United States Patent Application Publication US 2015/0376612 A1 - sequence listing, part 40

SEQ ID NO: 95678 - DNA, 1035 bp, Homo sapiens
gtttgaaaaaagaaaaaaaaatctacaggtagttctgaaattatgaacacaatagggcaggaaaaagaattctgaacttggagtcaagataaatttcactctgctgaatgcaggtcactccagcgctttgaccttccattacctcatctccaaaataaggttgtaaaaaacaaaaagagttacacctacggcactggtgtagaggggagtttccaggctgagggagctggcagtgggtggacctcctgtcctaccaactcaggcccactgcttcctaccttcctcacatgtatcagaagtatcagccaggccagagaatcaggttcaggcagaactgtcaaggaattcccctctgcttccaagaggcccatgcccatccttcctcaatgttcctttactgagatttgttgcagctgtagtttctgtgttgacaggaatccccattcctcagtatccccagccttttctcagtgtaaggccttccccccaagaacagaacctacatagatagaactgatacacctgtggaattggcatataaatgtttattaagaaaacagagatagcctttgaacctgctttttaaataaataaataaggctttcagggggtttgatgcatgtgctttttttttttttttttgagacggagtttcactcttgttgcccaggctggagtgcaatggcacgatctcggctcactgcaacctccgcctcccaggttcaagcaattctcctgcctcagcctccctagtagctgggattacaggcgcccaccaccacacccagctaattttgtaattttagcagagacagggtttctccatgttggtcaggctggtgtcgaactcccgacctccggtgatctgcccatctcggcctcccaaggtgctgggattacaggcttgagccaccgcgccaggccatgcgtgtgcttttcttctccacctgatccttccccttttccttctcagagctggagcggggagctctgggaaagccaggctgagtgtctggtgctgagggggctggtgct

SEQ ID NO: 95679 - DNA, 1036 bp, Homo sapiens
tggaaaagataaaactgtaaagttaaagtcttcctcttgccagttctcagctctcctcaggaaacagctgttgatcctttctttgtattcatctgcagtgtttgtatgtgacccagctaacacaaataggtatttatagttctccctttttatataacctattatgtattgtcctgaatcttattttcttccacttactgtgtcctggtgatctttctatatcatatatagagaccttttttggcagctgcttagtgttccattttgtggctatactagctagatctctttaccaagacacgggttttcccttcagcattacttgttagcaagtcgtcttcttatgaatatgttgtaatttccttagtcctgtgttgttggatctttaggttgattgcagtttggggccatcataaaccatgcttcagaaagccacacatctgtgtctctgtcatcattttcatggtacactggctttcccagggtcctgctacagagcacctgtgcttccctgaaatgctgtcccaatttacttttccaccgtctgtataaacagggatcttgagaccagcttttccatggggaacaggaaaaggcagaaatgtgcattgtgtcgtgggaagaccagtaccgggaacttgtagtatctctgttgaagaggtccaggaaaataaaagaagaaagtgaccatagctaacacttaactatattccaaatgctattctaatcgctgtttatggttggcaagtttaattatgtcaatacccgtgcgaagtaggcagctattttcttcattttataggtgaggaaaccaaggcatggagccctttccattacctgccttttacctggatgctcagttgctatggagggccgggggtgggggcaccaggagagggaagatgggagagccaagccatcaaccctgggcacccaccctaaagaggaggggtggaaacagtgtttgccaaggggattgagtccatgtttatgtagacatttaaagcatgcagctctgattagaatatttttgttg

SEQ ID NO: 95680 - DNA, 1026 bp, Homo sapiens
tcctccagttacaccatttaatttgaataaaatacctgtgttcaacttaaaagtatttttcaagcgcagttgacttttcacctttgcaggggtctaggttttgttattactgagttaccgtcaagacccctcacagctgcctcatcgtgctctgtggctgggagtgtataccacactgggttcacatcaccattcagaaattaaccacacagtggacttaggcgtttagggctttagtctacaaacagcatgtattgcttattaatttgttctcataaacaatttaaaagatatttgtttttcctgcagtttttgaatctaacttaaatattaagtttttttttcttggtagttcaccaaatctctgcattttgctaatcgttttttctataaagtaatttttaaagttctcagcagtaatattaaagccacgtgagctatgtccagcatcccatttgttataaaacaagaacctttgactaatgggaaattctcagtcagcaaagacattttgaaatttgtaactatgatttttctgtattcttccaagactggtagtttgaaattttaggctgcttaggagtttacagatagtatgacctctttgttctgcagtaagagtcaagatgctaccttaaaacctttgctgtcttccttccccgccttgctcctgagttttaagtcgtggctgcaccagagatgtctctccgtggagctggtcctcactgtgttctcatgtgctttttctgggaatgctctgcacacgctgtccggatgcagataacaggaggcgcagggttcgtgggctcccatctaactgacaaactcatgatggacggccacgaggtgaccgtggtggacaatttcttcacgggcaggaagagaaacgtggagcactggatcggacatgagaacttcgagttgattaaccacgacgtggtggagcccctctacatcgagggtgagtgaaaactgcacattgttattattcagagctccgcaggtggccttgccagagctgcggga

SEQ ID NO: 95681 - DNA, 2306 bp, Homo sapiens
agcacggaactaaagtcatgccctgccatgcccagggccggttctttaaaggtattttgtttctgcccagctgcctcaaccaattatctttttcctgggatttttgatacaaaaaacaatatatggccaatcagtagcttatgttattttaatgtaaattcttgataacttagaaactgccttttcctttaaaagcccacttgtcactgctgctgatgggagcatatattcagggcaacttgaattgatgttcctgggttgcagttctcaaacttggcctgaataaactctacgatcctgtttttacttattttgtagtaagatttaattgttttgaaaacaaagtatgcattttgttgtcttcgtaagttaattttctttgtaaaatttaaaatattggttaaaatttaagattccatccattggaatccctgaaagttgtggacttaaacattgacttccttttttctttctcttacagctgtttggggcaacttcgttaatatgaggtaattgtttttaattacttgggtactgtggttggattttatagacacatttcagttggtacatatataccatggatgtcatgggttaattgaaaaatatttttaaaacaaaagtgggttcttgctattcacatatctgagctgtttcttttctcctatgggtattctcaaggaatgcagctgattttaacaattaccaagtaaggcccacaagtaaaacaatggtcggccacccccgcttccctccttgtgtagataataaagggttgaccctagcttatgtaaattgtatttctgggtggattgagcaagaacactgaggggcttttgcaaagccttctgagaagggagctgtcttcgggaagccatggcaggcccatgacctcagggggccagctagtgggtatcgatgcagagaccacctatttagtccagcgttaggcctgtatgcatcgtgtgtgcttcttcatagggcaggaggcactcttgtaaaaataaaactcgtgttatctctttaccaaataaaaaaaaatagcctttaaaaaaatcagcaaaaagaaataagcacttattgtaaaaaccatttggtactgttaatagttttccatgtaaaggaaaatttgctccacttggttatgttgtgagaatcactattgtgatgattaggttggtattgtaatgtaatgcggctgcacatgtctaccagggtaaaaggttactatgccctcaggaggcttttcatgtggagttgggttttgcaaggtgggtgggatggtgtcgatttgattcctaccaccagggcatgtgtgtgtctcctgacaaaggctgctgtgtatgactaggtggggtgctcagatcccttttaaaggagctctgtggttttacttaaaagactccatttttacattaaatccccaggaaagcccagcaggcacaaacacatactcctacagacgcacttcctgcttcaaatttaaaatcctgtgttggatgtagcatagcagtgagattattttagtttagtggaaataatccattaggtaatactgagcatgttcacagatggatttaaggggagtccttccctttggttgtcttcttttcctctggtgcatcccttctggagggaattgtacacatgactgatacttgagcaggagacagaggtggtctgcatccgttgggttatgttagggtaatttattcagaaacagtcttaaagtcacaaagcctttcagttgatctcagttttatagctttctactcaacaggtctatccaggaaaatggtgaactaaaaattgaaagcaagattgaagaggttagtcttttttctatttttgtatctatttcatctgtatacttgtcaattttacttcctttgctcgtgctgtcattcttattgtggcagcttgatgctgttctgtgattttgcaaccgtgtctcaaaaaattactcccttatttaagaggacatgcagtctgttactgttggtccatttttgatgtattaaaacaaattctacctcaaaggcaaaatggatttagacttttacatgacttttcaggtaagcgttttttagagaaagggaagtgattgcctttgggagatagagatgagtacaaacatcctctcactggcacaggtgctgaaaagaacaatggccaccaatcggatgctaggccacgtgcacagatggagacgttgcacacccacccagctgaaggctagcacctatgctcagttatgcacctcctatttaaatacatgtagatacagccagaccgttgtaacatgg

SEQ ID NO: 95682 - DNA, 1033 bp, Homo sapiens
gaattaaacacagagcagtatcttctaattcgaaccttctggtcagcttaagcaaaactttgaatgcttttcttcttagaagaatgatgcatattcttatctgctttaagcaaacatttcagttgtgccacctcagggtttatccaaggaaagtcgaagatttgcccttttccagagtgctaggatgattggggttcttcagaggtgagtaaggatgcatctttcctatgtacacttgttttcttcagatgggaggtgggaggactgcagccaggtggggagcagccaggggtggggggatagggatcagaattttctgaggacttcagacttggcccttgccttctacccaggcgggccagtctctatgcaaagcagtgcctttgactggaggagggcacagatacacttggtagggcaagctgtgggtgaggagggatttagccctatatttggcttgatttgagggctgtgacctgggcgtatgagcatcaatagattaaaggtggtgacaggtctggcactgttttggttgtggttatgtttcactgcttaaccaaccactttaaaacatagtggcagaaaacagttaccgttgtatttatacccatgggcttggtggatcaggaatttgagacggggatggctcttctttgtttcgtgatgcctgggaccacacccaggttagagcatccacttgcagggggcttcttcactggcaggtctggaccttgaggacagactcaggcttggctgttagagtgcccacaggcaacctgtctggcctcacgtggtcagacttcacgcatggtggttcagggctctgagaccaagtgtctcagcaaatgtggcagaagcactggcggccatctgtgaccatctaaaggcatcatatagtgtatcttttgctcttcactgtggtccaagcagctcaagacccccagacttaaaagaaggacacagagacacttctgtccccccatgcaaggtgtgccagataatttttggataggttttaaaagtgtcactttgg

SEQ ID NO: 95683 - DNA, 1003 bp, Homo sapiens
ttttgcattttggggttggcccgtgtggcctgaaatgtgctttgtggtgtgcatgtctcctgagctgcctaccttttgtagatatgtgactggattctagtcctggtatatgatatgtatggtacttctgtacaggccagtgctgtgatctgaatgtttgtgtcccctggaattcacatgttggaacctaatccttgaagtgatggcattaagaggtggggtatttgggaggtgattaggtcaggaggcagagccctcatgcatgggatagtgtctttgtaacagaggcccaagggagttcattcctcccttccaccatgtgaggatacagcaagaaggcaccgtctgtgaataggaagtgagccctcaccgccagtgtcttgatcttgcacttcccaaccttcataactgtgagaaacaaattcctgtttattagccacccactgtgtagtatatttgtgatagcagcctgaacatggactaagacagctgagaagtcaagaacatgtctgatgtgaagttggagagctttcacaaatagatatgttgaataggtgaggccagttaccagattcttcatgtgtactgaacccacattaatgtctactgcaaatttcttgtcttgctttttgtcttacaaatatgacaagtcctaggaattacctgaagggtaaatgtggggaggattaattcagggtcagcccttttctttttctttttatacttttatttttttctgagatggagttttgctctgttgcccaggctggaatgcagtggtgcgattttgcctcactgtgacttctgcctcccaggttccagcgtttctcctgcctcagcctcctgagtagctgggatcacaagcgtgcgccaccacgcccggctaatttttgtatttttagtagagatgaggttttaccatgttggccaggctggtctcgaactcccgacctcaggtgatccacccacctcggcctcccaaagtgctgggattagaggcatg

SEQ ID NO: 95684 - DNA, 2633 bp, Homo sapiens
tttttagtagagacggggtttcaccatgttagccaggatggtctcgatctcctgacctcgtgatccgcctgcctcggcctcccaaagtgctgggattacaggcgtaagccaccgctcccagcaggaaagttttttaaccaatcattcatctgaccaggaaatcttaccaagtccttactgttgtccctgaatttggcactaggagacaccatggggtgctaaaacttaactggtctgtgctgtgatggtacagaccctataccacatagtgtagcacgttgattctcagacttaagcatgcatcagaatcagtagggttttttttaaaaaacacagactgcttgtctcccacctcaagtttctgattcagttggtctgggatgtggcctgagaatctgcatcactaataggttgttctgtatgctgttgctgtgacctgacaccactttgagacccactggccaagatggtgaggtgggcatgaattggaaatgaaggttaaattacaaactggtgtgaggaaaaggaatgcatgagaactatgccaggaactcctgagtgagagcaatcaggtacgtttgttttgttgaggaatcaaaagtgagctgagaatggacggcttatgtaggagttaacagggaagtcataggagagagcgtgttctaggaggagcagtgtgtgcagaggtcctgcggcagccaagagcaggcagtattctaggaatgcaaagaaggatggtattgttggagtgtgaaaacaaaattacagccatgaggctgcccaggcagacaggggccagagcaggcaagcaggcaggcaggcctggggtgcagcccacgacatggttgattttagctatgaggggtttaacacagggtggaggcagtgttaataaggagcaggtatgctaagtctgagccactctgcagggaaaaatgttacagggcttgtgattgataacaccgaaggacactgaaaatgtagtccctcaaccgtgatgtctgtgttttctaatctctgcttttcctaattagtaatcttgccctccctgttacaagtaaaatctcaccactgtttgaaaaaactgtccatacttcccaattatatacaccctcactgttagccagcctccgttgcagaaatgccctccctgtttcgggaacagaactcaagttctgttagcctttctccttctcctccttacatctttcccaaagtctttgttacctactctggccctgagtctcctccttgataccacataactcttcttcatgtcttagggttgaccacctgctaacttgcattgtacttgagttctttcccattcatatgttggcttttttttctcaatgaaatcccgattctgaggacagggattgtgtcttatgtgtttcagcccttgaaacatttatagcagtgctaatggctcattgaaagaactcagtttctgccctttgtgctgaatcaaaaatcaggccaacctactaggtagctcctgggcagactgcttgaattacctttaacgtatttttttttaacatgcatatagtgtaaaaagttaaatagcttctgcagggccaaacagtatcccctgccaccatttccctctccccagaagcaggcacttcatttcttttttttttttttttgatacagagtttcgcttttgttgcccaggctggagtgcagtggcgtgatttcggctcactgcaaccttggcctcttgggttcaagcgattctcctgcctcagcctcctgagtagctgggattacaggcatgcgccaccacgcccggctaattttgtatttttagtagagacggtttctccatgttggtcaggctggtctcaaactcctgacctcaggtgatctgcctacctcagcctcccaaagtgctaggattgcaggcgtgagccaccgcacccaacccctaggcatttcacttcttttagttgattattttggtatttatcattgtgccattgaatcacctggcttcctgatttttcagttgtagatattacctagtgactttgttctttgggagatgatttttttcttctctttgcccctgtacatgctctccaccctcctatatagatgtggtataatctcacggagctcatcatgcagtgtttacaagcatgactatgtaaatgctgttcctagtgagtcatgttgtaggttactttttgttttctccagcgaataattggctggtgttctaatttgcttgctttctatgtagtatgacagatccaactccaaactctttgccagttgtctgtcgcgtcttcccccatgatgttcatgagcatcaggatgccccttggtcagcaccccttcctgaagaagggccccggggccttctactgcaacttgtggatacatctgagggtcagctgccagcctcaccacctgcacccacatcagcctggacctacccactgcaggacttctgtttcctgacttcctcttcctgactccctcttgtttcactccctggtttggatgtgatgggaagtgaattctgagactttacccataagtatattttctgccttcatgtctgatagattgatagtgtagaattatagaaaaaaagttcctttagaatttttgaagcattg

SEQ ID NO: 95685 - DNA, 2043 bp, Homo sapiens
ctcactgtgataggtgagtgtatggctgcaggggttttcattgctcacaggcttcctcagtgaacagagcagggcaatacatgggtaaacataaacacgcatacctgcatgcatacattcatctatatttccatattaaaatatgttgaaaaccatgggttctcaccaatattttcaattctaatccattttcacagtttttattctagttgttccctttagtacagttgatccttaatgcagggactaggggcgctatctccacagctgataatccacataaaattttgtagccacttcctgttgctgttgcagtgagctcaagtgtcatatcacctaaagtgctatgtgatgtgtatccagggtctatgctacctgctttatagggattatctcattttggaaatacttccattcaaaacgggtttaactaaaagtattttgatatttgaagctgcagttggctgaaaaacccatttatatggaaaaactaattcactacgacggattcagttaaatgatgacttttatgtactctgtcttcttactctctccataattgtgtgtgtgtgtgtaagtatatatgtatataaaggaaaacttcttttatatataaatattctatatatatgatacaaatatgttctctatattttttaatatgtaattgaccttttaacaacttgggggttaagagtggcaactgccactctgacccaccccctgcacagttgaaaattcacatataacttttgaatccccaaaaacttaactactgctaacctactgttgaccggaagccttgataacataaacaattgactaacacatatttttgttgttgttgctattgttgttgttgttttgagattgtgtctcgctctgttgcccaggctgcagtgcaatggtgcagtctcggctcactgcaacctctgcctcacaggttcaagagattcgcctgcctcagcctcccaagtagctgggactacagatgtctgccaccacgcctggctaattttttttatttttagtagagacggggtttcaccatgttggccaggctggtctcgatctcctgacctcaagtgatcctccagcctcggccttccagagtgctgggattataggcgtgagctaccgcgcctggcccaattaacacatattttgtatattgtgcgtattatatactgtgttcttacaataaagtaaactagagaagagaaaatgatattaagaaaatcataaggaagagaaaatatatttactagtcattaaatggaagtggatcatgataaaggtcttcctcctcattgtcttcatgttgagtaggttgaggaggaggaggaatgtatatatacacaagctagacagctgaggctaattcttcttctgaaccagtctctgtcaattccccattccccattctctttagtcttgcagttggtttatgtcttgtatatacttcaagggccactggagccgagcctccttggggtcaccttcctcaactgccctggttcctagtcttccccttctctgagctcctggagctctctattcctttgcagttcattcagtacacatcagtgcaacctggttttgccattcatcatttcatgtgtatagaggcagccactgatgctagtgccagatcctttgaacgatcagcacttagtgctctgaatccctcccagctcctgggatgcttgctactgttgaagataattactcaagtcactgtatgtcattcattcttccatcctctgagagctgcaattttctcatgtgttatgttatatgttatatgttatatgttatgttataatcataacagagattatatcatctacctcatcggtggtgttttagccattaacgagaataagttgtgaaaaaagttttttaatttcagcatcgctgtatcagtgttatttatttgtgatgcattttaaacaggactcaatgtactcaaatgtggttttcacacagctttttgggaacattcctccagtggatggttaggagggaatctgtccagcttgg

SEQ ID NO: 95686 - DNA, 1056 bp, Homo sapiens
gcctgtgtgtcatgcatctggtacacagaaacccctcccaaaggtccacccaggaagtcaccttgattgtttgctttgggtgctgtagctgtagttggtttttcccatagattgagccatttgaaccaggagaattctttagaccagttttgaagcaaaaaatatgtctcattctttgcctaaatgagccaagacactgtgcaaaaagctgacactgtggcaatttcttacaggcttcggacaaagaaatcgtttgggttatgcgaatcacagtgtttgtgtttggagcatctgcaacagccatggccttgctgacgaaaactgtgtatgggctctggtacctcagttctgaccttgtttacatcgttatcttcccccagctgctttgtgtactctttgttaagggaaccaacacctatggggccgtggcaggttatgtttctggcctcttcctgagaataactggaggggagccatatctgtatcttcagcccttgatcttctaccctggctattaccctgatgataatggtatatataatcagaaatttccatttaaaacacttgccatggttacatcattcttaaccaacatttgcatctcctatctagccaagtatctatttgaaagtggaaccttgccacctaaattagatgtatttgatgctgttgttgcaagacacagtgaagaaaacatggataagacaattcttgtcaaaaatgaaaatattaaattagatgaacttgcacttgtgaagccacgacagagcatgaccctcagctcaactttcaccaataaagaggccttccttgatgttgattccagtccagaagggtctgggactgaagataatttacagtgaccccatctaaataaaatactgcttttgcaaacagaacactgtaatagggtagttctggagagatggtatgcagcatacaaaaatatattaaaaatataaacaatgttcaggagagtaaaaattcatataaagtgcaattgcacaaatacaagccaagctagaaggaagcacctatgaaagcaacaactttgtt

SEQ ID NO: 95687 - DNA, 3225 bp, Homo sapiens
gtctctgagggaggaaggacatagattatttcttgcttactctctgactggtccctattcagattgttgaccaatcaccaatttttgagccccacacatgacacctccctcaacaatatctgttgcctccaattctgagcatttcagttctgcagaatatttgccaggttctcatgtgtttccttgtgcaggtccttaggttatagctttcttcctgcttctaattcagttcatcctcctccgtaattcagttttccaaagatgtgttgaaatttctcttatccttatatcttttctccttttctctttgcgcaatgtgttctaccttttaaaatctcttattctcacttcagtgtgttttgaaaaggtcaggagataattacgcatgtggtcaatccaccattttttaaccccaggcaaataaatcttgttctaaaataggcattaactgaacgtctggatgctcttcttctggaaaaagcagagactgagcaacagtgtctttctctgaaaaaggaaaatataaaaatgaagcaagaggttgaggtaagtcaatattttagtgttcttttcttttttattaacatatagtgtagtcattaattttagaggtaagactttaaaaagcatctaatctgattaatattttataatataaacaaagaaaccgagattgagattttaaaagaaaaataactgaatcacctaactatacagcaacagaggtgacatttacttttgttgcattatcttttttatagctataatgccatctttactaaaagcgaaaaaaagtaagttgattttcacacatgactaaataccattatctctttagttctacggtattcagaggcatttcttgcctatttcttgcctattaggtctgggctaatttgagtaatagatttaatattgtagatatatattgtcatactttagataggcagcacctaaggagagttattggaatatcagtatcatgtttctccaaatacatttctgctcatttacttttctctctacttagcttgtggctaatatttttcctaaggtcagaggctccttttgtcttacttaaataatttatgtgtgcttattttttgtaataggattctgtaacaaagatgggagatgcacataaggagttggaacaatcacatataaactatgtgaaagaaattgaaaatttgaaaaatgagttgatggcagtacgttccaaatacagtgaagacaaagctaacttacaaaagcagctggaagaagcaatgaatacgcaattagaactttcagaacaacttaaatttcagaacaactctgaagataatgttaaaaaactacaagaagagattgagaaaattaggccaggctttgaggagcaaattttatatctgcaaaagcaattagacgctaccactgatgaaaagaaggaaacagttactcaactccaaaatatcattgaggctaattctcagcattaccaaaaaaatattaatagtttgcaggaagagcttttacagttgaaagctatacaccaagaagaggtgaaagagttgatgtgccagattgaagcatcagctaaggaacatgaagcagagataaataagttgaacgagctaaaagagaacttagtaaaacaatgtgaggcaagtgaaaagaacatccagaagaaatatgaatgtgagttagaaaatttaaggaaagccacctcaaatgcaaaccaagacaatcagatatgttctattctcttgcaagaaaatacatttgtagaacaagtagtaaatgaaaaagtcaaacacttagaagataccttaaaagaacttgaatctcaacacagtatcttaaaagatgaggtaacttatatgaataatcttaagttaaaacttgaaatggatgctcaacatataaaggatgagttttttcatgaacgggaagacttagagtttaaaattaatgaattattactagctaaagaagaacagggctgtgtaattgaaaaattaaaatctgagctagcaggtttaaataaacagttttgctatactgtagaacagcataacagagaagtacagagtcttaaggaacaacatcaaaaagaaatatcagaactaaatgagacatttttgtcagattcagaaaaagaaaaattaacattaatgtttgaaatacagggtcttaaggaacagtgtgaaaacctacagcaagaaaagcaagaagcaattttaaattatgagagtttacgagagattatggaaattttacaaacagaactgggggaatctgctggaaaaataagtcaagagttcgaatcaatgaagcaacagcaagcatctgatgttcatgaactgcagcagaagctcagaactgcttttactgaaaaagatgcccttctcgaaactgtgaatcgcctccagggagaaaatgaaaagttactatctcaacaagaattggtaccagaacttgaaaataccataaagaaccttcaagaaaagaatggagtatacttacttagtctcagtcaaagagataccatgttaaaagaattagaaggaaagataaattctcttactgaggaaaaagatgattttataaataaactgaaaaattcccatgaagaaatggataatttccataagaaatgtgaaagggaagaaagattgattcttgaacttgggaagaaagtagagcaaacaatccagtacaacagtgaactagaacaaaaggtaaatgaattaacaggaggactagaggagactttaaaagaaaaggatcaaaatgaccaaaaactagaaaaacttatggttcaaatgaaagttctctctgaagacaaagaagtattgtcagctgaagtgaagtctctttatgaggaaaacaataaactcagttcagaaaaaaaacagttgagtagggatttggaggtttttttgtctcaaaaagaagatgttatccttaaagaacatattactcaattagaaaagaaacttcagttaatggttgaagagcaagataatttaaataaactgcttgaaaatgagcaagttcagaagttatttgttaaaactcagttgtatggttttcttaaagaaatgggatcagaagtttcagaagacagtgaagagaaagatgttgttaatgtcctacaggcagtcggtgaatccttggcaaaaataaatgaggaaaaatgcaacctggcttttcagcgtgatgaaaaagtattagagttag

SEQ ID NO: 95688 - DNA, 1035 bp, Homo sapiens
cattaattccttaataccaaccataaatttgagaatccatgctgtgatttggggtgtatatattttaaacattgaaatattaccaaactttttgtattttagcgtgtcagatttattttattttatttttttgagacggagtctcgctctgttgcccaggctggagtgcagtggcgcaatctcagctcactgcaagctccacctcctgggttcatgccattctcctgcctcagcctcccgagtagctgggattacaggcactcaccaccatgcccagctaattttccgtgtgtatttttagtggagacggggtttcactgtgttagccaggatggtctcaatctcctgaccttgtgatccacccgcctcggcctcccaaagtgctgggattacaggtgtgagacaccacgcccggccgtcagatttattttaaagccccttaaaaatacctttttaatattggttgggtggtgtgggttgtttttatttttaatttcaggaacatgccactactgtaaatgaacttgaagaacttcaggtacaacttcaaaagcaaaagaaacagcttcagaaaaccatgcaagaattagagctggttaaaaaggtaaaataaaacactaggatcaaaattgatgtaatattcacattgttctgttttgttgttctgtttgttctgttctctctgcaatctcactctgtggcccaggctggagtgcagtggcatgatctcggctcactgcaacctccgcctcccgagttcaagcagttcttgtgcctcagccttccaagtagccgagattccacgcatgcgtcaccacacccggctaattttttgtattttgggtagagatggagtttcaccaatttggttaggctcgtctggaactcctgacctcaaatgatccgcccatctcagcctcccaaagtgctaggattacaggtgtgagccaccgcactcagcctgcattgttaaactattctatacatgttgaaaaggaatattttagaatgttacttgtggtactaaaataatgc

SEQ ID NO: 95689 - DNA, 1048 bp, Homo sapiens
aatctaggctcctgagttacaagattttggtttgacagttcattttgtatacatgattgttgtatgacacattaagatttaattaatgtcaaagcttgaaatttgtattatacttaaaactttggctgactttactccttcaaagatgaggctaaaaagaaatgtactataagagccacttgacatattagtattttataaataagagctccgcaagctacagctgctagttgtagttagttataatgaaataaaatgaaactaagaaagttgggttaaactattagaaaatattttgtgaaattaaaaagtagaaaatatccaactcctcatttctttgttacagtgtaaacaatttcagtattacagaaaagcacccatttattgctgtggcatcattttagcaattttacaaatgaaaaaaaaaatttacaaatgaactgatctactattgtgtaaatcttttacttataaaatgtgcaggatgcccaacaaaccacattgatgaatatggaaatagctgattatgaacgtttgatgaaagaactaaatcaaaagttaactaataaaaacaacaagatagaagatttggagcaagaaataaaaattcaaaaacagaaacaagaaaccctacaagaagaaataagtgagttaaagaaaattcactttactttttaattatttcatcataacaacttgatttggtggggggcattacttgtttatttcaccagtctttcactgtcagtcaggtgtttaacacagtgataaatgttactggggacccagaatgggtgtaaaactgtttgccattaagttgtttgtagtccatgcctatgtcctgaatggtaatgcctaggtcttcttctagggtttttatggttttaggtctaacgtttaaatctttaatccatcttgaattgatttttgtataaggtgtaaggaagggatccagtttcagctttctacatatggctagccagttttcccagcaccatttattaaatagggaatcctttccccattgcttgtttttctcaggtttgtc

SEQ ID NO: 95690 - DNA, 1091 bp, Homo sapiens
tgtcagtctcgtgacatgtcttttttttgagacggagtctcgctgtgtcgcccaggctggagtgcagtggcgcgatctcggctcactgcaagctccacctcccgagttcaggccattttcctgcctcagccttccgagcagctgggactacaggtgcctgccaccaggccggctaattttttgtatttttagtagagacgcagtttcaccgtgttagccaggatagtctcgatctcctgacctcgtgatccacccgcctcggcctcccaaaatgctgggattacaggcatgagccactgcgcctggccgacacatgtcttaattctagtattcaccagatttctttcatgttctccgttgttagacatcaaatttgtctactttttaaatagaaacattagatagagcaaggaacttagaaacactcaagcggcactgaatgtgttagaactgcataaccaatatagcttctttgctttcacatttacaattagttggagttttagttcagccacacccagtatcttccattctgcttccaggaagacatggaaaaatgtcagccatgatgatgcagtattttagtagcaagttgatggtgttttggtttcccatgggaaatattgtcactggagcattagccgctatcggtcacttattagggtaaaaaagcaacttcagaagaatttaacatatgccaaagaatcaacaaaggaagtaatcagccagggcaaaggtcgcacaagagattgtaatctagcaatcagcagtggaataagcagtcagcttaccagaaacccaggaaaaagcttcaaaaagggcagtcaggactaaggcaacttaatgaaatgcaaaataaatgaaatctgaagtttaaaaatctagattacaattctggtttctaactcagttatgagaccttgggcaaagtcattaaatttctctgaacttcagatttttgggagtcaataaaccaatacatgtcaaagggcctggtaaactttacagtttagaccaggcgtggtgtctcacccctgcaatctcagcactttgggagccaaggcaggtggatcacatgaggccaggagttt

SEQ ID NO: 95691 - DNA, 1038 bp, Homo sapiens
actgcaatctccgcctcccaggttcaagcgattcccctgcctcagcctcccgagtagctgggactgcaggcacgcaccaccatgcccggctaattttttttattttactagaggcatggtttcaccatgttggccaggatggtctcaatctcctgacctcgtgatctgcctgcctcagcctcccaaagtgttgggattacaggcatgagccaccacgcctggccaaatgttatattttcataaatttatactctcttcatgatttcttagtcttctttattgtcacttttttaaatggtcctaggtttgaggacaaagttcgctaactttcttgcctaacctaaaatgaaaatatactaaaagctatggcttggtttcaacctggaaatcttcctcaaagacttgaacatcctattaccttttttatatcattctttgcctcatttttctgatagtgttttacattatcttatattcctgaattttcactgtgtctgaacttttgttttgattaagtgccgttcactgtggacgtcttaactgcctgggacttcaggaacagggtaggggcagggggttagtggaggctgccgatgttcccctcagcccattttcagagccccatgccatactggcttagtttctatcgaaagtagaaggcagagggaacatcttggtaccaacccatggctccagttagttgctcctcatggagacgttccatcagttccccagctttcaactccatttccatgataccctgtgcttctgagacaagaaccccagtatttacacaggatgcatcctctcctcgtcagtgatacttggtaagctgctggactgactcatttccacctcttcatctgtttctcgtgagaatttcttgatgtgtctcatctactttttctcctcttgtattagcttcttgcctttctacttcacccctcttccttccaaccccaaatagcttaggacagtggagttatatagcccaacacttggttcatacgcagcaatccactttctaggcaaatgcag

SEQ ID NO: 95692 - DNA, 1230 bp, Homo sapiens
gcttgaggctagtgagctgtgactcccactgcactccagctcggggaacagagcgagaccttgtctctaaaaataatagtaataaaataaaaataacgttttatgactatttattgcaaggtcagagttacagattgttataaattgttgagaaatttttgtgattagaatatgaaggaaaaagctttgttggtaaaagtgacatgttaaggggctatgaagtaaatatgctgcagttaattatgctaagttaaaatacagtttagttatttgctttaaaataaactcttctttttttctttaaagtatactatctcaaaactcattatgttgtcagagccctagagctggctagtgtaacactgactatgagtaggtgggcccacacttgagttgaggtgatttcatggtgtctttccaggctcttgatagggtgtcactgcatgcaagccatgaatctgttttgagaatcctctccattttcccaaataaaaacctatcacaacagtgactatatcactcagcattggatctaaatataaaagtggtgctttcagtgtttttggcagatagtgttccataagctttccatcagaagggattttagacaccttagaggtccgtgctacatcgtcacagttcctccgaataaccttaggtggtagtgttacttgcctttgacacctctgcatatgttttaatgactagatccaaactgtgttgttcttaaatcaaaaattggataatttgtaatatttatgtgttaatcacacagtatgctctctgaagttctcttaagccttcagtttatactcttaatttaattttctttctgagctggagaactggctttgcactttggttacacagaacattggtttccaattcagtttaactgaaatttgctgctgatatgttgagtttgttctttaaaaaatagctcatatatctcatctttcctcctgtcttagaagaacagacctaactagtgaatgtattaatgaaaatgcatctatttcagagctgacatgaagagtttagtttttttactttataaactgtgaatatgagtatgccagctgcatacgatgtaactaatcatatttaaatatatttcactttctctttgactttagaccttttgaagtctgtataaacttgttttgaaatatagtctctgcttacgaatgtcataacaaaataattttttgcatgataaaaaattacttt

SEQ ID NO: 95693 - DNA, 1689 bp, Homo sapiens
gcatttatcctgttattttgttgttgctgtttcttttttttttttttgagatggagtcttactctcgctcaggctggagtgcagtggtgtgatctcagcttactgcaacctctgcctcctgggttcaagcgattgtcctgcctcagcctcccgggtaactgggaccacaggcgcccaccaccacgcctggctaacttgtattttttagtagagatgaggtttcaccatgttggccaggctgattttgaactcctgacctcaagtgatctgaccgcctcggcctcccaaagtgctgagattacaggcgtgaaccactgcacctggctgttgttgctgtttctatgtgagactgataaaggacaaaaagaagatggcaagggatggatggaaaaggctggttcttctctcagggttcccagaccatagctggagataacccagggttgtagctccatctgctggagagaagcaaacccactcttacatagtctataaatgaaagtgatctctccacaatcacagtgagccagcctgtgtttgctaagcacttgctgtgcactgtgtaacactttgtcaggcttagggtaacagaggaaaaacatagacatgttccctgttcccaccatgcttagctctgagaggccttctgctgtcaagaagacttattttagctggtgtgcttttgcattctaggtttccccctagacttttccttgggtgacttttaaagccacgtaacctcattctgagcttcctgttccttattagaggtaaggaataacagtgcccctcctataggcctcagtttagctaaactttattaagtatctagtgtgtctgctaggcagaggcccaaggagcataaagatgagtaggaatctagtccctgccctccacaaggttagaaacaggagctcataaaatgatcctcgcggagtaaatgagaatgtataacgggatccctgaggaggagtgcgggatccaggcaggagagtcgactaggaaggtatggacaggttttctgagttgtttgaggatgtgagcattagcgaagggaagcccttcccagccgaggtcagcgtgagcagcagcatggagatgagggcctgtgtggtatgtgtatgtccctcttaggctgtgtaaagtgagcggcaggaagtgtccagggatgagggtttggggacatagatggagccaggtagggcctggagcagtagctcacgcttgtaatcccagcacttcgggaggccaagatgggcagatcatttgaggtcaggagttcgacaccagcctggcaacatggtgaaaccctgtctctaccaaaaatacaaaaattagccgagcgtggtggcacgtgcctgttgacccagctacttgggaggctgaggcaggaaaatgacttgaacgtaggaagtggaggctgcaacgagctgagatcactccattgcccaccagcctgggcaacagagcatgactccgtctcaaaaaaaaaaaaaaaaaaaaaggcggggccaggcgatatagggttttgtgtgttaccttaagggatgctgactgtcctcagtgcagtagagaatttaagcagggtagtgatagcaggttccttagaccgcttgctggctgtgtctgttggatttgattgaaggggaccaggctggagacagggactccatctaggaggctgcggca

SEQ ID NO: 95694 - DNA, 1050 bp, Homo sapiens
tgtgactgtaagaggtgtttccagattgcagtaggttgatgagtaaataggagttgagataacttttagaaaatggtgtctgaggccgggcgtggtggctcatgcctgtaatcccagcactttgggaggccgaggcaggcgaatcatgaggtcaggagatcgagaccatcctggctaacacggtgaaaccccatcttactaaaaatacaaaaaattagccgggtgttgtggagggtgcctgtagtcccagctactccgggggctgaggcaggagaatggcgtgaacccaggaggcggagcttgcagtgagctgagattgcgccactgcactccagcctggacgacagagcgagactccgtctcaaaacacaaaaaaaaacaaaaaaacaaacaaaaaaagaaaatggtgtctgaaaagagagagctgtgatggtagctggagagtgactcaagatagactcattttaacgtagcagaaactggagcctatttacaaactcttcgggggaaagagcccaaaaagaaggaaagtggctgtctggatgtgagtttatggactgacatcaaacagaccttgttgggactgaaggcctgaagagtaagcatataggtgggaggtagttgaaagagaactttccagataaactgttttcttcatgaataagtaataaagtaatatctgctgagagaagaaagggatgaggtcgattacgagaagaccttcaagcatggtacgtccttatgcgagtggcgcatggcttcaagaggagggttgatgggacccatccatgagtagagaagttaacaacaatgccagtctgcccaggatgttctgctgggactcagaaaaacatccagtttccttcctttagattttaactgcagcatcacgagctgccttcctagagggaattttgtattttggggctgtagctcagaagacttccattctcttttccctctcccaagagagatcgcagctgcttcccggggtttatgtccatgacataggactgtccctgctgggaatgggggagggaactgcttccc

SEQ ID NO: 95695 - DNA, 1080 bp, Homo sapiens
tatagcttgtcaccagctctaagagtggctagtacccagtctcagtgttggataacaagcaaaagtgatgagttgttttcttggggtttgtgtgtgtgtgtgtgtgtgtgtgtgtgtgtgtgtgtgtgtgtgtgtgtgtttggtttgttgtggtggtatgtttttgtttttgttttttcagagacatggtctccctatgttgcctagtctgggcctgaactcctgggctcaagtgatctcctatgtcggcctcccagagcactgagattacaggcaagtgtaagccactgcacctggccgttttcttgtttttaaagattaacctcaggccctagttatgttaccatcctagaaatgcagttatcctaaaaatgattcctctataataaaggaattgggtaaaggagctttcttgctgtattttcagtgaattcaggcaaggacaccctcattcatggaaggggaaggctgaattaattgctctcaagttctttcttaccttcaactaaattagatccctttattctccagtggaaacttggcactgaggagtcccaggaggtgactcagtcggatatgtgaggccttagcaccactggccttgctgcttctgcactgtgtctgtcagggatatctgggacagaaagaataatttccgctgctggggcagccagagcctggcgtgcccgtccctaagctggcctgcaccttgccaccggaagatgtagtgtagagtagctgcttgaccccagagtagcattcagagggcacataaagaagctccgttaattcaaacatgtagttattatagagatccagagggccagaggctatcatttttttaaagttacctctttctatgatgatcagttattcatttttctaaatatttgtctgcatgttatatgtgctttcagtaagtttttgggtgaatttcttaacttcataaagtatataaaacaacttagcaggatatgagttatgacatttaggggtgttgtcctattgcttcagaacagtggggttatcgtgtaacacaccatgtcacatgatttgactaaatacaggaaaaaaaaaaac

SEQ ID NO: 95696 - DNA, 1049 bp, Homo sapiens
tttctggatttgttttccttatgacctacctttctcagttatttaagaagcaaatctaaaggatatttgttgaaactctctatgcagaaagggtcttgggtgagttgtagtaaccttcagccatgctgattaaaattttctccctgctgcagaggttatgattgtggttcttatatcttgtagatgtgtatttaattattgaaatatgtgaaaactttgttttattggtttcaaagtagggtgggtgtggaagggaaactatgccttttgtttgcaaagaaaaatttaaaaacaattgataaacagtatttagtgtcatatggtttatatcctgcagagccttctataaaagaccttagtaatgcttttggcattttattacattaattttttaaaacattatttctgctgcctagggtctttggtggggaaatgtactatttagcaatatgtttagtgaacttttgtcctgtcatggtaagaagaaagcagctataactaagtaaggagttactcttattcattaacatgtaaaacgctgtttaaaaaaaaaaaactggtcatttttttaagttttatttttaattggcacatttatttatggagtacaatgtgatattttggttcatatgtacattgtacaatgaccaaatcagggtaattagcctatcaatcatctcaaatatcactttttcgtggtaacaacacttaaaatcctcttgaggtattttgagatatacaatacagtattattaattataatcactttgctgtacaatagatcaccagaacttactcttcctaattttgtacctgttgacaaactcttagtttcattgattctgttgtttttctagtctctttttcatttacttctgttctgatctttgttatttccttcctcctgctaacattgggcctagtttgttatttttctagttccatgaggtgtaatattaggctgttatttgagatctttcttttttgaagtaggtgtctattgctgtaaacttccctgttagcactaacttttgctgcatcccataagt

SEQ ID NO: 95697 - DNA, 1104 bp, Homo sapiens
aaccagccagaaataacaccagactgccaagtcagatgtgatttcttagtcataaaaggtacttttcattcctgtaatcctgattggcctggtcagtaattaaaagtcaacattcagttttattttacttatttctaggaccattgtagaatccttcagtcattacatatctggtgagaccctagtggtaagtaaaggatatccatgcacttgaggggaaggaagtgttcacacatgaaatagctagaatagtaacaaagctccctttaaattcagacaatagcagtgagctactggtaacagcccaaaggagaaaatgagcagcagccagaattttgagattaattttaataatttattaatgaatgcaccagcagagaagaggtgggaaggatatggtcgacaagtggtaggagtaaaaaattcagctgtggggaaggggtagcttttgcttagaaagttcaccacagacccctgccctctaagttatggtgaattctgtggaagtgattagagtggagaaaaaggaacaaagagggttggaatccagacgttccatgactaaccccaagatgactaaaccagctactgaatgcacccacagaaagggaagtgacatttactgagaacacatttagtgttgctgaacgcttaaaatgctttctttgtgttctcagtccttaccagtctgtgaggggggtttattttgtctacattacagatgaagaatctcacctgcaaatgaagaaagttggctggccgacaggagatcgtttgaaatgaaaggattccagggtttctttctactgagcgtattcaataagcagggcttattatactatctagaatggtgctatcctgtagaaatacaatgtaagcagcatgtgtagttttaagattttctagtagccatttaaaacaggaaaaaagagatagggaagattaattttaataatatgtttaatttaacccagtatatcaaactgtcatcatgtccaagctatatacatatcatgtcatcagcattttaaagttaccaggagaattcagtgggtactttaaagtccatctgaattcagactagccacatttcaagttgctaca

SEQ ID NO: 95698 - DNA, 1052 bp, Homo sapiens
tcttgctctgttgctgaggtgcagtggcatgatcttggctcactgcaacttctgcctcctgggttcaaacgattctcctgcctcagcctcccgagaagctgggattacaggcacgtaccaccacacccagctgatttttgtatttttagtagaagtggagtttccccttgttggccaggctgatctcgaactcctgacctcaggtgatctgcctgcctcagcctccaaaagtgctgagattacagatgtgagccaccgtgcttggtcaaaacatcttaatttgacctttttttttattcacagaccactttgagactcaacacttaacgacattcatagaagaaaatgcacaaaggcacatgcatagaaagtttttgtataacttccaggaattcatgcccccagtgcagccacagcaacacgtgattgtaatgatgattgcatttctgaagactttttaaaagcatttttttggatagaagagttaaaatgttgtgaattcttgataaattgaataagcaacaaatacactagcagtcactagagggtgatgttttctagcatacaacatcaagttctttccggcaggttgccattgtaggttcctgtgtatgtgcttgcttgtacgtatgtctgtgtgaaagagacagaggcacacacacagactgtctctacctgcataactaaaagaatttctttgtgcatgtttcttttttctccttttcacttatctataatacaagcaaaaatgcttttttttttttttttttgcgacagagtcttgcatgttgcccaggctggagtgcagtgatgcagtctcagctcactgcaacctctgcctcctaggttcaagtgattctcctgcctcagcctcccgaatagctgggattacaggcgcccgctgccacacccggctattttttgtattttttagtagagacggggtttcactatgttggcaaggctggtcttgaactcctgacctggtgatccgcccgcctcagcctcccaaagtggtgggattacaggtgtgagccaccacacctggccag

SEQ ID NO: 95699 - DNA, 1050 bp, Homo sapiens
ttcatagtaaactaaaaaaatgtctactttatccaaactttttcatttataaacgaatttgtgtcacctggtatgtcttagatgtgatttgagactttttgttgttgttgacatagctttaataaaattaacataaactgtgactttgtataggctaggaggaaggagagactgaggagtactatgtttggaaggaaagctgaaggtagggcagccggatggttagctttgcagatatgaggccagtgagaagaaaacagctagttcgatattttgcttaggattaagccctgatggttggatactagccatctggggggtggtgggtggggaatccttttgggagaacggacggagtgtgggaatgaggccctggccaggcagatgtgtgccagtctgacactgttcatttcttctgttgtttatgccagttcaggcaacacggaagctgtgtctgtttctcctgtcattgtaaacgtagccctggtctttcaaaaagctgtggttgtgtgggtctttaaggtattccttcagtaattgtggtggccactatttcatttaaggagttagcatcttataaagaaaaatctgttttctcaaggctctatagtaatgatattttgtttaagtttgtccaatatggtatttagttcttcctattaaggaggagtctctaaacttcagtctgtgggccaaatctacctcctgtttctgtttaattattttattgggggggtgatatttatcccctcaagcatttattctttatgttacaaacaatccaattatattattttagttatttttaaatgtccaatctaattattattgactgtagtcaccctgttgtgctatcaaatactaggtcttattcattctttctaactaatgtttttgtacccattaaccattcccttcccattccccatctcaccactacccttcacagcctctggtaatcatctttctactctctgtgtccatgagttaaattgttttgatttttagatcccaaaaataagtgagaacaaatgatgtttgtctttctgt

SEQ ID NO: 95700 - DNA, 1059 bp, Homo sapiens
catttatttgtgtagatgtgtgcttcagtgaattttcttttacagctatacagcatttcattgaagacatcactattttagaaatctgttttcttgatcttgagagaagcagggtagtagagtgatcatagatggggcccctgatgcccattccagtccccattctgtcactcaccagttgggagcccagtttctacttccgagaaatagggataccgctcatttcacagggtgttagggggatcaaatgaaatagtatgtgaagcattaacaccatgattattaccgtcattactgccactagaacgagatgacagtaatgcagactcagggcaggactaattttgtgctatattttaacttgcagttggacggagggcactctgaaagaagtagggacaatagcttggagacagctgaggtggcgtctttctgaagacttctgttttctctaacataggtggggttatctcccaagagtaatagaaaaagagggtgggatcggtgattcgagagtactgagggtttgaagtgttctcatttggggcatgatctggctaaatacatgcaaaataatttcctgtgttggtgtgtgtgctaatcttgtttgatttttttcttagcaacctgtttacctggcaaagcataaaggcttctcctctggagtcttctcttccctcccccatggcaggtgttgctgcctggagctgcttccacaactggttgtctccaggattgcacccctccccacccggaattctaaccttgtgtggcttatcacctgtcacataaacccatcagcctggctctcactcttcaaaagctgactctaaactgcccggctccccgcagtcattgctcctactgtttccagagtgaggcgcccactgttccctggctcacttctccaccttcccatgcctttgcattctcctctccatctagaatattctctcctcccttttcctggtgccattctttcacaatgtaacatatcccttaatgtatttcatatgatcttgggcaatctatttaacatcctcagatatgatacttcag

SEQ ID NO: 95701 - DNA, 1034 bp, Homo sapiens
gtgcaaaggctagaaagtgagaggaagcacagtctgtctgggaaactcctggagtccagtcctctcagctgggatgggggtgtgagatctgctggagtcaaagtacagattcaaggagaacccagcagtttggaaaaaaggacagaaagttgtaattagggccagaccaattgttaaggcaaatgtcttattcccagtttttgtgaactgttgttcctcaagaaccactgggcatgtgggggaaagccccaggagttttatgaggtagtaatttccccatcactgcaagtgtccatgaagagacaaactcccaggtcatagatattgtatagggatgaggccatggggaaaatgacggtggggaattctgcattgaatgagagtctggactgaccttcaaagatttttttagagtgctaaaatgaaaaatatctctatttggaaacccgcagaaaatgcatttatacaggcctccctctgtactgtcaaaatcatgctaagacagttatttgaaatttgaaacccttttaaatagggcctgatctgagaattcaggcataattaataattccatctccatgggaaagtacatttgaaaggaaaaatagatggggactcctccctgtctttgtcatggccctgctgtgtgtcctgggtgtttgcccatctgacccccttccctgtgctgatgtgctgctgtctgaagggtgctggggagggaaagcagtcctctctctctctctctctatcttcagtgaaaagatcctggttaggcggggcacggtggctcacgcctgtaatcccagcccgttgggaggctgaggcgggcagatcacaaggtcaggagatcaagaccatcttggccaacatggtgaaaccccatctctactaaaatacaaaaaattagccaggcgtggttgcgcgtgcctataatcccagctacttgggaggctgaggcaggggaatcgcttgaactcgggaggtggaggttgcagtgagctgagatcgtgccactgcactccagcctggcgaca

SEQ ID NO: 95702 - DNA, 2273 bp, Homo sapiens
gaaggctatctatactttgtgtactattgttctttttcctacaaactaacttccagagtttattttaaattctctatttaaatgtaacaaggacaaattgacaagcttcaacttctctattaaatttgtatttgtcacagacagctatactacagtaactgtaatttgctaaagaaacatttattttaaaattgttgactcaccaatttttgaagagggtagcattaaaggactattattgacactaacattattagaacttatcgcttactatgtcaggtgtctcttagctacatttaatgtattaactttgaattgactggattaaacaatttaaaagtctcagagtttaaattgttaagaagtttgtatgtgaggttagtgaaaatattgagctctatattgctaaccagatagacaattggaagtgacctctgaaaccaacatttattggtagactccagtctacaatggatccaagagtgaagttaccaaaaacagttttaatttcagatttcggggtttggaggaatttccttttttaaaaaaattaagttatataaaaaaaattctaaaccaaccttttctttattttcagacaatagccaaagtactcatgagtaaaataacgtatatgccaaggaagtagttatttacatagttacaatgctctttcaaacaactagatttttttttttttttttttgcttagaatttaattaaaagaggaagaataattcttaagtattgcctgttctagttgtttaaagagaaatattttgtcacccattctggtgatgtagttatctggtcatagaagggacttgtatttctgccacttttgtctcctaatgtagagaaaatgatcattttccttattcagaagtataggttagccaagaaaggtaaaccattgtctgtttatgcctggattttttttttaatcagcttaggtgtatttttttttaccctagttatactaagcctattttcaggattaaatgaggtttctgagctaataggaatcaaagagagtaaggactttgaagttaggtacaccagagtttcagtaccactcagttggacaagttatataatttttttaagtcttggtttattctttttttaaaaaaataaggataaaaataactactattattgaacattatttactctctcacagaactcaaaccaccaattcagtgaggcaggtggcattgttatcttgcgaatagtgccatacagttaattcattgtttaattgttattgagtgcctactatttgcaaagtaaagatacagtgaggaataagacacaggcctcgccacaggaacacccacctaggtttgggcatatttaatatgaccacagattttctctccatgaacaattatttgattttgaatacctgtgctatcaaacatctttcatactgtctcaagtattgcataagacccattccagctctcattccttcttactcaagtgttcatttcttacgtttgtggactcttaacagaaaaactttcagagactaaaattggccatggccactgccagaaaacattttttgctcttaaagtttaaataaaaggctgtgctctgaaacacgagatgcacgtgcttaaagagcactgtaatacacatgaaaatagttccggcgtcaaacttgaaattgttcaaaaccgaagcaggtaaaaggtggcatgacaaacactgggcttcctagacttttgttttaaagtattaaatatgacttgaaactgactttattcacatactttgtacagtggagcattacccactgtgtttgtggttacagttagagtgaagtgacacaagtgacatgcttgttccagtgggtcggaagccccagaccttcacaaggcattgacccttttttccctgaagtttttggtgtcccaaaataacatctaagatatacccatgtacctacacttactcctttagctattctatcttttaaattatgttgcattcaaacatagttgttttttgacaatacctgaatgacaaacacacctgagaaattcctgccctttaaaaattctcaaagttactttttctctgcctcagatagaagggatctataaataactgattagaaacagtacaaaattgaagtttctcctggttgggttcaaaacagcttaatataggggctggtggctggatgcagtggctgacgcctataatcccagtactttgggaggccgaggcaggcggatcacttgaggtcagaagttcaagac

SEQ ID NO: 95703 - DNA, 1043 bp, Homo sapiens
atttttatgtattcttttaacacagaattattttttgtgtttcagagcagttttatttcaaaggataaaactgtctcttgaaatagtcatgtggtgctttgtctgtaataggttagaatattgccatccatagaagagtaaaaatgactgctgcttttaaataggcttaaattattgactttttatacaaccagcataggcgctgtcattagagcgtcagacctcttatattcagtctgaacatagtccaaatagtcaccatatttattagtttatttgaaccactctcaatttcaccatttgatttgctttcctaataggttctaaactctttgaagctcagttattttgttctgttttctcagcctatgaatttggcctcttgccaagttagttttgattacatttttgctttttcatttatgagctgccataaaagagattgttctgtcttatgctttactaatagttggttaaaggtttgacttaaaagacttggttggcccagagtcatacaagtgcatgtttgccattctgaactgaaatccctggcgacagtgctgtttataaaaggattagagcagggagttttgttgccctaaaatcaggaaaattaagttttattttatattatttaagtaattaaatgataagaaatttacacacaggtgtgtgtgtgtgtccatccttgtgcctcaattgcaaaatttcctgaaataatctccctgagctccatcgtggtgtttctcccaccaagcttttcttgtgattctgtcttgcacaccaccgttctttagaagtagtatttcttggaggtttgtgtttgagatggggactggatgctggctgtagcctctttgtggctccaaaggaaagaggagggaggattgtcctcaaagactcttacaagggtagagagggaggaagcaggctgggcaaagctcaaggaagtccatgcaataactgacctgtgtcaggttggggtctccttctagcaggatgtctgtagggggagggaagaaggactgcagggctctctggtg

SEQ ID NO: 95704 - DNA, 1088 bp, Homo sapiens
aagctttgaggttagctggagtccagtagaagagttataactaaacactggcccttgtctgtttccacttgtgcccattcattgaagctgagattggactgagtacatttgtgactatgtaccagtagcaaaggtgatagaagtcaaacatagctcttagttttaggggctcatggcctcctggggaagggacccatcaggcatagctggcagtcatggccagggttgtggaagcccaggtccaggcagggttcaaatgctcctcagagtgtgccagcagcctcagcctcagggagagcttgtcaggggatgttttacaaggtctccaaaagcctcttatgccctccagagtgaaaagcacggcattgttgatgaagtcttgtggcaaatatgcaaggcacgtgtggatatttctttctcttggaggcttacaaggtagccccggtctcctggtgcagtgtttatagcatagtccactgggactgccgctctgacaaagactgtgtcactactttgtggaatgttattttagaacttccagaatgcctcagtaaatcctgactgccatgtaactgtgtactgtgctgctgagctcttaacatgaagcagcagtagtgaccctggcgggccaggctgacgtgcgtgggaacagtgggagtgaccctggctgggaagcagggaggcctggatattgtttctcctggctctgtgtcctgccattctcgtccctgtgctcagagctctcaagcacccacgatggccttctcaggccgagcgcgcccctgcattatcccagagaacgaagaaatcccccgagcagcccttaacactgtccacgaggccaatgggaccgaggacgagagggctgtttccaaactgcagcgcaggcacagtgacgtgaaagtctacaaggagttctgtgacttttatgcgaaattgtgagtgtctcctctcctggagtgccctcttccaggtccagcgttcttggctgtctgttcaggagccatcctgagctggcccatacaattttattgactggactttgggtgggagttttccagggtggtagggctccgaggggctcgcag

SEQ ID NO: 95705 - DNA, 1454 bp, Homo sapiens
gtaaatgttaatattaatgttgtcatgaaaaataactgttttccaaaatggaagaggcttagaggaaaggatggcattgcgttacatttttgcaaatcttgttaataaaagtttctcagatttgtttctgcattcaacctattacagtctattgttttagatgaaatatatgaagaaaacatggcctcccacagagatgtagttggaaaagaggacttttctgcctcctgaaagggtcatggtgacgctgacattttgaaaacgactgatttaggtgataatgatccaggacattctagaatattctttttgggcttttttagagtcccattaagattgttgaggtttggtgaatcttttgagagggtttagaattaacaacagagccatatatatgagcagcatcttacggtttccaaatagtttaaaatactttttcctcagaacaataatgagaacagcactgagaatgaccaggcagatgtggagcttaccgtgctccttcatccaggaatacctgtggactttggtcagaaagagggaagaagcacaaacccctccagagttttgtaaaactgccacaatcatctggcttacggcaaagctgggcgatgatgagaattttacagattttttccccaacctacagtaactttgaaatgacagaatggaaattcattttaacatgaggcttgggccaggtttactgagcagtgaagctgcttccctttctcccttccttccttttttttgtgacattttaattctgcattcaaacctgttaaataaagttgagctttgacgggtctgaagtgatgaacatggtgtgtctgcacgcagttatttatggcaaggctacaaaacaggatgactgttttgtgaaacattttggggagaaaggcaaagggaaagttgtcttccagaggtgtggaggggagtgaagcaagtaagtggaaccacttttgctaaggaaacagcaaaacttggaaaccaataggggcaaggcagttagttactctgtttatagaatggagactgtctacctgtctgtctcactagttggttgtgaaaattcaggagaacattggtaataacttcatgaagtacattgattaaatatctggaaggtcagaagctgtaccagggaactagacacacaggtgtagagctcatgctgtgggtaggcctgtgaaaataaacttgccaaaaattgaaggaccgcttggcatgggggaccttctccatttctaggacttttaagaaataaataggtcttcacgtgaaatcctcatctaattgtatgcctgtcaaagccatgttgcttttcttttcctttttcttttttgaaatggagttttgttcttgttgtccaggctggagtgcagtggcaagatcttggctcactgcaacctccgcctcccaggttcaagtgattctcctgcctcagcctccca

SEQ ID NO: 95706 - DNA, 2072 bp, Homo sapiens
atggcatttagttgacatgcattttagattctgttctcagaagggaaagaaactggccttgagatgttgacttttggatattttaattaagctacttattaagctataaacccaattccttgagagcagcttgtaactttcatctctgtctcaggtgcctaacacatagtaggcactcactcatagtatattcagcaagaagaatgccaaaaatgttagaaacagaatcaaagtgggacacccttacagagcctcagatgctacggtaaagaggctgaagagtccgagttcagagcatgtaaggaacaagcaagaaattgagctttttagataaaatagggtttttgtgatcagatagaatttgctgctcggttcttagtgttgtttgatcttcgatctaagaagtggctgacggtctgcaacctgctgttctttgcgtgttacagcaacatggccaacgccctggccagcgccacttgcgagcgctgcaagggcggctttgcgcccgctgagaagatcgtgaacagtaatggggagctgtaccatgagcagtgtttcgtgtgcgctcagtgcttccagcagttcccagaaggactcttctatgaggtgagttgcactggacaaaagcagggaggtgccattccccgccctcccgcttcctgcccttctttcctgaggcctcctccttcatgttcagtttcatgatgaaagactgaagtgccacatgcatgccaggtatttgatagctgtgaggtcagaggtggcatctctatggcccatatgggcagtggcatgattgggacaccctcacagaccctgcatttgtattgctcagttcatcgtcctatttcagaacccagagtcccttatgacagagcctttcagacctaagcagctcagctccacatagaaaattctttctgagtcttcagccacactcaggccccccacacacctcacccactcctgtctctgtgtctttcccccttctcagaggaccactggacctgctctaaaggagagcgtgtggtgtacgtcaccccctccacaacttcccagcctcgagccaggagcgtccatgcatttattttctaagggaaaaaaaaataagtattttagggaactatactgtctacatttagctctcctgggtgtctatgttcttttctaaatatttgtttttcttgatcctcgggtgttagcatatggtctgcacttcctttgtagtgtatttggtattttcaacattaccgaaacccctttcttgttgttttttattgttttgttttgtttgagacaaagtctcattgtatagcccaggctagagtgtagtggcatgattatagctcattgcagccttgaactgctaagctcaagtgatcctccagcctcagcctcctgagtagctggggctacaggcacgtgccaccatgcccgactaattttatttttcatagaaacggagtctccctatgttgcccaggctggtctcaaactcctgggctcaggtgatcctcggcctcccaaagtgctaggattacaggtatgaaccaccatgtctggcctactgaaactcctttctcacagtaaacatgtattttgggggataatctagaaatgctgaccccaggctataaatgaaggtgagagtgaggtgtatgtgtgtgttagatcaaataggtaatttacttttaccaccttacttcttacatatttgtacgtaaatgcacatctatatatgataatatatgtatatagaattattttatagctggagatggctgctctttgatttcttcttttgcctagcagatttttatgtttccctgttatataaaccatgcttgagcaaggaaaggtagttgacaaagatcattggtaagtccattgtatgccactccggcagcattttcccatagaaacaaacatgagagtggggttcccaggccagcccacagaaaagctgtttaccccatcatgggtacatgaaatacagggctagcaagtatgtaataatgtcaacttggaaacagctttaagggtttgggttaaggaatgctattttattcact

SEQ ID NO: 95707 - DNA, 1035 bp, Homo sapiens
aaccacttaccagaacatatatctgaagaaatgagcaccagtatttctgtctcaactacagtttctctttttttttctttcttttctttttcttaagacagggtcttaccgtgttacccaggctggagtgcagtggcacaatcatggctcactgcagccttgacttcctgggctcaagcaatcctcccacctcagcctccctagtagctaggactacaggcacacactaccacagccagataattaaaaaaattttttttgcagaaacagggtcttgccctgttgcccaggctggtctcgaactcctgagctcaagtgattagatgccatttacccagggaaataccctttcaacccagaggccctaacgctaactatagtggttcctaaatctttgtgacatccagcattatctccagtaaaagaagtattttaatttttcccataagaaaatacttttgggagtgaagcggagccaacagttacaagagtgatttaagtccaggaagtattgcagagtgggatggactgaaccaaggactagggacctggtgtgcagctgattaaccctgacttagtacatgctcagggctgggttctttgttggtgcttcacatttctctctccttagtttggatttcacaaatgtgtcccttttttcccatcacaaaatgcattaacagtaaagacccatttttttaattttttatttttatttttattttttttgagacagagtttcactcttgttgcccaggatggagtgcaaatgtgcgatcttggctcaccgcaacctccaccttgcggcctcgagtgcttctcctgcctgaggctcccaagtagctgggattacaggcaggcgccaccatgcccagctaattttgcatttttattagagacggggtttctccatgttggtcaggctggtctcaaactcccgacctcaggtgatccgctcgcctcgttctcccaaagtgctgggattacaggagtgagccactatgcctggccaggaaagacccgtttatgatgagt

SEQ ID NO: 95708 - DNA, 1048 bp, Homo sapiens
acatggagaaaccccgtctctactgaaaatacaaaatagccgggcgtggtggcaggagcctgtaatcccagctacttgggaggctgaggcaggagaatcgcttgaacccgggaggcagaggttgcagtgagtcgagatggtgccattgcactccagcctggacaacaagagcgaaactgtctcaaaaaaaaaaaaaaaaaaaaaaagttcctctattgagaaaggcttcaacggtttttttcctcattgtttttccttaattactctctcagtaaataaagtgccatgcctgttacttaggatgttacttagtaacatcctttgtgtgttgctttcccacaggtgaattcatcattggccgagttatcaaagccatgaataacagctggcatccggagtgcttccgctgtgacctctgccaggaagttctggcagatatcgggtttgtcaagaatgctgggaggtaggtggattttcatccttgtcagatgtgggtggacaatgtgactgtgacaagatcatgtgtattctccatgtgggatgtaaggcagttctgtaggacactgaattgagggcatgggaactcagacactgcagtgtgttgactgagtgctgctgctgggagtggacccttgtgttgctgttcacagggcataactgctccatgcatggctgaactaccaatgggggatgtacctagatggagtttcttaaaaatcagtcatattagggttggaacacatttttcatgtggcttgattctgccccgtgaagcacaggagtgatttttttaagaaatggtttgtttaatttcttttcagagataagggaagcatatttctttttaaccattagaaagaacctaaaattttaaatttaagttttgactctgtttagacacctgtgtcgcccctgtcataatcgtgagaaagccagaggccttgggaaatacatctgccagaaatgccatgctatcatcgatgagcagcctctgatattcaagaacgacccctaccatccagaccatttcaactgcgccaactgcggg

SEQ ID NO: 95709 - DNA, 1574 bp, Homo sapiens
aatgtattacagcaattatgtttctaagcttaatgttaagcatgtagtcttagaataggacatgaaattaaattgtatgtagcttggaatatattgcttcagaaaactgaatgtgtatgtcggtcatattgcctttataaccatgctaatatctatgctttatacatactcaaacttgccttgccttaaaaacatacatactacatacttaaatcaggaattctagccatctcacagaataccaactaaaactaagtgcattgagatctgagattggtaaacccagattcatttaccacagctgtaattaagtttttagaaactattctctttttggggaaatccattgaagttaatttctgttatcttattagaagaaaatgatgttgatatgtgtttcagattttccatttgaaatcttataattaatttgatttatttactgtaagtaggaggtataaatgacactcttaaattggaaggaggggtgttttagtgtctgttttaggtcaaaattagtgattctatttttatcaaaagttttatcctgaagtttcaggaccactcttccttaataaacttgttaatggaaagcgagctttatgaacatttaaaaatgttgctgctgctttgttgcttaaaaagaaagttgccaagagagacttcttagggaaaatatttgggttttttttccaaaaattgctgaaatattgttttgccatttttaaaaagtctcaggttattaccactctgccattaaatatttgtatgcctgcatttttaaaaattctgtgcatgtactttatggagtacattctatttttgttttcagataccctacaaccaattttttttagtaatcttttagaattgaaattatcataaatgatcgagaataatcatcacatagtttaagattgtatatgttgagtagtttaaaacaatctttgcattttacagtaagaatcaaagtcccttcagtgtgcctttgtcagctaatatgtgaccagcaatgacaaccttgggagtatttattaaatattatgctatgaatataggcaacacagaacagggtttgcagtatagcgtcttgatgctaaattctcatatacctctacacgagaaatatggaggagaaaaacaagcatttacatatattcttcgtcactttgaagatgcatggcctgaactcgactgcttgtgtttgtttacatatcaggcatacccaggcatctcctgcagccagaggttccattgctgtctttgctcagtcctcttttaaaatatgaattagtggacaggcacggtgcctcacacctgtaatcccagcactttgggaggtcgaggcaggtggatcacgaggtcaggagatcaagaccatcctggctaccactgaaaccccatctctactacaaaaaaattagccgggcgtggtggcgggcacctgcagtcccagctactcgggaggctgaggcaggagaatggtgggaacccgggaggcagagcttgcagtgagccaagatcacgccactgcactccagcctgggcaacagagcaagactctgtctcaaaaa

SEQ ID NO: 95710 - DNA, 1026 bp, Homo sapiens
gtggtggcgggcgcttgtagtcccagctactcgggaggctgaggtaggagaatggcttgaacccaggaggcggagcttgcagtgagccgagattgcaccactgcactccagcctgggcgacagagcaagactccgtctcaaaaaaaaaaaaaaagtgtaagtggattaaaagagaaacttggtctagttcataatatttttaatagggctttccctggctgctggaaaacttaggccagtaagcatctctttgtttaaagtcctacaagacaatttgaaataattcattgttcatgccaaaattctaagtactgtttttcttagcaagtgtaacataatcaggaacaatgggtacaagtaaaacattctttggatgatattcaaagccttattagcactgcacctgaataataggtcattttgcctcactcatttgccaaagtagccatttctaagttaaggaagtttttagataggctcatagccttgtatttcgttttagattgtaagctcaatggcagggatactatattggtaattatgttttcatatagcaaccaccacagtatattcttggtgcttaataaatgtttataattgttaacaataacctgttgtatattgtttattttgaatggtatatatgtgaaatacatatgaaaattgaagtattcatgaatatataatagaaacaagtaaatgaataaaatgacctggttactatagataagccaaattttgaaccatctagaacaatggtgtagtcttccctctactcaatgtaaatgctgggttttttaattattattattattaagaaggagatacagtccaggcacagtggctcacacctgtaatcccagcactttgggaggccgaggccagtggatcacttgaggtcaggagtttgagaccagcctggccaacacagtgaaacctcatctctattaaaaatacaaaaattaatagggcgtggtggtgtgcacctgtagtcccagctacttgggaggctgaggcagtagaatc

SEQ ID NO: 95711 - DNA, 1069 bp, Homo sapiens
gtatttttgtcaagacggggtttcaccatgttagccaggctggtctcaaactcctgacctcaggtgatccgcccacttcggcctcccaaagtgctgggattacaggcatgagccgctgcacccagctctattttttgttttgtgataggaaattataaaacatggaattatgcatttgtcagcctttaaaaaaacttttaagtgaatgaaagtggcgtatttgaacatcaacttaggacagatttttactacttttgaaaaaatgttggaaaatatttctgtatgaaaagtaaaacaacttttaattttttttagaagtcaatgaaaggattctattttgcaaagctgtattatgaagctaaagaatatgatcttgctaaaaagtaagtacaaactgtaacatgtattttttttttaaaatcaatgccttttctcattttcttctttgaaataggtaaaaatatgttcttagtagttcttcctaagtgtattctggaataagggatttatcactcagactgatgctaaggaccagcctagattccattgagattgaaaccgtaattagtgttttctgcatgctgctgctttataccaagggcaagaaattgtttggcttcaaatactttttctaaaaattgtcttctgttggagtaaaagaggaccatgcctatatcttaatttgtttttggttagatatctgataccttaatcagatggaaaatagcaatgaataaaaaattaaaccgtaattgtaaggcaggagaatagcttgtataaaagatgtttaattgacacaatatgtgatgctctaaggctctatcctagggataagaagcttggtgattctgatttcctgacttggagtggattaaagcaggaaattaagagggagtcaggctttttttttttttttttaggcagtatctgtctctcttgctcaggctggagtgcagcagctggctccatctttgctcactgtaacctctgccttctgggctcaagagatcttcccacctcagcgccccaagtagctggggatacagatgcgcaccaccacacctggcta

SEQ ID NO: 95712 - DNA, 1583 bp, Homo sapiens
tgagatgatactgtcttcatttaaggtcaggaggtgatgacagtgctttgagatggtgatgaaggtaacagaacagtgggaggagaggggatgcgggattgagtcagatttaaggagatacagagcagtttgaacataaggaccttgttgctgaggattgactggggaggtctaggcttctggtggtgactcagatggacaggaatgtgtggcattagtcctggtagtctctgaagagagtatgagctactgcagtaatcacagatgcttttcttcacatacagttcttgaggcttagtttctgggttgtaagcaactctcagaagggatgaataaggtatataggatggtgtttttggtggcatcatcataaaactagacatagtggaatggtgctctttgggagcatgacttgtttaaaattgcacaagtgttactctaataatttttctttttcccctctaaataggaacagcttctagattgtgaaggtgaagatggatggaataaactttttgacttgattcagtcagaactttatgtaagacctgatgacgtccatgtgaacatccggctagtggaggtgtatcgctcaactaaaagattgaaggatgctgtggcccactgccatgaggcagagaggaacatagctttgcgttcaagtttagaatggaattcgtgtgttgtacagacccttaaggtagataaaagctattgggtctttacatttctatgtaggcaattagcatacatctttttgtactaaagcagcagtgccccgcaggacttaaaatttcttttatttatgtagaacagttataaaatgaaatttttaccaggatcagttaaatttataatgggaagattggggagataactatgataaatgtatatatttttggtgttttataaggtcgatataaaaatcaatatagtttcacaaatgtggttggagtgagaaaaggaatttgtaggcttaaaatgattaatttcttaacatttgattaagttttgtaacttactgttcattccacaaaataggaatatctggagtctttacagtgtttggagtctgataaaagtgactggcgagcaaccaatacagacttactgctggcctatgctaatcttatgcttcttacgctttccactagagatgtgcaggaaagtagagaattactgcaaaggtacgttgactttgagaagaatgctttagtataaattgcagtttttctttttgcagtaagttcattgctctaaacttcttcactgaatcattatttgtataatgtacctaggagttatagttaatacagtgaacaactaggaggcaatcttatttttcttcttttacggggaagttctaattggttttatatgactttcctttttagagaactcttatagttcaagcttgattaaaattagccttatggttaaatactcagttttgtcatagtcaagcctaaaatgaatgttctaactgctatttcatattttattttttaaaatagtataatcttgagtgaaaattaaagttcatctgtcatcagatggctaggttcacatgtattagtataagc

SEQ ID NO: 95713 - DNA, 2466 bp, Homo sapiens
tttgcatttttgtgaatctttttaatgtctcgcttaatagaacatagctagattctcatttacttcctctttcagtctgtaaaactattacatgtcatgaagcctctagaaaactcagctcagcggggcgcggtggctcagccctgtaatcccagcactttgggaggccgaggcgggtggatcacgaagtcaggagatcgagaccatcccagctaacaatggtgaaaccttgtctctactaaaaatacaaaaaattagccgggtatgttggcacgcacttacagtcccagctgctcgggaggctgaggcagaagaatcgcttgaacctgggagtcagaggttgcagtaagccaagattgtgccactgcactccagccttgtgacagagtgagattctgtctccaaaaacaaaaacaaaaaaactcagctctacatacatgagaaaatgagtatgtaaaatataaatttttttttggtattatcgtaaaagtaattttaacttcatggatcccctgaaggggtttttgagcaccctcagagatctttagacctcacttgctctggttgctttattgtaagccactttaaaatcatgcttcacgtttaagtgtttgctttttgcttttacttttcttccaaagtgaggatttggagaaacaataggatttagaagaactaatttagaatatagattacaaataataggccaggcgtagtggctcatgcctgtaatcccagcacattggtaaactgaggtgggtggattgtgaggtcaggagttgaagaccagcctggccaacgtagtgaaaccctgtctctactagaaatataaaaaaagtttagcggggcatggtggcaggtgcctgtaatcccagctactcagaaggctgagtcaggagaatcacttgaacctgggaggtggaggttgcagtgagcttagatcgtgccattgcactccagcccaggcgatagtgagagactccgtctcaaaaaaaaaaaaggcagactattttaaacgctgtaatgatctatatagtaaaaagagcaattactgtattgatacgcaaatacctgtcagttatttacttataatttggaaatggtatgtctaatttgagaaattacaactgttaattaaataatgaaattatatgatcaggaagaaactacaaaatagtctcccaactttatcctggtttattttgaaatgtgcacctataatcactgatcttatatttatcctgtgattggagggctggaaataactgggaatatcatttgagaggttaagcatgaagtataggaagtatgcaggataaaaaaaagcattagatgattcataatttataacatggggaataagaattattagttgaatgtggaagatgaagcttgaaataaaatttttattttgttttgaattaaataaaccatgattattcacagtgcagtaagtgtgtattatctgtttgatattttcatattacagttttgatagtgctcttcagtctgtgaaatctttgggtggaaatgatgaactgtcagctactttcttagaaatgaaaggacatttctacatgcatgctggttctctgcttttgaagatgggtcagcatagtagtaatgttcaatggcgagctctttctgagctggctgcattgtgctatctcatagcatttcaggtaagtcttccacttgtaggagcaattgacatttcactgagtcttgatgtgtttgaaatgaaggtgtgctctggtatgtaatgacaatatgtgaacaaacctgtggaattaaagttgaaatagtcaatttgatacagtggaaaataactaagcatacacaatactggtgaggctggtgaaacagggatgttgaatgcactcttgttgaaagcctgcattgccatgatttgtttgtagacaaatttgaagagtttgatctttttactctgccatttttgggaacatgataaagatgtaatctcgtattatgggtaaagcttgattcagaaagatgtgttacttggacaaaatcttaataagtagatgtagggcaatggctttatagcctatgatagaagaatatgattgcaatttaacatgttaattgaaacacatgtatataacatttatgactgtattgtgtatatgtaacagtatatctattaatctttgaaaacataaaaccttttcttaatttttatttttttattttttttgagaccaagtctctctgtcaccaggctggagtgcagtggcgtgatctcggctcactgcagcctccacctcctgggttcaagtgattctcctgcctcagtctcccgagtagctgggactacaggcccgtgctaccacacccagctaattttttgtatttttaatagagatggcgtttcaccatgttggccaggatggtcgccatctcttgacctcgtgatctgcctgccttggtctcccaaagtgctgg

SEQ ID NO: 95714 - DNA, 1039 bp, Homo sapiens
gcgtgatctcggctcactgcaagctccacctcctgggttcatgccattctcctccctcagcctccccagtagctgggactacaggcgccagccaccagggccggctaattttttttttttttttttttgtatttttagtagagatggagtttcactgtgttagccaggatggtcttgatctcctgacctcattatccacccagcttggcctcccaaagtgctgggattacaggcatgagccaccgtgcccagccggaaataattcttaaaagctgtttaaaggaggattctgatcagccaggttcagaaatcagtgtatcagatcagagaataagagtttgtccctgttctcctatggccacttaaatccagaccttttcatctgaaatgcaaatatgtttggcatttttcatacacattcctgtcttttttcccccttctgctgtcttatgtagatactgagaatattaaacctgtactcttctcatttgctacataagcaccggttttgttgtccagctgtattttttgggttggagggttaggtatgcagtaatcatgttatttcccctttgggtatacaaatgagacaacgtgagcaaatacaatctgtaattttaaagtgatggaaataacttaaatttttttttcagggcacatgttgctaaacttaagtcgtggcaagcaagattttttaaaagagattgttgaaacttttgccaacaaaagcgggcagtctgcattatatgatgctctgttttctagtcagtcacctaaggatacatcttttcttggtagcgatgatattggaaacattgatgtacgagaaccagagcttgaagatttgactagatacgatgttggtaagttatatgtttcagaggaaatggtctccgtcttaattcttataaattgcccataatcttattacccagaaataacgacttaatattttcctgtattccttttgtgtgtgggttgggctggggggagtttgaatgtggtgctgtgggggtggcatgtattttttgttgttgtt

SEQ ID NO: 95715 - DNA, 1614 bp, Homo sapiens
tggtctcgaactcctgactgcgcagaaccttttcaatattgactttcttgtagaaaaacagatttctttactgtaccgatggattaatatagtggtgttccattgctttaatgacttaaaggaaaacccatcgttttggggtttcttattaggttaggtgttctttatttggcttttgtcagttgattttggtttattgagttctagtcagtgtcattttttaagatggacttaaacattcttcatcactactatttttattaaaatttctagaaataatcaagtgagaatgcatttaataagaacatgagattttgcctaacatagaattcccttcagctttgatatagaaaagcagttatataattaagatatatataatgtgaattgtttatgttggcaaaactaatggcacaaggaaaaatttcaaacccttaagccaattttttaattttatttcaggtgctattcgagcacataatggtagtcttcagcaccttacttggcttggcttacagtggaattcattgcctgctttacctggaatccgaaaatggctaaaacagcttttccatcatttgccccatgaaacctcaaggcttgaaacaaatgcacctgaatcaatatgtattttagatcttgaagtaagcaaagattttaacaaattaaatattctgaattttgtttaattttttttctaacttaacttttccttaaataaaacaggtatttctccttggagtagtatataccagccacttacaattaaaggagaaatgtaattctcaccacagctcctatcagccgttatgcctgccccttcctgtgtgtaaacagctttgtacagaaagacaaaaatcttggtgggatgcggtttgtactctgattcacagaaaagcagtgtaagtagtaaaacaaaaatattgctttcacttagtgcgtaggttttaccggggatttaatcctcatgtgaagatttaatttgtcatgtgacccattaacatatatgtatgtaagccctgaactgtgtatttagaaagcaattttagtaaattgaactattttttagacctggaaacgtagcaaaattgagacttctagttcagcatgaaataaacactctaagagcccaggaaaaacatggccttcaacctgctctgcttgtacattgggcagaatgccttcagaaaacggtgagttttaaagtataagcatttttaaagaacattaccttaattttttaaaatcatgaactttttattgaaagtttttttgttctgaaaacagcagcttggtcacattatgacagatgtgttttttattgctgcaaaatagttaatgtagttaaatataagcacttagaggagcaatgcctggcacacagtgaatgttacatattagctgagctgttactgttattccttaataattaagttctgataattattcagcctgaaaattaaaaaaaaaaattagcacaaggctttgtaggtaagaccattatagatctttctatatacttaaggtgtgttttgtgtcaccatgaggtgtagatggtcagccttttgaacaaactgacactacagaagaggcaggtttcagctatctaaaaat

SEQ ID NO: 95716 - DNA, 2897 bp, Homo sapiens
cctggctaacacggtgaaaccccgtctctactaaaaatacaaaaaaaaaaaaaaaaaaagaaaaaattagccgggcgtggtggcaggcatctgtagtcccagctacttgggaggctgaggcaagagaatggtgtgaacccaggaggcggagcttgcagtgagccgagatcacgccactgcactccagcctgggctacagagcaagactctgtctcaaaaaaaaaaaaaagttgagtgtagaatgatcactggtgttaaggtggtttagttattacagtatttggaagttgaacaaatgactattgagataccatttggttttgacttgaaattttagccagttctttcaacttgtaaatgaactttagatctaatcatgcgtgttccttaaagttgtgtgcttttaactttcttttttagggcagcggtcttaattctttttatgatcaacgagaatacatagggagaagtgttcattattggaagaaagttttgccattgttgaagataataaaaaagaagaacagtattcctgaacctattgatcctctgtttaaacattttcatagtgtagacattcaggtaacagagttcctttatgaatttattggagatgggaatttccagtttataaacaaagacatagagctatacactgcttaaattaattgccttgttatttaatggtaatcttgttttctaaattcactagctctcacacataagatatgacagagaagaataatgagatgtttgtctcttaagatcatataaaatctttggaaaatcatttgggttttatattctgagtataaacaatttgactaaaaactattctgtgtgtttaggcatcagaaattgttgaatatgaagaagacgcacacataacttttgctatattggatgcagtaaatggaaatatagaagatgctgtgactgcttttgaatctataaaaagtgttgtttcttattggaatcttgcactggtaagtagatgcagtacttgagctaaaagttttatttatttatttattatttttttaaaagacggggtttctctgttggtcgggctagagtgcagtggcacaatcttggctcactgcaacctctgcttcccaggctcaagcgattcttgtgcctcagctcccgagtagctgggattacaggcatgagccaccatgcgtggccaagctaaaagttttttgttttaaaaacctaatgatttcataaaagcactatttgtatagatttttcacaggaaggcagaagacattgaaaatgatgccctttctcctgaagaacaagaagaatgcaaaaattatctgagaaagaccagggactacctaataaagattatagatgacagtgattcaaatctttcagtggtcaagaaagtaagtagcaggttgttgtatgtacgttcttactgataacccactggtcaatgtttttgcgttggtcttatattttggtaatttcaaaaatactcagtaatatgttgttattaatgcacagaagggatatgtgtgtctaaatgcttatatttgcttgctttgtcttaggtttggtgtgtctttttaaacttgggaatctaggtatatgctcttaaaaagtacttcttggggaattagaaaagatttctaagataagacattgattttgttatcttagcagtgtaatcaaaacaaatattataacctcaggactaattcttaatgaactttgctgaaattgaaagttgttgctgacaacttaagagcatttcttctcatcctcatcagccattgtgaacgcccttgttttcttgctgtcagctgtttgagattgtcatgatgatgttaaattatgttcagtcttctgagtgttttgttgattaatttgtgttactactcttttattaggatttatgttgtctggtgtattgtagcatctgtatttctgtcaccattgaaaatcagttagaaaacatcagtaacttattttgttcacttggaaaagctttccaagttaacattcctctacaattatcatggttaacagaagtaatagaaagagcatggactttagaatcagaagatgttagattgtacaacacttttctgtgttcatgaagaaaaaaatataataaaggcaaaaaataataataatacaaaacaacagaaaaagaaaaaagataattaaaaaacactttcacgtgtattatttaaagtgtaaagtgcctattaaagtggcaaaaatgtaaataagataaaatatatcattttagagtttttacttttggaattttttgcaaatgaaagcccttaattaatgtcttttatttttagttgcctgtgcccctggagtctgtaaaagagatgcttaattcagtcatgcaggaactcgaagactatagtgaaggaggtcctctctataaaaatggttctttgcgaaatgcagattcagaaataaaacattctacaccgtctcctaccagatattcactatcaccaagtaaaagttacaaggtaaacaggaaagaatggaatcatttcattgtgaaattgtttctgttctaagtgttttaaatgctgttttgttatttttatttttttttagtattctcccaaaacaccacctcgatgggcagaagatcagaattctttactgaaaatgatttgccaacaagtagaggccattaaggtaagtcacttaatttctctagctgtactttttattccaagattccttccctggccactctctcactttttttctgaagctggtcagaatgtccccttgccatccaaatagtatggcaaggggacattttggtctttttttttttttttaagacagggtcttgttctgttgtgcaggctggagtacagtggtatgatcacagcttactgtggctt

SEQ ID NO: 95717 - DNA, 1894 bp, Homo sapiens
gggcgtggtgggtcacacctataatcccagcactttgggaggctgaggtggtgggtcacttgaggtcaggagttcaagactagcctggcaaacatggtgaaaccccatctctactattacacaaaaaattagccaggcgtgctggctgacgcctgtaatccgagctactcagggcgctgaagtgggagaattgcttgagcccaggaggtggaggttgcggtgagccaagattgtgccattgcactccagcctggacgacagatcgagacaccatctcaaaaaaaaaaaaaaaaatcagttatttaaatttaaaagagtaagtttccccagcactgtttctgtcatgatataattaaatgtttaaaattatttgatttttttttcttccaatagaaagaaatgcaggagttgaaactaaatagcagtaactcagcatcccctcatcgttggcccacagagaattatggaccagactcagtgcctgatggatatcaggggtcacagacatttcatggggctccactaacaggtgagctggcaagtggataatcgcatattttagtaaaactactttacttccctcttttaagtagataacgtgtgaaatcaccttgtttatatatgtttgttaatatacatgtcaacgtctgtttatatgtgacttcaaaagctgtatttggtgttacggagatttttataatcccaagcagaaaaaacgagccgtatgtgatcacgtgtatataaaggcttaaagaacacttaatccacacctcagatgagctgagatgagattattccttaaattgaaaaatgttaatgaatagagttatgcactaagaaatgcttaattaagaacctacacctctggggaattattttgatgataatgatgagaggcaggacgttatataggaaatcttacttaatttgaaatattatggttatataaagaaagaaaaggagtttggacctgaatcatactgggtttttaagttctgctctatcacttactataatagctgtgtaagataacctgtctgaaacgtggagataatacttgccttacataattactatgagcatttgtgtatgtgcaggtgggcgtgggtgtgtatcagacatttattagagtatacagtaaacagttaatgaactaaggttactaatagtgtttactgtgggttggctatgtgcaaaagtgctttgtgaatgtaattttatttaattacagtaacttagaatggccggtaccattattaatcccttttttataaataaggaaattaaagaaaggttaggtaacttactcattattatacagctagttattgatagagctgagattcacactccggtggtgtaactccaaagcacttgccagtataatacattgctcccaggcagcgagaaataacaaaattgttccttttacgtacgacagacttctgaaatggtagtagtagtagtgccctttttttttctctttttagcccaggaaagatttagaataaaatctagtttagatgagcacatttgtgtgatggttcatatagttaaggcaaccccactagccttttgtgatagtatcttctcaacacaagcaaaataacagaaaatctttgtgaaatcaagcttattaaatgtcataagtcatagataagtatatgaaatgtctaacgttcaaaccttgttttcttaaaaccttacacatcatataggtccttgtaagaggataaacaaaccggctagcctttcctggggcttttttagtgatgtgtgcagtcagttatttggtgccttgtgggtcatgatttccatttcttctgtgtacaggcataaaagatcttctgttcttatacaagcatgtaaatccaacattctcattgtctcattt

SEQ ID NO: 95718 - DNA, 1401 bp, Homo sapiens
aaaatcaaacttgggcttctggctagccttttctaggtcttgatttttcagtgctttccagaggcaattgtttggaacctcttggcacagtttctgtttctttttccatgtacaggcataaaaggtcttttggttgttttctggtaaaactatcataaaacagttcaagcaaatgactattggtagttttgccattaacatgggtgccttctagtcattttgtttcctggtaaaacacacaaaacagagggagcagacagtttgtacatcagcatgagtgttgatgtgctttttattttaagccagggaacacattttatgttatttatgacatcctgtccatgaatttgtcaggtgatttttgagctgaacattctcagtaatagctttagtttacaaaatacaacctagtctttctgcagattttctaggcccacttcaaatgcattgaccatcagatggcatcttggttccttacgtcctttctgtgactgaatgtccataattccacatcatactgatctttcttagaaaaggcaacagttactttcttctttattccttttttaatgcttgtgaggtagttgttcttgttgatcacagcaatgctattctcttattcttcatgtcatatttagcagtttttttctagtttgtcatttgataatcttgattggtgtattttgatgtacagaaatttaaaatttatgtagttaaatctttctttaatttctattgcctttgtatttatagctcttgcctagatagtcttaactgtagtatagactttaacagtgttttctttattttctttttgtttttttagttgcaactactggcccttcagtatattatagtcagtcaccagcatataattcccagtatcttctcagaccagcagctaatgttactcccacaaaggtaacaaaggaataatttatacatttataattatttcctttttaaattgtttagggttccttcaaataaattcaagagagcagttcactattaaaacttttatgtcccttaaaatgtagatattttaaatttatctccaaatacagaaattatccttcttagtcaccttatttttgtgttaataagtgtgaatatttagaatattttaaaaatgggagtggtggtggtggatccttcatcgttctgttttaacagaaatagaactgtaatgcccttgctgacccactatgtggtaagtactttcaggcctgatacagctatatatataacaattgattgaagactcaatattacagtggtagttgaatgtgacagctttgaggacagagtgttggggtgcatttagacccttgctcttctgcttattttgaccacaggcaagtttcttaacctctcaatgcatcagttgcctcatatgta

SEQ ID NO: 95719 - DNA, 6658 bp, Homo sapiens
caaaatgttttaactttctgtcttttagggcccagtctatggcatgaataggcttccaccccaacagcatatttatgcctatccgcaacagatgcacacaccgccagtgcaaagctcatctgcttgtatgttctctcaggagatgtatggtcctcctgcattgcgttttgagtctcctgcaacgggaattctatcgcccaggggtgatgattactttaattacaatgttcaacagacaagcacaaatccacctttgccagaaccaggatatttcacaaaacctccgattgcagctcatgcttcaagatctgcagaatctaagactatagaatttgggaaaactaattttgttcagcccatgccgggtgaaggattaaggccatctttgccaacacaagcacacacaacacagccaactccttttaaatttaactcaaatttcaaatcaaatgatggtgacttcacgttttcctcaccacaggttgtgacacagccccctcctgcagcttacagtaacagtgaaagccttttaggtctcctgacttcagataaacccttgcaaggagatggctatagtggagccaaaccaattcctggtggtcaaaccattgggcctcgaaatacattcaattttggaagcaaaaatgtgtctggaatttcatttacagaaaacatggggtcgagtcagcaaaagaattctggttttcggcgaagtgatgatatgtttactttccatggtccagggaaatcagtatttggaacacccactttagagacagcaaacaagaatcatgagacagatggaggaagtgcccatggggatgatgatgatgacggtcctcactttgagcctgtagtacctcttcctgataagattgaagtaaaaactggtgaggaagatgaagaagaattcttttgcaaccgcgcgaaattgtttcgtttcgatgtagaatccaaagaatggaaagaacgtgggattggcaatgtaaaaatactgaggcataaaacatctggtaaaattcgccttctaatgagacgagagcaagtattgaaaatctgtgcaaatcattacatcagtccagatatgaaattgacaccaaatgctggatcagacagatcttttgtatggcatgcccttgattatgcagatgagttgccaaaaccagaacaacttgctattaggttcaaaactcctgaggaagcagcactttttaaatgcaagtttgaagaagcccagagcattttaaaagccccaggaacaaatgtagccatggcgtcaaatcaggctgtcagaattgtaaaagaacccacaagtcatgataacaaggatatttgcaaatctgatgctggaaacctgaattttgaatttcaggttgcaaagaaagaagggtcttggtggcattgtaacagctgctcattaaagaatgcttcaactgctaagaaatgtgtatcatgccaaaatctaaacccaagcaataaagagctcgttggcccaccattagctgaaactgtttttactcctaaaaccagcccagagaatgttcaagatcgatttgcattggtgactccaaagaaagaaggtcactgggattgtagtatttgtttagtaagaaatgaacctactgtatctaggtgcattgcgtgtcagaatacaaaatctgctaacaaaagtggatcttcatttgttcatcaagcttcatttaaatttggccagggagatcttcctaaacctattaacagtgatttcagatctgttttttctacaaaggaaggacagtgggattgcagtgcatgtttggtacaaaatgaggggagctctacaaaatgtgctgcttgtcagaatccgagaaaacagagtctacctgctacttctattccaacacctgcctcttttaagtttggtacttcagagacaagtaaaactctaaaaagtggatttgaagacatgtttgctaagaaggaaggacagtgggattgcagttcatgcttagtgcgaaatgaagcaaatgctacaagatgtgttgcttgtcagaatccggataaaccaagtccatctacttctgttccagctcctgcctcttttaagtttggtacttcagagacaagcaaggctccaaagagcggatttgagggaatgttcactaagaaggagggacagtgggattgcagtgtgtgcttagtaagaaatgaagccagtgctaccaaatgtattgcttgtcagaatccaggtaaacaaaatcaaactacttctgcagtttcaacacctgcctcttcagagacaagcaaggctccaaagagcggatttgagggaatgttcactaagaaggagggacagtgggattgcagtgtgtgcttagtaagaaatgaagccagtgctaccaaatgtattgcttgtcagaatccaggtaaacaaaatcaaactacttctgcagtttcaacacctgcctcttcagagacaagcaaggctccaaagagcggatttgagggaatgttcactaagaaggaaggacagtgggattgcagtgtgtgcttagtaagaaatgaagccagtgctaccaaatgtattgcttgtcagtgtccaagtaaacaaaatcaaacaactgcaatttcaacacctgcctcttcggagataagcaaggctccaaagagtggatttgaaggaatgttcatcaggaaaggacagtgggattgtagtgtttgctgtgtacaaaatgagagttcttccttaaaatgtgtggcttgtgatgcctctaaaccaactcataaacctattgcagaagctccttcagctttcacactgggctcagaaatgaagttgcatgactcttctggaagtcaggtgggaacaggatttaaaagtaatttctcagaaaaagcttctaagtttggcaatacagagcaaggattcaaatttgggcatgtggatcaagaaaattcaccttcatttatgtttcagggttcttctaatacagaatttaagtcaaccaaagaaggattttccatccctgtgtctgctgatggatttaaatttggcatttcggaaccaggaaatcaagaaaagaaaagtgaaaagcctcttgaaaatggtactggcttccaggctcaggatattagtggccagaagaatggccgtggtgtgatttttggccaaacaagtagcacttttacatttgcagatcttgcaaaatcaacttcaggagaaggatttcagtttggcaaaaaagaccccaatttcaagggattttcaggtgctggagaaaaattattctcatcacaatacggtaaaatggccaataaagcaaacacttccggtgactttgagaaagatgatgatgcctataagactgaggacagcgatgacatccattttgaaccagtagttcaaatgcccgaaaaagtagaacttgtaacaggagaagaagatgaaaaagttctgtattcacagcgggtaaaactatttagatttgatgctgaggtaagtcagtggaaagaaaggggcttggggaacttaaaaattctcaaaaacgaggtcaatggcaaactaagaatgctgatgcgaagagaacaagtactaaaagtgtgtgctaatcattggataacgactacgatgaacctgaagcctctctctggatcagatagagcatggatgtggttagccagtgatttctctgatggtgatgccaaactagagcagttggcagcaaaatttaaaacaccagagctggctgaagaattcaagcagaaatttgaggaatgccagcggcttctgttagacataccacttcaaactccccataaacttgtagatactggcagagctgccaagttaatacagagagctgaagaaatgaagagtggactgaaagatttcaaaacatttttgacaaatgatcaaacaaaagtcactgaggaagaaaataagggttcaggtacaggtgcggccggtgcctcagacacaacaataaaacccaatcctgaaaacactgggcccacattagaatgggataactatgatttaagggaagatgctttggatgatagtgtcagtagtagctcagtacatgcttctccattggcaagtagccctgtgagaaaaaatcttttccgttttggtgagtcaacaacaggatttaacttcagttttaaatctgctttgagtccatctaagtctcctgccaagttgaatcagagtgggacttcagttggcactgatgaagaatctgatgttactcaagaagaagagagagatggacagtactttgaacctgttgttcctttacctgatctagttgaagtatccagtggtgaggaaaatgaacaagttgtttttagtcacagggcaaaactctacagatatgataaagatgttggtcaatggaaagaaaggggcattggtgatataaagattttacagaattatgataataagcaagttcgtatagtgatgagaagggaccaagtattaaaactttgtgccaatcacagaataactccagacatgactttgcaaaatatgaaagggacagaaagagtatggttgtggactgcatgtgattttgcagatggagaaagaaaagtagagcatttagctgttcgttttaaactacaggatgttgcagactcgtttaagaaaatttttgatgaagcaaaaacagcccaggaaaaagattctttgataacacctcatgtttctcggtcaagcactcccagagagtcaccatgtggcaaaattgctgtagctgtattagaagaaaccacaagagagaggacagatgttattcagggtgatgatgtagcagatgcaacttcagaagttgaagtgtctagcacatctgaaacaacaccaaaagcagtggtttctcctccaaagtttgtatttggttcagagtctgttaaaagcatttttagtagtgaaaaatcaaaaccatttgcattcggcaacagttcagccactgggtctttgtttggatttagttttaatgcacctttgaaaagtaacaatagtgaaactagttcagtagcccagagtggatctgaaagcaaagtggaacctaaaaaatgtgaactgtcaaagaactctgatatcgaacagtcttcagatagcaaagtcaaaaatctctttgcttcctttccaacggaagaatcttcaatcaactacacatttaaaacaccagaaaagggtaagtactttgttgttaaagttaagcacaatttttctttcttttaatgtttagcttgatgcagactctttgtaggatactaatgttgggatataaatgatgctttgtgaacacccccaaaatatttgagcaattttttttctcccttaataagttcacggtgaggtttcaaagagcaagagaacttagtttaagacatttcagtaactggaagatacttttatcatgctagggcagagcaaaagaactcggtacggtatacggactcatgcttgaatcatgcacattaacgtgagtctttttttaaagtgttcattttcatttgttcagtttcttttgtcactcagaaaacatgatattgaggctgggcacggtggctcactcctagaatgccagcactttgggaggttgaggtgggcagatcacttgagctcaagagttcgagaccagcctggccagcatggtgaaaccctgtttctactgaaaatacaaaaatgagccgggcgtcgtggtgcgtgcctataattagcagctacttaggaggctgaggcaggaggatcacttgagcacaggagatggaggtagcagtgagctgaaatcatgccactgcactccagcctgactgagtgactgagactttgtctccaaaaaaaaaaaaacaacgtgatattgagatgttctcattttatatgttgtatgtcagtcttgctcatgtattaaatgagcaaagaatgaaactacagggataaatgaatatgtaagacaatcagattggtggtataaattgagggattctggctttttatgttttaaaagcatattcattttgtttcctaaaatgttaaaaaacgaaatattctttattttctaggatttaattttagcctttttaaatctaatcccatggccttttggactagcaccccttcctcacagcctgagagcaaaggtatagaactagcattctcagtatgagataacagcagtttttagcagctgggtagcccttagcaaagtattaataactgtggctgtatgaaatgaagtacttaccactacaacatgcatgttaaagaatgccagtttaagcaaagtaccttttgactggtggcatgacacccttgttggtttgttttttaaaatgtactgggatgctgatttgtaatgtacttcattgctctgctatttcaggtctgctcaatgaagacctatgttttatctaatgtttatgtttagccactaacgtctgccagtattcaaatgtagtggcaacggcatgtatacaatatggaagagtgtccctgtagggctgttcttttgtgcatggtttagaaaaatgttgtatttgaaaatggaccccgtttttaacagccagcattctacagcttgcatattatatatgttgcaccgatcaattttagaagtgtggctactagagtggaacaagaagtgggatctgttgaaggccttcaagaaca

SEQ ID NO: 95720 - DNA, 1043 bp, Homo sapiens
aatcccttgaaattggggtcttttttgccaaactgaaatccttctcctgaagttgattttgcaagatctgcaaatgtaaaagtgctacttgtttggccaaaaatcacaccacggccattcttctggccactaatatcctgagcctggaagccagtaccattttcaagaggcttttcacttttcttttcttgatttcctggttccgaaatgccaaatttaaatccatcagcagacacagggatggaaaatccttctttggttgacttaaattctgtattagaagaaccctgaaacataaatgaaggtgaattttcttgatccacatgcccaaatttgaatccttgctctgtattgccaaacttagaagctttttctgagaaattacttttaaatcctgttcccacctgacttccagaagagtcatgcaacttcatttctgagcccagtgtgaaagctgaaggagcttctgcaataggtttatgagttggtttagaggcatcacaagccacacattttaaggaagaactctcattttgtacacagcaaacactacaatcccactgtcctttcctgatgaacattccttcaaatccactctttggagccttgcttatctccgaagaggcaggtgttgaaattgcagttgtttgattttgtttacttggacactgacaagcaatacatttggtagcactggcttcatttcttactaagcacacactgcaatcccactgtccttccttcttagtgaacattccctcaaatccgctctttggagccttgcttgtctctgaagaggcaggtgttgaaactgcagaagtagtttgattttgtttacctggattctgacaagcaatacatttggtagcactggcttcatttcttactaagcacacactgcaatcccactgtccctccttcttagtgaacattccctcaaatccgctctttggagccttgcttgtctctgaagaggcaggtgttgaaactgcagaagtagtttgattttgtttacctggattctgacaagcaatacatttggt

SEQ ID NO: 95721 - DNA, 2434 bp, Homo sapiens
tagccatatgaatggtcttagattttatagtgttagctacctatagagtcacagttgttatttaattttacttagtatcatgcttgaacataggcaaactagatgcaactctagtcaccttccattcttggcaattgttaactttccttacagaaactaatcacagttggctttggattagtttcatatgtatagtaatacttgcctatgttttaagatttttttcaattgctgcaaatgcatggatattttggtaaactattgtatgctaagtatagttaggcaacactttaaaatttttaacctttataaattctagaaatttatagtaattcttttcaatgactattaagtaaacacaaatttttttttgttttctttggttttaaatagattctgtgttcacttagggtttttggtagaacactaaatcaggatgctaattctagttcatgattatcatacatctctgcatcaaagtatatgtgttttttatcagtatgctgttttaacctatagataggttccatggtttttattttcagttagagtattaacgtcaatacttaataccttatctttgtcaatttttttgactggtgttacagcaaaagagaagaaaaaacctgaagattctccctcagatgatgatgttctcattgtatatgaactaactccaaccgctgagcagaaagcccttgcaaccaaacttaaacttcctccaactttcttctgctacaagaatagaccagattatgttagtgaagaagaggaggatggtaaaacttttgttatttcaaaaatcctctgttcccgctaatcttagtaaaattgggagtatggtttaattattttaagcctgcctcttagaacttatcactaatatccttgcaggtagatatttaccctaaatgtatgtgtaaatggtcaatggatatagtgatcaaaaggactgcaatcattaagcaagcattttttggatggctaatgtgccaggcacgtgttttgaggggatttaaaataattataattttgctggagtcttaaagatgtggaagagagagagaaggcggacaaggttccagtggaaaactttgtatgcagtaacagtttttaagctggacagttaaataaaagtctcaatagaatcagttggacagtggtatatagtattgggttatgggacaaggagatcggaagatgaactaaaatgagagcagctcaaacaagatgagaggctgagctaaagctctagcagaaagagaggtattaaagatataaaattggctgcaattcagatgtggagagtgagaaatggtgaagttggaggtagtccctaagcaaggaaaaccccccaaaattaactagaaattcttttaatcaattgtattttaagatgaagatttcgaaacagctgtcaagaaacttaatggaaaactatatttggatggctcagaaaaatgtagacccttggaagaaaatacagcaggtatgttaagtgtaaaggacatttataatgcttttaacaagtcttctatttagaaggaataacctagtctgataatttctataattatcgattttacgatgcccatggtgatttaaaaaacttaaaactaacaggtgaaaatattcttttctgggtggtccttgtttttcattagtatgtacaggtcttgttacctgggtctgtggattatgttgatgactaccattgttgtagagaagttgggcttcatctaatttcgtttgcttgtgttgtactgatttttcagataatgagaaagaatgtattattgtttgggaaaagaaaccaacagttgaagagaaggcaaaagcagatacgttaaaacttccacctacatttttttgtggagtctgtagtgatactgatgaagacaatggaaatggggaggactttcaatcagagcttcaaaaagttcaggaagctcaagtaagaacatctctaataaattttccttctagttccattgcctttgttgatgcagtaaactttagaatgttcttatttatttatttttgagacagaattttactcttgttgcccaggctggagtgcaatggcatgctcgtggctcaatgcagccttcatctcccaggttcaagtgaatctccttcctcagcctcccgagtagttgggattacaggtgcctgccaccacgcctggctaatttttgtatttttagtagagacgggatttcgccatgttgggccaggctggtctcgaactccggacctcaggtgatgcgcctgacctagaatgttcttaccaaataataataatgggttgtggctactaaatgggtttaagggtctagactaatcagctatggccaggaaagaaggaattttaattttgttctacacaggggctatatgccaaaagctacaaaacactgatgaaataaaaaat

SEQ ID NO: 95722 - DNA, 2087 bp, Homo sapiens
tcttattgatttctagtttaattcctttatggtttatgaaaatattttgaataatttcagttctcttaaatgttgtgaggtctgtcttggtgaatgtcttctgtgcacttgagaagaaagtagagtctctttttttgctgacattgtgccattggcagttccagtttttttgggctgctgtagcacccaggctgggttacaggagtggcagaaaaactccgtgtggatcttaacctccagattatctctctggtcccaagatccttattcttcctgtttttatccacctttctaaggcttcttagaggtgctctgtatgtttcagtgtaggcatttagttataggttttgaggagagatagggtgaagtgtgtttattctatcttctccagaagcccaagttctcaattccctttgaaatagattatataatctgttttgtaaattagcatttaagtggcatagtattttgtgacttcctctttgcagaaatctcagacagaagaaataactagcacaactgacagtgtatatacaggtgggactgaagtgatggtaccttctttctgtaaatctgaagaacctgattctattaccaaatccattagttcaccatctgtttcctctgaaactatggacaaacctgtagatttgtcaactagaaaggaaattgatacagattctacaagccaaggtaaatcttgatatatgtttatcatgtgttacataagggacaccttatatttgagaagatagacttttaaaggctgatcctgaaaactccctttaaaacacattttgatatgtataaaggggcatcttagtagtagtagtaataataaccagaaaaattatactgtgttgccaacaaataaacatgtttttattgatagagttgtggttattagggaatacaaagcattatgattctgacctattttcctgagtttaaaagacaatagtgttgttacatgtaatttcctttgtgatagtgttttcatttaaatattgtttgaattatattatcactcaagcatattcaaagtgttttaattatgaaggaattgtagaaatattacggatttaagaaagttttatggtactacttaaatgtttcttattttctctaatacttttaaagcttgttaaattaattattcagttacagtaacatatttggtattgctttctctctttttcatttcgattttggggatggaagtgggaagtttaagttgtattgctttgtgtaccttacctactttttaaaaatagccttcagtgtcacaaatattacatttataggcatttgagagtcttaatgtgctaaaagaggaagacgacttcatacctaaaacctcatacattttcatatgaggaaaataaggcatggggctttcagagatcatgcagcttcacattagcagaattaagagaagaccgcaaaagtccttatgacgaagtgtaaatgagacatttggtttttatgagcttatttatagtacagaacacaaaaagtttttatacagatgtttcctaaaaccctgcctttgactgaatgcttgctttagagtatagtaggctccatagagcagaaactgtagtttaatatctggcttaatatagatagctctccttctcatttataaaaaataatttttggcatgcatttggtgtagtattgtagtattctttgtgaatagcacctgtaaaattagtaatactgaagtagctcagaattggatgtattttgtaacttgacagaatttaaataactcccctcatcccagagtatacaagtctctactgttctctctaggtcctggggtaaagctttgatattcagcacaaattaaatagtaaattgttctttttttcttttgccaggggaaagcaagatagtttcatttggatttggaagtagcacagggctctcatttgcagacttggcttccagtaattctggagattttgcttttggttctaaaggtaagatcaagaggagagacttttaatgacattgttacagaatcaagcacaactgaaaaactagttttttgttgcagtatataactaagttagaagttt

SEQ ID NO: 95723 - DNA, 4226 bp, Homo sapiens
tcctgggttcaagcgattctcctgccccagcctcccgagtagctgggattacaggcatatgccaccatgcctggttaattttgtatttttagtagagacggggtttctccatgttggtcaggctggtcttgaactcctgacctcaggagatgcgctcacctcggcctcacaaagtgctgggattacaggcgtgagccactgcgcccagcctaatttttgtattattagtagagatggggtttcaccatgttggccaggctggtctcgaacccctgacctcaggtgacctcggcctcccaaagtgctgggattacaggcgtgaggaatttactagaataatataattttaaacatttaaaattgatgtacatattacatcatcaggaattagagggattgataaaataagagggggatgaaaaatgtaaaaaatagatactagtgtttaaatatcctgatttattcatcagataaaaatttccaatgggcaaatactggagcagctgtgtttggaacacagtcagtcggaacccagtcagccggtaaagttggtgaagatgaagatggtagtgatgaagaagtagttcataatgaagatatccattttgaaccaatagtgtcactaccagaggtaaatgttaaggaattaaccttttactaataacttatttttcatttttaagttttaccctggcttgatctgtcagggtataattgtttgcatttaagaatgtttactgtttgaaatggaagctctatttattagatgtctagcctttaagtataaattatctttttacagtttttacataaatattggtttgtaaattctatatgtaattattggtaagaaataattttttcttatgtttctagaatatcatgtttgtttttataacatgattctggggaaaaattaacctcatactcactaaagtcctttcaataaatgttaaccttgtatgttttttggacaagaacattgttctaggaaaattactttgtcattttttaacctcagtcagtagctaatatttctcttcagtagcaaacacttttgaaacctctctgtcctataaagaaaagcatttaatttccaaagggaaaatgaatattatataaaagaaaatgtttaatgataaatcaggtctttactccctcagccaaatcagatatattcctagccctaagatatataaccagttatcacattaacaaattctctttgtcatcacaaagaaaatgccttaaaagaatttggatctttgaaatttgtcatggaatttattataagcagcagcttatagagaatttcatctcctattataggtagaagtaaaatctggagaagaagatgaagaaattttgtttaaagagagagccaaactttatagatgggatcgggatgtcagtcagtggaaggagcgcggtgttggagatataaagattctttggcatacaatgaagaattattaccggatcctaatgagaagagaccaggtttttaaagtgtgtgcaaaccacgttattactaaaacaatggaattaaagcccttaaatgtttcaaataatgctttagtttggactgcctcagattatgctggtgagtttttacattcaaatgctacttttcattttttggacttttctaaaatctataacaaacaaaacaacttataacagttattttaatactaaggtcactgcttcccctttccctccctgccagatggagaagcaaaagtagaacagcttgcagtgagatttaaaactaaagaagtagctgattgtttcaagaaaacatttgaagaatgtcagcagaatttaatgaaactccagaaaggacatgtatcactggcagcagaattatcaaaggagaccaatcctgtggtgttttttgatgtttgtgcggacggtgaacctctagggcggataactatggaattattttcaaacattgttcctcggactgctgagaacttcagagcactatgcactggagagaaaggctttggtttcaagaattccatttttcacagagtaattccagattttgtttgccaagtaggtattattaagtacataccacaattgaggtcttgaagagtgcaccacactaatgggaaatttgagtgtttttccttgacctcatcctgtagttttgttaaagatttctttaggttttccacacatggaatcacatggcatcactacccattccctgctcctgcctaaaactttcaacctaaaataattgaggctgggcacaatgactcatacctgtaattccagcactttaggaggccaaggcaggcagattgcttgagccccggaatttgagaccagcctgggtaacatggcaaaaatctcgtctggacaaaaaaatacaaaaattagccaggtgtggtggtgtgcgtctgtgatcccagctacaaggaagctgaggtgggagcatccaggaggccaaggctgcagtgagctaggtttgcaccactgcactccatcctgggcgacagagtgagacagcctgtcattaaaaaaaaaaaaaaaaaaaaaaaaaaaaatcaaattttcagtacttgagatctagtagaaactaagggatgggaaaaaccttttcatttttcatcttctttccaacaatatgaatttcttagttttcaaactatactcaggaaagctgggctttaggatttaacatgtagtgatgagttctgtgtgtattttaatattttactcaggattcctattaattgaaaaaaatttttaacttttttattataaatctttttttcagggaggagatatcaccaaacatgatggaacaggcggacagtccatttatggagacaaatttgaagatgaaaattttgatgtgaaacatactggtcctggtttactatccatggccaatcaaggccagaataccaataattctcaatttgttataacactgaagaaagcagaacatttggactttaagcatgtagtatttgggtttgttaaggatggcatggatactgtgaaaaagattgaatcatttggttctcccaaagggtctgtttgtcgaagaataactatcacagaatgtggacagatataaaatcattgttgttcatagaaaatttcatctgtataagcagttggattgaagcttagctattacaatttgatagttatgttcagcttttgaaaatggacgtttccgatttacaaatgtaaaattgcagcttatagctgttgtcactttttaatgtgttataattgaccttgcatggtgtgaaataaaagtttaaacactggtgtatttcaggtgtacttgtgtttatgtactcctgacgtattaaaatggaataatactaatcttgttaaaagcaatagacctcaaactattgaaggaatatgatatatgcaatttaattttaattccttttaagatatttggacttcctgcatggatatacttaccatttgaataaagggaccacaacttggataatttaattttaggtttgaaatatatttggtaatcttaactattggtgtactcatttatgcatagagactcgtttatgaatgggtagagccacagaacgtatagagttaaccaaagtgctcttctctagaatctttacacctcctgtgtggttacaagttaactttgtaagtagcgtaccttccttccttaaaatatctagcttcctgtgccctttcatagatattcgattaatttttacattttaaacaagttgactatttcctttaggggttttgtttcaaacttttctgtcatctgtctctactacctcagaaactgcagcttggttctgatgatagaaattgaatttttccttgtagttattgtgataaagtatgaatatttttagaaagtctataccatgttctttcgttaaagatttgctttatacaagattgttgcagtacctttttctggtaaattttgtagcagaaataaaatgacaattcctaagagccactgacatccaaaaaattcattacttacgcttcgggttcattctaaagtaaggaagacaatttaaaggcagtaaattcaaactgctgcataatttccagagctcctagtttctcaagtttgatacacaccaaaaacgtatttggaaatggcttgtatcaaatgttaggcaaattgctaaagaaaagaggatgttcttattggcctactcaatatggaactacaaagaatc

SEQ ID NO: 95724 - DNA, 1027 bp, Homo sapiens
tccttcaatagtttgaggtctattgcttttaacaagattagtattattccattttaatacgtcaggagtacataaacacaagtacacctgaaatacaccagtgtttaaacttttatttcacaccatgcaaggtcaattataacacattaaaaagtgacaacagctataagctgcaattttacatttgtaaatcggaaacgtccattttcaaaagctgaacataactatcaaattgtaatagctaagcttcaatccaactgcttatacagatgaaattttctatgaacaacaatgattttatatctgtccacattctgtgatagttattcttcgacaaacagaccctttgggagaaccaaatgattcaatctttttcacagtatccatgccatccttaacaaacccaaatactacatgcttaaagtccaaatgttctgctttcttcagtgttataacaaattgagaattattggtattctggccttgattggccatggatagtaaaccaggaccagtatgtttcacatcaaaattttcatcttcaaatttgtctccataaatggactgtccgcctgttccatcatgtttggtgatatctcctccctgaaaaaaagatttataataaaaaagttaaaaatttttttcaattaataggaatcctgagtaaaatattaaaatacacacagaactcatcactacatgttaaatcctaaagcccagctttcctgagtatagtttgaaaactaagaaattcatattgttggaaagaagatgaaaaatgaaaaggtttttcccatcccttagtttctactagatctcaagtactgaaaatttgatttttttttttttttttttttttttttttaatgacaggctgtctcactctgtcgcccaggatggagtgcagtggtgcaaacctagctcactgcagccttggcctcctggatgctcccacctcagcttccttgtagctgggatcacagacgcacaccaccacacctggctaatttttgtatttttttgtcca

SEQ ID NO: 95725 - DNA, 1050 bp, Homo sapiens
aaaagcaggcatcaaaaattttagctgctttatgaggacaagaaattagttggttttatgaaagatttctttcatttctcaaaggtaatgtaaattatacactttataaagccataaatagcttatctcttgaagagtatcagaaattctttactgttttattattccatgatgtcaaagaaaatatttccatgagtttgtgtgagtggatttttctgagcagaagcagaaaatagactcattgctactttgtaaatgctaatatgttttaataagtatgttgtaaatgcctttgatgttttgttgttatcttggtagattgcatggtttttataaattacttgccacactagtcacttgtgcttgcatacactgattaaagtttttgtgattgaaggagttcttacttgtaattaattcacgttccatagtattagtgatatacagtccttacaagttttagatgagagttttttttttctcctcctagcagcatgatgcagaagttgaacacttaaccgaagttcttaaggaaaagaataaagaaaccaagagactgaggtcctcttttgatgcattgaaagaattgaatgataccttaaaaaaacaggtaagacctgttttaatatatactgaacataagacattctaagaagtatattttatatataacaaattaaagtcagccttagaacacgtttcagctagagaaaatttggattacatttgttagctttattttaaaatacttccaaatgtaaataaagtattctttagctctttggtctcttctctttatttgttctggcaaccaactgacaaacaaaagaaaaaaacctgataacctgagaactgattacatttttaggtactgatctctggctttaatacttattatttatcactacttatttaacattcatttatttttgagtatctattatatcctaggcatcatgctagactcagaccttcacattgctcatgttctcatggttataaactggtatcacattgcagtatacttatttatataagtattgcaggcca

SEQ ID NO: 95726 - DNA, 1045 bp, Homo sapiens
tggagtcttgctcttttgcccagattggtgtgcagtggtgcgatctcggctcactgcagcctccacctcctggttcaggtgattctcctccctcagccttccgagtagctgggattacaggcatgcaccaccatgcccagctaattttatttttagtaaagacaggttttgccatgttggacaggctggtctcgaactcctagggaacttcaggtgatccacccacctcagcctcccaaagtggtgggattacaggcttgagccactgcgccaggcaggttggggaggtttgatttggaattcttttgtttgtttggagaagctctgtccttaacacattttagtgaattactttagtcaaattattcttattacttaacaaatttaaggtttgtctttgaagttttatgaagttgtgaactgaaataaatgatttaatttttgacatataggtaccacttaatgggcaagtttatgaacttttaactgtcttcatggactggatttcggatcatcatcttagcaaagtgaaacatgaagaatctggaatggatggtaaaaaaccacaactcaaatttgcttcccagagaaatgatattcaggagaagtgtgtaaaggtttgttttttaatttgaaatatgtgattcagaatatatgaagattaaaaaaggaaaagccagggccaggcacagtggctcacgtctataatcccatcactttgggagttcgagctgggcagatcacctgaggtcaggagtttaagaccagcctgggcaacgtggtgcaaccccgtctctactaaaaatacaaaaaataggtgggcattttggcacgtgcctgtaatctcagctacttgggaggctgaggcaggagaaacgcttgaatctgggaggtggaggttgcagtgagccaagattgcagcactgcactccagcctgggcaacagagcaagactctgtttcaaaagaaaaaaacaaaaaacaaatttgaggggctgcctctgatgaggcccttcttcctggtctcctgcagagtccagaggtga

SEQ ID NO: 95727 - DNA, 1065 bp, Homo sapiens
atgtacagtcacaaataattttttaagttgataaaattgtcactttccaattttacatattttcaactttaaattagccacagatttcacttacttttaatacatatatttgatttaatatttaaaatagttattggccaggcacagtggctcatgatcctgtaatcccagcattttgggaggtcaaggtaggaggatcacttgagcccaagagttcgagaccagcctcagcaacttagtgagacccatctctaccgaaaaaaaaaaaaaacctgagtgtggtagtgagtgcctgtagtcccagcttcttgggaggctgaggtaggaggattgcttgagcccaggagtttgaggctgcagtgagccatgattgcgctactgcattccaacctgggcaacagagcaagactgtgtctcaaaaaaaaagatatattctgaacatgaataaatatactaagattgtacatatttttaacagcactcgactatgacatcaacattgaggagattgggtgaagacatttttaaaggagtggtaactaaaggaattcaggataattctccacagcattctgtggagaataaaccaaagacagctgctttctttaagagctccaatttgccattgagatttttatcaaccttaattgttctcaaaacagtcactcaaggtaagctttcaattgtacttatggttaattttgagaaacaatagagaatatcatatattaaagcaattcttttatcaaatatgttgtacattttcagaatgaggttttgaattgttttataatggttacacattataaaaagctacttttatttgctgaatttgagaaattgaagtctttagttggattcttgcctcctcccaagaggcctttgattgtcttaggtcatattcccataacaacctttgcctacatctatttgtatttgtcacatcaaattgaaattgctagttaattattttccactagcgaatgtgttggtaaactagtccatgggcaaaatctggcctaccacctgttttgtaaatgaagttttctcccacaaccatgctca

SEQ ID NO: 95728 - DNA, 1042 bp, Homo sapiens
cttctgcaaaaggcctatgtgctctacacgtggttaatagccagtctatgcaatatgattgatgttaaaggtaacatctcctctgtgtccccaaactaatcagtgccccatcttagactatcaacacctacacagtctggccccaggggtatcagttttccacttggtactatcactgctgtaaacaacttcatgggctgagaagcccttactttcataacccccaccttccatccggggctgctgtgaactggacaaccctaaagcatcctgacaaccagactcctgttgggcaggcggtatctggctggtgtgagccatttacatcagttgtattgaagggatcaatgctatgctgggacccatccttggtgctcattttagtcgacttcatccaggtggaaagatgcaaccacaccccccggagcccaggtttctgcggattcctctcttttgtctcccttctgtgcagtttctggctccatttttatttgttcaggctgtttcagtgacccttcctcactcttcccctctgtgggccgtgcgcattcctggcaaccagtgctctgtcggcttttgcagttgccactggctggctttctggaggcagcctctcgtctctgcctgggtccctcttcctccaacttgctcagtgatgagtggggctcagagcctcactcacaggctgccctccgcaccgcgccaagctcatgggaggggctcgagacctctgcagcacctaggcacatgcctgcctttcccagtgaccaggcccagcccagagctgagcccacagctgcagagatcaccagtccccaggctgaccaattctttacaggtgtaggctgaagctccaacccactgcacttttctctatcgtgaaatcggatgtgaatttagggtgcagatcccaggaagagtgatgacgcctggggataacagtgtgtcttgacagaagagttaggacccaaagccagcatctcccaggagaaagcaaaatagtcattttctagaccccggggaacaagtctcctgacagtat

SEQ ID NO: 95729 - DNA, 1048 bp, Homo sapiens
ttttttttgagacggagtctcgctctgtcgcccaggctggagtgcagtggcgggatctcggctcactgcaagctccgcctcccgggttcacgccattctcctgcctcagcctcccaagtagctgggactacaggcgcccgccactacgcccggctaatttttttgtatttttagtagagacggggtttcaccgttttagccgggatggtctcgatctcctgacctcgtgatccgcccgcctcggcctcccaaagtgctgggattacaggcgtgagccaccgcgcctggccgcaaatattcttaagcttggagacttcacgattccacagtgagtaactggaatcgccatcctgtgtgcagtcggcagctcaggataagaatgaaacttcttaataatggctctgcttccctccaaacaatgtgttttccatgatctctctggtctattaccaactatttgtggttggaccaagtatgaatgaaagaatgcacttagagtttgatagatgggctaggactggtttcagttttgtgatctggatatgtttttgcttcttgatgtccttcccttccccctacatcctctccagggctttagtttgtttgttacaatgagattctacatgatttttgtatttataaatttgcttctaaggtgaaccccactggctgtgggggatggaggaggcctactcttctcttgtgtctgttaaatccttaaggaattatttttggtccaggaaaactctgatgcctctctcttttttttttcttttactttttttaaagagttggggccttgctctgttgcccaggctgaagtgcagtaacatgactgatcataactcactgcggcctcggcctcctgggctcaagtgatcctcccacctcagcctccctgagtagctaggactacagcacaggctgcaacccctggctaatttttaaaaattttgttagagatggggtcttgctgtgttgctcaggctggttccaaactcttggcctcaagcagttctcctgcctcagcttcctgagtagctgggac

SEQ ID NO: 95730 - DNA, 1038 bp, Homo sapiens
agcccagccatcatgtgaggaagcccaagaagccctgtggagaagggcaaaggctcccagtaacagttacagctaagctccatgtgattgagctttcttggaagtggagccaccagcaccaaccgacccacctgcagcagagctgttcccaccaagctctgttcaagttgcatatttgtaagcagtcatttgactttactgttttaatacactaagtttggagcaagtttgttatgtaacaatagataaccagaatactgttttttctgtaatcctgtactgttgctgtgggaatatgccagtgtctaatttccttgtcagaggaagtgaggtcaagggaatcttgccctagaaatacatgtgttgagcagatgtctcaagcatgagatacttaagcatctccaggaaaaggcaaattcaggttcattctctcttactggcctgctagagaagatccttaaagagggccagtgtgggcatctggagaaggactgtaggatccaggccatcagacagaggtgtctttggccatgggcaggtggggttcatgttcacagaggcccgacatcaacacggacatatggacccagagtggcagtgctggccccagcacctgtagacccacaccaactttccgtggcagccagtaccttaaacaaaacccacaaatgttgcccaactttttctactgttgccactgggaagtgggtccaaaccctctgtgctgtggtctgcctgggcatcatagttgtgtacctgaggctggtggtctcatatgccgtggcatcaacacctgtttatgggctgtaggaaaactgagaggtcatcacattcagagattcccttgtgccaggtcctgcgcgggtgattttggtgaccatgactgagttttcttggctccagtggtgtgctggcaaacgtttaacagttggcttcctaggaagatgccctgagtgatagtgtttgtccatttccagggtgtaaacactcccacctggccgattccaagctgcttatgtgatgccatgggttgggaga

SEQ ID NO: 95731 - DNA, 1148 bp, Homo sapiens
gatgaggggggaggcaggtctccaaggggaccctgagacccatgcctgcccccaggaggtgtgcggggctgggcggaggaggggagaagggagaactgagagcctgcagcatgtgccagtggaggaccaggtgaatgcagaccccactcactgggcacgtgtttagtgaatgcatgtgaggtgccaggtgtcttgtacagatggggagttttgtggtgggacaggcttagagtcctcctctgctagagcttatggcttcatatgatgatagacattaaacatgcgcaactgctgatggggacacacgttgtcagggacgcatgagatctatcacgttgcagggtaggagtcacatttagaaggtcatagatgtccctttcatatggtgacagggtatgcaggttgtgactgaaatccagatatgctgcttgagaccaggctcagcatacatgctgattgcttataaaggggttgcttgaagtgaaaggaaacaagtaggctgctagatgaagaatatgggctctggtgtggtaggactgggtttggtgcttgctttagggctatgtgactttctgtatggaaaatggaatactaattatgctggcaaggataatacttaccatagttctgggcttataaaagagtgccagtaatattacctcctatgtgtgattattattaacattactgctattttattatctttattgtcatgtcaaggaaaatcatttgtggtagtatgtcaaaggcaacttgtagttctggaaatcttctaggatctggatttcttagaaagttaaaaagtcattattccttggaacaaacattatggagatttgagatttcaagttcattggtcctaaacatgttatcattttttttgtatatcaaaagtgaattcctaggtgtgtgcccaaaagaattaaaaaacaggtggtcaaacaagtatacaaatgttcatagcagccctatttacacagtagcgaaaaggtgggaccagcccaagtgtctatcagtggatgagtggataaacaaaatgtggcctgtgcctgcaatggacttttattcagccatcaaaggaaatgaaattgtcatatatgctgcatcttgtgtgaacctcaaaaacattatgctcaaaaaaagccagc

SEQ ID NO: 95732 - DNA, 1646 bp, Homo sapiens
gttggggaattatagacataagatagtattttattgaattaattcttaggttcagttttttagaacaaattctactgatactgattttgtgagaatttttattttaataagggaaccaggctgtcgattcgaactcctgtgcattgatgtcagagcttgtgaaaccaatggtggacgtaaagacgcagagaaaggtagagagggccacagtgcaagggggcagccatgagtagcatgtggatgataatcgcaaggcgtgtaggtttggggtatgtgttaaaatcagttacccaagttttagaaaataagtttatttttcctttttgataatttccttctgtactttgtgtcccttgttttatttctcccacttaagtatccctgtcggtttaactatttggctcttgaggaaattcatcatgccttgttctattcagaatgctcatttgggggactctgcctcagtttactctagctacctctgtgctagcagcgttgcatgctcccatgttccccacagagcaacacatctggtttaatgctctcactgcatctatttcagacccattttcagaatattgcaactcaactttaaaataggaaaacataaccttggcccattggtggctttcaatttttaaatatggagaagtaaaccacaggactttggcagattttattggcttatatattttacaggtatttttgtttgtttgtttgtttttttggaaaagaggaaggaattctcatgtatgatctttcaatgcaagctctccaagggcatggatctttatcttgttcattgatatagccatccccagagcctagagcagttgtctggtacatagtaggcatgcaattatttttgaaagaataaatagtataaaagctgtattttattcaagcattgaatttagaaagataaactataaatttattactgcttttcaacatgctttggattttaaagctaatggatcttttattaataccttttttcctttcatcttaacccagtgttactaaaattagatttcccattttttcccctatatgaaagataatttacatttaccttgtaaaaattatcaccctgctccacttgagaaccctgctgttgtttgcaaaatcaggaccaagcccatattttttgagagctctctagaagaatttatcttcaagaaaatatggtttggtgtttttggttttttcttttctttttcaaagtcccatggccagatatcctataatatactagatgcatgtttgctaatttttacttgaattttttttaaattgtaccaatcaaaaggttctttttctttccagctccaattttttgtaaaacagaagttccagagcacagaaggtcatcatcacaagcaaactttattaaaaaaaaactagaagtgtgctttgattttgctgttatttgttttatcacttctatatttggtgaacagccacagttactgatatttatggaaaagtactttcaagtacaaggtcaatacataagccagagtgaatgatactacaagttgagcatctctaattcaaaaatctgaaatccagaagcttcaaaatctgaatctttttgagcactgacttgaccccacaagtggaaaattccccacccgacacct

SEQ ID NO: 95733 - DNA, 1061 bp, Homo sapiens
atcacacctggctaaggatatgtaatttgaaattaaagtccataggacccactgataaattatttttgcatatgggatttgaaggaaagagagggatcaaggataactcagtcaccactttgacctagaaaatggggtgactggtggtgatcgttattgacctgaggaggatgggaatcagagagtttaggggtgtagttggtaatccagaggttttagaaatgttacatttaagctgcttattaaatattcaggtgaagagtttgagtaggttattagacacatgatgaatctggagctagggagaagttagggctgccatagtaatttgggagtcagcagtgaataatactgggtaaaatcttaagtatttttttaaaaggctctgctaaatgctagagattactattattttgcatggagtttatgttcttgtaggggagttcaaaaattaaacacctaattgcacagtacattgtagctgtgatataagcactaaaggagaggcagacagtgtaaaatgggttgtgtgggtgggggggttccaaatttaagctggaaaattcgggaagactttcttgaggcagtggctattttgagctgtagtaacttggggaaaacagagcaagacatatacaaagggctgaagatggagagagaatggcatctgtaagactccggaagaagatcagttcactgcagtacagcaggacagatgaggcaggcctgggctcacgtgagatgagagaagagaacaggcaggcagcagctgtggaggccctggggaggattttgatctttgtcctaaggggaaggcaacgctattttaggaataatataatatttgcattttaaaaattattatttgctctaatgtgaaggaggtattgaaggggtgttcagagatgcttaggagaggccagttaggagagcatttctttgactaaagtgagatcaatgaaaataaagagctggacatatttgagagatgactagaaggtaaaattggaagaacttagtggttgtttggatataataaagtgagaaagcaggaggctaga

SEQ ID NO: 95734 - DNA, 1064 bp, Homo sapiens
tgttttccatgtgaaaataaaactgtaatttgtgagtaatattgctgctaatacactttcacttgtgtcttccaaaaagacttcaaacaaggtgaattttcaaaaagtccagtatgagaaaatgtttagttttttaagttggaaaaggtgtaaggagaatttatttttaagcatatttttctttcactctgctttcaccaaaataaagtgatagatttgtgagactgggatataccttttgtgcagccatatgtaattgccttagaaagatgacaccttcctaccctgtctttataaacatgagaagactttacagcctccctttgcatgctgtaaaatcttaaaatctttaaggaggtctcttaaaactagtatttatgctccttctctctcatagtgtcaagttacattcatataacttttagtttagtacaatggaaggtgactaagttcttaattttactttcttgaagctaacacatttttaaaacacctggttgtgttttgtaggatcatgggttttgaaatctgacaggcttggttggccatatgtccattggagttactaacctccctgagacttaacatatctacaaagttaggttaatactgcccaccttaagggttgttgtgagggataaatgatgtcacctttgttaagcgcctaacagtgactttcaataattgttcattccatttcttctattttccttttctgatttttcataccacttttatattagtgtacctaaactaaatctgtaaaaaaaaactgactaatgtaaatgaggtgatcttaattcctatatgttaaattgtctttacatctaattttatttcttgtgctcaactagaatattcagaaagccaccattaagaaactaaatatgtcaattttaaaatattaaacatagtaattaataatttttacattagacttttcccctgtattaatcctcaacttcagacagaccagtctactccctgcccctgaacctagctattgcattttgttcagaatcttttccttttctaagccatttcttcccactttgcttgtccat

SEQ ID NO: 95735 - DNA, 1052 bp, Homo sapiens
ggaactgtttgctgttattttcacttggaaacccagatttgtttaatgagaatagttaagagtagaaaagtgaattgcaaaggcagtggtttatcatatcagaactgaatggaatgctcacacaccattcttggaacagcattagcacactgctctgcacatgcactgtgatttgatttgcatcttgaaggctgaataacctgagatagccagaaggaagactgcatttccagggaggagttacctgagtagaggatgtaattggcctttcctttgtttataattaaataaaaataaaaacgtgccaccattactagttagatactgatgtatgcctttcttctttacttaggctttttgtgccttataaatctaagaggcaaagagtcatggactttgacttaaatgtcttttgagttattgatgcctatgcattttctcagttagttaaataataagccaggtaccagtaattacaaattagactgctgccagccccttcgagcagtctggcaagtgtgggaagctttgtcagaaagggacccagcatgtgaatgactatgagaatgaatcagtgtaaattcaataccatttcaagcacagattgccctgatggtttcggaagtacaaatgatactgaatttaggatagtttgacttaggatttctcaactttatgataggtttattgggatatgaaatgcatttcagctaatattttcaacttatgtgatggatttatcaggatataaccccattgtaagttgagaagcatttgtatagcttttgcgcatgttctgcacatttttttatcactaaagttaatctgttcagcatagatattaactgtttattaattagtgaaaatatagacctcaaacttctaagagttgcacagatatcttaaggtagcacaaataatgttgtattaaacatttaaataatttttcagctaccaaccaatagttgactacatagatgctcagtttgaggcctatctccaagaagaactgaagattaagcgttctctctttacctaccatgattctcgca

SEQ ID NO: 95736 - DNA, 1004 bp, Homo sapiens
tttttttgtttttttttttgagacagggtctcactctgtcgcctaggcaggagtgcagtggcgcaatctcggctcactgcaacctccgcctcctgggttcaggtgattctcaagcctcagcctcccaaacagctgggattacaggtgcccgctatgacacccggctaatttttgcaaaagtagagacggggtttcaccatgttggtcaggctggtgttgaactcctgacctcaggtgatctgcccacctcagcctcccaaagtgctgggattacaggcgtgagccacctctcccggcctaactttactgattttaagtgtacattcaaaatgaattttcagaagcatatagcatgttgtaaccactagcatagctctaatataggaaatggccgtagtcatgggtattttgctgtcctgcatatgcatattattctttagccagggacttgggggccctctccagatgtgcagtgcttcctgcctgtgcagctttcttctcttctgttccaacctacagatgttgcttttgcctccttgaactcctgtctgggtttcctcaactcagtgaatggccaggcgctgtgctgtctttgcgctctgcccgggacacttgtccccagtcaggaagctgggacatggtagggctcataaaagagggcatttatttcctttttcagtggtcacagttttatactgcctgtttcccagtgttttaaaacctttttttcatttattttgttcaggtttctagttatttaaggtgagaagataaatccagtcccagttcctctatcatgactgaagacaggctttatttttctttctttcattgttaatgctggactgtactgggtaggacctgcagtattttgtaggatagtcagtgatggtagtgggcaccatcccctcatcatcctaatcccaaagagaaagctttattttttaccatgtaccatgcttgctttgttgtggtttttttgtttatttggttggttttgggtt

SEQ ID NO: 95737 - DNA, 1061 bp, Homo sapiens
agtgtataagtttttattggcaaaaatctcttttacgtgtcattatggaatacacatgaaggagaaaccctcctgaacagagcttagtgataaatcctacctatatctaaaaatcaagagtgagtgcctggttcctttgatttgcaaggagtgtttctagaacaccacccttgctcattcctacaaagattaattccgtgtctcaacctcatgttaacataggaaagttgtttccacatgaagcacccgccaccgtccccccattttagtggggctattatgccttattacctccaactttgttttcattctgcgaatgtagtagtcaaggattgaaatggttcctggagctcagtcccatctgggccgcagtttgctgaagcttcctagtgtccacccctaattgaggctccaagagttgagactctttgagacaaggtaggtttcttgagggacatattacccccaaactgttggaatgtgcctggttaagcatctggattgtgactggcctagttctgcctgtttggacccattcttgtgccatgttcctggtggacctggtccttccaatgttgattctttctttctcattgcttatgtacagcaccctgacacagtcatgcccctctcctgtctctcctctaggtatccctgcctctgggcatgtgttacttccgagtcctgtccatatccttatgggatttttagccactctgtgctgctcctaattttctagttttctgcttactacctttttacactgtgactgtactccccagttctgtagtgggcagttacctttgacgttacctctgtcactttttctacctttgctctacttaaatgtggtagttttttcccccccaaaatactgtggagatagtacttttcctacgttagccaaaactggaaatggaaagttgggagccaggagtcagtgccagtcataacttggaaatgacacactgttgactccttgaatctatattcccccacctccatttttcactgccatttagtcatggcatctacatgtcttggcccacttttactaccct

SEQ ID NO: 95738 - DNA, 1271 bp, Homo sapiens
tatgttgggataagtaaatatattattaaaaacaattccatgtttttgtttttattttttaaaaaacaggttaccagaaaatttaaagttacgccagtcactcccattctattgctgagagaaaatacagagcggtgaagagcttacagtcgggtgagcaagatacgcccccaatgttagctaatgatgtaaggcatcaacaagaaatgtgggggttcaggaaagtggaaggtggggtcgtccaaagcctgggaaagtcttcagttgaaggcgagacagatgggactattagtgagtttcgagagatccaacgcctcgccgccttcgcttcatttttgtctcacgccccacccttgaacgcgcggcgccttttgaccccgccgccgcgccgtagaccgcgctgcacgccggcggcagccatggcggatgtgtcagagaggacactgcagttgtccgtgctagtagccttcgcttctggagtactcctgggctggcaggcgaaccgactgcggaggcgctacttggactggaggaaaaggaggctgcaggacaagctggcggcgacgcagaagaagctggacctggcctgagactctgcgccttccgccccattctgtccccctcatggccaccttgccatgtccgcgccggagccccggtccgccggcgcccagaaccaggcttgccacacagtccccgcctgccatggccggctcttcctggagtgttggtgagcagtacacatagtgacattgcaaagggagactttggggtcgggcggatatcttaggatcaactctggctaggtcgcagaagacaggacttgttcccacagacaccagaaggtggaagttttgtcttccctgataacttgctcttcggtatcttggtttggttcactgggtgtttaatgagaatgtcttaccaacgtgctatgtcgtcgttcatcctgacaacattaaacatcagtatagaaaatactggaaagaacaaaagaaaaaaagaaccagggaggtgatcttgccacccccaattcttttcagtaacatccttgttagcacatcttcgccttggcgattgtaaactccaaactgaattcttaggttgttggcagcctggtaaagtggaaagagcagtggcctggaagtcaggaaccttgcatccagtcttagctcttcagaagagctgtgcatgatcaattttcaggacctcagttttcttgtcgtaaaccagatcttatggttcatggtttaataccacagtacggcttg

SEQ ID NO: 95739 - DNA, 1033 bp, Homo sapiens
gctctctcctgggcagtccaacctgtctacttggtcctggtgcatatgcagttaggcttgacagaagcatttgtccagattatccaattctagcagtattgtatgtatggctagccagaagcagatagtttgggtttttatttaaagggagagagagaaaattttttgacttgcagtattgctaaaagattacttatcttattttttggaacaagatgtataagacagttaattgggtctttaatctctctcatgtataatagatatagtgtttccatacttgctgcattgtattgtgtttaggtgagagttgttatactaaactgtccaagcctgtggaagtcagatgcaggggtggggttatcctgcatattgaaggctacattttagccattatttatgctttgtctttttcaggcttcctcatttggatatgtggaatgaattttttcatgttatgttgaatattccagattgtcatcatcttccatctttggatttgttaaggcaaaagctgaagaaagtatttcaacaacactatactaacaagattagggccctacgtaataggctaattgtactgctcttagaatgtaagcgttcacgaaaataaaatttggatatagacagtccttaaaaatcacactgtaaatatgaatctgctcactttaaacctgtttttttttcatttattgtttatgtaaatgtttgttaaaaataaatcccatggaatatttccatgtaacttagttgttataaatatttcaacaaaatatacaaccccataaggtccctatatagcaggctgattgggctgcttctgggatgcaagcatttgtgagaataattcagacatgagcattctctagaaatcactttttaaacactgacctgtttaagccaaaaaagggccaagacagctattttccaaatttgaagtttggtgtctgtgtaaacacacacacacacacacacacacacacacacacacttccctaacatttccaagggacttcaagtttttatgaataaa

SEQ ID NO: 95740 - DNA, 1433 bp, Homo sapiens
aggccagcccaatttcctaaatcagggataacagggagacctgcatgcccactccaggcagagttgagcacatgttggatatacctgggatgctctcaggcaggatggtgggtttgactgtaatagatggtacagccagattcctaactggccagatcaagaaatggatcattattattctaatggaagactgctgaattttcaaccaactagaatattaggtgaccagggaggagaatgctaattgggataaatgaaatattttgaacctgggtttaacaaaaccaactgccaagttccctggtgagagctatgtctttccaggagcccatggtaaaaggggcaaagatttggtgggggtggggaggggtcttgtttctggtatgttgtcactgctagtgaggccttaggagatggtcatcttctatcctgtggatgtggatggggctggagtgttcttttcaattatgaacatatcacacaacaagaggccatgggggcgagttagagaactacgaccagagtcccaggggagtgagctgggaggacttccaagctgtctatgtggaagagggcttagagtgttgtgtttgtcctctgtgtgacagaatgaaggacttgagagggacatggtagctcaggagggcagagcttttcaagagactggaagcctgtggcaaagcctagatattcagtaagacatgttagtggggcgattgaacaaatgccttccaaaatgttttaaaagtaaaatcctgtgagtatttaacttgctgcctaagttagacaggcatcttgatatagtcatgtgtaaattactatttaagtcatatatacctctatcttcttcatagatcgattactttggggttgctgcaacagtatattgcatgctctttggcacttacatgaaagtgaaaaatgaaggaggagagtgtaagcctgaaggtctttttagaaggtgagtattagcattggtgctgtagtgaaaagagaataactaaagtagaatgttgggttccatctggcaaaaaaaaaaaaaggatctctgccaccgcatggaaatcctatgccttgggcaatatggtgacaggacagtcctgggcactgggcacagggagcaagctgcatagctttaccacttctctctccccactggggcagctgatgtcctcactgaaagctcctggccaaatggttgacatcctgtacacacgcaaatgtttccacccctaatcacctaatgtcactggacctcaggttctcactggttttttcttttttcttttttttcttttttttttttttggtctatggaaatactgatcctatttttgtcagatatttgtaagaagcgaaggaaatagtgtatgtgaaagtgcttcataaattataaagtaatatgaatagctctctctcacaggacagtccta

SEQ ID NO: 95741 - DNA, 1411 bp, Homo sapiens
acttctttgtaaattgaaaactatttaaaataaaaggcgtacataaattaaaattttcaattatcttctaaggttctaagctggtctatgtccatcaccttcttggagaaggagcctttgcccaggtgtacgaagctacccagggagatctgaatgatgctaaaaataaacagaaatttgttttaaaggtaaatgacctgagttgtcttttgtatgatatagaaatgaattttagaacttgagtttgccaagaaattttttttctttaagatagtggtgtttttatttatatctacagttggcaattaaaaaacaaaaactacaaaagatttagaatttttttcccactaaaattgtcttggagcaagccccacattgcagcaacagttcatagcttgtcatcactatcaacaccacatcttttattgggatagaggttgctttattgctatcatttttcagaatacgagattggatatgaatttcacatacctgatttgcaggtccaaaagcctgccaacccctgggaattctacattgggacccagttgatggaaagactaaagccatctatgcagcacatgtttatgaagttctattctgcccacttattccagaatggcagtgtattagtaggagagctctacagctatggaacattattagtaagtattcatttttatgatgagcacatgaatttaaaatggatttttggcttgtaccttgcacgtacttttgtggttggggcttttgtggagtggtgggcaggggcaaagctctcaatttgaaattttattaatcttgtgcaactaactcaggattccactttccattgttcctagaatgccattaacctctataaaaatacccctgaaaaagtgatgcctcaaggtcttgtcatctcttttgctatgagaatgctttacatgattgagcaagtgcatgactgtgaaatcattcatggagacattaaaccagacaatttcatacttggaaacgggcaagtgttatgcttttaacagggttcttctcttcctatttccatagcagcctttcatcatttgtgctcatgcagcctggctttgtttgtgtttaatatagatttttggaacaggatgatgaagatgatttatctgctggcttggcactgattgacctgggtcagagtatagatatgaaactttttccaaaaggaactatattcacagcaaagtgtgaaacatctggttttcagtgtgttgagatgctcagcaacaaaccatggaactaccaggtataaaactaaagtgagggacttggaaatatttttctgtgttgcgcttatcagattttcaaaatgaatttggggatctaggtagtttgaggtggtcttttgaggagcagttgaaggagagatgagcctaaggccaac

SEQ ID NO: 95742 - DNA, 1120 bp, Homo sapiens
accatgttggattagtatttgataactgccactaatataattttttgtaacattccaggttggagagaaagctttttcttacttttagaaattatttctcttttgtggacccaaagtatatctcatatatgcaaattgcacataggtagtataagttttgtggatataagtggaaaagaaattaaataatatgtgtctatctgcgcacattagaagtaactaatgtccacatctgcccttaagacatgtatccctaattgtgttaaagatagaatctagccgttccagttgagtggagcaaatgcacctagagttgattccctttgtcacaactaaatattgatccaaatttgtagatctaaaatggcaaataataaactgtgcagagctaccaattttgacttttaaaaatagttcttttttattttgaattaatactcttataaggctttgaaagcttacttagtaaatatctctactcactttgtctataatttatttggtaaagttcttgagtactcaattcatgttccctttttttttttttttctcattcctttaagacttcattgttgggaacccatgggatgataagctgattttcaaacttttatctgggctttctaaaccagtgagttcctatccaaatacttttgaatggcaatgtaaacttccagccatcaagcccaagactgaatttcaattgggtaagaattatttggataatataactttaaattcttgtttctctatgagaagttgatggtaacgtgtgtgtgtgtgtgtgtgtgtgattctcctatttgccccccaacctccaatagggagttgtatctgtaatactaaactgatcattttgttaagccatgattgtaggattgtgcttgctgttgggactataactcctataactcatagagggcaatttgccaatatctattaaaattaaaaatgcatttacttttaaagccagctatccacttttaaggatttcctatagatattattatatacttctatagtaaaatactatagtaacattggcaacagaacaagaaagctcactctgtactgatagggaatgagctccaaaacataccatactgttaaaagggcagag

SEQ ID NO: 95743 - DNA, 1051 bp, Homo sapiens
agtgaacgtgagggcctaggacattactgtgcactgctgtagacttcagaaacactatagttaggttacactaaacttataagaaaaatttttcttcagtaataaattagccttagcttactgtgagctttttactttataaacttaaaaagttttatctttttgacttttgtaacaacacttagcttaaaaaacaaacacattgtacaactatacaaaaatattttttctttatatcattctataagcattaaaaaaattttttttttcactttttaaacttttttgttaaaaacgaccacacaaacatacacattagctgaggcctacacacccagggtcaggatcatcagacatcactaggagactggaggttttcggctccattatgatcctatggggccaccattgcatatgctgtcctctgaattgttgttatgcagcacatgactatatatatggaagtgtactggagtgttgtattgtgattgacattttctgtttgtttcaatgttataaaagcagccatttttggaataaagttaaatattcagtcttgatgatagtagtgtcgcatagatgcagcttggagaaataaacccactcctgacatttcctactaaagaatatcccatgtattacctcacctatttatctaatataaccatatcttgattttattatttctgttcatattgtactagctgtatattttcatagatttgtttgtctaaaaatgctttaatcaacttttagtctgtgaggctattgtgaaatgtcatttctagaatgagaagggaatttcatgtgactgaatccaacagatttctaatcatgtggtgttttggtttctttattcctttcacacgtccagtccaattcaagagaaaagcccaaaacaggccttgtcgtctcacatgtattcagcatccttacttcgtctgagccagcctgctgcaggtggggtacttacctgtgaggcagagttgggcgttgaggcttgcagactcacagacactgacgctgccattgcagaagatccaccagatgc

SEQ ID NO: 95744 - DNA, 1766 bp, Homo sapiens
aggagaggtcagttgaaactttgacaattgccaagcaccatcacaagcttgcttttaattaaaaaaaaaaaaaaaaaagattaaagccttttccatccaggaaaagtagtttaatgagtctaaagaatccttcaaaaagtcaatattggctattcttaagagtatttggcactttggctcgataaacaaaaactaatgttctagtgctaaaaagtagtaacacctgttcagtgaaggagtatctgataaaatgtaatccaatatacttggctgtgtgcagtattataatcacttggtagaaatttattctgtatttctgttcttcctagtttacctatctatagatagattttttttttaattatggagagtaataaatattgccaggttgctttctgatttaaacacaaaatcgtttcaataaattaaatgctaatttagtcaatcaactaattgactacaacatgttaaagtgaaaaacccaaaatctctgccctccagaagcattgtagccttttactctccatgttcttgtcttcaggttctcctgaagctgggtgtagccctgccatccgtaccagtaacttcccatggtctggtcatcctgcccacaatggacttgccactctctcgaccccttttttcttgaaggattataggaattagatgtagagttgaaatgctcacatatattagtagtagattttatttgtttgtttgtttttaagagatacggtcttgctatgttgcccaggctgagtgcagtgcagcctcaaactcctgggctcaagtgatcctcctacctcagcctcttgagtagctagggctacaggctcctaccaccacatctggttaattttaaaaagttattttagggatagggtctcactatgttgctcagccttgcctcaaactactggcctcaagtgatcctcccacctcagcctcccaaagcactgggatataggcatgagccactgtgcctggccagtagtggatttttttaaagtgattttttcctcccatttttttaatcttattatacattttacaatggaacactattttgaaatcataatgcaagtcagtgtcaaaagaaatcctagactttgtaaccatatcaaatggtgtgtgttgtgcacacatgtgcatctaacatatcttgtctctaatttttgaatctttcagaaaatgtggtagcaaaacagtgtacccaggcgactttggattcttgtgaggaaaacatggtggtgccttcaagggatggaaaattcaggtattgtgagggtttatttggttctgccattctcttcattttcattctaacattgtttaccattttcattctagctttgccttttaggctgtaatagaatacctaattttagccttaaaggccaataaagattttatggactagtagctttaagtcagaaggtactctccgtgaatatacatacaacagtgaacctaagcacttgatacatcaggccggtgcttgatgagaaaacatcagagaaacccaaattgaaggacattctccagaatacctggccagtactcctcaaaactgtcaaggtcttgggaaactaagaaagactaagaaactgtcacagatgaaagaagagtaaagagacatagcaactaaatgcaacctggtacccaggactagatcctgaagcagaagttccttagtgaaaagagtggtgaaattgaatgatgtctacagtttagttaatagtaatggaacaaatgttggtttatta

SEQ ID NO: 95745 - DNA, 1008 bp, Homo sapiens
tatttccttagcatattttactatttataatttagcaaatctttccttagattaccacagcctaaaaataaacccacaggagccaggacctttggagaacgctctgtcagcagacttccttcaaaaccaaaggtaaacaaacctgttttatctatgaaatgggtcctacaacccatccgctttattctaccaaatgattatgccagtcagaggatattgtgtatgtgaaactatgctaaaaactatgaaacataggaagaatatgtttcttttaggacattatttaataattattcaagaagaaacagggtatgtgcatattttccaagtgtcctaccaaaattatttattaatattcattactgtggtggtttcacatttatccacaaattctttgaatttttttcctccagtttaattcatctccttttgagtgtggctagatttggtgacttgcttcagacaaaaagcaaagggaaagggaaaattagattacagtagggaaacatgggagattctgcctaatcaagtgattgggttaaccaggaataagtcatgttgacagcagatatcccctaatatgatgtaatgagaagaacatttcacctctgatatccttcccaaaaatctgtaaccccagtctaatcatgagaaaacatcaaataagcccaaactgtgtagggacattctacggagtttctgactagtgttcaaaagtgtcagtacaaaaaagactcggaaaggccaatagacaatgacagactcaaggaggctaagaacacttgagaactaaaggtgacatgggatcctggattggatccctgaacagaggaggcacattagtgggaaaaaaaaggtgaaatccaaactacagttaatagtactatttcatttttacaaatgtgccacagttctataagaagttgacattagaggaagcttggtgaggagggtatgtggaaattctgtgctatctttgtaactcttctgtaaatcacaactttttca

SEQ ID NO: 95746 - DNA, 2898 bp, Homo sapiens
gtttatttactaacactgtagaccctaagtagttccatctgtattttaacaggcttgtaattattgactgattcttttttctttctactattatttcttgagagtcagttaaaaattctaatagatcaagcatttttttgttttgttttttttttgttttgagatggagtctcgctcttgttgcccaggctggagtgcaatggtgcgatcttggctcactgcaacctctgcctcctgggttcaagtgattctcctgcctcagcctcccaagtagctgggattacaggtgcctgccagcacaccccgctaatgtttttttgtatttttagtagagaaggggtttcaccatattggccaggctggtctcgaacttctgacctcaggtgatcctcccgcctcggcctcccaaagtgctgggattacaggcgtgagccaccaccgcacccagcctagatcaagcattttattctctagtgtgtctcaagagttttctcttccagatgtgtgaataagagtactcatgaattcaagccacagagtggagcagagatcaaagaaggtaatgtttaattataataaatgtgtttctgtccagattcctctgtatcactcagaggtgtattttgtggctgtggtttatgaaggcttcaggccttaatgaacctgagtgttagatttcctattcttagagtataggttatttatccctgaaccatttcaaataaatgtagaaatccacttgttagtctcatcttctttaacattctttggaaatgtaatttgtgaatacatttctagtaaatttctcaggaaattaatccaaaacagagtcatctttagtatgttaggtaggaaaggttatcaaaagtttaattaggagtgttacactgttattcggtactactttgttagaggcatttgcataggagataagtcttataaataataagatgcacaggttgggctttcacttctccgctgtgtgactgggacattttttttctggacagtttggtgaggaggagggctgtttgaaatagctggaggttcattaactgaaccaagacttactgagcctgctctgtaggtgccaggcactgttatacatagttagggatgaagtcatgaacaaaaaatctccacccacacagagggggaaagaaatgtactattggagttatggggttgaaatttcagtcaaggtgatatttgggtaaagggctaaagttagggagctaccatgccattagcttgggcaacttttcagacagagggaatattaagtgctaagccctcaagcaggaaaatctctgatatattctaagcacagcaaagggaccaatgtggggaggtaagcagggagaggaggaaggtgaggcctgaccaaacaggacccaggctgtgcagggccttgtattctatgcctgactgcagtggaatgagatgggaagccaatcttaagatttacattgtgactatgaacttgggatacagtggcactaagggtataatttatgacaaagttgctaatctggtataatccagaccaaccactcaatctctctcagccttcatttccttttctgtaaaaggataattttcacctcatttacttcataggactattataaagataaaaatgaaatatatgaaagcactataatactggaaattcttagtgataatttttaacaatgacaaactgttttaattgtaacttacttaaattgtgtgtcttttaagttattctgatttccctactgataccacattttgtctccatttctttgctagggtgtgaaacacataaggttgccaacacaagttcttttcacacaactccaaacacatcactgggaatggttcaggcaacgccatccaaagtgcagccatcacccaccgtgcacacaaaagaagcattaggtaaagtattttatctgagtgtgtagcacctgatgacaagttaatgaaagctcttttgcaacctgtttacaattattctttttgttctttaaggtttcatcatgaatatgtttcaggctcctacacttcctgatatttctgatgacaaagatgaatggcaatctctagatcaaaatgaagatgcatttgaagcccagtttcaaagtaataactatttaaaagctactaagtgcatagcattataggtggttatcacagaaaatatcaagaattatttaagaggtgaccctgcccttgattagcttgtcacataaaggcagggaatgcatgaaataaaaataagacagttcttgacaaggtactcaatgtgtgtgatagatttgcttgattaaagggaaaaaaaaaaaaagaatagtgctaaagaaggacaaaacccccatggataagaagggctgagtactcaaggtgtgacttgagccttcactggtagaggaatggctggggcagagtattagaggaggctggcagctagcccacatttgtctagagtcaggggattcatgctagaagccagagatcatgataaagataagtagaagccaattagactcaggaggacttgaaatgtaaagctaagagcttaattctttcttgaaggaaatggaaaacgaaaccctgagagcgtttattgagtgagtcaggtgacaatagtactgatttaggagaatgattaacaccttgctgatatgtggcagggactcgtgacctgggacttgagtacaaaaccctgttaccatagttaagtcacttcatctcactatagtgacttactgcctagtatttgaaaagctgatattagttcttttctgtcagctgttagtcctttttcttatttgtagttgaagtttaatataaaggatgttttttcctagtacaataattagatgctattttttattctgttgcagaaaatgt

SEQ ID NO: 95747 - DNA, 1614 bp, Homo sapiens
agctgggactacagacacatgcttccatgtccagctaatttcttgtatttttttgtagagacagggttttgccatgttgcctagcctggtctcaaactcttgagctcaagcaaaccaccagcctcggtctcccaaagttctgggattgattacaggcttgagccacccatgcctggctggtgtttttcttaacaatttataagcatacttttatatggtgagaaattaactcatctaactttgtaacactaaagcatacaattacagtcttacactgatgtgagtagcaaagcaaagattttaaatttagagcttgttatgcttcctgttgtgagacaggcttttgtggcagttattattgcaatttatatttgtgtttcctattcttcaaagtgaaaacggctatgaaaagtattttatttatttatttttttccctttttcaagccctatctcatataccaatctaagggtattttaatgggaggaaaaccgtaatgagcttttgataacactgatttgtcgaccttttcccaaaattaagtaaagagaaataagataatacttaaatgctgatacaactatagagacttgttatttcagtggttagaaattataagctgctgatggtgtctgtggttcagaagctacaaagcatccattttgtagagtggtctttttgttgttgactgtacatttcagaatgcttgaagaaggagtatggggaaacttcaaggaaaaaggaatccattgaagacagatgccatgctttgagaagatgtaatgcctgattagtagtattctggacttcatggttttgtttttgttgtttgtttgtttaatatgaaaggttaatccagcacgtatggggccaagtgtaggctcccagcaggaactgagagcgccatgtcttccagtaacctatcagcagacaccagtgaacatggaaaagaacccaagagaggcacctcctgttgttcctcctttggcaaatgctatttctgcagctttggtgtccccagccaccagccagagcattgctcctcctgttcctttgaaagcccagacagtaacagactccatgtttgcagtggccagcaaagatgctgggtaagctgaaggtagtcctagagatcacagtgatgtgagtggcacctgtcaccttctttacatgacctgcattatcaggaacagtatgtaaaagatgaatgatgtctgccttttatttttagataggtatgttgttgaaaaagcaagtggcaaaacattgctcccaatcctttaggcttacttattccatgcttcttttagaatatttattttatactttcgtgaattaaaaattttcagtacctgaaagtcaacagtcactttgtaactgaagaatatacagctgttaggctaaaattccctttgctcactggctttgattgaatacctacagggatcataactgtctagacaattacttgacatgtgttctcatattccttctgtcttcccatagagagcagtttgggattaatacacatgattctgtctctcaaaatgtacctctgcactggaagtttttaccccaattttgagggatttttccagatttcagaaattatag

SEQ ID NO: 95748 - DNA, 2592 bp, Homo sapiens
gagatgggtcttgattgcagtcacatttcccagacctagctcagagtgtgacatggaggtgtctggcaaatatttgtttagtgaaggaatttgagaactcttgagggcagagtagtacctgaggaaaattttaattaaaaaaaaaattagcagcagttgggaatgtcaatcccataatgttcagacactatactctagctactagactatgaattgaagggaaatcagctatggttcttctctactgctgagtaggactttattaaaaacaaaacaacaaccaaaaaaacctctttctttgattagattaagttacaatagttattgtaaggttgttgatacaaacaatcttttgatattaatcataatttaaaattacataaatctacttgggattaaggtccctcttcccctcaagcattttcatattgttttgtgaagtaatttgggtgaagctttcttctcagataagtgaatgctcatgtttgttttctgttttttagggttcagagctttctggagtgatatcttcagcttgtgataaagagtcaaatatgcaagtataatcagtgcattaatctattattagtttcctttaagtgctcttaggtacattgttgtaaataatgtattttcccccattgtagggaacgaagagtgatcacgatttctaaatcagaatattctgtgcactcatctttggcatccaaagttgatgttgagcaggttgttatgtattgcaaggagaagcttattcgtggggaatcagaattttcctttgaagaattgagagcccagaaatacaatcaacggagaaagcatgagcaatggggtacttgcaatcttgtatttttagttattcttatgtcacataaaaaaatcctcatctctgagtaattacttttttaaagaataattgactatgttgaaagactgcaagaaagtcttcatctcatcctatcagaagcccagaaatcattattaacccattttgcgtttgccccgagaaaactgcgctggcagcaagctgcactttttttttctgaattggaaattgcttaaccactagtgtagcagccaagttagtccaaggactaaattgatgtcttggcagcaaactcatagttgaaagagtactaaattagatatccataccagtgtcatcttagctttagtgaaataaatatttaaaaatttttcagtattatctgtatatagtaattctaaacctctaggtcagttatttgaacctttattccactcaggacttttatactatctaagttatttgggctatagccattctgggcctttcttttctgttcattacttttcatactcggttgacaacagagaagacaagtcagttaacacagaggactcattttgtgctgggcatagatgtgtttttctttcacatgctgtgaccagaagttttaagccagactctttgacttgcctgtggcatgactctgttaaccagttgttggaaatgggactgaccacagcatgcttgaagccctgatcatttagtgcagttcacttctacttagaaagtctctagaaatttttatcttataaaaacaaataaaaatttattttaaaatgatttgcacaatcatgattgtttacaagaacagtcatgtatatgatggctacaaaaatctttactattatactgtgctattattattatttttgatcagcatgtagtttttttttttttttagtaatttacatgtcctaaacatgtagtagccaagctgtgggcaggtaaaaattaaaaggtaatacaagtttcacttctaaaaccaaatatgagaaagactaataaaaaaatcggccccctaaaatataaccctttcctcattttgcatgtattcctatgatgacctggatttaaattttgcatgcaaaccatttctatctttcctaaagtaaatgaagacagacattatatgaaaaggaaagaagcaaatgcttttgaagaacagctattaaaacagaaaatggatgaacttcataagaagttgcatcaggtggtggagacatcccatgaggatctgcccgcttcccaggaaaggtccgaggtatgttgtgctcctcatgacacatcctgtgcccagcagcaggaatggcagtttgatttgttcctttctatgtgctgttttagagttaattctgatgttaatttagctagtaactttctgaaagtctaaaataatttgacatagacgttcacaatgtagagtgagagtggaaagttacaaaacagaatggtagtatgttttacatgtttgtgtatgtgtacatgtctatatattcatgtatttatatatagacctttttctggtttttgtacagtgactattgtgtaatgaaaattggagtatagtactctcaataatttatcatttagatatattttttgtttgccattatttcatcttggaaaagcagagaagtgatgagtgtgttagagccacatatattttcttaaaattagtagtgaatgaaggagattggaaataaactcatttaaactgtataatggttgcttaatctttcatattatatgtttgtctatgacat

SEQ ID NO: 95749 - DNA, 1061 bp, Homo sapiens
gcaacttttaaagaaatacagccatttctttttcttagaactaagtatcacatttcagcaataagcattgcctatcctatctggttgtttaaaattattagttaggttttacatttcttttgggtacttcctggcatgttgagttgatcagaaaattgtataatacttattttaaaaacgttttagttgaaatttctgagacagtgtgaatgagttgatttacttcttatgattcctactggaaggatcaggggaatttattatgtgataattttacttacggttttacccttaatttctccgtattttatcctcttttccctcatagctagaacctcagaacctctgcataatgttcaggttttaaatcaaatgataacatcaaaatcaaatccaggaaataacatggcctgcatttctaagaatcaggtaataatgacatttgtagcttgtgtggaaactgggaatggtattgaatggccagcctggctgccttctacatccactttgacatctcatttctttgatctttctcttcatggctctgagctccatgtcagccacctgctcctgtggcaacttcctgggcctgttattctcccacacagctcacctcaaatacaatttgttgtctaacccagaggccctcaccacacggcctcctgtctttactctccccaccagcttttcccttaccaatgtcctttcctctgttctgctggcctctgcataggctctggaaatccctactgggaatggatccacctgggggcttctgagcctggctttcaaaactcagagcctcaaagattgctgcctgttacctcaagtaacagggaggtctcatactcccaggcaatgggtcatactcccaggcaatgggacatgcttccagtgtctgattcactctttatgttttgtgtatctcttatgtttccaggttcactctagcgccaaactatagtgattttagacttcttttcagtctcttcaaacttgggacctcgctacctctagcctctctctcaggaacttcaaaaatactatttcaacagatagca

SEQ ID NO: 95750 - DNA, 1079 bp, Homo sapiens
ctcttgttaggaggaggagcaaacttctggcaactgcccctcatggtggtagtgacattggggttccgtgagaggagaaggagactcttggggatagagctgggacttatggaaaaacactggctgcttctgagttttctgactatgtctgagcgaatgcttcttaaaattttaaatactatttggatcgatatttaagattttcattttaatgcatataaatggtgtatatataaaatgattgatatttaagatttttgttttaatgcacataaatggtatatataaaatgaagtatatcttttgcttgtagaaattatccctaatatcccatgtgcatacctttctctcttctaggatgcttgaagcccacatgcagagctacaagggcaatgaccctcttggtgaatgggaaaggtcagcatttagttattttatttcccttaaacaaactatacactgccccatggaaaattaacattatccatatttttctagatacatacagtgggtagaagagaattttcctgagaataaagaatacttgataactttactagaacatttaatgaaggaatttttagataagaagaaataccacaatgacccaagattcatcagttattgtttaaaatttgtaagtatacttaagatgtataatcaaatctataatcatgttgtacttttgctttttaaacttagattgtaagatcattttaggcttttaattccttgtttctagttctgaagatacagagaggaaaatctgttcattctctgattcaacagacttctgtgccactagtgattaaaaagtatgtaggggctgggcgcagtggctcacacctgtaatcccagcactttgggaggccaaggcaggtcgatcactttagttcaggagttcgagaccagcctggccaacgtggtaaaatcctgtctctactaaaaatacaaaaattaactgggcatggtggcaggcacctgtaatcccagctactcggggggctatggcaggagaattgctcgagcctgggaggtggaggttgccatgagccgagatcagatcatgtcactgcact

SEQ ID NO: 95751 - DNA, 1011 bp, Homo sapiens
tcctgggcatgattttgggccagttattcccaccctatgcctcagtttttccttacataatatggagataacaaaccttcccttgtagaggttgtgggagttaaattctatgcgacaaagagcatcaaatgctcaacacatagactcaggaagtaggagttgatgtttcctcgatgtgcccaggctggggatttggagaaaagagataccacatggtctcttttgcttgccattgtaccaggtagacaggtggctgcagagcccagcacgacgaggcaggccctgtgcagctgcaggggctcagagtactcagtgcgaactgtggagggtccgcaagcagtgccacttgagcaacttaaggaatgagcaagagccttccaggtggggctggaggacctgctaggcaggggaacctgaactcaggatgagggtgtgggagtctgtggtgcactgagggacaccatgacaggcatgggctgggtctcagtgaggatgcaggggaggaaaggaataaagggaaaaagcgggaaccagacctagagaaggcccggagcctgtctgcacagctgcctacagcaggcactctgtggtgccttcaggccccagcaccacatggtgcagctgatccagtgcacagaggctcagcctgcagcactgcagcatggtgcttggcacatatggacacttcacgtcagctattctcacttatttccattttacaaatgagtaaactgaggctagaccatgagggcagtgagggcagggaccaagtccttgatcactacagcctaagtctgactgttgtgtggaatattcaggagatagctgtggactgagtgatgaccagctgacagacagatggacagatagactgatgtgcacagacattgaatgaatgaatgaatgaatgaacgaataaatgaatgaatgaatgaatgaaagaatgtcctgtgcatctgttttctttcttacccttaaaacttggaattaatccacaaaacttggccccct

SEQ ID NO: 95752 - DNA, 1069 bp, Homo sapiens
agacttgctgccctcagcattttcggcaaacaatggggccggagcagggaacgcggccagccgcctgcaatcgctgcatctgcgcccgctcctgtgctccggcgtcctacctaaccccgggaagtcagagccgctgggagtttctgacttactcgaagaagtctgtcctgggcaaagagcacacacgaatagacttcagattagctgcttctctggaaacgcatgtgtgtgtgcaccagttccgcaagctgttgacattgttactgtattttgtttgggggtaccctctaccaaaaaaaaattacacctttattattttaggtgcaatttttttatttgggagattgtcagaaaagtatagaacaaagtatttgggattaaccctaagaatttttaatcgctaggtgagagctaatttgtttattcatcgatttttttttttgcttaaaataatcttagtttttattttacttgcagaaaaaaagaccaaatggcaaagcaaccttctgatgtaagttctgagtgtgaccgagaaggtagacaattgcagcctgcggagaggcctccccagctcagacctggggcccctacctccctacagacagagccacaaggtaatcctgaaggcaatcacggaggtgaaggggacagctgcccccacggcagccctcagggcccgctggccccacctgccagccctggcccttttgctaccagatccccgcttttcatctttatgagaagatcctccctgctgtctcgatcctccagtgggtatttctcttttgacacagacaggagcccagcacccatgagttgtgacaaatcaacacaaaccccaagtcctccttgccaggccttcaaccactatctcagtgcaatgggtaagcaatgcctgggtaagaggcagttgacgtgtggatggttgaatctgcttgaaggctgtgtgtggcatttaaaatccccttttaaaaccccgtaactgatttattccatctttagatgggaatggaggatgtgtcaaactatcaaaccaacttttttttttttttttgagatgagtcttgct

SEQ ID NO: 95753 - DNA, 3427 bp, Homo sapiens
gccaccacgcccagctaattttttctatttttggtagagatggggtttcaccgtgttagccaggatggtctcaatctcctgaccttgtaatctgcctgtctcagcctcccaaagtgctgggattacaggcgtgagccaccgcgcatggcccacatcaacatttttacaaagttactaacttttgtggcagtgatgagttgaggtccaaacattagctttcaggtctgtcttcattaagctaaagtgtgttttaaccaccaggctttacatagtaatgacattttgcttgaaagggaactgatcatttacagaaaatagcttaataatcaaaagtgtaaagaaagatgacaatcatttttgaaaataacacttttaaaaaaatgaactagttcatgaaagcagtaccaacatagaaccatgaaaatggtttgttttctgcctaaattcctctttgtgcttattgctcagagggtttggacatagtactaatcagattaggttgtaggtttttatttcagggattaaaggcagtagtagggtttgaaccaagagtggctaacataaataccacagaggcccacagcaaaatcatggaaggaactgacctggtggagactggtaaattggagagtatttgccccttctatgtttgggccacacctaattgtggctgtgagggcatgtggtctcagggtgggttttcctatattgcaagataacctaggaatgcaaaattgatgccagataccctgtttcaacattgacagctgattcagattttgaaaacattgtacaagctgaaaagaaacatctgcagacttgatttggcccttgaacctacagcatgtgactttgggtacatactttgggtaaccttggtgaggggctgagtctgtgttgatcgacttgctgttccccaccaatggaaaaggttcatgtcttgatcagtagtcaatcacattgaccatttgtccagattagcttgccatacatgaacaagatagaagtaagttggtagagttatcaattaggaaacccagtacagagtctattataatttagattgtacctcatgatgaaggctaactcaacaaacccatcagaacagacactggaacaaaatgacatttctaaataccatccagctctgtcttcataggcttcagtgaggtaaatcaggcaggcctttgcccatgttatagaattggaaagaacctcagagtggtggtcacttgtcagaggttgggcacacctgtgaggtggtggggagaaatgacagacatcccagcagctacacatgctggctgcacgtctcttgccaaatgccaggaggtaattttttagggtccctccttagggaaaggggctggaagttttattattgctgttactactgctcgtgaactcatttcagccttagaagttcttggcttgtagtttttgttgtactcatgaaaatgctcccccatatatatgatcattctcgcttactataacatccttgcttactaaatgagttaacagggctttatggtgtgtatcgtgaaacacacgtgcattaaagaccctctggaaggtattagcttttcacactttcacaacaaaagcttcacacttgtggttattaagctattttctctaaccagttccctttcaagcaaaatgcatacattggtctctgtaggtgatgggttaatgcatggaaatagtttctccttccctggaactgggaatagtgggtgagatagtgtattttttaatgtaaagacaggcacaaatgctttttttgttgataaatactattttacaagctaattataagttaagcactgttacttgagatgaaatatacagggcttcaaagatcataatctaaataattatgcacagctaatggttatacctgtgaagtaaagtagtggatcctgaggtgtaattttatagtattagctgcatttcagtagatggtgtgatgaagagtttaatgcataggattaaatgagaagttacgaggagtttgtttaaagttaatgtaccgaggtaagttttcagtgttaagtttttgggagatttgttttgggagaggatgagttggggttgggggaggaaaggacttagccagatgtgagtttcttaaattgaagcataaaatttacaatttatgtagtccataattttctctggacattctacagtcttagttcatgcctgaagaccactgaaataatgctgagttgataagtggttctcttgactttgtttagtattctttactcaaccctatccatgaagttcttcaatgaagcttttgataatttattgcaaaatacattttccacaaagaagtcattatgattggtttgaactagtggaacacaaatgtgaggttataaagaggttcgccttagccaggggctcctttagctgcaaagcagttttttgctcagcaacttggggtagagatcagtgtgtcttgaagttttgttttgcaaaactttgttctaatgagaaagtcaagtcttaggaggaatgtatagtagttgagtgtttgtattaacactgttttcatattttccttttatgtctctgatttttctgaagacaagttcaaggaatatatttctctgtggggcaacagatacagttttttcacttttcctcaattttagtctccttacactctgggaggattaacttgacaaatgataccttagtgaataactgattatttttatcaaaatcactcacatgtgttggtttactgagtgcctttttggatgagtgttttatgccatatgtgtttttaatggaaattaaagtgtagtcagtacactaaagtgtagtcagtacaattggaaataagagttgagaaaagtcaggatatggaggaatgctccctagtgtcatgttagtaaatgtcttaaattttatacttgttccctggcacattggaattcacagatgggagttaatggctttctttttttttttttttttttcctcagcgtcttgtgggtacttctcttatagctggtacttgtctgacccctcctttagtttgtgagctccctgggcggggaataatggcctgcagatgctagcgagtgcctgacaaagaggagaagcccaggagatgttgagagtcagtccagctctgcctgttagcctttcagacaaataaagttgaagaaggcaggtagcaagaaaaagatcctgacctctgctctgccaaagtgtttttaattacctggatctagctgtaaggtttgccacgtagtggtgacagctgaggtctagctcagcactactcagcagggaagccacacatgcattaagcacttgacataggactagtctgaactgagttgtgctgtcattattgatacacactggattttgaggagacaaaaaagaatgcaaaatagtt

SEQ ID NO: 95754 - DNA, 1081 bp, Homo sapiens
atgatagtctagtttaatattaaagaagttcattggcatatcaaaaatataagaatacattaaactgtcagtagtgggtattgttgtattttcgttacaggtgggcttttctcccttttttctttctttctttctttcttttttttttttttttgagatagaatcttactgtcacccaggctggaatgcagtgccatgatctcagctcactgcaccctccacctcccaggttcaagtgattgtcctgcctcagccttctgagtagctgggattacaggcacccaccacgacgcctggctaatttttgtatttttagtagagacagggtttcactatgttggccaggctggtctcgaactcctgacctgaagtgatccgcctacctcggcctcccaaagtgctgagattacaggcgttgagccactgctcctggccacaggtggtcttttctgtgtgcctttgtgtatgtacacaattgtcataactagtattatgtttataatcagaacagatttaatagataatacttactaaaacttttgctctttataattttaatctttgtttttggcattcccagcagcctgtcactgggcatgcataccttgtttgtgtgattcagtgttaaccgttgtgtcttttgcattgttgaagattttgtccaggctgatcaagctttggtcccatcaggaccatcaccgaaagtactcggggtgaacattagccccctaatttactcttttggggtctgcctttttattttttgcaaagtgagtaatctctcagggaacatctccatcggacaggatcatggatggatttggtgttggcaggttgctcttggtagctgtctcccccacaggctgctcttgggtctggagcaggttttgggtcgggtcctgcctgccctccatggaacctgggcggagcagtgagtctgtctgagcttcagcttcctcagccatcaagtgaggacatagtgctcacctctgagggtcatggggagtttttccataagcaaatcgacagaaagcccctggtagaaactcgcacaggaatctttccttgcccctcaatgagc

SEQ ID NO: 95755 - DNA, 1093 bp, Homo sapiens
gctcttattttttacctgtgtcttggtctttcttatcatggaggtgaaaacagtaatactgaagaccttaatgtgagtttaggagaaaagatgttaatcaccagtttcctgctactggttttaaatttcatagaggaagccacacttattttgtcatcagaaattcttatattttttgtttaaattctcatctccctcccctcttgcccagatctggttttttggctagaaacaacttacagtaacttcaaattaagcattttaattctaaggaatggtcttaagtgaaccaatgtatatagagttttatctttacttttaaaaggtctctaaagcatttttcttcttatggggaaataaattgggtagtttacctcgtcagtagaaaaaatatagggatttgtgtctttgcactaaagtaatttcagggttggtcttcttttagctgtccttagttttgggattatttttgtttttcagaataaaatggcacaggtcagatacttttaatcccctgaaagtaatctaaagctatagaaatggagctgtggctgtcgcagagacttactaggatgaaggttggtgtagaaaaactaaggagtagtagcagtattcagtgtcccgtgtctttccccagaagaacactggcagaacaccaggggcagaacactgtcacacactattcagagcagcgatttcaggagcacaccaaggcgggccaggtggtcaaggggcttcccaggggatgtcatacaaggcacatggaaagaactggtttaggaccaggtttggcacaggttcactgacaaaaagtggggtgatgattgagagggatcatagatttcctttatagtcccaggggcagaatcaagattgaagtggggcttagaagggaacatttcaattccctacgaggaatagcatcgtagcactcagtgttcttcagcgaggacagcagtgccttaggaaatgtgcatctgtcccaggaagcgggcacacaggctgggagtcttagagggctcctgctcaggtctcccacatggtgcaagatgctgggcttctgtcgtgactcagctggggatgtccttgagta

SEQ ID NO: 95756 - DNA, 1034 bp, Homo sapiens
caatctctgggaggcatcgtgctttgtgacacagtgctcttgaagaggtgcctttcatggtgattaagatgggattggttgttcacttaaatatgggctcccacccctccccacccccaaattagggagaaactaagaagctttccttttgttgtttcaggtatttttgaataattaccaagcagccgaagaccacccacgaatggttatcttacgactgttacgttacattgtccgcctggtgtggagaatgcattgacaggttctttgcggagccgagataccatgcagacattttgcttgttcaaaccaacaagacccagcaccgcggtctcctggtgccattattatgcagccagcggttctcttgtggagggggcaggtgacgtttcagaagacaccgagctggatgggactacctttctgttcatcaccacacagcagaatttctaatggaagtttgttgtgaatgtaaaggagggagcattctttgctttttaatatacaaaccatggttttttggagcaggattttgtgtaagaatggtgtttacatgcagtgtgttttccccctcaccttcaataaggtttttcaaaaaggaaatggaaactttttaaccaatttgtgaataacttttgtattaaaattttaagaacctacggcctattctcagaggattatgtaacccctgcagtggaaactgagccagctaacttaaaaagctgccttagtttatttttagagattacagaatttttaaacagggagacgtgtgatatactccctcccttccctactattgcctctctgacctttttaaattatttttaataccaaaagagttcttttgaaatggaactgattaaaagggcagagggtctgttgccagcctgcattgatataccagtcccatttgtaaatatttacgtacctttataaattcagttgcatctgtggcaaaatttcagactatttttgcgtctttcctcatcactttttgtgatgcaactccagtctggactcagatgcataga

SEQ ID NO: 95757 - DNA, 1203 bp, Homo sapiens
ctgaggaaattagagattctatgaattgtaggagtattaaagaccaggctgttggcaccagaacttaaagcgatgactggatgtctctgtactgtatgtatctggttatcaagatgcctctgtgcagaaagtatgcctcccgtgggtatacgtttttaccttttttaaaaaacatttttgtagaaaaaataattaaatcccctttttggaaacttactgcaggttttgtgccttgacaacctctccctatgtgaggtttgtaaaaagtgtcctgtgacttaacacagaaacgcaataaacacacacaaaatagtttcatgagtgattcttcagatgcccttcccaactggttagttgatcaagaattttgggggtgggggttgcggagaaatcaagtttaaaattccttctgattaaaaaaatatagtggaatacaattgtctgccgtttccccttcttaatgtatatattgtgagtatttattagattcgtaggtcatattacttatcaactgagccaaatgtctgtgtgcaattgtgtttcctttaccttgtaaaattttgtacagcataaataagtaaaaaaatcactgtttttctcaactttttcaaaatcaaggattgtaaatattgtagattctttttctgtgtgatgtgtcctactgtttcataatgctgtaacttgtagaaatattgtatatttattttctgcttatttaatgtcttaatttctgaaaagtattaacatccctgtctcccactcccctgccgtcccatgaagttaactcctgagagttgtcgggggtgactggagagctcattgcagaccacgtggtcctccagggtggctctccaccttcgggtcctggtatttccagtcaagtgggtttcaattcttgggctttgccgcccttatgatgaagtgtgtgtttgatgccagtgagaaactcagtctggcaggctacaaaattctactccaagaaatacccagcaaccttctgtttgttccaaagcaactagcttatcatgcaagcaaattttgctgactccaggctttatctttaggaaaacaaaaaaaccaaagtattatcagcaggtgggaaagatttttctattgaaaatttatccctgacaactcagcgtttagaaaagaaataaaatgtgccacttccagaggtgctgcattgcagttgttcagggctag

SEQ ID NO: 95758 - DNA, 1048 bp, Homo sapiens
agagaatgtatttggcatctaccatatctttgcatccttcaatgacacatttgtccatgtcactgatctttctggcaaaaaaaaaaaaaaaaaaaaaatgtgctgtgtgactggtgggatgaaggtaaagggtggccagatgaatcctctccacatgctgccacgctggccacccaggatgtggcctagaggtgcaaggagccagacaccactggcctacatcaaactccaggccacagatggaaataggactgagatccctggacctggggcctgctcaggtatgaagatcaggtggattgaggatgtcactgccatcccctccaaaagcacctgcaggaagggggttgccatggtcaccatctgtgaacaggactcctcaaaatgttttctattaataaattgccttcaagtaaactgaaaaaaaaaaaagagggagagaattcacacaaaatgatgcccagtcttggtctgcatggtgaagggcccaggactgatgggcgggggctcatttgcataccacaacaccagggagagtcctgtcacctgccctcctgagtcctgaagaaaacccttcaccccaattccctgtacactacttctaaaggcaggaaatgtgtacagttctagaattacagtcacataaaatgctagaagaataacgtgatttatttaagtgcttagaggtacccccttgaagtttgtgttacctggaagttggcctcggggaaacacctcattgaccttctctcaaggataaatgagatgcagggacagggaagggagaaaggttattttaacatttcattcacagtccctgggattctttggagagcaccttaggaatgttcttaacctgagtcctcttactaagtattatcacatagtctgccaggctggcattattaaccctactttgcagctgaggcaactacaagagatgaccctatcgggctagtgaagtggaattcgccatgtactgcatgcagtcatgtactgcagtgaccaatccgggtctaatttctttgatgatatcattgacggggta

SEQ ID NO: 95759 - DNA, 1084 bp, Homo sapiens
actcaagaacaaatgtgtttaagccccaagcccctaaaaatgggaagctgtctatttcccttctgtaccagctcccacatgtgtctggacacagactctgccagggaagtcccctcccatagggaccgtgtgcctccagagttgtgtggacaggacttgaagacatccaaagcccccacaagagatgatgacaacaaaactctgtgttaaagagtttccaggatggagaactcctgcctgtcaattatccttctcagacactgattttgtttgtttgttttctggctagagacgattattccacacaggaatgacagacagtccctctgttctttgtctgctggtcctgggggcctcttgcgtcagtgggaatggaaagtatcaactttcttatttctccatgttccctcttgccttgcatctttcttcctgctttcatttctaatttcttgggccctttgactttctcttcatctccctcttcattcttcacacaataatgtttatttaattttggatgttctcttctggccaaaagttgacttggtccagaccaaatggaaatatatgtgattaaatctgttctctgcggagagggactaaaacaaagatcaatgccagatattgtcgtgatgatgaaatgtcagggcagagggcaccaggaaggacagaccaggctcacagaagcgtgccattctttcacagcacatgcagcacacaatatgcagaggcatgacattccaaccttctccaacccaccgtttatcagtgtgtcccctggactggtagtatcagcatcacctgagacttattagaaacacaaattctcaggctccatcccagaccaactgaatcagaaacactgggggtggggtccagaaatctgttttcacaagccccagaagactctgatgcatgtggaagtttgagcaccactgcttctagtgcgtagacgttttgcttgctatcattgaaaactcgcttgacctctttggagaggggcatggcggcccccagatatctgaggaaggctgagcaggaggataaggtgagctgaggaaaagggagggagcaatggggtatt

SEQ ID NO: 95760 - DNA, 1033 bp, Homo sapiens
caagaggaaggatgaagcttttccaaaatcacatgccttcatctcattttacagaaaaatttgtgcctaatattaaccaaaggaaatggggagcggcagggccagtgggttttcatggtgaactgagggttgcatcttggacaggttgcatgtggaagggacagcagggttcccaaggaagctttgcacggtcatgggtagagccatcccttcttcatccatagtgaatatggctggaaatagcgggtagtcttggatttgacctccctcccatggaagtgctgtctccagctcactcctggaaaaactgctttctccccaaagtgtgtctgagcagcagatttaagcatgaagttggttttgtggggctacagtatggactttgggaagatggtgccatctgtatttctgattctaccgtccctctgtctgtctttggaagtatcctttcacttgtttgggagactgagaatgattttctgcaaacagtgagccagaccatgctggtctcaagcggcagagcagttattaacagaatcacagtctttctggagctgctgtcagtcctgtgctgtcctcagggcctttgcttggtcaggggccccacttcttatccacccttccctctacctcaccgaggctgctaggcccaggtgtattgtgattatttgatgcacctgggaggccatgtctcccggggagtctcaggacctcattgggctggaattccacggggatctctcattgggtctctttgggcctttggagaggggagtgcagggcaccacctgggcgaacacctgtgccatcctgtaagtccttgtgtgactcttcatccaagtcaacaggggcatgtaggggaagagcctcagggcccatcaggagtcagaccctgaccaggaagtcagaactgaatcaacttttcaataaacacacaggctggccccaaacaaagcagcaggcttttgggaacatctgccttttcagtctcttctgaattctgtttatgtggacaccccatgtcccgcaccac

SEQ ID NO: 95761 - DNA, 1032 bp, Homo sapiens
gctttctaccgttttgatctgaatatttaatgctttataaaataaaaccctgtgttttaattttaactagtttcattcttttttttatgaaatgatttgcggtattagactgtcatttggtttcaatattaatatataacatgaactacgtgggtgtcacttattttcagtagtaaataactgcttaaccgattactttactttaacatagttctactgttctccttgagcctcgtgatctgcatcttcaaacaatatttggtgtgtgtttttgcaaaatagcatttacatactgtgtcattaaaaactagtttcatggtgtcatggtggtcggaatcagggaatgtcgtgtagttggtttcaaaatccatcagtaggttaatcattaattatcctttttccaggaaaaaactgatgaggttgtttcagaatttgaatttactagaattcctttttttttgcattaaaaaaaaacttttgcattttaagcttaaagggggttaatttggtaagaaaaggtaccttttctgtttgtattgtggcttgttcattttctcataaactgtatttggtagctaaaatgttgaaagcagtttgggaacaaaatgtctgctcaaaccatgacaaaattggccacaatttgccgattgggctgataacaaaagccagcaacacaaaataggtagaaaaacagtttgttcggtgatgtgagaccactgaagctcttttttgcatgttttttttttttttttcattctgatgcttatgttgtgatggaaatacatgaagtctctgcttacccattgtttctgattaactatttcatctttggatttcttttaaaacttcagaaaacaagctgccccctgggcatctgagacaaatttgaaataagagccagctctgcacctaaacattgtgttttctctagaccccacttggttgtaaatgtcccaaagctcttgttttgatcgtttaaagcagcatttaaattccatttcccccaccaccccaatgttcaacattgaattg

SEQ ID NO: 95762 - DNA, 1095 bp, Homo sapiens
tcagtgaaatacctggtatcgtcctgccaacgtgaagcattgaatgctttatacgtctccatcctgattgtttaggctttgaatgctgagaagtatctgcactttgttggtcaattgtagatggtgctaatttgtggggagtttttcctgcaacttccccctgtgccataatccagaggacctccctctgcccccagtgctgtaggctaggcagctatgggcctggctcagggctgtcgggcaaggattggactctctataggttccgttgggttctggttagatcacagagctcaggcaaggaaaagccgacaatagatcagaaggaagttgagcgctcaggaaggaggagtgggcaggatgcttggtggtgtcagaggattccttcggattaaaaaaaatagatgttattgcactttgtgtaatcagaaaagctaaggttgacagcagatcttatccactgtggttttcctgcttatcttttgttttaggagtgataaccctgcgagtgagggcttctgttacagggtcttgtagctcttctcttcatcctgccctttaaaacatttattggactaaaaatcacaggatttttaatgatgacagaaaatgtattattttagctgttctcactggacaaatcacttacggagtgttgattaatacattgataagtttctatcaattcagctagatacaagggaaaatgtataaaatagcaagggctccgaaaagagtcaggcttaatttctcttgcacagaaaaaggattctattgctctttctgttccgtcctcaaacaggaagcaggttttctgggacaagggtcaacaggcagccagttcatccatctgcctactccgccatccttagcactggcttccttcctccaagttatcttatgcttcaagaaggctgctggagctcctgccatcacttctgcattccagacagaagagaggaaggaagtggggggcaaaaggcaaagcctcctagatgtcagactcctctgcaggcctttccttgaattcccagctaaccctttcagcctagtctttcactggccaccctatctgtaaaggagctggaggaggaa

SEQ ID NO: 95763 - DNA, 1065 bp, Homo sapiens
caagaccttcatccactgacttcatatttcttccacatcctgaactgtggtgtttgactttaaaaataaattaaagcaaatagaaatgtttccattgagattttggcaaaaacccacatgacatttgcgtctgcagagtagacttggaaggcatgcacctggaggccaagtggtattctctggactctctgtccttgcatttgcgtggctgccccgaggactcgcttcttcctggatgtgaagcagaggcacgatggggctgactgagaggctgaaatgtgcttctcttcacagttacatagttttcttctaattaaaaataaattttaagtggtagattatgaaaattccatttgaatcaagattttaaaaattcaatatcaaaccagttgttactgtcttcactctccgttgtttacgattgtgtgcttttcctgaataaagaatgactggagagacattagttgtttgcacacatattaactcatacctaagggagaacagcttttagaacattgtcgatgaaagcaaatatcagctttaaaagagagaggacagaaagactgcagatagtctggaagcagcatttttaggccgtctgattagctagcagggagcaaaggggaggctgggaagtcagcccttgagtaggcctgctggatcatcaaataaatcaattgcagctatttttggggcctcaaaaaatcctgagggtatggctctcaccatccagaacctgcagcctccttagagccgtggctcaaagggaagtgctgcagaaaaacatttggctgttaagtgttttggccccaaaatagcacacatcatttcctgttaaagcctgttggcccgaagtagtcacactgctctacctcatgtgcccaggactgggaggagaggcagacgctggtgaggatcttatgccagttacatcatggttcctaacttactaattccctatgcccatcttttctacttagatagatagaaataggtatcatcgcttccatagacataattaaagaaaccatacaatttacacatacactcagagtggtggttctt

SEQ ID NO: 95764 - DNA, 1567 bp, Homo sapiens
catgatgctcagaggaaatgttcattacagcattttggatttgggatttttggattaagaatgctcagccgaggctgggcgcagtggctcacgcctgtaatcccagcactttgggaggccgaggcgggcggatcacgaggtcaggagatcgagaccatcctggctaacacgttgaaaccccatctctactaaaaatacaaaaaaaattagctgggcgtggtggtgggcacctgtagtcccagctactcggggggctgaggcaggagaatgggtgaacccaggaggtggagtttgcagtgagccgagagagcgccactgcactccagccccggtggcaaagtgagacttcgtctccaaaaaaaaaaaaaaaaaaagaaagccagtaggtgtaatgcagatattccaaaatctaaaaaaatccagaatccaaaacacctctcttcagaagcattttggaaaagggatactcaatttacattacagtgtattaaggaatttcataattttaaatattgtctttgcatagtcattttcaaagggaaaaatgcctgttttaaacatgattgtgtttctgaagcttccttgaaaggagaggtatggctgaatttatttagagatgtgaccttcccaccccatttccattttagggagcacaagctttgctgaactgctcttcaaatttaagcagctaaaaatgccagtgcgagctttgctgagattggctcctttgcttcttggaaatccacagccaatggtgatgtgaccgtgtctggcggtgaacctaccctgaaacgtgacttctgcacaacaaacgtgaccaaacatcaaagctaaagcaatgtttataaagttttatggtataactagggggaaatgagctgcacaaacctcaatgtattttaaatctgttgctgtcatcattaacggtatatgacatataaaagcaagttaaaatttacttttgtaaataaagtttttggtttgtttccaaaactcttgatgattgctttagttttggacttagagaatagagcaggggttgctggagtgaatattgatttttaaagtctttgaactgtggtggtataggtgaagtgactatgcccaaaaatgccaagttttaaaagaagctatgtcataaagttttactttctgtggcaaaagagcgctttagcatttcctcagatgtcacagttgtcctgtctaaaataagtttgtacttctggtgacaatgccagacactcttatgatgtgatcaccttaaacaggagaaggagatttttgccctcagttgctcaacatgaagtactgtggactgaattgtgtcctcccagaattatatattgaggccctaatccctgtgtgactgtattaggcaatagggcatataggagattactaaggttaagtgaggtcatcataagggtggggccttaattcagtagaattggtggcctcctaagcagaggaagagagatttttctttctctctctgccatgtgaagacagtgaggagtcggccgtctgcaagccaagaagagcccttatcaggaacagacttggctag

SEQ ID NO: 95765 - DNA, 1089 bp, Homo sapiens
ggacacaagtatgcctatgttattagaggtctgcaggtaaggcacgtaaagggtcatctttttccagtgtcttcaactccatttctctgaggttccatcagctacattctgtgccatgactttatcctcagtgcatttttcggatggtaatcaaatggctgtaacatgttcacctctagctcagcatgatactcagaggaagaatagagttgcttctaggagttttgtgatgagaatgagggaatttctttccctggagcctccagcaagcttgtcattaagtacctcctcaggtttctggctcgagttgcatctcatgcacacctctcaatctatccctgtggcagagaatgtctcttattgaaaaaatggcctgggtctgcctgtctctgaactaacactgcatcaggagaatgggattgccttgatcacccaagatcagtgattctcaaagtgtggtttatggagcagcatgacctgggcacttgttagaaatggagtttttctggccccaccccagacctactgaataagaatctctgtgctctgtgcatggagtggggcccactcatctgtggtttaacaagccttccaggtgattctggcacatgttaaagtttgaggacccctggccaagactagtaaggatctagttctggagctgaagtcagtcccatcaaatataatatatggtggagggtagggtgtgacaaggggtatttcggggagacaaccacagtgaccactgcacctttatagcactcctcacaatttgtaattatgcatttgtttgtgtcattatttgtgtaatatctgtctcccccaacaacactctaaactctacaatgacagggactcagtctagcttgtcagagtagcctcaataccggctatagaacctgctttatatatgctgagcgttcaataagttcttgatgaaaaagtaatagaagatatttcttgtgcctctcagttctgtcatcagttggttccgttccatttgtttctctcacagtcgggggtgatatgtgtgtgcacgcctacctcagcgggcagcccttggaggaatcacagctgagcatgctggcc

SEQ ID NO: 95766 - DNA, 1827 bp, Homo sapiens
aaagtggggcaggcggactggatgagtggcagccagaggactgagttagcatcctttgttcttccaagtacggagacagcagtttattttaattcaactcatatttcattttagtcagttacttatgaccaagcctttataatggttcccaggattgaaatgtataaatagttcccagggttgacattggtgaattttgtttggcagtattcagtaagttgtttatgaaatacttttgaaagatttttggacacagtttaacttaaatttgtagtattgcttcttctaaaaattagagcatattccaaagactctaacccaatttgtgaagaaaatagataagtttagacttgagtttgaacgaagaaagtatataaaaattaaaagctatttctatttcctgcctactggagttcagaaataaaatataaacctcagtggaaaatagtaataccttcatatttcattttcaatcttgaaccttgagtgatactgtttttttcccaagtttaaaaagttgtggtaaaatgcacacaatttattgtcttaaccattgcaagttacagctcagtaatactaagtgcattcacattgttgcacaaccatcaccaccatccatctctagaactgtttcatcttgcagacctgagatctatacctgcaacaataacgcacaaccatcaccaccatccatctctagaactgtttcatcttgcagacctgagatctatacctgcaacaataacccctcattctacttcccctagtccctggcaaccaccgttctattttatgtctctgtgattttgattatactaagtacctcatttatgtggtttcatacactgtttatctttttgtggctggcttgagtgatattcttttttccttaccttttcagtaacaattctagtttctggtaggctttttaattagtcagtgaaggagggaaaagccttttttggatgagttgtgtaaacaggaagacctgtttgttattggccttttgataaattagtagctcatgttaacttgtgcaaaagcttcttgtaacttcttagcagaacaggttgatgaggcaagtttgcatcatctgggattttttgggaatgttgggtgacaaaggggaggtagagttgttagaactgtgtgtattacagtttaagcgtaaggaaaataatcttttgttgtcttatactgttgtggttgtttgtttttttagccagaaacaatctcagcattcacttctgatccagcacttctgtcatttgctgaatatttctgcaagccaactgtgaacatgggtcaggtatatattctatggtttgccgagccccaggactagaatttgttattatttctatgcatgggtcacccaaaacatctctactatctatatctatctttgagattgatgacatgcgtcagtcacattggatgacttttgcttggcacgtatagatttgcatagcctaaaactattaaattcagcaactttctaccttgatagaagaaacaacttaaaatttataagacatcagttttgacagatgatagtttctgtcatctacaagaatgatacccatccatattctgctttatgttttcagtgtttaccacctttctcttatttttatgtaatttcattaactgtttcctctgtatattataaccctgctttttattgttcatacacctgttaccttcaagattccaagggtgcttagcagatttttctttatttttttgttttttgttttttgagacagggtcggttttttctgttgcccaggctggagtgcagtgacgtgatcatggctcactgca

SEQ ID NO: 95767 - DNA, 1054 bp, Homo sapiens
attctaggctttctcatagggactgatttaatcttagacacagtaaataatcatttaccttagtggaaaatggtaaaagcttcatctcctgtgaacatggtattgggaaaacactatttccagccaagaactgccagtaataccttatattaaattcattccttttctttcaggtccatcctttccaaggatggggttttatatgttaaactccgggcgggtcagctctcctacaaagaagatccaatgggatggcaaagtttgttggctcagactgttgctaacaggaactctgaagcccgggctttcaaggtagtattattgattggtaaaaacggaaagaaataattctaaattgccggcttcctcgcccattgctataaacttcaaaggtggatctgcttcctttttcattgttgcagattgtaaagactgactgtggctctgtttgctttttatgtgataaaataaataataaaatataatgaatataaaatctgtatataataagtaatatatatataataaagtaaaatactgtaagttaatgtttacatttagcagcaaggacagtcacaccatatcttgacactgtaacaaatagtgattttattattgatcttcaaatcggtgaagatttacttaatttcatagcaaaaatagaaaacgagttttgcaagctagcaattattaactccatttaaaaaccaccatttgtttccttaatcttggtgaggataaactgatgacagattcagacttcttttattagtttgctttattatttgcacagtactcgactgccagtgcagtagtgtttgaaataaggaaatagttacgataaatgagggtaggaagcaatctcattcccacggcggggtcagcacatattttgctctatattcttgactcagataagtttccaacacaagaaatttgtcccataatcaggcattaagacttctgaatttaacttcagtttcctgtaattccatgagcaactgtgtccctgctggtgatacaaagtagagtagtctaaagtagttaggaccct

SEQ ID NO: 95768 - DNA, 1019 bp, Homo sapiens
ttttagggatcatcagctactcttttgtccttagagcttataatttgaaaatgtccctgttaactttatgtgactgacagtagtgttttgtataactgattgagttagacccattcttagatttgttagctgaaacttgaaaacccaaaattgtgtatttgatgacagctttcatttagatgcatagattacaagttttatatcctcctttcattcagcaaattattaagtaccttctgtgactcaaaaccgtgctaggctctggggtacaaaatgagatgacattgtcattttccttaaggaacttctatcccctggggagccaggcatggatacaatgggaatagagggtgataattggagatgtctgtggaatgcaggggaagcagagaagcaccctcgcttagctgttagttatggggttgaggctgtcaacagtggacagtgtttggactaggcctggcccactgagtggagctccttcccagcggagaaggcaatgtgcagaaacccagcagcattggagcacggcctttggtgctgctggcctgtgaggagcaaggcttgaagtgatgggaaggacacataccctgtgaggaatttagacatcagtcctttaagatttgagtaccagagaggattttataccatttaaaggtctctgtatgaactgcggggatagggggaggtatagcgtggagatgtttcttctttgttgtttccactgactacctagtgaattgtggctggacttttacatttgtaaagggcactcagtggtatgaacaaaccaaagaagaattgatggctcctacccttcttccagaactccatcttttaaagcaggtaagctgggtgtggtcgggagttgggtccaaggggtcaattcaacagaatggcatagcgttaaagatagctaaataaaagcctcagctttcttcatgtattgtagcagataagaaagctgcagcaggaggaaaagtcagaaagaatagagcaagtcttttcttagagatctt

SEQ ID NO: 95769 - DNA, 2997 bp, Homo sapiens
ccggctaactttttgtattttttagtagagacggggtttcaccatgttagccgggatggtctcgatctcctgacctcgtgatccgcccgccttggcctcccaaagtgctgggattacaggcgtgagccacagtgcccagcccagatttttttttaagttacaaacttttgtagtcttctaatgatggctaagctagttctgataataaagaaatgtaacacaacagttacagtgatgtcatctcttcacctgacagacaggtcctcataacctagaaacttgtctgagcgtggtgctgctgtctctcgccatggtcatggctggctcaggaaacctaaaggttttgcagctttgtcgcttcttacacatgaaaacgggtggtgaaatgaactatggttttcacttagcccaccacatggcccttggacttctatttttgggaggaggaaggtaagtgaatatgtatttttccaatgaaaagatctcattggtgagatctataagggtgacttacgttgatcttgaagataacatgaaaaatttaaattctgactagctcttagcttaactagcagcattattcgacttgatgggcttctttgtagtttaaccgtcaacttatggtctactcagtagaattaccatcctctctgacacactgagcatcactgtatttctcagaatagtctgtgctcggttcttcagtgcatcactgcttgtgcccacctggttaaaaattttaccattccactaagctactttctcagaaaggtcacaaacaaaatcgtttaccagatcctgtgacattttcttagttttcagctttcttgatctttttccaacatgtgccattcctgactacatcctttataagactgccctggctttagatgaaccaaaaaccatgtacagaaaagtgtataaatcataggtgcacaggtcaaagagctatctaccacagaaaaatctctttgttatcatgtagatcaagattctgtatagcactttcaactcacagcacccgtctctgcttctgccatgcacccctctcaatcactattatcttcctttccccaaagatagccctatctggtcttctaacaccttacgttgattttgcctgtttttgacatttaaattgaattatacacgatgtatccttttgcactttacttttgctcaacattatgtttgtaagattcatgttgtatgtagcaatggattattcaagtttcagtgttgtattacactttcattgtatgactaccacattttattgatctcccccattgatggatatgcttcttgcttctagtttggggctgttatgaacagtgctgttagggaaagttgtacatgtcttcgattttgttgtatatagaactgtgtggaattgggtcataggttgtacgtgtgtattcactttcagtgaataataccatcagtgctgcagtgcacttgtaccattttacatactcatgggcaggatgtgaagttccagttgttccatatccttgtcaacccttgttattggtatagtctttttagtagtctttttagttttagccaactagtaggtatataacaggatctcattgtggctttaatttctgtatttctgaataatgttcttgagtaccattttacacttttaatagccaactgcaaaacctcttttgtgatgtccaaatctcttgctacccagtttttatatttatctattttaaaatttttatttgtggtaaaatacacataacataaaacttatcaatttttaagtatgcaattaagtagtgttaattatattcacactgccgtgcaaccaatctccagaaatttttcatcttgcaaaactgacattctatagccattgaacaactccctgtttgcccctcccaccagcctctggcagccaccattctactttctgttttgatgaggttgactgctccacattggtttagctttgtattgattactgtggattctttaaactatgtcctaagcccttggtcagctttgtttgttgcagctatctttgccaccctagggcttgtttgccttttcactctctctcagtggtgtcttttgatgacacaattattaatgttcttcttttatagtttttacttctttgtgttgtttatgaaatattttcttacccagagaaaaggagatattctcctatcttatcttctagaagtttttagcttttccattcacatttgaatctaaaatctacctggcacggatttttctccatgtttttttcccgctgctattgaaaagtttatccttctccactgctctgcagtaccacctctattatataagttaagtgcctatacacctgtgtttatttctgggctattaggttttgctggtctgtttttctgtacttgcaccaatactccattgtcttatgagtcttgttatccagttgagtaaatccttcaaactcggttttcttcttcaaaagtgtgtttttctcttggctccttgcattttcatataaatattggaatctgttccatactaaataatctgataaaatattgatcagaattgccttgattgtatgtgtctgtgttaaggagattagaatctgttacagtattgtcttccattctgtgaatatggtatacccctgtatatatttagctgtagtgtgtgtgaccttgatcaatggctacagtgtctgtgtaggctaattttcccctcttctttaagactgagcttaccattggaactcaccttttcagaagtacaaaaagtaaagttgatcagaaaggtgtgtatttcctctcaacatgttttgtggaattgtctttctttaattgtttagaattaataatggtcaaagaaatattactatgaaaattcttatttattttattctatgatttttgaaaattttttcctttcaaaatgagcctctccgtgtctcttaatcccatctttcattgttccaaactgtatgactctcctcgctcttct

SEQ ID NO: 95770 - DNA, 1641 bp, Homo sapiens
aatgctgatgcttgaaagtaagatctttggcatttatgcttacactttgcatgaggaataagttgagtacaagacgttatgccatgtctttagtctattaattaaaaacaaattctaagattcaaggagttttcagtgttccacatttctccctttagaaaaagtaaatgtgtgcagaattaacaaagtgtttaaaaatagatatttattactttactatttggatgaatgtgtagggcagtgcttccttggcactggggatatttcattgagcaaaactaaaaatatcttccctcatggagtttatgttatagtaagacatacatgtacatctataataactattacattagaaggtgtgaagtattgtgaaaaatatgtagagctgtagtggagcgggaagaaatgttttgaaatagagcttgagattcttgattgtcttgccctctacttgaacagtgtgccttactgttttcctccaccaccagatctattgcagattggctccgagcccctgacaccatgtatttgttggactttgtgaagccagaatttctcttgcttagggtatgctttgtcttcatttgtgttaacatgagaagtctatttgtggttcttaaacttagcttgtaagccgggcacagtggcttacgcctgtaatcccagcacttcagaaggttgaggcaggaggattgcttgagtccaggagtttgagaccagcctgggcaacacaggctgttctccatgaatgaatgaatggcaaacataaatgtctttacaagagagccttttatttttaatttgtcatgcatatctaattggcagtgttcatttgaaatttcacaaataggactttgggaatcccaagaaaggtaaccacgttgatatttaatacttggagtgacatttcactgtctcacattattattcaaaacttcctaaaaagcaacaagtgattaggacttttttactgctttgttttacatttttggattactatcagggatgtgataatactgttaaggttgaatctaaagaaagtaacaattcacttaattgtctaaaattttccctctaattcttttttttctgatgtttaaacttagcatatagaagcttttaaattatgtgtagatagagctatgattctttcctttgtgatttttttcttttccagagtacattttaaaaagtacccgcacaagccctctaaactttggtgatattcaactcaattttagtttttctttgttaaaatttaaatctttattttaatgagtagtttaatgagtaagacggttcccaacttaggatttttaacttaaccatagtgtgaaagcggtactcattcagaagaaactacttccaattttaattttaatttttttcttgtactcctggcagtatgatgctctcatggtgttgggtaatggcagcaagctgcagctcccagtcagccatgcagtcatgagggtaaatgacccatactctacagtttactatgctgacagagaatttcactcaattataggctaatttgagtgtttggagcatgtttaaggtaggctaggccaagctgtgttgtttggcaggcaaggtgtattaaatgtattttctttttcttttttttttttttatgag

SEQ ID NO: 95771 - DNA, 1022 bp, Homo sapiens
tgaaaatccaccttgtggttgaccatctgttagggccttgaattcacattggcacgtgagctaaagaggctggtggtataatggaaaataatcagctgggtgtggtggctcatgcctgtaatcccagcactttgggaggctgagatgggcggatcacgaggtcaggagatccagaccatcctggctaacacggtgaaaccccatctctactaaaaatacaaaaaaattagctgggcatggtggtgggtgcttgtagtcccagctactcaggatgctgaggcaggagaatggtgtgaacccaggaggcggagcttgcagagagtcgagatcgtgccactgcactccagcctgggcaagaaggcgagactccgtctcaaaaaaaaaaaaaaaaaaagaaaagaatcacacagggaattgcaacttgaattctggtcctaactagtgattcaagtcatttaactacattattgtgtattgcttaatcagcttcatggattgttgagccagatggccgtgttttatatatagccctgcgacttaactataatagctgtataaccttgggcttaatccctctgtgccacactttccttatttataaaatagggttttaatagtagctatttgatatggctgttcattcatgttaaacacacagaatagtgcctgacacagagcatgcatttaataaattactattattatcatagttattgttggaaaagttcttaagtacaataatgacagtattcaggtatttacagttccagtttcaattatataactaatatttttctttattgttaaatgtaactaactctaaagctcttatgtattttaagacagtacttaaagttgaacattcatgtattaaaacttttatgagaattattaatatttattaactcatgattaatgtttgctttaaattggaaataaaaaaaacaaaacccaaaataacctgctttgaagttagttcatttttatatttgttatgggtatgtgttgtggatcttccttca

SEQ ID NO: 95772 - DNA, 1036 bp, Homo sapiens
atatggatttgtgaatatattgttaaagatgtattattctttagtataattgtatcagatagctattgccacagtgatgctacatacatacaggcatagcattggcccaggcagctctgctttaggctgtagatgtgtagccggctgttctgctgccgttctgcctcacctgcctcattctgggacccaggctggagggtgtgtttctctcgtggtgttgatagaaacctaagagagaaccagtgaagattgggacccataatttagtctactataatgataaatgaaattattcccaaagttgaaatgttttggctatcacaatacatggtagcataagtcagagatctgaaaaacgcttattctgaaaatattcaacactggttgttaaagcatgttcatctgcaaagtagtctacccttctttggctatatcatgatgatgtctaatggtgtcattgcacagtctcacagctgcggcatacctctttcacactgtatatagaagatttcatctttaattcatatgtatatgcctttttatataattactgtcagaatgtacattaaaaattttttttttttttgagagagtcttgctctgttgcccagcctggagtacagtggtgcaatcttggctcattgcaagctccgcctcccgggttcacgccattctcctgcctcagcctcccgagtagctgggactacaggcgcccgccactatgcctggctaattattttgtatttttagtagagacagggtttcatggtgttagccaggatagtctggatctcctgaccttgtgatccgcctgtctcagcctcccaaagtgctgggattgcaggcatgaaccactgtgccccgcctaaaaattgtttttatagatcattgttataaatgggttttaaaacaaattttgtgtaatattcattgagtcgatggtctgtaaaatgcctttttttaacttttagaactttttagattgtttctaataatcctttgttgttatatataaacattacactgattacctttg

SEQ ID NO: 95773 - DNA, 1030 bp, Homo sapiens
gatgttgggatttataacttgtatagtttaacagtgatgttagtcttcattttggtttttaagctctctgtttgaaagaaaaaatgagtgattatcccagtcatctctgtataatgttaaattggtatcagttatctcattatatagcctcatacattttaacaaaaaggacaatgaactgtttagacagtgaaggtttttccagttccattaagtttgactcacatgtacaaaagttttaagtggtcatagagacctaacgttccaggcattatggggttaatggttttgaatgtagaaaacgtaagtaatcttagtctcaaagatctaaatttaacaatcttggttttgtggatttttattctctcaatgttcttcgtttggctggatagggcgtgcccctcctcggaacacaacagtagaccttaatagtggaaacatcgatgtgcctcccaacatgacaagctgggccagctttcataatggtgtggctgctggcctgaagatagctcctgcctcccagatcgactcagcttggattgtttacaataagcccaagcatgctgagttggccaatgagtatgctggctttctcatggctctgggtttgaatgggcaccttaccaagctggcgactctcaatatccatgactacttgaccaaggtgagacctgtgctcccagtgcctggctttgtgccttggctggctattgtagtagctcctaattgctctatttgctcttctttcttcattcttgtacttctaagtccatttgtctcatagtacatggaataatctttctaaagcataaatcagagtatgtcacttccctggtcaaagccatttaattaatgatctcccattgcttttttttttttttttttttccttgagtaaggcagagtagaatttaatgagtgacaagaaagctctcaacagcgagaggggacccgaaggtgggttgccagccacgaggctgagtctagaggtttttatgggcttgaaatgggggaggtacatgctgattggt

SEQ ID NO: 95774 - DNA, 1314 bp, Homo sapiens
acatcttatcagtggcatcttatattcaggggatataatattgttctcattataattttgttacttgcgcaaagttgaagtgaattatgtgtaagatttcctctaaaaaaattctatgggttgcaacagcctcttggctttgaattttcctgatcccaaattaatgttgcggttgtgttcccagagaatctttaagacagcaaaatttttctttccagttagctagaaaagcagttatgtgtgtccagttaaggagggagtatgcttatgaatagctttgtctgcagagaaaatgtttgtcagttgtcagcctctgaagggatatttctgtgtcttcagatatagcttgtataggcgtttcttagttataaatgccctacttccaaaatttctgttagttttttttaagtggctatatggaatgttaagctattttaacataggaagaagttgaagagtggtgtattaatttcacagtagagccaacagaaaccattttaaccttgaacatacctgatacataatggtattagtcctataaatctagccatcatgtaagtgaaaccaatctgtatttcccttggagacaccatgaaatccattcacctctaacacaaggaccttgtttcttttcttgtgtacaggccacagaaatggtacttctgaggctgtattggcaaaagggatgggaggaggatcccacatgtactgaggacagctagactgaaattaacacagtgataaaaaccccaaaagtactgtattttcctttgagaaggttagcatccatcggagtggaattttaaatttctttttttttttgaatgcctagagagagtcggctgggtttataggccaggtggttttcattcaatgtaaatatgaaacaaaacagaggaaatatgtctctccctaagagtgtaataggaacaagaatattaaaatgaaaataatcatgtttgggtagttcactcacatctgtgtatgaatttactttgagacaacttcatcttatacagtacaccttcttttgaaatacttacagatgatatttcaattgctctttgctttaaacattttcatatgttggtttttactttaattacagattgctccaattgtgtcagcgaactatggctcttcctgtaggacgaggaatgtttaccttgttttcgtaccatcctgttccaacagagccattgcctattcctaaattgaatctgactggtatgttaaattctgggctcaatgagaaaggaaaatgattaagtacatgcattaagtgtagttctttaaattagttaaaacaaaaga

SEQ ID NO: 95775 - DNA, 1045 bp, Homo sapiens
ggagaatggcgtgaacccgggaggaggagcttgcagtgagccaagatcgcgccactgcactccatcctgggcgacagagcgagactccatctcaaaaaaaaaaaaaaaaaaaaaaaaaaagaataaaaagaattattattgctctacatagttgccaacatttagtattgattggctttgacatttatatttctcagtagctttaatttgcattttcctgatccctaattaggtagagcatcttttcatatgcatgttgcccatttatgtttccccttctaggaaatgtctttttgtcctttatatttttctattagattgtctttttttcttcaggtttttacaagttctttcaaagagacttcctatactagtccttgatgtcaagacattagtctggtagtaagatgaataaaatgaacttatttgtcaggatagatattgttgccaacttcagtcaggataattgggacagtggcgagtctaaattaaaatttttctctcttcctttaaccattaggattcactttaagagatttggaaactcttccctttggaattgctcttcccatcagagatgcaatttatcactgtcgtgagcagcctgcctcagactggccagaagctgtctgtctcttgattggacgtcaggatctttccaagcaggcctgcgaaggaaacttacccaaagggaagtctgtgagtatcaacatagaaagttcagagttccaattttagccttaaataaaatcataaagtagaaatgttcttcattttcctttaaggctttttctaagtatatatattagcttgtcttttatattatatgccagacggggtttgtaattgtacgcgtcttattaattgttaagatgagcattaggagcaggagattttgtgaatgttctgtcttgtgcctggatctttctttgccttgaatcaggacaagtcctgagggtagtcatggaaactaccatggctatttccctacttgtaccatattagtaattaaccactttgtaattattacataggaaaagggaga

SEQ ID NO: 95776 - DNA, 1021 bp, Homo sapiens
aggattacttaaaatctaatacatcttgtattttcagtgcgggtaaaaaggactattttagcctgaaggaaattattgtaccattgactcttgaacaacatgagtttgagttgtgtgggtccacttacaatgaaattcttttcagccaaatgcagatagaaaatgcagtattctctgatgtgaaacccatatgcaggttctgcagggccagttgcaggacttgagcatgcacggatttgggtacgcatggggtgtcctaaccaatcccctgagtattctgagggccttgactgtacttttcagcctgccacagtattgcttattttatttttttttagatgttgtttgctaattgattcttattttcaaatgttttctacatgttacatgttttctttaccaggatgactatcaaaattaagtttcattttgttgccttttagccccccagaagttgcaagtagaacaagaggaaaacaggtgacttttatttagactgtgcttttatgtcaaacacttaaaacaatattatttactgttctgcttaataactttatgttttattctcttataggtttagtttcaggcattctacatctgtttctagtctagctgaaagattggttgtctggatgactaatgtaggtgagagcttctttgttacctcctaactaggccgtgcttcctccagactagctagaagtggaaggcatgaggagagaggggctctggctttgtgaaaaggcctcacaagattgagattatggttcatcaagccatattctttttttctcgacaatctcacaactttcatataataatatttgggataccagctttttatcttgatgcataaggaatctttatttgccatttaattggaacatttgaggctgtggctatgtaagctggtctctgagaatggagaactctaatcacctacatacacacctgaaatcattgtgatactcagatatcagaaatgggtggttttggcaaagtctaaaagcaataatataaa

SEQ ID NO: 95777 - DNA, 1264 bp, Homo sapiens
cctacataaagacccgcatgtatgtgaatgtctttggggccaggtgcggtggcataatctcagcactttgggaggccgaggagggcggatcacgaggtcaggagatcgagaccatcctggccaacatggtgaaaccctgtctctactaaaaatacaaaaattagctgggcgtggtggcgcatgcctgtaatcccagccactctggaggctaaggtgggagaatcgcttgaacccaggaggcggaggttgcagtgagccgagattgtgccactgcgctccagcctggcgacatagtgagactccgtctcaaaaaaaaaaaaaataaataaataaataaagcagctttggtcatagtgaccacaaactggaaccaaatgttcatcagtttttgagtaggtaaacaaagtttggtatgtctgtataatggaatactacttagcatgaaaaggaagaaactagtgatccttggagagacgtgaatgaatctcaaagacttatgctaagttaaagaagtagcacaaaaaagactacatatcatatgattgatttacatgatattgtaggatagacaaaactgtagagcaagaaaacagatgaattgtttccagtgctgggtgtaggaggaaaggattgactacaaaaggaacaagggaactttttggtgtgatgaaagtatactatattgtgagtgtggtagtggttatgtgatacaacatttgtcgaaactcacagagctgtacacctaaaatggatgaattattctatgttataattattttctagttatacttcaattatgtagctaggtgtggtggctcatacctataatcccagcagtttgggaggctgaggcagaaggattgctcgaggtcatgagtttgagcccagcctgggcaacacagcgagactccgtctttacaaaaaataaaaataatataaaataataagctgggcatggtggtgtgtgcctatagtcctagctactctggagactgaagcaggaagattgcttgagccaaggagtttgaggctgcagtgagctgtgattgtgtcactgcactccagcctgggtgacaaagtgagatgctgtctctgaaaagagaaaaataatgttaattttcttcctttgcagagtattgcactgtacatacttggtgatgagagcttggtttctgatgaatcctcacagtatttaaccagaataactataggtaagttggtgcaatgttgcctctggaaacaaatttttgtaaatgtcagtatc

SEQ ID NO: 95778 - DNA, 1732 bp, Homo sapiens
ttggttagattctttgtatgccttgggaacaagaatttgctaaatttccatccagggtgggataaaatagaagtcatttaaattctacatttaataacatagttccttatgtactgtggcagaaaacatgaagcattttggagaatatggaaaaacgttattcttttttttttttttttttttgagacagagtctcgctctgtctcttaggcgtgatctcggctcactgcaacctccacctcctgggttcaagtgattcttctgcctcagtctcccaagcagctgggactacgggtgcgcaccactaggcccagctaatttttttttgtatttttagtagagacggggtttcaccatattggccaggctgtccttaactcctgacctcgtgatccacctgcttgggcctcccaaagtactggggttacaggcgtgagccactgcacccagctggaaaaatattattctagttgtttcaaaatgacaagtaactgttgatcatcttccgtttaaaataaaataatgttgtcttaatgtattttcgtgtctttttgaatatttatctaattttaaaggtcaaacaggatttatgcatcatccatcattttttacgtctgagccaccaagtatttatcagtgggtgagttcttgtctgaagggtgaaggaatgccaccttatccttacctccctggaatctgtgaaagaagcagacttgtagtcttggtatgtatgtggagtgttactacctatctcctttttcttttaaaatttagttttaaaaagtacacctgatattaagtttttttctgtgtatagttctgtgaatttcagtacgtgtatagattcatgtaattactacaatgaggatatagaacatttacatcaccctcaaaaatttctctcatgatttcgagacttatccaagttgtttcctgtatcgacagttcatcgcattctatggctaattagtagtttattgcatgaatgtgccatagttggtttttcattcaagatagttgggttgatttcagtttttagcaattgtaaatatagatgctgtcagcattcatgcttagcgttttatgtgaacataagttttgctttctctaggacaggtacctgggagtaggattgatgggtcatatagttaagtttatattttgtttttaaagaaactgtcatctgttttccagagtggctcttccattttacatttttaccaccaatatttaagagatcatttacctgcattcttgttggtgtttggtattgtcactcttttttatttttgtctttctgagagatgtgtagttatacctcattgtggttttaatttgcattttcctaatggctaatgatgttttcagggttctaggtatgaggttttgtcagatatgtggtttgcagatattttcttctggtttctaccttgtcttgtctcgtcattctcttaatacatcaaagagcaaaagtgtttaattttgatgaagctagtttatctgtatttttctttaatggatgttgcttttagtgtcatgtctaataattctttgtttaacttcaggttttgaagattttctcctgggtttctttgcatgttttacatttagatctctaatccattttgttaatcttttataacatgtcaggttttaagtcaaggtttttattatttcatttggatatccagttctttcagcactgttttttaaaaagactatcctttctcta

SEQ ID NO: 95779 - DNA, 1509 bp, Homo sapiens
gtccaatcagtctgaatataaaaatcagttgattattagattatattactagccccggcatcttatacatgtggaaagatgaatacaccagctgaatgcaggtggaccttccttcttaccaaaacacagttcagtgtagtggccactaacttgccatctacttttcctataaaacctagcctgagataatcttaaattttctctctcaatctctacctaaatagtataattcttctcccaatgtctttcctaaaaggtcatgaaaatattttttttaatggtttttaaaggtggcttgccttaacgtttataactggcttgctattttatagttacttcattcttagcattgtcttttttttttttaacatactcttagatcaacttaatgtgaaaatgaaacttgaattgttttaagtgaattaattttcttatgatattataaggaggtattatttttaaaaattaatattctttttattcttctcaggactgggaatatttactaaattcagactaccaccagaatgttgagtctcatcttttgaacagatctttatgtctgagtccttcagaagcttcacagatgaaggatgaggatttttcacagaatctcagtctggattcttctacacttctctttactcacatacctgcaatttttttcgttcttcaccttgtgtatgaggagcttaagttgaatactctaatgggagaaggaatttgttcacttgttgaacttctcgttcagttggcaaggtaaatttgtttgtaggttagaaactgccaggaagtcctgagatgactgtcttttccatataggaaccttgtatcatatagggaccttgtaaataagtttctgaaatctaccttctcagaaaactagggcatctctgtaaaccacagagttgtttgaagatactggttttgtaagggcctgtgagccatgcagggatttttagtctttgtcctgagattagtggaaggtcacgaaaaaatggagatgacctgctcagattttcattttgacaggatgactgactggctatactgcggtgggagttctagaataacatctgctgttttgtaatatccacattcaaatagtgctttatagttgacaaaatcatagtttacatgtaaagtctcaaacaaggtaagtttcctgttttagtgatgaggaaacttgcctaaatgtctttcctgggatgcgagtgtttgatagttgtggactcattttgctatgctgtccttgttgcagtctgaggttgtccctgtctttgaggcactcatagtagatccacaataagatagttctaataatacgtttcaacacctttcaagagctttgaagcacctggtgtatggctcagaattctagggtcatacttgtgtgttgtttgacctttatgacctttggtgataaagaagttgaatttgaattgaaatgtcaacctctgagttaagacatagtacattttctaatttctgttgtcttttttgagatct

SEQ ID NO: 95780 - DNA, 1098 bp, Homo sapiens
tgtctctgccatagaattgttagatagtttactgtaggtggactgtaaataaatgtttgcttagttctaacatttgactgatattgggttgatcctttgagacttggtatattgtggatatgcctaaagtttctttttctaccaaagatgtgatgtaatctatgttgttacaggagtaggagagggaaggaaactaccattaaaatcagtccttagaagcccaggcactgttctagatgtttgcatatattaatatgatttcatttcatctttacagtaacctggaagaaagatatttaaataatgcctttccagatcaaaaaatgagttttgatggcttttctcagttttcgtaattggcagaactgatttctgaatccttgaagttgatcagttgacaggaatgcatttacgatttttatcttttcttttggggttacttttcagtttgactttgaaggatcactttctcctgtcattgcgcccaaaaaagcaaggccttccgagactggatctgatgatgtaagcattattatttcttgctaatataaattaatttatggatattcatactattcttccacttctgtggtattcctatcaattcctctatctttccaacacctttcactttatttattttaatactgaatagcaattattttgaagagtaggatctgttacattttctgtggtctttaatgattatctaaaaattaatacatgtattactgcatgatttcagtttgggtttgtagacattttagtatcaactgatcacctgaaatgacagcatttaccttttttatgcagtgttttttaaattaaggttctcaattgtatcaggttccatggtatattcctttttttttttgagacggagtatcactcttgttgcccgggatggagtgcagtggcaggatctgagctcactgcaatctccgcctcccaggttcaagcagttctcctgcctcagcctcctgaatagctgggattacaggcgcccgccaccatgcccagctaatttttgtagttttggtggagacagggtttcaccatgttggccaggctggtctcgaactcctgacgtcaagtgac

SEQ ID NO: 95781 - DNA, 1053 bp, Homo sapiens
cttttcttattttaaacaattgtatccgagtgacattatccccaatttttctgttctttattacatgtgaaaagattaagcctcatagaaactggatttctacattatgaaaaaacgcgtcagctttctgtagttttgtgtatcattgtccttgtaacttgttgatgagtacagattgttgtgtcctagtctctggcagagaacctatgccccttcgcgtttccatgttttggggaggactgagcacctacccattttttcctttgcagagaaggacatggctttttgacttacttattgcatgataattataaaggaaggaataaggaaatcaattcttgaggccaagttgctttgctatttatttataggactgcatggttaaacccttgttatcttttgtcctcatagtcaaagcttaggataaaatggtcctcattggcaaatggttttcattttgctttgttcagatttattctttttgttttcacatatgtaatgtggtggagtacagaatttctgccaatgactcgttacacaatttttggcatttctttgtgctttctttaatttgctgatgtgttacatgagtgcactggactgtacattgtaggaacagttgcatttggggttaactttttgtggcttccgggctgctgtttttttccttagataaatattgaatccctgctgtgggccaggcatgatgccaggtttctcacatataccccagacaaaacagattgttcctctggaattgactgtcttgggggaaacaaataaataatatttgataaatgtgttatgatagatgaagggtaagggtccataggagcatataacagggttggctaacctgagacacattgaaagagtgaagattaaacagatccatgtatggcacaaagagccatccttatcaggcagtttctactttctcataactccaggccttatgaatctgataattatagcagggacattctttttgactgtgggagtttgtgtgtgttacattttggttgaagttttaggttagatagttactgttat

SEQ ID NO: 95782 - DNA, 1223 bp, Homo sapiens
ctgggcaatggatgtaaatcaggactgtctctggcaaactgggctatttgattactttatttctgatgcaaaattaatgatcaaaaagctgtccttggccgggcacagtggctcacacctgtaatcccagtgctttgggaggccaaggcgggtggatcatgaggtcaggagtttgagactagcctggccaacatggtgaaacatggtctctactaaaaatacaaaaattagcctggggcagtggcagacgcctgtaatcccagctacttggtggctgaggtaggagaatcgcttgaactcaggaggcagaagttgcagtgtgccaagaccgtgccacagcactccagcctgggcaacagagcgagacaccctctcaaaaaaaaaaaaaaaaaaaaaagctgtcttcagacccctttcaagccttgttgaattcagtagttggttttagtttcagatgattggttaggtaatgtttgcatctcattggctctttaatgacagttttcttttcataataattggcctttacatagtagaagttaaaaaacttggtgattgaaaggggaaaagaaatgcatgcagagtaagaatactaaaattaatctttgcttttaatagtacaaacgtgtttgcaagcaattaagtttatcctgccaaaagaaatagcagttcagatgcttgtcaagtggtacaatgtccacagtgctccaggaggacccagttatcactcagagtggaatttatttgtgacttgtctcatgaacatgatgggttataacacagaccgcttagcatggactagaaatgtaagtaaatactattgttttctttatgagttattctgttaatgtaatggttgcataattggtaatataacattgagactacataataggcgtaccatattcaaaataatagaataatattaaggtttattgtatctatatattgtaaataaaatctcacttaatatttaatattaacattttactagtgattataattactgagctttagaatgttaaagcatatatgactatttctcatttcacctttgtaaaatgactgcaagttatgctaggattagtgatagtcttggttttattgatgaagaaactggatcacaaagaaatcacagatctgtggttttttaacaactatgactagactgcatcttctgactccttgtttaacattgttttctgaagacaagattgtctttt

SEQ ID NO: 95783 - DNA, 1039 bp, Homo sapiens
agtacacaaacattgcagtttgggattatttactactaaaagcagatttgggtctcttcacagtggtagccctggccactctgaggggatcattgtatgacagtgtagtgctataattgatgtggagccattgagaatggtataaggccaggtgtggtgggctcatgcttgtaatcccctccctttggaaggctgaggtgagggggttgcttgaggccaggaatttgagaccagcttggacaacatagtgagactctgtctctacaaaaagaaaaataaaattagccaggcatgctggcatgcatctgtagtccttgctacttgggaagcttgagctggtggaccacttgagtccaggagttggaggtgacagtgagctataattgcaccactgcactccagcctggggacagaggaagaccctgtttccccttaccaaaaaaagaatggtgtaaattatgtggtattaactcttaacccttttaagacagagagcctgtgaaacattttagaaactgaacgacctcagaaataaagttataaagctttggttaataggcatgttaactcatttagaacatcatgtaatgctagctaagcattgctattcgtggatgcatatattgaatattatatatttactgaagtatgtaggcagtattttatataaatgtataaacatagaagttgtatgtttttcatagtgacttttttttttttttttgagacagagtttcgctctagtcatccaggctgaaatgcaatggcgtgatcttggctcactgcaacctctgcctcccgggttcaggcgattctcctgcctcagcctcctgagtagctgggattacaggtgcctgccacaatgcccaactaatttttgtatttttagtagaaatggggtttcaccatgttggtcaggctggtttcgaactcctgacctcaggtgatccacccgccttgacctcgcaaagtgcttagattacaggcgtgagtcaccatgcctggcccatagtgacttttaatttgtcacccgagctag

SEQ ID NO: 95784 - DNA, 1838 bp, Homo sapiens
aggtgggcagatggcttcagcccagaagttcaagaccagcctggataacatggtgaaaccctgtctctaccaaaaaatacaaaattaaccaggcatagtggcatgtgcctatagttccagctactcaggaggctgaagtgggaggatcacttgagcctggtaggttgaggctgcagtgagctgagatcatgccactgtactccacccacgggaaaagagtgagatcttatctcaaaaaaaaaaaaaattataccaacatatttgcagttggatagtggaattggatagattattgacatttgaattgtttctttgctgtgtttggtgagtataaacttagaaatatcaaaagaaatatatgtttatattccttaacattttatttaaggatatgatgcattaaaggcaatatttttttttccacatgtttttattgcttaaaggtgggaaaggtttttattcctggactgccagctccctctctgacgatgtccaacacaatgcctcggcccagtactccactagatggcgttagtactccaaagcctcttagtaaactccttggatcattggacgaggtaagaaaaggactaggtgttgccaaaaagttaacattttttaaagaagtttggttaaacattagttctttccatggttaacttaattttagtttctacttgcagaataaatgttttcaaacagaagtgattcagttaacatacactgacctcccttgtgatgtatgtgatactttttgaaggtgctggagagatggaaatgatacattcttttccatctagggatctcacaattgtgtggagttgatgtactgtctgcataagaaattagaatttaagaaagactcatgactcagtaatgtggaaaagagagtaccatcgttgattgactgatgggaagataacatccgatgggaagataacatccaatgggaggacatggcaaaatcaaagcctcactgagagacatgtcagtcttcgtttggaccttggggttgagtaggatatctgtaggtagaaaggagcattcagggcaaggagaaaccacacaggcacaggcaggaaggccagataatgtggaacattttttagtggatatttgtatcttcatctcctagtcataaggactcaataaatctgtagaataaatacttataaaagtacaagtagtctgtagggtgaggcaggatagggtttggataacaataataaccttttttgagcattttctatgtgctaggcattgttctcagtgctttattagtattaattatttccttagaatagctttattgagaagatagtactatgattcttttttttacaaatgagatagaagttacaaatgaaataaacctaataagtggtagaactgggatttacactcttactaatgtgctcttaaaggcagaaaggataaaaaggtggttttattctgaatgcaattgacagggcattacaggattttgagaaaggagttatgaggttttggatctgtgttgtaaataggtgtattttgggattaaagataaggagaccggttagcctccaagtgaggttgtctgtgtcagtttaagaagtatgaagagggtctgagctagggcagtatatgtgtggaaaggagggattaatatgagaggccttgagaggtggaaatgagtttgtcagctgattggttttgtgctgctgggctggggaaaggtgatgtggaacgaggctccgaattctctgaatgacctgggaaggtacctggatttaccaagttaggaagcctggagaaaagtggtttgtatttaaaggacatgtgagtgtggatgttta

SEQ ID NO: 95785 - DNA, 1045 bp, Homo sapiens
tgccttggcctcccaaagtgcggggattacaggcgtgagccaccgtgctcagccctgagccacttttactaagatttctaagtttaccatgtcacattctttcctgagtcatattttgaagctgcctatgcttgacctaaggttagttgcctcatttctaccactatgtgggcaacagtttgatgaatattaattcccaaaatactgtggcactattttatttttgccttaatttatgttagtttttcttttttttttacttgttatttgatatgtaaatgtatctatttctctatatagatatatatttaaatgaccagatatgtatatctggtgctacagggacattgttttgttgataaatatatatgtctgactatacagggacatagtttagagctttttgaataatcattcattttccgaaaaagaagatgatctaagttttagttgtaaaagatgagttcttctaataataattctaaatctttagaatatagtaaagcacattgacatgaaccatttaaatagctactcctttttgaaaaattttaatttctgacctggattatgccatgaatgctcttctgtctgtggaatttttggaagtgtcattggagtgtgtgtcatataagcctgccttgctaactgtgatgtactctctcctctgtttattttgcagtcgtgctcattctcctgcgttaggagtgcactctttttcaggggtgcaaaggttcaacatttcaagccataatcagtctccaaagagacatagtatttctcattctccaaatagtaattctaatggctcctttcttgcaccagaaacggagccaattgttcctgaactgtgtattgaccatttgtggacagaaacgattactaatataaggtttgttatatatattattatattcaaagaaaaatgttgctgaaagtcttgggaaatatatggcattttgtttaaagtttccttttaatgtgatcagttattaatatatgtaaaaatatatagagatatgtattaaggccacctcagtttcag

SEQ ID NO: 95786 - DNA, 1545 bp, Homo sapiens
tagtcaggatggtctcgatctcctgacctcgtgagccgcctgactcagcctcccaaagtgctgggattacaggcgttagccacctgcccagcctcgaatgatgaaatttcttaatggccttgtccttgggcacacgtcgggcacagtttgtgcaacgaataggctgcatgtggctgtgcccctttttggcatgattgttgttccttcttttctttgtcatcttggaggcacggactggagggaggagtgtagccattattgatcatatttttgactaatatttagtgaactagaagttgcttatttgtgatgtcaagtaggatacaaataacacagtatgattataattttgtaaaaatgtataaagtgtgtatatatgtatgaaaaaaaccaaaaattctctaatgtattaatagtagatattttgagatggtggcatgatttttatttataaagtatttcttatgattatagaatcatattttaaaatttttcagtattttaactgagtgggaaacatttcctgtcaaataaggatatggagaccagtccatggtactttagattaaaagctgaactcactgggaaaaaccttattttgcatgtgtaactagtaaagcagaaacaacagtgtactgttcggcactgtctgaatagtaattatagagtacagctttcatacagaaaaacagaaccaataaggaagtcaaacttggcagaatagttgagtgcaatttataaataagtcagttgaagaaatcatcgaccttttacctgtggctgattcgtgtaatggtgagagtcagcacaaatcttaacatttagcaacagcatgtatgtgaagctaaaacttgtaatgctctcatctttaatgtattttaaggaagttgatgcctaaagtaaatttattaaaaattcagagttaattatttaagatagtaataaattttgtgctctctttggcttggttgttctttatctttaacaattttaagagctctgttcataaatatcagtcttgtaaagcccattgttctatacctgatttttctattttatttttaaggtctttttggttcatcacgggtgcaatatgttgtagatcatgcaatgaaaattgttttcctcaatactgacccctctattgtaatgacttatgatgctgttcaaaatgtgcattctgtgtggactctccggagagtcaaatcagaggtaaggagaaaggcaagtcacttctccttaataggaaagggtaggctgggtgcactggctcacacctgtaatcctagcattttgggaggccaaggcaggcggatcacttgaggtcaggacgttcaagaccagcctggccaacatggtgaaaccccatctataccaaaaatataaaaaattagccaggtgtggtggcttctgtaatcctatctactcgggaggctgaggcaggagaatcacttgaacctgggaggtgtaggttgccgtgagccaagatcatgccactgcactccagcctgggtcacagaatgagactccatctcaaaaaaaaaa

SEQ ID NO: 95787 - DNA, 1036 bp, Homo sapiens
cccgtcttcgctctaaaaaaaataattccttaaaaaatgtaggcttctggccaggtgtggtggctcacgcctgtaatcccagcactctgggaggccgaggcaggtggatcacctgaggtcaggagttcaagaccagcctggccaacatggtgaaaccccgtctctactaaaaatacaaaaaaactagctgggcgtggtggcgtgtgcctgtaatcccaactactcgggaggttgatacaggagaatcgcttgaacgtgggaggtggaggttgtagtgagccgagatgatgcccctgcactctagcctgggcaacagagtgagactccatctcagaaaaaaaaagcagacttaatttacttgaagtagtttgtttcttccttttttaaaaaatgcattcctttgtcagcagatatgggagaataaatttctttcttagctgccaaagacacactgccagtaagagaggtcaataaaaaaagaccgctttatgcacattactccatttgttctgtactgtgatgactgctgtttgcagaaattccctggctatattgatttccctctgttcgtgcattgatagaattactctaaggggagagatttctaggaatgaaatagaagacaatgtgaaaaatagtatgtacaaagtttagaagattgcattttgagatagtaggtttctagttgctcatgtaatctggagatttcttttcaatagaagtgcaaaatttgtgcacagacatactcgtattggtaattaattgattatttgtttattgctagagaacctttacctactatgttcagcatgctgcacccactagatgaaataactccacttgtttgtaaatctggaagtaagtgtatttctatattcttttagataagctcttttttttttgactttggtgagggaggttataaaggcgcttatatgaaaactgacttataaaaataatgtaaacattttacaaaaataacttctattttgactttcttgaatatcatggtattaactgctcaacagttatttta

SEQ ID NO: 95788 - DNA, 2109 bp, Homo sapiens
attttgtaagatgggcttttaagaaagggaggagttagtttttctaaagactttttcaaaagtcagtctagagagagtctaagatcagttgtttaatctggagattataaagtttgaataatctttagttttgtagaggatatagggtttagtatggtttgagctactatttgaatttttgctgcaaagtttctatctggtagattttttgattcttgtcttctctttttgtaaaatttatttttttaatttaaaattttaattcctatggatcttttcataaaatttaattgtaaacatattttgcctttccttatcatatttatcatttattactctaatttattttttcttattctttttgttcccatgattgtacatgttgagctgaggaggcaaagttattacgtagatgctattattattatttagatgccattagttaatagatgattatttagatataattttcttaggtaagcattttgttttgattttaggcattgtggtgtgacttcattatatcacaggataagtctgaaaaggcctacagtaagtttctttttgaaattttatttttcttatgatgattccaaatatttatctcattgtatttttcattcaaatgaagtagccactagtaatagtggtttaccataagcatctttatattgtgcattaaataatttgtgctgttaggattgaactcctttgagggaaaaaacacataagtcttgttgtaccctttcttttcaggtagcaatgaagtagaaaaatgcatatgtatattgcaaagctcatgtattaacatgcatagcatagaaggaaaggattacatagcttcattaccatttcaggtaaacaagtgtttcaaattttgggggggttttgttggagaacatttttgaattaattggttttagaggcatgtcttatgtctcatgtttcgtagtagtcaaaaatgttatttttactcaaaataactaaattttggcagctttagtggcttaccatttttctgtacttcacaagaaaataagttatttagtgaagtaaattaggaagtcttctgtggtatgtgtttgttggtttaaatgatacctaagaacttttggttatattaaataaggcatatgaataacaccagtctttttttgttactcatcgtctttttaatgcctagggctattgttaacacattgtcattttgttactgatcctggccagtggcaggaatttcacattgaacaactcctctttattagatttgattttatcttagagttgcttatttgtattactttttaagaaaataccgtatttaatgattatgttactttgtaaagctattactaaattggaaaataaaacattctgtaatgtttctttaaaacattttataaaggggtaggttctcttacttctatcttttcccacccttttacctgaaaggttgcaaatgtttggcccactaaatatggattgctgtttgaacgaagcgcttcttcacatgaagtacctccaggttcacccaggtattcattttattcacttcagaatattactgcttgggatttgtgtgtttgtgttggttctgaggtttatctaaaagtttgagatgatgataattttcatgttgacagcatagatatatgccattttctctcatctcagtacaagttgagtatccctgatccaaaaatctgaaattctccaaaatctgcaacttgttgagctccagcatgacactcaaaggaaatgcttattggagcatttcaggttttggattctcaaattagggttgctgtcatcaaaaagatatgtcatgatcaagtgggttttgtctcagggatgcagggatggtttaacatacacaagtcaataaatgtgacacatcacataaacaattaaaaaccatatgatcatctcaatagatgcagaaaaaagcattggataaaattcagcatcccttgatgataaaaacaaactaggcatagaagggacttaccacaaattaataaaagtcatatacaacaaacccacagccaacatcatactgaatggggaaaagttgaaagcattccccctgagaactggaagaagactaag

SEQ ID NO: 95789 - DNA, 1095 bp, Homo sapiens
agaaggtgaatatatatgtgattgcgaagcaggaagtctgcatttgtgtgtgaactccccaagtgattcccacgtgcacctcactgtcctttccctaccctacctcatatacttaatatgtccttttagtctcccaagcatgtgatttgacttttggaactatagagaaggtgtactttttgttcgtttttgtttttggcagagtaatatagaggaataatataaaacattcaatatagagaattattgagtaaattcttcatgtaattctgtagtgtaatgcatatatccacatcctccgttaatcagtgtaccaaactttgtaggagttgtgtttgaattgagtcttactccatgggcaaataaattttgttccagatttttgaagaacaaaaaaagagtgcttgaatatgttttacatgtgttaatttttaaggaaagctggcagttaaggaaaggagtaagtgaaattggagaagatgtggactatgatgaggaactctatgttgctggaaatatggtgatatggagcaaaggaagtaaaagccaggcattggcagtttataaagcatttacagttgacagtcctgttcagcaggtgagttgatttgaattttagcatttgattcactatttaatgcaattaaaaaaaagttttgttttaaaatttaacagaaatgataaaaccagcctaatgatctcagcagctgggtgtacgttgtaacatgacataatataatgtgaagataatggcaggaaaataaaaatttaattttatttttatatcatcactttttttacactcttctttgtcactttaatggtaatctttaaacactctgtccttatgtaattcaatttgttattgccagcaaaaacctataaaacatgaagagtacagaaatattttaacacatgattactataattgattgcaaagatttgaataaataaaaatcgtgggattcataatggtagagagaaaggaaaaaatctgctttgcagccattgcagttggctgttataactaactgttctgaaagttgataatgaaagggaaagaattaagcatttgccatattttttcaggaagac

SEQ ID NO: 95790 - DNA, 1075 bp, Homo sapiens
cagttcaacctctgatgaattagagtaatgtgtggttttttattgttttattccaatatgacaatgatcccttagatgtacttttcaaatgaggttctggcatctaaccagaaatgaccttaaatgttgaaaagccatgtagttatgggaccatagaatacaacttgtctaaatacttcatatataaagtatggaaaaattagcgtatagtagtgggaaacacgggataggtggtgcgggacataagtacttgttgcatctcagtggtttcctatagtggtaactgtcagtctgtgactaaaatgtgataattgcaactgtctgaatcagatctagaatgcccttttatgttatgaccaacttatatacttaccagtctgatataattacttgacacccatgtaaggattaatgacttgtgtgtttatggtatttttattctagttttgagtctggaagctgaccagaatgtgtttgaattcatacagaaataatgttgatatttggaacccatgtcgaacttctatgaagaaaggacaacgatgattgcagcaagggatttgcaggaatttgttccttttggtcgagaccactgcaagcaccaccctaatgctttgaaccttcaacttcgccagctgcagccagcttctgaattatggtcttctgatggtgctgctggcttggtgggatcccttcaggaggttacaatccacgagaaacagaaggttccattgagtttcccattgtgtttttgaaatgtagagtgatataatctacttgtaatttaaggctactaagatgcaactgagagatcggtgtgatgccacttctagagtagagttaaggtgtggtaatttcaataaatgttgaaaataatgactttattacattgtcatagcgacttatttagataccctctataacttgtggttttatttattttttatttttcaatttttttgtttgagatgaagttttgctctttttgcccgggctggagtgcactggtgcgatcttggctcaccgcaacctctgcctcccgggttcaagtgattctcctgcttcagcctcccga

SEQ ID NO: 95791 - DNA, 1050 bp, Homo sapiens
tggtttaaatttttttatttttattttttgtgtttgttttgttttagggtttttgagtgtgaacatccagaaaattcttttttttttttttgagatggaatcttgctctgtcgcccaggctggagtgcatgtggcgcgatctcggctcactgcaacctccgcctcctggcttcaagcaattctctgcctcagcctcccaagtagctgggattacaggtgccctccaccagacctggctaatttttgtattttaagtagagacggggtttcaccgtgttgggcaggctggtcttgaactcctgacctcgcgatccacccacctcggcctctcaaagtgctgggattacaggagtgaaccacctcacccagctcagaaaattcttttcctttttaccacatcgagctaggttttcccaatgaggtcagttggctgcaacatagagaaaatgaggctttggttcttagagtagattccgtgtacaggcgtgagtatgtgtccgcaggtggtcttgtaggaaatgcaaagggcgccaggtgcactcctggcttctggtacttcctgcttaatggcatgggtgagccaaccctcaggtgcccgggagggagccctgattactctccctctggcactctgggcattggctaacccgtgaccggagttaaaccagttccctctcttttcattctatgtctcccactcctgcctccagccgaagtgctaaaaatgcagcctggcaggggcagagaattccattaggatcagcaggccccttttggagaacaaggatactaagaatacctgccatcctggcacttcctccctcctaggccttacttttctctgtctgaaccatggctgttgaactgggtgattcttagccacaggaagggagggcctagatcttccctagttttgtgagactctgcagctggacagccatcccttcatgggagctgccacattttcactctcggggcctctgacaggcactaggatctagggacatggccggcatgtgaaaccctgggctgctatggccaggtcacctc

SEQ ID NO: 95792 - DNA, 1043 bp, Homo sapiens
tgggcggctactctgggacctgagtgggaggctagtgatccaaggcagcttagcagcactcgtttatgtgaagttaaaattccactccagctgtttatccagtccacatgaggaagcaatcctggaagaaggtgggagggataaggtggagatttcttgtgaattccacccaaattacaaccagaggcaccccacttttccatgtgctgtgtagaaaggaccacatttgcattaagtctttgatgtgggtaagcctttcagtctgaattcatctgcaatcactacccaaaaataattttgagagtattccacttctgtgggggaaaaacagggggaaaagatacgttatacaaccaaagtaatagaaacaatgaaaaatttagcaacttaaaatataatttctaattcatcattgcccaaacccttgggtccaaaaccttggaatggtttttgttttggcttttttttcttcacattttgtataatcacccagtgcccccacacagggctggtgaggttatgcattgcacagctctagagaacaatttatacagccaacaacgatgtgaatggcaataccaccccactaaaattgtgcagtacgagcctcaccaatctcaccagccacgtgggggtccagcctcagtcccaacagttctcaagggttagaccatggaagatttttactaactcataataaaatgagaaaataattaaaataatagctaacattgagtgcttactgtgatccagacagtaataactcctttattcccgttggcaaccctatgaggcaccatggttgccatccccactttccctgtgagcaaactgagcctgagcagcctcgagccaccagctgtccactcctgagaactctcctttatgccaggatcgcatctttcctcaatatctggtgtcagactgactttcctttgtggaacactggtggtagtgaggatgctgttgctgtcagccccctcttcttggtctcctgtatccttcctactcttcactgactgcccctgtagtcaggtcttcac

SEQ ID NO: 95793 - DNA, 1635 bp, Homo sapiens
gcccccggctgggcagcacagtaggagaaaaaagacccaccacatgggggcttcatcagggaacgttacaactctaagatgaggtgaagatcccaaaagcttccagagagaacagaagcagatcacttatgaatgaatcagaattacatcctgcttctctagagcaacccagaactcaaaggaaatatatcagtgacttcaaagttaaaacaaaaaatattttcctttcgaactctgtacccagccaaactacctcaaggtgaaggtaggaaaaagaatggcattttcaggcatgcaagtcccaggaagttagtgacggataagctccttgccaaagtaaaagagtaaaagccaaagagagtgagaagcggggagcatgttccaatgaaagctgacggctcttgactaccacaaccccgccggtttcaactgcaaagatgaaacagaatttagaaacttcactgtttggcttgaagaccagaaaatcagatactacaagactgaagacagaggtaatttaagaaacatccacagcagtgactggcccgagttctttcaaaagtatctcagagatgttaactgtcgtttaaagattcaagatcgacaagaagctattgactggcttcttggtttagctgttagatttgaatatggagataatgctgaaaaatacaaggacttagtacctgataatgcaaaaactgctgacaatgcaactaaaaatgcagaaccattgataaatttggacgtaaataatcctgattttaagcctggtgtaatggctttggctaacctgcttcaggttcaatgtcatgatgattgcctggtaatgcttaaggcaattcaaattttggttcaggagcacctgacacaggatgcagttgctaaagcaaatcaaacaaaagagggcttgcctgttgctttagacaaacatattcttggttttgacacaggagatgcagttcttaatgaagctactcaaattctgtgactgctgtatacagaagagctcagacagctacagacaaaaattaatgaagccatagcagctgttcaggcaattattgctgatgcaaggacagaccacaggctgggaaaagttggaagatgaacactttaggacttcagcttttcacctatttagtctatttagtacaattgggaaccatgtatacttccggcatgtttggaaatcaatatatcacattctcgggggaggaatcccagaaaattgagtaagttctagaggtttaccaccattacttttttctttaataaagtttaggaaagtagaaaaaaaaaagagtagaagccaagaaagaggacctgggctctaggaaacaggagctggaccacaggaggcatagaggatcctcagaatagtagtaaagatagctggaccccagacccagagggaacctgattagacagaggcagaagggaagaagccaggacaggcatctcctaaataaataaatgaatatcagtactgataattttgttgtggtgtgaggagatgcatacattcctttagagaagaatgagtgattgatacttaggaaactattaaattcaagataatcaaaaagctactcaagaatcgctatggggctgggtgcagtggctcatgcctgc

SEQ ID NO: 95794 - DNA, 1066 bp, Homo sapiens
tcttacctgtggtccaatctttctcgttctcatccccctaccccaccaccatagtgagtgatgctccaccttgtgattaaagaggttctcctaaaatacagagcttctcattcctggcatgactccccactacatgcaggttaaaatctaccattttaccctgaagtctgagacccattggggcttcagcctaactttcccacggtctccgcctgcctcacctgcaaaggcacctgcttgtgagacctgatgaacttttcgcaggcccatgagcgactgtgccttcttgccaagctgccttctcattgtctggcaaacccctgttcacttgacacacagatcacggctctcctctgaaaaccttcctggtcacccccttgtctgtatattcacaaggcctcttccccattgcattgaagaacaaaccctctatctatttgtcaggcctccaagaagacttactaatcaagtgattattatgtatgatttattagttaggttagccccatcacccagcacagtgcctggcacataagaactatgtgaatgaatgaatgaactaatgagcaaacaaatgaattacaaatagtccccgagttttaggtcctttcactgggacaaagggacatcatgataatgaagtaacttgtatttataaaattatttttacatttaaactcttatctcttttctcatttatatctccagctggtcctgtaaaattaatagaacaggatctttaatgtccattctgtagacccaaagggctaaaacaagtccagggaggaagggcgtggggcccaggctgctgactgtggggattgtgctgggctcacaggggttactctcaaaagtcagctagttgctgactgttcccttgtgtctgcgttttgtaacattataaaagaactacgtaaaaacttatttttaattaatttttttttaattttgaggaagctttagtttgatacctgagtcccttccagtaattcatgtatgaggaactaggtgctgaggtcagctttggggggccttgtgcagagtagctgcccctgacatgctgatg

SEQ ID NO: 95795 - DNA, 1077 bp, Homo sapiens
tgagtatttccacatcttttccagttcaaaggtctcctcatttcattagtgaataggaaagtgggtctgcgttcacttctttggcccttcactggaagacttctttggcccatccataggctaacacaattaccctcaggcatagggaggctcctcttgaaaacatgtttccctttactaatctcaaggaacgaaaacaggtattaatgcatttgtttggtagctgtagcctgtcatctataattgtgtttgtgtgtgtatgtgtgtgtgtgtgttttgttttatgcagcaattccctccccaccaactgaagtcagcatccgtaacagcactgcacacagcattctgatctcctgggttcctggttttgatggatactccccgttcaggaattgcagcattcaggtaaagttccagggtgaagagggaagtagctgtttggtgctctctgtgggtttaaggatttttcttccttccaaggatgggcatggagggcatttctccatctctgtacagagtcccctgacctccctgcttcagtgtccagcatgcatgcactattccatgtccatgctctgcccatgatactgtgtccttcctgtgcaggattcagggctcagtcagaagcaaaacgtgtttccaagggagaacatcatgagaccagggagagttcttcttctttttttttttgagacaaagttttactcttgttgcccaggctggatgcccaggctggagtacaatggtgtgatcccggctcaccgcaaactccacctggttcaagcaattctcctgcctcagccccctgagtagctgagattacaggcgtgcatcaccatgcccggctaagtttgcatttttagtagagatggggtttctccatgttggtcaggctggtctcaaactcccaacctcaagtgatccgcccgcctcggcctcccaaagtactgggattacaggcgtgagccaccacgcccagccaagaccagggagagttcatttttaaggtcccgaaacacatgcttgtgaccaagagttgaggaacccaggcactccccagtgtggctccttctgggc

SEQ ID NO: 95796 - DNA, 1051 bp, Homo sapiens
gtggtgcatgcctgcagtcccagctacttgggaggctgaggcacaagaatcgcttgaacccaggaggcagaggttgcagtgagccaaggttgcaccattgcactccagcctgggcaacagagctagactctggctcaataaataaataaataaataaggaatgttttattatacaggactttatttcattttaattatcaagtgaaagaaaacacgctgacaatttttgtacatactatgttactcctttttcagtacatagcttgggagtcagtgaggaactacaaaataaactagaagatgttgtgattgacaggaatcttctaattcttggaaaaattctgggtgaaggtaagcaatttaaagtaattcttttaaaatgtgggataagaaggtagcagtttagaataattctttaacatatatttattaaataaaatagcatctcaggactctgagttatactatggatagttatattttattatttaaaatgatagactattgatttttgaaactcagatctggcacatgaaaagattctcttcaatgcctagcacatacaggtccttgaaaaatattaattttctttcttcattgaaaagcatgtaattcattgagtagtttcctatgtactttaagtttattcctctagttcttaagttcattgttcttggcacctttctaattaggaacaaaaatgaaaatacgtatttaacttgttaagttgttcttaggatgaatgataatggtattaaaagtttgtgctttaaaaacttcaataatatttttcatgttctcttctaagtgtcttggattggttataatgcttaataaagtgatgagcaaaggtaggcccaagccacccaagctcgtgacaagcaggagactagagcgtggcgcatcaccctggtttgcgatgtgggtggcctgggcaggctctgcctggctgcccgtgggtgagttgctctcataccacatgaaaccagcagctctggcactgtagcatttctgtggtcagggaagagtttgcacagtgtccatacaggtg

SEQ ID NO: 95797 - DNA, 1048 bp, Homo sapiens
gactctctaggtacttcatgtaagtggaatcatagagtattcatccttttgtgacaggcttgtttcacttagcataatacagaattttaaatgtctctctcttaagccagtttaattcaaaaaatttggtatgaaaatgcatccaactcacaaggcgtggttgagcaaccagacttgcaggacatacaacaatagaaacagagaggtgtggggttctttctttttttaaaaaaagcaaatataattgcaacagatcagttagaattgttctttgttttggtgttggggttttttttttggaattttttttctttaccattagactttaactttgtagagcagtttcaggtttgcagaaaaattgggcagaaagtacagagaatgcccataggtcccctcctgacacacataatttctcctattattaatgtcttttattagtgagctgcattttttgcaattgatgaacccatactgatacattattattaaccagagtccatattttacattagggttcactcttggtgttatacagctctgtgggttttgacaaatgtgtagtgtcatgcatccatcattatagtatcatacagaattatttcttggccccaaaagtcccctgtgctttgcctgtttgcccctctcttatctcccctagccctactagcccctgacaaccactcatctgtttcctgtctctatactttcatctcttcctgacctgggttttagagaacagaactgctgttgcccacccactccccttaattgagtaaattatccatacttaaccttttctattttctcctctagtggacaactcttcacagcgggagatcgaggagtttctcagtgaggcagcgtgcatgaaagacttcagccacccaaatgtcattcgacttctaggtacttccgagaaatgcaggagtgggtggccaagagggctctgctgatctgctctgtgccaaaggaaaaaatctctggtgtagataagtttacacttcgtataaccccaacataacttataacattgaggttttcaccc

SEQ ID NO: 95798 - DNA, 1131 bp, Homo sapiens
tgtaacattttactccctatgttgacttacccaccatgagcactgtgaagccctgggaatgttggatgtagctgtagaggcagttacggatcatctaggaaatttaggaccatggagacgcttgcctttcttcagggtcaattttcagtattgactttgagggctgtagcgttaaggaatcatagccactggggacattgtatctttcatttcctaggcctccttatctgaaacaaaaacagtatcctcctgttatgttttgtggacaaacggtagactgcgagcaggcggtgtgtgtcctgactacatgcccagctaagcaggacgccccttcctgccttgcacgcatcttctctgttgcaaaaggcagcgatcctgcggggttctggttgggacacatgtgggaacagggtgtggctggcctctgtcaacagtcattctctgactgggcaaaaggcaaaagtcactccagatcatcactgcccttaatcacagctgtaagaaaccacaggtcctgggaaggaaccgaaccacccagtctacaccttggcattctcggacacaccccacctttgtccctttagctgccatcagtatgaggaccgctgagtgcagtggtgcaattaggaacaactgcttccttcactgcatcagcgatggctccaggaaagaattcttgctgctcttgcttgatggtctgatgagtccacaggatgaaagtgcaaggaaattagttcttagggaccatgaaaactcactcccactggctctgcagacaaaacacaggggaaaatgtcccatgcagcaccagtgtggtggagttctgcacactcccctgtatctacaaacctggggtgacagtggcctagggtcagccaggtcgcttttccaagtgaagcagtgccatgggactcactcacaaactattaaccaaaggaagtttattaagttctgcccaggtgcggtggctcatgcctgtaatcccagcacattgggaggctgaggcgggggaatcacttgaggtcagttcgagaccagcctgaccaacatggtgaaaccccatctctcatgaaaaaatacaaaaattagccaggtgtggtggcaggcaccagtaatcccagctacttggga

SEQ ID NO: 95799 - DNA, 1003 bp, Homo sapiens
gttgaagcagcccgaagactgcctggatgaactgtgagtgggcttctctgtctcccttccatactctgcatggggcagccacctggctctgcactgacctcggaaacacagccatgggaggggaaagggactgctgttagccaggtgggcatgtgcagaggggtggaacccacagacaccccagcccaggagccattcctgatgtgggagatagtgtgtggtatctccagtgagcccactgaggctcactcatccaaagggcctcagtctcgaacgacaggcacggtcaagacaaggcaatggcacctgtcctaaaattccttacacacctctaggaaatatatccacagataatagcttcgccttgtagtgcatgaggtccttgaatgattcctcaccctcttttggtccagttatctttctccttctatgtagcatttcaaacactccactcacagtagtagccttcatcaggaaactcagaaatctaaaccaatgactttggggtcaggctgctcatcagaatcgcttgggagatagtgtaacaatacgattcctcggccctgttcccggaaattatgatgctttcggtacaaagtgggcccagaaatgtgtgttttagaatgctccctggggctgggcgcagtggctcatgcacgttatcccaacactttgggaggccaaagagggcagatcgtttgagcccaggagtttaagaccagcctgggcaacatagagagaccctgtctttattaaaaaataataaaataaggccgagtgcggtggctcacgcttgtaatcccagcactttgggaggccgacgcgggtggatcacgaggtcaggagttcgagaccatcctcgctaacacagtgaaaccccgtctccgctaaaaatacaaaaaattagccgggtgtggtggcgggcgcctgtagtcccagctactcgggaggctgaggcaggagaatggcgtgaacccgggaggcggagcttgcggtgagctga

SEQ ID NO: 95800 - DNA, 1065 bp, Homo sapiens
agccggggagcggggagcggcccctcctccggcccgacctgggctgcaggcaagagccgtcaggattgcgcatgggacggccctcgggtccgagcgctcggactgttactgagggtcaccatgcccgacgccgtggccctcattctgctctgacatgttttggctggatcaggaatctctcggcacatctagcagcatctttgggattcgactcttcctgtccggatgcagccacagtgggccacacccctgaggccgcagggaggacttgccagcgcttcagtttctgcataaacttagaaagcgggtctgccgcttccttaaaaaaaaaaaagaaagaaaaaatttaaatgagggggaaacgtgcagtagtcaccctacctctatttctctcttcttgagttcctgaatttctctacagttcctgtcacagttccgggagagagagtgtgtgtgtaggtggggcgggacttgtgattagggagtgcttgaaaggcgaatctggaggcatgagtgggtggaaactcttctttccaaggcaggctattagaaaacttggcgtctggtaattagaggagatgatgtgggagagatgcaggggcagaattatggaaagtcttgcaaaagagagacaggaagtctggaagaggcattatctccggcttctctggggtcagatgactcatccagcactgtttgggatgggtattttccacatgcatgaaataatgtccaggttctaaagatgagacttatattttgatttccttaaccagaaaaagaaagtagttccaaagactacaaatacttcccacaacacaaaagctactcagaggaacacgctgggtatctttctggatcttttaagacctagtgcagccatttcctccaggattggattcttctgggttggtgacctaatttgtgtgccagttatagtctgcacatctccattatttaatttcctgaacgggaaaaagtagaactcagtgaactactctcatggcttcctgctgctacgatagtgaatagtcaatataactatattggaagtgaatcagttgc

SEQ ID NO: 95801 - DNA, 1544 bp, Homo sapiens
tacggataacagatttatgagtagatagtcatatacactgtgatatacttgggatattactggagcaccaagggggtcacctaaccctgcttcctggaggagagacctgcctcagtctttttttttttttttttgagacgaagtttcgcttttgctgcccaggctggagtgcagtggcacaatcttggctcactgcaacttccacctcccgggttcaggggattctcctgcctcagcctcctgagtagctgggattacaggtgtgtgccaccacgcctggctaattttttatttttagtacaggcagggtttttccatgttgatcaggctggtctcgaactcctgacctcaggtgatcctcccgcctcagcctcccaaagttctgggattacgggcgtgagccaccgcactcggcctcagtcttaaaagatggataagtactaccttgatgaagaagaggaggggaacagagcagcagcagtgcaggaaattattggtgttcctgctacatcaagttctggcagggttgttagaggggactcaggtcaccacaagctttccatgcctgagcttggccttgagcctgaggccagaggcctcaaactcaaggacctgtgttggccaaggcaagtcatatcattaagcacagtgagctaagttcaggactggagggggtagtgaggaatgttgtggactacagattgcatgcccattctgaagagggcagctgccatttggcttcagcttactctgcatacattctagcagagtgggcacagaattgccacagctcgtttttttaagtgagactggaatccatctttttattatgtcaactaaagttttaaaaaggcctcttgtgggcccagtatatcccatttttaggttggattagacctccagactcccagtagctactttaggatgtgaatgagggagccattgaaagatcttagacataatgctaatcactatggctgctgtctaaagatgaattataggatcagatctggaggtagaagtaccagttaagctattgcagaaattaggcaggaaatgcagagggcctaaattagggcagtggtgacagagatggagaggaagaactaaatttgataaatgtttgtgagataaagtaggcatgccttggggattgggtgatggaagtggggaactggaaggagccatggcttgggtgactgtagatggtaccacctccagccaaggtggacaatgtaggaaaagttggtgagcagagaggagtgtgtctggtttaaaacaggtttgtctgttggacatctgtcagtggacatgtcctttaggcagttgggtatttggatctggagctcaaaggaaggatccaagttgggaattttattgttgttgttgaaactctgttggggaagggaagaggttaccacttgtcctatcagtgttttttgttttgttttgttttgtttttaatgcctaatcatttgtacatttaacacagtctctaactgcaggatttttattcctgagaagacattaaacaactaatcaat

SEQ ID NO: 95802 - DNA, 1803 bp, Homo sapiens
ttcacatttttgagtgctggaggacgttgtagtcctttaacaactttgttctagcagacatttaagttccttgtgggtcagtttgatgctttccagttttcttgttaagttcttttaggatggttctgcagtagccttttgtctagggcaaacttaacagtgcttctgtggtgtggtctttctgcttgtcttccaaatacctggtatatttactgaggcctttccactctggctagtggaaactcaaacagttcccaactctgtgtgagctctgagaattgttgggcttgttcctatgcatgggcaggctgcccttcagccagaaactccaggggatcactatgcagatttctctttctctttatgtagcttccatctcttgggtactgtcccccagaaaatctaccagcctcagtttgttgaacttgaatctctggtctcagtttggtttcgctctttgtcattatcagcctttgagatgtctcccagtgatccttgcttcctgttattcatgatcttgtgtggtcctctaacacattttatcagagttggtctgagtgactgatagagcatggtggaaataatggcacatcccttctgaggctaagttataaaagatactgtggctgcatctttgctctctctaatcactcactctggggtaagccagctgccatgtcgtgaggacgttcccaacagagctctccttaactccagacttaatgcttttcagtctgcctatttgtgtcactctcttacctggatcattcaaaagaaaggccaaactcctcagcagggtctaagacctcatgaattttccccagcactcttctccagcttcaactctttctcctttccccagcctgtgttctaagcatagcagactattttcaggggtcatactcatgctgtgctttcactcaccctgggcatttacatgtttggtccacccttctcttcaccaggctaacttctgctcttccttcaagttacaggtctcctcctccagcaagcttacccagaacccattcttcatgctctcctgggctatgataggtgacctgctcagtgctcccttgactattctcagcctctgggactactgagagtgcctgtttagttgttaaaactcactcctccagtacctcttaagtcatagacaggcattgttcttgtttaccatcatagctcacaggatggcacacaggatggggctcactcagtatattttgaatgaatatgtgagtgagaaaaatgtttgagagtgaaataagcagtgacttagcatatcaggccactcagtttatttaattttagacttatacgtgaaatgagcagtattacagcagcttttggttaactgtaacaatttaatgaatttatctgtctcactttacagtgactttttggagaaattagctaatgttttactcattgttacattaaagtagcctatttttaattgcattctcaaaaccttaagtttatattagagtgtatgtattattcatgtaaaacaagactttctttttctaaacagttaagtcattccattgttctgggcctgtgaagtttaccatagtgtggcatttgaagtatcatacctgtcacaatgagcattctaatctggaagtaagtaaaacacaagtttttaatgtatataaagctatgaaggaaaattatgggtataaagattagctcatcaagcgaggaggctagaaatagagattacagttttagaagtgctacagattaattttgggacttatggcaataaaccaagttacatgctgagaatactac

SEQ ID NO: 95803 - DNA, 1030 bp, Homo sapiens
tgataccagcctggccaacatggcaaagcctcatctctactaaaaatacaaaaattagccaggcatggtggtacatgcctgtaatcctagctacttgggaggctgaggcatgagaatcacttgaacctgggaggtggaggttgcagtgagctgaaattgcaccactaaacttcagcctgggtgacagagcaagactctgcctcaaaaaaaagttttcttatatatgtctatatgaattttgtatatactgttactatctttgtctaaaaatatccttaaagcaatttaagatgcatttctatgcagcctttcttttctttaaaaaataaaattccccctctaaatgtgcaagacagcatagcaatgggctgtgcgtgtcattaaggatttaaagaaatagaaaccatgaatgtagcatgtgggagggaaattttggcattctggggaattactaaaagttagaagactgagtaagaggtcgaaagggatgggagttatgtgtagggactgaaaacaggtttgggagagcttaatgtttgcttttatactatgactcttcatgttttctcttcaaccatcctaaagaagtctgataatggaaaggcactcgctctgcagtggccaggacaaactttgtacaaaatctgtcatatgatgaggagtaggaaatgaaagaaacggataggaaatattcaggaaaatggagtataagaagtgtgatccagttatgggagggcactggagaatttacaagcattacagtgggaagttttattccttagtggaattgcaagtaacatagtgccttaagaaatttgaatcatttagcttatgtacttaatctgagtcatttctgacaatgttatctaacttcctcttcccccaattcaatttaaaaaccacacattaggccgggtgtggtggcaggtgcctggaattccagctactcggaggctgaggcacaagaattgcttgaacccaggaggctgaggttgcagtgagacaagatcgcaccattgcacttcagcct

SEQ ID NO: 95804 - DNA, 1554 bp, Homo sapiens
tctgcttctctctgtgatcactgccggtactctcatcatctcttagttttctggaatagtctcctgagcattttccttgcctgcagttttgttcctctccaaaccattgtaggtagagcaatcttgataaaataaagccatccattttattccagcagtcagcacattttttctgtcaaggccatagaggaaatattttggctttgcaggccatatggtctctgttgtaactattcacccttgccatcaaagcataaaagcagccatagacaacatgcaaacaaatgagcattgctgtgttcccataaaactttatgttcaaaaacagatcagatgtagggccagatttggcccatgggccatagtttaccaatccctcctttgttcttttgtttattgttattgacttcccactgcccttaacatcgagtccagactccatgacaggggctccaaactgcatgattggtccctgcctttatgaccagcctcttttcttgacatctaccattacactctctgctgcaggcataatgaactttgacttcttgcagcatagtttgcttttcctcttttcttctctgtgcctttgcacgtgccgtgttctttgctttgtcatcccccacccccaaatacttaactcctacttagccttcaagtcctgatttagatgtcactttttctgagtttttcaggacccaattctagttcccccaggtgtagattagactggccttcttccaagtctggagggatgatgtgttacctcttgctcttaccacactgagttctatttacttagcctaaccagagtacaagctccatgaaggcagggatcaagatgtctttttcactattatagccacacagtaggagcatatcagatacattttaaatgaatacatgatgaggagatcctggagaaaagagaactctagaggatgttgtggtttttaaatatttacaggacaagaagagagagttctgtaaagagcaagaacagagggaagctcagggagacagtgttcgggctgatagaagaaagctgtgcccagtggagcagattagatagatagggagtgaattcttgaggcgagtatgaatccttcactgaagttttcaagcatcagttggattcagtgacttttaaatcaaatgtggctgattggtctgaagttcgaatgtagttatacacaggacatgttgttgagaatcttggttggcaggcttccaggtgtagacaaagtgaattattttatttttttcttcctcagcccaaggcttattgatatttgcggagttgatttctgcgattaagaggacgttggctcgccttctcgtgatcattgtgagcctgggctatggcattgtgaagtaagtactggcgtgtgggaaaaatgctgggtcccagcccagtgattcagtccgtctacattatgacctttgtgaaaatggaacttctaagtattgtagtacaaatccctttgggaaaaatctacaagaacacatttttaaaagatttccacatacttgctattttatgttatcttccaa

SEQ ID NO: 95805 - DNA, 1116 bp, Homo sapiens
taacaagttagggagtatggtccttcattcaattaattaagctgcagactgcgttttttaaaaaataaactatcttttctggtaatttatagatatttatttcaaagatttcttgttctttttttttttttttttttaagacggagtctcgctctgtcaccaggttggagtgcagtggcgtgatctcaactcactgcaacctccacctcccaggttcaagcgattctcctgcctcagcctcccgagtagctgggactacaggcgtgcgccaccacgcccagctaattttttgtatttttagtagatacggggtttcaccatgttggccaggacggtcttgatctctttatcttgtgatcttcctgcctcagcctcccaaagtgctgggattacaggcgtgagccaccgtgccctgccgatttcttgttcttaaccatccacaaggtagttcattgggaaaaacacttagtaatgcagcttggcagaaaattccaaagaaaagcagctctgatggctctaatccatctggatttgagtgggggtaatttattacctttatgaacagcattgactttcacacattccagtatctgattagtcagattggggtaggaaaataaggaaaacagatgaaagacttagtttgcttaattatgaatatttataatgaaaatgtttcagggaatagtcaaagaaatctaaaatgtgaaagatctttagtgtttcatggtgagacaaaggaagtctagtgtctatttctgcatgagcctgaatttgtgaagtttgctgtcagattgctctttggtaatttttatcactaaaatgaaatgtctgctttttctatacagaaagatagcagatttcctaaatgatataaatgacaagaaaaaaaaaagcagaactaaatacgtatacaattgagtgctttggaaaatgaccctgcttcctttgattttgatgaacttaatataaccaatcctctaagaatctaattctaaagtcataggaaaaaaaataggctgaaaaattcaaaagccatagccttagcctttctcctgtggcccttcctcccctttttttcttcttgtttctctttcgtttctcttttcttttctt

SEQ ID NO: 95806 - DNA, 1045 bp, Homo sapiens
gtgcactgctctatcccgtgttgcgggtgcatggcattggtggaacgcatcatgggtcttccgtgttttttccttggagtttgttttcttagttcagacaatggtaaattgtaaaagaaaatctgtgataaagtataatgattgtacaatattggccaagataacattttctgtgttttcattagcttcaaattttaggaactgtatttagcagtactgactttgggaacatagtagaagattctgttttttttttttaacctcttattattacttggaatgtttttccttaacttttttcacatttttattagtttggcacaaactatgaagaccctaaggctaagaaagaacactgtgaaattttcattatatagacattttaaaaatactctgatctttgctgtgctgggtaagctatttaatttttcttacagtaaattatcttagtattgttatattccttcaaaggtgactttttgtgtgtttcagcttctatagtgtttatggggtggacaactaagacatttagaattgcaaaatgccaatcagtaagtataaccttcctatttaaacagttatttttatttatactattttgtagaattttgaacaatttagtttatgcttgcaaatagaggtgattttaatggagatttatgtttttactttgaactattttttacagagttataaaaacttttggctgggcgcggtggctcacgcctgtaatctcagcactctgggaggccgaggcaggcggatcacgaggtcaggagatcgagaccatcctggctaacacagtgaaaccccgtctctactaaaaatacaaaaaattagcgggtgcctgtagtcccagctactggggaggctgaggcaggagactggtgtgaacccaggaggtggagcttgcagtgagctgagattgcaccactgcaccccagcctgggcaacacagcgagactccatctcaaaaaaaaaaaaaaaaaaaaaaaaacttttaactcctccaagtgagtctgaaaaagttcctccgaaatctcct

SEQ ID NO: 95807 - DNA, 1011 bp, Homo sapiens
tttattacatcagcttatgttataattgttctagtttatggagaagcaatatttgcaaattagtgtaataacaaaagtgactacttactgggcatagattgtgtgtcaggcattttatatgtgctaacttgttcaatggtcactagaactctatgaggtagaaattattattatccccagtttatagtcagaaacactaagtcacaggaagttaattgccttgcccaagattccagtgaggcagacacttagcctttgctccactgaaactgcaaacatgcagaagagccttggtcaaatatgaaagaaatcttgatctttcctatcttctttatgccatacgcacatttcaaaatttgtacatcagggatgtaaagcatacccaaagatgtgttttgttcttgaatgtaccatgaatcctgaagatttttaaatccataaactttaaaataattgcaattaaggaaatatgtatgcatgtatacttgtttaaactctaaaactaggattcaaacaagaaacttgaaaacctggtggttctgacaaatagtttccaaaaatctgtgaacttttttcatatatttttcctacattcccaaatggtaaatccagcatcctgcctaaagtttccattattaaccctccatttctaaaaagatatagtattttttcttatcagattattaaatttctaaaggaaaatattattttgtgattttatatatatgtttataatgtctctcgtagccgaaggaataaaattaagagcctcaaaatcagtttccaatggaacagctaagcctgccacttctgagaactttgtgagtatggtatatatttagtacaatcttagtcttccttagtcttcactactttagagagctatacgagtgtcatattcattgactctcagaagaacagtttttactaagattttgttgttgttgttataaaaattagtgttgccaagtgccaagtagcaatcctggttgtccataactgaaatacctt

SEQ ID NO: 95808 - DNA, 1654 bp, Homo sapiens
gaaatggctgaaaaaatgttctcttcagaaaagataatgtgattggaacccgtataagaaatgtagttaagcctgaaggactatccttcatcaagactgaaagtgagctttgatttgatattgcctaaaaatttttattgtgttatcttggaagtctgtgtatcaaaatgaagaattcagatggtaggaggttctatagtccttttaaagctgactcttgagtgtcagttgaatatccattaaattggatttggaaataacctgaggaaagtattatgataaagatctgcacagatgcctcttagctgataggtggcaggcctgtgggtttgggttctccctcttttctctggaacatatgacaattccagattaaagaaaaatgttttttaataaatacccttggtctttcttctagtcacctttgaggtagatattgtgattttctggagtatagtatatccgtgtctctgtgtcttaggtttactagatgcaataatacttctctttgacatttgtactgaagtgatttgatattaagtaaaacagttaatgtttgaatataggcatatttataggttttttccgctcccccccaacccaccctttttaaaaaatctatacaaagcccttgtttgagtctcatcatgcacatcaaatcatggagttaggtcttctctgagctcaggggaacacaagtgcacagagagagatgtcttgagggtcactaccaaagaattaccctcattgtccctcactcaggccatgtgtacatgcgatgctgctgagtgtgctggggtgggtggtggccacgtggctcccccagagcacttcctaactggcaagctgggagacccattactggtgaactttgtggaaattagaactgtatcttttacataatcttggcatattacatttcataataaaaacatacatttagttgcatgctacatcactattgattttataattaatttcttaagcttcaaccatgttttataccttatttcgttacatcatatatttgtaatgtgtaatatgaaatcttttgctttaatgtctttttttaaaatgtagaatgttctaaacttgaaaggcaattgaatgtagtatgatgaaaatgtgaatgttttgctgctttcatgaccaaagatacagggctagtggacatttagaataataattaaagctagagtcttgtatgtcttttctttgaaggagttctaaccttgtaaattgagaatgacttcagagaattttgattaagaaaacattaaaatcttaaccggcacaaacactccaatttttttcactgtgaagccgcaagcaattttttttctttttctttcaaaagcctaccttctgaatttatttcttgtttactcatttcagagagggtagtaaagaagatctatttctggtagtcatatcgcttgaaaggtattggtaaatgtgttttcagtcgtgaccatgtggaaagtgaacagtgttggcaaacattaccgagaaaatcatgcttttcaagatgcccttgctttgggatatccttcctagggagaaaaaaaaaaagtagtttaacaattgtgaattccatttcttatttcagtttctgctgcagtaatgggttcccacccactataattcccagcat

SEQ ID NO: 95809 - DNA, 1081 bp, Homo sapiens
gttggcatgcaacctcaatagggttctcaaatagaagtatttttcttcttcctccgccactaaaaaagaattataaaatatttgatatatttacatacctatatggatctacatcagcctgcttccttgtgtgggcttgtctatcaggtatatttttattctcctcttgtgtttctttgtagatttaccaaatacgtataattcacaaaacaatatatttagttttgcttatgtttggattttatcagactgtatcatactctctgtattaattgatgacgtggctattttcacccaacattattcattcgtgtagatgcatgcagctgtcattcatttttactcctatataacatttcactttatgtttatattagttatttggtcattctactattaatgaatatttaggttattttcaatttttaaaaatactaactcttgtaaatatccatatacatacttcttggcatgaatgtgcacaagttatccacagtatgtgccaaggagtagaatcatatcatcataaaatttaatataatatcagtttttttctcaagtagttataccagtttatactcctacaaactgtgtagaagaactgtcattctacacttgccagtactttatattgtcaatactttaatttcaaccaatttagtggatgtaaaaatagaatctcgtaacttaatttgcatgaagtgcagcatcttttcttatgcttactggtttttgagtttcatctttggtgaaatgcctgttaatgtctttgcccatgtttttattggtctgattgtcctttatacattgatttctatatattccttatataattctttgtgaggtatgtgtggcaggccttctcccattttgtggacggtcttttcgttttttgttttttttttttgcggcatctcagtgagtagaattacttattttgggaatctttttgtttatgcctacttttgtgttttgtgtctcatttaagaaattattccctgtcatgaggctgtaaagtaatttaactttttttttaagttttggagctttgctgtatacgtttatattttaatccattggg

SEQ ID NO: 95810 - DNA, 1055 bp, Homo sapiens
actatcaatgactcgggaaaaatgggaagcccagagaagatcaaatagtcatgaggcatttcaaaggccactgagtcttacaaattttttactactaaagtccctcatcctggctccctctggaaattaaaaatcaatatttctgagcattggccttactgaatctccccactccccaccttcctgtattttgattttggtttttagaagttccctttccttggtctgtagatgtaagcagggtagaataataagtacctcttctggattccacttttctgagggcttttaactggatggcaactttttttattaggcttggtcatatgggacaagggtaaggggtggtaaaatattagaaatgccaaatattctagattgaaaaacatttatatacagtctgtcccctgcctccatattttatgaatgaggaatctgaagccctgtggttcaggtaattacccatagtcacacagggccaagccaggactaggattttgtttctcaaccccctgtcaatattctctttgatttgatttacatggctcaaatgattattcagccaaagctgacagcccttctacacaaggaacaaattctaaacatatatatagaatttaataatgttaccaaataaaacaagatttaaactggcagatatttataagacataaatttgatggtgctaagtggaaatttgacattattataaatgactgtacagtcagctcccttgtttgtacatactgtattcctaaaactgtatgcaaaaatttggtatacagaagctgtaatctgtagcataagttaacatgtaaaaagtaccttatgtttctgaagagcttaaatgtattataagattttcttcctttttttaatgtaaaaatctccttttatacctttatcaccatctttgacggtgtatttctagttgcgtgtgttaatttgagctgataagtgtgctcaactcacacccagtgagcatctcattgaaactatagattccactgcttttggttcactctgatttccaactttgtctctaccactctaaa

SEQ ID NO: 95811 - DNA, 1002 bp, Homo sapiens
gttcgctgcatagaaaatcaagaagtaaggactatgatgtatatagtgataatgatatctgcagtcaggaatcagaagataattttgccaaagagcttcaacagtacatacaagccagagaaatggcaaatgctgctcaacctgaagaatctacaaagaaagaaggagtaaaagataccccacagggtaagagtcaaactattttatcatttaaagtttatctagagaagcagtcacagttgtccatatacggacagaggatttttctttgcactttatcttatgataagactatggttttcatgaatatttataccagacatgagcttgcatggccagagaccccatctgagacctggccacttggtgcattaaatgcttagtttgtagagggagctggaggatggaggtgggttatcaaaggccctgactatttctaaagggagaatgctaaagccctggcctctgcatgtgtgaaggataggatatgcctgcttgtattgctgtcatttaaagaggattgactggaatggttgtatgtcagactgtaactcagaaatatattcttctagattactaaaatgagatttagccataaatatgagggcaaatggcaattataaatgaaatttttggccaggcatggtggctcacgcctgtaatcccagcactttggaaggccgaggctggtggatcacttgaggtcaggagttcgagaccagcctggccaacatggtgaaacctaaaaataaaaaaaagtatcagggtatggtggcacatgcctgtaatcccagctaccctggaggctgaggcacgagaatcacttgagcctaggaggcagaggttgcagtgagccgagatcacacagtgcactccaacctggacaacagagcgagactctgtctcaaaaaaaaaaaaaaattaaaattttaatgctgtcatttttttgttgttttctttacttaaaatggatctgtattgcttgagcccaggagttcgagg

SEQ ID NO: 95812 - DNA, 1054 bp, Homo sapiens
gttccttctgaggctgtggggaagaatctattcattcatctcccctagctcctgatggaatgctggcaatctttggtgatggcttgcaaaagtatcatcctgatttctgccttcatattcacatggtgttctccctgtatgcctgtgtctgaattgtctgaatttcctttttttgagacagagtcttgctctgtcacccaggttggagtgcagtggcacaatctctgctcactgcaacctccttctggactcaagcaattctcagcctcccaagtagctgggattacaggtgtgcaccaccacgcccagctaatttttgtgttttttgtagagaaaaaatatacatggggtttcgccatgttgcccaggctggtctcgaactcctggggtcaagcgatctgaccgcctcggcctcccaaagtgctgggattacaggcctgagcgactgtgcccggctgaattttccttttttataaggaaatcagtcactggactagggcccaccctaatgacctaatcttaattaattacacttgcaatgaccctatttccaaaaaaggtcacattctgaggtattaggggttagtagttcattataagaattttgggagggtgcagttcaacccataacaaaggtaatgtatattcctatcttgcccttcttttctgtttttgaacatggagaaacgccatctctactaaaaatacaaaattagccaagcatggtggcaggcacctgtaatcccagctactcagggagctgaggcaggagaatcgcttaaacccgggaggcagaggttgcggtgagccgatatcatgccattgcactccagcctgggcaacaagagcaaaattccatctcaaaaaaaaaatgagttttaacacactatagaagaatgggttaaattgtcactgagacttataagacagaaatagactttaatagtgtatcttttacttagctttcttgcttgcttgctttttctttttctttctttctttttttccttttctttttctttttctttcttttctttctttctttcttttcttt

SEQ ID NO: 95813 - DNA, 1569 bp, Homo sapiens
catcctggccaacatggtgaaatcccgtctctactaaaaatacaaaaattagctgggcgtggtggcagacacctgtagtcccagctactcaggaggctgaagcaggagacttgcttgaacccgggaggcggaggttgcagtgagccgagatcacgccactgcagtccagcctggacgacagagcttgactctgtctttaaataaacaaacaaacaaacaaataaataaataaaataaacaaaattctactatctgaggtaaaggacgaaaaagcttacagaagggcaaccacggcggcgcctgcgcagagccgaggcgaaggaggcagggagagacccggcctgcccagagtcgcggagggcggtgcagcgcatgcgcggggcaggtgaggctgcgcggggcggagcctgtggccctggcgcggctctgggtccgtctcgtcgcgtccgggttgtcactctctcgggttgttactctgtagcttcccggctcgcgaaagggaggacctgtctgggtcatggattttgagaatcttttctcaaaaccccccaacccggccctcggcaaaacggccacggactctgacgaaaggtgatcccatatcttttcatcttttgaatgcaggggctcagcgggactccgcctcttagtttcttctggattggaggcagtccggggccacgtccgggccgcgtcgcgagggcccgtggggagcacgtgggccggccgggcgccaccgtctgacctatagaggtcgtgcggggtccgggtgggagcagaagctgaacgcggggctcaggcttaggccgtcagggccggggctgtcgagagcctgggcgggggagcggggtggaggcgagaaggctccgggatgcgcccctttctctgcacagcagcgggtgaggagcccgcctctgtggtcccgtagcgtctgtctttaccgttgttgcctgtttccacgagaccgtaaactcccagaggacactgatgtgacctttttcactgacacctcctaggttcttttctgtagaaaggatgaaaccacaagtttattgaaaggtaaagaataggcaatactctgccattagtccactgatttgcatggaaagaccctaaagaccacaataaagcaacagacgtcatttggacttaatatttccattaggttggaaaagcaagtgagactcttggtcagatggccctaatttgtagattatatttttggagcagtgtctagtgatttgaaatgctaaaaaccaccatctttgttcttaaacctacgtcttttatttccctcaactgagatatatttccagttgtgattgattttaccattcgatattggtcagctgttcactctatctcaaattttaccttaactgatcatccagagctttaccttgtgctttacatgaaataaatcacttaatcctcaaaacaaacttaaagagaagatgatgccgtcctcgttttacagatgggaaaactgaggcacggagaggctaaataacctgccgagattgcacagtgtaagtggaagagctatgtccaggatccatgattttatca

SEQ ID NO: 95814 - DNA, 1047 bp, Homo sapiens
caccaaaaggccatctgttgtatacagtcttatcccttggaatttgagatggcaagtttcaagtttaatatgttaacacaaaatacttaggctttgcagaaacttagtttagcacagttttaccctaacgtaaaaactccatggattattccggctagcccaattttctagatggtgtgtatcacttgaatattgagattctgattttttattttttgctctgtgccttaagaggcacattcttgtttccattcgagtttggggacatttacaaagtatactgtagcatacttaaattttggttataattcaaattttcattcgtatatatctttaataatgcgaaaggggggctttcattcattaaacttactgaaacaaaatccattgcatctgattcttacttagaatattaatttgaaaatctagaacctcacaattactcctttgtgaatagaagtaagaaaaaatatacgttttactatagactatatacattgctgaagttttatctgtagtaatgtgatcggcttggtaaagcatcctaaacacgttttttaaaacccagaagcaaaaatcacaaacactgctgaaatttgaaatatctaaatacctagcaatcttgagagggataaaaatggtatttcaacaacttcagtattgtaataataaaagtagattcccagagggcacgtcaatcaaagtgtaaaaatttttggaaagtaaaatgcacttttaaaaatgataagcttgcacttggcacatttttaatgatttttttaacgttatcttttgtattaaaaaggaaattcttagaatgggttgactaataccttgctcttgaggtatggacaaaccaatgatggggttttgctaatggagcctaaaatcctttttttttttaatatggaagaatatctgttcccctctcttagtgcacaaagtaacttctatatatggagttatgtattgtacatcatgaaaaaacaatgccatcaaattcaagtatcaaaataattttgctggtaaggaactgtgatgacagac

SEQ ID NO: 95815 - DNA, 1030 bp, Homo sapiens
tcactggtgcttctgtgtggggttgagttttttatgatatctcctgttagacccataagggaggctgtgagttgttttctacatccttggactatataagatcctcttttaaaattatattttatataagcacatgaaaatggaatgaaataatgagttgacataggaattacctacatattttggctgtacatttagtgcacaaaatatcccttttttgaatgccaaatggccaagtgtgaaaaccaatatttgttaaagctggagcagaagtcggtatcatcatcatagagtaaacttctggcatatgtgaagatatgaaatgttatccctgaagttattataatttattctcagaaatattagtaatcttattttaagagtaggacattatagtgcagtaatgataattttctcagtgctgcctgttgctagattgttcctatgattgctgtcatgcacatacagacactaaattgagggtcactttccactgaagttagtggaatacaaaataggtggaggaactttcttcctctaacgtctttatatgtgtctgtgtttatatgtgtgtgtatacaaatatgtatacacatacataatatctggagcaaaaatgattatgttgtacagaacttttggaggttttcctccttataaaattctgaagtggtagagttaacattctgcttttaatttatctccaaaaaaatgtgaagaattcccaaataagattttctcatagaagattcatggattttgagtctgagaaaaaaaaggaagaaaaaaaattcatggtataaaataactaaaaattaaatatagtctttagaaatgattttgtttagtataattaatactggtatgacaactgaatgcaattgaaattatgatataaaatttctattctgctttgtatttttcgttaaagtttttataattgtcatctgaaaaaggatttaatattcttcttaaattcattagctaactctctcaatattattacactattatttgcctatttgaaaat

SEQ ID NO: 95816 - DNA, 1093 bp, Homo sapiens
tttgagatggagtcttgttctgtcgcccaggctggaggtgcagtggcacgatctcagctcactgcaagctccacctcccgggttcacgctattgtcctgcctcagcctcccacatagctgggactacaggcgcatgccaccacgcccggctaatttttttgtatttttagtagagacagggtttcactgtgttagccaggatgctctagatctcctgacctcgtgatccgcctgccttggcctcccaaagtactgggattacaggcgtgagccaccgcccccggccgttggaaacattttgaaggaactctttgtaaataaaatacatggcatgcctttctgttttactatacagttgctgatttatcctttagttggttactttgaatcatcattaacatctgttgtcaccataatccctgtgatcactagatgtcatactccattttatgttttattgttgccttggggagactttgagagtatgagaggtgttcatgcagactgctgctgagtgttgcatagagatggaataaagtacaaataccttcaggaacagactccaaacttggtctattccagcttcctttcattttttttttttaaacctattccagataatttttcattggtattctctgaaggaaaataagagaaatttcctcttagaatcccttctccttggatttgtaacctttcccagttcatttctgtggaagtacttgtagtccagcatagtaattctattcagatatgtatagttcagttaagtcacgaagggaaaggaagctttcgttgagggctatctactaggtggtacagtgctaggtaattaactttatctcaatccttaaacaactctgcagtggtaagggtgattaattcatcccattttgtagacaaggaaactgaatgttagagggatggcataatttgttcatgttcatataggtagtactttgggaagcagaatttgaacacagatctttctggttctagagctttgtgttcttctaccttgctatgatgttaagtaattagttttaacatgccacttaagtttaaagccttaagtagtccttttaagaaatct

SEQ ID NO: 95817 - DNA, 1141 bp, Homo sapiens
agaggaactgtttatgaaactgtaaagagaaaatggagatacaaaaagccatccaagatgtaaatgccgaaggccaagttttgagataaacagaaaatcacgaaaactcatgtctggtggatcttccatggccccagtgtgagcagacagtattttccttgaggagaaatactagtttggtgggggtaaggtagggagttagtttaaggattaatcaagagaactatacatgtgctatttaggttgagggaaaagatcagaataggcatgggcaaagcctagactcaaatcaagttatctatcaagcaagctgacatattcagacagtttattaattacttagagaaatgcatgatcagcatagtgtcagctcctcatgtccctcatccgcagggtaacactgaaactaaacgggaccacatgataggtaacatgagtggtgggcactctggctgaggaacagtttccatcctgtagctaagtagttttttagcctacagctacatcctaaggagtgggcaaggtggtgaatctcagacctcatggaaccagggaaggtggatgagaaactgcctcccagcaggctcccacaaaatatggaggttggtaagaaatagccttgtagcagcacctcacaatactgcctatctttccatattctgaaggaacacagagcattctgccaaagcttaggtcagcctatcgttgggcttacgtaagtagcctatgtggaggcatgcgagttttccagggcacgagtacagagcagttatcctaccttatcatctatagtaaggaagaaacgaccgtgtgaattagtacaaaagcatgaaaagaaaaatgttataagtaatcatttcaaacatctaggaaattttgttctgttggtcttaggataagcattctgcttctattaagttgtttgctcctggactgcaaagaaatcctagagattctgacacagtcacttggcacattctgaagattgtctttttttgtggtgatcatattatcccaagaagtttgcattcatgagtaatgtcattgtactatcatctatcaggagtacttgtatagtcttttatagaggcttttgtgtttcttccagaagactcagtttctgatctgtagcttgtaacag

SEQ ID NO: 95818 - DNA, 1214 bp, Homo sapiens
ttccctccttccttcctccctccctccctcttgcttgcttgctttttctttcttatttctctctctctctctctgtctcttttcttttcttttcttttggcaaggtctcgctgtgttgtccaggctgggtgtagtggcgtgatcttagctcagcttactgcaacctccacaccctgctccttgccaaccccctgccctgcaccgccccccacccctgcccctggggtcatcctcccacctcaaccttctgaggtgggcactaccatgcccagctaatttttgcattttttgtagagacaggggtttctccgtgttgcttgggctggtctcttgggctcaagcgatccagctgccttggccttccaaggtgttgagattaaaggcgtgagccactgcgaccagcccatttcaactttaatattatttttctactaaccaaacttaagtcttctagttttaaatgtgaggaaaagactcgctttgaaatagtaatctttgccaattatttttaggtgttgaatactgatgaagaactcataaatgaagatgaaagagaattagaggaacttagaaagcgtggcataactcctcttcccaaaccacctccaggggttgggcttctgccaacccctccagagcattttcccttttctgatcctgaagacgattttcagacagatttctctgatgattttaggaaaattccatctctttttgaaatagttgtaaaacctactgtggatttagcgcataaaattgggaggaagtaagtgaaaaactttcaaaatgacatcaaatatttttttctgaaaattatcattaagaaactaagtcatactccaagctaatcatgtaattaaacttggttagagatagcacatatctggcatgcacgcagattgttgcttccacctttgttttcggttcccacctgctgcttgccatcagtgctttcccatatggaatccttatacagcttctgaaacttctcagcatagtaatcctgaagaaccctgcctggtgggtggatttggcattttcacttgattatgaggctgcattgtcattgataatgccttcagattgtgggaaataggtctccacatatttgattattttgaagagcaattccttaggctattggcggaagacctctggatccagattttcattttctaacaccaccatttcagccctgctgccagtccccaagc

SEQ ID NO: 95819 - DNA, 1054 bp, Homo sapiens
atgcatcaaagggtgcccctcacttacccagatcaaaccctggttcatcacagccctcaggggcaggaactagcaattctggttccggggctctgcctccatatgcccctaaactctcttcctcagctggccttccactgggaacttccacttcagttcttagtggtattagtttgtatgaccctagggatcacggttcatcatccacatcagagctagcaacagcttcttcaggagaaaactcaaagaaccagaaaaaaagtggtggcttaaaaagtagtgacaaaactgaaccttctcctggagaagccatccttccacaaaaacccagtccaaacgtgggagtcactcttgaggggccagctgacccacaggcggacgttcccaggagttctggtaaggttcaggtcccagcagtgcacagccttcctgttcaggcattaacaggcttaattaggccacagtacagtgatccaaggcaggcaaggcagccaggacaggggagcccgaccccagataatgatcccggtagagaaacagatgacaaatctctgaaagaggtttttaaaacttttgatccaactgcttcaccattttgttagctattgtgtaactgagcaattcttttcactcttgtgactatctcagtcctctgctgttttgtaactggtttacctctatagtttatttatttttaaattataaacacttttcagctgctagtatcagaaccacatgaagttatagcctctaaagcctgtggtattttatataatatttttataactttaagagactgtagtaattgacctaaaaacttatgttagcttcagtaaaagtacttttattgtaaataaacaatcatgaactcaacactctgcctgaatatatgccagttgtctttcataatcaatgtttagataaatgattgccactttttatatggttgtttagtttcaagcaatatgatgtacattacttttgagaaacagtattttgactaggacctctcttatttgtcagcacagaactgattaatatgtaatgctacctg

SEQ ID NO: 95820 - DNA, 1086 bp, Homo sapiens
gttctctagcataactttttacatttaatttttcatatgaaatagcaattagttactgctgtgttacattgtgatgtttatgtatgtcaatgtttttgtctttaacagcataatttatattgctttttcaaatgatgtagctgcattaattgtgttcatcatgactttggcgatttttaacaaaatttttaaagacccagtgagagtctgtagtgattattacacggataatgttttaaatgtctaggttctgtatttttttcttaaatagcaagaaaatacagattgctagtatagtcaacagtatttggctatcaataaagaatctctttaagatctcacccggctggcattctgtaacagaggggattacctggtgttttaagtatttaatgtcctcatagtgtggaaatcccctaaattgattagaaattgtattttatgaaaaataacttgtattcattcttgtgtatttattacaatatataaataatggcaactctttgttttatacatatataatttataactgaatctaagtattagactgctactcatattttgaactgcaggtgtaggacagtgtttgctggtaacaactccaatgtgtattaataacttgaaaaggagcatttcactataaaagataatgaagtaggtaatgaaatcagtccttgaatgaaagcagtgcccttgagaagggatttttttttaaatatacagtaaaatatttcgtgggaacctaacactcacatagcatatggtttattaataatgcatatcctttctaatcacttcttcaattctttttgctgcagttctgtgctaaaatggggttgtggttaagtgaacgagaactctgcctacctaagaagttcattgtgttctaagtggaaggagagttactgaagggaatgtgaatttttaccgtttgtacttaagatacatttgttgtctaaaatggctctggataacatttttgggttaaaaaatgtaatttaaagccaccatagaaagtattttctgatttactgtccaaatgaattttgttgttaattgagaagtcaataaaatggattaaactga

SEQ ID NO: 95821 - DNA, 1084 bp, Homo sapiens
aatttaagcacccattccttttcttgtttcagcagcctgaattattgaactagcagactgaatattcactcaggaatcaaattcttatgaaaatccacacaggagataactggaaagaaaaagtcaaattaaagtgttcggcaattcatcatttggtttcattagttccagggcctaatttcctttcagtttcccacaacaggactttttgaagactcacagttgaaccttatttttatgcctgaattgattaaaacttttagcttcttttacagactctagtccagttcttatttccatgaataagcaggaccgtcagtacagcagaaacagcaaacctctcttagctccatgcataaattatgatgtctgcttgttagcaatactctctgtaacatcagcagcagagtcagctaacagttgctggcaggtgccacagtctggaactctactatagatggacatagatttctgtggcttggtaaaccatctggatttcttacatttagggtgaatccaattatttgttctttcctttggagggtgaaaagtgtcttcccaacaaggtaagtcaatctgtccatgtttttctccttgttgattctctatggttggctactctctcgtgattgtcaatcaaaagtggattatgggatttctacaagttatgctctgaatgtgatggtgttggctgatctctagatgtattcagaaacaggaataatcacattcctcttttccctatgtgttaagctgtttgttaactgggatcatttattttataatacattttggtgtcttaatatgtttcattaacagagttcatgctaaaaaacattgtgtgagttagccatttaaaaacgaaagagaagatctactaaagtaaacaaaaacagtactagatacaatacaaccacctctgtttttggataatttaggtgtgttaggattctacatgtcctccttccagctctataagcacttcatgtcgaagatctgtagatgtgcagaaaggaatgtcccagagatattgtgggttgtgggggaatggtgcaggtgtgccagttgggcctcccaaacatat

SEQ ID NO: 95822 - DNA, 1037 bp, Homo sapiens
cgccgcgcgcccgggccgccgggcagccgccgcagggaccaggcggccgagaaggcggctcagcgcggaccccgcccgggcgcccgccgcggcccggcccccgccgcccgcgccggctaccgcgcctctcgggtgccggcggcgccgcgcccgggcgcccgccgggtgccggagaggaaagcgccgctcgcacgcccgcccccgccggcgcggccccgcctctgtcccgtgattccgcgcggcccggccccgccgcgctctggaggagcccgtgggcggcggcgccgcgccctttccgtaccctcccccgggggcggcggcggcgcagggttggagacccgcggcggtgggcgcggctttaccgcagcgggcggactgtgcggtggaaccggagcccgggcctggggtggttctttccgagccccgggtcgcagccggggggcggtgccggcggaagatcccagtttgcagggctcgatctgggtttttcttctattgccaaaggacctttaatggataaaacccaaaagttctaaggcccggtcctgtggcctaatgaagaagcgcttcctcttcctctttgcttaacgactacggagacccggagcgtcggttttgtttgtgtcgagtgctccttccttcggctgagcccagggtggcgcacggccaaggggatgaccttagactctgctggtggaagcaggtcccaaaccgaccccctggagccctgggctccgctcttttcctgccttttaccggcattcagccacttgctttcccttctccggacctcgatttccccttatgagcggcggagagtggctcttaaaagtcccttcggttctgatagcccactctgaagactgtgctgctgcatttgagatacaaagagaaggcaatgatcatcagagctcccccaaacttcctacagtccctcataaattacccacatcagccctgcgccttgcatcttttactctcctgtagataaagaacaccctggggcctctccccttcctgtcccccgatgctcacgg

SEQ ID NO: 95823 - DNA, 1959 bp, Homo sapiens
ccagatcggttcaactcacatcctattgacctgagcatagtctcatggcctccctctctgcacagtcatctgggaattgcatcttctctccggggagccatgttccttgccagaattcaccagaggtgggggccaattgtattccaaagacaaggggagaatcgatacggaggaagagtcacctctaccttggagggcaacccagagagagcaatgttctatgtccaggagagaaaacagtttttagaaataggtgtggtcagaattcaaatgggtaaaaactgaatacgggccatttggaattgactggtcatttatgagcttccatagacagagcctttgggagggggctgtgtaaaactcaaatcgttggaggaatgaagagctgcagtgtaaagttgctggattttcttcttttgaatagtacctgggacaacttttcattggtatacaagtttatgatgtagaatggtgactccatggaaggacccatttgaacacccagaaatcttagaatatggagactgtgcctggaggctccctttggttaaccggtgtcaggaagaccctagcaaagagaattcatgatctgaaaggagaggaagaattgcttatagttgagaacaattatttgttccttgcattgtccacttccccttccagacttcctgacttccctctatattcttggcagtgcctagctgtgaaagcttaggtggaatcataacattaaaaacaacaaacatggctccgcccaggcagaggtaggagtgactggcattaccctggtgcttaagcctaggagtgagaagcagaagcctccagaatttgaatcctgaacagataccacaaattcaggagatgatcagtaaacgtttgagctttttgtttgtatgtgtttttttttttttttgtagttttgttttttgtttgtctgtttgttttgcgacagagtctcactctgtcgcccaggctggagtgcagtggtgcaattttggctcactgcaacctctccctcctgggttcaagcaattctcctgcctcagcctcccaagtagctgggattacaggcgcgcatcaccatgcccagctaattttttgtatttttggtagagacaaggttttgccgtgttggtcaggctggtctcgaactcctgacctcaggtgatccgcccacttcgtcctcccaaagtgctgggattacaggcatgaaccaccgtgcccggccaacatttggtttttatgggaaagaaaacagcatcctacaacaaaattggttatatgccatcactgttaagggatatttaccttttgcttaaagtgtactacatgaaagccaaggagaagatttatagagctaggtaaaggctcaggaaggcaggtgccctgtggataagaatgtaggcagttcaggtgggaatcaggtctgtctgctcagggagaccagtgagagccagctaatgcctgcctgaaacttttgatttgactgtatgccattctcagagaaattattctttcttctggcattttcaactgaaaattcctttggtcttactttgattttgttactggaaatacagtgtgttttattaagatttgaaacaaaacattttttattttattttatttttgagatgaagtcttgctctgtcgcccaggctggagtgcagtggtgggatcttggctcactgcaacctctgcctcccaggttcaagtgattctcatgcctcagcctcccaagtagctagaattaccggtgtgcgccaccacgcccagctagtttttgtgtttttagtagagatggggttttgccatgttggccaagctggtcttgaactcctgatctcaggtgacttacccacctcagcctcccagagtgctgggataacaggcatgagccactgtgtctggctgaaaacactttttatttttaataaaaattgtttttctttgtgtcct

SEQ ID NO: 95824 - DNA, 1035 bp, Homo sapiens
ttatatgaaatgtccagatgagacatccatagatacagaaagtagattagtggttgtcagaagctggggtgaggagggagtagtgagtgactgctaataggtacaagagtttttttggggggagtggtgaaaccgttctaaaattaaactgtagtaggccgggcatggtggctcacacctgtaatcccagcactttgggaggccaaggcaggcagatcacgaggtcagaagaccaagaccatcctggccaacatggtgaaaccccatatgtactaaaaatacaaaaattagccaggcatggtggtgcacgcctgtaatcccagctacttgggaggctgaggcaggagaattgcttgaacccaggaggcgaaggttacagtgagctgagattgcgccactgcactccatcctgggcgacagagtgagactccatctcaaaaacaaacaaacaaacaaagaaataacaacaaaaactgtagtaatggtttaaaactcttgaatatactcaaagccattgaactgtgcactttaaaaggataaattttttggtatatgaattatacttcaagctattaaaaaggatatatcaattatttaatgttaatggacaattccaatgtatccagttttttctattgcaatgctgcaagggacgtacttgaacattcatctttatgcctttatcttcctggtagttctataagatatagtgaaggaaggggatttattgttgttatagtctttattgtggtagccagtgactagtaatagaatggtatttattttgagtgcttaggcactacgaatttctgtaaaactgacgtttcatggttgtagccagccaagatagcgttgacacctgtatggagaaagagttggtaggataatcctgggtgctcttgaggggagaagggagcatgtgggggactggagtaaggaagggagggaaaaaggtgagcgggacattgaaagcctcttgtggggtttttgctgttcgtatttcctttctggatttatagagagctcttggtttga

SEQ ID NO: 95825 - DNA, 1022 bp, Homo sapiens
ccgggcgtggtggcatgcgcctgtaatcccagctactgaggaggctgaggcaggagaattgcttgaacccggaaggcggaggttgcagtgagccgagatcacaccattgcactccagcctgggcaacaaaagcaaaactccatctcaaaaaaaaaaaaaaaatcatctgatttttttatcttttgatcaaatttccctgttatttatggtaaaatgttttgtttgcctcattgtagtgataactcactatcttagctaaatcataacatgcctcttatagttttagaaacttcctccttccctagttgcctcccactccttacctaccccataaaagaagtcaagatgtggggattgatgtatataatatgcagaaactttggatgacttgagtaaagcagtgtttttgttgaattgcagaagctgggtcttggtggatcatcagtataatatctacctctatagagagggtgtgcttcggactgcttcagaaccatatcatgttgataatttccaagacaaaacctgccatttgaccaatcactgcattcaaaaagagtattcaaagaactacgggaagtatgaagaaggaaatgaaatgttcttcaaggagttcaatcagtacctaacaagtgctttgaacattaccctagaaagtagtatcttactacaaatcaaacatataataaggtaacttaattgtatctttttggattacgtgtttcttcttgaaggagctttggcgtctatgcctttcaaagaattgtttcatataagttgtctaatttatggtcaaaaattttttgtaatattcctttattttccttttaatgtctgcaggttctgtaatgatgtctcctctttcgtttctgataatggttatatgtgtgtgtgtatgtgtgtgtgtgtgtgtatatatatatatatatttatatatttatttatttatttatttttttgagacagagttttgctcttgttgcccaggctggagtgcaatggtgcgatctcggctcaccaca

SEQ ID NO: 95826 - DNA, 1030 bp, Homo sapiens
cagactagtatctgcacctgccttccctgccagaatgtctcccgtctgcctccagacttacccatcttggtcggtcaccaccccctgctccccccagagactaagctcgaacctgacagtgatcctgcctctgccttcccttcccctcaagtcctgcccatcagggccctgtgggttgtacctctagcctccggagtcctttgccctccatttgcactgtcacccctgcacagggtgtcttccaccatagtgaaggttttggcatggagccttctaactggggtgcacttctgctcttgccccagtgaaatccatcctcccagagcagccagtgtgtaaagtcgacaccagaccatgccattctccagacttgccattgcacctaggacacaaaccagactcctccctccacctccaaggccgctgccttacccacctctccagcttcatcccaagtcaccatttcccttgattgctcttatctgcagtgggcctttgtgctttctgttacctgtgtgtggaatccccaccaccattaccaccaccaccaccagccttaccgtggctggcttcttctttaccaaaacatcttgaggaagctttctctgaacagtcctagctctgattttctctaggcagagcctttgcagtttccttcattgcactaactgccatcagattaactcatcagaagaaactgtctgtgggtgtgtgtgtgtctgtgtgtgtgtgtgtgtgtgtgtatccgccccttcttctttatttctaccctgtcatccattctctgtctgccttctattcattgggtcttggcttagctgccactggaaagtcttcccctgtcactggggagtcttcctctgtcactggggagtcttcctctgtcactggggagtcttcccgtgtcactggggagtcttctccagtgtcccttcaattatgctgagttggtccttttcctgggtagggcctgcccctgtctgtaatgcaaggtggctcttacatgctcttgaaatgcctgccttccctg

SEQ ID NO: 95827 - DNA, 1046 bp, Homo sapiens
gagcctttagtaccaaggttctcaacactgactacatgctggaatgactgtgaagcttttaaaaaatgttagtgcccactcttcccctgtacccccggacagttaaatcagaacctcagacagcaatatgccttgagatgccttgaaccatgcttgagaaggaaggacaaacacattattatcttggaagaattgcataaggcttatgacttaaaaaaaaaaattctttttggaaacacaagcatttctttaaggatgaccggatgttgccgtatgtatttatggcacaagcaggtgttgtctaagcagtttctctgtttgcttgtcatagcagcatttggaaactcaaacatgctttcatttacataaatagtttatgaagctttgacaacaaatgtaaacagacacgaaattataaatctgctaaatatgtattaagggtattaattattgaaagtccctttccccaaaactcaactcctatggcaattatgaactccattttaccaagaacatttaagtgcctcagcatctgtatgatatagtggagcaggtgctgacataggtaccagctgacatgatgtgtcactagctctgtgggatgattgccacatacatggaacacctgggagtgctggaaatgtactgtgatcgaagtgacaaagtgtgttttcattcacagtggaggctacatcaagcaaggggaggtccagccctcttgcaagtgtggtgagaggctctactagcaaagacatgggcaccggagtaggtcccgtgtagcatgcgggtgctgtagagaaaattcagtgacgtacatggctctggttctggacacaaaatctgtactggagaggaaatgactgctgaaataaggcgattgtatgaatatttaaaatgcctggaacactaaagtaaagtaatgatatttcaagtgtttttgtgctctttggttcttgttgtaggtattgactgtcctgggatatcactggtcatttaaattcaccatataattagccgggcatggtggcatgtggtggtggctgagg

SEQ ID NO: 95828 - DNA, 1259 bp, Homo sapiens
tgatcttcttcctcagtctttgaaaatactcatttgttctcgtaaatgcagatatttctgttaagtaactttttctcttgttttcatttaggctgatatcaactgggcagtgaatggaatctcaaaaggaatcattaagcagtttcttggctatgttcccatcatggtgaaatccaagctttgcaacttacgtaaccttcccccacaagccctcattgagcaccatgaggaggcagaggtaatgacgggcgtccaggcatgagacagtagagaaggcctgggttgggagtaagaagacaagaagtgtgtcagtgttttctttctgtgctccaatttctggataggtgaaagagatatcagtatcttgcctgcatacagtgtatggctctgaataactatcaaattagacagtatgaaaaagtggctgtaaaattagagaatattattgttcggggggaagaactggtaggtttttccctaattttctgaatgatagagacatacttccacaaaatttgttttttttttcaagctgtcttaatccacaaagctattgtcaaaaatgtctatttatctgggcatggtggtggcatggatctgtagtcccagctaactgggaggctgaggcgggagcatcagttgagcccaggaggcctcactacagtgagccatgattgtgccactgcactccagcccgggagacagagtgagaccccgtcactaaaaaagtgaaataaaaatgtctgctttgctaacagtaagattctgtgcgcatattaaatgacttatatgcattcccttcatcatttctttcagctatattaggtggctttgcagagttgagttgaggtaatcaagatgaacaaacagtgcctactaaataggtagatggtgttatgtggtgggaagagggttttggtgtcagatctgggtttgacacacagctcttccgcttatcagtcttgtggtttggggaagttaatctccctgagcctcagtttcctctgctgcaagtgggtataatagctaccccactcattgttatgagaattaaatgttatgataacatagagcacctactataatatgcctgtttcatagtaggcaattcgtaaatagtagctgtttattacagaaatgtgatattgagcagagctattaaaaatatttttctatttagctaatccaaatttctggtttccagagctttcatacaatcaagtttttgaacgtatttgggaaaccatactcgtatggaa

SEQ ID NO: 95829 - DNA, 1858 bp, Homo sapiens
tcttgatctcctgaccttgtgatgctcctgtctcggcctcccaaagtgctgtgattacaggcgtgagccaccgcgcccggcccagtttttatctttcaacacctctttggagtaagttttttttagtgttatttgaagactgaagtcattttaggggacagaaaggcaagataggttgagcctgtctgataaagagaagtaccctgtttttcttccatacttttttcccatgtccctaggacctttgtaatatacttgagaaaactgttaattcacacaaagacagtgtctgtgtactgttttcaagggatcagtagtacatttcacctctgtgttcctattctgtgtgttgtactacctttggctaggagtgaggttcatgtttacagttagtcatgtatctttgtttaacaagttgcaattcatctttttggcaggaaatggggggctattttataatcaatggcattgaaaaagtcatccgaatgttgattatgcctcggagaaattttcccattgcaatgataagaccaaaatggaaaaccagagggcctggttatactcagtatggtaagttctggagattattagaatattttttaaggaaaatttaaaactttttttttttttgaagtagatgcatccaaatggtctttgatatttttgtttctttttttttttttttttggtagggatggggtttcaccacgttgcccaggctgatctcgaactcttgggctcaagcagtccttctgcctcagcctcccaaagtgctgagattacatgcatgagccaccgtgtctggtctttcttttgttttttgttgtttttctattgagcattcttgtgttaagttttcataattgggatggaagaagaaatggagagatgttagtcagaggatacagacttgcagttacaagatgaataagttctggggatctgatgtacagcctggtgatgatagtaatactgtactgcttaaaattgatgagtacattttaagtgtctcaaccacacacgcgtgcacacgtactacaaatgataactatggtgattgatgttttcatcagtttgattgtggaaatcattataatatatgtatatgtatattcaaggtattgtacaccttgaatatatatgatttttatcaatcataagcattttaaaattcacttttgctaactgaaagagcatgtgtatttttgttactacttatgaagatgaaagctagtctggcttggccataagtgggtgtgggtcttggctgtcttctggttcaggctgctgcacttttgcaaactgaaagagcatgtgtatttttgttactacttatgaagatggaagctagtctggcttggccataggtgaatgtgggccttggatgtcttctggttcaggccactgtggtacacccctcagggtctctgtctgacagccacctggcctctgttggaacattctctttgacaatgcctaagacagcatgttgtattcttgagcaaccctgacagttaaacaatttgtcctgatagttgagctaaaaatcagaccttaattatagccatacatactatacctagaaaaacagcatgcctgaatgtctagtgattttcttttgcatcagttgatggtagtatgtcttagcagtctttgcctgaaactgaaataaaatctaaaattctacttttctccattggaactattagatcaagcaccatgtcttgaccagactccacagtttaaggcagatataaagtgctaaaagatgtggactctgtcctggagggaaactttgaagtttgcttaaattcatagtttcggttattttacattagtgtttctcaatctgggtaga

SEQ ID NO: 95830 - DNA, 2819 bp, Homo sapiens
cctcccaaagtgctgggattatagcatgaaccactgtgccccgccttttttttttttttttaaacccatgttactgttgccgattctttcattagcctgctttcttgcttgtctattatctgactctctcagatgaatttaactacttgctattttattaactcatttaatgttcacccacaaaggaggtcatagaggagacagggaactagttggggctaatacagtttgtgaaatctggggattattttacatatttttttgtgaactctttacactcatcagagctaggagaataaatgttgtaataattcattctatgatctgtagagtgctctgaggttttgtcgtcataaagcctcaacaatttccatttttcaaaagattggcccatttttgaatgacttttgttttattaaggtcttggcctcctacaagattctggactttgtgttgtggctgacaagctgaacttcatacgctacctctcccatttccgctgcgtgcacagaggggctgattttgccaagatgaggaccaccacagtacgcaggctgctgccagagtcctggggcttcctttgtcccgtgcataccccagacggggagccctgtggcctgatgaaccacctaactgccgtatgtgaggttgtcacacagtttgtgtatacggcatctattccagctttactgtgcaacttgggtatgtagtgtacagtgataaacatcttgtttggttatgtgggtttttttgtgttctttttgtttgtttgttttgagatggagtgttgctatgtcgcccaggctggagtgcagtggcgcgatcttggctcactgcaagctctgcctcctaggttcacgccattctcctgcctcagcctcccgagtagctggaactacaggcgcccgccaccacacccggctaattttttgtatttttagtagagacagggtttcaccgtgttagccaggatggtctcgatctcctgacctcgtgatgtgcctgcctcggcctcccaaagtgctgggattacagttgtgagccaccgcgcccggccaaggttacgtggtttttaacctgttaagttgtgctgcttttggagattcagcagagattttctgtaagaattcttttttactcttctgtgcaggagttgggctgctttcttggctcctctgtagaaggccgaatgcattctttgaaagtgaaaacaggagaaactaagtgttataggtactttgttttctttgggaaaaaaaaaaagataatggaagtgaggatcgcttgagcccagggatttgaggctgcagtgagctgtgattgtgccgctgctgcactttagactgggtgagaaagtgagatcctatctccaaaatgaaaaataaatgaataagaatgatgccaaagcattcgaaatagactagtcattaatattggaagtatagaagctattgagtagttttttgggtcatttctttttgcatctcttggcggatctttgcatttctaaatagaaaacagtgttggtttgcaggaggacagtttaaaaggaggtttcccagtctaccctgatatcatcagatatataaccttttttcctgataaccttaaagctgctgtctctgtctctgcttggcttgatacttggtttgaatttactttcatacctaaagatgtcagccttctctgcagtcttctagtcccagggttctccatttatgatttggagacagaaatgttctgtctttggtggtctgtggacagggtcctcagtgggattaatatgtgtgcagtaaaacttccagttcatggggatcagatgataagtgttctcaggcaactagaagggcattgactcaagaaagttctgcttaaaagtacttctcccaattagagtggcctggccgggcgtggtggcccatgcctgtaatcccagcactttgggaagccgaggtgtgcagatgacttgcggtcaggagtttaagaccaacctggccaacatggtgaaaccccatctctactaaatatacacacacaaaaaaattagctgggtgtggtggcatgtgcctgtggtcccagctactcaggaagctgaggcagtagaatcacttgaatccaggaggtggaggttgcagggaaccaagattgcaccactgcactccagcctgggtgacagagtgagactccatctaaaaaaaaaaaagagagagagagtggcctgtaagaagagggccctacagaaagtaatcaagaaatactcaagattcagaagatgtaatcagcgtaatttgaaggtttatcctctacgaggaaaagaattttgttactcgtgattcaaaatgtcaaagtccaggagagggtagaaaggagaaaagagaaagtggagaggtagaaagtatatccaactgcagaaaaagagatggggaagggttttttgctctagcactggagaagaagacggaatcgctacctaactttcgatagagatgttcatattgtggtgacagatgaaacacgaggcaggtaacttctgacactctaacaaacacttgatgtcttcagaatgtatttatggttcatggaagagtgttcttttttttttttacttaatttcagttgattctcattatttgtagtactcatctttaaagttaccagtgaatattgaaccattgtgcctaggggaaatacagggtaaggttccttcaagcctcgggttacaacatttttgttagccgatcaatatgtagccttgttttttgtgtgtttctgttgaaagacaccctttaaaaatatatattgttcacgtggtaacattg

SEQ ID NO: 95831 - DNA, 2857 bp, Homo sapiens
tttatagatgcttgtttaattttgtgaatattctgttactacttattttgatgctcagaaagtgtatgagatttgatctagtgtacagttgagggttttaagtacattcatgttgtggagtcatcaccatcttcagaactttctcatcatcacaaattgaaactctgtaaccattaaacaatcattcctctttttttttttttttgaggcagagtctcgctctgtcgcccaggctgcagtgcagtggtgtgatcttggctcactgcagcctccgcctcccatgttcaagcaattctcctgcctcggtctcccaagtagctgggattacaggtgcacaccaccatgcctgggtaatttttatatttttagtagagatggggtttctccatgttgccccggctggtctcgaactcctgacctcaaatgagctacctgcctcattagtctcagattttatcttttttatagagaatttattttcattctcttttttttggttagcattgtggagcatcggaggatgaggacacttaagatctgctctcttagtaaatttcaagcatgcaatatagtattcttaactatagtcacatgctgtacatgagatctccagaaacttaattttgttgcataactgaagctttatactctttgaccaacatctccccgtgtccccctccaccaaacattctctcatttttaatgataatgcatctagctgtgaatccccatgagttctgacacatgggtttgttgttgttgttgttgttgttgttgttttcaggtttctgtaatttaggtttttatttctcctttcacccaggagtttgttggagtttttttgttttgtttttgagacagggtcactctgtcacccaggctggagtgcagtggcatgatcatggctcactgcagcctcaacctcctgggctcaagtgatcctcccacctcagcctcccgattagctgggactacaggcacgtaccaccacactcaggtaattttttaatttttgtagagacggggtttcatcatgttgcccaggctggtcttgaacctctgggctcaagtgatccacccactttggcctcctaaagtgctgggattacaggtataagccacccccggcccacccatgagtttttggtttattaaatttacaaataaaaccagtaatctactgtattttagatcacagaggacagaatttcctttagtgtatcgacacgtgcattcatggtgtgctttatccttagcctcagtagttagtgatttgcctactagctggggtgagcacccaaggaagtagggcttttaccatggctgagtgtggatgagtggtattccatggggcataagactggcagcgacagccatggccttgggacaggtttgttaaactctgtttttgttaaaaacaggtgttgagagagaaaagaattcctccctggatggaagtggtccttatacccatgacaggaaaaccaagtctgtacccaggattgttcctttttaccactccttgtagactggtacggcctgtgcagaacttagcattgggcaaagaagagctaattggaactatggaacaggtaaatacatatgtgtgatggatgagtgtatgtgcttgtttgtatagtatacaactttcagagacttaactcttccttttttaaaagggttgttaatgttacaacaacagttggacatttgaaagaaagtcagactttccacctcctctatgatcagcacagagcaatttccatgtctgatctcactccacagaacctgagagagggctggtggtcacattacctgcctcccatcttatctagctcccagaactcctttgtacctggctctgcctcagccgtgaagtgaaaacattccattagattcacactcagtctttgcctacatatttacagttgcaaaattataggctttgtgctacttaaaaatttttcttcctattccccttcacaattggtctggggtagttttagagtgagatacgtaaagcaagtggtatttctaactggtcgcttccctgtgcttcccagttgatcccttcagcactcatgatgctgggtggggatggttttctcttgagtctttgagtactgaactctgagaaatggtaagagtaaatgtgtaaccagttgcagttattttgtgccttggacatctgctcttccagatcttcatgaatgtcgctatctttgaggatgaagtttttgctggagttaccacacaccaggaactctttccacacagcctgctgagtgtgattgccaacttcatccctttctctgatcacaaccagagtccacggaacatgtaccaatgccagatgggtaaggaagagggatgatgttacagtcacaatcaggaaagtaaacttgatactagcacactcttttattgtccttatttacatatgctgaccatttgttccaaaaatacagtttatggcaagtttttcttttttctgtgccacaagcaaccagcccaggatcactcattgtatttagttggcatgtctatttagtttcctgtaatttatgacagatctttaaacattctttgtctttgacattgacatttttgaagaaaaaggtatagaatgtccatagatttgggtgtgcctgaggtcttattatttgattttttgaagaatacaagcaattatagtcacccgcatatttatcacttccagtcctcttcattcctgctgcaagattcaagttttcattgtatacaattttccttcagcctgataatcttcctttagcatttttttatagtgcaggttgctggccacaaattctctttgttttcatttatctgaaaatgt

SEQ ID NO: 95832 - DNA, 1233 bp, Homo sapiens
ctctgtactgtgaggtagtacacagaggaatctcaccccatgctccactacttagaattaaatacatattccgctgtaagaaagtaatctaattacgtaataattcctatccccttttcttccccgagtagtgatagcctgtaatttgcgtacttcctttctgtccccttctaaagcttttattacatcatacatgtatccataaactaagtatagaattgtttggggtgtgttgcaaatacacataaatcgtatcatattaaatgtcagtctgcactttctcccactcagcatggttttcctggtctggtcacgttgatacatttaggtttacttcattttcacagcttatgtattagtctaaagtaagcataactaccatgactatttatttgttcattttcctctgatggatatttagttgtttccagtgttgcgtatcacacctataatcaagatgaaagcagcagaaaatgctaagatgttttttctccatgtaggtaagcaaactatgggctttccacttctcacttatcaagaccgatcggataacaaactgtatcgtcttcagactcctcagagtcccttggtgagaccctccatgtatgattattatgacatggataactatccaattgggaccaatgccatcgttgctgtgatttcttacactggctatgatatggaagatgccatggtaagttttaccaggaaatgttgttccaatctttttattttttaacttgtttgtttactgtgaaatcactgaaggaatatttttgtgtacccaagtacctagtatttggcacgtgatgttctattaaatgattagttcttagtctaagttgaaagtgggcaagccttgaggaatatccactaaatattcagatacacgtatgtcttgcatatttgagtgcatattatgagtaaattttgaagtttggttttggatctatctaccttttatatttaagtatgattagattttaagctatttctgtgtgcctgggtttttgtttttcttgttttttgtttgtttgttttttgttttttatttttgagacggagtctcgctctgttgcccaggctggagtgcagtggcacgatcttggctcactgcaacctccaccttctgggttcaagcagttctcctgcctcagcctctcgaatagctgggactacaggcacccatcaccatgcctggctaattttcgtgtttttagtagagatggg

SEQ ID NO: 95833 - DNA, 1015 bp, Homo sapiens
atttctatggcaccgagaggttatatagtggcatcagtgggctagaactggaagcagacatcttcataggagtggtttattatcagcgcttacgccatatggtctcagacaaatttcaagtaaggacaactggagcccgagacagagtcaccaaccagcctattgggggaagaaatgtccagggtggaatccgttttggggagatggaacgggatgcgcttttagctcatggtacatcttttctccttcatgaccgcctcttcaactgctcagatcggtcggtagcccatgtgtgtgtgaagtgtggcagtttactctctccactgttggagaagccacccccttcttggtctgccatgcgcaacagaaaatacaactgtactctgtgtagtcgcagtgacactatcgatactgtttctgtgccttatgtttttcggtattttgtagctgaactggcagctatgaacatcaaagtgaaactggatgttgtttaacttgatgttgaccttttggattaagaggactatcagattaaagcaaaatgtaattttaattcaatgaagatatcattaccaggttactcttgagatttttcaacggtgttagaactctcaaccaagacctgaaaaccaagtatgcaaggtttctgaatctctctggtagattaactattgacaatgattttctgttatctttgttcaaaaagttcatgtcttctcaaaatatgaaatattgataaatggaagagcatacggtgacaagtctcctttccaaccccaggttccctacaccctgctctcagcaggcagtgagtgtcacacacctgttaatccatcttgagcaggacagtactatacaaatagaatgcaagctgtaatgtaattttatattttcttatagccacgttgaagtaaaaacaaacaggtacagtgttttttaccagctttatagaagtacagttgttacatatttaatgaatacaatttgatgggtctgactatatgcacacaccttt

SEQ ID NO: 95834 - DNA, 1049 bp, Homo sapiens
ctgggtgccagggggattatcagcgtctgcgcaaggccgatggtggcagcgcggcgttaggaatcaggccccctatccctgagcccaacagcctaccgctacagcacccaacgaaaatgggaacaacatgttgagacgctgcagcaacagcaggcgcttcccaccagctacagtcggagatttggagcgcttgtgtctgaggctcaatcccgtcaggtgccgcgcaactcagcggcgcattctctttggacccgaggcaccaccatactttccattgcttacttccgttaaaccccgagcgctgccatggcaagccggaaatagggatgaagcaatttagccagaagagggcggaagtggctactcagggcgccgccatgacgagccgggccggaagaagaggtagggcgccgccgtgacagattagtcctaaagggaacggggttgttagttcaattggctaccggaaaaaaccaggctgggctgggcgccgccatgacaaccgataccggaaaaggcgggtcgttccccccggacagccctacgccggcaaaggtctcgagatgtgagtagtgagagcgcctaccccatacgtgctgccgctccccttcttttacccagtgatctagacctagtctaggacctcgggaactaggaccagcctccctccttcttggagatctgaccctcaggattcagcgccttcgctcacgagctccaaccctccgcatgcccaagccccgccctctaagcgtttaggcctcgccccctctcgcgctgcttaggacttcggtccagtcactcttcacccaatctctgcccccagtaccccaggtccggccttcacactgaaatcctaagactacagacttatttagggacctctatgactcctacacccatcctcagagctccaggttcctcccccttgatcaccaaactttaccttttgaaccttccagatctgcctgggaccccagtcctcacctatagggtccacagacttgttcctagaccactctgaccttgcccaggattcccagagcacc

SEQ ID NO: 95835 - DNA, 1042 bp, Homo sapiens
gtggaggaagacgcggtcgtaggtgctgaggatttctcgttcagacgctcctgctcctgacttaccgctgttcactctcgccgaggaacaagtcggtcaggaagccgcgcagcagccttggcttttaaggataccggaaaacacccgtggagccggaggtggccattcaccaaattcgaatcaccctaacaagccgcaatgtaaaatccctggaaaaggtgtgtgatgacttaatcagaggcgcaaaggaaaagaatctcaaagtgaaaggaccagttcgaatgcctgccaagactttgagaatcactacaagaaaaactacttgtggtgaagattctaagacctgggatcatttccagatgagaattcacaagcgactcattgacttgcacagtccttctgagattgttaagcagattacttccatcagtattgagccaggagttgaggtggaagttaccattgcagatgcttaagtcaactattttaataaattgattaccagttgttaaaaaaaaaacaattctgtgcctgatgacattgcagaaattagttccataaagatttgaaagatgcagggctactgatttccataacaccattattacctcacctatttggtcagtgcaagaggcaaatgttggtggagaatgaaggtggattaacacaaacatattcatgggtttgcttatcccgcccacagcacttcctccagcaccatatattcatagatttacaaatgcttattcaattgcaatgatgtcttacatacaaattatttgtccatgggcatgttttcatgataaaagatgttaagctatgggccatggctatggagttcctgcttactacatgccacatctcctagcagcaggcagcttcacagaaggtagtggaaagacctgccgcagccttaattatggtggcagtgtgggctccacatctacgactttacaatgtgtagtgaacctttggatacctctcagaatttcccatcaggacctaagcagtgattccatgagctgctagagtatggactgct

SEQ ID NO: 95836 - DNA, 1048 bp, Homo sapiens
cctcccctcattcttcacatgactagctatatcataaatacttaccccaggtcccaaaggtgtctctatgattggtaatggggccacaacccagttcctgctacccaggagactgaggttcaggtttcctgccctagtgaagcatccccatcaagctcagcatggcctgctgattctcctggagatggaggcaattcaggtacaagcctggatttctgaagaaccactcttggtgcttgcagagccacgacaagtaccagccacactcctgcaaccttcacaccttatgagaaaacagcactttatgcttctaatctatctatctatccatccatccatctatctatctatctatctatctatctatctatctatctatctatctatctatctattttttttaaatgagatctgaagaatcaaggccaaaagacccctgggtgtttctctgtaggacctctttttaaggagggaaaaacctgagtaaattaaagttcgcagccctagggcggtggcccaaggcagtggaggcccaccgctggaggtattcattggaaaaagcagtgggagtggagaattctgtctcggagtaagctgtccacaagtctgctcggaggctgtgactcactctgaggaaaaggagtgccctgtattctggaggaggctgctttctccaaacaggagatctgtggccaaggaaggaaatgaagcaatccaagactgatcagcagccgtggggcaggcagagctagacgtccacaccacccccaactctttgtgcttaatatttgccctgtgcccccaaggaataaacagcactacagaactggattctggtgagaagggaatcaggccctatcttgggccctctctggacctttgtttgcccatctcgaaggttaaggggtgaactggacagggaggaaactggcagccaactcatgtcccaactcagcctgtggctgcattttatcttactcacagttagaaaaacaattcaatttaggtgcctttgcacaaggctcttttctccagttcggcatagcca

SEQ ID NO: 95837 - DNA, 5131 bp, Homo sapiens
ggagccccgagagaggagctaggaatgactttggtcgcagcctctgtaaccccgcatgacggcctctagggggacagcgaggtccccctcgatctctggctgtaatcagccggcggggccagacggtgccgagactccagggcgaggccgcagggagggggctgtcccgccccacgtggaccggctccccgctgggggcgtggccgccgaagcgggccgggccaatgagcgccaccgtcgggctcacccggctgggcacgccgggccgaggagggctgcgtcatgccgggggcggggcttcggggccggcgcgaggcgcggcggggtcacgcgggtcgctgcgcgggctataagtaggggccggcggggtgctccgctggagtgatggctgccggcgctctctgcgtggttcttcttctcggccgctgaaacccccgcggctgcttcctgggaaggtcgtgagtcccgctgagctgtccccggtgccgccgacccgggccgtgtgcccgtggctccagccgctgtcgcctcgatctcctcgtctcccgctccgccctcccttttccctggtgagtagtggcgccgcctcgtaaaggctctttcttctccccggggccgggcgcggacgccgtggcgctggaggcggacgccgtgggcggcgcggctggcttctctcttcgccgctggccgcctccactccgcccgtctgcccgcccgcgggcctttttggcggtccccgggcggcgcgcgcgggaacggcccttttccgattttcgcgcggagggcgcgcgcgggctggcagcgcaggggctgggctgggcgcgcgcgggccgcggaggacccggagccacgtgcctctccttctcgcgcgtcctactggggatgggggtctggagtagccggcagaggctattgcgggaccccgggcgcgtgggtagagcggggtgccccactggccccccaggggcacgcagctattgttatttcccccctcccccgcaggatgaacttgcgtcctttctcttctccgccatggaattctgctccgtgcttttagccctcctgagccaaagaaaccccagacaacagatgcccatacgcagcgtatagcagtaactccccagctcggtttctgtgccgtagtttacagtatttaattttatataatatatattatttattatagcatttttgatacctcatattctgtttacacatcttgaaaggcgctcagtagttctcttactaaacaaccactactccagagaatggcaacgctgattaccagtactacagctgctaccgccgcttctggtcctttggtggactacctatggatgctcatcctgggcttcattattgcatttgtcttggcattctccgtgggagccaatgatgtagcaaattcttttggtacagctgtgggctcaggtgtagtgaccctgaagcaagcctgcatcctagctagcatctttgaaacagtgggctctgtcttactgggggccaaagtgagcgaaaccatccggaagggcttgattgacgtggagatgtacaactcgactcaagggctgctgatggccggctcagtcagtgctatgtttggtaagttctttttatgttttgtcctcttcgtggtgggtgagcaaatttgtatcatgggtggttccatttttgtgcataacctttccgattaacctttctgaatgtgccacttacataatggaattttgatatttacttaataaaactttactatgtttcaggttctgctgtgtggcaactcgtggcttcgtttttgaagctccctatttctggaacccattgtattgttggtgcaactattggtttctccctcgtggcaaaggggcaggagggtgtcaagtggtctgaactgataaaaattggtatgtttaattccaaacggcttcttaattttcgttttcgtcatatgttaccatggcattaggtatgggaggatgtgttctaacgtcgagggacagacccaagaattttgaactcttaaacatttaaagtggtttttggtttctgattttcattatttgatattttttcttaatgtgttctattccagtgatgtcttggttcgtgtccccactgctttctggaattatgtctggaattttattcttcctggttcgtgcattcatcctccataaggtaacctttctcccccgtatgaagacctttcatggagcacacccaatcgatttcaaacccagtggtacttttgcagatgtgattggtgtataggtatgcggccttggaaaattttaaaaagctctttgttctgtgcatttcttgtatgttgtggagttctctgaaagcgagtttttaatactcaagagggcagtcaggaaggaaaaattgaatactatgatgtgccaagaagtaggagaaactgggagcaaaaaaataaggaaatttattttgcgtggttttgtgtagctgtatacacattatttgtttaaaccactgttatattcaggctaatataatacgtaaacttggagttcaagacagtgtcccctgtggcttttttaactaagctgccagttaaatgggtctctgccgtgctgattatcataaccagtttataagcttctagatgaggactctgcctcccatagtgacttgactccaatttctcagaatagttgaaaagaaccagttaaaggtagtttttggcccgccccccaaaaaaacttcaggcagccatttaatttcctgtccatttgaaaatcccttttaagtgacccagtttgcatttcttttatcaagaagtcttgctggctgcaaaataaatgttgacaagggattatgttggcataggactgagttacagtgaggataaatgcatttttctcaggaaacaaagttgtcctttttctaaggtgaatggctcttaacaatccattgtaagttcttaaaagtgttcctaaactgtagaaatctgagggagatagcataaatcccagcaggtaagaatgtattcagacccacttgtctggtctagttgtaagcttctctagggaaagatttgtctcttctctgtagaaattctatgactagtaaagtgattcactaatcactgttttccatagccagaatctggcagaatatagcagtttaacactttgaaaacttgaaatatctttagcctggtataatatgagagtaaacagttcattgatatttatggactcctaagtttggtactgttttattcagcagacaggtacgataagcatctaccttcccactccctacaactgtagtgtatgatactgggatgcttaaattagaggctcaccagtagtcatggaccagatttttttgttttttttagagttttcattagaactgtatatcttgctacttagcagagagtcagaagcattagtaggatctcctgttgtgaattcctgcttggtaaaggtttatgctggccctgtgttgattattgagtagcagatcattttgtttttggagagggtttgtgtgtttcacctccacaaaacacttattccccggaaggggaatggtggtgctctgaggtgcaaagagggattctcaggtgcccagaacctctcatttgaggaatgcatacccccacggtgttattgagggctgaagttagatacggtaactgatttcttaattgtatatttcctatatgggtatgggaatgggcatgatcaaatgatgaagaatgattggcatagtgtttaaaacaatattgactttgaggatcttcccccactctgtgcacgtgcacacacacactcttgcaggccaatccctcagtaacaggagttttcagttgagtatgaatatttctgcttccttttaggagttaaatttcaagaaaatatccttagactggtaagcttttggtatcttaactgctaaaatctgaatatttgaccattaagatatattccaactcttaaatgtctatcttgaaaattaagattaacatgacctttttttttaatttcaaaaaattgcttttaaacattttctattctctgaatgtttgttccaagcatgttggggataggtgggaacagacagaatggaggtgaggtacttctatttaggactggcatcgcacagaaggaatatgcttcagtgctcctgttgagtatttttaaattctagtcaaagaaaatagggcttttggcattctcattagttagaaatatatttaggatgtcttcccttttctttagacaaaaccagaatatccaatatgtaaaagtgaactattctggtgaagatggggggttttgtgaagacctttcctgtcccacatgactagacgatgaggcattcacattatttccaggtgaagttttacttgtgtgttaggtggatctctacaatgatgagacctttcttgttttaccttcttcctagactctctggaacttttgatttttttttaaccatgaacctgtatttcacaataaactattggtatagtagtgtcattcataccctaccccatccccaacaactttgcgtagagaatacctcagatttgtttacctcagggaatacttaattgggctatgctatacaggataataaatacacaggctgctacttcagactagtcaattacaatttgatttatggataatcatattacgaaatatctttgaaaatctattgagaagtccccacataatgtctttaaaacccaggaaatttttgggggtgggagtcttgggttgggttttttggagccttttttttttttttttgagacggagtctcactctgttgcccaggctggaatgcagtggcacgatctgggcttactgcaacctccgcctctcgggctcaagcaattctcctgcctcagcctcctgagtagctgggattacaggcgccaccacacccggctagtatttttgtatttttggtagagacggggtttcaccacgttggtcaagctggtcttgaactcctgacctcaggtgctctgtccgtcttggcctcccaaagtgctgggattacaggcttgagccactgcacctggctttttttttttcttaagcgaagtctcgcctgtcacccaggctggagtacggtgacttaattg

SEQ ID NO: 95838 - DNA, 2733 bp, Homo sapiens
gctaaggtctttataaagtttttagccttcccatatatgtattcagatctttgctcccaatttttttttttttctgagatggagtcttactctgttgcccaggctggagtgaggtggcccagtctccactgactgcaacctctgtctcccaggttcaagtgattctcctgagtcagcctccagagtagctgggactacagatgcttgccaccacatccgggctaatttttttggtatttttagtagagacagggtttcaccgtattacccaggatggtctcgatctcctgacctcatgattgtcctgcctcggcctcccaaagtgctgggattacaggtgtgagccaccgcgcccagcctcctcccattctttcggtgtttgacttgggtgttctcctatagaattaatacatactaggtatggtagaattcttatttttagtcactggccttactgttccttaaacatttcaagtttttgccttagggcctttgcatttgctgatatctctgtctggaacattcagcgcccaaataatcaggtggtttgccccttctgtacccatagttaatgtacacagcttgctagcttactacatttatgtcatgcttattccttgaccctccccacccaaatggtgcccccccttccatcactctcctcttacccttctttatttctcttcacagcatttgtcagtactttacattattccatactagaaggtgagtgtcagttctattagaacaggaacttggtcttattccctcctatatttcggtgcccagaatagcacttggcacacagtcttttgagtgagtggatgaccttgtgcacaatcagttattatcattgaacttcggtaaagcattaattgtggcatctttgtcagatgtttagataagatggttggcgtacgcatagtctgcatgttgtatttttagtctttgaagatatgaagtcaggtaagcaacatcctaacatagtctatttcttgacatctcttacaaacgtagagtatagcctatcctcaggtgtgtgctgaagtttatattagggcttttgggtaccttagaatgtgggtattgcaatctttattcaggatgttatcagtcactggtacagttagtcttgttattaaaagaaaaaagaaaaaaaaacaggtagaagttggaattagccttcgtaggaagaattccagatgcaaatgcaggaaaaactctgttgtccttggaaactactctggagagagttattggcactataattcccaaacctaccctgttaaaagattctgtggaaatgggttaacctttataccttttaagatattgatcttaatgatgttttacaggcagatccagttcctaatggtttgcgagctttgccagttttctatgcctgcacagttggaataaacctcttttccatcatgtatactggagcaccgtgtaagtacctatcaaaatatttaaatgtgaatttaaagttgtttacaaaacttgcattaaatgcccaatttacccctttttgctttacagggctgaaatctcctagaaggtggctggcctgcgcccatttcagaaggctgcaggctagtgtacgctgagttaacctagatagtttttcaaccaaagagacctgctcagattctaaatcactacagacctttcctctttagtcttcacaggatccactgataatatgatcatctccttccctttctcctgtctatgctaaaaatgctggaattaatactgacctcaactactgaagtcattagttatatctgatcttcagtaatcagtcatttaggactggtttgctggatattctcatttttctctcccaaatggagatactattgtttctaagtactaaacttccatgaatctgcttgaatgagaagagttgggatgtttaccacctgctctaagtgcacttggaagaagaaattcatgcagctaagaggaaaaataatttgtgagaatataaaggttgaaatgttgatgactttcatgtttgggactaaggcaaggcatggattaaattatggcgctacaagtttaatttagcaacaacaaaagattggtaacttgtaactggcaggacagtacagttttggtatctagactcatttggcctgatggtctgtgactacataggcagtgacttttattctttatactgtgacccactggatgaaatacaggacacacatgtatgtatgtagagagaaagataactggaatagtgtcatgaagccacttaatgcttactatgtgctatgcacccatattttcaaattctctctttttttttttcttaacatttgttgtggcccactgaaatgatttcagttttgagtaatgggttgtgacttgctcttaaacctcactgaagtagtaagttgctgacccaaagtagagttagctaaatatttttattatttatttatttttttgagacagttttgctcttgttgcccaggctggagtgcaatggcatgatcttggctcaccacaacctctacctcccgggttcaagcaattctcctgcttcagcctcccaagtaactgggattacaggcgtgcaccaccaagcccggctgattttgtatttttagtagagacggggtttctccatgttggtcaggctggtctccaactcctgacctcaggtggtccgcctgcctcagcctcccaaagtgctgggattacagacatgatcac

SEQ ID NO: 95839 - DNA, 4921 bp, Homo sapiens
tgcagtggcgcaatctcagctcactgcaacctccgccctgccaggttcaagtgattctcccacctcagcctcccgagtagctgggactacaggcgcccaccaccatgcccggctaatttttttttgtatttttagtagagatggggttttgccatgttgggcaggctggtctcgaactcctgacctcaagtgatctgcctgccacggcctcccaaagtgctgggattacaggcatgagccaccgtgcctggctgaaagacaaagcttttacaactattcttaaattatcaacttttgatagataatatccttgttttctgtatcttgctttgatactgctttcaaggagataatctcattaaagcattttactaaaggccagtatagtgaatgtaatcacttttacacagaattgtgtcagcatgacaaatgtgactactgagacatcattctgttaacattaaaataagtttgtaggtggtaatggaatatgtggcagttacgatcatgagctaggagagtggaacacttgctgtctttttcatagctagtcataggtccttagcgtgtagtgatctttattatcttccaaggtgaagaaaggaaaaggctcgtatgttgagaagcataggaacttgagtcccgcaggtgttcaagtgggctaggctggtgtgggttttcagatgatcattgagtttttctcccaaatttgtataggcactagcacagtaatcctgtgcacttaaatctggcagcagctgtcaggggtgatgggctggtatggggaacccctcagtccccagaggagggtttacacaatattgcagggggctgttgccctggggttttcaagatgcaccattttatctcctagtgctgggctttgacaaacttcctctgtggggtaccatcctcatctcggtgggatgtgcagttttctgtgcccttatcgtctggttctttgtatgtcccaggatgaagagaaaaattgaacgtaagtaataactaaacagcagaaaagtttaactactaatgttgtgtttattttttatttggccacctgtaaaaatctattagaagagattggcaaaataagagattttaaagggaaatttgaggatatgggtttgttgtccaaactgtttttagaaatggacttacatgacctaagacctgttcttaaaaatggacttacatgacctaagacctagtgataaagagtattcaacctatgctgtagagacaatctggggcattgaatttttttatgttccttgatcagttgccagtgacatgatagataaatagagaaatcatagcctacatttactgagaagtagaaggataccttaatgaaaaataaggggtagatacaagatattttcgtagaggaaatatttaccccaactgcttctgtgtataacttcagattcagacaagcaaagctaagtctaatgtgtacatgttgtatataggctagaatacatgtagacattgtattgcagtatacaatgcaaatacatatacaaacacacattgtgtgtctgctagaattgtagcacagattctagaagtaaacattttcaagtgtcaaggaatcatttaggccattaccacacactcatgtaattaaatactgagtaaattttggttagtatcggacttttttttccttaaaataatcattttctgcccttttcatcgatgtgaaggctgggttagcaagttgaagtttatcgtttcgaagctgagggatgcatagactgcagtggtgttaggaagaacgctgcgtcaccgcagctgaaccgaagagcctccgagaggttctgtgctagtctggctgtgccgagtgcacggtgggaaccaggctttcaggactctctggcctcattttccctctctgggaggagttgagacaagtcttgctttatgttagtcagtctgtagtttgactgaggtgcctggatggataggtcagcatactgagcactggcatgagagaggcagaagatactctggtctgcctgtgggatttacagccatgatgcacatctctttgttttatagaggtggaaattaaagttgtcgtctttagttccctgcattgagctgtgccactttgcttgaattggtggactgaaatttgagagaatcctcttttgaaaagaatagaattgggtacagttcagatttttagtttcagcttatcagccccatggttgagctactttcccctacagaatgagtcagcagggagctaagaagggttcttatatctgtaaagggttgtaaaaataaaaacaaaacaacaatgtgctacagaagcccgtaaaacctaaaatatttacagaaaaattttgggacccctgacatagggtgttctgcattgctggttgttcccaagtgagagttgctggcaaatgataaagcaggcaggaaaaatgttcctgaatgttaattgaagttcacatacattcttgttttgagatgagttttttgggggtggaggaaaggagacgtggaacaaagtagtatggccacaaccaaaccaaaaaagaccccccttttttttcctaggagaaataaagtgtagtccttctgaaagccccttaatggaaaaaaagaatagcttgaaagaagaccatgaagaaacaaagttgtctgttggtgatattgaaaacaagcatcctgtttctgaggtagggcctgccactgtgcccctccaggctgtggtggaggagagaacagtctcattcaaacttggagatttggaggaagctccagagagagagaggcttcccagcgtggacttgaaagaggaaaccagcatagatagcaccgtgaatggtgagttggaattcctggtttcacttttgttacctgcagtggtgaggaggcttattgttttggatttgatgctttttgtattgaatgtcaccttggtgatcttgactaggtgcagtgcagttgcctaatgggaaccttgtccagttcagtcaagccgtcagcaaccaaataaactccagtggccactaccagtatcacaccgtgcataaggattccggcctgtacaaagagctactccataaattacatcttgccaaggtgggagattgcatgggagactccggtgacaaacccttaaggcgcaataatagctatacttcctataccatggcaatatgtggcatgcctctggattcattccgtgccaaagaaggtgaacagaagggcgaagaaatggagaagctgacatggcctaatgcagactccaagaagcgaattcgaatggacagttacaccagttactgcaatgctgtgtctgaccttcactcagcatctgagatagacatgagtgtcaaggcagagatgggtctaggtgacagaaaaggaagtaatggctctctagaagaatggtatgaccaggataagcctgaagtctctctcctcttccagttcctgcagatccttacagcctgctttgggtcattcgcccatggtggcaatgacgtaaggtcagttgacattgatcttagtgttgctaaccctatttttaaaccatttatccttgtcacaggcctgtgcttgtggtagtggtactcctagcatttacaggaccccaaataatacaaataggatgaggtaatagcagttattgacataataagacagtacagttttattcttcagaggaattacaaagaatgtttatttttgtagatgataaatataaacagatactcttcacagagaaggcttttgtccatcaagatgagattcagttctttggtagtgaattgtgggatgtaagatgtaagatgaaaaacttaaaagtttttcatatagaatgattttgtagtttggtttgtaaactgtttattggaacctgagagttgctttaagctgcctataggaggaaagaggccaccatttgcctggcattccctccatcagagctgtgttcatttttctgttgtgtatgttggggttccatttatgtctttagaaagaaaggcccttttgccagatgagcttgaaagctgtactttagacaacctggtagatcattcagcagattgggtcttgccaagatctagttctgcctgaaaagtcacttctgccctctttgtttcttccagcaatgccattgggcctctggttgctttatatttggtttatgacacaggagatgtttcttcaaaagtggcaacaccaatatggcttctactctatggtggtgttggtatctgtgttggtctgtgggtttggggaagaagagttatccagaccatggggaaggatctgacaccgatcacaccctctaggtaagtaggtggagcaggttctacaaatgtcagtactcatttttttcagagatataacactgtcgagtgctaacacaaatctctaaagtaaccaagtttgtataagttcatgatgttcttattgtcattgttctttttagattttacttgtctggcccttaaacattttggtcagacattttacccatttagctctggtggtctctgaagaaaatgacttttctgagaaagctgtgtatgctaagagcggatagttatgtatacttgccttttatttgtcttgggagctaagactcaatgtttaccaaactcttcaaaataaaagtgcaaattttatttaatagtgggattccagaaaaacgtaaaactggaagcctttgaataaggaaactgggcatctgtggcctgatttaaataaagtagatcttaggggttatagcaaataaagatgtcagtggaggttttgtgactgagtagaacaaagcaggactgtgttaacttgaggtgtagtgttagcttctcaaaaaagtcaaactcacttcctgacaagaatccttttgtgtctgtagtggcttcagtattgaactggcatctgc

SEQ ID NO: 95840 - DNA, 1945 bp, Homo sapiens
tggatcacaaggtcaggagtttgagaccagcctggccaacatagtgaaaccccatctctactaaaaatacaaaaaattagctaggcgtggtggtgggtgcctgtaatcccagcacttgggaggctgaggcaggagaatcacatgaaaccaggaggtggaggttgcagtgagccaagattgcgccactgtactccagcctgggcgacagtgcgagactccgtctcaaaaaataaataaataaaagcagtatatattcattaaattttagcagtagctgagaaggggaaaagaaatagttcttgtgtccttttactaccgttagtatagattatgattggattttcaaattgccttcattttcccagcttaacctgttgtaaaccagctttcttggactttgtcttgtccaggggtctggggctccttgtccaaacagtctcaggtgtctgtttgccagaataccactggcacttcaataacctgtttccttggtctgcttctcttctaggtgggctctgttgtgtctgttggctggctccggtccaagaaggctgttgactggcgtctctttcgtaacatttttatggcctggtttgtcacagtccccatttctggagttatcagtgctgccatcatggcaatcttcagatatgtcatcctcagaatgtgaagctgtttgagattaaaatttgtgtcaatgtttgggaccatcttaggtattcctgctcccctgaagaatgattacagtgttaacagaagactgacaagagtctttttatttgggagccagaggagggaagtgttacttgtgctataactgcttttgtgctaaatatgaattgtctcaaaattagctgtgtaaaatagcccgggttccactggctcctgctgaggtcccctttccttctgggctgtgaattcctgtacatatttctctactttttgtatcaggcttcaattccattatgttttaatgttgtctctgaagatgacttgtgatttttttttcttttttttaaaccatgaagagccgtttgacagagcatgctctgcgttgttggtttcaccagcttctgccctcacatgcacagggatttaacaacaaaaatataactacaacttcccttgtagtctcttatataagtagagtccttggtactctgccctcctgtcagtagtggcaggatctattggcatattcgggagcttcttagagggatgaggttctttgaacacagtgaaaatttaaattagtaacttttttgcaagcagtttattgactgttattgctaagaagaagtaagaaagaaaaagcctgttggcaatcttggttatttctttaagatttctggcagtgtgggatggatgaatgaagtggaatgtgaactttgggcaagttaagtgggacagccttccatgttcatttgtctacctcttaactgaataaaaaagcctacagtttttagaaaatttgttctcatggttttctttcatactcgaatcacctgggctcctgatcagttagcctaatatcattcttaggtgatgtgaatatcttaacaagtgagagctactgtccaacttaaagctcccaacccctccctgtatgcttcttgtgtgcccagaatatgcaagacattactccatagggactgtggtggcaacttggcattttcccttttagtagcacagcctgtacactttcatgttagcacacgggtgttttttttgttttgtttttccagttttttcttttgatactttttgtttttttttttgagacggagtctcgctgtgtcaccaggctggagtgcagtggtgtgatctcggctcactgcaacctccacctcctgggttcaagcaattctcctgcctcagcctcctgagtagctgggactacaggcgcccaccaccacatctggctaatttttagtagagacaagct

SEQ ID NO: 95841 - DNA, 1013 bp, Homo sapiens
gagcctctagagctagggaagggaccagaggagcggttatatttctactttagttgtctgccatggggcagggacacatggtgagaaccctggccccccccttttttttcggcatagatattgccttttctttttttgagacagagtttcgctcttgtcacccagttggagtgcaatggcgcgatgtcggctcactgcaatctctgcctcccagggttcaagcgattttcctgcctcaacctcctgagtagctgggattacaggcttgcgccaccacgcccgactaatttttgtatttttagtagagacagagtttcaccacgttggccgggctggtctcaaactcctgaccttaggtgatccacccacctcagcctcccaaagtgctgggattacaggcgtgagccaccacggctcagctgacattgccttttcttaactaaaagttttttgaaaatcaaggttgggcaaattgaagagccagctggtccaacaaggcttgttaacaaaaacaggtctgccaacatttccctttcctgaggcaaccactttcaattcttttggtatttgtctctttatatctaaataatatacttgtgttactatttccctctcgcattttttggctgagtgcgggtgacacttctgggactactgggcctttgtcttgggtaggagttctccaccaggggtgacttttgctgtccccagtccccatttgtgactctcccttgtcccatttatggtagtaatatttggagacatttttggttgtcacaattgggggatggtactgaccagagatgctgctgtaagcgtcctacagtacacagggcaactccacaacagaaaatacctgggctgaaatgtcagtagtgctgaggttgcagaaccctgacatagggtgatctggttgggctctttccttggaggaaccccagaaaagcttcagaaggctaaaagcctaactaatgaacgttctaggactcagagggggaagtggtcaccacata

SEQ ID NO: 95842 - DNA, 1053 bp, Homo sapiens
gggctctaactgctgtgagtcatagaatttggtagaagcgactgccagtttccaggttcaggtcttaggagtctggcagcttccacttcctgtgtcttggaacacttgccctggggaaaagtagcttccataaaagaagcctgactaccctgagactgctgtgttgtgaggtagtccaagcagattcatggagaggaatcaagatctctttccccttctctctccagccaacatccttggcagagctgtgagccaacagccagccccagcctgccagccgtgtgagcaagcagtcttggaaggtgattctacagccccagctgaaacactccaactgatgccatgtgagccgagaagagcagccaaactgagcccttctcaaatccctgatcctccaaatgtaggcaaaataaattgctggttttaagccactaagttttgatatagattgttatgtaataatagatatcagagctctagctaaggcaggtgctgaagggaagatgtttttatcattcatagatatcacaaaatatgtatatttaatgcatttcaaaattttagttctaaccaatacaattctttggagtttacttttcccgttatagaaatggtacattataaatcacctacctgcgagtctcaatctactcttgttatttttctatgttccgttctagtatttgctttaagtgcatatttaatttgtaattaaatatgtaattatgaaatagatataatttagatttctcgtgtcatgtcatttttagatgggattggccaatggaaatcagacagtaattacagtggtatgaaattagtcatagcttgccttaattaattttttgtttatttttttttttgaggcagagtttcgctcttgtcacctgggctgtagtgcagtggcatgatcttggctcactgcaacctccgcctcccaggttcaagcagttctcctgcctcagactcccgagtagctgtgattacaggagtgtaccaccaagcctggctactttttgcatttttagtagagatagggtttcaccatgttgg

SEQ ID NO: 95843 - DNA, 1108 bp, Homo sapiens
tgccttgtggagttccctgattccttagagggtggtggggaaactgaacacttcggctttatatgtgtgctcatatacatatgagcaggcctaaaatatgtgtgcagtttttacacaagggatgtcgtagtctgcccaatgtttggcaccttactttgaacagcacagataagggatcactccattttcatacagagtgctgccttattatgttagatggctgaacagtgaatgaaccatgatttcttcttttttttttttttttcctggaagcatgctagatggctcaccatgatttatttagtacatcttcccctgatggccattaggttgttgggagcctttagtaactgaaacagtactgcaccctggtgcatgtgtattactcgtctgtgttaagtagggatgttgcttagcccagctggaggagaattctagtttttaacactcctgggtgtgaagtcacagtgggctggatgggcctcccagcgcctgcttccagagaagtctctatatgcctcgtgggtggatgtagaacctgggagtgaggcttggcaggaaatctgcagtgagaaatgtcacaacccaaacagtaactcatacacagagcttcgcatgtctcattccacaaggatcagcagctggaccattacctggagctatagacttgatgaaagccccagaaatggctaaggcagaggaagtgcctgggagttgtttggcaatttgacacaatatcttttagatatttttaaagccactgagcaaatcaaatcctcaagtttagggatggattcaaaggccagtcctttcactatcggactggaatgatttttagtcatcttacctctcagcatttactccttttcccagatgcagcagccccacctccttccagggagtcacctgtccaggtcaggtgcctcctcaggggaagcatccctcacccgccagattgccagggcgtgtgactctatctgggccaaccacatcctctctcctggactttgactgctgcgaggagtgaggctagaaccagagaaacctagctgatgctgactcatgctggaggttcctgcggagtgagcatcagagctcatgagctcat

SEQ ID NO: 95844 - DNA, 1078 bp, Homo sapiens
ggatagcacatgtcactgtgtccgtggtgaaggggagagatcttcgtggagggaaggaagtgaagaggacctcccgccggagtgtgtgtggtcagttccctgatgggttgttacagctatggaagtgcgtcccttgtgagtgcaagtgtacgtctgcattttgggagtccccatagctgtgtatttaaaggagcccctgtgtgctgctgtggcgtgtggggtgtttatgggctgagacccctggcccccaccccaggtgcccatctcaccgctggtgccagtcctgcttcgggccttgaggggagaccagtccctccggctctctccagtctacactggccatcgtcacccagagtgaggaggaggcaagtgtcccttcctcagcctcctgcacactatcagtggggcccagccactctcctctccctcagaagcttcaggcaccactgacccagctggccccaccctgtgctcccatctcccccgagcccctttgagggaggagtcagccaggacaggctctggtatcccatccttttctctagagcaaaagcagcaaggatctaggaagagcaattcatgtccactgcaccctcctcattcctagggcttatgcatccatggacctcagcggcctggagagtagcggagaacccagaatgaggcaaatgacgggatacaaagtcaggaggctccgtactgtactcatgataaaagaaataactcagtactcttgctttatgcacaattctgacacatttggttatcaaatttcccagctcaaggccatttagagaagacattgctagaagcatgccaagggctataagaattgggaagataactgggatctcagaatgggggggtggcagaaagtacaaaaggaagtgtcaaaaagcagaaccactggggccatttagtgtagagttctaaatactccctgagggcccataccactggctccacaaccaagcatgtgacttccatttggagcggtgacctggatcatccagaaagacttaactgaagtgccaggccctcttttaaaaagaaagacaaggctgggcacagtggctca

SEQ ID NO: 95845 - DNA, 1049 bp, Homo sapiens
agttgtgaccaggaatcctggccactctgttgtttctgagggaggaaacagacaaagacatacagacccagagaggctaagcggcctgcccgaagtcacacagccagtagggggaaagctgagagtcaaatccacttctcctgacccaagaatcccgtggtgtttctgcaggcggtgccttcctcctgcacctgaccccaccctccccacccaccccaaggatgttcagtgagtggaaggtacacaccttccacccaggtatgacttgaagtcatcctccagggcagggagttgtgtgagcccacacaatttgggctttgtcctgagagctgaggctttaggtttgagtcattgccgtgtgacctcaggaaggtcacctgactccctcacctgtcccatggggcctacggggcctatgctgtccctgcctcagtctgggcagagtctcacgtgatgtaaggggccaggggtgttatgcacacagctcagggtgtgcaagtcctccgctgggccagggcagacacaggcaggcagggccagtgggtgacacaggccgtcactcacccccactgacccctggtggcttttcagagcggttggaggagctgaagagactggacacgcacctggcagacatataccagtgagaccctggcctttctgggggtgggatggggcagggagaggtatggaggggcagtggctcacatccctgcctggcggcgaggtcccggccaaggttgtcagaacatcaagatctgtttcaggctgggcttccctagcaaactgaatgtggggacccctctcacccccttgggactgctcacactctgtgacctctaggcccttcctctgaacctatccagcactcagggacctgccctcgcacgcatgcacacacccagcccggcacccccactggatgcccgcacggtgtccccccacccgacccctgctggggtctaaggagactgtcctggcactcggaggctctgtgcctcccctgggtcacctagctatttttgtaccaggcacatggatgggagcag

SEQ ID NO: 95846 - DNA, 1058 bp, Homo sapiens
caggaggctgaggcaggagaatcgtttgaacccagaaagtggaatttggagtgaatgaagatcacgccactgcactccagcctggacaacaagagcgaaactccatctcaaaaaaaaagagtagatttaactggggaacaatcaagtcatgtagctaagtaacccactacatgtggtaagaaggacataaaatagataatagtagattctttgagaatgaggctacaattcagttatttggttaaaacatggtagtgttttaaaaggaataaaaagagaagacaggaatccatgcctttgttgcaccctattgacctcacttagggtgtcagcctctagccacagtgtgcctggcacagtctgatttccttcctttcattttggtgattgtgtttgggctaccatgaaaactattaatgcaagacagtttttgcccactgtccaaggcagtaaccatgtggtcatcctggggaggaatgggattgggaggttgtgtgagttaaccttagtgagtcaagaaaattgatccaaggtgtggtgtaagggtagaaggccagtgattagtccctaagagagctctcttgagagtgaataggagactggagatatgttcagagtcttgaaagggtgtcaagaatctacgtacagcagtctcgggggctggctacgagggtagcctgatgtagcaagacactgctacagagcttaacgtgaaaaaacaagttataagtcacacttcaaatcaatcactattcagtatgtggagcccatgaagatcactgggaaatcattgtatgtatgtatttttcatgttattgacttctagttgaagtattaaattggtaaatcttactttccttcatgatcttacatacacagggattacttctgactctttagttgctgaaactagtataacatcagtggaagagctggccaagaagatggaatctgtgaagtcttgtctttctccaaaagagagggaacaagtcacggcgacaccccgaatagccaaggcagaacagcataattatcctggtatcaaattacagattggt

SEQ ID NO: 95847 - DNA, 1050 bp, Homo sapiens
aaatagaaaatgtttatcatagctgaaggtaagaaatatgttcatttttacatggtacaaaaacaaaacaaatcctagagtaaacatttacatattcataatattccatatttataataacgagaacactgagtagtgatgagaatttccataggactaatagcagtgtaaagaatgacacaggcatgcgaaggtcataggggtgtatatgtgtaagtgtcagggatttatgcaggtgtttatgaaagagggttaaatcccacaaaaagataatttgaaatggattcactggtttggttcccttctggcttgtgccgtaagcaggacagtgacatggacccaacgaatggggagcactaccatgcccagaaatccaggtactggcacactcagccaagcagcaccttctactgctagaaatgggggagacgcaaaggtaagttcacaattgagaatcactaacatttgagaaaaccaacactacatgaaagaggcataaaactcaacaaacaagaatgaacactggagcaaagaggaatacttttaagagtatcacagtcaatatcttcagagtgataagagagagtattgctatcctaaaactagaatgggctgttatgaaaaataaccaacagaaaggcagaacaactgcatggacagcgctgaagaatacatctgtgagctgaaaattcagctgtgaaatcctcctagaaaccagtgtaataaaacaatgaagtgaacagtatgaaaacaacatttagagttctgaaggatatatccattactcaataactccaatatccatctaagagagtttctagaaggaaaaaagttcaacacacaaagtggttgtagaagaagaatttcaagaaatgaacaaagaaacagttgttcaggttgaaaaggctctcagatagttaagcaggatgaatgggagaaaaaaatataatagaaaaccaaagataaaaagaaaatcgtacaagcttccagagagggggaagaaaaggattacctataaaggaatgagaatcagactgacgtgagacatta

SEQ ID NO: 95848 - DNA, 1042 bp, Homo sapiens
agtgtgaagctggatcgtccacaacaggagaactgtcaagaaaacctgtggggtcacttaatatagagcaattgaaaactacaaagcagcagttaacagatcaaggaaatggtaaatgtatagactttatgaataatatccatgttgaaaacgaatctttggataactttctaaaagaaacaaacaaagagaacttgctcgatatcttaacagaacctgagaggaagccagatcctaaattatataccagaagtaagccaaagactgactcttataatcaaaccaagaacagtttagttcctaaacaagccttgggcaaaagttcagttaatagtgctgttctgaaagatagggttaataaacaatttgttggagaaacacaaagcaggactttcccagtaaaatcacagcaactctctagaggagcagatcttgcaagaccaggagtaaaaccctcaaggacggttccctctcactttattcggacccttagtaaagttcagtcatcaaagaaaccagtagtcaagaacatcaaagatataaaggttaataggagtcaatatgaaagaccaaatgaaactaagatacggtcataccctgttactgaacagagagtgaagcacaccaaacccagaacataccccagtttgcttcagggtgaatataacaacagacatccaaacatcaagcaagatcagaagtccagccaagtttgtatacctcagacatcatgtgtactgcaaaagtcaaaagccataagccagaggcctaatttgacagttggcagatttaattcagccattccaagcacccctagcataagaccaaatggaaccagtggtaataaacataacaataatggctttcagcaaaaagcacagactttggactccaagttgaaaaaggctgttccccagaaccattttctgaacaagacagctcccaaaactcaagctgatgtcacaaccgtaaatgggacccaaacaaacccaaatattaaaaagaaggcaacagcagaggatcgaaggtactttgctttaat

SEQ ID NO: 95849 - DNA, 1013 bp, Homo sapiens
agatggtagaaaaaggactgaagctcaatcccttagcatttggccttcatgagaaacagcactttaggactatggctgtaacatgatgctataggctcttcattcatttgttcattcagcaagcatttattacatgcctagtagatgtgtggcccagtctattaataagagttgatttccttagttgattggagagagatctaaattagttatgaagattgtcagtgacactagtatcttactgtatccaggcaggtaggagggaaacattgtttctgtcctgccttcaacataggcctaagacattttgcatcaaatctgagcactacagtgattctaagccccctaaacattttgatctccaagtgaacaaatcatacctttggaaatcaatttagcatttagatgacatttatctcagtatttaagtcaacaattgaaggttaaacacacgcacacacatacacacacacacatacacacaaaattcctaagtatatcagtaaactctttcaatatactctttagaatgtacttttcttgtgagtatgagtagaatttaacaatacttttatggaaaaatagatttcaaattccaagttgagatgcttctttcctattcttttaaatctaaagcaagtaaatatacttttgaggcttccttggggtttccaatgtcagcaggatttatttcccaaacctattcctctcctactttttcccttctcagtaaatgttgtttctcctcttccttctgttggttctatctccaaaatataacccaattctgtctgtttctttccacttcttttccttaccccacccccatgactgctgtgaaacctcctcattggactttctgcttctctattgccttccttctgatctgttttctattttaggaaatataagtgaggtcaggccattgcactgtgtgaaacccattaatgggttttcattgtacctcaaatgaaatccaaatgcaagctctgcaagcactagtctctgcatat

SEQ ID NO: 95850 - DNA, 1016 bp, Homo sapiens
ttttttttttgagacagagtctcactctgtcgcccaggctggagtgcagtggcacgatctcggccccctgcaagttccgcctcccgggttcacaccattctcctgcctcagcctccccagcagctgggactacaggcacctgccgccacgcccggctaattttttgtatttttagtagagacagggtttcaccatgttagccaggatggtctcgatctcctgaccttgtgatctgcccgcctcggcctcccaaagtgttgggattacaggcgtgagccaccgtgtccagcctgtaacacttcttatagcactgagttgaaaccttgctcctcctggttcctccaggaaactgaaatctttttgagccaagtctagcacagtgcctggcatgtacattcaggtggtagagtttgctgcttgaatgggtgaatgggaatttgacagcatttttattcaaattagtatgtgccaggtatcgtgctcgctctgcattatccaagggagtgagcctctgtgcaagtatttgagacacgagggaaataggttctactgtgggaaaaagagcatttcatggacttgctctccaagcagccttctgatttttaatttggctcccagtatcttgatatcaggagtcagtcacaagaactccatctttagtaagttatattttccacaggaaatctaaaagctgttcaacatgttagtttcctgtgaatttgataagccataatccattcctaacactgagccctcctgaaatttggtgtctggtcctgcagatagctaaaagccctgtctgggtggcctaggggactcctctgttttgcctccacaggatccactttgcaaattaaccactggttctcccgttgtaggaactgccaccttcctcagagcctgtctttcttccttccttccttccttcctctttctttttctttctctctctctttctttcttttcttttctttctttctttctttctttctttctttctttctttctttcttcct

SEQ ID NO: 95851 - DNA, 1126 bp, Homo sapiens
aggctgctgagctctttgttggggaagggggagagacccacagaaggggtgagggatgtggggtgagaggacccagggaggagaggcccagcctggccccagccccctaggggtctttgtcctccccaggcagcagctgtactgggtcccctttgtcattctgtccctacccccgtgatctctcccctggatactctctgcctacctcagaccgccatcctctgctcccttcctgagcctctgctggcctcaccacaggccttcagtagcactgtcttctctctctctctctctctctgtgtgtgtgtgtgtgcgtgcaaatttgcatgatggctctttctgtgtgggcaggatgtggggccttctcgagtcatttctctcacggtgcttcagaccccaggttcagacagaggcctctgtcctgcagctccaggccagggagttccactcatggttcctgcctgcagcaacatctgtaattcggcagcttctcgggctgcagagggacaggacaggtcacctcctaagtccttggaccggccagaagccttcataccttttccataggagggaaaacatttccagggtaaaaggagggagcgtttgcttgctgagtctggaagctcaaaaagggaaacagagacaggcaccctccggatgaaggttcagggctgactccttgaggaggctgagagctgagcctgaccaggagggctatttgtttgtttttgttaattttggcttctctaaatggacagcaaaacaacaaaattaaactgagcaggacacggtatttcctgagcacccaccaagggccaggcccagcactcagacccattccaactttacaacaaacctgtgaagtatagctttattgggtcttggttccttattttacagaaaaggaaccaggtggagtttttcacccagagccacatggcttgtcagctgtagagttaggatgggattctgctctgcattcttcactatgaccctgaagtgggcaaaggagggtggtcagtgcagggcacccaaggccatcaccttcctactcagggcaggctcataccccagcctctgtgcccggtctccccgttcttcagccagggtacaaggctgcaatgcc

SEQ ID NO: 95852 - DNA, 1078 bp, Homo sapiens
ctgacatcttcctgcagatggagagaaagaaagacatctcagaagtctatggggacagcctacagctccccacagggttgctccaggtaacgctggaaggtgaaagctgagcaggctccagtccccatcctaggtatggaacagatcaaaccaccacaggcctatgtctgaccttgttcccaccccatgctcctctcccacctgtgtccttctctttgcaggagaagggacagacagaggttctcagtgatgagctcaggctctggaagggcacttgaagtttggctttagttcttcctttcccatataggggagctcagcttccagggtcctgggcctgctgtgacccaggttgttactcctgatataactgcttcctgggctctcatgatctcagctgagcctggctttctgctgatgatatttgtttgttgcttgccaggcaccagggtagataaaaagatcaccaagacccgcacctttttccttaggagggtctgagtcttcaggagacggagacatatggaatgtgtcggggttggaaggagcaggactggagggtcggggtgaggggggcagagggaaacagggccgtcagggtggcctgaggccagatcatacagggtctccaatgcagccaaggagagtggctttttgtgaatgtgcagtgcaacttttttttttttttgagacagagtctcgctctgttgcccaggctggagtgcaatggtgcgatctcagctcactgcaacctccgcctcctgggttcaagagattctcctttcccagcctcccaagtagctgggattacaggcatgcaccaccatgcccagctaattttgtattttttagtagagacagggtttcaccatgttggtcaggctggtctcaaactcctgacctcaagtgatccagctgcctcggcctcccaaagcattgggatcacaggcgtgagccaacgtgcctggccagtgcagtgcaatttttaaagagaagagtgccaagctcagggcttggaggacagcctagggattttgttttaagaagatgagctgggcgcggtggctcatgcctgtaa

SEQ ID NO: 95853 - DNA, 1136 bp, Homo sapiens
tccatctgaaaaaaaaaaaaaaagggcagggggaagtgttcatcagaaacatcatgtggccttattcctggttgctatttcatgaccagacatagctagaagtcatacagctcttgtttccctattttacaaatgcatcaaaaaaaatcaacagaatatgaatatcagtttattgacagaaatcaagaatttggtggcttctgactcttcacgattctgaaataatatctgtgataactctcattgggcatctgctgtcaccaagtattcggtgctaagcacattatgtataagtatacaaaatttcatgtaatgcttacgtcagcctcataaagtagagtctatgattcccatacaggtgagaaaattaaggttcagagcagtcaagtagactaaagctacttggcaggtcattgcagaaccagggctcagagtcgctgaagttctgaagcattgtgctgctctgccccgattcaagttcaattccagctaaaaagcccaataatcactgggaagtttcagtcattgaatacaaaatcaccaaaagatttgactatataggttttctttttcctttttttctaagttacttggattttgaaatagctataggattctgagtagatattttgctgtcaaaacaacacatccataaagcattttaaacttctcttatacgctctagaaattaggtattttgttcaatttcaataagacacaccctggccaggtgcaacggctcatgcctgtaatcccaacactttgggaggtcaagccaggcagatcatgaggtcaggagtttaagactagcctggccaacatggtgaaactcctgtctctactaaagatacaaaaaattagcctggcatggtagcacgcacctgtaatccctgctactcgggaggctgaggcaggggaatcacttgaacccaggaagcagaggttgcagtaagcgaagatcgcaccattgcactccagcttgggcaacaagagcaaaactccgtctacaaaaaaaaaaaaaaaaaaaggccctaagcaactccaccctgcctctaagtgggcccccttggaaggcatggaaccagagcaccatttagtcaataattgctgctatgtgctaatggtgccctggtggc

SEQ ID NO: 95854 - DNA, 1066 bp, Homo sapiens
cagctctaaatgcaggtgatgatgatgacgatgatgatgatgatgatgatgatgatgatgatgatgatgatgatgatacaaagaggagcaggagaagaggacagctaacatgtattgagcagtctccttctgccggacattcttctaggctgtacatgcactgtcttatttaatcctcaaaataacactataagataggcactataattatctatcctcgttttgcagatgacaaaatgaaggcacagagaaatgatatagcttgctcaaggtcatacagaagtggtcgacctgggatttgaacccatgtcatctgatggcagagccttcacaagactggcatgtgttgcttgctagtgattccatatctacctgtctgtaatttctgtctaattccattttctgtaggaattcaaatcagtaaacagaaacttttttgcatcttttcaaatgtgttaagacagcaaagtgtacattttctctggattttctcttctgtatgttaaatacatccattctatcaagtgttccataagaggagatcattctagtgcccttaccatcttggtgctccttattgaatatccctgagttggtaataattctcactgaaggtgaaagctagaagtaaacacagtactcccagtatgattcaatctgaatggagtaaaataagagaatgtagtgcattatggttccctgtgtgggggtagagcagatggcaagaagactaggcctggagaaaagcccactgtaaaaggatggggtgatactgaatcagaaaagaagacgaaacaatgagtttaaggaggataagaactgagaacttaaacagatctgctggcttagggagagtcattgggaagaaatgcaggagctatggaaatagtaggtaatgagccagcaggagggactacgtgttgtcctctctggttacaaaaggaaagggaaaaggacagtggctggtgggaggtggaacagacagaaggatcaagtaagaggttgtttacatgctaggaaagtgaggatggtgcataaggcagggaaaggattgtcaatagagagg

SEQ ID NO: 95855 - DNA, 1060 bp, Homo sapiens
aatgctaaaataagctacctgtaataagtgtggattatatttttgggttttgtagaatattgcaaattaaccacacaaaaaatgtttaatttatgcaacaagcatgtttgtgcaaatttcatgggactttaaaaagaataagtatttgagaaaatatctggttcacttacactacatttactgtattattcttttatagcattaggtgccttgtattttaaatctgtgacaaaccatggcaaatttttaaaggggaagtattattataaaatgaagaaatatgtatttctaaaggctatattgctgtaaacttaattgataaagctctgtttaatttagagttttgaagaaatagtctcccttcaattaagaaattttcataatggaatgatttaaattgaagtgacaaagagtattattaaaatacaatgtttatacgtctatttgtgtattgtagatgtatcaagtgatttctaatttttttcacatatgaatgtgccagattactctagaactagatgtctcttctttaaataattttagttttcctgaataaatttgtaatggttaaagtaccaagtaagtaaggcgagaagggattctgtttttaaaatcacatcagaacttttcctctactaagattataaattaaatgtaaaatactcctaattgcaattcttaaacttaggccttacatgtacttattatgcaactgctcctggactctattcaccatagatatcagtaaacgtatgtcccaggattcacaggcttttgattaatcaatattcttttcaagtttgctgtgaagagtttagttctcttcaaaatttcttaactaatctgatttttaagaattctctttgcagtgtttagcttcctattcacattcttaaaattgctttggtgttaccatgagtctaaaatgaagtttagccttccttttgtttcattctgagaacttctatattatattacctttaaaaattgtttatgatattaaatttaaaatacaaacagctctctttttttttttttttttttttaatcatccagccca

SEQ ID NO: 95856 - DNA, 1041 bp, Homo sapiens
gcaagagtagtactattgctggatttatatgggtttgatataattttataatccaaaagaaagattggaaagggatgacaagttggttaattcattcttaactgaaagatagtggatagcatagcacataaaagcactggactctggagtaaaactgcctgtatttcagtctcggctatgtgatcttggtcaagttaccttacctctttgtgtattagctttcacatgtaaaatgggaatggcagtaataacacttccttataaggtataatattgtacattttgtgaggattaaatgagttaatacaaatataacactatattattatattgatgttgttagatgttattattgaaattgctaaattatttgatagttttacccaaagttgagattagtcttgatcacttataaataatttttatcttcatgattaggcttttcagaattctttagctcatcattaatgactgttattctcatagcattggaggcgttgtactggtaaacctggcagggtctgaaaaacctgctggaagagacacagtaggtaagtactggactctggattctctctgttagagtaaataagaaagttacatgtgcgtgctcatgtgcacagatgaacgcacaaagggtaggcactagcagggtgggttttttttgaacttttcctttggaaataacataaaaaaatgcgtaaatagtttagtgaattctcatagccttcacccagatttttcaaatgttaacaacttacataaatattatacagttataaaaatcagaaattaacgttgattatgatactgttatctataaagccttttcaaattttgccactttttccactaatgttctttttctgatctaggatcatttattgcatttaattgtcgtgtttccttagtttcctttaaatgcagaagtgttcctcagtcttcttgtcttttatgaccttgacacttttgtagggtaccacctagttggtttgtagaatgttcctcaatttgcatttgtctgacattttctttggttaa

SEQ ID NO: 95857 - DNA, 2332 bp, Homo sapiens
ttaaattcttttctcctcataggactttttaccttaatccttgctgcagtatttccaagtaacagtggagatagatttaccctttctaaactattagctgtaattttaaggtaagcatatagtgtgatagctagtttgctctgcttaaaaatacaatattacaatttctgatagtggcaccagggtagtttgtattgtaagagcaaagaaagatgtggataaaagaaggctttaagtggacatgatgctacttagccctgtcacatcctgcactaggtttctaaaccttcctgggtagggtaaccagagggaaaaccccaaggctgctttggttcccattcatgtgtctgcagactcatcaagtattggactgacgttcacacttaatgtagcagcttaatcctcataatctcccaagtttctatttctttttcttaaggcaatttcccctctttgttttgatttttatttctcctttttctacttctcttagaaagctaacattcagttttctctaattgtctaagcctcaggtgatgtttcagttattttctgtataattcatttggcagttttgcactactgcataatatgagtgttgctgataactatacttaaatattttaatttaactttatgtatgtttgttttgtcttccatactggtttgtaaacccttgaaggccatagccttgttttatatttgtgtcatcaaagacctagcatagggctttgcccatagacagtattgaaaaaagatgtgttggtttaataaaacttattttatgaaacaaaatcagagaaggtagcaggatgatttgatggagagtagtgtttcttggttatcaaagctgagattgaataagagctctgctgtttgccctggggcagttttcttaaactctgaaagggtttcctagttgagaaaatgatattatctattttaccttgcagccttgttttaaagtttagtggtaatagctatgaagtgtctggtattgggcaatcatagaaaactggtagctcttaatattaaatgtttttcttttttagttataagggtaaattaaccacggttgctccaatgggcagctggttgatccaactaatttaccatttagactttatggccactagggatttattcttttacatgatttactaatgttttaagccgagcaaatttttgcattagggaaatatgtttgtattggagaagtaaatgaggttttatttaactttatttaaaatatgtgctaatttataacttttcttcatgttatcttaataaagacttgataaagaaggaaatggatataaaatattgaacttgtaagtattttgacagagtacattacttcttctcattaaagtaggtagacgaacagaggttggcaaactatgttgggtcagctgctggttttgtaaataagattgtattagaacacagccactctcatctatttacaaattgtctatggccattttagcactgcagaggcagagctgaattgcaataccatgtggcccagaagcctaaaatatttactatctgtacctttaaaaaaaagtgttacttagaaattttttgagtaagtatatgttcttaagaattatgtattaaacattgtttaatattttgttttgaattggcattttactaagagattcaatttctgaggctataaaaagaattttacataacaacaatcttgaagggaatctaagcaaagaaatctcatttcatcaattgagagacaagagtgtggcctcaagccaaacaacttggaatccaatcccatctccatcattactagttttgagatcttgaacaagttccttacatttctgtgccaattttctcgtctgtatattggggataataataggatttctctcataggattattatgaggattaaatgagtagaagttgtaaagtgcttggaacaatgtctgatacacaacaggaggtgctcactatatttagccattatcataatcatcatcatttaaatggaaacaaaatccctggtttctaataaattgtggatactcaataaataatagctgaatctgaatatgaacagtgattattacagaaaattgggatgatttaattgaagggtttgcatatttagtgtaaggactgcacttgagttctgatgacatctttccataagggaatacatattttctttcatcttcctctcccactgccacactggtctttctcatcagggtgagagaattaggctaatttttttttttaattagcaatatctcatctacttgaaaacgtgttacaatttataagattcatagaaatagaca

SEQ ID NO: 95858 - DNA, 1002 bp, Homo sapiens
agctaagatgacaggcacctgccaacactgctagctaatttttttgtatttttagtagagacagggttttaccatgttggtcaggctagtcttgaactcctgacctcaaatgatccaccagccttggcctgttacttgcctttttaactaacccatccctcttttccctacttatctgaaatgttatagtagtgttccgaaaagggcataagctttggttttagactaacttgggttttaatcctgactgtcaggattaaaaatctctcagcctcaaatttttcatcaataaaatgaagataatacctacctcacaatggtgaatatgtggcattagctgctattattattagtaacagttttagtcttacaggttgattctggatttttgcttctatttatctgagttacgtctgactagtcctacagtataatgtaagtttcattgaattttgtatcttgttatctgtatttagtttgcagatgctgaaggttactttgctgcttgcacaacagatacaactatgaatagttctttggtaagtgcttcttttcttgtcaggaatagagaggtggggttgagccatggtaggaaaaactgaaacaggtttgatggcagcaaagctgtattacaacatagatatggctcaatattgggtgcccatcattaggattgtaatttggtactttttttctccttagggttacctggggcctagaggtaagcaatttagctgcctctgaagagagaggggaagggaaaactggttcaggagtgaaaataataaaggacaatcctttgttactaaccaactttttcacttcatgcacattattattatcatttagaaacaaatatttttgacactgagactatataggcaaattattcgtttgttccacaaattttttacagtgacaaatctgtgttaaacacgttctaggctctgaagatacagctttgttttagtgtgtgagtgtgtgcgtatttgcgaggggaca

SEQ ID NO: 95859 - DNA, 1047 bp, Homo sapiens
cacgatccttccacaggatgctaaagtaggaaaactagagaatgtattagatgaattagccatgtgacctggaggaagacatttactctttctatgcctcagtttttttgttgttttgtcttgtgtttttgagacggagtcttcgtctgtcacccaggctggagtgcagtggcacaatctcggctcactgcaacctccgcctactggcttcaagcgattctcctgcctcagcctcccgaatagctgggactacaggcgcatgccaccatgctctgctaatttttgtatttttagtagagatggggtttcaccatattggtcaggctggtcttgtactcctgacctcaggcgatccactggcctcggcctcccaaagtgctgggattacaggtgtgagccactgtgcccagtctatgcctcagttttatcatctatataataaaggctacaatctctgtttcacctatcacacagcactgttaggaccatcaacttgtataatgttctctgaaacaattttgaaaaccttgtagctctctataagttattattagaattagtattcaatatatataaacatttttctactaaaagaaatctacagctattttacccctcccaaaaaaacttcttcctttccagtccctctggtattctccaccattttcctttagacaattaaatgctatcacttttaagattaaaagaaataaaaaggccgggcacggtggctcacacctgtaatcccagcactgaggtctggagtggatcacctgaggtctggagttcaagaccagcctggccaacatggtgaaaccccgtctctactaaaaacacaaaaattagctgggcatggtgatgcacgcctgtaatcccagctacttgggaggctgaggcaggagaatcgcttgaactcaggtggcggaggttgccgtgagccaagaacatgctattgcactccagcctgggtgacagcaaaactcctgtctcaaaaaaaaaaaaaaaaaattctgctacttttgctaccattcaaaaaagtcataagta

SEQ ID NO: 95860 - DNA, 1055 bp, Homo sapiens
ccaggcaaattgagatgattgctcacccgagggccaccgataaagcaaatggaccgtggagagctgctgtttgtattgattcctgtaaccaaaaggccacggcgggcagaagtgattacaatctcttctgccataggaaatagatttctatgtcttcccctggtgtcctggggctcaatgctgcctttacccaccttggaagagttaccagagtccagaaacaattcatgacaataaatcataattcaggtttaaaagcaccagaaaacacatcccactggtgaaattctgtctcacccaaatattagcaccatgctggaaatttacagcaaaatttagagtatatcgtactgaagacaagccaggaagaaaaagaaaaagaaaaaatatataatataaatagaattcctgccaacaagcagagattaagtaaatcataaattctaacctgaaattaaaactattgataaaaagtgttcacgagagatgaagactttcaagattctatgtgcttccccggctaaaaaatgtcctagaatcttaatcacagctctctgaaacatccatttaataaaatttataaatatacccaacctcaaatccgatctatcagaataagcaatataatattaaaggattgtcattttatccatcaaaactaaattacttgtgttccacagggaagatataacatccatttataatcagctaccaatgcttttgaaaatacatattttcttttacaatgagatacattaatgttttgagtttggggaaccccagagacaatgaccatcagaaagtaggtccaagcccaggcgatatagggagaccccatctcaacaaaaaattcaataattagccaggcatggtggtgcatgcctgtagtcccagctactcaggaggctgaggtggggcccaggaggtcaaggctgcagtggcctgtaatggtgtcactacgctctagcctgggtgacagagtgagacccagcccctccccaccctcacttcccccaaaaaagaaaaaggaaaagaaaattccttctccaggaatt

SEQ ID NO: 95861 - DNA, 1005 bp, Homo sapiens
ttgtgatccacccgccttggcctcccaaagtgctgggattacaggcgtgagccactgcgcctggcctggactcttacatataataagcttgacttatcgtacaacttataattgatgctttcacgtcatgggaagatcaaattaatgcagagagcgactacgtttctggtgggagagcagcaggggtcttgagaggaacagcagtgttgactgtttcgctacctactctgggtgctgattacatctttctttcgtgcaggcaaatccacttggagctattttgggctcactgtgggcatcattctttgtatactctgctcctttcccccatagtttctctattgatgggggattactaaagaatgaagaaaagaacaaaatgaaagtggcttttgaaaaattttaaatgactgtcactatgtaacatattcattatttcatgtctccactggacattttggagatgtgagccttgcaatacctacatgaatgcttctatgattatgattattgttttgctcttcgcctaacaacttgccaagtattgtcaacctcagtgtgtgagatggggtccactcaaacatcagggccgaagtcaggtagttcagttaagtgaatttgataccaggaactagttacaaaggagttggaagggctggaaagccaaactggagaagaaggggaaccccagagtaacaatagcaggaagcctctaccgtctacctctagaactggggaggagctgagttaacagagtcctggagccattgctggggaagaagaaccccaactgcagaggaaaagtggccattgtgaagaaggtgatggtggagaagtcgtctgaatcaaaggggagaggatatgttggctcctttatctttttatctttcattgtcctaattccttctgggcatggttaaatgagcccaggaaatgcagttggcaggaatcagcttcctgtgacatagacagagtaagagaaggacaaaaataatgaatctgaga

SEQ ID NO: 95862 - DNA, 1724 bp, Homo sapiens
gcaggggagctagaaaagagaagcgctcctggtaggtttgacaagatcgctgtgacaacattctgcccagggtgtgggtggggaaagggaagaatcggactctgaaaatgggaacctacagtggggctttcatttgaccacccaccttctcctttcgactcctggtcatttccatctccctctgcgttttaaccggtgaaccaagtcacattttaattcgagggagaaagatgtcatgtgttacttctgtagcctcaaaaaagtcccccagtgagcaagcgcgctgcaacttccttagttttgtcaaagccgcttcctgctttcagtcttttatacccttataaggtagtttttagtttccaacctgagcacatcttactagaacttttaagcaggttttaaagagactgaattaccggtgcttggtgtccatttatatgacttaaaaaaatgtacttatgtttcatggagtgggggaaaggaagcaccctggaaaataaactaatttaagttgtattcgttcattctgtgatggtatcttgaaggaagcaggaaggtatagaggtatataggagggtgtttaagttgcaaatagttactcgtagatatgtagggtagtttgcgaaaatgtagagtggctttaaagtgtggtcgttcattttgtattaatagacgttttagagagttgtaccacactcataactgcatagagaatagactacccttatttttatgtagaatcactgcttcaggatgacatataggaaagtggtttttttttctgtgctgatgacatctctccaattcccagaacactcccagttttttttttttgagggggaagtcagtaagaggtggactgtcaggcttttttttttattattaattataattattgatttcattattgttacttaaaagattgtgtgtccttcactctttatgtgaaatttctttaatcttcattctcataactagctagtgtggcagtttctaaaatcccagttaggtagagagaaaccaccaacttcttaatattctcctaggaaaacactagccttggaacttctatgtatttttttgatgaacactttatttaaaagtttttccttaattcagtctcatttctctgaaccaataattttttttatttctcccttcttagtctaattggtgagtatttttatgtctaggttcagttttaaaattagatttggcctgagtcagtaggataggacttttcaaatgtgttttgttaaagtgacgaatattgctacataattaatgctttagaaattactgcgttttcaaaaaaatagtgtaaataattgtggccctgagaaataatatggtaacatctcaagtagtatgttacttttctaatctccattttcccccttttgaaatagtttcgaattagtatacaagatgtttcattgagataaactgtccttaagtgacctcctttcctaaagggcaaccttgaatttaaaacatgctgaatgaccagtaggatcgggaagaggggttcaatttaacctaggctatttctgttttaaaattacgattatcacaatagtgtatttttaagttattacattggtttctccaataaggagaggttattaactgcacattgatgatttgaatggaactgattaggagtccccttgccacctcactctcttttaccatttgtcacaatctgaaattccccctttaga

SEQ ID NO: 95863 - DNA, 1031 bp, Homo sapiens
tttgttttgttctgttttttgataatgtgtgaaaatggttcagcacagtgcctggcacacagtaagggcacaatatattttaaatataataattggttggctttcttttttttttgagtttcagttcttaaagaaaggaatacagtgtgttatgcttattttcttatctcctgcaggccttggcctgcctaccacacacagttctctgcacagtcaaaatgtttttgctgatttgagagattgaaggaggtatagctaggacttggcagttgattccagtggattgtaaataggcatcaatgaatagttcaagattgtaagcctgagtgattgggacaataagggagttagttttaagaaactgagtaaaattggaatttgttgttgaatttggaatgatgatttataattggaaacattctagaggaaattaaaaatacaggacctttgggaatgaaggtggatatttgggaatcataatttgttaactgaagctaataagatgagagcattcagagagaaaagaacggaaagattgaatatcagtttcccttctttaaaaaaattgtggatatgtgatctagcttcttgagcatcacagtgactgattggctcgtggtaattgatcgctatgctgacaatcttatctccacctatgtcattcaattttctaagaggcaaaatccttaatcaggaggagagtttagctctagctaaatttcccttgtccagcatgctcctgctcccccaacttgtggaaacagctaaaggattggactaggagcagaagtttggaatggttaaaatgtagcaacatgtgtttcctgaaacaaaattccactataataaaaaaagcatttgaatgctcccttgtaattctgttggagcttgttgccttttttatgacacaaccataatcagtgatagacagtagcataaagaagcaagagcaaagcaattaagtaataatagcactacaaaaatgtgtgctgtagcttaccaaacacgacatttatgaattattagatagg

SEQ ID NO: 95864 - DNA, 1004 bp, Homo sapiens
gtttgcgatttatttgatagacagtagtggattgtgtagatcattaagcaaaagagtgataaaaggtaaatttatgcactattagtctgggtctagtattttactttatacagctttattgagttataattcacatactgtaaagtttactcttttaaagtgtgtaattgagtagtttttagtatagtcacaaggttgtgcaactatttccagtcaatttcatttttttttaatgcctggatgccacttattggaatccaatcaattttagaacattttcatgaccccaaaaaaccctacacccagtagcagtcactctccgttacctctaccctcaacccttagcaaacactaatttactttctgtctttatggatttgcctattttggccatttcatgtaaatggaatcatacaatttgtggctttttgtgactgatttctttcatggggcaagtgctgactgctgtagtcgttgtcttcagtggtgatggacgtatagcaaagggactgggaaaacgttgagaatctttgaaagcaaaattaaaggaatgggtagagggataaaggaaggcctatggataaaggaaaatcatcttgggaaggaaatgtttaccaaatacttagtgagttttattcactgttaggtcctttaatccttatgacaacctcatgaatttagttttattcccgatgcattagggatagtctatgatcacaggatcacaggctagtaaatggtggaacaagcattcagtcatgtcttctttatttcaaggttcatgttctccccactagtgaaaaggagttaagattttaaggtttaggcttgaagggaccaggagaatgtttctgttgacacacagagtaggcgtccaggttcttcactcaacagtccatcagtatttttgtgtcaggttaaacattgacttgcatgtcatgagaaaaatgttggagggaattggaaaagttttttaaaccattgctgtttatctttatagctaa

SEQ ID NO: 95865 - DNA, 1018 bp, Homo sapiens
catttgtgtttttcagtttttttctttccagttgttcatcaagcatatgtggatttggtgggattacagttttactgagaatcaaaggaggatttatataatttaaaaaatatatatttgaaactttcccacagatgttgtttttctggctttttgcatttgaggtcttgtctctgagtggaagttgaggtttcgttgtgtgaaatgaattttgtcactggtttcttatgacttttgtgaattagtttgacaatttaaataggctaggtcatgttttactttgtagtactttgtaatgggagaagtgtaaggtaaaagtttttctcatttgaggaaaatgaattctttgacatgtctaacttattttaaaggtattgctattaaggagtcagcaaaagtgggtgatcaagctcaaaggagggtgatgaaaggtgttgatgacctagacttcttcattggtgatgaagcaatagaaaaacctacatatgcaacaaaggtatgtttttatgatttgtataaataacattttcaaaaaatagtttgttcgatgcttgtgccctctggaattcactctataatagaccttattaatatcctcaaacctcttctcagtagaaatttctttttccctatggcatccttccctgttgctttaacttttttttttcttttttttaataacccctaagaggaaagttttagccctttcaaatgagcagtatttatttttccacacccactggatctcagggccctcaataaaattacctttacttccacattgctacttctgcaaactttttttccccatctttattcaaacttacaccatttttctcttttttgaagtttatgccatctgtaagtgctgttctctttctccctctttttctttttccctttttcttttctacccttttccctccctcttttaattgaggtgtaagtatgtaagtgttaattatacagttcgaagaatttttatgactgtaatcataacaggtaaagaaacagaaca

SEQ ID NO: 95866 - DNA, 1037 bp, Homo sapiens
aggctattataatgtggtggaaaggaagacattgaagaaataattacaagtgtgttgggggttagaagaagggaaacacacacacagtgctctgtgcatgtatcacaggagtagctaacctagtgtggggaatcaggaatgtcctcgaggagtaaatctttaagctgaggcttgaagaataaaataggagttagctgctgaggtgggcaggctgagttgttttaggtagagaaaccaatatatgaaaaggctttacagtatgagagggactagaagtgcatgaccaatatgcctgaagcatggagaacgaggtggaaagaagtgaggaggctgtataggtaggcaggaaagagcactgaatatgttgttagaccatgttaaagaatttgaaccctatcctattggcaacattaatgagtatacctagaggaataatttttgcacttaaagtgcaaatattggaatctgcctgtttgaacttgaatcctgtctgtgctaatttctaactttgtgatatcattcagtgacttaacctttctgaattttgatttcttcgtctgtaaaatggagatattattagtacttgaagatttttttcttttctttctttttttttttttttaagacaaagcctcactttgttacccaggatggagttcagtggcatgaacatgactcactgcagccttgaatatcccaggctcaagtgatcctcctacctcagcctcccaagtagcttggaatacagatgcatgccactatgcccagctaattttttgtatttttggtagagatggagtttcatcatgttgcccaggctggtcttgaactcctgggctcaagcaatttgtccccttggcctgccaaagtgctggggttatagatgtgagttaccacgcctgggccaggattgttataaggcttaaggagatgtgtataaagaaattgttatactctagtgctttgaacataatggttactcaatatatgttggcttattttacttagaaaagattactcaggccacatagacaatg

SEQ ID NO: 95867 - DNA, 1016 bp, Homo sapiens
aacctgtggcacttttttgcttaaaaaacaatagtctgattattatatcattggtatttcttcataacaaaaatacaatataatctaactttttattaaacatctttttattaaagcagtgcatgttcataacttaaaaaatcaaatgactttataagatttaaaacaacaaaataacactttcctttcttacctctcccaacctttggttcatattccccggaggcaaacattttcaattttaacaaagtttgccctgctagtaatcttttaacatgtttcttttatttaacattttttttttatttcttctgtctttaagaatattatacattatttaccaacttcctaataggaaaaatgagaatttccctttttaccttttctctccctcaacacaaaatacctatcctttcccactcctcgcattgtagttacatcacaatttttggttaaatcaatattctgtgtctttcggtgattgtgatggactataaagttgaaagaaccatactatggacactcatacacccacaatctagattcgatgattaaccttaacatttggctataattgcttcatgacgtctatccatctttcacttcattttagtttttaaatcacttcaaagtgagttgcaaatgggagtcatttgacccctaaatactttagcacgtatttcatcaactagagctatcatttgtgtatggttattcttttcatataaaatttacatatcataaaatcaccggtctgcaccattcagtggattttgaccagggtttggcaaactttctaagggagcagatagcaaatatttttggctttgcaggggttatagtccctgaggaaacttaatgagaactttttatacaatggtccctgtcacagctactcagctgtgctgttgtagcatgttagcagccatagacaatacttaaattcataggtatgtctgtgttccaataaattttttttttttaccaaaacaggtggtgggctgtatttgacctgc

SEQ ID NO: 95868 - DNA, 1696 bp, Homo sapiens
tatttggaggtgtgcgatggcgttttctgtatgtcatatagtcctaaacacatgttaccttaaaaaaatttgaaggtaggcctggcacagtggctcatgcctataatcccagcactttggcaggctgaggcaggtgaatcacaaggtcaggagttcaagatcagcctggctgagatggtgaaaccccgtctctactgaaaatacaaaaattagccgggtgtggtggtgggcacctgtaatcccagctactccggaggctgaggcagagaattgcttgaacccaagaggcggagattgcggtgagccgagatcgtgccactgcattccagcctgggtgacagaaagaaactctgtctcaaagaaaaaaagaaaaagaaggtaatcttttagtaatagttgtttatagccatatatgtattgaataactggaggtagggtggttgtgtactttctgccttacattgcagtttgtaacaggccagcccacgtggacatagtttaagttctggcaagttagttctatacaattttttttttttttttttttgagatggagtcttgctctgtcgctcagtctggagtacagtggcatgatctcggctcattgcaagctccgcctcccgggttcacgccattctcctgcctcagcctcctgagtagctgggactacaggcgcccgccaccgcacctggctaagtttttgtattttttagtagagacggggtttccccgtgttagccaggaaggtctcgatctcctgacctcgtgatctgcccgcctcggcctcccaaagtgctgggattacagacagttagttctgtactgtttaatgcaatcttccacatttttagctttaggacagaaatagcctttataaaatatgtaaatcttacaaatcatgctcctaaaagcaaatgtaaacctctaagtttgtcttaataaaatgtagggagtgagctattttattgcataatacaaaattaattttatgtattttctttccacagatactacatttaaaattgaataaagtactccagggaactagttttttttttttcgattaactctttgtttttttgttttttttttttgtttttttgcctttcttctttctttgtgctcaaggctgttcttgccttagctgcatcttggacctcaagacaagtaggagaacggacgttgaccggtacggtaatagacagtggagatggtgtcactcatgtcattcctgtggtaaggctattttacagttactgaacagaacatgaaataacacatctggcaaagttaaattatacgaattaatgttacttttaaaaaactttaaatgctgcactataatttggccatttgtccagttatagctatgttttgctcaccgtttaaaacttttataaacaattcaaaatgtttcttttactgtaggtttgtactgcaattaagaaaattacaaattgcaatatctggaatggaagtatattaatggctttcattctgttttccagttggatgtgtgttagccatttgatgacctcttttattcataattaacagatttcagactggtgtacagggtaactgtataacagttagttttaagtacctgaactttagtagatgctttatggtttgtacttaataaagcatattaagaaaaatgcatcaaattagattgtcagaaataacatttttc

SEQ ID NO: 95869 - DNA, 2604 bp, Homo sapiens
aacatattttattcagcaactgctgagagaccgagaagtaggaatccctccagaacaatccttggaaactgctaaggcagtaaaggtaaaaagtgtgataggagtgtaatttagttaaaaattaaaatcacatttataacattaacgtgagaaatttttaatagaagaagagtacttgaaataatcttgttaaccagttataaattattacccttaaatatatttacattttctttgtgtttcttaaaagaaaattattacagcagtttgtcttctgttttcttcatattttatatttgagaggagtaatataagaacattttaccaaatgacattaacataaatttttgtgattattctctttattaaaaataaataattatttcactataaagtccttgcatctcagtttcttcactgaattctttattttaattctaaaagcttttgtcataaaaattattttgatacaattgattcattgtgctatagtatagaagcagtgcttggctcaagtgatagggcacatagaagaaaaacatgaaggctatctaaagtattttattaatttttttctgccatgtaagtattatatcagtgcttcatgcaaactatcaaaatactttagcatcgtctttcaaacttattatttgccacataaccaaaaaatttcagtgggtttcacgtgttttgaaaagcagaactgccatggcaaaagtaacttacttgtctctgtttccatggtttttttttttttaattacctgtaaatttttaaaatttttaatttcttatttttattgatttttttttttttttgtagagatgggatcttgttctgctacccaagctggagcgcagtggcacactcgtggctcactgcagcctcaaactcctgggctcacgtgatcctcccgcgtcagcctcctgagtagctaggactgcagatgcatatcaccatgtctggctaagtttttgtagagatggaggtcttgctatgttgcccaggctggtcttgaactcctggccttaagcaatcctcctgcttcggaatctcaaagtgctggatgtgagtcaccatgcctgggcctctttgcttgtttatgggattttccttgctcgtcagagcttaagaatgaaaatttatcaactacttcctaggtagtaaattagtaaatgactaccaaaagttaccccaagttggtggcataagaattaaatatataaaaagttaatgtgaatactactgattcaacatctttgggaaatctgtgaaattaaagcaaaacgagaaaacaccagagatttaaatctattccagagaagattgatggtcattctgaatgtctttaaaggaatatcatttctttgtcattctcacttccaaggtttggagaagacctcaaatagtgtaatcaaatgtcttcggattccagtattttttctctttgtgtattttgattattactggtaatatttgcatctatcttggatggtgcctgtgatgtgtaaaaatactggaaaaggaagtttttttaaaaaaataaaacaaatattggttggcagttgggagtttataaattacaaatatgatgttataatctataatatatttttcagtgtttttgatgaaaacttttacttaggtcatataaccaaatatgcaacaaaatagagtaatttatatttttagccttttttctttgctcttttatttactcagaccgtaatcagttttgtttcagatagatattaaggatctatattaatttgtgtggttatcacaattattacttattcttcagttctgtattttatttattctccttacctacagcacaagattcattattactgagacagaaaatgttgaatgacattagtgaacattttcaggaaataacattgaaatagtagaagtcagctctccagtctctcaaatactgtttatatttaaagtcagaaaatatgtgtaggagatgagtatgtttatttgtactacacatatgataatatcctaacaaatttttcttccagcttaatttcctaattttattttctgaagagttttttttttttattggattatagtttactgaaaacatgccattcttctttactgttcctataataagcaaaaaaagttacttttgtttctttgtttttcaggagcgctatagttatgtctgcccagatttagtaaaagaatttaacaagtatgatacagatgggtcaaaatggattaaacagtatactggaatcaatgctatctcaaagaaagagttttctatcgatgttggttatgagagatttttgggacctgaaatcttttttcatccagaggtaattttttttaacggaattgtttaaaagtattcagcagcaaatatgaattaatagatattcagagagaattaatctcagaaacttttattagtacactaaaagtttgagtttttatgaaaagtttataaaacattttatgaactttttaaagaaaaaatttgcttttgttaaaataagcaaaattgttgctattttttgcagatttagaaaaaactttttaaaaaatatgtgtggcttatgggggggtcatgaaaagagg

SEQ ID NO: 95870 - DNA, 1282 bp, Homo sapiens
ccttcaattaaccattaaaatatataactagtagcaaaatagtcttctgtctatgaagttttagcaacataaaggctttattaaattaagaaatacatacttttaataatggaaaattcttctggtaacttagtatcagaattgtaactttattaatagaattactaatattacgtacttactctgcttatttaatgttaagaatagttatttttaaaattttgtttattcactcagcaaatgttaaatggtttgaattttcatgatctcagcttaagcactgggtattcaaagatgaaaaattattttatcttgctcttactgagctcaaagaataaaagagatgagtatttaaacacgtaaggttatagttgctttaatgagtgtatgtatctgctgagggcacaggaacaaagagcatgtaagtctgcttgggagaacatctcaggggagataatggttgaactgagacttaaaggatgaatgggtgtttgtcagtcatgtgtggtaggggagtatatgtatttttgtcagaaggttagctaggcagaggtcttagacatgagagtgctggaaagaaaagtatagaggacagattggtaggagagggatccagataggtattcatggacccagtcttgaagggcagatatgttatgcaagggagttagctagattctgtagtcatgcaaaaattttaagcatagaagataattgtgtaccatattagaaaggttactctcgcagcattggtttggacgggttggaacagaggtgtgaattgtgttggaaataggtgattttactatagtattttagatgaaagatgaatagtatttgtgggtcagtgagaatgaggaaggaggtgagagaaaaatagaatcaacataatcagtaattgcttagatatgaggggagtaagaatatgaggaatctgtgataattcacaggtttgtaacttgggcaacccagtgtgccatccactgaaatttgtaatactgaaggggaggagtaggtgaaatagacaaagatgagtttattatatgcatcttttaaaaggttcaaaaacaaacacttgggtgttgtaaagtcatcaccctttgtggggcacaaaggaagaggttggctgagaaggggctgtggagtagaaaggtgaagaatagggccttcgtgaacacagacacgtggacaggctgagtaagtagagcctgcaaagaatactgaagatgacagagaggtagaagccaagctaaaggattatggtcataaaattgagagaagt

SEQ ID NO: 95871 - DNA, 1023 bp, Homo sapiens
tcagtgtaacctcgaattcctagggtcaagcaatcctttttcctcagccctctcaagtagctggaactacaggtgtgtgccaccatgcctagctagtttttaaattttttgtagagacagggtctcgctatgttgcccaggctggtgtcaaactctgggtctcaagcaatggtcctgccttggcctcccaaagcactgggattataggtgtgagtcaccatgcccagcttcaagttgttttttgtttttgtttaagttagttttttaaaaagtatgtttttcttgagtgccagctgtttggaaatagtaagtttattttgactatggtatatcatcgtttgaatatatagctgatgtttgttattcaaagtagatgtgccaaaaagttcttgagagcgctgaattagtgaacactgagctagctattgctcctaggggaaatacagtattaggtttctttgagcctctggtaacatttttgttatcccattaacatatacccttgtttcatgtgtgtttctttttaaaggcactgcatttagtatatcattttagtatattcatttatattcaatagcactagaacacatgtctgaacaaagctatctaacttgctttttctctgtaagacacatcacagcctccttgtgtttactagccagcacttgagcagtatgcttgggggccattttaaataatgaaatcactaacaaaaatatgaaaaccgtgccactaaatagaactgtgaaaaggacacttgtttatagtatgagagctgaaactagatagcagagtatcatcttgttcaacctcaatggggaatgtgcacatcagtggactcaaatttttgttgctctacacgtgcatgtccatgaataaccatattttgatttggggagtaacaaatatgttttagcgattaggtaaattcacaaatatggaatcatgaataatgagattagactacatttatttatttcatcccctattgatggacttaacgggtttttcctcttagaaaca

SEQ ID NO: 95872 - DNA, 1079 bp, Homo sapiens
ttccatttacccagatttttgccagctcatagtatatgtatgactttacatgtttgctattctgatagttataaaatggtatatatcatcataattttgagttttctctgatttcagtgtcttcaatctgaatctgttagagaccagtattagtggtttctaaaaggccttttgtttttgaactgaaaactttgtttaaccttttattgtgatatttgtcagtagtgatatgatctctattatatatccaacttatttttcagtttgctaatccagactttacacaacctatctcagaagttgtagatgaagtaattcagaattgtcctattgatgtcagacgtcctctctacaaggtatttatagcaaaattgttattcaaggtcttactttaaaaaaacttaaacacctctcataaaaaggatataatagcatttcagtactatatattatatctttaaacttttctctttttaaatattatatttattttctctccactagaatattgtcctctctggaggttcaaccatgttcagggactttggacgtcgcttgcaaagagatttgaaaagaactgtagatgcccggctgaaattaagtgaggaattgagtggtggtagattgaaggttggttttcccaattattggtgagaaggttgagggtgccttccttgattaggatgagaaatatttgccagcattcactctgatttagaaaaataagaggaacctgtcaggtattctaatggaaatggttaatgttatagatttatgtctgtgatattctggatcatttgattcttctaggatattgtctgtatttctggaaaataattcttagtaatacctgtggaaagactttttttttaaatacctctctcatagataattaatatagtagatttctttgcatacaccaacaatcaaattaattatggatccacaaaatgttttatactatagaaggacagcaaagctgagttgagattgatgccattgttgagtagtcaagcctgctctcaaaaactgactttagctcccacatagcaacctcaaagtgtgcagtcaaatcggtg

SEQ ID NO: 95873 - DNA, 1754 bp, Homo sapiens
ttttcaaaatttcagaatcctcgcagcaggtgtgtgagacaaggattggggacaggagttaattgctcttttggagttccgataaagatttatagctgattttaagtcatggctgctagaatttctaagctttcatgccatgaatggactaataataaacattttagacttaacatctattttaaagcatcactcttaaagtttatttcaatataccttcaagatggtagatttttgacccttataaaaatacatattttttgttttcagcctgagttctaccaagtatgccacaccaaaaaggattatgaagaaattggacctagcatttgtcgtcacaatccagtgtttggagtcatgtcgtaaaattggcttcatagttattggggttagggaggtggggaagagataatctttctgattacctgttttgtctggatggctggttttgaggttttaaacctgacttgaaatagtaacaccaaacatgattatacaggaatattttaataagtgtatcaccatgcagatgtagaagagagcgaaagtgattgtgtttttctttagattgaatatttgaatcttatgtgtaacaaaaagaagtgggttttagttctttctgtgccctgatattttgtatattaatgaattatccaagattcgatgggatttatcagtgtgtagatagctctataatgcttgaattgtacacttctaagtgtgcagtgcaagagcttgtttatatttcatactttttatactttgaggaaaaaaagtcaaagaaaaattgtatttgagggaaaaaaccatgaccaagtaaaggataaattcaaaaaatagcctcatgagacttggcatacacactcgtgggattccagttattatggagtgcttccatccctctccaccccttccccccaaaaggttttctttgcaagtgcttttggaactaagagctagtatcttggattaactgatgcctgctagtgctttctgattactcgcattctgtttcttgctttaaaagaagagtaaagacaagagtgttggaccagtattgcagttctgtagtgtcatttcttataaaaaacaaaacaacaacaataatttatcaaaattggcatatttaaagcctaacattctaataaaggcacaaatttctttttaatacttgtttcagcctctttaatctctttataagttaactaataaatctattttcttcagacttctgcaatagttctttaaaatcacaacagttagcaagctgacttttgtaatgtgctcaatacaaatacttgtgaacttttaatatgttgagtgctttcattttgataactggatctccatttgatattttcatttgtataactcatttgcagtctgaaaattttttttagtgccagtccctgaacatatcattgaaagttaattttctttgcattttaaaatatctggattatgaagaaaaagtgatgaaaataaattaaaactgaattaccttttctaatgttttttttttttaagtaatgtaattctattttgtttttatgtatgtgatatctgtttctgttgagatttgggagttattgaaatctctgtaatgtgtatggtagaaaatttcttgtgaccttaaaattttaccagttatttatagaaagagaaaatgggaaatgttttataggctttttactagcagtatcagtgaacacttgaactccattattcatgaaaataacacgttaggattggaa

SEQ ID NO: 95874 - DNA, 1081 bp, Homo sapiens
atgactccaataaatatgaagtccttactactggacactgattgtgtaagcagtatagcacccatagagagtgatcacaatctgagatcattctatcttatggtagctaaaacagtgcacattcaaggatatatgagaatacactgagtaaataccagatgtagaaggaaaggattttgaagtagtatgtgaaatggctcacagcacatgagttggtgtcagacgaatctggatttgagacctgggtcctcatctgaataactctataatcgtcatcagctaagttctttaaagtacagtttccaaatttatacatctgaggtaccaatatccataacataaatataaaataaaaaagatgtttataatagtgttattttagcacatataaataagcatttattataattataaatatataaataatttgtccaagattcatttcattaaactgagaagagaaataacatattaaaaatatttatcccatttctccaaatcaatgggagaaaagtacaagatgagttgtgggggtggatagatgaggaaaagacaatgtctttacggtatttccagttcacttctttgtttgccttgctcagtgtaagtagatcttggggaattaaagagtcagctgatatgatgatttgtttgttaccagaacctcagcattctaaggagatatactattgacctagaagactggggcctgtgttctctcagtaaccacttgtattttccaggacaaataagttctcatcttctcatctgtataataaagagttggttcttatggtcattaaggtcccttttaggcacaactatttgctgatataataacgtcatcttcaatttacttattctctgttgtcgatgggaaatcaattcaaagtctcgtatttttatgctttttttttgattattttgttttcttccccccgcaaagcctgaaattaactggcacagctgtggaattagtaaaacctactgaggctctagtcgttggtgacctttagttttaataagctgtgctgggttttattgtctataactagtttcttttaagtagatatgttcactt

SEQ ID NO: 95875 - DNA, 1114 bp, Homo sapiens
catcctgtatactttaaatcatttctaaatgacttataataccttatacaacctaaatgctatgaaagtagttatcacactgtattatttttaattgttttttttttaatgttttcaatgggggagttggttgaatccacagacagggaattcaggtacagggagggccaactctagttctgcacccacagaggataggaacataaaaatgcggactccctaaggcctccttcccctccacgttctttcttcagtcttcctctagggggagctcaagttagctttagcacagtgtgaagccagtgcagcgtctcgcttccacttctccagggggcgctgcaaagattttggtcgccaaagatatcacggtgcgcgcgtctggaagcatttccgctctggagcattttcgttccgccgggtgccagcgttcctgtgacgcgtttcctgttggccgagctgcgcacgtgcggccggaagggaagtaacgtcagcctgagaactgagtagctgtactgtgtggcgccttattctaggcacttgttgggcagaatgtcacacctgccgatgaaactcctgcgtaagaagatcgagaagcggaacctcaaattgcggcagcggaacctaaagtttcagggtgagatgcgttgactcgcggtggctcagaagacccacgcgcgagccctggcgcgttcgggcggccgggggcccagctgctctgtgtgacggaggcagcttcccctgcagcgtgtgtgattggggagagtgaaaaggcagcttccactcgggacccgcgctgctgcccactcgtcgcgtggctccagcgctgctcctgacctttctgagcaatcagtgtcttcttacaacgttagagcgggaggactccccgttcacttctaggcttacgactaaccctgccttttgcatttccaccttagcttttggttccctcaccacctgcaagtcgcacctcacctcatccctcatttccggttatgctgcatgaaacgtctcatttccacccacttttcacatctatttaattcccgtatttctttccccaaaagcccgtctggctgtttccacagagcttctttgatactattgccttcctcta

SEQ ID NO: 95876 - DNA, 1058 bp, Homo sapiens
ttatttcactagaggtttattgtagctgttacggactcagtggtgacagccacatttagacttctaccatatatcatttttaggaacaggagtccttattctctcacctactagagaactagccatgcaaacctttggtgttcttaaggagctgatgactcaccacgtgcatacctatggcttgataatgggtggcagtaacagatctgctgaagcacagaaacttggtaatgggatcaacatcattgtggccacaccaggccgtctgctggaccatatgcaggtaagagatgtagtgcttgtctcattgtcttgtatgaaacataaactgacaactaatggttgttctttgtcctttgttttgttagaataccccaggatttatgtataaaaacctgcagtgtctggttattgatgaagctgatcgtatcttggatgtggggtttgaagaggaattaaagcaaattattaaacttttgccaagtaagtaggtagcatctgcatttggtttgcaaagtatctgttggaggtagataagagttgttcctatagaaaaactgtactaatgccagaactttaccatagccaagtgaggtagttgtgccaattaacccgaaaggtaatttggaatacaagcatcaaatgtattataacttgatataatagttttgctgttttagaagttataaggcacgttaagcagtcttcacataggtcctgtcctccacctcttgcccattcttacctcatctaacatcccccaagaagccgcagattttttgccttacttgtacataccttggttatagtacttgcaacattatgaactggttataactaagaccatggtttccttcattatataatttatttttaaaagctttgtcaaagtataattatatctacccatttataatgtacaatttgatgttctttgatttgtttaccactgtgacatcatcgctgcaatcaagaaaatgaacatgtccatcacagtcaaaggtttcctcctgccccttttcaatttctccctcccacccctccttacacgtatacct

SEQ ID NO: 95877 - DNA, 1050 bp, Homo sapiens
atatgtatctgtttcagcacgtagacagactatgctcttttctgccacccaaactcgaaaagttgaagacctggcaaggatttctctgaaaaaggagccattgtatgttggcgttgatgatgataaagcgaatgcaacagtggatggtcttgaacaggtactttttatcaataactgaaaactgtagggatcttacttggtgtttttatgtaattgttggaaggatcattcagaaagcaaatgggttaatgaacttttaaaatgctgtaggtgaggcatgacagtttacacactgtgtttatcagtgctcttgatgaaattacacaagttaggaaatggaaaatgtccacttggttcatttgtatctgtctgcttaaacgctttctagggatatgttgtttgtccttctgaaaagagattccttctgctctttacattccttaagaagaaccgaaagaagaagcttatggtcttcttttcatcttgtatgtctgtgaaataccactatgagttgctgaactacattgatttgcccgtcttggccattcatgtaagtgatgatgatgagctcattgaaaacagggtatgcttattaaatcctatagattgtaggattggaggtattgccctctcctggaaacattgttctgagtagtttgatcaccactagatgatggatcctgtgtgggggagcgctgctgggtgtggaggggtatgaggactttcgaagagtgcaagacaccatcctccttgaggggcttgcggaacagttggggaaataggacataggccaagggatgagctcgaaatagggtaacagttccacaatttgggggttctactgctagtcttcctcaagattccagctctaatggatgtttttatttaattctagggaaagcaaaagcaaaataagcgtacaaccacattcttccagttctgcaatgcagattcgggaacactattgtgtacggatgtggcagcgagaggactagacattcctgaagtcgactggattgttcagtatgaccctccggatgaccctaaggt

SEQ ID NO: 95878 - DNA, 1381 bp, Homo sapiens
agccttcaaaagacaaagaaatttgactgtcaaggagagacagagacagttgtgtgttccaggcagaaacacaggttaaaaaaatcaaaacttcagtgtttgctgaggctgcactgtgcagggtacttaggtgaatggggtgttttgaagctaaagagaggatgggacctttcaaggagttttaatcatcttagaacccctgaaggattttatgcaagaaagtggcaagttcagcaaaagaaaataaaacttaggtgttgcttaagataaaaggcaggagtacttccagttgcttcagttgtgatttataatttgtgcctttcagaagaagaaactgagcagctgaaatgaggcctgtgcttcagtgccataggggtaacttctgagggaactagaggaccaaattttgggtcaccatccccattgtcagcattgagtaaatgtcagctgaaatgaatgtatgtcgagtcctgtggaaggaagagcagctccttcacttaggcattcctaaatcaattccgaagagaaatgatagtcatttgttttgacacaggaggtgtttttttaatgtgctcctaccaacttcctgattaaactcataaatccttattcactgtcatgaatttcatcgtgtggaagaaataattaatatgactattacacaccgaagtttaaaatcatacctgctaatttaagtccacagtcacgtggccactcctaattttctggaaatttattgcataggcttatgttcccacattttcattgttgagaatggggttgtggaggaacagtagtgttcatgccggtttttttctctgtgtagatgttagattggagttcattatcttttttgcttgatttccttaatgtttgcctccagacgtcaacagtaatgaaggcaagcagaaaaagcgaggaggtggtggtggatttggctaccagaaaaccaagaaagttgagaaatccaaaatctttaaacacattagcaagaaatcatctgacagcaggcagttctctcactgaacacatgccttcctttcatcttgaataactttgtcctaaaatgaattttttttccccttgatttaacaggatttttgtagactttagaatttggacttacctaacaagagtataaattgacttgggttgcaagcactgagcactgttacttctatcacgtctctcttttatttctgggatataaaacaggctttaagtttcttggttgcccaagggcagagcaaggaatatctggtgtttcttgtgatgataatattttaattttaaatatccctccctcatacaagtgtatgttaccattttaatataattctttttgtacctttccttcttgttttgcgaagatttttgtggc

SEQ ID NO: 95879 - DNA, 1089 bp, Homo sapiens
tagttatattggtgttgatgtcagtaggtcatcaggaagcttcaccatcctggcggcagcatgccaagagactgggttggccaggagatgtctcccatagggatatgggaagggctttgagaccatcttggcctcacatgggtgctaatgtagtcaccactctctctatactctctgctttccctccaggagggccgcaagaacgagatgctgctgtccaaggtgaaagcgaaggcctcctgaacatccccagccgtggctgtatgtcattgattttacttttaagcaccgtatatcacctacaagatcatgaaatggttctgaaagcgacagtagagagatgcagttgtgatgatttcaacaacctggatgttttctttctcctctttgcttccattcatctctgttggctgctgttgatggagtcagacagtaaacacgtggcttggataacacccatcatcctatgaagaatatagggagtacttgttctctgttgattcaacttttatgtctccagtaacattgcgcttatgaaggtacctgtatttgtatggactctgaataaagaagaattcatttgtttagcaagtattagttcagcaaccactgagaaataagcactgaggaagattcagagacgtgtaaaacacagttcctactgcacaagtacccagcaggtggcccagggaggcagatacagcacacttgaccgcagaactgggctatccaagatgtttttcagtaaacagaaggcatttagctgaaatgatcagcccatgtagtgttggtcacttgggcctttcacctgccatggtaccttttgttcccagctcctccaggtgccagccagcaggcttggtggtgacagcaactggaacgaaagttcagtgttgttttaatttttatacgttactcaagttgatttctcagaaaattgaaaacagaccttgtgctgaggacacgtcaataaaaattataccttcccctgccccaatgttcatgtgagtcacagcatgcagaggggctgtgcatccccctcattgaaggcacatttgatgaggctacgctgcagatgggtcatggtct

SEQ ID NO: 95880 - DNA, 1032 bp, Homo sapiens
cagtttttaaatcagggtttctcagcctcagcacagttaacatttcgggctagataattctttgctgtgggggtgtcctgtgcaatgtaggatgtttagcagcattgctggcctctacccagtgattccagtagcacccacttctcgcagttgtgacaatcaaaactgtctccagacactgccgggtgggggatggggggcaaaatagctcctagttgagaatcaccaacctgtccattgtgaaattgtagtgagaaaaaaaaatggaaacagttaatactcagtgatagaaaaattgctgaataaattgtagagcctccatgtaatatgcaaataaattaaccaacctcaaaaattatatattgaagcttcctctactgtaaggaaatccatgaaactgttaacaactgttgccttttggatgttgccagtagcccttgggcagaacatgtcttttcatcaccatttcccacaatgtttcaacagatggaaaagaaaaagcaagagaacaaaatgagaagagaccagttgaacgaccagtacttggagctgttagaaaagcagaggctatactttaagactgtgaaagagttcaaggaggtaagaggaaggctgggtagcacattaaggctaacgtgagatatatgttcacctcaaaagtagccactaaaaaacagcagttttttggttttcctctggtctgtgaagggaaataacaagacagagtgtgatctggcagtgaagtgtggcgtctaggtagctgaagattgcgtttttctgtggcccatcttgaggtctaattaaatgttttaagacatcacatcactttagttttcctaacacttagtaagcacattaactcacaaaatgactccatcagtccgtatcaagggccacttggaaacagcatttgttgtggattcagatatagaatcttctttcctgccaatcttagggtggggagggacctcaagaagctgtgtgggaagagagaactttgaagtgtcacaggcttggattcgaatcctacat

SEQ ID NO: 95881 - DNA, 1025 bp, Homo sapiens
aatttctcctcattctcactttcccatttctttttcctgtgggtaaatatcttagactttcaagcctaggacactgttaaaacattcagggaaagttgaatatccaaatggtttttgttgcatgtgagtttagaatcaatgattagcttggaattggggtacttactataagaaagaagatgttttattgttggtgtttgactgtttaataaaactataatcatccaagaagtattataattgcacttattgcaaaacggtctaccttttaatttctttttcctggggcttctcacaggagtcttgaggcggtgtttgtattcagtatctacactaagctgcttacttctttgtgtggtttttcaggaatggccatttgccctcctggaaaatgttatcacattcacctcatcatcttgttcagagatctctctcacactcactcctggtcctgaggatccttctccaccccctcctcccttatagagttgcagaacttttcctacctgacctctctcagcacctttaatccctttccaatcaatcccctgttaactccagaacatcagaaataggaaatgattaaattggagtgggccaagtgatggaaaatgtgttgggagactcttcattataagtgctgctgaatggctagacttttttaaccatttgcttataatacttcgatcacagtgaatcaattcattattcttgataactccagaatggtcttatgaagatattactatggccatgttattcccctatttaagactttttgatgatacctgttgcctatatgatattgacataaccacagttatgtccctgtacttttttacacatgctgttccctcagcccagaatgcaggttctgttgatagggattttggtcattgtgtcagaatctcttctgtacgccaggttttgaacaggcctctgtaaatgccctggcttggtgtgactggctgcccagtactgctttgcccacattgaacagggcttgattacatgaaccaaggtca

SEQ ID NO: 95882 - DNA, 1043 bp, Homo sapiens
atgtacatttacaggactccacacaggactaagaattattacctaccaataaaagagagcagtttgaaagctcatgtttccttggaacatatactactataacagatatggtagaggtacctatagagatttcaagatatttttctgtgcattgcgagcattttctctctgtatggttgtctgaatcacgggtctagtaaaagagcagaatgagaaagaacttttccctctcggtgttacataaacgatggctggccagttggtgagcccaccccattgactgtcccagcccatgggtgggttaccaagtgaaccaggctccttagattaaagtagcagttctcaacattttataatactttcaggacccagttaaagactcttaaaaataactgaggactcaatagcttgtgtattttaattcatttacagtagcttacgtattcattgacagtaacatgtattaattcatacccaatagcttatgtatttacttacaaattataatgagcacattaatattaacatcagatcagtgatatcacatgtcatgtaacatctggaagatgtcactgtataatcacgagaatgagagtgaaaaggcaaataacatattattatgaaaaggtatttggcctctgagaccttctgacagggttttgagggagcatgtggctcaaaattgagacttagatagctatcaacagaaataatctttccacatatcaagatggctgctggttttcctgcaagaagaattcttgtaagtgaagtctgaaggtcataattttaaaacaaagctgtatgtgtgccacatacactaatacgagagcatggaagctgggtgggggaatgcagtttttattttcttaggactttggccataaaagcagtttatgagcaagaaagcttgctaacagtcagagacatcacccaatccatgccaaagctgcagaacagaattgaatgagtttactcagcccccacacactggaggaagtctggaaggtgagtgatacgtggatccactggagcctgcctgc

SEQ ID NO: 95883 - DNA, 1053 bp, Homo sapiens
ctaggtgcaagggagtatggaaaatagtctcttttccagcctcagcagtactagaagatgcaatagatattaagccagtccacagaatctgccataaggtcctttacagaattcgtgtggatagccaaaatttaaccttggtctgctacactttggacctataggtttatttctaaagggtggacatactgcccagcagtgactttttggtttccccagttatatgacaatctgttgcaaggtcagatgatacttttggcttcttgatttttgcattttttcacttatgtttagtttgtttgttcagtgaatattggaaaaaccagatataaaggtagaatctttgccctcaggagaatgatacagataagtaacagttgcatgtattcaccatctgggaagtgagaggagcatgaacagatgcagggatggataggccaggctgagcacatgtgcatgggggatgcttcacaggggaggagctttagagctgaggagtggagggtgagtagggaagcaggggcgagaggggaacagcttagtttgtgcagagctctctgttcaggtagtaagtgtaataggaacacagaaggtgctgctggtggtgaggtgaaacacttgttaggctgagccatggaagagaggctttataaggctcctgaggaggttctgttttcttctgagggaagaggcctgccattgataaatgtgcatcaggccaatgcagaagttggacaaggaatgggcaggaagagtgtggggagtgaagctggaggaccaagaccaggtgagcacacaacccagaagtgaggcacagagtagccttaaacttgttctttattttcatttatttatttttgagacagagtcttgctctgtcacccaggctggagtccagtgctatgatctcggctcactgcaacctctgcctcctgggttcaagtgattctggtgcttcagcctcccaagtagctgggactacaggcgtgtgccactatgcccagctgctttttgtgtttttagtagagacagggtttcaccatgttggccagg

SEQ ID NO: 95884 - DNA, 1074 bp, Homo sapiens
aaaaaaataaaataaaataaatacatatatcatatatatatatatctgatatatatatatgtatcagaacctagataaagggtgatgaaagtacaggtatgagacattttgcagagtgcttaagtgtctcagttctggagtcatcctgtttttatcgcttactgcctttttcaccatcagcaagttttttaacctctttgtgcctaagttcgtctatagaaagataacaaggataactacactcagatgtggggatcaaatggacagcacagatacagcagaatgtgcctggcacatacctactattcaataagtgataactattacaattgctaccactattaatgacagaaggataaattgattttatattcctttttaagagcacatcatggaaagcatggtagattttttattaatctcagactacattttttaaggaattatgttaccaagccagtatctttacaggattaaaataatacaaaggaagagaccctgggagcatccttcaagatctgttagtacaacttcattttatagatacagaaactgaggcccattgaggggaactgcctttctcaaggtcatgcagctgattagtggcagagatagggctagacatcagcattcttgaccctgttgctttaaagggtgacttagcaatagctctttatagttggcctgtaaacccctgatatttaggttgcattacttagcttcagattgtagaatgagtcttgtgagagggctagctgaaatggctggtgggtggctagagtggcagcctggggcaaggtagtgtcagggacaagccttgaaatgagaaaccaggttacctagggctaggccgcgtagtgtcccagggatcttggacaaattattcagtgtctgcttcctcaatagtaaagtaaggttgatggtatgtgccctgtctctacttcacagtgtggtttataaagtgtaaaagaaaggtgagatatatatgaagatttatactttaacatgtaaggaataattcacaaaagccaacattgtcattgtttggcggaataaaaggtccttttagctgtt

SEQ ID NO: 95885 - DNA, 1078 bp, Homo sapiens
gtgctgggattacaggtgtgagcccccacgccggccctaagtcctaagtgtaaagttttttttagaaaacaccataaaaccttgttcctgtttgtaaggagtcataatccatttgagaagactgtcaaagtaaaccatgggttagagaaaaaggaagtattgtgctctaaccttccttttccctggattccttcagcatgtgatgagtagtatatactacttgggcatgtgtctccctcagctatgaagattaacagcccgttgaggaccgcggacccatttgtgactccaacaacactgtccacatacttctgtgtgacacttgctgaattttcagagaatctattgtggtgatgtagccaatgtcatctactccttggcaatgagcttgtggcatcaggggatatacctggtgttcctttattcagcatatcttttaccagccaaagttttaccttttattttaggtggaaacaagagaagatgaagaacaaaatgtcaagttgactgaaattctggagctcttggttgcagctgggtatttcagggcaagaattaaaggcttatcaccctttgacaaggtaaggggaaatctttctaaccattacactatcttttgtcagaatgacatggttaatcatggcaaagaaaggaggaaaagatgatgttttaacttcttccatgtctgtgtttccatttcttcctaattcagattcattatggaagtgttcaaacttcttttcaaagacagaaatgatgtatcagtgaatacgtcagttccttttctgtgcacaaagctttaggaaatgcaaagaagcaaaataaatagttccttctttcaaggaatttacagtttgggtggggattataaaacttatggaaaataaaataatcagagttaataatgagctatcccaagtcagcgtgctcacagacggttgccagatattctgcggatagtaaatgctctgatttaggatgagagagagatcgctatgcaatgaaatcttttaattcagcagaaccttgaatgatgatgcacaaatcatagtaataggtgttgaggacacagagaaaa

SEQ ID NO: 95886 - DNA, 1048 bp, Homo sapiens
gtccttcgtttaaactttcactgactgctaagaggccacactcaccaggtcaagcaataacttatcatcatttagttcagaagctagtaaatataaatatggatagtctgtgttattaggatgtcactagaccagttaattcattaaattcattcttttttttttttttgagacagagtctcactctgtcaccgaggctggagtgcaatggcgtgagctcggttcattgcaacctctgcctcccaggttcaagcaattcttatgcctcaggcttcccagtagctgggattgcagatgtgagccactgccctgcccgaattcattctttttaaccctttacaaagatagctagacttggcctgccttccagcttacaacaactatagtggacggaaattgaaagtttattgggctttgtgtaagagctcattgttgtttgtctttgtcagaaatttagcttcaacaactggatgtattaaccagcctggtggatttttattgcttcaagagagggtctttcattcccagcagatcagacagtggcccttttccatttgatttcagtgttaatctgctaagtgaatttggagtcatacattcccatttagtgtcttgtgccaaaattacttcacaagttatattgcaaaagtaaacttctccatgctaggggtgagtggatggaagcctgggccctgcatctgtggtggggtggccagtgggtgtccattagataggtgttgaggcagtgatgatcctatttttttttggttttttttgtcttcttctcatgttttcataataaatgattgaacaaatgaagtgttcctgttttacaccccagaagttttaagaaagtacttatattatctcattttctttttctgctgacttgaactacaactactctttagcttctcttttcttagagtgttttcacttgtagacgtttctcaaccatcccagattttttgcagaagggagagaaggtgtgaattatttatattacttaagaaaatttttatgtccactaggaactagtgaatgctga

SEQ ID NO: 95887 - DNA, 1006 bp, Homo sapiens
agttgtcattgcttgttttttggtttttgttttttttgttgttgttgttgttaattgtagagacaggtttttgccatgtttcccaggctggtcttgaactcctgggctcaagcaatctgcctgcctcagcctcccaaagtgctgggattacaggtgtgagccaccacacccaaactacactgtttttcccccctttaatagcacctatttctacctgatattatcttattaattacatgtttaatttctgtcagtaattatcttgtttggtgtgttgactgcagtatctgcagcatcaggaacagtttctggcacagagaaactcttctcaaattgactgcttattggaatcacctgtgaagctttgaaaatcccattacctacccccgaccaaaagaaagaattgtttagttattaaatcactttacaaaaaaatgtaaatattattttctccaggagatagagaatgtagcagatattctcaaacatgtttatttactactgtgtagttggccccttgttgaatcctttttaatgtagctaatagagtgtggttgtacaaactatgaaagttattgaaattctttgataaaactatcatttttgggggaaaacgtattggaagaactcatccaagtgtgtgtgtgtacacgctgtgtttttctaaccttcagtccagaagtagaaggggtttaaatctgcttgcactgcctgtgcctccattatgttactgtagaaatgtgacatgctaaatataggatggtgcattataaaattgtaccgcttgagaatagaccagcatgccattaagaatttttaggaagaactcatttaacctaagagctctttgtttatggattttgaattttatatgccactgtgatctataaagaaacaaatccataatgaagtcactattcactactgtgttgtatataaaacaatatgttccaaggcaaaaaattcaatattcatgcctctccctagcccaattaaatcaggattg

SEQ ID NO: 95888 - DNA, 1565 bp, Homo sapiens
gcttcgttgcaatttcttttttggatttctctatacgtgcagcatggtcagtttggtgatacgtgttctcccaaacctcccccgccttccccagtagctggttatagagccaagatgtggcctttgggacatagataatgcccttttaatgacacttgaaattaattcctttagtgtaatcctctagcaaagagatgagaaaactgaatttgtaaagcttaattttacccagagattttggtgtagaaaagggccatacatttgtgaatagatgcttaagtaggtgatgaaaataaaatatcatttgagcaaactgtcctataccagaaagtctcaggcaccaaaatagcttggcaggttgtaagataatgttcacttcaaggctttatcctcaacaaattaaaactagaacagttgacataatagaaagggatactgtgtccttggtactcttgtttctgaactgcattattataaaatgtgtctgtcagtaaatcatagagagaatgtggtaccctgttaaatagctgtcaactcttctattttcaagttcctgtacgattctcaagtaattctaaacctgttggagaagtaatattggtttccttttttgcaaaagtgtgttcctttagtgatacttgtgttctgaggcttccagttacatttttagcaaagaaagcatttcttaaataatgggtaaagccttataattgggaatgtatgtagactgttctttttgttttgttttgttttttgttttggaggggttacagttggtaggatctattgattaatgtcttttgtgtatctggtattgggtaaatactggagacagttttaatcccacctagcttcatacattgtactaagagactgaatgtacttgagtagaagcaattaattcccttctcaacagaggcatctcttatttagaaaaatgaacagatgatattatttggttacaacttttaagatgacttcttaacactgatctcagaaagtggatttcgataacaacatacagttgtctctcacactggctgcactatccattggactgtggtggacttttgatagatctagaagtggttttggccttggagtaggaattgccttcttggcaactgtggtcactcaactgctagtatataatggtgtttaccagtaagtattaatccttcaatttttggtgcttgtttgctagataaataaatgataaccgctttcagaattgagattatgaaatgaggttagccagtttaatctacagagtagtttattttcattgtaattatcttaagtgtcattgcagttcctctgtgggtattaaagacatgtctgttattctagatatacatctccagatttcctctatgttcgttcttggttaccatgtatattttttgctggaggcataacaatgggaaacattggtcgacaactggcaatggtaagctgatgctcacttttctgaataagatgtggaacaaatgacaagttttctctaaaaggcagtcctttaagggaaagcaatttgtgaagacaacattctttgattgcttttt

SEQ ID NO: 95889 - DNA, 2510 bp, Homo sapiens
gattgatctaaattctaaatcatatactgccactacttgcttgtaatgcagaaatctcatctttctcttgcttttggctgtggctttttcacttccagaatgtgaattatttttttccctgtcacatttgtcatttaatcatagtaattatgtaactcttggattatttgaggaataaatgggcacatagtaataaaatgttcatttttagagcttttcagtttatttggaagttgctattcaaaagaagtcttaatctgttaaccttttaaccttttaatttttgcagtacgaatgtaaagttatcgcagaaaaatctcatcaggaatgaagaaggcaaaaaatatcttttgtacagaaaagcaagatgaaaaggatgtgaaatggtagatataccaacaaaacttcagactgtaaaattgccaggatgcagttttccccttgattggcgtgtgtgtatatatggataaatatatatatacacacacacatattactgcaatctgtgattgcttcatctgtaaatcagttgtaaacctttacatatttgacttaaataactgtaagatatatatgtactacattaaaaagtgttgattaatagatgaaatttttaaattaattttttaaaacatgccatacattgtatcacaatgttaatgtgccaagatattgttcctgtcatgcagagtataagaatgctttgaacaatttgtagacttagtgaaataaaataagaggaaagccaaaaacaaacaaacaaaaagcatatggggagctggtattttctctttagcttactgttgtgcctttttatttttctaatcacagcagtatgagttatgagtgccctaatttgtggttagtttctaatttaatgttgtttcatagagtttggagtgttttgatacagggtgaaaatgaacttctggtttcaaacctgcgttactggagacagcccaaagagtaattttctgttttgacaggttttactggaagtatatgtgatgagcagaagaggttatcagcattaaattgttttggttctaaatttggaacagtatatataattaaaagtaaggaacattagaggatttaattagaataaatacatgttttggaaatacagtgacctcttgcagtgtcacaaaagtgcaaagtgatattagctgtcatctgcaatacagaatctcattgcttttgcacatggagcatataggaaactccaaacagatcacaatgaggtttctaaatctgttgggttctgtcttctattgggttctgtgaagcaaaccactgtagctttagctgggttcagtcatatgactcgttggtggaatgcctaggtttttcatcttacatgcagtcttgggggtggatgaatacataatttctcatgtattcgtgtatccattagtgaatagttcaagtctgtttaagagtgtattgagatggcattctctgcatgttaaagatcttaatggcaaccagcacctcttaagtatggtttaaacatattcttagctaattttttccattagtttttgaaattggtggcagttgtctgatccacaagggcaagatcttctgagtactctggggtgtgagtatgtgtgcacacgtgtgtgttggagtgagtgagagaatgtgtctgtgcatgtggccatgctttcctagaatgtcaagtagatatttttacactttgagttttaaagcaattactatcagactgagatcttgtatgccaaactttaatctgcttttatgttttcaggctgaaggtgtgaaaatcctaagaggatttcatattgaatatgtgtacacaatcttaactatcgtggtggaaaacatactactataatttattattatatcttccagataatgttattcatttagaacaaataaggtatattttttagaatcaactttgtaagcactataaaatctttaataagttataaggtctatgatgtgtttactttaaaaattgctgttaaaagcaacacgtattaaatatgtaattatcatctgggttaagagtctgtttttcttctttgtggtaagtcttagaatatggtactgtggattaatctaatgaaattaacatatgtggttgaagttaccaagaaacgatgaaaagaaactaaatatagttgacccttgaacaacaggagttaggggcaccactccccaacatagttgaaaatccatgtataacttttgactcctccaaaacttaactactaatagcctactcttgatgggaagccttaccaataagaaacagttgatgaacacatattgtgtatggtatatgtattatatactgttttcttacaatagtgtaagctaaggaaaagaaaatgtgtttactcttcattcagtggaagtggaccatcctaaaagtcttcactcatgctatcttcatgctgagtagtaggctgaggaggaggaggaggaggggttggtcttgctgttgcgggggtggaagaagatgtgcattatta

SEQ ID NO: 95890 - DNA, 1024 bp, Homo sapiens
aggaggaaaaggttgatggctttttgctatttggagccaagaaggagagagacttggcttttagaattggactcagaaggaggaaagtaacacacttatgtacccggccctgaggaaggcaggcatgtctcaaattttatcgtatttattctaagggcttccaagaactgatttctcagaaaagtcaacagcaggtttttctggggctagataatggctccacggaacagctagagctgcatacgtttcttgccacgaggagctcttaccaagacaaggtggtttttaatgccaccttggtttttaatgcattttcttggcgaaagaatgccagactccatgtgtgagaacttccaccagtgagtcgagcccaggtgccaggctctgtaggacagtttaaaggtgcccagccatacctgactacagcaccttaaatgcaggctgcatcatgggactcccaggtatggaccaggaggaacagtggagagtgttggatgcagggcctggagggaacggagcaagcaagctggctggaaaagacttggaggagggctttgacctgggcccacctcatgctgtcaggctcagggagcagggagtgcattccagtctgagggaacaatctgaaaaggcacagagataagaaacaatgctcctagacctcagttttctcacctgaaaaatgaagactatagtacctacctgcgggctcatggcaaggctgagagatcatatatgtaaagctcagcatagagtaggtgttcagtctgtgtttggagactaaactgaccaatgcagtgtcaacaaggcccacggggtgcttggggatctgaggactgcaatgtgcctgcagggggacctcgtgggtcagagcagcgggcttcaaggcggagagggcaggctggagctggcttgtagaaggccttatgtgctggctgagggctctactgagccgagggacatcatcaaggggggtgattctgaactgagggatggagctgcagccacagctgcccattctgca

SEQ ID NO: 95891 - DNA, 1231 bp, Homo sapiens
gagaagagggtgcctggctttgctttttcactgccagcttaacagctctggaagataggagcccaaaacagagacactgaaaaggccaaagccaatatcagccacgagagttagcaggaccagtaaagtcaccacgatgacagtttcctacctgtctggagggtggcacctctctcccaaggctcacaatggccattcccccaggacaggtgggggacgcaggtgtccagcagatgggcgacagatcttggccagccccaccaggctttctgagcacagttgcttatggagcattcacttcgggccaggttctgtggatactgtctcctgtaattagtagaatctcaactttattaagtgagaaactgagcctaggagagttacagcagagctgcctggggctctggaggctgcttgtttcctaccatgctacctccctgacacataatcctgtcgattccttacagggacttccaaggaagatgccatgaaagcttacatcaacaaagtagaagagctaaagaaaaaatacgggatatgagagactggatttggttactgtgccatgtgtttatcctaaactgagacaatgccttgtttttttctaataccgtggatggtgggaattcgggaaaataaccagttaaaccagctactcaaggctgctcaccatacggctctaacagattaggggctaaaacgattactgactttccttgagtagtttttatctgaaatcaattaaaagtgtatttgttactttaaataactttagtgatctgagttcttgagatcatttactctgtctgacctcagccttgcttcctttttctaaagacctctggtagtgcttcagctgcatacctggtagagtataaggtgggcagtcctgccctgcaccctggcctaaggtgtgctggccctttgtggggaggaggaggatggtagaagtgacctttctctcttccttcccagttcagccacgccgaggaagatgaggcaggctggctgagaccacagtctgcaagtacttctgacggggacgttcctgccccaggacctgtgtgaggcagggtttacagtgcttgaggtttgtctgaggcccagctggtccctgattccagagtgcatgaaccagagtggaagcccccatcaagaatggagtgtgaacctgacaggaggcgttccccaagtcccaggggaagccacagacagctgtgtgggcaacagt

SEQ ID NO: 95892 - DNA, 1093 bp, Homo sapiens
gggtgcgagcgccccccgtgcccgccccctgttgcaaacctgggtccggaggaggctgggcggggagcaacctcggggggcctgcctgcctcacatagctgctcccgaggcgcggactccggctgcttctgctcgcggccttgcaagcacccgaggctcccaaacttcatttggaaagatttttcttctctttggtgtcaccagtgacttactggtcagtttaccataagggtccccctttgtgagaaatgaggcgcgtctggggtggagggacagaatcgacttgcaaagtgaggcttatgtaacagaggatgcgtctcttgggaagttagacctttctgggggtggaggttaggaagaccgtctccctccccaaagctgcgtttggggtgctgggctgggggtggacttgctgagtcgcgcggacacctcagggaaaggctctggcgagggaagaagcccgtgtctccgaagatttggcttctccttagcgtagtgcacgatgtttatgttggctaagaacctacacattcctacccgctccctcgggcctgctgctccccaaagggaagtcagtgggtggcggtaccgctgcccagcgggcgaacttcctttccgcgcaactcgcccgctgcagagtctatccgctggactgtctccaggattagagaggcccgttgacttcgtgtacaaacgctcagccacaacactgacctagtagacaccgttctgcccattgtatagatgaggtaaccgagactcagaagtaaggtgccctccgtggctggccaaggaacagaatcaagattcaaacccagggctttctggctccaaatcccactggctcctcctgcctttacctaacgggagaaaccccacccacaggacacccccaaaaccgcttctatagccaggacctaggcacctgggcgaagccgggcatggggcgcagggaattcctcccctttgttctgggggatgtctggaatcccggccaggcagcatggtgggacagaccaggtgcggtccctcccctctaggagcttacagcccatgtagggagagagacttggaaacagggcatgggggagcg

SEQ ID NO: 95893 - DNA, 1992 bp, Homo sapiens
atgctccaattaccacaaaagcaatttttatgtctcttcgcattttttatggtacacatatctttgttacattttgcattgaaacacgcacggtcccatagtatcataatcttcagtgatttataagagaaacagtctattttgtacatgggaatgtttgtcatgttgccagtctgttttaaaaatttggcaagaggtttttaaaatccaaggaggcaccactattttgtagtttttaaaaatattaattgagtaggtccatgtttattaagttagaaaatcacgagttcctcaaaagtagtaatagacgaggatgtgatttttcttactgcccattttctaacatcttagcttcagagctgtaggtattgaattgagtcaaacttgtgtttttttcttatgttctaattaaatatcttttaaaatgtccctagtaacattgttactttaaatttataacacccaatttctaatttaggctaggcataaaaccagcattgattgaacgtacttgctaaaaatactttctgggtcggatgtacttagaatgcagcctcaggaaatttcatttgaactattctgtgaccagtgtacacttcattattgttgaaggacttttaaaaaaagtatagatctctcatactcgatttaatcagtttgagcatagatgcctaactttaaaaaaaaagtataataaagtgggatagtaatacaatttacgtgagatggtaataaaaacttttcagcttttttttttaacttgtatgacttcgttaggttgttattaaactgtgatttgtatttttaaaatagttttgtctgttaaacataattgaggtgtacagtacagtatccattgttatctgtttagtatttatttatgacttacaaactctaaaagcgggatcagtgatcatggtttttagtaagttgtctttaaggagcaaagtaagagactagcagaaaattgcaaggaggtttgttattgagagtacttctgccccccgcttgagagttaatatggccacttttaaacaagaaaagttttccagaaacgtggaaatcttgtttggtgtatgtttaggggcaaatgttttaaagttttgcctaaattcttagttagaatgcaaaattgatcaactccctaggaatggttattgtggctaaatatgaattgttgctcctatgtaaaatttagttattggtagaagtttactaactgagttgaattttgttgttttcctgggttattgcatgttatgaagttttttatgtactataatccagatttgttaaatttgccagtttactagaataagctgtgaagccttgaagtttggcttagcattctgaaaatcctttttattgtttgccaggaaagcactgtaggaaggaggtgttatctcttcatttaatatttaatgagtagtatagatgatgagataggatataatgtagaaataccgtagaatcttctttattgatatgaaagtaccattgtctaggaacagcataatttcttatcttttgcatgaatggggaaaaagaggaggggaaatttattagactctttcatttcattagagatatcttccctcacattcattcttcatttcattattcttaagtagaaactttggaagagagatgcaagtatttgaattaattagtaagaacaaaatgaaaattacatcgtatagactatcatgaggaaaatatcaatttgggttggttattgtgtttgtattttttaacaaggaggttatatagagtagtagaaagaaaaaaggacccagaggggaagagtgttaatatttattgtctgttaagtgtcagatcctgtataaggggcttttcatgttgtcccactcaccaagtatgctttatgaggtaggtattattaatcccctgtcctctccctgccaaatagaagctaagggaaatgaaataacttgtctaggctcatacttctagtaagtggaattctctaaa

SEQ ID NO: 95894 - DNA, 1039 bp, Homo sapiens
tctcattcgtgcttaaaaagaaaatagtcttgttttttcctttgtcctcgtttccataatttaaacatctctgtctccaattcatgtgcctcctctttaaacctttttcaaaattcacctgtttctggaagaatgctgcttaatccactcacaaggatcagttaatgaatcctggtaataagtaccctaaggttaatatatgcttgtttagatatagtttaatatcttcttaagctttttttttttcttaagtttttatgttacctactctgtttccttaattttcttaggttaaaaaaattaaaataggaatagcgtcttttgtattgtcttatgaatttagttcatttttcaacaatgctacttttaaaagttgctaatttttaaaaaggataaatactgtaacaacgtttacccttgatcaccaccataatagctattttttgtttctttccaggtaattgttcatatttaaaaaataaagttgtgtggtagagagaattttgagaggaatataatgggaacattgtatggtggaggctgtgcaatgtaggggaaagatcacagactttggagtcaaatctggtgtggaatctagcgtcaaaaacctcgggcaaactgtctgatttctgagtcaggagtcaaatctggtgtggaatctagcgtcaaaagccttgggcaaagtgtctcatttctgagtcaggtggtcttgaattgtggggattaagatactatatgtaaggcatctagcgctgtgctttaaatacaagagatgatcagtcagtgatagttggtattattttttcatttttctattcccatcttcatgaatattatttatttattttagctacccaaagccaccaaggtcaatgaatataatttaagtgattagttaaacattcaggtgatataccataactgatttagacatttacattttgttaagcggttttttgtttatttcctcagtttaaaaccctaggactgggataatggtcaagtgtcatgaatatttctgtgccagatctctctctta

SEQ ID NO: 95895 - DNA, 1047 bp, Homo sapiens
gtggtataaaggtaaataagacatgattcttgtccttgagctcaaattctagggtggtaacacatgtcaacaaacaattaacaattcatagtgacagtgtaataagatctggggaaaagaagtggcatttgaatatggtcttggaggatcatttggaattgatctgggtagagagaacagcatatagaaaaagtcaaagtatgaaagaatgtgtggtgtgtttggagaaatgtaagttgtcttgttggatatgtctgtctctgtctgggtgggtgtggttgtctgttcctgtgtgtgaatctgtgtgtgtgtgtgtgtgtgcgcgcgcgcatgtgcgttgattgcagtgggaaatgaagtcttgtgagggtccttgtgtttgggcaatgagtgggatcattttaagacctttaaaatagagcttcccaactggtgtgccatgaatggtttaccagtgtttcggagagcaagatacccttgtttaatgggacctgggcatatcagatccccctccccaccctgccccaggatggtttcttttggctttgaatagcatttgtggcttatcccaacgtgctaagaaattattattttctttgttgccaagttgggaaaaggattgggaaaaccactgttttagagactgtaagtattagaaagtttatggttcctactcacccttggcatccactatggaatcagaaataaatatcaaatcctaaagtaagcttaaggtaaacttaagaattcttaagtcaccttcctctttctctctctttttccctccctttacccgctgcctcccccatttcactggtgtatgcgcatgtgcgcgcgtgtgtgtgtgtgtgtgtgtgtgtgtgtgtgtgtctgtgtgtgtgtgtgtgtgtgtgtgtgaaatatctctttggtgcccttgcgttactggtgccctaaacatgcatttagtctgcctcttgggaaatcagcattaacattcaggaacaatttagaggtatttaaataagggatgataagattagatgcaggttttgaaaggtaactcct

SEQ ID NO: 95896 - DNA, 1686 bp, Homo sapiens
ctgtttagtggtttatattagttactgtcattttaaaatttcattttgttggtcaaattgtcccaaatttggcctttaagttggctcctctatctccttgacctgtccccctccttggtgtatttccttactttctggcctaacaagatgttccagatgatcttaatactctcctatcccagctctgaaatcatttatttttccaaggaatcctgattttattttacttttttaagtagagatgctatttaggaactgagatccgagtgttcagtgtgttcatttctgctggcatgtcatcacttttagggggatagagctaggaaatacatatatgtatacacacatctgaatctgtttctatgcctatgtacaggtattttataagttcacactgatacaaccaattccaatctaacatctcaggattcgtctagccttttccctttctgtatttgtaaatctcttctccagcagtgataaattggttcctattatctcctcagtgtatttacttatttgctcaatccccttgtatgtgccagtcttccgaccccgcattagttgtctcctttctccttgcttgccgcctctgaggcctgtggcatggggtcctcagagcttgctgtcaggtccatgtaggaaagagaacttctcatttaatctttttcccctcatttaatcaggacagaaatttgttagaaaggtgctattcccagttttaaaaggagaacagagctgaaattcaaaaaggtctgtgtctttaggcatgttactgtgtaaatagctgagtaaatattttgcattcagattcgtctgatactgaagcatcttttctctcctgtactgcatagcctctgagtatctgtggaatccaaagtggcaggatttaaggttgtatagatggtagctgaagcaatgggtgggactgtcactgcttatgaagtatatataaagttaggaagaggcacactgacagagctcctaactaccatcactgaaagattaagggctctccgaaatcaagaagccagtgaagaagactgaaagaaaggttgtgagagaggagtgtggttgtgtgttagatgatggtgaagtaaggaatttcatgaagctgccatgttgctgagagaaaaagagaagaccaagaggctttgaatttgactgttggaaagttattgataatctcagctagttggttttccagtgtgttcaggcgagctgcctgtatcagaattatggagatactaatgaaaaatatgaactccccaggtctcatctcagaccttatagattcttaaaagggggagtggggagccaggaagtggtagcctgggaaaatctgctgaaatgctaaggttcttctgaggtgtactagtttgaggtttgttgctttagcagaagagttatagtggaagagtgtaataaactaaattgaggaaaccaagtgtacaatgaatatagatgagacagctcttcgagaagtttgccatagaggtaaaagatctcaggtcatggaagaataggggacagcatcaagaaaaatacctttgcgtttcaagggttacatacaccttaacatttgttgggattaagagaaggaaactgtaatggttattttaaagttgggtaagcaaaactaattagcaacacctactatcaaaaaaatgccctgagtgaactttg

SEQ ID NO: 95897 - DNA, 1027 bp, Homo sapiens
tgtgtttttgttatacagttgtgtaaagagcttctctttgctcatttttatacaaacacgaattctaagtatattcttgtatatagacgagtcactagcaatacaattaaaaattacgtccaaaattggaggtgactttagagggaaatccaatccagggctaatttaatgtattctttgagcaccagctaggtactaggcactgtgcttggctgtggggatacagaattgaataagacatgctctttatcatcaagattattgttctttcttcagaggaacttgaaatctagtgtatagctagaaatggtacagataagtcatagataactatgttagtctacagtaaaataagtacagataagtcaatgtttaattaatacagcagtgtatattaccataattctcagacttgtcattttaaaattgtatttaaattgtattttcgtatttgaattggcaatatggctacatggttcaagtttcaaaataatataaaaaggcatataatgagaagtcttgataccactccttctctttcctgttctgtataggtaactacttttattttttgtatattctatggtatttatgcaaatagaaacacatataaagattactgttttccccctaccttttttatgtagaaggtatttactatattaatgctttgtaccataatttttaaatttaaaatataccttggagatcatttgacttcagcatataaaaagctgtccctttcttcttctttttaaaaaatatagtagtatgttctattgtatagatatactattaagctaactaattctaattatttaaactttaagttttagacccttttacttgtgtaacccatttcctttcacctctttctgtatgaactagtgctccctgaagcattttacattaatgacctgcctgacttttctgtatctaaagggtctaactttttttttttttttttttgagacggagtctcgctctgtcgctcaggctggagtgcagtggcgcagtctctgctcac

SEQ ID NO: 95898 - DNA, 1089 bp, Homo sapiens
gagtgctgattttcaggacctgaagggtggaaaatatactgttgatatatcgttatgattgctttatcgaatgtattgtttgatggctactcctcggcttctctctgatccagtaataaaccttataaaacccaggagataaccaaaatgtagctctatacaatcatctttcatagttgttatggcaggtgaagttgttagggacatttgaatgttatttttcggcttcagatcattggaaactaggatgacttaatgttcctctattggtctgtagagattgtagtagcaaagttcaaactactgatactaatttttgtcacagctatttttaacctccataagtgaaatgctgaaaagttataaagcaggaacagtgattatttcaatgatgactgcttcttagtattggaaatattttattgacaaactatccaatccaaagttatcaaacaaattagtagaacatttgaaaaataaaaaacacttcagttaatgataacccttgttaagaatcaatagaaataagacatgtgagtaatggcaaatttttcgttttaaagttggccatttaaaagggaaatactagacatggtaatttggttattatactttaggttgggagtatgaagaattacctttgtatctggctataagtctgccacctctcagcaaatttgaaataattgagcttacagattctcacctttctaagaagtttgcctaatttaggcacttttttcaccccagaattcactcttcttggaactgaaagaatatggtggggtttataattccaaaacatttcccctggaaacacaggaaacggaaaagaaggaaaagacgttaaagctgactaggtgggttagcttcaagtgctggttctcttttcctgtgtcttcacttcataaaatcaggagttgatcatgcttttaatgtaattattttctggtcaagaaaaataccatatagaaaactttagactcctccagtgatgtagtttgcaaaataaaaatgcgttctttgaccattatgaaagtaattttatacagatttttcttcattttcttaagttacatatagaagata

SEQ ID NO: 95899 - DNA, 1022 bp, Homo sapiens
ttttttttaaacttcttggtttccccaacaccttaagttttttaaaaaagggaagggcctgccaaaattaaataatttttcctcctgttgtcattctacagtgctttaaaatacttgcatcaatgagtaatatccaacttcctgaggcagcataatcttcccgccccttttggctactccaaagtttacatattttgaattggaatatgacttccttaaaaatttatgtattaaatcttctggatggagcagttaaaaaaaaaacctctttttcaaagcagtggtaactttagtttgatgatgaactatatataacttatacctacaattcttattctggtgtttcaaaatttataactgttttccacctaagttttaattgagaaatatataataactttgccttttaaactacagcttatattttacgaaccttttatttagtgaatttttttttttttaacttagactttgtgtggacagtaatgacctcacgtttccgattgcctgctggcagaacctacaatgtacgagcatcagagttggcccgagacagacagcatactgaagtggtttgcaacatccttcttctggataacactgtacaagctttcaaagtcaatgtaagtattttgtgtcttttaaaaaataatctctggctataagtctgaatttagacatatatgtaaactaggattattaaattatagtacagtttgaaaagtcttattcaagtaaaaaagtctttttggtgcaggattgtattagatgcatgctctcattcaaactgggtctttttaaaaagtgttgctcactggatgttgttgagaaaccaacagtgtgcattttgattagtagagcagatccatagtatgtgtgtggttttcataaatgtgcttgagggtgcctgaaaagaatttgttcttctaaataatttatacatattcatggtaattttacttgtactgtctgtgagtaaaatttttgccaaacaaaaataaatgacagccctgatcttatct

SEQ ID NO: 95900 - DNA, 1074 bp, Homo sapiens
cagatttaggatttagtgtgcttttctaaaaagctaaacttttgatttcttttgtattctatcatctgttaatatatagttggaatataggttgccaaacagagataacataaagtgaagagaattctacttcgtacaaatttctatttaatagaaactctcatgtattagacagttgatgtaagaaaataagccttttttcctattattcacgtgttagaattcttttttggaaaaggcataaatttaataacttttgtcttagcttaaatttagctactatttagttttcattttaactatagttttgaatgtatttcaaaatattgtaaaaaggtttggtatgtttctcagctagcataattttctgttgagcactttagttaacagtagtatgctgtatttttcagtgtagtaatcaatgtgctgtctagttactcttttagaaagacatatatattaatgtacttttatatgtttatattttaaaaatatatattacatatatttagctggcagtttcaatagacctggatatattacctagaatggtaagtaagcttaccattctgtggtgctagaaactttctctaccattatctcaggtcatcaaaaaacttaagaggaacaatatttatgaaaaattgctggttatgtggtatatttattcctctgggtatttgaacccaagccattcaaaccaaaagagttgctttgtacttttaggtagattatttatcttttaatccatgtgaatagatctccagttatgtactttacaacctgtggagtggtatgtggcagcctgcaaactaattgggggtttgaaagttttggtgtttgttttcttgtgtccacttagtaccattaagtctcagaaatcctttgtgggcagctgccaggttcaccagcatttctctgttcaccaagaaggagaactactcagtttcctttggagactaccaggcattggagtcattgcttttcatgaaagatttttgcaccacaggtaaaatattcatgttgccaaagcctgctttgtttcatctggtagttatctcatcaaagccgttt

SEQ ID NO: 95901 - DNA, 1004 bp, Homo sapiens
ctattttcactgtggctttggtataaccatttatttactgtggccaacctatggagtgtattgtccctctcatgccgtgaattcattgtcactaaatgaattcatgatatgagaattcatctcaccaaatatgtttgcattaacaactcactaaatatgtttgcattaaatactttaaaatgcatagtgtccgtactacatggattgatgtcttcaatctatgaggatttttacccctaatttttgacttgacttttactttggtgcagctgattaacgttagcctgtatgatgaacaaggaagggctgggaggaccagcctattttagttactgtgactgcgtaagaaattaccctaaaacttagtggcataaaataaccatgtattgtcctcagggattccgtgagtcagagattcacacacacacacaaaaggcttaattttgctccattatgtatcagtcctcggctggaagactcaaaggctggaggctagaatcattcgaaggcttattcactcacatggctgttacctgaaaccttagctgaggctgaggcacctatatatgacctcttgatatcctggacttcttcatagcacagtggctggtttctttctttcttttttttttttgagacggagtttcgctgttgttgcccaggctggagtacaatggcacgatctcggctcaccgcaacctccgtctcccaggttcgagcgattctcctgcctcagcctccctagtagctgggattacaggcatgtgccaccatgcctggttaattttgtgtttttagtagagacagggtttcttcatgttggtcaggctggtcttgaactcccgacctcaggtgatccacctgccttggcctcccaaagtgctaggattacaggcatgagccactgtgcccggtcacagtggctggtttctaagggtgagcatctttagagagagagccacactgtagctatattgcctttccagtctggcctgggaagccat

SEQ ID NO: 95902 - DNA, 1031 bp, Homo sapiens
cagcagattactttgatcttatggagattagttttaagctttttaagataggtctgtttcacctttgttcttactcctaggacagagtttgtctagggtctcaactaagtgactaaggtgttcatcaagatatctctcctccgagcctggaccacaccttctcagaactgcacaacctctgaaatctctgtttagttaacagctattttctcctagaaattctaaccctgtgtacgcacatcctatgaagcaagtaaggaccaaagggcaatttcatgtgtatttttatagcttttttcctttcactttctcagttctaataacctatccccaaaaccctggcaccatagcaaccccaaacattaattttagttttcttatcctagcaggactaccactgtctgcttgggctttgtttctccacagtatggtttggcaggtgcccccaaggagaaagccagcgtgagacttgattcatctgcccttttctcccaaagatcatagccctgtgttggttggtatctgttgcttgtaaatgttacatacatgttttatttggtctatatttggtccggtttttatagatgcttgtaacaggagaatattgcaataccagctactctatatgatcagaaccccaaatcctcattattttaaaatatgaaaacgtatctcattatataatcagtgaattttgatttgaaacatttaacatgttacttgctgtattttctgattcattgtttacttgacccagatagttgagccaaataggacttagatctcagttaataatagtaaatatattcatcttataaaatcgaaatggcccttgctttccaaagatggaaccctaaacagctgggctaatggatttgatattttagaagatttcatctgcaacatttgagatgcaccttcacacaagttgatctgggcatagccgttgtcagagaagcttctgtccttggctgataaattattaatgcttaattatttaacttttttgtttgtttacatatctagcatct

SEQ ID NO: 95903 - DNA, 1727 bp, Homo sapiens
cttctctagtgaatttattgataggtatagaagtttcctccagtattagcttttgtttgctacttatgttaagatgccagagtagttgatattgttattgcttgttttgtcaaattgctttcccaacagatatctttctaccatgttagcagcaataagtatttcttgtctttattttttatcattggattttattttgggggttgtttgcccatggcatgtcattataatttcccattttctttttttattttaactgaacatgttgatcatttgtctgtttttactcataagttatattttttattggagggggattatctaatcatgccttttgtaccacagtttaacagctttggaacttggggaagttgtatttactctttaatgcctacatgatagaattagtatgaggttaaaatgagatagttttctaaagttctctgagtactttggcaatgaaaatattagcaatcctttatcagtttgctataaataattgttaccatcttcgttccccttttatggcattataatacaaaattatattttaagtaatatttagccaaatatgtcactttccagtcacaatttaaatataagaataaaaggcataacaaaatgatatagatatatgcatgagttaatgtggcaataatataaactaaaaaaatatcgtgatagcctgaaagtgaaaagtattttcaatcaaatgtttctttgtattttcatatttattatatgctctttaaaccagtttgcctaaggtcaggttgttttctaaaagtgctgtgtcacatgtgaagtcttttttctcaaccaagtcattggtatgaaaacagttaccaagttaacccatttatgcctagtgctccattattggcttgctaagcttatgggagttatttatatcctactgctcaaggtcattgccaaggcctgatttttcacacaaaaaacgtttgctacctctggcataaatgggttaatagatgaggacaaaagtcaaccaggttaaaaaatgtgaagaatgtaacctatcaaagttgatttcattcaatttttttttttttttacagaaacatgatcaggggcaagtcttgttggatgtcgtcttcaagcatctagatttgactgagcaggactattttggtttacagttggctgatgattccacagataacccagtaagtgtaagattttgtctttcattttcatttagtttttcctctcagtttagtgtagaaagtcctttctgatttacagtgttcactgatttgatgagttttttttttacttgacttaaatagaggtaattcttttgcttttgttcctcttttcttgacattttaatctttcagaagttattagctttaaggttttcataattatgtcaggtaatgtcactttcattaattatgtgtctcagacaactaaaaagtaaatccaatttatgcctgttgactgaaagagaggaaattgggcataaaggttaaaataccttcagatgtatataaattagtctgcactaaagtaaaattagttttttattgtatttatagagagctatttctaataaaaattcttaatttattcaatgtcaaatttccaaatttcatcagagaccctcacaaataagatagagattaaatttcagagctgtacaattatttggcattaaatttcttggatttttacttattcttcagtaattgcaattgtggttc

SEQ ID NO: 95904 - DNA, 1052 bp, Homo sapiens
atgtttccactgtaatatcttaattcaagctcttatttgcctgttgtgtaatcctctttggtagcctgctaaatgcaattttttgcttcttgtctcgtttaactctgttgtattttgagagggaatggcaaagagacctggggtgcacagaagtgtttaagaaagaagcaggagcatatgcagagatcaagagtgaagaaacaggaatgctgaatttgaagaactggaaaaaagttttagtattaaacctttatttaataaaaggagaaggggtaaaagatgagatttgagcattacatgatatcatgaaaagccttttaatccatgataaaaatcaaacttacctatgaatttatttatatgactaaacacaagacttgtattttacacatatccctgtggttatagtgtagccagcaactaatagacagttgggagattgttggaataaagaaattgctaagaaagtagtggttggctgtggggaatgaagaaaagaagatgagtgctagagataattcagttaggagataaagtcaacaggactggttggtttgattcagatacagtgagttcatgaggaaaaggggtaaatcaaggttactacttcaaattctgcttttggcaacttggtaaatagaaaaaacatgcaaatagtattgttggttttcttttttcatttcaaattgtttatttctagcatatagaaatacagttaagtttgtgtattgattttgtattctgtacccttcctgaactcacttaattctagtagctttttgtaaattctatagaattttgtacctagattatcatgtagatatatggtaaattacattgattttcaatttttaaaccaactttgtgtttctgggataaaccccaagataactaactgattgtatattaaccttgtatcttgagaccttgctaatacacattactgttagtagttgttttcattgattccttaggattttctgtgtaaataatcatgtcttttgtaaatagggacagttttacttcctccttacaagtctttatcctttttg

SEQ ID NO: 95905 - DNA, 1030 bp, Homo sapiens
agcacctagcacagggcttgacataatatgagttaaaaatactgtcaaaagcagtggcacacacctgtaatcccctgtctcaaaataagaaagtaagcaaagtaaataagtaaataaataaataaataatttactgaaggactaaacctgctgaatgactcaatagctgggggtagggttttcagccctgtttaataaacttctttcctcaatcatctaccatttatccaccttcccatccatctatctattaatctagtgatttttgttcttcatatcttctaggaaaagtcataaattatatccactttaatgactgtctacaatcaaaatttcagatcaattaatctattgaaagcttgtcttcctcattcagttctccttcaaaatattctggtaaaagaaatacaaacacatttacatacacagatgtgtcaagctgacatagcttagaagtacaaagataagcactgagaaatttaattgctctcatcaatgatatcagtgagatagggttaaggttcttggtttaaaccaggaagatggaacagtgctataacaagcactactgaatggtaaaaatagcattcattgtaaaaatccatcaagttgcaaaacaaactaggaaaaaacataatatataaacaagttctacacatcaataagaaaaaactgacactaatagaaaaacaggcaatgaataagaatgcaagttcacaatcaaggaactacaaatggcatttaagtatatgacaagatagtcaatcttgatcataattagagaaatacaaaagtaatctacattgggttattatttttcaacagtaatattgggcaaagactaaaacgtttgatgacacacacgtgagaagaacaggcactctcatacatagcttctgaaagtataaattgtaccatctcaatggaggataacttggcaaaatttatcaaattataaaatgcatatgccaagactcagcattatttttattatttttagtgagacatatttcacgcaccacaaaattta

SEQ ID NO: 95906 - DNA, 1038 bp, Homo sapiens
attgtctgtaatgcaatgatttttttcctacctgggccttttctgaaatgcagcttttagcattaatctccaaatggaacagatttgcaagaatcaatatagtagttcctcaaggaaaaaagaaatcagttttatttatttatttttcagaggtggctggatccaaacaaaccaataaggaagcagctaaagagtgagcatacatatttacttaatgttttgcaagtttactttataaagataaaggattaatatagtctgattaattagaactacttttattaattctaggaggatctccttacagtttgaactttagagtcaaattttttgtaagtgaccccaacaagttacaagaagaatatacaaggtgggtttatggatatatttttcttgaaaatattgtcaaaactctaatatgaaattttgaaattaattaggcaaaaagaaattactgtggtgtaattctgagctttccagtcagtacacagaataagttatggctattccaagataacgttttcctccttttttggatggctgggagagtgtaaggggatttagaacctcagggctgcccagtccagccccagcttcctgaaccatgtaaatattaaaaatttctacttgtgaacactgcttaagtgtggctataattaattgaggtcatcaaatgtgctgaaattgtatccaaaggatgctgtgtggtgagaaatttgggttttttttttcccatgtgaaagcatattctagtatctttttttattggggagaacatagaatttataaaatatataaccattatttgcgggtcagtaggtaccttttgtcccctatgtgtttttaatctttggttccaaaaaaatataatggagtttataaaggatgttgcagagagtgcactagcatgttgaggcctttacatgcccacttgactctccattttaagtctcagcttatgttactatctaattttatggtcatttcgacttgacagagtatatacacatgaatgatccagatgaacattttgataat

SEQ ID NO: 95907 - DNA, 1261 bp, Homo sapiens
taactttgaatttttttttttttctttttttgagatagagtctcactctgtcgcctaggctggagtgcagtggcgcgatctcggctcattgcaagctctgcctcccaggttcacgccattctcctgccttggcctcccgagtagctgggactacaggtgcctgccatcacgcctggctaatttttttttttttgtatttttagtagagatggggtttcaccgtgttagccaggaaggatggtctcgatctcctgaccttgtgatctgcccgcctcggcctcccagataactttgaattattaaaccaaaacaggcctgatagaaatatactgtcttggattgagtaaatagattatatttataatattatgcactaagcctcacaagaagttatatatgaagccaggatgtttgtattctttttttttgtaatgaatatctgattctctgaaaacctctttggtaatttgaatattgtcatggagctcttcagtgacttaatcagccaaactagaatttctaatgacttttgactcttggaatatgtactttttttagtttagtgaaataaaaaatcttaagatttcctggttaaacatttaaaaccaaaaagtttggtcttctgccacccctatacaacacaggtgactttgcccaagtattgacaaatctttgagtgggttacccactagcagagaccaaaggacaatgctatcttgtaagcaatgacagcaggcttgttaaagaaaacctaagtttttgttggtttcacaggaaattgaatacttgacaattctaacaatagtagacaaaagtattcttcccctgccccgccaatcaaagagagacttccttaattcacatggaagtgtataggtgcttttctgtaacaggcagcttcctgccatctgatgataaaatgatcaaaacgctggcctgtccttgtagctggctttctatctcagaccagcgaaaatcatcgctggtctctagtgcattgcttacaatgctcttccatgtttgtgatactcaggttttctatgcttcccacttctttctgcatataccaaccctcaagagtatttctccctctgtcatgtaactatttgaaatcttgagggcttctataatggaagctagtggaaacaagacattcgaaatacaaatttcatacatcaaagagttttaaagatttagattcatgagcttatgaaatcttatttttaaactactttacatgttttaatatgtaaattataaa

SEQ ID NO: 95908 - DNA, 2487 bp, Homo sapiens
attgaaattgttacaattctattaaatgctatcctttttgtttgtttgtttttaaggtaccagtattttttgcaaattaaacaagacattcttactggaaggtgggctctttaaatttcttaaaaaattttttgtaatggactttaaaaatactttttaaatctgtgttaagtaattcatggtcattgcaaacaaattatttaagaaggttacatgtagtgtgaattcctttcatcagataagtttatttcttaacagttaaaatcaaatcacatgaaacttcaagtgtgattgtttaacaaattatagcacttttgaaattgctatgtttaaccttcggttgtgtatttttgttttgttttattagattaccctgtccttctaatactgctgcccttttagcttcatttgctgttcagtgtaagtatcagcccatttttaggtcaaatagcatataactgtggtttgtgttgctagtacattggcttcaatgtgggagttctttagaaatgttgctatatagaaaatagtgactgcagtggaaatgtaatgaaatctccagttagttagcaattactatgatttttgaaaaaatttcctctgaaattgagaccaagaagaatgttaaatggattgctgtggcttgcttaagtggttatattagaaacataagtattttacatccagaaatagaattaatggcatcgctgatttgactataataatttaaaaatttgtttattaaaatgtgaatgttttcctttcattattagctgaacttggagactacgatcagtcagagaacttgtcaggctacctctcagattattctttcattcctaatcaacctcaagattttgaaaaagaaattgcaaaattacatcagcaacacatgtaagagttttttagttttttatttgataaacttcttaatggcattctttctagagaaatgtttgaaattctaatatgatggctgtatttaatatagaacaattactgttacctaaaataatattatcataaagaaatataggtgatctatgctaaaaaacgatttcatagaatatatgaagctcattttcatttctattcagagccattaagctatctgtaaacagatatttatttgctattgtgtaatagtctaaataattttagaatataaacagtatagtcacaatatagagatcagtctgcttagtaattctttctcagtttttaggtataaaggacttgattctccttggtagtgagccaagaggagaacaggaactctatataatactgaattaatttttaaaaaatatttctttaagaacagtacaggttgaacatccttaacccaagagtttgaaattcagagagctctaaaatttaaaactttttgagcactgacattacaccacagtgggaaattctgcacctgatcccatgtaatgggtttcagtcaacattcggtgaaaactttgtttcatacacagaattattttaaatattatataatattaccttcaggctatgtgtataaagtgtatatgaaacataaatttcatgtttagacttggtttctataccaagatattgcattaagtatatgcaaatatttcaaaacttgaaaaaatctgaaatctgaaacacttacgatcccaagcatttcagataagagatacttaaccttatcaatattcattcattaacaatattcattcaactttgatttttttgtgtgagtataattttatatattattttttcaaaagagatttgttgccttgaatagaaagtaatattgtttattggttcagaattcagttgtgcttcaatatacaattcagaatactcagggaaaaactaaggcagtgttgcgtattggctaagagtctgaactaaagagccagactgcctggtttgaaattctgtaagattacttactatcttataaccttggccaaactgttttatgcctcttcttctctgtttccttacgtaaactggggataataaaagtatctatctctggagttactgtaggtcttaaatgagtttatatacataaggttctcaaaaccatacatagcacattgtaggcactgaagaaatgttagctgttgttattattaagaaaacttactttcttttactaataactcatgtatctaaaacaggataacaaaccatggccattgaaacggagtctcgctctgttgcccaggctggagtgcagtggcgcgatctcagctcactgcaagctccgcctcccgggttcatgccattctcctgcctcagcctcccggtagccaggactacaggtgcccgccaccatgcctggctaattttttgtatttttaatagagatggggtttcaccgtgttagccaggatggtcttgatctcctgacctcgtgatccgcctgccttggcctcccaaagtgctgggattacaggcgtgagccaccacgcccagcccctattgcctatttttata

SEQ ID NO: 95909 - DNA, 1019 bp, Homo sapiens
tagatttaacagatattacccaggcagattgctatacaagcctccaacactcaggttccatactgtgaatcaacctctgtctgtgcaccacactctgagaagcactgccctggaggttggcttagaatctgcaagtttcagagatatcctgtgtgatttaaatgcagatatggtatatgaaccaaattttgagaaatactgcttttaagttatatctaaaagtgaggggttttgttacagtcacccatataaatagtgaggagctttaaaaacttggtgtattcttgtatttctagaaaataagacagtattctggaaaataataatttgggttactgaaaatgtgccctccagataagttagaggagtagtcctgcatggtgtttcatagatttaattagactgctcagttttttcagataaatagcctttttctaatttagccatatttatttgattgattgattgatctcatttttaacttaatgatgtctttatagaggcttatctcctgcagaagcagaatttaattacctaaacacagcacgtaccttagaactctatggagttgaattccactatgcaagggtaagtgaagaaaacttactttgatgttgttgagttaggctccgttactcaatataacattttttaagattagataacaaatggaataagttatgattgctgctgacacagctgcactgaaaatttcctctgaatttaagtattttcacaataacttaagattcaattcccgaatgtgaaggatggttaatgtggattcttcaaggtagtgttttatatgtaaagataatttttacagaccgtaagatatagtacctttagaatatttattttaaaatataattgttaggctataggaaaagtggcttttgtatacttttataataatgatcattaaaaatgttctcacatcactgaggcctgtattagtgcacttactttgttttcatcatttaaaagcactattacgagtttttatttataaagcacaa

SEQ ID NO: 95910 - DNA, 1050 bp, Homo sapiens
ctcattatgttgtaaatattgctttattgggttccttttcaccaaactctgaattcctccatgttttattcatgtttgtgatgttagcatcacagttacttagtaaatggattgtaatacttttaggaatggtaaaatgaatactaaggaaaaggtctctgatttctgaattcttggttcctattccaaagagtcagttctagtcataaattgtgggaaatcctgagatccattttactttagattaaagaattttaataagacatttcagtttggtttaaaatttgttctttatttttatttggtaataagtaccatttgggtttctaattagtattcggttctttgcaacctttgaaaatgcaatgtttagttttaaaaatagaatcctatttttaaaatatatctctaacaaagcccataaatttagatttatcatgtttttattcattttttttgaaggatcagagtaacaatgaaattatgattggagtgatgtcaggaggaattctgatttataagaacagggtacgaatgaatacctttccatggtaagaacatctattgatacttttatgtttaccactgtattactaaatataataatttatattaaaggcagtggctgttgaactattttaatgttgtcattttacttgtgagataaactttatactttatcccacttagttagcacctaccagaagacaccaaaatggtttatttcaaaattactttttaaaaattattacttatgagtttttcttttatggaatttttgaaagatgatcagagctttccagtctttttagcagagatttgcccccagggcaaattgttttaccagcatctaaccaatatgggttttatcagagtttaaccaaagtaggagaatggaaatacccaatttagacccctcctgctttcttgtctcacctaaggaggggttgacctgagaagcaccgaagatcgcagccaagaggcacagaccactaaaccactaagacctaattacaggatgaaagaatgattcctccctgtcccacacct

SEQ ID NO: 95911 - DNA, 1050 bp, Homo sapiens
tttttattataaccattctagtgagtataaagtagtatctcattgtagtttttatttgcattcccctgctggctaatgataatgagtgtcttttcaagtacttattattgtttcatatattttggattattcaaactggatttttaaaaatcaatctgagccagatgcagtggcacacacctatagtcccagctactcaggaggctgaggcaggaggatcacttgagcctaggagtttgaggccaggctgggcaacatagcgaaaccatgtctgtaataggatacattttaagatggcaaaggcaaaccttaaactgaaatgtaaagtcattgtaaaacctctgatgtcaagtgaaaaatgcgtagtatgtctaatgatttattaactacagaaaggaattgttccagttaaaaaaaaatcaatctttatactgtttacaagagacatacctaaaatgttatacaaaatgacagaaacattgaaaaagataaaccaggcatatagaagccaaaaaaacggttatggctatattactgctatataaaatagatactgtttgaaagatttttaatttatacattggtatttttctgaaaaaactttgtagcaaatacaagtcacacacaatacatttataagaaaataaaagttatacaaaatatatattatgccacagagagcattcagtgaaaagatttttattcattgattgataccttcctgggaatttttgaaattaaagtgatttgaaactggcctagatttcctttctcttgatcatttagaaatgaacagtgttttttgttgtttaacttctgaaatatcagtgtgtcttcataagattttttgaattgaggcacctggcttttttccataaatacagtcaatagttactcaattttttttttttttttttttttttttttgcttctggaaataatgccctctctctatgacagaatatttttcccatgtcgagtgaaagctcagtatccaaaagtaaaatacaaagttttcaaatcagaaacctaaacatgtctcttcttccc

SEQ ID NO: 95912 - DNA, 1019 bp, Homo sapiens
gctgaggcacaagaatcacttgaacccatgaggtggaggttgcagtgagccaagatcgtgccactgcactccagcatggatgacagagtgagactgtgtctcaaaaaaaaaaaaaaaaaaaaagactgagttaggtccagatttttcaggcttttgcatatacttcattgcctttttattggataagcaaaaaagatcctagataaaagatcccataggttctatctatatcattaacaagttcatgtttacaaggctagaataatttatctgtcaaaagtaaattaaatggagcattagatcctgacattttcctggtattctctgcattttgtcatttattacagcatgaatctagagaaacattattgggatttaatatggtgaattacagagcatgtaaaaatttgtggaaagcatgtgtagaacatcacacattcttccgtttggacagaccacttccacctcaaaagaatttttttgcacattattttacattaggttcaaaattccggtactggtaagtattgcttctgtgttaaggctttattgttggattttgtttcctttctttaaaataaagatgtagtttatggaaccatacaacctttgttacacaaacttaactgagtcaaaaatccctatggattgcagcctctatatcagtatcattaaaaagttctataggttcttgtgatatgctacaggcttgagaaaccagttctgtgttctgtatttgctgtcattattttctggagtaaattaactacatttacttatttacaataaagacagatgacataatttctattgtgtctttattagatatttgcttgaaaacttttctttgttctaagacacccaaggtatcttatgcctaaaactatataattattgttttttaatttagaatttagcatatttttgggttgtcaaaccctttattgtaaagtgtttaaaacagtcacgaggcaaaatcagatttagtcattgaacagtaaccccaggttccatttcct

SEQ ID NO: 95913 - DNA, 1010 bp, Homo sapiens
atttgtatatggttacatttgatataccgcaaatttatgttaattcacagttaagtaatgagaatgtctcaaataaatgctctgagaacttttattaacaaacttcatctgaacacattggtgtacttcagaagaagatcagtttctctctatcaacaatttccctctagacaaatcagcttgaaaacaaatctcctagtgccaaaaccccaccatttttctgccttagttccttcctctaaacaaaaatctggagctgttctgtgtctggacatggagggagttgaacacatctttcttcattaatgggagaaatgtaactaagcttcattcatccaggtagaattggaatgttgtccagtctttttattctctgcttccttttctctgctagaaatgtcttgtctcttaggaagttacactataatcatgttatgtgttgtcattttatcttatagttctcttaagactttattgttgtgcatatttatatatttcagtgggagaactgaagtccaatcagttcagtatggcaaagaaaaggcaaataaagacagggtatttgcaaggtaagccaaatctgtttcattgtttgaatttttttaaaaagatggattgagtttactaaaaagtttttctaaatattttttctaaagtttttctaaatatttcaaatttttgattacagaattatcacaattctttaacagtaaataatgttgagggaatgataaactagcttgtctagtttattgattcattttttatattaatagtgtgccaggcattgcagttctgaataggctgatcaaatattatgttattaatataatattctgttcgaggttgctccacttttttaaacatttttgagaaatatagtgacttatttcatgttatcaagccatttccatatttatttaaattataatgttaagagataagttgttttattttttgtttttgtttaccatttattgtctttatttctttagggtctgtcatagcca

SEQ ID NO: 95914 - DNA, 1947 bp, Homo sapiens
agataagcttttctgggattgtttttctaatatgttaggatctaattgtaatgaacagatatatgtctaccaaaattctctaatggttttagtaattattaagttattttattaaagtaccagataacctagagttctttttttttctttgggttttagttggcaatatgagtagatagaaaaggctcctccttaaacttctcatataataattttttagcaatcattaaatgttttttcttttttctgattatcacctctttgtgttcgcctcagcagcacatatactgattatcacctcttcaaattgctttcacattttgcagttgtcatataatatatctaagaaaagagaaaaacaatgttctcatacaacagaaaaataaggtgccctagacagaaaagaagcttaccacatcgcaaacacactgatgctgtgtggtatttttttctctgaaatttccacactcaacaggaaacatagacagcaagcttgagtgggtgggtccctgaggttaaaactgttaataaaataaaatacatgaagtttggttttaagttcaaagtgtccagccatgtttagtccattaacagcaataaagtgttctgacgcttcagactaggtgagtgtgctggaattttttttcttcaaatgactttttccagcttttagaaaatgaaagtagttgatctattgattacagttagtgaactttcatacagcttacatttcgtagtttaatatttgaggaaataatagtttattacattatgaattagcattaatagagccataaatgttaatctttattttaaaaatcaaagttttatgcatgaggtaatatactttattttcattctgttgtgactgataagaaaatttgcactgcaatatgagggagttgaactaaacggtgtcatgagttgtcttcaaatcaaaaaatcctataatttaaacctgtgataatgggaaatgttcacacctaaattactttgaattcacttacggaaaatgaaatctgagtcaatgtatcttttttaaaactaataacattccatgtcttataaaatgcctacaagatttttgattaaggaaatgtcattaggccaaactaaaaaagttttagctatgaattgctgaaatgacaggacacttctgtggtgtagattcataagtaacttaaatttttcgtggtttagtaaaattaataggctaaaatattgccctgaaaatttggatattcataaatcataaaattcaggaggtagggagagacctatgggtcatattatgctaataaatttatacatttagatacagaaacataagaggtctgtctaataggaagccacatctagaattcagagtccttatcattattttaatgcttcctactgtacacataataacaatttgttcagttctctttggtcagtgttattgtgcgtgttagtccgacatttctttttacacgtttaacatattggaaaggaaattctagcaggcagtgaaacttcaaacttcatgagatcattatgtatcagaattctaatgttattaagttttaatgtaatcagatgagttaatattgcatttgctttgtgccttccttggtaattgtttttttttttttagccatacagaagtgtatacatagtacatgatgagagaaaaatatcccaatgagctaaaaaagcaagtccaatactacctgcaattctttatcaatataagaaaatctgaaaataaatccaaagtcacacaacaaaggcctatgattcttattaactataaccaaaaatagtcttcatttttaaattttactcaaataggtatttctacctaaatttttatgatctgatttttgtaggaagacaacaggatgtttcattttttgtaaattgtgctggaatggaaaatacatatagtttttatatgcttcagtt

SEQ ID NO: 95915 - DNA, 1879 bp, Homo sapiens
cttttccttataatttggcttaaatcccaacctcagcatttatacttgggctcttttcctatctgtatcttcctgcttgatttgattgtttaaaaagaggttaaaagaggttattctcaaatacctgtagtcttgcaagtagcacgggatggagatttgtgtagattatagagctcatgctgcatctaaagacagcagctgccacttggctttatacagtgtttgacaactggtactgcaggcccattctttccggagcttccagatttttcatcttgaaaatctagatttgtatgcaattttaaaaatgtaattgtttaactcaattatttttataaaaacaatgaatggtccaaatgtatgttggccaaaattggcccataatccatgaatttataactgctcttttaggacaataatgtctaatcataattgcgcaataaaaaccacctctggaggtgtttcttgtaaccccagaagtagagattcaacagttttagcaaaatgtaccatagaatcagtgctgtccctctcatgtaactgagtattgccactgttaggcccatactgagtatgccactgttaggcataactgagtattgccaccgataggcccatacaggtttggctcacttagatataccactgctgatcaggcttgagtttctcctgtatattttggtgctgtatttaaactgatagctggaccaagaataaggaaggtttccctgactccattttcatatgttctccaccttactccctttcccacaggcttttagttttaaattttttttctcagcttttaaatttagcttttaaatgtttcctggttatgacaactgtatgcaaagcagaaagagtttctaattatattgcctaagtggttacacttaggtccaagtaaggggtgagacctgttatatatgtcgagtccaattacttctggtatttgtaaagttttagagattcttatcaactgccttttaaaaatgttgcatctcttaagttctgctaagggatgtccatctctgtgtgctctaatcctatgtagtaggccgtggttgagttacatatctctattctaatccatggaaacatttccctagacaagcaatacttgaatctatgggcccttagaagcttgtattcttggcagttgaaagtaacataagaactaccacatttgggagctggaagccctggccattaaggcagacctcaatgaagctttggctgaaaaagagggatgtatgctctgatgcagtctttgtagacttggcagaatttagagcatttgtgccctgaagtatttctatgcagacatctaggctaagtgggcattgctgttcacttgcttcttttgcagttatattttataccatgttataaaatttcagaaagactctaatctctcctaggagaaacttctctttaagaccatacaatcacatcattcattattaatcccagctgacttccttggcactgatcatactttctttcagtttcacaacacttatttactaggtgtctagcagccaacctctcaataagcttacacctcctctacaagggagaacagatgtatccaagggtcactctggcagtaaatctctgtatcagttatcttgttatgcttgatcacaaatgagcctaacttaaagagacataacaaaagttctttctttcttacattgtatgtacattatgtgtcatctgtggctgtgctctaccttatcttcattctgggtcccagactggtagcattccctgtttgggacatggctagtctcatgggcaagggaaaaaagaagcataatgaaatcataagctgtttcatttttttctttttttttttttttttttttttgagatg

SEQ ID NO: 95916 - DNA, 1008 bp, Homo sapiens
tatgtgtgtatatatacacacaaacagtttatttagacttgtcagatcagaatgaaatggaaatgaaaaattgtaacatatctgacaaaaggcatattaactataagagagttccctttagtgataatggatacagtaagagattcatagctatcctctttaacacatagaccacctctttttttctgccaactacactatgcacaaaataatgtgaggaaaagctctgtctgctatagcccattattacattttccccagtaccattggctcccaattcactatacttcaggtatctcaaagacatttacaaaaacttggaactaattggtatacaaaagcatcatactgctagtgcacagagggaatatatgaatgtctgtcatctacttcactacataagtagacaaaaaagcaacttgagagaatgagcataactctaaatttgaacgttccagattttaaagctttgggttgaattatctcatcttcacaacaactctaagaaataatcagaacttttcattttcagatgtcttttcagaacttcagatgtctaattaatcattcatttcagaagcagcagagtaacttctagaccagtgttttttccactaatgacagtgccttattggattttattgactttgtgttgataaagaatttcagtagttgtgcttttatttcttcatgcctttaccacaagcagttcccttttttgtaagatccaaccccatcatttccttctcaacctggcctatcattcctcaaaattcactctcatatgttttcattgctatgttcccagaacatgtccatatttctatttcttttgtctcttttaccttaatcgctgtttgtcttctcactttgtgctatagtgcaagactataaaaatgaccatgcaagatgaaattgtgcaggatcttgatgattaataggaaaaattatggttgttcccatgacctttaaatttattgtcaaaacattaagaatttcctttactgt

SEQ ID NO: 95917 - DNA, 1048 bp, Homo sapiens
ctagttcgacctaatggtgagtactctatgtagtaccagataatttatagtaatttattactgttcattactgagcacagcagccagatttctgacataaaacataagtcacctaagtttcctgctcaaagcacagtggctttcattgacacgtggagcagaattcaagttctttgcccccccaccccttgctcccactcagccttgcttactttcctctattctacactagctttcttgcagttactcagatcttccaatctaatcgacttattagggtttttatccttgctgttccctgtgctgacatactctttttgattttgttatgacttatacctatacttcattcaggtctctgctcagatatcatcttcagaagggctttctctcctgactaccatagctaaaatggtctcccatttcccctaaatggtaatagttgtagtactagtactcaataaatactagttgaatgaatgagtaaatttgaactctgttccacttttagaaaatgccataacaagctatagttaaagtgtttttaaaatactgcctttgttttcagtatatgatgtctacttgcctaatcatgtcatctcccaatctggacagctgacttgttaattcatagtcatagaattccaggtttggagaaaacttgaatgccgtaagctctagctctttggctaattgcacgaatttcctccacaacaacctcaagaacattctaccaatatagatagagcactttgtggctcctgaaacaggtcattccatctttggatagctcaaactataaattgaactaaaagtccatctttcttcagtcctgctcctaagtctgtcactctgtgctatgcattataagtttaaccccctttccttcagttttttgacaatagctaattttaccagaaacccacctccctttctccagtttaagagtcctagagtcttcagccagtgttcatatggcattgtttagagttccctcaacactttatcagtctgctctaagaaaaaagttttatatgtctaatatccc

SEQ ID NO: 95918 - DNA, 1050 bp, Homo sapiens
tagccagattacttactattaaaaagggaaaaaagtgacaaagaaaaaatgtcggctgggcgcagtggctcacacctgtaatcccagcactttgggagacggaggcaggtggatcacctgaggtcaggagttcgagaccagcctgaccaatatggtgaaaccccgtctctactaaaaatacaaaattagccaggcttggtggcacatgcctgtaatcccagctacttgggaggctgaggcaggagaatcgcttgaacccaggaggcagaggttgcagtgagccaagatcgtgctattgcactctagcctgggcaacaagagcaaaactccatcgcaaaaaaaaaaaacactagtcagcagatcgagatgaaatttattaaatttttcttgtaacttttatatgtttgaaatttattaaaaaaacatttttaaaaattggagaacatgaatccatatgtatataattttatttattatttatttatatcaatatcaggttaaatgtcaccaatattggccagaacccacaggcagttcatcttatggatgctaccaagttacctgccactctgaagaaggaaacactgcctatatcttcaggaagatgaccctatttaaccaagaggtaagaaggcaggatatctgttcattagaactgttgtgttcagggtaaagactgaaagctgaaaatgtttttagtttgagtattggttgctaggaaatactataagaattattgaattatttatctgctttaatggggtactttggaattttattaagagtattatcctattctattataaaattaatgtttttctttagtttctatgactaaatatgaatggtcagtgaaaaagtagtctggtaaataatactactgttactactttgcttattcagaacaactgtttagatatgtttcattataaaaaaaacttttactccaagtagtatcagtacagtatttgggtgtgtctgtggaaatggaaaaaacaattgaaagctattaaattattttccttttttaaaagagtagaggagagcaac

SEQ ID NO: 95919 - DNA, 1049 bp, Homo sapiens
acggagacagtaagagtattgcgtttagatacatcttggttcaaatcttgactctgccagttacagcattcagtgtttcagaaaataatttccttcaactgaaaaatgaaataacatctatactttaaaggatcagtcttatgctaaaaagactccatgagaggacctgtaaatcaccccatcagctacttggcaccatatactcaataaatggttgctatagtcattcaacactataattataactatggttattgccatttacactgaagagagcttcctgaagagtaaaagtaaaaggtattcaagacttgaggtagtatctgctatcattaatccatccatgtatgtatgtatttatgggagcgaactcattttcccaattatgtttggctcaaactttagaaactaactcatgtcttagttctaatgtactcagggtgtgtaaagaaaagccactatggtatataaaactgtcatggataatctacaggtggagtataatagagactatgctaaagatagacattattttatataaacatacgtagcctatctttcattatctatttgagaaaatgaagaaatatcatattggcttgacctgttacattagaccatgagctacacagtatatgtccccaaaccctaaattcattctgatggactctagcccataaaattttgaaattttaaaattcttgtcattttagctttattcaatgccagattccttttctataaatcagcacaacttctggcttcttcccttttcgtcagtaagactctgtctctctggtttcctttaatcatgctcttggggttggaggggagttctcatttccaaaggcttgaccattgatgggatagtcctgggcactcatagcttgggctatttgctcttctctagcagttattcttttagtccctttcaaaaccaaagatggtggcagggggatagctagctgcaggcagagaaagtagggtgcactgtctctagcagcctgacagaactggcagcatgacgctctctacatacatcttccaat

SEQ ID NO: 95920 - DNA, 1148 bp, Homo sapiens
tctggcattgaataaagctaaaatgacaagaattttaaaatttcaaaattttatgggctagagtccatcagaatgaatttagggtttggggacatatactgtgtagctcatggtctaatgtaacaggtcaagccaatatgatatttcttcattttctcaaatagataatgaaagataggctacgtatgtttatataaaataatgtctatctttagcatagtctctattatactccacctgtagattatccatgacagttttatataccatagtggcttttctttacacaccctgagtacattagaactaagacatgagttagtttctaaagtttgagccaaacataattgggaaaatgagttcgctcccataaatacatacatacatggatggattaatgatagcagatactacctcaagtcttgaataccttttacttttactcttcaggaagctctcttcagtgtaaatggcaataaccatagttataattatagtgttgaatgactatagcaaccatttattgagtatatggtgccaagtagctgatggggtgatttacaggtcctctcatggagtctttttagcataagactgatcctttaaagtatagatgttatttcatttttcagttgaaggaaattattttctgaaacactgaatgctgtaactggcagagtcaagatttgaaccaagatgtatctaaacgcaatactcttactgtctccgttataccaaccttggctctccaaaaagaattaatcccactgatttgactttgtgtttttattaactccaatttttaatatacatttatcttgagattttatttttctgatttccataatttcatctgcattgtgtgaggattaggtcagctttgttcacaaaaaatgttttttactttaccatttttgctcacccaagaattcattagttttttttaagcatttctctgggtcttaatttgtttctacctatgtacttgattatcatctttaaaatactttacacatatagaaattgagttataaaaagagtagtaatgtaattagccatacttaaatggatacaactatttctgtaaaatagtttctttcctttttgttgaaattttgcattttaatgagtttatacataacttttgg

SEQ ID NO: 95921 - DNA, 1029 bp, Homo sapiens
cactccagcctgggcgtgagcgagattccgtctcaaaaaaaaaaaagatatatttgagtttaaaatattgttgtcttttgtgcattcgttgatggtttattattgtcattctatcattttgcattttaaggagttgctccagtaagcttctattccttgttcagattttaaaaacttaaatttaactcctttaaaatagtatttttccaactaacgtggtagatggaagatacagaacaagtaattgagtcagtgcattttttttctgttttcaaaatattctgtatttggcttactacttttataattaaaatattaaaatgatattgttcttctgtgttataattcagttttatgcacaaaagccacaagtagtttaacagaatagtatcggtaagatcttgcctatatttgtcttttttagtgctggaatcggaagaactggggttcttattactatggaaacagccatgtgtctcattgaatgcaatcagccagtttatccactagatattgtaagaacaatgagagatcagcgagccatgatgatccaaacacctgtgagtactgtactttatatacaagtgtatattcttaacatgatgatttttgttgccaatgcatattctaaatcatatttttatccttttttatcttttcaattccttgccatggtcaaataacctctagcacaggggtaagcaaactactgcccactagtcaaatctggcctgccacttgtttttgtaaataaaattttagtggaacacagccatgctcatttatctatgcctgctttgatattatagctgcagagtttagaagttgcaacagtaccatatggactgctatttctaaaatatatttaatatctggccttttacagaaaaagttttgctaacatgcaagttgcctggcatattaaatcttgagtgcttaaacaggcacagaggaacttgctttgtattatttagtcaagctgaatgctgagaatgatagtatccctgaactggagagtcttgatagacc

SEQ ID NO: 95922 - DNA, 1164 bp, Homo sapiens
ctggtttattttttggatagattcttagaagtgggattgctgggtgaagaggtaaattaggttaattttcttatatgctgccaaattcccctttatagaggctgcagtattttaacatccctaccagcaacatataagtgagttttgccaacaaaatatattgccaaactgtattttttaaccagtctagactgttagtgaaaaatggtatctttatgcagttttgttttgcattttttaagtaagcaagccaagtgagatgtttgtcttttttggggggagaggggacggttttctgacttttctgatcagttctgttttttatattttatttttcagagtcaatacagatttgtatgtgaagctattttgaaagtttatgaagaaggctttgttaaacccttaacaacatcaacaaataaataagaaagcaaaaagatctgggatatgtgttggaaaactgctttcccttatgttcactgtgccataatgctgctcgcaggaaatggcattttacaaaaaaaaaatgaagaactcaaaaaaactttgaaaacttcagcactgttgcactttatgttttaaaaaatgtcactctttcaaaatctataactcatgtatttgaagactgtttcatgctttgctccgaacaaatagtaaataactgagtatgttcagggtaatttatgaaattttgtggtggtgccatgcaatccccttttggtagaattgccacaaacaaggctcaaaattctcatcatctctgttatacacctgtatcatgaaagcaaaaagaagtaaacatcaggagtcagctctggtcttttgcagtggtttgcgtacttactatactgattaccagattttatttttaaaattttagcaatatcgttcttaatattagccaatacactgcctatggatgcagcacatttttccctgcacaccccctgtagagacctgcctgctgctcagaagaagaaagatggaatttgctgttcccaggaaatgctgcacattgtccatttaccagcatcttatagaaaatataaatatgaatctacaaattctcttggatttaataatgtaacttatatttatcataaggttggcttattccaaatcatgtgatttcacatacttgatgtaaaggaatgcatgcattgt

SEQ ID NO: 95923 - DNA, 1675 bp, Homo sapiens
catctaacatgcagattaatgttaaacatattgataatctaagctaaagttagagcaaataattgtgatttattcatgtccataactaaaatattattctttagcactcatttcagttaatatcaagctttgttcacactgatatattgattgggattcttcaaacgaagaatgaaacattattgacttatttctaagtgtaataactcaataactaaattgagaattttcttgtttttttgtgtacaattaaattattccattttatatatacttattaagttataagcatgttaataaggagacttttgactgtccagcctaatggaggatctgattcccattaaggatgtgggaattcccgtattttcctcttcaggtttttttgtttttaagtctacagagagatagaaccttaacattgcccagtttgataaaagtgaaaatttgctcacctatacaaatgttattttacacaattattttatgtggattggggttttaaaagattcatttcctagcagtttctgaatatttctgtaagatcttgataaagtttagagtcaaatggcagatattttggaaagccatttagtatgaggggaagagtacacattttaaatctttggtataatctaaacgatgtcatttcagacattcaaaactcataataataaatttcaggaaatcaagctcctaaacattaatagccaagataccaaataaattatcatattaaaatatttaagtttatttaaagagagaagtaaacataaacttatgtcaaagagaaattctcttaatctatttcctgacttcacagtcaaaacagtataagatagtgaagtaacttataatcttatttggtcattctgttctataaacagacaaatataatttaggctgctatatgacatgataaattaaaaactgagaaagtaaaattatgtcggggtctacacattaaatgactgttttggcagtttttcacctgaatttaaaaataaaatttgtctgttctatctgtatggacagaatatgacaaccatagaccaaaagatatcattgtatagatgtaaagagacaaaagtcatggttggcatgttctttaatttagggccttgtttatacttgtgagtttaataatttcttggcaatgagcactgctgcctttttaaatcatcaatgcctgtctttaaatgccaatcattagaagtttagaattacatttaaatttctcatatatgaatttttcatctgggaactacccactgtcgtcatttttatgtgcagaaaagatcctttttgaaaaccatatttattgggatcttatttaaatttaaattatcctttacaacttcttaaaatgaatatgctaatagataagactttatccattacatctaagaactttttaacctgtatatcaatctaaataggtttctagaaataatcctagctttcatacaccatgtagttctagactccgtccatatcagtgtaacattgtgtgataaaatgccaaatgtcttgtatctaagctacgctcccactcttccagccacccctacctcccaccttgacacccttaagaaagcaatgctgacttttattctgacaagtggaaatcaatagtggttaatcaagtggattttgtaaatgctaagaagtgttt

SEQ ID NO: 95924 - DNA, 1041 bp, Homo sapiens
cttcacttagcccatttttatcggcattaggaaatagggttcagcaatggttattgatttagcagtctggtcttatatgatctgctttctaattatctatctagtattcctatattatactggaacttcaataaattataacctatgtgaatatcataaattcttgtgaatttttgtctatttccagtagagaagcatactcagccaatgttttcacttaataactatgacaaccttaaaggatgtcacttaagttagaaaataagcaggcttaagaagtgattctaattaggacccccactcagtttgctagtcatgcctgcctgacagaacataagcttttgtaaagtatttagactgataacacatgcagtatgaaaacattatagactgcagttagaagactaattttttaaaagcactcaaaacatagaactaagatttagaatatatgtccatttataatgaaataatttgtgttcataatgtgaacatgtaagataagtaaataaagcattacttgttttataatatcaggaagagagaaggaaacattagtttataacaatgtgctatttaatatctgtattttgaacatttaaaatactctgatggtaaggttgccaaagtaattttgaattcataaaaattgtttataccacaataatgtgggatatgtttacaggctcttttattttgtggtagttactttatagttcagatgaatttgcatttcagtcacttatagtaaataaagtatattaaatatttgttggaataaaaatctcaatgtaataggacatagataaattatgcaacagcctgctttgatgaaagctggtgcattatgtgagctgccacagttaatactttgtattaacattgcttacttcccccatttgcttcacctatctgactacaattgctggaatcattctttttgtggtgcttcctccaagtgaaataactatgttattaaaacctactggattaattttatcaaatatcagacttactgatctcttggcagagatttattgg

SEQ ID NO: 95925 - DNA, 2587 bp, Homo sapiens
tgcaaccattatatagacttcattgatactcagcaattactacagtgtgtcttacaatgttataaaaaacaaacagcaatctctgtttctgccagaagttagatatttttttatagtcctgatgaatttgttgtgagtagacaccacatagttatttctgtttgcatataaatttgctgctatttatttgtatgtttttctactgtagtatgctattgatttctgaagttataatcataatttttattttagtaatccaagctaaatgggcaaccagaagtaatatctgctagggtgcaatccatcagcattggttcagtgcatatacataagtaaaccagtttaaaaaaattttactaagcaaaaggtagtagcaatattgctagttaaagattaccattttaggggaaagttcaaaggtttaacttcctgaaaccttttaaacttttcagtgcaagaatgaaaatgtttgaaagccttgttaagctcataaaagtttcatttaaacactgtagagtttcctacctttgttgtgtaaaggatatagaaaatatttttctatggacagaaggttgaaactgttaacttctttaatttcattgtttaaaggagataaaatgttatttgtgtgtctttcatgctgtaaagaaaatgaatgtatctttcaaatgtcattagaattatggcttgattctaaggatactctatttgttttaaagtctacacgggattgaaaagaaagggaagagtattacacttcattgtacaaaatgtaattttagaagaaaaacattttcattataaacaagagcaatcattgaagcattttcagatataatgtacattctttttcattttgctttgcctctagaatagaaacttttcagaaaatttgcacatactgtttgtaagtataaaataattgaattctagacttttggagtgtggaagggtgtttgtgtgtgaaggtaataaatgtgttgctgcatgtgtttaccatagagaacgttgccaggctttgtcaaatgaggacattgttgtgagggtgtgacttttgtgaagccagaaaactgtgcctaagattcattacagtgagtatgtgcagaggcccctgacccagtaaatgctttttgcctttttattcccaatgtcttggacagttgagacaacttggcccaactctgaattgtagcagtgatgtcttatatgcttacgagtttatattaattcagctgaacaagaactacatcttaaaccacctttgtaggtatgattaatacgtgcaacagctgctttaaaaggtggtatttattattcatcactcatgaaacttgactcagtgaggacttcattatttttatttctctttccacgtctccaactttttaaaaatcactaatttaactctttgttaagtactcaagtacaaagtgatctcttctttcatgaactttgctataactgttgaaaggattggtgtcaggctctctcaaccctgggagtttccaaaatttagcaaatattacttgtgataagcttaaatgccacatcgctaagtacaattattaccaggaatccgtcaagggggagatagccccgctcacacccttagacccaaacaggtgctggttcatgctttctccacaaattggcagttgggtacttccccactgtcatcacagttgagctcattttaacatatattcaaagaagctttttagtttctactcctgaattgtagtgttcaagttatttgccttcctgggtaagaaaattttaacccaagtctgggattctctggcacctgtcttttcccatcttttaatgagttggcaagattaggtcaaatttcaatgctaaatttgattttttgaattttaaatagttgcactttatttcatgctgaccaccaacttaatttatacattttaaaataaaattatcctagaagtgttgtaaacgtgggaaaattttaattagtgttggaggtcattagattggacccaggtttaaatataatgatctcttcacagcttatttgatgtttaagagcaacttgtgtgatcttagctttgcaggttttctgtaatttatgtagcacaataaaggataaccagttgactgtgttactggactctgagttctcacagctagtttcatctaagcttggtttattatcatttctgctttggatttttttgtgcatcacatgaatacttagaaatccatttgttttcagtgtagtacctagggtgaagtagatgctgcacaagtaagtttaagggaataaaagtcccgacactttatatacatgttgaggggcacgatttaagagactgaaacagtttacattaaactgtttttattttctgccagtagactctatctgcttaaaaaaataaaaattgttcaacccagtgttctccagcatcaggacattacagttgtaatctatgttgtaatcttttcaaataagaaaagctactccttattctctacagtgtaggcttaattttagaaccgataatttactatatctgcattattgatatttttaagtagtagttttaaaaataattatttctat

SEQ ID NO: 95926 - DNA, 1065 bp, Homo sapiens
aagctcgggaagaccttaaactcaccaagtgagagtataaggaattggagagtttgtttaaatggatgttctgattaacttaataatttggaatgtattagatatgtacattatacattttaaaatattagaatatgataaaattaatcaaagactcaggatttcttgaagtgttttgaagtcatcattacgtgtatttgttatctttgtctataagaatgtatatttttagggtttttgattctggacaacttgaaagcatctaaattttcttcctgtaagtgcttcttgagggtttatcagacattccaacatgagatattttgtgaggatagttttcatactcatttcttatttgataggaatcttaagagttttgtttactatttcattaaaatatcattggatatgtggtgaaaagcctgagattgctgtgtaagagactggaaagaaatttcttattacctaatgtttgaagtatgaagtttcagggttgttgatggacaagctgatagtaggagagtagaatttgtaaaaaaaaaaaaaagaggtttttaaaaacgcagtgcagtatggaggagaaacaacactagcttttaaagtggtggaacaaatggctagttactgatctggaatggtttcctaaactttgtatgcttagctgggtgtatgtgatgcttgatcaaatttataaactagctggtctctcatggggacaattgtagtgaaacagctggagatatagattggactttttgtgaaacaagaacagttgtcagccaggtgcagtggcttatgcctgtaatcccagcactttgggaggctgaggcagacagaacccttaggccaggagttcgagaccagcctggccaacatggtgaaacccatctgtactaaaaatacaaaaattaaccgggcgtggtggcatgcgcctgtagtcccagctactcaggaggctgaggcaggagaatcacttgaacctgggaggtggagattgcagtgagctgagatcgcgccactgcactccagtctgggtgacagcaagactccgtctcaaaaaaaaag

SEQ ID NO: 95927 - DNA, 1019 bp, Homo sapiens
gtacatagtgctattttgatgcatgtatataatgtgtaaatgatcaaatcatggtacatgagatatccatcacctcaaacatttaggagtaaatctttagatcttagatttggcaccactttctgtttttttgtttgtttgtttgtttgtttgtttttgatacggagtctcactctattgctcaggctggagtgcaatgacgtgatctcagcttactgcgatctctgcctcctggcttcaagccagtctcctgcctcagcctccggagtagctgggattacaggcgcctgccacacacctggctaattttttgtatttttagtagagacgggatttcaccatgtttgccaggctagtcttgaactcctgacctcaattgttccgcctgccttggactcccaaattgttgggattacaggcgtgagccactgcgcccggcctggcaccactttcttacatatgatataaaaagcatgagcaactaaagaaaaagtaaataaattggacttcatcaaaatgaaaaatttttcatttagccttcaaaggagaccatcaaataagttacaagactgtcacacagaataagagaaagtatttgcaaattatatatctgataaggaacttgtatctaggctatataaagaacacccaatttaaaaatgggcaaaggatctctatagacatttctccaaataggttatataaatgaccagcaagcacatgaaaagaagctcaacatcataagtcatcacagaaatgcaaaataaaaccacagtgagatacagcttcacaccaactaagaaggctgaaataaagtcagataatattaagtgttggtaaggatatggacaaatcagaactctcagaccctgctggtaggaatgtaaaatggcgcagctgctttggataatagtggggcagttattcatatagtaccacctgacccaacagttacatttctaggtatatctccaagagaatggaaaacatattgcacaaaagcttgtaacggatgttca

SEQ ID NO: 95928 - DNA, 1080 bp, Homo sapiens
taattaatttatttagagacagagtttcgctgtcattgcccaggctggagtgcagtggtgtgatcttggctcactgcagcctctgcctcccgggttcaagtgattctcctgcctcagcctcctgagtagctgggattacaggcgtccgccaccacacccagctaatttttagtagagacagggtttcactatgttggtcaggctggtctcaaactcctgacctcaggtgatccacccgcctcggcctcccaaagtgctgggattaaaggcatgagccaccacgcccagccccagcctccaattatcagtaaaagctctgatcccctaatgctcaggctgatttgagtaataataaaactccagtctcccacacaaccagctccgcttgaattactctttctccattgcaattcccctgtcttgataaattggttctgtctaggcagtgggcaaggtgaacccattgggtggtaacaataccttgatgaacttaatcattgcaaagaggaggtgaagtgagggctggatctgaaagaggtggtgacctgaaataaatttgttaggtggggataaagaacatgagtagcaggtactggtgtagatacagatgactaatgaatttgtagtgggccagagctttgtgggtctgttttcactttcctgtttccagtttgttcattttcaatagctacaaggtgagaaaaacattttatttttaatttatgaaaataaacaagacattgaacctgtaatcaagatctcacatccatattctacacactctgaccatcctggaccttcttactgttgcctaaacatgatagacccattacaagtctatgctggctttacactaattagaattatgggtacaagatagtacagaggaagcaggatttattctctgtgggattattggaaggcaacactgatatactgattcttgagaaaccagaatcaagagttcattagaagggcgcagtgtggtaactcacatctgttatcccagcaccttgggaggttggggtaggaggattgcttgaggccaggagtttgagaccagcctgtccaatgtagcca

SEQ ID NO: 95929 - DNA, 1027 bp, Homo sapiens
atttgtttttggccttaagtgatttattagaaaactgtaatgtcttatgcattatctgccacatgctaatacttttggtattgcaagtcctcctttcttcaagagatcttgtataactaaaaccttcttttgttcaggcttgttgatcttataaaccacttattgatttacttattatcttgccatttcagaaaaaagccaaaggacaagagttgtttgatcagattatgtaccacctggacctgattgaaagcgactattttggtctgagatttatggattcagcacaagtagcagtgagtaactgttttttggaagttttagcataaggagaagaaacaggaaatttcagatgatatactaattgctataaggcttcctattcttgatgtgttattgtgatataaagctttgacaccgctccctccccccacctccttgctttagcatcacctgaagtacttgttttaaaaaatgtgagttctggtcctaatttcctaacctgaattacaagaacaaaagttttcaggatggggctccagaatctttgtttttaataactgttgtctggattgttgggcacacaagaatttgagaaacactgtgtactggaaagaatgctagaatgggagtttcatgggctcttgggtaaacaatagtagtttttaatttgcaaatgaagttgagtagactaggatatctctaagttccctttcagatctgtgattctgtatctataaatagtggtacttcgacatgcatttctgacaagagaacagcatacataatggagtagaaagttggaggctattcaaataactgattactatattaggattttactggaggatgtttgaaagaaagtggcagatgaaaacattgggaggtggtttagtggttatatcattcaaactgaatgcccaaagtattaaataataaattggcaatatttactctcaaataattgggattaggtagtcttcaagcagggaggttttattttccttcaggaagttttttgtagaga

SEQ ID NO: 95930 - DNA, 1118 bp, Homo sapiens
gggtgagggtatgtatatgttagtgttttatggacactccctacctgattctttgtttggtttacttatggctgttatgtttgtggttacatattatttatattttaagatacaagtagataattgttcttccatgcctagttcgataggatgctaagaaatgtggctttctacatcctttgatatatctttatcaattaaactttaaaagtgggaaatagaagggaagttgtctcctttttaaggtacagtgaagaaagagaatcttactagtaatctatatctgtgtgctttcacttttatcttctagtgtaatataaactcaactcctaaagaccctgattcaaggaaaacactatcagtgcctgtctctgaggcctgaattttccaggcctcggtcttggaatgtggaggagatgaaagaaaacagacttgagaatatgcaaacatgaacccagacctttcccagaagaacatcacccagaactcccacagctcctaaatctcactttaacatgtgtttgatgctttatctgagttttgggtcatcttaagggagtgcaggtattagaaactattatatataagtagaaaagagatgaaaatgcctgcctggaagataactatgatcctttttctcactagggtgattttatgtttatttatgtacttacattttagagatggggtcttgttctgtcgcccaggctggagtacagtatcatagttcccttgaagccccaaactactggactcaagcagccctctcgcctcagcctcccaaataactgggggactgtaggcatatgccaccatgctcagctaattaaaaaaaaatttttttttttggagaccggtcttactatgttgcccaggttggtctcaaactcctggcctcaaacgatgcccctgccttagcctcctgagtagctatgattataagcaagagctactgtgacaagttagactagaaaggtatatttgtgagactagtcctaaatagttttaaacagggagaaatttaagttataactgtctaagaaagactttagattgttctttttttttttttttgagatggagtctcgctcactctgtcacccagactggagtgcagt

SEQ ID NO: 95931 - DNA, 1055 bp, Homo sapiens
aaacacagtggaagcatgtctaggcataatatatcagccttttgagatatttattaaaaacttgttcttatacactattttaatatgtctaaagtgacacataccttaatttaagtgcctaagattttaattaatataatttttaattacaaacacttttactttttaataaacacgaatattttaacttaccaaaagatttagagatcacattaataatgtggctcatgtatagagaaatctgaatggttagttttgaatggttaactgattaacattcagttatcataacagttaaccagtggttaactgaatggttacattactactgaatggttctataaaatgaaaaacatatttactttgtcttttcatttgactggcttttctctttcatctcatacacctgacagattacccaggtttgcaacagtctcataatctgatcctgtataacctttaaaataaaattctgaagccaaaaccatatgatttttagattgtattactatttttgatcctttttaaactttagaatttcaagctccttggtttaattaatagaagtgaattagctggaaaaagtccatttctgataggaaaacatgttaagggaagcatttcttctgtctttttttagttttcttttatattttagaaaaattttcaaatttttaaactatgtacatagaaatttatagatattttatatttcgaagagtttataatgcttcaagataatgaagcttcattataaacagcttaactcatttaatgcatcctgctcacatagaggttggttttatatctcaaatccttcctgccagacaaagattaaggtttcagagggcttaatactggactattggtttaatactgaatggttggttgcagtttgtccatagaagacctaaataagcagaactgactaatatttaaagaatgaaatttgtaggcaggtttcaatctgagtttagtataattatgtgtaagaggatggccactcaaagtatttagcacatcctctaaatataaatagatctgtatcttaaata

SEQ ID NO: 95932 - DNA, 2212 bp, Homo sapiens
caatcacagatatcctatggagatttaaggatgaaagccctgagttgttcttgggttcttggatctggactacttgttatcttatgcttctcacttctggctaaaacttgcacctcttcttctcttagctaagccccaaaatgaagatttccttcagaagtcttgttagcagaattatttatcagtcacagagagaaaaatctgctatttttctaagtaagagtctcgagaagcagagtttttgtcttgtcattgagaggagtcagcagtcttgttctgtaaaggaccagagatggtaaatactgtcccactcagctctgctggcgcagtacagcagcagcagccccagcacagctgtgttcctgcggagtcccctttacaaagccgctgacccctgatgtgaaactttgtagagcagcagagtggctgcgtgaaacgggaggctggcaggtcctcagataggttctgcagtgttacctgtcacttggaggcagccaacacttctggacattgcatccttattcacacatgtggcagctgaacgaggtgctgttgtgggtgtctcagctctgagggtctttgtgagctcccactgttgtgggtgtctcagctctgagggtctttgtgagctcccactgttgtgggtgtctcagctctgagggtctttgtgagttcccaccaacttttaattattcatgcccttgaccatgtggttgcttggagacctggggtcttctgcagactgaagaagacacatttctagattatttgtcctttttatcctctcaaaaatttaaacactgtacctcttcagtggtcagaagaaagttggaaacttttcctacatattaggcgttagtatgaggacatttgtttgaattatagaaatttgccctgagctgaactgggttgtgttaacacattggtagagctatgattccttcccagttctaagagatacgatctgtaagtccctatgtcaccacattgcttgagatgatcattcagttacttgtcaggatttctcctcttcagagagatttttttttatagcacagattcctttgccccttttatctccttatctggatatgataagtggttatgagggtctcactaactattttgtgtttaccttttatatgtgtaaaactttgcagtagcatttaaagtgtaatttatttttctatcaagtgcactattcatttagtgtgttccagttttatatgacttgtattagaaacactgcactgagttgtttgtacactgaaatgagaactctagatgtaactctattcaaataaaccttcgtgagacattcatgtttttgtgcactgtttctgtttcttggaactgtgattcctacatgctgacctcaacagagttagaccagatccactgttggtacaaacctgaggaagtgagcagaagcagccgcactgtttttaggttgatttccatgtttttgtggtgtaaatttgggagtaggggcattttcaaaggttgaaaacctcattggtcatccccagcatatcctggaaggcacggtggtcattccaaggacagcatggtgcagtatcaccacagctttggacatcggatctgggctctactgcttaatacctcaggttttttgtctgaaatggcacatgaagtgtgtgtcacagcgtgtggtagagtatgcaggtgttgacttctccttctcttggcgcccaccagtccccagccttctctgggtttgcactgcaccatccagcgaggaacagtgccacctgggttggtttcaggacttctgctgggcagagtcatactgcaccatatgggtgttggcaaagctgagaaaagttggaagtcttctctttccctctcccctctgttttctgcctgggagagaggcccagttgggccctggaaactaaggagcttttctctgctttttggagatgtatggagaggggctggaacccagatgcaatcacctgtaccaggagctcttctaagaggaagtttttggcaataagtaatgaaagccaccaataagtagcgaaaacaactcactggagagataaggactgacaggaagatggaggatgggcagcagtggaggtggagggagtgtggatggtgtctccacaggtgctgcctttagagggcaccctggccaggctgtggttccccagaaggaaggggaatggatactgggctaccaaaa

SEQ ID NO: 95933 - DNA, 1049 bp, Homo sapiens
tcccaaacctggaaatggaaacaggcttcaaacactcgtctcacgccgtgtttgagatcaccgcctcatcagtatgcatcatagatggaggtggtttcagtatgtgggtgtgtgtgatgtgtacctgggtaagagacttgctttccaggttcgcactttcaggtgtagctgggggcagtaagtcgaattgttttagtaggtcctcaaaaggaataaccacacagctgtttgtttaaatgctactgtacctatcaaaactattgtttaaaaagtatttttatacactgctaatctaaaattgtatttcagattgtgcctgtcataacaatagcaaatgtaaaaagttctctttcccaccacttgtttataaacctcatagttgatatttttagtgttcctactgttaaaatactctctccttgggctttgctgatactggtctttaatattctgataggtgaatttttctaatggaatgaacccatgcatatatagtatttatatgaatattttagcagtgtaatatgttgaattctagttctctgcattaccattattacgttaaagtattttttaaagcttaggtgtgaagatatgtgtctattgcagatgtccttgaaaactgcataaaacagtatgtgcctggtgtggatcttaccaaagtactaggcatgaatgtagggactgcaaatcccatgggtcttaatatttaggtgttagtaaccaaggtctctggtagtacccgttagtagaggaagaggccactgcccttgggaacttgtgacaggctctagtgtggtaccaggccataaagtgacactgttatttagcaacttgaatttttccacacaggtagtaactgtgtggaaataagcaacaagtggtttgtccatttctaagaatcttaaactattagttggctgtagtgtgaagcattacttgtcattggaaagatggagagagtggccttaaccggaagtggtcagtagaagcaggtgtcattttaagggccaaactttaatctgtcagcaatagggaaacaactgttc

SEQ ID NO: 95934 - DNA, 1108 bp, Homo sapiens
cgcgagcgccgagcgtcgcgagggagcaggcccgggcaggcaagcggcggcctccgccatgaaccccaggggcctgttccaggacttcaaccccagtaagtttctcatctacacctgcctgctgctcttctcggtgctgctgcccctccgcctggacggcatcatccaatggagctactgggccgtctttgcccccatatggctgtggaagcttctagtcgtcgcaggcgcctccgtgggcgcgggcgtttgggcccgcaaccctcgctaccgcaccgagggagaggcctgtgtggagttcaaagccatgctgatcgctgtgggcatccacctgctgctgctcatgttcgaagtcctggtctgcgacagggtggagaggggcacccacttctggctgctggtcttcatgcctctcttcttcgtgtcccccgtgtccgtggctgcctgcgtctggggctttcgacacgataggtcgctggagctggagatcctgtgctcggtcaacatcctgcagttcatcttcatcgccctaaagctggacaggattattcactggccgtggctggtggtgtttgtgcccctgtggatcctcatgtcgttcctttgcctggtcgtcctctattacatcgtctggtccctcctgttcctgcggtccctggatgtggttgccgagcagcggagaacacacgtgaccatggctatcagttggataacgattgtcgtgcctctgctcacttttgaggtcctgctggttcacagattggatggccacaatacattctcctacgtctccatatttgtccccctttggctttccttactaactttaatggccacaacatttaggcgaaaggggggcaatcattggtggtttggcattcgcagagacttctgtcagtttctgcttgaaattttcccatttttaagagaatatgggaacatttcatatgatctccatcacgaagatagtgaagatgctgaagaaacatcagttccagaagctccgaaaattgctccaatatttggaaagaaggccagagtagttataacccagagccctgggaaatacgttcccccccctcccaagttaaatattgatatgccagat

SEQ ID NO: 95935 - DNA, 2408 bp, Homo sapiens
ctgacgcctgtaatccgagcacttggaaggctgaggtgggcattgcttgagctcaggagttcaagacccgcctgggcaatatggggagaccctgtctgaatttaaaaaaaaaaaaagctgctgctgcatggcagtgacagtacgatgattctgtccttggcttgagcagttgtgtgatacgagcagttgtatgagagatgtttgctttgtataattagaattttttaaggttaatttttcttatttgccccagagctattgtttctgttgacatatggtttataaaaatcagtttgactttgtgctttaaaatgtaactacatatcctgcttagtcaaattatttcattgaatccttaaatgctgtgttcacagtgtcaggttaacaaaagaaaaaaatcattaaatggctctttcttcactattctttttactctttactcctcacccccaggtgttctttgacctaatgagagaaatcagaacaaagaagatgtcagaaaacaaagacaagaatggcaagaaaagcagcaagaacaagaaaagttttaaagaaagatgttgcttactatgagtgtcaaggtgacggatgaagccagctgctcctaaggacacagggctgggttggtaaagagaaggctatggttgacttcttgcttgtgcttcccactctccccgacttcattcactcaaacttctttaaatggggaaaaatatttgtgactctgtggctggcagaagaaataagcccatgcaagtggaagggctgctttgtcaggaggttgtggaatttctttcttctccccttcttccctcccaaaagcttagctatgtataaagtgccacagataggaaacagctgttaattacaaagagaaagaattgtcatagcatcttattttgttcctagttttataacattaccatccttcgttttgaactacagatgttgtagtgggttttggaggagggagtggagtaagatgccctcccacttttatcagtttagtagtagtactgagaaaaatcccttcagctctaagaacactgaaaaatccaccgattttttgggtaagcttcttggcaataccctgtggatctgaaacagctaaaaaaatgaatttgaattgcgccagataggtcaataccaagcttctgattcctcctcacatatgaaaagtgaaagttgtgagttgttttcctcttatttaaacattggcctattataatctgtgttggttatttttctcctgtaagcatcctgatttttctgtaggaacttttctttggcagaccaagtgaagactcaggaatggtgtgcattataaatgacacacattgccacttgtgtagatatttttaagttctttggctaagtcctctcctaactgcctgtcctctggttaggcccctccctctccactagtggtgaatgcatgtgtctgtctgatcagcatcactgcacacggaggtctagtgagcctcttgctaagtgtcacacacactcttcccaaagacgtgatgagttaaagttgtattctgaaatcatgaagccagagcctgtgccagaccttctgctacctctcatagaattgctctgtaattctaaatttaaaattagaagtagagagagataagccatcgcccctttgcctctgagaattggctgctgtttctaatataattattttctaagatagccagatagttagaaaaagattttcattgatgacatatctttaaactttcttgcatcagtattctaaattgagcaaactgaaagattttcatcaggaaaggagcactgtgggaagagcccagtattcacattttttccccatttttcagaagcgacatttcatatataggtgccaaaagtgaatcggggtgcggagagtgggaaccttttgaatttatgattgtcacagagatggtagaaattatgatctgactggaaaacaatcctgtatcccctcccaaagaatcatgggctttttttttgaataaaaaagcagacaaatagactttctcgggatttcagcctttttattttatccttttgtcatacatgtgaaatgcaagtactgaaggaatggccagttattcattattcttgtcaggcgttcttcaatatctgacaaactatttcaattaatacttgagttgaggcaaataaaatggtaagtattaaccgtcctttaaacttcatctttcctccatctcttcttaaaatttaaaaagttgatggtaatgacactcttgaatttttgaaacaagctttttgttttcatcctagtttgccatccatttgataccagttctagtcaagagtgggtaagtttgagccgatcacagtggctcacgcctgtaattccagcactttgagaggctgaggtgggcagatcacct

SEQ ID NO: 95936 - DNA, 1092 bp, Homo sapiens
attcttagaatatcatttctttatagttatttttatttttgattacacattatgtttgcatatttattcttttttctttgatccacatatttatttagtgaaacagcttttggtttccagcagtttatcttttttactctctatccttattttattatttctttccttctttcctttgttttgctttattgctattttccaaccttagctcatttgtttcattatatcttgcttcttgataaaggtacctaaagctatatattttcccgtgagtacttactttagctgtgtctcaaaatttgggcatatggcatttttatggtcgttcaggtctaagtattttataattgtccctggtgatttcctctttaatccaggtgtaatttactagtatgttacatatttccagacatacagaatatttgcagttatccttttgccgctgatttatgattttattatgtggtaatcagaaaacataaattatgtgatgctggttccttcaaatgcatcaagacatcctttgaggcccaggatgaagtcaatttttgttgagtgcatcacgcgtgcttagaaaaaatttgcattctctgcttgtgcaacattttatatgcctatgtaaattggagtttattaattgtgtctatcatatctttcttggtctgcttgacctgttcagtgaagtatatgttaaaactgactactacaattgtttaccaaagcaatctttctaacacaaaaattcaaccacatcattcccgttgctttcaagaaaaaaaaaattagaaataaaaaacatgtgcagctcagactgcagtaaggccctctttgcccaggcctgacatgagacctccatcaggtcatctgtcctccaccagcgccgcctccctgacccacaccccatggtcacagtgaattccttgccgtgcatgaactggagtaccacgctccctctcactctctgtgtttaggcaccgtgactcctgcttctggaattttctcctgaaactaacctagcttctcgtaagtgcccacttgcccttcaagattcagctcaggtttttccaacctcatccgtcgccgtgaccccac

SEQ ID NO: 95937 - DNA, 1051 bp, Homo sapiens
gcagggacacactgagcggccaggctccctttgagttagagcatctgaagttctgctcccacatcctctgttcccaaggatgtgaatgtggtccccagggcttgcatcctggctagaggagcacaagacaccccctttgcatggtgacctccctgcggaagagatgagtaatgaagctcagcagcctgcccaagcaccaaggaaaaaggcgtccatcatcttaatggtacctttgagctgtctggctgacctgcggcctcttcctcataggcacccctcccgaaagcatttgatgtgagctattcctggcatgtcctgtggtacaaaagtgcggttcatcttttcaaggagacgtgaggaggttgaaagtcaaagccattggaacaaaccttggctttggaggagagtcaagtgcttattatgcaagtccttgctctccctcggctgaaggcagcacaatgagcaaaacagaattttggggggatttggcaataaggacaaaaaggaaacaagatctacgcagtacataccgtctccacagggagattgtggctcttgggcactagcccacctagagcaagtcagtctccacatcacctaggataacccaggtagggagggaacacgttgggtcactctgccctggaaaggtttaggggaagagttggggttctgcatggcctggccttggaagagagatgtgtatccctgctcccatgcccatggccaccatcttcatgcatgcagtggctgatactgctgtgaagacaggcttggactggggctggagaaatctctactcttgttttactgagagcttgaacctctttgggtctctttttacattataggacaacaggcctcatatatactagtttccttctccaccagaaaggggccagaagcaaaggctgataacagtgtctcttggcagaaaagttattttagcatcccaggagggcttgctgaaccatgaccctttgtcctttggagaaggaaggcagggtgttgcccatcagtgaggatgtgggtactggggccacccagggcc

SEQ ID NO: 95938 - DNA, 1066 bp, Homo sapiens
tcaacagggcaattttttaaaaatttaatttaattaatttatttttttgagacagagtctcgctccatcacccaggctggagtgcagtggcgccatcatggctcactgcaacctccatctcccaaggggtttgagagattctccagcctcagtctcccaagtagccgggattacaggcgcgcgctactatccctggctaattttttgtatttttagtagagacggggtttcaccatgttggccaggctggtcttgaactcctgacctcaggtgatccccgtgcctcggcctcccaaagtgctaggattacaagcgtgagccaccgcgcccggcccaacagggcaaatttaactgaacttacagtacaaccacccgaagctctgggaggatggcagagtgctctgaccttagactagttacttaactttttaaagcatcagacttcccacctgtaaaaacacgagaagagaaccttccttacagagctgtgaaagtccaataatacaaagaaaatataacatcacctggcacttggtagagtgttctacaaacgttaggaagaataaaaccagaaattccccccaagaccctcttcgggtgaggcccaggggccctggagagggtggcaggcccgggggtgtggggaggacactttagccagctgcccccaattctcctccaagcctggcggcccagttccgggctgtggtgtggcttgagggcccagggctcctcactgagcttgcttaagcaagttctttcacacacagccccatatacactttggctagaaaattcaatgaggagttttttcttccttctttctctgttgttgttgggttctgattacttccatctggcttcagcggctcgagtggagtctctaaaacacacaacacaacaaaacaaaaacccaccctgcaagccacatgcaccaaacctagaaggctgcttcgtttctcgccagcgtgtgctcagatggcgacgagggctagcggcggcgggggacgcctcaggacccccggcacctgcgctcgctgcccgcgggaagagggtccgcgtggac

SEQ ID NO: 95939 - DNA, 1693 bp, Homo sapiens
cccggcacaaggcagccagccgagggtcgccgcgccagccaaggtgggatgggggcccacagccaccgcccggcgcccgagaggccacctgcgtgctagaggcaaacttttgtctctctcggtaaagttgcattggccttcttttgcttgcttttcgtgacgaagcgcctcccacctcggccaagcgcgggccgactgggatgctgcgccgtctcggggggtccctcggccgggtaccggcgcctaggccttgggatcggggccctgggcttcgggggactagaggctagtaggcgcgaccccgcctggggctctggacgagcagggcggggacgtaaggagagtcctggggcttggagctcgtggccagaggtcgatgttgcaccctctccctacctgggggagagcaccactcttctcggggtgcacagcgagccggcctccgcgcgccggcgggggtctgttttttcagggggtggagggtgggatcggaggctgggatgctccgaagctgccgtaggtgggcatgggagcgtgtctgcgggcgtactgagcgcggaggggctgcagccagccacttgagaacttcgaactccacttctccgcgctgcgcgtcccggagccctgcctttctttcttccttcctcaatccttcctccccctcgcccggcccggccgccccctccccctctgctgggctctcctcctcggccccccctctttgcctctcttctcctcctctcctgccctcggccctgagatccgcttgacttcccaaagggatccgcacgtaatcctttgccgggtcctccggttcccccttccacctcactttcatccctgcccccctactcatcgtctctccccacccccgacaatctctcaacaagtatatttgctgaggaatttgaaaaatccactactgcaacttgatctgtatgtgatggatggggagaggcgcggagagagttgggcgccaatcctattaagggtttagagaggggagtcttttccccggacggggcgggggcggggagctgggagggagcgtgtgcttgcgtgtgtgagtgtgagcgcgcccgccgcgctggagagctgggagtccacccagctcggcgccttttcagcccggcggtaactgctgtcatttcctaggaaacccgacttttaccgcgcggggagctggggatggagcccgtgcgcctcaccctgggtgatcggtcgctgaggctctcggggacctcgagcccccccgagggtgcctctttccactaccttctcttttgtgtaattgttctgtggctcctagagttgatcccagctggaaaagtagacctgtccctactgtctggtcccgcgccctgggagtcttgtaggcgtccctctgtcccccagcccgggcatcccgctcggtgcgcgacctctggcacgggctttgcagctcggtggccgcagcggtgtcccgggccccctctccgccgctcttgccgggcgtgtgaaggtttaatcccgacagcttcagataaagggagcagttgtaaaacgctcataggctgtttgcagacgaggctctgggggatgtaggagaatttgaaagtaaacgtttccctcgcaagcagcataaaatagtgtttaaacaaatattgtattggcatgctcagggggctcggtgccaaaaagtaaagtaaataaa

SEQ ID NO: 95940 - DNA, 2341 bp, Homo sapiens
cctgccagctttctctccgcccatttccttaccttgctgggagttcccttggctgggtttccctgtgtctggggacaggccctccctggggcctgggaacggctttgcagttgcttgtttagggggaagctcacggtgtggctacctgggcctgactccacagggacggggggcaccttggctatgcctggctgctttgagtttggaggctctttatttaggcttttcccagcttctggtctgtcctggggcagtcattctagaatgtggaatccagatccatcaggggccttctcttctttttgactatgcttcttgtgcctctttcttcatcgttcttgcttttgttttcctagacttgctgcttctctcttgagggttacaggaaattgtggagatgtttttccctgggattcgaattccactcaagcccagccatatggaaagttgtcgcttgtctgatgagttttaaagttaattatatttggtaagatttagggtggttttattttctcctctgcttcgagaaatatgccagtttcacgaaattgtttcgtgattttaggggatttaagctaatacagggaagatcctgcatttgaaagagcccagctgcccaggaggtatccctcaggtgaaccagccttcagttgggctagcatctgagtgagagactgtggtcagaacggtctatttgcaaagcctcttggagagaattagaattataggtagaaagaattagaatgatagtagaaagagcctcccaagccaccgaggaacaaggtaagactgctagagatggttttatcctctgtgggaatcgatttgactgaatttgcagtgggttcagattccttcagcagagacttccgggctgctcccaaactcattctgctctggccttgaaggggactcttgactcgtggcttccttgaagcttgtgtggagttagcgaggcccttgtggccaggcagccttggagtggagtgccacttcactctcccagggatgctctggtccactggtggagagagcaccgaatgcagagtcaatcctttgagttgcttggtcagaagagggggccgcagggcttctggtcagtggctcattgcctggctgcgggggtcttgggggctgtgtactgtagctggcttgtttgcactgcagactgaaaaatacacaaatacttcacgctttttgtactcccacaagtgccctgtacacagtgcagcccctggggctggattagcaaaccagggattcagcaggcaggcagacaaaattggatatttgcctaataaacacccttcttccattgtcccccacccctgccccgggggtactccacgggaaaacttcactccacagatgccagcagttccctttaaatgggagtaggaggttgtcatgtgcactttgaaagcttgtgtgaccccctcacacccagctggcttgttaaagcctagaatcggagtcctacatccttgtgtactctttgggtagggcagctggccttttcctggggaaagtgtgtttagcccagcttcctttcatctgcatggctcttgcggcagggaggtggagcaaaccagccttgcttcttggaggctgtggggaggagaaaggggttctacctgggccagagcctgtttcctagtggacaaggggcagccaggccaggtggacctcgctgtggacagctgcagctgttcccgctgggccagggccctttgaaaaggaacccgggggagcacttcccccctttcttcttttcactaagtgtcagaggcatggacaagtgaaacacgtgaagaatgccaaagagagaaacagtgttttcagattccagaaaattcagaggcagaataggtgattgtaccaacaaccagaatgtacagtgatttcagttgctcctgaaattgctcctgcacttctaaagaaatcggggaggaaaaactgctctctaattgtttcctcaggcttgtttaacagatttgagaaagggtcatccgacattgatgtttgagagtgtcctttgaaaaagagtggcaccttcaacacttttctggttttcaaataaacacacaacaccggattcaacattaatcattttctctgaaattaatttgagggtttgctgtggaatatcaagaattaaaaaaaaaatcattgattattatttttaggtttagaggatgacaaaagcatccttaacccacaaaactgtatttaaaacctgggaaaatgcacagatgataacggtatactttctgtgcatttaatatcttattttcccccaattctttcatcagcacagtaattctcaataatcctgtttgtg

SEQ ID NO: 95941 - DNA, 1403 bp, Homo sapiens
cgcccccgccgtctggaccttcctctccctccgcgccggcttttccgccacgcggagcgctggctggcgaggccgcgtgtccgagcggcgccgaccgtgccgcggccgggggacattccgtgccccgagcgccccgggcccgcggctgcggccctcccacctgcgcgccggcctggtttgcagctcccaaacaatggccacattgtcgcagccgcacaccggccgccgccggcgagtggcgggaggccggactctgctcgtggcgagtcgggaagaaagccaacgggccaggtccccacagccgcgcccggagcgcgcgagcggctcccacccgggaagggcgcgggttccgaggggcgccccgggtcttcctcgaccccgtttcccattggcctgccctcttgcccgcttccccaggaggggcttccagttgcctttacagctggcgaagtgaatgagagcactccacgggagccgggaagagagaggccccgtgaccaaacttttggtggcgtctgaaactttttctgtaaggcatctgcagacagtaatcactaaggccgccttctgcccttgtccactcccggcgacaggaaaggaagggcggtcctctcttccattcgtcttgacctgtagggattcgaaacctcttagcgctcagaaaaaagatctttgaatgcctgatgttaaaagagcgtccctgggtccaagatagccccttcagcagacgcttagcaatgcttctttgtgtgctggacaatgcagtaagtcagccagacttttgagccacatttataaggaactgtaagggccgctcaagtacacttgtgctaagttgaattgattgaaatttaatggcggttagtggcgatgaatggtaatgattttccagcgtatctttggcatacttgacattaataactggagtgtgtgtgtacgcacgccgagagcccgccacacacgtgaggccgtagcattattcattttccgaggtgccagtcctttctctcctcaaatccttttccatctcaccataattcagttgttaggatgactttaaaaaaaaaggaaagagggaaagagaaaaatctttctccattgagcacgtacatcatgtcaacgtaattttgagctcatgatttcttttcaattcctacataaatcagcttctaatatatagaatgtgacgaatttgttttagctgccatcatgaattaatgttatgcaaatagaagctgtgcaggtgaaatgatttacttaataatttcaacttctaatatttaaactcattcattatgttggagttaaaaaaagcaagtccatatttttaaacctcagatggggagattagtatgcaaatatttgcagtgcagcaacccttgatgaccagaaaatagctctta

SEQ ID NO: 95942 - DNA, 1446 bp, Homo sapiens
ggaggacacaaatgcatttacataattccatcgtgaccatcaatgtaccatatccagtgggactgaactctctctgctttggggaccaaggaaggcttcccatttgaatttgtcttgaagaataactgtaactgccaggtagagaagggtaaagggctctgatgtgccgcctccccgctccccttcctgcttctttgtcctttgtcctttgctagttaagaccatcttaacactgtaattccaggatttggggaggctgaggtgggaggattgctggagttcaggagttcgaggccagcctgggcaacatagcgataccctgtctctacaaaaaaataaaaataaaaaaagaaatcatcttaagagccagtcattaaataccggcctatgaaggtgaccctggtgtagaaagttgggccagaggactacccagataactgttaggaagactttcttatatataccatccttcccggctgtttccctctggaagaagctaaggaagagcacaagagtgatggatggctgcaatataaagataattagcccgaaccccttggagttatccccagggactgggagacccagtcactcaatagctgggtgaccctgtgcaagttgcttcgcctatctctgggaagggggcggggcttggtagatgtcatctctcaggtcctcccagcttcaaaaccctctgagctagcacaccctgcccactggacagccatctctaagagtcaagacagcgggtagggtgggaagatcagagtctggagaaagggaaggtcttgggtaccccctggggagagttgggtgcctgtcaaggaatatgtcctgcctctccttgctggccactcttcttagccagccgctgtgctcaggtacctctgggatgtggtcacagggtcagtgtaaatgggagtggccttggggacattggtagagagcggaagcctgtgatggtcttttcagactttcctcgaggctgaagatcagtgaaggaagggctgacacataaatttgtcttggatctctgaagatgataagggtggagttttgacttcacttctcaaaaaattgaggtcgttgcagtctgatgacaggttgaaggcacatcactcagacgtttctgcagacagctgtgggttgtgctgtcatgatacattgtgtgtgtccaggcagtgacagtatatttagggctggccctcgctgtctgtggagatcaaggtgaggggacatctctggtgctcttgggcttgagagaatgcatatgttgccttgtttatgtactgaaagaaaaattggactcagtagctactctgttacttccatacttttcaggtatgtgaatcaatagttggaacaggattgtagagtttgaatgtaattcaggtacattcatctaccgaagatgtggtacataatatagtaatttacatacacagt

SEQ ID NO: 95943 - DNA, 1023 bp, Homo sapiens
aggtggctctggtggttacttgcttttactggcccccaagagaaacaagagagtatattaagttaacatgttggtttatgtgctgtaggttctgtcccaagtgtccctgggatgcctcctttctttttccatgtaaggaactgcagcgccatcaggatgctttgtggctgaagtgggaccaatttggcattggacagtttgagtaggtcttttggaagtttgacccacacttaggtttggttgaagggcctaccttgtggacacctttatggtccctaagaaaagtaggaaggagacagattgtccaataggggtgaagttgcagaagaggatgctgtgtggtggcgtcaggcctgggagctggaaggagcctgccctgagggtgagcagagccctcactcaagattaggggcctaggaacagacttttcctttcactactgtcctgcaggccttggagacctgggctcttccacacccgcagctgtgaccatgtggggtggcttctggggctttgattcatacagttttgcactgcagacttcatttgcttgatgctaatgttacaagtgcacctgggccaggacttcaagagtgcatggaagaacacactggaaacatttgaaattgtgatgtgggtgggtcctcatccaccctgcagctggttcacctggtggccatgtggtgggatttgctggtctgaagaggctcaggattccttctgtccacatttttgcagttcttctgcgcaggcagatatgtacagtagattgcaggctcttgctggcactgggggccccgtgagaagggaggtgggatgtgggctggtgccatttccatctcctctgggtctctggtgtgcaagacctgggtgccacatccttctgcaggtgcaaccctcagcccctgggcccgtaggacctggtgcccagcccatctgttttaccaagagcagcagaggccccatgatccagtgcgttgcttcttcagtgccatctctctccgtcttcaaggggccaccttg

SEQ ID NO: 95944 - DNA, 1794 bp, Homo sapiens
tttgcagatgggtaagcagggcctcagagacactggcggatctccatgttcacctgggcagtaggggcagagctctgagcggaggcaggtttgctgacccccaagccaggaccctctcccagagttggctcctgagggctgccctgggagcagctggtttgcctcaaacaagggctatagcactgatttctcaactgggcagtgtctccagggggcatttgacctgtctggagacatttttggttgtcacaacaaggggaatgctattggtatttagtgggtagaggccagggatgctgctgaacatcctgtaaaccacaaggcagcccatgacaaagaattttcagcccaaatgtcagcagtgctgctctccagaaaccctgagtgggggcacatcataggggacccctcccctattgacacaacaggactctgccactggggcttcccagggactctgacagtggggctgtcaaagcaggcagcagtactttattcaaacctagttctcacaccaggctggaaatcttaaaccttttctgtgccttgaatttgaaacagtgtggcaggtgccatcaagaggaattccttgtgtaatccatcagtcaatcagccagtacttactggaacatctgttatgtgcccggcacttattaagctcacggctgtaggcacaccttgctaacttggttacggagccggcagtctccgaaatcccagcaggtttctcaaatgtgcgtattcctccttatcccccttgcctaggacggagcctactttaggaaaggcatgatctggaaaggcatcatgggaatattggccaggagcaggaattgccccaaactcttttccccaagaccctggataggtctgttttcctggctccaggctgacaaatttccacttcacaatgaattttgttttgagctatgcttgcagctactagtcagagaatgcaaagtcctgtcagtataatgaaaagccccagagtgaaggccttgagcagtggctcttttaattaaccagtttgcctgagcagtttggaaggcttcctcaaagagagggccagactgggtcttccaggaggaggactttgccagcagaggggttggggaaggaagggcaatctgggcagaggacctcatagggcaagtgctggacagggtgtggcatttctggggcctctggtatgtgggagagtcagcgtggggttgcctccaaggggtggctttgtggtccccccggatgactcctctgcctatccatggtttagcttcaggtcatgggacataaatgtgcagaggcccaggttctttccgaggctggaacatttgggatcctgatgtgcagcaatgagattgatcatcagctttgccttctcattctccccgtcttgggtttgggctcagtttctaaagttatatctttctgtctggtgggtggtggttctcagaatgctctctactatgatccccagtcaagattataggttgagattaagattatagtgatcttgcattctccatccatccatccatccatccatccatccatccatcctcaatccatcatcatccaactatccaaccacccattcatccatccatctacccatccatccatccatccatccttccacccatccatccatcatacattcattgactgcaaggattttaaaggcctttgctgttggtctttggtgtacccttcctccccatccatgaagccaagggtcatgtcctctgtaaagtatttcctaccacagccctaggctctcacttgtctctggga

SEQ ID NO: 95945 - DNA, 1944 bp, Homo sapiens
gctaatattaaagaatataattggtttatttatattgcttttatatcctgctttttgtagattttgtcagattttatacatgtgtttatgtcatcagtgaatacagatagttttacttcttcctttataatctgaattccttttatttagttttttgcctttcactggctagaacctgcagtacaatgttgcctagaggtagtgagagttcttattcttatcttgtttttgatcttagattggataacataataaatttcattagttggttttcaactgttaaaacagttctttaaaatttcttttgtgtattttgaagctctgttattaggtgcatagatgtttaggattgtcatggtatcagatgactttctttatcatctctactaatatcctttgttctggctgcttttatgattttctgtgggtttgtagtttttatcaaatttggaaaatttttagcttttatgtctttaaatatttcttcttcctatcctctatgttctgtttctcctttggggactccagttacatgtatattaggcagcttgaagttatcccacagctcatatgctcttttttaatgttttattctgtttataataccggatagtttttgttgctatttcttcaagtttacagatcttttttcttcaatgtctaatctaccaccaattccatctagtgatttttcatctctagaagtttgattgggtcgttttgtatcttccatgtctccacttaactctttggacacaggaattcatttataactactgttttcatgctctcatctgcgaattctaacatttgtacctgctctggctcagttttgattgatgtttattttcctcatgtacttttctgcttttttttttttttggcatgtctggtaatctttgctagatgctagaatattgtaagttttatcttattggatgttgaatatttttgtcttactataaatattcttgagctttcttctaggatatgattcatttacttgcaaagtttaatttttttagctttgttagatgggaccagagcctagggctaattattccttgctattgaggtaaaatccttcagagttctctacccaaggctgtgtgacttttgaggttttccagtctggctggtgggcataggcactggccttgtctacactgggcactcttccctctcatcctctcagctggatcttttcctggccttggggcaagaacagtatgtgctgattctattctgcaatgctccagggggaccctctgcaagttcaccaatgttccccttctgttcagctcttccactggtctggtgttctgccatgcaaaacccttcttaccctggtctccctcctctccaactccatctccatctccttaactcaggaatccaccaagctctgcctggttacccctccctgtgccgtggcctggaaacactctctggaaaggaagctggggcaggctaaggctcacctctttggttttcgttccttcattgcctgatgttcattgtcctgaaaagccattgtttccatggttttgctggttatttgatggttttgggagggaggttacatctggtccctgttattccatcttggccgaagcagagagctcaccttgcacttttctcactagcagggcctttctgattttaagtggtgtgagtggtccactgtaaggatagtcctcaccctgatgtgtttaagacctgacgggagaggctggtgtggccagcgggtgtgaggagggatggctggggagaggcctgaagctgacaggggcagggacatctcaccacttatccgggccgcctggccttgagggactaggcctcacagaacatctgtgtgggctggaggtttgcattttactcctagcaccacacacaatctcagcagcttttctgagggctttgtgcacagctgagcgtggg

SEQ ID NO: 95946 - DNA, 1815 bp, Homo sapiens
cactgtctctctagaccccagtctgggatccttgggcctctctcatgtgccctcaggggacaaaaccccacttcacaccctgagcccagtccagtcctagctgccactgggagagggcagacgggccgcctgtccttttccttgcacttctaaggacagggtctccctgggctgcacagccgatggctgactttggtggtggcctcttcatgcctttgcatgaggccaagcccggaggtatgaataagtggctaaagagcgatcaacccaggggagtcaaatgcaggaactggaggcagcaagaaggcctggtgttgggagagccggaacagagggccgccaagggagagggccagctggctttgtgcccagctgactgggcagggacctggtctgtacccaggccggggctggaagggcccctcaggatctggttcaggggtgtgcctgaacctttcccctgcctgccagtgacaccttggagctgacgccccctccatcaggacccgttagggcaggtctggggaacaggcttcagggagacaggagattctgcagggtgggatgggcccccttggcctagcaaagctctttctccgttgcagtcaggtggaggtgagaagagcccatcaggcgtctttgagaccgctgtctccttgtgtttttgaagttcgctgcctgatttccttttggcacgcgctaaggcggctgcaggagactcagggaatgagataggagatgttgatgtgaagagagaatgtggaatttacagagcagcaggaaaagcactcctcctggaattcagacagcatttgtcacagtgataacgcctgttttctaaacaaaagtccctctgtgggcaaggtctcggagacgtctggagctcttgcccagctcccctctcgcgtggctggatcgtgtttccttgcatcacgatggggagggttcggaggttcacgcggcaaggctggggctgggatgagttatccctgctgttcttcagcatgtctgcagccagctgaccctctgtgacctcgcagccttcggtccagctgtggcgcctcagtttggacacatcagtctctccaggaaatgcagcaggcaagcgcgtcacttcctgccacccagacagtgtgaagagcgtccagcataccctcgcaggccccataatgtgcccatccactggacggagagggcctcacgcccctggggctgaccctaggctccccacctgtggagggaaggtggctcctggagcattttccgggctggagaggattgtgggggaagcccttgagtagaagagtatggaggctgccctgggcagagaagaaaagtcagtggtcaggagggaccacaccatagaaatgggaaagaaaggccctcccctgatagcctgaggttctgtgttcaccagaagcaggaggaagccaggaggtggtgagagcagcggaggagcattagctctacgctcagactggcctggtggcatcctggctcttctgtttaaggtctttatgcctcagtttctgcatctgtaaactagggacataatggtgaatccttgcagggtggtttgtaggagtcactgagaaaacatgacatgagagagttgacattaaagaaaccggtggccatcatcattatattattatgtgagtagattcttaagagttcagtgaaattcctgggaaaaattccagaggctgtacttagggcagttcgctatggagggcctgttcccaggtctgcagtgtcactgggcagggaccatgacagggcagctggagagaggctggggaaaccgacaggcca

SEQ ID NO: 95947 - DNA, 1052 bp, Homo sapiens
ctcctcatttccaagccaactgggaaattaagtcgcatctccatcagagcgctattagtaattttcaagaaagaggtaattgaaaagaaactttttaatacactcaccaaattggcacaggggcacgggagcagtgggagcatcttcccaccgtctgcctgtgccccccgctctgagaggccatgcccctctgcccagcccccactgcctcgcctgggtcaccctgccccagccacagtggcctgcgtgggctctggccccacctgggccttaacccaggcgcttgtccagcaagccggctgtgtgacccttggcaagttctttgcctgtctgtgcctcttgtcttcatctggaaaagcagacttcagtaccacttcaattcccatggacattgtgctgtgggagggagataaatctaggaagtgcaggcccctgtcacatcagaaggactcgatgcctggtggctgccaccactgccaccctcaccccccaccacagtcagtgctgctgatactcctcagagttcagttcatggctgtcccgacgctcctggaacctcaaatccaccccaggctcttcttccccaaactatttttactcttgtctgaagctcgagtttggcatattttaaaaattaaaagctgcagcatctaccctggaatagcagtatttctactagcactgatgatcacaggagcccgcctttacccggcgtcggctgccaggccctgtgctcagagcccctgtgcctttcccattcgatcttcacagctgccctatgcggtgggcggacttatccccgtctcagaggaagcactgagccagagaggagaagcgccctcagagctggggttcctggcgaggccactgagctctgcttgcagggactttccatgggaaggtgggctactgtgggtgggcctgttgaactgcaggtgagaaactgttttctgtccagctggcctgcaggctgagagcaggtggagaccacaaaacttgcatctggcccgctgctgggaacagaaggggctccgtctacagagtgacttgtt

SEQ ID NO: 95948 - DNA, 1901 bp, Homo sapiens
gcatcccctccctgctgtttttgtaaataactgctttattgagatgtaattcgcgtaccataaaattcaccctcttaaagtgtacaattcactgctttttagaatattaacaaagctgaataaccaccaccactatctaaaccactatcaccacatatctaagttctacacatttttatcaccctctcaaaaaaccctatacccattagcagtcgctccccatccctggcagccactaatttactatctaagatgacaccttttcatgtgtatttatttgcacaaattcctagacaggaagtggaaaattggtaacccgtggcctggtcatcaccaggctgttttactatacaggaaaattgaaataaaacccctgttcttgacttttttgagggtttggtttactgagtcctcatccttgtgtgggaaaagctggccagaggggagcagcagctgtctgcttttgacaaggcctgtgtgctccagtttgccacagtcctcaccactccctattgccccaggcttgccagccctgctgcatgactccattggtatgggaactggcagtccttgcctgagacctttgcttcctctgaggggtgacacactgtcagctgtttgccagcctttgcaccccagatccttttctgtgatgtggccccctgcccaaagcccgggctcccatgagagcccaccagactcatgccagccttaaaatctcttttcccaagagctagtctgtgtgggtggtccaggaagcatcctccatgtccatctctacacttggaaatgctgccccttgccaggactggtcgacatagggacgtgggtatgccgggaccttgttgtcttgcccactttcctacctatcacctccccttctgtgacagctcctccactccacactaatttaagctttgtgtagatatgggcccgctcagcatttcaagccatttaacctgctgtgattgaagctgtggcaattaaattttaattgagatgcacgctgcttaagcagacacaagacagctacagctattgctaattaattttcttccgaaatgacaacatttaataattatgcttcgtgacgcgtgtgttatttatgtagcctcacctctcccggtgccgttcagtggtgtccatcaggggtagttggtggtggtgtcacgtgtgcctgctggatggcttctgatgcgaacagtgcgctaatgctccggaggtgctgagacgcccttcctggcgtttgaaagagccccccagtgcctgcctcggggtggaggcattttgctcccccatgcacctctcagcagagcgccgaagggttctcactagggagagtaccccccagagtaattaagagcccctggtttgcttagttagggaatggccttcctagttaaaaaacctgatcctccaaggcaggggagcagagcgctagagagagcctggggtctggaactctctgtggacttgggtttggaacatgagggtgggcatgctgtcagagcttcctcacctataaggtgggaaggggagtgttcccctggggggaatgtgaggctggcagattccatatgccatgtcgtacaggggcacaggggatgggcaggaggcatcagccaagtaacagcagacccggccttcccccgggctcccatccctttgtgttctgcggccctggaccccaggcctcctctaacgctctcgccctggctggcacaaatcgctttcctgggcttagcctgcccaggggctgggatggtcccatcagcaaggcagggccccagctagccctctgaactggatgctgtttttccagggatggaagctcctgagcccggaccacccccatcaggtgcctgggcaggtgagggatgagatggcaggaggcgatggca

SEQ ID NO: 95949 - DNA, 1120 bp, Homo sapiens
agggtctctgctgcctgagacttggccattgaggacttgcatctggggtgtagacttgggccattgcaccccaggctggggtgcagagcccagtgtggtcagagtgggagcacggagactcactgggggtacagaagttgctgggaggccatggggggcaggcagcccccacccggctaggcccagctgtgttggtggcatcaaacacggggttggcagcgtgcagctggctcagcatggttgtgatggggcagggcttgtttttgtttggaggagggaaggtggcccagtacccactgtaaacagagctgctgccacctaactgatgagttgtgctgctgaagccttgtagcccccacagatgatggccaagaaagtggggtctgacagggctgtcctggcctcctcgctcccgattctcctccctatgttgtgagatgcccaattatttggcagccctgggcttcctggcccactcctcctcctcttcctttgtatctcagaactcgacgttagctcctcacagcgtccctcctttcctgtgactcagagtgctcccatcgtcgctcctgattcagtccctgcagctcctgccatcacccacacacagccagagaaaacaattagggggcacggtgggttacctgccgggttcctagggcaggtgatgtggcgcaggactgtgtggcggggcgtgtgaacggtgagggcaggtgctgtgcctgagttctggggcatctgagtggcaggcaggcagagcttcagattccacatgtggctggtggggtgagacggggtgaagtcaccctaggacctgtctagctgtctgtgcccagggggtatacagcaggctgggggccagtccaggtaggcagggcacagagaccttccacatggccaggtaagtgctggatggagaacctggcacacccatggcctctggcctgcttgtcttgctcctgaagctgcgacagggaagccaccaggttggcttgcaaatacaagaggctttgtaaaatatgcttccggctttgccagtggaagtgctgggttgaaccagaggaaggtgtaaccctgggttgatttggtcacttgggccaccaggcttgcccggcaaatg

SEQ ID NO: 95950 - DNA, 1025 bp, Homo sapiens
gtgtgagtgtgtgtttgtgtgtgcgtatgtgtcacgggtgtgtttgtgtttaggcaaatggggaaagaaaacaacacccgcattctttttcagccccgtagacatcactgcatggtgaaggaatgtggattcagtgcagcaggttgtgtttcttttttttttttcttcatggcacataaatacctttgggtttctcggttctcagaaaggcatctattactcaggtcttacttagcagttatcactgaagagggaagcctggagtgagcatgtgggcgggcgtgccacacacactcataacgcccccttcagctggaaggcagactccttttgaatccagatgagcagatgtcttgagaccaagaagatccacttgccgagctccagctgggggctgagagctcgccctgtcctgggagcaggcatcttcccctctttcttgcagagaagcagagaccaccatccccactgaaatatagggacccttgcccagtgtgaaaggaggaagggaggaagacagggagggaaggaggaaggaaggagagagagaagctcagcacagctccaggcagaacctgtgggagtttttccagcagcgtggggtgtgtcgtttgctccccttcccagcaggaggagggagtttccagcaggcagagtggtgtgggatgagggacatggctggtggggaggcctctggccccatggcgggtgtcctattcaatagatggtatcactgtccactacactacagacacagcagctgcagcctggagacgttaagcctgccacccgggttcccagctggtaagtggcagagccagtcctgggtcgtttccagcctggaactctggagcttgccagtctgatgcacgtttattggagatgtggttctctcctctcccagcgatgtcctgtgaaggctctttggaggctttctgtcgtatttctgagctgtgttacagcttctggacaccagtgaggtgaccccaccccacctctgtccatgaacgtcagggtcatagtcg

SEQ ID NO: 95951 - DNA, 1032 bp, Homo sapiens
actgtagaggcgctggcaccagggtgggtggaggaggatgcctggatgggactgtcgtgtcaattcttggacagagccttctgttggtggggcagcctccaggcactgctcaggggcaggccttctccagctgcagggatgataaggccaggcctgtgtgtgccaggccccatgtgagacattctgtttatccccacttaacagatgaggaaactgaggcttagggagaagttgattcttgtcgacagttcctgacagagctgggaggtgaacatggccattccttctccagagtctgcactcactggcctccagctgaatgtgacaaccactgacgtgtgcacaggtggtgtcaaagttcagtcacagcacaaagaggttggtgagctctgtctaggactctgggaaggagggtgtgagagcaagctttctggattttaaagcatggcatcctcggtagagcagagggaagaatgttcctggcaggaaggcatggggattggagagggcctgctggctttcagggagtaaatcccagtggaaacaaacgaagtcttgaggccgtctcaaatgtcaacctcaaagtaggtcttacccacagcttcccagagggaaaaagtcctcctgatactcatcaactcttatcggaggctggctgcccctggaggggcctgcatttcccattggggccctccctggcccctgttccagcccagcaagtcagtgaattagggttaattatctgttttcctggacaccagcaggcccaggagctgggcaaattaggggagcttttgtacttggaaaaacaaattcaaggagcgataaagaagcaggtgcacctgctaggatggggattttgtatggtgcccacccctggccacactgggagggtgagggctttggccaccccctcaacttgcaggcccctgggctgcatcccctgaaagaggtggggacagcaggcacaggctggccaggctgtgctgcagaagcgtgtcagacacccaggggctggaggccttcctaaac

SEQ ID NO: 95952 - DNA, 1441 bp, Homo sapiens
aagaggaaggcacctctgctcccaggaatcccaggcaccatgaaggtcacctgtgagtttgctaagaggtctggccaccccaagtccagggggctgagctgcctcagacagcggtgggtggggcctgagtactgggaggggagagagggaggaggggagagagggaggaggggcatggtcgctgccaggcagccctggggtgcgtgcagctggcacatttgaaatgtgcccagagaacttcttgcctcttgcccgccaaggactgttttggaaagtaattgtctcctgatgccttctggctctaattagagggtcaggttcgggatttactatcttaggtgaatttttggccaacttaattataacaaaagagactacacgagccacagcctctcattttactgccccaaagagaaagactctctggtttctactgggccatccgtgccagcatcccgttgggaaagtttggcgggaaggcgagacctccgctgtgtctgcacagtccatctggaggccacagaactatttctgtctcggaggaatggagagacttcgatttcttttcctccctttttgttccagtgcatttagtcaggccctgttgctctcagggctgaggcacagctcagagagcaggcagggaagagaatgcgccttttcttccggcgggcgcttgggcagcgcccctcacactttgatgtatacacagttgttgggggcttgttttggtggagaccccgattcaattaagttggggcagggctggctgagtttctgcatttctgttgggtgccaagatgatgctggggctgctggttcacaggccacgctggggccggagcccaggaacatggaaagaccctcggaggggcttaggagttggtgcttctacgagtggacctgagggcctgcggggggttgttactgtatttacttttatttttcctgcggttctaagtgggaggtcattattgggatgtgtggctcatgtcaggaaagggagatctgaggtcaaccttcaggccccttggggaggtggccttctgagctggacgatgcctctccaccctgtgccccttggacggggactctctaggccctccctctgtgaggaggggccagctgggggtggaggaagagctcttaggtggagtgggaggagccaagcgcacagggagggaagagctggtggagcggccctggtcctggggccacacatggtcttttccttcccctgggtcagggccatccttggcctgtgggggcacctaaagctgcccctctgcccatgctctgaggccttgtgagctccaggaagcctggcctctgtgtatgtctggcctgccccagggttttcagcgggaaccatccccccatccctccgccccacaccctgcctctccaagccatgagtggatcatgaaccaccatggtgcaa

SEQ ID NO: 95953 - DNA, 1492 bp, Homo sapiens
gctgggccaggtgtcctcccagtgtgggccgcaccagcaacatcagcatcccctgggaattgttagaaatgctaattcttgagccccaccttagacctactgaatctgagtctgtgggggtagagcccagcaagctgtgtttacacaaaccctcttggtgattctgatacactcctaagttggagaaccgcatgttctgactacatgaggtagggtgggtcttcccatacataaaatgggagttagacacagagctgcagtgcagagattacaggagacttctgatgtgcttacacaggcctgccagggcacttcctggatagtagctgtaacactgcctctcttagtgcaggcagtgctaaggaagtagtgagaagcagcccaggctctggaaccaggctgcctggttaagtcccagttctgttgaccttaggcaggtccgtgcctcacttttctcatctataaaatgggcatgatcttggttgtgagcattccttgagttagcacatgggaagtgcttcgaaaagtgttgggcacagagggccttgtgtgaggtccaagttgagtatttgctttatgaactattgctattcttcctaccagttttccttttctagatctgcatactctgcctgacttagaaagtttccctttcactggtaacccttgcctgctgacccgttgaggctgacagcaggtgggaaacccaggtttctggtgacttcctacttgagagtggtgggtgccctgggctggaaatcagacctgggtgcctgtcccactttgctttgctcccagggcctgtcctgggtgtctgtcccgagtgggctcctggcctctctgacttggtcttttccccagcacgctggagaccagaccagaccaaaggttactaaagctggccaagccttagactctcgtgacaatcactatgtaagtgcagggtccagggcagcccctgggctggggcctgggcatatgtatttttaatacgcttcacaggtcattgggcgcagtccgtccaaggcatgaacaagatcccttggagtattcaagagtctcagggggggagactacggtttgcagctggtagtactggcggggctgtgaccaggctagcatagctagggtcaagcactagacgactttcagcagagcgctccagtgttccaggaggcgtgtgtgctacctactcatactgacagccctcctatcttcttcattggccctgctgggttcttggaaagtttttctgaggcacagttttgcttagtggcgaggcatgcatgtctatatgggaatgctgtgcaaatagcagaatatttagacgactcattttcattgtgttggccagagctagaaaatcccctcccaccacctgccttaccacacctaggaatctgtccaatacccctccattggtacgtacctccaagtccctggtgtctttgcactctgtctttttctgtgcctccaggatgtccttgtgggc

SEQ ID NO: 95954 - DNA, 1307 bp, Homo sapiens
aagaagcttttgaaatcctctagtttgaatccattcattttacagatgtggaaactgaggtccagagacacaaaatgcagagggttgcctagtgatattacttggactggaaaccaattccgcaggaacattccatcacatgggacacagctgtccctcaacctggccctcctcctggcccaaaccccaacttcccaagtgactgtgtttatgttggaaacatttttctgacgtttggttctgtcaaaactaattttagcatttctaaagcttggtaaaaatacagcctcattactttgatgtcagtgcatagtttactattagtatattctggggtttatcattttagtcatgtttaacacggctgtgccaggcatgcactattaaatctggcttattttacattcctgtccggaattatttatttgtaacaatttcctctctatcaaaagacacagctaatgctgtgttttaatgtgttatttacacacaaaataacctatttacaactcagtatgcgccggagggagaatggatgggcccctgtttcctgcattctgttatatcagagtttaacaatctggattgctaatagaaccatttatcattacttgggagggggggaaagagataatttattttatgtttgtggccaggtctcaccgcctctgatcttgggaccattttgaggataatgaagtgaagccctgcatttggtgggggctgtggggcacccgggcctgggtgcctctgggttccctgcattcatgtgcacatcctacagatggtcccgaactgtggaccagagaggtggtgatgacagggacgttgcctctgccttctaggagcttccagttagaggtgacactcagcagatggtgacgaatcctgcccatagggcttcacgggggaggcagtgtctgagcctggggacattcggggttccaccaggtggaaagaggaaagggtgggtgggccctggtgggaggaggaggggcagagtggccccctgggagtgtggggagggaggactgggcgccatcagctcagtctgtatgtctcctgcgtgagtccatatgtctcctgcctggcatatggggtctgaaggacaaggctcctgttgccctgcggggaggcgcagagatggctggcacccaggtgggtgcatagctgatccagggtgcaggccgaggtcccggaggctccactgaagtctctttgaatggacattgaggggtaaggagggaaagcgccatttgaagctgctgtcctctatgaagctctgtgtggacaccagagggggatag

SEQ ID NO: 95955 - DNA, 1090 bp, Homo sapiens
aggacctggtaacactgctgtgtacagccctgtgacctggctgctcagtcagtcccacagaaagccactgtgcactcagatcagggggctggggagggggtcaccaaagtgtgattgcaaagtgtggcagggcttgggcaagcccctggggacgatgcagggagccatcagccccaggacaccagcatggtctgggggatggggcctgggcttggacaggtgaggtttgaacccttgccctgccccttctcggttgggtatcctgtgctgatccgaaccccagtgtcctcattttaaacgcaggccaaaatgcgtatctttggagggctaggctgaccaataatgagactccagtgcttagagggtccctggcacacagttggcattctgtacatggtagttcagctgttagtattatggttcttgctcttattatgattcttaattcaagaactgttttctgagggtagcgcatacgttccttaaaaatatttgagagagcaaatgaaggagctgagtctctataatgagttagcagttcacccgtgatgtgcaaggaggaaccacactctagcctgagaaacagcatgggcaaaggtcctggggtctgagaatggctggagaggctgagctgagcgggaagcactggcaaatgaggctggttttgtcagccccttggcaaagggctcccttccctccccgatcctggcacaagctcacatctgaggccgagtctagtggcccctcctagggtctgtgtcctccctctgctcacagccacacgtggacgctggtaactcagccaggccctgtgtgcacggcttgcttggaccacccccccacacacctccccgcccccgccaccctgagcatctggcttcttctccttctgggtgggcagggtggggagggagccagaggggctctgtcttgagaagccgcccttggctctttccccttgaatatgtcctggctggccctgctgtcagagggcgtggacctctgctttgtgttttgggggattgtgaagcttgaaaccctggcaccagacagccaggcctctgggcagagcagggcctcatccgccgtc

SEQ ID NO: 95956 - DNA, 1023 bp, Homo sapiens
gcaggggtgtggagggtgaagtctaacaccaggacagccagtgggtacatttagggctcttgtttgccatccaagaagaagcctccaagaagaaagtagcatctgcttctctaatcagcccctgggaaggagtgtggacgtgccagtggcctgagacagagataaatggtgtgcaccgaccctttgaactggctgggcctagtctgggtgcatttagtgcagacaaagccaagagccaggaaggactgaaccacacaaggccgagctgggccaggcactggcattggctaagtccttaccgagtaggtgctgggcactactggaaggaagcaagagtgcgtctctccctgcccctcctccccaaaccccactcccaacacgaatcactcctgagtcttgataatattccgagtgagtctgggccccaggcgtgtctctccagggactctccagtcccccagtgtctccgcccaggccctgtgccctgccaaatcccaaggctccttcaaggccaaattcagtagtcaattctgtttcattcaaaaggcatttagatgtttacgaaaggcctactggttagcatgttaccagggccacccggctagtaagtggtttgagccaggatttgaacttgaatccttctgagcctcccccaccttatgctgataacctgcttatctgaagcagccgcagccccccgccctcttttactgatacccacttctaggttacgtgctgggaaacatatcattttgttagaatagtttctaagccaagaatccagacgcactgaataagggcctagggggcttttatcatacactcttagtgcaaagcctctgagatgtaggtttaggggctcaggggcttcttggctcttgttgggttcctggctgcagctggtagagttgccttttaggagtgagtgacctccagatgggtgaggtttgtgttgcactttaaaagtactgatagtagatattcagagtgacagagtgccactaatagagatttttttttttt

SEQ ID NO: 95957 - DNA, 2702 bp, Homo sapiens
ggctatttttaatatttttagtagagacggggttttgccatgttgaccaggctggtctcgaactcctgacctcaggtgatctgcccgcctcagcctcctaaagtgctgggattgcaggcgtgagtcactgcaccccaccggtttttgtattttctatccaccctcgtttttaatcttcctttgccattcctcctttagcagctgaaagccaatggcaggcacagagaattctataacctgagccttgttctcaagaaccagaaatctgaaggactttgccacaggcagtttattcatctgcttgcaggcatttaccagttactgtgccagtccgttatgctggggcaaataccccactggccaagcccccagggagctcaccagctaagaagaaggactgatcagtgcaaggacagcatcttagtgtggtaacgactccaagagaagtcatttccagatacttcatcctgctgctgggggaagagaggcagggaagacttcttggaggaggccagacccagcctgagctgggtcttgagggatgaatacgggttcactaggcagaaaagtggggcccagagaacagaatacgagcacaggcagcaggatggccagccgccaaggccatgggaacctggggaaggttggctgctttgctggaggaaacctccagcagcatctactgaggcatccacccttagaaagactgaggctgatgaaggcaagtgaaggaaaggtccaggctggtcccttttgccctctgtctggttttctctgagctaagatagttctctctggctcccttaaaatcaggacagtggagcgaaggtgggtttgggggccaatttctcctcctctcagccatcccaggctttgctttcttgccgagtctaaactctcagctgtcgccctcgtatttgctcaggggcccctgttagggggactgtgcactttcatccagctggacgccggagttccctggaagccgagagggttaaatcaccaagccagctggtgagcattagttcccccctctccaggcagtaacgtcagaggctgatgctggcggcaaagaagctggtggcaggaggaggcggagagctgccttgaggcactccgggggtgggctcctggcctgggaccctgccccagcaacccccaggtaggctggctgtggatgtgtgggctccggacaccctgcggggacggctgctgtccacgccagtgtgtggacgtgtgtgcacaccctgtgtgtctgtgtttcttctctttgtgagagttagccttctgctgtggcaaaaacttcagtggagaaggaaagagtgagcgctggagagggtagctttttttctagtgggaaggggactgacttctttaaacaaacactcaagtgttccagtggccacggagcaggcagatgtgggccacactgcatcttccagggtttctctatgccacttggggtgcagtcttgagtggccagaggagcagtttgctgaggtggcttaagaacatgttttctcatctgtctgtgaccaggaggcgtttcgaagggcttgccatgtgccgactcagtaactagtgtgtggcctcccggtggtttcagatgccttgccaaggccgacccacccacctcctcgaggaaatgcaaaaagtgttttcagggcccagaacactaagcctgggatgatctgctcctccctgactggcagcctgtcttgcgtgggcggctgagctcgcagccaccaggacctgatggggacagtgtttcctggggcctctgtacgggggaggttctctcgagttgcaaaggtgcagatgcgccaggagggttcttggcccctaggcttcatggatagagtttactaggacaagcaaaggcctggtgtgcgatctgttttcctatttgactggatgttgggagaaaaatgtccaaattagggatgggcccatggctcagctgagcagaacactgggtgaacttctactgtgaaagaaatagcagatccggcggacatttatgggcgacagagaagggtagctcagcattgaggagggagtttggtctcattctggccgagactgtcaaatcctcggatgggcttgtaaaccagctcctggcctagcctcatcaaacgtgaggatgaggaagagagagcctggtgggccctggggaggggacctgcactctcagtgggacacctggtgaccagtaagcctggtccactgcccttcctcaccctctcgtctttctaataaacagaggggaggtgcctgtgcatagacttggggactattacattgactcagaaagaccctcttttcccttttgccccaaccagtgctttacgaggttgcctaagcctgtgctgcgacccccagaggcaggtgcaaccccattttacagatggggatgctgaggctcttcaccagggccgcccagctggatggcagtggggtgggtcacaccgagcctcctttcccctgggctgggctgccacccgaggcccccactatgtgttcctgtttgcctttgactccacgggggccgggagaaagtggcactggggatgccaccaggctgcttgtcaactggcctttgctgtgttccacacctctgacatggaggtgaggctgtggtggctaagaccgggcggtgggccgagttcatgttcctgctatgccagtgatagctggacgag

SEQ ID NO: 95958 - DNA, 1788 bp, Homo sapiens
aaattcaaagcttcagaggaaatggtacgaatgcaacccaaatggcaaatttcccatctgattttattttcagtacactctgaacccatcttctgccccttaccctagctcttcctcaggcaaccttgagtttccttctctaaggggaatcttgcaggagtggtctaggactgggaggctgagggggcattggaggagacacctggacaggtgtgcacagaggtggatgtgagaggtggatgaaggacatcccaacagggaacctgctcccaccccctgcaccccccgccacccggctgtgtgtttcccaggcgaggctgtgtttgacatgcagcggccgcacaccgtctttggtatgccgtttggtcccggacttaatgagttctgcagggacgctccactgtagctaaagatcatttacctgaattgctttttaatttctgccgtgggaagctgcccccggtgtgatataattacattataatttacagcaatcccaaatctataaatttagccatacagtggggggaagggactggagttgtgtgtggggctgggggagaaatcccccccatcattaagtaaacccacatttctgggtgcaggttccagtccctgggcaggtgtggaggaggcagagagggacatcactcgcccagtacacgctgaagtgtgctttaacaccacagagcattcgggctggagctgctagtgggagaggatgagagagtgatgtgacattctttctgatctgccctcttatagcatttttgctgtgggatgtggggagcacacagaagtgggtagcctggggacatctatggaatgcctagcattggaaggcagggatcggaatccttccctgattctcttatgggaagatctcccggctgtgggctgtggagaggagagctgggcctcagggtggagtcccggggatgtctctgggcagatggagccactccctgggagcttgtggcatgtgcggaagtgaagccgtgtgggattccgataggcctaggcgaaggcgcagtaccatgcaggccaagggaggggtttcctttctgcacccacaaaagggttcacattcctggtggccctgccattccacgtcactgtgtaatttgccgtattcctgtaaaaccatgcatggaccaaaattattcatattttatgggcataaaggcagttcattaattaatggaattctatggtgaattaactttatttaacaaagaaagaaccaggtttttctgattcgtctgctctggagatctaaacgttcatatcttggggggattccgttgggatgactttgtagcagtgggaggcagtatagcagctaaagcaccagtggaacccaggttcggagaagctaagtcacttaccccacatcacgtagctggtggaggagaaaaagaccctgtgaaggctgttggatggggaaggtaagtagggggatagagagggaggaagagggaggcagcaacaaatttactcgctgtgttgaccttgactgttacgagtttgccccttggccagggggactgtgtggagtggtgctctggcagcagccttcccccttacaggggtgtgggcccccaccctgatacaggtgattgtccctcgccaccccgggaagctgctgatcctcaggcccaccctctgagctttggctcttacgttcacgagcgctggggctcagagatggcagaatggcggctccagagtgtccctccaggtgcttgtcattagccactgccccctgctccatctctggctgtaagc

SEQ ID NO: 95959 - DNA, 1038 bp, Homo sapiens
aaacacaaacatatgactatgttgcccagacccgtggctgtcttctttcaggacagcggagttggcacagccaaacccgagtgtctgctgatatgcttcttgctaagtggtgagcccggcgtctctaagtagtgcctctgcctgtgagcgggtgatgaagagtcagtggggattcatacccatactgtgtgaataggatggctactattaagaaaaacactcagaaaacagaacaggtgctggtgaggatgtggagaagttggcctccttgtgcactgctggtgggaatgtgaaatagtgcagccactttggaagacagtatgggagttccttggaaaatgaaacagaattaccttacaatccagcaattctccttttggatttagactcagaaaagttgaaagtagggtcctgaagagatatttgcacacccatgttcatagcagccttattcacaatagccaaaaagtggaagctacccaagggtccattgatggatgaatgaataaacaaaatgtggtgcgtgatacagagggctgttatgcagccttaaaaaggaaggacattcggacacagcacagatgaaccttgagaacgttatgctaagtgaaataagtcagtcacaaaaggacatatactgttttattccacttatacgcggtccctagagtcgtcagaatcgtagagacagaaagcagagttgtgattgccaggggccggagggaggaaggagtgaggagttcatgttgaatgggtgcagaatttcaatttgggaagatgaaaaagctctggagatggatggtcgtgatggttgcggaacaacgtgaatgtactcaatgcctctgaattgtacacttaaaaggcatggaaatggtacattttatgttttgtatattttcctgcaagtttagaaaatgaaattattgaagagagcctgaggagcaggtctaaacacccatggacttctaaagcttccgtgaaccttgggtcctcctggttcctccaccatcgatgaccagtgtgtcaccccctggttca

SEQ ID NO: 95960 - DNA, 1077 bp, Homo sapiens
ttgttactaaaatggattctctgctgaggccgtgacttccaactccaaaaaaaaaaaaaaaagatcatccacagccactattcctcacaatttctctgaaaggtcctccttgccccaccacgctgaagctaggcccagggctcttggaagaaacacacagcacttgctcctgcacactgacacactctgtcacccaaaatgacatgctgtcactcatactcacacaccacatgctcacagtcacacacgtacgcatgcatgcacacagggacagccacgcacctgcacccatgcacgcactcactgtcacacacaccatcaccacgtgcacacccagcacccacacgcacccttcatacacttatacacacatgcacacattcgcatgcacacgcctgcactcacacagtcacagatacacagggacacagagccccaggggcagtatgcctcagagcatgttagtacttccataaacgatctctttccacatcatttacagagtgggcgcattgtgagtgtcttaagtttctgaccagggttaatgtctttctgaggctgacttagctcaaaggcagtgtcatgattaagatctcaggcccaggagttggacagtgctagggctgagccccagcccagccacttaacagctgtgtgacattcgtcaagtagaaggagttcccccagccttagcttcccatctctaggtggtgataatgaagagttgacctcatagggtacatctgaggaataaaccaaggctgggcctaacagctgtttcccaggaggttctcatctgagttggctgatatcgtcattattatcaccaatccgtaatgctggtgtcccatccgttctccaagtgctgacttggctgtagctgtgggcccgggcctgggagaaggggactgtgtccaccagggtggctgcaggagggcctatgtgggccttgagatcctgcttcctggccaggacccattccttcatggggcaccttccccagttctcagggctgggggcactcagagggaagtgcagggctgagttcatgtaagttctgcaagcaagttctggtcc

SEQ ID NO: 95961 - DNA, 1829 bp, Homo sapiens
tgtaaagtttccttagaagaggtggcttttgagcagaagcgccttgggtgaaaagtgtagcaggcttggaagtcagagtgtgctgctgagtgagtgggagtctggtggaggtggtctttctaaccggccacaagaccctgggcccgctctgcccctccgtctgagtacctgccatcccagggggtgagtgctggctgggctcctggtgcagccacctgcaccgtgcagtgccatcaccgggtcgtgtcttgagcccctccttgccctcctgtttgtttaagtggccttggcctagctccctctgccctctgagggtctcactgtgccctagccctgtgggcatagtgcctggcacatagggggccctcagtctagggcacagggtgagtagaggaggaggttggccctgctggggcagcatgcttgccaagcctgtgtgtgtgtgggtttttgttcatgcttctgctggtgtgtacggagaagtgggcccagacacacacagacatacacggatgcccaccaggccccacgtccatccatgggaagggcagcacatgctggtaatgtgttccccaaacagcagcctcttgggctgcctgagctcagggcagagcagggacggggcctgtttgttggggctccagcagggcaggggagggcagagagtgtgagccctctggagaatgtgcaggtggctgggggagtgcccttcccagaacctcatggctggacctgtgagactccctgcccgtcctggtccccaccatgttccctctgttttctgggtgactctctctgcctcctttctctggttctctctgtccttctctgactttgttgctgtctctctcactgtttctttgtctgtccctctcttctctgtcattctgtttctctcacttggtccctgtcctggatcactctgtgtctctgtgtcttctgtctctgtgtcctggtttcactctgcctccgtatctctctctgtctcttttttttttttttgcctgtttggtctctttgttttcctgtcattctttttccctcatttggtcctcagtttcagctctgcctgtctctctctctgtttctgtcattctctctctctctttctgtcatcctctctctttctgtgtcattctccatgtttgtccttctgttccctttccttgtctgtctctgcacaccaaggttgctcccagctgggaggttggccctgtcccgatgcctggcccttcttctgccaaaggcatcttggaaagacttgaggttattctggtgcattcagtccagcgcttgataattgtactaacctggcaattggcaagtgctcctcccaaagaaaaccctcacagtgcagggtgctctgctgtgggcaccaggcctccctggaggttacagggctcacagtgtggggacaggttgtccaggggcagctggagcatccactgggatgctgatgtcaggccagagggcacctgtgttttcctgggtgacaggccacaagcaggacagctcacacccaggaaaataaaagccaggctcagagtacttgattccttattatggttggggatagtcagtaaaatagtagattccgttttgagagcagtatcagtgctctggggcctgtgaagggagctttgggtgtgctctctggttgtcacacagcccccggtggtgcaggttattgtcccagtctgtaggaagggaggtgcctcctggtctggtggctgggagtgtggctttaaatccagctctgattcttaccaactcacccaactctccaggcctcagtttctgcatttgtctgtgggttgttgtgaggattc

SEQ ID NO: 95962 - DNA, 1048 bp, Homo sapiens
tggcatttggggagggttcctaagggctgtaaccccagaaacattccccctgcagagggcagtctgctccctccctgagctaggtgagggtctgcaatgggtccagaacatgggatctataccaagttctgggaaccagctcaacaggcctgggcctgcctctcacatctctgtgccctggctgtgtgaccctgggcaaggcactgcacctctctgagacctgtttccccatctagagcacccaaagaatcaggctgcctttgcagggctgtcatgagtggaagcctcatcccccaaccttggatgagcagacccctcaaatgtgcagctacccacagagattttgactgtccatggactttggtgttcagacatcacaacagccacctcccaccaccgaggtcagctcctgccacgcttctggtcatcaacaggactgccaagactcctgggctgggagcatcctttagctccccaaacctgctagctggcaggaaacatggaggccatttagggacattcagcatttgaacttaagatttgttttcagtagaacccacaaacccagttttaaaattcagttggaaaccaatccacaagtcttcaaagtcatcttagtgcagttcttaaacttgcaaagtaacacctagtgggtctgtcattggcttgtctggctcagctgaagtcagagctcacagcacactggcctaactctcagtctggcttcaaagtaacctgtgatgctgctgcacagctctgggggtgctcagtcccccgcccccaaccgccacatcatcttgcccagcatcctctgcacaatgtacaaaaatgttttcaaatgcaggttttagcatgattcaggtatggtgaggccagtagagcaggggagagttgccattgaaaagatgatttgttattcacacttcccagtgggaggacaccccacaccatacaggactacttggggaagcatcagggtcagtcagtgaggcatccaggggagagcatgggaaggaggcttcattggtttttgtggaagggctggcaa

SEQ ID NO: 95963 - DNA, 1722 bp, Homo sapiens
tgatgtcattatatcgtttcctttctttcttaggtgtgctttgacattattttcccaattccttgaattgggcacctatgtgattgatttttagccttcctccttttctactcttcttgatataaacatatttctaagttatgcttcagttacatcccgcacattctgaaacatagcaattttattaaatttgaagccttaggatccacgtctttgtacagttttgaaaaatttccaccaaccatctcttcaaattatgcctttccccgcttctgtccattctctcttcctggaactttcttattctgtcttccatgtgtcggcacctggtttttatattacccatgtttctgttatgcattttctaatcctctctcaagctgactttgataatgctctttgtggtatctggtgactcttgtgtgtgtgtctgcatgtctgtgcatgcacgcgtgtgcatgggcactttgtaatttcagataatgagtggagatttatttgaaggaaacctgtgcagcatgagttaaggctatccctccaaagtgcttttctgtgtgactaccaggttcttcaggagtagcacagatgtgagatcaattttgtattcttttgatagcttaggggtcctggaccacatggggactataaatttgaaccatcactcagcgagaaggcaagcatgtggctacaaacactcagaagatactttttcagctcctctgcccgtttcccagcagaggcgtgagaagccaagcatcttggtgtgtccctgtgctggtgggcattgaagggtatccagcctgttactagagatgcagcgatcccatggcctttgcacgtgggggtctcggatcccccttcttgtttctcccagactccaggcctcctgtcctctcactgcatggtcgctaaaaagagatccactgggttactgaggccaacacccactcctgggctgcttagtgtcagctctctgtctggtctttggggtccctttgttatctggccctacgtggcctctttccttgccagctgaaatgtgcatctaaacagatgttcattctgtttattgagctggagggcctttagtttcccttgttgatcgtatggctgaaactcgaagtcgctacgctgttgtttttcctatgcaaaattaaaggtagaaaatgaagttgatggagaaagaaacacacattttgagaaagaactgtgtaattattatccactccctgcaaaagacccatgaagtggtcggttttcagaggaggaaatccttggcgtctgccttattccaaaatccactggctaagtcactcaccacctaagccctcttggacgaggaccaaggcttctacgctccatactaaggcacaatgtgagggattctacagagggcctagtgaagagagaggagagggcccatttcatctcactttgcctggggccatcctgcacgctgctctgctgtgtgatctctgcaggacacttgaccattttgtgaacacatccttatcagtgaactgctatttttgtaatggcagttccccccagacactgaatccacaagcttaaggtaagcttaagtcaagagtgatgacttcttgactattctagtttttctgtcttcattcatttcaacagtatttaccgagggtcttctgtgtgcccagcactgtcctgggcactgtttaaaacattgcttcattgcctctggtatgccag

SEQ ID NO: 95964 - DNA, 1882 bp, Homo sapiens
tcctgagtttccagcgatggaaggaagcggagcaatggctgtttctgggcctgccaccgcctagaacttggattggggggttggtgaacttggattgggggatggattgggggattggattggagcaggctgaatgtcagccctggaaactgccactggcctcccagagtgagctgggagatcctggtgttcagatgttcctgccttggctgcgtggggggcaggggcgggggggcggtggttcctatttggagccagggagttgatttaatacagctgaggccaagacccagcgtggagcctacgactgcagctggatccctgccagccctctttcccagccgcatgtggctccaaatcccagaaagggagaaacccgctgtggggagggggtgcagcagatgtcactgtccccacatggtacttcttgtttatcttttattaaaggcaggcgcttaggcaggggcagtgctcagagcagcccttgtgagcgggccatggtggcggcctccctcagaagctgtgggaagagggagaaggcatgaataatgcaggctgcatcttgacggagcttgtccggcccccgcagaccgcgcagcgcgcacctgagcaagcactttgaatgcctctggcttctgaacttgagaaggaagctcccgggatgggcctgactccgccgcctggttgcaatagtcctggaaggggcggcggagcaagcagaagcctcctgccctggcccgtgggtttgcaccagctagaacgtggggctcctccattaagagctccttggcgttgggagctacgcagcctcacccctcatcttatcacaccaggagaccggcgagcagagtggggatggccacacagggagttcgcagcagggtggtgctctgcctaccgactcgcccctggggttgtccctgtcgcctcagcctttctctttattttgggtggaggcagggtactcaggacagggatgaaaacttaggtctgtttttcattgttcatcctattcttggcaacttttgcagaaggcgctggcaggaaggagaccctggggagggaagagttggaggagaaagaagtctccttggcacctttgcctttcctgctaaaaatggtggcagttctgcatttctactaaaaatagctagtcctctgtcaagaaggccacccacactggggtgtggggactggggacagcaagatgtgggccctgggccacacattctgtggagaggcctagaagctcacagatagtcacttttcttaggaagaaggaaggagtggcaggaaggggctgggatgccatctctggagagcggagcggcactcctgcccctgtgtgacaaggacaggtctgcacactctgtcatgtattactctaagtggctttaatattaaatggatgatgaaggcaaggataaacaaactgtagcttaccatataatggaatagtattcaaccatcaaaaggaaggagattctgacacatgctgcaacatggatgaaccccaaggatatgcgctaagtgaaacaagccagacactagaggacacgtcctcatgattctacttatatgaggcccctagggtagtcaaattcagagagacagaaagtagaatcgcagctgtcagcggctggggaagaggggaatgaggagttaatgtttaatgtgcacagagtttcagtttgggaagatggaaaagttttgaagattcacaacaatgtgaatgtatttgatgccactgaactgtacacttaaaaatggttaaaatggtaagtcttatgttatatatattttaccatcattttaaaaaaattaaatgggtgtcgttgattcctctcttcctctcaacctcccatatagaatgactagaatc

SEQ ID NO: 95965 - DNA, 3337 bp, Homo sapiens
acgcttctgaaaacttctagagaaggggagaacagaacagaacagaacagaacaaaacaaaactaaacagcctaggtcatctacaaacgaaggaggactaaactactacccttccgatcaacagcagtgagtgtgtcaagtcagtgaatttgccctgggaaattagcaatgaaactatcagacaagctctcaggcagatgggaggggacaataaggctatcttcagtcatataggagggactcaaagcatttaccttctgtatatctttggcctttacttaaggattctctcttacagcgtaagggagtaagtgaatgcagggaagacctgaggtcccaggagggagacccccaagaagggaatgatagcaaggccggggctgtgcagctgccccctctctacagtcagagcagaggcttgagggattccaggggagggactccagaagagggctgcagccctggtgcctttggaggatcgggagctgctgtcatcactgtgcgagaggcaggggttggccttatacaccattctgtgtgtggtgggggaggtccaagtgaattgagttgtcctctgtataaataaccaataaatcagaaacattaagctcataggattaaagaatcaaaacgtggtattttaataccttccttatatagatcagatagctgccagaggaattaagagcaggaacattttttcaaagttaaaagtggttgcctccagggcacagggaggggactattgcctttcattataagccctttggtgctatttgttctttaaaaaatcatacgcagatcttttctcagccttttggctaagatcaagtgtaaaaatcatatgcaggattgcttagatttttttaaaaaaagaaaaagaatcatgaaaattaaaatgaaagaacttgcatgggccccagtttgtaacaagaactcattgggggtggactcagggcagcatggaacaggcctctcagtggtgttcctgggaccatgggctgggccaccttaagggaggtcatgatggctaggctgggctgggactggagtgacctctcaagtgaggagttttcagttctatgttgctctgtttggatttacttttttggaaatacacaaaaatgcagcccgtgggcccccagggccaggggactggaggtggcccctgctcttgttgcctgcaggttgtggttgggcttgtctgacatgcagcatgaccaggaaggctttgtcaaggctgctgtgtgcctggggtcattagatcctgggatgactgcctgtgacttaggcctggtccctgcccttggggcctggctggtactgaactggagtctggtgtagctccaggcagactgaaaggccccaccagggaggtcttcacactgtccccgaacacagaggaggcagtgagtgccagccgggcatcaggcagtgggcttgggctaaaccagtgcagtccccacctccctggcactcctgttcctgtgaggaagaatagacaatcaacaagtcaacacacaggtgaaacactttgagggagaggtgctatgaagaaaatagagtgggcatgagagggtaactgggagatgccccccactgggtactggggaaggcctttcccaggaggtcccatttgagaactgaaagcttagatagcgtgagccttaggaagcaggtttgcagagaatacaagcagtgccatctggtaggaggggcagcattgccacgtcttggagaaatacaccagtcaattgaggagtgagctgagactggaaaggcaggccagaggtgggacaaggagcctgactccacactaagggcgagaagtcccaggcccagagtgagtggggaaggccctaagggagttgtaggattagaacccagatggcattcgcctgtgtggagggtgaacctgagcttggagtctttcaggagttggagagaggaggaggacaggttggagcacatggagtcatccctaccctgcccaggcctatggatcgcacagagacggatgggcagagagtcgttccccatgcagcggggctcctcctgagctccattttcgggccagctctgtgctgggcttgggtggggccactgcaggccaaaggaggtgctgaaacacatagcactcctgcctacccccaccaggggtgccagggggacagctggctttccgacaggacccccagatgatatgtcgtgtccgtgccaatgaagtcgaggcaggactgagggacgagtgtgtttctgagggatggcatccaggaccagtgccagcattccagaggcagggccgcctgtaaacacagacaggggaggtagctgtttatgtggttggtttgaggaaggcttctctgcccacagatacctctcctgcctccccagcccactttgggatcaagcctagaattccaccattataggttcattcctttggcttgcaatacaaacatcccagtgaggaggtgatccctgagctgtcactggtactgagcaccccgtatgccttggtaggtcatcaggacctttgccattcaacaggacagccagccagcactcgctgtgcccagtgtgtggccactgtgatggttctgggtgtgtgaagagggtcaggtgctgtccacccactctgggggagacagacgcaggaagggataatgagtaatgaattctgtgagagagtggccaggaacagaggagcacagagaagacagcaatgtgcatccttgggcaaatcgaaaatcccaaatcccctaccctctctggccctcgacatgatcgctcaggagacagtagacgacactgtctctgcaaggcgagtgaaggccagcaaggtgctggccctcagagggtctttggcaaaggctttctgcgggggctggaggggggtaggtctaggttcagctgaggctgaaaggagggccaggagaccttcaaagggacagagaaggtgcaggcagaccaggacgaggaggttggcacaaaggtgtgaggcatggggctgccaagagcagtttgatccaggacagaagctggagatttgagttcagagaatgacacctcaggtcactagggactgggcctggggagagaggaggtgtcgtggaagagaaattctgtgacatggttccaccattggttctggggagaagattctcctgcagctcagaggggtctcccttgagaaaggccctgggcctgtctagcaggagcagcaggcctgccagtctgcaagggctggcatgggattgcaatgctgagctttctggctgtttggatctgttgtttttctaagtcactagtcccttgcatattaagagaaagaaga

SEQ ID NO: 95966 - DNA, 3708 bp, Homo sapiens
agcacagcaaatgagcagaggaaaacagaacccaccagacatgcaaactcacagaaataaacaatttgccgatgatcagggaagaggctacaggaaggagtttgtgcagacagctcctatgagaaaatggtccctgggaggtcccagagggctttccggctgcacgctgaccctggaggcagctgtcagctgtggcaccatggttgttctcgtgcttggagctgtcttcaaagccagtgagcgagccactcaagaaacttggttggtcaggtggcttcacagatgtactctgctttttacccaaacagtctgcacagtgcattgtccatcagcatgtgtacccagggagcactgtgaattcagggccctgtgtctccagtactcagcatggttacagaatgggtgaaggtgcagtgaagtgacaccctcttcccatcactaaggatattcacaaggtttaaaaacagttcccaaagcaggattcccaaagacgctctccagagaaaccgtggagccccccaggggaattgagatgatgaaactactgcgagctcacttttcttagggttccaggcactgcttggttttccatgcactggattatttaatcctccaacagccctggtaacagtcccataatcctcactggacagtgggggaaatggagaccacagaggtgatgtgatgggcctgaggtcccacagctggtaaggggtggagcagccttccagccctggctctctgaccctgggcctctgctctgagcctctgtgctgggcctcctctccactcaggaaggcacacatatgttctattaggttcattaaggaaaatcagttaccctatttaaaacaccagcaggcaccatttgtgcagcgcctacttggatctggggacctggattatctcgtgccatcttgataaaagcaaggtcactgtgcttgtccccagtttacaaaggggtcatttgaggctcagggagggaggtgacttgagcagggctgtacaactggaactgatccctgggctgctgactcctcagcctgagttctccctgctgtccatcccgcacttattttccaacacctcaggctgagaagctgcctgttctgcctgcctggcttctctcatgatgccagccaggagggagtgagggcagggggtgcccacctctagcagctcaggcaggttctaatgtgggcattggcagcgccttctgggatcagagctgctgtgccactcaccttgccaccctttgttgcaccttctagctccttcctgtggggctccaggttgggaatcaggcctcccatttatggcaggtttgggccgactgtgcccgggccaggaagcaggacggctcctaggtagagatttggatggggttctcaccatcatgggcctcgttttaaagtggacctgcccaccgccccgatctccactgcctgtagactttgcagtgtccggacctggctttgacctgggaccagccactgtgtaagggagctggctcagctgcctacagaacactctcatggcaccggaacctccagggccccctaatctccagggactgcagtcccgagccctctgtcattctacttgcctgaccactgccctcccatggctctgcagaccagcgctttcctgggctgctctgttggctgtcccactgcattcctcaggggcgtctgaagaagcctcgtgtggctggaatggggataaaatccagacggaaaggcctctgatgaggacttgggcctttggtgtgcctggctcacttcaggcctggagggagtagccctctctgggttgaactgggcccagaggccctctgatttatatcaaggtgggagctgcctgggcaggcagaaataataaaggtgtgggccggggcttatggaagatggggtggagggaaagctgggcagaaaagctcatccttccatgccttttggccatgctagcctaaagaccaggggaaggcttagagcttagtgatgcacccaagacgtgcagggctgtggatcttaacctctgaagccactgcccactctgtgggcagctgcacatcacaaagatctaaactgaaatggctatggaggaaagaggagtgaggtggggaggagggtagtgacagagagatgacaggaggaaatatcctgactagagagcttccatccattcaaccacccacctacccatctgcccatccacttacccatttgcccacccacctacccatctgcccacccacctacctatctgcccactcacctacctacccatctgcccacccacccacccacctacccatctgcccacccacccacccacctacctacccatctgctcacccacccacctacctacccatcttcccacccagccacccacctacccatctgcccgcccacccaccgacccacccacctacctacccatctgcccacccactcacccacctatccatccatccacccacccattaactgatccacctcacccaaacacccacctactcatcaacccatccatcctacccaaacacctatccattcatccacccaccaggccaccccgctatccaatgcatttttcatcaatcacctgctatattccagcattttcatccaggtcccacctcagtgtagcccacaggggatcaacccccccacccccacccccaccaccagtttctgatctctttttgcacgcacagcctgatggtggccctgggcccttgtaaaccctccttcccattttctgatactctgcttgtttctcctcgtggcccactgagatagtaagctccttcactcagagttgcggttgcttctaattccctcgcacctttcttagagctctccttggaggagttgctcagagcatcttttgtgggtcgatggaaaggttactgggaaacttcagttgtttgagactgggatcacctggcctctgtgtagggtggtcgaggtgagaagggagctcacgttaggtgaacacctgctgagtgctcagggggcgggggagaatgacagcttggtgctggggaaagaacccatgtttggagctggcaggggtgggattggttcccggagttgatgccagctgtgtggctttcaacaagtcacttaagctttccgagtctcagtgtttttatttgtcaagaaacaaaatataaacaaacctgaacaattaaatgcacatgtaagtactccttgtggtacttggcatgtggctagtgggtgatggtctctccccatgcccccgccatgtccatagatttgaagactgatcaaggctactttgttgagttaaaatgggcatagatgaagcttggctctgggtcagggccaagctagtgaacaacaatgggcagcctctgatgtttctggcctctcgcctccacccttgtcctgtctcatcctcttggccaccggcctgctagtcccctgggcaggatgggggaagagacaagctgctgagttgctggagggcaggatggcttggattcagcctgctgccttgctgtggaccctgtggctcaggccctctgtgcagcccagtggccggaggctggttatccataagcaggaaatggtggaggtgagctgagcatgagatgatgtcaggagatgtggggcaggaggctgggctctggggagggcctgcagtgctggggggcacaggcatttaatcaactga

SEQ ID NO: 95967 - DNA, 1177 bp, Homo sapiens
agcaatacagccaaagtggaaggctggccccggctcagagcggggctcctcccgcctaagaggacagcctgctcagacctccagctaatagggctggtggcaaattgtactttgtgttcattggtagcatgagattgtagctcgtatctctttccctccctggctccccagtcggagggagcttccagaggcagtggagcagctggggatcagctctgccccttgccagctgcaaaaactcaagtcttgggttttcatccatgttaacaacatctgcttcataggcctgcaaggtgaccagagcgcctggaaggggctattgctgtggttgagccattggaggacttggcttagacaactcacaacttggacttagtcaagaccaatgagaggacaacatgcctactgatggattaacaggagtttctgggagaccctggaagcatgaagcccacaagttccctaaagaggagcaattgcaggcatttctccggcagccgaccactgcccctcaggacccttgcatgccttggctccggccagtgcccgtgttgcccctggtcaagggctgcctgacccagtcagtgcttgcctcttcctgaccgcggtctccaccccacacctgtgattgcacaaccccagggctgtagaatccaccacgggccgtctctcctgctatgatgagagcctgccttgcttcaagcactaggactccacgtgaagaacacacagttctttattctgttttaatcagatgcttaatgattttcagtctacttaattactagtattgtattttttaaatagaggttttaactgcatctatgtagtatcttagccacaatgtggattatctgggcatttgtgggctaacatggaaagctactcatattatgttacattattttttatgggaaaatgcatttaagttccaaatcattgatttataatatgtcgacctttgagaacacagctcatttgtaagtgggaatagcctgtattcagaacaacataaagggtctgatatgtcctgggaacagcacagataagctgagtcacaggagggcgaggccgaggcagcccttccaggaagccttttgcttggaggaggagttgatggggctgaggcgtcaatgtgaacaggagagagggtggcgtctgctgtgtctgctgtgtc

SEQ ID NO: 95968 - DNA, 1099 bp, Homo sapiens
tggggtgacaaagagtgatgacgacaatagcaatgacccctccccaccccattatgtctcctgccatcccccacccccattagcagaaaatgcagcatccttgcacatggcacctggcagacagggcgggtggtgagtggctgagtggaatcagcagtccgggcagccctcaccagcgggtccgtgagctttggaggtgctgaggttccagtcttctgtttgattggaactccgtgtcccaaagtacttttcacgtgcccactccctgcggaagggaaaagagggtgggtgtgattttccacagcttgattcgaaagactgaaactcgatgagtgacatttcaggctggctggggatgtgggttcagatccccccatgacccctgtgtgtgaggagccaccttcacctgcactgcccgcagggactccacttccaggctctgcagctctcagtgccctcagggaactgcagggagccggctcagaaggtgcacagtggcctgggggccagtcatgtctttcacagccttgtgcgccttggacaagtctccctcccttcccgggcctcaatttccccttcttacccagtgggctgcctagtccacatggcccctaagatcccacccagcttcctcttcctcttggggccacagagtcaggagttggaggcagcatgacccccaagttccagaccctggagggcagccgctgcccctggaaggcatgccgacgtcagcttctcccgggaggcggaattcatgcgggccctagtctgagaaaggcacccgcagggtggacagcatgctgcccgccagcagtgtggctggatccccgagtccagccagcctttccgttagccagccagccagcgagcgctcctaaaccctggccgccgccggttataaatgattcatgcagccccgcctccctcggcggccacttgatgttccctgcgctccagcccggcggtccaccgcctctcctgccgctgggcagtgccgccgctgggcagtgccctccccgcaccgccgcccctctgggtgctgcgtccctccgccctccccgcacgctgggtaagttgaaggaggacggcagctttt

SEQ ID NO: 95969 - DNA, 2080 bp, Homo sapiens
ccatttctgggcctggaattcctgagagtggcctggccccagtggggacagggaggggagagaagcaacctggggcacacttccctagccagtcctatgtttgtgagacctgggagggctgtggtcagggggctgggccctgggggcaacagtgcctttgcatttgaacacaaagtgccacttggtataatgggcacagctcagtcttggctgttcttgagttttaaacaaatcatgatccccaccttccaaacaatttagtttttttcccctagctagccccatcacaaacttttgaagcatgaaatgaattttgctggccctcaccaataggatcctttccctagataatggattttatgaaatggccataatcctcctaggtaatgagcaaaagctacactctccacttgggtccagcattcctcttcctgatttatgatagattggttaaaatagtaaactgatagcagttgcaaaatagtcatcaatcaccaggcagtgtcgcttaaactacagaaaggtttccagaagtgagatgctggaagccagagagagaacaatttggcaataccaaaggcataaagcaccaatgaaatcaaatctctgtatttgtattctgaagacagaggagtagagtggctcagggtactaaggaaggaaggaaatgcaagcaaacccgttccccaaggtcaaaggacaccccctcctgagctccaggctgcagggggccctgcagggggaccttcagtccagggagttcttcagggggactgtccagagggctctgcagggtgctgcagagctctcaccagtaggtttagtgttctgtttctctttctagacagttttggaaagttttccaatttctaacatgtataaatatgttgggctaatatacagtaatggcttttaaagcaaagtttttcaaaagtataagaggattgaagtgcaaagctatcaaggccatgcccaggtctcacccgtgctccctcacccccttgccccttcgtccagacacctggcctgccacacccagcccaggacagaacttttctttcctcctgtacgctgagctgtcagaccatgagtgttcatcatgggctgaggtgatagttgatgctggagaaactaatgttttagggaccaaaacaaggtctgcagcagtgtttccatggaactgccttagtctggatgagtaacctcatggctgtagattacttgcatcatcagttcaggagaaaacattctcctccattggatgaatagatgaatgagtggtgagaagctgtagagatcttgtgtggtgtcaacgccctcatttcacaggggaggaaactgagtcccgagagagggcagcgacttggttcaggtctcagggaattggtgaaagagattggagtatggcctcagcggaggtgtgactgccagtgacacctgccggaatgtgaacttcacggatagcgctggctcacacctgtgttgcttagtgtaggctgctgagctgaccacttgcccttgattatttcaagtgaccgcgccatgtgccaccttcagacctgctcccagatcgatcccagagcctagggtgggactgtggttgctgtcatcataggtgtgtgattttccacaggtcatataaccctcttgagcctcatcttcctcttctgtgatatgagagactcttcctgcagaacctggcgtgtaatacatgcaacctgcatgcccaccttcagtccagcaagcagccatcaggcaccaattctagaccgagtcctgggccgccacagaaactcaaagttagataggagctgggtgggaaggcaaggaacactcaggattttgaacacagctgtcaacccctattccttaattgagaaaggcaaatcctgggacttgaataaggagattgggaagactcatggctgcactagtgcatgaaatattatggtaaaagcaggagaataaggcagtccttttcttagccctgttcttctccaggccagagcctgggctttaacactgactcaggcagcagcccctgcagaagctacctgcagccaggttggcctgtgctccc

SEQ ID NO: 95970 - DNA, 1601 bp, Homo sapiens
ccctggttgtccatcattatgacacatgattttccaaaggatttactattagttagcagcacagggctttctccctggggtagcagctacttgcagtgaagaaaatgcatgttcaatgtagcaatttgtctttttttatatatttattataagagtaaatgagttattgttggagacttcaatattattgcaaattaggtgctgcaaacagagccgggcccatttattatgtttctcaactcccacagcaagcctaccagttcagaaatcagctgagagttgtggcccttcccagggtgagcatggagggacccccggggtctgggcatgacaaccacgacgtcacattgtgccagaggcaaaagaaacaggagccacctgtgcaggcgggtgaggggccctggaagggagcacaaagtttgttgtgccaggtggtcagtggctggtgggctgacagctgtggtcagagagctgtaggaggtggagtgacctcacgctgtgacacttgctccaagcccatagctgtggtcatggagcagaggtgaggtggtagatgtttccagagtggcccctaagccatgaactcactttcaaggtattggcagtttaggccacagagactggacccaggttctgatttagggtgtgccccgtgacagagagtggtggctggaattaaccagcttacagtggggtcccctggaatggtgcactccccagtgaggagtggctgctgcctagtcctgtcctttcgccacctgcccagactaggggtggacacaggggctgcaggatgcatagaatgttagggtcctgcctaccagagatgaaggtcatactgcaaagtgggcatgctggctgtgtgtggtcaacaccaagaagtgggcaggctgaggccctggcatacagccctgctccatggctggaagagtccacagggaaggccacctagcccagtgatcaggagcacaggcttctggtgacaagccagcccagattggagtccaggtgtcgtcacctgctggttgtgtgattgcggacaagatgctcaactttgctgtaacctcagtgtctcttctgtaaaatggggctgataatccataggtattattggcgttaaatgagctcttgtgcttgaaacactcagcatagtactagcccatggtaagggctcagatatgtcacttgttcaattactattcagtaggcttctctgaacgtgacaggctaaactcgaaacattaattagtcacttcatttgatggcaatagtaataaatgtgagtgacagacacgaaagaggctaccctcagtgtaccacccagggagagccagagttaagattttggaatatatgcttgcagtcttctgtgttgtatatagtgtgtgcacaattattcacacacacatacctgcctgctttttacaaaatgggattatattgtgcttgctacctcgtaacctttccacctgagaatggatactgtcattactgatgcctttccgttcaagtttttctgcagttgcagtctcaaactttttggtctcaggacccctttataccctcaaaaattattggtagcttcaaagagcttttgtttt

SEQ ID NO: 95971 - DNA, 1400 bp, Homo sapiens
acttctgagagcatagcttggttttgcttgcttttgttctttatgtcaatggaattatgcagtgtgtgcacttttctatctggttgctttcttatgtttaggggattcattcgtgttattacctgtagtcgtggtttgctcttcttattgttgaataatattttttcctgttattgtggatatagcacaatataccaacgttttctgatgttgatgggcatttgggttgtttccaatttggggctattctgtgctgcttatgaacatccttgtacggtctcgatgaatgtctatgtgcatttttcccaggtatatacctaggaatggaactgctgggttatagggggcacatgtggtcagctctgataaatactgccagctgtccaaagtggttgtaccaattgccttagttttgatactggaatttgctattaaaagatttattttctcgaacattcttttatattaacatctaggaaaaactgttgagatcaatatggatacattaaagtgttgactgagcctgggtccctgatgagaaactgaagaattgtgaacttcagaaaaatagacctgggggaatattctgtgattcactgactccctcacttacctatttgttcttccttcagccacagatattcattatgtgtatcctccctcccaggggcagagcaaggaagtcaagacaatcttttctccttacgataccaccgtcaaatgtattagttatttcttcttgccaataatggctctaactgaggaagcccatctctttatacaaaaaattaggtccaggaagagctgcctaagcagaatcatggttgcagtaaagtcactttatggtgtttaaagacttggctgaataaaggggaaagtttaaataaattagtgtctagctatggactgagacagtatgaatccactgaaatatttatgaagaatcttaatgacatagtacaatattaaaaggaaaaaaaggatacagaattacatacacagtataaaagttatttttttaaactcatatcctgtcacaaaaagaaaaaacacacttggtctcatttttctggttttaaaaatctttcggccaggcacggtggctcacgcctgtaatctcagcactttgggaggccaaggcaggcggatcacaggtcaggagatcgagaccatcctggctaacacagtgaaaccccgtctctactaaaaatacaaaaaattagccgggcgtggtggtgcgtgcctgtaatcccagctactcaggaagtcaggagaatcgcttgaacccaggaggcagaggttgcagtgaaccgagatcacaccactgcactccagcctgggtgacagagcgagactccatcttaaaaaaaaaaaaaaatctttcttctggctgcagtcct

SEQ ID NO: 95972 - DNA, 1006 bp, Homo sapiens
aagctctggtgtgtgcaggtatttgtagagcatttgctacgctgacccgttaagtccctacagcagtctcatgagggtagttattattgtaatcctgtttaacagatgaggaaaccgaggctcagagaagtgtaatcattcactgtggtcacatagctcagatctgaacccacttctgtcatcctcactattctgtgtggttgtttggctgagtcttggatgagggatacttgcaatgataggtagcctctggcccctggtggtgggggtagggagtgggagagtcggagaggtagaagaaagccgctagatccaggcctctagcccctatctctacgggggactcccttccaaggaaaattgtctgtgctccagacccccgcagcagatgagtgtgtggaggcctgattttggagagtggggatttgcacccttccgcaggccacccctgtgttcctgctcatacttttgcatagccaccacctgaagttagggcagccccagccctgggggagactttaggggccaggggcagctcagtgctgggctcacaaccacagaacaccagctttcctggcctaggtcacactttgccaggccacaccatgaaggggagagagcgcccatccttggggagcaggatccagggtctgtgagacccaggcgtgggctgcagggagagtgaggtcgtccgcacggatggtggagtggacagaggccagcagaggctgcgcgcccatgtgcgggccaaggggagagcgtaggtaaaggacagtattgcagtcttgggaccaagtgccactaaaccttatgggtaatgggtttttcatcccctgggtaataggagacaccaaaaaatgaggacattacttagtgagtccctcacctccctggccccattcagcagactcggaggaaggacattgcccagcattgagccgtgtgtggatttaatggggtttccagctaaaccttccatcaaatttacggctgtgcctgtctcctg

SEQ ID NO: 95973 - DNA, 1026 bp, Homo sapiens
acttaacaaatgtctatggcagaactggtgtgtaaataccccagctccctcacccctcagctgggtctactctggttctcagaagttctgtgtggagctcagctgcccttgcccagagtggtagggggtgtgccattgtccctgattcaccaccttcggtgtctcttcctgatgtcctcagctgccctgtcatctccaaaataaaccacttgcactcacatccttgtctcaggttctgcccctaagagacccaaacccaatggggttgttgccacttttctgatagatgctgtggatttgaagtcaggaaggatagaccaccgctaacccgaggagtgaccgccagtgtgaaatgtgggccatgacccctgcctggcagagctcctgcccccagcgtgcatagttatgagttatttgactaaggcatcttgccacagccttctcaaatatctcagcagctcagcctgtcctctgtagtttgggaggaaggctgaatggccaggaatagctggggcttctatttcttgtttcctattttagtttttgtccttgttgttggatgacgtggagggagaagggtgggctcaaggtgaataaccaagcccagcccctgaagggagagttcttttcaaaccctggtggcccctgcccgccccccagcctcccctcccccacctggggtatgtgtgtggctctggcacaattaagattcttgctgggtgcccccagcccccgctggccctgctgctgagcagcctgtcttgaaggatcttctgagaacggactccttttctgggagcgtttataagagatttctcatggctcagttcccctatagaaaaccaggaattgtaagtcttacatagctcaagaaagaaagtgaagggagtgagtcagagccggccaagaatgagtgaacagggttggtggcagtgtctcgggaggaattaccaaaaaagaaatgaaaggaaaaaagaagaaagaaaaaaaaaaaggaaaaagaaaagcaaaaccaagttcccccca

SEQ ID NO: 95974 - DNA, 1027 bp, Homo sapiens
atgggttttgcagatcagtgtaatatagaagcaaacacttgaggatgggagggagagcacgtttctcactttaggggtttgcttccaggacttccttttttggaagtatgttctttttctctctcatacacacttgtgtgtacacacacatacacacacacacacacacacacatacacacatgcacacacattccaccccacagcctgttcctcaggctgcagcttccccaaggaaggcgagtgccccgagcctgctcctagctgagcctgcgcaaggccatcagccagtcttgtctgggtcgaaaaggtctcgttggctgtgtgatgcaacttgcagtgaactgagggtgactgtgggcgtcacagcagcgtctcagaaggccctgttcagccctgtctgggacctgtatataacggaactcagtctcacctctgcagaataggaatggcggtgcccatcttcctctttcttgtggctactctgagggttaagtgaagtcatcgatgaaaatacgctttagaaatgaggtttgtacagcgagtgtaaaggcaggctgtttttctaactggtgtccaagccaggtgtggacctgcagtaaaatgcaaatgaccctgttatgtggacaggggccattgtgacagtgagctttgttaggattgctgcatcacccacaagcctgttactgctgagccccaactccagcttctgattccaagggcctgggaaggtgcggaggatttgcgtctctagcaggctcccaggacatgcagaggctgccggccgggggccacactgggaactgctggggaaagtttgctttactttgagttctgaggcaggcaaggcagaagaggcagaatctcctgggggtgggagggtggttacaaaatgaggccccagcttgtttgcagcccccattgcctcttgaatggtggatatcctggctgccttgctcttttcccttccggctctttcttgttccttctttaacagaatatatcccttaaaccagtgcttcccaaac

SEQ ID NO: 95975 - DNA, 1065 bp, Homo sapiens
tgagaactcgctgccttggtttcccttctgcaccctagcgatgttaacccttggccctatgagggttctgtggaagaaacaagatgaggggacaacacccagttccttttaggctctagataaacattatttgctgtcttcttctgtcttttactttcacagcccctgggtaaaatagacaagggatgtgcgtggagacggacattgtatccaaaaatcggaggtcagtgatgttgagcggtttgctcaggatggtagaggcggctctggaggtggccccacatctgctgacttccatgttcaggttcagagttgtgggttcagatttcagaatgcggatccatcagagaatctgtctggtcactcactttcctttgcacttttcaagaatttgatcctttttctttttaagagggagaacagagccctcttggctggcaggtgtaaatcttcactttggggtttgtttgtaccagggtatgttctttctcacacacccacatacttaccctcgcccccacttgcataggtaaacagcttttaaatgtgtattttctttcaaaataaagccacttaagctttaccaaaatgcactgctgacatggaattcacatttggcaaacccctgccatccgtgttttactgagtgcagactattgtaaattaagggaagtcactgtgtgtgtgtttttttcttccagactgttatggaagcagagctggtcctaagtaaaagataaattatggcgggatctaaagaggcatcatttaaaaagtgtcaggatacaattgggttcttaaaaaccatgcagagctgctaaattcacatgaaaattgagtggagctggattgcctggggtgacagcgtccttggcattgatttatcccatctgtttggccggcccatatgacttgaggcctctggtggagaggcggcttccgctgggccggtgctgctccgtggcctctgcaggtcttcctggccccagcccccagccaggccactggggagcatgaacaggtccaggggtcttcatagaccactaggagaaagacaccaatgaa

SEQ ID NO: 95976 - DNA, 1022 bp, Homo sapiens
gagtgtgcaaaataaggagggaagggggaatgaaggctggaggtatggtgtgctcatgggggtgtcaggaggcactcattccttgttgtagatgatggccaaaataaaaattccagctggtgctgtgaacctgaactttgacattagccagagccctccagaggctgtgctgcccctcgccgggtccctcctgggtgatggccatgatagcaggatgctgtgcacctcctgttcctggcatctggttcctattttattagaggttggagttcaccctcagcaatctacagcatgcatgcatttcaaaggaaatgcttaattagtccccaagcctgggcttctttaggctcccaaggagaaatgaattttgttgccttgatggattggggaggacaggtggagctctcaagtatgtttgtaagttgcagaagttgttcatttggagactgtgggtgtaataaatggtatgagctgaggcaggagagggaagtgagactcaagtgatgaatggcagagggggcatttattgaagccagttctccatggcaggatttggggccagacaacatgggggaataaactttttttaatgcaattcagggccgggcgcagtgggtcattcctgtaatcccaacactttgggaggctgaggcaggtggattacttgaggtcaggagttcgagaccagcctggacaacatggtgaaacacgatctctagtaaaaatacaaaaattagccgggcacagtggcaggcacttagaagaattgcttgaacccaggaggcgaaggttgcagtgagctgagatcacgccactacactcaggcttgggcgacagagtgagactccatctcaaaaaaaaaaaattgcaattcagacagtttctttaaacagtccaccagcctcttgattgtgggttctgggtgctagtgaccctccccctgagagcccccaggcaggcctgggcctcactgagagagacaaagtcccactgtcagttctgactgactgtccccaggaccc

SEQ ID NO: 95977 - DNA, 1074 bp, Homo sapiens
aggacagggtctgtgtgaacatgtgtgagccatggagcggcctgccaagggaagtggcactgtgactgaggaaggacccaccttcccaggaggagggacccacctttccaggaggaggcgcagctgttctcaacgccccctgcccgatggaatccactggggagctttttaaaacgctggtgccctggagccaccccagagagtctgcttctgtactgggctgggttttggcctctcttgattccctggtgtttctcctatgcctccagagcctgcgatctaccaaagttggaaaataaaggaggtgaggtgggggtggatgatgtctctcccaactctattggcccctgtgcttcggcctctggcccagcagagagaagggagggagtttggctggtgtggggcagggaggcaggaaggacagagcgcctgagctgcaggctttccctcagccattaaagtttatcgttgccacggacagtgattgaaaaaggctttttgcaggactgaaatgtgagcaatgaaacttgccagttggtaccgacacagggcacttatctcataaaaatatcctccagtgtcaaaaggtttcagtaaatgtggctggaagtattagcagtcatttctggcagcctcaggctcccttggggcctgcagtgaggggctgtaaaagggggctctcagttcctgcaaagaagaagggagggagggagagaaggaggaggggaggggaagcccaaactcagcctactgctgtggggaaagtgctggaacctctacggggcgccccacagcatcagtgggggtgcctgtccctgtgcatactccagctgctgacttggagggtgggagaactgcctaccagaggggccagcgtgccgacttccagccagccagggagtgaggttatgggtatgtgatcctgcttctgctgacctgcaaggaggaaatggagactcagagaggttgggtgatctgcccaaggtcacccagctgttaagtggcaatgtcaggattaggaagctaaagccctcctcctttccagacgctcagagcctgggatgagttctctgt

SEQ ID NO: 95978 - DNA, 1049 bp, Homo sapiens
ctgagtgcttcccaccggactgctgggcatgggaaagcaatcttactatcaggaacgatgcagctgtgatgggtgctgccctcaagggggagccaattgatcctttttcaccacctggtgaaagcccccagcagggggctagactgtcctcaggagccctggtgtggacagcacaggatggcctcatgcccacatggggccctattataggtcattaaacctgcccttggcactgtggggtcagcaggactggttgatagtggggactcttatagcagaggagccatggcctggggggcctgtcacccaggggtgacccttcatgccctggtttggtggtctgtgcactcagccgtgcttggctttggcctgagtggggctggccattggggaaggtgcccaagactgtccagagcgtggcatggacatgggtttcagggtgactcatttgtgcacacttgggtagaacaagagaagtggcatcctcgcctcccctctggtgggcagctgcatggggacccctttcccaagccccttgcatatggaggccccctcttctgagcactggatctgcttcccgtgcagactcatgctctagagtcatccactgtgggtccctctcagcacctgaaaagggaaaagaagcctgggtcctgggctgagaactatgaggcagggccctgcagccatctgtgatgtgggagaaggcagtttccccttcctaggagggaagacaccccctgccccccaacagacctggccactgcttgggccccctggctccagcccctcccaccgatgggccacacatagcatgtgctctgaagctgaagctgtggtttaggggaaaccaatgttatgggaacagctcccagctctagcttgtgtcactccagcctggaggcagattcagggtgggtggtttggtttgggaatcttattttgcccagaaaggaaggggggagccagccactaaggagagtgctgaatggctgatggctggaggacagactgtctacaggagtcagatgcaggctgagaaggcttca

SEQ ID NO: 95979 - DNA, 1013 bp, Homo sapiens
gtggtggctcacacctgtaatcccagcactttgggaggccgaggcaggcagatcacgaggtcaggagattgagaccatcctggctaacacggtgaaaccctgtctctactaaaaatacaaaaaattagccgggagtggtggtgggcgcctgtggtcccagctactcgggaggctgaggcaggagaatggcatgaacccgggaggcggagcttgcagtgagctgagatcacgccactgcactccggcctgggcgacagagtgagactccgtctcaaaataaaataaaataaaattttaaaatccactttacaggtggggaccccacaaccctggggacagcagacccttcgtaggccttcctacagatttattccataagggaccgatgactgaagccatagctacagctcctccgtgtaggcccagctgggggtggagtgagcctccgtccagccatagctggggctgtgggtcccatttccctctgggtcccctccgttttcctgtgctgtggtttcctccttttagctgtcatgtcccaaccttgatccccctggggcatctggtccacccctgcccatgaggcctatgtccatcccacaacttataatgctaacaagccgtttggggcctcccggtggtcagcaggcctgagccaggggtgacagcagggccctcagccacctggtcccttggcacggtctgtcagggcttcttgcctaatcaagggatgcattttaatttatgcaaatgggggagggatggtggcagggagtcacagacatccatcaccccatttcctagcagcagtcattcatcagtggggccttaaagataatacactttttgtttcaggcaattacttaatcttgacaaactcctgtgttaagcagggctattagcggggtccatcattaatcagcgcagaaccaagtgggtgctttttctgaactgcaatcactcttggggacccggggtgggccctttgccatcctcgccgccctaattacaca

SEQ ID NO: 95980 - DNA, 1048 bp, Homo sapiens
tgacttcgctgggtacctgggcagcacttagatgccgctgcatggcagacccattctgttttaaggggttacatttccttttggaaagaccacgaatgaagtgaaaataccaaggctggccttgtgtttcctggagtttgttggtgctccacctccttaccagggcctgggtcacagagtactgctccctcctccatcacacacctgtgacccttattacaccaatgcctggcccaggctgccctgagggggagtgggcacccaggagaacaggggatgagtcgggcaaagactgggacctgggccttcccccggcctcatttcttcttcctggtccaagaagagctcataccgccctaccctaccccacccatgtctggaatttcagagaaatgggcatgaggtctggctgtgacacagattagccatttgactgaaccagggcaagttactgaacgctcctgtgcctcagtttcctcatctctaaagtggagataatagtaacaataccttcatcaattgctatgaggatgaaatgagttaacaaatgcaacatgctcaggaaggctccagtgtgaaggaagccctgtgcactggctgttagaaccactgcggtttccagtctccaaggaagggccagtgcgtggctgactcctagaaactgctctgtctcctactgcggccccgagcagcatggctttctctcctcggtcctaaattaatttagactgacagtcggtagctactggccacccttgttatcctcgggttctgttttccaatagtgggaggattcactcattcatgtattcattcattcactcactgggcacatactcctcacctcctccatgccactcgctgggctggtcgttgactcagaggaaatggtgtggagggagtatcgtctgcctgcggtggaggggggtggcagaagaaaggtccaggaagcttcctggaggcaggctcgtgtggactggggttgctgagggcaggctgagttggcatgatgaggatgagggggtgtggtggggaggggctttctagg

SEQ ID NO: 95981 - DNA, 1045 bp, Homo sapiens
cagtgctcgtttgcttgtccaggtggctgattccgctgcccggttttaaaggtcattgattgtctgtggcaggccctgcctcagaatgcagcctggaataaagaggtgccttggctcagcctgggaaaccatcaccagggcctggtggagaccaaatgtggtggccttactgtcgtctcaagagctatggcagagtgcaaagctgggacttgatgctctcggcaggacgcaaggcaggacctataagccagatcaagaaacctcttgttgggctctgcagggaaggggctggatgctagttaagtacacagaatggcaagtgacaccttcacgacccgtggggaccagacagaggaatggcatggtcatcctcctgaaagggagaatcacctgcgacaagtgggcttcttgccggggaccagtcagcattgcaatagctagccgacaaggtccctgccagctgacggggtcgccagtgtatactgtcaaatgagtatgtcaaggggcagcaagattttaggggaaagcctgaatccatcccaggccacctggcctagccctggcctgtgacaggtggaaggagcactagggcctgggcaccgtctcctccagctcctgggctggattcctgctttctgcattggattctgcaaggtgccagggtccctgggagccatggtcctctgggcttcaaatctattgcattttgcagtggggaggctgcacactacttttttagaaaccttctgtgaccaagacagagttttcaaccttaagcaagcttgaccagccctattgtttcttccagccctaaaattctctaatgtgggactctacatgtctacccagacagacaggcagcccctcccattccttgtgatggcggggatctcccaggtgtccctctggagctcaccccagtctcccaccccttgctaaaggggcaggagcccagcagaggggtctgtagggatggccacaccggcacccttcggggccctactgcgtgcctggccctgcactagctcttctccacttcacagtc

SEQ ID NO: 95982 - DNA, 1008 bp, Homo sapiens
gtggcctgtctcctgtcacttcaaggccactgttgcagggaacagatcccatgactgcctggctcccgagcggccagacccaaatggcacggggctggcctctcccgtggcgttggctggagcacactcctcaccctggaatgtgcaggtccctctgcatccctacctgccctcaccaggagaccagtctcagaactctgtgcctggtgtggagtggctgtgctggccccagcccagcacactctctctttcggcagctaatttgtcaagtaacacctcagcctggggtgggcagtgtgcgtgggcggacccagcagaggccacgggtcctgctaggctgtgtctgcagggcaggcctgattgcgtgagtggcctgggcctcagccagccggacaccagccagctcgtggtgttggaatttcctgtctgattttaattcctccccccacgtttttcccccaagtgagacagaagcactttttagttgcacgttgtggagtggccattcaggatattattcttattaaatgcttcctgtggggtggtggctgggcatcaggagggcctctggaattctcctgtcctgtggcttattattgaaaatcatggtgccatttgcataaggccctggggaaggaggttttccatgattcgtgctcttttggtgcttcctacctctgatgcttaggccagtgacttcgtcctcatttgcgaacgaacacctggtcacctgggctcacgtggctgaagggctggcctttgaaagtgtcaggatctcagaacagaccaaggctccctagcaaggggagaaagtccctggcagcctctcccagccctggtgtgcactttcattcatgtaccatcgaaaagcacagacccctggatgccttccaaacctgcattcccagtggcacccagaccccttgcagctgctgctcagaagcactggtaaatggtcaccaggattcaaatgtctcccccactcccgcctctctgatcttctgtgtt

SEQ ID NO: 95983 - DNA, 1410 bp, Homo sapiens
atgtttccatgacccagttttcccgattctttgtctgaactctgcagacccctacctccttctctcccccaggaatccacaggatcatttctaatggggcattaacttgagccaggtttccggggaagggctgtccttgccccctcactgccctcctcactaacacaagaagaccattacacccagtacactgcccacaccaatgtctgctcgccctgggaccgccagcaagaaacatttggtgttgaaactgcagcgtagaaaagttccaggattttaaagaaaaagccgtcactccgccgccaccctcagcttctcaggctgttgggctttctgtgtaggatcaaaaacaaatgtgcatttttttttccagaggggagtgatgatccattgaaaattcccatcttagagtttcttcctcagaaacttaaaaagagagtcatttctttgaaatggcatacggggtgtgtatgttttcagggggatggtgtgtctgtccctctgccggaaggacatgattaattttggattttttcttttacttgaaaaaaaaaaaaaaacacaaaagccaacaatgaaagctgtgtgtgtaagggtctggctcaggatgtcactcaaggcagcgcctattcttcccacgcatcttcatgctcctcgtgggcttctgcagcctctggatgcagcagtttcttgccagagttggaaagcagaatttttccctcctcagcctggccagggggctctgagcaaggcattcacctctgaatgtttccatcgggggctgtgggacaatccgtgctggtctgaaagagaccaccaatgagtcagggtcaacctttatccctcaggttacttgggaagaaaaggtggtctgtagagactgtgtgtgcacgtgtgtgcatgtgtgttggtggggggtgttggggtgctgtcctattatacctgggctcagaggattggggctggggctggggctggtgtgtcaagtgggttagaagggccgttgggtcagtcattatacatacagggccacaaagatgagccagcatctgcacccagagccctggtctgggcctgctcaggaggtccctcctgaagccttggggtgtcactggctggaataagcgaggccctttgcctgggaagtgggcaaccatttacagatagcaggaatgtgccagtaggaagggacctcatagctcctctaatccctgttgtacaaggagtgtgagacccagagaagggacataatttccccaaagtcccatggccacctagcggcagggccagtctgggattcctggcggatgggcaccactgccccacagcactggaccctccttgtacagcatttccaaaagttgtatcagagcaggtgactgcctgctcaggacttcccaggggcttccc

SEQ ID NO: 95984 - DNA, 1032 bp, Homo sapiens
aggaattttttcttttaataaacaaagagcatcctacaattatcatgatgatttgtcgagggcaggccaagttcagacaggaggctgactcagctctggaaactgacacgcacgtgctggcgttttcgatcctgggggcacccgacagcgtttaggggtcaagaattaatattaagagctggagaactaacagatccacatagatgtccactttatactgccagcaaaacgggacagcagttgggtgggatttggccttcctgaggctggcggcaccgtctgtgggccgtgccatcacaaatggctctaggtcaacacctccagcctgcgtgcactgcagcatccggatgccgtaacctggtgctgctggagccacacgcagccagggccggcatgggcagaagccggcggagttggagcctgtcgctctgtcagccctgatttgcgggctgagcccagttttgtggccctgcctgtaatctccccgagttcaaagagtgcttagctgcttgtctttgtcaagagcgcagttggggatcttttatgtgaaagatgtagaattctcgggcagactttgattatttattcatcccccttcgtgggtgtgtgatcgcgcgggcactgcggagccccttgtcctggctgctcttgctatgaaattcattgagctttaaagccctttgaaagtagctttttgagggagggggaaagtttttgaagtcttgtttctctctccccctctgcagtgccgcagcatctcttgccaccattccatgcgcccctaccgattgacatgcgacaccaggaaggaaggtaccattacgagcctcattctgtccacggtgtgcacgggtaagtcctgccctctgcctgctgctcctggcgtgcagtcacctgccatggggaggctgggccggcagcctcagccacatctcctgcctctgtctttcttttgggggttcctgatctacattgtcctgagcgggcgatcacctttgctatcatggcctgggaccctgtgtgagcatgtgc

SEQ ID NO: 95985 - DNA, 1049 bp, Homo sapiens
cactctctcattctgccctgccctctgcccctccggagtaccttggtcatcacccaagagcctgccattgtcagttctcagcctgccaggctacccgcactgggacccattgccgaaccctccctagctgtgattaacatgaattaactcacctcagctttctcatctatagaagggccagatctgctgagacaacccacataacccagccaactgagttattttgagaaggagacagggtaatgtgagtaaagcgtctagaacactttggaaacattcaatggatatgagcaacaatcgtgatcattgttgttatcctcacttgctgatttgagaagggggccacggcaggctgggagactgggtggcagaggccggccacagcatgtccttgggagagttgactgtctggggactgtggcacagaaggtgggggatggggctgaaggagtgctgtggtgcggtgtggtgggggtctttctttcccccagttgaggaatttggacttcctccttttggcaaccaggagcagcggggagtggtcagatttattttcaggcagctacagcagtagttagggagtagacaggagaagggcgggaactgtggtgagaggacctgccagagctgccacagtggccctggggagaggggagcaggaccagggctgaccacccggctgtaaacaggcagctgcacgtggggaaggcagggcatggaggttggtgtgaggacagccttgcagcccagcccagctcgatggcctcctcatagacacccaagcccactcctctgcagagcacccttcccggtcacttaaggttcaaatgcacagcaggcttgcatggcttactgatgctcacgtggttccaggggaggaaagtcaccacccacccgtggactcctgctgcagtgtctttgggctgtgcaaaccacaagtgatggggagacaaatggggcaggggtgtgtgattgctggtcaagcaaggttctcttgaagcccccatggggacatccctaagtctccaagagtctgtacaagggcgaga

SEQ ID NO: 95986 - DNA, 1056 bp, Homo sapiens
gggagcaaggctgaggtgtggcgaggaagggtccctaagttggtgctccccatttcctcagtgtatgtggtcacacaagcatgagtccggcctgccctgggccagcgttaacttgtgtcctggagaggaatgtagaagtccatgctcctggttcggggggctggggtggaccttcagctccctatgttgcttttgaggacctttccagccctgccctgccctgccctgccctgccctgccctgccctgccctgccctggggcttcagagaagaccaatttcagctgcttcctgcccagaagggcgtacagaaactgccccatgcagaggttcccaaacctggctgcagatctgaacacacagggtgggtcttaaagatgcccattctcaggccctggccccaggagttcttgttgattttcagactagggtgaagcccggaaatctgcttatttacaggcgcccataggccagagtttggggaccactgcaggcgccgctgcttgcttgacgtccgggaaagcagccccagagctgcttgttggctttctggactcatcactgacagcgcctcgccgccaaaacacgggttgttaaaaatcccctggttcctcgtgataacccattcacagacaagtccctcctaaacctattcatatgacctaaacctattcatattctcagcttgcaaaaggcagtgagtgtatggggtgggaacagctgcagtatctcagccttcctttctcctcctgcctggcaccatctgacctctgacatccacgactccacccccgacctgaccactgctgatggcttcctgcagatctcttgatcctgagctgtagttggtttgcattgcattggcagtcacggcccaaggccacccttcctggaggagtgacgagggggctcttgctggcacagatggctcagggttgtagctatcaacccaggcccaggtatgttagggcaatagagtgaacgccagctggtgggcatgggggcctcacctccctttcatctgcatgcttggtcacgcaaaatgcatattacccag

SEQ ID NO: 95987 - DNA, 1010 bp, Homo sapiens
gccacctgccccctcactacctgggtgcatgcggggccctggccgggtctgtctcagaaccccagctccccacacctgctccctcactacctgggtgcatgtggggccctggccaagtcggcctcagacccccagctccccaccatcagtgccatcagaggcccatgctcagtaaacatcagctgatccgggggagtgacgtgtggacgcagacacagatcagcaatgaatgtctgcaaactgcggcctcagctcccgtacacagagcctccccatgaggacagactgccaccagacacacaggagagtgcagattgataaaagacatggactgcgcttcagtttgaggaagggacagttctccattgttttccaaaagaatttgctgtatggctcttaaaaaatgcaaatccccttagtacattttggaaaggacttgatttctagaactttttaaaacaaatgtatgggaaacatggtaagcaagcttgccagtgtacagtttcacctacaaaaccaaacaacaaaactcaaaccaacaaacgaaaaccctggggaggagattgaattccatccagaggagcgttctggagctctgtttctatttgtcggtagagccgagggtggcaggagctggccttgctctccagggaggccctgggagagcagacacatgcacgccctgtcctggcagtaagaagttccagtttggggaggaagagatgcagggcaagctttggggactccagcttcctttccagcaggtcagtgggcccagaggacgcctgcccagcatttctgaggaagtgggcacctggtcctgagcagctccgcaacagcaaaaaggtcccagtgtctccactctggagctccgtggacccacccatggccctgtgatcctggtgggtggtaggcatcttggcccaaaggcagggctggtgtacacaagccagcggttccgaggcaggaggaaatggcatgctggggctgtgtgctgggtggattctggc

SEQ ID NO: 95988 - DNA, 1057 bp, Homo sapiens
atggacgtgctcaggtcagaggaaggagccacctaacacagaagcaccgtaggaggatcctgaccttgacctggggctagggggcaccttgggtgagaggtccctgagctggcacctctgggaggagaacaggagttaactgggggaagggatgaagaggggaagggcatgactggaggtgcagacatcaaagggcaaagctgtgagaggcaagcatggccaaggaccagagagtggcatacaggacacagaggggagaggcaggccctggccacatgggattgtggcccctcgcctgctgccactgaggtcataagtcaccctgagaagcaggcaggtggtgagatttgtaggctcatatccccaagtgactgggcctccttttctcttcatcagcaacagctgttggaccagtctgggggcatccgggtgcctgtgttcccacccgctgctgccgctggcctcactgtggccatgcccctggtgctttgggactcagcagtgctgtctgttaaatgggacatgaaggagctgttcctgcctgtgtctggccccagccaccagcacagatcttggagcaaagccatctctggcatgccaagggtgggcttctcctctgactccaacccccgagtgggacagcccgccctgatggctggtgctgagtctgggtgagtcagcagccctcagctccacattgttcagcttctccaagcaggcaccgaggctggggtgtgggggccccaatccctgcacttccttccctttctctcacaccttaaggaacatgccggttcttgcccccacaccttggctcaggcggtgctcaggccagatgccctcctttctcctccccagccctcaaagtcttacttgtttctcaggcagaagctacacaccgtccaggtacacatcccccatcattctcactcccagggacagcacccactccgagggtctggcatgctcgcttaggcccagccagctgcatgctgagttacacatggctgtgcagagtgctcattaccttgaccttttatctcccaccaaaaatctc

SEQ ID NO: 95989 - DNA, 1024 bp, Homo sapiens
ctgggagtgaggcccgctggagggagctcctgcttgcctctcactggccgcacagcatggagaatgactcccctgtctggatgcagtgtgctcgtggtcaagtgcagtggttggttccatttttccataccctcctgaggggcacacagccggtgcttacttcatgggggctgccatgaggatatagtccaggcatccctgcagagacccctggatgtccctacagagcccagggcctgagagaggaaaaggctgccctgggctacccctgggctcctgactcccttggtgatgcttgcggtgggaagggggaggtggagtctaccttccccaaatggtggcaactgcaccgtggaggcggaagtcccagctcctccatgtgtgacccaggccccacctgccatctccaggcccagctgcctccatggcagccccagacagtggtgtgcatgtggctgtgacaacacctcactccgggcctctcaggggaggctcacctggccagtgggacctgggtcaccttggacagactgggcctgctgtgtggcctcaccatgtagcttgaaatccccacgtgatcaatggctatcgcagggggcctcagctgtggttggcacaccccacagggcaaccctggtgccagggaggctggcattcccgggacctgaacaagccacgtagggccaccggcatctgattacaggctactgtgacctcaaaccctggccggcatcctgcaggctctgggaacctgccgtgcctggagtgtctggggaggaccgagaagtcaggacagaaggcaccttagctattctctcagcctgtagacaccctgcattttgctgagccacactcagccttccagaacttgtatccttcagcccaggtctgcccccaggagccatagaggcgtgatgttgtctcagagccttctcttcacaacccacccatcccgtggcaggatgtgagtgtcatcctgctgcagtcacaggctggagcccacaggacctgcccttgtccaggg

SEQ ID NO: 95990 - DNA, 1051 bp, Homo sapiens
agagattgtttatgagtctaatgaagtggtggagtacagaggtcggggtctggcctccttcagcagcaacaccgcagctcgtgctggccaagcccaggcccagcacagtgcaaacagtggggcagtgggggaaaatgccgaggagagaaaccccgacaccaggtgtgcatttctctctgccttttttttttttttttttttttttttttggcaggagaaggcacagccagtgccaggttctgacggcttctttctctcccctctgcccacagtggcccaggagcaccttaaggagaggggactgtttggccttcctgctccaggcaccaccccctcagactattaccaccagatgaccctcgtggcaggccaccccgcgccctacggggacctgctgatgcagagcgggggcgctgccagcgcaccccatctccacgactacctcaaccccgtggacggtgagtgctggcccccaggggctgaggatggggctagcagatctcctcttgaggctgagaaggtcactcgctgtttcttttggggacaaggacccttaaggagaggtcgggctgtaccccaatgccttccaggatggctgtccacaggcactgaatctttggacaacacttactgagtcaccacaggccaggaggcgttgtaagcatcgcagacaccacagcaaacaaagctggaacttacagtgcaatggggagaaacagatgccaagtagctctaggaattacgtatgaaagtagccaattataaatggaccagggaaacaaagcaggggcggggggagcgagcactgggtgagtggggtgcagtttggaatggggaagtcagaggaagcctcactgggaagttgaaatctggggggcgagtgctccaggcagaggaaactgcagtgcaaagggcctgaggcagcagtgggcctgccaagctcaagaaatagccaggagccagtgctggcagtgaggggtgggagtgggggtgaggccagagtttccaggtggggtcttgccagccagtgcacctcagaagagactggctt

SEQ ID NO: 95991 - DNA, 1874 bp, Homo sapiens
cgcctcctccaggaagtctctctggaagcctcctccttccctttcccctgcccccctcagtcactgggacagctccctcctctggctgctccttcactctttgcctggcccacctcatacttacagcaaccacctcacattgctcctcagctatcttgaacatctcctgcttcccaggaaaagttttgctgagaagagggcggccaacctccgaggctggcccctcatggatatggtcctcgccaggccctggtgggaggccataacatgcctcagtgatgccaccagaatttggtccctgtgtctgtcccgttcttccttgcctttcccagcatggtgtttagtccagaattaagcacaccatccagatgttcaacaacacctgtcagctctgtaggacattgacgtccctctgagtacacacacatccatgtgctctgttcccctctcctctcagcagccctacacggtgctcccacaagccacagtgaggtgtcagagatactgagagaaagttgtgtgctagacacgctccttgccaatattagaaaccaaacagcagcaaccgagtgcatgaaggatcatgtgcaaattgccacacccgaatgtcagcttcctgcaagcaggacccttcttccaagggcctgagggtggcaccaggccaataggaaagtggacgaggcagagaaaccacggccaagagaggtgagatgaggcaggtgtccccacagggcaggaaaggctaagccaggcagccgggagtcatccagtgattttcagcatgagcgtctgtgtgtgcacgtgtgtgtacgtgcacacgtgagagacagtgaattggaatgcagactgcctctgttctgtgcttttaaacacattcttccatgtaattcccttagccaccttctgaggctagaaatatgctccttactttaagatgagcaaatgggctcccagcatctagcggcttgacccaggccttgctctgtttgttaccagcaccatctgcccttccctgggctgcagttttcagcagcacatgcacctgaccaaccatgagccctggcccaagggagggccagccgggccaggtggacttgagctcagcccagagcagctgggccggagccagaggggagaagtagtacagcgagctccagggcaggcctgggtcaggcctggctgcacggtgtcctccctgtggtagctgggctcagaggtggtgacaggactgaaggggtgtggagtggcaatcccaagccctgcgagctgtgtggattaaacacattgactgagatggcacatgtgagcctggcccagtgcctggcatctagcaggtgctggaataatgctggtgcaggtctctttccaccagtatatctttccctctttaaatccactcactcttgcaggattctgtatcttcattgtaggcagctctgtccacctgctgcctaagcccaggccccaggttctcccagaccttttccttgccatctcccatccatcccatcctgtccctcaggcctccaagagtggcgtgtcacccctcccgggccagacagtgacatatcgccctcgtagcactgctccatggctgctgctcatccagcatccccatctttatcctctccgccatcctgcgctcagcccctgccacttctagccccctcaggataaaatccagactttagaacccccgtccagaggccttcctctccagctcatctctctccactgcacactggtcttgccatgcactgccccacatgcaggtccccagatacctccctgagctcattcctgcacagagtcctgtgcacggtgcgctaggccttctcctgagaccccacaagaatccagccccaggcctttca

SEQ ID NO: 95992 - DNA, 1919 bp, Homo sapiens
ttctagggtgcagggtactcttgtctggggcaagccctcttcccttccacagttatgtaggtgtgcgacagcagctggtgagggctgagggcatagccatgtgtccacacatatgtgtgcatatgcatgtgtacacatgtctgcgtgtgggtgcacacaagtgtttgcatgcatgggtgatgtgtgcacctgcgtacatgtgtgcctgcatgcatgtggtgtgcacattcaaagcaacagcttcccagagcctcgggcgactttagaactgaggacctcagtacgcagaagcacctgcctgtgtcaggatgcctctcgctgccatgtcctcgtgtcctccctgccctgttacagcaggctgcccagtaggctctggagagacagccaaaggcccagacattgcgaagagtctgggggccgccatccaggcctctgcttggcaaatgccctatcagggggcactttagtggtgattccaggtacaacgtgacctgtgaccttggagcacttacttccattccctctcttccccatggaattctccatagcagtgggaacaggcaagcttctgccacacacaatagcatggagaaatcttacaaactgaccatgtggatgaaggaggccagatatgaaagagtatttaaaaattccatttacacaaagctcaaaagtaggcaacaagaagctgtgtgttagaagccaggatagcagctgcccttgggctggaagatggagggggcctgtggacaatggccaagcactgtttcttgacctggggctggcttcccaggtgggctaacttggtgagaggccaccgaactgctcacttatgattcgtgcacactcctgtcatgaggtaagcattgctggattccagccctggtctctgcacccagtggtaaatacactatgctcagtgctcatattcactcgcccaaacaccttacatgcacttctccagtcctcaccacaccctgcgctgctcagtccattttacagatcaacaaactgaggccgagaggtgacatccttcgcccaagagcccacagctggaaagtcggcaaagctaggattcccattagaccatccttgcaggctcttcctatcccccacccacatgtcaccccctcccccatccccagtgatgctgacctgtcttgtgttgactatcccacagtgtcccgtttctccagcccgcgggtgacgccccgcctgagccgcaagcgggcgctgtccatctccccactctcagacgccagcctggacctgcagcggatgatccgcacctcacccaactcgctagtggcctacatcaacaactcccgaagcagctcggcggccagcggttcctacgggcatctgtcagcgggtgccctcaggtgagccccgcctgcaagcagagagctgaggaccagagctgggctgagggcccggtggggaggcgctggcttttcagtgggcgcttttgacccgaggagaaagacaggacctgtggcatttgtgaatccacatacttgcaccttttttatgaattcaaaaccaataatgatcaaattgaaatgagcccatatctgagtacatcttcatggaccaggcctgtcatgaatgactcaaatgtgaaatcaaaggtgtttgaggtcaaagatggttttcctagtatttcactgaatttggtggagcagccaagtattggccaaccttggagaccacacaaaatgtgacattgacatggcccatgctctcagcaagcctctgggctggcagcaggcctccctctgtagccgcatggtggcacacccaagcctcactgacaccagccacccttctcccttctgtgcggctctagtctgtctgaggactcagaccccagccagcttgactgaaactcacatgcctctccagcacctccggaagag

SEQ ID NO: 95993 - DNA, 1009 bp, Homo sapiens
tctataaagatgaacccactaaattagtagctcgattgctgggaagagcagacacacacgcacgtgcacacacatgcacacacacacatgcacgcgtctccgattcatattcagaagctgtccagaggcgcttgcttctccccagctctgtgaacttagcatttaggacacgccgactccctctgcttcttccacttatgcaacttgctcacaaataccgtaggtttcttttgtgttggagtttgtcctcccaaacacagttctcacccagaaggccagaatttcccagcaaacgaatgcagctggtgaagcagggtcttatctaaccccttctggatctcaaacttaatttttcaacttgtaccacctctttggggtaaacaagccctagatggagcagggaccgtggagctgtgagttgcagaacaaatcagttagatgaaaggaggagagagggacagtctctcaggccaggggaaggccaaagccagagcatgcagatgaggatgtcaaagacgtgctctgtgataagtgggtcagccccaaagagcaggcacggaattcctcagatgaatgcggagggtccccaaactgggaggagggctttagccaggggcttctgcctgtgccctggactgtcctggagctataggtggccacctccaccaggccctggaaaaagcagaccccttcacccagctctgtctgtctgtctctctctgtttctctctgctccctggaaagatggatggagcaggcgcacaggcgagctggagcccctggtcgattattaacaatttgttgctaagtaaaccaataagaaaaaaatgaaagccattgtcaggaagcatttttatcatttgaaaggctttaaaaatggaaagtgaggctaatatgataagatttccctggaagttcaaagcgctggagatttcacatgctccagcaggggcatctgtacgcgtgacagttgggcgagtcgcacagggcatgagggcctggcagtttt

SEQ ID NO: 95994 - DNA, 1037 bp, Homo sapiens
gtacagcctgcgggccaagtacgcggcagccactggcggccccccgcccactccgctgccgggcctggagcgcatgagcctgcggaccaggctggcgctgctggacgcgcccgagcgcacgctgcccgccggctgcccacgcccactggggccgcggcgtggcagcgacgggccgacctatggccacggccacgcgggggctgcgcccgccttcccccacgaggctccaggcggcggagccaggcgggccagcgaccctgtgcggcggcccgatgccctgtccctgccgcgggtgcagcgcttccacagcacccacaacgtgaaccccggcccgctgccgccctgtgccgacaggcgaggcctccgcctgcagagccacccgagcaccgacggcggcctggcccgcggcgcctactcgccccggccgcctagcatcagcgagaacgtggcgatggaggccgtggcggcaggagtggacggcgcggggcccgaggccgacctggggctgccggaggacgacctggtgcttccagacgacgtggtgcagtacatcaaggcgcacgccagtggcgctctggacgagggcaccgggcaggtgtatcccacggaaagcactggcttctctgacaaccccagactacccagcccggggctgcacggccagcgcaggatggtggctgcggactccaacgtgggcccctccgcccctatgctgggaggatgccagttaggctttggggcgccctccagcctgaacaaaaataacatgcctgtgcagtggaatgaggtgagctccggcaccgtagacgccctggccagccaggtgaagcctccaccctttcctcagggcaacctggcggtggtgcagcagaagcctgcctttggccagtacccgggctacagtccgcaaggcctacaggctagccctgggggcctggacagcacgcagccacacctgcagccccgcagcggagccccctcccagggcatccccagggtaaactacatgcagcagctgcgacagccagtggcaggca

SEQ ID NO: 95995 - DNA, 1020 bp, Homo sapiens
ggttgatcctcaggactctgagggagcatcgttgaattttcctgttcagtgtgaccaagacccacctggaaatggaatttggaactggcttcaggagacatcattcctgaacacactgtagggtgaattggtgcatcttccccaccatacacacacacacacacacacacacacacacacacacacacacaccccaaaccttttcatggggaatgtgtggcaaccttgccaaacagcaccactcagagtgtgactctgactgtgaccttggccttaatgaggaacttcttaggagagtttgaggacaaggccaacatcgtcatctgggctcgctgcgtcccagcacatcaaactctgtccagagacaaggccaactgcaaatgaaagccagggaacattgctaagggtctgtggctctgtggtggtgttcatcgccttcctgagataggatttcccttgccagtcccaacctgtatatattctgtacagaagacatccctgaatatactgtaggtgagtcgtccagccaaatttatatctccaaaacatttttagctttttctacatgctatgaattgagatgacatgctcaacttgtaaataagtctttttgtacattaaaaaagtaattttttcataatttatcttgtctatctgcttcccccttgacagtagttaatgagaacctgggcagtaaatttggtgcattcgagcagaaattaggctgtattttttcttaacagtgtcaaaattgactatcccgcctttgccaagaaatgtttaatgctgaggcatttactggctgtttgtttgttgtctccttggggccgggcagggtttgacatttcacagtgaatatctgactgctcttccggtgagccactctgaacatctatatgcattgcagaccggggtatagacccaaacactcctagggtcagaaccctccctttggtgggccctctgatggagcatatttcatcagggtggggcggggtgagatgggcaaacccccaaggc

SEQ ID NO: 95996 - DNA, 1051 bp, Homo sapiens
ataatacacaggaaggtgctgagcacacagccagtgctccataaacacttgctcccttccggctgagcagaagaggcctggctagcttcacttctggtgacaactagcaagtgttaggacagtgcccctgccaagggccctcagaccaaccctccagggcttttatgcctcagatggctcatttgcatgccctggttggaaactgcttagctgaagaatggaatgttctggcctcaccaatttgattttcaaatcacttccctctgagcaatagcctcccccaagagcagcatcccaatacttggtcacacccatggactcggcctagtgattttgggacagtgagattggagggagggaaggggctcaccccaccctttccacaccctactcccagtatgcatatttctagaaaccaggttaagaatctgtagatttggagagatgtcagggcaggctgaatgggtggctgtagggagagggcaggattcctgctttggcagggaaggatgttgtgtgtgctgttggagtctcagtccctatttcttaccccaattgtctatcgcaggcttctgtcccaggggaaaagagctggccatgtcaagcctcaggaactctcctttgaccctgaactgccaacctgccttcttctttcctgatgatgccagcagagggcaccaggagccagggaggagctgcgagatgtcctggcctcagtgctgcagggatgctgcccccagccagcctcacctgcagacggaacagggagccgcctggctggagccatccctcagagagcggtccctgctaccttgcacaaacctccctctgagatcagaagccctttcatggagggcaggtctcaatttccagttctttttggaacaggaaacagagggacttgtgtgtatttatacaaaattgcaactgagaaagtggaggctcagagagtttaagccactcgcctgacaccatccagctgctaggtgacaccaacagggtttgcgccctgatcggcctgacttcagaggtgcactactgttctatccga

SEQ ID NO: 95997 - DNA, 2323 bp, Homo sapiens
tgtcagctagcatacggtgggcccacctggcccactggctgtttatgccactgatttatgatagggaatattatctttgaacccaatgaagtgttttctcccccatcacaaaaaaaaaaattcttatttttagtagacatgtatttaccaaaaatatgtactcaattattgtattttggattttatcaatttaaaaattgtggaaatttgtttgctcttacgccaacataatattgattttgcctcttggctctgaaagcccaaaatatttaccgtctagcccgttacagaaaaagtctgctgactactgagccagacctccattacctccatccctgttggattatttaaagaaagcctcagacagtaagggcttttttaaaagaataaaatgacttggtttgcgcttggaagcaggggaagcattcagatgagcggtttctgcattaaccctgcctatcacgcatctcgtgtcctgtgtggctggcgagccccccttggaaggttctggtgcttcagctggctcctgcagagtccaccccgcctcgtggtgggaatgcagagccctttgctttccttcttgccgcctgcttcctgttcctggggacccgctgggcctttggtctgcatcccctggccaggtccctcagggttgatgcgtggagaaggactttgagcagtggtgggcagcagtggcctcctggccagctcacactcttgtcctgggaggggcagcctgatctcacctccacctagtaccttggggactgaggaccttttggcttctctggagcctgcaagcctcttcccatgtgtccagctgctcttcctgctacaaaggggactgctcacagtggcctcagcttggtggttttgaggggccgccccccggccctccataagggtatcctgggcctgagaattctgcatctgccattggaggatggacagcctcaaatggaaggagtcccacgggagatgggtccgaggtccggctgtggccatccagccccctgtggcttgtccagcctctgtgcacccctggtgtcttcactccaggggcagacagcagccactgcagttcctttcttcgtgagtaacagtagtgatagcagctggggctaacaggctaggctttgtgttctgcgcatttggtcagcttctcactcgatcctccctaaagcaatggggaggcccccactagcccagttttcaggaagtcaactgggaggttagatgggggccagggtcccacagctactgatggcccgagccaggttgagcttcctggtgtccagtccggatcccacttgcagatctcatgctctcagataggtgggacaagttcttttgtcacagtgctggctctgtcctgaggcctcattgctggctgggtgtgctctgctgggaaaagctttgcggggcttgcttggttaaccacagaagagaaggggactgtttggggtgcctctctgcagcctccccgtgctgggtggaagcacggttactgtgttctctaatgttcatgtatttaaaatgatttctttctaaagatgtaacctccacacctttctccagattgggtgactcttttctaaaggtggtgggagtatctgtcggggtggtgtggcccttggatgggtcaggtgggtgtgagaggtcctggggaggtgggcgttgagctcaaagttgtcctactgccatgtttttgtacctgaaataaagcatattttgcacttgttactgtaccatagtgcggacgagaagtctgtatgtgggatctgtgcttgggttagaatgcaaataaaactcacatttgtaagaaacctctgtggctcaggccttgagttgttttgcttttttgtttgttagattctggtaaaatatacaaaacataaaatttaccgtcttcactatttgaattgtacatgtcagcggtattaagtacactcacattgttgtgcaaccatcacaccatccctctccagaattcttaattttttgttgagacagggtcttgctctgtcacccaggctggagtgcagtcgcatgatcactgctcactgcagcctcgacctccccaggctcaggtgattctcctaactcaacctcccaagtagctgggactacaggcgcgtgccaccatgcccagctaatttgtttgtattttgtagagacggggtttcaccatgttgcccaggctgatattgaactcttggcctcaagcaatctgcccacctcaagcacagtggctgatgcctataaatgctgagattacaggtgtgagccaccacgcccagcccagaattcttttcatcttgca

SEQ ID NO: 95998 - DNA, 2282 bp, Homo sapiens
ccaccttgtcccgtggatctagccaccgagtgtctttttttttttttttttgatggagtcttgctctgtcacccaggctggagggcaatggcgcgatctcagctcactgcaagctccgcctcccgggttcacaccattctcctgcctcagcctcccgagtagctgggactacaggcgcccgccaccaggcccggctaatttttttgtatttttttagtagagacggggtttcactgtgttagccaggatggtcttgatctcctgacctcgagatccgcctgccttggcctcccaaagtgctgggattacaggcgtgagccaccacgcccagccaccaccaagtgtctttggggccttgggggccataatatccctgagaaccacagttgtccaaatcctccttggaacgtaggttttcatccttgggcctggggctatggtagaaagacctattgttaaaaagacactaaacgaggcagatgtcagggcatgtgagatccctgcttctgccagcacgctttgctgtatgcagccctattttggtggtctttgctgataccctaacagcgtgccttttgggactccccaatactgtggcactgcaccttttttcctgtgaaatacacccagtgtttctctcttgcagctgagagcaatgatggctaccacatcatcctgaaatgtggactctgagcagcagtggacctcatacctgtctccagctcccagccctgtggatccccgtggatgtagacattgccccactgtaagctgtggcctcaccaggcaagctgaggccaggagggaccctgcccagtctgtgaaagctacagagcaccaaccagcagaagcctgtggacaccaagtacggtgtacagaaagccagtggctcctttctcccttcctcttggcctccagattttgaatggttccttgttcttttctattggtccaaccctgacgttctaaaagggcaaacagtggagacgtctgctctgaaatccctcatcccttagttggaagctgattgggtatcttggtgctgcctgtattggtcccttctgaccactctcctgcctccagagaaagctctgcttcaccctggaagctggtacctttacctcctcctctgggagttggctgcatggccagcactgccgacttgatgggagcagtttgccctcattctcctgtttcaggtttgcttcccttctcagtgaccctggtgagcatccgcctttcctgttcttggatgaattgatgggagtggggctattctgtgccttctacctctttcttctctacgttgtttctaaggatctgctgctgcggaacccaaagatgtgctcctgtctctgcactggcgcattggcatggtagatgccacaatgtatgtgcacggcctttctcagagacattagttctgaggccctttgtggggaggttagggggatggtaatagaaaaagactattttatttcctggcaatcacgggtaaggaggattaggaatgagtattccattcctaggtgtcatcagatgaccttgaccaccacaataccaggccctcttggatggacttatagaaagttagagaagaccttgttgaaccgctgctaaacttgccacaggagcgatgtgttttctctgagtgcccctcacttacatgtttatctttgtttgtagaggctatgtttaggatattttgcctgcatcagaatgggtgcatcatctttcttaatggcctaactatcgggaaatttgagtgtcagtaactgtggtagactcagaaattcgtctttgtcttgcctctggttcctgggatccagtgatctctactggcccagggcttcagctcttggttaatttaggttcatggggaaccctctgaccacctgaatgggatgtcatagcttctaaatggagcttctgtggaatgaagtgctagactgaaggactaccagaataaaacagggtctacaatggggagaacttgttttatagatgaggaaaccaaggctcagaggggcaaagtcacctgcatggtagcacatagtgatagggtagcgatataaatttatcatataaaccaggacatctcggaataaaaggggctctgttagtcattatgttgggtaatagccgtggcattcctacagaacagagtgaggacaggctcctgattcctcttccttctttagaggagaagcggggagtgggttaactaacagctttattgagatgtcattcacatgccattcagtttacccattgctagtgtc

SEQ ID NO: 95999 - DNA, 1056 bp, Homo sapiens
tgggaggggcgggggcgacaggtggatggatttgcaagattcgaggcagtaatccagagcaggccataaaatgtggatggcattttttcaatttgaaaaggggttttgctattgtgttagctagtgtgtgtgtgtgtgtgtgtgtgtgtgtgtgtattgtatgtttatatattttattttattttattttatttggagacagagtctcactctgtcacccaggctgaagtgcagtgatgtgatctcagctcactgcaacctccgcctcctgcattcaagcgattctcctgccttagccttctgagtagctgggattacaggcacctgccaccgtgcccggctaattttgtatttttagtagagatggggtttcaccatgttggccaggttgttctggaactcctgacctcaggtgatccacctgccttggcctcccacagtcctgggattacaggcgtgagccaccgcgcccggcctgtttatatattttaaaaatattctttaaatgtaaattgtgaaatgcagtataaatatggaaaaaatttgtaaaacttacttatacagttaaagaaccattgaagtacccatgtacctgcactcaggttaccagaatgttacattagaagcccctttgtggactgatttcataacagccaactggctagtatgaattttctattaaacattcccttgttcctcctcaatatattgtttaattttgctatttaaaaactttccatgagtgaaatcatagtgtattcttctgtgatttctttcatttcacattttgtttggaaggtcatgcatgttgaagtatacagctggcgctcattggcactgccgaggagcatgattccatcacatctggttcatgcttctgctgttgactgacggggctggtaggagtttggtgttactgcagacggtgctgcgctaaccagcctcatgcccgtctttgtgatgtagaactttgtccagggctcatgacttgtaggagaatgtaggaaaatttccttgttggaaatgcatggtcattcttactgggtcccatgaaca

SEQ ID NO: 96000 - DNA, 1009 bp, Homo sapiens
cttcagcccatctgggtgtcactgggctggggatgggtctagggatctctgcatttcacataagcaccccaagagagaccgagaggaatcaagagtggcagcctggctgggtgcagtggctcatccctgtaatcccagcactttgggaggctgaggcgagcggatcacctgaggtcaggagtttgagaccagcctggccaacatggtgaaaccccatttctactaaaaatacaaaaattagccaggtgtggtggtgcacacctgtaatcccagctactggggaggctgaggcaggagaatcacttgaatctaggagatggaggttgcagtgagccgagatcacgctgctgcactccagcttaggcgacagagcgagactccatcacaaaacaaaacaaaacaaaacaaaacaaaacaaaacaaaacaaaacaaaaagagtggcagtgtggtcctgccccgccgccctgggtgtggcattttgacaaaggacttactgctttctcagggcgggtgggaggctcacactgacagaatggccacttggaaagcagcacttgctcctccttcccccagtgtaccacgccatcttcctggaagagctgaccaccttggagctgattgagaagatcgccaacctgtacagcatctccccccagcacatccaccgagtctaccggcagggccccacgggcatccatgtggtggtgagcaacgaggtgagggctgctgcctggcctgccccgacaacgggctctgggccacgggaggagtgtcagaacccctgccccagaaacacacttgggtttgggagtgacagacaggttcatctgcacaccacctgcagctgtggctgtccggggctgcgatggagagtgctgaggccccgtctgggtccaaatggctgccatgccaagtaggcactccttacccctcctgggctgggtgcccggtgggagccaggaggacagactccactctggcccaaggtgcttatagtcagggctgtgg

SEQ ID NO: 96001 - DNA, 1848 bp, Homo sapiens
acatagatgcaacactctgggaaactgctggcagtatctgctagagccaaacacaccctgtgatcccgcagccctctccggggctagacccggcagacacgcaccttgtgtaatgaacaaagacatgtatgagaacgttcagagagcctattcataacagcccagacctgaagcccccccagcgcccatccacataaagtgggtatgtgaattgtggtgtagtcacacaatgataggtaataacgggcatgaacactctgactacattccacacaaatgcaccgtgaaacatgacttgcggggagggaagccagaccaggaagagtgcctaccgttcaattccatgtacagaaacttcagagaacatgcaaaacgtgtctgcactgtagcaagtcaggatagtggctcccctgggtgggagtaggggtggtggctggtacgaggggcctacaggaggctggcaatgtttcactgctggctctgagtgctgggtcctggggtgtattcagattgtcagcatccagcgagctgtatacttccacatacagacagatgcacacatggccagtgccctgtgctgatgacatctatgcatacagattatatgtcaaaaaaaaaagagaagaggccagatgcagtgactcatgtctgtaatcccagtactttgagaggctgaggtaggtggattgcttgagcccaggagttcaagaccagccaggctaggcaatatattgagaccttgtctcttaaaaaaaaaaaaaaaaaaaaaaagaaagaaagaaagcaagcagggcaggcaatgaggcagtggggacctattggcttctgttgtactcactgttgtgagcactggcacttcctgggctgcaatcttttgatgttgttgagcattttgccattttctctctgtgagatagtgcagctggctcttccccaccccccacccccagtgctatggggtctgcagctggttggggaccgagccctttctctgggttccatgtaacaggcatccccgtttttttcctgcctaggtgctgacttgctgaagatgtcccgagatgatttggtccagatctgtggtcccgcagatgggatccggctcttcaacgccatcaaaggccggtaggtgttggtttctctgtgaagccagccagaggctcatgtcccgtggcatgtggtgggaaacccctacctcagccttttggatggtgggtggtctggctggggggacaggactcctgcagtgtggggtcaagtgtaggaggaaatgtggcaagaggggcacgggccacagcaggggagtgagacactgcagtgggagatgtggccagctgccgcagaccctgcctggaggcccctccctcttcttggttggacgagagccttggcctctggatctcggcctctgagccacttgcccatgttctcagatgcttgtgtggtcctgggctcggagctgctcccccgctgaggggagctgtggacttggggctggtcagatggtatcatgcagcagtttcaggggagactccagagcagcgccgtcctgcacaccttcctgccatggcagagacgttctgcagccgtgctggccacatgtggctgtggagcacttggaccgaggctgatgtgatggacgaaatttttatttaactttagtgaatttaagttttaatagccacacatggacagcatggttttagagtgagagcctgggtttgagtcccagatctgcctcttaggtgctgtgcagtgaagggaaagccctttgccctccgagcctcagtttgctcaactgtggaatgagagcgatagtcctagctcccttgcaagttttgtgaggat

SEQ ID NO: 96002 - DNA, 1046 bp, Homo sapiens
aagctgcgggtgcttgttcactgcaaaataactccccgtgggattcttatgccctctcccctcaccacctgacaaagggtttggtggaggacccttgagtttggtggtagccttcaggtgccaaggctctgggtgcccttggtcagcgtgcctttccctggggctggggctttgaatctccaagttcaagaccagcaggggtcagccagcaggggcctgggatgtgttgccggtgactcagggtagaggagtgtcattgactggggcagtgtagcctatcagaacttgctgtctacaatgaaggctcagttagggattttgagggattggacattggctcctgctgtgtttctgtgactcaggaaattcttgaggactcatttcacttagaacaaatcctgcatctgataggaagtaaaagtgccaggctgggtgccgggaccgtggccattgccctgggagccccctctgtcctcatcactggttccttttccttgcagcaacgcctctccgacccacccggtggaggccctgcccgtgggcagtgacgtaagtgtctgagcagggctttctggctggtggtccctcgtgggccctgagccaccatctcaaggcctctcccctctgctcacagcacctgctcccatcagcttcgatccaggatgcccagcagtggcttcaccgcaacaggttctcgcagttctgccggctctttgccagcttctcaggtgagcatctccgaactgtgtttaaagcccatgagtatcttggagacacttcaaggctggccaccttccaggccttgctgtcaacactggcagcgctgtcgtttcagctgggagacccgagatagtgtgggttcgctcgctcacgtgccccaaccctgggccaagtgctggacataggtgatgctgcccccagaaggtcccaagtgagtgtgacttgagggggaccatctgggtgacttggtcaagatctcctcacctgcggggggttggtgggctctggtctgtccaggaagagtccccttagcccggcagggtgat

SEQ ID NO: 96003 - DNA, 1017 bp, Homo sapiens
actccacatgcatttgtgtttggcttccatagtagaatgttttcgagggcaaggatcacatctttcatgtttgtggatctcccttagcccccagcagaatgcctgaaatggaatgaacaccatcaaatttcaccgagaggagctgcttttggtgattgtgcaagagcctccgcccctgtcagcagattcttttttcaaatagcacaggttttaatactgactcttactgcttatttttttgtttggaagttgcctgtggtccagtactccctataacagacatttacacgaatttgtctctcccaggaaaagctgtttgtgaacaactggctggtttcgttttttctctctcgtggacccaagaatcacatgactgtgatgtttcccctctggttttactgctaggaagcccagagagaccccttgggtacttcacttgctccaggggtgacttactgaacatttctgctggtttccttcatgtggccctcgtaacctgccttgccgtggctcactgtgggcactgggtaaacgcaggctgcgtttcacaggtgggggtctcatgcattggtgtcagtgcatgcctgcttgggaggacctggggagcacggctcagcgcctctccagatcccagctcgccctgtgctctctcctgcagtgctctccatggcccgacgtggcctaccaggtgaacagcgccccgtccccaagctacaatggttctccaaacagctttggcctcggcgaagggtacgtcccacctctctttcttcgggttccctgaaatgaaggcaggtgtactttcctttcttagtcttcctttctgggtctcctctcctttctgtttgggtttcagggtagctaactcgtgttgcagtcacaactgtcttcagcatttacacaacttttagtgctcagaaacacccctgtaaacgttgtcgggtgggacagcggcccagaacttacctggtgaaaccaggactggcttgagggtgcatgcggtcagccacccaagac

SEQ ID NO: 96004 - DNA, 1148 bp, Homo sapiens
ggtttgcaaagcacccatgattgtcaggctctctctctggatggagacgttcccctgcagacagagtgtaagctggggcttagcgggagtcctgagagttgggggtaaggaggccttcagcttatggccaggatttctcaggttgcaagcacagactaaatccagaccagcagcctgtacttcttccactttcctctgctctccctgggtaacccaaggaatgcactgggattccttgtgggtccccaagcttccttttcataagcgagtggccatgggaaacaatcttttccccttgagcagcagagtgcatgacccgtggcaggttccgagttcctcaggtggggaagcattcaggcagaatgggaggggagataggtgctgtcctgcccctgagttcctccctgcgccctggggccctgggtgaggtgggaagcaggagagggcttgggggctgctgcctgtgttggttttgggctgattggactctgtactctgctcgcagccgaagggagccgatcggaaacagaagactgaccgggagaagatggagaaaagaactgcccaagagaaggagaaataccagccgtcctatgaaaccaccatcctcacagaggtgagccggctgggtgcggggacagagcctccaagggtcttccaccaggagcagggctgctggtttagattcttggaaaatcgcccatctcgggtgactacttctgagagtgcttattctgttgtggtgggttccagtgtctggagctcgtgttcatctgataagacccagtggcccgggaggtatttcagaaataacttccagctctgctccctttgaatgcatttgtgctttcccaaattaggttccctttttttttttttttttttttttttgagtaggtaatgtattcacatggttttgaattcaaaaggtacaagagagtgtacaacagaaaatatccctcccagtgccatcccagcttcatggtttctcccctccagggcagaaaccttctgtatctggcccaactttgtctgcaggtgaagccagtgtagacacgtttgccccatgcctgcatttatataccaacagtgtacatagacacaacttgcttttttccattattagcttatcttggtgcctgatgcct

SEQ ID NO: 96005 - DNA, 1042 bp, Homo sapiens
gaaatcatttgaaagtaaacattttttctattatagtttctattgttgaatgaattattttgttatcaagcactggtgtggatccagccttgtgttatatgccatgtgagatcaaggtggtgaaggatgtgactgtggcattgtggttgcggttctggcttgatcctggctctctcgcttgctgtgtgtccttgagcaagtctcctcccctttctgagcctcttagttttctaacctcccatcttacaaatcagataatgaatacagagccattagcactgtctggtccctaggaatcactcaataaaagcgatcttttctttctctttttttttttttacaattacaatactcttaatatgtttaaaaattattacattgttattattacagttatgtatggattcttataatattgcagtattataacaatacattgatatcgagtgccatttatgtagtaggaacctaccagaagtacagaaatggttccagccttctggttgtcctttaagcctggcctgagtagcctggacaccaggacattagagaggggttagggctgtgctgtggtccctgccctcagtctaggatttgccaagggagaggaatctgggtgaggagttaggttgaggttattggggtcagtggcctggggagtggtggggacttagctggtcaggcagggcctccacagtaaagagacaaaggtgggggtgtgtatgtcttttgcaggcaggggaacagggaggccaccggcctgatggagtggacagagtgtcagggaaagcagggaggtcgaggcaggcctgcactgaccaagcagggaaggacacctccaatagagggggcgcttgggggatccaggggcaccctgcttggtgcctccttgccacctgcccaacgtttctcctcccaggtacactgcatcagcacagaattcacccccaggaagcacgggggcgagaagggagtgccctttcgagtccagattgacacgtttaagcagaacgagaatggggagtacacggagcacctgcac

SEQ ID NO: 96006 - DNA, 1685 bp, Homo sapiens
atttccataccctttcaaatacatggaattcttttaactggggaacatgctttgcattctgccattagagacaatgtttaacaggcttcttcgttccttcaaacctgctctcaggaagggtgtggttggttatttaccctgtaatgtgaacttaagtagctgtgttctccatcccgttgtattggggggtttgtaaagatgtatgagtttgtgttcagtgattttaatgctaactgtattttcctggattctgtttatttgaacattgtagaggtgctatctctagtagggtcacacggtgtgttgtctggggtatcctaggcccgacctggcggggtggacagactgatgtcagtccagagagtgagctgagctggtcgtgggttttcttctctgctttgctccccagggccttgaggcctggatgggcactgagggtgttgagaaggctgctagctgaatgaaccccaaatttagaaatactcagaaatggaaaatgtccttttaacccccatccaggtcagtcttatgaaatccgactactggagaatcggaagctgggagactttcaagatctgaacacaaaatatgtcaaggtaagcctcacaggctgttctcattgcctcggggagaggggcttgattagggtctgggcacctgggcttgctggggttgggcacgggtagctggaaggttagggagaggccgggttcagctcagccctcaacggtgagacgcagcccctgtttggcttctctggagcctgttgcccaggtggggattagatgggctggcagcgttgaacttttctgagctgcagtttgctcatctgcacaaaagggttaataacgtaaagcacttagtaatactgggacaaatggtagtcatcactgttgttgctgttgttagtgttactggaatctgaggaggggacagtgggcaaagcttgagaactgggaaaggaagccccagggggaggggcctcaaaggtgggagggtttactgtggctcagggaaaagaggtgggttcctcttggccccccgcggtcacttgtttccctgctggcctccctccccagagcatcatccgtgtggtcttccatgaccgccggctgcagtatacggagcaccagcagctggagggctggcggtggagtcggccaggggaccggatcctggacatcggtgagtctcctggccaggagaggccaggcaaggctcgaggcacccaggccacattgggttcttcctggatgccacccggacctatgccgagaaggcgttttagcttgcacctgctctgtgtaaaaccccgcgggagcttgcagagctgaccatacactgggtcctgccctcgaggagtcccctttttcagtggaaaagaaaggtctgtggaattgagagacctgctcacagggagttcagggaaggctttgcggaaggatggtgccttaaaggattttgataagtgttgaagacaaccgtgagcatcacagagatagatgggcaatggaaatggaattctggggcctcagggactggcccacagtcctttacccataatccttgtggccaggtgggttttggaattcagaagctagaatgacaatacgatgtgtgtacccagagcatcagggaacatctccaacaggcagccaagcacggtcatatttctgtagcaaaat

SEQ ID NO: 96007 - DNA, 1137 bp, Homo sapiens
gcactatagcactgtaaagaaggtgaaatcccatggatgcatttgctgagtacctactgtgtgcagacagcgcagtgatgagcagaacagacacgacccgcgccttctcatagcccgctgtcctggcttccacccacgcccagcagtgatgtcggccaggcagagaaatgcccttgtgccctaggtcagttcagcctgtgtgacctcgctcgtcagcctgtatgtgactgtgggtggtggccttctgcgtggcttttgggatggtgctgttgtgctgctgtgtgagttgggtgggaggtcaccttgggcccactgtgttggcacgggggtaggcatgcagagggtggctggatgtccatctgcatggctagaaaggaggatttggtggtgaagtgtgtggatcaggaccctgctgctgatggagaaggctcctgcagccgtgatccctggcccaggagaagctgtgatcctgggcctaacgcctcactcaatggctttaccctttgttcaagggctgccccttatgttcaggcctggaagttgctctctacaggacaggaggtgcttgctgtttggcgtgagctgaggttgccctgcagagcctggggtcagtgctataactgggccctgtggcacccgtaaactcacttaatgaccacctggacattgggcctcatgctagggccgctgtcagcattctttatctgtgaaggcagaggacattggaaaaaccagttagggtgtgtgaggcatgttttatgttgatatcaagggagtgttggactcttggttcaggagcctggaaatgtatgcaatctggctttttcagaaagtcagccatgttgaatagggaagcaagacctttttaggcgtcacatctcctgaacaggcaagtgggcaggatgagagtttggggtttgctcctcttccctctgatgggaaaggcgtccagcgcgtcaccatgagcagcactggggtttggcatggtcaagaagtgttcactggcatgtgaccagagaccttcctaatggctgagacggagtctgacccagtgggcatggctgtgctcggccagtgtcatggccggtggggagctgtggtgacaactccaggaacatggtgccgtgtggctctgct

SEQ ID NO: 96008 - DNA, 1009 bp, Homo sapiens
ctgtgctgggttctgctcactggggcacagccactctggctttccatgctgctctgcaggagcacctggtgggcacgacccaggggaggcccactgggagaggggcagcctgctctgggcagtgctgtggttgcagcagcagatcctggaagacagtggatggcctggtggagttatccctgcctgggggtgtatcccagctgggctttctcctggctctgtgaccttggcagttaggtcacttggtgtgtggagctgtgtgagggctggaggacagtttctgtgtgcagcacggaatacagtgacctgtgcatgggtagggctccgtaggagggcgcatacgatacctgttatttggctggcccttgctgagtacttactattaatacgtgtgggcgggaagtacattatctcatttaatcctcacaagacttctgcaaagaacattttgcagatgttgagagtgaaatgctgagagatttaagaactcagctgtggtcctggagtgtcaaggggtctgagtcaaccccggtggtgtatctgacctgaccccagctccctttcccctcttctcctgggccaggctgtaggctacttagtctttgccattaacttgcactgtgaccttgggcaggtcagcacctctctgggccttagtttcttcatctctgaaatgggcacggtcctagtgtactgtgggttcttcagggtgatctctcaatgagaccctgggttgatggggcttctgcctgtcttacatggtctgcatgtgtttcctgctctatgaactggactcccttccccaaataccacctgtctgattggcctttgggtaccagcctgacactgggaaaataaataccaatcgctgtattgtgagcatccattatgtacttggaacagtgtggaggactttcccctcttttctttgttttgtatttttcaaattcagatgcaatatatccctagttgttttttttcaggccaatactgaagatatatctaattt

SEQ ID NO: 96009 - DNA, 1038 bp, Homo sapiens
attttagtatttttagtagagacagggtttcaccatgttgggcaggttggtctcaaactcctgacctcgtgatccacctgcttcggcctcccaaagtgctgggattacaggcaagagccactgtggctggcctattattattttgttattatcatttttaataaataagagacgaggtctctctgtgttgctcaggctgctctcaattccagagctcaaacagtcctcctgccttggccttccaaagtgttgggattgcaggcatgagccaccatgcctggccaaaagcttgattttgtagaatgctcctcaatttgagtctgcttgatgttttttaaatgatgagattgggcttatacatttttggcaagactactactgaagtgacatcgtatccccagcagtgcattggggatcatggtgctgatacgtcttttgctggtgctgttcaccttgctgatttagttagggtagtgtctgccaggtttctccactgtaaaattacctctcctcctttgtaattgataaataatcttggggtggaggatatgacttggagactgtttaccctttgctttttccctctcaatctttgcccacttattttagcatccgttgttggactgtgtccacaccagttattattgtaatggttgcctaatggtgattttctgttgattttcttctgtaattggaatgctactataaaagagtttttccttctctaccattaacttatttattcacttactatatcagtatagactcatggatagttattttattctgtgggtaaaactgaaatcattttgctgtttattgtgttgtttacattgttcagctgtggccatcgagagctcctttgggttggtgcttgtgttgctctgacatggcttcattcttttttgagcatttcctcaccttttggcactacagatgcttaagtctcatcttgtattctgcctgccccagctctgtaaacagtcctttctctaaggagcccccagtaactatcttccaagtgtttacttggattca

SEQ ID NO: 96010 - DNA, 1004 bp, Homo sapiens
gctcactgcaacctctgcctcccgggttcaagcgattctcctgcctcagcctcccgagtagctggggttacaggcgcccactaccacgccaggctaatttttgtatttttaaatagagaccgggtttagccatgttggccaggctggtcttgagctcctgacctcaggtgatccacccgccttggcctgccaagatacagttcttaaaaagtagttttgacacatcattcaagacatttttcgttaattgaaaagcctgctattaagtgtttataagcctctatggtagttactgcattattcttgtgaagccatcacaggtcctctccccttccttgtaatgatgtgtttaaagttctctgaaaacatggaaaagatgctgtaggcataaatcaaaaagtcacttaaaccactggatgcccatttctcagtgccgtgtcaaacaaatgccttgaggacctgtggcttggacatgtgtgtttcatagggatgtcctatcaccaagccgagtggctagttttagatatggtgaaaatgatttgaaaaacaaactctgttctcttcctctgaaaaggtccttccaaggggtggatagagagttgaacagaggtttgcaaacttccagataacttcctctttgtcagtggccaaaggtcattgtagacatatcttcccgaaggctggagcctgagggaagggatgaggagggtgtggagggatgacaagggatgtggaggaggaggagtccgggagagcagagaagagagaaccccaggcaatctgcatggggatttctggcttgagataagaaacaacattgcaaaaatgacttgcggtggggaatgctttgatattttctgtcaaaacaactcttgagtcttaagtatagtaatgaattttcataatatgcttactttcattcattcatggagtaaaatttcctattggttggaagaggatggtggcttggtgagaagaaagaaaagccacatgcaaaggcaagc

SEQ ID NO: 96011 - DNA, 1027 bp, Homo sapiens
aactttatgagtgatcgcttgtggatagaaaccaaataaatgtcttagaggtccctttgctgctagcctgtctctggcatggagaggatttctgtagatgttagctaactttgcccttttacctccttgatgggctgattgaatcagtgttttggggggtcattgagtgaaactagagtcacgaaggagcggtttcctctgttttaaagcatctggagtattcgagggttgcaggagtgcagccagcaccctgcgatgcgcgtgccgtgtcaccctgggccccggtggtctgcgtcgtctctctagcttcgccctggctctgtgcaggagccccctggggctctgctcctgacctctgcttcccgtgtgttgcagtgatgtgctcgctctgcccatcttcaagcaggaggaaccccagctgtcccccgagaacgaggcccgcctgccacccctgcaatatgtgttgtgtgctgccacgtccccagccgtgaagctgcatgaagagacgctgacctacctcaaccaaggtagtggccagaggccccgggccagggcggaacccagaagtagtggggagctgatgcgaaaggcccatttgggccttgtgactttgttacggtgggtgaggtcgggcgaggtcgggctcgggaaagagaacaggtgcaggttcagattccattttccagctgtgtgaccccctccagcctcagtgtcttcatctgaaaaatggaaacatcagatacctcacgcgggtaacagggtaacactctgcattcctcctatagcccctccatggagcagatgctagcattatttctgtttttccctccctccctccctcccttccttctttctttctttctttttttttttttttccttttttgagggggtcttgttctgttgcccaggctggcatgcagtggcatgatcatggctcactgcacccttgacctcctcaacccaagaagtgaccctcccaccttaacctcccaagtagctgggatcacaggtgtagaccgccatgc

SEQ ID NO: 96012 - DNA, 1024 bp, Homo sapiens
gtttaaaaaatttaaaggcagcagtccgtggattattaacttgacatggtctgggcaaacatgaaattatgcaatcctcagtgttcctagagaaccacccgggctgggagtgtgccctgctctgacaaaaggaagacgccctgtgggggaaagtcgagacggccttgcacccttatttttcggcagtggatggtgacgggggaggcccacacagggcaggttttccaggtgtgtgctcaatgccaggctttttcttctcaaaattgatgagatgttgatggggtgtgtgccgggtttgtgttgtagagacgcttgtttatgatgtgcgaggaacagattgtaccagtgactctgtttatacagacaagtggggtcagctaattggattcctagtcagggacccacgaagggaagagggttatcaagataagagcactggcacttatttggcacttgtttatgtgctgctcataatttagagaccttacacaagccttgcctgcctgtaggtcattcatgttctcaaggaattctttgtcccttgtaagggcatttttaaaatgctgggttttttgtttctttctttttccttttttttttttttagagatggtggggtctcactatggtgcccaggctgatctcaaacccctggcttcaagcagtcttctcacctcagcctcccaaagtactgggatttcaggcatgagccactgttcctggcttaaaaaatacgtccagaaacaagttcctccctaagtcgcaggatgatgacttcatttttttttttttttttttttttttaatgtggagagttttgttaagaggtggaggaaaagaaacttggagcaaggatttcaagatttcccacttggataagaaaatagactgggctgggcgcggtggctcacacctgtaatcccagcactttgggaggccgaggagggtggatcacctgaggtcaggagttagtgaccagcctgaccaacatggtggaaccctgtctctactaaaaatacaaaaat

SEQ ID NO: 96013 - DNA, 1094 bp, Homo sapiens
gaaggacagcttcttgaaatacaatttctgtaaattgaaatttgtcacaaaagctgtttgggaagatggatgagataggactgacgataagatggcttgttttctcatataagcaagcgtctgctttgtcagtttctttcaaaagaagctatatgtgcagaatgtgtttcttacacattgaaaatgtgccaagtaccaaatctgtctcagacaccattcatccaaagctaacatacatgttctatagtaagcaagatagatgaaggatttggacaccaatttagagtttttattttaaaatttggtgtttctgagcttagacataatgttttcatagtccctatttgagtaagtctctttcattatctaacttctttatctttttagtaaataaattttgctattgagtttcagtgcctcattaatgaagttaccgtggtttgcagtagagttggcatttagcaaataccttaaagggctaaggccttgagagtgaccttttaaaattttgagcccattttctgtttccaagagaactccatgaatttgaactcttcttatattagaatttgtaatctgtttgttagagctggtacagaacctctcctttggtgattaaaaagagaggattaaataagagaattgatactacaaagagattctggggtcagtgtgagataaaaatcttgaggcagaaaacctggtttttagtcctgcgtctgctgttgtccagctgtccccagtttcatcatcttagtataaccctgaataagcagctctgctgtgagaatgaaagatattatgatatagaaatatgcttttaaaattgtcatatgctatacaaatgttgctacataaaactgttctcagacatccttattcatttcaaaagtgcccatttctcaggaaatagttgatatactaattataaatcattgtatgcacacttaatgcaagaatatttgttgctgccagtcagtgtgatgtgcatatagtacccataatgttgaagttcacagtaaatgttttatttaaacttgaaagaagcccaactgttttttgaagatattctgtaattgaggttttctgatcat

SEQ ID NO: 96014 - DNA, 1053 bp, Homo sapiens
gggctttggcggatacaggcatttcttctctttgtctgaagtagaagggaaaagatagcaaggaagggtgaagacattgactgttggtactggacagctggtctcgcacctctgctttcacagtgaacttggtgagaaggttggtggagggtgtgtaggctgaggccggacagcgaagcagggcggagggtgggaggggaaccgtgaaggaggcatcgcctctgggagaggaggcaggaagggaaggatcactgcgcaccactgagcaagcccctgtgctgggcatttcctcacgaggtgacgtatgtctggtgtgtttcaccagtgcccatcgaccattctgacctggtggctgaccttctgaaagagctgtccaaccacaatgagcgagtggaggaacggaagggagccctgctggagctgctcaagatcacgcgggaagacagccttggtgtctgggaggagcacttcaagaccattctgctcctgctgctggagacccttggagacaaagacgtgagatgctggtttggccttatcttgcccctttccatgtaatggggtcacgatgtccttttcttattgggcttagcttcagctttactttctgggttgtgcttactgtttacatcaaaacatttatttgttcatttttcacatattttctgagcacgtttagtaaggtcatgtttttatcagcaacaagctgctgcttggcttacgtgcatggtctgcaactgggtttatagtagttgaggaaacttcattcctgcatctagttgctttaacacagaatttcttaaaactttattagcatagaatgtggtcttttaggatgtacttttttacttgtgagtttcatttttgtttcatatgtaattgagaaaaagtttcattttaaaagacctgattaaatgctacattccatgaaattccatcttggtccccccctacatatgttaagagttccaataattttaatcagtcaagtggcaggttccagaagcatgattctgatttttgtattattaatttaaaaataaaaaaagcttc

SEQ ID NO: 96015 - DNA, 1002 bp, Homo sapiens
gggccgcagtgagaagcccccgttgctggtctggtgcttgaaagcaggggtgtgagtggacagcctttccttctcaaggaaaggcttctgagcctttcatccctcagaaaacatcttggtaaagtggatcatcaaattacaaagtaaaggagatttaaagcgtaaagactagatgcaaataaatgcaggtatattgttccttttatggtagtttacggatttggtatttttacattgcagtactagtagctgtccttttgtcactggccatacatatttcaagtgaaaatctctggccttcttaatatttctgagcattcaaaggaaatgtccattacaagtcccagaagggaactgacagtgtgctgtgctgcaggtgtcccgcgatgggggcgctgcctcccctgccactgagggccgggggggtagtgaagtagaaggaggccggacagctctggataacaagacctcactactcaacacccagcctccgcgcgccttcccggggccgcgggcgcgagactacaacccgtacccctactcagatgccatcaacacctacgacaagaccgccctgaaagaggctgtgttcgatgacgacatggagcagcttcgagacggttggtgtctcttttcttaactgtccccacccagaagtgcttcccttgtgctccctcccgtctggccagcaccaggcccactggtcagatgtaaatggagacgctgggtctgttctttctgcttagtcatttgttcaggcactacttaactgaatccctactgtgcgcttgggcacggggaacatggcagtgaacagaagcacaagtagcggggcagtgaggaaataaacagtcacacgtgatatgaagtagccactgccacagctgagcatgagggaaggccaactctaccatcaggaaggttttgctgtagaacccagggcccaggtaggccaggggtgtaggaacaaacaggatggcgagcgcgggctcagcctttgtg

SEQ ID NO: 96016 - DNA, 1012 bp, Homo sapiens
atgttggtgccatgggaaactgatacaatgttttggaactcagtaaaattatatttagcaaaagtgatttgcatattctttacccagtatggttaatctacactaaagaaagaactcaacagaagaaaaaaaaatgtcatttccataagatagcttatttcagcattatctacagtagcaaaaatattaaaggggaacatctgagtaaatcttttttaaaacacaagtagaggtagtggtgtgattaaacatggtggttacaaaaacttcatccacacgggaagtgcttgcactgtagggaaaggaaaacagaagccagcgtgcacaccgggttcctgctgcgtaaagcctgcgtggagacacacactgagggagtaaggttttgttgttaacagtgattagaattgggagttgagctttattttttaaatgtctgaaatttttaaaacccttctctttttttgttttttttaaacctcctgttcaatggcttaccttttttataaataatttttcattataatggtatttttagaagacttataaaaagaaacaattaaaaccatccatgaattttcttccacccagagaaaacctctgttaagatttgatttatacctttttagtcttaatttgtttctgtctacgcatatattatgtattatttttacatcttaattataaaattttgtttgtgggtgttagaaaccaaatgcatcccagcacctccactagattcaagtccaaaagaattgaaagcagggacttgaacagatgtttgtgcaccagtgtgtcatagcagcattattcacaagagccaaaaggcaaaagcaatccaagtgcccatcagcagatgaacagataaacaaaatgtggtatatacacacagtggaatgtgttcagcagttccacttatctgaggtacctagcataggcagattccaagagacaaagtaagataaaggttaccaggggttgtggggaagggagagggatgaggatgcagggtttt

SEQ ID NO: 96017 - DNA, 2012 bp, Homo sapiens
ccttcaattgttcttggttctgcaaatggtgctcctgaattgggagtttgagttggtttattaattgaaagtgagaaggaggaaattacctggcagaatcctttattttcttattttaaaaagaggctattgtaatagtgaagtgatgtgatctgaaatgaaatatttttaagaaagttcaggttaagaataatgagatgaattatctgaaagctgacattatctgaagcgacatatggaaaataatattgtgacatcccttaaaaaaacttgaacgttcccccagacttcctcttgtccatcccatcattctttcagttttttggattttttttcttttgcatgggctatgctgttatttttggttgttgtgattaaaagtattttaaggcatttttttacatcttgtatatatattttttgtttgagtcataatactcagtctttatatataaaaaatagtgtactggccagatgtataaatgccttgtccatacaaaagctagtattgtggtgtcctcagaaggagcgggggagcctctggccccttggtcatgcctttctcacatctaaggagtgttgcctctttgacagacagccttgtgaacatagaagaggttgaaatcttaaattctcttcaggttttttattctacctcctgtcagtttagacatggaatttcaacagcaaacctgttcaaggttcacatttctttttgtttgatgctcaagtcaatctttgagttgaattttttttttttttttgtgaactctccaaatattcattcatcaggaaaggtgggttttatctgggccatatttgcaattctagacaaatagctcccatctttgagattgtggtcagctcttgggctctagaacctaccagcaccagccctagaaaacacttggatcattgctacatcaagccagtagagatctggccactccaagtgagagctctccaaatcttaccttgctcatctgccccaactttttttttttttttttttaaggcagaatacttaaggaagagtatttactaaatgttcatcatttttacattacaggaaactcactttgggaatgtacaggattggttgtgttgcccttaggaaggatacttcgtttcttcagttactactcttttgaagaacaggaagattgcttttctttagtccttaaacagtgttgcatgcttacagccaaggattcttcgcgtgtccctagcaatcctcagtatagctcaggactattttaaaaattaaattagacgaattcatctgatcttttcttgaaactttcttgaaacaagtgacatttaaactaagatttttttttaacttgcccttggttgactgttgcttcgtgttttgcttgctttatgctgatatatccatcccatgcttttcttttatattctcaggatggtttttgttctcaggattctccctgtttcagtgcactttccagacatctaaaaggcacttgttgacaaactgcagtgcaccaaaaaggattgtttggcttttttgcttcatttcatgttttgctgtgcccaatgtctataaagacagcagtcaataacacttttctgtgaacaacaaatatttcttgcttttatgaggatttttagatgtccatccaggaatgtgactttttataaaatctgctttgattataaaactccaaacagaagcatgtagaagagtctgatattaatagcaagctcatgggtgagatgatgtgagagttactttctgggcctgttcatagggtggatctgactttgagtctagggttttttgttttgttttgttttaatagggttttatttgttttctggattggatacctgggagtataacctagccttgtgaggtcatttactttgctcctttgaaatttgcttatagtactagctttatttccaactgcccattcctcttaagtttgtacatttgagaccagtaacaaccaaactccttttttccatcttcaaaataagaaagt

SEQ ID NO: 96018 - DNA, 1050 bp, Homo sapiens
cccgtttccttgtcctctttcaggaaatgtcgagcatcctgaggatggggccatcttaagccccagtgaatgaatgaatctgatatttaagtatgccgttttttctcaggttgttcagtcaactacattttcactaggttatccagttagtcattcattcactgagttggtcttatttttcaacactggaaagatgcaagtgctcaattttgtctgtcactctagcacacccaacatcaatcatttgactccaggagtgcttgtatgatgattattcatttttggtttatatacacttaaaattggccttatgattctaagggaaaaaaaaaaccatcctgggcagattctacccatttatttacatgtgggttaaaagaccaaggaaagaatagaatatattctatatacagcccttgaataacgatgcctattctgcttcaccccagggctctccaagcaatacgattggccggacgccctcccgacacaccagcagcaggaccagccccctgacctcacccaccaactgttcccatgggggtctgtctccaaggtaaggtcacttctttactttccacagatgtaaagaaactaaagcaccttaattgctgtgcatcctatttctagatttttagactaagctaaataacaaaaagaatattgagtatcaagaaccgtgggttctagtcctcactcaaattgtaactgtataatcttatgcaaaggggttaacttctgtggtaagatgagtcatgtgtgctgaatgttctctcgttcttgtagctctaaacactcactagtacctaatagtacctacaactaaaagtttgtatttagtactgttttacatagaatccatgtagaagctcattacccattctgcaagtggtagaacctaaaggtatttagtcatccaagccaacttgttatagtcagttacaccaagtctagggtagtttttcaaccaagtaatcattctaaacatagttgctatcatgtttgaagcagaatgctgctctgaaggactgtgatttagaatctgggaac

SEQ ID NO: 96019 - DNA, 1742 bp, Homo sapiens
attggaaaactctgcctttcctctcaaattttgttttcccaaattaatacaaacactgaagtgtttggtaaagctttgttttgatctgatctgctagggagaattcctttctgctataagatgtgcaacattcaagacagttgatgtccctgggagttgtcttcaaatggtagcagtgagatgtgaagaaccttttacaaaccccacctctcaaattcctctatgagggtgtgtgtgagaatcatttcattttaagttgccatgtgatccttaaaataaattgccctagggttgcccattagaaaaagtcagcagtactctgagtttttcatctggctgcctaacggtcttgcctcttacgaagataacagttcacatatgccgacaagaacagtggcgtactccactttttgagtcactagtaaacatgagctatgccccaggcttttttaatgcatctctccagcccagttccatatctggaattacttgtttaatgagatcatattggtggtaatgataaatataacccagttttcttccttgcttggattccatattttaacctctcactgattcagagggttggagataaaatatttgaaaacagtaacagtctaattcgtggcaaaactctgatataaaatcttttaaaaattggatacttgggcccggcactatggcatatgcctataatcccagctactccagagactgaggcagtaggattgcttggagcacaggagttcgaggctgcagtgcactatgattggacctgtaaacagctactgcactccagcctgggcaatgagacccctgtctcttttcttaaaaataaaaaaatgtatatttaaatgatactttctaccgtttctagaacttggatcttatttttaaaagattttactttggaaacactctaagcttctaagttaataatttgcatcatgaaaagcctcaagttagcttggacattaggtaacattctgggaagaaatattgtctcttaaataaaggcagtggcacatttcacataaaaagcgtactattcaagaatgtaatcatatattttataactttcaaatgccattttcaaccaacaaaatttaagtgccaatatcttttaattaaattgatgtgttttccctgctacaattccaggctgctgctttctttcctccttgtagtgcattatttttctgcatgcattgttttttttttttctaacacctaatacaatgttttttaaaaatatgcaggttactttgcatgagttttggaaattgttctgttatgcaaatatgcatatcaaataaacagtacattaaattggtgaaatagattccttcagataatttgtttaaaatgtttccaaaatgaaatgcagaaaagtgtattttagtacaagtaataataatgctttttgcccatgtcataaaaatattatgaccacttatttaatttgggtggaaaaggtattaatgactgtatttgaaattaaaggggaaaaaagtaatgtacttttgcccaatactgtgattaatgaatgatttcaaaatgttaaaaaagtaacttttgattatatttttaaattcataattcttatttttggttaaatacctttgggtttttggatttcttttcctactccaggcacaaaatagtaattttgtcctaactggacctataattaattttagcattgtaaaagcattgaaatattttgtgatgtttatttccaa

SEQ ID NO: 96020 - DNA, 1095 bp, Homo sapiens
aatccctgagttcttgtttattatctgtaaaatcggaataataatacttgcctcaaactgggcatggtggcgcatgcttgtagttccagcctcatgggaggctgaggcaggaggattgcttgcagccacaggaagagtcctatctctatacataaataacacttatctcaggcattactgagaagattaaatttcataaagtatattaaaacttagacattttatttgcagttgcagctctgctattattgtttgaggattgttttggttttgctgctgctgttatttatggaataaactgagtaccagaattttttctaagatttaggaagccaggtgatcaatcaaagggaatgtggtaatggcagtagaattttaattatatgtttacattttggaatttaaaatgcctgtatgtttgcttatcacatgtgactctctttgtcaaatgaagcaacagatttagcccccaaaccttgttttgagaagtgtgggcaaaaaggcgtggcgaagaaacctagaagtataaagatgctgttggctagagcagggagaagtattaatacataaattgccttcaaaagatgagatatctagttgacttttaaaaaaatatgattataaaggcagcatgcctctagtctgaaagctatgggttttactatcaaatagctggatctcagcttaactgtgactgcgagtctctttcaagtcttttttgttgttgttgagacagtctcgctctgttggccaggctggagtacagtggcacgatctcggctcactgcaacctccacctcccaggttccagcgattctcctgcctcagcctcctgggtagctgggattacaggcacatgccaccacacccagctaatttttgtatttttagtggagacgggagtttcaccatgttggccaggctggtctcaaactcctgacctcagttgatctgcccaccttggcctcccaaagtgctgggattattacaggtgtgagccaccacgcccggactctttcaagtcttatttggacatcttccatttcatcacctgtagcaagaatactactttcaagattattaagtaaaagacct

SEQ ID NO: 96021 - DNA, 1334 bp, Homo sapiens
tgtggattttataataattcataaggatgatttacaagactggctttttgttcttctcacacaattacttaagaaaatgggagcagatttacttggatctgtgcaagcaaaagttcaaaaggctctagatgtcacaaggtaagtgtttaagggttaggtccattttgatgttacaggatacttgtaagtgactttttgccattctcttttgttacccatggcctttgtcacccccttgaatatctcttttactcagttctcactttctgttgttgacatacttgttgacatgtcccaccagtccatgaaatgaaataccatatcttccttgtgttgatattacttttgtgagtatttaagacatatataataaacaaatgtaaaactttggaaattgattctcttctcattaaaaaacatttaaagggaacatttagaatatttgtttacatttctctgaagaccttagtatttttattacttcaacttacaagtcttactagaaatttttctatcggtgtatgatgtagagtttccattggtccaggaaaattctctaaattaatagtacactggctagagattaatagcacatttgcagtagttgtgacccttctggctgttatgagaaaagaaaagctgctgaagcccagaaaagttagaaaaagtacatgctgctgctgttcagaaaccgcttctctattgtctatgcagttgtgggtcctcaatatgcaagtatgaaagttgaaacatctcagaagacactttgcaataatgtcttggttgtgatttggtggaagatggatggggggaatgtcaaattggtgaacttttttaaagaacaaaggaataacttccaagtcactcagaaaattatcagggcaatgacttttataagttactacaaactggaataattctagttatcatagaatttcaagatggaaggaccttaaagatgatgctcattttatcagtgagaaacagacagtttgccttgactttgtgttagtggctgtttgggaacgcaaatccaggatttctgaagattgcactgttgtctgtttttattgttgcaggctatcttgtgggtgtgtgtcctcacctcctgtgggggcaggggggtggtatggatagcactggaaccttctcttccctctctggctcccttgactagcacagtagcacatcctgccctgccggcatctccctatgcgtgcagcttttacatgactctgacttcaaagtatgcgtctgttcctctacaccatgatgccagctgttttcttttggcccttgaccctgtcagtctgtgtaattgcattgctctagaa

SEQ ID NO: 96022 - DNA, 1058 bp, Homo sapiens
ctctactaaaaatataaaaattagctgggcatggtggcgggcacctgtaatcgcagttacttgggaggcaatcacttgaacctgggaggtggaggttacagtgagctgagatcgcaccactgcactcctgcctgaacaacagagtgagactctgtctcaataaaaattcaggaaagactgagcttaaaggccacatagatatccaaagataaaatttatcaagatttttctctaaggtagtggtaaaagcagtaagatttaactcataagcataattagattcttaagatttataacgtgaacactattagatggtttagaacactgataaatttctgttacctgtcacccctagattgctgattcagaagcagaatgtgaggataaagaaggaaatttgtttccatcagaagtctcttgtacagtgagtttggaggtctcagtttagttagtatttgttagctgcctgtaagtgaagccaggaatcccacagctgaatgactttttcctgagctgtctcacaggagacccctggtggtgaatagttgctgtgctagaaatgaggcggtatagggtttgtggtttgtccaagtagaacaagtttcattaacaaggtagggatactcagtgctacttttctctctgaaattggttcagagatattccactgtgcactctattttgccttagcaaaaatcattacacaacagcatgatgattatgttaatatttttatatattttattctaagccgtaatctattactttatgatatctgaaattggtatacatcaaaatgtctgacgtgaaaagcaatagctacacaatagtgagtaggtgtttttattggctcattttataatagtatttgttgactgctagatagtgaataagaatactatagaattagggcaagaggatttgttgttgtttaagaaagaaaagccttcaggattaaacacagaaaagttaatttctctctgtactgctttttaaagacttacattgatggaggagagaatatttcattggtttgtagccttttcaggttttcttaa

SEQ ID NO: 96023 - DNA, 1325 bp, Homo sapiens
ttagaaatccttttatgtgggctgcttctgccattgacatttcaaattctgacttttttaggaaacataaatattcacacaagtttacccatagactgtgctcaagatatattgcttttgactggggaggggctgttggctgcacatatttgcattgtgccaggtgcccagctgaaatatttaacatataatttcatttaatcttcacaacaagcctgtatgataggtttaattattgttgtcttaaagatggggaaactgaagcaaaaggcctaggaggctttcagaagtcatgcagcccagtcagtgttggcaccaaggttgtgatctgtctgtcttcctgtaaagtctacgcactttactagaggccatactctttcccttctactacagagtgctttgcttatttacctaatggaaaactgcttttctgtttttatttccctaatctataagcacaggaaaagtgtgtgtgtgcatgtgtctttttacacttaactctttgttgtagattttgtttggtgtgactcacagtcatttcacctttctatttcttcctcaatcactcccatccctcattggacctgtcagaagaagcctgtgaggaggagatatgagccgtatgggatgtattctgacgatgatgccaacagtgatgcctcaagtgtttgctctgagcgctcatatggctccaggaatggtggcattccccattatctgcggcagactgaggatgtagcagaagttctcaaccactgtgctagttcaaactggtcagaaaggaaagaagggcttctgggcctgcagaacttactgaagagccaaagaacactgaggtgaggaccacagcaagaatatgagctaagtttgaatctcctgttggactcttcaggggtttaaagggatttcctataattaatggagtctaattcctataattaatggagataccaagaggtctgcttgcaggaacaggcactaaaggtaccaagatgactaagacacagtccttgccatccatttgctttgccatccatttgctttgaaatatctggcaaatatcctttttttctttactttttttttttttttgagatggaatctcgctctgttgcccagactggatgcagtggcacgatcttggctcactgcagcctccacctcctgggttcaagcgattcttctccctcagcctcctgagtagctgggactacgggggtacaccaccacgcctggctaatttttgtatttgtagtagagacagggtttcaccatattggccaagctggtcttgaactcctgacctcgtgatctggctgcctttg

SEQ ID NO: 96024 - DNA, 1079 bp, Homo sapiens
gaaaaacataaatgatcatggatcctttaatttttttggttataccaaaaagtttcctagtagaatcagcttgtggtcagattgctttttaaagatgcatttcagctagtcacacagtctcttgcatattctggtttatgtgctcagcatttgaaatggatattctttagaactgtctgatcactggccttgctcttgctgttttaagatttattctcttgtaagggaaaaaagtatgtaatatcctgctttcagactctgaagtttttaatccagccatgttttgtcagatcaacattttatagtttatggctatggtgattccagttttcattccttcttgtcttgccctcatttattcctgctcagtcaggttctttgacaagtgtctgtgagcagtttgctgctctcctaatccttttcctgtaggcaagctgcctggccacctgtattcctcaaccttatgtatagaaagacttttttctggcaggtgctagagttcagggtaactgctctaaccatggctttaggagtcaagagctggaacagaattatctgaagctgtttgtccttccaagttgcagcatttagaatctgtatcttatttgttcagagaccctgggaagtggaggtcaaaggggtgggaaatgatggatgtgaaacccttagttgagacttccacttaaggcagggaaatttcttagttctttaaagaactgcataagggactgtgtgtaaagttctaggaggcggaataggacttgagagtttgagctttggcttaacttgactggagcttttctctgagctctagctcccattagattcatgctgcccttgttactttttgtccaaactgttgagtctctccaagtgacctgcttctgaagagaaaacacagaaatggtacagaatctttgcctcgctgaatagacaccacggcgccagacagaatgtctcagaggaatagatagtagaattaatggtgaccttagagatttgcctcaccgatatgggaaaagttttagcaaagaattacagcaagttaccagaaggtcttctgagacgtggaggagggt

SEQ ID NO: 96025 - DNA, 1058 bp, Homo sapiens
taaattgatttttaagtaatttttgttgacacaggcatcgtgacgaacaagtatctaaaattaaatgagcttaacaatagttaaacagaagtgacactaataaaaatttgcacagaaatcaatttaatacatttgtttcaaattttaagcttttaccacacattgcattagaactcttatgaaaccatgaagctttctaattagtttgaccaaacatcaaggccacttgcctctacagggaaagctaaatagattaaaagactcaactcatagcctagctaccttttataataagttcccgcttccctctcatatcagaaacttttcaataataaaataccatgtttgaacaatttcgagtgacagtgctttgtggcactatagcattaaatgtgaacagcttaacctctaccactggtaaacaagtcaagtgtagttaaaattggctagagacttttcagtacttctgtctacttggtgggaagaggcagtagtccttgcaaggaattgaaataatttgaattaaagtgacacatcttttgcttttgttttttaaatagatcggtttgggcttggccagccaggaagaatacctggttctgtgaatgccatgagagttctgagcacaagtacagatcttgaagctgctgttgctgatgctttggtaagaggcacagtatgtatgtacacagtctttttgaaatactcatctgcatttctctctgtcctaacaggaaattgcccccaaatcaggttatgaattcatctttgaaactctttaaaattgtgttaatgttgggtaaatttatattgttattgtttgccccttaaacttttacctctgcacacatataagtgaaaatggactttacagaaaatattagcatcaagtatttcttatctgtgctcttcagtatcaaggagcttttgatgaccctggacttctcagatgtcattgggcttctttttttctttttaaccatgtttttttttctggcatttccttttttccattctgttgcttctgttgctttacagactttgatggcataacctag

SEQ ID NO: 96026 - DNA, 2268 bp, Homo sapiens
ttctaactgttgaacccccttcctgtgattttattttatttccgttgaagtaacattatgaacttctatgcttgtttttggtgcatggttgcatatgcatcacatactgataaaacatctcgtgagctaacaatccgtcttactgccattccgctctgggatgtagacggtgctctgtgactcctgctgttcttcatgttgcatatgtccatactggctgatagaggcttcatggcgtgaatataaccctggagtccgagttggttgatgcatacttagtttggagcacctttaagagcgcctttgttgtgcctgtgtgtttaatagctgtgtgagagccagctggccactgtgaagtttggggattggcacttgctgtccattcatatccagcaccatttcttctcgtgagaaaacatggccttgttggtagcagtctctgcatttcctctggactgtggcattttctgtctctggtacttctgtgttaatcctgtgggtgttgccattccttttacctgcagcctctcgacgtcattccaggtccactagtgctctctccactgctgaatctgttgggcagtcaggtgaacaagtgctaactgcatgacttggcttcttcatatgttctagtttcacacccatgtcaacatttgttttcatctgtgtcggctagcacttggcatgtttgcacctcatattttttccccaatgtgctttaatttttttaagttattgaatgtttatagttctgttaataggctgtagatgcttcatagcctgtttgacaacatcgtttctccagtgttcatatttacgttaaaacaacagggaagtaattcccttcctgccactctgtccccaggaaaataaccaaaattaggtattatttagggttcctgtggggcaagggggcatggatatcatccaacagattctttcccttccaaagtctttactccaaataaactgtcaaatattaatgctagttattgatgtcaagttcacatttttaaggtaccatttagttaacagcgctgcaaattatagcatacataatttcatatgtatgaaaataagtgtattgttctcaaagttttatggaaaaacaagatcaggattcaggtaatcaagtcaggccagaggtatcctttgcagcctgcaaaccccaaacctgctctctcagctctgtttagcaatactcaacatccactggttagccacagtggcaaaaagtaagcatacagtaatacatcaatttgttagatttaactgccactatttttatatgctaacagtccctaatgactacaattttctcaattgagtaaggcataatctatgaattttcagaccattgatggtaacaattgttaccaattcaccgagtctggtattttctcttttcttcttctaaatgaagccccctttgctttttttgtttgtttgtttttgttttttgtttttgaaacagggtcttactctgttgcccaggcttggagtgtagtagcgtgatcttgggtcactgcaacctctgctacctgggctcaagcgatcctcccacctcagccccccaagtagctgggactacaggtgcgtgccaccatacccagctagtttttgttgttttttgtagagacgggatttcactgtgttgcccaggctggtctcaaaactcttgggctcaagcgatttacccaccttggcctcccagagtgctgggattacaggcaaagccgccgtgcccagcctcctatatattctgattatgtacatttccctgaagattagggaccagactgagagcacagtcataggtattcatctcttggaaaaatcagacttcataatagtatcagagccttgagaatatggaacagactttgctctggcgaaaacataaagcttatagttttgcttagatccagataaacatttccccttaagatttgaaattcaaattgtctgtgatatatatcaaatgatctatagtcactctgtatggcaaagctgtatgcatcttggaagcacagaataattgcattgttcttatagttttaattttgtatctgaaaaaatctgtatattccctggagcaagaattgctggcatgagatttttttttttaaattttattagacttcgttttatttaagtttatgctgggtaattttttaatggcttataattgaattactttcattctgttactcataagtctcctactatctacccttttttaatgaaaaaaaaaacttgaacaaagat

SEQ ID NO: 96027 - DNA, 1022 bp, Homo sapiens
tagttttccctttcgtattctttttttaatcagggagtgttatggttctggtttataagacattcttgttatactttggctgtataataaatctttgctctcaaacaatagactatgctcattgcagtatagaaacatacttgttttgatatcagtgattcaagttgattgtttctaaaatgtcttgacattttttccagtccatcctctcaggatggaaacgtatattgtccccatcagctattacattaggcattccacctacatgtattcagtatacaaggttgttttggagtattttcccagtaatgtatttccattttctcagatggagaaacaagggtatcctggtcttttctaagcttcacagcccagttattatgagaccctgggctattcatgcaattctgtcttgtagtctcggtgttttataacatgagaatgattaactttagccgtagataatcagaaagttatttgctgttctcaggtcagtggagagatctttccccaaatactgagagtattgatctacttgctctagacacagtgtgaaagactgggtcagtggtggtgcttggtagagcacaggcagatcttttcagattttcatagaaaaagcagggataaaatgttgggatcagtaaaggaaaggataacagtccccactttttatatctgctggtttcgagaattggatatgtttgaagcatctacacacttacttggagtgggtaggctctctctctggttgtgtcaactcttatggcttctcttggtgaagatggccagcctgggagcagtgagccctcttccttatcattaggtaagttcatggacttcagtgaccagtgtggttattctgtttgttaatccaaattaaattacctttctaagaaacaagtgcatatgaatacagctttggttttttgtcctcttgttgagaagtttgctaagctcataaaaactgatcgtttctaaaaggcttttgatcttgtattttctgatgacagtttgttgtt

SEQ ID NO: 96028 - DNA, 1034 bp, Homo sapiens
tggaagtttgcccttgttcccttctcccactcctctatggaaaggctatgaaaacacatttgacatttttgcagctttcattctgtggatgtgtattttaaatgttaaggttttctggttaaaatactttgaaataattaaacattaataatagttcatttcaactgtgaaattagactactgtctaagaccaagacatgaaaatgtctagaccagagagacatttcatgtctttaacttctggttgtttttattaattctcttatattctgcttttatgagtcctggttggacccttccttaagatgtaaaagtcaagattaccattaaaacactgaagtagggtagagtgtctatcaagaaatgtaaaccaatcaaatgggtatcttacggcttcccagcatttcatgtaagcagaagaccccagaggtacctaggaatactgcttttttaggaagttcacagtacaagtatgttttcctggtctctccctcttatgccttctcttctgtaacatattttcacatagaacatttagtttggcacttaaagagacaagactattttggtgggattttcttcttttagttttgatcacctaattaattcatttataaaaagtcatttatatacttattttaggccgggtgcagtggctcacgcctgtaatcccagcacttcgggaggccgaggtggatgaatcccttgaggtcaggagttggagaccagcctgaccaccatggcaaaaccccatctctattaaagatacaaaacttagctggatgtggtggtgcgtgcctgtaatcccagctacttaggaggctgaggaaggagaagcacttaaacctggaaggcggaggttgcagtgagccgagattgcgccacacattccagcctggtcaacagaagaagactctgtctcaaaaataaaaaataggctgggcacagtggctcacacctgtaatcctagcactttggaaggctaaggcgggtggattgcctgagctcaggagttcaagaccaggctgggcaac

SEQ ID NO: 96029 - DNA, 1280 bp, Homo sapiens
atcaacagtgtttactgtgatgtaccaggcactttgttagacctgagaattagaagatacatgagatagatttagattctgacttcaaaaagcttgatatctattggggagaggtggaaatgtaacacagtatgacgaatactatgacagggtgcttcacataatcaaaactatgacctaaaaaaggagtatcttagacccttggccaccccagatttcttgctaggggaggctgcccagagtagattctgttttcatgaagtacaaaatgggattggtccgggtggggagatgaggggaaaggtttctagaggagagagaagcatctgcagaagcagtcaggcaagaggcagccacatgtaattcatttggctgctgtaaaggaagtcagagtgggtgggagttgggggcagagactggtagagtccagctcatgaaagtctttgaagcccaccttagctacgagaaggcaggagaagatatttaagaatggataagatttgatttgaaatcctatttccaaagcaagtagaaagtatttcttggttttagtaaatctctatgatgccaactttttattggcattgcgtagtgtggtctcttagctgacaagttatttgggtgttgatgtggatacaatcatagaaaaggtcacagctggaatatctgaattttatgtctgatgctgtaacatatttgtgtttggaaaatgcatttgattttaaatctaggtgttatgttttagctgtctttttccatagttaattgtttaagtttataggatgtctgtttgcaatccatgttagttttatacatttaaagattcttttctgttttgagattttttttccttttatattattaaagatgccattttaatcttcttcttgaaattgggaaataacccaacttcatttatctaacataattctaatgtgttccatggttttaactaggaagtttgtgttgtgtgtagttgaaaagacaatattttatatgtttttaaaacagttattatggagcatcagtaggaacttaagcctgttcccttccaaagagttatttgaaatattatttgaagaaagttatttccttgatgctaattaaagggatcagttacgtgtagagctttgaggtcatacatatagtttatattaaagaagatattttctttaaatttccacacattgcgagaatatatgcatataaagaaatctatatgaataaaatgtattttcatttttttcctgtggtattgcttagagattgcatttaatagg

SEQ ID NO: 96030 - DNA, 1251 bp, Homo sapiens
tgctaagaaaattgttatagttctacttctgctcttctagcagtgacacctaaaatttttaacataatcagctcttacagaattaaaaaaacaaaataagaataaacacctttgtgacatttgtagttatttactgtggaataaggaggctattccaccagtaattcttctaagtatattcttttatgatattcaattgtcttttatgctcctacatttaaaaaaattactaccaccaaataaaaatttatttttatataaaattgtgtattttagccaaattaatgtgtaaaatctggcttttgaaagtattatagttcattcctacatttacatctattattcattgtcattttgcttcacttttagctggcagccggtcaagttccccaggaaaattgttgggaagtggttatggtggacttactgggggctcctcacgaggcccacctgtgacaccgtcttcagaaaagcgaagcaagattcccaggagccagggatgtagccgggaaacaagtccaaaccgaataggattaggtaaggattctcaaagatcttggaataccattcccagcttggtcatagttttgattataatctaatgactatgtctaatgtaggaaatatagatctattttttgaactgaggatgtcactttgcctgggtgtgctttatacagattatggcatattgaggtttcagttagaaaaatatatgggacttaacccttcaaattgatgggaaggaattatgtcattgtaggcttttgtgttttgcagtcattgtacaaagcactggaattggggaaatagcagggtgtttcccccacaattagaagcagtgttgcttttcattttccttttactgattagcactaagtagacattaacctatatgaatttttcaaaaacagcatttagggtccacatttattttaattctgatcttctctaatctaattggtgaaacttatggtgaaaaaatatgcatagttacttttgacatagatttgtttaagcatgaaagctaggaattgattaaaaccaatacataatatttagttttgtgttacttagtttctttgtaatagtgtgtagaatcatgtgaattactgtcagccgcttaaataccttttgttccatttaaaatctaattcatacgctaactttttaaatataaaatttagaagtctttgtgatataatacaaaaaatctaaattcatactctatgacttctttacttcctaagg

SEQ ID NO: 96031 - DNA, 1108 bp, Homo sapiens
attcatagtcctgatttaatactaagtaggcttcattaatattagatttagggcccttaataattggcatattttaaatatttgaggtttatgggaagtcaggacaggtgaaactagttaacagcagtttctttcagttagttgatgtttattgagcacttactatgtggtaagcacttttgaagatggtagtgatacagagatgagtaagttacaatcacttccctcaggttgcttaaagctagaaagcagatgtgagcctggcacattgtaggtttgaaagtgttttatgaacagatctgaaataaatgctaatgtagaatgacaaagataaacataagtacaaaaataggaggaacaagtcctaggaaatatagctgttttgctaatgtatttgtgaacaaagacctttgtgttgtgttgcatgctgaccttctgtattgtgttattgtcttttaatccactttttgcctgtcctttggtctgctctcataatcaaggatccagatctgctaatcctgctggtggtaagccatttctcttcttgcctttttttgttgttgttgttgttggcattctccccgaccccatgttccttgcacaatattaatttctctctttattgtaagcttagttaatctttctgcgtttttctttgtgttcaaattctagagtttgaaatggatttctttcccctttatacatagtttaatagtttatatagctcaaattttatgggtaaaattaataggtcctgagacaaattcttcattggtttttataatgatttttcacttcaatttttagttaaatcattataaactattaatttttgtgagtattcacctacgtggttcatttgaatgatggtggttttgatttatataatatgtatttttaaataatatatatttaaaataaacacacatataaatttacaggtaagtgttgcttcaaatgctttcttcctctgggtcattctattctagtacatagtaaatgtatactttatattttagaatgtattgccttctctacttagggaggtaatctgtcaatgcaaatgattgccatttgagtgtattggtgtgatgcttaaaattttgtt

SEQ ID NO: 96032 - DNA, 1057 bp, Homo sapiens
ccgccgtgcctcacctattactttaaaatttattaatgtagtttaaattcgggagaaaaaccctcttatctaaaaagatcaaaacatcaaaaaattcaaacatttatgataaaaattgttggcaactaggcacagaaatgaattttctttttttttttttttcttttttagacagggttttgctcttttgcccaggctggagtacagtggcacgatcttggctcactgcaacctccgccccggtttcgagagattctcctgcctcagccttccaagtagctgggattacagacatgcgccaccatgcccagctaatttttgcatttttagtagaaatggggtttctccacgttggccaggctagtctcgagctcctgacctcaggtgatccgctcaccttggcctcctaaagtgctgggattacaggcatgagccaccgctctgggccaaattttcttaacctgttggcagatacactttctgtgaaatttcagaaattctttttaaaaatcttgtttgagtcaacagtgcttaccctcactgcttctattttgcattatattacatgaccaagacaccacaataaaggcaaagaagtaaaagtgaattatttgagggtaataagctgatgagttatttgtgggtgttattctatttagataaccccaaatctgtatacaagtttagcagaatcctagagtgttaagatcaaaatataatgattccattcttacctgccaagaacagaaaatataatttaataaattataaaaataaagcaactttaaataagtctataaaaattgagtaagaactttgaaaaaatgatcagactttatcaaaagatattgacaaagttaaataaacatagaagatacaatgaatgagaagaccaatattataaagcttttccccttaacccagagtttcacataatgccagtcaacatttcaacaggcgttgttattgtgtctgcacatacatatggaagacagcaaagggcttaggaaaaggcgaatttacttgtcctgccaattagcaggatgtcttttaaaaa

SEQ ID NO: 96033 - DNA, 1062 bp, Homo sapiens
cacttaatagattataatacagaactgaagtatatttgtactgcttgttgctttatttttatttattgtattttgaggtggggtcttactctgtcacttaggttagagtacaatggcatgatcatggctcactgccgccttgacttgccaggctcaagtatcctcccacctcagccttccaagtaactgggactacaggtgtgcaacaccatgccctgctaattttttgtggagatggggtttcgccatgttgcccaggatggtctcgaactcctggactcaagtgaccctcgtgccttggcctcccaaagtgctgggattacaggcgtgagccactgtgcccagcctgcttgttgcatttattgaaacttttttcccctaattaccacagagcattttatatcatcttttaaaaacatgcacaggtactcatagtaatattgccaaatcaatagactgaaaacaaaacaaaatgaaacaaaagacaccttttcctataaaataaatatatatctgagtttaacacaacagaggccctttaagctgtatagctgtgttcccaaaaaagtaaggaaatgttcaaaaccaagaggatcacagactggaatgacaagcttgaactgatttttaaggctgtccccgagggcttagtttttttttttttttttagttttttttttaattatactttaagttttagggtacatgtgcacattgtgcaggttagttacatatgtatacgtgtgccatgctggtgcgctgcacccactaactcgtcatctagcattaggtatatctcccaatgctatccctcccccctccccccaccccacgacagtcccagagtgtgatattcccctccctgtgtccatgtgatctcattgttcagttcccacctaggagtgagaatatgcagtgtttggctttttgttcttgcgatagtttactgagaatgatgatttccaatttcatccatgtccctacaaaggacatgaactcatcattttttatggctgcatagtattccatggtatatatgtgccacattttcttaatccagtc

SEQ ID NO: 96034 - DNA, 1374 bp, Homo sapiens
taggttattatcttcagtatgttatgttcagtaatttttggagattttgatgagggaaacataatgtcttttatgttgcacatgaggaagtttatgattagatgtcatatggtaaatgaatgcattctcatacttttttaaaaaagctagtatgcttaggaaaagcattcatatttttcccaaaataagtaactttaaatgaaaagttacagtgctttgaatggcctgtggggctgacaaccattgtttgtttggggaataatcatgtttattaagatgtagtcaaaagccatatcaacttaactttcagtgattttaattaagattacacgataaaaattatatagccttgtcttctcttcaggaaaaagaacttagattttagtacaattttactgggaaataaaatgtaaaaaattatccaagaactgtgaattttaggtaattgtcctttttacacagtggaaaaagtatgcatgtctatatatagaagtaaaagggtgttaagcttcttttaaatttttaaaatatgaaggaaatttttttttttttaaaggcagggtctcatttgttacccaggctctggagtgcagtggtgctattacagctcactgcacccttgacctgccaggctcaagtgatcctcctgcctcagctccccaccctgtctgtcagagtagctgggactacaggcgtgcaccaccacgcctgcctggctaatttttcaatttttttgtagagatggggtctccctatgttgcctagtctggtcttaaactcctgggctcaagtcatcctcctgcctcagcctcccaaagtgctgggattacaggcgtaagccaccatgcctggcaggaaattattcttttggggagaatagttgtaggtagcaaaatgtagaaatgatcaagttcctctgttttggttctgtaaaagatgtcagtgtatgagtaaaggctgggtttaattatgcccccaagcagtgaaacgtacagcagatatgtatgccaaaacgtcccagtgtgatgagaacagagacttactttgaagaccttttaattttataatctgtaatttgggaatttgctagaaaatttgaaacacgtagggaacagaaaaaccctagtgacataaggctctctagtggtttttcatttgcctaacaagaagataggaaaaccaggcctacaaactacacttggtacgcagggtgaatttctcctggtttggagtcttttctagaaggtatggcaatgtgagtgaaaaagaatccttaggagcagtattaaaaagtcatgagatgaatgatctttctttattccatgaaagtcaaaggctttgggctcctcttacaagtctttgttttcctctggg

SEQ ID NO: 96035 - DNA, 1331 bp, Homo sapiens
tagatccacctttagtatttgtaattagtatttgtttcattgttggaaaaagtgagtaaaaatcagcctcagtatttttgtttttctgtctgtattatggagtgtttgaatatggctggtatagacttcccccagtgctagtaaaagccctcacgtcttttggtatgataatatggagctgacccttcagaagcactgatgataagttttcagtccagtattaacctcttcaaagaacgagactggagtattcaaattctctgtttcctgagaattctacctcaacttcccttattttgtccccaaacaaaaacaccaaaaaattgaaatatagcacaatcctagtgagaatttgttacagttgctacctaggttgacacatgacatctttgcaaaagtgtagcattaaagctgatgatccttttccaaacttctagagtccagacacatgagggaagacatggagtacataggcctggactcaggtaccatgctcgacagcttttgctgctggacgtgtagttgggataggcattgctagagcaagcttctctgagcttcttacttggctctgccttttgggtaactctttagtattttagcttctagttcctcctctctgccctgttctgctggtactttcttccaagaaaaaggaactcttaagaggatgagagttggctaaaacaaaaaataatctttctttcaactgtggcactaccctgggttgcccgtctgtgttttattttccaaaggcaaaaaaaccattatgctatgttaagctaatttcaatacaaggcacacttacttgcttcagactctgctttgctgttgaacttgtttcccttttaattttgttttaaattgtacttttgcttttttagtagctaataacattcggctttttaattttttgaatgttactaactgttccctgttatcccttcccttgttttttaatttgcttaaagatggtactaccactaaagcggagggtaagcggtttgtttctgtgattgaggtgtgtctcactttctctggtcctctgttctcaccgagtgttgcccagtacccacttgtcctcaccaaggtccctgcatgagatgttgcacgctgtttctcctcctctcttttcattctgtcgccattgggtttttgccctacctctacctgagttctccttccctttcttgttcagtctttgttcttgtgaattttagcactaaagtatgctgcgtgtggtttttattgctgagtccacactctggggaggagcattgatgtcacactgtgtgctactgtcctcatggactgcctgtcttgggttttat

SEQ ID NO: 96036 - DNA, 1026 bp, Homo sapiens
tgaggttgagagaggataagtgacttgcccatagtctaaaagacagtaaaattgtgaggccaggattcgtaccaggtctcctttgtttaccctctcctcctgctactattagcggctaaactgaggcttccagtccttgaaaatcttctgtggtgtactccagagttcagcaaaagacctgtttggatccttgaattagaccaggattttgtgtgtttcctctagatgttactggggtttccacagtcacttcagcagagaagcagagcacttgtaccacaccttggagtcctcctaccagaaagccctgcagtcccacctgaagaactcagacagcatagtgtctctgcctcagtcagaccgctcatcttccagctctcaagagagtctaaagtaagagattcatctttgcttatcattcatgtgagaatttgtatttaaaagtttgtcacatgaaaacacaaattctagctatgtttttacatgggtgcttgttaaaacgcccccttacttgaggtagatcctggtgcaaagtaagataccaccatggagtggtgagaaataggttgctttggtctctaccgtactgtttttcagttaaatgtatacggcagtcctagaatacagttttagaataacataagtgaattatggagtagtgtgaactatacacaccagtgcttcagagtcttctcagaggatgtaagtgtgaacctggagacaagtttggaaatggaggtcattcaaactctgtgacttaatatattatcatctctgctctgtgtttctaatttctgtctgtagttactatttcactctctgtatttgaaaggcagtccaaaatagattgctaaagcttcgttgggaatcagggagtttacaacattgtggttcacattgcccaaaaaattctgaaaactctgaaataattcttcattgtaataatttcctgttgtagtttgtatttgtattaattcaggtacagtacatgtaataaataatatacatctttacttttagtcgtcc

SEQ ID NO: 96037 - DNA, 1561 bp, Homo sapiens
agctgaaacaataaagaagggaatacatgatgctgattccgaagcaagaatagaagccagaaagtaagtttttattgtacaccactttttaaattaacttcttctatatttcacatgaattataggattgccttattaaaaacttaagttacttgaacatatttgttaaccatgacttttaaacatgacccccaaaaggccattttggaatatttctctctttttttaataacatcactcaagcttgtaaataaacaggactgagggagacaaaagaatgctcgttttttacattcgtcacaaattatcacatagctctggaaggcagttgtatacatgctcaatgtattcttttactcattaagccatattgtaatccaaagctgctttaatgatttaccatgaaaaatcttggtcacagggaattctctccctgcagtcacttctttgcaagcatctgtggttccttggtgtgaatcatattaaggggagttggatcgactaatgcctgggattatcacagtgataacttgttgtttctgtctcaacaagtgaggtacttttgccattaggactgagtttcctccaattatgtggccatggcctctgtattcgttacctccttggaaatttttttttttttttgagatagagtctcattttgttgcccaggctggagtgcagtggtgcaatctcggctcactgcaagctccacctcccaggttctcgtcattctcctacctcagcctcccaagtagctgggactacaggcgcctgccctcacgcctggctaatgttttgtatttttagtagacacatggtttcaccgtgttagccaggatagtctcgatctcctgacctcgtgatccacccgcctcggcctcccaaagtgctggaattacaggtgtgagccactgtgtccagccttggaaataatttttgccagtgtgactgtaaataccagaattttgatattaagacattctctcttgggcagtgcattgataactactgccagtgttgcatctgtgattttttttgaatttactctcatagttgaccaactctcctaattgatatgtgctaaaatctaattgtactagcctgcaacgttacggttttacttagctgcattaatacatcctgatctagtacttattgctctttgactgccttcacagttaaattatatttcacttgtttctgagcttattataactatgaagtgtttgtgccaattttttctttgctagtttctaccaaaataagtgatataattaatcgttgctaaaaactattaggaatggatttgttaataatctgtttatgctgtttttatccttgtattggaccctccccacccccggcccattttttcttggtctttaattataatgtgatactgatttcaagtagctctgaacattttaaaatttttcttttgcacatgttacctaaggcaattttaaatactttgtgtcaagagatgtaaaattgcatgtataatagctgccattttaatgagcctatcctgtgttctaggtatggtcttagatgttta

SEQ ID NO: 96038 - DNA, 1033 bp, Homo sapiens
ccattttaagcactatttagggccttagcatgaaaatatggagagcacttagtttttcaaggtacttttaactttttttgtgcaaagcattctccgaaattaatgcaaagacctgattgtgtcatgtttgttgatcttctgtgcatgtgtacattctctattaacatattacttaggatagtataaaaatgaatgacagtggtaagtcctttcagtgatgttgccatgaagtgcaagcttctgattggagagaaatgcttggatcctgtccctgtgtccctgtggcactaataggtgcttaattactttcatttgctttggtttttagtcagttctgattcattctttatgttctgtttttctaatcataaaaatcagaagaaatgtactaattataaaaaatagtattgggtcacttaagaaaaatgccgttttcattttcactaaaatatgtattaataagttgtgtatttcttaatactttttaggcgctgttttgaatttttagatttgcttttacaagaatggcagacacattcactagaacggtgagcatctgatttgaaaccatttttccctctgaattgagcctttagagtgaatgctttggtgagtggtccagctggctttctgtaagaatggaggaatatatgcgtttgttttcatgactacgtctgttgttttactgatgttggccacataatattcacagacgcttttagtgaatttcattggttgaaatactactatgtccatgtgcattctgacagctgcagagccaatgtaaactgttactgactctggccctgctgcttgacattcctgtcagttcccatgaggtaacagtttaaagttgctgttagtagacaagtgttagatccttcaaggaatttcactcatttgaaagttttctttttctccctctgtatttgatgtagacagcctatttaatgttaaggtgattatttcacagtttccatagaaactagttctgatgtgaaaaacacaagcttttgttgtttgggttcgtaaa

SEQ ID NO: 96039 - DNA, 1041 bp, Homo sapiens
gcttcctcttgagagagctaattatagtctagttagtaggctgccacatttcttactcccttggaggagaatctcaattagcagggagtgggtgaatctgaaagcctgtcaggatagcagcttcttcaaagtgaccctgctgcagtgaagcagagagatagttgtcttttctttagaaaatgaggcattttctccccattgggcttctatccatcaaagcctgcctcagaagaagagaaggaaaagctttgtagtttaggttctggctttcctggcagataggcaatgagcagttatttcttagtttctgtgactttttgttggtcgttatagatgagtgtttaaattttccgagcgaacagtatggcccaaagcttctaattacaagttccagacaccagacttgaattcatgtttgtctttagattgatatctctgcccctcatagccaaacttgtagccacagtggtatattccttctgatctgtctgtggcttgttgcttggtatctcccctatgcagcctggttaaagttcagttctggggcagctgggctctgctggggctttcttagggacttcagtggaggctgctgaagggactggttctgacctcctagtgctggccctggctatccctcagcctctctgcagcatctggacctcagtagtagacctgttcagcttctggaagtctgctagtttgcttctaaggccatggatgattgtgtttgtaatctggctttatttttactgttttactgctatttttcccttcattatgtctacttatttggattgccaggggtggggtgattcagggttggatgaaaattatagtatcactctgtagaaatttcatgagtcatttttaagtggtttatcctgatgctgtagaaggtggaatggagctcaggtgatttttaaagaatcaaaggaggtgatgcttgctaggaactgaaggcttccatctgcttatttcagatttctacccgagactatcagatgagagaagtggccctcccatggcagtctgcagtgg

SEQ ID NO: 96040 - DNA, 1047 bp, Homo sapiens
ctggcctccatatttgtgagctggatggaagccctgtgatggggcccaagaccctggccctgcactatttgtgctcagaagttccctgcatggtggtgtttgtgcccagcaaggctgactttttggcatgcaggacaaaggggaccatgggatgtttgttggtgcttataaattgggtgtgaaatttctcacacaatggttgtctttggcataaattgggcaatgtgattattatgtgggcagttggcttgggagctggggaacacagagggaagctgaaggtagtggtgagcaggcttcagtggtgggccgagatgatggagatgtggtgtgtggcacactcacttgacctatttgggctagaaaatgagcatatgatcaaagtgtgaggacagttatcaaataggtacttttagtaatatatctataatttacaaaaatctctttaaagatatcctgtaccttacgtagaataactgcacttatctgcacttccttctcctaaaatacacttgcttgaaacctctcatgatgttgattcctcctaagctttgctttcttcctgtttttagcctgcagttgtgtggcctgtatacccggccatgcatcagaatgtctggataattctctagacaaataatagcagggaagctgagtgccatttgcatttaggtttgtaatactacccaaatgtaattaaaagaattttagaaagctaactactttgaaattttgaaacaagttatttttggtttatgttaattctttataattatgtaaatacagcaatgagaactctagattgctattgttttaagcatatgtatgctgtagttatccaaaggtgttattaaaatcattgaaaaccatcaactaaaatatgattttaacttttcaaattgtaggactggaattatttagatttgaatgaacattgcaccaaaaaaacagacatattaatattaattggagaaaataaacccaaattcttgtgtgtgtgtatatatgtatacacacatatatatacatacatatatatacacacac

SEQ ID NO: 96041 - DNA, 1034 bp, Homo sapiens
taggaccaactgaagtcaggaacctggaggggagagcaggttttgagggtaagatgattataggtgattatagttttggacacttggacatagaattttgtttgtacgtgagtttgattcaggtaggtttgtatcttggagtagacttgagattgctattagaggattaagtattattggaacatggctatttatgttaaattgtcatcttctttctctttgtcttcgtatgtagcggtatggtatttgcctctctagctaaagagggttctggagaaagagatcattaaagcagagatggaagatttgaaggattatttgcacaaatggcaaatagctcttagtgtaattactttaaagtatgagagaacattctggtaggaaaccttttccaaatttggctctaagtttttccaactgacttacttttgtgcctatgtagtgattgtcaaaaagaattgggtcaggattgctacagtgataattaaaatgacatttccaaaagagcacagggtgtagatctgatatctgtgggatttgggttctgacatttataactttcagggcaagttggaaggtaaaataagtactgtgatcaaagggagaaatgaacatttaatcaatgaaaggatatatggtgactcttatgtaatatgacactcagagattatctaaggtgttgaaattttagttgttgacttctggaagtctcagttttcagtcatcagtttgcaaactttattcacatcccttagtgttgcttaaaactttcccctttgccatgaaataataaaaatgtaagtcagaatatgcccacttaaggcctgcattgtaccttttcagttcctttttgagggataaatgatgatttcaatgtcctactattctctaacctattaccaggaagaagcttgtggttgtcattattactataattatagtcacccagtctcgttcattactgcctttgtgtctttgccattcctaccttgcccgtttcttgccccagggagcttgcacacattattctcact

SEQ ID NO: 96042 - DNA, 2117 bp, Homo sapiens
gtttaaaaatttttaataccacttttaaagaagactctcttaaatgagtagagttggatggagaaggctcacacctccccccagccaccaacccccaaccctttttacaaaatcattgttagtctaggcttttattttggaatagggtggcagttgtcattggtgctgccggatcacactgaacaagtgtgggtggagagtttgctgatgcttaagttgctgtgagtaggtatagctttcagagcagtgtttttatttggtaccaggattactgacaatcatgactactgggaaaggtaggctattctaatatattctgaaaagtgtttataattattgctgcttggctaggaaatgcttaaatattttataattcctgtggtaactaaaaatcatggatgaaacatgggaaagattgttatgaatgttgttggtatttaagcagtgaaaaattgtgaaacctacagggaaataaacatcaatgttaaccttctaagactaggagagaggaagtaggcacagtaggctgaggctagctgtgtttttatcttctgtttatttcatgggcttttaatttttctctgcttatgttcacagtatgagggttatgaacataaatctatttgcaattgcaaggtatttgttaataacgctaagtggtcttgaaaataatctactggctagaaatttctaagttttcccagtaggtatagaggaaaagcataaatgatagcagtgcaaggatgctgcttctgtcttaagtcattgtttatttttttcccctttaaaagatttgcatttttaaaatgcaaaaatgtacaggaaaactacaaaagaagtattgctcacaaaaaatcttcttgattaggtttcagtctttccacagagctttttctcaggtttggccaatatcgaagtgattttaaaagattctgtgtaaacagggtttgcatttaaaggtatagggtacagttgatgtgatgggaacaacctgtatcactgtcttgctttcctagtggttttgctggcagactcttaatttgttgtcttcaaagggtatttccagactcttctactgaaacaggtattgcacagagtaaaattgcatacagtaacaagtgtttatttgtctcctgctgtggggaattgggcacacatccaggacttctgctcagtgtttattttgtaatggattattaaaggtttgtatagctattttcttaaatttggttaagttgggctgaaagtactggaagatgccacatttctgctcatatttttaaattgagaatttaaagtatatttgtattctttaattgagaatttaaggtatacagtgataatatttttatttcatacctaagtatcatattctattttcaggttaaactgctgcaggaaatcaatacctgggcaggagagttaaataattcatgttctgaagtaacctctctcagagcctttcctttgaggatttgaaagtgtgtcacttacaagtagcatttgacttaagttgtgatattttcatttgtatttagcaacaggtcaaaataatatgagagtcagctttttcatgttaaaagccatggagatagcctcctgaatctgagtttaaaataaagacgattctttcacttgatatattttttcaaattgcctgcctccttagtcactatcacctggaattcaggcttacatgctttggtaacttttaccctcagtaactgcagtcgtgataggaaacaaggattaaaatactgtttcttatggaagtggtatgtctgaatcatgtattaattcatgaccattaaaaatctgcaaaatataacagcagcaggtctcccaaggtgtgtagagtactttagtgttttcagagcactttcctgcgttttttgttttatgaagttcacagcagccccatgaggagtaggtagggcagcttttgaacacagatactgaaggttttgggttttctataattgggttagttgcaggacaggggagagccctagtttttgctgtcttagacaagtctttattccagaaagccattttgtcaggccaagtgctctggaatccctcagactgggtatgagtgccacctctgcatgggcagt

SEQ ID NO: 96043 - DNA, 1003 bp, Homo sapiens
gaaataatagaaaattgatatcataattcagctattaccatcaaaaatcattttcgctatattttcttagttcattttcctgtaactgtataatttgtatataattttaactatggtgtaattttctctcctttaccctgtactttagcttacatactttcagcttttaaaaacatatcattggtagagctggggccagaattctggcatctgagtggtgcactcgtgatgagtggggttgctgggtgtccacaggcaggtcttcacaggcagttagttgctggacatgtggcttttacttttgtgtgggtgtatttgtgtcatttgtgtggtttctcagtttaaaaattgttggcactaggacagaacatgctgtgcaagtaagtaaaagcagtggcaggaaattgagtttgtgcttcataagccagtatgacagctatgaaacagaatctcattatagtgctggcattggggagaaagactgcatccacactggagatcttgcctaaaagagtgtgtacatataccctatgggatccagtgatgtgacaaataggatttcaccctcaggaatgccaaaactgtgtggcattggatatatcacaagcagcattttattctaagtggctaggtataaatattgcccccaaattccctttatgtgtgtgtgcacgtgcacacacataggtttagggttgaggatggaaacagttcttttaaacatctatgctaaaaatagcaaatggtaaggaagccttaacaaaatttcttggaggccgataatttcagctttttgctttgtatgtgtagtattactgttttaattgttagagccaaaatgttgaaggaaactgagtactatatagccatatgtataaaattttagaatttctaacctaaatgattttcatctctttacagtaaatttgagagaccagtaaaatgttcaattgctgtcaaaaaacaaaccacctgatttccttcattgaacatttagatggca

SEQ ID NO: 96044 - DNA, 1074 bp, Homo sapiens
atctcaacacttactccagtatacctgtgagaaagcctcttttttctttctttttttttttttgagacggagtttcgctcttgttgcccaggctggagtgcagtggcacggtctcggctcattgcagcctctgtctcccgggttcaagcaattctcctgcctcagcctccctagcagctgggattacaggcacccaccaccacacccagctaattttttgtatttttagtagagatgggatttcactatgttggccaggctggtctcaaactcctgacctcaggcgatccacctgcttcagcctcccaaagtgctgggattacagtaatgagccaccatgcccggctcaagaaagcctcttttttcttaactttttctactaattatgattgcattctcccaccttttcctttcatttttggtgtcactaggatggaatatttagactggttaaggaattttgctttaatttaaatgccaaggtgaaatgatccattaatagaaaataaatgtaatacagatttttttttaagctgaagattatccagtcacagcatttgtttctagagaaatcatttatagcatttttggattaagcatgaatcacagcaataagcacaagcctttgtaacgtactattagtgcattttgaaaagctccatcccaagttattgatagtctgcgctaagaaagaaagaggagaaacacacacttctcataagatacacattttgtgtagagtagtcagtaatgtcagagagcaggggctctggattactactctcagggctagaatctccaccccacacctgtgtcacctcaaggagattaaatgagatctttcagatagacttctaggcccattctttacccatagtaagtgctcagttattgttggctattgttaatgttattgattgagtcactgttttgttactaggtgggtctgtaccattgttttttttgatggggagtggggatcaacttcacattagcattttaatataattggctatgagcagtgatggttaatagtttgtttacatttttctttcatacaggttgaatgtaatt

SEQ ID NO: 96045 - DNA, 1061 bp, Homo sapiens
ggtgctggtgtgacctgttggtctaagtagaagactctcagaaggccaagttactcagtagtctcctcatcatctgagatggtcattttcatttgcagaaatcatgcacctaccatgtgccagtgggtttctgagaaactcagctgtatagtgctttaaatatatgaaaaaccttaattgcaggatagccttagtgtcttgagatgtatttgtgatattgacatagccatacttacaccaaacattggcagccctggagtagactatacacatactgccatataccagacactagtttcactaccaaaaatcaggtgctcctggactgattatggggaataataataataatacaaccgaaaaacaaaagtagtacatttaaatggattacatcttactgctgtataaatcataaatagattgtataattttaaaaatgatttatgaagaagcagagagatagttttttaaaataagatagaaaatgtgagacttgtctaaaatgtttcattaagccaaaaattcaagttagcacttcctgcctagtgtctttaatggcagttatactttttgtgccaggaagccctaggctttggtcaggagtttggagcctataatggttttgtgggctgagttctaggcctgtgtgtctgcttttgagaaacttcttattatttgttttgttttttcatttcccccacctcatccataagatgaggttggtactctacgggcagctttcagtattctgtagtagacaggatttacagctagagtattccaaattgagcactctgaaaataatccatatattcacatgtgccttaggaatgttttgtccgcacatatatttgcacacgtgcgcgcacacacacacatacacagacatacaatcaatccatgtctcccttctgccaggaagttctgccacctacctccccgatactaaccaagttaattattcctgcttctggggttcttgtgtagcttgcatgtgcttttgctgttgcctttattttaattttttcattaatctttcctactagtctctgaacctctag

SEQ ID NO: 96046 - DNA, 1056 bp, Homo sapiens
agacatttccggcccagacgcagtccgagagtccagacgcatgccgactggaggaccaaagagattagcacgaagaaggatgatcttccacaaaaagagctatgtacagctataatggaaaatactcggtgaggagaaacgaaataaaaggcaatacagcgtagccaaacccgggttagctgcgggtggagttcaagagcgcgccgcggtcccgcccccgccagccccgccccggcgagaaaagcgtatgcaaattttcgagcggccgacgcgcggtcttctgggtaaaaccgagccgccgcttttgcgacccttcgggagcctcagaaaacaaagaattggggtgtcgtcgaaagctgtggaggctggaggtaagctagctaccagaccgactagggcgaggctcacgaattaattaccacaaccctaccaggtattggcgcttcctgcttgcagcccagggactttctattataaccatccttttcttggggttgcgctactgtccaatgagcgcatagtgagggcagtactgctaacgcctgaacaacacacccgcatcaactagagcttttgctttattttggtgcaatttttggaaaaatgaaaacctgttttcatagacttatcagttcaaacagcagtaattcgtaaataaactagtactttgtggttaaaccagtagagggtgcacaagacgcgtggttttagtgtcgcaagtaaagttctttcagtttttgcggtgattaaacgggaaggatttcaacagaacttcacccctttaactttacgccgatcatcaactgttctgtaacttccttatgctgagtcagcccagtagtctaggtcaagtttcaataggagacgaagtttcagtaggtctttgcacctcacataaaatgtaatccaggtcgggcgcggtggctcacgcctgcaatcccagcactttgggaggccgaggggggcggatcacgaggtcaggagatcgagaccatcctggctaacacagtgaaactccgtctctcctaaaaatacaaaaaattagccgggcgaggt

SEQ ID NO: 96047 - DNA, 1026 bp, Homo sapiens
acaagtgcttttgagaaggtatttgtcaggatatgattaaagatgatacattatttatgttgtctgctacatgaagaaataaaagatttgttgtaaaaagtaatgcccttgttaggtatacagttgcagttctgaaattagggaagatcactggtacctcacagtgatttcttaatttttcttttggaattctgctcacaataaagtaactttgcatctttaatatatggacaatacccaagcaatattacagttaggatcagggatccactaaagcatattccactgcatcagtcccacttttttcccttaaattttaatctggttgctctaaaaagacaaaaataaaaatctgtagaaaatctcttactacatttaatacttgaactgtttcgatgaattttgccagtgaaatgagcaaacactggtatgaatttagcttgttttaatgacttcatttactactttttacatttagtttattttttcgtggtaattgctgcagattttctttttttgttatttttgcctcagacttttgagatagaagattatgaaatatgccatgccaaatgttcagagtttattagcaatgcagtcagagtaagccaaatctggcagtttggtttgatttctgctttatagtagaaggattaattcaagaggaagatgcttatttatcttcctcaatgcataatggtacatgtggagttaaagcatgttctttgtatattacaaacctcatagaatggagatcctttgactcaagaatgaatgtcttgcatcttcctctccccttcaccaacaaaacagccttagggagaatgagaattgcattagtggttgccagggactgagaggaggagggatcgggagcagctgctaatggataacggtttcttttgagatgatgaagatattttagaattagtggtgatggctgcacaacctgtgcatatactgtaaattacggagttgtacactttaaaaggatgaagtttatggtatgcacatgaaacaccaatt

SEQ ID NO: 96048 - DNA, 3147 bp, Homo sapiens
tttaatggctaccatttattccttacttagtttcaggtatgttctctgtcttatctcatgtagtctttataacaaccctgcagggtaaatagatagtggtatcctaatttttatacaggaagtaactgaggcttagaaataatgaggcaattttaactagtgattatggaactggatttaaatataggtctctgattttctggatagtgctgctttcataagaacagggtttagtaaacttttccttaaaacccagatagtacctattttgggctttgtgagaccatatgctctttgaaatattcaactaatatgaatcgttgtattgcaaaagcagtgacaggtaataggtaaatgaacaggcttggctgtgttccagtaaaacttgactaccttatgtgatatttcagaaaaacttgcctctctcactcagactcatattgggatcagtttgaattctgttagcttactgctaatcatctacagtgagctggccttgaactttctttggtagtagaagccatctgtgggttgagtaattggttatttaaataagcatacattcagaacagcactatgctacaccatggcggtgctgttcaacatggaaggatttgtgaaggttccctgttgtcatagtgaccatgggaatcctggaaggagacattaaataataaaaataaccccaaattttgaatatggctgtcctcattgatctggtctcctcttcctgtctgccttaaaacttgcagaaagggaaaagtggtggggataggttcttgcactcacttccagctgcttctgttcttccttcttccctcatcaggtgagaagggatgaaatgttaagaatgacctgtcttggagagaccgcctgggctatgcaactggagggaattggggggggacttatgctacgcagctttctcaggtcatcttgacagctttgattctgcgcagcagtgcagtaacatgcagcctcacatccacaccacaccagtgcaagtacctgtacctttactgggatcattggaaacaacgtttcttagcaggggcttggtgctttttgtgaatacagtcccacaggcctttctccgcagtttcaaaattcaaagcactctgaaagcctagtgtttttaattactaatttgccatttgacctgaagtgaactaacatgagactatttatagtctgtatgtacctggctaggctatgtttcactacaaaaatattaatgtgcttgattgtgagttgctgccccggattctattcaaggggctatattacacatacacacacacatacacactatctctctctccgtgcactattttatcttcctaaaaatctgaaaaattctttattccagaatatacctggcctctagagttttggataagcaattgtggacctgtatttaatactgtacaataataatgatagtctatggctgtggtgcatttactgtgagccagaaattgtgctaaatatgtgttcattttttaaattgtaattaccatatgaggtagacattatttttcccattttacaaatgagaagactgatgctcaaaaaattagctaacttgttcaaggtgataaaactagtaattaagatttctgagacttgaactcaagtccttatgcaacaaccagagttaattaaacacgtatgatgtgccagttgctgtacttacacagtagggaaaaactgggtacggtcccggcccagtgtctaagctgtctaggtctgtccagtctgtgtgggcttcatctccgtgtacatttgtctcaaggcccattccgtgctgccttatatttgaaatttgtgggttccctattaacccagagcttccttttcttctgccctgtggtctgattggaggaacggggagggcacatgagagggcggtgcacagtgtaggataggaaataagtcagtgctaaattgcatcataggaatttgtataaattctgtcatgcggagaaagaagaaacattagggtatgcttagttggagaggccttgacagagaagtgggattaaagagggttatgaagaaccaaaaggtgtaagctgcagagggttctgagaaagtctctcttcctttcctgtttctccctttctggttagcacttccttggtagactgtaaaagatgtagtctctcctaagctgctttacagagcacatgttaccgctagatcaagtgtgtttatgggcaggaggagactgtgttgacagataagggaggttcctctcatttcctttgcctatctccaaaaccttggctttcatcgaggtttttattttcccgcttgtgtccttgagaggagagccagaaaagattattggattcagattaagtgacttctgtttccttttctggcagtctcctcgctactgccaccaagtgacacatcttttcagagactgtccatttttttccaggttttccttgcagtgtttgtcctattggctgtaggaggtgaatttccatggtttaatctaaaaagacaggtgcctctgtcataagtagaaaagctacagttagcagcactaagcaaaagcaaaaaaccttaggaaaggttatgtcaagaaaatttatatggattgttggtaaaaatggtgtccttgatgtatgtaattagtggcatttcttcctaaatgtgtttacctatatgcaagggcaacaaagtgtactgaaagtattttagatttgagtgtgaattgtctggattcctcttctggctctgccactcatatatttgagcaggtagctttctctctagaatgtatttcctcatctgtaaaaggggtctgatgatatttactacatagaggattcagtaagcccatgtatataagcccatgtagtgcttttaatatgtagcatgtggtcagtaaaaggaagttgacgaaaatgtatattatgggaccaaatactcataaaatctgaggaaagttaacttttatgtgggactgaggttacatgttttcttgtggcctagtcagttagcctgtgctctggaacagaggccttgggtctcttgtaataagatatgaatccatcagttgttcagtgttgataataaagtccctgagtagagcagcagctggctgggaagtctgtgaagggtgagttaaaa

SEQ ID NO: 96049 - DNA, 2165 bp, Homo sapiens
tgactttgcgtgcccatcccagcaccactggaaaatgagtgtccgtgattgcctttgaatgccatgcttaacctattggtcttaagtgggggcctcccttgagtgaagcatgtgaccatgtgaaggagggtggatacttgaatagtatcagggtcctaataggaaaaggaggttggggatgggactggggtagcatggatgttaaattattagattggtgcaaaagtaattgtcttcaaggagctcatagtctatggagaggaaactgataaataaacaagttatacagtacagtgtagtgtgtgcagtaatgcaaatatacagagttctgtgggaagacagaagaagaaagtagtaacactgcctaaaggaattgagaattttgaagattggttagtttttccagaatgacatttgcagggttacaaaggaatgaaagattaagacttgactcttggtgaagtaattcctaaacaaggacagattagtgtgaaggaaagtcaggaagttggggtttaccactaacttgcttgtaaccatggacaactcagttaaacctgtttgtacaatgcagatattagactagataatctcttgggagccctcaagctctaatattttatattacttaatagaggtggtttttgcactcaagggctatgtcttatggtttgtaatttctctaagtgtagtggcagcctgcatgttcacatctggagcccagagtatggaacatcatgggtgctcaacaaatactggttccatgagtgatctcaggaacttagactcctcagccaggtattgctggttgctttactgaaacctggaaactaccttttagatcctgcttccctttttttcttaattataagtcaagatttttaaaattgaaaccctgaggtacagtttggctttatttggaatttttaaaatagataattcctttaatattttagattaaagggattagctttatattaaacaaaactttgaagcttggcttcttgaatttttttttttttttttttttgacagagtctcactctgccacccaggctggagtgcagtggtgtgatcttggctcaccgttacctttgcttcctggttcaaatgattcttgtgcctcagcctcctgagtagctgggattacaggtgcgtgccaccatgcctggctgatttttttctgtatttttagtagagatggggcttcgccatgttggccaggctggtctccaactcatgacctccagtgatccgactgcctcggcctctcaaaatgctgggattacaggcgtgagccaccatgcctgaccttgggaccttggcttcttgaatttttttttttttttttttttttttgagatggagtctcactctctcgcccaggctggagtgcagtggtgcaatctaggctcaatgcaacctccacctcctgggttcaagtgattcttctgcctcagcctcccgagtagctgggactacaggcatgcaccaccacacctggctaatttttgtatttttagtagagacagggttttaccatattggccaggctggtcttgaactcctgactgcctgatccaccagcctcggcctctcaaagtgctgggattacagttgtgagccaccgtgcccggctgttttttttttttctttaagggctgaaaagagaatggagaagtaattttggcttgcccaaacaatagtacttgcgtgttgttattccttttcttaacagggaaggtagatgaatgtcagctcaatggcttattaaaaaaaaatacggccaggtatagtgaatcacgcctgtaatcccagcactttgggaggccgaggtgggcggatcatgaggccaggagttcacgaccagcctggccaacatggtgaaaccccgtatctactaaaaatacaaaagtcagccgggcgtggtggcacgcacgtatagtcccagctacttggaggctgaggcaggagaattgcttgaacctgggaggcagagtttgcagtgagctgaggttgcaccactgcactctagcctgggcaatagagtgagactccgtctcaaaaaataaataaataaataaataaaaataaaaacgttggctggagcttgagtaactttgcatttaagtgtttctttacagacagatgtatatgtggtatca

SEQ ID NO: 96050 - DNA, 1584 bp, Homo sapiens
tgcgcccacctcctttctctttttgtgtctttcttttctttgttgtagggaggaggagatggaggctaccacttactccattgtaaagtagtgtgatgtaggtgctgcccttgactttgtttaatgtgaccaagccagccactttggtcaacagtgttttctatagagccttcctcatttcccatacttggtttttttttagaagactgagagtaaggcagtaagctgcagtacctacagtgattcagacacagagtggtgttagatttctggtgggaaatagaattgaagttacaaataaatatgctagctaaagcagaagattgctttcctgtctggtgcatttacaagctgggaaattctggaaaacatcaacctgccaactgtgtggctcattggctcttctttgggcttcgatgttcttcctgataaaaataataattatgttatttcgatatggttgccaagccgttcatgcttctcgctctgcttgtgattataaatgattctgcagcatgaattgctttgtctttgatttaatgtttcataacatttgggtgttatgttatctgtgctaatttgtcgttctcttctcttacttttcagaatggactgctgaattatgaagtatttcagacccagtagtagaacatcactctgccactcactcctttatctcctactagttatttaaattggacttttaatatcctaccagctgctcttcagacacacatggtgcattgttgccattccccagattgcatctttgaaacacaggctcttagtaaccttcagcgaacaaagaggcaacctcccagatacgtctgctgggagggagtcatcgtgactgccctctagcttttgctggatctggatttgaattccactatggagcctcgcatggagtcctgcctggcgcaggtgttgcagaaggatgtggggaaacgattgcaggttggccaagaactgatagactatttctcagacaaacagaagtctgctgaccttgagcatgaccagaccatgttagataaacttgtggatggacttgctacctcttgggtgaactctagcaattacaaggtaagctgtgctttagaaggcacttttggaggtggctgggctgcactggtagatcaaaattggcccttataaaaatcccttgtgagcagtcagcatgcttccttggtttctagtaagacactcaatcagattgtggccttgggttatttcattctggagaaagtagagttttctttgatactcattgcagatcaaaaaattctcatcctttagcactttgacagaaggtcaagtgaacagataaggggaggcttttttgttggaaagttgacaagcatttgtagccttgaagttaatgtgtatattatgttttgcagcaaataggtcctgagaccttggtgagttgccctttataaataacaaatgtcttcactgattttctctgggggattgaattggtaataaggtgtggagcattttaccttcaggtcactgttgtgaagctggcccaggtacctggacagaaataggttgtcaaggacttttctgtgacctgtg

SEQ ID NO: 96051 - DNA, 1062 bp, Homo sapiens
ttccttggatttgccaacatggctgtcactggtgattctgacaagagctgctcttgtggagtgagcaagtgaagccagatcagagggtctgtggaggggacaggaagtgtgcatcagtggagctggctggtgtagacaacggcttaaagaagcttcactgttgatggtgtcattgatgaaaggcatgtgagctcaagagagggcctttgtaagatgagtgatttagaggacatttacaagctgctgggaatgagctagcggaggagagatcgctgattcctgggagcagacaactggaaggttataggtctgaggaggcagaaaggaggagttgttgtcatctgtgtgggtgctgaaaccattaaggaagctgagaggagatagggagggagtcagggagactggagtgtgagtctgcagtggaagacagggaaggacctgtgactgacaaatgaaagctggggctgccccggtgctgagctgcttggtgcttagcttagttggtaggtgcagtgccccatccttgcaattcccagttgaagcattactgagttccctcaggcagttttatcttccttcctcttctacctacagcattttctgcaaacttctggtttaagacttgtccccatactattttgactgtgtttgtctctttcttctttcaggcagtgaccttcttgaaggccttgatgaagtctctacaaagttttgtgatttttagtagttagcatagttcaatacctgtcagagtaaatgcttgctcactgagtgaatgtgtgggcctcaaaatgagtgggacagtgggagggagaaaaaagagaaggaaaggacagaaggaacaggtagactaagaacagacttcctgctggcagggcatggcagcgcgtctttcttcgttttcgatcatattgtaattgttgcagaaatcatcctaatacagaaaagattgtcttattgatagaaatatgctgacttagtgtgagtagatcctgctaatttctggctttaaactatcataccttctttctggcatgaaactaccataccttcttccagaac

SEQ ID NO: 96052 - DNA, 1029 bp, Homo sapiens
caagaccaacatgatcatctcaatagtggcaggaaaaacatttgattaaatccaacattgtttcatgataaaaaacattcaacaaattagaaatggaagggaacttcctcagtgtgataaaggccatctttgaaaacctacagctaatatcatacttaatgatgaaagacagaatgctgtcctaagattaggaacaagacatatagtctttaattttttaaaatttatatatatatagatattgtttatatagacggagttttactatgttgcccaggctggtctcgaactcctgagcttacgtgatccacccaccttggcctcccaaagtgctgggattataggtgtgagccactgcgcttgaccaaaacatgtatagtctctttgacacttagctttaacattgtattggaggttctagccgggacaattagggaagaaaaagaaagaaaaggcgttcatattggaaaggaagtaagataatctctatttgcagatggtatgatcttgtatataaaacatcctaaggaatgcactataaaactgttatgagctcctcaaagttgcagaatacgggatcaatatacagaaattaattttattgttacacatttacaatgaataattcaaaagtgaaaccaagggaacaattccattcacagtagcgtcaaaaagaataaaacatttgggaataaagttaacaaaagaaatgcagaacttagattcttttttttttttttgagacagggtctcactcgtcgcccacgctggagtgcagtggcatagtatcagctcactgcaacctctacctcctgggctcaagtgatccttccaccttagcctcctgagtagttggtaccacaggtgtataccaccacgcctggctaatttttgttttttttagagactaggtttctccatgttgcccaggttggtctcaaactcctgaattcaagtgatccacctgcctcgacctcccaaagtgctgggattacaggcgtgagccactgtgcctggccggaacttaca

SEQ ID NO: 96053 - DNA, 1107 bp, Homo sapiens
atttaacaagagtttaaactcccttagtaggaagcatgatttatgccagggagagtaggaaggagggatgcaaactatcttttgctatctccatccttctttatggagaagttgggctggtatgtatctgaatctatagctattgttctacttttgtgcatatattttgtctaaaaagcttgacagaagcagcattcttttcatttaataaattatcctccaggcatgggatcctattctgaggaagatggccctctaaaaaatgctctcaatatgagctgtctgggcttactgctgattgagcgtacctgttggcagtgattggcgtgccaggcagatttcctgtggtctgtgactgcgtttctaaagtaaacatagtgggaaaagcttgccattctgtctttcttttcagaacatgcagtggatttctgaagtggccaaaggaggatttgtttggacaaagggacagtatttagtttaattgtagagttactgattttatggagtcatgaaagaatgactaagcactgggagattagaaacatctcattgtaattatctggttactagacctcttttggggtggggtagggagactggaggtgatgcagaaagggtgtacacaaggcattaataagaaatgggcctaaaaacagagagtctttaaagaaactgctgacattaaaataaaagtgttattctagggtatatcctaggtaattactagagattgaacaaactgtgtaacttgatcaaaatcatcattcagcaaactttgctgttatgtttaagggcagagagaaaggctctcaagccttgttgccaaggagctccatgcctaagaaggaaggcagacaagtaatggttattattctgtgtattaagcgtgctactatgggaaaactgaagagggatgggatcctaagctggggttggggaaagagatgtggtcccttcctattttggcctgaaggatgtgaggctgtgaaccaggtgcacactctcctggtgggtactctggggtctggttttttttttttttttgagacggagtctcgctctgtcgcccaggctggagtgcagtggggctcactacaagctccgcct

SEQ ID NO: 96054 - DNA, 1108 bp, Homo sapiens
aaggatctgttagtcttaaaaacaaaaactaagcgaagtagaaatcatcgctgatacagtttttggtttgtaagatgtaatcttaaaaaatgaactaacttttttacccattgccagcggggcatcatcaacaaagtacgggtatatgtgtttgactaaatgacctctaaaatgctggcatttactgcttgtttctagcttgttcttcacctccccagggcttttctgccggctttatgcccagaccattactgccacacaatgattttcctccccaaattcttatgacagtcctcatcccacctcccctcatagatcctaaagatctagctcaggtgtgctcaaatggtgacatttcttccataacacctttgttaacttctgtcttgtttcctgcctggaagtttcctcactccttgctgcttcctgttgtatatatcaccttcctgcttacttagattcactcttgtgcatttactcttctctagatccttgatggcacagggagtttgtagaacacattgtgtgtcctctgttgcttactaagtgactaagtgacttgtataactaatggaaactgtagaatgtatgaaagaataaacaaatgtatcctaatgtagactaatataatttgagctttggaggagttgttagaggcccagtagtccagcatccttccttatgtttgctacattctgatcatcagtgtcacactgcaggcatctgtccctggacaggtcttggttgccagaaatgtttttagattactactacagtctgctccctccctttcacgtattgaccttagttatacttcctgaaggaacctgaattaagtctgtttcttcttcacataatagcacttcatatttcccatgacagatatcacacttctagaattattgattaatttacttattaaactctctcttgaattgagcatcaggtaccaagagggtacagttgaagagacatccatggcccctgcacttcaggggcttgcagtctagttagggagacaataacatgaatcgatggctgattatagtgaaggtatgcaaacagccctaaatggttagtcctttcctggtttgatatggctcaccat

SEQ ID NO: 96055 - DNA, 1098 bp, Homo sapiens
tgtcaccaggctggagtgcagtggcgtgatcttggcccactgcaacctccgcctcccgggttcacgcgattctcctgcctcagcctcccaagcagctgggactacaggtacctgccaccacgcccatttaatttttgtatttttagtagagatggggtttcaccatgttggccaggatggtcttgatatcttgacctcatgatccacccgcctcggcctcccaaaatactgggattacagaagcaagctaccgtgcctggcttcatttttaaaatttttttgtagaaagaggctctcatcatgttgcccaggctggtctccaactcctagccttaagtgatcctcctgcctcagcctcccaaagtgctgggattacaggcacaagctactacatctgatggcaatgtttttaatgagtctgaattcgttaatgaaggggaaaatttattatttttttttcccaatgactcccaagtcctactcgcaaacaaatacattgtagaaaaaagtttaattgctggttattgtttgaatcttgaaatacaattcttcactgatgatactggtataaaatggtggttattaattcatgctagcacaaccaaaactaatttaacattattggtaaaaatgagtcatttttgaatctctattaaaatctgaacacataaacaaatctgtgctaaaactggaactgccttctcactctacatataattaaacttccagcttcaaccatctgatgttgaaatctaaagcacctccatgagttaaatgtccccgacaaaccatgtagatggacaaacaagattggtggtctttaattgctggcgacagaaaaggctgcagtttagtacttaaacctgcagttagtggtcaactttctatccaggcagagtaaactaaggagagctatgaaatatcaaaagaaaactagaggccaggacaaagaggcaatgtcagccaagccactgcaagatggtatgcacccctgtatttcagccaagggcaggcaatccaaaattacacactgctttccttaacttgaccaaacagtgtatttttcctctgaaaatcttgtcaaaggttgtattccat

SEQ ID NO: 96056 - DNA, 1095 bp, Homo sapiens
agaccttttttgaaagtaggcgtgaacgtaattgtttcaggcactcttaagcgaagccagccggcgccccgacagccgagggtgcgggagctccccacggcccagccccagccccagaccccgctgccgcgcctcggcacgcccctgcgccccgcctccgcgcctcggcgctactcacgccccgccctccgctcctcgtcacgccccatgtcgcgcctccgcgcgactcacgcctctcccagtctctcggcacgacctcgtgccccgccctcgcccctggcgcaatttatgccccgccccgcgcctcgccacaccccgtgccccgcccccgcttctccgggcaactcctgctccaaccccgcgcccgactcatggccctccccgcccctcgccacgcctcgcctcgccttagcgcttcgccccgcccctgtcctgcctctacttccgcctcgggggagctgggagcccgacgtttccgggagcgccgcgtggttagcgtcggcggcttttggcatggcgactttttctggcccggctgggccaatcctgtcgcttaatccgcaggaagatgtcgagtttcaaaaggaggtggcgcaggttcgcaagcgcataacccaggtgagcaggcaccctggcccaggctgcgagcgggggcgatggaccgggtctagagggtatctggggttgcacggtttccggcccgggcgccccttgccttcgtgctcgccttcattacctccagggtctcccaagtggattcgaccgaatcagggaccgacctcttaagcttgcaggccacggtttccgagacgaaagggtttacgctgttcggtaaatgatggaggggtttggccgctgaggccctggagccttcatgtggagggtaacggggaagtattggggtgacagaagcagtagaaagaaccagctggagggaataggctcctataccacaggttatctccgggttagagctgtcacgcttccgcgtttcccccaaaaatgggagccccagacttaacacattcgggaagtttgtatgccgggttggtgatctgggagttattaaaatagagtatttgccaggttccactt

SEQ ID NO: 96057 - DNA, 1053 bp, Homo sapiens
atcactgttcttactgattaaatttagaaggcacaattgctcttgtcatctgtaatcttcagttttcttttttctgtctttttttttttttttttgagacggagtgtcgctctgtcgttcagggtggagtgcagtggtgtgatcttgcgcactgcaacctctgcctcccaggttcaagcagttctcctgcctcagcctcccgagtagctgggactatgggcgcctgccaccacgcctggctaatttttgtatttttagtagagagggggttttgccatgttggccaggctggtcttgaactccttacctcagattgatcaacctgcctctgcttctcaaagtgctgggattacaggcgtgagccatcgcacccggcgtaaattttcatactcatcaaaattagaccatatttgtcactgattaaacttaattgttataaattcgaacttgtaaaattaatgctaaatgtcatatttctctttatatattgggggtttgtgtaagattttatttgaaaaatgatcgcatttctaaaccgtttgaacatggctgtattaaacccatctttctgaaggtccctaaccttggaggctaaatgtgcttattttcatgcagatttcatgagcactggaggtttgtgttgcagcgcttggtcttcttggcagcatttgttgtgtatttggaaacagaaacactagtgactcgagaagcagttacagaaattcttggcagtaagtgtctttattagtgggatctgcagaatcaggcatggttgcttactttttggtggaaagggtggttgtactttgtttattaaaacaaacaagaattaactaaaaaccacttatagttgtagcttggtatctgaggatgatgcttccagagctcttccaatacccaaatctgaggatgttcaagtcccttatataactggtgtagtatttgcatataacctatacacattctcccacatactttaaatcatctctagatttcttaaaatatctaatacagtataagtgctatgtaaatatttttttttttttgagacag

SEQ ID NO: 96058 - DNA, 2682 bp, Homo sapiens
tttctctttcctggtacagtcgaggctgtctgtcaacagcgtgactgctggagactactcccgacccctccacatctccaccttcatcaatgagctggattccggttttcgccttctcaacctgaaaaatgactccctgaggaagcgctacgacggattgaaatatgacgtgaagaaagtagaggaagtggtctatgatctctccatccggggctttaataaggagacggcagcagcttgtgttgaaaaataggaggctctccttgctcctggccttgctgacctcagcggttgccaggaaggggtgagcacagagtgcctcttacggtagttaggatgctcagttgctaaacactgcgctttattttcttaaccagttgtggtgtgagtatcagaattgaaacacttttttgggggtaaaaaatatagcctttacatggacagaattttttttgttgtttcagtgaatatgcctgtaattcagtgtatttcagttccgtcagaaagtgtaaatgttagtttcttggtaaagtccttttcttgcttaccttgactgttgatgtactgattgagaagttcattgtctcgtttgtgattcttccagatgtgatgcttgatattttctatatgcgagttagccatccacacccaggcatagcctggatacagtataaaaatagataattaaaaagatggttgccaagcaaggaaaacttattttatattttcccttccttattttaagcattgtgagtaaatcagatgttgaattcttttgccaagggaattatagctgcaggttctctctcactgccatcaaactgtaaaagattaaactgcgaagtcaagctcaacagattattttggaaagtttttgtattaagggatttagtaacatcattttgttttccaccaggcagggagtagggcttagtgttttaaaacacctctgctttctgatgttgccttaatattctgctattgcagcaattaaaaattgtcttcatgtacatttggaactaacacgtgatgtgatatattcctaaactatgaaacctttttcctagtagtcagctagatcatttgttctgggagtataaagccacccacgtaagttaataagcaaaatcctgactattatgttgttagagaaaaatgctttgctttgtctggaagaaagataaaatagtgaattataaataagtcaggccgggcgtggtggctcacacctgtaatcccagcacactgggaggccgaggcagggggactgcttgagctcaggagttcgagaccagcctgggcaacaaagtgagactccatctctatataaaaacaaaaaccacgaaagcacacacaaaataaatcagtgggatttggtaatgtgttttagagtaagaaatttcaggttgttggtgactatcccaacagtcatgttttaaatgtacagtttggggcaagtcatgtaaatactgttggtggtcttccccacacgccccaattttcaggtagtactaagagtatgtgccaggaaactcttgctattgaattgagatgattaaaatggtgacttaatccgtagttattttgcacccactgaaaggaaagtgctttccagaataatatgaagtatctaaaagtgtcaccttttcttgcctgatcaacaatttgggcttcctgtttgtacaaggggccatttggcatacctttcacagcttttatcaggccaagttaaaggctgactacattttttcatcatgaggaaagcagttgaaatgaggcatgagttactgtgcattgggattttagaacaattttcttgtgacagctctttttgtgaagttaggttcttaaaagtgcccatgatggtcacttaaaatgtgcagtaatagcactgccaggatcaagcatgaaaggcttttaaattagatcatcccacagacaatacgtttgataatagttttttcttttaacctctttaagtattgattctgcttgagaatattgaagtacttgccagaagttgtggatttcagttttaacaaatgctattaaagtggagaagcacactctggtcttggaattccatttgaggatttagaagtgtcatgtttataactattcagttgtgtttgttgctggcttgttgtaaagcaataaaatttttttggtctttttgtaagtgagtgtgctgctgtaagaaatctcccatgtgcataacaaattctgaatattttttgaggctaaagaagaccggggtgacaagcagatactgctgtgtaatggttacactaaccaaaagacaccagccactcagagttctatactgtaaagcgcagataacatttgtgtgttataccttgattggggaattaaaagtcatttaactgaagatgttgagaaacctgggctctggttttagtataccggaattacttttttccaattttagaaaatcaagcaggttagagaaaatagagatgaattaggggacactgtcttatggattcatttataagaagagaaccagccatatacacttggggagatttgccacatcttaaacttgaataatagtatgagtaatgcttaagggagtttaatagagaaggaaagctttggcagtgttttgagaacttaagtggctaaagagatgagacaaacatgcaggtcgctactggcata

SEQ ID NO: 96059 - DNA, 1021 bp, Homo sapiens
caattacagcgcagaggcctgctaagaagtctgatgatttatgcaaaagtaatgtggcaagagcttgaagcaaatgtatttattaaagtaacccaaataatcagatcatagcaaatggagagaaaaaaaatccaaacctgtaattcctagccagtatttcattttcgtttacatttaaatgatacatcttgtggcaaattatttcagactttttctaccaggagaaaggggaagaaaaatgcactcattgaaggaaagctctgcaagaggcaaaagtgataaacttccccaagcctatttacaaatgcagtcaatgaaacagaattttaatgaattgtgccacataatccggcagttaatgagctgcaaaagcctttgtcaattgcagtgactgggaactaactctttcagtttcaagatcaataagagaattctctgctctgcgttacccaaaagggaactctggggagaaaggaagttgtcagaggaatgtcatctctacaggtcgcagcagcaaggccgccatctgttttgtgtgtctcctccatcccccctccccccctttatatttaaatccccacttcagactgaggagtaaaagacagtttggagatcaaacagcacaagtcctgtgaactgccaacacaaaatgacaacaaaaaggtttgaatgactctaaaaatatctcccaatattttagaaactgtattgagtccggacgctgttctggacctctgggagggggtaaaacccttggcattcactatttttgatagacaaaggcaatgagaagtgggttgttaaggattaaacaggcctgaggcatcctgctaatttgtccttccataacacttcttttatctgctgttttcattgctctgccgccaaataatcacattctttttcagaggtctgggatttgcaattatggtatgatccatctctatcacccagagttgttgctagggagatgtggttgtcgctatggtcctaatgccacaggacataagaaatcccaggt

SEQ ID NO: 96060 - DNA, 1052 bp, Homo sapiens
cagggcaaggctctcttaggtctttgaggacattgaagtgaaaaattcatgtgtatcttggattatgcagcaagtagcttcctaaaaactgtatgtgaatcatattttttaaaatagagtcccatttccccacggacgtggctatttgctcagagatgctttctcttcctttctgatttatctccaactggcagcagcaaactatgaccctagcttcacatttctctccttcccaagtggctcatcaatcaatcaacaaaattttcattcagagcctattatgtgtaagacattgttcatgatctgtaaagagaagagggaatgcaccgaatgcactaggggaacccgctctctgtgaatcctctataaaaccatgtgaatagtcaacctcttatttatctcttccgtaaattcagattttcttctatcatgttttcccaaagaggtgcccatgtgtactgaagagcctgtctaggttaccatagaaatagagagtcataaaaggatatttagaaatctaagcacttctataaatcgcaataatagcaatcacaattgtttggagccataattgagactattcgtggtgtgttccgaggaaaagcacaaataactcaccaatctgcaattcctggcaaagagagcgcaaactaggaaaaagttaataatgctttaaaaataagttgtgtcaggccaacataattttcctttgtgacagaagacagacttctacaactgcgggaaccacaggtcagccaccaccatctctagagcatggacttttcctattgtctgtggcacccaagacacttcaaggcctacctcagcagcttctactcagcttcagaagaaaatacccaaatttgtttcatatatttataattcacctggtccacaatggattctgaggcactttataaaagattgtgcagcaccaaaaggtaaatacaatcatccctccatatccacaggttgtgcatccccaggttcaaccaactgcagattgaaaataatcaggaaaaaaaaaaaacagtgaaaaataacaatacaat

SEQ ID NO: 96061 - DNA, 1043 bp, Homo sapiens
ggctgtttccgggcatgctgggacaaaggtggaagctggaagcaccacactgaccagtgaagaagcatcactggggtggtgctcgcaggaacaaaaggcaaagaggaaagagcaaggcctgtcctctcctgccctcctctctccctgtattaccccttagtgtggagcctaacaggaagcagctggcaatgcagaaatatagtctgtagaaatcctgccataggaccacagtgccaagagggtctggttttgaaagacagcagcttacagattggcacactcattatacgccaggccttccgccaagagctttcatatttcatctcagttaattgagtctttacaacaaaccagaggcaggtcttcctatccccattttaaatggagaaaatggaggctcagaggggttaagtaacttccccaacgtcacccagctggtaagtagcagggctgagtcccaaagccctcattttctctactgtatcacctggattcccaactatgagtgcactggcaagtcatctgggagaacacttgccagaaaagacacatcagagcaggaagggaagaaaagtcaccctaaatgaacaagatggttgctagcctcaaagtctgggccacacacctggaccctgtgtgtgacagcagacaccatccccatccatatccatcatgtgtccacctcccctgccctgagcagcctgttgcagaccccacccacaccaggctgttccgcagtggccgccatcaagaatcccaagtccttccagcagaagcaagccgctgcccagggctgggttcatggatgtgcctctcctgggtgatggcaagggatgcaaaccaaatagaagaaaattccaaatcactatgtcctgggaagattcctcaaagtctttgtaaaatgttcaggaagcattttcaatgttctttcatcgcagaagataggctgagtattcctatgagaagaggagagtggggctcaaagccctccagcccatgcagaagcagaatatgccctgtccttaaggaggatgcccacagag

SEQ ID NO: 96062 - DNA, 1024 bp, Homo sapiens
cacagtaatgcagagattcatgtgcgttaaaacagcagtcacttaggaatggtggtcattattttcaaggtagcagcaatgggaatcttctcctaaagtgatacatccatcccctgtcccagaaaccaaaagccagccctggtctcctgacagcagtgacaggagacagcatgctgcagccacccgagtgcctatgcccatgatggatcagtgggctgcaaaattaaactcctctttttagaggccatttgtgtgttaaggaagagaataaatgagataaccccacggccagttaaaaaaaaggcacccagacagaacttcatttgactctttcaggccaatgggggaaaatgagcttcgtaattgaaattgtaatggaataagttgggcctggtggcggtgaggacaacatgttcttggaggtcacgtcatgagaggtgacatgcaaaagtcatcaataggttggcaactcaaacgtttctgtgaaagaacaagagaaagctttctggatgccatgtgggggtttctggaccacagaagtggtctggactccagagcatagtgtgggactgggtcatagtggaattgttttgtaactaattacaaggcatgaccatcctttgtcatgtctgatttgtgcacagtcagaaccaggccccatctctcctgtccctcctaaatccacattaaggaggtacacatgccttgctttgactcttcctgggtgcaaggatatgagctggggtaatgttttctctcagttacacctttattgaaagctctctctgtgctggcactgggctggggacctcttggtgaatgacacagatagcttctgccatcagagcactcacagtgcacaatcataacaggctcctgtcaatcctagtggaagaatatcaggaccaattaattggaggcagagggcattttggaggaagcccctcaaattatcccatacagggtccagctgtgtagagtgggaagagaacttgctttaaaggccaagaggtatggaagtcag

SEQ ID NO: 96063 - DNA, 1529 bp, Homo sapiens
tttactggtgaggaaactgcagctgaaaggaatatcattcccatcttcttccatcagagcagcaggcatgtgggccccaaaggagagacagctcaatgcaaaagtacatcccccaaaagcttcaaaatcaccatgactaataccattatgattagttctcaaagaaaatgtggactgcttggggcgctccttacttttgcaagtaatatttatgacaatgttcatgtcttcaaaatcttgtcggaggccgaatgtatccatgcaatggcgctgggcccacaagacaatccaggtgttctttgttttctaaccactaaagccctaacctccaatcttccgttattgaacaaaccaatactcttgtactgaaagaagccagagcagcctggctaaagccatcccctgtaagaaggtggggcagactgctcccttggcccaaccctctctcaacacctgaacccagagaagccccaaccgaaagactttctacggtttgaattgagtgctttgtgtcatgggcctatctgggactctctgcctctttacagtgaaaaaaagaagagttttaaatattttttagcagaaagacagccctttctcattgggatttgagctgcaaagacatggccaaccaaacagaaacaggattatacctgaggaggatcttggagtaatcaccaaaatccacttctcttctccctctaggcaagaggaaggatttacagttaggcaagaccatgcaagcttgcaagatgtgagctgaagtgacctgtgttgcttccagcctaaagcatttaacccctgatgcaagaccctccagcgttctcctaccccaagcattctagcaagaagcccgtgtatcttagatggtgcagctgtatgatggtggaatctccatcagcctggatcctcaggagactgtgtggagcagggccttctatcagacatattgcacatgcaaagtgggaggtaaataaaggcttattatgttaagccttggcgatttgggaattgcttgttactatatcacaacctagcccagcctgactaacatattcatggtgtgagacccattccccaggagcagcagagctcaagggtgctcctctgttgtccttttatgttcactgccctttctgtaataacagtcaggacagtaggtgactcatgtttattatgctttggtaagtgcagtagatggcaaattgtactcaaacataagcagtgagagcagagagtaagctgtctactttttctgtactctcctccacacagagttaacattcatcaggcattcactctgcactagatatgttaagactattatttctcattccataatatccctgcaatgaaagtaggtatcgtgcatatatcaaaacatcatattgtggccggacatggtggctcacgcctgttttcccagcactttgggaggccaaagaggatggatcacctgaggtcaggagtttgagaccagcctggccgccatggtgaaaccccatctctactaaaaatacaaaaaatca

SEQ ID NO: 96064 - DNA, 1028 bp, Homo sapiens
cagggctgtgtcctattcacagctagagctcaaccttccaacgcctcatctatataaaagaatagtgaaagtttatccctcggggagttattattataaaatgagaaaattaatggagagcacatagcatggtatctggtgtataggtaaatacttaataaatttatttatttttattattgctcaacacattgttgaataaatgagtcaatggaaagattgatgtcattattacaatgtggcatatatgtgcccccaggaacagcctgtgggcaaaggcaggctactgactaaatgacttgtcaaggtcttttctatcccaataactttctgattttgaggcccatgaattacccaaacaccatcaaaactgaaaaatttacctccatcaagtggttgtcggccacagagattgataagagatgggaagtgctggtggtaaaactacatttctaattagctagaaaaattcgtcctgtgtgcgtgtgtaaaagggtctttagataaatgcctgtgttatctctccctcacagggcctgggtggccagccaagtgctgacttacttctgcatttcaacagaatctgttttgtaaatttgttaaattcttcagaatgaaactacttcctggtggaaactcattttctgccccctttcctgcctcttttctagttttccacctccggcatgacttgctggctctgtgggcagtgactgtcactctccaacatgttctctcccgtcccgtgaactggacttcccaatcccctcgctgacggtgtgggtggaagagagatggcttaagtggttctgataacagtggcaggaaaaaaatggtcaggatttttggaggacgagaggggagttacaagatgagaaccagctcaagatactggctctcggtggtgcagaaagtgagtctgagtcagggggattggggtgggaagagcatcattttcttttccctttttttttttttttttttttttgagacggagtctcactgttgcccaggatggagtgcagtgg

SEQ ID NO: 96065 - DNA, 1047 bp, Homo sapiens
gagcctggtgcagaatctacaagctggcctgcactgagatgcctctacgtggagcaaaatgtctaggttttgcttaatttgaacccatcaagaaagaaaatggcactattctggggtcaatagttctccatattgtgtgaatattgcttttccttttctactttaaaagtgacaccagagtggttttcgccagttaaaaatactatagctgtctgttcagtagggaatcttttgtaaagaggatcaaatatttaagacagggcatttttcccccttagagcagagctaagcggaggataaaaacgtgctatcttcctcatccgtatgcaagaaggagagtttggatccacattcttgtaaacctggaggagtcagataacaagcgtttctcaatccagtggctcaaatttcaaccaaatataacttttctatcttgcaagacagatgtggcaatccagaaatattatgatgagaatgtaggggaaggagaaagcacagtttgtagttacatggcaatgaagggatatcaaactgtgcaccataataccatgaattacgagaccaatgggacaagaatttttttcctgggaggatggatgggtgacactaatactcctgtgactgaagaaagccagcatgtgccctgatgttacagaaggaaacacagacataaaagtctaatataaacattcttgggcccagactgaagtgaagatagaaaggttaccatcgacaatatggatataaaaatatcaatctgcagtataattataaataaaacggttgttaacttttacaacgcctacatatatttatgtaatgtcaaagcttacacatcaccaatctttatatcaacttttatattggcattctgagaaaaacaccatatttcctggagttttttgtaaaataacagagaggctatggccataaacattcttcaaatgcatagatctcatctctgcgtgtgtaaatggtatgtgtgctgtgtacattgacatgctaatgaaagcataaataactcaccagagactccagaaatggcca

SEQ ID NO: 96066 - DNA, 1041 bp, Homo sapiens
ttgttgacatgaactggccatattgttatatatcttcctatttaataaataaaatacaaacctgtttaaaccttgattctgtttatgaagaaatatacattgggtattcaaagatggtcaagtaataaagatgaattatttgaggaatatgtgtagaggatgacttcatgaattataaaagtaagatataaatgtgaaatgtactgatatttatttttaagtttactaagtgaaatgcacattagataccttatcttttgttctgataatgaataattgccaaaattcatttcccgatgtagaaatttcccttcattcaccaaagggctaattcctctgatgtgcaatcagtctaccatcagtggatgtattgatatattactccatactgcagcatgctaccaatatttccttacttttcttaattcacaaattatttaattatttcactttctgcatgcttttctgtactagcaacagcatcgttttttttaatgactataacatccatgcaattccacctagtactctgactcatcaggtcttcaaactcttcaagtctacttttccacttctgaaatgttgatttccattatcttgttttctaaacatgatatcttacctttaaaacttacttatgattttatccaaactccaacatattctcagccgtatagtggcatgaggctgagtgatccaactgcttttcactgctaacatcttctttgtgttatttctcatctaatctaacttagattcaatagtctgatgccagtgctgcttttcacagagtctgaacaccttcgaatgacatatatgaccaaaatcaagtctagtaaaactgactaatctaacctcatacaaacttaactgttgaatgagattactatatattttatatagctaatatatattatataatatataaggtgcattatatatattaccatatattatatatttatatatagtaatatataaatatgttaaatgtatatgtaaatttaagtttatatatataaataaataaaatctgtcaat

SEQ ID NO: 96067 - DNA, 1038 bp, Homo sapiens
aaagcacggagatgctggagttccaatggaagttacgggtctgaagcttggagaatttgttgattattataccatcagagtgattgacatgttggctatgccataggtgtcagtgtggaggcatttgatctaatgttccaagctaaaacgtgaatatattgaatcagacaggaaagcctgagatggttactggttgtcatcacagtcacttggcttggttgctggggtttctggggtggatatcagtactcagccgagttttgaaggcttgtcagagggagctttgacggtggttgtggattccattcggagtgtaaaagggaaggttgttagtgatgccttcaggttaatcaatgctaatatgatggtcttggtacatgaaccaagactaacaacttcaaatatgagtcacttaaacaagccatctatccaggcaataattgatggatgaaacagacattattactctattactgttaactatcagaaaaataaactggaatagaagatgttgctaaatttgcataagaagagttgaatggaaggtttgacacttcaggattacaatgaacattataaatgcaatgatttagtattaaaatagatgctggaattggccaagaattacaaaaaggctgtagatgaagaagatgagatgacacctaaacagctggcaatagggtgttggctagcagaacactaatgtcacttggaggaacaagtggatttagtcatgacttcaaatattgtttagcaactatgttgaatactgttgtatttaagtgaagcaacaaaagatttattagtgatgatttcagtagacatttctctgttgttcctaatgctcaaagttaagggatgtatttggttaaatgtaagacatttggcatcatttgtagcactgtaaccttcagtctcacctatgcaattacttttgtttctttagttagggtctttgcaggttctaaagttatacaataattcataaaagtggacacattttgttaatatcccatttaatatttgaaaaaatcagta

SEQ ID NO: 96068 - DNA, 1041 bp, Homo sapiens
tgtgaataagtgtaggaaaatgattgcttattagcagtcaagaataatggtgataccaaacaatcacagatttttcagatgagtggctgagatagtgacaatttaaatttttgaaggttcaatctacataagcattgtttcatatacaaaattatttaaaatattatataaaattactttcaggttatatgtataaggcatatataaaacgtaagtgaattttatatatagacttagttctcattcccaagatatctcattatatatgtgcaaatatttcaaaacaaaagaaaaagaaaaacaagtttgaaacacttctggtcccaagcatttcaaataagggatactcaacctatatttaggtcatttgatgttgggtgcatatatatttacgattattataagttcctttagaattgaccattttattattatacagtgaccttcttgtcgcttgtgactgtttttgacttaaagtctattttggtctgatagaagtgtggccactcttcgttctttttggttatcacttgcaagtatacattcctccatctcttcactttcatcttatgtgtgcccctaaatctatcattaagtctttttattcagtaaacagttggatctcagtttttaatccattcagccacactacatcttttttttttttttgagtttagttcatttatatttaaaatcatgattactatgtaaggaattactcttacaagtagtgaattgttttgtcttttgtgtagttctcttactctttttctcccttgtcattctttaggtcctgatggttttttgtattgatgggcttggattattttatctttatattttgtgtatctattgtatttttatggttttcataagatttgcattgaacatttcatagttacaatagtgtgttgcatgctgataacaacttatcttaaatcacagaaactctagacttgacttcctctctttcccagtttacatagtcaatgtcagattttacttctttctgtactgtatttccattaaaaatttgtggtc

SEQ ID NO: 96069 - DNA, 1015 bp, Homo sapiens
agaaggtcatctaataacagaggcataatggccacttaagtacattatgaactcaaagctcatgatacagctgacctttggcagaccccacattcttcctgaggaggaagaaggagagactcttgctgaactcctcggatccaagtaagcatctgaatgctgaacattaatatttaccatggaaactgccaactctcatactgtacttagcttttcttatcgaatctctcagggggacaatgaggactttggttcactgtgaatgtttcagcgaaactccattccccatataggccctttcaaagcagaaacatagctcctggagggaatcgtgcaacttccttaaaagacgcatctaaacttgctaatacagatgcttgtacaaaagggttgggagtgaaaaggtcactcattaaagcattaaatgtctgacctttactttttgttctaaattatcctgtgattgtacagtacagttcagcaatacaaaaagcacttattgtgagcctattagaatgcctacggatggaatcttgcccagtgctacagcagcaggtagctacatttaatgtttttatctgcattttatttggcattaccactgggaaatgaaatgctagaaatataatttgctgaaagatcattttattcaagattttagtaatggtacctatataaatatctttctcttaaggaaaagaaaataacgcaggcagtgaggagaagggacttttcactaggccaccagatttgtttgccctggattctggtgttaactcatttattaataaccaactgaattcatcttcttaaagttttaaaatcatctgctttttaagatttcattctaaaagtttctttacccattgatttaacctgaaaatctttgtatcttcctgattcttctccacgtgatggttatgtctcttgaaacccatgaaaccctaaattaggcctccctggttcagaaccaaaagatttaattaccaagactttgtaattaaactcaaaaatt

SEQ ID NO: 96070 - DNA, 1435 bp, Homo sapiens
aaatcagattcacatctgtcttcaaagtttgctgttgttgattgttggggccaccatagttattaatttgtttagtgacttcttcaaactattttttgaaataaaagactgtatttcttgtcatctgtggtcactgaaatctctacttcgttatcttagcagtcaagcaatgatctggcaaaaatttccttaaacaccttgagcaaaaagacctccccccacaaatctttggagatctctgagccaaaatgcaccttcagtgctaagcctgttcacctacacctctgccttcaccttcaatttctgcttatgcagagtccagagttagctaaaggcataagcctagcctcctctcacagttctcctgagcatgtgtttggccctggggatgtgcatcgcactctggattccctagcatctgcggcaccccttcaaaggccttaattcccttaagaatattcctctagagtctcagcctcgccgctgctgccgccgccgcccagagactgctgagcccctgttcgtccacagccaccacccactccggacacagaacatccagtcacggataaaaatgagctggttcagaaggccaaactggccgagcaggctgagcaatatgatgacatggcagcctgcatgaagtctgtaactaagcaaggagctgaattatccaatgaggagaggaatcttctctcagttgcttataaaaatgttgtaggagcccgtaagtcatcttggagggtcgtctcaagtattgaacaaaaaacggaaggtgctgagaaaaaacagcagatggctcgagaacacagagagaaaattgagacggagctaagagatatctgtaatgatgtattgtctcttttggaaaagttcttgatccccaatgcttcacaagcagagagcaaagtcttctatttgaaaatgaaaggagattactaccgttacttgactgaggttactgctggtgatgacaagatagggattgtggatcagtcacaacaagcataccaagaagcttttgaaatcagcaaaaaagaaatgcaaccaacacatcctgtcagattgggtctggcccttaacttctgtgttctattatgagattctgaactccccagagaaagcctgctgtcttgcaaagaccgcttttgatgaagccattgctgaacttgatacattaagtgaagagtcatacaaagacagcatgctaataatgcaattactgagagacaacttgacattgtggacatcggatacccaaggagacgaagctgaagcaggagaaggaggggaaaattaaccggccttccaacttttgtctgcctcattctaaaatttacacagtagaccatttgtcatccatgctgtcccacaaatagttttttgtttatgatttatgacaggtttatgttacttctatttggatttctatatt

SEQ ID NO: 96071 - DNA, 1054 bp, Homo sapiens
ctgggtgggactgtggcctgaggtgtgactaaccgtggctttgtctctgtctgtctcccccaaaccccgtgctctgctgtgccttcccgcgcggcccctcacccgccgccgacccacagctccggaaaggcccaccagtccctccgcctcccaaacacaccccgtccaaggaagtcaagcaggagcagatcctcagcctgtttgaggacacgtttgtccctgagatcagcgtgaccaccccctcccaggtcagccgcggccgccgcggcccagctctcctctcttcctgccctctcagggcgtgcatggccttcatcctctatgcttctgtctcaagagccaggaatctggccagagagagtgtcagtttccctctctcaccctttgttccctccatccatcatcctccatcatcctccatcacccatctctgagcatgtactaaggccagatgcagggccacagaggggaaggtgccgcctctcccggcgcagcagttacatcagcagcgccctcgcgacgcagtgggtgctatggcagaggggatcggggagtgtggaggacgtgtggctgtcagggaaggcttccagggccagggagagttggaaggtcctggaatggctgaagcacctggacttcagctcccacagctgctgtcagcccctcgagggcgggggcagcggccaggctgcagggcagaactgccgtgtgcacactccctaagaggcgtggaatgcccagatacagcagggagccacccaggggggcttgggtctctcccgacgggcccttggctcagcaaggagccacgcagagggtcttgggtctctcccagtgggctcttggctcagccgtggaggtgcctctggggagcctggcccacagccccaggtcttacgtccttcatggtggaggtcgggctggagtacctgtgctggaagcgcatcttgccagtgctggagtgggctgacgtgttgtcagatttgcccagaggtggccggccttccccgcactccccgagagctgactgcctcctcaagtccagccctcaagg

SEQ ID NO: 96072 - DNA, 1037 bp, Homo sapiens
tggccctcagaaatggggagggagcactcaggggcgggggcaattgggggcagcgacagatgctgccctgagagccagaaggcagtggcagggctggcacctagcctgaggaggttcattgtggaagtgggcagggtccccacttggctgggtctggggtctgcctctgtgcatgtcccgtgtccagctcgccaagccccaggcttgcccctcttgttgtgccctactccacgctcactgccctcccggccacgtgggcctctctttggcaacggctgctcagccctccctttcccagatgtcctcagggtcctggagggctgcagggggaggtcgccagcatgggtgtccacatccagttcagcctctgtcttgcccggagccctggtcccagcgcactggccaagaggggtgggcaggaggtgggaggactggccatggggctgggctggctgggacgcccaacagaggggaatgacccgtgctgccccccaggccgaggaggagctcatcaaagcccagaaggtgtttgaggagatgaatgtggatctgcaggaggagctgccgtccctgtggaacaggtgaggcccagcacggtgcccagcctgcgtggggcagtgtccagtctgcgtgctgcggtgcccagtctgcgtgctgtggtgcccagcctgcgtgctgcggtgtccagtctgcgtgctgcggtgcccagcctgtgtgctgcagtgtccagcctgagtgctgcggtgcctgggccctctctggtttgtgcctctgatgagcgtgtgtggtcgctcgtgggtgggtatttctgagttgctgtcctgacctgcctgttcacctggcccccatccttccgcccttctgtagccgcgtaggtttctacgtcaacacgttccagagcatcgcgggcctggaggaaaacttccacaaggagatgagcaaggtaggccatggggacccctctgaggggccacaccccaccctggccgagggtcagagtcagagtcgtgggaggggcagcctgaactcctccttcc

SEQ ID NO: 96073 - DNA, 1615 bp, Homo sapiens
gagaaggcattccaggaggtgcaggcatggtccaaggtgtggagagaggtgtgaggacattgaggatgccagctctctgaagagaaggggtgcctgggtggtagattccctccatatttcatgaagttgtgaaggccaggaagatctatggatcgcaaggattcttggagaagctgaggcttgaactctctgcgccctcttcaagatcaccacatcggggctcccttctcactggcatctgaccaggtccttgtccctggactcagcgtccagcccagctggtcccttacaagctgtgtgactgtccctgaggttctagaatccctgagtcctacccttggaggtaggccctctgtcctcatatctctgtaaggaacagcatgcacaggcgtgcacaggctctgggtttccctgacatgctgcggacccttcctgagccctgtttcttcatgtatcaaatagggaataagaacagttcctcttcacacatgtgttgtgggaagtaaagccccaggcaggtgcttggggcatagcaagtgctcattgaatgccagctctgtggcagagcggcaccttgagcccacatgtggcaccttcttcctgcatggccccgcttcctagcccctgtccccagagtgtccattacaggcctctatagacagctaatccctcctgagcctggggttgatcaggcttatgacgttcacagacccggggcagtgagtgtatgtgcatgcatgtgtgtgggtgcagtgtacaggggtggagggtttgggcttgggaatcagagagctttagagtgaatcttgactactcccaccataaactataagtttttttctgtctctgggcttaacttttcaccactggcatatgatgaagtttgtgtgttcattcctttattcatgcaacaaatattgagcaccaccatatactgggcactgttctagggagtggggacccaggagtcagcagaaccaagcccctgctctcctggagctgacattctcaccaggggagatggtgaagaaaccaccaagtatagtggcaggtgcttagaggggtggtgaggcagggactcacctgccctcaggactttctgcatgtgtcccgtgcgggaggagtgtgctaggttgaggattgagatgtggacgtgactgtgggagctcacacagcaagtggattgggtggagagagtcaggtgggcagctcccgtcccaggtgaggggcacccacgggaggatggcttccttttggatgccaccctggtttgttgtgttttcctaaagctgcctgtttggcaagcctccttttaggattaagagtgcagatgtgcagcctcgctgggtgtttgtgcagggcaggtgggcaggggtacctgtccaggatggaggatgggggaggcaggaggggctgctaaaggagaggaggagggtgtcaaagatggcctctgctgcccagggccacttgtaagattctcatgccaggcagcaactctgggtgcggtagaaagctctagacagctgagtttgagtctatccccaccccccgcacattcctacccttgggcaagtctcactgaattcttggaatcccggtttcctcatctgaaaca

SEQ ID NO: 96074 - DNA, 1046 bp, Homo sapiens
tcgagaccctgtttctctcttaaaaaaaaaaagtttgttcagaagttgttattaagtgaggtagtgtggcattatggttaagaacagtctgaagccaggctacctgggtgttcaaatcccatctccttaagagctatgtgatcttggataggttagttaatctctctgtgtctcagtttcctcttctttcaggtgtggattatagtagttttgaggattagaggagataatgcatgtaaaatgcttagaacaatgcctgagacagtaagcgatctgtaaacattattaaaaatgatgtattaaatttatgtaagtcttataaaatttgctgtgattataagtattataaaaggagtatcttttcttctggagactaacatgggctggttcccccttcccggcaggcatctcggcgctttggcaccatgagttctatgtctggggccgacgacactgtgtacatggagtaccactcatcgcggagcaaggcgcccagcaaacatgtacacccgctcttcaagcgctttaggaaatgatgcttaggcagggtacttcgttcaagaccggcgcttggcacccttgttggaaagggattttcagcataacattttccttccacctctttgaccttccctccagcgttggccaaattgtgctgaggaagatgcatcaagggcttggctgtgccttcataggtcatctagggttttataaaggaggaggagacaatattttttcaaactttttggggagtggggtcatttctgtatataaaaaatgttaatatttaaggtgtatttatgttaccgttctgaataaacagaatggaccattgaaccagtcttcattgtacaagtgtttttatgcttcgtcctgggcatgggttatgtctggatgaccaacctccatcaaggccctactttgtagcaagcacagatgagtaagatggagcccatccccagggagctaccagagagatgtaccctgagatagaagaaacgttggcaggaaaggcctggggaacggggagggtgatccagccagag

SEQ ID NO: 96075 - DNA, 1023 bp, Homo sapiens
tttggaaatagcagtggtttctttgcacctctctttgggcttcatgaaatgtggagatgctccttgtatagactctgtgctgagagtaagagatgttgaagcaggaaaaagcatagtccaaaaagaaaacgaaaaatggaaaggagggaatcccgaagagaatggtgggcctaaacctagaatcagtggggaaggctgggaggtgcatctgtagccagtcatttttttgggtgtaacgatattcctacatgacgagggctttctacttgagaagagctagcctgagctcctttttccctctgatgtgttttcaagataactgaggcattattctgtggtctaacacagcttcattcttctctagaccctatatctacggacctacgtctcagggggaaaggatgcaaattctccagaatttcaagcacaaccccaaaattaacaccatcttcatatccaaggtttgtgtggcatatggggtggaggtgaggcccctagcactctggggacctggggggtacactatgattcctggacagtgaattcatgtctgctgaaggaacttctcctgcatgttttcatttccgacatgtccagggatagggggcactgcctggggttagtggaaggagcagactgaggatttgcatgcatcatggataatctataaaggctatttgaggtttttccagttcttttggggatgtagaagttttaagttgtatttccttatttataaaaggaaaaaaagttcatttcctactctggcaaaagtaggcatttagatgaagttctctttacaagttggagatcctgtgtgtcgcggcagcctttgtcctggttcctggtgtcccttgatgatgggtggtggatgtcagcacagacttccgcaggcccagctcagggatggtttactctgcaatcagaagctgtagccccacagtttagaatagtcattcagattaagacagacccaaagcccaaaagaaatgagattttacaaccgggcgcggtggctcacat

SEQ ID NO: 96076 - DNA, 1050 bp, Homo sapiens
tcaccctcttgttctccttttcattttcttttggacaggtctaaaagtgatggtgaagcatttgcctagtcattcttgtctagagccagcttctgtggtcctgaaacccaagggttagttcaggtggtgtcataagccagtgttaagttgcacagctatgagcatttgaaaaagtgacagtgtaggctgggtgcagtgggtcacgtctgtaatcccagcactttgggaggcgaaggcagggggattgcttgaggccaggagttcaagaccagcctgggcaatataatgagaccccatctctacaaaaaatattttaaaataaataaataaaaaataagaaagaaaagtgacagtgtgaatgctcccattgtttcctcagccaagatgttccgaagggtgctcaccatcgtgcaggcccactgtaagctgggtttgactgcgaccctcgtccgcgaagatgacaaaattgtggatttaaattttctgattgggcctaagctctacgaagccaactggatggagctgcagaataatggctacatcgccaaagtccagtgtgctgaggtagctgggcctgggctgggggcgtctgggaaagggcctcctcctatgggcaggggagtgatcagatcgattcctcatgggcagacacaggtcaggacttaggctcacctgctaccacttcatacaggatcctcagtcaccctgtggttgggtggtactagacccacttgctgcatatcttctgtcttgtcacatatctcacatacccctgaatttgtgatgattctttttcctagccatggggtttaccagtcatggatttctgtgggtgaggattagcattcagggcacagggatgaatgaaggcccctgataccacagtgctgcctgggagcctggcagcaaagggctttgctctgatagccccaagcgcctaactgatatgctcccagccctgctgggaagtgtgtgaagaggtggcggtactcagtagcagtgctgactcgtgtgtggaagtgtggcttaaatggaagaattgctgacact

SEQ ID NO: 96077 - DNA, 1022 bp, Homo sapiens
ttggaagctgtgttcagggcttgaggcattctgtctgactatatgtttggtacacgttcatgtttttctttaacccaagccccaggtcccaggttccaggggacaacagcacagatttgggattggttatctgatgaacaagtacaaaaaggtgcatctcacactcacatatgtctgtgagtttgtctgtctctcgtctagttcactggatgagttagtctttggttgagttgcggagtgaaaccaacaaactctaagggatttttgagtacaggccccataagcccagtggcctggccatgctcattgtcccagagagcaaatgttaaataagggaatgctaggaagtcacagtaagtctcctgactgtcttaacgtctgctgtgttgggttaggtggagtgatcaatctttgagatttatctcaaaggataaagattgctgtgctgttttacagatttttcaaaaggagctctgttatgcctttttattaatgattcatattatggtacttgtgtatattaagtgcttcctgtgtgctaggtactgtgccagtttcattatttctacaggtatttattgagaacctactaagtttaggcactgtacttggcactggagacaaagtggaagggacagccaagtaaccacacaaataaatgccaaatgacaaccatgacataatgttgagtgatacaagccacacacaaaagtgcatactatgatttcattcatgcaaagttcagaaaggaggcagacccctctcagaagtcagaggagtgtttccctcaaggaagagtgctagttattgacagaaggggtcaggggagagacctctgggtgcctggttctctatatcctgatctaggtggttccacagctgcatgtctgtaaaaatatattgagtagtatgctgtgagttattcacctgtgacagctgtcagggctgtaggagagtgtaatagaggggtgtgatggggtcacgggtgtccaggcagagtcctacctgccttatccttgtct

SEQ ID NO: 96078 - DNA, 1006 bp, Homo sapiens
caccatgcccagctaattttatatttttagtagagacagggtttctccgtgttggtcaggctggtctcaaactcctgacttcaggtgatccgcccacctcagcctcaccctgggattacaggcgtaaagtaccacacctggccaaatttttgtatttttagtagagaaagggtttcgccatgttagccaggctggtcttgaagtccagactttaagtgatctgcctgcttgggcctcccaaagtactgggattatagacgtgagccactgcattcggccaccatgatccagttttagatttcctttgtactcatttgcagtcaatctttgtttctctatctagcttcagatgactactgaactgctgtcactatagatttgctttttatggaaaatttatataaacacaatcatacaatatatattatgtctggcttctttcacttcccataatgattcatctgtgccttagcatttatcagtagtttgttccttttattgctgtatagttttttgggcgaatcttttttgataaaaacagattaagggattaagattaacaaattaggagtgggcatggtggctgacacctgtagtctcctagcactttgggaggccagggcaggaggattgcttgagcccaggagcttaagattagcctgggtaacatagtgagacatgtctctacaaaaaaaaatttttttaattagccaagtgtggtggtgtgcacctgtggtctcagctgctgaggaggctgaggtgggaggatcacttgaacctgggaggttgaggctgcagtgaaccatgattgtgcaactgtactccagcatgggtgacagagtgtgagactctgtctcaaaaaaaaaaaataaagatgaacagattagggtaaattaaggagtctaatagaggttactatgaacaaaatgaaatctgaggcattttcacaggtagtgttcaaaatgtcaaaatggccccagcatctggttctttctgtgcatgagag

SEQ ID NO: 96079 - DNA, 1183 bp, Homo sapiens
cctcagcctcccaagtagctgggattataggcgcccgtcaccatgcccggctaatttttatatttttagtagagatggggtttcaccatgttggccaggctggtctcgaactcctgacctcaggtgatccacctggctcggcctcccaaagtgctaggattacaggtgtgagccaccgtgcctggcctgagtggcaaatttttattgttgccacacagcctctactgtattccttcctaaaggtggttgggaacctgggaggatttaagctgtattctctgccatcaagatgcttacattctatttggggaaataggagcattggtgaagaggctttgcattttatttaagccgcaattactgtgcacatactctgtggagttgtagtaatactggtgtggtcttctctagactagggtgggggctgtgggaatagagaggaaaggcagaatgcaagattttaagcagcgttttataacttaatggatatgcatcagaattacccaggcaagaggaagattttgttctcagaaagcagaggccaatggaaaaagctcagtttaggcacatctgaccactttaggattgcaagttgggtttccctaaagtaaaatgaacttttcacttggttggtaggtgtaagatgtgaccagtaatgaatgtgttctgagttagctgcacatttacctgttggatgttatctgtatttgcagttgtgtactgtcagctatggaaaagtcaagctggtcttgaagcacaacaggtaagagattccatgacaggcctgtcccaaggcactgtcactttctgcgcaccagcaggaataaagggatatgggaaggacctgatgtttatgctgtcttttctgtgaagcacagataagagaagagaaacaagagatgtggcccagactggaaactcatccactggccactgtatttcctctagcagtggagctgggctcaggcccctgcctacttgacctcaaagtcacaaccctcatatgttaaatcatggccggcagctcatggtacagatttggcgaagggttgtggggagagtcatgaggcttgtatttccagaccatctaattgaatgagcagtggaatctccaggaggtacctgctggtcagtagaccccttcttcctcccctgcttgcagatacttcgttgaaagttgcca

SEQ ID NO: 96080 - DNA, 1097 bp, Homo sapiens
agcaattccacctgccctgctaatgtaacaataggcataggtgctccatgttgtcagcctgtggcagccatgagaatgtgccattcagatttcctgtggggagcataacgactgattaccccagccgctacactctggatccagcattgtgttctgggtgaggccatgcttctcatgagccgctacactctggatccagcattgtgttctgggtgaggccacgcttctcatgagccgctcccagctgtgggtattaacacagaggggctactaattcaggcccattgtagccagggagaatttggaaatgcagcccaaagtgagtgtgctggggactgaattgtgtgtgttcccctcaaattttgtcttcaaaacctaatatccaatggtaatgtatttggagtaagaaagtagttaagactaaatgaggtcgtgatccgctatgattagtgtcctcctaagaagagacaccggagcatgctttctctcacctgcccttcttgtcatgtgagtacacaatgggaaggtggtccatagacaagagccttcaccagaaactgaatcggctgataccttgatcatagactttcagcctccacagctctgagaaaatacagttctaatgttgaagccacccagtctggaattttattatggcagcccaagctgactaacacaggtggtaaactctgtctaaagctaagtatctgcaggagaccaatagtcaacaagttccatgagggaaagtcaaaaacaacttcagatgtttttgacaaaacaaagagggttccatgtgattaatagttgaacatgctaggtttcttctgcgagatgggtgaatgccatttaaaagagatggacagtggctttcattgcctttggctgatccaaaaggagtcagattcagaccttgggatctggagtggcagaagagtgccacaggaattcagtatggtactgcagccagtcccagagaagctgcaggagtcctggagagaactctcttttcctgtgatgtgaaagcgtgcccggccaggtgcagtggctcactcctgtaatcccagcactttgggtggctgaggtgggtggaccacctg

SEQ ID NO: 96081 - DNA, 1533 bp, Homo sapiens
ctcgaactcctgacctcaagtgatccacccacctcagcctcccaaagtgctggaattacaggcgtgagccaccgtgctcagccaaattttttttaattaaaaaaaagaattcttccttacccatggactcaggtcacattctctctctctctctctcacacacacatttattgcccacatggcttcattaaaatttaagttccagaaggatgaggcctttaattcgcgcactacacaggtgctcaacacacagtattttccttcagttgtagagaaatgaacagtggaggacccccgccgctgggtcgcacgagctaacagatcggcggtcgctggctctccgctcttccagccacccacatcacggcgcctagaggcgggacatcctgtgtggacaacagggagcttccggattgagccggaagtccccccagagcggatgccgcggcgggcctgtgggagcggggtcatcttctctctgctgctgtagctgccatgggcaaaagagaccgagcggaccgcggtgagacgttgcgcgggcacgctcagccacgactgcccttgccggccctgccccccgctctgcctcggagctgctccgggcctctgcgccggccgaccctgctggccctcccgcgcgcaccccgttgggacaggcctttgggcgggagagatgctggacctgggcgcagcccagcgaactcggcctaggggagacgggtgaggggcgcaacgcctgcgggatgcaggtggctcttagctaggagtttgcggcggcgcaggtgaaatgctgccaagcggtgcggagggaaccctgaaggctcctgctgggcttacttctgtgttggtatcttgcagacaagaagaaatccaggaagcggcactatgaggatgaagaggatgatgaagaggacgccccggggaacgaccctcaggaagcggttccctcggcggcggggaagcaggtggatgagtcaggcaccaaagtggatgaatatggagccaaggactacaggctgcaaatgccgctgaaggacgaccacacctccaggcccctctgggtggtaagcatgcccttagcttgggcagggcccaggagtgtgcggagcggcagctaaatcttgggcatcctcagagtcaaaactgacattcaggatactgcccctagaactggccgggagagaattttcatccacacacgttggaacagcccaaggcaacagcgagcagttgcgcacacgtgtggcggccggacctgggcttccaacagctctaacccctcggtttactctcactccttccccagccctaccccatgtagtgaatccttttatctgccgaataaatagcatttatcatgtaacagtttgtttcctcaaataatggaagacatgttcggtagcaagcttttgctctactttaaataattaatgttatacatttagttgaaatctagccaaaaggtaacttgaggatagccagtaagatgggctttctctgtgcagaatagtaggaaacagctgttgactttgg

SEQ ID NO: 96082 - DNA, 1937 bp, Homo sapiens
tagacatccagaagttacttccactattgaggaactatgtagacatgaatttaagcttgtacatgtgccaatcttgttaatgtcacttgaccactgattcacatagacagacattaacgtctgatgcctcaggttgatggcgaactttcttcctagtgtcttaacatttatgaacttatgtttgacttgaggggcatttcagcaaagctgtgaggaaaagtaggttctggactgatgtctgctttgtgccatagacattttggaacataaggaagtatctgcttctactatatgtacaggacttgtccccaaataatttctgaatcccttaatgcagttgagaatcccttaatgcagttgagaacagtaaagttcatgaccataccgaaaagcacttttaagttcacttctttttaaatatttttttagaatttattttttaaaagcatatgtaactagtgatgattttagcattagctttacttggaggggagaagaaacaaaattacaccttaaactctattagatagactacaaaatggatttgatgtattcttacttttccaaagaattttttccacctggaataagaagagaggactagttgaaacatttgagctggagaggcttatgggcaatatgaagtgggccaaattcttgcaatacaccctattcaattgaaagtacagtgtctaaggataagaatacttctttaaagaccaacaattgttttaatgcaatcttaattagtaaatggtttacattttttctattgttattggttttaaaatttgctaccctgaattctgaaatattataagagttaataccaaaaatacttttaatgtctgacatctcttacatttcacatggttctttttattcattgtaaataaaagtaaacttggataaatttgagaataaactttgaattgttgcaaactatgattatcaatttgtaaatttaccctttgacataataatgtacatttttaaatgtagccattaaattctctatatttaacctattggtttctctctaaatgtttttaatctcagttgaatgctgggcagtttataattatgtacaaagggtttttttcctattaagattgacatttttgcacatttttggaaatgtttaatttgtacactgatttactactctgaccaataattgttgatgagtgtatgagcatcatgaatgcgtgcattgaactactgtctgtgtctttatgttttaacttctttcaagatgtagccatcagttactgcactgctattactgacttaaatggacctttttgcttttacaaactatacttatctatggttctttgttgaagaactcaggagttcgacattaatagaaattagaaaattttataatgtattataaaatccattactaagttgaaagtatgcttttaactgtgtatcaggggatgtatgtttgtgtggagatgtttttttctgtctgtaggcacatgtatatatcccagtaagttcttattttcatttcatttctacatttttatgaacttgttttataagggtactgtttagttgtgataattaaatatatataaaagctttctgagagattatttactatatgaatatattttcagctggctgatcaaaagtatttttaaaattttgtttttagccattcaaaatgtatttgtattttcagaattgaatgcaagtcatacttagagctcaattaaaatactcttgcaagaaaaagcattaaattctctttgagaattccgtgaaatgcaaattaagggaaaaataggttttaagcagtagcaaaaacacaccgctaaaaatggcctttgaattctcagagctatggaaaaatgtgagaaactaaattgtctcgagatgtcaagatttttctatctccagttgctattggcctgtcctactgt

SEQ ID NO: 96083 - DNA, 1040 bp, Homo sapiens
cattcacatggtttacaaatgttaaggcaatgagataggacagtgagtaggaaatccagggatagcagattctagtccttaattctcagctaacattttgggtaatactcacagaaaagttacttttctgtgaagtgtgtgcatgtgtgcatgtatgtgtgcgtttgcatgcatgtgtgtgtgtgtgtgtgtgtggttagagttggaggcagggatgggaaggaagaaggggaaaggtatgagtgttcaattaggtcagtttctggttttggaagaacaactcaaatgtatgacctactgatgacatacagtgagtgtagtcatccttgggtaggaacaccagtacattttccagaagtagctagtacaaatgattgtataataatattgattgtaaattgccatactcttggttgctaaaggtagattaaaattcaatttgtgtatatgtaaaataatcttatatataattcttaaatagaaagtaattgattttacatagttcttcctgaactttttggaactgaaattctgccaaacattatcaaaataagcttccttagcttaccaagtattcacaaggaaattctcttgtacctctttttggttggctaggggaagcatgctgtgaagcagctattcctacttatagttgtctttggcttggctttgacttctgccatggtttggacaggatgccatggtaggtgtgggaagtatcagggcctcccatcttcccatactcaccttccagagctgttgatggaaatgagctcttgggggagcctagagattcttttttcagtggtcctgtaagcattcaaggttgagcttcagaaagatgagggaggagtcatagctacagtaaagaaaagaatagattttatctgttgcctgtatacagtctcatagaattcttatttttcataattgtgcattttaattgatagtcatatggtatttttgttaataacagcaaaggcattaaatcagtaccattgttccttctgcctgatgacttcttgtttgtaacacaatct

SEQ ID NO: 96084 - DNA, 3554 bp, Homo sapiens
tggagaaataatcaaaatcatgtataccatcttctatttccagctcctgattccccataggtaacatcccttaggagcgaagagttcaattagtaatgtttatgtgttatgtcaggagatgaaacccttgttcttaggatcacagaatactaaagcacctcaaaaaaacaggtatcatgtgaaacagtggttgccaaaagtggagcgaggatgatttcactaggcatttggcaattcttagagacatttccggttgtcacaattggagggatactagtaacatgaattgggtagaggccagggatgttgctaaatagattataatacacaaggaaagcagcctcaaagaattacccctcccaaaatgtcagaagtgctgaggctgagaaaccctgatgtaaagatcagtcccagttataaactgaaaacagctatttacaaagcagtaaatgcaagaaagaaaaggaagtcgcaaagagaaagtgatgtaatgcaaattgaggattttacaagatcagatactgctgctttaagtcaagggtgaataatctcaacaaacagcaaatagcaatcactttaccagctgcatattgcacccacataggtaactcttcattttaggaacaaactgaatttgaacactgagccttttgaactcagccatctctatatattctttccttaaaattcatgattttgggcaaaaaaaaaaaaaaaagcatatcaaaacaaaattttaactactaatgggaaggttaaaaagctgccacgtatttctagtacaatgtatccaataagagcaaggacattgttaaatggaacaagacagctgggaaaggccccactatctctaatagaattgtgctactataaaacatgaagatatcagcaatttggccacttgcagtttttttcagcatgttaaagcaagtgctaagtactttattagtactttatttagtactttattttaaaggtctagaaaacaacagtcttcctggaggccccagaatccctttcatgggattcataagggactcaggtattcttattttctgccaaaaggtgtgcttatttagggactcttttacgatactttgtttctgaagttaggtagatcttggtttactgtgccaaggtcctacctagcattccctgtaggaatatttgaaattccactagctagtctaagaagtcaaagcacaaaattaattgtcaacgcttctctcatattcttaaaattgaagcagtttgcagggaagaacaagaatgaggtgtccctgccttggtaaagcaactgccaaattttgttctagaaagaatccccaagtgtgtggatctattataatttctttatcttttatgaatgagggcatcttttctacttgagcaagatcatggtccttgaccagtgggcttttccttcatatctgtcttgtgtagttgtgcttttcctttggctcgtttttggtctgtcagggtaaccagcagtgcacaatatgagacaaatgctctttagagagaaatctggtgagactgtagaacccagagcaaaactgtttttttttcagtctctgttttcttttctaaatgctatagaaaataaaggcacctgaaaagaaactactactttaacactgctgtggaaggcctttgctttataagaaaaatattattagctatgggaaagtaatgttctttatgtaaagacttaaaaatagactaatagtttacagagttattatataaaatacgatgtgaatttatttcaaacaagttgtgaaggtaccaaaaaccacaataaaagttaatatatataaaaactactagaacaaaaaagcttgaaggtgtgggggtggagggtatggaagaccaaaagtaaatttaaaaaagaaatttttgaaaggaaacagctttatcaggggaagttaaatataacactccgtttttttcttctttctaataatgatatggatcaacaaatgcaatttgaactttttaagataactctaaatgtgttttgtttcttaaatgcacaattgattcttctatactgtaatgcttctttgctgacgctggaaaatggtcagactgctgactttgtgcctttaaaatgcattctgctttgacagtggcagactttttggtgctggagaagattcactagcagtcttatatgtgcttttcaggaaatatctttctacttaaggccttgagagattcaaagtggcatgacttaggcttggaccaaatataagatcttttacattgcaaacaaaatgttgtattgaataaaagggttaaaaaaatcataatgactagtggaaattttgatgggttgttaattatttaaaatgtatttgaaagtatacagactgaaaatttcagtatgaatatcttgaaaattttcagcacttttccttgtttacaaaacatctttctaacttaaaaaaatgactattgccttagaaagttttaaaaggcacagttacccttacataacatatataaggaattaaaatattaatgcatttgctgaactgtaaaagaaaattttaaaccttgatttcagagtgaattggattggctttcacttgagagagtctttaccttattcccaaagaaactgcattaaaaagatgaaactatttctttagactaagtctctgctactccagctcatatatatgtcagatctgctctgtagtatttctgacatggagttgttataagatatgtgaaatcacttagaaaataaaatcagatgtgaatagtttagcaggatgaccaagccagatgcagactccttggcctatggcaaagttctgtgccagtgattttatttggagtctgggaactgatagcttgatataaaatcacctggtgtcaattaaatatacaaatctatcttttttaatagaatgaatcttctttgtttgttcaataattgtaacttattatgtcaggtactaaattaacatccttaaggaggtcacaatctaggaggaacatgggcaaacagttacttattttatggcatacgctaactctgaaagttcagcaatgatgttttaaaatgttattttttattaagggaaaagcaattttaggtaatcattggctgttataaacggaaatgtcactgacaacagggattagagtaaaagtatctccaaactagagggatcccctccccaaccaggtcacatagcatctctctcaggaccccctcttactgcaaaacccagcctctactcaacagttctggtgatggggagcatttattccataacagtgtttttttgttcttttttttttttttccccagtgtctcttttaaagaaaacatactttattttggtctaaattgtgaaaatacccaaaacatttgatagaaattgaactctgtcaacagtgttatttatactaagatcaggacagttccttgagatcatactgttttattactaagtttggcctttgttttacaaatgtaatgttcatatttatttgaattttaagattggttaaatgttaatgaaaagcaatccaat

SEQ ID NO: 96085 - DNA, 1027 bp, Homo sapiens
ggctatggaagaaaagcagacatctggtaggttttgatacgaagtttgcttgaaaaccacctgccgcctatgtatttccacctgggattgaattactgaggcagatgtaaataatcttttgtacttccaaaataggacgtaagaattgcgaagattaacactatattaattgtgccttattgaggcttataattgactaaatagttagaatccttgaacctgtcctccattctttaggaaggattttgtcgtgagcaaacctcagcattaaaaagctttttgctattacagaagtaaataaatagttactttgtttgtctaaagacctttaaaagtacttcatctttgttgtcagtgtcttataattcatttaatctttaattcttttataattttaagttagaacatgaaatggccattttctacttcccacccagaaaagactttaatagacattcattttaggcacctgaaggcaattgatttctaatgcttatattctttgtaagataaagacaaaaattatttttaaaatcaggttagaaattatataaaacaaaaataataagatgaataatgttctttgcccaaccgtttgaattaagtgatagtcattaaatttattttaattgatttttatgtttaaattagttttacgaaattagaactttttaatgaaactttgaacttgaaattaagtcatatttaaatatatatggacttaatgcctgtttctcattttctagctaactagctttctttcatgttgttgtttgtgtaatgtatttctttttgtttcttttcaggagtgttgcatgtactgtggtagaaatgctaactgaaaagccgccttgggctgaatttgaagcaatggctgccatctttaaaatcgccactcagccaacaaacccaaagctgccacctcatgtctcagactatactcgagatttcctcaaacggatttttgtagaggccaaactgagaccttcagctgatgaactcttaaggcacatgtttgtgcattatc

SEQ ID NO: 96086 - DNA, 1050 bp, Homo sapiens
ataggcaaacaacttagtttcttcataagttgcaaagaaaaaagaaaaggagattggagggaactttaggaaagacttagaagatttatcagtgactcccaatgtatggacttcatttggattctagttttttttaatgtaacaaattgaacaccgactatatatttgataatattaacaatttattgttcatcctcttgggtgtgataagagtccttatctttgaaagatatgtactgaaccatttgttgatcatgacatcttgaatttgcttcaaatcctagagaggggagggggagtggttggcagtatggctggggcaggattgtccagatggatgttgaggctgggtgatggctgcgcatgctgctctacctttgtgtatgtctgaaaagtctccttaataacttatttttaacatgtccaaaataagtttttagaaacttctgttggagcctggctacccgttttctcctccgcccttcttgtggataagcattggttcaatattggtgattccgccccagagacagcttcccctgtctgtgacctgccttggactgttccttcccctatcagagccctgcttgtagccagtaaaaaatgggctttgttgtccttccactggttaagtattctagagacggtggcttttttgacattccttcttaaagtactggatggtaggaaatgttagacagtgctctttcagaagatcactaatgtcatggcatgtttacacttaaggtgtgcagagaatggaccctggactctcctctggagagaggctttagggaaccatcattgactagactggggaatttgctggtagaacagaaagacaggtacagaagccccgtgataggggtggggtctctttatcctctccagtctgtaaggtagcttttctccactattcagtctccttcttagagaccgttttttaagaaaagggtaagagaaccaagaaaatgaatctttgtaatataaaatatggttaaggttatggaagagttaaaaataagaattgaagtaaaattttaaaattag

SEQ ID NO: 96087 - DNA, 1050 bp, Homo sapiens
aaatataggaaaatgcccattaatttacatgtgcctgtataaagaaagctggaatacagctggttttatattgctcaataagtgaatgaatgagagtgagtgaatgataatgcatttgctttgtaatttaacagccagattttttttttaaacatttgaaagatagaatgaaactacaaatatttacctttgtgaaactgaggtttgtgaactttctgaaacatttaaaaaatacttcaattttatagtattaaaatgttttcatggagttgctgttattcccttaacattgcattgcatcgcattatatgttcacactattatagtagtttacattttctaataatgtaatagtcatagtgtcattagtctcagtttgggtggggccattgttcagttttcagtaagcaaaatagtgtgaaatattgtagcttttaattatttagtcaatagtctatagagaaagaatatttttctcttaggaaattttgaagtcgtggcttgcttacaagggacatttgaaaatgagtaactctggagagtgaccactattgagtatggaattgttctaaaattgtgagtgagggttgcacaactctcagtattctaaaagccttgacttgtatactttaaatgggtgaattttatgttacatgaagtatgtctaattaaggcaggtttttttaataagcaacttttggttatatcaaattgaatcatggtggaactcctttttttcctagatgctggatccattatctttaagcagccctgaaaattctggctcaggaagttgtccatcacttgatagtcctttggatgggtaatgtttatcgtagtttttggagggtttatttgtttatttgagacagagttttgctgtcacccaggctggagcgcagtggcgtgaatgcggcttactgcagccttgacctccttggctccatcagtcctcccacctctgacccccgaggaactaggaccaaaggcatttgctattaataccacatctggctattttgtttgtattatttgtagagatgggggtct

SEQ ID NO: 96088 - DNA, 1003 bp, Homo sapiens
aatggaggaaaaaaattaaaagaagtaattataatgtattaaaattaatagagtgtaaattcacaagcctttctctagggttttagtgattgccaagaatgctctcaaaataaagatactaagaatttttatattatgctttattattactttattagtattcattttcatttgccattaatttattgttataattaagattatgatataaagaaataaagatcttgcatgctgtagtttaaggaggctttattcgtgcaacatgagtttgacacaggtactctcaactccccattctgtctgttcttcaatttgtataaaacattgataatctacatttttatttgataaaagcattaacattgtttcaaaaaaccgctggtataaatgttctttgagagagggcagtgagtatggccattaaagatggcatgaaaacatgtatgaggggcggatttaaaagagaaaagttaaagaggaggaaaaacaaatgtggttgggaatctaaaaaagattggtaacagaagaggattgttgataatcaaagaaaaaattgaattggcatgtggaccatcaaaaaaatagacattattcatgttctcttttggtccccagaagaagctattttatgaccattctcttcgaagtgtctgtcttaaataagtcctactttgggtttcaggaatgcagaaatgcgagcagcagaggtgatacacaagcaaaatacaaatggcttgtcttttgcattcagatatatttcgatatagttttaaaatttggtgaaagaacatttgaaacacccaaattcaaattccagctctctgatgaacctgagaccagtaaatgtgtcttcatctttaaatcatgggattgttgtagcattaaattgagagaacacttgtacattttacttttcaaactagaaagcttattgtacatttatacattttgtacattgtacaaagctcagatgttcattgtacatttctttctttatccccat

SEQ ID NO: 96089 - DNA, 1030 bp, Homo sapiens
ccactctagtattctctccattaaatattgctttttgcaaatgggaggatcaagtagtgagatacgacttttttggaatgagggttacttgttccttggaagcaaaggaggacagtgcagaactgataaaacaaggtttgtttggaagcagtcaaattggagaccaaatgatgtagattttgttatatatgcaagaagatctcagagggaaagctgcagagatttcttggtcagtagattgggaggaagcttgagtacttgaatcatttaagggctcaatcaagaaaacagagctactatgatattatggaataagggatttaggaaaggaataggacttcatacagctgtgggagaaactccagaagtcagagtctgtagggcaggtcagagaaaagctactattcagcctctttgaagcagttgtgcagtggtcagctcagcgtttacaggtgaatctgagaagccaggtatgcccagctactggagtgggaccacacactggagctggtgaaaagtctgtggagagttgtcacctctgtgtagctgcctcttttgtggtcctcagtcaagcttttggtggtgaacctggggttgctgtttggtcagcagggttggcaatcaagaagaggagctgtatacagagcagaggagagctgcgcagtcggctggcaactgcagctctatctaaccatactcttcagaaagtcttttgctctttgggccacctaccctatggaaagaggattctgggaaatgtagtttggatgtaaccaggttgacacagtataaactgccacagcagttaaggatgaaaagaaacacagtgggggatgttaaagttgtgggagtccatagtgatgttttatggatcaaggctcataggaatgtgagagagcaagttgcttaagctctctaagcccacttcctcctctgtgaaacagggaaatgataactaccttatgggattgttgtaaggatgaaatcaaatgtaaaacacttagagtgtctgctcagtgcaagccattat

SEQ ID NO: 96090 - DNA, 1050 bp, Homo sapiens
tcgatttgtcagattccacccccctccccccgtcatagcattgtttagcttgttcctgtattcccccataccagttgttaagtgtaaactagatttaaagggtcgattagttttaatttcaacattttggacaagaatacctaataagtgatttaatatattttatatgcctcccattaggagacgtacactgtgcagtcccattatttgtgatactaagtttgattgcttggttgagaggagtaaggtgaggtatatttttctcactgcagtcagcaagtaatctgtggcatgataaattagcactgtaatgctagcctgttctccagtgatcttttacctaatagttgtggtatcttttgctgatccttgtcaggctaacttttaaatttcagtgttaataaatgtttgttggtctatagatggaaacaaatcacaggaattaaaaaatatccagctaggttaatcagaatctgattttgtggattttaaagattttaacaaagtattcaaagtatcgtttgttacgaattttataagaaacctggcttgaaaaatgggaataactcaatgctggtcttctgtactcttaagaagtgcatttaaatttttcttagataacatctactgcacaagaataacccagaaatacaatataaaggaagggtggatctactaaaatacattttgagaaaattgtctattttctgatgtaatgggaggaacactggattgagagtcagaagatcattcctaccattatatgaagtttaagaattacaaatttttgagctgggctgtgtggtgcatgcctcaactactcaggaggttaaggcaggagaatccctttagcccaggagttggagggcatcctgggcaacatagcaagaccctgtatcaaaaatcaggaaaaaaagaaggataaatttttaaactttactgcatgttcttatttcatagtgattgctttagtaaacatttatgaataaagaatgaatttctgatgagatatgtttgtagtgaacttcatttttatgaagccagttataa

SEQ ID NO: 96091 - DNA, 2231 bp, Homo sapiens
tggaggactgacctcttaaacccgtggagtctgatgccagctctgggtgtgtcgtatcagaattgaattgcagtacctcagttggggtggaaatggaataccaacaaaatcttattaatgtgtttctcttatttgggataattattttgattttcatttttctctgggatgggggcttataacagagaaaagatcaagaaatactactgtcttcaaggaaatatggatataactgaaaatcactatgccgaaagcttagagcagttgagcagttagaggagagagaaaaattatagcttgtagctatgtttcttgttgctctatttttgtgataatagtctctatagacttaattatgagaggtctcttaaggtcaagatgacgaggcccaagaacgttttatcaactagattattttaatttcagaaatcctattctgatacggattggcaccttgatcttcagaaacacataaaactacttttggccaaaaaagcctttgaacagctaaaataatgaagtttagatactaaaacactgctcacaagaaactctcaaactatttacttccagcaaacgcagaagcacagtgggatatagtgctttgtaaaaagcaggtgcataaaggcattagaaggtaatagctagccactagatggagacaaaaacctaagcttttctgcaatgtttcatacaaataccctcaaaaacacttgagaaggaaaaagcagaggcatctagtgaagccttacactgatcattaaaaaataaatttgaaacaaagacaacaaaggttgtatttaagaaagatttttaagttacacaattttgtcatttaatggggtaagctccaattacctgaaaatttcactattacagggtaaaactttaacgatgttggcaagtaaaaagttttaaaccatacccggggaattcaaaatggtaagagattctcctgtactgtgtttgaaggaaaaaattagtttctatataaatgatccttggtgttggttttatggcagctcaaacctagctggccagaaaaacctttaattttgaagatatttccaatttatagtagttgcaaaaatagtaaataaactccggtatactcactgatatttaccaagtgttaacgttttgccacgtcattgactctgtcatcttgtatatgcatagagctatttttgcagactcagagtaacttgccgacaacttgccccttgagccccaaatacttcagcatatttcttccaagaacatagactttagttttgtcccagaattgatgatactaactttgacaacttggctatgatgatacagagttgtgggggattttgtttgttttttaagagatgggttcttactgtgtcgcccaggctgaagtgcagtggtgtgatcctagctccctgcagccttgaactcccaggctcaagcaatcttcctgcctcagtctcctcccaagtggctgggactataggcatgcactctcatgcttggctttttttcttccccttccggttttaagatttactatcttaaacagttttaccgctcagtggcattgagtatgttcacaatgtatcgccatcaccaccattcatcttcagaaatcttctcatcttgcaaaattttaactctacctatcaaagaactctccttcctcccccaagctcttggcaaccaccattctactttctgtctcttacgagttgtctgttctaggtacctcatataagtggaatcatacatttgtctttttgcgactgtcttatttcacttggtataatgtcctcaaggtttgtccatgtgtccaaatttccttgcattttaaggttgcataatattccagtgtgtgtatataccacattttgtttgtccattcatctgtcaatggacacttgggttgcctccacctttggctattgtgaataacgctgctgtgatcatgggtgtacaagtatttgttcaagacctttttttcttcacttttagagatattaaaaaacaaccatttttttttccaattcttttggttatatacctagaagtagaattgctagatcatatggtaattccattttaaatttgtttagaaagtgccatacatacactttccataaggggctacacaattttatattcccaccaatagtacacaagagttccaatttctccatatgcttgctaacacttgttatttttattttttgatggtagccatccta

SEQ ID NO: 96092 - DNA, 1751 bp, Homo sapiens
ggggagaagaattagaaaaacccatctctttttaagcagtcatcattcttaaacatctgaattgttttacaacagagtcagcaaacctttctagcatttctaaaagatggcagtttcttggagaccacatctttgcaaggcagtattttcaaaatataaaatagcccccaaaccaaacctttaaacatgaagggcaaatgggtaaagacttaatattctttttgtgtcaagtatacttaatgtaaatctagttgcttgtgaagtagtaaaatagtaatagctcctattattttgagcactgactatatgtgctcagcctctgtgcttggatctgacatcactatctcatttccttctctcagcagttctggaaggagtacctaccctgggtatgctttgcccagggtcacagaagttactgaattagagcagggattcaccccaagtgtaaaaactcaagagctcctgcacttaggggtttacttcactaatcatctaacctcatttattatgcttaaggctttttctcagctgacctgactttgctttaggtcattcttttttatgccagcactgtttgaaagtgcatgtcaagcggctagctccacatttggtcttcgaaagggaaacgcatgcagttaaaacgtaatgtacatgatggaattgggaggatcatagtctcagtttccccccccctttctcccatctaggagacctccatggactgcagcaaaattaaaaataaagcacagacaacagaattattcttcactgagagagtttaatatgcgtttctaacaccatctatacttgctttgttgttcttgaggtcatcaacacacattctggttattccagagctagaagctcttctggttgctaactcagttataagaagatgaaagacataactagacttacgtatttcagtagtttgctctttaatttttcccttactcttagtttcaggcgacctccaagaagggtatcagtcgactggataaacagatgagaaagttcacagatataaggaaaaaaagcagatctgcacacgcagtgaaaatcagcattgagggcaacaaaatgccattgtgaccttgcctggaatgtgtccccatctctactctaagaaatgcgcaatggactctttggagaaagaagatattttaaaacatttttagtgtgtctgtaaatggttcagcgtgtatcagatgttgtcataggactcacatttctctcagttatatttaaaaccgttgtgtactttgtacaaaggaatactagtcatacttctataaactttacacaataaaatttcattctggtttttggggggctgtctcttcatttcttagaggatacattcttaataggggcaaagattgtttcttgttgtgtgggaaaaaatcttatgatattataggggtttgtgacccttagaggttcaatcctccctcattgtggtataatgaggaatttgtgtggcctttgcccctggttgctgacaaggaatgtctaaaacacttgtggtttcctgagtgatagagcgtctcttgttatgctaacgaggtgactgtatggtgggctttagggtggaggctggtaaccagaaacagctactacagagggttgggccagcaggacccgggagattgagacgcagtcagtgacctgtttgatttaatcaaccatgcctgccaaatgggacctgatgaagagctctggaccccacagctcaatgacgcttcttg

SEQ ID NO: 96093 - DNA, 1916 bp, Homo sapiens
tcatgtgttaataacccttgtagctcttgaagtttgtctgattcagagaggactgttttctggtcgcttatctagccaaaccacaaattgagcaatagagaaaggaaaagtattacccaggattaaagtttattgctgatgaatttttcttcagtcttaattcaacattatcaggtagggaagtttcttcttattaatccctttacttcaagcaaggcttgaaattgaaacctggagtattctgatacagtgaatttttttttttaataaccatgagaaacagagcttacgtgcttcagcagacctacctctccctttctcttcaacggtttaagcaattccattgcaaatgattagggtagacacttattctgttatcattgtaaatactgctcagtggatcttcagtgtttctcagtaatctctttttattctccaatcaaactactacttctagcctggtattcttaaaaagggcctaagccgattggaaaagcataagaggcgatttgcagaacagaaacgactcagcaaagtgcatcgtgctgtcaagttcagcattgaaggcaacaggatgcccctataggcctggccctaccagagtatatacacgagaggtattcccaaggaagcatgtactgtgcatgggcttgaattgtcaacagtcagagtgaaaagtgtgtgtgtgtgtgctttcttaatcagaagaggccaggtctgcttttagtttcaaaataatgaccctaacaggcaccttgggatattcaaggcctcttgaatatttagaaattgacatggaagtcccttcctttatcagtatcctagagagtaatagataattacttccctaatatgcatttgggtcttcctgactggtacccgtttttatgaaaaaggtttttgttaggacccagaattacagtgatatgtgttacaggcatataaactagttagtggtttcctggtgggaggtagcttgtttcctgctgtcagtggctcagcaacatgcatttgagaactcattacataaagccttatactaaatatttaggagatgaatttgattaacacatactcaaaatgtggtcagaagtggaaaagacttgggaacattcataagcccaactcactgatccactatgctttgagactaatggcacctttgttgcggagcacacacagtgtgtgtgtgttgcctgcctatggttcttctccatgacccctgctttggcagctgtttccactgactccactctcctacctgccagttcatgttgctattaagtgactatcaaaacaaaacgtactttcttatttcttgagaataaatcgagggtagagaaggactagttctgtgccaagaacttcctcctctctctctccctcctctttcttgtgcccatatccgtgtccctgaccacctctccatgtcccctgtacctgtttcttttttgcccttctgtcctttttctttttctttttctttttctttttgagacggagtcttgctctgtcgcccaggttggagtgcagtggtgcgatctccactcactgcaagttccgcctcctgggttcacaccattctcctgcctcagcctcccagttagctgggactacaggctcctgccaccatgctcggctaattttttgtatttttagtagagacggggtttcatcctgttagccatgatggtcttgatctcctgacctcgtgatccacccgcctcggcctcccaaagggattacaggcatgagccatctcctttttcattgtttcttctctctttttagccgtctttcatatttctcttaacatttttatttttgagaattgggaactacaatatggcaaagaaaataggtaataaaaactcttagtggccaatctgctttgaaagcagaggttgtgtttccag

SEQ ID NO: 96094 - DNA, 1048 bp, Homo sapiens
ctttcattttaacgtttagtatctacaaagcattgtattgggtactctggggatgtaaggaaaattgagaaaataattcattcaataaagattttattgctgtttgctaagtgctagactccttgttgtgctctgagaatataaaaacaaattaaaaatagtctatgctctcaaaagtgtaagtctttacaaggatgataggcaaagggaggtctttggtaaagccatgggctaagtgtgccaggtctgtgtttggaatggcaagtagactgaaggggttggacagtagtatggggcctgaggtggtagaagataaggttggaaataatagaccggtgaagggctttgaatcaagatgaggaattttcacgtcttgtgattccacaggaagtttttgaggctggatgtgaagccatctggtttgatttgatttagggtgctgatgccaatggcatcatgtaggatggattggagggcagtgggactgaggcagtgatacagctaaacagaggtggtagttgggaaacagaggggtgagaagacattgcagaggcaaagctgtcatatgttggtgacttagtgggagagaagatggctagagttgaagacctcagccaaaattttaacctgagtgctgagacagtgtttattacctttcaccaaaatggagggagaagtagatttgagggaccaggcaagttctcttttgagcatattaaatgtgacatgcctaatgagatagccctataaatattatgggtctagaacttgtaaagagatgtttgggctagagacctagatttgatggttctctccatagaaaagattgttcaatcaagagagtatagagtaagaaacgaactaaacaattttgaaagggggcatagccaggcagagcagccagcgaaggggaatgagcacctgtggtcctgtgcgttggagcagagcctggaggggaatgaggctgagctggaggtggcaatgacaaaagcatgggccagtggcaggtgctgcagagggctttgtgcaggtgtgttggtagtcaggc

SEQ ID NO: 96095 - DNA, 1050 bp, Homo sapiens
ttaaaggtacagaccattttgtaaggtagttgtaaaggagtttgttctgggttaggataagaaagcagaatttcaagacttttttatttccagtagcgtaaacttagaaattagtctgccttttaaaataaataaataaaaattttaaataaatgtcttttatgaaatgtcaatccagctaattgttgactattaaagtgtatcacatgttactttctttaaatctctgtggtgatcttttacattaaattttctgaatcagccagagtcagtcagtacactggcattatgctttgtttatcctataaattactctgaaataatggactcttcaaggaaagaatattctaaatgtctagaatatcccctcacactggggtgcaattatttgaaaaaaatggaaatgcaattttatggacaaaataattgatttttttcttactacagatgagtggtctaggcctatatttggtcttacctcaaactacaaaggaatgacaagagaagaaagggagcagagagatctagaacagatgcctcaacgacgaagaatgaacaggtatgagggaacaggtatgagtaagtggaatacacgttattgttgcagtaactcagttttaagtaagatcattaggaagcctgcaagatgataggatttcctttcctctcagcttgatatgtgtacataattcataatatccttttagtttaaatgtgatagtgtatagtgagggtcctgtcctcctaaccagacctttctgggtcagtttgttggaacagggcctgtttcaggatactgattgcttgtgttgttccatccacttgagaaaacaactttctgggtcccgtttccgagttcctagaagaaaaaatgttatagttttagtttgtattgataatagtggatacagttgcatccaggaggacagggtcattagttacaaatgtggcaattacggctcatccacaaggaaacctgttatgcaaatgaatactaaaatgagtagtactttttaaagattaggaattattttccctgatccatcgtaa

SEQ ID NO: 96096 - DNA, 1050 bp, Homo sapiens
agaatttttaaaaattattgttactgcaggcaggaccttaaagaaacattcattgacagtggtgtgatgtctgccatcaaagaatggctctcacctctaccagataggagtttgcctgcactcaagatccgggaggagctgctgaagatcctgcaagaggttagaggcagataatctgactgttctttattaattatctaatgtggtctgtatggtcataacctgtgtagtttacagtgtttttatatgttatctctgctacagcctgccagaagaggggttggaaaaaaggaacatatctaataaaatgagcgtgaaagggaagaccttataaaacttcatgtaactatcgcattgaagggaaaaaatcttagagtagctgtaatgtgtctgagaagagtagtacagtagtgggcaagttccagggagaaatgtgacgcagaatgaacaccaaattcagaatcatatgaacttgcatttgaatcttgagctgggccaccttacgtagttgtgacaccttgggtaagctatttaacttctgaaggaattcccaaggaaacctcctatgccacgcactgtgccaggtgctttatatatgtattgattcgttttttcctcacagtaaactgagaaggtaggtgtattatttccattttacagatgagggaattaagatgcagagaagttaaacgactcgtcaaggtcacatagctagaaggtggctgtgcttgggttcagtcttaggtctattggattctgaggcctgtgctggctcctgtattaaactgctaacctctgagtacgcttggttcatactttctcacattgttaggttttacttcaactcagctgtaatactgagctctcaacctctttttgttttttttttttttgagacggagttttgcttctggtgcccaggctggagtgcagtggcaccacctcggctcacttcaacctccgcttcctaggttcaagcgattctcctgcctcagcctcccgagtagctgggattacaggcgcctgcctccacacctggctaatttttgt

SEQ ID NO: 96097 - DNA, 2052 bp, Homo sapiens
tgctggagagataattggtataacctctgtggaatacagtttggcaagtatttcgcaatttcatatacataaaactaaatgtgactaggcaaataagtaaacaaattgtggttgcagccatattgtgaaatagtctaaagccttgaaaaaaatgacaagacttaatactgacatggattggcctctagattcttttcttaaatttggaagatgcagagcattatcctgtacccactctgaatagtatgcttcagtttgtgtaataagagaggatatgaagtatgtgtagaagtgcttatataaacagactatttctggaaggaaacacaagaaacctagtaacactagtggctggagagggaccttttgttatgtaccttttgatatctattgaatttttgttctttgtgaatgaattactttaaaaatgcaaaatattaagaacacttaatacagaagaaaatctgtaaggaggttgtgataattttgcatttagggttttaaccaagaagatctggaagaagaaaaaggtgaaacacaggtaaaagaagcagaagattcagattctgatgataacataaagagaggaaaacagtaagtttgtttttaaggaatttgttaaagagaagtttaaaaatcaaggtagagactattaaactctcttttgtttttcattttggttcctgattaagtttaggagtgggtctattcctgtttttctccatttacggtgttgtcagtgaattacctgctgttgttacttgtctttcatttaccctgtgctcagatgtcttactttgtggagttgtatttatatggcaccagacttaatttatggctcaccaagtaaactcttatgaaaaataacctaattttaaaaatacctttttgagagacaagctgatgttgtggggcaggggaaatagtctaacatcttaactacaaaatattacttgaccatatttcacttactttagttgagctagttggaatctatgttcagaaaaatctgatatcttaaaagatgtcatacggtaatagaaggattagttactgttttcagtcgtaaagatgcttttaaaaaatagtttcatttttaattcctagtggcatgcagtaattaaactgaatgagtttggcagtacttttggaaattgaattgataggatagtggcagacaataacttaactccctcttttttaagtgtaatgattctgatgaaagccataaaggtttgaggcgcttagcaagcctgtagttttccatgtgtatctctcattatgttttgagagttatacttcctatcactgaaaagcagcagtttatttttcattttttctactcatgctatataagaccacaacattcaaataattgaacaccttcctagtccaagaaagggcagtgccactaaagctgaatgaatcccctgcattggaacttaaaatgtactttctcaaactgatagatgcaagtgtgaatatagtgcatgaaaagttccgggctattagcgatttatatgtgtatatataacagggtagtacaggaattgaaataaagtctaggatcaaccgttcttttaatagcaggttctaagtacagtcatgcgtcgcttaacaacagggatatattctgaaaaatgtgtcattaggtgattttgttgttgtatcaatatcatagtattatacaaacctacatggtattgcctactacccacctaggctgtatggtaaaacctatcgcacctagggtacaaacctgtgcagcatgttattgtactgaatgctgtaggcagtggtaacacaatggtatttgtgtatctaaacatagaaaagttgcagttaaaatacaatatagttggacgtggtggcttatgcctgtaatctcaacagtttgggaggctgaggcagggggatcacttgaggccaggagttcaagacaagcctgggtgacatatagtgaggccctccctgtctctacaaaacatttaaaaaattagccaggcatgttgtgtgggcctgtagtctcaactattcaggaggctaaggtgg

SEQ ID NO: 96098 - DNA, 3230 bp, Homo sapiens
atgtatgagaaaattcgccttttaaaaaagaaaaaatctagctcttcacggtcagttttctgtagtaatctgagggcatgctttacaaatctgttttgatgaaggctggttatatttccccatttggggatccaaataaaaccatttcactgattggctttctgtgggggtgtttctatatgggtataggacaagaattctccatttaggtgcacataatcctgtattttaaaaaaatcacagaaaaaatttaatgttttattattaatggtttttttttttttgcactttcctaattttttctcactttatttttcagaatgaaactagtgatcgagaagatggcctccccaaaggacatcatgtgacagactctgagaacgatgagcccttaaatcttaatgctagtgactctgaaagtgaggagcttcacaggcaaaaggacagcgactctgaatctgaggaacgtgcagagcctcctgcaagcgattctgaaaatgaggatgtcaatcagcatgggagcgactctgagagtgaagagaccaggaaattacctggtagtgactctgaaaatgaggaacttcttaatgggcatgcaagtgactcagaaaacgaagatgttgggaagcatcccgccagtgattctgagattgaggagctccagaagagtcctgctagtgactctgaaacagaagatgctctaaaacctcaaatcagtgactctgagagtgaggaacccccaaggcaccaagccagtgactccgaaaatgaggagcctcccaaacctcgaatgagtgattctgaaagtgaggagcttcctaaacctcaggtcagtgattcagaaagtgaggaacccccaaggcaccaggccagtgactctgaaaatgaggagcttcccaaacctcgtatcagtgactcagaaagtgaggaccctccgaggcaccaggccagtgactcagaaaatgaagagcttcccaaaccccgaatcagtgattcggaaagtgaggatcccccaaggaaccaggccagtgattcggaaaatgaggagctacccaaaccccgagtcagtgactctgagagtgaggggcctcagaaggggcctgccagtgactcagaaactgaggatgcgtccagacacaaacagaagccagagtcagatgatgacagcgacagggagaataagggagaggatacagaaatgcagaatgactccttccattcagacagccatatggacagaaaaaagtttcacagttctgatagtgaggaggaagaacacaaaaagcaaaaaatggacagtgatgaagatgaaaaagagggtgaggaggagaaagtagcgaagagaaaagctgctgtgctttctgatagtgaagatgaagagaaagcatgtaaggagttaccttgggctgtttatcaatggctttattcattgtctaagcttgtaactgtggaacattgtatcctcttggtatgtcagatctgtgttctgttattcagcttaatattctaaaatatcagtaggacactcatttcccctggttatcattagctaagcttaatagtaagtttccttggagttctattagcacatattaatctctgactgcctcaaagtgataaaccacatgtcaataggaatataaaatactgttttttttttttaaaactggaagaggtaatgtttcaaagaaatacgtttacataaaaacccctaactgtattaattgttagctgtgggtctctttgacacttagttcactagatcccatccaaacagtaacagctcccacaggtacatctcttcatttgttaaacattgttgaatattcagatacagggaagctttgagaggattctatttagagacaccatctctctccagagtgtttcagtctctgctatctaagactccatttgcacagatagtattacttgtctacttttttatgaaacttatcttttttggaaaagacatatttcattataacctcacagttcttataggagaaggaaaaggtaccagacatgctgtcaatttgttaagggagatgagaaatttcaaactgaccagcaatgatagaggaacatggagactattcctagaaagaaatatgtagtcctttttagttcagttactactaggcaacatagaaaggatgccagttttgcccatcaatctagttttaattttctcgatttcccaaaaggaaaggtggctgcttttatattgatgatatctttcttcatcttttggccagtttttcttaagcaaaataacagataatttgtaagatgactctgaatgagccatttagttattttaaaaattctaaaccatgtgtcaggaggccctctgattttattttatttatttatttatttatttatttatttatttatttttgctgtatactgccatcttaaagcacctgttatgcttagtaatacaatggctgtgataaaataaaattaatgatgattttctttttcaacagcagcaaagaagagtcgtgttgtctctgatgcagatgactctgacagtgatgctgtatcagacaagtcaggcaaaagagagaagaccatagcatctgacagtgaggaagaagctgggaaagaattgtctgataagaaaaatgaagagaaggatctgtttgggagtgacagtgagtcaggcaatgaagaagagtaagtgacagtataacatgagttttcaggggttcttaattaggcagtagagaggggtctgtgttataatacaatatgtcctgcctaattgcatgtctttggggatttagtattttagttcctgaactgaacacactacaatgtgggtgaatctcagaattcatctcagaattaacatgttaagtgaaagaaagcaaagaggacatatatgattccatttacatgaagttcagtaggcaaaatttatctgtggtgttggaagtcaaggtggcagttgtttctaggatgttgatattggggaccagctagaaggggccatgagaggactttctggggaggctacatgagtgtatagggtgctggttacatgagtgtatatatttgttaaaactcattgaactgaacactgaagatctgcacattttactgtacataaattctattttttaaaaaatggttcctatgcaaatgaggataaagcaaatgaatgtttttacatttgtctactttctagaaatcttattgcagacatatttggagaatct

SEQ ID NO: 96099 - DNA, 1045 bp, Homo sapiens
cactgcaacctccgcttcctgggttcaagtgattctcctgcctcagcctctcaagtagctgggactacaggagtgcgccaccacactcagctaattttttgcatttttcgtagagacagggtttcaccatgttaggcaggatggtctcaatctcctgacctcgtgatctgcccacctcggcctcccaaagtgctgggattacaggcgtgagccactgcgcccggcggcattatagatgtttctaaagcatctaaggaccttctgagtgctcaatttcttttaccattacaactaggaaatgtgttacattattttagaaatgacattaaatgtcagtttcaactgttggtttgttgtactcatctgacttttaaaaaactgtcttttggattttttttaagcttgcaatttaattgccaaaaccactctaaaaactttggatattgttttgataacttttaagcttaactgtataatttccagcatactcgtcccaaattctgtggtggtgttgtctaagtgtattctttagctcgagtctattaaactagtacttctttactgtagtgatttctccccttttttgccctgtcatgccatacataatgctatgttttcgtgaaactcataaaaaattcatgaggattcctaaattttacaatcattgtcttatgcagtgtccttgtaagggtttgttttggaatgctacaccatgtgtcaggaaatctggggtagagtgtagcgggtgagttttggatgactgcccagtgtctctcacttctttgggagtgactcccagtgctgtgccccgatccagctgtaactgattgagtcacagtttctaatattgccttggccagttaagtcatctctcttggggatttataatttaggttctagacagggtatagctgagtcatgttactgatggtactctagtaaaatgatccttgagttcccttttctaagctctctgtgctgcgttggtacttaaccttcccaagtgtttagtcattcaactgactttgatcctgagaagattgtt

SEQ ID NO: 96100 - DNA, 1715 bp, Homo sapiens
agtttgagaccagcctggccaacgtggtgaagcccatctctactaaaaatacaaaaaattagccaggcgtggtggcgggcacctgtaatcccagctactcaggaggctgaggcaggagaatcacttgttgaacccgggggggtggaggttgcagtgagctgagatcacaccattgcactccagcctgggccaaaagagcaaaactgtgtctccaaaaaaaaaaaaagtaattatatgtaatacatgtatataggttaaaatacgattttactctgtattttttaaagtattggggctgggtgtaatcccagcactttaggaggcaaaggcaggaggattgcttgaggccaggagtttgagaccagcctgggcaacatagcaagaccccatctctacaaaaatataaaagaaagttaggtaacagtttgtatttaccattttatatatgcttttcttgaatggattttcactagttttggactggagttccttgtgttcttcatttgtaaacaaatacttactgtatatcaggtactaggcagtgttctgggctccagagatttagcagtgaaccaaaatccctattcttgtggcattttctttcaggtgaagaagacccacgttaaacaaaataacttcaggtagtatattagaaggtgataaatgccatggagagaaagacccaattttaacatgaagttgaaataaattgttgacttggtgtttagtgttgtttcttaagctacaaattgtttttatggtgtagttttgctgccacgtatttcacagtacatgttatgcttgttggtgtttgtatgagtattgtattaccttattcaaaatattagcaactttagttaatgcttcctcagtggtaacttttgcacttacgttattcttgattcagtgtgttcatttcactgtagatgtcattcatcttacaccataagttggtttttgttttgtttttaatcagatgatggtggtgctaccccagtacaggatgaacgggattcagggtcagacggtgaggatgatgtaaatgagcaacactccggatcagacactggaagtgtagaacgtcattcagaggtattggctaaccaacatctttgggagggcttttcccttgcgttctgtgagatctgttatattataggagttacagaatctctgtgacagagtttagggtttaatctctgagagtaaaggagcataagttaatagaaaaccgcttgaaaaataaatagggatggtctggttactgttgaaatcacagtgaaatatgttctgattgggtcacatttcaaatgttaggcagttttcaactgtgcatattgattcagaaaatgggcccggcctttgatatttgactaagtttccctattctgcaataatgtcatagtggggcattgagcatttgcaatctgaagaaacaccacttgaaatagaaagttatgggggttatcacctgtcaacatttatgtcagcatttgcccttctgattttgaactgttacggtgtatataatgtatgtaataataatgcttttttttttgagacagggtctgactctgtaacacaggctggagtacagtggtgagacctcggctcactgcagcctctgcctctgggctcaagctatcctcccacctcatagcctcccgagtagctgggactacaggcacaggccaccacgtccagctatttttgtt

SEQ ID NO: 96101 - DNA, 1026 bp, Homo sapiens
cgtggctgtgggtgagtcgagcatctaggacaggtcataggcctctgtggaggtggcaggtgggcatgtgtggcctcggggagggcctgtggtggcagcgccatggccaggtggtggcagtttcctttgcattagcgccactccatccctggcccgagccctctcccaggcatctggctcctctatgggtcaaggctgcctaatggttaggggcagcggtgctgtcattgcagcctggactgccggcaagccacttcccctctgcaagcccccatcagagggacgaaacaccgctttgtgggctgctgtgaattcagactgtggtcagccttcgatgcacaggtcagaccatcaccaaagagatgggacgagacaggctgctgcctgtctccctgggcagggctccccgctgagtgtttcctctgcttagccctgggctcccagtccaccccacccagcctgccccttacctctagctgctggtccgggaggaagggacaggggtctgcggggcagcaggtgatctccgcccgtgggtgtcggtggtggcagggggctccttgccgctgtgggtggaacgctggctatttaaggagaggaagggagaccacagcccctctggccctgaaaggctgcttcattcctgaggggtcccttgttgtgtcgggctgctcctctggctgctgctgctgctgccaccggagcgtgaatattctagtgtgtccctagcccatgccccccgcccccagcttggccacatagtctgagtgtgtgactgtctcagagactcagagcaggcgggggctgggtggggggcttgggctggagctgagggacacaacaggacgtttcagaaggggatgatttcctactgatggggggcagggaggggccggctgtcatggcaacaggcggcgctcccaggcctgcgcccgcagacggcggagggggcctgtgaacggagggtgggaggccgaggagtcttgctcacggagtgagaggcgactctttgaggacacttgctgt

SEQ ID NO: 96102 - DNA, 1010 bp, Homo sapiens
tccatgcccaggtgcctcccacggctccccctcagacttgccacagctcttcaagcactccacaaccacaccaagcatgccatccacccccacctgtcatcacaggaggggcatcctcccgagccccaccctctgtggcccacctcacagccagtcagttgggtcctgtccactccacctcccagaaccctgagtcagcctcctctcctccacccgctcagccacccaggagaggcctccctagtggctgccttctgtctccttccccatctccttcccagcagccctttctccacacagcacccatgggttcatctgcagacagcatggccacacatgccactccaggtcactttggtggctccccacagccctccctctgctcttgcctggtgaggtcctagggagagctggcagggagaagccctgaaggtatgcgagcagagagggtgtttcccaaaagcagcctggctctgggcagcatgggggatcccgagagaaccaggatccaggcacgaggagctgcccgggatcacatgggaacagtggacgtggggaagggcacccagcatgaaacggtggaaatgaaactccactgcttctgggacaggaaaactctcgcccactccgaaggccgggttggatgtctgttcctcacagactggcccggcccaatccctgtgtatggaaggcagggaagccagtggggcaccagcactgcgggcagcagggtcacctttgaaggagcgggtgcattacactcagatcgctcacagctgcgtcaaacaaactccaggagaaaggactgcggggagccaccgaactgcataaagggaggctcttgggagtggaactgtggcagtttccttctctttatgtttctgttatcttttatgtttccaggtttctccttattctctaagacgagtagtattgcctggacgaggaacgccctacacagtgcctgccaaaggctgactgtcatccctgtgtcatttgagggtaagagt

SEQ ID NO: 96103 - DNA, 1002 bp, Homo sapiens
gagagaataatttccaagtcttagtatagccaaaacaaaaaactaccgtcgctaagctacatctaccactggattttaaaatgacaaaacagcctgagaaaaatcacaagagcagctaactcgaagaaaaatcctttttctttactcagccgaacctaagaccacagttacttcgaaagcaacttctaataaccgtctcacatcctgtcaccagttcaatgacaaaatctcagttttcagagcgtgtgccaagtccagcacaaaaagctgacatcgaggagctcccaacgctgctgtcgcctccgctggcagcagccgctcccggattagactcgcaggctgttagggcagggccttcgccacgggcttccgcacagcggcgtgcagtcctcagctcggccggcgcggtctccgacggcgctggctccgcgtacttccccagcggcgagggcgcgaggtcctcacacgggcagcaccttggcgaggccggcgccgcggcccaggcgacccagtgcgaggcgcagcgcggtgccgccgccccagggcagcagcccaaccagcgcggccagcagcgcggccacctgcgcgcccgcgcccagcaccgtgagcagcgtgctgcgaaggcccagcgcggcgaacagcgtggcgcccagcgctgccatgtagagcagcgcgggccgggacggcgcttcttcgcagcgcagcaggcgtccgcacgccgcgccgccccgcagcagcgcgcttcccgccaacgccagcgccgagcccagtgaccagagcagcgcgaacttgcgcgcgcgcagcagcaacaccggtgcgtagagcgcggctaggccgaaacacagtgcagccagcagcaggcacccgccgcccgccgccagccgctgcccgcgcgtcacgctcgggaggcacgtcaggccggccgctgccgactccgcagggctccgcgcccacgtccagcgcaagcccgcgcggcccagccactcctccgccggccggtcc

SEQ ID NO: 96104 - DNA, 1040 bp, Homo sapiens
tttatttctgactaacatcaagttcctctcctcatcataacaaggcgattcaaacctaaactgtgattcttaggagatgcttccaaggggaagctccctcgttggacatccagaagattgcattttctcttcagagtacaattttccatctgtcagagcatgtctgaataaaaatttgaacctactacaaactacattagaataattttcaagtatttttctgtcacaaaaatggtgtgacagaatgtgttgaaaaacacaaagttcacagctgagattaatttagataacctagtggttaatatgctcatgaacatcagcaacaaccgtgcattccttggcagatgggatgcgatggaaaccaaaggtttccttaaggcaagcacttcacaactagttttctgtcaattcttgcgtaaatcacattctgtattcatacaaaaactttgtttttctctgacaaactgtacacatagaaacaaatttccaaatggacaggaacttaaatttgtggagatgccccatgtcttgtgagacttaaaaaaaagaaaaagatcccagcttttatcttcacaaaacaacatgggagttggggcaatgagggtggacaggacagggccagccaggctggtagctggcagcagtctcttcatcttgaagacctcattgagggttcctgggattcaggtgcccagaaaagagttcagggctacaatggtgcaggcttccttttgtttctcttggtgagtccacaagaagttcttacatactgtccagagaggcctcagggtactcagttccagcttctaccgaccccttccaccaccccgtgaagctcctcgcctcggcgggccagagttcatgttactccctctaccccagttactgccactccggccccctcgagaaggggtgccactgcctggagggcccccaaaaggttcatctctgtggtatccatcgtggtgctctccgtctaaggagctggaacgcccagatttgggcactctctgagcaggtcctgggccccctcggcctga

SEQ ID NO: 96105 - DNA, 1033 bp, Homo sapiens
tctgctgcacatgcccttgcagcctgggctgtgcagaggcacatgctcctaaatgtggtgccagtgccacacgagctgtcatctggtggactgcaactcagccctgcacaggactccacttgcctccgggaatccctgttcacttgaggttttcacttcagccctctgccaagatgccccagcactctctgctcggcttgctgtctgggagccctgctctccttggcagtctgccctccacaaggctgcttggaaccctcaagggctctcagtgggaggggaagagttgtcctctcctgggtggtctgttggtttttttagcctgggtctagaggaacactgcttgtgctcaaagtcacagagactttgggaaacatggtctatgggcagtgtttccaggggcacagtagattatctcctcaactgggaactgtggagctttatgttataggcagcactaactttagccaggagtagttgcctctgaaggctgactatacaactctggttgcaaggcagcgggggaggtgcataggtggtgtggctcggaagcttctgggaaggctgctccccgcatgccccagcttgtgctctgctcctgaagttggcctgtctgtatggacggtccttccagtacagagttctgccatttggtctttttgggtttttttctgtcgcccaggctggagtgcagtggtgtgatcttggcttactgcaagcaacccccgcctcccaggttcaagtgattcttgtgcctcagtctccccagtagctggaactacaggtgtgcgccaccatgcttttgtgtttttagagagatgggcttttgccatgttggctaggctggtctcgaactcctggcctcaagtgatccacctgccttggcctctcatgagccaccatgcctggcctgccatttgatcttgatagttgtttgtctcaacaaaaccctcagaaattaccttatgtatcatcaatagatcaccctgcataaacacattgtactactagccagtgtgctgtgaccttggct

SEQ ID NO: 96106 - DNA, 1008 bp, Homo sapiens
gtttttgcctctgatagtattaataggattatataatgtatcctttcaaaaatatatagttttattttgttttcctcccaattaacattgtatcatgctttctcatatcatatgcttctttgaaacatgaacttagagtggcaaggtgttctctgagatggacattctgctgttttctctttacagtttcagaagaggagccccgccgaggcatgagggccgtgctccccccagaggaagggatggttttcctggtcctgaagactttggtccagaggagaattttgatgcttctgaggaagcggcccgaggacgagatctcagaggtcgaggtcggggtaccccacgaggtgagcgagttactaaagacacctggtctggaaggatagggtgcagaatacactggttgtgaatacaccaggaacagtctgagtgcagcattgtttgctctgttgtgtaggaggaaggaagggtttacttcccactcctgacgagttccctcgctttgaaggagggcggaagccagattcctgggatggaaacagagagcctggtaaggaaaagaaccgcttgttgggtaactctagactgcagttcacaaagtgagttctgagggccctctctggggtgcaccgggtctcctctttccagctcatgtctcccggggggctgggctgtctcctgtcctgcagccgcagcacttgatctcagcaggtggaatgcagagcagaggaatccgccagacattacagggatctatctgagtataaaacgggactgctctttccactaaattgcttttggagaataaagttaagtgaattaaaatttccccagtctcaattgctaatatggtaaatattcgcagttacaactctcattaacaaaatctcttaggagtcctcagtaatttgagactgtaaagacgtcttgatactacaatgcctgagaacgagttctctggatcttacctgcccctcttacatgaggaggcaccctgatgtctgg

SEQ ID NO: 96107 - DNA, 1054 bp, Homo sapiens
taccaaaatgatttatgttgagaaatgttgataaaaattatataaatgacataatacttaaaatctattcttccaataatgtgttcattgatcaagtggccaatttcttttatttaagaggcaaaccacttttctttacggttacagggaaagatgaatcaaatgaaattgaaatgacaattccaggtttagattggggaatggaggaagtgatgcaaaaggatcagaaaaaagtacctcagaagaaagttccttatgcaaaacccattcctgctcagttccagcaggtaagtaaaagtgactccacctcatccacgcagagaggttttggttggttagtttgaggtttctcttggattatctcactgttgaaggtgtttctgtactggagcatttttcccatgttcacgtactcttagacatggttctcatctactgctttgcagttgtattgagtttgttatcagtcttctctgttctgtcctcacctgcttattatcatccatgctatgagaggaaatagaagaaagaggcatggagcagagggagtatgggagtatgttgcttctcttctccattgtttatctatcttgtgctttaattgtcccctcaacacaaagtgcatgtaccctgtgaagaggctggcaagctttgcattcttaataacatgcagtgtcttgcagcttttatcaccatagtaatttctacctagtaatatgtcagtaagaattagcatgagtcatgtacttgagtcatggagaaaaggtaaaaagaaataaaatcggttcagaggttagattgagcagatgacattgtagagtggttttctcattctatcattgtaattttcatacttagcgtacattttaatattctcttctttcccaaggcttggatgcaaaataaagttccaattcctgctccaaatgaggtgctgaatgacagaaaagaagacattaaattggaagagaagaaaaaaacacaagcagaaattgagcaagaaatggctacattacaatatactaacccacaacttctggaggtgtgtgaagct

SEQ ID NO: 96108 - DNA, 3153 bp, Homo sapiens
taagtgctcattacactgcctaaaatatagcaggcctgcagtaggatagctgttattattacctcatctaactgtcacaacatgtgcgaatcaagcagagtgtatttctcctgcatttcagtaaacaggagctgaaagctggcttttcctgtcattccatctagaaagtggtgtcctaaattcctaaatggtggtcccaaagtcctaaattcaggttgaatcaagttcgtctgtaagaactatcacaaagtgggacaactgaagtgagtgacagggattgtgccctataatcagggtaatcgggaacaacatgagacacttcaaaatctttacataatggggtcttgaggggtgcagcctccaaaagcctcgactgacctcccggcaagtaggtgagaagatgcacttgggtccaggagaggactggctcctgtgtgtcttgacataggaggagaggatactgtatctgaaaaatttccagacacacagaggccaaagagtcttcacaaaacaagttttaagttgactgagcactgagagcaaaacatttactaggtttctctactttggtttaaattgctttaaatgcatgtaactaattaggttttaatcctaacttgtttccgacagggcatggtgctgatgtgaaatgtgtagactggcatccaaccaaagggttagttgtttcaggaagtaaagatagtcaacagccaatcaagttctgggatcccaagactgggcagagtcttgcaacactgtaagtgacaggaaccccaccttggcccctgaacaaaggggagcaaagcagtgtgtcctttaacttttagctttgttttctcttatgtatttctggaagagtcatttaggcaacagatggacttggatctatagacttcttatgaattaaatatgattcatctctgaactcttaatgaagtaaggcttgtttttgtcctgccacatagacctaagtttaatttggttgttatatacgggtggggaggaggatgaggagggaggtggttactattctagcctattgcctgtcatcagaataccttgtggcactgtgaggagttgacgtgtgtgccccttactagacacggcccagccttctccatctcacaacatctgtttcgagagggttttcttctggttttgaaccacttctcattttttgtctgatgggcttacttacgatgcagctatgtaatctagttttctctttcagttatttgtgaacattcacagctacatgcatatgttaacatttttttgaccaagcatccatttcctggtctttctgattgggaagagaaccatattcagagtgaattggttggagcaaggctgctttgttgtacaaccccaatgaccatgccaacctggaatgccttgtgaatgctcccttggagatatccattgtgcaggccaggggttgttgcattgtctttagttcaaattaactttcagactttccagtccatttttatgctttgtcttaattagagaaactttatggaagtttcaaaatgtaatgagctttattgaatattaatttctgtgttcatgtgcttcccctgcttcacggataaattttactgttcagtggaagctctgctactgtattattattattattattattattattattattattattattattttgagacagagtctcgctctgtcacccagactagagtgcattggtgcaatctcggctcactgcaacctctgcctcctgggttcaagtgattctcctgcctcagcctcctgagtagctgggactacaggcatgcgccatcacgcctggctaatttttgtatttttagtagagtctgggtttcaccatgttggccaggctggtcttgaactgacctcaggtgatccactcgcctaggcttcccaaagtgctgggattacaggcgtgagccatcacgcccagcctctgctgcttttttaactggttgatgagagctgtctttgtctgggcagtgcatattatttctgtcgttgacttgtttctttcaagtgtgtttataactgtgatcctttaatgttacaggctttattgcttctaggccaaacctcttgccatcttgattaattcgcttttcaacaaaaatggccattgtatttatacttgttttgaattctgacatttttttttgatactttgtttctagtcatgcccataaaaacacagtaatggaagtgaaattaaacctcaatggcaattggctactcacagcatcacgtgatcatctctgtaaactttttgatatcagaaacctaaaagaagagcttcaagtcttccgaggtcataagaaagaagccacaggtcagtggctgtgatatgcttctcattgaccactgttacctgtaacattctcagatcctgataattgtgtcttttcccatgtttttgttctgcagctgtggcctggcatcctgttcatgaaggactttttgccagtggagggtctgatggttctttgttattctggcatgttgggtatgtaagatttatgtgaaaaagtagtgtattttgtgaagagagcacgtgaatgtgtgcagacatgatagttttgtagcttttctaagtgttcatatatcctatatcagagactgcttgcagttttcagttctgtaaatccagcttggaatagaaaatgtacctctgtttgtggatatggaagtcattaaggaggaataaaatagattttctagtttctaaatgcttgcagccttttcccctgtgaagtgctctttggatgaaagggtaactgtcctttggcaatgacaagccaataccccgagacatgtggaattcaccagagtccaagtccaggctttggtagcttcattttaagagtaacagaaaatgtcttttttgagggggagggagaagctgggtaacttttgtgaacaaatcttctctctttggtgctgttgcagggtagagaaggaagtgggtgggatggagatggctcacgaagggatgatctggagtctggcttggcatcctcttgggcatattctctgctcaggctcaaatgaccatactaggtaagctttatattgaaatagcaaagctttatatggagcaacaggaaataaatactgtatgtgtttatttttattggt

SEQ ID NO: 96109 - DNA, 1062 bp, Homo sapiens
taatcccaaatttgattgattaatgcatacatagctatacataatatttatttttaggtgacaatggcccatagagttttaaaattccctaccttttcaggggcaaatagttaattaaaatttcttaaggcaaacaaggggcaagggggactgaagtatttttatatttcaattattccatcttcagttatttttctttttaaaagacaaagcaacagcaaaacctctcttcccccttcccacccagttacaaaatatgttcattgtagaaaatataaaaatatagaataaacatggggagagagaatcaataccaccttccagcttaatattatttctgttaacaattcggtgtctagacttcttggcttttttctttaatttagataagctcacacagtcactcatgttattgactgtttgccttttacagtgatggtatacactggtgtatttttttaaaataaattatgaacattttaatcatgccattaaatcatctatagggtcatttataataggtgcatcacattcctttaagtacatatgccacactgcaatttattttgtaatatatttgtgttctattaaaaacaaattgtgtcagtaaatgtccttgcagataaatccctttgcacatccattatttcctaatgataaaatctaagacatgagattattgggttgtaggagatgtactttctcatacttttgatacatacagccaaactgttctccagattgttgtcacctccctacatgcttgccagtacggggtattgtgttgggataaacctatgtccatttgagacccaaattgtctccccttatgaacgggtacaaatcactgtcggtgcctctaccccgtctcttctttcccacttcacttccctttgtctgtattcttctgtatccttccttgtttccacctcagaacttcacagaagctggatttgatccagggtagagaaggaagctctgaatgttcttcctcactcctcatctgcttcttagtttatttgttatgtaaaatatccttggggctttgtacagcatccagtt

SEQ ID NO: 96110 - DNA, 1080 bp, Homo sapiens
gcaggtcttctcaagctctggtatcattgaaagataattttttgttgttgctgttcattgtacaactgagataaataaaaataagattgtggaaatttaaagggacactttctttagggccagttattgtccaatagggtttttttgttttttgttttttgttttgtgacgacggaagtattctatatctctcctgtctgatattcttagccactagtcacgtgtgactattaagcccttgaaatgtcactgatatgactgagaaactaaaattttaaccctaaaacaaatttaaacagccgtatatggctaataggtgccatatgggacagtgcaggttaaattcttaagtatttgtgttcagagggaattccacacagatttataatggtctttttctttatatagtgatctacaactggaatgtcttaattttagaattttgcaattgtacctccaagtccaagtcgtactgctgaatctttcatgtgcccatatcactggcttctttaagctctgccatcctactgaggattctgcatgtccaccacagtctacctatagactcctgtcagtcccctgcagggccacactttgtgcctgtagtggactttgtagtgtctggagcagatttggtgctgttcggaattttatcttccttttttttgttgtcaggggcttgattctgagaagtttaattacttgaaaaactgcctggtctttcatcagcaagaaattttcagtactaaaatctttagcctttagggagatgtttttagtactataacgtctagtcaccaggctacaaaaactctcgttacctgggtgaattttccattaagtctgtattcttgcagtattacaaacactacattcttggaattttcacatttggggaatcacaaagagcctggaatgattgtatcatgaaattctgtacctcagaaatgaaatgatcaaatttagtatagaggcattctttaggcttaatgtttgaaattaataaaccatgtgtttggtacttaatcatttttttctatgaaataataatttagataagattaagtttctatgtacggt

SEQ ID NO: 96111 - DNA, 1020 bp, Homo sapiens
tttctagaatctcctttttaacacattaggcatttttttcattaggaaaattatcttgtttgcattctgcactttgctatttcaagtgtggttacatagcatattttaaaagggggagagagttttctgtttttattttgtggagaaaggtctttaaaagtgcattcatgtttttttaaagcttaatttcaatcttgatccagaagacttttattctaagtattaactttcttaaaaagctgttgttctagcactatgtaaccctacaaatactccccagtattcaggtcttgttttgtttggtgaccacatatttgagaggttgagcaccaataacaggagctcaataaacgttggcatcatgcacatttattttgaattaatgagtggaagtggaagagtacataaatgaatatgtgaaagaacgagtagaataagtgaaatcgtttacttcctgtttgctgtacattttaatgctattaatggtcactttctgcaaataattattacaaagtagtaagtcaaacatttctggcatattagacacaggttaatctacaaagcagcatcacctgtctccaggagatgctaattctgtcactggtcatttagctaggactctgaaggaacgtttagctggatagctagctaaggaatgatgcaaactcactgttctcaatgcttaatatctaaaaataactcagtgtgattaatttggaatttcttttggtggagttagtttatggttgtcacattccttcattccgaacaagactctggtcttcagaatcaatatgtttacttattaaatagtcaaaagaattatgtatttatccctaaattattttcttatatagttctgagaggtggaaaggagtatagaagttgtcatatacaagctcttcagttacagttgagaaagtgaaagttgatttgtaattggaacagaagggactatccacttcatctggatgttatatttagtgagatgaagacaggattggatgaggaggaagaaaa

SEQ ID NO: 96112 - DNA, 2427 bp, Homo sapiens
attgttactgaattgtgaatatctgcagaaatgtttactagagaacctgtgactgttgaataacatgtgcccgaacatacacacacacatatgtacacacacacctcagagtactctttcttacagcggactttgctgctgctttctgcatgtgtgggacactggtatctcccgtctcagacaaatggctgatgttctctatgatattggtgttaatatcaaagaattgaatgaatacaacagaattgaggttgaaaaatatttgattgccacattcctttaagcatctttgatgaatactctgcaaagtagcctttaaaaaaatgtaaattttttaaaaagtccacagaggagaatttgctggttagcacaaaacatactgcaaaattgcttctttctggttattataactgaagaatatagaagattgacacacattttatacaccctcaggcagtgttttggaataatattgtaccttttcaaattgttatcaattaactgtttttctccatttcataattctcaagatttttctaaatacagcctttaaatttgactcaaatggaaattgtgcactttcctgtttatacccttccccacgttattgtaaaagagtttaacagcagcctgatatgtaagtttcagcaaaacttatacctgtatatgtttttatttgactcaaaaattagatattttaccatatagtcataagaatttgctcactttgatgccagaagtacttaagaagttacacggcactaattttatgagttgtatgcctaatttcaatttctaacctatttgacagtttcttttaggtcagcctttgttggtcttccatgtaaatacaagttggtacaaatcaatagaaaccattttacctacataggcaaagtaaatgtgtgacttagagactgccagatttatggtgcatctacctttttatccatttgagcttgcttttttatgtttgtgtattggttgctcctgacactatacatttcaaaattttttataacttgaaaaacacttctgtgctaccactcagttctgatcaaatccttacattttgcaacactcatttctgaattttcagtaaagaaatacacattacaaattaaaggttaaaggcccctttacatgcccttccccagtctcctcttcctcccccggaagtgtccattctgctgaattcaggttcatcattgccagacaaatgtagtaagctagtgtttcacatttccaaaatcagccttctggcagacttggaagtactcttgagaaaagaagactcgtgaccaaattctcccacagatttgtaataatgtacatattgaaaggactgaaggctctcagactgggaaagaaacttacccattttaaaattcagcattgctcaacttacctgactgccggaccccttcacccatgattctatgcactgtattgttggaacatacattgtgaaaacactgccctgcctaggcataccccctttccagaattaactttccatttaattctatagtttttcactgatgtaactttctagactggacaacaaagatgactaatagtaatcactccaagttgatgttgactgttgggttgtggtgaaatcattttgcattaaaggaaggtaaaatactaataaattgcatattccttgaccagagcacagattacttatgcttcttaattttttaaaatcttaaatcctctgtccaactggagtatctggctatgggccatgggtactcatataccctttgtcttaaactgatctgttacattttatgttcttgtggctagaagtagcctgagtttgctgttaatgtttaacacattttcttgagtaacagttctgttaatattgtacaagatggtacttgaattctttgtttgccttttttcttcctgtattagaaaatcttggtgctttttataagttttgtataaaagaattttttttaagatttgttcataaaatggtctgatccaggaaaaataaaatgggaacatggacaccatttctgaccttcaaataaaacttattatgtattggttttcagactgttcaccgagctttgggatcctatggactgtctcaagacaggttatttaggggcttggggtaacaggttccttaggatctgatgaggtggaggaggggtgatcaggtggaggaggggtgagggcctgagaaaaatgcacagggcacaaagtttacatccagtttcacagaagccagggaacctcctcctttaagggaatagtcaaaaagcagaccttctgcccttactggttctagccttcactgcactacactttacggttctgggacagggaataatgaacaagaagtcttcactatctacaaagcaagtctagaatgtctgttcaccaaatatctaatacctaatc

SEQ ID NO: 96113 - DNA, 1033 bp, Homo sapiens
ttgagatggagtttcgctcttgttgcccaggctggagtgcaatggcacgatctcagctcactgcaacctctgcctcccaagttcatcctgggttcaagtgtttctcctgcctcagcctctggagtggctgggattacagacacccaccaccacacctggctaattttttgtatttttagtagagacagagtttcattatgttggccaggctgatcttgaactcctgacttcaggtgatccacccgcctcggcctcccaaagtgctgggattacaggtgtgagccaccgtgcccagccggaaagtgttatttttatcaactgcatgtttacttttcaagaatttctagtggttctctaatcttttcatttttcaaggaagcctgttttgtagttggtttgtttttaaggaatataccccttaaaacctttaacatagtaattggggtgtttgtgtggatgtctggtttgatctgttgttcctgtttgttttccctaaagtcatataatctgtatttttctctttcctggtacttgctttttctcaaataacgcagtgacccttggttgtccagagatttgaatggtggtttgtattggttagtataagtagctatcttgcatttttttgcagttaagttcgcttacctacaagggtcctctcctggatggaagatctcactgtggattcgtgtgtctgtgtgtgtgcttgtacatgtgtacacacgtgcatgtttgtgtgtgtttaatgaagtgagtggagaagcacaggccactgccacatttatcaagtaagtgggttgtggtttgtactctgaggtggagtgcttaagtttattccactcttaagtggaactgccatctttctctcctccctcccttctcttttctctttttctcctcctctcccattctctctttgccctccacttctttccattttcagtgtcatccgtggcatttctgcagactttgtgctgctttactcttcagcctcaaatcctgctctagggtttcttcccagactgaaatgtgc

SEQ ID NO: 96114 - DNA, 1057 bp, Homo sapiens
ttacaatatcttgaaaaaatatgaagcccataaagtggtatgtctgtggtatgagctgtttatttggacatttttaatagtcattttaagttggatcaaaatcagatacttcattgttagaaatatttatataaccagcactttggttgcttcacaagtcctcatttaatctgtttttcttcagtctttgattttctttgttgctgtttctgtaaaggaatcatgaaagaaaaaccattgtttaaatacagttaagggtgagaaaccttcactccgccatatttctttgattttgtgttcagtatgttggttgaagatgagaagtacagaccagacactgggaacttcgtggtcccatgtattccaacatcacactggtcccaaagagcacagaggcagtaatgctgctgcagatatctgattaaccagaattctctctgggaaggatcgatagcacagttatgtgatttttatatgcttgactgggttgaacaaataaactctgggtcgtacatttacacaaatgtgttcttcagaatacaacaactatgccactgaaggccgctctcagtatgcgttttaaagaagtgtttccactagttaaaatggatttacattgatccttctatatctggtcctgtgatcaggaagatgataagtacaaaggcaagctgactgcataacaataactgatgtatatggggatctcgcaacctggcttcgttagcagtgccattctctaaccaatcaagccgaagaccaaatgcaacactgagatgcatttttttcatcagtcatgcatggtgaaaggtatattctatgaattgcatggaagtaagaattggagacagtactttttggtaggtttacaatatcttgaaaaaatatgaagtgcaggatgaaggtgtattcacacctacacaatatgccatatggaagcctgagatctgtggtggaagagtactggggaatgtaagggtggaaaggtaaggaaagaattgggtgggattaagagttgtttttcttgagaacttctgccttttacaaaggtaataaa

SEQ ID NO: 96115 - DNA, 1273 bp, Homo sapiens
ctaaattgtgtagatgccagaattaattttcatataatttagacacatagatttgtggtgtattctcttggttaaagtgccttgaaaataaggctttgtattttgaaactaaatctgtttgggcgaaactcactttggtgatctccacaaaattcactggttttgatcatcttctataatcgtatatttacatttttttaaataacatccatttaccagaattgatgctgaatagtaccagtttactgtgtcttttcataggcaatgatgagtgcaagtctatttgtaataagtattttttctataaaaagaagggtaactattgtgtattgttaactttaaaatgtaatgatagaagaatatagtgtaattactgtttacagtggttaagtgacaaagaagaaattattaatgttgttaaacctcctctttagctgctccaaaattctagttacagtggtagtttctgcttggcacaatctccgtatttcctctggggaactttaaacatcactcagctgagagtcagcaagtttggctttgaatccccgctttgccactgggcaagtcaagtctttctcagcttgcctctcctcgtctgtaaaggagagctaatgatacctacctcacagggctgttgtgaggaccacagacatactctgcacagtgcaggatgaagcaaatgtttgttgctaaagtcataaatatcaaggaaagatgctaaaagacaagataggagtaaagaaaataacatattttacttaatttgatttaagaggagattggaattgagtaggaaaggtattaaaagagaggtattaaaggtattaaggaaaggtatttatgggaggagattattggatcaaaaattagtattggaatatgattatcttttcagtagtgatttttaggtttagaagtgtgattgataaagttgtaagccacatttaaatagataacattatattgaaatagaactatgacttctttttaaagctttatttatgtaagtcctcatattttatttccactatcatctcagaaccacaggagtgccagaaggcaatccttcacaccctgcattagagttgttctcttcattgcctttgcttgcttacctttttttttttttttttttaattattttatgttttagagacagagtctcgctctgtctcccaggctggcatgcaatggtatgatcatagttcactgcaaccttgaactccagggctcaagtaattctcctgcctcagcctcctgagtagctggg

SEQ ID NO: 96116 - DNA, 1417 bp, Homo sapiens
gatgtgctgccgccaattgaaatgatccttgattaactcctgcttattctcttgatcaatttggctgtaaaagcttctcctctgctttaacagtttttaatgctttttactttacctgagccatttaaaacattttaccatggtcttgacattaaaagcaaaactgaagaaatcttacaccagcatcatccaaagctgccctccctgtgaattatagttttagagtcattttctaagcctagaacatttagtctattttcatttcactgttagtatttacaagtgtgaatacccttcagttaaagaccactaggagtacacctgtcatagagcaggttggatttattgctcattgcagcaaagaacacagaccgcagggaaccatggggtgtcctagtaacagggtgttataatgtattataggatttgggctttggataattttggggggaaggtctaaggacatgagggcttgctctagatagggtgctgtcggaaaacagaggcaattctatgattgggtatcaacagatcttatagagggggtcaagtagattgaggttaaagctgtaattggtgaagaaatagctgtcactcattcagcaagaaagagaattttgtattttgtgggttgtacagtgacctagttttttctcactttgccatggtcttggagtgactacttttgatattgacgttcagtgagattgtccaacaggagcgtggaatgtttaagctgtacatgtcagaacagtttgtagtaacaccaaggcttagcttgaacatcagattagttctcagaggtcaggggctgctgctttttactttcttgaacatattgaaatccagacagacttgaggtcaggatttagtagcagcgacatgctcggcaggcacaggttggaaccagctgaaatgatgccagcagtatgtttttacaaaacggagcaattggggagaatttggtggcatgttaaccagcattagacaagcaggatacattataggcaaaagcagcctcttcagatagtaccactagttttgccactggcgtatagaattttcccatagaaatagagaatgtcatcatgtatcatcattgaaatcttcatagttgcttttatgctaacgttgagtgctcatgggaacctcaaaatctttaaataaaggttttagattgtaaaagtttttacttttttttttttttcggtagagcagcggtagccctaaaatattgttgatttggaccaaactgaggataaaatgttttcagaataagatttttctcctaaagactatttcacacagaaatatttgttcattttaggttttaaacactgtatgttaaactgttgtttgtattttatttattaggtacagtacataatttcgtatggaaaaaacagcatattccaga

SEQ ID NO: 96117 - DNA, 1041 bp, Homo sapiens
actttttaattgtatatatacagtaaatgcacaagtcttaaatgtacagtataatggattttttgtatttatacacttgcctaactacctctagataagaaatggaataattttaggagtcaaagatttcttcatgcccctttcccaccttagctttttactaggtaggttaggctttgaaagatactttcattaagttatttttctttttctttactgttctttacattttgtgatttttgtggtttttatctcaccttcctctgtgtagagttgtcttaattacctttcgttgatttgagtctatattcttttttaaaaaatagatgcagtcctgaatctagatgcctccatattcttttaaaaatgctgttttattactttttctgatcagtttcttctgctagtctcctgctactaaaaccaattctttggaagtatataaagagacactattgcatatgattacaatcacaaactctagaagctgaatgttagtcacagtttcagctcttagcagccatgtgacactggggcaagttacaatattttgtgtcctcatctgtgaagtgaggtgttgaactcattgatatgtcatttccaaagtgaatttcagagcctgcttccaaatctctggactattttaggataaaagtggttatttcagaacttttctcatttgaatatttttcagccactgttatgacagtagtatatataggcttttatatttataagcaatctataaatatgactacttgtttaaacaaagctgtcatgattttttagtgtttttagatgtaaaaaattcaacagatatgaacttagaattggtctttttgaagtcctttaaaagggctatgcgtggtggctcatgcctgtaatcccagcactttgggaggccaaggcaggtggatcacttgaggtcaggcatttgagaccagcctggccaacatggtgaaaccccgtctctactaaaaatacaaaaattagctgggcgtggtggcacatgcctgtaatcccagcttctcgggaggctga

SEQ ID NO: 96118 - DNA, 1218 bp, Homo sapiens
aggggagtatcagaacaaatactgggtttggtttttttttttcatagtaatttttttcccctttaattacctttttttttttttttggagttggaatcttgctctgttgcccaggctggagtgcagtggcatgatctcagctcattgcaacctctgcctcccgggttcaagcaattctcgtgtctcagcctcctgagtagctgggactacaggcatgcaccacaagacccagctaatttttgtatttttagtggagacagcgtttcaccatgtcagccaggctggtctcgaactcctgacctcaagtgatccgctcgtctcagcctcccaaagtgtagtcattacgggtgtgagccactgtgcctggccacttttttatggtataccagaaaactgtagctcagcaatttctgagaagcacctatgatctctttagttgtaaagagaccagagtgaggatttctgtttgttttgtcacgaatggaaattgtaagtattctaccatattgaaacattagaaaatactgaaggaagtcagcatgaatatagaaacaaggagtaaaagggtgggttttaggaactccttgtcaggaagctcaatattttgtctccaacagacatttttaatgttattaaacaaaagtagtttgtgatgccatgagtcatcaaagattagattagtagttcttaatcccatcaggccagataactgcttttttgaataaataatttgtagtctgtacacttctgaagtgaacttcattgatgactgccacacacaaatttctaaaaaaggcaccaccacaggtacgcacacatgcatgcacgcgcaggcttggagaaagccttactgcttccattgagaaatagtggtctggaataaatcatgctaaaataatcctatttttttaataggattgctggagtggtcaaggacattgtagccagaacaatacaggcaaccttttgagctaatttgtggatcatggtagaggaacatggctttttagctgcatgagtgaaaggtcattcccaaagtaagttttccctggatgtttgttacctgtgagacaagtatgcagagagtgctgtaagattctttacttggccccgtcctatttaacagtttatattaatgtagatggtcttgctttgtaatttatagctgattcaaaacgacaagtagaagttcactagatttcaggatttgagaagata

SEQ ID NO: 96119 - DNA, 7137 bp, Homo sapiens
cctgggaggtggaggttgcagtgagcctagattgtgccactgcactctagcctgggcgacaagatcgaaactctgtttcaaaaaaaaaaaagaaacattgttatgtgagtagaagcaaccagtgtgtagtctaattttttttttaatcagggaatttggttaaaggggtatgatgtgcagctaattttaatatcctcttagcatagcatggaaaacctttttgaaaagaataaaatccgagcatccatatcttataaggtgggtaaatgttctcatttggggattacgctataaggtttgaggaagaatttgcacatagtagaggcacagtcaaaatcaaaaggtattaaggtataaagactgtgggctctgtgtctacagtttggttgtctgtagtattgaccgggttaggatccataccagataacagaaactagaaagaggggaggcttttaatctgataatcaaaactgtgacttacaggtaagcaatgaaaagccaaattgtcatatatatttgtgtaatttaagaaataaccttcattttatatatccttactgtttctataagcacatatgtatttgtatttttcaactttgtcggagtttttggaaaataggattgttgtattgccattttgtatatttacatcttttaaggaaaatgagtgtgtgatccatcatagaaacttgaaaataaaaagtaaaaacaaaaaatttgaatgtttcaaattaaccagcacatatgccacagatttcctttagtatgcaaattgtgacatcaaaatactgatgtaaaaatatttaaagggccttaagtgcaaaaagtaataaaggactttaggtttaatttaaaaagagaaaaggtgcacttaaaagtgcaaaaaaagttattggcatagtcattccctgaaaatatatacatctatgtgtatccattagaattaaaacttttggtgtagtgttaattagtcatggcactattatggttttttttgagagtagatcagcgtaagagttatcactgcttggtactttgaatggaggagagcttacttttttttttttttttaaatatgtttagctgcaggaagagtttgaaagcctcagtgtccttaaatcggtacttattattatcttgtttttttaattaaacactggtaacttttctttctgaatttgtcctctcttacttgtaagcaccatatcctttattcagtctttgagttgttctggtgactgatcaccttatttatgttagtctatcgtatagcctagggaaatgaggtctttgcatattctgttttgaaatggtctttagcatgcatacgtgtgtgtaatttagtgagtaggtgcgtatactcataatgtacttactgtctttaatttagctaataaaccaaaggactagagctttccttgcacagtgttaagttgttttctgacaaagtacttctgataaagctgagctacatttaagtgaaagtcagtatcattatttaatgtcagttattgcatgttttacaaatacctttaatatgtttttcaaaattagtgaagttggaggatgtataacctgtctttttttctcccttagtggactccagaaggaagacgcttggtcactggagcttctagtggggagtttaccctgtggaatggactcactttcaattttgaaacaatattacaggtaatgataatcaccagatggtatcatcatcctgtggtactgtaaagaacttgagatatagtcatttcattggcattgttaaacttagaattgggacgaattattacctcgagtcagttatatgctcttgtaagcctttagtcatatattctttgaagcagcaccttactaattaatgttttctgctttcacaggctcacgacagcccagtgagggccatgacgtggtcacataatgacatgtggatgttgacagcagaccacggaggatatgtgaaatattggcagtcgaacatgaacaacgtcaagatgttccaggcacataaggaggcgattagagaggccaggtttatacacaatataccattttctgtagtccctattgtcatggttaaattattctctaagtgtattctgggtgcagagatgcatgggctctgtcagtttctgggaaactttctgcaccctataaacacaatatttttctttgttttcacacattcaccattttgctggcacctttctgaagtagtgttgtcccggtatcagcctttgcaatatgttagagatgtactgtctgccgcattttgcactggttttctcttttcatttatgattaataatgtgtatacgttattcctttttattatctactgtgtaagacaagaatatttcattccaaataaagaattcagtctttaattatgcaactgaataaaatctaaagcctacagaaaacaacttcagaattcacacaaagtggaaaaaggcttaagtgaagacctggttggcttggttatgccacgacttccaaaggaaagtataggactaaaaccctcacagataactggatgtggcaaacattaacggagtaatgaatgggttcttcaagctttgcagctgtaagcagatcattgtcaagaagactctaggacttttcttctgattcactgttgataacatcacttatgcaaatgtatacaataagtggagtttaaaatattttcagtgagttgtatatttttacacatcagtgaggtatgtatagtaaaactgggggaaaaagttccaaatacaagcctgaagaattgctgcagcctcagaataaagctaagcagcattctttaaggttgtgccacccatgtgtgggaggaggttgacatctttatggaaacatcatccactgtagtcatttgttcatactttcagaatcttaacagaaattgttggatgaacatgcttctgctttgtagattttgccttagtgtcatgcccatacattgagtttacacagctggtccttcataggattccaaagttcaagggagtttttagagttagttgagaaacttgatgatctttcactgctgggaaaaactgactccttcttgcagcagattctttggctttacacacaagtctgaatgtccttattttaaagttttcctcaaaggtgcaacattcatggaatagcttgccaggaagatgtgaaacttttctacagacctttgaaatggatgagaaacattgtatgtagggatgtttagcaatcagtcttttaatagacagcccacattgtttcagcttatttcatgaagtgtctgaggcagaagctgatgataattttgggagcagtattcgtgtgtgatttaaaagactgcaggaatactgcaaaaatagaatccatttattttcaccacttaaggcagcttcatgtgatttcctcgtatcatagaaaatagagaaggaacatggatagcattagcactaataatacacacttgaagttctcagaatactgatgattgaaaactcaaacaactgctctgttgaagtcttcttttgatgagatgcctatgttagctgacgacattcactttaagggcttcttcactggattcttccctctcctgtttataatgcagcacagtgtttttatttttccctgtctgagaagcacagattatctgttaaatgctgacttctttcccctgctgtgtgtcttcatgtaacagtttctcacccacggataataaatttgctacatgctctgatgacggcactgttagaatctgggactttcttcgttgccatgaggaaagaattctccgaggtacgtgtactaacagtactgattggaatatttaaatagggaagacatttgtggttaaatcatcacaaaaccacaatactggcttacacctccattcaattttttttacatatacacaccgtctcaggctcttcaaaaaaacccagcactttctctgactcacagtcattttgtaggtttttactaccagtgttatctttgaatttttcagctgtaaattaaatacaagagtgcctcccccttacttgcttatctgtatgcatcttttagggctgtattccttttccttccttgtagccagggtacttgttcccaacatattgacactgtggtttgatttagatagccgtcattctcctggcagtccttttacaatatgaattaaccgacaagatagaggtatcaaagctacacttcttagtgttactatttttgaaagcagttggtttttcagtacaccacatttgtactacatggccggcttgttactaagttcgggtggcattgctgcttgtttacttttgttgattttataattaataaacctctatgaaattacttcattccgtaactgaagtccatattctcacttcgattattttagattatgcattagaatattggactttataaagtgggactgttgaaatattaacagtacatcaatgtgagttacgtgaattcagtggtggtagagttaaggaatttgttgtatatatgcaatacaaacatcacaacaaagacacttctaactggatcctgttagtttattaagtaggaaggtagttttctccagtgcttaatttgaaccttttgaatgtactgtttaacaaacagtaccttctactccgtacccttgattccaggatgccacaaaagtaccatctttctctgacacataaatacagggtgggaggatgggtgctacgggtgttgggtgtcaaattattattcagagcttttcccttatgttcaagagtcagcagagatcgttgtcttggttgaatcgttaagtttctcacagtttttcagagctttagctgtagcatataatgttgatgttttgtagacaggaaagactcttgagatactttaatgtgtatttcagcccatatttcaagccagtatcttccatcacatttgcttcaacactcctgacttggcacattttgtttgggtttatccacagtactgtatgactgtagcttttgtaagaatagggaacctgtcacattgagggagtttactcactataaaggtcataatattgtataacttcagaacgagacagagactttgagatgatcatgtctgagttattttatggatgagctccatgatgccaagggtggaagtgacatgttcaaagcaaaataggttcagagccaggactagaatcttatcatttgactcccagcctaatgccacacttatgttgaatctttcctcactattagtcttggctgttaaacagaaataagtgaaacattttctaagtttttaaaatcctggaaacttagagaaaatgaaataattttatttattaaaagtaattctagagtagctgggcgcggtggctcacgcctgtaatcccagcactttgggaggccgaggtgggcggatcacgaggtcaggagatcaagaccatcctggctaacaccatgaaactctgtctctactgaaaatacaaaaaattagctgggtgtcgtggtgggcgcctgtagtcccagctactcgggaggctgaggcaggagactggtgtgaatccaggtggcggagcttgcagtgagcggagtttgcaccactgcacttcagcctgggcaacagagtgagactctgtctcaaaaaaaaaagtaattctagagtattaaaacaactaattttacagtggactgtattaactgaagtctgatctaaaaccactttgctgcttggattttaaaaagaaggaaatctatgtgataacgtttttgagtcccatgatccagtgaagcattattcaattttggtaatgaatgtgtttcattaagaactttcctttgaaatttagagtgtgcaggggatattaactagcagttaagtattttcagataagtccaggtaaatttagatgaagttaagtagatgctgaatcataaatgagagttgagatttttgtatgaggtctctttattttaggtttttactatggaaatttcaaacatgtacaaaggtataatgagccttcaggtacttttagggtttacattctagctttttaatatcttttgattctttttaaaaaaattctacttactttacagtaacaatatttttagtaccccaagacacttcagtatatgagacatgaatatattgaattaagttgattataccacccaagcagtaattctgatagcaggtctgctgtaggagaagagttattagattccagttgtctgttttctgtcatttctcacttttccaaattttatgcatctaagagcttcccatcctccccttagtgagttgtggggtcagagggttggtggattggtagtggtttcaagggatgatgagagttctttaaataaaatgtgaagtgaacttacttagctctactcagagaaaactggatcacaaagtcaaacaaatagggacaggatagtctaacctctaaaatatcagttgccctttattaaggatgatgttcatgtaacacgcatagactctatggcatcaggtagataagcatactcctttgcattgttagtgttgtgtatcaagtcattacttttggagttaagtattcagaaaatccaaaataattctatttaaggggagtttgtgatcatacagtcaaactcttatcaaatacttttctacaacattcctaaaaactagccttctactcacagacattctcagtgatgtaatattccttacttcacatgaattccttaaatagctctaattttcaggaaattctttctttatatcagaaacctgcttccttacaacttgtcttgcctacgggaataccaaaaattaagtctgcacttaattcacatggcaggccgttaagtatgaagagacagctgttgggtcttcttgactgagtttttcagctttaagcatacagtgttcctgtacataacagaagtcatgatactatacttcttaatttttaattttttttaaaaaaatagagtcaggctctccctgtgttgcccaggctggtctcaaactcctgggctcaagggatcctcctgcctcggcctcccaaagtgctaggattatactgtgagccaccacactggacttgtacttttgaatgcagaatttatagttgct

SEQ ID NO: 96120 - DNA, 1441 bp, Homo sapiens
atttggggcttaaagcagtgtccaaaaagaagttgagtaatctaaagtcttgtaattggaaagttaattttaaatttcttaaaacttaaatttgaacttaattagctttatgtggacatgtttaaatatgttgactttaagtactaactgggttagtacttgtactaacttgtactgggttagtactggtacttgattttcttgtttgtttagtaataatgggtatttaactttcctgtatctcacttttcttcacttaattaatagactaattgtaatactttataatagtttttatgggaaagttctatatggtcccaaatttgtctttaaatgttgaaataattaccttgccgtgtttctggtttctgccttgtatgtaatcaggagctctaagaacccaattttccttttttgtagctggtcccacctataggaatgttgaataatcctatgaatgcagtaacaacaaaatttgttcggacatcaacaaataaagtaaagtgtcctgtatttgttgttagggtaagtaatctgttggatattttgggggaaaattaatcctgcgttatatagcaaatgtatttgacagggcaaagaaaattaaacattattttaaaagtatatctgggcttataattggtttattgctagtaattttattttggaatatccagttgtttatctactttatcaccattgagtgagataccacttttggattgtttttcttcatgtggcaatttctgtagaattctctctgaatagatggatacatgttgtagcaggtctcagagttgcgtttgagtaggaatgcttttattaactatttagaaagcagcatcccaaggtaaatgaaaaatacttaggagttaacagacaggaaaacatctgagagctgaagaactgtggtgtaccgtaatttttagctctatgaaggtacctagtaggcacttaatacatttaaactgaaattttattttatttttttattttttttagacagagtctcactcggtcacccaggctggagtgcagtggcgtgatctcggctcactgcaagctccgccccccgggttcacgccattctcctgcctcagcctccctagtagctgggactacaggcgcctgccaccatgcccggctacttttttttgtatttttagtagagacggggtttcaccgtgttagccaggatagtctcaatctcttgacctcgtgatctgcccacctcagcctcccaaagtgctgggattacaggcatgagccaccgtgcccggccttaaactgaaactaattttaaaactgaaactaaatttaaaaaatataatttttagttataaccccgattttcatagatgataatgtaatcattttcttctttgtgtttcgattattccatttcctagctaatgcacttgttggttaacagtcttaagtt

SEQ ID NO: 96121 - DNA, 1838 bp, Homo sapiens
taaagtaacatgctgtgcaggtttgtaacctaagagcattaggctgtaccgtgtagcctacgtgtgtagtaggctgtatataccatctaggtttgtgtaagtacaactctgtgaagtttgtacagtgatgaaattgcctaaggatgcatctctgagaacatacgcccgttgttaagtgactcatgactgtagttcattgtgtaagtggaaatgatgcacgttagataagggaaaagaaatgtaaaaagtgttcatttaaaaatgttttcaggcagtgttgcagtgctgatatttgtagtgaaagtactttttccttatcctagtatcctagaaggaaaacatcaccatggctacagaaattggttctcctcctcgttttttccatatgccaaggttccagcaccaggcacctcgacagctgttttataagcgacctgattttgcacaacagcaagcaatgcaacagcttacttttgatggaaaacgaatgagaaaagctgtgaaccgaaaaaccatagactacaatccatctgtaattaagtatttggaggtaagcctgatttatgtgcttcagatgaccaaactttggttatttatttatttatttatttatttatttatttatttatttattttgagatggagtttctttcttgttgcccaggccagagtgcagtggtgtggttttggctcactgcaacctctgcctcccgggttcaagtgattctcctgcctcagcttcccaagtagctgggattataggcacctgctaccatgcccggctaatttttgtagttttagtagagacgtaatttcaaccatgttggccaggctggtctcaaactcctaacctcaggtgatccacctgcctcagtctcccaaagtgctgggattacaggcatgagccactgcgcccggcctggttatttaaaagaagatgattttctagatgtagtgtagtaagtatgtatacctgtgttagttgaattagtgggacacggtggaatttcaaattggctaatttaggaagaacctcaaaccactaatactttataaaattctgtgcctgtatcatcttctaaaaaattattaaagttagactccattttagaaataggatttgctctaaaagttcacaaattagaagggagtactttaatcgctaggccagtcttaaaacacttgttaaacctgcagtgtatatgaaatcataaaagactaccaacataggaatatttttgtgagacactggcttggagaacatggattctcccacttccaagccctggtggtaggtatttcttagagtcaggaaaagggctttacgttcttgaggattgaacgcctactgcagtcctacagggtaaaagcaacttagatagtaagtaaaggcaaggcaggggtctacctgcagtttcccgttagagttctttatttacttgtgttaatgtaggaattagccttattactaatattacctattaggttcattgggtttaggtctggcctcctatgaaaatttgtctgtttttcattaccttagatctgtggttaaagacctatttgcatattgggcctagttaatatgttgcaggcatacaggagaaagagattcagagataaagacagattttgatttttctgggaatttcaattgggaaagtaggctaggagagagtttgagaggaattaagaccaagggcaagatatgaggaattgttttgtgctgagggctttgaaggaattggggatgtctttctaccctctctgctgtttccttttcttaaggtagcatcagggagactgtgttggagtcgacagtatcttggatgagtggg

SEQ ID NO: 96122 - DNA, 1007 bp, Homo sapiens
cacacatgtgtagtcccacatacttgggaggctgagacaggagaatcacttgagctgcagtgagctgtggtagtgccactgtattccatcctgagcaacacagcaagaccctgtctcaaaaaagcagaattataacgttggtatagacttgtgcatacaaacattgacacactaagtctgagtgttccattctgttcaatagtatagtcaccacattgttgaaagatacaaatttaatgcaaaataatatttttgaggcatggaactcattttacaggttgagaaaataatggagaaattgactggccttcctggttttcttgagcagttgaaagcctaaggctaaggatgcgatgcaaacttttgtgtactcaggatctttatatatgctaaaaatagagagggggccaggcaccacaaagtctgaaaactactgttctgcgaaattaggagtgatatttagtgaatcagaattgtgcgctgtacctgaggcagtgtatgcatgtaaagtaggctcttgataaaactgtgctgattgcttgaaacattgaaggtttatgtataggagaaaggcatgatgaattcagtgtttcacacagattcttgtccttagcaatttggttgtattgttagtgtatactgaattcaacaataggcaaattatttgtcttttctctacctcagttcctctctcttgcaccctcctttcccaaactctttgtctctcctccctctccaccctggatgtaagatgagtatgttttggggactaagtactttaaattgtgttgttctgttagcatacctcaagtcaatactgcagtgagtacaaatcacattaattacctttataaaggacaaagctctgctttctctgtgtttggtcataaatctagatctttggagtataatcccaagtaaagcgtagaggatagttgtaatgacttgtttgaggattggttctttctgtcgtggtcaataacttttcagcctcacatgtcaagttt

SEQ ID NO: 96123 - DNA, 1045 bp, Homo sapiens
tgagacaagagtttcgctctgtcgcccaggctggagtgcagtggcgcgatctttggctcgctgcaagctccgcctcccgggttcacgccattctcctgcctgagcctcccgagtagctgggactataggcgcccgccaccgcgtccggctaattttttgtatttttagtagagacgggatttcaccgtgttagctaggatggtctcgatctcctgacctcgtgatccgcccatctcggcctcccaaagtgctgggattacaggcgtgagccaccgcacctggccaatttttgtattttttagtagaggcggggtttcaccatgttggccaggctggtctcaaactcctgacctcaaatgatccacctgtctgggcctcccaaagtgctgggattacaggcatgagccaccgcgctctgctgaaaatgatttttctttggtaacatttatctccccatttcaaaccatttacattagtcctagagactgaagctcttcagtgtattggaaaatctgagcagtgctactctcatctgtctggcccttaaacattttactaattttctggtagtgactgactttctaaagttgtattgtatcttgtactcatgatttgtgtgcttataaattcccagagctaggtagtattggaaagggcatgtatgggtttcagcagcaaatggacctaggtttgaatgccaggctcaccattaactaccttttttatattgggtcagttaattaaactctctaagcttcagtttctttgtatataagaatgttaactataaaacctaaaggtaaaaagtgcctcatatatagtaggcattctttaaatgttaacattttttttctttctgtgatgaatttaattggtgacatcattttcagttttaaacattaactcaaatatctttgttgaaatttactgacaatctcattcctctgataagttaatcactcctttctctgctattaaagcattttgtatatatctttaatgtattttgactataccttctccactacttgtgaatactttggtt

SEQ ID NO: 96124 - DNA, 1500 bp, Homo sapiens
ggcgacgagaagacgtaagtcaggccacagttaagacgtgaagtttggagggaaatgcattttaactgaggtttggggcgggagtggaaagaagtgggccgagttgaagtagttggttgaaagggtcaagggaagttaacgtgaaatctgcaaaacagctgaagacttagccgtgatgttatcgtggcttgaaatcggtgcttattataaggatgaggctacagcttgacaggcaaagccctgcttttttggaatagttgtatttctatttggtttgtgctagatccctgtttctgattttaagttgtcttctggcaactaagtagtgaggatcttagcatgccttcttaaaagaaatgacaatgaatgtttgtacttggttgtaacccttgggattagtggccccttccggagtaaggaggaggcggcggcggcaggtcggtagggaattccgtaattggatctatttaaatcaaatcagaaaaatacgggctacttgtagaaagcctgtcaagaatgttttaaagtagtttctacacacatgatcttaagttgactgttcaggaactttggaagacattagaatatgaacaaaaagcctgcactgaaaggaacaactctggggagcgtagactttacttttttagtacactctggagagctaatgcatgctatatatacatatatatgtgtatatatgtgtgtgtgtatgtatatatagcctgtgaatatggtgcagtggtaaacctacttaattcaaaccttttagtgacagttatgctagttgtacctcttgtggcatttttcatttcctcgccttaattgcattttacccattttttattactgtaagatacttttgctttttttgtctccttgaccgggagaagataaaatattgtatagatttgagtttttgctgagacttgaagttccatatttagactatcttcttgaaacttggggagaaattttaacttgtctttcctgtactcctaggaagaattttggtagaaagttggcttatggccgggcgcggtggctcacgcctgtaatcccagcactttgggacgccagggtgggcggatcacctgaggtcaggagttcgagaccagcctgaccaacatggcggaaccccgtctctactaaaaatacaaaaattagctgggtgtggtggtgggcgcctgtaatcccagctactcgggaggctgaggcaagagaatcacttgaaccccggaggcagaggttgcagtgagccaagatcgcgccattgcactctagcctgggcaacagagcgagactccgtctcaaaaaaaaaaaaaaaaaaaaaaaaaggaatttggcttacatatattacaatggtttagacaaaaataaatgtttatctgtgaagctgatggcttaacttggataattttctttggttggtgaaaaatactaaacagattttgccatcacggttttatattgacgtaaggctttaattatatttttactaag

SEQ ID NO: 96125 - DNA, 1080 bp, Homo sapiens
gggtgacagattgagactctgtctcaaaaaaaaaaataaaagaacgaaatcatatcttttgcagcaacatggatggagctggaggccattcacttaagcaattaacacaggaacaaaagaccaagcacctcacattcttataagtgggagttaaaccttgagtacatatggacagaagggaacaacagacactgaggcctagttgagggggtgggtggtgcagattgaaaaactatgtatcagtactatgcttatcacttggatgacaaaatagtctgttcgccaaaccttcacaacacccattttccctgtagtacagacctgcacatgcactctgaacctaaaataaaagttcaaaaaaaagcagatgtggagtaggaaacccctcgatttctgcaggggcagagaaatgttcaaatgcacagtgaacatttagaagcaaacttttgaaggagtattttcagctgccatttatgcttcttacaaatagagtttgaaacagctgagacacttctaaattcagaagttcatatgcttctggaacatcgaaagcagcagaatgagagtgcagaggacgaacaggagctctcagaagtcttcatgaaaacattaaactacacagcccgtttcagtcgtttcaaaaacagagagaccattgccagtgttcgtaggtgagtgctaaaagaaagtttttattaatccaaaccattggacaactgcatgtagaatgctgtcccctccccctttcccaggtgtcacttgtgaatttaagtaaaataatgttaggctgggcatggtggctcacacccagcactttggaaggttgaggcagcagatcacttgaggccaggtgttcaagaccagcctggtcgatatagcaaaaacccgtctctgctaaaaatgcaaaaaattagctggtggtacacaccattaatcctagctgctcaggaggccgaggcgggagaatcgcttgaatctgtaggccaaggttgcagtgagccgagattgcgcaactgcactccaacctgggcaacttagaagaccagaatttcagccaggtgtggtggcttacacctgtaa

SEQ ID NO: 96126 - DNA, 1044 bp, Homo sapiens
ttcccttggcaatgtaaatgaagatggaggggtcgtttcgtgatttcctgctgctgagaataaatgtcttgttaaaaacgtggcaacggttactcttaggtgccatggatcgatgtcagggtggtcagctctggactaagccacccacctccaatttgtacaacagtattgatacatagggctacactcattactgttcaagtgttctatgttaagagttgtgtttaatttctaaagattaaaaaaagcaaaaaaattggtgctaaaccttcacccctgagcacgctcagtgagactggtcatgcaagcatttacagtgccatgctcctcaagccgattttttcttgtagaaatgttgccctatttgtcttctccaatgtatggtatgttattttattttattattttattttattttattttattttatcgagggggggtacgatacctgccatttaagaaaatgaatagaaaattttaaaacccgagaaatggggaaaaaaaaatcagtgcacaagaattgggctggttaggcccagcaccacactgaagtgggctcagtggtttttggagtgaagaagccttactccctgcacattccctcatgctcccacacaagtccagcaatggaaatgcttgggttcctcttgctttgtcaggggactcaggagtcgaccaagggaaaccatttggccccgtgaggaatgggcattgtcagtatccgtcctgaacggggcctagtcaggaagcggtctagaagtgtacggtcacggtcgcctcatgaaagtgtgtagcaggtggctctcaggaaaaataccaagtctggatcatccatgtggcagctttgcatagggagaggatagctccgaactggaactgaactgccttctctgcacgcttgaccaaagcagtgatgagggcggccagtacctgcggtgtgcgtggtaggtttaaagaaaagggaatgttttctgctgagtgtttcctttgtccttgggctgctcgagctggacagtaggtaaccactgttttcaaggaccagcc

SEQ ID NO: 96127 - DNA, 1081 bp, Homo sapiens
gcagcctccccagatgaagtaggtgtattcccctggcagtctgggcaacggagaccaagaaacatttttaggttgttttaaattcctttttttaaacttccagtttattgcgtaccaagagttgattacaacctccatgcttcataagcggacgccacgttagggttggacgtgggcaccacgagtcctttgaggctcctggacagagacccacatcaagatcggaagccctttgggtggcgttgcagatctcattgctcagtaggccgtgaagattttcatcctcatcccactctcagttggattttctggcactcttcctgcattgagtctcctgattactgaacagagctccgtcatgtagcctgctgaggaatggaatggaatggagatgcccacaggaggtcctgatgtcatcactgcacgcaggtgtgagaggagagacctcttctgcaccgcctggctacctcactcctctgctggtagcagtgcctatagctggacctaagttctcagaagcgtagatgtgcaaacaagcgattgagttgggctttaggaggacacatcataggagagaatccagggtctgtaagctggttttcttttcaggtgacatcctgaggggcctgtaagcaggggagctcctttttctagtttgcctgtagaggtgggaagactgttggtgtttctgtcctttacaggacattaggaaacagttgtgtaattacacaaggtggacctttatcttgcctgacatgctgggaatcttcaccccaccagggcaaatttccaaatagctcattttattctaggtctttcaaactttcatgtgacatatttccctttcccattgttgctgatttccaaatcgctgtcagcaattttttcctctctccttgcctattcttcactcatttggtggcaaagttcatagaactaggggacttggaagatgctttgaaaatattgttacaaaggcactgctaaaatgattcacagggagagtggccagttggaagaaggatcctaaggatgtgacactggttttcaacaacatgcttagagaactcatgaagtggat

SEQ ID NO: 96128 - DNA, 1082 bp, Homo sapiens
agctgcttggtgcctgcctccatccatggtagtcatctggaaattttatggaaaataaaaattctcttttaggaaaaggttaggggtttcttctcctggtctgtgacctggaggttgagtgggagaaagaatttgacagctcttagctggtcaatgcagactctctatctttgatgttttttcctctccttttaactaaccagtcaaattaatgcttaacttctcattttggttagggttctgcagcattccagaccttgagcactgaatcaggatgggaaaaagacgttgtgttcctccactcgagcccaagttggcagcaggctgttgtggggtcaagaagcccaaattatctggaagtggaacgcacagtcacgggaatcagtccacaactgtccccggctctagttcaggacctcttcaaaaccaccagcatgtggacagcagcagtggacgggagaatgtgtcagacttaactctgggacctggaaactctcccatcacacgaatgaatcccgcatcgggagcgctgagccctcttccccggcctaatggaactgccaacaccactaagaatctggtggtgactgcagagatgtgctgctactgcttcgacgtactctactgtcacctctatggcttcccacagccacgacttcctagattcaccaatgacccctagtgagtaaatcatgtgctgggggcactgaggaaggcatggtgacatctttctggggtgattctcttgagagggtctgctacttggaagtctttattatcatttgaggaaagggtaatgggaagagaatgataagaaatgtccagagaatatttaaaacattcagtggattcagtaatggaagggagcagttcacatttggaggaggctgtaggcttgttgttaaagtaatgttctggaaatcaagtgagttcattcttggctcttctgttggttcacatggcagtgggtatggcatttaacctctcaagtggggaagtcacgccataccattggggacacccatagtgttgaagtccaggtgagttggaagtctgagggccaggctggagactaggagctc

SEQ ID NO: 96129 - DNA, 1140 bp, Homo sapiens
aggctcggctcccgctcctggtccttgtctgcactccctccaggaagcaggctcgctcgctgtaaagtttggtggtctccggcgccgcctggtggcccccacccaccgtcccgccgccccgccgccccctcccccgcccggcgtctggattccacccccgcggctcggcccaagctgctctacccgtcgctccatcgtctccccaactccccagcgccccggaccctctttcctcataccctcgtttctcacctttcaccctgtccctcggcccgcttttcccctccccgctctgtcctgtcgttttcttaacactcttcacacgcgcactttctcctcctcctcttctctttttcgcacccctactcttgggccctccttccttaacctccgctggccccccattccatgatccgtccacctgacacgctgggtttcatgcctctctttcccaggctgtgggttgtgcccttcactccttgccctcctacattccctgtcctgatctgaactcctctccttgccatgctccctcacccttatccctctgggccttatcctctttcactgccctctcctaggatagagtgggtggggcctctcccacccacaggagatgtaaacagtctcctgtttacttacatctttgggagtagctcaattctctagtagtggggagagttggtgaagagatcaggaagagatttcttcgagactaaggatggatgacccttagcaacagtgaccgtctcctcccggcatagcaagatggcctgccctcaggtccctgcctctggcgtgctgtccagtaattcttcagttctgtctttgcagaggattgggaaatttatttgtgttctgaaaccggcggagagcttttaaatggtctcttctggcctgagagcaacttttgctctgcatctgtggtggggaagttttaatgtgcgtctcatgctcgagttcaataaataaaacctttgattctcagtgtcctcccttcttgctgatgacgctaaggatgagatgattcagggcatgggacttcacggctgcctcagatttagagtttgcaaggttttgaaataaggagagcctgttctctagctatttgctgtgccccccacccccccgaaattgctc

SEQ ID NO: 96130 - DNA, 1694 bp, Homo sapiens
tacaaaggtgattgaaggtgggttcatttgcctggggttgacatagaaaaatatttccgagcttatgataccctcccttttgtgtgttgcagacgaatctagaacatgatgtctatgaaagacttactaacctgcaggaagggattatcccaaagaaaaaagcagcaacagatgatgatctccaccgaataaacgaactgatacaggtttgagtgcgccccttcccttctgatcatctactttatgaagttgctttctgtaaagccctacttctcccgtttccccccgtctccctcatatcttcagtaaaaacatacgtgcttcagcctgcactcctgagaaacaaaaagacattttctctgttgtggaagcctcaacatggcctctgcccaaaggcaagcagttttttaaaagctgtactatcctcatggtcactgattgatgatgcaatgtcttctgtttcagggaaatatgcagaggtgtaaacttgtgatggatcaaatcagtgaagccagagactccatgcttaaggttttagatcataaagaccgtgtcctgaagctgcttaacaagaacgggactgtcaaaaaagtgtccaaattgaagcgaaaggaaaaagtctagacccagaacaatcaggagattggaagcaaatttatgaagaatgatggtgggggtggggggagggttttggttttttccaaagtggaacattgaaataaaggaagtgttccttagttcccgtgtgaaagcagaggaacccatgacatccaagggcgtgaaaggatcagagctgactggacatagtgagctgccttcttgcgttcgggtgcacccctgttaaacctgatctgtgtcataagtgactccggatgcatcagtgtccaccagttggaagcaatgacaaggatggctggctggtgtttttcagccttccggtttatagactgtatttatctagtggattcctgcaggccccatactgagcctggactgaaagtatccactcggaccatctgttatctctctacactgaaaataaaacctcttccacccaccccattcggttcttctgcctgaccttcaaatgcccatgttggccttttacagcagtgccacggcaccaagcgagctgccacatctcacactctaaagggtttgaactattagttcttgtcattttttaaaaaaaaccattcccaagtgaaattgttatatcgtctgtcttgcgtgtgtcagaactgggtttttgtggaggttcagagcaggcaacaccataagttgctctcagatccttgttctgaagtacattcttggttatctgtacttctgtagctggtgtgatgctgttaattgtatgtaccacacatctccagacgttaataaaggactcaaagaggtttttgtacttgcgcagtttgcatctttttgtaaagtgaatcagtgccatactgaccctcactgaaatgtttaccctgcttcagtttttcacacattgttgggagcctactttgtttgttgaagttatgctgttcgcatagagttcctcttagagggtagtctaaatatgctacagtggtgaaacctgttggatcttggctcccttaaatacgagcctgtattgtggcccagtgcggataaaaattggtccgattacaggactattaaggctgcagtactgggggcggagcttt

SEQ ID NO: 96131 - DNA, 1078 bp, Homo sapiens
cttggagtggtctaaggtaagccctcaatgaatgttctgttgttctggtggaacctgagaataacattttaataaacccacatatgattgaaaatgctgatagtactttgcaaatacctgcaaatatttctacggatggactttaagtgccattaatctcaaatataatatatgtacaaagaaatgtgagcctctagataattggtcacatttcccattctcttacataaatcccatttggaaactgctctaagggttttcttgaaggctcaagatgagtctaacttggatggagtactgactaagtaagcagaggtggacatgctaacagttcagtttctgaatggaattacagaggcggctacatttcccagcttttcttcctcacaagtgtactctgaggtttggaaagagggtgagatttccagaggtcaaggagtgttgccttttagtggaagtaggatatgaaccactaaacatctcttcatgccacaagaattccatagaaaaaatatttaggaatttgcctggtagcatttcaagccacactacaagagtctaaatgcttattgggactcgctcttcaaaaactatctcaagaaagataacttgacagctgaaaggtttatgatccctaaatcttctgtttcaatatattcatactaacctcctttacacagtgcctcttgactatgaaactttagtgcagctattttgcctcacctataaaataacataaattatatataaatacatcaagatagactaaaactcacaggaggccaggcgcggtgattcacgcctgtaatcccagcactttgtgaggccgaggcgggcggatcactggaggtcaggagttcaaaatcagcctggccaacatggtaaaaccctgtctctactaaaaacacaaaaaaattagccaggcatgatggcgggtgcctgtaatcccagctactcaggaggctgaggcaggagaatctcttgaacccgggaggcaaaggttgcagtgagccaagatcgcaccaccgctaccacactccatcctgggtgaccgagcaagactctgtctcaaaaaaaa

SEQ ID NO: 96132 - DNA, 1473 bp, Homo sapiens
ccactacgctccagcctgggcaacatagcaagaccctgtctctaaaaaaataaaaataaattggatcccattttttctttccattgtttctgaagcagtttgaatgaaattgggattatttgttttatgtatttttaatgaaattggccagtaaaaccaatttgagttgagtgtagttcatgaggaattgagcagggaagatttgattactgagattttgtgaactggttttcagacttactctcaaaaatcacccatagaatattatctatgtttttacatttattgatataggtatttatagtatccactttttttttttttaattttgcattcttggtgtgtgtcctgtgatgtaagagtttgtttgggacacaatttgagcaaagcttgtttgacagttctgaaggacacaaagaggaactggggtataggatcatttgaaagtaaagaagaaaatgactattttgtttgctatcatctgttctgtctctagaccgtctgttcccgttcagttccaatattttttgccaacttaccccccttctgcatacccactggcggcacatacctacaccccaatcaccagttccgtgtccactatccgacagtatccaggtatgagccctgctttttagatgacttttcacagtttaacttttgccaacaataatgtagaaattgatgaggggttattttttgtatgagattaattatttcagcttctgttttcagattcagataaaatgtgaagcttgaaggtcttaaataatcatctttgtgatctataaaagttgttactcattagtgatatttgcatagtattatgccaccctgaggatactcatgttaacaatttttgttactccttaaaatgacagtagttacaatgaatagagctgcacttttatagggtttccattgttttatgcaaatcttggctatatttttaaaaaatttataaaggtttgtttataataacttttactttaggttccatggtacttgtgcaggtttgttatattgataaattgcatgcacagggatttggtgtaccagttatatgttttttagttgttatgctctcctctcatcatgatgacgtgtgaatagtgttctttttgctaatccaggaaaaacaatccttaaatgtcagagtctgtgtagtcttttactgtggaaccctcaggtcactctgggcatcagaaagccttatttccagccaggtgcagtggctcatgcctgtaatcccagcactttgggaggctgaggcagggcaggcagatcacttgaggtcaggagttcgagaccagcctggccaacatggagaaaccctgtctctactaaaaatacaaaattagccaggcacggtggcacatgcctataatcccagctacttgggaggataaagcaggaaaatcacttgaacttgggaggcggaggctgcagtgagccactattgtgccactgcac

SEQ ID NO: 96133 - DNA, 1313 bp, Homo sapiens
gttgcagtgagccaagatcgcgccactgcgctccagcctgggcaacagagcgagacactgtctcaaaaaaaaaaaaaagaaagaaaaactatatgaacagtttgtttgtttttttttcttttgagacctagtcttgctcaggctggagttcagtggcgcggtctcagctcactgcagtctccaccccccgggttcaagccattctcttgcctcagtcttccgagtagctgggattacagacacccaccaccacccctggctaatttttgtatttttagtagatgggggtttgccatgttggccaggctggtctcgaactcctgacctcaggtgatttacccacctcagccttccagagtgttgggattacaggtgattcccaagtgttgaatctttttgcactcctatgtaatttttttaactgttccctttaatgttgctttcatactcttctccgcccttgactgcattttcagcattgtctctcatgttccacttctaattttgccttcattcttgaaactgctgagcagttgccttctgtttctctctggagctctgcccatatattttgtcttcttctgttgttctctcatcatttccactgagttcttatgtctttgctttgtgtttccatttcatagaagcagttacttcattaagtttttaaattcatggtacagtgttcatctgcgtagtgaaagcacttctggtgtgttttgttccaccttttgtcttttagcatctttaaatagatcctgttttggatcctttctgagtattcatctttgattggattggctttattctggatccccatttgtaattggttcttattgtagcctggactatatactgggtttggataaattttccaaatgactcagtgtcctgtgtttgaattttgttggccattacttcactcctgtcagtgcagatagaccacttaaaatggcaaagcctctcttccctaggtcccccgcacactattccccacagacggggcttatctgtgtctgtgtctgattcctggtttaaccctagatcctttgctttttaacccttggaactggtccaaatgctccttcactgccagcttcatttccactgttacacaaaagattttggttttctctgtcagtttatgctcctcattttggagtattatacttccttactggattttatccccagaattatagccccagaaattctctcttcaggctgggcagggtggctcatgtctgtaatcgtacactttgggaggctgaggcaggaggattgtctgagcctaggaattcaagaccagcctg

SEQ ID NO: 96134 - DNA, 1032 bp, Homo sapiens
attacaggcatgagccaccgcacccagccttagttgcgaacatttattctgaagtcttctgttttaaggtttttttgtgaaattttgcaatcctactctgctgtgtacctgattaattaaatattttacattttttacctggggaaaaaaactaaatctaaaaactttcccttcacattttcaagaaaaatttatatcccaaagaggtgtactgtgttttttccttttgtcatactgctgagtactctcagaagtaccagaacccttagctgagaagccctgaactctgtggtttgggagaatgtaagggacatttcagggttgagctgaagaactggtagggagcacctgttggataccaactgacatttacttagaaacaaaaaagcttaaagaatggatggatgcagtggtatgtaaaggaaatagtgagaatgggaaaaaaaataagcatttggccagaacagggaaaacaagtgtgaaaggtaatatcgcagatgagagtttctaaacgtagatatcgaagtatattatctgtaattatgtgggcctgcagcagttgtggggtcctcatacttctcacatgcctgttagcacagttcattgtacggtatggcatgtaaaagtagctcaagctgaatgtccttagccctttctcttgggatactcactatctaaaaaacaacctgacccacatttggaggcaggtgacttcctagaggcaatggctaagagcaaacatgtaaaaataacgttctatcctctttctttcagggccatcccagtaacctgcatcacatcatgactacaaatgtgcaaatgtctatcatccgcagcaatgctcctgggccccctcttcacattggagcttctcatttacctcgaggtaacgacttgcaagttttgttcaaactctcaaaatgtagtagtagatatacatttggtaaaatacgtaacacagaatgtatctagaatcagcttgttaaagttgcagaacaacagtctgcagaaccgtgaaccaaataaacctct

SEQ ID NO: 96135 - DNA, 1071 bp, Homo sapiens
tgcctcctggaaggtagctatcaaaattttagggtttagtataaagtctaagatgctcagaaacattaagacaattgtccttactgtgccaccgaaaggctaaagggagtaagcttttaacaaaggtttaagggagtaagtcccagagtccaaactggatttcaccgactgactgttgaagctttcgggtctcagctgttggcccaacgaaccttcccaagaccttgaagaccggcagcctacccgccaccctgaaaggcggaagtgaggagagaggcaggactcccccctccccaaccctcggagatgagagggcgaccgcgcgacgctctgggctgctaggtctcgactcggtatccggaagtcctccagcgttcgcctgcaggaagcggaagtaaaagggcggccggcagctgggcaattgctttgcgaggctgggtgttgagtcgagccgcgggaaaggcgcgtgtcggcctctcactggcgcagcctgcactgccgctgccgcctcgccccgccctgccctggcgttgtctctggcactgtggcggactgaccacggcccgggcatgggctgcaagggagacgcgagcggtgcgtgtgccgcgggtgcgctgccggtgacaggtacccaggggtggcgtgaggaggcctcgtggacaaagagagggtttggggcacaaggcgaccctgtgcccctgtcacattgagcttccgcctctaccgtgactcagtttaccctctggtgtcctatcccttcccctattcgcgagcgccccgagttgccctcagtggtcttcttggcaaggtatcgcttccgcgggggtggcggcgggctctgttcagcggtcttgaaccttctttgaagagctttagatccttgtgccaagtgcagaaggaaatgggggaggtatcctaccatggatttagaccaagcttgatcctcagtgagttgagaagcagcactttgcaggaccctgattgcagaacgacgtgctttttaaaatagatttcaatttttcctaaaatgaattcgggttgatgcgtattggttactgttttcttttaaca

SEQ ID NO: 96136 - DNA, 1050 bp, Homo sapiens
tatcagtcactcagcaaatatctgttggactagctagatattaagtgctattatatgtcagaagcatttctgtttcgctaacttatgttattttgtgtctccaagtattattaggattgttattttgtgtctccaagtatgaggttaaaattaccttgtagcaggccaggcatggtggctcatgcctgtaatcccaacactttgggaggctgaggcgggcagatcacgaggtcaggagtttgagaccagcctggccaacattgtgaaaccctgtctctactaaagatacacaaaattagcagggtgtggtggtgcgtgcctgtaatcccagctactggggaggctgaggcaggagaatcgcttgaacctgggaggcagaggttgcatgagccgagattgcaccactgcactccagcctgggcgacagggcgagactgcgtctcaaaaaaaaaaaaaatttccttgtagcaaaacttcttttctttttttccttttaggagtttgctataaaatgggagttctggttgtactcactgttctgtggctgttctcctcagtaaaggccgactcaaaagccattacaacctctcttacaacaaaatggttttccactccattgttgttagaagccaggtaagagaacattttttttcccttcgtgtatttgagtataaatataggctctgacagtgaacattcaggagctttttaaggagtgagattatcatcaaatgcatttatgaagagcctctttcagtgtatactgtaggatgtattgtacaaaggctgttaggacatagcatcattcagtaggacaagggctatgtgggtttatagagctatgtaggaactttggacaaataactgtgttggataagttagtatgttactttccaaaaagcataacaaggaaagagagggttatgtttatttatttatttatttttggagacagggtctcgctctgttgcccaggctggagtgcagtggtgagatcttggctcactgtgacctccgcctcctgggttcaagggattctcatgcctctgc

SEQ ID NO: 96137 - DNA, 1004 bp, Homo sapiens
gtttttgtgatattctgtttaacattctttttttgagatggagtttcgctcttgttgcccaggctggagtgcaatggcgtgatctcggctcaccgcaacctctgcctcccaggttcaagcgattctcttgcctcagcctcctgagtagctgggattacaggcatgcaccaccaagtccggctaattttgtatttttttttttttttttttttagtagcgatggagtttctctatgttggtcaggctggtctggaactccccacctcaggtgatccacccatctcggcctcccaaagtgctgggattacaggtgtgagccaccgcgccaggcctctgtttaacattcttaccctgaattacattttgttactttcacttttatttacactaatttcttgatagttgtacattcttgatcattgtcctagaagattcttacagcataaaactatggacttttgagaaagaatgctaaaattgccagccctaattgctcaatattttcagtttctttgatcactgtgaagtggacagggtatactgttttcttcaccaacttccttatcacagacatctccccctttcatgatatccctggtcatttgccattttgttttatttttattaatttttttccttggcatgtgaagtaagagctacatttgcccttttggtttactatttttaggccccttctcctgtggctatttgtatacagtttcccaaggtaatacgacatgtaggcaactcatagaaatgagctatgcttattagaatccacttagtattcacctccagagctagcagagcccaccattcttccttcttatgtctgtgggagaccctgatgttggatcaaggtactatgtccatctggttaaggatgaagggtcaaaatattttactacactttatggcatgccaccaccacagatcttttgccttccttgcatctatcccttagggactaaaaatattcctgttgtgtatttttagattggacc

SEQ ID NO: 96138 - DNA, 1043 bp, Homo sapiens
attttttgtatttttagtagagatggggtttcaccatgttggccaggctggtctggaactcctgacctcaggtggtccacccacctcagcctcccaaagtgctgggattacaggcgtgagccacggcgcctggcctgtaaaatcataatttatgctcagtggaataagtattatataagaagctaaaaaaacaaaaagcaacaaaaatatgctgtaaaaaaaggcagcatttctttaataatatcttgtattgttattctctcctctgggttgtttcagtggatctagtaagtaatattaggactgttccaagtttagaccttgtaagaccttatgtatgcagtggggtgaaaagaatgtatgtttcaagaagtttccctgtaattgtatgaaaagcatgtatttattcgtgtgtggcctttactgggagagtcttagtctgattgaatcttagttctcaccacactggtgagtgtgtcaccttgcccctctctgcttatcttgtgaatgtgcctttaattaattaatttagtgtttatttgcacatcctgatgtatctgtcttaggacttgttttcttagactataagctatgccaagcttggtgtggtgtctatgtcagttactagaaagcctagaaaaatactactttcaaggaggcattgagaaatttaatatattatgataatgggtattttcagaaacctatttttagagaagctgtgcattaccaggaaatgtttcttatttttcccatatttctgtgtctagctgtggagtagagtgagattgtacaccccagtgttcacaagtaatgggaaagtcttcctttggctaggtaagctgagatccagatctgtagtttgctttaagacagtgaaagatcaccactgcattagtattatggctcagaggagaagataagcaattgacatgaatcattcaattactacatgcatttcctcgtaggggttttagactcttgaatgaagggaaatttagactggccattattttagtaggataaagtcgaaaaaaattaag

SEQ ID NO: 96139 - DNA, 1053 bp, Homo sapiens
cctttattctcagaaatttttctacggttcatattttactgtgggagaactttaggcaaaacatattttttgttctttgtaaggcctttcagaaaataagtaagcagaactagtactagaatcatcagttcctaattcttcttccactactcatagtatttttgtcaatggggtttcataagctttctttatattgagacttcccttttatgtttttattattccaggtttcttaagaaatagctattaagtgaaaaaattcataggctaagttattaataactaataagataggacttgattatcattaaaaatatatatattatacataaaagagtattatatattatagattaaaagtcaaactatggacatttggaaacttcaaaacttatttttactctctttagtaatatagtttatattagaaaattttattaagttgttttatttctgatcttttctcccagtgagtttttagcagaagacagtcaagagaaattttggaattttgtagaagccagtcaaaatattggatcatcagatcatgacggtaaaattgaagcaaatgcttctttgactttggtgtctgggaaaatattaggaaaaaattgtctctttatagtatgtgtggcatggcagttaatggaaaacattgttgtctttaatgactggagttatgatggtggtcaggaagagccaacacaacacaaattattatttttgaagcaatgtatacctttggctataagtggtacctttgtttttttcccctcttgtttttgttctatcgtgatcctttattaaagtgctatgtgaatattttgtggaagtacatttcattttaaatcattcagtattaataaccatctaatctgattcactatttttgttatgaactacacaactgagctattatctgttaagttcattatcattaagttagtatcatccagagtgttttccattatgcctgccagccacccacaacttgagtgttaaggtatcaaatgaatgattatcctgtaaaacctcatttgcagtttttatgat

SEQ ID NO: 96140 - DNA, 1751 bp, Homo sapiens
tactggtttaaaaaaaaagttactatgtacattgttttgtgcctttgcttttcatttatcctggggattttttcacattcgtatttggatttttttttctttaaaataatttggtccaactttttgtttaaatgcttcttttcaaactttacaatttcattagtattctttaatactgtgtaacttcctcatgacactgctcagttttgtttagtttttggagtagttaccatatgctaggcatcatggatataaggataaataggtcatagcctcttcctctggggaccagaagtctaagtggggtatagatagacagtgaataaataatttagtaaatgatatgataagtgaaagaggtaaacaaagacgtgttctgggattgaggaagaggtttaactggtccattgaagcatggggtagggattgtggagactttctggagtaggtaatttcacagctgaattatttctgaggaagtatgtagctgtaagtcatccaggtaagtgggaaaatagcggtccaggggagggaatagttcgaaaggtgagaagagaggaagagcccaactgcattttgtactccagggagttttaagcatttgttgagagttcaagacaatatactggtaaaacttgccttcacatacctttgtaaacacagctttgtgcttcatgaactatcttctttagatatctctagtcatacgcaattactttggttaatgttcttccttgacaggtaccgattattcctactatcatgcaatattggaggctgcatttcagtttctgtcacccctccagcagaatttgtttaaattttgtctgtcccttcgttcttactcagctacaatccaagccttccagcaggtgggtccagtgctcttaaagaacagcattttagagtgtatatcatgatgaatggatggaccccagttgtcctggaattgaattacagagctattatcacttttttgcctgaaattttctaggatttatgatttttaaaaaaaataataagcaaaattgatgttaagtcttcaacccacagatttaaaaaaataaaagaatatctatatagaaaaaagacagcaatattttatttatgcattgcagcctgggagatgtaatcttgttaaaccaatgagccagcatctaattacagcctgtagttctaaaagcagttcacaggaaatacaggaggcaagaaatgtttagcatcaccacagggatgcagtcaggaaaatctagaattcaggaatcgttgtagtaaagtaatctagtttcttcagtacataaattatggaaatttctattgtaattgaaaagaaaaagagggacagaggaacctcaagttaagagagacttaagaagagacagtcaaagatgtcttcaccaacttgatatttgatataaaagcaatgctaattttaaaattattttttattataaaataaaacatggaaaaactcctcacaaaaaatatatagtaatggactattataatgtgaacatccttgtaattttcacccaagtcaagaagcaggacttagtctggcaccatggaaagccctccgtgtactttgtcctgattgtggccacctttcacccctgaaaccaaccaccctgttaatttctgttggaatcacttgcttgttactgtattgtattgcccaaaggtacatcttcacacaataaagtgattttttttttcatttttctttattttgtgacacagtctcgccctgt

SEQ ID NO: 96141 - DNA, 1044 bp, Homo sapiens
tacatttcttcaactgtttatctatagagtgtttaagacatgtcattgtggcaggatgtatgtgtttttctctgttccaaagaactatttttcaagtttttttccccaacgtcatttactaaaagtcttcatgctgtattttgtgatgtattgtaaatttagaaaagggaaaaggacttgggcctgatttagcctgtgctacatgcgttagtgtagcgttagtgtgtgccctagtgttttctgcagatatatcagaaacggctcaactgaatactccagagatctttgaagtgaataaaacctgaaattaaatcatgggcactctctggaatggttgcattcgaagatattcttaattaccatgaaaagagtgggaagtaaatttggattttgttttctgcttctcattgcattagattaatccacttttaattatatttgacattgttgcagatctcagtttccagactgctgctcgaatcttggcttctcctgttgagttggctttggttgtcatgaaggatcttagtcagaattttcctaccaaagccaggtaatgtagaataatgctcttctccttaacatcatacccagtcatcgtcatgttcacttgccaaatgaggtaataacaatatgaaaattcctagaaaattaagattctttttttttttttttttgagatggagtctcactcttgttgccgaggctagagtgcagtggtgcaatctcggcttaccacaacctccgcctcccaggttcaagcgattctcctgcctcagcctcccaagtagctggtactacagacgtgcgtcaccatgcccagctaagtttttgtatttttagtagagacagggtttcactgtgttggccaggctagtcttgaatgcctgacctcaagtgatctgcccgccttggcctcccaaagtgctgagattacaggcgtgagccaccacgcctggcgaaaattaagattctttatgaccaccaccactactattgcagatggtgctctgtgtcttgaagatggcaagaccatgcattgtg

SEQ ID NO: 96142 - DNA, 1538 bp, Homo sapiens
gttttcatttggtgtagtagaaaaagcggcatcatcactttggagtacagttcccttgttatcagcgtaagtccatgagaaaatcacctagcccttcagtaccaggttttttgaacatagagggaggtagctgctatgtgtgtaattcatcttttatgtggttcaagcgtagctcgaaaaaggttggcttcatgtacagtgactcataacatttttctcggcccacagatacttgaataaatgtcatttcatgtgttcttttccctttcttcaacaggttttcatagttgatcctgcacatgagaccacagcagagttgatgaacacagctgagatgttccttagtaatcatataccactaaggtaacactggtattgatttgatgatgtatctaatttagctgaggttttatttgtcatttttaaatgcaagtctggtgctactgagttgtaggataattaatagtgcacatcactaatggcaattttatcttctggtcagtatgaagccagtgtcttttgggactgagaatttgcttctcaatgaatagaagcttaccaccaatgaattatcaataaatagcccatgtaaaaatagtttctggctgcagcttgcttcccaatggaagggaattttcctaggtgagtgtccacatcacaaaacctatttccactttcagcagagatatagagcattgccaataacttgttagcctgtcaaggactaaacatatacacagccttttgtagatgcaaacagtaacagttacttcacttgtgttgccaaacctgcctacagggtactgagtggctggatttccactgtctttttaagaacagttttttttattttttaaaggttttacatataaatgctaagatattttcacctacattctaaataattctggtaattttacatgttggtgaaattttaattcttagaaaatgtgaaaataaagaagaaaataactctttattcaataaatattactgtgtgttccatgattactactgggctaaatgctgtaaacatgtatgccttattctaccttcttggaaaagatcctctgtatactttcaaaccctttagggagatatatgatcaactgctaggttatgtcctactggttagttataagtgcgttaggatttcagggaaacaaaaaaaatcattgagatatttgggaagccaaaggtttttggagaagttggatttcaaataggctttgaggaaaacagagggttctgatagttggaaatgcagagattttgagtttcatgacatttttcatataaagcatgaatacatctggttagatggaagaacctattactggatcacaaccagagctatgttttgatcaaaagagaaatataaggacacagaagaagttgggtcgtggtacacagttggcactaatacaatatttcttgaattgagggacgagaagagggcatgtggtcttctgattgcaaaggcaggtgagaagaaggcacttgaactcctaggcaactgagagattgtgaatagttgg

SEQ ID NO: 96143 - DNA, 1068 bp, Homo sapiens
ggatcacctgaggtcaggagttcgacaccagcctggccaacatggtgaaaccccatctctactaaaaatacaaaaaattagccaggggtagtggcgtataatcgcagctacttgggaggctgaggcaggagaatcgcttgaacctgggagacggaggttgcagtgagccgagattgcaccattgcactccaccctgggcaacaagagtgaaactctgtctaaaaaaaaaaaaaacctttgtaagtggtgtatgtatacctttgccaatcatgttagagtagagtaggctgtgaactgtgcttttcactcaaagagttttcctctgttagctataatgtatgagaagggtacaaggatgtcattctttttaaccatttgcattctttgacatgtttctttttttcttttccctttccctccagaattggttttatctttgtggttaatgactctgaagatgttgatgggatgcaagatgctggagtggctgttcttagagcatataattatgttgcccaagaagtggatgattatcatgccttccagactctgacacatgtacgtttttgttcagaatggcaaataattttttcagatctaacttactcttaataacaatgtgtggtcattgtatgctaggcagctggggtgtatagagctcaggggtgggtcctgaatttaaaagtcatgtctgctgcagtgtatagagatggatctgaggaagggcaaagcaaagtggcagggatgccagttgatgagctgttgcagtgatctccatgagaagtaatggggaaggtagttaagcagggctgcggagaatgaaataggttcaaaagaagtcactcagaatagtaagtattttatactttgttattttattcactttatctctgctaaaggtttgcttttgtttgtttgtttgaatatatcttccacaacggctaccttaaaattttatttatttatgtactttttgagaccagatcttgttgtgttgctcaagctggtctcaaactcctaggcttaagggatcctcccatgtcagtcccaaatagctgggattacggc

SEQ ID NO: 96144 - DNA, 1063 bp, Homo sapiens
aaaaaaaagaatatttaatttccaacctaggaagccatcttagtaaggtatatggaaaaggaagaattgctaacatgtcccaatttgacctttcaagaaaagtaattggccaggcgcagtggctcatgcctgtaatcccagcactttgggagactgaggcgggtggatcacctgaggtcagggtttcaagaccagcctggccaacatggtgaaacctgtctctactaaaaatacaaaaaattagctgggcgtggtggcaggtgtctaatcccagctattctggaggctgagacaggagattcacacgaatccggaaggcggaggttcagtgagccgagattgtgccattgcactccaacctgggtgacagcaaaactccgtctcaaaaaaaaaaaaagaaaaataagtatattttcctctaaattcagaaaaatgtggaataaacactttgaaatttgaacttaaaagtgtagttaaccaactgttttttctttcttcagatctataacaaggtgaggactggagaaaaagtgaaagttgaacatgtggtcagtgtcctggagaagaaatatccgtatgtagaagtgaatagcattttggggattgattctgcttatgatcggaatcggaaggtaaaaaatttctttgtgtttcttatttgattgcaacattgtactgtccttaaccccgtgtttgggggctttggttaataatggcgatggtggttaaagtgtttcagtacttagcatttaaaagtttagaaaccagatcacttttcagtgtttgaaaaagtttttatttcagtcttgtgaagatatgactgatttttaacttgcttattaacttttaatggaactgtttaagtctcattttctcttatcctgttgaagagaaagtaccagtagctttttattgtggatgattatgatatcaaaagtatttacttgaaaaatgatgagtagagtggacaaactggggaaaggagtatttttatatctttacatgtgtcgaaatcttgattgtgctgaaaaattgaatgagagtatcacacaccatgctcctt

SEQ ID NO: 96145 - DNA, 1043 bp, Homo sapiens
ggtgctcagtagttacatgaggttagtgactactgcattggacagcacagacaagcacagatagaatatttccatcattgcagaaagttctgttgtatagtgctgaccgtagaatatgtagttcagttttgacagcctgtgctacacacacacacaaacacacacacacacacacacacatacacaaacacacgtacacacacacgcacttcataatttgcaagcttttgtggtcttgtaaaaacttgaactcagtaattcaatctcagatttacatagtaggatattaactttgatgtcatttttcatttttttaaaaagaaatatcttgagttattttttctttacaatatttctattgattgttgttagaacaggcatgtaagaaaaatatgctgtgttccatttgtctcacaaaaggcaaaaatatactgtttttgtggttacttgtgtttcaggaagcaagaggctactatgagcagactggagttggacctctgcccgttgtgctgttcaatggaatgccctttgaaagggaacagctagaccctgatgagttagaaaccatcacaatgcataaaatcctggagaccaccaccttcttccaaagagcggtgtacttggtgagtcacgtttcaaggctgattttttaaagagaacagttggcttatattttttgttgcctctatagtaggcagtaaaattcttagtatcactatttgggaggctgaggcgagaggatggtttgagggtaggaagtctgagaccaacctgggcaatatggcaagaccccatttctaaaaaagaaattaaaaaattagctaggcttggtggtgcacgcctgtagtcctagctactcaggaagcttaggtggaaggatcgcttgagcccaggagtttaaggttgcagtgagctgtgattaccccactgtaccccagcctgggtgatggagtgagaccctgtcccgttaaaaaaaacaaaacaaaacaaaaaactattttctgtaagtcacttgtaattggtttgcaaactcttggcaagtc

SEQ ID NO: 96146 - DNA, 1197 bp, Homo sapiens
cttgagagaagaccttttcctattttttttttttccttgggacagagtctcactctgtagcccagtgcagtggcatgatcttggctcactgcaacctctgcctcccaggttcaagtgattctcctgcctcagcttcctgagaagctgggattaccggcacctgccaccatgcccggctacttttgtatttttagtaaagatggcatgttggccaggctggtcttgaactcataacctcaagtgatctgccttcctcagcctcccaaagtgctgggattacaggcatgagccaccattcctggcctgggtttgcatttcataatcactttgcattagctttgtgagtttgagtaagttatttaacctttctgtgccttagcttcctcatctttacaatgaatgtcaacaatatctgcctcacgttgttgatagaggtagagatgctgtaggtgatgtgcccaggtatactcggcagtgacagggaccaataacatagtaacttctgtcttaactattattagcacagaggaagccatttataaagttaataattttttggttcctaatgaattattattgctaaaatttgctttaccctcccccctcaacctcctttttttttcttgcagggtgaactgccccatgatcaagatgtggtagagtatatcatgaatcagccaaatgttgttccacgaatcaattctaggattttgacagctgaacgagactacctggatttaacagcgagtagtaaggagcatttcaggaacaaccttatgctttttttgacttgtgcttcagaatctttacatttttcagattttaatattctgattatcttctgcagtgttcagaagatagcccaagattgtgacaaaattttatgtgtaaactctttgcacctttagttcataatatgagattctaaattcacaagagtttcctcctaaagaagaaaacatcttctgggcaaaaccctgtgaactttgaaaaatatttagtgccatttaaatgccaactaaacagacaatagatgatgagaatggacctggattgttcgcttctctagtcataaagcagttctctttcttcatcctcattctagagtcagtcagccataatgtcaacaaatatctcagtgaattttactctgagaacttaggaaggcctttagcagcttcatcaagatatgatgta

SEQ ID NO: 96147 - DNA, 2824 bp, Homo sapiens
aagagtgaaaatgaccttttatttctgttaagggtttaaaaggtgatattttgttagacctgaaaaataaaaatcagttttcttacgtattttctcttttacccctgcttcctctgtaggaacaggaagagcttactccactggttggactagggaagggagaaatgagttaaggggatctctttgagattgtcctccagttgacaagtgacaggaatgggaataggatgaattcagccattaaactgacacatacttatatgatagctgtgtgagatatgtatgtttccatcaaccttgtgtctttgatgtgtgacttcagtagggataggggccatgttgtgaagttgttcagtaaacatggaacttaatatacttcactcacgcatttctataaatcttatattatgatcaagtcaggttatcagttgaatattaagaatagattgaactggaactaatatatacgtatttcattttttctcccagataacttctttgtggatgattatgctagatttactatcttggattcccaaggcaagactgctgctgtagccaatagtatgaactatctgacaaagaaaggtaatccatttgaggcttattatcttgcattcaacatttttttgaaagtatttgcatattcatcttaatgtgcaaattaagagagaaaagggaaagagacttcataatttttcttatttcttataaagctttgagtctagaacatatctatttaaagtttaattctttgtatatttgttgaaagtatatatttgtttaaaaattcagatgtcttcataaattttgtattacctgttttaccttttgactaaagtcaaaaggaaaaatatttcatagttcaaatggaaaaacatttgtgatgtaaaaatgggttaatgaattaaaaatgactgtacagggttaatattattttggggtttataagataaagttggttttagaaagccttgtataatctttgaagctgattttatgcagaggtatttatttaggctaagattgtgtaaaatgacgccctgtagtggcggacagattctgtcgccctcgggtcagtgcttcagaaaagcactggctgttattttaagtcagctatttttaccgcctttttaaatccccgctgtggtctctccccaagagaagttctggtttctcagctgtatgtaaagtacaagcaattactccatttggttctttaaagaaactgtttcttagggtactgggacagcgccatgacaccgacaggactaagcagcaggaagaaccatagaccgtgttagccattgtttagactttcaatttttacagtaggcattcattccagaaatgatactttttttctactcttttctctttacctttgttcaggaatgtcctccaaggaaatctatggtaacttaaaacttcagaatgttctatttcttaattttcttctttggtttcagtgaccattgtaatttagaatttatcaacacttaattgtactgtttccggaatctgtgggtaacaggaagctatatcaatgtagataattttttttttttttttttttgagacagagtctcattctgtcacccaggctggagtgcagtaccatgatctcggctcactgcaagctccgccttctgggttcaagtgatttcaagtgattctcctgcctcagccttccaagtagctgggattacaggcacccgccaccacgtccagctaacttttttgtatttttagtagggatggggttttaccattttggccaggctggttttgaactcctgacctcaagtgatccaccctcctgaacctcccaaagtgctaggattacaggcgtgagccactgcacccggccaatgtagataaattttgtataaacatttgtaaagaattagtttcagaaaattacaaattagtatgattaaaaatgacaatatgttacccacatgttcaaaggctgtttttcattttacatgctaacagatgcccagaccagtgcattaatcagtagaattaatcagtgcatgttcctagtctgtaactaaactctgtggaagattcccctgctttcctatagtaaaggtttacgactttttcttctatctttattaagcttgtcattttcttctttttgcatggttcttacaaattatttggtcaatttcattttcagaatgttgaaacacagaatgtgcttctctcctctgactcaattagctgtttttgtttttctacagatgattcttttattaggccagtaactttttggattgttggggattttgatagcccttctggacggcagttactgtatgatgccatcaaacatcaggcaagtatctatgacttcattttatatttttgtttgtggctgtagttgtcttcatgggcttcgctgtgcggctaggattgttcagtgggagttgggagtcctgctttcttaatgctcgagggaacggagaattgtatctctagagatctgccagctctcaagaaaagagatctaagactacagtatccaggctttgttgaacgggatagattcttatagagaaaaaaataaatagcgagatcctcatcatagacaagttttattgcatacctgttcatgttcttggagcagagttgctccaacaattgtgttgtgtactgtatcggggagatggggtccttaccacgacagaggtctggacatgggggcagtagcacacaggaatggtagtgtgtgtgtttagtagaagtagatccagatgcactgagggatacacacataggtgttctgaaaagatatgctgccattaatagttgg

SEQ ID NO: 96148 - DNA, 2960 bp, Homo sapiens
ttttttttttttttttttttaatgagacggagtcttactctgtcatccaggctggagtgcagtggtgtgatcttggctcagtgcaacctccacctcccgagttcaagcgattctcctgccacagccttgcgagtagctggaattacaggcgcccaccaccatgcctggctaatcttttgtatttttagtagagacagagtttcactctgttggccaggctggtctcgaactcctgatctcgtggtccgcccgctttggctttccaaagtgctgggattacaggcatgagccactgcgcccggcctgagacttttaagagagatattatttgctacttattgaacatgactgatgttaatgctgctttttaagttcaaaaatatctacaatatgactcccgtttcccattttgtgaacagaaatccagtaacaatgttagaataagcatgatcaataatcctgccaaagagataagctatgagaacactcagatctccagagcaatctgggcagctctccaaactcagacttccaacgctgctaagaacttcatcaccaaaatggccaaggagggggctgcagaggccctggctgcaggagctgacattgcggagttctctgttggggtaaggctctgagcctctcatgaggctgccccattttgtctgccacggaagctcacccactgcagcttacgtgtccggttcatgatcacgatttgtcattttagtcctgagtctcagggaatttttttttttaatttggaagtttccctttattacttttaaccttgcctagctttcatgtggtgcatgatttgagtttttgtgtgttttaagtatggagccatttgttatgcacagtttttaagagagacaatatggcttatttatagagcaaaaaacggagatttgaaccacttataggttcaaggcttatatgttcttgatgtgtttccagaataagcctgtgtttattcatttatattttatgttacttatttttttgacacagttttgtagtttttaaattttttacagaatgatgagtatatactatttgacgtttgagttaggaaaacaggctgtcactggaaattagcaggatttaaaaatgcagagtaaaggaatgatgaatagtctgctagtcgaacaaatcacaggaaaagataaggaaatagcagttactctaagtagtagggagatggcggggagactggagaattgacacatcttaatgttaattatgaaaattagttattactttccagggaaagaaatttttatggtttattcactgtgtttatttgtttatatggtttgcttagtaacgactatttttccttaataatgattactttcctagggaatggatttcagtctttttaaagaggtctttgagtcttccaaaatggatttcattttgtctcatgccgtgtactgcagggatgttctgaagctgaagaagggacagagggcagtgatcagcaatggaagggtgaggatttgtcaagcttgacttcacattagatccgtgaacagtctttgcagcattctcctctgaagctagtaaactcttcagacagagccactcttttttcaaaggtgattggggcttatgaagtgccattgatgtttctgcctcctatttccaaggagctgtgctttttgacatagacaaatatccccatatggagccttcctgctgtcggtgagagtgtggtggctctcagaaagtcagtcagtatggactttgacacataaagtagcctttgttgtttttattcaggtagaattaatgaaaactactttacgattttattttactttgtccttgaggaattgataagtaaataactacaagtatttgctttgggcttcactttgtattatttcactgattttatctaaacatgtacctgtctcaggtctttaagatgttctggcgtatgaggtagcctgaggacgccagagggttccttaccagcttgctgagtgcaggcagccttccagagctaagcgcctgctcttctctccttcacagatcattgggccactggaggatagtgagctctttaatcaagacgatttccacctcctcgaaaatatcatcttaaaaacctcaggacagaaaataaaatctcatattcaacagcttcgggtagaagaagatgtgtaagttttgccataggaggaattacaggggttatataattggactttcctcattgatcagttagaattatatgttgttactcatactacatatcccaaggagttttatttccagtttaaaatctaataatactcttcaattccagttttaatgtatgcttctgttgaaacaagataatttattttgtagggtactatttaaggaactgaactagttctctctttttatttttataatttttggttgtggaaaatttcaaatatatgcagaagtaaagaggctagtttatttattacctggaatacttatgtaaagtgatacttttcatcattatctatttggttacccttcagttttattttgttcaggaaaggaaaggcagtttaaatgtttcttttatttaccagtgcagaatactgagttgtttcccttgtatcttcaaaggtgatgatgaattggttgttgtcggtttttaattttaattttcagtgttattataagctgatgtgttttagtgtgttattttcttaatggaagaaaataaattgtttggatggaccctggagtccattgttacatatatgtagtttctgcattaaatatcaaatgactatgtagttggaggatctatttctatgtttaattgtttgaggaaccacaatacctttcccacagtggctgtaccattttacattcccactggcaatgctcaagggtgccggtttctccacatcctcacaacacttgtaattttctggggggttttttgtttgtttgtttgcttt

SEQ ID NO: 96149 - DNA, 1241 bp, Homo sapiens
gcaggctgccagtataatttgtttatatgtatttaaaagtatagaattatgagccaaaatatcagaccttgttacttgatattatgtgtaatttcaatttttggcttttatgtttattttccagtgaattattactctaatagtcataaaaagtaatagttttaaaaggacaagggagaatgtaaataatactgacagcctgtaatgggccagggcctcagctaggtgcattgcagagttgtgcagttttactagagtcatgcagcgtgggtgctgtctccatttcacatgtgggaaagtgagtaacttctccaaggttataccactaatcactctttctcatgcctatcagtacggactttataccttgttcaaaccatcttgttagaattcagtatttgggctgatgatatgtttggcaataattggaaaactttcagttaaaaagatgttaagatttctctaaccccttctttcagggcaagcgacttggtaatgaaggtggatgctcttctgtcagcgcaaccaaaaggagatccaagaatcgagtaccagttttttgaagacagacacaggtatagaattaatgttgaatttgtgcatattcttgaatattaaactcttatgtttgctttacctcagctccttcatttttccatataagatttatatataagttcttacaggaattgaacatttgtttggtgtgcagttttcacatgtatatatttgtgttcatatataaaattcatatgcaaatctcagttgtatgaaaactgacatttatttctaaatgaatctgaaataactctgagtgcacccttgtagtagaaaatagactgcatttaattaaacagagaagttgtacttttcttaaattcgagaataaacacaggcaggtcaagatagctcatgcttgtaattccagcactttgggaggccagtgtgggaggatcgcttgagcccagaagctcgagaccagcaaacaaagggagaccctgtctctacaaaaaaattttaaaacattagctgggtgtggtggcatgtgcatgttgtcccagctactctggaggtagaggctgcagtgagccatgatctcatcactgcacttccagcctgagcaacagactgagaccctgtctcacaaaaaaattaaacagagattggctgggcgtggtggctcatgcctgtaatcccagcactttgcgaggctgaggccagcggatcacctgaggtcagga

SEQ ID NO: 96150 - DNA, 1076 bp, Homo sapiens
gccggggaggtggaggttgcagtgaaccgagatcacgccactatactcccagcctgggtgaatgagcgagactctgtctttaaaaaaaaaaaaaaaaaaaaaaaaaaaaaaaaaaaaaaaaaaagacaaggaccaggtgtggtggcttatgccattgctttgagaagccaaggcaggaggatcacttgaggccaggagtttgagactagtctggtcaatatggtgagacccgtatctctacaaaaaaatataaattagcccggcatggtggcatgtgtctgtagtcctagctacttaggaggctaagttgagaggatcatttcaacccagaagttagaggcttcagtgaaccatgatcacgccactgcactccagcctgggccacagagtgagaccttgtctctaaaaaagtaaataaggaaaagaacaggcaaaatatctatctataacttaatgctgacgaaggatgtggtgaaatttattttttggccttgtaaatttgtttagttcttcaggaaatgtggttgacaatacttattagccgcaaagtatttgtatcctttgtctccataatctcatgtctagcacttccttgactctaaagaaatttccaaatgtggagaaagttggttgtacaaattgtttacaggttgaaagccatctctatgtccagcagtaaagaaaagctggagtaaactctgacagcttcatttggtgaatagcatattatttcttatagaggatgcttgttgtgtaacagcatgtggaaatctttatgctacagtagtgagagacggaaggaaattgttttgaaattgctaatctgtatctacaactaatgtttatacaggcatctagaaaggattacgtagagatgcagctaagtgggctgggatagtgaatattttgtgattatatttttcctttttctttgttttgcaggttttctggaatgttctttcattattttttaaaaattgatttattccttttctttttgtactcttcttgccaagaagtaaaaactggcataatgttatcagaagctaacttcagtagcttttctcagtttttgg

SEQ ID NO: 96151 - DNA, 1033 bp, Homo sapiens
gttttttcatcctttggcatgtgagcggtgactctgaggcctgtagtttttccatgatctgcctgctgcttccccacaggaactgccttcgtgtgaggagcagtgagctgcagcagcctacttcccattgcttttggccacgtcctatgtatgtgtgatgtagattgtgcagtagagttgtgatttccagaagtttcgccagtgcagactctgtggctgttatctttatatcttttcttgagatattaatagctcagtgtcaaataataaatttctgaagaaaaaaatcctaaatattttgtcatctggttttccttctaggttttggctcagctgataaacatgaatctgagagtatttatgaactgccaatccaaactttctgacatgcctttaaaaaggtaaaacatgctatgtaagaaaacagttgaagaaattgtactgaatccaagttctgatattgcatgttagaggatcagatggatttataggtggacatcatgtttgaaatggtcatttactaaatgttcagttttgccaaatttcattctaatcagaagttctaagaacatagtgtgtttgtagcatttaggtggcattaacccaggctgcttgcatttgtgccttttctttctttttttcgagatggagtctcgctctgtcgcccagattggagtgcagtggcatgatcttggctcactgcagcctctgcctcccgggttcaagggattctcctgcttcagcctccttagtagctgggattacaggtgcacactaccatgcccagctaatttttgtatttttagtagagacggggtttcaccatgttgaccagcctggtctcgaactcctgacctcaagtgatccgtctgcctcacttcccaaagtgctgggtttacaggtgtgagctaccacgcctggccccatttgtgcttttcatcttaaaagaagaatattcatttcaagttggaatatacatgttagaggaagcttgcttagctatatattgtcatgagctttggaatggtcattt

SEQ ID NO: 96152 - DNA, 1072 bp, Homo sapiens
aaaatgagtcctccttgaagggaggaaaatgcccaggacctaactgtgaccctgacagccatccatgtgaacgagtggcctccgttcaagtgattggattttggcttgcaggtggacagtatagtggctgctgagtatgagctagagtacctgttactagaaggtcattgctacgacatcaccacaggccaccactgagcactcctcctcagtgctgtccttgtttgccttttcttgcatctgcagcaaccacaaggaggcatcataaggtcaaagatggttttggaaacacttttcccaatctggaagggtactcctccaaatctaatttgttttaaccagttgttacctgtgtaagggctgtgcactcaagtcctgttgtcacatcgaaaattatctaacactttccttttcaatttcagcttttaccgttatgtcttagaaccagagatttctttcacttcagacaatagttttgctaagggtccaatcgcaaaatttttggatatgcctcagtctccactgttcactctgaatttgaacacacctgagagctggatggtagaatctgtcagaacaccatatgatcttgataatatttatttagaagaggtaagaccatatctattgcttccaaatacctaatcatgtataatacagcagattgaatcatagtctaggtgggcctctgagacatcagtgttcaggtatgatatttttttaaacaacagctttattcacatggaactcatataccataaaattctccccattaacgtgtacagttgagaggttttagtatcttcacggagttgtgcagccatcaccactatgtaattgtaggatgttttcagcatccccagtgaaagccccatactcattagcagtcactcttcatttccccagcccctggcaactgctggtctactttgtatctctatggatttgcctattctgacattttgtctaaatagaatcaaatgtggtcttctgtaactggcttctttcacataacaaattgttttcaagatccatccatgctgtagtatgtatcgacgcttcactcttttta

SEQ ID NO: 96153 - DNA, 1043 bp, Homo sapiens
ttaggtctttaatttttttcaacatttagtatcttatcctcgttcgtatttttagaataacgtccttattgtttttttctcctttctctttccaacctagtttttataattgtatacagtcattaaccaccactatagccacgatgcagaacatttccattaccccaaaaagttcttttatacccctttgcagacagtagcctcctctcgcctggtttcaggcaacaactgatctgctttctgtcattatacttttgtcttttcttgaatttcttaaaatatgatcatatattatgtaagtcctttttgtctgcttcctttactttgcataatgcatttcagatttattcatgttgtctctgagtgcattcaagtgattggattttggcttgcaggtggacagtgtagtggctgctgagtatgagctggaatacctgttactggaaggtcattgctacgacatcaccacaggccagcctccacggggactacagtttaccttaggaacttcagccaacccggtcattgtggacaccattgttatggccaatctggtaaataatctgttcatcagatagtgatattgtagttacgttaatttgggcactataatttatgatggagcaattagcattcttaaccatagagtgagattaaaattcattatgggctgaatttggtcaatatagaaatcattagttcagctaaatttgtaggttagaattacatgtcaaaagaaaaaacatgctggaatactcagctataactgaattggccccctgaaaatagattgctcatgagctgacagcctttttcttttctttggaagtgcaacacttattcatgcatcacacgttgattcttccctgaagcacagctaaagagcagatgatttattggtgtgactggcctttattgtactagtttttttttttttttttttgagactcctgcccaggctggagtgcagtggtgtgatctcagctcactgcaacctccgcctcccaggttcaagcaattctcctgccccagcctcctgagta

SEQ ID NO: 96154 - DNA, 1020 bp, Homo sapiens
agtacagggcctattgttgactgattgttgcctccggcagaaagagcgagcagatttcctttacaacactattccagttaaagagtagtggccgggagtgatgggtgatggctcacgcctgtaatcccaacactttgggaggccgaggagggtggatcacttaaggtcaggagtttgagaccagcctagccactatggtgaaaccctgtctctactaaaatacaaaaattagccaggcgtggtggtgggtgcctgtaaactcagctacctgaaggctgaagcaggagaatcacttgaaccccggaggtggaggttgcattgagccgagattgctctactgcactccagggcaacagagcaaaactctgtctcaaaaaaaaaaaaaaaaaaaaaaaagagcggaggcagtgtggttccaataatggttcagggggcctgttccctgcattcctttatcgaaggctctgtgcttggctcagagcttgtgaacacaggcggttgtttagtactcaccatgtggttaccacacatgggtgcctctcactacgtgatgggtaatttgcaagaggactcacaaaggaggtttgggcatgcaccttatataaagagaggtttcaacacgtgcttctgtgcagctcgaaggagcttaaggagcaagaagatagctggatctggaaaactcctttatgagaaggatgatggactcagatgctctgagagcatttgctgccttttgagaattgtgccttgtaatattgatctttcttttctcgcaaagccacgatggcactgattctccccctgatgctgatgaggtggttatcgtcctcaacaacttcaaaagcaaaattattaaagtgaaggtgagtttggtaaaagtagtggcattctgttattggacagctgtcatttaaaaatatgtatcttggaaccagcccaagagtctctttggaatttgctatggcaattatagggatactgctttaaggcaaaatgtctttgtaactgtgagtttgtggc

SEQ ID NO: 96155 - DNA, 1020 bp, Homo sapiens
aggtgtctcgtgattgactctacataatgttgaggttaaataacattggaaagctgttattaattacctgcttttgtttggcagcataatgatgctatccgtgctgaagaataccaagactcctgtgaaattctggttcttgaagaattacttgtcccccacatttaaggtttgtttcacagagaaagggaaaacattcttattaaggagatatttactgtatatttttcatgacttttgttttatctgtatactttagcaaattttccatttactaagataccctaatttggttgcatatttttattttgattattcttccagattggtctatttgaaggaaacagttaaattgtgtttaaaaacttggatgatatggtaggagagtcttttgttgttgttattattagcagtgtcttactgagataacgtttccttcctctgaagcctgcatgcttgctttaatttagaaagcacagcgatggtttacattgaagagaatgattggtgttagcatgaaccactcctagatgatgtatggaagtagtgcttcctctgtgcaaaacaaaacacgtacttggaatgttttctgcattacttatatcagtcagtatttgtcatctaagttgatttatttgcatcctttttttttcttgtagaatttactaagtgacttttaatatattcaataaccattctccttgataagcactttactgctggcgcctaaaggtgcttatacttagaatctgaaagacttattcaaaaaggacaacacatttgtccagagttctggctttgcagtgttattccctgggttagatctggcctcgaggaaggcttgtcatcaagctcagtaaatgccttactgaaatcaagtttagacaaatggacttaaagttcatgtgctgtaaaaacacacacagagggatatacatctaaaatccttctcttgaacattctgtcatttcatgtggtgaccagaagtcataaagaaatggggatttgacaaaggtttat

SEQ ID NO: 96156 - DNA, 1509 bp, Homo sapiens
tctctctttcctactcagttcctgttctcacagcagataacctcccaacttattgactgtctatccttccagattttcttaattcttacagaaacagctgtgaatgtgtattctttttttttttacacaaaatatgctacctatttatacattttgtaacttggcttttttttttttttttttacttaatgtcatatacatcttctcagtgaatagagagagacctgattccttttcatagctgcatattattccagtgtgtgagtgttatttatagttttccctgtgacctacaatgttgcaatgaataatctactaaataatttttcatatctcatatatttgtgagataaattcctagacgtagaccttttaggtcgaacagtgtgtgtgttgttacatttctaatgagcaccccattctcttctctgcgagaagtgtgatttgaagatgtgcagggaagaggaacgtgtaggaagcggcacatgcagagatcactgctggggtttagtgatggtggcttcattctttacattcctggtccaaaagaactgtaaggactgtaacactctggggttttcccccccctgtaacattgaagacatcatcaggatatcattgaataatggttgtttatcagttactatggcttttgttactgccgcatatgctagaaatctttggtctgagattatttctttcggatggcaaatacagaacagtaacaaaagcatagcacagtatagattttgcagtgactttcttagagatctttaaagtagcacactttaactccactgtagggctgtagcataccttttcaaagaaaagccagaatatttggctagtggcctgttccattattcattgggtttagttttcctgtcgtaatccatggttggttgtaacaagcgggtcttctttattcagtgcactatatgttgtggatctgaagaagtttaggaaaatagctgctggtgacagactcaggggacagtaccaaggtctgagtcaggaccctaacagcctttcaaatcttgatcaagtaagtgtccattttttatggttaactgtgagtgacgggtatacagtgttgcatcagaaaatgaagtattacttgtgtcttcagtcctctcctcacaggatggcgtcttgttttttcatggtgtgtgtgtgtgtgtgtgtgtgtgtgtgagagagagagagagagagagagatttttatctgccctcaagacatatcagcgtgaaaaatgtcatagatttgatgctggctggggagagagatggaaggagaatgctgcctctctgaaccattagcatatctttgtattttgtactcaaactaatctcataggtttgtttctctacctactagggtcagtttgtttttctgctgtaggaactaaatagctcaggattcgtagtatagaatcacagtatagtatcacagcttcccctttttctatgtcagaaaccatgatgtgtttcaaggctagctaaattactg

SEQ ID NO: 96157 - DNA, 1050 bp, Homo sapiens
tgttgtatagtaagcataagtatatagtttgttggggctattcttatagaatattcttataaatattcttatcttatagaatatttcactggttttatttccctgcttacattaggaaaccaaatcccttagcacttaatgggactgttttcacaacttacaatctgctgagtcactccttggcttccagtttatctctgtgccttgtaatttttccaaatggactttcacttttcctgccttccattagccactcacacattctttgtagatgtaaatacagctttacatagcccactaccatattgcttctggtagtatatcatttggttccttactattgttttcttgtccagttaggacttgtaacccaagaacctttgaattctctatcatgtggcctttcttcaactcagctgaagtgtgttcttttggtttcacagtgtaataatccgatgaccaaagagccgaaactggaagcagctgtgcggattgtcccggagtggcaggactacgaccaagagatcaaacagctacagatccgctttcagaaggagaaagaaacgggagcactgtacaaagagaagacaaaagaaccaagccgagaaggtaagcacaaaccgttggttttaggacagtacttctttccatttctgatttctgcttgttgtaaagacaatagaataatggataaaaggaagagaaaaatctcctattaatccttccattctaacatcaaccagtatatatttttcattttccttttatgttggtcttctaaacagtatttattagtgcaattgctatgtttttttttttttctcgtttttctggtgagggggagaaagggtattttaattgtgattatagttatttaggttcatgagttttgtgatacataaaccaaaccttttgcagagttcttcttagattccttgttttttttttcattaaatctgtcagtgtactagtgaatgaaaaaatttagatcaacacaaatatgtagttgaagaaactttttttttttttttttgagacagagtctcactc

SEQ ID NO: 96158 - DNA, 1117 bp, Homo sapiens
accctcaagaattactctcttgagaatatatctgaaagaaataattcaacagaaaaaacaaagttgtatacatgaaaaaatttattttactattacttataagccagaagcatcaaaaacagtttaaacatccaagaatgagctacactgatacatagaaaatgtttagatgctattaaatgataaaagaaaaatcccgactaaaaaaatgcatgcaacgtttactgaaagtaaatattgtatttgtgaaaacaattcagttggagtggggtttacagatagtttccatttttaaaaaatctttaatttagtttttgctttcaaaatacagtacaaaagcacaaatcccaaagatttagtaagtgagataagatgaaggtggaggtacaaagaataggttccagtgatgaaaaatgcccactcagtggtgtttgtaatttgaagatcatctgttttcttttctgtggttctccttttccttaggtcctcagaaacgtgaagaattatgatctctggagaaggacaggaaatcaccccatttgaaaaacagtttttataataaatgctagttttttctgatctgtctatacaactgctgataagccggctgggcaggagtgccacaccttttgattctgagcatttgattctgacttctgtactctggtggccactggatctttgggattaaagctctgttggatttgtacctcagaggaagaccaagtggctgatcctttggactctgtaaagagcattcttctagtcagagggtggaatggcagcagcaactggaagaaaatgagttttttggtgcccacacccaagagcacacacatgctgcactgtctcggaaagcagggccagctagagccaccatgttcttccttacctcagtttacctgcggcctgcgctgcactgcagatgcccaccctgccctgggtctggccggcggaagctctgtccaaggtccacacacctccaggtttacgccaacatccttgtgccctccccaccttctcttccaacgcattaggtgcattgtttaattgaaatccaaccaacaattgtgtgtcaaggctggtttggtgcagtggctgggcaaattaattttgg

SEQ ID NO: 96159 - DNA, 1021 bp, Homo sapiens
gaaatgcctagaggatacagatttctcatttcattctttggtctttcatttctctatatacagaaatgaaatgacacttctgggaggcagtagaagcaggaagtcaatgaattgagtagagggtcccattccctcaggctgtcattgatcagtgacaatttataaaaacaaactgcaaagtctgtggcaagtggctgcctgcttcctagaaggagcccatgaaggttaaactctgtggtcggtatttgcaagcgccgggcgtggtggctcacgcctgtaatcctagcaccttgggaggccaaggcaggcggatcacccgaggtcaggagtttgaggatttgcaagcaaaaggtcctctcctgagtctttcccagatacccagcagtgcagaggctagctgtggaaggttgcagtgggacaggaatgtattgtatgccttgccttacttgtcaccattgagatttccagagaaatgggcataacgtctcttaacaacaacagcagaaagcaaaatacattaacttaaggttgacaacaaaagattatcaagtaccatgttttccaaccaaccagttattcgtggtaataataaaataaaggtgggaaaatgttataatttttaaggaaactgtgtactttaaaaatcttctttatgaatatccaatgttactgtaatcctgctccattaaatgcagcattgttgtcaggtgctgcctcttgcttgggaacagcattgggcttttaaatgtctgcagaatctctgcgttcgaagggaattgagaatgaacttcctggtactgtaatgaaaataaggtctgctcaacacagtaaacgtttcctctcttctttaaaactgcgcagtcatttggcctttgtgtttaggaagggcagattgatagagcacaaagtccaaccccttcatctagcagaagctgcaaacccagacagaggaacgagggctttacctgagtcttgtctgctgctggggctggcttcgggttgcatccagttctttggattc

SEQ ID NO: 96160 - DNA, 1056 bp, Homo sapiens
ttggcttcccggcaggaggtggacacccagccagaggcctggctcaaggtgacctcaccttcaccatgggcttcctgggtgcgcgggcctgagcgcaggttgttttgtacatattggaatatgtgttaacttatgccccgcatcccaactcacacggaagcacgggtcttgtctcagtctcttcgctgcatttggaaagcagtctcctctcgggccagcgccgggctgaggtgtccagaggcggcggcagctggcagtgccctcagcccccaagtgtccagcctggcacttcccattcaggccacctgctttgggtcaacagttcctttgccagcagcatctcctaaattgtaaggactctgtccaccggggccctcccagggctgtgaggacggaaacaggcagggagtggagctaacagcttagtcaccaggacccccagacctgcaaacgtcccctcctggaaggggaagccaggaacagcagaactgcccacaaaacaaggctgtgaacttttcgggaactggaactgtttaacttgaacccaggattgtttaaagctttatttatttatagcttcttcttaaaaaaaagtgttgaagaaattttttggttattcatacaaaaaaatgagttgatgatggaaaagcaagtcataatcatctaattgtttttgtctaggtcgagaatgaatgttagctgatgaaataaaccctgacaaggagtggcgggtgtgctgtggtctctgcgggcatagctgcccctcccagtggggtctcacaccacgtcccaagggcggggtgctttgcacaggtgcaggaggctcagtgaggaaagtcccattaagtaaggcattctgaaagaaaaaatgggactttgtcatcaccataaagagtaaccgtttattaatcattagtgatagtatttgggaagatgacaccagttgagagggaggcaggtgccactgagttacattctcattaacctcttccctccctgtctttggaaattttgaaagatttcaaatgacaaagagagtggaggaatagttcatgg

SEQ ID NO: 96161 - DNA, 2477 bp, Homo sapiens
gagcagccctggtagcccccctcatgctgcgtcacagccctcacctcctctccccgtctccttgcaggaagttctactacatcaccctgctacgagaccccgtgtcccgctacctgagcgagtggcggcatgtgcagaggggtgccacgtggaagacgtcgttgcatatgtgtgatgggcgcacgcccacgcctgaggagctgccgccctgctacgagggcacggactggtcgggctgcacgctacaggagttcatggactgcccgtacaacctggccaacaaccgccaggtgcgcatgctggccgacctgagcctggtgggctgctacaacctgtccttcatccccgagggcaagcgggcccagctgctgctcgagagcgccaagaagaacctgcggggcatggccttcttcggcctgaccgagttccagcgcaagacgcagtacctgttcgagcggacgttcaacctcaagttcatccggcccttcatgcagtacaatagcacgcgggcgggcggcgtggaggtggatgaagacaccatccggcgcatcgaggagctcaacgacctggacatgcagctgtacgactacgccaaggacctcttccagcagcgctaccagtacaagcggcagctggagcgcagggagcagcgcctgaggagccgcgaggagcgtctgctgcaccgggccaaggaggcactgccgcgggaggatgccgacgagccgggccgcgtgcccaccgaggactacatgagccacatcattgagaagtggtagtggcggtggtggccacggggaggcctcttggggggtgtgggggataaaacaggacagacgacaggtccacccaagactgtcaagggatgagcatcccaaacctgctccacagaggtagctgcgtcctgaaaaaaaacagagcagggatgtagtggggctgggcagggatgggggcttgagaaatcaacaggtgcagcccagtgggtcagaggaaagcgtgctcgaaggatgccatggtcagggcagggcctccagagcaggtgttgtgcctggagctgctctcctggcctccttggatttatcgcaaaaactgaaggtttgcgcaagagacgaggacagcggaaagtggacctgccaggccgggagtgtgtccctcaccaactatgcacacagcactcgctcttagctcctctgtccgggctactaggagtgagaccagcttctggcaactgccccagctccaggccatcccatagcccctcctcttctggctgcccccaatgccccgaggcctggggagcccccagctcacccatctgtagctccctcaaagtcagggcccaccccatctgaggcagagaagactcgagtccagcccccaggaagcctgctcccctctctggcccatggtcctgcttcatgctttgggtcaggaggccaaagctgatgttcaggccccacccactccctacagtcctcagaccaaggaggggtttgggtagtaggcccgagctgcattgccggccttcctcgggccaactggcagcccaggagtggggaggctttggccagggatgctgccacttgtgcgtgagtccgcggctggcccttggaggtgaccatccaggcaggcctggctcagactggaagggctggggaccgagggctcccctgcctctgttctcctttctgacccactgggatttgctagcaggctgccccagccccatcaccgaaacacatactcaagagctcaaataccactgctcccaccagcgtacggattaagttcatcaggcttccatcggctggagcatgggaccatagcccctgcccaggagccgtaccctcggaccacagtggctctgtatggccaggaactgggactcgagctttcagattctcaactagccttggcaaaacagctgtaggtggcctccctgacaacagacactcagccctccccaccctggctctccttgcatttccccatgctccccaccccctggcaaaaggctggccatgctctgttcccagcagccgcgcaggtttccccactggctgcaatggccctaccaaaagccatgttgcatatccgttgtaagcacgtgccctgtgccctgtccccattccttatgccctaggaggccaagctggtgtctctaggagggcccacacaggcaccctggatcccccagagagtagattggtgtgctcaggccgcaggctgactcagaggtagggcagtgggctctgcaggccacctggctggggttggtgggggtcctctctcctgccccagcttccactcagccaccacagttgccacaccatggggtggagacgtgggtcaccacgggcttgggagcaagcgccttctgcagcacaggaagccgaagctggggtcaggtgaggtcgctacccctggaggtctggcataagggccccaccctcaggtctcctacactggccccattttac

SEQ ID NO: 96162 - DNA, 1055 bp, Homo sapiens
catgaggccagcaggcaccagctggccagtcctgtccagacccaggtgcctccgtctgccagagggggcagggcagggagatgggcctcagccctgctgctcccttcctgccaaggggctgggctgaggctggatctcagctgacccagctccaagcccagcccatgcttgagggggtgagtagccttggcctctctggtgttgcttcctcatctctccagctgggacacgcccaggctgtcaggtcactggtgaggggctccctggggttgggtcagcctcacctgtccatccgggtgtcctgccaaaggtcccatcagctgcaggctctgcctgccctgtgtgtgtcctgaggcaagagggggctctctggaaggggtgtgggcagcacagccttcccaggaagcacatgggtgaggactgccccctgtgcccacacagcacctgaccactgatgtcatggggcccctctccagacctgggtatgtttggaagcagattgagttaatgaaaaaaaaaaaatctgactactcttctacagacgtcaccaagaagggacagccttagcccagcattttctgtgttgcatttgtagaggggctccccagcctgctgccgccagctcagaacttgatgatctgggtttttctgcaggcagaggggaggggctgcctgcccttgggccaagccaggcctggtgctgcggcactgggtcaggtgcaggcacaccagagcggtggggaagccattccctctcaggcagtggctcacatgcctgtgcctcctgggagcgggtcgtctcctctgggctgtctcccaatcccctgccctcctggacctgcaggtgccccctctcagaaggaatgacaccatggacagccagcccggccttgtggccctggagagctgcgcctgagggctgcttcctgccacaggaaagaggaggcagccacccgccccaagtggggcgctcagcggcttccaccccacagtgggacttggagccaaaatcagacttccactttttctaacaaactgggcagaagccggactgc

SEQ ID NO: 96163 - DNA, 1028 bp, Homo sapiens
gtgctgctggacagccgcagtttctgtttacagtggttcagcccagtactgccgcgtcttcactgcagggctaaaggtggttttttctttatgcagaccactctgactcttcactgatgcactgtgctctaaggaaacgggctgtgatttttgttcctagtcagaaaacaccaccctggccatggtttgggcagtagtcagcagggcgtcctgagcagcattgccaggccattgtatctgcctagcctctggggactggcaaggtcagcctgcccttccagcctggaggctgtggctcagcaggtgaatagttctcttcagtcagtcacagcctgggtccaggtggacatgggctccaatcccagtgctgccctgaccagccatgtggcctgggctagttattgaacctctctgggtctcagtttcctcatctgcagaatgagaataattcatgcctatggggtgactgggtaaagcgccaggagttcagtaaattaataattcagttactcctgagcccaggctgctgccaggccctcctggccccgcccgggagcccaccctgtcatctcattcaggtccctggtgtatctccctgaatagatggattaggttcagaggccaaaacagggcagcagtttattttttatttccctccctttggaagggagcccagcataagcagaccaggctggtggaacgccaaggaaacaccaagaacccaggctctttctcttcgctctacaaagtggggcttctgcctcatggtccaaggtgactgctggtgctccgcggtcacatccgctttccggtcagcagcaggaaaacagggcaaagaaggctgtctctaaggacatcctgatggccggacagtcacacagccacacctggctgcacatcatctcctgggcgtcttcctcctcagggactttctgcactgttttctaagcctctctcttgagggccacatgagcacagagccctgtaccacctggactgcctttccacccatccgtaagaattcagct

SEQ ID NO: 96164 - DNA, 2725 bp, Homo sapiens
attttcctctcttgtgcatttgtccaacttcggtattaggattatgttggcctcatagaatgaattgggagtgtccactgctttactcttgtctaggagggtttgcttacaaaaatctggttcttttaaaatttggtagaaatagcccagcactttctttgtaggaattttacccctaactttttatcttgaaaaatgtcaaacttacaaagtcgttgaaatggtagtaaagtgaacctcatacctttcaccgagacccactgcttgttaacattttgcaatatttgtgcttgtgagtgggtgctctcacttgctgtttacatatatgtatatctgtagatacatgtgtacttacatgtatatttatatatgtagttatatacatgcttttgcattttagtagaatcatttgaatgtaagctgcaggcatttcctcaatattttaggaagattttaaactactgctttgatttttgctttttgagattatcgggctatttgtgacttatatttggacattttatacaaataatttgactgacagctatcctctctctatctcttacatgttctcctggtgcctctggcctgtggttggtgaaagcaggtaggtctgttccggcagcttcctctctttccctgccagctggggtgggcccatcctcatgccgagcgtcatgctgtgacctccaggaggcatattgtcttgttttgtgcaaggaggaaacagatgacagatgcattccttggggaactcgtcagggccacacagctgctggatggcagatcccttagcaagctggagacctgttttctggtgctgccaatggcgcgccgggttctcctgggagcttcgtgctgctcatctcagggaccgtgcacgtgggtgagcagcagacatgccttgtggcctatgaagtcagacacctctggtatctgggagactttggctgcagaaggatctctgagtctccatttgcccatctgcagggggatctaatagtggcgaccgtaccggggttgcaggaataaaatgagcaaatgcctgctgggccctaaccttttttggaggcaccaaccacagaagtgcttgatggggggccataaaatggctggttctggagagtcagcattcccgagtccccagggtcactgctcaggtgacagctttctcagtgcatcacccggagctgtcgccctccttgtaagtagagccagggccatgggagtatagagttggatactgcagttagcttgggcacagaatggcttatctctggggtgggctgtttaggctctgaatttccctgtctggggaagaatagtctacattcaagagcatgcaaggccatctctccgcggccgcctctgtgtttatatggactcgggggttgagggagcaggtgtcagcccctcttcgctgcagagaggctctgtggggtcgtgggtgagaaccaggactttgcctcggaccctgacatgagttgctgtggggtcagcaggaggtggagcctggaggggtcccagggacacccccagtgatcctcagatgagctctcgccctcctgaccccgagaaaggctgattactggtgatgatcctgtggctttggagatgtcctgagaggctgctggggaggccctgagcctcccaggcctccctgactctcctacctcctgtgagaaagtcagattagattgttttgtttgtttgtttgttttctaatacatgcatggttatataaaatcggaaaaatacagaaaaagtaaaagaaaaaatggcccagggcactaggcccagggcacctggcgcgggttgcatttctgctccatctctccagttgatgtgttttccagagttggcatcaggctgtacccacaagctttgatgtggctcttttgcccattgtgcacacagatatgagcttctgtgttaatgcagagtccccagaagggctgtgcttttctactgccatggagtcaccgggcgtaggtatcaagtcgtgctggctggcctcagggccctgagcactttctcacctggcagggacagtttcatagcagggtacaaatactgcacaccccggcaggacctgacgctgccgccagcctccctctcgggcctccacgtctctcttggtgggcccaagcagccatggtggatgtgtagttacaggctgtaaggaagaggaagggccacgtgagtcctcgcaatagcctcagcaaaaggcctagaagcagaaggagtgagccccagagctcttggccaggacaagaggaggccatggctctggagacaggtctcaggccgagccagcccgcccctagtcagctgccctgctgctcgactgcgtgccctgtgaagaagcagggcactgtcaccttctcctgaccccaaggtatgagtgtgtgcgttcaggcataagtgacatctcgcctgccggtgtcagaagccagaaagtgccaggcaggcaggtgtgaaatatgaatgggcagccttcatgaccggcgagcagccccgcagggccctcatggccttgctggagccctgccttggagcagcaggcaggagagtctgaagggcagtgggacacaggtgaggaggtggtcctcaccccttctgctcatggaagacctcggcagagccccattccaggtgtccagtcagcagcatctgggcccgggctgctcacagccatgctgggcttttggacagggtcaagctc

SEQ ID NO: 96165 - DNA, 1045 bp, Homo sapiens
ccctcaggccaagctggagcctctgagctgttcccactagggagacaccggccagcatggtgtccctgactgtctggcagccgtgatgcctgcgtgagccagtggggcccaggaacacatgctgcccgatgtccatgagtgccggggaccccatggaggctgggcccagcgggcaggatcagctgcaggcttcaaaccagcacacatgtacccctgagggtgagaggctggagaactcccagggttgaccaggggctgacaaagcacgcacgctctcccacacacgcacgctcacgctcatatacacacatccccagcagtagctcatgctttggcgccagtggtgactcagaaacattctggaacaagaattccttttttccttacaagtggttggcacttggggatgtttcttcgtatttgaaattccttcccactggtccctttaagagctgagcaattttccattctgagctgggctgctcttccatcctgagctctcagaagtctttgaaatggtcccaggatattagaggagatgcttttccaaagacgatctgctgtcattgcagacacaggaagggtagcctggagccacatggcccctgggaacccctgcctgacacacagggcgcaggagccatgcagcccctggggatctctgcccaacacagaggggtacaggagccatgcagccctgcctcacacagaggggtggctagagctacgcagcccccgggaacccctgcccctcacagaggagtggctagagccatgcagcccccggcgaccccagtcccacacagaggggcggctagagctacgcagcccccagaaacccctgcccctcacagagggagggaaggctggtttctatagaccattcaggaggctgttgctgcatgtacccaagcagccaaaagcccagactcctcaaactttgtgacccagggctcccattcctttcttttgccctccccagctaatgacaatgacagaggcactcatttcttaggcatgtgccattgcacccacccccaccaca

SEQ ID NO: 96166 - DNA, 2238 bp, Homo sapiens
gcaccgtctgctgcgggcgcacccagggctgtccctgtggggcactgctgtatggataaagcttttcgcaccccctcagaaaggagcatgggggtggtagccccctcatcatcccagccttggaatgtgcccccaccccatgtgaccccagccccatatttgcagtacccctgctgccatgcccccactggcttgggacagaagggcctacacatcaccatccacctgagaattagaaagcgccttctgctgcagggcttgcaggaacaaatgtttacagcccctaggcggcagggggagcatctcccctctgagttatgagctttagaggctcctgtgtaaatatttacctctctagagcattggtgaccgtgggagatcgggatctgtaagcactgaggttttctgtttgcgtcatcgtggccagggtggggtgggggtgtcgtcctggagcagggagccaggctgtggagcgtgcagctgcgttctccctggaatcctggtccacattccctggcagagaaatcttcgcagcggcgcggccacgtcctccagcccgaccacagttgatggagggaaagccagggaaggcactgtcctgtggagtgacaccagcgtgctagccctgctgaggagcggaggcacaaaggagggcattcctgtcccgagggtgcagtctgggagcagggaggggctgtgacagtctcattcaggcctcactgtcaggggcgctgttttgcagatgagtaaactgagactcaaagagcctaaataactcatcacctaaggtcaccggtggcagagctgggattcacacacaggcctgtgcctgcaggatttcccccaaactcctcccagtgacaagtcgcaggcaggtcactccccagagtgggggagccaggcgtgtggctcatgtccgccacagtgcctgcctctgggagggtaacgcagctgctctgcgagcaggtgggctcgccagggagtccaggatggtgcagggaacctgggcaggtcctgagggactgctggcccaccctcctcaaggtccagctgaatgagtggcctgctggaagcagctgtcaccaggtgtgatgcttcagctcccctgagaggatcaagggcaggcagagcagatggtctcccgggggagttgagagggttgtgatgtcacccgtaaggagaggctctgcccaggcactaagccggggagaaggtaggccccagagtgagagtgggttccagctctgcctggagaacaagggcctcagccagccgggctccaacccttgccacagcctccttccttcccgcccactgcagaccccagggctcccggttggaggggctcggcccctcctcttctgcctctgttccctcctggcaggcaggaaggtgagcaggtctgagcagttggtttagctcacgcaagtccaggcagggccgcttgtcggcacacgtcctgaaccctgcaaaagttcaggcctcccaagtcatgctttaaaactgtccaagcaggcccatcgggaagccaggcccagcaaggaggggtttgttactctgctttcctggaagctgggctggcaacgttcccagcagagaacatcattcttacaaagtagaggggtgtcaggtttcagccaagtgggtaaaaggcaggtattgggattggtgtggctgttccaggacaggagcaaacccccatccttcagcaagtgggtcaaatggggacccaggcaggcaatgggtcaggccagcaaaggctggagaatccagaatggagagcttaggaggccctcatagcagggagctgcctcctgcatgacactgaccctgtgcattccacacagatcacaggcactgccctgggccaccaggaaggccctggggaccatgttccatgggttgccacagagccaggggatgatggcctgcaagtgtgtgtgggtgctcagtcacccgccctccccagtgcagcccagcccagctgcaggagaggaaggtagccattcctgagtgtcatgagatgctgagtgctccagggtgggtcctctcactgacccagtgagggctgccactgctgtgcgacactgctgtgagcactctgatgggacacagtgtcactgtccctgttctctggtacatgggtgcctccatatcttcccagtggcagagggtttttggccagcatctgactacagcggctgtgtgcattgctgcagtgctgggctctcccgagag

SEQ ID NO: 96167 - DNA, 1095 bp, Homo sapiens
ggtcgtgagaccctgtgggtggcagcctgaccccacccccagccatctgagaacctcgagacccaaccaagaggaacccagggtcaagaggaggaaggggtggatgccacgtgatgctggccctgcacagaggctcgcctggctgagggcccaggccttgttcctcggatgcagtggttcctcccttccctagaccccaccagctgctatcaccccctacatggtatctccaggggtgtaactggggagccttgtggagtttcacctctgttcccactgcaggcttagctgggtgcggctcgcaggtgaagaccccatgcactgtgctccaccccacccctgcctccctgcagcctcgctcagcaccactgtcctgcgtttcacatgtttcctgcccttgtgtttatgctttcgctgtagatgtgtgtattccttaaatgatacacagtgctgttttgatgttactaactttccagaacccttatcaaactctgcttgaccttctgcaacttgccgtcttcactcagccttgttttgagatttatccctgttggtccctgacatgcgtgtttaattcattgactgctggacttaacatcaaggtagtccagacggatctctgcttggttctaatgcagctgcggggagcaattcactttggccatcacagtccaggtgcggccacggtgctcgctcatggtccctatgtgtccctaggagtgtgtcagagggaggttctcctcaccaccatgctgtgcccgtggttcccgattgtttgggcgggcactcttggctcatttctgccaggccaggagccaggaaatgggacctctgtgctcttagtgcatgtttccccatggcagagagatagcatcttaccatgtgtttatcggtcagtgaggtctcttccaccgacctgttcacgtctttggcctgttttcccctacagggttgtttgtgcttcgcgtattggttcgtaagcgttctttatgtgtcctggtgccaggttccatgggtagcatgctccccgcttctctcctcctgttcatcatttctccatgtgtggacttgggcctgtggcatcccggtgcctgc

SEQ ID NO: 96168 - DNA, 1052 bp, Homo sapiens
actccacagcagtatttataggtgaggtgacattttgtttgcaagaaggttttcatctcttaagactgttcttgccttctcagaaactcagttggctctgtgaagatttgctgtctgttttgggtttgggtggggtatgttatgctgaaaaaaatagtcctagacctaggggatgaggttgctccagccaaatgacagtgagctggtggtagccagaggtgtgggctgcagtgccctgagggagtggaaaagcctcccacacacagggttttgcaggatgagcggggtgtggagtggaagcagcactcagaaagcacagttgggtttcagacacatcatgcgagaccccgccactcacagcaagggggggcagtggagatgggacggcatgagtggagaggggcccctgcaagcaggccagttgctttctgactgtgggacttgtggcctaatctctttgttcctttcctgaaagtgcccctttcctgatagggcattgtcccaagtccccagcttgcaagggatgttgttttggaaaaacatggcaggtacacgcccacacaggagtgttcaagtgctgatcccagaccacccaacccagggtggaggctgttagaggacatttaggatccacaggtgggcagagggaggatgtccagccaccagagaccacacacatcctaccccagccgtggtgaagatggggctgttttccttgaccatggagcaaaaaccatccaggacagctctccccctccatgccaccagttgctcctgagccagctctgtgggtgctgggagctgcgctaaggatttgcacctgtccccaccagcttgtggccttctgctgccgcggtgcctctgccctgaactccctctagggctcaggacctttggggcctcacacctaccccactgttggtccttgattccttgactcacacagcgtgtggtctggggctggggctggggcccagctcactgcggggggatgcctgtgggggtgacacgccgcaagttccacggggccacctcgggaggtcttgggtcct

SEQ ID NO: 96169 - DNA, 1677 bp, Homo sapiens
ttggcggtcacagagctgcctgtctagggcccctgaaggattgcttccggcccagcacttagtctgctctgcacagatgcacgttcctgctgcagggcccccctaaccctggtccagcttctctgtgctaggctcagctgtgcctgggaccacagccatgcccccacccacccttccaccagtcagagcagtaggctcccagagttggtcactgaccaataccaacagacgcctccctacctgtggggggtgcaaggatgggggtcaccccctttgccagagggacttagctcggcagcctaagaggattgcgtggaagcttcgggccgccaagaagccggagcttttgaaacaagcctgctcagcagaggccacctcagccctagattgcaaccaggatgctcttcctgcagccccgcacgcctgtgggtccccagggtgaagagccttggcctcctttctctggagtttgtccatgagagtgggaggaccaggtggggccgatggggccccaggtgctacaccaggaaggcccggctccccctgcccagggagcatgtgtggagcaagaatggaaaacgcagatgcctctggcggaggtgggctgccagcctggaaattgctagctcagcagcatgcgccagggttgggaggggcttccagggccgtcaggaggccccctctgccacccactctggaagtgggttgtgctaccgggcaggtgacagcaccccaccctccgagtccctcttctccgcctccactcccttcagttctgttgcaggcactaggtagattgcttttttaatgagcttcatcaggaggccaaggtaatcttgcctttgtgctcgcagggccaagctgcactgaggtccacctgctgagcgctgccccgccacctgagtcttctggcccaggctggagctgggctaagctgctctgctgtggcggttgggatgcacttcccccatctgcccagggacccagcaactctctatcaggggcagtgcccatccctgctggggtgcctcatgttaagtgggcttggtgtcaggagactcaggtgtcaccctggccctcctgcgatgtcttcactctggctctgcactgccatctccgtgttctctggggactgagaccctcttttccttctatctctgcctgcctccctgcccaaggctggctcctggaacctctccaccaagcccctcccattccctgctgcggtttgggagggtctcagtgggcctgtggtgcgcgtaagagaggtggggctcttcccggctgccagcctccccattgcacagtatcagcctgggctgctctgagctgggcatccatggagatggacaggtttttgatgtcttcctggaatatggtttggaacttctagtggctgttagtgcttggctgccttggtagaaaggaacaagagtgagcagagcattggcgggtccctgtttagtcctgtgttcaccatgggggctgcctcatctgccgacatcagccagggtgcttgtaagactccactggaaggacgtttgctggctggccttaaagaggtgtggccatccccaggcagcagccaaatggccagccattccagggaccactcggttagaatgtctcagcaccccacactccgctgtcactcagagggtccagatggtgctccag

SEQ ID NO: 96170 - DNA, 1069 bp, Homo sapiens
cctccccaagtcccagccgcccacgtccccgcagcccgcgcgggaggaaaggccttgaccttgcacgctggggcgctgaagttagacgctagcctactgggctgcacttccagggaccagggcggcgggggccgcccaccaccaggaccgagagggaaagcgaggctttcctttcctgctcgaccccctcacccctgcggctggctttgggacagtgccccgcagccccgcattgaagagatgttgggctgtctgcagaggcctgcggagcggctttatggcttcctccttgtttgaaaagaatatcagacgaggtgcattttcccccatccatgtttattatactccaatgaaagagttataaaacattgagccaattcttaagaatcgtgagtgcccaccaaatattctgtctttcgtgggttggttggagagtccagcggcccgggcccaacctggctgcggagggctcgctccacgttggctcgtgtgtgggccgggtggtgcgggctcctcactcgccgccgcccagcctggcaagcacgcgcggcattcgtggggcggggggtcccgccaggtgcccactcacactgcttgggctctggcagtactcggaggctgcagcccgtcggaagcgcaggagtggggctgggacctgccaggatctcacagctgcagggccggccgcggtgggccctagtgtgttggttcaggccagcgagggctctgggagcgagtctggctgccaggcgtgggctcccagtgtccacgtcaagccctgccggggacggggtggggggggaggcggggtggtgccctgccttccgttctgttagggaccggaagcgatcatggggtgtcaattatgcctcagtaaagctgttaaacgtagacaacatcacaccagaaagccctcctggaagcaaacccagagagctggaaaaaccaacaccccaaacccagctgagcgggcggcatgcattttccaaagggaccgcaagaatatccgctgtggacaggcgggtgcagaaccctcaacacagcccagcgcaccctggagtccatggtg

SEQ ID NO: 96171 - DNA, 1043 bp, Homo sapiens
cacagaacagagcagcggtgatcaagcaggggatgagggaggctgtcttcccctcatcccctgcttgatcctcacagcggacccccaggcttccgtggcacctggcatggccactgatccctcccctccttgcccaaggcattcccctttggaccctctgggggatcctccctgagccccctcaggctctgggctggcctctgccatggtggcctccatccacttggaaaggggcctcagccttgctaaggatgtggcatcctcagagggcctgggtcttacctgcctctgtcctgtcctccctgcctgcccgtggccccctgagctgtcatctgtgacagcttgtcaccttggctaaggagagtctgaaagcccaagggtgagcaagggcattaggggcacggaccgggcattaggggcatgcttccagttggaaggctggccccaacctgccacctcggtccccagggcaccctttgtccaggagaacctgctgatgtacaccaagttgtttgtgggctttctgaaccgcgcgctccgcacagacctggtcagccccaagcacgcgctcatggtgttccgagtggccaaagtctttgcccagcccaacctggctgagatgattcagaaaggtaagtcctcagcctgggccagcccggtatacgtcaacccagccagaccagggccaggcccttagctgggggtggctggtctttaagagggacccacacgcccagagtgggccccggcaaagggtgctgtggagactcctgggacacgtctgtgtggtgaggtctgaaaccggctggatcctgcctgccctgcagccaccaggcactgggtgggggatcgcaggtgtgcccacagagcgggccggcacggtccaagctgcggccccgtgaccccgctgtttctccctggcaactcgtgttggccgcttcaggaggtgagcctggtctctgccttgcattcatcctggctgggttgggcgttggtttctgtcgatcctcctgttgtttacctcctgcagacactgctagggg

SEQ ID NO: 96172 - DNA, 1232 bp, Homo sapiens
ccaaagtgctgggattacaggtgtgagccatggtgcccggcctttgatcctagttttctcatggcttattcaaaggctcccttggcagagcttgctcttcccctccgttcattgcatagtgcacaggtaatatggaggggatttgcccctgtctcagttttgtgaggtggtgtttgtattggaatcttggttctgccacttactagctgggtgggggtaagtgaattatcccatttctgcctctccttcatcatctgtactgacctgcagtcatagtacatctgtacccatcgggttgttgtgaggttggtttttctattcttgtatgacaaacttagcagcttaaaccggcatccatttattatctcatagttatgtatgcagaagtccaggcattacaagattaaaatcaaggtgttggtagctttgctcttatctggagactctagggaagaagctgcttccaggtttatttaggttgctggcagaatccagttccttggagttgtagaactaaggtctttgtttccttgctggctgtcagctggggactactctgtaacttaaggtccactaacttaggactctaattggatgtgcaaaatgccgtcatagcagtacctagatgagtatttgattgaacaaacaggggtcgggaatcttgggctgctatctttagaattctgcctaccactgaggattaaatgaggagatatatagagagcatttagagcgagtcctggtatataacaaatgctgtacaagcattaccgaggattcagtactacaaacttggctctgaagctggccactatgggctgcaggagaacagtatttctttttttcttttttttttttttgagatggagtcttgctcagccttctaggctggagtgcagtggtgtgactcagctcactgcaaccacctctcctgggttcaagtgattctcgggtctcagcctcctgagtagctgggattataggcacccaccatcatgcccggctaatttttgtattttggtagagacgggttttcaccatgttagccaggctggtcttgaactcctgacctcaggtgatcctcctgcctcagcctcccaaagtactaggattacaggtgggagccaccatgcccggctgagaacagcatttctataaaagatgggaattgctggccaggcgtgttggctcacacctgtaatcccagcactttgggaggctgaggcggatag

SEQ ID NO: 96173 - DNA, 1041 bp, Homo sapiens
tgagcaaaacatatcttgaacactcatgcaaaagagtgtaagaatctagcagaggctttattggcctctgagactttggatgccaaagagattcaagttgttcttgaggggaagaaagaaactggaagtgagataactctcttcttgatagggatgtattactagtttcattgaagaatggaagcattagtctctctttggcaatgctttcccatccattcttgagttagtataattcaagggtgtgagatactttgtcagtctattgtcatgatgacacctattgcaaattagcaaccttgcagcatgcatatttaaaaaaagaacaatcaggatttagaacagcttatttgagaaatgtcagtcataaagttgaaagaaatgattttatggttggtgactctactagatgcgaataaaaattgtgcccttagctcttgggaagcatttttaatttgcaagctaaaattgttgaaggatatccattatctcttgatattaccatttatcttttataataaaatattatttggttgttggtaaatcataattttatgtacatcaatggaaacttaagatgcagtaattgtgcttcaaattaactgcatataaaatgtttaaatctaagagtagagagttgtaattcagttacaatcagaatttaaatggttataacattttaaaatggacaataaaaaaggcagaccataagaagtaccgtaaaagatgtggagaaactataaccctcatacactgcttgttagaataaaaaattctacagtcactttgaaaaccacatccatttagttataagcatatttcttaattttaatgtgtcatgttttaataaaatatgtcggaataaagactttggattgaaaaaataatactgagtagtggacatgatttggagagttggtacctttgaaacaaatattttatttctatgcaaatacctttctgtccccactctgttacacatgaatccttattttagtcaggaatataatctttccttccctttcacaatagaaacttaat

SEQ ID NO: 96174 - DNA, 1087 bp, Homo sapiens
caaacattatagatatttgttacgagggaaaagagtttgtcaccgttggccttagcagagtgtggatttcgttgtgtaatggagtagctgcttagccccatgtgactaatatagcttaagcaaactacaattaaacaaaagattctgtttctcagccacgcttgtgctcagcagccagagtagttggaggctgccctcttgcccggtgtgcatgtggagcattcctattgttgaaggcttcggcagacagcgacatccaggcggtcttggctgccccgaagttagcatttcattcccaagactgtcatgttcttgcccctcgtgctcctgacaggtgtgaccagccacgtggatgatgaataccgatgggcaggagtcgaggatcccaaggttatgatcactacctcccgagaccccagttcccgcctcaagatgtttgcaaaggtactggtgagcagggagtgagggagagacacccaggacacacagccccagtcctgactgtacactgccatccacgcccaggagctgaagctggtgttcccgggcgcccagcgaatgaaccgaggtcgacatgaagtgggggcactggtgcgagcctgcaaagccaacggcgtcaccgatctgctggtcgttcacgagcatcggggcacacctggtaaggccggagggagggagtcggggtgggagccgtctgagggcagacggggtctctgacagccacctttccccgccagtggggctcatcgtcagccacctgccctttggtcctactgcctacttcacgctgtgcaatgtggtcatgcggcatgacatcccagacctgggcaccatgtcggaggccaagccccacctcatcacacacggcttctcctcccgcctgggcaagcgggtgagtctgggggccttcaggctggggctgcgggccaggccaggcatttgccactctgtttccctctctttccttgtgccccaggtctctgacatcctccgatacctatttcccgtgcccaaagatgacagccaccgggtcatcaccttcgcaaaccaggacgactacatatcattccggtgggtccacgggcca

SEQ ID NO: 96175 - DNA, 1142 bp, Homo sapiens
cccacagacacggccctcatctgtgcaggaccctggccggcatttgctgacaataacatggccagttggtcttttctaaataaagcaccgcatacagaggaagtatgctgaagctgggctagcatcaggtgtagaaactgcaggctgaggaggcagcagcctgacccggcctgtcagtcatggaagtcccagagtgctgccagcgttgctgttagagcacttgtctgcccgagtttatttcctccaggggcacatcgggggcctgctctgggccatgcagatgcccaggctctgccctggagtagtgggggaaaagttggtatgagcattttaaagatggggaagagggctttcccctctattcctagtggtttcccctcctttctgaagcagaattgcaggacagctcccgagggcagcaggtcagcctccacaaagagctgggggttgtggggtttggtggtagcgctgagaaggggtagggtggctttctctttggcctctttctctttggctttctctttccaccgcgctgagctgctgaccctttcccatggagcgatcaggaggagtctttgattcagaacactgaaacctggcacgcctgaggagagttagaggagacaggaacaaaagctctcccagaggacttagagctctcaggcatcggacgggagggggacacagccacatgcttcctcttgcactgaagagggttgcctttttcctgtttgctaaatgccagacttgtggatggaccaacaggacaacttgcccagcttgaaggtttttaacagaatgaagcaatgggaaaatgttttcaaatttatgcccccccttccacttttgttttaacttagaggagggagtaaggaggtgggcgtggcaatatcagaaagggaaactagcagtgtaataataatattaatagtaccaagtgtatactgcaagccaagtgctgttctatctaaatgctttatatacaatgatttccttaaattctcacaataaagcaacaagaagagacacagtcctacagaggaggaaattgagacatagaaattaaatgacttgcccaaggtcatactgagaaagtcatggtgccagaattctaactcaaacattttggttccagtcttctg

SEQ ID NO: 96176 - DNA, 1028 bp, Homo sapiens
cacggtctggccaggacatatactgtagctggtacacagaacgggactcctgaaacacagaaaaagatgagcaaaagacttaggaaaaaaaagaaaaaagcattaattggccatctactatacaccaggcccacttctaggcatcttccatttatgtctaccagacaataactgaggaagtgggtactagtatgatgcccatttttacaggagaggaaacctctcccctttcaggagcccctttacctcctcctcccctgtcacagtaccttctggaatgtgaccttgagggtcctgagcatgatgtcctcattcagccacttctcctttatctgagtaaggggggtggggcaagtaagaagagggaggagaacaaagatcataggtaccagaagacatttatagaaagcaaagcattcctgattaaaaaatcaaatacagaaaacattttaaaaattcatatagcccaaactttccccaaagctttcattaaggaaacatttgacacaggagcaaaagaggaactattataaaaacacaagcccttttgcaatgaaaagagatgtcttttgttctaaaatgaaacttttattgcatttattaagtactaactgtatgtatgacttgagagagttccccaagctcttttgaaatggtaagagaagtaagaatttcaacaacctaaccaggcacatttacatgacagagattaactgattgtagccaaaataaaaatgcaaaggctatccctatagtaagttctaactatttgcaggctaacaccagagggtttcctgcagtatgagtggactgtgggttaaatcattcaaccttttaggcccaacccaaagcctttccaccctgggaatcttccttgaaaactcccacagctcaccagagtgatgcagaaaagcccagtctgcagtggctcctgctcctgggcccagtaccgctcacaccttttctgcaaaaggtaagggagaaaaggcagggagtgagaagagggagtcagcttcagagctagctca

SEQ ID NO: 96177 - DNA, 1399 bp, Homo sapiens
cctgggacggaccccatgctgtccccaacagctggggtggcactctgccctgggcacccatgaccctctgctgtctctccctgttcagctgttggccggccctgctacctgacgcgccagaagcacccagccctgcccagcaaccggccccagcagcaggtcctggtgctggcggagcccaggcgcaagccatctaccttctggcacagcatcagccggctggcacccttccgcaagtgaactggtccctgcctgacagcacctgctgggccttcctgccagtggcccccagtttttcttccccgaggcccactcggcctggccttcctctgcctgcaagtgagcagggatgggctggggagttgcttgtgccaccaagacgtgccaggtctgtactcctgttgtctttttccctgctcctggtgccctgaagagaccagcaagggggcagaccccgcactcgccacaccgccgctgcagcttgggccccatccgccctctggacctgtgtagggcctcactgctggagcggggaaaccgcagctcagcccaggcccagctggggagaaggcgctacctgcgtgggaccctcttctctggaaacctaatcctcctttcatttcctctgggcaggactctctggccttctgtggcctgcaatgccaggccatgtgcccctctgccctctagttctccaagtccccagcccggccagtggtgccaggcagcttgccacttgggagggcagaagccaggaattccacacccttgtgttgcgcccggagcccgcccttcgcctcccagcccctcaagacaccgctggctgctggacaccctcttcacttgtgtgtgtgtgtgtagcggaaaaggacaagacggtgcagtcggctgcatactcccagtcgggagtgtggtcagtctgcctgctgctgtgcggtagctccagaaccacctcgttcctggttttgtttggattttggcatcttgtttttctaacaacaaacaatggagaaaaagaattgattcttagtgacacagaagattgccttacgctcgtgagcgtgagaagccataagagagagaccgaattctgtggctcagcacacaggactgacccacagcccaggcagcgggtgtgtggagatggcgccctgtcctgccaaggggcgccaggagcagagccagggcctggcgagctggcgtggagcccacaggattcagcagcatggacagtcactcttgcactattccttctccaagccagaaaccacatttaatttcataaataaatttatgaaaagtaacctggctgctagcccgttttctgtgggtgtgcgtgcattttcctgtggccagcagcctctaaaggtggggtgggggctcacctgtcgcagatcac

SEQ ID NO: 96178 - DNA, 1097 bp, Homo sapiens
attaaatgtggtttctggcttggagaaggaatagtgcaagagtgactgtccatgctgctgaatcctgtgggctccacgccagctcgccaggccctggctctgctcctggcgccccttggcaggacagggcgccatctccacacacccgctgcctgggctgtgggtcagtcctgtgtgctgagccacagaattcggtctctctcttatggcttctcacgctcacgagcgtaaggcaatcttctgtgtcactaagaatcaattctttttctccattgtttgttgttagaaaaacaagatgccaaaatccaaacaaaaccaggaacgaggtggttctggagctaccgcacagcagcaggcagactgaccacactcccgactgggagtatgcagccgactgcaccgtcttgtccttttccgctacacacacacacacaagtgaagagggtgtccagcagccagcggtgtcttgaggggctgggaggcgaagggcgggctccgggcgcaacacaagggtgtggaattcctggcttctgccctcccaagtggcaagctgcctggcaccactggccgggctggggacttggagaactagagggcagaggggcacatggcctggcattgcaggccacagaaggccagagagtcctgcccagaggaaatgaaaggaggattaggtttccagagaagagggtcccacgcaggtagcgccttctccccagctgggcctgggctgagctgcggtttccccgctccagcagtgaggccctacacaggtccagagggcggatggggcccaagctgcagcggcggtgtggcgagtgcggggtctgcccccttgctggtctcttcagggcaccaggagcagggaaaaagacaacaggagtacagacctggcacgtcttggtggcacaagcaactccccagcccatccctgctcacttgcaggcagaggaaggccaggccgagtgggcctcggggaagaaaaactgggggccactggcaggaaggcccagcaggtgctgtcaggcagggaccagttcacttgcggaagggtgccagccggctgatgctgtgccagaaggtagatggcttgcgcc

SEQ ID NO: 96179 - DNA, 4837 bp, Homo sapiens
ttgaatacctactgttgacactgtccatcttgagccttgcctggaatgtgctctaaccccccacctgcctgctacaggaaatagggctccagttgcaattgggggtctctaggaaggaagtgagaaccaggtccagcagttttgcccattgctgccctttccgaccctgctgggcctcatcctacttgagattttggaatagcggtgccggaagagctctgtgtgactgagtgtctgtcttcctttctgcaggtttgaggacggagctgtgcagtcacattattggggattccacagctggtgctgcaggccttgcgcctccaaccaggactttcttcttaatgctctcgacacttagctaaacacgactatatcccggcccagcaggccccagcgccgttagtctccagctgactctgtgggttggtcttaaagcaaattctgttttgtggactgcctggcaattttttagctaactgtaatgataaaaagggagtattaatctattctgaatcatatctagttgaatgcatgtttaaaaaaacaaacacaaaaagcttgctcaatctacctgcagtgactgatgcaaaaccatcatatgcaaaatccaaaggaatggaaacgtattttacaacttgtatcactaatgcactgttgtaatgtatgcaaagtcttacagttataagtgttaaagtgaatttcttcatagagcatctgaaatatcttagatgattcttcaaccttttggggttgatgtgggttgccagttagggatgtggacattttagttttcagcgacctgtttctttggcactgactgtcctgggagggagttgcgaggtttgggagagagtagggaagccacagctgcttgggtgcagctggttcatggacatccctttgagtttaggcttggtggagtcagtggaacagggacatgcttaaagctcatcatgaaagattatggtagtgtggccagtgaaatttggggcgaggggggtggtttatgtgtcagcaaagcagtttctctgctatctaaattttcattacagttctcttagagagatgatgtttttatatgtctttattggaaaagtcctatgtaaaactaaattattttcctgggatggaagaaatgtgaaagagaaacagccatgcttgcaggaggtattgtcctctgctttatttagcttagaaaatcattcctttttttttttttttcctggagaaatgtttgaatcagctgaaaacaggtaggcattgctgtttttccccaacaaagaagggcaaaggtttcagctgtatgttatgaagaaagtggtatatttaagaatgagttaaaagggaacaaaactttatttaaaattcctccaatttcttgtagaaaggcagggccgtggatatgtctggaaatgtagaaacctgtagctgcttctgggatcacccacctgatggtggtgacttgtctgctgaggccggctggaggggacgcttagagatggggcgagggggaggccagtgtctgttgtctgcgagcctctcctgccatctcttttgcagctgagggcacttggcacaaagcaagcacagacagcagagagggccaggcagtgctggagtgcgtttgctggcagggtttattgtgggagaggaatttgagtttaggatctgaatcttgtacataagaaatgaaaaggcttccctccaccccgcccccaaaatatgcccgtcctgtatccatgagagtgcatgtcggttctcagtgagggtcagagtgggggtgggggatgtaaggcctgggtccctttcagcggcctctagggcaggagcgtgcgtcttcttcccagtgcagtggtggtttgagtgctgtgggctctggtggggagggggctctgctcctcttcatttgctggtagctgggtcagggcactggcgcccagtgaggatgcccactagcattctgccccagttggttggtggggggacacctgaccactgagcctttggtaaccttattttttatagtaagtacttcttataattttctttttcacatcttattttataagaagtttaggaatatttttgcatggatcattgtaaacagcagattctttattcctgatgtctattaacatagaatgtttactgataagtactttaaattgcttcatgagcacttaatccatcttagtgtctatgtgtgggggcagacatttaccgcaggcacacagtttgtgcccctttcttcaagtctctgttggtaattccatctgtttagtggatggttggcaggattagtaggttctaacggttccaggggttcagctgaccaagtagcagagaagtcttttttcccaattgagtgctaatagattaggataaaatactcacaatgttagtgtatgcttttaaaaagccccacacaacaaaatggaaacatacatgtacaactcctgtgagggctggagtcttggggttcaggaggaggttagaagttacaggcatctcttcaggcttgcttggtacttggcacacacaggatggtgttttaaagagtgggctgcaccccccacacgccatttacatcagcttcataaacacttttcttcctccctgtaacttaaccttttttcccttttatgaagttgagaggctttatgaaataagtttgcattgcacatccgtgcagaaatctttctgactttgaaatttttaggacgtcagctgtcagatacgaaaggtagatatcaggtaagaatctggacttaggaaatagtcacaaaactgtcataggttgtaattttatcaacattcgcttctagtaaaattaaagtcaattaagaaatagaacttgggtcaaaattctgttacaaagcttcataatttgtcccgaagcatatggtggagcattctgagaaatttgctttttgtgtgtttgacattcctaatttgggagtccttcagctgaattactattcttttagaagttgagacagcaggtaagcaaaggacctagttcatgtaaacatggacatcatgatggctatttaaaaaatatttgttctacaccttctcccctgaggcttggggagtgtgttcagccgctgcagtttctctgctcatggaggtcttgtttggatctgtgctggcggctgagcatttagtgtgagccagtgacccatgaacttgccgctctgtgagggccagagtcagggccagtcatggtaatgggcctgaaggcacttccagaaccttttatgtctctcgtgagccatctgttaagaacgttcttcttggtgtggtttgtaggcctacctgtcgctattctgggaaaccttcttgagtgctatgcaaatgtgttcacaggcaatgggggtggtcctgagccttggggtgggcacctggtcagtgagtgtcttgcccttccccagctgggcatacagtaccttgctctttctggtggcatcatctggctgtgatgaatgaggtctaggaaataatttgcatgtgtcttgggggacacaacagtaacgagaggaaatacattattacagcaacttgcgacgtactaatacctgtcagtgttggcccccgtaaggtatgtaaggcacctgtgagtgccagtgagtgctggtgaaaggccaacatgtactagttatgtaagtattggtgtctgctttaaaaaaggagacccagacttcacctgtcctttttaaacatttgagaacagtgttactctgagcagttgggccaccttcaccttatccgacagctgactgttggatgtgtccattgtcgccagtttggctgttgcccggacaggacaggacctccattgggcgcagcagcaggtggcaggggtgtggcttgaggtgggtggcagcgtctggtcctcctctctggtgctttctgagagggtctctaaagcagagtgtggttggcctgggggaaggcagagcacgtatttctcccctctagtacctctgcatttgtgagtgttccctctggctttctgaagggcagcagactcttgagtatactgcagaggacatgctttatcagtaggtcctgagggctccaggggctcaactgaccaagtaacacagaagttggggtatgtggcctatttgggtcggaaactgcatgtttcagaaagtttgtctctttttcctactcattatttgaagaagagagagcctgtggggatagccttatcttggtccacaggactgaagtgaagtcacttgggaaggggagacagaggatgagcggcgtctgtgtagggacccccccccgggcctgcagaagggtggtgtgctcccaggactggcatgacaggtgtctcctcctcaccacaggctgtgcccatgagtccctgtgcagaccagtgggcaaggcagctgggccagatctcaggccagccgtttgtgctcctagcagggttgctgtgctggccacacggagaggccctagagagcctcatggattgtaactaaagaagaaacggttcctttttgtttttttaaaaatgatttttaaataccgttttttacaccgttctctcggtactttttttaagctaagtcagcattgtcttccagtgttaaaggcatccctcacctctgcattgaacttacgtatccatgccaaggaatggaatttccatcctgagccagttcagttaggtgtcaattgatactattttaattttttatgcaatctgatgagatgagctcagatttaaaaatctcaaaagcacgtttattgtaacaagaattgttatgtattaatactgcagttttcaataaagattgacttgtgttgcatattgtgg

SEQ ID NO: 96180 - DNA, 1737 bp, Homo sapiens
gttcccccaccagcggggctgtgccaccgtactcctcctccccgaacccctaccagactgccgtgtaccctgtgcgaagtgcctacccccagcagagcccgtatgcacaggtatgcttgggtacacactgctgtgtgggaaggggtgataccacctgggcgttcatcctttggccctgggaccctgtgtcagttgtctctcttctccccacagcaaggcacgtactacacacagccgctgtatgcagcacctcctcacgtcatccaccacaccacggtggtgcagcccaacggcatgcctgcaacggtgtaccctgctcccatcccccctcctagaggcaacggggtcaccatgggcatggtggctgggaccaccatggccatgtcagcaggtaagtcctcgttcctgcggtgtctgtcctatggtgtaccctagagctgggggaggggagagctcacgaatcctctgacccttggctctaggttttcatagctgtagttgtgtggaaggacagaaaattctttggggaagaaacagcaggttatcttttattttgcctacctgagtgaccccttgtggaggcctctctgaatctgatggactcgctttgttggtgaactgagccatttggcaatgcaggatgtgccccctctcctcccaccccctatgaccatgtaagacttgagtagaaggaggacactttgtgtaccggggttgctctggccttcttcctttcccttgaggggagcttgtctttgcaggtcagttgtcttcatcgggatgttttcatgcatctaggagagctggtcttgcgttgatagaagaaacagctgcctgtagaaatcctttggcattcatctaccgtactttactttgcaaggcctcctctaaggaaaataaaccatggaaagatgaggcccctggctgggatgggcacatctccgcggaagccctgggggtttgatctgatgtctagggattgggtgaccacccaatctgtatgaccacccatgtggattcacctcctggtctctgggtcaatatgaccacctttaggtcatgcccacacaaaagcgtactgttccctccttgtttttctggacttgacttcagtgtaaggaaattatgccagagagaaaagcattccgggttattatgtgtgcttcaatgtagactctgatttggttttccccatacttatctgtcaaggaacaggaaactgggcatagacagaaactgctggtttgaggcacagggagggagggcagcaggcaccaggttgggtgccactgtgttggaggtggtgctggtccataaagggactcaagtagttgttgagtttctgcagttgtaggaaaaatagatttctcttaaagaactcagaagctcatgtagtttagaatcctcatttcttttttttttttttaattttaaaatttttaatatttttttttaagacagggtctcatcctgtcagccaagatggagtgcagtggtgtgatctcagcttactgcaacctctgcctcctaggttcaagtgattttcccacctcatccttcccagtagctgggactacaggcgcctgccaccatgcctgcctaatatttttttgtaccttttggtagagatgggatttcaccatgttggccaggctggtctcgaactcctgacctcaggtgatccacctgcctcggcctcccagagtgctgggcttacaggcgtgagtcactgttgcc

SEQ ID NO: 96181 - DNA, 1683 bp, Homo sapiens
gtgtaaaattttttaaaaattaactttaattattattactatttttctgagacagcgtcttactttgtcgcccaggcagaatgcagaggcataattacagctcactgcagcgttgacctccggctcaggtgatccaaaattctttatactcagctcattttttcaaacttgaggtataatttatgcacaaaacacccacatattaagtgctcaactgggtgggttttgacagttgtacatgcccatggaaccaccactccaaataaaacatggaatactttgatcatcccagaacgctttcttcgccctctcccctctgatttccgtcaccgtaggtaaatttctttgttgttagggaataaacgggatcattgctctatgtgctgttctgtttccagcttctttggaaagctcagcatgttgtgagattcatccatgttttttccttttgattgctgagtaatgtttatagagacatatcatgatttatcctttctccagttgatgaagatttggattagttcccatttttggctactaggaataagattgaacactttttacaagtctttcgtggacctgtgttttcatttttctaggggaagttttgggagtggattgctggatgttgcgggatgtgtctctggcttgcaaagttgcactgtctgacacggacagtgtgtgagtgctccacccctcctgctctcacccatgggaatgtgagatgccataagcacttgtatggaggtctgatttacatattataagttaatccttctcagtgtacagtttggtatgtttggacagtcatacacagctgtatgaccgtcaccacatttgagtgaatgcactctttggaaaggttctcgcatgcccctctggcccctggcaccattgctggggttttgatgactctggattaggttggtctttcctagagcttctgtcagtacatgcatccagcatgtgtccttgtatctggctcctttgacatggtgtggctttgtgattcattcatgtgcttgtatggatcagcagtttgtccctttggcttgctcagtaggatttgtatggatgcaccacagtgtgtttacccatttgtctcctggtgggcatctgggccattgccagcttttgatcattgtgaatatagctgctgtgaacatagctgtccagagaccctctccctcccctgagaccaaacccctcttctctgttggggtcaggaagggacacctaactgcttattcagcaaactcaaccactctactagatggggtctctttatctgcttctggagacgggttggtggccagcagtttgcagggctttggggaacggctctcttggtgccagctgctcctcgctgctggctgagtgccttcttctcgagtctgctcaatcatcctccacttcagcttgccaggcttcaacatgctgtcttctcttccattcttggtgagttttatgtcttttttctcttaatctgctttattgtcattttcatgtcattttgtgtggggacaaaagcaagtatgtgtgttcagctttctcccttaacccagagggctttttaccatagagtgcttagccagtcctggtgctgggcaagtttctcctgtttttgctgtaacaaacaacactatgatgagcatgcttacagttaagtctctgtgtgtgtat

SEQ ID NO: 96182 - DNA, 1038 bp, Homo sapiens
gtcacacctaaaaattttttttatcactactgagattgtaatcagtgttcatatttccagttatctgtcatgaatgtttttaattgtatgaagaaagggaaccctgtgggtttgtttgtttaaactgttggaagtttggaatgagattcccaactttgaagtctagcatctgttctcaggatgtgacacacagagggtagctctatgttttgacatttttataaaaaaaatatcatcttggtcagataagagtttggtgactcctgggaggatctcttttcaggctagtggaaatatgaggcagaaaactgggattaagccgtacagtggggatcccattcggcagtgtctcctttaggtacagctgaaggtacccgctggtgtctggctgctgcatggtggtgggaaatgaaagaggtggtgtggctggggagaagggagctatccaagatgacccttgacgtccctcatccccacagtttctttcatttgagacatccttgccccacctgcccctctctgagctgactcctcattgcttgccaagactgcataaaatgctgctatgttggtggtttgttttcctgtgatttcttttccccctgaagccaagcaccttatggagagggctggatctgtcctgatcatctccgctgtgacagggcatggccccatgttgatggtgaatagcctctctgtgttggtacaatgccccagtcaccattcactagtcacatgtgtgcccgccacacaccatgcttcctttttgcatttcttccctgagttagctagtcacttagggggaattggactgtcccgggtctcctgggagtatcagtacatggccggacacactaccttttcctttataattctttgatggcattcacactacctttttctttataattaaagaaaatgttatacaacctcgttgtggcgtaattggcatacaactaagtgtacagatttaaagcttcagtttgatgagttttaacctgtgtacacctgtgaagctttccttttcactttcctttt

SEQ ID NO: 96183 - DNA, 1341 bp, Homo sapiens
agacatgctgttggccacacatagtgctcttggggctgcttaagtctgtggagttctggggaagaaggtaagagcgatggctttgcaggagctctagtgattgtcgctacttcagttgatgacatgagattgttctttatttttcttcagctggttttcccatgggctatgcagcagcagctcctgcctattctcctaacatgtatcctggagcgaatcctaccttccaaacaggtatgtgctgggtggtaaaatgctttgtacgtacagctgggagagaaaggtgaaggggtggattttgagaggggtgggtatagaattaggacttggttgagtcgatttctcaagttcattaagttagcctgttgataagtgcaacaaaagcttaattcttactgcactgaagctttatatactgtgtttctcatgtcctcccacaaggcaaatctgtaatcactaggttgttaactctgccagagcatctgttcatgaaatagtatcacctactagaaattgaagaatttcttgccatgccaacaggtggaatttccatgttaatgtttttagagataatttttggttagactactttagcactctgataatattttttaaaaaagtattattttccatgtaatgtatagatgaatatttttagattttggaaatcactgttaatattaaaagtggaattggtttgggtctgaatcttgaggagattggttatttagtgggatttcctgctaggagcctgcactctctggtgttggttccttttggacttttttcacccacacggggctttgcctttctgccgcagcagtggtggtgcacactctgatctgaggctgtggtttggccttaatcctgggactgctggggcaactttatccctcaacagtagcttcacacagttaactttgacagaggaggagacaacagcagtgtcctttccccagattcttcctgttttgttaatcataaaattctgcctttatattctgtccttacatccatctcttcgtttccatttccacttccactatgaccctatatgaccacccttgttcagaccgtagttcacaccctgagaaaaacgttcttgacttggtcttcctgctcccaagctttctttccccgggttagtgttcttcccatttaaaccagagcgatgctcccagatgaatttttctcagtggtttcccatgactgtgagacacagttatgcctagagtctcgactttcagtccctagctgtttgccatattggcccattttttccctttagagtggttttccttttgtgttttgccttgaaagaaccatccatctcgtagtgta

SEQ ID NO: 96184 - DNA, 1068 bp, Homo sapiens
gtgcgtcagagagaaagggggctgaacttgtcctttttatcaggaacccactttcataataaagccgtcacctattaaatgtcccacctctcagtgctgttaaaatgacaaattttaacgtgagctttggagaggacatatgaaaacatattagctggtcatgctggagaagttggggatcagaacatcaaaatatggcaaggcgtggtaactcatgccggtaatacccgcactttgggaggccgaggcaggtggatcacctgaggtcaggagttcgagaccagcctggccagcatggcaaaaccccatctctactaaaaatacaaaaattagctgggcgtggtggtgcacgcctgtagtcccagctactagggagactgaggcaggagaaatgcttgaacccaggaggcggaggttgcagtgagccgagatctcaccactgcactccagcgtaggcaacagagcaagactctgtcttagaaaaaaaaaagaacatcagaatgtgaaaaaacctgaaatgaatttagaagtttaaaacagtttcttacaacaaaaaataatagcttttaagtcaaaatatgtaatgtaggaaatgtcggaattcagtgaaaatgagtgacctttacataggcttagctgttcactggtagcagcaaaaataggcccttgagtccaagctagacttgaattctgattcttccagactttgtgcagtgaagtcagatgagggtaacaggacctagcgtgtgatacccttagcactcttactactcttgctaagtaattatgtgattagagtttggaatgaaacttccagaaatgttataattgaggcttggcgcggtggcttatgcctgtaatcccagcacttcgggaggctgaggtgggtggatcatgaggtcaggagttcgagaccagcctggtcaccatggtgaaaccttgtctctactaaaaatacaaaaattagctgggcgtggtggtagatgcctgtaatcccagctactcggaaggctgaggcaggagaatcgcttgaaacggaggttgcagtgagccgaggtcgcgccactg

SEQ ID NO: 96185 - DNA, 1723 bp, Homo sapiens
tctctactaaaaatacaaaaattagctgggtgtggtggcgcacgcctgtagtccctgctatgcgggaggctgaggcaggagaatcacttaaacctgggaggcaaagttgcagtgagctgagatcatgccactgcactccagcctagcgacagagcgagactccgtctgggaaaataaataaataaataaataaataaataaataaataaataaatacaggaaattgcaaaaggaccactaaatccactcccatctagagtcaatcactgttcatatttttatatatttcttttcagactttttttctgtttgtgccagggatgcacatttttatacacataggtgtttatatgggatcatactgtgtaatgcaggatgcagtataatactctactttgttttcacttaacattgtattattctgtttttaaacatttcttgaaaagcagctgcgtgatatttcatgttctggatatgtcttggttaacttaactatcctctgttagaagaacattttggttacttgtagggttttccccatgttttttttgcgacaaagtctcgctctgttgtccaggttggagtgcaatggcatgagcttggctcactgctaatctccacctcctggattcaagtgattcttgtgcctcagcctcccaagtagctgggattacaggtgtgcgtcaccacacttggctaatttttgtttgtttttgttttgttttgttttgtttttttgagacggagtctcgctctgtcgccaggctggagtgcagtggtgcaatattggctcactgcaacctccgactacctggttcaagcgattctcctgccttagcgttctgagtagctgggattacaggcacgcgccaccacacccagctaatttttgtatttttagtagagacggagtttgaccatgttggccaggatggtcttggtctcctgacctcatgattcctccacctcagcctcccgaagtgctaagattacaggcacgagccaccatgcctggccaatttttgtatttttagtagagatggggtttcaccatgttggccaggctggtctcaaactcctgacctcaggtgatctgcccacctcggcctcccaaagtgctgggattacaggagtgcaccaccgtacctggcctttccccttgcttttagtggacatatagctaacaatttttactccttagcttctgatggactgaggagaattgtgaaaaaaagtttatcatgccctggtttggcacccattaggacatcgagtgtcccttttctgttcttcgctggttgggggcagcatgaaatgcattgttttatagcagcctagagaaaggactctagctacctgctttttggggactggtactggagaaaaatctgagagcaaaagtgcttggctaaattcccttttttttcttttagtttttgaaatcatgaatcctgtttatagtcctggatcttctggggttccctatgcaaatgccaaaggaattggttatccaggtaagtaagtaaaattttgttttcatttttgaactttgaatacttggtatattttcatgtcactaagaatgctttctattgacaaacgcagctcaaagtggcttagacaagaaagaaaatacctggaagtgaaaaatcaaatgataggactggatttggtcaaaacttgatctagtggctccagcagttgggaccaggatctagtttct

SEQ ID NO: 96186 - DNA, 1974 bp, Homo sapiens
ccaccgctggctaatttttgtatttttagtagagacggggtttcaccatgttggccaggctggtctggaattcctgacctcgtgatctgcccaccttggcctcccaaagtgctgggattacaggcgtgagccaccatgcccagccaggtctttcttttttctttcttttttttttttttgagatggagtctcgctctgttgcccagactggagtgcagtggcgccatctcggctcattgcaagctccgccttccgggttcacaccattctcctgcctcagcctccccaagtagttgtgagtggctaattttctttttgtatttttttttagtagagacaggtttcaccgtgttagccaggatggtctcgatctcctgaccttgtgatccacccgccttggcctcccaaagtgctgggattacaggcgtgagccactgcgcctggccaggtctttcattttaaagatagagttttcttctgattatgatttgattttcaagttaggaatttttgctgtcatctttttaaaggtaatctgacatttgtctattctaatgcaggtgtcaaaccacccataagaattctgacagttgagtcatttcaaatgggaaactaaaaatgtggtaagctcggcccggtgcagtggctcacgcctgtaatcccagcactttgggaggccaagactggcggatcacctgaggtcggaagttcgagaccaacctgaccaacgtggagaaaccccgtctctactaaaaatacaaaattagctgggtgtggtggcacatgcctgtaatcccagctactcaggaggctgagacaggagaatcgcttgaacctgggagtcagaagttgcggtgagctgagatcgcgccattgcactccagcctgggcaacaaaagtgaaaactctgtctcaaaaaaaaaaaaaaaaagtggtacgctctagatccagccttgggtttgggtttcttagtccacagcaaattagactggaaagttggtggttgcagggagattttagtagcactaacatttcaggtagattggtgatggtgtgttttttctttagttttgcattatgcagaattgaaaatgcggcagtacagtgcataaccttatatgcaacatcttgatgtaaagattattagcatttacataatttctacttgatgtagagattatttgctctttttgtagaaatattttaaagtatagatgtatcattttcgactttatatactttattgtatctttacaaatttatgtaactatacataatcacagtactgttaccaggattaaacataattgtttcataccagctgatacccagtattcagtcgtgtcccagatatctttaaactctgtttacagttgtttcagtctaaatcgagtccaaacaaaattcagctattgcttttatgtctatatctattttaatttagaattatctggccttcctcctctcccgcccccttttccccccaccattgccttattgaagaaactgggtcatttgtcctctggaatgtcccacttttggggtttgtctgattgtttcatggtgtcattcagcatattccctcctactcctgcgtttcttgtaaactggaagttagatgtaaaggctccatttgatttttttttccccccagacagagtcttgctctgttgccccatctggagtgcagtggtgcgatttcagctcactgcagcctctacctcccaggttgaagcggttctcatgccttagcctcccgagtagctgggattacaggtgtgtgccaccacgcccagctaatttttgtatttttagcagagactgggtttcaccatgttgcccaggctggtctcgaacgcgtggtctcaagtgatccgccctcatcggcctcccaaagtgctgggattacagggatgagccactgcaaccagccaagtagagttttattattattggtctaggctataagtcagg

SEQ ID NO: 96187 - DNA, 1269 bp, Homo sapiens
gtcgcggcgcgctcaggcggaagtgaggtcggcggctccggtggctgcgcagcgtcggcggggagcgcgggctgcggagaggcgggccgggccaagcggagccgagcgagcgggagcgcggcgtccgggaggcggcggagacgcggggctcggagggtcagcctcttatcgtagcaggtctcctcggcacgccccccttgtttcgccccacggccaagcccgccgcgggccggcgtgcgctggtcactgaggcccaggtcgccgccgcggcgcggtgagtgggggcgggcagcgggcgactgcgcgtccaggccggaagtgcggcgctttgtgcggccggctcggggcggcgccaaggtcggcccgcggctcggggtcgctgggcgtctggaccggcctgggctgcgctttgtgccgcgggcaaggccgggcgggggccgggggcggagctcggccggacacgtacgcgtgcaggtgcggtccgggcggcgcgggcctgccgcctaggtggccgaggtggcttcgcggcgcggggcgttctcctaaaggtcggggtcacagccgtcaggaatgcgagcgtgaaacccgggggcagagctttgtgacaatagtcatttccaatgtgtaactgctcactttgtctacccacgaagtaaagataatttttatttttatttttttgcttggcggaatctgagcgttctccttccagcttgaaaaggcacgatttaaattacagatttttaagatttccttcagaaaggacgtttcgtggcctagcctgggttaactttgaaaaaagagtgcagtgcgcctttacgacgtccacaaataagggtatttctgttttatagtgtatgtgaacatgaagtgtgcatctcatgggctgtttgagttaatgtttaatcattaaagtcaaacaagaatattttgcagtgttttcgcatgcaaggaagctttataaataaaaaggtttatatagtttccactccttaaactttcaggtcatccttgtgtaatttgagatcacttttctcaaatactatggatgaaagattctagattaaataaaactttttggttttggcaaaaacaggacacatttttaagctcttgtagatgaaggagtgggttatttttgctttgacagccaagatttgagcagtgtaaggctattctaattttgaagctagtgttgcagaaattgtgaagatcttgcttctctttgtctttacaaagcaggcttactttggtggagttccgtagttt

SEQ ID NO: 96188 - DNA, 1345 bp, Homo sapiens
agttatatgtgcagatttaaggcttaatttaaaaattggtttgcgtgcatactaagaagctcatttgctttaagtgagcatttcctttttgggcttttgttgggcactgtgtgtctcccatgttccccatttgtctgccacccaataagcatggtgtcgagggctgaagtagaaatcagaggctagaatctgaaagcttcattagggttctgctttttgcagattagggactttggcccttagtgagctgaggatcttggtttcctcccagtgtgcggtttcagggatgtcggccacatgatgtgcctgttgtggaggagggctgggtcgccagtgtgacaggagacagcagatcccttttgtgaaaggagaactggtactttgcgtgatgttaaacttcacaaaccgctgctcagaaatctgctattttccttctcttttaggactttatggacagcagcctgctaaccaagtcatcattcgagagcgctatcgagacaacgacagcgacctggcactgggcatgctggcaggagcagccacgggcatggccttagggtctctattttgggtcttctaggggcctcaaggtcttgatgtgcatagcttctgataaccctgtgtgcaataatatgatttgcagggcatttctgtttgtgacaaaagtttttaataatagttttaatcattcctttgaaagtagtgatgtcataattgtactaatccacataagtaccacagagaagggtttgaactgtgctattttgttcaaatgttgactctccgggggcactggctcattccaagactgttcttgtgcaactctcagaataccttatttgagcatacctgttttgaaaggcattttctttttagagttaggtgtagtgcttaagggttaatttattttcatgttatgccagtaatatagtgttgtatgcctattgagtgattgtggcaagaaaagctacagcttctttgcgtttaactttttcaaaccacagaccagaactggttgcatgttactttaggagttgtgggttggtaagctcccaggtacttcccgaggctatggtgtgagagcccccgtcctgccctctggggctccacaggcccctggcaaggccgatggctcaggatgatggggcacagcccgcctttgaacaatcatgcttcagaaatctgcctgaccctagctgctgctgctgctcactttattcttgtatggctttggtaggcatacttggagaacatatcccacattaggaattgatttaagcctgagagtttgagggctttaatcctttaaaacttggagaagctggctgggcgcggtggctcacgc

SEQ ID NO: 96189 - DNA, 1049 bp, Homo sapiens
gggcttctccgtccaggtccctggagctcccggtccctggagctctgcacttgggggcacaacttgcatgaggcagcgcgactctggcgactggctggccatgccgtcccgggctgagaactatgaagtgttgtacaccattggcacaggctcctgtggccgctgccagaagatccagaggaagagtgacggcaagatactagtttggaaagaacttcattatggctccatgacagaagctgagaaacagatgcttgtttctgaagtgaatttgctttgtgaactgaaaaatccaaacatcgttcattactatgatcgtattattgaccggaccaacacaacactgtacattgtaatggaatattgtgaagaaggagacctggctagtgtaattacaaagggaaccaaggaaaggcaatacttagatgaagagtttgttcttcgagtgacgactcagttgactctggccctgaagtaatgccacagacgaagtgatggtgatcatactgtagtgcgtcgggatctgaaaccagccagtgttttcctggatggcaagcaaaacgtcaagcttggagatttggggctagccagaatattaaaccacgacacgagttttgcaaaaacatttgttggcacaccttattacatgtctcctgaacaaacgaatcacatgtcctacaatgagaaaccagatatctggtcattgggccgtttgctgtatgagttaggtgcattaatgcctccatttacagcttttagccagaaagaacttgctgggaaaatcagagaaggcaaattcaggcaaattctataccgtgactctgacgaattgaatgaaattattatgaggatgttaaaggattaccatcgaccttctgttgaagaaattctcgagaaccctttaatagcagatttggttgcagaagaacgaagaagaaatcttgagagaagagggcgacaattaggagagccagaaaaattgcaggattccagccctgtattgagtgagctgaaactaaaggaaattcagttagaggagcgagagcgag

SEQ ID NO: 96190 - DNA, 1110 bp, Homo sapiens
tagcccatggaacagggataatctccccaaaggatgtgggccttcagggccagtgttattttgtgcatctgctgcttgctgaaaggcctccacatcacccagtcataccttaaatccagtcgggcaccaatccacaaactggatggtgcgcttggtcttgatggtggcgatggccgcgttgacgtctttggggaccacgtcccccctgtacaacatgcagcaggccatgtacttgccgtggcgagggtcacacttgaccatttgattggctggctcgaagcaggcattggtgatctcggccacagacagctgctcgtggtaggccttctcagctgagatgactggggcataggtggccagggggaagtggatgcgggggtacggcactaggttggtctggaattccgtcaagtccacattcagggccccatcaaatcgcagggaggctgtgatggaggacacgatctgcccaatcaggcgattgaggttggtgtacgtgggacgttcaatgtccaggttgcgccgacatatgtcatagatggcttcattgtcgaccatgaaggcacagtcagaatgttccagggtcgtgtgggtggtcaggatggagttgtagggctccaccacggctgtggagacctggggggctgggtaaatggcaaactctagcttggacttcttgccgtaatccactgagagccgctccatgagcagagatgcgaacccagagccagtgccgcccccaaagctgtggaagatgaggaagccctgcagtcctgtgcacagatccgcctgagagaaaccacacaacgtgagccaatgcccatggaagccacaccaccaacctccaacaagccagggccgcttctctttgcctctaaagagttgatatggattcaaatcatccataataaacatgcagtacactttgaagcaaagaaaagcaaagatctacggacaaatcaccactgcagactcagtaggactcaagatgctggtctaagtttttgcttgtttgtttgagacggaatcttgctctgtttcccaggctagagtgcagtagtgcaatctcagctcattgcaacctccgccttccgggttcaagcaattctc

SEQ ID NO: 96191 - DNA, 1085 bp, Homo sapiens
ctctgctcatggagcggctctcagtggattacggcaagaagtccaagctagagtttgccatttacccagccccccaggtctccacagccgtggtggagccctacaactccatcctgaccacccacacgaccctggaacattctgactgtgccttcatggtcgacaatgaagccatctatgacatatgtcggcgcaacctggacattgaacgtcccacgtacaccaacctcaatcgcctgattgggcagatcgtgtcctccatcacagcctccctgcgatttgatggggccctgaatgtggacttgacggaattccagaccaacctagtgccgtacccccgcatccacttccccctggccacctatgccccagtcatctcagctgagaaggcctaccacgagcagctgtctgtggccgagatcaccaatgcctgcttcgagccagccaatcaaatggtcaagtgtgaccctcgccacggcaagtacatggcctgctgcatgttgtacaggggggacgtggtccccaaagacgtcaacgcggccatcgccaccatcaagaccaagcgcaccatccagtttgtggattggtgcccgactggatttaaggtatgactgggtgatgtggaggcctttcagcaagcagcagatgcacaaaataacactggccctgaaggcccacatcctttggggagattatccctgttccatgggctaggcatgtgggcataaattagtgaaccagagttgataattgattcagtgatttctttttttttttttgagacagtcttgctctgtcaaccaggctggagtgcagtggtgcgatctcagctaactgcaacctctgcctcccgggttcaaacaattctctggcctcaccctcccaagtagctgggattacaggtacccgctaccacgcccggctaatttttgtatttttagtagagatggggtttcgccatgttggccaggttggtcttgaactcctgacctcaggtgatctgcctgcctcagcctcccaaagtgctgggattacagtcgtgagccactgcacctagctcagtgatgtcttttgaactctctgtc

SEQ ID NO: 96192 - DNA, 1482 bp, Homo sapiens
gagggaagggggtggcgcttgcattgtccagaggcgtttggagcgcagagggggtgcttggctcctcagggctgcgggaaccgggcgatgtggatggatttggtatagggcccggccctcctgggaccgactgccaggcctggccccgggcggccgccgctatctgcacctggctctggcggcccagttagggaagatgagtacttctgggtctgtgacgttgggaaggggcaaactcagttgtgtgtggggttcgggtggatggcaacatcgcacttgtaaacatacccagaccaaagtgttagaggtatctcattctaaggagatgcgagtgggaagctgggtcgttgaactgacccccacccccagtttattgtcaggacctgatcaacttggtttttactccaagagactccccagcgttaatctctgtgtcatgcacatcctaagccttacggctgcatcagaactcccttgtctgtaccgagaaaatcactgaacagtttttcatgaagggcaaagcatctgagatttgtggtgaatgaattttcaccctcctccccccgtcctcactgctttcctataaattatttttgttgctattgttcagggctgagatgggcatcctcagatttatctggcagtaaagattagagcaaagctctcctgtctttttttttttaaagatggagttttgctcttgttgcccaggctggagtgcaatggtgcgatctcggctcactgcagcctcagctttccgggttcaagagattctcctgcctcaacctctcaagtagctgggattacaggcgcccgtcaccacacccggctaatttttaatttttagtagagacgaggtttcaccatattggccaggctggtcgcgaactcctgacctccggtgatccagctgcctcggcctcccaaagtgctgggattacaggcgtgacccaccgtgcccggcctagcgcaaagctctcctttctagagagctttttagttttttccagtttagtttttttctcttgccctcctccatcaccctgcttttaaatgctcatttaaatgcccatgttgtcagccttacctggagaggccctgaaaagcaaggtgatggaggaggggcaagagggtgactgtttcaccctttgtaggggctgggagaagaggagaaggaagttgctctgtctggcatttgcctctgctggggtggctccaactggatatagggtttgggctttttctttcatctcctcctttgtttcagcctgccttcttcactctgggacactcgtgactggagtcattaggagaaaggaatctgcagtcctggtttggagctttgcagggtttgcacctgcacaagcagccaccagttggttttaaggtgaactgcaatggcaggaggggtggagggctctgcccagatctgccggtggcaaccgtatgctccaactgctgctgcagagcagctcatgggct

SEQ ID NO: 96193 - DNA, 1047 bp, Homo sapiens
ccaggaaccattctagttgtcactctgacatttgacacaacttttccctaatgttccatgtgtctcaggatctaagtcactacagagacatccctggattaattttggcaggggatgggcagtgactagtgtaccctgcagagatgtgtagaaaactgcagagcagtcatctgtaagatctgggttggaaagtttatgtcctctccttcccagggtcatacagacaggtgactgctctgctctttctcaagaggctttaagcgcagtagggactcactgtcttccttcctccttgtgtgtcatgggctcctggccctaggaggcatggaggaggagtggttgggggtggcattctgtgttgatgctgttataacaggcctcaggaaagtgtgtgctgttagctttgtctctgggggtttcgtatggtgagtttcaaagtttggggaaggctcctggtgtcaggtgaacaggttgatgggtagttttgattactgtaattcagatgatacttgagaaaagggaggaaataattttatacggggggattgctatctgggtgacaattgggtgatagggtgagaaataaataagcatttgggacttgtcagtgcaggttttaccaggctgcctttaaagttaataattgctttgaagtatggaatcactcttagtagccagaagatggctacactttcaaatttctctttgaaattaagtaatgatctctccaacccttaaagtctctaatctaagccatatccctatactgttttacatcctatgtcaacatccacatttgtgactgatgctggctgctgatgagcatttttccagcatctgccatgtgctgtgcactgggctggtgctgggtataaagatgtcctcctaaattatctcacttttaatttagcagaccttctcttactgtgtgttaatacaaactaatagctcttggaaagctgccaaggtgggtcccaggagccttagcactgtaaccacgttctcagctagaggagtttggactcgagctgtgtgtttgcccatttg

SEQ ID NO: 96194 - DNA, 1056 bp, Homo sapiens
gaggccaggagtttgagaccagcatggccaacatggcaaaatcctgtctcttaccaaaaataaaaaattagctgagcgtggtggcgggtgcctgtaatcccagctactagggtggctgaggcaggagaatcacttgaatcccagaggcaaaggttgcagtgagctgagattgcaccactgcactccagcctgggcaacagggtgagactctgtctcaaaatacatgaataaataaaataaataaataaatataaaaaatattttggtaacagtatttcaatatcattgatttcctctgcagtcctgtgtattttattttatgcattaaaaaagtctttctgagaaggagtccataggctgcccctagtttgccaaggggtacagtagaattgtggtgtgttctagaccctgcacacccactgctcccctttccctcctcttcatcaagagttgacctcctcctgacttgggctttctccaaggctgtcaggtgcgtttgtagagtgggtgtgggcttatctccaactttttatcttagacctggtcaaagaattgagctctattcttggctcactggtttatcatatccagggaggcaagtttgtcagaacgttcctctagcaaggccatatctgtcactacaaggtatgtgattcatttaaagccaaatgtcctaattatctgaatcctaaacagaagtctgatttcagcttcagtttcagtttttcaagtggagaaaacccacagacattctgcaggaaaatgccctaaatacacattaaccccctgttttcctcttggtatgctttaaggttatatcatcgacaacagcactctaagaaataggtctctgcccaagaaatatgttgtgcacatggttgccaggggtgttttcctgttggcgtatggctttggacagaggggcatcccctaggaattggggcttggcttggaggtagtcagcgccataggaatgcacttcctcttggcttcccgcttgccactcagtgagtccagcccagagggtgctctgccgctgctgtacctggatttctg

SEQ ID NO: 96195 - DNA, 1025 bp, Homo sapiens
ttttttgttttttttttttttttttaagacagagtctcgctctgttgccaggctgaagtgcaatggcgtgatcttggctcactgcaacctctgcctcctgggttcaagcgattctcctgcctcagcctcccgagcagctgggactacaggtgcctgccagcatgcccagctaatttttatatttttactagaaacaggttttcaccatgttggccaggatggtctccatctcctgacctcctgatccacccacctcggcctcccaaagtgctgggattacaagcatgagacactgtgcctggcctcttttccttttctttagaataactttatttagtctcatggcaattaagttgtcttctggaattttatggtgaccttttactaaatataccacaaatactgcttttctgaatttgagtctttggagaatgtggttttaaaacttttctgtgacattctttgggaatccactgagttgctggttataaggtatctttctggctttcagatatgcccttctgaataaatgcaccccaactttggatggacatggggtgctggcttgtggatgggcaggctgtctttctgctttatgcatctgaagttcttggccactgaagacttgcaatctggtgatgggcaggcttgtggtaagatttttttgtggtcttccctgctatctcagttattagtgaacagtcacctgattttcccatgtttgatttttgtagcaagtgtggtttctgtagttcatttctttgatttgctgtttttctcttgctactgcagacttctcactttcatgaatttcacagtacatgtttgtccctgcaattaaagattgaatgttcccgggagtattttcattttatctgaagagtttgtagtcccagctcccttccccaccacccaaccccacaacaacaaaaattgtgtagactagcattactccaaaggacttgatgaggatttgattggagcccaagtggctggagcaccctaactagttacaaagctcaaag

SEQ ID NO: 96196 - DNA, 1030 bp, Homo sapiens
gttgaagacggcccttgtcatctttcagatgtggtttgacagatcttttgtatcacttcagaaacatttgagaagttttgttctccacgataaagagagagcaagccagacagatatgtagaggccatagaattttaaaattgtctgcactttcttttacagatctgaagaaaacccttgctgtgttattagataacattttgcagcgcattggcaagttggagtcgaaggtggacaatcttgttgtcaatggcaccggaacaaactcaaccaactccactacagctgttcccagcttggttgcacttgagaaaattaatgtggcaggtaaaaatagcaattctctgccctgatatggagtcacaccctgctttggaccaagaagagaataaaggagagcagtggttcttactggaacctgcataatataaattctataaacttggcatggccattgtaaagataagtctaaatttattttttaatagcagatgttaaaatgctttttatagttttatcatgatgcataatatttggtggtttgtgtgacacatttgctcttaatgagctcctggaattcacttgtaaagagaagattcatggcatagattaaatgaaatacagaggttatttgagaagcttgtgccttttagagttcttcctcctccgtactcccatcagacaattttgaaagtctgttacgtataataggttctctcctccctgttgttaaaaaagagccaccattgccgaaaatgcctcctatgtatatatggagaaatagaaattctggaaatggcttttaggagataacccctgcctagtcgtaggcagattctgtagccactcatgtacaccaccatgcggttcccactgggaggcattttgtttggctccttctggaaactggaatattggatgagacaaggaaaattgactaaaaacaacacccagattatacgctgcatgttgttgcctgcagctcacattagaacccccccatccccgcaactcccccaccatcacactg

SEQ ID NO: 96197 - DNA, 1049 bp, Homo sapiens
gtgtgtgcgcgcgcgcgtgcgcgtgcatgcatgcagaggcatccctttcatagacactgtcttggccaaagtggatatagatatgctggacagccttcttcatttcccccagaaggtgggggggggtcctttatatcttgtcagtcaactacatatttttaaaaaacgatttgccatgtctatagagtaccagaaagaaggacaaggacttaagtgaacagttctcatttatgagcagcccttccttgcttttctgccctctctctgatccataaccatgctgatgtcttcagacccctctgtcaacccaagaatggctcctgagctgtgagagttcagttttatggggttccaatcctcgccaagtaaagtttttctctctcccttcctgaatggagacatgcggtaattgctcagaaatgttctccctggtgtgtctttacagctgactctggtgtcttattgctcactgatgtttctgattgcttattgttgtgtcttattgcttgctaatatatcttctggttggctataaactgtctctaaattgggtaccatagcaattgaagaaggattccctaaatttattttctttagggggatagctctgtgtgtgtgtgtgtgtgtgtgtctgtgtgtctccttattttttctctctagctgtgttctgtgtagcttttatccagtatggcttatcttcacaaatttatcaccgagggttttttaatgtgaaagtaaatttgcccctagggaaatttaggtggaaatgagctttattaaaatcaagaaatcagattgaactggatttttgagctctgtttgtcttgttgaagagaaaggggactcaaaggaatgaaaaagcagatttttaaaatccccacccttccaccaatcacacagtaaattaatttctccatattcactttctgaaagggcttgaagggccttcgtcaaaattctctccttttagaatgatgctttgaattttagaaagacccattctgtctttctctagttttgtgatcttaagtgaggaagtggagcgaata

SEQ ID NO: 96198 - DNA, 1081 bp, Homo sapiens
ccagaaactgcctgaccctttactgtaccttcccactccaaaatggggaggggaactcctgtgcgggagtgctcagctctcaagggaagacagtcattaacctgtctaaactctatgttaatagaaccttctcgataattgctttcattaagtgtggttaatgtgaacagtacaagttatagcaagatttgcagaagaacaaagtaaatatttaagactttatttcaggatgcagttgggtcgaggcaaggagaagattagtagaagctgtatctgatggtatctgaggttgaaacacagtgaacctcttggcagaagtgccagtcatttctcatcagtggttcacagaatcctaactctggggaggcagatgggtgtctcctggagatggttgtgtgttcaggttttctcctttcgcttctggcctctgtcagacatgaatgacatggtgatgaagataaactgccttccctgtactgcccaggaatgcaatgaggattaagaaggtggcttttagcctgtgtctatgccacatggggaggatggttgctccctgagggcagaaggccattattagcaactgagttggccaggagtgtgtgccatgccgggctgggtgtacggagctgtcaagccaggcacctggggattaatttagcatgggttttcatgcccccgggctaccagtgaccatacagccatcatctctacctttgagttgatgtgtataactgaataatagtgctgtgttttcaaaaggaaaggcttaaaaaacagtgcttctgtagtacaaggagggatgctctgctgaaaatctggaaattacagctaagcaaaaagatgaaaatacaaagtagctgttattctaccacccagagatcgatttgtttctttactaacagatacggcaagtgcctgttctgtgccaggcactgtctaggcactggagatagtgatgagcaaaaccatctcttctttctggagatgacactccagcagtgaaggcagataggaaacaaatacataaacacatctggtgaaaaatgcttgaggaacagcaaagtagggtaagaaattagcg

SEQ ID NO: 96199 - DNA, 1008 bp, Homo sapiens
ttaggcagccttgtatttccagaacatcaggcagttcattttctgtatctgttttcgtgagccatgtaactactcccattacagagacagggccctataaagtaattactctgaatgtcattgtttcaggtatattaacttaaccatctgcagagccttttactgctatcagcttttacaaaatttagaatgaatttcttcatctctgttgatattatgttgatagatgatactgatgtatttgacactggcacttttttttctttttaaacagttgttacagaacctaggaagcatcatacctttccagagttcctaatttgtttatgcttttcttgtatgcacttctgttgccattgcaagtagagttgctctgaaataatcaaattgcccagtgattgattgctagatcttaggatgtgtgcaagctattgcttcaaatgccaatttggactagatgcatgagagtgtgtctatgactctttcacaaaggagcaaaagaagcagtttcatgccttacttgtcaatctagttcttatatttcataaacaacagacgtaaaggtctttgcttctttctgttctcccttggcagtatgtaaaactaatattggctgagcatgtaattaaccttgagtttaaattcagcatacttaatcccttgattaatgctaagattaatgcccaacaggaaaggttgaaagcttaaatgtttgtgaatgcgagcatgaaatgaaatcctaataaccagtacaatgatttggatttatgagctgtgttggctgctaaagataacttggaaatggtgttgcacagactaatttgtcaaagtgggcagtgataaagaatagactgcttaggttacaggacaaaacctgaatgtaaaaacaactaacgttttggggtgggtcagggagtactttaaaaatatcaccggattgttgcccgagaataccaacacacacccttcaaatgttcagccatttgaaatgggaaattccttttcctc

SEQ ID NO: 96200 - DNA, 1049 bp, Homo sapiens
aagggggataaagaaggaaaagagatgagtgttcagaatgagctatggtgattactgaaaaggtggactcagcatgtttgagatgttctatgaaataaatactggttattatgtttctctattattccaatcactcgttgtatccagctatattatccagagcattaggaaaaatattcttcctggcttttaatttattctgtttggaattttaaattgttctcactcatggcagaaaagtagtattcttggctctttaaattccttagaaaacaatgaatttttgtttggactgggacaaaaccagaagatgagcatttatttccctatttaactctgtggacagaaagaggctttctggcaacttccacgttgtcaaacagcctgctaagaattgacttcagttttcttagaagtctgctgtcctgtggtagatccaagtggaacagtaaatttgagtgctgagaatttcaaggtacatcaaccatactcattataaaaactgcattttaacatagctcagggctttgtaatgcctgtgctgcttttctcaatttctaattttttaatgatgtccctttgggcagatcagcagtcagcagccttggcttcagtttgcaatcctgggaccttaaagtcaaagctgcagcagacaagacttacttttgaagctctcaatttaattgactaacccttttaagttttcagatgtcacatcatgaaaactattatgctttctgactttttatcttctattcattttattaaatttctgttgctaggcggaaattcgtacagattttaatattctctacagtatgatgaaaaagcatgaagaattccggtggatgagactacggatccggcgaatggctgacgcatggatccaagcaatcaagtccctggcagaaaagcagaaccttgaaaagagaaagcggaagaaagtgagtttcttattaattcagtgcagttagatgccagctttcttttaaaatttgattttgcttggaaacaagactaagagaaatgtcatatctcaaatgatattc

SEQ ID NO: 96201 - DNA, 1069 bp, Homo sapiens
tatctagtattcattaggcactttcttttcaatatctcattgtgaagaacccctgagagactggtatccaatgttctttgtatccagtccttgttttctggaagatgagcaaagagattgagagaggttaggtaacttgtttaaggtctcacagctgctacatagtggtgatggagtcagacccatatcttccttgatttcaaagactgtgtttatatgccaccatttgcttttgcaagagtcagaatcagggtactgggttggccttaatggatggaaataatttatataggtagcagatttgaaagggccatgctgtcatctctaaaaaggatttttggggtggcatttgcccattaaagttgccaagtttattaccttttaagtaaatgatttttctcttttttctcccctctcttttgccgtttctctagaatcatgaagaaggttgtaggaaaccgatctggctgcccaactgtaggagacagaattgttgagctcatttacattgatattgtaggacttgctcaattcaagaaaactcttggaccatcctgggttcattaccagtaagtgctacatggtgttctgacttaaggttttttttcccctccttaacaaaggttgcatggttgtgggtagaaaaagcttatcaaatagtatcttttcagctgtatggagtgttgctcattcgtaattgaaattcagattctcagtgactttgtactttctatggctattcgttattttcattggtttcttagaaaacaagtgtcaacctcctttctaccttgactaatgttaatacttagccttcctctcagtatgcgtatgccagtgtcatctatttaatcaaataacaattttgataaaatatgtacagtgtcatttcttgtgttccgtgggttttagatcatgattcgcttttcttaccctttacctcatcagtattcttgtcattcctggaagggaaatctgggaatacgttatctgaatgctggggtcttgcactttttaagataagcccattaagattagtatgtctgtggtacatgtgtactctgtgcag

SEQ ID NO: 96202 - DNA, 1025 bp, Homo sapiens
ctactgaatgagattctaagcttaatgtaaagtcaaatactccaattgatgaaaatgttgaatgattgctcctagagataacacgtgtcatatgctttaagcagaataagacctctatagatggtagctctgtttctttggcatcagttgattagacacctactgtgtgctcagctctggctaggtgctgggggtacagcattgaacatggcagtccccagttcaagctttcatagaactttttattttgctggtagttgaatgatcttctgtaattagttacccgatctgaagcaaatcgtatctgctgtgtgatgtctcagactctaaagtgacacaagtagatgttcggtacacaagctattgtaaaacatcacaattcttgtctggtcctgcttctatttaaaaggatttacctatttttagtagtcttgaaggaagggttagagcttttaccttttcaactttgggggcaagtatgtagtgttcaacacattgcttttttctttcaggtgcatgctccgagtccttgattcatttggtactgaacccgaatttaatcatgcaaattatgcccaatcgaaaggccacaagaccccttggggaaaatggaatctgaaccctcagcagttttataccatgttccgtgagtattcctgtttcatgtatgctttccagaatgccaccaaagatagatgggaaaattagccgccatctattttgggttatgattctcaggaccattagctgtagaagtgtgtgctgttgaaccttttccttgggaattactgaatttgtttttttgtttttgttttttagttgaaatcgaaaggccacatgaatattttttgaaaagccttgaaaatgttctggagaaaaaatgttcaatacaaagtatctttagaaactatttgggaaaggactttgcagttactttagattggcaggcactaaacacattttatgccacatggatgctatttagggtacactttgtcactaatgagaggtgaagtctttcatgc

SEQ ID NO: 96203 - DNA, 1007 bp, Homo sapiens
tgttttggttgtagtcatgctcttgggtccctcttatgaccgactgtctgcgtcttcccctctcctttagcctttacttggttcttttcccaacccacccgccaaaactggcaaccagcttcctcagaacttgttatctggctcgtaattgcccagactccaacgctcaaatgacctttttgctctaaagccagtggccatctggcagtaatctccctgtatacaggattctgagttcccaagagagcatctggttggctccccttgccttcctgagtctgctacatcattcctgggctgctggccagcctaggagtgggtcccctcaggtcagacacaccctgggcaggtcagcagccagcagtgggcacagggtaacagagccccctgcctacttaacaggagctgtgggtgggggcaggagttaccagatacatctagcacaagaaccatatcctagaacccttcaaactaacatatgccaggtaggtgtaagcttctgtactaatttaaaactatacatttctaagttaatgaattcagcatcttgcggccataccagacatggcatggaattaaactttcagtcccactgttcattttattcatacattagggtggcaagggtggtcttgctcattgcaagcaaagtcatcctggttcatgaaatgaagaatgtggactgtgcagttttcccagtcatgaagacttttgatacatcacttgaaatgttcctcctgaagttgagggtcctttgtaatatcaccagggcagtgaatggcagagaccagatcatgaatcgcttcatttagagcctgcctccgggcttccctgcactctgtggctgctaataccacacccctgtgtcccttgtggtcttaagtcacaaaaccagctattattagatttgcctggagtgtctgaaaacaggcttagaatgaggaaaccttgtcccacttttatacaactggaaaacattacagaatttgactttttgaaaatttccc

SEQ ID NO: 96204 - DNA, 1047 bp, Homo sapiens
ggaagctgaaaggtaaccttagccctgccttgtgttccaaaagctgcaaggatcatttgctggctgtccctaagttcaaggcctccctaccttccccttcttttccaagtcacaacccgccctgcccgggccagacagcccagaagaacacttttctgccatttaaaaatccctctttcatcccccccagtccagtattgagtggaagtgcgccggagttccactgacagggcagctgctcttggagcaaacaagcccacactccagttgtttagggcattatctgaagagtcagtgacccctgaatgtgtactggctcccaggcctcctcagacttggcccaggtctagtcagtgatcctggagaggaaactggggagggggcttccaactgccctgcatggaagaggagaggaaggtgcccctgtgtgggctggaagcctgcggaggttttgccattgctgatcttgatagaatcctaaaccgatttatagctgataacagttccatggggagagaaatcctaagttatgattaatgtttttccccgctataatatcttgcctgtttttttggattattttccccattgtgatcctaagctcttaaaaaacttgagggaaaacattcatctaatttactaaaagagaaagctttccattgaaaggtagatactttgaggagtaaaaagacttctttgaatgctggtaaacaccgcatttattttgtgtatgcagtttgatttgcacatgtataaatggagatgcttttcatttttgtttggactgggtttgtgtcactgctcattacagtttgcttttttgtgtgtttgctgtgcgtttggagatattagtcagtttctttagtgatatttgtttccttgatgtgccttttcgtttttctttggggtttttggaatccggatgctgttgaagggcaatagcagactcctccagctaagagacaggacatgttcttgagccactgtagctgttgaagctggacaccagacgctccctataacccccccgccaggccatagcgtgta

SEQ ID NO: 96205 - DNA, 1107 bp, Homo sapiens
gagaactgtgctggtgaaaaggacagaccccgagaactgtgctggtgaaaaggacagaccccgagaactgtgctggtgaaaaggacagaccccgagaactgtgctggtgaaaaggacagaccccgagaactgtgctggtgaaaaggacagaccccgagaactgtgctggtgaaaaggacagaccccgagaactgtgctggtgaaaaggacagaccccgagaactgtgctggtgaaaaggaggacagaccccgagaactgtgctggtgaaaaggaggacagaccccgagaactgtgctggtgaaaaggacagaccccgagaactgtactggtgaaaaggaggacagaccccgagaactgtgctggtgaaaaggacagaccccgagaactgtgctgatgaaaaggacagaccccgagaactgtactggtgaaaaggacagaccccgagaactgtgctggtgaaaaggacagaccccgagaactgtgctggtgaaaaggacagaccccgagaactgtgctggtgaaaaggacagaccccgagaactgtgctggtgaaaaggacagaccccgagaactgtgctggtgaaaaggacagaccccgagaactgtgctggtgaaaaggacagaccccgagaactgtgctggtgaaaaggacagaccccgagaactgtgctggtgaaaaggacagaccccgagaactgtgctggtgaaaaggacagaccccgagaactgtgctggtgaaaaggacagaccccgagaactgtgctggtgaaaaggacagaccccgagaactgtgctggtgaaaaggacagaccccgagaactgtgctggtgaaaaggacagaccccgagaactgtgctggtgaaaaggacagaccccgagaactgtgctggtgaaaaggacagaccccgagaactgtgctggtgaaaaggacagaccccgagaactgtgctggtgaaaaggacagaccccgagaactgtgctggtgaaaaggacagaccccgagaactgtgctggtgaaaaggacagaccccgagaactgtgctggtgaaaaggaggacagaccccgagaactgtgctggtgaaaaggacagaccccgagaactgtg

SEQ ID NO: 96206 - DNA, 1909 bp, Homo sapiens
gtcgggccgtggagcttcttctcgctggttctttactcgggaacagctggagaacacgccgagccgccgctgcggagtggaggcggataaagagctctcgtgccgccagcaggcggccaacctcatccaggagatgggacagcgtctcaatgtgtatccttttctgttcgccgccgctcacgccctgtttcccttgcccggtcgccgggcctggtgccccgcgaacatggcgccgccggcctcggccttcgctgggcctcggcgccgcggtcagggaagtaatgttccggctcgggcagtcgcgaggggtcagcagaggaagggaggaggagataggaccccaggaatgcgggccaggagcctgcgttgtgtaatctgtttggggcagcgcgtggtggtggcggcgggggttgggagtgtggctcaggcgaaagaggaattttagggattattgcagaaaaggggcggctccctggacttgtccctgaccccgaagggtttgagaggtaggagggttagcgatgctgaaaggcctaagtgtttgccgcagcctttcccggctctcgtcgccggcttgatggcggctctcttctaccttgggagcgtactggagttctttatgttcttggcgtggttttgtatgggtgtgtgcgcgcgcgtttcaactgtttcattttgagtttagttagtcgtagccattgataaatagttccagggccctcagcgctgttagagtgaaaagatcagcagttcttattcccatttatttggcgtcaagcctattctcttcctgccgccccaccccccgcgggcatttatttctttatttccagtttggggtttggatttgaatgggaggtattggaaaagaacctgggaattttccatcaaaattgttctgggaatgagatcttgcttttgtcagatatttcctaaatattacgttccagctctcagcttacaataaacactgcgattgtttatatgcacaggttttatatgcaccattctttcaccaaattcaacaaaaatgtaagtactagttgtctgtttttactgtccgcaaatttgagggtaaatcgatacgcagaaaaaaagttggtcattgcgttgttggatttagtgttctgaattaacggtaaacgtatatcacgtgataaatattttgcttcagatgcggtgtttttgtgtttttaaaatttatgatgaattaaactgcaaggcactgttaagctctgccaggccttttaagctaaaaaagaaaaacatttatttctttacagagttattacataggttttcttcatttaaattctatacttaacatttgaataatttcagtagtgatgtacagtggaattgggcaagcctggtcgttctgtgatacatcttaattatgttggactcattgtttaaaagactgtcaattgagattaaattaattatgacattcttttgaaagagctatttagtagaaataattcatttcttcatttgctaacctagtaatttcttaagatgtcaacgtttctgtttatcacgttagcatcagttgtctcctaaaattttgggtgattcaaacgtccactcttgcttcagatatagtacgtcaggagtatgtttatgtattattagtaaaatttacacctgaatattaaggtatataacctgtaaaccttgacaaatagagtaatggcattttgttgaaatgttaatttcatttatgaaagatacgagtttggtgtatgttgagtaacacgcatactgtgttgtgtgtgttaaagaaaattgcatattgtttagaaatgtttaactctgctttaattctgtctttatttgttactttttatcatagttatttttagaatattattctgaaaggtatgtgtagaaaaatggaccaaagaag

SEQ ID NO: 96207 - DNA, 1378 bp, Homo sapiens
caaatcaaaatagttctgactattctttatatggctacagatgtcccatttgccgaatcaggcatacttttgtacttccaataaatgatctagccacaagtcttcacttcttttatttattaattttttttttatttttttgagacagagtctcactctgtcacccaagctggagtacagtggcgctgtcacagctcaccacaacctctgcctccctggttcaagctattcacctgcctcagcctcctgagtagctgggactacaggtgtgtgccaccactcccggctaatttttgtatttttagtagagagggggtttcaccatgttggccaggccggtcttgagctcctgacctcaggtgatccgtccgcctcggcctcccaaagtgctgggattacaggcacgaaccaccgtgcccggccatcttcacttctttgttttgagccctccttataatttgtctttatggcgtggttggcgtgctttacaacaaataccctgcttaaagccagaattcacaactttagattgtcatttgcattctagctttcactattttacttaaatgttttccttcaataaaaaggccaaggtattaattttttattaccttctttaatgtcttattgtgtatgaaggtaaacttcagcatttttacgtagagtcagtaataattgaaatctgttcatttctgttttgagaaatattattatacccttcatatctgttgtctttttttacctttgctattataatatcaaaagtggtttttatatttgtgtcagtgcacttgcatcaattgcaccgcctcacttttatctttcttcccccctgttcttttagggcaaagggggtggtctgaaattgaatgtgagtcgcttttaaatttgtattattccacaccagtgggaaatttttttctatatactgaaatgtcatggtaaactttaaaaagcgtgaatcttcaccagagtaaactgaacaccgttcagcaaattaaaccctatgaaataacaagcttaaataagttaagatgctagtgacaaactatatctagtcttatagtaaatattaataacatccattaactgtgtgaaaatatttttaaatgttcaggtgacttaattgtattttcccacattgacatattaaaagttttaaaacccccaaaagtaatgtgctgctgtattaatatttaagaataaaatcagtatcagcatgttttggtgacccagaaatggtctcttatcattgagttcttttgtcagttactcagagttgaatagctgtcagcagtaaatgacttttatatgtagcctaattagataaatctacactttgttcactagatgcaatgaggttcatgtaattggaatt

SEQ ID NO: 96208 - DNA, 1035 bp, Homo sapiens
tgcatcttgttgcactgtgctgtgtatgttgacatagtagcctgttttttcctcattcgtatgtgttaggaattccctaggaatggcttgtcatgtgatttggttgtagctatccatggggttttggttttgctatcttgttgctctgtttttctgtggggatttaagtatcccctctgcagccatcaactcagaattcttcaggtaaatcactaaaagtttaccttcattcagaagatgatacactcatttccagtgggacttcatctttccagaagtatttataagtacatttaaatgacagcctattgtggtcccactggaaatgagtgtaagatgaagttgattttttaaaaagaataaatcacttgaagtttctgttaaataaggaagctgtgggagagttcatttattaataggcattacaaagaatatatgatatttttgattgattttctcaaattaattctgaaagctactctagaacttccccagaaagctttaaatgttattttgaaacatgctgctcttatctgcctaattacagggatactgacttcagtgactctgtattattatagaagtcttatgaagtattcctgaagcggcttaaaatttttttttgcaaaattaaatgattgtgaaataactcataccttttctctgcacacacagatacatgtatattttagccttggtaatttatatgcttctctgtggtcctggctcatcctttttgttgagtcatcgcatggcaggagtgcaagagagtgaacccagtcctgcaagatccaaggcgctttcaaaccataacaaattctaaacttaggtgtatagagtagaataggttaatatattaacaaatgtgcattgagtgtttgcattggccaaggcatgcaaatgtctcagtataaaatcagacagattttatatagtttataaactgattttcaaggccattgcagaacaggagttttgtttttagtattaatagctaaaattggttaaggtaattttttaagtgaaaatccaatt

SEQ ID NO: 96209 - DNA, 1319 bp, Homo sapiens
acacttgttaaattgttttttaaatttaaaatcaacattaacatgcacaattttaaaaatttttcaacataataataatatttgagtcatattactagggagcactattctaagtcctgtgtatattggttcatttaatcctcacacaactttacaagcaggtactattaatatttctcccattttacagatgcagaaactgagccacaaagagaataagtaaattgtctaggctagtcagatcacagagccaagattccacttgaggcagcatggctatggctggctctgtcatctctacctccccgtctccatgatttgtatgatatatttctatagagaaattccacaaatatctatttgtctcattttgagaatgttacatttccttgaaatagttatatatctgctagagtaacaaactcatgacactattcagagttcaaacaattctaaacactattcgcatcaacttccttttacttttttccctttaatttgagaacgtttattaaactaggtccaaaatacaaaaataaatagtgcatggtccctgtcctcagtgaactgaatctcagtttgtaattgtttgattacttgaaccaaaccagctgtactcctccaatactagtgtgaattatttggcttgaaccaagcttgcatgtgccagtgaatgtttgttggcttcaaaagtatgctcacctttaaaagctttggaccaactagtaatatttctgttacccaaaacatttggaattcttttaagcctcacaacaaaatcaccttccatacaaaaagcagtagtacctagtttgatcaccttccttaatcatccttgaaattaaagcctcacatggatactcacaaaatatttatctaaaaaggtgttttgttttgtttttacagccttgatggaggaaaatatttgcaggttatagagaaggaaatgtgaatggaattagtggatttcaccaggaactttggaagagtgttgggaattagtgtttagctggaaagtatttcttgatcagtgtctttcaggcaagtaagagaaattctggatcatctgacaggaaggaagtttaagtactaaattcggtctaatttgacttttgacctgagcctctattgcttcactctgacaaatagttttagcatttgaaggcttgattaaccattcccctgttagacatgaataatgacaataaatgagagattgtgggaaactgagagtgtcttcattttcttgaatgtcttatgtgggcatcagctctcagatttttatagtggcatttggaatactttgaatttaatattag

SEQ ID NO: 96210 - DNA, 1876 bp, Homo sapiens
gtaattgttgacgccccctgcaagacatagtgaggctcaaatgttcatctcttgaaaaatgggtactcaaatcttgacatttagaaattgtcttcccatgggaaatttcttgaatgtaatcttaaaacattatttgagtttattttatgcctattttctaagtccacagttacttgatttattattaacttttggggtacatattcaaacttcatgtttctctgtcttagtatctttgtagtgcttgtgttcttatatttctgtcccaaggacctaatttactaagctaaaaaaaaaaaattgctaatttatggatctctgattggcaaagtttctactatattggtttatattacatgcttataccctggtggtgtagctgctttcattattgctatagttaagtaatagagataattaagtaacagttttatgttcagaatcctccttactttgccctctaggtggtttttctgttccttcaacaagatagtgaaggtatcttcactatcttgtgtggtagttatagccacacaatgaatcattgcttgattttttaaaagagtattagaaaatggtgactctgtgcctagaaaaggagtatagtgggtatacttgatccgcttttcatctttttttttttttttcaggtatagcatcatctttttgcttattttcttctttgcctccacaatgtgcaaattaatattatttaaactttctctttagcatttttagtatgttcagtcaacttacttagtatgtcttttcccttttcccctttgttctatgtgcaaaacgagtaaaacagatttatagattagttctatttaatgaataactttattaaaactattacatcaatcttgtcatagcccaactcacagttcatactattaatattgcattccttccttgcacacccgcccccccttaaaaaatagaaggtttgggctgggtacaggggcttatgcctgtaatcccagcactttgggaggccgaggcagatggatcacctgagctcaagagttcgagaccagcctggccaacatggtgaaaccctgtctttactaaaaatacaaaaattagccagtgtggtggtgcatgcctgtaatcccaccttctcagggaggctgaggcaggagaatcgcttgaacctgggaggtggagctttcagtgagccgagatcacaccactgcactccagcctgggcaacaggagcgaaactccacctcaaaaaaaaaacagaaaagaaaagaaaatagagggttttttgaaatgtatttgttcttaaatgaccagagttttatcttttctgcagataatatcgtctactgcattatttttggctgcaaaagtggaagaacaggctcgaaaacttgaacatgttatcaaagtagcacatgcttgtcttcatcctctagagccactgctggatactaaatgtgatgtatgtaaatactgggttttttatttttctttgtaaatttgaaactttttcataatgtaggcctaacaaaaatacacagttcaattagtggtgccttccaaatgctgcttgttttattacctcttaggaatgcaatgccaggaagcagtctggcagaaaaacatataatgtatgttcatgaatttggatgtcattctgaattatagaaggctttgattccaggtgctttgttgattcaaagatacttttgtttcatattttgttgttcagagttatgatatatgtagagggtaagtcctatcacctccgctggaagctgtatttgagaccagaatataaataactccttaaattgtcaacagatgaaggaacagaaaatcttctgaatttacccctagatgagtagtctttttaaagtattgttcc

SEQ ID NO: 96211 - DNA, 1472 bp, Homo sapiens
caaaattagccaggcatggtggcacatgcctgtgatcccagctacttgggaggctgaggcaggagaatcgcttgaacccaggaggcagaggttgcggtgagctgagatcgtgccattgcactctagcctaggcaacaagagtgaaacaccgtctcaaaaaaaaaatttttttttctagcatcctgagttacttaatcaggaacctttacccattgaatgactaacagattatattaattcaaagtcccgattaatttaagcttcaatggaactatatctgattttattaatggcaagttttatcataatgttggctttaagggagtaaactgttaatgtagccattaaataataggttgtcattatttaaagataattcctacagtttatattaactgtacaaattcagaactatttcttggggtactgtttaaataatagaaattgactgttttaaaaatcagctcaatgacctttcaaagtagagcataaataaaataaaaggtacttttactctctggctttagaaatatgtccttacaaaaatgaatataggtatattcatatcagtaatatagtatttccttatcactttggtcaattgtcatgatttcagaataggacagcagtaatttttcatatcctttatttccagagtaactgtaatagagggataatttcttgaaattgaataaggaggttctctggtatttatgtccccgtgggtatgagatacattattttggtatgtttggtcatttctaaggtggcagggaagttaattctaaaatttactcagtgacttactgtgacttttgaggaattaccacatgaaatgtcctagagtgagtttgtaagccaggtttgggttaaaggcaggtttgagttggatgtttttaattgacttggtgcttcctgtctttaatatctcttgaagcaccagtgcctaggttgtttcactttacagactgtgcacatctccttatttcaattaacttaccctctttcatattggttaggtttttgttttctggtgtttgtttcctgttacagaaagtaattcagtttaggcttgccacagaatacaggctttctctgtcaccctcagtttattttctccatattttcaaactactgtggttcttttgtaatcaacctgtaattctcacaagatgtaacagtcatgcagtctagtaatgttatttttattttaatcaatttgataatatttttatctgacaggcttaccttcaacagactcaagaactggttatacttgaaaccataatgctacaaactctaggtacgtacttacatcagataatggctttttgtgtgtatttcactaaagcattctaaataagtgaaaagatttctgaaataattgtattattgaagaaagttattttaaaacaggttttagacagaataaggttgcctggttataaggaaattacttttctagaatttaa

SEQ ID NO: 96212 - DNA, 1244 bp, Homo sapiens
cttttaaacatttcatctttggtattagaaacagtagtttaagcagtcatgagacctctatggtttgtcatatgattttgattattaatgaagtatggttataaggtaactggttgaaaccctttgatctagagtgccgtatcatttaaaagctcgtttctaccactgtggcccaacagttatgtttatgaaaactgcacttttcatgtcttctgaaagaaagctttggaatattaagaaagatattacgtagttgaattccgtccttaaattgtgggaccagcttaacagttgtatttgccaggaatttaatttgtttttaagataatcccgaatcatttataattcagaattttgaataaatttacccttggtcttttaactttattttcataattgagacattgtatttgaaaaattatatcttgtcattggaaaagtaatgagaatgtcagtgatgagaaacttataactttggatttttcttaataatgaagaatatattatacgtttatggcatttctcaggcaagtactgtagtggtaagagattggaaaaaaaagtgcttatcatttcaggttttgagatcaccattgaacacccacacacagatgtggtgaaatgtacccagttagtaagaggtaggtgatccttgaaacttttaagataagtattaatgctttttattatctgtaattgatttgggtgctattttgtttttctagccttttgttaggtttcattaaaattagggagaaatgtcattttttaagcattactttttagtgttctacatctacttctatttgtgattctacctggtatgttagcttcctttaaacataggtaagaatctcatttcactaaaactccggagggcttccaagtattaggactctatccatcccccattgagctttgctagtcccatttcagtcaagtgtgggccaatagtgcataggttcagaaaataatattaattttgggtttgtgtcaaactttgactttttgaaaagtgataacagttgaagaattttgaggccaacctcagacctttcagataaaaattgcctttgttaaaagatttgtcagtacggtggctcccacctgtaatcccagcattttgggaggccaaggcaggctgatcgcttgagctcaggagttcgagaccagcctgggcaacatggtgaaaccccatctctacaaaaaacacaaaaattagctggttgtggtggtacacgcat

SEQ ID NO: 96213 - DNA, 2865 bp, Homo sapiens
ttagaccagattatttgttgttgttaatgttaaaatgtgactgattctttgagtacaaaccatatatatgtttaatgtcattttgtctgactaacatttcaggtaactagaatatatctcactccattttaaaagtactgtttcatgttttagtgtctttttgttttctttgctcttttacaacttttagctaacagcatttcccctctattctctgttgcacagtgactgtttctggatcactgaatttagatacatgcctaggtgaaaactgctaatggcattttttaattattattttttccttctctacgtatttttattcggagggggaggggaaaataaatttgatttctgtgaagtctttttctcccctctggagatgagaaagttggtattatgctactttgctgcagaattggctaatgtcattttacagggaccttcacttctgtgatttctccttccctccccaccaggaaagtcacactgcctccaagacatctgatgctttgacactcttccttagcacaactctgctaaaccccaatcccttttgtaaaacctttatgttgatgatccacatggggcagcagggattacaggtgccatgaataaaaaataggggagggggaaagaaatttgaggacggttagaggggtggagttgagataaactgatcctaggtgagcagaggggaaagatatgtcagtgcttgtggatgtaattgggaaaaagggaaactataacaagagcatccctgttgggaagactaagaggcagaataaggggagggaaaacttttcagtgtcttaagctaattaaaaattgcctttctgttgggtatcagtgttgaagcattctgatcctccctagaatacctgtatctttcctaagttagtctttaattagattctgtaatttgaactaaaatacagtggagcctcctgtatctgtacccgtatgctgtttctaggtttattctctgttgatgcttaatagcatgatgaaaaactgagcagtttgtgctctgtgttttgtggggtgggggtttgttttgttttgtttttgatggaagtatttaagccaacttaaatatgactgaggattaagtctggcaggcaactctttgtattttgtattagacttcaaaatcttttcttcttcttcttcttttttttttaaatccaggagaatgctttattgcaacttttagctgactagatgcttaacttagtaacaagtttagcccttgtaactggctagctaaaagcaaatcggcttgtttctcagatctttgggggatagcaagaaacatttgagtgaatgttgttgaagattttcagtagtatagaaaatgatggcgctcttgtgatatttgtaagtagtaagtaaaatttactttttgtgtacaaatctttgaagtttttgttgtgttgagaactttttgattgtagcacgttaaggctgatagtattgtcttcgtttttttttttttcttacagcaagcaaggatttggcacagacatcctatttcatggctaccaacaggttgttatcctgaccctctttgttgcactgttgtagcacactatagcttcctttaatgcagggccccctcaatgtgtctcttacccttgttgcgacaggagactggaccatctactgtggtggtaccttcctgtttgctttgcggtgtattgtacaagggactttgggcacagaggggttaaatgcacaatgtgaagtgtagtggtgctttctgatgacatattctcgatttgtgagtgcataagtctaaaattggtagcctgaatagcagctaaagattacaaagagctaaacttaacgtagaaattcgagcaacttggtaagtataaagctatttccagtttacaattatagttaaatgacaatttttaaaatttcacgttgatccagtcttaactttaaaatactcattaaagtttttttaataaataaaatttatgtaatttgaaattttttttcagataatacccactagtagcaagttaaaagtagtcaagtcctatccatgcctggatttgcataaacacaatttttcctttttttttttttttaaacaaaaaaaccttccttttcagtttatatagagtaaaaaatggtatgtgtttatggctgaacagataacatttccatcattgaaactgaactggaagaatagtcttaaggagcctttaatatataattctgttctagatttattaatgatttaaatttgtctttttgagtggatcattggggagaagggaccaaaccagctttgtatggtccctaatttcttgtgacactgataagttttatttacaatttcacattggcaaatactgctatattttctcaaatatctgttgttggtatttaacctctatccccagtaattctgaacagcaacataaaaagacttaaatttggaactttgattagaaaaggctagctgtgacacatatttcatgccccatatttggcatatagtggaaggagaaaggtagtatttttgcagtatttaataacattgagccttgaagctgtttggcaaaaggtaagtttcctttgtggctttgctgaaaaacaaggcatagatttacatagatacgtgtttaattctctgcttcactaaagaaagcaaatgcctattaagccacttcagttgggataatccctgattattgtgagattgaaattactttgtcaattttacaaatagtttttatctttccatttacatatttaccatgacattacaaaagaaaaataccacaaaaaatttacagtgttatctatatagtgattattgcaaatatactatcctcctctcctttt

SEQ ID NO: 96214 - DNA, 2083 bp, Homo sapiens
caaaaaaaagaaagaaagaaatgcaaaatattgcatagttccctgtataccctttagcttctcctggtactaacatcttacataacaatatatgattatcaaaactaggaagttaacattggtacaatactgttaactaaaccacagatgttattcagtattccatatttttccctattctaggatcccatgttccatttagttgacatgtcccttcaagtcttctccagtctgtgacagttctccaatctttccttgtctttcataacactgacacttaggagaataatggtcattttatacagtgttccttagttggggtttgtctgatgatttctcattattatgtcgaagttatccattttgagcaagaataccatagaagtaaattgggtcttgcttggtgcatcatatcaaggggtacagtatgttgatacgtcttataactggtcatgacaaccgtgatcacttggttacagtggtatccttaaagtggtttctgcactttaaagtcactattttttttctctttgtaattaatacatttcatggggaagatacgttgggattatacaaataacgtttttcctcaaacttttgtccactaattttaaagaatcttttgatagatcttgtctgtgacaaaaattattgtggtgtttgcctaatgaagattttttttttattgggggggtgattatttttaatgctactagattttctagagattctaattaagcaagtaaaatcaagagggaaagtaatcgttacaaaaggattcagctttgaaaatgccggttgagagttgtgtgtacttctgtgtatgctgaggatttaataggagggtaaaagtgaagtagatgaactcctagcattcctttttaatactgcccacttaagagaaatttaaatcctaaaggcaccttctaagtttcaaatttaaattttatttttagagctaacacatgagtttctacaaatattggagaaaacgcctaataggttgaagaagattcgaaactggagggtaagagaattgacagggtttaacagaatttcagtcttttatgtaacatttacatagctaaccagtttgaatttttgtggttaaataatctttgcagtattcctgaataattcaacgtatctcaagttacatatactcacatattcaactactgagtccagtggactttgctaaagtacattatacttttaaaaaattttttgcagtgattatgacaaaagtatcctcttcattttacaaatggggaaactgaagcctagacaagttaaattactttctgaagtgctgggctaggatttaacttgtatctgattctaaaatgggtgttttcaattttttatagccttttatgcctctaaggcatttatttactgacaacataaaatcttgaaccccaggtcattttatttccatatgtttaatatataatgtttttaatatataacttttataagacaagaaatttgcattaaattattttgctatatcactgcttcttctgtgttttattttaataggctaatcaggcagctaggaaaccaaaagtagatggacaggtatcagagacaccacttcttggttcatctttggtccagaattccattttagtagatagtgtcactggtgtgcctacaaacccaagttttcagaaaccatctacatcagcattccctgcgccagtacctctaaattcaggaaatatttctgttcaagacagccatacatctgataatttgtcaatgctagcaacaggaatgccaagtacttcatacggtttatcatcacaccaggaatggcctcaacatcaagactcagcaaggacagaacagctatattcacagaaacaggagacatctttgtctggtagccagtacaacatcaacttccagcagggaccttctatatcactgcattcaggattacatcacagacctgacaaaatttcagatcattcttctgttaagcaagaatatactcataaagcagggagcagtaaacaccatgggccaatttccactactccaggaataattcctcagaaaatgtctttagata

SEQ ID NO: 96215 - DNA, 4626 bp, Homo sapiens
gacaaaaaggaaaagagtgggtcactgaaattacggattccaataccacccactgataaaagcgccagtaaagaagaactgaaaatgaaaataaaagtttcttcttcagaaagacacagctcttctgatgaaggcagtgggaagagcaaacattcaagcccacatattagcagagaccataaggagaagcacaaggagcatccttcaagccgccaccacaccagcagccacaagcattcccactcgcatagtggcagcagcagcggtggcagtaaacacagtgccgacggaataccacccactgttctgaggagtcctgttggcctgagcagtgatggcatttcctctagctccagctcttcaaggaagaggctgcatgtcaatgatgcatctcacaaccaccactccaaaatgagcaaaagttccaaaagttcaggtagttcatctagttcttcctcctctgttaagcagtatatatcctctcacaactctgtttttaaccatcccttaccccctcctccccctgtcacataccaggtgggctacggacatctcagcaccctcgtgaaactggacaagaagccagtggagaccaacggtcctgatgccaatcacgagtacagtacaagcagccagcatatggactacaaagacacattcgacatgctggactcactgttaagtgcccaaggaatgaacatgtaataatttgtttaggtcaatttttcctttacttttttaatttaaaaattgttagaatggaaaaattccttctgatctagcagtggtaacccctgctgttgctgccactgcttcaatatttgtaagtgctgctttattcttcattctgaaaagaagagattatagtaaacaagtctttatctccacatatgatagtgttataaatactgtaaaagcatggaaggtgcaaaactcagtatttctacaattgcagctaagaacattaggatgaatggctggctgcttctaggaatataagatgcctcaagcattcattatttatgatttgaatactgtagctattttttgttgcttggcttttgaatgagtgtaaattgttttcttttgtgtatttatacttgtatgtatgatttgcatgtttcaatgataaagggataaaacagtatactgacaactgtttacaagaaagtggagaaaaatgtacatacatttttgtatgtttagatattaccgtaaatactcaggattggagctgcttgtaagtataacaatatacagaataactttattttatcttgtcagagtccatcactaatctaaaacaaaggtggcacttttttatgttaaccttaaactctaggccttactggaagccactgataggggacacttcactaccagatgtgtgcagtgcaacagatggtcatatacactgtgaggcactgaaattttgccttcagaggttctgaccagattggctgctgaaatagcccctaactttctgaaggcttgaagaggaaaaaataaagtttacatactcttgatgtgaagtgcatttaaatgtttgttggcttgttgcagttctatgaaacagagctgttaataatggttatgtggattactgtgatttgaaaactaaattcacaataacttacctagtagagatttagtgagttgtttcctttaaagaattttacactacatattttaatagtaaacagggatcacttttcctttagcattcagaatgacaccatattcttaaatatactccttccctgaagcgtgtttgtgtgtgatgccatatttctttttcaggtaaatgtagtcttccttataaaaatgaaattaaacctatgctctcaattcttttatattctaacaataaataaaaaagaaaagattactgactgtgcattgtacctgtatttatagtttatggttatcaggaagctctgtaagaaagaaaaggtcagcctcccaggcaaaccagtagtggaggttttacatttgtttgcacatctcagtatatttctgttgaggtaaagtttgcacagtcatctgacttctgatcaagcattagattttaacttgtttagattttgtcttaaacaccagtaatatggctcttgtttatcagctaatcttgaatttattctgtggtaaatcttttgagttgttgagtatatttgagattgattggattcgacctcttgttgaactgaaaacttaattttttctctgtatttttgttacaaagccactgatacgtgcacaattgtaattaagtatgttgcagttgtaaatattagagtttaatctcatgctctacctttatttagcaattacctaatttgccagtagctttataatttttaaagataattgttcattattttgtcaatgttatttgaacttggggtacttaggagcctctttgtagggactgtgcctaggtagcatgtcctaacatttgttctggtcttgcataacttcagtaatctttgtcattatatgtaactttgttgctctgtatggcataatattgtatccataaacatggtaattttgatacagttatacttttacagtggtacataatccaaggactagtatagaattaagctgagtgcaagatgagggagggaagggctttcttggtaatttagatgtgaaacctctacagagctatcatgtaaaaactacataaggtggttgtgctactgtataattgggggtgataataccaggaattttaataagattttgtaaagaatatccagaaaagtagtgaacttattttcagtagacatagaaaacaatgtgaatatttaaggtctgtgactatagttaaacttcactaagaatttgcagaattgttttgagatgtgtgaataaaggtaattttattgaatcttcattggtgctaatgatggacagttaaaaagatagctagtgtatattgttatgggtcagtacttattagtacttccaaaattgaatttgaaatgctatgtattcacttttcactctgtaaatgtaattctttacaatgactttatttattaaagggcagccagttgtcatttttacaggattgtgtgagctattcaaactcttcaacccctgaacagggtattaagcttccaaaataatgatggggataaatatggaaatcctttttaagttgtatttccattaaacaaaaacccttataattcatactatcatgaatttgctttatccatctcatttgcataacagttcatctgtctggtcccattaggctctaccaaagaaagactctgatgagtggacattattactgtgactcttgtaagtagccataaataaaccaaaatagtatcaaatttaggtatgaaattccacatgtgcaaagtactgttaaggtgataacatttttgatgagatttaaaaaaatatttgaaatattaaaaagcattatctttaaacatcctataaaagagtgagtcatttttaagttgtgttttccctagatcactgatttgttacctttacacagaagcacattgcaaagaaaggctttatttctacctcttccattcagttttccaatattgagctgtgtccctctgaatatttgccttagctatttcaaaataggtattttcagaaccaaagcaaagggtggtttgttcactgaaacattcttagaggcctacttaacgggcggcagtatccggtagtggtaaaacctcacagtttcctaattgcaggtatgtaaataccaaaaaagtcctgttgtcagccctaggtttatctttgaaagcagttaaatgtgcaccttggtcttcctccgtgtgttcagattccttctggttaaagttcttattcagagtcatctaaaagaaatttctaacatgatgtatggtttcttgaatgtcatgagtggctgcgtatattgctttgtagcaacagattgtattaataattaatagaatacctaatttttttggcctatcctctttgaactagaaatgactacttgagggctatttcagagaaccaatatgaaatgtttttgttagtacaaaataccattgccttaaaaggtttcaagcacattttcttttctatttgagaacttaaattgctgacttgtattcgttaagcaaccttagaaataaaccactgcttatatctgcatgaatattatgcatttcatgagtacagttagttgattagatatttcagggttttgcattttctatagacatggggacttttttaacatggtaacgtcttaggaaaaccattctctcaaggtattacaccatttccaattttatccaaatgaaaagcatatctgcttaaatttaggatgtctttgctgagaatatttggaggctcttgttaggaagaatcatggattcagtatttctaacctgattactgcctcagaggctgtcttgaagggagacagtaggattcactgactacctttacccagatgagggatcaacaaatctcacacttaaactaaatgagttgacaggacaataggtgctaatctcatgtgccctaagatggacttatttagatagggatttttgcattggaaaagcagcacattctctgaccttgggtaccaagctatgatac

SEQ ID NO: 96216 - DNA, 1066 bp, Homo sapiens
cctggagcatctatttttgtaatacattttgccagtgggactgaaaagctcaaaatgttttagacctaatatcatacattaattttctgctctgcagtgtcaatttgggcacagccagtttttacctctgtggcaccttctttataatttactgttacctattctgcctgacagattgattaagtaggttgataagatccatcgaagattgaatggctaggagtaattctgttctcgtataggcaacttaacttcactgtggaatccatttatctcaaagtttgagggctgtctactttattttcaagtttggggcggaaactcaaaatcccgagcattgccactttagtagtttgtttgatttgcctattgtttaataatgagtacattcttattaagtgatgagtacattcttaattttaaggtatgtttttttcaagcagcttcattttattaggaaaaatacatactcatttgttgtaaacagtgattgtggggtttcattttctgaatgtactcaaaactcccaacaacaattgaacaggatgtttgctaatagaaaatctaaaacaggaatatgtgtatatggcatgaattagtcattgactttaagcttcttatccatacaaggaactaataaaatgtttattgacaacataaatccaaggctctaacatgtcttaagttaatgtgaatcagaagtaactttgaggtggggcgcagtggctcatgcctgtaatcccagcactttgggaggccaaggcaggcggataacctgaggtcaggagttcaacacaaccctggtcaacatggtgaaaccctgtctctactaaaaatacaaaaattagccgggtgtggtggtgcatgcctgtaatcccagctactcgggaggctgaggcaagagaatcgcttgaacccaggaggcagaggttgcagagagcccgagatcgcaccactgcactccagcctgggcgacagagcaagattccttaacaacaacaaaaacagaagtaactttcagtccctggaaaatgtgagatctctagtataattgaccctttatcca

SEQ ID NO: 96217 - DNA, 1056 bp, Homo sapiens
tttagtagagatgaggtttcaccatgttggccagaatggtctcaatctcttgaccttgtgatctgcctgcctcagtctcccaaagtgctgggattacaggcgtgagctactgcaccccgccagtaatttttaagagtgtaagggtgtctgagtccagaaagtttgagaattgctcttagacaaaaaggtataaacaagtgcctgttgtcagatacactttctttttctcaatgggtaaactcttcccagcttctgcctgcatttggtctctctccagagcattgaaaaatggtgtttttgtccagattttataggaaagtttatctgacaaagctgctttgccattaccagaacccaaagtgctgggaaatgattttaaaagggaaggaaatggcaattattgagcaccagctatggtattggtatcatgcactatagttgggactgtgtctgttaacttaatccttaaacagacttcaacagttagttataaccctattttatggaggagaaataaggctttgagttcatgtggtactgtaattttcccagtgtcattttgccagtagttttggtataagcgggattaaacctaggtcttgccttcagaacccatgttctttctattttactctgtcctttttggtttcagaaatttaagtgtgtgtaaaattacttccagtgagtattaacataggtttctaaggcagattttgggattctgttgtctggggctttataaaatagataaaaatcttggtggtatgagtatgatccttgaaggcaagggaagtaaagaaatgaccttttaagttccttttagccttgtaattttatgattctatttagctagcaaaaattttaagtacttttaatgaaatgttaagtttaggtatgtcatgatccagtaatataactgtttagtcagtgactgactcgtatctccctgaaaaattcatggaagaagaattagcttgagagtattaatagaataataatgactacaatgatgttgaaatgagttcacatttttcatacccactcagtagatgggaa

SEQ ID NO: 96218 - DNA, 1040 bp, Homo sapiens
atttttcagtcaccttctatgctcgcttttgcctttcagtatactctttgtttctgttacccaggaatctcctttttattatttcaaattcagcggtgtattttgacagcattgtcatatttgatcaggtatttctgtgtgttttgggacaaggagggcctgtgtcatgttagtttgccgtatggttggaagtcactttcagttttgtcttacttgacctttcttaaagtttaggaagccaacaacaaagcttttgagaactgtttaaaagttaagcatattaaatgtatgtgtattttcttttattcaacaaatataatttttaaacatttactgtgatccagatacagaaatatcaagaataaaacatggttactgccttagtaatctatgggattaatagataagggagtagacaacaataacattttgtgataaatgctctcataggaggcagaacacaagtttgatggaaactcataggaggtacctgtaattcagacagattaagtcaggaaaatgtttccagacaaggtgatacctcacatgaatcctgaaagacaagtgagaataaaccaggtgaataagcttaattaataagttaggtaaaaagatacttgaggcagaattagtagaggtgatgatgtttaaatgcacttttgaaacttgtaggtagtttggtaaggttgggtatagcagtagagggttgggaatgggaaaagatgagaaggactttggtatgtgggtattttaagactaatgtgaaccagacatcttaagaggatttcataatattctccttctgttttattcatataatttttattgtaattgttaataaatacatttctcaaaaatttcaaggatacagattacttgtaatgcttcagagatactgaagaataacatacacagaagttttcacctaaacatttatttaaatttgaattttaaaaagttaaaccagaattaaagcaatgacaatgaaaatttgaaaacgattttgcaatatatgcatctgtacttatttataccataaa

SEQ ID NO: 96219 - DNA, 1051 bp, Homo sapiens
ttggcttgttattcatggcttgtatacagtggcattgtgtgtgtgtacagtaaggaggttagcaacagctatcagtgttaaaatgcaaatgttcttttatccagcaaccactagaaatttattatagagatatagatgtagaaaaacagttgcagtattgttgcagcagcataaaactggaaataaagtactgatcaataggggattgtacttttgaaaagaagctttacaaagtgtatacaaataatataattgtatttgagggtagggtggttacgcagataaatggaacatttctggaagaataaccaagaaactgttgacagtgattttatacaagtacagaggatggaacggggatgttcacttgttttgttttctttcttccagggacatttgaaaaaaagaaaactatttttcaaagatctttagagctcaatttttaaagctctagattattttcattattttatgctgcctctgcataactaattttgatttcagggctaggagggtggaggtagggtgaggaaatgaaataagtttttgtcatctaaataataaacattatgaattaaacttaattttttaaatcattactcctgtttggggcatttcttgaggaggatgtttataaaaataaggattaataattctttatataccagagataataaattaggcaaatgagtaaaatctctcataagttattttctttattaaaaaatattaaatataaatacattaaagagtgaataggagaggaattttcagtatacaggataatcagtttgactttattttcataaaaatttggcagcaaatttgtgactttaaaggatatggcaactgaatgagaagttttaattaatgtagatgtcatagcaagatcaagctgctttatgataattttttaacccctttttaatgtgttattgagtaaaagaacacaagaattctttaattaggatacttagtaaactgtgttctcacatttagaaaggacatatacatcattgctgataattttcctgcagtttagggaatctgt

SEQ ID NO: 96220 - DNA, 1053 bp, Homo sapiens
aatgaatatgatcttcagatcttttatgtcacatctcttttttgaagctagggactacattgatctgtggaacccaacttacatcttggctatttattagcagtagttaaaaaaaaaagtttttaatcagtttatctcatcatctgacaaacctaaaacttacttttctgataagaaacatctctcaaaattgatttgagagaattgaacttaagagctggtttgggttcttaagtttaatcctcttctgccataatcctctaaatatttgaaaactttcataacttcatcttttctttttcatcttagacattcttagttcttgagatgttctttacattttatggtattatatcatgactgttgatttggatatttgtctcttttagaactacttttttatgttttgggaaatttagtttgtaggctcattttgaatgagtttcattttaaatttttaatgttcactcccatccatcctctctagtgattctgtagttttatggttactccctacctgcagaatatttcagaattaggtcttaaaatagtgtttggagtctcttgctctgtagtaatgttggggattttgataactggtcttagaatcttgggttgtttgctcaccacatgtgggtgagggttttttcccctcacacaataacctccagtcccataccttccgataaagccattgtgccaagcaggagtgacatgtcccagtgtctggcttaagcagagaatcttgcaatgccctcacactggactgagcccttttggtttcatcctaggttgtcagtgccgccttccacacctcaaggcatgtgccttgaaccccacttatcctccagggtccacaaagatatttccatcatttttcatcctaatccttccttccttcctccctccctccctccctccctcccttccttccttccttctgtccttatttttttgagacagggcttcactctgtcacccaggctggagtgcagtggcacgatcttggctcactgcaacctctgcctcccgggatcaagcgattctcctgcc

SEQ ID NO: 96221 - DNA, 1016 bp, Homo sapiens
tatctgtgtgactggatcagaggttatgtgtcaaagtggccttgttatggcttctagaacatttgctccttattataggtgaatgctcatttgatatctggacatgactaaaaagttgatatactgaccagccaaaatctcaccttgctgttgggcacaggagcccaaaactgaattaggttttttgggagcagctgtctactattgtgacttcaaattgagtttgtgttcttaaagctactagtgacatttatagatgctgctgctgagctaaatgtaaatgtcatgtattcctttgctactcaaagtgtagtctcctgaacagcagcatctggaaactggttagatatgcagaagagtattgaatctgcatttcacaagttccctaggtgattcctatgcatatttaagtcctattttatattagtttagattaagcattatgaagggaagctgaggtcataggatgtttaaatgatagtattaagttttgtgatttttagtgaattgacagataaatctaagttttcttttgttagctgattcattaatctattttgtgtgagtgatcattcatttctcttagtctgaaattttggttaaatattcaagggtggctttaatttgagtttattttcatttaaaagaaaagacatcctctccccaaaccaagtcttatgctttataatacttttacttatttgaaaaatgaatcacctttttttcacatttaatatgtctgaagtgaatagtaagaaatggtattttatgattaaaatagtaaaagatactttaaagagcattttgcttaatagaatgtaatatctctttttctaatagcagtttaaacagctttattttaaagctatggcattgtttttgaaacttttttttagctacatcaaatgaaaacatttgtggaagcagtatgcagaaattatggaaatccttctgtacacacaaatatgtggacaaaaatacagtgattctttggaaagtttacttttccatttttt

SEQ ID NO: 96222 - DNA, 1069 bp, Homo sapiens
tatttccttggtatagttttctagaagtattaaatataattgctgagtcagtattaaagcttttgggtatattttatgttttttagtgaactccatttagctactacatggcctcatctgaccgaagggatcattgtggataatgatgtttattcgtaagtatgttaagagtagtagtacactgagattaaaaaacttcagtagaataactctcaaattgctagtaatttttatatgcattttttattattttgttttgattttagtgttcccttttgtgttttattgtctaaggactttgatttcttatgatgttattttttaaaaacttatccaaatggctccatgtatctggataagagtaagtttaagggaggctaaatggattgcttgtccttctatgttttcattagactgcattttaataagttcatgaatcttgcagattgtcataattaggattttatatttattggtttgcattttagtgatttggatcctattcaagctccacattggtctgttagagttcgaaaagctgagaatcctcagtgtttgctaggtaaggtatattatgctcctttcctgaaatactgctgatctgcctaacttccaaatcggagacactgcatacattctttatactttgtcacctcttcagttaacaccatgtaggaaaaaaatcattgccaatagcagtgaatccttttttgaatagtgccagcaaattctccattattttctcattatctcagctttatgtttctgatgcttttatttacttttttttatttattttttattttttgagacggagtctctgtcaggctggagtgcagtggcatgtctcggctcactgcaacctctgcctcccgggttcaagtgattctcctccctcagcctcccgagtagctgggactacagacgtgtgccaccatgcctggctaattttttgtatttttagtagagacggggtttcaccgtgttatccaggatagtcttgatctcctgacctcgtgatccgcccgcctcggcctcccaaagtgctgagattacaggcatgagccac

SEQ ID NO: 96223 - DNA, 1123 bp, Homo sapiens
tccagcctgggcgacagagcgagactctgtctcaaaaaaaaaaaaataaaataaataaaaaataatagtaataatgacggaaagaataccattaatatgtagcagaaactgaaatatctttatcctacatgatttcctaatcttctagaaacatgtctttagcgtttcttcttaattttattaatggatttagattctagtagtgtagcagttggggaaagattactacatacttagagtaagttcttgttacttacataacttaatgacaaatggatactgtgtctcattgaggcatatagtaagtactattaggtacagttatttttttctttccttctagatggaattctaaggaaaagctttttaaatatcctgggacatggagagaaagaaaagaacaaggctacctttgatataggattaatttttgtttttttcaatggaaaaactgaatggttttactttctaccatatcttagttaatagcttttgtggaaagatgtactttaatttataggactgatttttttttttttcagttaagtgtcaaaaataactttttttcctacataggtgattttgtcactgaattttttaaaatttgccgtcgaaaggagtcaactgatgagattcttggacgatctgcatttgaggaagaaggcaaaggtaacctacatttttttttaacattactttcaaatgtcttactgtttttccttggcacatttttcagcaacttttcatctgttttctcattttgaattaagttggataatcaagttttgatggactagacagctacagttcctttccaggctgtacccagtgcttgttaagacattaaaggcatttaataagttctttccaccaaaaatgtaaaatattttgaaaagcagagttttagaggttaaattttgaagtctcctagggagaaataatttgtgtgacaccattgtcactcatgcttgcacataaagctgaacatgtatattaatattttataattccaagaccatgtaacactagtaaaaagaatgagtaaaatattctatataatcatcaatttgttcatcactttcacctgctgaggttggtgatataatttatatttatttctgtt

SEQ ID NO: 96224 - DNA, 1060 bp, Homo sapiens
aaataaatataaattatatcaccaacctcagcaggtgaaagtgatgaacaaattgatgattatatagaatattttactcattctttttactagtgttacatggtcttggaattataaaatattaatatacatgttcagctttatgtgcaagcatgagtgacaatggtgtcacacaaattatttctccctaggagacttcaaaatttaacctctaaaactctgcttttcaaaatattttacatttttggtggaaagaacttattaaatgcctttaatgtcttaacaagcactgggtacagcctggaaaggaactgtagctgtctagtccatcaaaacttgattatccaacttaattcaaaatgagaaaacagatgaaaagttgctgaaaaatgtgccaaggaaaaacagtaagacatttgaaagtaatgttaaaaaaaaatgtaggttacctttgccttcttcctcaaatgcagatcgtccaagaatctcatcagttgactcctttcgacggcaaattttaaaaaattcagtgacaaaatcacctatgtaggaaaaaaagttatttttgacacttaactgaaaaaaaaaaaaatcagtcctataaattaaagtacatctttccacaaaagctattaactaagatatggtagaaagtaaaaccattcagtttttccattgaaaaaaacaaaaattaatcctatatcaaaggtagccttgttcttttctttctctccatgtcccaggatatttaaaaagcttttccttagaattccatctagaaggaaagaaaaaaataactgtacctaatagtacttactatatgcctcaatgagacacagtatccatttgtcattaagttatgtaagtaacaagaacttactctaagtatgtagtaatctttccccaactgctacactactagaatctaaatccattaataaaattaagaagaaacgctaaagacatgtttctagaagattaggaaatcatgtaggataaagatatttcagtttctgctacatattaatggtattctttccgtcattattactattatttt

SEQ ID NO: 96225 - DNA, 1664 bp, Homo sapiens
caataatctttaataacagatgttcatattgtttctaataaagtagaatattttaatgcatatacaaagtacttttaattatgttgctatatttgtacaggaaaaatattataaatactgtgaaatgctatcagtttttcccagtgtgaaattatacttttattttgttctttatacttttatgcattttcaaagtcttttgtaataaacctgttttttgtaattgacattttacttaatcaaacagaacattttcattagcacataggttgatattgcatagtttagtgctcatctacccatgctatgataggagaatcatgattttgagcaatataaaatgattactgatccaaaaacatttatatcatttgccaatctctgcttagctggattctctcttggttttagacagtccgctctggaacattttacagacccagaagcatgttgaatatgagggagtgcctctggctgattgctgggaacctagtagtctagaggaacctagaactagagacagtccaaggtcctattgaaatacaggtggagatcttggtttttatagtgagaatccactgtaagaatttagtactgaatacacaaactgatttattttgtatggtgtgaaatactgtatgctagtacttcctggagtgggttcaggggctttttctcattttgagtttttgttagcctgaaaactatcactaatttgctgttatgttttgaaatatctattatatttgctattggtgatttgtggacaaggagtataaaataaattttcatcttttaattctatgtgctccccctctggaattcacttaccttacctgtggaaatctagttttgatttcttatcaatatagctaaaaattatggtagtatagaaaataatcatatctgaagcaattttactaaaactaagctttcttttctccttactttatttgatagattagcaagtggacccccagatctgaggtgttgtttactgcatcagaaactacaggtaaagatttctcaatgacatggataaatgtggtcttgatttaatcagattattctaatactaaatgtaataatgggttacatgctgttctcatggtgctgctgtaggttgcctatagtcagtagtcactgcaattcacaaggtcctgagaagtggagagtgaaaattaaatattcaagcagtaggtagatttttatttttctgtaactaattcaactataaatgttatttctcttttcttaagatgttaaattgttgtattgaaagaaagaaggcacgtgatgaggggaaaaagacaagtgcttcagatgtcactaatatatatccaggggatgctggaaaagcaggagaccagttggtgccagataatctaaaagaaacagataaggaaaagggagaggtaggaaaatcttgggattcctggagtgacagcgaagaagaattttttgaatgcctaagtgatactgaagaacttaaaggaaatggacaagagagtggcaagaaaggaggacctaaggagatggcaaatttaaggccggaaggacggctctatcagcatgggaaacttacactgctgcataatggagaacctctctacattccagtaacccaggtaggatgcactagttctttccattttaatttattt

SEQ ID NO: 96226 - DNA, 1120 bp, Homo sapiens
aagtctggccaacatggtgaaaccctgtctctactaaaagtacaaaaattagctgggcacagtggcgcacacctgtagttccagctactggggaggctgaggcaggagaatcatttgaacccagcagtgggaggttgcagtgagccgagattgcaccactgcactccagcctgggcaacagagcaagactcttgtctcaaaagaaaaaaaaagtgtttatgtttaaagataaagatatagactgtttaaagaaactaaaggtaaggatttcccaatgacatagataaatgtggtcttgatttaatcaaggacctttaaaagattggacaaagtctatgtttaaagattaaagaaatctaaataaacttttggggcttttaggtttgccatttctgtaattgagaaatgttttgaagtttaagtagatcacgtcatcatatataaggtgatttataaactgagcagtgaatgctcagatgtttaaaaaagaaaatccaactgcacttatgtatgtttttgtttaacttgtggacaaagacttatggataggtgcaaaaaataaatcctcttttgcaacccagaactcattgttcagtatgagttttgatacatataagaagggatattatgatacctgagacagttaactgatgggaatattgatagccataaaggttggtcccagaccaggcacaatggctcaagcctgcaagccccacaccaaggtgggagtattgcttgaagccaggagttcaagaccagcctgtataagaaagtaacaaacacctcatctccacaaaaatttaaaaattagctgagtattggggcatgtgtctgtagttgcagctactcaggaagaggaggctgaggcaagagtattgagcccaggagttggaggctgcactgagctttgatgacaccactgtactccagcctgggtaacaaagacagaccctgtctcttaattaaaaaagattgattctaggactgtggaagagatagttaaacagcatgggatatgaaggaaatcctcagcagtattaattttgcattccaatttcatgttgacttgatacctacgatggctttttgttttaaaggcttttatcttgagaacatg

SEQ ID NO: 96227 - DNA, 1037 bp, Homo sapiens
agaagccagttggctcttggggcacatgtcaaaccaaaaggtagagaagggaattggcttaaggtgtgtgtgcacagcaggaaataccagcctccgcagcagtaattttccatctgacctctagctgccttcagagtcatctttccctgtcctgctgcagtgtctttgcagaggcatgcacgggaggacattccaaataggaactacggaagtttttccccatggaaacatactactccttcttggtaaagttctatatagttcctctaacactgcacttcagcaaaactgtgattcattagactattttgggctaacctgggtacctgcaaatcttacatgacattgttttaaccagaaaatagacagtaatttaaatagtcaacttacatatacacccatatgtagaaatcagataatacatttaaggaaatatgtagttattctaaaatagatatggttgcctttactttttgtatagggatgagttaggggctcttgagagtccccagagcattggaagcatactaatatgtgcctgggcacctacacctacacctcagagttccagaaggagagggtggattctggagcatgcccttgtggtacatacctttaacagtaaagagaagataagctcaagtgaaccttggccttctcttggtagctatgttcagcctagtatagtaaggacaaccagaaagaagaattttggtatgaaatgcctttcttcaatataatctatagtgtatgagtgaatattattttcttttgaagtttatgctctttactctgggcctctggtttcctaggatgttttcatgtgggtatgatgttaactgattaagatctagatctttgtacatgaatcctgagtcacccagtatcatgaaataatcttgacccactgcttttgccatggaccgtatcataacccttttacatttgtgttgttgacagtcagtgaaggatcttctaggggatatgcccttaggggtatatcctaagatggtagggatggtcatgctggtagccct

SEQ ID NO: 96228 - DNA, 1049 bp, Homo sapiens
gtactttcaaatgagaatggagttcagttttaccatctttaaaccccatgtagggcaaagtggagtcacaactcagcttgaattataaatataattgttcttgtaatggtgaggagatctacctttgaggtttcctagaaaagaagaggaaaacttcagatttttagggctgtggaaacagatttcagcacagaaagaaagcccagtttgaaaaattatcataaccattacctctagtagtgaaagtaaagattttaaaattatattgtatcttggttactggctaagggctctggcatcctacagataattctcagttcagggctcattaatattagggattctgataaaggcgttatgtgcactaattacacgcttccccttatatggcactgtgattacactagaatgacccagttttgagagtgtaattttcagaaacaaataagaaaaagaatttctatgtgtctacacgtggaataacaactggataatccctgtagagttggtctggagtacaactagttaatatattcaaattcatagccaaatacactgataggaattcttagcaagagctaaaatctgagtttgtttatggggcagctccctaaacctcagaatttcaaattaataaccaaatatttatttccttataaattagacttctagcaaacaatagatgcttgctttgatttattttgtttttctctctggcatgaaaacaagaaccgagtttggttccacatctgataatatctatccagttcactacccagaagcttacaagcgcatttccttgttagctaccaatatgaatgttcctcatattgcaaaaattctttcctctttgatcatttttaataagtgacatgttggctgggtgcggtggctcacgcctgtaactttgggaggctgaggtgggtggatcacctgaggtcaggagttcaagaccagcctggccaatgtggtgaaaccctttctctactaaaaatacaaaaattagctgggcgtggtggtgagcacctgtaatctcagctacttgggag

SEQ ID NO: 96229 - DNA, 1190 bp, Homo sapiens
ttaaaaaatgaataaataaatataaaagttcctatattgtcaaagttttacttgcagtcagtagagggggtaaggaggttatttctattttggggaaaataattttgcttagttatctaaaataagtaacaatctcaggactaaaaatataaatacttcacattttaaatcctcttaacacataactttttttttttttttgagatggagttttatcacccaggccggagtgcagtggcatgatctcagctcactgtaacctctgcctctcgggttcaagtgattctcctgcctcagcctcccaagtagctgagattacaggtgctcaccaccacgcccagctaatttttgtatttttagtagagaaagggtttcaccacattggccaggctggtcttgaactcctgacctcaggtgatccacccacctcagcctcccaaagttacaggcgtgagccaccgcacccagccaacatgtcacttattaaaaatgatcaaagaggaaagaatttttgcaatatgaggaacattcatattggtagctaacaaggaaatgcgcttgtaagcttctgggtagtgaactggatagatattatcagatgtggaaccaaactcggttcttgttttcatgccagagagaaaaacaaaataaatcaaagcaagcatctattgtttgctagaagtctaatttataaggaaataaatatttggttattaatttgaaattctgaggtttagggagctgccccataaacaaactcagattttagctcttgctaagaattcctatcagtgtatttggctatgaatttgaatatattaactagttgtactccagaccaactctacagggattatccagttgttattccacgtgtagacacatagaaattctttttcttatttgtttctgaaaattacactctcaaaactgggtcattctagtgtaatcacagtgccatataaggggaagcgtgtaattagtgcacataacgcctttatcagaatccctaatattaatgagccctgaactgagaattatctgtaggatgccagagcccttagccagtaaccaagatacaatataattttaaaatctttactttcactactagaggtaatggttatgataatttttcaaactgggctttctttctgtgctgaaatctgtttccacagccctaaaaatct

SEQ ID NO: 96230 - DNA, 2199 bp, Homo sapiens
ctttaatattgcgaacttctcttttgtggtcattgctatatgggcctctatcacttcggcatcacattagctgcccagcaagcaagaccaatgcccccacttttaatttggcaagtgaaccttaaaaagaatcgattaaaaaattcttacccagagtcaagatgaaaatcatcttttcactctggagaaaaacagctccttactggactgaggctgtcagacgtagacttgggtcattgctggaagaaacatagaaagcagcacagctccgaggtcctttttcatcagatgtgtaaatatggccttctctcttcagagcagattgcctggcagtcatcatccctcctgtctgtctccagcccggctgctcatgcagtgtctcaagcttcttgcatttgctgtgttatgtggtttttgagtaatcttaacatatagctgactgcattactgagtaacgtgggacattttcatatctttattatgttaattcatctgtccttcaaaagcatctgagtttagcatttgacctgcttttgactttagcatttgattcttttccaggctgcagctatgactccaccagaggaggaattgaagagaatgggctccccagaggaaagaaggcagaactccgtgtcagacttcccaccccctgctggccgggaattcattttgcgcaccactgtgccgcgccctgctccctactccaaagctctgcctcagcggatgtacagtgttctcaccaaagaggactttagacttgcaggtgccttttcatcagatacttccttcttctgattcttctagcattactcgttggtggcttcagagacagtgctgcctcctcctgagggagggaaggtaccagggagaacctgggaggtcctggagagggccctgtccagttgggtgatcaggaatcaaaccagcatcggaaagacttcccagcaccaagcttgagctgtgtcgtttcgtggagggggcagcgaggatgggcttgagctgttgagagatttctgccctagagatggcctttgtatatgggggggtggtggggggacacaaacacatcagacactccgtcctcacactggcaggacggtgttcatcgcattctcttctgtgaccagcctctaggctagcggctgcattcgtggtctgtgcaaacacttcgtggttctatatatcagcagcaagtgtgcaaaataaaggacctgttaactcagatttctggatattttggtggtagcttctagtcccagaatctgtgtttttaaaatactacatgacattctgtctattcaatcacctggtggtcatctttcttgtactaattaactgttgatgagcattttggatattctaggagaaagcctataatttcacatagtttctctttttcatgtaactgtaacctaaatgtattacttctgataaaactatatatcaaatgtcactgcaaattagttttatatctgtcatgtgagatttgtcttacttatttttcttttggttgccatggaagttatggccctgaaaatcgtctccctccccttctcttgctgtacagcatgcgttctctttttgtggttgctggctgggtactgtatttaatgaagtagagaatagcacttgcaaaaatacagtcttggtacctagagactgtcatgcagatagtataatttggtatatgtgctaatgcattgagtagaggattattttaacacactattttgcttttgtattttagttaaaataatcgatggggatgtgtagcccccccgtgtgaggatgacatcaccacatttctagtttcatggagctcaagatgtcttgtgtctgtgtggctagatggcctctgcttggtaatcttatttttaggcctaaaattcccacttaaatccaaagtaaaaatggttatactgaagcataaaccttgcctgtgtaattttaaaaaattaatagagctgtgcaaaccctgttatttttgtaaaaaaaaaaaaaaatacatatctatatataatatgtgtgtgtgtgtgacatatgcacacgtctctgtgtatgtgaagtaggggaggccctgggggatgacctcccagcctttatgatgcttttctctatgctgctggacttcattcttactggtccacgcagatgcaggcggcctgaggccagtgctgtaccaagtagaagacggtt

SEQ ID NO: 96231 - DNA, 1117 bp, Homo sapiens
gcccagccctcagggttgggccctgccaccagcccaccacaagccccatgacaggagcgctgtgtgacctgtgctctggaatggcccctcctcttcagcatgtgccccaaaatgggatggtgtcccaggaggcagtctccgtccctcactcatccaggagtctcccagcctgcctgtgtgctgggccagggccttgccttaaaacagcctcctctacagacacctttgcttccattaaactttgcttcagaaaggtggcctcggctgtggccagatgggacaccatcaaagctcttccaaagcccccccagccacaggacgatttgagtaaataatgacttgtccatgctgtttgttcacattcctctttctcagccctattttggcccaaaacactatttttgcccatgttacataacgagggaactgcattcttagtaacccactgtcactctgctgtgttatcttgcctatatgaaaaaatgaaatatttttagagtgtgaatttcccaaacgtcctcaactattctgggactgaagtcacaacatcacgaagggagtgcgacggtgggaggcccagcctcctctgtggctgtggctgtggctgagtcccacccaagggcttccgttgccactgaggctgggttgggacgtgccctatcctgccctgtcccagtggcaagtggctgtctctgcacagggctttccactgtcagcagtggactccgcagcctaggaatactcttcattgattttcttgactcctgttgttactttggggaaaaaaacacaagcaatggcctgtcctcttagggactcaagtaggaggctgaaatccccattgggggttagtccaggtgagcaaattaccctgaataagtgtgtaggctccctccctgccaccgagggacatggtaagaaggcttccccaacacaggtgttagcagggttaatgctgtcccatcagtaaagcaaacctgtccaaaacgctcaggggtttcaggccttgccatctggctggggagccagacatgtttcttttgtgtgtttatcagctccccaggtgtgtcctggtagacaactgctcccaggagctggcatagaagcaaacctgcag

SEQ ID NO: 96232 - DNA, 1015 bp, Homo sapiens
gtttggtttcccaggttgtctcaaaaatgccttttgctgggctcagtggctcacacctgtaatcccaacactttgggaggccaaggcaggtgtatcacctgaggtcaggagttcgagaccagcctggccaatatggagaaaccccatctctactaaaagtataaaaaattagccaggcgtggtggcaagcacctgtaatcccaactactcgggagctgaggcagaagaatcgcttgaacctgagaagcagaggttgcagtgagccaagatcatgccactgcactccagcttgggcaacagagcaagactctgtctccaaaaaaaaaaaaaagtattttatagttactttgttcaaattagaatcaaaatgtcacccacatagtatatttgattataatgcctcttatgcttcatttaatctattatagcaccccattccttttttatactatcatactatcaatggttgaatatactggatcatttgccattctggatttgtcttcctgtatctgcaaggtattgtttgacatgttcttctgttcccccaattttctcagtaagaattgtaagatctagaggcttagtttcattctcattcagttattttgggaaaagatcttaacaggtggtgcagtatatcaagaggcacctatggtctggcgattcccctttccatgttaatattgaaagacaagaggcaaacagataacccagaaatgtagtccatcacaatcagaggctatgtatgtgtatatacactcacacacatatatgtgttcattgcattgaaaaatgtaattttaatacaacaaattatgacaaattattatttatagaacactatcatcaatattcactttcatttccaaaattcaactggatttctaatcttgctatctgaacaattctaaatttcaaactaggccaggcgttggctcatacctgtaatcccagtacttggagaggccaaggcgggaggattgcttgagccaagagttaccagcctgagcaa

SEQ ID NO: 96233 - DNA, 1044 bp, Homo sapiens
gactaaggcagcaggaggactgctggagcccaggaggtcaaggctgcagtaagccgtgatcatgccactgcactccagcctggacaacagagcaagaccctatcaaaaagaaaaaaaagagatatctcttgagaactgctgtaggtagtttacaataaagatatgaaaactgcatcaaattgaagaaagccttaggttatggaactcaaaagcctatttgggggacataacaaaatagcagttttctgatgttgtaaataggctcacattcaaaggaagatatctgcctgtgagctgttaactcttattatctcattttctgccagattttgagatttgttcgagaatggagtagtctaactgccatgaagcaaaggataatcaggaaaagtggacagctattctgtagcccaattcttgctttggaagagatcacaaagcaacaaaccaaacaaaattgcaccaaaaggtatgagttgtctttttttaaattttgtattatattacttttcatggttctttctacaggggggtctgaggcatcttttggaaccactaatgaaatcctgatgagttatgagaaaattatgcataaaatcacagccatattgtttcataacaagataattatatgtctagtgaatttgacaaaatctgctaaaagagatcaggttgtccagatcttactctccatgagtcccatcaatcaacaaaaagaccagagtcacaggatggtgcaacctatgacctgccaagcctgggacacttattagcagcaggaatacattttactcttagaacatcagagcatgcctctggaccccatctgctttgccctgctgtgcgtgagtatgatgctgtgcagcaagggagctggttctatttgaatgcatcaccacccaagtaatggaagataactataatcatgtccatgattggaaatgaaataaaaggaaaggttgaccgtcagatatttgtgactgttttgtccttatcattacaggttcctttctaatctctgtacattgatttccttccttgtca

SEQ ID NO: 96234 - DNA, 1018 bp, Homo sapiens
cctcatgccccatgttgggggatctttaggccatgcctctttctcagaccatcacatgagagggacagagaaatggtcccaagagggtagagaaaccaaaggacagacaccaggcagagcataccacagaaatccagaagcccttaaattctttaatctttttttactctatacaatgaaagctctgcctcttggattacctgatcaatgttttatccccgttggggtggagacggagagaactgcaagctcctggtagagggtataatgcacctgctgccaaaccaaaccacagcgaccacctcactgacccgtattcaggctctgccaccagcctagtagcctgcttcttcttgacatctctgttaatggtctcaaatatatttttatgactgttctaaatacttacatgtccctttaccataaaatgttatcacccaaataattttccaaacacaagacactaagcagatgagttgttgacatatcttttcacaaccagagtagagctgagatgaaagctttccttttcaccttaaaagagctgaagtaaggctgggcacagtggctcacacctgtaatcccaacactctgggaggccgaggcaggcggatcacctgaggtcaggaattcgtgaccagcctggccaatatggtgaaaccccgactctactaaaaatacaaaaattatctgggcatggtggcaggcaccagtaatcccagctacttgggaggctgaggcaggagaatcgcttgaacccgggaggtacaggttgcagtgagccaagatcgtgccactgcactccagcctgggcaaaagagtgtgactctgtctcaaaaaaaaaaaaaaaataaattcctagttcactgcctaaaaggatatccctttaaaggaagagtagtaacagacatttagcatcctgtgtcatattagaactgttcatttcagctagaatcccaagtctatatcagggtttagaattacatatcaatttttttttttttttttttttgagatg

SEQ ID NO: 96235 - DNA, 1259 bp, Homo sapiens
ccaggctacagggaatcaggcatttaagtggccctcaacatagcgatgttgctgctaataatcaaaatgatgctcattcggtctcaaatctactctagcaaaaggaatagattagtctaaattttttcaagaccaatagcagctcttattggtggaaattcttccttatgcctaccaacttgtattttttcagctaattctgaatctgtttgtttcttgttagatcattagcaaaaatgtaaaacaattggttaccatataagccaatatgctcttcaatggcctaccgtggtagttttatttcaagcctagacaattactttttgttaaatatattgatattttgatatagctatttcatcgttctaacctacacacgattaaaataagctattttagatagagggtagataagccttcaggttctcttttgtcttctttaatagaacagtggaagagttcagacactttgccagtgtatgacaccttaatgttctgtgcaagtaggaatactgaccggattcacatctatactaaggtaagcgtcatgcagattctgtaacttgaaacataaaaaagacttccttttttcacttttcagtggagatacttaattttattaacattgagataagcatctagttattttcctcaaagctaattctcaaatttctgtgttaaatctacagacaatgagaggtaaaaccacacgtctttaagaacatagacttcagggctagactgcttcagttcaaatctgttagtatgtaatcttggacacattactcaactgctcagtgcatcaatttcctcaactgtaaaatgtggtataccccatttaccctgatgtgattattacacattgtatgccagtatcaaaatatctcatgtatcccataaatatataaacctactgtgtacccttaaaaattaaaaattgttaaaataataaaaaataaaatgcagacaggatttgttataaagataaaacaagctgagtcctgtaaagcacttagcacagtgcctggcctatatgaactctccataaatgttaattcctgcaatgatcacttgcagcagcaggagcagcagcatccttacagaagcctagacctgcccatttgtgttgagtaaatgttaggaagctttttgtcagatgattgctgattcctgccataggctagcttagtagtgcccaaactttttagattcagtacccctttgcactcctaaaatttattgagaaccccaaagagctt

SEQ ID NO: 96236 - DNA, 1055 bp, Homo sapiens
tccaagcttcctagagccatgaacagctctcagctcaaatgggactcctctcagagcttggtcctcatgacttttgctatagtagtgctctccaaaaccttcttactgaaaaaaaaaaaaaaacaaaacttagttgtgttctctttatctgaaaatatactatttacctatttgttaattttattgtctttctctgccatttagaatggagtctagaatgcagggatttctctgtcctgttcctgctgtctcttcagcatctagaatagtactgggtatatagtatgctcctgataaatgttttgaacatatgaataaacattattcactttctttttataagacctaactgttacattctttttactttacttttaaatgtaaattattacatttttgtaataatttttattttaatagttatgcaaatagatagcctcaaccatatccaggataaaaacgagaaggatgattctcagaaagacacctccaaaaaggttcaaactatctcagactgtgaaaaacaagcccttgcacagtcagaacctggccagttggctgacagcaaggaagaaacaccaaaaattgagaaagaagacggacttacatcccagccaggtaatggtaagtcttgtttccatttctagcatccaagtaataaccatatactttcacacataatactgttattagattagtaattactaccttgttccaggttccttttactctcttttatattaaaaataccaaccatttgtaaccacatacttaaacaccagatgtctagaagagctgagtgtgtctgttggcattcagacattacacatagagcaaaaccgataaatagctacatgtgctgccaccaggcctgttgcccagcctcaaccaagcctagctcattcacacagtaagggtgttgttttgatatttgggaggtgctttgggacaaaacagtaagactgacagataattaactaacacttagcatatcattaatcctttacacaaaaattcttgtaaatagttatacttaattggcatatttttaaaaa

SEQ ID NO: 96237 - DNA, 1022 bp, Homo sapiens
ccctcaaggaagggacgatcaagtgtcattagacatttgaagagaaaatctatagcatgaaaaagataaacaaaagtaaactaatacacaaattgatcctgaagataattttaaaaaaactcttaagtagtagtttcagatttgagattatattgcccataaaaataaaatgagaatacggtaaaaaaaaaaaaaaaagaacagagaataacaaggaacttttagatgttaaaaatatgactgccaaactaaaatgattctatagaagggttgaaagataagtagaggaaaactaagagtttacagggtaaaaagacaaaaagaaggaaaatattacagtaaaaggtaagacataaatgtgtaagtctaacattctactaataggaatgccagaaaaagagaaaattaagaggaaggaactatcaaagaataatagaaattttcgagagctaaagataatagtattcaaaattaataaggtatcttaagtcctgagcagaatttttaaaggcatataaatatagactatatagaggtaaatcactgtgaaattttaaaacaccaaaaataaaagttcctgaaaagccctaaaagaaagcaaaaatgtgcagcctaccaaggaacaacattttcagcaacaacagatattggaagaaacagaacaatgcctttaaggatttgagaggtcaggcatggtggctcacgcctgtaattccaccactttggggggccaagacaggtgaattacttgaactcaacagttcaagaccagcctgggcaacatgttgaaactcaatctctgcaaaaaaatacaaaaattagccaggcatggtggcatgctcctgcagtcccagctacttgggaagctgaggtgggaggatcacttgaatccaggaggtcaagactccaatgagctgtgattgcaccactacactccaacctgggtgacagaggaagaccctgtctcaaaaaggaaggattcaaggagaatcgtatgcccagcaaaactactgaataaagat

SEQ ID NO: 96238 - DNA, 1501 bp, Homo sapiens
tttacttcctgtgacagcattcatcattgttcagtttagccatcataacattagccatagtcattgctaatcttgctctctccttttgctaatattgtattcttaagagtaccttttggttcacaatattattaaaatgatttcctttctatcctttcccttgttttctggattttatgtactaaagcctcaattttattacccaagtggaatgttctgttttagaacatcacctatgctgattactcccatgccactgttcataaactaccataatggcagaagtaagcatcagtttctcattactgtcagtcactgctaaccttacctctcaacctgccttcagcatataatgagaattctcaaatgctattttcccaaaataagtcattgcttaaatagtaaaataagttatttttaaaatagcttaattaaatagcttaattaagaagatcaactgtaaagctggtatttgaaggccctgagaattctttttttgtggggaggtttctttagttgttttgtttgtttatttatttatttatttatttatttatttttgagatggagtatgctctgtcacccaggctggagtgcaatggtgcgaactcagctcactgcaacctccacttcctgggttcaagtgattctcgtgcgtcagcctcccgagtagctgggattacaggcacccaccaccacgcacgactaatttttttgtattttcagtagagacagggtttcaccgtgttggccaggctggtttcgaactcctgacctcaagtgatctgcccgccttggcctcccaaagtgctgagattacaggcgtgagccccaatgcctagctaatttttgtgtttttagtagagatggggttttgatatgttgtccagggtggtttgatctgtttggccagatcaagtgatctgcctgccttggactcccaaagtactgggattacaggcatgagccaccacgttcagccttctttgttgttctgttttgttgttgggaagattccttttgttttaacaaatgttgcaaattttttttttttttttttggtggggaaatggagacataagtcattaaataaacagattctttaaaatatagaataggacaaaagattcaagtattatttaaacattattcagtgtagatgatagtggactattatatattttatatatatagctatgctgacatcagtttgttttatttgctcttcttaaaaaaaaaaaaatttaaggccgggcatggtggctcatgcttttaattccagcactttgggaggctaaggcagaaggatcgcttgagcccaggagttcaagaccagcccaggcaacacagggagacccttgtctaaacagtaacaacaaaaattaaccagacatggcagcatgcacctgtagtcccagctactcaggaggctgaggcaagagcatctcttgagcccagaaggctaaggctgcagtgagctgtgatcacaccattgcactcc

SEQ ID NO: 96239 - DNA, 1049 bp, Homo sapiens
ctgcttatccacctgcattcagcctctttcctagggatatgtacaggagtctaacctcccacttcatgcgacactgcacctggctaagaccatgtctctaaaaaaaaataataataagtaataacgttttcttttttactactttgggttttaaaaaaaatcaaaatgtgttttattttgtgtgttttgttttgttttctctctatctgcagagaaacactagtagttgtgcctaagagtggatattgtcagtattttattcagctgtatgggaatgaacattttggaaaatctgaaaaaaaaaccagtcatttctttcttagaataatttaaatctattttttcagttagatgattaaaaccctacttgtgtcactctgtctcctttgaaaacagactcttgttggcttgtttacaaatgctcacgagggctctttagttccagttccaatcatcaatcctctgtggttcaagagaccagcatgatgtcccaatcacccatttgtaaaataggtttattaatatttttaggaacaggagccaaatgacacgaggcagtaatggttcctaccagagctgccctttgatcaaagtctattaaacttgacatcagtgcttttgttggtagcctgtgcttccctggaatggcaccaagctttgaagtgctttattttttatgagttttactagatttttttcccctctccttcagttctaataactggcttttaatcctatcatcatagccaggggatttgtctgtaaagaccagtagtttgctatggtgaaaaacagggcaaaaagattaggactctgaacttttcagataaaaacatgcattttgccatcttaagcattttgcagtttgtattcccagcacttctcaccaaaagcagtatttttcttttgtttttcaaaaacaatattgaacaaaagacaggaacataataactgagtttcagctgtataactgaagagaggaatatgttcttctatcttccactttccttatgacatgggcgtgttgttataattatatttttctcata

SEQ ID NO: 96240 - DNA, 1051 bp, Homo sapiens
ggcgcctgccaccacgcccggctaatttttctatttttagtagagatgggatttcaccatgttgggcaggctggtctcaaactcctgacctcaggtgatcgccccccttggcctcccaaagtactgggattacaggcatgagccactgcacctggcgtgtttcaggtttactttagaatgctcttggccaagaggaggaatccattaagttggttgggaggcttataattttatttttggtttacaaagataattatattactaaagcccatgatatgttggaacagtaagattttcttagtgggtagcttatgatttaaatgcaaaatcaagttacttagtgaatttcagctgtgaggtgaactgctcaaaaattcatttactttttcctcttgtaggctcaagttacagggagcacactgaacggtaggaaagaaaaaattcaggctgaggaaggtgataaggaaaaatgggatttcctgcagtttgctgaagcttggactccaaatgacagttctgaagagttaaggaaggaagctttgttcactcacgtaagattatatgccttactcttttctattttttttagtatcctgaaactataactttgtatgtatggttttaaatagcaactctcaattatttatggtgttgaaaggagacttcacataaagctggaaaccctcttagagccaaaaattaatattgttttccaacagttttagtacttactgttcagctcctcggataaacaaactgaataaaattcagagttcaaaagaaaatataggaggctatctttatgacactgagaatagggaaaggtatattaaatgtgccttaaaatgtgcaaatagtaaagaaaaagattcagatatttgagtatatcgaaatcacaggttttgttatacaaaatgtcctgtatataaatcacagactcagtaaagatatttgcattacaatgtccaaagtatatgaagaatttatacaactcaattagtaaagcataaacaagtcaacagaaaaataggcaaagagctgggcatggtgg

SEQ ID NO: 96241 - DNA, 2166 bp, Homo sapiens
gtataaccagagacgttgttttcttgctttataacatgacagtgtgagttagatgaagaggatgtaaatgctctctgcctggttgctatagataccatatgttggaaattgtattctcatttataaagtattttattagattttccagtggtaatgtgaatccgttcatcatcagagaataaagtgatttagtttatatacttacatcaagctgacttttgaaattttgaaatacctttcaaatgtgttttttgtagttcacctagctatgttgcattaaacattcttcatttgcctttcatgaattaaatcttaatttggcctaaaatagacaactaatttgttttcaagtccttcagtgttctccatttaacatgttcagaaatactttattatatattggctgtatgttacattctcaatttatttgctttatttcacttagggattaacatttactgcagcaagtcatgttgtatttgctgagttgtactgggaccctggacatataaaacaagcagaagaccgagctcacagaattggccagtgcagttctgtgaatattcactaccttattgcaaatggaaccctagacacccttatgtggggaatgttgaatcgcaaggtaaagcttgaatttaaatcaagttagcagcttacttactattaaccatagccaatgtgagttaagaggctgagttttagtgttttcaggcaaaggatacttaagcacatcaagataatgatgataatagagaccaagttaagaaaaggcttcagtagtagtaccttgtctgctctcctctgtaataagagaggcatgaacttccacgtactcctgttatcttccaagcccttctactactttagaggtacaatgatggggttggctagcaaggaaacgtaatgtttcaagccccaagtcctttgcgtaacctaagaataaaccttttctagaagaattcttgagttccaagctaattttggacagaaggtagcctgtacccagactctagaaaatgtaggaatgacattgcttgctctgtcctctcagctgtctcatttcctcagtcttgacaatgtttatagaaaggacttgactaaggattagatgatttctggctgggcgtggtggctcatgcctctaatcccagcactttgggaggtcgagatgggtggatcacctgaggtcaggagttcgagactagcctggccaacatggtgaacccctgtctctactaaaaatacaaaaaaattagctgggcatggtagcaggtgcctgtaatcccagctacttgggagcctgaggcaggagaattgcctgaagctaggaggtggaggttgcagtgagctaagatcgcaccattgcaacaattgcactccagcctgggtgacagagcaagactctgtctcaaaagaaaaaaaaaagggttagattatttctgggttagtttgtttgggcagccataacaaagtaccaatctatattgggtagtttataaataacagaaatttatttctcatacttctggaggctagaagtctgagattaggatgccagtatggttgagttctggtgagggccctcttccaagttgctgactactgctttctcattgtggaaagagggcaagaaagctctttggggtctcttttataggggactaagcccattcatgagggctccaccctcatgacccaatcacctcccaaaagccccacctccgaacaccatcaacattgggagttaggattttaacatctgaatttgggggggatacaaacattcagcccatagcactgtttttcaatgaaatgttttttaagcactggatataaatatttaaaatggccgatcatatgttggttaagtttcaaagcatataaatattagaataaaagtttttatgaagaaagtgaatagtataacttctccagttaaaccttttctcattaagcatggaaccattgactgggtaatggattataattttggataattattgctatggtttgaatgttcattccctctaaaacttactttgaaacttaatccccactgtggcagtattgagaggtgggccattaagagagatgattgaccttctttcccaccctcttctaaaaaaaagaaaaaaaatgattgggtcatgagggttctgccct

SEQ ID NO: 96242 - DNA, 1027 bp, Homo sapiens
taagcttcagtccctgatttcttactgttttcaatcttcccttttaaaaaaaaatgctcttcatctgatttttttgctttctgttttctccttaactctgttctacttggtcttatatataaacttttttgaaaatcaccttctaaacaaaactgccaactccttcttggccatagcctacttgactacctcctttccattgaaacccattgttgtgttgttttttaattcttctaattcttgtcttcttctcatttaattgctcagtttttccccttcttgtccctcttcttttacattttccttatatgtgggcttctacttccttaggctacctagagaacaatgcagctaaaagttcatatttactgattttcaagccatttttcttgctttattaaaagtgacataaattttaaataatcatttttatgacactaataaggtttaccttttaatatttaggcaggtgctgtaaaggattatattaagatgatgcttcagaatgattcgcttaaatttctggtttttgctcaccatttaagcatgctccaagcttgcacagaagcagtcatcgaaaataaggtatgttgccattttttaactaaatactttttagaatgcatatttttactatactaaacatcagttgtagtctcatagttgaggtgttttttgtcttctttagatgatggtatataaattatcacacatttttcttgaaaattatattaatattatatgatgatgattatatactattaaattttctcttttcttaactgatctcataattttccactgaccaaattatctggattgattaaagatatgctgccatgccagccgccccatctgggagggaggtgggggtcagcccccgcctggccagccaccccatctgggagggaggtggggggcagcccccgcccggccagccgccccgtccgggagggaggtggggggcagcccccgcccggccagccgccccgtccgggaggtggggggcgcctctgcccggccgccc

SEQ ID NO: 96243 - DNA, 1003 bp, Homo sapiens
acaagaaagacactaaccactgactagaagctctgcgcatgtatacaatttatagactgtggccttcaataaatggtgatctgaatgggatgtctccctgggaaacccctgatagcagtatctttagttttttctcttggctggtcagattccttagaaaagaatcactttatatgattctgctctcttgcctgaaggacataagcctgtttctgttttgggaagtataggggaaagaaggctgggacagaggggcagatctcagcatttattttgtaactttcatgtaatccccatgagttttgtaggatatacctatcatcaatataggattcctccatccaaataccctctattttatccactccagagaataagtctgtagttttctaccagaatggttatggtagttacctattatatggaataggtagagagaaggtaaatagcagtattgcacataatcaactacttaaacattatttcagcaggtcctcctaaccacactcctaccccccattccagaggtgtcattttctgaacctttttaggtgactgcaacgtaaatcaagtgcttctccactttccatagccagtttaggatctgtgagattggttaatcagttatcagtcattatctgctttttagcttccaaagttttgttgctattgacttttctccagttctctttgtccctttacacttgctatcttttaaacatagcattgagaaggagcagaagttaaatgtggtcagcctggtatctttttccacaatttctacataaccagtttttaaaagttaaaagatacatagattttaaacttaattcatgctatcctctttaattcgtatttgcttcatatcaaattgatttttcactcttagtaagtaacttggcctcaagttacctgttaatctgaactttttaaattttcttccttctgtgtcataattgttctatatgtccccctgttctctcagacctcactaccgttgtct

SEQ ID NO: 96244 - DNA, 1085 bp, Homo sapiens
gtgtgcatattcaggcaaattcattgttttaaaaagattgtaatataagcataaacattgttttgtactttccctttttgtctttttttcatatacataaatggtatacattatggttgcatgtcattgtatcattggaaatatactgtactttcggggatggcaggaagttgagagtttgccttgtacagtttatattttctctgtggaatgggaaggacaatcataggttcagagaaatggaaaaatagagggttaaaggtttcatgaaagttgatgtggtttgaaattttaccaaatgagaatgagattagtgtggtaggattgttaacagctctagtaatcatttgagatcagcaactgcagatttgtaatggaaccagttttctctaaggtacaatttctccagccacacccagcagcctggatacaggcatggaaaaggcttcaggcctttttgatcctgaggttggatccattcaagattggattttttcaacagcttatgatgcatggactgtgggacaagggaacttaaactatatttataagaacaaaggtaatgtatgaactcagaaatcaacagggctgaggaaagatgtgaagacagaaaaaatataatggatttggaaattagaggagtcagttgactgaaatgtattgatgcaatagtaaagacatagtgagtatgaatgaacaagcaccttcgaaggatggggtaagtagagagtagaatgtctcaatttaccaggtagaacggtttcttaggacctggttgtaaccatagggatagttggagtaggttttagagggtcattgaagacaatgagtgtgaggaactaagagggaactagaagccatgttttaagaagcattttaacaaatgaaaacatatctggaaaagggtgaccagaataatgagaggaatctcatattcagttcaaaaatgtctaatgttattgattgcctactatatttaagacattatttcagagctgccggcaatacaaagatgaataagacatagtacttgatcttatgaagcctacaggaatttgaaaacgagaagccctaaggggagcagg

SEQ ID NO: 96245 - DNA, 1016 bp, Homo sapiens
gtttttaagcagtgcattattattttattgtctatataaggttttaaaactaaaaatagacacgtgtaatttaagtgtctgagacatgttttatgggacaaaattctagtgtaacaatatatatgatatgatcctccttatgtgaataaaagcataaacatatgcttatatcaacatagaaagatgtataaatgtatatttatacaacagataacggttatccctgatgaatagtagtgaggggatttgaggaataaacagttggattttcttttatacttcctactattttgttaaatggttttatcattgtaataataatttacttgaaaatattacaacatactacaaacacttgtattattatagctttttatgcagattgaagctctctttccacaaaaatttggaagatggaccgactatgcaaaaagatactgtaatgcacacatcaggtaagttaaactattttccgtaaattttttcctcacatgtttactgtgaacattgctttattaatcattctttttttttttgagacagagtctcactcccatcgcccaggctggactgcagtggcaccatcatggctcactacaatctctgcctcctgggttcaatcgattcttctgccttagcctcctgagtagctgggattacaggcatgcgccaccatgcccggctaatttttttgtatttttaatagagatggggtttcaccatgttggtcaggctggtcttgaactcctgacctcaggttattaatcattctttattccagtgttttacaaatttgtggtagctatgaaataattggtggactattatacatataggtggatgacctatatgtaaaataaataaaagtaatagataatggcaaagttttcctttgtttttattttttactttctactttttatttttgaaattatttatttttattggctagatttacatgtaaattatacaaaagtaaaaactaagtgtttcttccactcttgtctctcagcaaa

SEQ ID NO: 96246 - DNA, 1105 bp, Homo sapiens
ggaatgcagtggcaccatgtcggctcactgcaacctctgcatcctgggttcaagggattctcctacctcagcctcccgagtagctgggattacaggcaccaccaccacacctggctgactttttttatttttagcagagatggggtttcaccatgttggtcagtctggtctcaaactcctgatctcaggtgatccacccacctcagcctcccaaagtgctgggattacaggcgtgagccactgcacctggctgataaaccttatttaaatgttcacatttaaattttcttaaaatgactcttctatcatcttttatagccactagggcatctagtttttatattattttgaaaatacactcttgcagttaaatggtggataatatttttatttgaatagtatttgggatatgttagataggagtacaactccagagtataagtttcctggaggatgttagttaaggacagaaaaactacccaatgtcttccaggtacttaaagaaacaggtttaggtgtataccaatatgtccaccacaaatacatatactttccttctggcttatatcagttatgcctggactgtttacaagtcaagacatggtaggatagaagctacagattgctgcagtggcctttgaagccagtctcctatatgttgctctcagtatacctaagttagttagtaatattaaataacctattactttcttcttcaggctcttctggtgtttgaatacagtgagaaaattataggtctcggccaggcacggtggctcacgcctgtaatcccagcactttgggaggccagggcgggcggatcacaaggtcagaagatcgagaccatcctggctaaaatacaaataattagccaggtgtggtgatgggcacctgtagtcccagctactcgggaggctgagacaggagaatggcattaacctgggaggcagagcttgcagtgagccaagatcatgccactgcactccagcctgggcaacagagcgagactctgtctcaaaaaaaaaaaaaaaaaaaagaaaattataggtctctgtattaagtagattaatccagggcttaaaatgcagtagccatagtggttctg

SEQ ID NO: 96247 - DNA, 1024 bp, Homo sapiens
tgtcacccaggctggagtgtagtggttcagtctaggctcactgtagcgtcaacttcctgggtccaagcaatcctcccacttcagcctccaagtagctggaactacaggtgtgtcctaccacgcccagctaattttttgtacgtttttttatagagacagggtttcaccatgttggccaggctggtctcgaactcctgggctcaagcgatccacctgcatcagcctcccaaagtgctgggattacagtcatgagccatcacacccagctaataatactcttaaataaaatgtttgataaatattttcttttaaaatattttaggctctattattaacatttatttattttttaatttagatgggtctaggaaagacaatccaggcaattggaattacttacttctataaagaggaatggcctctgttaatagtggtcccttcgtctctgaggtacccttggacagaagaaattgaaaaatggatcccagagctaagtccagaagaaatcaatgttattcagaataaaactgatgttaggtaagaacaactgtttaatatttaaggagaaaagtcttccttgtgtgtacctggtatatattcatgttttagaatgcaatatcaccaatagataataatttagaagtggagtaagtagtatggagaattttattttacattttaaaatatgaattatttatctaaaacccaatagtatattttagttctaagttcctttatggtatatttttaaagtaaatgtaaaatacgtatacttttaaagatatatgtagtatatctactttatatataccttaaacatatttgaaaccatcttaaggttcagaaataaatctcacaacttttcattgattgacttgaagctttgtgatcgtttattatcagcaacttcagtggattttgctttccaatttgttaattaatatgcaagttttgtgtgtgactcattagtaagtttgattttccttatttataattttaatattttatatcttgaaaatatttg

SEQ ID NO: 96248 - DNA, 1209 bp, Homo sapiens
ctctattggaaatagcactaacaatgtacaagaacaagaaagtggttctgctaaaatatatacccccttaataataagtaacagaacatagtatttcagtctgctatttctttatgcgggttttctttcttaattgaaatcctcactaagattttaaaagcatacctaaaagggtcctccaaagcaatctcttttataacaaacaggccacctattttaaagacaaacctacctatctgccttcaaaggaacaagctgcttataacattaaaaccggaaaagtttttagtttcgaaaaatgtcaatgagcatttttaatgcatagaaataaaaattgctttataaaagtaatcacagtataaaaaagtgaaactgaaattttatgtatcaggataattgttatttaattgctcttaataatttcatagaataaaacatttaggaaacctaaaattattctcctaagtaaaatggtgatttacaattttgaaaacattgatgaaatgtgttcttgaggttaatgtattctatttaattcttatgtagctacctggacatttgtactattgtttattcaagactttgattcttaatcattgatttagccttaatggtgatgaaacactgaagagttccacattaacaaattctattgttgttagagcccagggctttgaaccacatgttgagtgtagttattcctgtatgcctaaattacttgaagtgtgttgttgcttttataattgaatgctatgctgttttcaattcttttcaaaatactgaaatctggccaagtgcggtggctcacgcctgtaatctcagcactttgggaggccaaggcaggaggattggttgagccaggagttcaagacaagcctggacaacaaagtgagacccccccatctctacaaacaaacaaacaaacaaacaaaccaaaaacaggcatggtggtgtgcacctgtagtctcagctactcaggaggctgaggtgggagaaccgcttgagcccaggagtttgaggttgcagtgagctgtgatcaggccaggccacagcactccaacctgggtgacagtgagagcctgtctcaaaataaaaacaaaaactgaaaatctaagtacatgttttaaaagtttattttttattttattttattttatttttttgagacggagtctcactgtgtcacccaggcaggagtgcagtggcaca

SEQ ID NO: 96249 - DNA, 1038 bp, Homo sapiens
ggtataccttttttaaaccatctagtaagatgcagagactatttcctgttttgttcttcattagtgaaagttatagggcaattttctgctaatggaatcagactaatgaagcatattttcaagatattatcaagcattagacactagtttaatttttttaaagcttatgaacagaaaaggcagttcttcttaaaaattcattaggtttttggaatacacaaggatttatttgtattactctggatctattatgtaccttgaaattattacaagctttcatgtctttcctgtatattactgatgtttcataataggtaaaaagaactaaaacaaaacaaaacactgaatgttattttaactagtttttcaaagttataacatatgttgcaaatataggctgcttcacataaagcttttctcctctttcttccctattaagacactttaggacacttcggatatatccttccacgtgcttctgaacattgctgagtaaggatatgatgtctagagctgctaaggatgacaaagtagaaagatgacatgaatagactagtgaatcaaccaatcctagatctatccctctcttacgtgttatgtggtctctttagtgattaagccattttgagttgtatttctgttattgtacaacatcctaattcaaagtatttacaaaaccaggttttaaggccaatcacatttccttcagtttataatggctacatttgaagctaccatcctctgtaacttccttatatctgttgtgagtatttatttactgacaacagcaacaaaggttttaagatacttttccatttacaaagtactatctctcctcatttgatcacagcttggtttaattggcttagtgattttcacaaaaacacatgagactaggaaactgagtacagagatctagggtatttataattatatgctagttaacaagagtctactttaagcttttacagaaatgcaacagactaatttgatacgcaaccaagataaactcagccctctatttccacaggttttgta

SEQ ID NO: 96250 - DNA, 1056 bp, Homo sapiens
gactacagggtgcacgccaccacacccgggtaatttttgtttttgttgtgtttttttaagggatgggttttcaccatgttgcccaggctggtcttgaactcctgggctcaagtgatccttctgccccgcctcccaaagtgctgggattacaggcatgagccactgcacccatccattgtattcttattctttttattttccaccttagatttagcaacttctgggtgtgttttatgagtaccttatactactgtctgtatttctttacttttttcaaactttgtgatagttatatgatctcttccatcaaattgggccattatatggttttctatatttttaaggataacattgtcttagttccacagtcacatatatcatatactttctcttcaacattttattatgaacagtttaaaaaacatacaacaaagttgaaagaatgttagagtaaatgcttggtagaggcaacacccacagtttattattaacattttgccatgcttggtctatcacgtatttatctatgaatccatccttctatccttctgtcccatcagtcccttttattattttcattcatttcaaagtaaattgcagacatcattatactttcccatatatacttaaatatatgtatgattaaccagaattcgtatttgtttacagacttttttttctgttgagatttaattaatgaaatgtacaaaccttgacaaatgcatatactcttataacccaaacccatcatcctagaaagttacttcattccctttctcagtcagtccccactctcacattgatctgatgttttgtattttgcctgtttttaatggtttatataaatggaatccagtaatatgtgctgtttatgaaaaacttcttaaaattattgtaatcttactgagtgagattcatgtattagtagtttgtgtctattgtacacatttgtatttatagctgttagttgacacttaaggttatatatctggtgtttttcaccttacacctgcatcttctcagtttttccagcctagacatcacttctgtagattt

SEQ ID NO: 96251 - DNA, 1111 bp, Homo sapiens
taaacagaaggcagggtaccatctaaatacaaaatattattatttgataggcattatagtgtagttgtataataggacattttcttccagagttataagaatttacagatatatgacatttttatgtcatagaaaattacagtaacatctgtggaaaaccagggggtgaggaaggtgttaatcaggcaaagtgctatactgtggattcagctcattaaaaagaattaattttaatatttaaacaatttaataatattacattaatttaattagtataaatttgattttggagttaatgtctttgtattttataatttttttaaatgtagctttacctcactcttagaaaatctggtgtgatatgaaaatgtggatccataaaaggatgaattattaaaggattcatctttctctagcagattcatcccttattttaaaaattattcgatttgtgaaaaatctagtttatttataattttttagtaataaatttgtggtgttaaactggtgtatagtatatggtattatggctcaaaatgaaatagtgcatgctgagttcctagagagtgcattaagtaattgctttcaaactcagtgctttgaattttcttagtagcttactgtgagaatatgatttagtttatataaatggtatgtcaaagctatttataagtactttaatattatttatatgtgattctgtaacatacttagtaatatctatttcttatacccctcccttttttgttgtttctttgtttttaggatcatcatgcctagggttcataacataaaaaagtctcttacacctcacatttcttgtgtgacaaatgaatctgataatctgctggattttttgcctgacagactaagagcaaagctacttccattccagaaagatggcatcatttttgccctcaaaagaaatggcaggtaaagttctttgaagacatgctaaaaatgttaaattcctggaaagtgtattaaaaacaaagttctgttcaaactttcttttcgtgtattcacagtctttctttagtagaattgattgtgaccaagttagctttatccatttactatggttgacttatacttcatgttgaaatatatt

SEQ ID NO: 96252 - DNA, 2654 bp, Homo sapiens
gtttatatagttgtcctgacccgccatttacttgttgtttctgaaataagtctctaggtagtgtattttaacaatatctgattctcctcagtacagttctactatttacttaaatgagtcagtgaattccagttgaatttgccttgttctcaattgagtacaaaaacactatcttgacctaaaaagatagaaagtatttccttctttctttttttcaagtgttgcgtaccataccaagcaaattgcttagaaaataagttctactagattttgctttcactaaatttccctagccaatattgtcattttgattttaataacatggtattaaaaattatgtattgctggtgcggacacagttgcatgaggggtttctgccatcatcagtgctgtgtagcagagttagttcctctccagctcagccgcacaggtttggacatatttgactttttcccctcagtttgaattgaccaaagcaatggtgatggagaaggctagtcccctgctggttgggtgggaatttgtgagacagcattacacactgctgaactaggccccagacatgctgcatagattttatggaaggaactcttcttatgtccatgggggattggattcaaatagaaagctagcagatgcagtttatggacagaaagaaatccacaggaaagtgatgtcacgaaacttcagcaactgccacaccaagattctccatgttgatgcttatgccacactaaatgatggtgtggtagtccaggtgttggggcttctgtctaacaacaaccaggctttgaggagattcatgcagatgttcgtacttgctcctgaggggtctgttgcaaatcagttctatgttcacaatgatatcttcagatagcaagatgaggtctttggtgggtttgtcactgagcctcaggaggagtctgaagaagtagtagaggaacgtgaagaaaagacagcaaacacctcaggtggtacctgatgattctggaactttctgtgatcaggcagttgtcagtaatgacgtggaagaacatttagaggagccagttgctgaactggagcctgatcctgagccagaaccagaacaagaatgtgtatctgaaatccaagaggaaaagtctgagctagtattagaagaaactgctcctgaggatgctcagaagagttcttctccagcacctgcagacatatctcagacagtatgggaagacttgaggacattttcttgggcatctgtgaccagtaacaaccttcaacccagtggagctgttccagttactgggatacctccttatgttggtaaagtactagcttcacagccctgtacagagtctaagcctgaatctcagattccaccacagaaacctcaaagggatcaaaggatgtgagaacaacgaagaaatattcctccccaaaggggacccagaccgatctgtgaggctggtgagcaaggtgacattgaaccccaaagagtggtgagacaccctgacagtcaccaactcttcattggcaacctgcctcatgaagtggacaaatcagagcttaaagatttctttcaaaattatgggaacgtggtggagttgcacattaacagtggtgggaaattacccagttttggttttgttttgatgattctgagcctgttcagaaggtccttcgcaacaggcccatcatgttcagaggtgaggtctgtctgaatgtggaagagaagaagactcgagctgccagggaaggggactgacgagatgatcgccttaggggacctggaggccctctatgtgggctgggtggtggaatgagaggccctcctcatggaggcatggtgcagaaagcaggatttggagtgggaagaaggcttgctccatggcagtgaatcttcatggatcttcacgcggccatacaaaccctagctcctacagaatggtgaatttctttgaccagcctttggtatcttggagtatgaccccagtttgttataaactgcttaagttagtataattttacttcttttgtgtgttaatgatgtgtgctccttctccctctcttccctttcctgacctttagtctttcacttccaattttgtggaatgatattttaggagtaacggatttttcaagaagaagaagaaagaaagactgaatttccttgcttattttgcatgtacagactggatttttttcctaacagccatttccccaaaggaatgtgtcttgcgtattactgacatttggtacgtttcattcattggaatatttcttactttctgtgtgtttcaaaagcctgtgagaaatacaggatttgataacattttgaaggcaggaaaaccccaaattgttacttctttgagagtcacaaccactttctggtgtggagaaattgccattggaaaatttgacaattttgattctcgctggtatgtttaaaaactgaataaaaagaatagaatttttcttttgatattggatcacgaaacacttctaaaacctgtttttacagtgggtttggaaaatttgacaattttgattctcactggtatgtttaaaatttggaaaatttgacaattttgattcttgctggtatgtttaaaaacaataaaaggaatagaacttttcttttgatataggatcacaaaacaattctaaaacctacc

SEQ ID NO: 96253 - DNA, 1161 bp, Homo sapiens
ttctgacgtcccgctgctgccagcccgccgttaggtcgggttccgagtgagccaggctcgcctggcccgcggctgcggctccggctgcagctgcagccactgccttgtgcccaccgcccccacccgggggccatgtgaaaagcaaacccctcgaggcctagcggaggaggcaggggaaaggtttccgagtccctgccatggctgctgctgctgcctccgcggctgctcttgcagccccagggactcgggagccagccacagcaggcctgccaagagcgtggtactgctctctcgtgtggctggcgccggtgccccgggctcccccggccgccccacggccgcatcccctggccttgcaccaagagaattttcagcttcgaccggttggtaaaatgtaggtacattttccctgtggtaccagaaaaagcacaatgggaatattaaaaagaaagttgaatgactgtcagtgccacggtcccccgggatcagatttacacacgttttgattcctgagccttaggctgccaacaaatctttgtgggctttgaagttttttggtgttttgttttcttttgttgctgtgactaggtgcaaagggtgactctgttgagcttgtttttataaagaaacttaaattattgggactatcatgctccgtgtgtaattgtcctgggatagttaagtaaaaggtgaagaagaggtgctttccaaattaggattagtgaacagcaaatggtttttctaataaaattttctaaatatatatatatatatcttcatggttatagtttacctaattgtaactgtaagaaaccttttttagcttaaatatcattgatgacaaaaacttttaaatgaaaagatgattaaagtcaaactgaaagtctacccatttataatatgtgaaacaagatcttctaagtaataggataccagtctgacaggaataattggacacgtctcaatttctaaaaatttggcatatttggctatttttagggcattctgttatgatttcttcatcacattttgatggagtacgctcgtcttttcaaataccactctgcttttatgcctggaagaatatgtctttaaatcatggattctatagtctgtagtagacataactgtgatcagagataaaattctaggcccatttct

SEQ ID NO: 96254 - DNA, 1027 bp, Homo sapiens
caggaggtggaggttgcggtgagctgagattgcaccactgcactccagcctggcgacagagcaagactttgtctcaaaaataaataaataaataaataaataaataaataaataaataaatatgagatggctgttgtgaagagaaggaagtcagttttttctcagtataattgtaaactttaaaaaaaattaaatcatcttccacttaatccccgagacttcccataatgtttagtaatacggacatgtgcaaagaattaaatcgtataattaaacaaaattttgtcaagttaactttgcttctcaaataaggaagttatataattaaacacatttgcttgtacctaatgagacgttagcatcaacatgactgtatatcatttccagaatttaattcaattagttattggctgagggatgaaatagagatgaaactaaatcctggcctcaaactagttttgtaccttattttccagcaatttggtttttttatatctagattttatctttactattttccctcatcttacccattcttagtctccatacacacctattaactttaatttccttttctgagaattttgaaagccctatagtttatgatcttttttccctctttgccttgtgaattttatatttgtgagttttttccaaatttctacctgtcagctcacttctttaggcaaggtgtaaggtttttgagcccccttatttcattttttatttttttaagagacagggattcaccctgtcacccagactggagtgcagcgacaggatcatagctcaccacagccttgaactctgaggctcaagggagcttcccatcttatgctcccaagtaactacgactacaaacttgtcactaggactacaggcatatggctaattttttaatttagtagagacaggttcttactgtgttacccaggctggtctcccacctcctgggcgcaagcaatcctcctgccttagcctgccaaagtgctggaattacaggcataagccactgcacccagcctat

SEQ ID NO: 96255 - DNA, 1064 bp, Homo sapiens
gtgccacactgtttgattatgtacctttgtagcaagttttgaaatgagagctccaattctgttcttctttttcgagtttttttttttttctttttgcctttggctattccagatcccatttattattctatatagtttagggtcaggttgccagtttctgcaaagaagccagcttggattttaattgggattgtgtcaaatatgtaagtcaatgtggatagtattgccatttaaaaaatattaaatgagaaattttaaaaaatatttaatgattaataagaatgataaacattgcaagtttacatgataccatattttgtacaaaataacttaaaaaagaagaatcccattgttttaacatttttgcaaatttccttaatgtctggcttaaccgaagaagatggctgggttcacatacctgcttttgcattcactctgatatatgtggtttgggttgaaatataagaagacaattttggccaaacatagatacaaagataaaaaggggaggacctcatgaactttttgaaaggatcttggtgaccctgcagtggtcctcagaccacacttagagaaccacatgttgaatggaaacaagtatgtgtttggaaactcagagacctaattgaaattcacagctctgcctcttaacaactgaacaagttaagttacttagcctctcagtctgtttcttcatttataaaatgaagataatgacatctccttttagggattttgtaaggaggaaacaagataatgcctgtaaatgttttggtatgtggaaaccgctaaagaaattatgctgttttcattcatttatatttgtcgacctctcgctataggattagctaatttttttccagtgaaaggtacaaatagttgggaaatgagagaggttggaattttaaatatacttatgtagtaaaaacacatcatatagacattcagctgtcaattgttgactcccaaaaaaggacaccagaaaaaatgtgttgatcaaagttgtatttattagatttactggaataggggcaaacacaacttgacaaagtcttagtagtctc

SEQ ID NO: 96256 - DNA, 1028 bp, Homo sapiens
taacacttttatctagccaatgcatggcagtaggttagtaggagatgcaggcaaactgacaagtttgtttttcctcatagaaaattagaaacaaaattagaagtgggagaggctgcccgctgtagctgcactagcagcaggaactgataactaaaatcaaagaaggaaagagaattataaaaggtattaagtagtttaaaactattcgggaccatttagcacagaataaattgtccatgtacctagtagaatgaaaaactgccaaggttattctattgcactctggtattttgtttttaaaacaataatgaaaaaaaaacagtgcaacagtcatctagaaaatatacttattctttgactatgccaagtaattaagatattacgaaataattgagtgtacattaaaagttaaatcacgttgaattgcataggaacactgatagttatttcaaactcacattagtgaagtagtatataatttatagttttgtcgttttacattgtggggtattaggagaatcttttcaaatggaattcctagagtgattgctgtttgagatcggggggtgtatctttctggtttctttctagttctatagctttttaaattttttgagtgaaatgtcaaaaattattgtaaactgatttgagagttgttttcattatctgattcattaagcttcagattttaactcagtattaccttgaaggcaaatgtttattttaatatgaaaatgatagttcatttgttgatgctagtatttatgactgtatcataaattaacatgagctgcttagagtctaattgcaaaattgaaaagttagcataaattatccatcatataaatgaaaaataatttcagtttatttagtaaagaagtttttgtgtctaatgtgcaagggattttgctttcagcattgtaagatttaatagtaaaatatatgctgtaataattatgaaagcatacctacatctcttttaacttatggcatgacctaatccagaatttttttttcttttttggggg

SEQ ID NO: 96257 - DNA, 1051 bp, Homo sapiens
ggtttcaaaatgtgatgtttttacaagtttgtatataacctgacttatatgaatcatgttgaaagtggccgatgttaatattctgctattctgctgaggtttttgtatgtgttttttgtttgtttgtttgtttgtttttgagacggagtctcactctgtcgcccaggctggagtgcagtggagccatctcagctcactgcaacctctgcctcccgggtcaagctattctcctgcctcagcctcccaagtagctgggattacaggcgtgagccaccacacccggctaattttgtatttttagtagagacagggtttcgccatgttggcaaggctggtctcgaacttctgacctcagctgatccgcccaccttgccttctcaaagtgctgggattacaggcatgagccacgacgctcagcctctgctggttttttaaacaagtttattgagatataattcgtgtactgtaaaattaaccctattaaagtgtacagttcattcagtttttatatattcacaaagttatgcaactatcaccatatctaattatagaacattttcatctctccaaaaagaaaccccatacccattagcagtcccttccacattctccctcttccccagtcctcagcaaccactacttttctgtctctatagatttgcctattctggacatttcatatatgtgtaatcatatagtatgtggtcttttgcaactggatgctttatttagcataatgtttttggggttcatccatgttgtagcatgaatcagtacttcattccttttcatttctgaataatatgcgtttgaatggatatatgacgttttattcatcagttggtggatatttgggttgtttctgttttttggttattgtgagcatcactctgtaaacattcttggacaagtttttatgtagatgtatgttttcatatctcttggttatatgtctaggagcagaattgctgggtcatattggtaactatgtttaaccttttgagaaactgccaaacagttttctaaggtggctataccattttgcattctc

SEQ ID NO: 96258 - DNA, 1586 bp, Homo sapiens
atcttggctcactacaagccctgactcccgggttcacgccattctcctgcctcagcctcacgagtagctgggactacaagcacccaccaccacacccggctaattttttgtatttttagtagagacagggtttcaccgtgttagccaggatggtctcaatctcctgacctcttgatctgcccgcctcggcctcccaaagtgctgggattacaggcatgagccaccgggcctagcccaaaactgtcattttgaagcaacacttactagaattcatatagaaaaaaaaaactattaaaattcctctgcttagattctctaggtcttacaactttatcagctacctgtttacctagatcatattgctctagcatcctttttttttaaacccaaagaattcttcactgatcttgcttattttagaaatatttttagctttacttgtaagaaaggtactgctctttaaagattgaagagcataagatgaagactgaaatgtgggatcttactgccttttttctttcttaatcagtgacttttaaacctctatgaagatccagatctagaattctaggacaagtgcccttgtggttctacttactctacggtggtaattagcaatttagtaaccttaaggaagtattttgttgttagtttattgctctttttttcctctactaattttactttttttttcctttttactgtccatatttaacgtaagtatatcctttgtatctttttcttcccatactataacaagggtcttgaaactctttatctctgattattctactcctgcactttaaattgtaagtgatacaaatccaaagcatacaaactcaacaaaacaggagtcagagaatttactaaactcatcgaatgccaggtccagaagttaagaggcagccaggttcaggtctcagatggtgtaatccgagtcttatttcttctccacaggtattctgtagacagcttctttcatgttgccaggaaaaattggttactataaatcctgacttacttggtccttatggctcttgatcccgatagcagtgagccagtggcaaggatgatcatatggcatattctgaatgacccagcttaagtcacatgttcaacattgaactgtggccagggactggagtatagttcatgtctaggtcatgttctcactcctggggctggaagtggaacttaactgccaggcaaggctgctgacattgagtgatattattaccaggagaggtggaggaacaaggtattcaagagacaaaaataatagaggctagtaagtgtagttagtatacattgaacaaaaaacatgggcccatgtacaaaggaatgacatcagatcttagaatacattaaaactatgtaattctttgagttgcatggagcccacagtgctagagaagtacgtattttaagagatacagtggataatgataaatgataatggggctaaaagtaataaaacattagaaatatcgagttatagattaattggttcaagtgtaatgccaattctttaagcacacatcataagcagctgatacgaaaacatcagttttcacacattggtacca

SEQ ID NO: 96259 - DNA, 1027 bp, Homo sapiens
attgctatctccatctgttggtatgaagaagtaatgctcttgccagaataagcaagcttcttttaattttagcaaaaacagattaagaaataaggaattgtgctgttaattcattttctttgtgacaggtaaagtcagttggaagatgcaaaactgtcacaggaagttagctattacagacaaattgcctttttttaaggctttttgttagtaatactaaaagtgtcaaagagagtaatttaaaaatgatatattaaccatacctaaattatttatggcttgttctttaaggaattatagaaaaatatggttgtctcaactttttttcttcaacctgggatcaggcattgttgtgcaacaatattttaatagcgagaaatctcaaaaatcctgacagtctttgcatattcacagtttcatgggcttttgcatcattgcttctgaattgctaatgaagagctcaatatagcttctgatgcatttcagatattctgggtggtgactggctagagtgttactgacatcacaacatacagctgttgactttctattgtctgagtcctcctcggcaagtgctttagactgctctagcaggcactcccaatgccagactaatcagctggatgtgtgcagtgagctctatagaggagcaatgcagagcatcagtttacaggtactatggaaagaacatctccttaactctgtatgatgaagcaaataccaatacaatgaaggtatgtgactcaattcttttgctaaatttgtatagaatgtaatctgatacatgaagtattcatgttcacttagtaccataatttttgttagaggatgtgtgataaaattctactatattgaaagtgagagcattttaaaattgtctttgtttatttttgcaaaaatatatttgtttaggttggtggagtgaaaagtagagtcatttacttctcagctgtagcaccaatttcttctccccacccctcacatgtttgatatttcttgtaacttactgatagaatggtttacctgt

SEQ ID NO: 96260 - DNA, 1047 bp, Homo sapiens
aatggccttttatcaacgctgaatgtcattgctctttcttttgtctatttctgattcccaactgtgtaagtaattagggtcatgaaaatattaatagctattattaaaattagggtcttctatcagatgcattgcttcaccctaatgccaagagaatttcattatttttaagcctcagattttaagttttttcttgagaactataaaagaaaaaattaaaataagcaacacatactctcagttcttacttacaactgcttttatccatcctttgtcatattctgctttgctttttcatacttttgctcattttcatttcttctttttcctttaggattctgtttgtctgtgcgtctctatcttgccctccctctctttttctgtttgactttctgaatatttgtctctccctcttgatttatctcatctctccctccatcttccattctccctatccccacccatttttctccccctctccctctacatttgtctttcctactttgtctcagtctgtctcccttttttgttcatctacctggtgtttcagggtgtctctccctttctgactaaatctatcttaatctctctctctctctcttttatctttctacctccctccttcctcttttctttctctttctgtctttccttttctgcccctctgactctctctccctgtctgtttcagtatttcccattctctgtctcttgctttcccactgtgtcttggtctcttcctgtccctatctgttagtctctgtccatcattccctcttcctttgtctgtttctctatgtgcccttctttcttctccctctctcatccttttgctctttctctctacctttctgtctctgtgtgtctccctggctacacctctttcagtctctctgcctccgtccttccctctcttggcactctgctccctttcccaccctactcccagatctttctcttttctgtctaagcttcagtcacacacattcactctgcaaattttcattctcatacaggttttcagttcattggagccagatctgcact

SEQ ID NO: 96261 - DNA, 1043 bp, Homo sapiens
tctggttgtaggggacaaaaggtggaaatgaaacagaaccaacaaaatcatcatctctaaatcttgccatacttgcacagctgaccaaccctccttctgattaataactgagatctttaatacagttaatataatttattttttccaaaccgagttcctctaagccccagggtaccacaaaagtacttcaggaaatagagaaaagcctgaagcccagttaacactgctctactcatccccaccttctcacttgaacagagcaagtttatataataaatatatgtttccacagttttagttctccagaagcctatatatgaatcctacttaacccttattttatattttatatatgtatgttataaagtgacttggataatatatctgtcacattatataatatatattatgcaaatctgttacattatataatatatatgatgcaaatctgtcatcttataaatatgcatgtcattttattataatatacatagatataaaaagggggttgttagctaggattcatgtataggcttctagagaaccaagcagtccctaaaagcatgtgtaaactgtgaacatacacgtgtgagtaagcacatgtgattgctgcatttctgaggagaggatccttgggtttaataagattttcaagagggatcctttcatggcccaaaaataagtaagagtcactgctttatagtgtttataaatcattgctcaatatgctttgttaattttaaattttctctcttttcattttcaaatgcttagaaagttatgtagtacctctacaatagcagacacatcaacagagatcacatacagtttttggaagtagtttgaaaatatacagtgactgattactaggcacatcagatgtcagacttcagcttggggtcactagagagagagagcagaacatttttttattccagtactttcagaatgctggctaaaccacagctttccttaacaggtagaaaatgaatgacaaaaaaactgtatgcccccttgagctccaatgagacaattgtaaagaa

SEQ ID NO: 96262 - DNA, 1063 bp, Homo sapiens
tacaggcgcctgctaccacacctggctaatttttgtatttttagtagagttgaggtttcaccatgttggccaggctagtctcgaactcctgacctcaagtgatccacccacctcagcctcccaaagtgctgggattacaggcacgagccaccactcctagccctgtgtgtagtctttaaaagagattttacctcatgccaatcagatcatattacaccctgagttatttatttcagtcctgcatttagcacatacatggggagctctcagtataaccctggactatggtaggttcagaattaaggcaaaatacattttaccctcactagcactatattaggaggtcattaacttcaggtttagagttacattaatggccctgactttcttgcattgtctcttacctatatctgccaatatctaaacccctttagaatctcaccaggttatccccaggattatccaggatctcctcatgagctcaagaacagccgtttcatgatcttccagttttgtctttctctggcccactgcccactaccattttgctagtgtttgccacgaattagctcatgtccatgccaaaggttgtatctcttagtgttcccaacatgtttagtcttcagggtaccatattctctagaattttcttttttattttattattttatttatttttttgagacggagtctgactctatcacccaggctggagtacactggcacagtctcggctcactgcagtctccacctcccaggttcaagcgattctcatgcgtcagcctcccaagtagtgggattacaggcgcgcaccaccacacccagctaatttttgtatttttagtagagatgaggttttgccatgttggccaggctggtctcaatcttctgacctcaggtgatccgcccgcctcagcctcccaaagtcctgggattacaggcatgagccactgcgcctggccttctctagaattttctatgtaccagcaccatgccatcctcagagaagttaggcaagccattcacccgcttctgtggtgggcttggtcacctgggcaccagg

SEQ ID NO: 96263 - DNA, 1045 bp, Homo sapiens
agtgtttctgattatgatcttttttctctctctttatctatagatactatctcaattataaccctgactgcattgtagcttctcagtacatatcattttctttcctcttctctcttctgcttttaactaatcaatcctctcggcctcagtgacttattcaggttcacaaagctaatatatgttagaattcattgttactcagtgttctgactttcgtttaggaaaataatgtaataaaacaactgacagtaatatttttaatttctcagtttcatgtggagtgttccatttcccttggccattttgttaaaatggtttcttttgttttcattttaggccacggaaaggtatgatatatttgatccaagacagtccattccagtccgggaatctacagtggtgacaaggacatgggactcctcctgccagattacagatggttcactacagttgacatcctggctgacaactgtgaaaaagaaccttggattattttattttatttttgtgggacaccacaatcccaaatccaaaggacgcatcaggtaatgcttccctgtcattcagaaaaacatatttttcttacaaaatctcacctataaaaagcaagaagccagtgtcttaagtaacttcaccaccctctccctactttgcagctgtttgttttcggaatgaaccaattaacttttgtatgggttataattaaggaagacatggttttctttttttaattcagttcagtctgtctgtgactttaagacctacttctctttggcttttttaacttttgagctgtatttatcaattcctaaaatccatttatttatgtatttattgagatggagtctcactctgtcacccagactggagtgcagtggcgcgatcttggctcactgcaacctccgcctcccaggtccaagcaattctcctgcctcagcctcccaagtagctgggactacaggcttgcaggcacgtgctaccatgcccagctaatttttgtatttttaatagagatggggtttcgccatgttggccaagctggtct

SEQ ID NO: 96264 - DNA, 1154 bp, Homo sapiens
tggagaaaaagatttctaatgtcttctaaatacacatatattattctccagccattaccttctaccttgatctggctcggtccttaatgtttcttaagaattgccacaagtatatgtgcatcaaaatcactccatattctttttttaaatgtaaaaaaaacacacttatgtgttagcaatagggtcttgctatgttgccctggttggcctctgcctcctggactcaagcagtcatcctgcctgactcccaagtagctgggactacagctgggtaccactgtgcctggctcacatactttctatagctcttttctcactgtattgtgatcttttttttaatttggatgtatctagcacaaaattatatactccttgaaatcaagaattttgttcctgtctatattcaacattatttctggaacataacagacagtaggtcagtatcatgcagtaactgaatgtaaaaaagtttcaaactgtattaatttttttttcttaaggcttcaagctccctgtagaattcgaaaataaccttttctaatgaggatgtctgatactgttactgtaaaagatgaaactgcaacaatgaaggatttggaggcagaagtgaaagatacaaccagagttgaaaatcttatcaaatcagaaaactatgggaagattttggtagagaagaatgaacattgtattgagaacaatatagatttgcaggtaaacaggaatttttctctggctacaaatactaaatattcagtatatatttatgtttattttcatacaaaactcacttctcaaaattctaaaagggtaagttgacccttcgtgacatgcttactagctggttttggagccagttggattagcttgctgtgagtcttaacttggcttgtatcatgtaatatacttctttttatttgtatgtggctagtgcatttttattggctttctactttctcattccacccttttcctaattaccagtgctgtgagagttttgaactctcacagttaaattttgagtttaacctaagagctcttaaaggaaagacaaatagaatacaataaaactgcagacgaactattggcaaaaacagccctcagggggttcctcagtcactcaacctgactgacaaaaaagatttgtgggcccgggg

SEQ ID NO: 96265 - DNA, 1036 bp, Homo sapiens
acgattctatggcttctcaaaaatttgtggctttattgtcatgcaagattttttctttagtaataaaacagagtaaaacttaattttaacataacctccccacattttcagtacagtagttttaattctattaagttctgtatctgtatgctgtatttttattgttttttattaatattgaatgagttcaactttttaaaacttatgatacattttccatagtatatttttataattatttctaggatttggtactctttctactgaacttgggtcatatgcacatatggtagttcttttaagcacatttacttttcacggtgctttcttgtgctgcgtaaagatgttggctacatcttgtagatgtagaaatgcttttgcatacttaccgtttgtacttctttggataattttcatgtacatcaccagtgggatgggatgatcctgtatcttcatttattataaggaataactataaaccagatagtttgtgactttctccacatacttttcgttagaatctaagagttaggcctttgagtatttaactctgtgctttatggctcgaaagattaaatgttaaaaacaaattagtgattgtgtttagtttattgatttttaaaatagctctcccacctcagagaactttgtatttttcatttattccagtagaaattagcatcctggcatccattatttttactgccctgaccttaactagacatggaacattttaattcattatcttccttacaattgccactaatctttactattacctagaaaagtactgagaattcgtaacctcttcaaggtgttttgagtctggttgaaagggtgtaaccattataatttttcttcataacaattattaattacaaagagaaaattattcctattttttaaatgtcagattttcttagttgagtgatatttaattggttatttttgtgctaatacatatataactcataaggattgctctgtttttttcagttctccaaattctagtagctggtaactctgacaacgtatt

SEQ ID NO: 96266 - DNA, 1031 bp, Homo sapiens
actcacctgaatcttaaattgtatcttaaggtcacttggcttggagcttagttaacaaatgcataaatccagcagggtatggtagttcacacctgtaattccagcactttaggaggccaaggcggactgctcagttgaggtcaggaggttgagaccatcctggccacccagtgaaaccctgtctctactaaaaatacaaaaattagctgggcatggtggcaaacgcctgtaatcccagctacttgggaggctgaggcaggagaattacttgaacctgggaggcggaagttgcagtgatccaatatcacgccactgcactccagcctgggcgacagagtgagactcagtctcaaaaaacaaaaaagcaaaatcctttcttagcagtaccttgatttgtgtttgattaaataaccagtggatgggaatcttgggtgccatctttagaattctgtctacctcaggtagaatttaatccacaataaagttttttaaaatatattaattgcactggactaagattctgaagatatggggttctgtttgactttagtaactaattctggactgtgaggtctttaagaccaggaactatgtcttattcatcttcatagctctagtgcctagcacagtacctggtgtacagcaggaacctaaaacatgtttgttaaatgaagtcaaattaagataattttacttctctgtatcttcctttatcttttcctcattttcatcaaagcctcctcgtagattaaaagtgagataaatacatgtgtaagtctatgaatattctcaagcattacgataggaacaatatacagcacccccattttatagacttttttttaaattagcatttgttagattaagtaatttttcttaatctcattgctaataagcagaggcagcacattggttttctgacatggtcagttcctaacctttaataatcgattacatttatgacacactttagagttttcaaagcccctttgttagctacgctttcactgaatcctttcaagaatcctgtg

SEQ ID NO: 96267 - DNA, 1487 bp, Homo sapiens
aagttggaattattcccattctttctattgctataattttcaaaactgcaaatgtttgtgttccttcttaacaaaggccttcagtagtgtttaatgatatatttaacttgcacatttcatctactgttatacatggcagaaactataaagaaacttagaaactctttctagggggcttttggatatgccctagatttctgaaatgtagtgttaattataaatacttctctttagtcaagctcaaagttaaagctagttcggagccttgcagtgtgtgaagaatctccaccaccccctgcaccagagatatcacaggagaaccaggtaaaaaagcaaaacaaatgttatttcaagacatggtggaactggagaatttttgtatatgatttaagttgtgtttgttatatttgttttattttgactaaatgaaacttattcaataatacttggcacccaagagatatatgaaaagttagaaaacctctttgcttcaatctaaggcttagagcaattattactcttctggaagaacttaggaatcatgtaattaattaggaatgtggctttaagaaagttataaattaatttttataaagttaaaaaatgttggtcgggtgcagtggctcacgcctgtaatcccagcactttgggaagccgaggtgggcacatcacgaggtcaggagatcgagaccatcctggctaacacggtgaaaccccatctctactaaaaaaaatacaaaaaaattagccgggcatggtggtgggcgcctgtagtcccagctactcgggaggctgaggcaggaaaatggtgtgaacccaggaggcggagcttgcagtgagcccagatcgcaccactgcactccaacctgggcgacagagcgagactccatctcaaaaaaaaatatatatatatattaaggtagcatttccagtgaatataattgtggtgaaatttgcccttttagttttaccttttagaaatttctcagatacttaatgcttgtttgtaaagagaccagccaagacttcttcttgataggttatttaacgtaacctgaatgcatggtgaaaccaattttcatattagcttggctctttaatagttatctagtatttctaatttctcacatatctattcttgtaaaatttagaacagtgaggtttaggcaaaccatttagtttgcattctttttaatgctatgactacttttctgttaatctcagctatgggttgatctctgtctcatgttacatctgtatatttatgcataaatatttttggatcctttaccaatgtttatcttgtgataactttgcctagtggctagttgtacttaataagagtttgagcaacttaaaatgctcctttatcccaaaaaacagtttccaaggaatttgggcaattttgtggttatttaagaagccatgactgatccatgacatgtacatcttttttataaagtaaatatcattatacatttggtgat

SEQ ID NO: 96268 - DNA, 2207 bp, Homo sapiens
gtattttgaaagcaagcctgtagtaatagacctgacaaaaatcaaattctttcacaactaaaatttctatctacctccaaattattgcctccattatattcatatctgaactaagctgtcttaatttgctacaaatgtagttaattatgtaaatcatttaaatttttcacccacggaggcattttgaacatgaggttgtggtgagtatataaaaggatctttaaagaatttagaggaaattaaacagacacatgtgagaggttaatttttttttaagaatgtgcgtggatatgcagttatataaactcatgtcatgcacattatatgggaatagaaacatcgtggtcacctgatttcattgtaacttttcctactttgtcgaatttttttcaatgtggggcatcttgttttatttaagatatatatacatcatgtgtaaaagggaatgggacttgttttcaaacaactttatactgggtttttgtgttgttgttttttagattccagtcaagaatacactgattcaactggcatagatctacatgaatttttagtaaatacattaaaaaacaatcccaggtaaaaattaaatttataaggtttccattgcttctagagtaccataattttgctatatatgttttcattattgagttagagtaatagaataagattgcagatatttgaagtacaccagaaacattttagttttttagggcaaagatgttgttggtctagtatatgcaaatatataaatatctttttgcattatgcatgtcaccatgatgtatgaattttgggaaatatagaatcactaagatatttaggctcttgattgagttagacatataccattaatcatgagaaaaaagaaaaataggtatctcaccatagtgcactcaaccaaataagaacttagtgtattcacttatgagtttttgaagtttttaaatgcaaagtttttgttccttcttgctgagtttataaatcatcaacccaaagatttttgaggtgtttatttgagtcagtactttaattgtgaaatctttcattttgtcagattactaaatgaataatttttaactttttggcaactcataagcactttgagacattctccctgcaaaaatggctacccacaaattatctgaccaacactttcatggagtgaaagatgccaaggtgaagaaatcttcctctagatgttagctttccagagtagtagctttccagagttgacatacgttgaaataaaaatgatgtcactagatatgggcacacggaagataagagagttgtttatctcttacacagtcttgcttcaagataacttgtttttattcaggatgtattgtattcagtactatcttgattttctgtttcgtatttaatatcaaccccaaagagaattaccaaaatgaagtggtctctataataggagctgaaggattataggtaaggatttagagagaaggtaggcaactctccttgactttttttcctccagttcaagtttattcctcagtagtcccaacagaaagataaatttatgagtctattgaacagctctaactatgtgccaagcattgtgctaaacattgtagatatgaaaaggtattacatagaagctctgaccctacagtattcactgtctctgtactagaaaaagacacctgataattaaaataaaacaaatgtaaaagaggtttacaggtgctgtaatagccagagaagggccacaacctctgaaaggattttggaatatgtcactgaaaaggtagtgcctaacctgaatcttgaattaagagtgttttatattggagctgtctatacagagagacatgggaagggcatttgagatagagactagaggattgccaaggcatagttatgtgagaggaagtgttatattcaaggaaagataggcatgtggcaagttattctagaaagtgatggtaaaggtcgggcgcagtggctcacgcttgtaatcccagcactttgggaggccgaggcgggtggatcacgaggtcaggagatcgagaccatcctggctaacacagtgaaaccctgtctctactaaaaatataaaaaattagctgggtgtggtggcgggtgcctgtagtcccagctgcgtgggaggctgaggcaggggaatggtgtaaacccgggaggcagagcttgcagtgagtagagatgcgccactgcac

SEQ ID NO: 96269 - DNA, 1029 bp, Homo sapiens
ttgttctctgaaatatcttctaaaagtcatttttattggaggtaatatttaagtcattttatttcttatctgttgcagacatttaaccaagagcatatgaaacattgggtggagggtggtcaaacagaagcattactattttcttctttttttatttgccactggtataacatcggttccctctttctctaaaattacttctggaataatgactagaacaatagtaactaaaagattgttagcccttcattttagcttttagtttattagcttgtttttattacttctttaataattaacagcatgtatcagttcattttaaaggttacacgatagaagttttagtttgtgcctacttttagatggttttggctcacctgctaaaagatcaatataccttgagaaaagtagtttacctgttagtttgagtctcatatgtagggcccctataaaggattagtaacctttaacttatgaccattataaaaatatctaacctcaattacagatttgaaaatttgaaagcttggataagctacaatgtggaataaaaggcagaaggtataaatcttaagaccttaggaaagttgtcattcttgtttttttaacaagtgctactaaaagcagggtatcttttttaaaataagtgacccagataatctaaaaatcctctgcaatctatagatgtacgtcttaaggggagagaaagcctaaatttctatcaattgctagtaaaattgttagattctgttatttcatgcagatagtggaaatttcagtggcagtgcatttcactgaagaacaattgaaatattcttatacctgctctttagctcaaacacagaaaatcaatttaaatgtactgttttatgaactccaaataagttgcctcctttcttgtttgtttgtttgtttgtttgtttttgagacggagtttcactcttgttgcccaggctggagtgcaatggcacaatctcggctcacagcaacctccgcctcccgggttcaagcaattctcctacctcagcc

SEQ ID NO: 96270 - DNA, 2166 bp, Homo sapiens
aaaacgagattctcatacttctactatcatatactgagtagaaggtggtgccagttactgagatgggatatactaaggagaagcaggtttggaaaccaaactgaatattgctataaattttgttaaaatgtaattctgtgttcagctttggatttgaaatcaccaagtagacatgtttttctgttgattttttttaaacaaatataaaaatgtaagttaaatatttaatgaatgatgggggaaatgttattacttagttttatgaaacttttgcagtgtaggaggagaatcaaatgcaggtctgatgtgtagactttcaggtgaccaaagcaggggctaccagttcttctattgaaattgagaataatctgcatagtgtttattttagggaatcattaacctcttggcctcgttttcttgatctgtaaactttggaagacaaaactgaatgatttgtaaagctgcttttagctttaagtttctgtaagttacattttttttttcacatgtatatgaaatttccaattagcacaggaaaattctagagccatgttatgggtgtgtgagcagggaggtcctttggggagtgataccattaatttgttgcagctaagagaactaaataagaccctagtgatctaaaggagcacatacaggtactccctagagtccttatttattttatatgttggaggtttttggttcacttagatttttatgggaaaatttaaaaatatataatggcagtttatagaatgggttgaaatatcctcttcttctaaattagcgatataattaatacttctctgccatagtcccatctacatactagtattagattcccatagaagtattcctgttgttactggcattgcatgttctttagaatactgtttctatggagttcagcatgataacaaagtcctgagcctaactaaagatgtctgttcttctgcttcctctccactttattgaatgaggaaataaaaactaaaatgcttttattatccacacattcacagagcaaactctaatatagtaatactaagcagatcaaaatacatttaagttccttcgttgtgtgtaagcaaaaaaaaaaaaaatgcatttaagaatagccacatgttgattattgttaaagttgggtgatgggtacatcaaaattcattacactattctctacattagtgtatgtgtgaaaacttctgtaataaaaagttaaactacaaaaatcatcttttgttttaaaacattaataaatattctagcatcaagattggggtaatactgaatgtatagtttttagggggtgaaatttagctgtataaatcataggctgttgacatttgtgattacttcattgctaagttttacatataagagtcttcatactttgtttcagggacagaatgatgctgctgaaattggaacaagaaattttagatttcattggtaataatgagtaagtcctgacattcaacaagaaaagaaattgtcatcaccattctccttgacttactaagttggtttttcttgtgcttctaggtctccacgtaaaaaattccccccaatgacatcttaccataggatgctattacacagagtagccgcttactttggattagaccacaatgttgatcagagtgggaagtctgtcatagtaaacaaaactagcaatacaagaatgtaagtgtcaagagatgtaactacatattatatatctaaataataatactttatctttctatattacctttcatctgaggttttccacatgttttaacagtctaattaagttttatgataaccttatgtgataggactgaaaaacacatttagtttactgggaacaaaatgcaacagcctggactcaaatatggcatatgaatgaggactggggcatatggtaaaaaaataaaaatccagaggacatagtatcagtgatgtttgacaaccactcttagggatttttaaaattaatttagacagctgtagccagccttagtcaaatttaaaaaaaaaaaaaaaaacacaagagagagagcagactttgtccgtgacaccctcacatttagttaatcttctgtcagtttaccgttctttccaaaagcctctgaatttactccttttctctcacaattcttaagaaagtgggactgttggtta

SEQ ID NO: 96271 - DNA, 1031 bp, Homo sapiens
tttgcttaagccatttgaacctcggtttgttcaataatatttatatcagtaactaacttctgagtgtttactgttttatgtgttactgacattttcatttcatcttcagaacaaccctaagaagtaggtacactatataattcccattttacaaataaagaaaccgggaaagagaaaggttaagtaacttgtgcaagtcataaagcagctaaagtgctaaagctcaacctttgaatccaagcggactgactccagagccaacattgtatttgatatggcctctcaaccataacatggaatagttagtattttctcatgagattattgtgaggactaaatgagactgcataagcatctatggatggcactaaaaagtggtaacttattttatttcttttcataaaatgttatgtttaacttctttgctaatattgttcattatcttttcctgttcctttgtttttgtttttgttttttaagacctgatcagaaatttaatgaacatattaaggatgataaaggtgaagactttcagaaacgttatatcctcaagagagataactctagctttgacaaagatgataaccaggtaatctagaacaattgtaggatttgtataggtgcaagacatactataccagtagttcatttgcctaaaaattatcctcttttctgtagatgagaatacgtttgaaagatgacagaagaagcaaatctatagaagaaagagaagaagagtaccagagagccagagaccgaatattttcccaagatgtacgtactaacttacttaggtcttcatgttagagtatattctaattacgttgtagggtctcagtctcccttttatctattgatcacatttatttttaatcacatttgttgcacataaggtcatcttttagaaatattgagatcagttttgcttgtgttattaatagtttataaaatactacattgcagtagttatataaaattttacaaaagttggaagcaggtagactacaggagtcattaaaagaatgttctcc

SEQ ID NO: 96272 - DNA, 1035 bp, Homo sapiens
agaaattgctccactgtctacaaaatcatatactctagatgctacttgttagttgactttctttgacaaataatttatttcttcttttgaaataaagctaattgattttgtaggttaatatctgttttcttcttcataagtgattatataagataggctttctaaatggctaattattttatgcatatatgccagaagagaatcaatttgttttttgtcaacatctactaagcatctgtcctgtaatatgtgttaatcagctacagatagaaatttcctctgtgttaaaaaaaaaaaaaaaagaagattaaataacactaaaatccagattgtaagtgaagaacttattcattcaacaaattttattgagcacctgtagtaagtgctatcctaggcactggagaacatattcatggacagttaaaataatttatccccaaaacaaccctatatggtagatactatcattgtttttattttacagataaggaacctgagattccaggaggctaaaatagagatcacacagctagaaaatggcagagttgggatttcaacccaggtctgctgaactccaagcctatactaaatgtccttctctctagtttataagatagatgaggtatctgcccttgatgaatagccaagtaatgacaacagggtatgtggtttatatagagacatgaaggtgtaatagatgacacagcagataagcaccaaaaccagaactggggaagggatgggagagttagcttccaagaagtaaccttacaggagtgaagagttccaagtcgagagtcagtatgtacagaggcccagaggtaagggagaacttgacacactttaggaattaaaagatttaagaggaggccaggcacagtgactcacacctgtaatcccaccactatgggagcactgaggtgggtggatcacttgagctcaggagttcaagaccagcctgagcaacatggcaaaaccccatctctacaaaaaattagccaggcatgatggtgcacgtctgtagtcccagctact

SEQ ID NO: 96273 - DNA, 1535 bp, Homo sapiens
tgttaaaagtaagcataggatctccaaaccagaaaaaaaattccattattatttatttgtgtacccttatcaccatttttaacttacattattacacatgatttttgttgtcatcattggtttacagatggcattacgttatatttgacaaaagctcaactttttgtatctattcttttttctagtccctgtgttcccaagagaattacattattgacaaaaggtgagggaatttttaacatctgttttggtaattgtctgactgatgctaataaaaattaaaatgtcctattaaaatgccaacagactccaagacgaggatgccagtagtacccagcagaggcgccagatatttaggtattggaagcatgttttcaatacagtattgaaaaattaaagcatttttttctttactttttgttcccctgcattagcttttcaaggttttatttctaaattacagagttaataaagatgcttcagggagatctacaaatagccatcaaagcagcactgagaatgagttgaagtactcggaaccacgaccctggagcagcacagattcagacagctctcttcgaaacctgaaacctgctgtaaccaaagccagcagcttcagtggaatctcagtcctgacaagaggtgatagttctggaagcagcaaaagcataggcaggctttcaaaaacaggtataaatatctacacaaaactgtgcagtcaagtcattagttttcctaatgttgtctcaggtccttatttatcagatggcttctaattatcctaaaatataaaatcactatcaatagtaccttgaccacctccggagcacttaaggggtaatatgtttcttgacatgaggattcactctctgtcctggacacagatttacaaccatcaattaccataaaaattcttctctattgtgacataaacttaattaggtaggttcaatgaaacattatctcttgattgaatgcccataggtaattggaaattctttattacttattcgtagttggtagaaggcatggtttctcacctaggattatttaacactgattgcattttcagctaatactatcaattattgattgcattttttatgataaagtccttcattttccattaaaaaaattaaattgctgaggagattttgaggaatttaaaaaacaaaaacaagtaacttacaaatgactgaaaatttcaataatctcctcattctactacctgcttccttggagttcattggctcataacatttcttcttttcatttcctctaactggcttcaatactaaagaagctcatatgtttttaggatccttgaagatctttatttttatcccaaaataagcgtgaaagtcaaaaatgggtgtttccctgtccgggcgcagtggctcatgcctgtaatcccaacactttgggatgccgaggcaggcagatcacctgaggtcaggagttcaagaccaccctggccaacatggcaaaaccccatctctactaaaaatatttaaaaatcagctgggcgtaatagc

SEQ ID NO: 96274 - DNA, 1634 bp, Homo sapiens
ctgtatagtgtatcatagttgtttcattcattaaagattaattatccatcccagagtcaattctcttattcaaaacctaattaactatatacataagatgcaaatcattttctttctttgtctcggccaccttttttagccattatgctaaaaatcagtgacattttcagtccctgtataatagaaaatggaataaattgcagggatgaaggcatttaaaaatcagttatcaaattagttcagtaagaaataaattttaagttaacaccagtataagtacttggaatatatttcatggtatctctgtcccttgattagataaaatattcaaagttgattttacattttgggaaaatgctatgctagtaaaatgagaaattagattctgcaattaaatttgacagttatttgtcttaatacagaatttatcatttatttcttacactgaatctttctgtgttcttatagataaggggtttctggtattaaagattttgggcattttgctgtactaaattctttttcctgggggaaaattatctatatattcctaggtgttaatctaaaaggtaaaatgtacataactttgtccttttgggaatgtgggtaatgtgctttttgtggctgtctgtggctggtgttgttataaatgtgcttaaattgcatgctttggcagtgatttctctgacaacttacgtaatcagtttgctgtattaaacttgttcgttatggggagggtaagcaaacgtggacagtaaattaaaaagagccaatgcttttatgtagtaactgcatgttatgcaatgtaaattttattgttgttttaaaaacctgtgttttttatatgaggtttaaaaaatccatatttttcattactcctcttctaggttctgagtcttctggtagtgtagggtcatctacaggctctctttctcacatccagcagcctcttccaggtacagctctcagccagtcttctcatggcgcacctgtcgtctatccaactgtcagcactcatagttctctttcctttgatggtggcctaaatgggcaagtcgcatctcctagcactagcttctttttgcttcccttggaagcggcaggcataccacctggcagtattctgatcaacccacaaacaggttggtatccagaaaaaggtgtttcaggaattatctgaaaatttaaggatacttattaaatgtattttctgaatatgtgtagtcagctttttattattcatgaataattaacattttccaagaactttataacaaaaacacttaatgctagggaagtttcaaagacatttatatcagaaagcatttttttccccttgtacatctgtgatatcatctatgccaaatactagcccaattataatttttaaaaaagtttatttcctagaaatgagacaactacccacgaaagagctttgtttgatataacaattttttttaaccaacattgatttttttggatgatacaacaattttatacttgggaaaatcggatacattttatgaaaaaggactgaataagcagctttttttcattatataatggaggggggaaaaataattatctttcagaatgtgttgattttctactgaggaaaaggtaaaggacatctt

SEQ ID NO: 96275 - DNA, 1138 bp, Homo sapiens
agtaccccataataagaaatgcagtaaaacatttgaatatttaagtgagggaaataaagactattaatagcctcatgtcagagcaggcatttcccaacctaaggaaatctttgttttcaaatattagggtttttttttaattgtggttaaaggattttggacatgctttgtaaattgttagtaaaaggacctattttccacctgtattctaagttatttttttccctctttttgaatttttcaggtcagcccttcataaacccagatgggagtccagttgtgtataatcctcctatgactcaacaaccagttagatcccaagtgcctggacctccacagccacctctgccagccccacctcaacaaccagcagctaatcacattttctcacaggtgcacatatccatgattacataatgctaagttgacttgcctttacatatttgggactaaattcgctaattataattgagatagcctaagtatctcttagaactttaatattctgccactagtgatattccactcactactcataggaaaagagataacttcaaaggtttttcccctgataaatactgaaaatatgttggaaagaagggaattgttttaatcatatgagcctgtctggtgagtattttatccctatttcacaacagcaagaaatggacaacaggagaaataaaaacaaaactgtgattgttcattggcccaatgagcaaagtgagttgttttaagattccacagattaagcagttagaagaaactgagataggctgctcaggttctgcaaggtactcttcatccattctacctaccctatgaaagacaaagcagttctgagttagaattcccaaaagtactctcagtaatattttgagtttgtaaaaatgtttagaatttacacattcattttcacattcagtctttttcccctacagttgtattatccatctttggggaacttgactataccagtatgaactcctatttttattctaacttttttttttttttttgagatggagtcttgctctgtcaccccggctggagtgcagtgaagtgatcttggcttactgcaagctccgcctcctgggttcacaccattctcctgcctcagcctcccaagtagctggga

SEQ ID NO: 96276 - DNA, 2193 bp, Homo sapiens
cagatcacctgaggtcaggagttcgagcccagcctggcccaaatggtgaaacccccgtctctactaaaaatacaaaaattagtcgggtgtggtggtatgcacctatagtctcagctactcaggaggctgaggcaggagaatcacttgaacccgggaggttgcagtgagccgagatcaggccactccactccagcctgggtaacagagtgagactccatctcaaaaaaaaaaaaaattaaataaataagtgagtatcccttaaaaaaaaaaaaagaagaagtatgatgataaacttgaactggagaaatttcattaattttgctcacaaatgatatcatttgtattgcagggttgaagaacatacaagtttaattacattatttaatggtgtgaaagtcataaaaaataattgtacttctggcaattaagactcctaatactgggcaaggcagttttttaaaaagaagaacttacaagttatggatatacttctaagaccatagaaatcagttaatgtatgtagaagagattgcctaaaactatttccacagactcccatattcccttcccaatcccatttggttacatacaatgagctcgcataaaacttcttccctggctttctctgccttggcttcagtcagcttggtcccaaagagtttcctctttattatgctgtcatgtagttgtctttgcagtgccatgtattttaccaggagctttaaaacactaattttcatttggtttcatttttatttaaatttcagtggaaataatgttaatctggcaacttttaaaaactctgggatttatctgtgattatatatttcagattattatctcttagaactttgtctgatttagtgataagagacagttctaaatgaagatgtaggccacctagtttagaaacagatgctttaatgagctataattggaattcttgggatattcatcaaatttcataacttatttttctagcattgctccaagttcaggtaatgcatcatcagatccagaaacagagactcaaaagtgattctcaatgaataccttttgcacaatctgaaataatttatcaatgagattgcaaataaccaaacaaaataatgctatgatttccaaagccttcagaagggctacttttcttagacctaacgtaaaaccaattactttaggtggatgttgttttgcagccagttgcaattcaagtaggaaaaggatgtgctaaggctctttcttccctaaatggtgtcagaatttcactttcatcaatcaatcttctagcccacagtttttttcattactctctgaaattcgggaagacattaattcatacccttggtgctcatagtactttccttaatcccccagctgactaaaacttttgtttcatctgacacataggagatcaagtcatctgaaagttatgtcttaatggttatctgacttaataacacatcaagtagcttgttcttgagagttctaaagctatggcacctcatgtagtataatatgtactatcatctgttaggaagctcacttatttctagccatgagttttgtgaggaaccagaggctacttcatagatctttcagcttttactgaaagatttttttaatgctttaattatagatttttttgctttcttttaagcttatctaagcttttgttttttagaaaccgttgtgttgattttgtggtaaaagtgcaactcaaatcattattatctatctatgatgtcatagacaaacaatgtctatcttagttgacatagaagttctctatttaaattattgcctgaacaatcttaattccattagtttatctaacatttttaaagtattgtctctgaagacaacatgcagagatattgttcagaaggagatgcatgaatatacattttaactaagagttttcatcaagtgagattccctgggttcctcatctacttgcttatgtggctgtctacaagtcacttaatttaccttagtctaactgccttctgtaaagtgggttgctatagtctttaagccaatatgtatattaccgtttttgtaataaacagtataaatatgagaaaattaaacagatgcaattttagtttgtggatgaccagctgtattcccaagattgaaaagtgattacaactttaaaaaaaaaaaaaaaaacacctgtgtttgagtgcccct

SEQ ID NO: 96277 - DNA, 1512 bp, Homo sapiens
actagtttctcagctcctaacatgtactatcttaatagaaatgtgttaattacaaagaaagtgtttatcttccttatataaaagaggtgtttgtgtgtgtgtgcatgtgtctgtatgtatatatgtgtttgttgttccttaggctattattcttaatagttcccaccatatatatatatttgggtttttttttttttttttagacggagtctccctctggcgcccaggctggagtgcagtggcgcgacctcggctcactgcaagctccgcctcttggattcacgccattctcctgtctcagcctcccgagtagctgggctacaggcgcccgccaccatgcccggctaattttttgtattttttagtagagacggggtttcaccatgttagccaggatggtctcaatctcctgacctcgtgatccgcccgcctcggcctcccaaagtgctgggatatatttttttacccagagcttttttcttataaaattgctaaaagttaggggctttggtcccaaaagactgcttaatttcaccttatcagtagggtaattggaatagttattgtgtaagttattactgtctgatagtaagaatgaagtttttcatttataatttagtgttatactgcaaaatagggcaaccctttcataaaaccaggaaataatgagaagtagttttgcttttactgacttaacccgggggtctttgttaaataataggattcaaaatgcctaagtcacctgttcccgttaatctataataaagaaatattttattgcaaaaaattattctcctaattatgtaataaattcaggcgtacatgtttttgaaagttttactgtattagagttgcttcactttgtattgtttttgttgtttcctatgttgttatattttaaatgactttataaatgtagttaaagctattgccaaaaaagtgtaaatttccgttttatgcaattcttctaacgttttattctgacattaacattgtttgccaacctgttattctttagcctgttcatcctctgcagtcctcttcacagcctgttcagtactctacagccccttacccatccccgttcctgccagtctcacccacccagcaatactctgtggtactatatctctattcacctcctgcgttgtttctgtgggtggatgtgtgatgaatgctcaagagtgtcattaatgtaatatgatcttttgtgattttttttgggtcaggtttacatatgtatctaaacaaagtatttctaattcatactagaaataatttattccataaaatattggttatagtggcttattatggtgattgtttaaccttttcctgctttttcataacgaaagaattttcaggttgattattctagtcctaagatgttttagcaactttctcattgaggccactgcaggatctgtgctgccctgggatggcagctttcatctgggtttaggcattctattttctccccaacactgtagctccagtagacccagtaccagt

SEQ ID NO: 96278 - DNA, 2169 bp, Homo sapiens
tggaataagaaaatgacttttttccaaggtgactctgagagtggtatacaattatggtacttctgttaacaatatttgatcatataacattgaaattacagttcataggtacattttttttccttttgacaccattcactgaattaggctaatagtgttaaagtgtcaaagtgacagttggggaagagaaaaaccatatattttcaatcattaaatcaggcatctcctttcagtcctttatcttctccatagccgtaatttactttggaaaatccagcagatctagaaactgcagacatgtcaactttgatatgatgactcaattgccacaattttgtaagtcatttttttcagtgttgaccttttaacaaaatgtggtatattttattgccagtctgtggtttcttgggaacagggagcattttaaccctatataatcatttcagtgatatttttctggaacaataagagctggtccttatcctgttgaattagagaaatgtttgtcagatagcacataaatcataacccttgtcttggtagggcaccatttagtaaaagcataggaaactgtcatttgaattacatttgtcaaattatctgacttccagaacagattgaaaaacacaagggaagaatggaatgtatggccaaattatttttgaaagattagagaaaggactgtagtggattttatgtatttaatttctgcaaataattttcgtggttagggatacaaaaatgcatagaatttgcattttgccttctaggaagaggggagatagtttaaagcaaatactaattagtaccttgctcattgcttggtctttgaagtcctttcagaaaatattaattgtataatatgaacttggccaatttcacttctacattctaatgttgctttcatcttcatttaaataaatgtcttcattttttaatgtgaaatgttgtaccctactcttttctgcatgctgtgcattcccactagatatattttttaaataatttataatttataatattcaacaatagagttgtcatttttttgaagctttaccctattacataattgctgttgttgatatatataatttccataatgtgtactattgcatcttatttaaaaataggaagtatttttctttgataagtttggcctatgtgtagaaggcttactaatttttgacttcttccttttttagcaggataacctagggtctcagtttagccacatgagtcttgctcgccagccatctgctgatggttctgaccctcatgccgccatgttccagtccactgtggttcttcagtctccacagcagtctggttatatcatgacagcagcccctccaccacatcctcctccaccgccaccaccaccacctcctcctcctcccctaccacctgggcagccagtccctactgctggatatcctgcctctggtcatcctgtcagccagcctgtgctccagcagcagggatatattcagcagccatcaccacaggtatattgctttttaaccttttctttcttgtggaaacctctcacttaagatcagttttaacttcaaagaacttatttttaaattctcatgaagagaatttgtgagagtatataaacaaagcatatactcatctttccgcctctggagattttcacgcacatgctaagcaaccatatgacaggtaaatgctccagttggttggtaaagtatgtgagctttgaggggttttttttctgagaggtatgggtttctaaaaaactaacctaagggaaacacaataaagtgtaaatccactgtaaaagtaaaatggtaagactgggcacagtggctcacgcctgtaatcccagcactttgtgaggctgaggctgactcacaaggctgggcttgagcctaggagttggagaccagcctgggcaatgtagcgaaacttttgaatatttaactaacttttaatttctgaaacagaccccacttggttatgatgtagtatccttcttatatattgtgggattcagtttgctaatatttgttaaagatttttgcatctatgttcatgaaggatattggtctgcagtttgcttgtaatatttttggttgtactatccggatggtagtagccttaaaatgagttgggcattgttccctcctcctttattttctgatg

SEQ ID NO: 96279 - DNA, 1029 bp, Homo sapiens
ttggtctcggttcttaccaacgatataatttaatttttttttccaaacgatgatgttgttgcatacctgtggaaagcaaaatgattctgtgaaactatacttttagttttgcaaccatttgataacttcaaagattatcaatgtattatatctttagtcttagctttccagataacccagaatcatatggttccaagttgattaagctttgttaccagcagactatggtaggatcctgatgaacgacactatggaagaaacttgttaggataaacagtcttcaatgtgtgcatattgttgacagaatttgaaggcacaaatttaagagtaactagggtgtaaaaggcgagcaaagaaaagtcagcactactgggtaagcaggtgagggggcttattgataggagagtcggctatgtcaaatagggactcaaggcacaaagtcaatttctttactgacaactttcaatccaagtaataggaattttgtatttgtaaattactaggtagtggctctggctattcttgttttttcattgatttctgtgagcatttcttagtatgtattgtgtgattcagcatagattcagacattgtataatacctacaaatccacctatttcccttttcccttctccattaacctgccgccactgaaatctggagccaaatatatctggtaagtacccacagatttccttgagttgtatagactcttccatggaatagttctttaaatagctgtgagcaataaactctgtgtgactgtttttgttagaattggtttttgtatatgtatatgtttatttcaggcacaggagtgagagaagaggggatgagagatgagaagggataatcaagtgtgatggcaattgcatctccttccaaatacacccatggggctggctttagttgaacttgcccacctactaaaatagtgccacagacagaagcccaagattataagcttgaggttttaacaatttggtcttgtagatgcctagttacaaataaatttggctttagtaaaat

SEQ ID NO: 96280 - DNA, 1075 bp, Homo sapiens
gttgcagtgagctgagattacgccactgcattccgggctaggtgacaaagagagactcagtcacaaaaaaagagagaactccaaagaccactttcattcatctcaacaaggagagaatagcctagttgggaagatagggaatagcctagttgggaagataaaatacacgtattttgtgtattttatctgaacacatgtaaacaaattggtgatagtgtacagactagtaactgagaggatcatgaaatacagcaatgaacaggttaaggacttgatttgaagccttctgggaagttagaaacctttagctcttcaaagaaaatgatgggcgtaaattggttaagatgacattctgagaatgaagaaggatataagcaaaggtgcaagcatattccatataatttcagaaaattgaaattaaagtgtgaaatgtgaggttgtcaaatgttgttgagcaccaagtgtatgtccacttttgagaaccctttaccatagaacacatctacaaaagaaagaaaagatacttcatgaaaactgggctttccatcttcattttctctcacatcccccatgcttctgaccccttctcctccatccttgagcctaggcacatgagcctgcccttcgtctgtttccccatagttaagcattaaacaggattgacaccaagcctgaagccttcctttctcaaagactctggttctactatctaatccaatacagagttcagcatgtaagatctgcccttaatctttgggggcttacatctagtaagagaaatgtcatttttaaacaaattacagcctaattagtatagtttttttttaattagctggatattgaaaatattccagagctaaggtagtggtcataatttttacaccatacatttttacattttaacattattttctcattgtatttaatgtaattctcacattggctgaatattgtaggaagtattgctctggccagcaatcaataatagtcatctgctttaaagtgtggctcctactacatttgataaacaagctaggtagtgataaactgttatctaaaaaataagccagaaaag

SEQ ID NO: 96281 - DNA, 1109 bp, Homo sapiens
tacaaaaagcttctcaatttgtgatgtgctgaaatacacccacaatattgagggtgctgtactgaatcatagttaacatgtgcagtccacttcttcctttccttctactgctgctatcacagtactatcctgattctcctttctcagaagtattgatactctctagggttatttcctatgccttctgtcattactcttccagctgttcctgtttactccaaattacctttatgataagtgagatgtttaggcctacagagtccatcttaatgcctgtttaaacacacaatacttgtagtgtgatgcactagggcttcaacctggttttcttagttaatagtaaaattttattcagaaatgtaaaattactactgttatcctagtgttcagaaacaccaactagttgctaaaatattctgactatagcatcctaaattctgattttcagctggaccaccaccgccacctggtggggggatggtgatgatgcagctcagtgtaccaaacaatccacaatcttgtgcccactcacccccgcagtggaaacaaaacaaatattactgtgatcaccagagaggacagaagtgtgtagaatttagcagtgtagacaatattgtccaggtaagatggttttgttcattatcattttgaaacgttacatttttgttacctaagattgacttataaggcttgaatttgaaatcccgtcagccagattaataaaagaatttgggccaggcgcggtggctctcccctgtaatcccagcactttttgggaggctgaggcacggggatcacccagtttcagaccagcctgaccaacatggtgaaatcccatctctactaaaaatacaaaatcagctgggtgtagtggcacatgcaaaaatacaaaatcagccgggtatggtggtagcatgcatcccagctactcaggaggctgaggcaggagaatcgcctgaacccaggtgagtggaggttgtagtgagccaagatcgtgccattgcactccagcctgggcaacaagagtgtaactctgtctcaaaaaaaaaagacggaggaaaaaaagaatcagtgtttaaatattatttgctaacttctgcgtattcaaa

SEQ ID NO: 96282 - DNA, 1048 bp, Homo sapiens
ctcacgcctgtaattccagcacttagggaggctgagccaggcggatcacaaggtcaggagatcgagaacatcctggctaacacagggaaacctcatctctactaaaaatacaaaaaattagctgggcatggtggcgggtgcctgtagtcccagctacaggctgggactgaggcaggaggctcaggaggctgaggcgggagaatggcgtgaacctgggaggcagagcttgcagtgagctgtgattgcgccactgcactccagcctgggcaacagagtgagactccgtctcaaaaaaaaagaaaaaaaagaaaccatctgttaccagtgtttattttggggagttgcagatcacatgcttctataatgtttgaattattttctaacaagtacgtatatgtaatcaggaagaataaaaaataagcctgcccaaaatgctgacccattttcttgacgtattgtaattgcagcacagccctcaactcagtagccccattatttcaccagctcagtcgccagcaccagctcagctgtccaccctgaaaactgtacgtccctctggaccaccactttccatcatgccccaattttctagaccttttgtccccgggcaaggtaagtgcacatgaaactagtcacaacttcagagaatttaagacatccattcccagtcacttggtaatttatcttggtaatattgcctttctattttccatagagctgcatcttcacctacactcaggcatgtctatttgtgaccatataccctcctaaccttaatgtatcattgctaattaataattattaattcagtaattacttctgtttagtaattacatgatcacattaaaatcactttaacttattcttagaatccattcctctatagtaataatacacagttttctacattttttcggtattttaatttctacttagagtaatatatatcaaaagtttatccaggccgggcgcagtggcttacgcctgcaatcccagcactttgggaggccaatgcggaaggatcacttgaggccactcaagaccctgt

SEQ ID NO: 96283 - DNA, 1029 bp, Homo sapiens
aaaccaacaggtaggaaagacaactaacctcctaggctttgttgcagaacatcatagctccctcagagtgtaaggggcaaccctgagcccacctgttggcactgcccaagaagagctctgtgcctcagccagttggtttacacagattatcactggctccatcaggagcagagcaaaggagaagatggtgtgctgcttggcagagcagtaattctctagtgccacccaaagacaaggcagtggctagggattggggcactcttgctaatgaaggaccgtcagcaagtgatcggtcataatgaaggacaggaatgccactgccacaggcagaatccagaaggcctgggactgattttcttctgccagagtgcaaaacccaaactaaaggtgttttggtgttaatttgttaaacatccaaagtgtgtttttcagcattattaacgttgtttctcaactatttgtgggttttcagggtcagcctggcagcaggcatggaaaccgaggaaggagacaagctaaaaaagctgcatccacagaccttggagcaggagaaacaggtatgtctctgaggggcaactagatgtgggtctgcaaactggtgacagtctaaaaatacaccacagcacagaaatgggttttcctcttcctagaatcctgcaaaaagtcataatttttgccatctctgatttagggttcttggatatgttcctatgaccttgtgtcatttgagatgtgagagtatatatggtaagatgcaggtaggtttaggagggacagaggggccacagggaaatgtgtgagaggaacaagtagagtgaaactcttagcctcttagttctttgagaaagggtttgtccttacatccatgtgggagaaagtctgagtgaacaaatatgttgcctctctgtggtaaagtaccttcaagtttatattttaactttctactcagcagccttgtggtgtggttagggcaagtgcttttattttattttacaatggaaatgtgaagttcagaaaaatgtttgagat

SEQ ID NO: 96284 - DNA, 1023 bp, Homo sapiens
atgcctgtaatcctctcactttgggaggctgaggcaggtggattgcctgaactcaggagttcgagaccagcctggccaatatggtgaaactccatccgtctctactgaaaacacaaaaaattagctgggcatggtggcgggcgcttgtaatcccagctacttgggaagctgaggcaggagaatcgcttgaacctgggaggtggaggttgcagtgagccgagatcacaccgctgcactccagcctgggagacagagtcagactccatctcccaaaaaaaaaaaaaaaaaaaaaaaaaaagatggccctaacagttttaattttgtgtattcgaatggtcatttcccatgtcatatttgggtctgcagtgcttttttacccaacttttttggtaacaggaatgtattgattctgtaccttttctattctagttgttgggaaggtcttggaaattactgaactaccagatggaataactcgcatggaagctgaaaagctttttggggaactctttaaaattggcgccaagatccggtggctccgggacccccagtcccaaccacgtcgtcaccccctctgctgtggcagtggggacaacactgccaaccctgaacgctctaaacccagtgacttggcctccacctacaccgtcttagccacattcccctccatttcagctgcacagaatgcactgaagaaacaaattaactcagttaacaagtttaagctgagaacaagcaagaagcactatgactttcacattttggaaagggcaagttctcagtaacagccacctttggacccttcgcctttatggttcccctgccctctcccatctttgattggcttggtatttggagcttctgttaacattatagagactcctaggatgtgtgttcatggcattatagcttttgaagaaaggccagtgatccagcaaagggggaaaaatatgcatttcaccccacatgactaggaatccacatcagaatgatacagagttagcaggtttttctaaggaaatg

SEQ ID NO: 96285 - DNA, 1076 bp, Homo sapiens
gttgcgggggccgcagagccggacgaagacggagggcggagccggcttcgggactgcggagactacacaccgagcgagcgcctgggcccgaagggagcgatgctgtggttccagggcgccattccggccgccatcgcgacggccaaaaggagcggcgcggtcttcgtggtgttcgtggcaggtgaaggaggcaggggttcgagaggcggccgggacacccctccggcctaccttcatcctcttgtatacctcagccgccggcccgccctccccgagacgcgggctcctgtcggctcgcacaattgccactactaccccgcgccccagggacggctgcgactccgccgccagatcccccagaggggccatgcagaccctcagcgccctgctccttcaggccccgggcgcccccagcctttcctcagtgtctgcgaggcccgggctgccggcccgtggctgttcagcgcctccccggttcgtttgagatacagtgggcctggccccaccgctgcgtctcccggcagccgggccggaggcaccgtctggccctggtctccaaagcgccccgaggcccgccgaaatctccccgctcggggcgacggacgcggccagcaggccccagccgcccagccccgctcgtcgccccgagcctctcccctgcgcagccagacccccgcgaccctctccctgacgtccctctctgtcaccaaggaccctctttgtgctgcttgaacgcccgtttcgttactgctgtttagatggaggtaggaacgggccattaggcaagcagttgggttgtaattagttgtggactgtcgggaagaaagctgtgtcatcgataagcaacaaagagaaaccacctgatgttcacggttactggtgttagtacgttcctgaaacgtaaacttttgagctgaatagaggtttaatttttctttatggcagtcttggtaggggatctagtgtgaaataatgtaagtttaaaaaaaatccattagtttcaaagaaaatagacgttcagtccttggtttcttccctttgttgtcttcttaggctaaaatctacacgactttgag

SEQ ID NO: 96286 - DNA, 1056 bp, Homo sapiens
agactgttagcaatctcacaaaggagtctctgtctgtcccttgacctgttccaaaatccagctagcttttttagagctttagccagttaatccccaagactaagtaggattagtgtcactctaggagtatgtagatactggactcatgaaaccaaaacacttacagattgcttagagctttcttcataactctgaagtcagaacttgtgattttcttaggtctaagatctcagtaataatataccaacttaatggaaaatttgaaagatgtctttatagttggaagacgtgatctcaagagtacactttggttcatagaactgttcaagtgggaaacgttttaggcaagtggtctttagttagtgacattttcatggatgaattaaagaatattgtagagttgatgttaggagacgagagattactactacttcagctaacaaattaatatgattttcaaagtattgtggctgtgtaaagtaagtgaaacaaaacgatattcatttaatacttgggaaggtagaataatctgacgagactgaagtaaaggtatctgttcactggctaatgttgctaggtaggtaggccaaactttgttaatgatagacgccattttctgccttttttggtgaatgtagaccacagaagcctttaggttttgagcagttgagatttattttacatcggaaagactggctgtatgagggtctgcaactctttgcttctgagttcgtgttgctctctttaagtgccttcgcttaggatactgccgatacaaaggatatgctgttttctcctaaaatcttaggcccacctaactttatagttgataatttgattaaaaataagaaatgaaagataccagagttagcaatcagtcatcccactcagtagtattaggaaagttgtcattaagcattgagtaattccattcagctttccaccactgctgttcaagcagctgctgccaccactaggctgagtctaggacagacactgccagtagggttgagacatctgggaccctaatcacatggtacagtataggtgagggag

SEQ ID NO: 96287 - DNA, 1028 bp, Homo sapiens
gtgtcctcatttaaaaaaaatgttattataggaaatttcaaacatatataaaagtaactcaatggtgtagtgcaccccatacattgagataatatattgcagctaaagataggatagggagtttttaaaatgtgaatatctgaaaaacaatatagatcagttgggttggaatgttacaagtagcttgcaagaggcagctggcagcaagatggatagaaaaggaagttatgatagaggagaatgtagtagattcttcactagaatatacctcataaattaacatgtcacatgtattaatactacaggtataatgatgcagtacttgaaattatttaataaatgttagattatattgtgaaaatcacaaagatcatttgttttcctttgttaccaatagtgtttcgtaaaactatcctttcgtttcacatgaattgttagacttcattaaactgtacagatcctgtagtgtgtgttccatccagtttctttattggagacagtggaattcccttggaagtaatagcaggaagtgtttctgcagatgaacttgttacaagaattcacaaggtccgacaggtaagaaggaacagaactgttgtttccgtaaatggtacgtcaggaattggatttttttttttgagatggagtctcgttctgtcgcccaggctggagtgcagtggtgtgatctcagctcaagtgcagcctccgcctcccaggttcaagtgattctcctgccccagcctcccaagtagctgggattacaggcacctgccaccacactgagctgatttttgtatttttagtagagacagggtttcaccatgttggccaggctggtctcaaactcctgacctcaggtgatctgcccgcctcggcctcccaaagtgctgagattacaggtgtgagccaccgcacccttcctaacattggaatatttttggagcccctctgtatattcaggaaactgccatgccaaaaatcttaaaaggtagtaagtactgtctttgtcacctgtttttgtaaatagc

SEQ ID NO: 96288 - DNA, 1042 bp, Homo sapiens
ctgttaagcattctagcacatggttcatttttctcaccatgtatacctaactgtgtagcatgtctttggagttctaatataggaaggttaccatttcattcaagccaaatacgtgactgccatgttgtccctgaagggtaatatatttaccctcatgactaaagacctgtaattatgcttgccttcaaattacactgactacattattatcttaacagaccattggcaatgatttatagattgatagacatttgaccattaaccatgccattaataaactcgtctagacttacattttatgaagttttattcttttaactgcagttttcgttgcattcaaaataatatctggggcagattatcaagtttttggatcataaaactttttctttaattcagagagaaattaagaaggaaattgagaggagaaaaactggaaaagaaatgttggattataaaagaaaacaagaagaagaattaacaaaaagaatgctggaggaaagaaacagagagaaagcagaagatagggcagctcgagaacgtataaaacagcagattgcattggtaagtcttaagtttccagacattcgtgaaactgtttttctgtgcacagtagctttagattactaccagactgtgcacacaaaaatagattttagtgactcatagactaccaatcctgagcttccttttattagaaattgtaaatgaattaaaatagttaagattaaaattgagttgatttttttgaagtgatttttattcatattttgttaatttatgacttttatcagcattcaaaaagcagcttttaaagattccctagaaaataagctaagtactagtacctactactagtactaagtacctactagtagtaactactagtactaagtacctagtagttcttctgtagtcacaggcacacttttttgcaacattgaaaggatttaggcacatcataaagcttagtttgcaacaattgcttttataattcatcagctgcaatacatattaaaaccatcccgccaggtgtggctca

SEQ ID NO: 96289 - DNA, 1113 bp, Homo sapiens
ggaagtcctcttcattcttaattgtttataaataagtcattcttgaagattttgcgaaggatttaaaattgaccctttctgtcaagctgactggagctttggatagtctctagggtgctaagttacaaatgttttagtagataatgtcggcttgcataaataacaaaggaaagattagttggcaaatggtcacactcctctaatgcttattaagtcactaagaaacacaatggaaatggaatatatgatttggctggctggcttgacttagagatcagatgaagctaaactaccaaagactgctaaagtctagtactgtgttagtagatataatggtctcccatggactttccttactttagatggcattaaaagtaaaacttagttgcctgtactgatggaagttggaaacagcttgtattactattgtttttattttatgacatcttccccttgctccctctttttcgtatcagggaaccagtgagaaaaagagtgctggaaaaacgtggagacgactttaaaaaggaggggaaaatttatagattaaggactcaagatgatggtgaagatgaaaacaacacttggaatggaaattccactcaacagatgtagtgtgacaagtataatatgtgcaataatcattgtttctcttatgatttaattcaactaaaattctactggagaagtgggactgctttatattttccaactggtctataaaatgtctctttattcctgcttagtgggtgtgggttgaaggtgtttaactcagaaaagtaaagacaggaaataactctctgctaggtccttgcttatatggcaaccactgctagaaccctaaaagaaccaaaaatctgccacagcctgcctccatcagcttcttatttagtatttcatatgcccattagccctatgcttcagatgacacgttttgtttagagctactttgctccaagactcttaagcccaaagtaactggtatgtcactgagtaacttgactcggtgtcagagcattttaactagccactcagatgagaatttatgtttaacttctctttttactcatcagctgcaagcaaaatcttgtagtttttaatcttaaacactga

SEQ ID NO: 96290 - DNA, 1006 bp, Homo sapiens
aggattcacagggatgactgtggagccatgcgtggctgaaggctccaccacccccatcctggccaaatgtgagggtctatggaggaagcaccaggggcagcactggcctctaactgcctcccatttctggcatacacactccttcacgcattcatttagccatcaacactgcgtgctttctgtgtgctgagcacagaggcgcatggatgagcacataggtgatgcattcccaacaacatacaggcacaggcaccccccgccccctacacacacacacacacacacacacactttctcattccatctccatcttttcctttggaaaatcctgctttggaatatttggtttagtgataaggggagaaacaaaaaagcgtacttctgagaggctgttagtcttgacagtgcttaggttctaatgaccctatttaactactattttcaggacacggtcgatttcctctctcttgatttgtcttatgaatgccaaaatgaggcaagtctgcggcagaagctgagtaaattgcaggtaatttgagcccttttccacattaatgatgaatgcagcgaaggtttcagagagcagattagacatttaatgctttggctactgcataaactgaacttccatcaacagcagagaccggctgagttgtgtctggggagatttccattgcaagcatccctagagaacatcggatgttaggcagtctttcctagaagggatacaagggttagcttgttaaggtgaatatttacatagatcctctgcttgcttgtgtagaaatctgccgagaattgagattctggggttcattctgagttttaaaaaggcaactcatcaatgggggtgatggttccataacgataagcgtccacttaacaccactgaactatacatttaatggttatgatggtaatttttttttttgagatggagtcttcctcggttgcccaggctggggtgcagtggcgtgatcttggctcactgcagcctccacctccc

SEQ ID NO: 96291 - DNA, 1014 bp, Homo sapiens
gaacagggtttagcagagcactgatagtgatttttaaagtgtggtccttttcctaggagtttctagttgggaaatgaaagaaaatgttgatagcaaacactcggaagaagggtcaagtcttgtatatctggacattggtataatactgcttgaaacctgaggacaaatatttgtgtttcacaggatcatgttctaattgagctcacccaggctggattgaaaggctccacagagggaagtgagagctatgaagaagatccctacttggtagttaaccctaactacttgctcgaagattgagatagtgaaagtaactgaccagagctgaggaactgtggcacagcacctcgtggcctggagcctggctggagctctgctagggacagaagtgtttctggaagtgatgcttccaggatttgttttcagaaacaagaattgagttgatggtcctatgtgtcacattcatcacaggtttcataccaacacaggcttcagcacttcctttggtgtgtttcctgtcccagtgaagttggaaccaaataatgtgtagtctctataaccaatacctttgttttcatgtgtaagaaaaggcccattacttttaaggtatgtgctgtcctattgagcaaataactttttttcaattgccagctactgcttttattcatcaaaataaaataacttgttctgaagttgtctattggatttctttctactgtaccctgattattacttccatctacttctgaatgtgagactttccctttttgcttaacctggagtgaagaggtagaactgtggtattatggatgaggtttctatgagaaggagtcattagagaactcatatgaaagctagaggccttagagatgactttccaaggttaattccagttgtttttttttttttttaagtttataaaagtttattatacttttttaaaattactctttagtaatttattttacttctgtgtcctaagggtaatttctcaggattgttttcaaattgctt

SEQ ID NO: 96292 - DNA, 1050 bp, Homo sapiens
ctcatgaattttacttcttagtaaactccagttccataaagccttcccctttctacagaggaaaagttgttatatttcagaatttttgcttgctgttgcttcattcctaatttatgcttttagtttctgttggcaagcattctcagaggtggtgaagcataagaagatgaagaaaagaccttcatactttgaaatcttaatagctttaagaaacatatttcttataatctattttattaggtttctctccttatggataaaataaggcatgctttaatacaagtgatatgacttgttatttcaggcttatgctagaacattgcggaccttacgtcaccagatgtactttcggacggcttgacatttatctaatctgtacattatctcgttgtatatgtggcagagatttacccaaggactgacagtacgagttgctaggataatttgaatgtgtttttttgttgcagaagaggacgagtcagcattaaagaggagcgagcttgttaactggtacttgaaggaaatcgaatcagagatagactctgaagaagaacttataaataaaaaaagaatcatagagaaagttattcatcgactcacacactatgtaggtgcagaagtgcgcgtgctctggtatcagggagggagggagttcatgccctgtatctgcaggttcactagtgaaattttttttgacctttgtttgttttgaatcattggagtgtagtcagaagtatgagttgtaaaataagagagaatgaacagcaggtaaatgacttatttcctctgctgaaacaagcagaatttaggttaaatctcagaaggtgggattgaagtcttactagttaggtgttttaagcttctgtttcccatcctcatatttgcccttggtcgtactgctgtcacctactttctatgtttcattttcctcacattcttagttcccaccttacccaacccaatagtcaatcttccatcttacttgcttggcgaaaccccaaacttggttaaatataacttttttttttttttgtatccttatctaagcag

SEQ ID NO: 96293 - DNA, 1005 bp, Homo sapiens
cctgacctcaggtgatgtgcttcccttggccttgcaaagtgctgggattacaggtgtgagccactgcacctagccggtttattttgtttttcatttttattttttggcagaggagatcatgtgggaatgtatgcttgttttaaaattagtgttaaggctggatgtggtggcccacacctgtaatcccagcacttgggagaccaagacaggaggatcagttgagtccggtagttcgagaccagcctgggcagcatagcaagaccctgtctctaaaacaaataataataataatttttaaaagtgaaaaaaatcagtattaaatgtaagtagtgtatttgtaaatgcttgacaaggggatgttaagggcacaaaaataagattcaggtggtcaatttttcacttaggtcatgctgacagccctgctcctgtgaacgggatcaatggctacaatgaagacataaatcaagagtctgctcccaaagcctccttaaggctgggcttctctgagtactgccgaatctctaaccttattgtgcttcacctcagaaaggtggaagaaggtgaggcttacctggtactgcttacatgctcggtcacttctgtaagctctgttcacataggccacttgtgattgccaaacttcgtgttgttctgtcggaagagaggataagttgttagataaactcactttagcaaagtaaatttgtggagtatcagcatacctgccagcctgaacatttcttcacaagcttattgtcaggcaaagctttgtaggtccttctttttaacattctgggcctattttaataattttgggacctgataacatatgaagcagcacatacaaatgtttttacaaatgcaaaattactattcccttacaatggttctgtttaaaacagctggacccctagggtatattttaacagtaattaattgagcctagaaatctatactatcaaaaggccattgcagactagaaatggagtaaaatcctcatgtagt

SEQ ID NO: 96294 - DNA, 1597 bp, Homo sapiens
gtgctgggattatagacatgagccaccgtgcctggcctagttcttatgggatgtatatgtctttggattcatatgatatgtatatatgtttatatttctacaagtacatacctaggagtggaattgttgggtcataggttaatgcatgtttttctgccaaacagttgtgtcaatttctgttttcaccgctgtgaatgagagttgttctaccttcttgacaacacttgatattgtcagtcattttagccattctggtgaatttatagtgctatttctgtgtgtgtaagagagagaatgagagagggtgtttgtgagaaaaccaaagcaacactgtgagagtgtgtgtgtttgtgagaaaaccaaaatacatactactgtgatttcattgggagaaaatctgtttggtatatcaaaaaaagtagcttaattacttcatcattattggtttaggtccaacctaaacatgtgaaggaagctttccggttactgaataaatcaatcatccgtgtggaaacacctgatgtcaatctagatcaagaggaagagatccagatggaggtagatgagggtgctggtggcatcaatggtgagatacttgttcatgtgactgttttggagttagggaccaaaacattttctgagatgtcatgtggtagaagtacacctgctgttggctaatagtctatggtagcaaaacggaaaaagcagatactgaattctattcactgtttacaagttaaaatgaaattaaatagttgatataaaatatatatacttggctgggcacggtggctctcgcctataattccagcactttgggaggctgagataggtggatcacaaggtcaggagtttgagaccaccctggccaatatggtgaaaccccttctctactaaaaatgcaaaaattagccaggcgtggtggcggctgcctgtagccccagctacctgggaggctgaggcaggagaatcacttgaacccgggaggcggaggttgcagtgagctgagattgtgccactgcactccagcctgggtgacagagcgagactctgtctcaaaaaatacatagatatttgaaagactaaaagaaaaggcagcaaaatggtgataatagacataaatcccctgggttttacccttatttgtattgttgttttgcttctgaattgaaaacattttttcaagcacattagaacagaaaaatactagaaattttatttattttgagatggggtctcattctgtcacccaggcttgaatgccttggtacactcatggcactgcagccttaacttcctgggctcaagcagtccttctccctatcctctctaatagctgggacatatgcccacgccaccactcctggctaattttttgagaattttttctagagacaggatctcgccatattgcccagactggtagaattttttattttgtatataatactgcaagtggactttcagattgtgaaatctttatatctctgatccctcacgttcctcccaagttagtttttgtctttactagtagagtttatacatttgcttctaatttatttgaaaattcttatatgctatgtataactgtatgcat

SEQ ID NO: 96295 - DNA, 1043 bp, Homo sapiens
aaaaatactcattctggttgagattttcacactgttggctaacttgacttctggaaggtgttactaggtattgatcatttatcatcttcacttgattattcatgagattgcagttggctctcactgtcccaaagaaatttaatcatttaaaactaaggattatgggtgattcttgtgtaaaaaagagcatctgttctccattactgcatactgatatactgatccctctgtaaccttggcatgcttccttaatatggtgaattccttgctctgaaaagctgaggatcctttagatataaagtttattgaaacagcttttttttccctgcaaagagtgtgagttaattaattgagcctcaaatactgagcattaatttatttaatgagcactgacatcctgaggtgtaaaagacattacatcttgttccattgcttcagcttgttaagcagcttttagaaatggtcatttgcttaaatactaagccttttttcaggttcataaaattagtaacatggaattcacaagcctccttaatattagtttcttttgaaagacattacaatagtaatttattgtcactggcttctcaaagtttcaaccctctcaggttccctaaatgtttccacctggaaggctcttaaacttaggtttaccgtagctctcatcaaatagaaatgtttctctaacttgagtgatgatctgaaacagatttccaaagagtcagaggacttcattgtggagcaatataaacatctccgccagagagatggttctggagtgaccaagtcttcatggaggattacagtgcgacagcttgagagcatgattcgtctctctgaagctatggctcggatgcactgctgtgatgaggtatcagagtcactttgatatgatgagagcagagataaacagatttgttgcatgtttttaatctttggtatgggacatactagaattcactgcaaatacatttttatgtaactgttgaatgctcatacgaccatggaattcttccctttaaagagcttggtaagcatttgag

SEQ ID NO: 96296 - DNA, 1050 bp, Homo sapiens
tcctgcctcagccacctgagtagctgggattacacatgtgcaccaccatgcccagctagtttttttgtagagacagggagggtctcagtttgtcgccctgactggtctcaaactcttgacctcaagctcttctctcacatcagtctcccaaagtgttgggattacaagtgtgagccactgcactttaccctactattgtttttaaagccaatcaattccttcaggtatagttttagagtggggcaatggtatacatttaaacgtttgattttaaatccacctgttcccaaactttcatcagaaacttggtacccattaatacttctttaagtggtatattagagcttgtttttggcgataaatcatttcttattgcctgggatagtctggagaagatattgctgtgactatcaaagtgatttttttgttttgaattaggttacagattatgccattgccaggcgcatagtagatttgcattcaagaattgaggaatcaattgatcgtgtctattccctcgatgatatcagaagatatcttctctttgcaagacagtttaaacccaaggtaacctacccttttgtactgggataaggtataatgggtatattaaagtggaatttaagtaagtgtgttatatggaaattaactgaacctgtcatctaccttagttcctaaattttacaactttttttttttttctggaacagcaatttgttttttcagagagggctgagaaagggaactgtaaaaaaaattctgaataattccattatttgtttggtggtaataaaaagatttgtatgggagaagagttttggataactggataatctagaacattcttttatttcaaacattactaagaacgttaaaattgtttatgcgcctaaatcaatagttgaatctttctttgaaggaaacattggattcatctaggccattatgataaatataaattactgttttacagtgattgatgcattgtattggactaactctgttctggacccaggattcttacctggacataaacccccaaatgcttgg

SEQ ID NO: 96297 - DNA, 1079 bp, Homo sapiens
tttgtgccccttttaggaatattttgtacataagcataatactgacaatttcattcctgctggtttaacttcataattttattttggcaatcttttaccagcacatattagatcaactttggttttttattaatttcccatattcaattgtgtataccacagcttgattctttagactcctgttgagtgacatttggttcattttcagtgttttgtattacaaacaaaattgtagtaagcatccttgaacgcaacatccttttatatttggctataagagaaatttctaacaaattgatgtcttcaatggtgtgcacatcataccaccaaaatcacataggagttcctgtttatgtgaaaaagggtatgtcattattttggtttgtgtttagttaattatgggtgagattgaacatgttgttatatatttattggctgatgtctatttaaatctgttaagattctttcttttgtggtcaggctactctgaacgcccggacgtccattttggcagcagcaaacccaatcagtggacactatgacagatcaaaatcattgaaacagaatataaatttgtcagctcccatcatgtcccgattcgatctcttctttatccttgtggatgaatgtaatgaggtaaccccatgagcttccttttttatttccagttggagtaatcgagtgagacaaggctggaagatacactgctcaacagctggtgcatgtatgtgcaccagcctttgatttccctcagggtggcacaggatcggacaaagggtttagtaagcaactcaaaataaagtcatttgaattgcctcttccacttaattgtgttcaagaattaagttttcaggttttgttactatttatttctcaaaaggaaacaagttacagttaacttccaaccacactttttatttttttaaacagcctctcactggagactgggctggagtgcagtggcacagtcttggcctactgcaacctccacttccaaggttcaagcgattcttgagtctgagcctcccaagtagctgggattacaggcatgtaacaccatgcgtggctaatttttatat

SEQ ID NO: 96298 - DNA, 1029 bp, Homo sapiens
cttgctctgtcgcccaggctggagtgcagtggtgcaaccttggctcactgcaacctctgcctcccgggttcaagcaattctcctgcctcagcctcccgagtatctgggattacaggtgcacaccaccacacctggctaatttttgtattttcagtagagacggggtttcaccatgttggccaggctggtctcgaactcttgacctcatgatcagcccacctcagccttccaaagtgctgggattacaggtgtgagcccccacactcggccgttgttgttttttaagagacagggtctcactctgtcacctaacctggagtacagtggcaatcatggctcactgtaacctcaaatgcccggccttagtgaagcgttcttcctgccttggcctcccaaagtgctgggattacaagtgtgagccatgcatccagcttgaaagacagcttcttaggcttgatttgtttggttacagggtgtgtgttgtattgatgaatttgataagatggacgtgcgggatcaagttgctattcatgaagctatggaacagcagaccatatccatcactaaagcaggagtgaaggtatgtgttatctacttctgttctgctgcatcgtccatagccttgttgattaatgtagtactagagaagttcacctggataaaattcattacttcagtgtgtaatgctgttcattaaaatggaaaatacagccctgagaattatttattgaaactataaatgttgtttagagtactgtgtaaatgtattgccatgataatagaggaaaatgtccatgaacaaagcttttattttctttgataaagcatgctccaattataacaaaaataaccaaagatcaacagattgattatatatgtatatatttatttatattaacagagtatttaaatgaaaataagtatgacagtataaccaacactagggagaatctaaactttaaaagctacagattcaagtagcttttaagcagtacacaattgtaaattgaaaagacaactctttccctg

SEQ ID NO: 96299 - DNA, 1010 bp, Homo sapiens
ttaaaaaaaattgatatttttatcaggtattaactctgaaaatacaaaaattagccaggcgtgatggcccacacctgtaatcctagctactcgggaggctgaggcacgagaatcgcctgaacctaggaggtggaggttgcagtgagctgagattgtgacactgcactccagtctggtgacagagcgagaccctctcaaaaaaaaaaaagaaaagccgagggagagaaaccttcccatttagtctgtggcatgtgtcttcatgaattgcttaagctctcaaatgttctttcagtaatttaaactcttctgctggttttcctgggaagggtgctgtataatcacatattaatgagtctttatgtgataaccttgaacaggcacgtggaggagttcagccccagagctgtctacaccagtggtaaagcgtccagtgctgctggcttaacagcagctgttgtgagagatgaagaatctcatgagtttgtcattgaggctggagctttgatgttggctgataatgtaagaacattttacactcttcagtataaagaagtcagaatacccctaccctatcagtaaaggcctataagttaccattaaaaagatgtccttaaaaacagcattctcagctgggcgcggtggctcacacctttgtcccagtactttgggaagccgaggtgggtggatcacctgaggtcaggagttcgagaccagcctggccaacatggcgaaaacccattttctctactaaaaatacaaaaattagccgggcatggtggcgggtgcttgtggtcccagctactcaagaggctgaggtgggaggatcactgagcccaggaggtggaggctgcattgagccaagattgtgccactgcactccagcctgggtgacagagcgagactctgtctcaaaaaaaccaaaacaaaaaaaacccagcattctttagtaaataattcatagttttcttcatctagaatttaaaattgtgatagttgatcagcatgtcctg

SEQ ID NO: 96300 - DNA, 1249 bp, Homo sapiens
ctcatcaatgttgagagcacgggatggggttaagatttgatgagttttaaaaccaaatcttttgacgtatgcctttctgatcttgaaaaaaagtcttatttgatgtcttacataaaagctcaatgcttttaagtgcagtggtacaaattatccacgctgttttttgttttaaagtttcatagttcctctgttattcttctggaggaaatacaaataaaaagatttagtaatctgggaagtaaacttctgagaatgatgaacccctggcagtatcattcagttaacttgattctgtgtcataaatgggagtttggaaaatagttcagtattggaaaaagggagtgaacataatattctcttattttatttgcatctttatgtcagtgattaacattctgctatcgcttatctcttgagcattcaggtagctttttttctatttaactcactggacaaatgacatacccttaagtgtctttgttaactgagggcttactagtttggggagttgtttttttttaaacctttacagtcaataaattgtgaggttgacttcccatgctatgttgtgtttgtaatgaagtttcttctcctttatgctcttttgactgcttctatactaatgattcttcctttgttctctaccattagtttggggggaaagagctcagagatgaggaacagacagctgagagcattaagaaccaaatgactgtgaaagaatgggagaaagtgtttgagatgagtcaagataaaaatctataccacaatctttgtaccagcctgttccctactatacatggtaagaattccatccatttgtaccataaacttgaaatcaaaataatgattataaacagccacaggtgatttctgaaagcacataaatcagactgtgaaagtttttagtgggtctgaaagaggtcatttacaaaaggacaggtacatgatttcacttatacgaggtacctgtaatgtgcaaattcatagagacacggtaggatagaggttatcagtggctgggggaatgggagaaatgagttatttaatggataaagttgctatttgggatgatgacaaagttctggaaagggatagtggtgacagttatacaacataatgtacttactgccactgaacttatacactgaaaaatggttaaaatgataagttttattatgtatttttatcacaattttatttttttaaggaaaagttattttgtcatcttatttcctggccttatgac

SEQ ID NO: 96301 - DNA, 1211 bp, Homo sapiens
cccaggccagagtgcagtggcacgatcttggctcactgcaccctccacctcccgggttcaaacaattctcctgcctcggctccccgagtagctgggattacaggcgcccgccaccacgactggctagtttttgtatttttagtagaggtggggtttcgccatgttggccaggatggtcttgatctcttgacctcatgatccgcccaccttggtctcccaaagtgctgggattacaggtgtgagtcactgcgcccagcccgttctgttttataattttaattttcatttttttggcatcctttagttcatttatatattttgttctggatacatatacgtcatataatttaggattgggcacgttgactaaattattcttataggagagtccaaagaataccttgtctcttgaattttttttttaaacataaattatctttgaataccctctcactaaaatggaaagattcttagttaagagatgaatgtttactaatgggacatttgtctttaaacaggattcgagagctcacctcatccagaattggtttgctcactcgcatcagtgggcaggtggtgcggactcacccagttcacccagagcttgtgagcggaacttttctgtgcttggactgtcagacagtgatcagggatgtagaacagcagttcaaatacacacagccaaacatctgccgaaatccagtttgtgccaacaggaggagattcttactggatacaaataaatcaagatttgttgattttcaaaaggtatttatttaacatctgtttagatcagagtccatctatgataataattcacttctaggcccttgcaatagcttatttagataatgttcaactcaatttttatgtaagttaagcatcatcaaaatgactacaaagttaagcccaaaactgttcatgtaaattataattgttagtatatacatttgttttaactttcagtaacttggaagttccttaagactgacaagatgtatttgtcaaagaataaatggtaactaggtggtggtggttgtcattatgaactggagttaagaaaacttaaagaaatagcaacttgttagtgtaagatttccatttgctgcatagaaaggaaagcatgaataggacaggctagcttggaagcaatgaggattatcatgattgaagtaaaggagccaaattggagatcatctgagagatgattt

SEQ ID NO: 96302 - DNA, 1069 bp, Homo sapiens
gtgggataggagagaactgaaagagggtcctaaacctagagtagataatagaagtgtcctacacagttaagttctaaggtttagttgtaaccagatgaaattccttaatctcggctgttggtaggtatgtaaagggaaggaggccttggtaaacctctaaggtatcagctgacttttttgtttttcagagtttacccttacctgtgtcgggccttgaaaacattcgtcaaagaccgtaaagagatccctcttgccaaggatttttatgttgcattccaagacctgcctaccagacacaagtaagaaacccttctctggaaaaaaaggaattcaccaaatggtataagtaccacttagctgacagtcagaaaacttgagaggttgccttgatctgctattagctggctatttaacattatacaaatcacttttacctccctgagcctcagtttccttgtctgtgaagtcttttggcttaggttttctacctaaatcatgcaaaaaataggtttgttgctgtaaaattactttttcataattgataatcacaataattataaaacaagtacttataaaattgatgctgtaaaataccaggaggaaaaaatagtggtttgcattcagattttgtagaaggttgacttttgtaggagttatacccacttatccagaaagtttagtgttggagaaatgtattttcctatggagatgggattagatgtaaagggagtgaagcaaatttttaggattatcacattttagggcgccttttagggaaatttgggagaaaattgatcaagggagaaaatatgaaattctagaaattcctgaatctctggaaatttttgttggtttaaatgcataattttcaaacacccctttggcagttattttaagaataaatttactggataaaattgaagtgatattttgaaaagttaaactactgaaattataaaattaccaaattacttcacataaaatgggtttgtaaaggaagtgtttctgaactttgagtacaaaattttttctcatgataggattattatgtaacacatgcttttttttt

SEQ ID NO: 96303 - DNA, 1198 bp, Homo sapiens
gggctgtgaaacacctcatttccatgtattcttatttctgttctgcttcttaaatccctgactaatttgttagtttgcaaattccctacagaaatggaatcattgggtttgagactgaatttcttgatttaacattttccaatcttaattatacatgacagtagtaaaagaagagttagttgttgggtttttttgttagttagcagttaaacctcacaatcatggtggaaggcaaggaggagcaagtcactgatgtcttacgtggatggcatcaggcaaagagagcttgtgcagaggaactcctctttttaaaaccatcagatctcgtgagacttactatcagagaacagcaggggaaagacttgtccccatgcttcaattaactcccaccaggtgcctcccacaacatgtggaaattcaagtcgagatttgggtggggacacagccaaaccatatcagaagggaggagtaacttgccccaagttacagaactgccaaacatgggcctgtctgagcctagttgttggactttaaccaatgttctgaattatcattcaggttctttgtactgcctgtgtccttaatctagttgactcgaatgtacctgcaggtttcagagcagcgatggagaaattaaatacttgcaattagcagaggaactgattcgtcctgagagaaacacattggttgtgagttttgtggacctggaacaatttaaccagcaactttccaccaccattcaagaggagttctataggtatgggcatattaatcttctttactttgaataggggttgaaatccgggaagccagctcttcttggactgtaagtgttcacttgtgtagcagaaggtcagctttcacagttatttcccactgagaagaggcgctttgatactgccagtggtcgttttagtactgctctgaacttcatgtaggcctttgtagagccgaacgtttttttgttgttgtgttttgtttgtttgtttgtttgtttgttttttgagacggagtcttgctctgtcacacctaggccgaaatgcagtggcgcgatcttggctcactgcaacctctgcctcccgggttcaagcgattcttctgcgtcagcctcccgaatagctgggattacaggcgcccaccatcacgcccggctaattatttacattttttaatagagacggggtgtcaccatgttggt

SEQ ID NO: 96304 - DNA, 1247 bp, Homo sapiens
tactatgctgtttctgggattgcataatgttcgtcagacctccatgttccctcgtgatcccaaacgactcactccttaaattcacactttgccacttaactccagtgtggatgacagagcgagaccctgcctcaaaaaaaaaaaaaaaaaaagaaagccacacttattcttttcagtaacctgctagtgcacaggctgtactttaggtacttaaaatatgcactagaataaatttgcaaggccctaaaatatcactgttatttttggagtaattcagtataggttcgtttaaaagagatttttataacttcagacatgcatcagtaggaaataacttgagaaattcatatggttatgttacaaattcatattctgttactacagtaaacgttaagagttttaaacagttaagattgtacaatttttcttcttttctatattacaagggccccagtgttaatgtcttagattttcagtatttgaacttatttttttaaattctgtcattgagataagaataattcaggtagcatctgaaattttaatgaatgtataattggcatatcatggaaaattaaccagaaagtatcagttcttaaaagttatgcctagaaattatgtaaagctaaactactggttagaaagtattcagtgtaatattgtattaatttgttaaattctaaacttgaatttcaataaaattttaaagctaattgtagtttttgtgtaactttgtggccaactgattttgtaagtggtgctaggcattcataatttggtaaaagaaaaaatacacaactagtttatataaataaagactaatatgttgtcaacatgtattcatttcaggatattagtttagatgggcgtagggatagagctcttaaagttgacagcttgggtcggttgacagagttcatttcacatgggttaaaatatattgcagaattttgtttgatttttaactggaatggtactgatacttagtgaatgtcagtaaaatccagtcccatcttatccgtcaaaaagaaatttttgtgtaagaattagttagaaacactttccctctagattattacaaatgttgatgctaatgttaattttacatgaccacaaatattggggaggaacaaaacataacatatttttgtacaggaagaaaaaattacatgcagaaaaatatgagggtcaaaaagttaggaagttacccctggaccacgaacatctgcccattatgtttgaaagtt

SEQ ID NO: 96305 - DNA, 1733 bp, Homo sapiens
tgggtattgttgatgctgctcatttccagatcatgctttgagtgataagggaatcaatattgtgcctgctcccaagactaagacatacatacatatcacagtcatagggaataatcaaataattttcacaatgaatgatcagattgtcctataccatcagcaaatgggtgttaattatgtagtataaatagtaactgtaaaaagagagaaaatggagtttgctagagtcaccataaaagaaaattcaaactgagatgtactttaaggacaaagtaggatatatagacaacagagatggagttctagacaggaagcagagtaagtaaagagcaagaactacacaagaaaacaaaaataagacaagttagtattaagaagtgagaaatataggttaggattaacttacgaaagcataaaggttttagggtttttttggtcattttatgtcttactacagtagtcatttgggaaccattgtaagtttctgagcaaggatgtattataggaatattagtgatgtgaaagatgagtcgaactagagtcaaaaagactggacaggaggaaaaggcactgaggatattaaggctggactggatattagctggactgagctaatggctcttaatatcctcagtgccttttcctcctgtccagtcttcctgactctagctcgactcatctttcacatcacaaatattcctataaatgactactgtagtcaaatggaatacgtatgttactttattggtagagtttcacttagtttgagtcaggttttaataaaattgagaagaactcactatcttggtcataattgaatatatttttaaatattgagaagacacctcaggatcttgcattcccccagggttctcatgaacctctcttattaatttacatttggtacggcttttattgcacgaccgtaggagtttataatgaacttgctgtccaagataatgctcaaacagatggttcatcagaggtccttccagccctgtaatatgaaaataataccactggaatccaactaaataaaagtttgtatttaaatccctatttatccaaaattgaaatcagtgtttgctctctatttcttttattaacttcacagtattcagagcggaagactctaatacccatagacatctaactgagtttgttggtttggacattgaaatggcttttaattaccattaccacgaagttatggaagaaattgctgacaccatggtacaaatattcaaaggacttcaagaaaggtaaaaagtattttatgcacctagatggacttaatttcaaatgtttgggccctttaaaaaaaaaattcttcaatttaaacatacaaacttaagtttctatgaacatatatataaagatttaccagttagatgatccatttaattggttggaaaaatctacactcagaatactgcttctggatccaaatcatttgggggctcaactaattaacctctattgtgctagtaaatttaccacattgtgaacagtccaactgtattttgttgttgtttttgtttcctttatactgacatcccgaatgtctcaagaaatacagcatgtgtttcttttaacagtttatttgggaaacagtatgagggtagtgtgtaagaggttggattcagcaacatccagatagcctgagttcaaatcccagctctgctccttctctgtgtgggccttgtgcaggttatttaattctgtgcctcagt

SEQ ID NO: 96306 - DNA, 1037 bp, Homo sapiens
tacacaagtatctgcaattgtattgttgtaatggttaaaataaaaatacatggtttttattcatttattgtcaaataccaaaatcttacttagaacattagtatgctgcacaaacattgctatgtctcactttatgggttggttgcctttaaaaaaaacagaccattcacaagtaagttgtttcactaattgttaagaaacatttttcttttatggaattcctacaaattaaaacatctgctcactaaggatttccggtgaaattcctttatatgatcatatatagtcattgtattccagcatgcctttttgccttgtatttattcgtgtcctttcgtcttctctccaattattagaatttaaaaatgttgaaagcaagaattgttaggtttccacagtgcctagcccacagagttagtgcttagtaattaagtacgttgatttaattagattttattactgtcttctagacatcaactagtcaggcagtcttccgtctccagtctggcatctgccatctcttccgagaaactttaattaacaaaggttttgtggaaatccaaactcctaaaattatttcaggtatgcttcaaaatatttctcttaatttttaaaaataaatttgctctccccagagttgctttatattaataaaatttttaacttgagaatcccaagtgtccattaaggtttattgccatgagactactattttgaagaccatcttatatagcaacaatcatatatcaccaaccttaataagtacattttcttattccaggagtccttttgtgataatgattgtaatgtgaggcagtaacacacaaagcaagattcttgttacagaacttacaccaggaactactttcattatatagatttcttttgaaattagtattgcagttttgttttgtataaactgcattgtaaaatcagtaaatactaatgatgggaaaatttccttaattcttgttgcccaggctggagtgcagtgttgtgaattcggctcaccgaacctccacctcccaggttcaagc

SEQ ID NO: 96307 - DNA, 1039 bp, Homo sapiens
atcattaaaatatttgtctgacccaaaacaatttttagatttaaacattaaggaaactaatattattagtatggtttataacttaaatgataaagaaggcctttttcctgttcatttaggtatcttaaggtaagggtaagtatagtaatgataaattaaatatataaggtatttgtacattccttgtcagttgaaaataaggttgttatatatttgcattgaaattaacatatgttgcattcattttatgtactatagtttagaagcatttaatttgagatagatttaatatataattaccctattaaacatacttttcttttgttatatacattctgtaatcttactgataagttggatcattgttgatttttaccttaaccgtcaaattcttacacacgtgtagaagtcagttgtagtaatcaatatgtaatggggaaacagttttaaaatgagtctataaaaaaccgattttgtttctctttagatgtgttctacgcaagagtgtcttgttttgatcaggagaagaaaaaataccattaccatttcttattttaactatattgtgttgttctctcatgtaatgataatgctttttgaaggaggaagaaatgtagaaagacaacccagcagtaggtacaaaaagtttctcagactctgatgcagtctgcttagtactcttcctctgctaaattaactgactaacctgggcctgaggacattattttcctctgagcaaagtcagagagtttacaggatactaatcttacccgtttgtcttgttccaaccagcagagatagctagtctgaattcgctcgcacaatgtgattgtttgcagtaatgggtattcttgctagtaagatacataatcaaaatagttgaagatgtattttgaaatatttgtttttctttcttgttatttacttttaaagaacatcttatatttagtaattcctttttgtttaattcttttcccatctacccctgtgattggtggttttcaaattaaaccatttaaaagctagaatcttctagaaa

SEQ ID NO: 96308 - DNA, 1062 bp, Homo sapiens
agagaagtttcgtaattttgtagtataagagattatcctggcaatatagttttaatgccaatatattgaaacttacatgacatttcagtggttttgcagtgttttcccaagtatggtacctttaccactgaaggtacacagtgatttctgggtgttaaacagatgaacattttttattttaatagctatacaatataaccagcaaataaaatccatgttttcatggatattattgcttagagttagttaagttttaaaatgtgatttaaaggaaaatattaagtactagtacaagagatacccagtatgacagaaatgatagtagaaggcaaaagacaagtttaagaaatgctggtttgtgtcagcagtgggcagaaaattggggactcggggctgccatgagaatgataggtgtttgatcaccacagctataggagttctttgaaagtagatctggacattttgaaatagtcaaggggaggtgtcctcagggatgtcataactgttgacctcaagaccaatgcatcagttagaaaaacattttaaggatgctcagcactgctatgtatcacagggtccctccataggacatacatacttgatctgctagcgtttttgtcatacgttagaatgaatgaatatgtgttggaatgtcttgacacagttaacctgaacacatacagctggaatccccctgttgcagttgttattatatgtaatataatagcaattgcagacagcttggattctttctcacagatattccttttgttcaattagaaattctacataattctggccgagcacagtggatcacttgaggtcaggaattcaagaccagcctggccaacatggtgaaaccccgtctttacttaaaatacaaaaattagccaggcgtggtggcgggcacctgtaatcccagctactcgggaggcagaggttgcagtgatccaagatcacgccattgcactctagcctgggcgacaagaaagaaattccatctcaaaaaaaaaaaaaaaggaaaaagaaattctgcgtaaatctggccaggcatggtggctc

SEQ ID NO: 96309 - DNA, 1070 bp, Homo sapiens
ttagacaacagagtcattgatcttagggtatgcctcatttatttattaagtgaagcaattatgccgcattagagaggggcagggataccatacctgtctcaggcttataaagctaaatggtatttgcctgactgtaagtatgataatacaggaaacaatttccttttctgactgacccttcccctaaaaagaattgcaggcaacaggagcggttaaatactagttaacaggatattgactttctttgttttaaaatgacaaatgaatttgaagccagtaaatgatcttgcttccaggtgatatcttttttagacaagttattcagcaagtagaaacataacctttaatatcactacaaagttatgaaaaaaattacatgcacatttgagatcaaccaggtggagatgagtaattaatgcttcaatcctttgaatttgattggagcaccaaattaaaaatatagaagcagttggctctggtggtttatgcagtagtctcatgggtcttctgtttccctttctggtttggttgcaagtgaaagagagtttagtggtttcatcattgttgtagtaaaaccattgcatctttcttaatattttgaccacatcttccttttttacttaaatattctactcaagctcaaattttttgtcaccttaagagttcttcttggctattctaccatcatgtgagtctacccttattatatactcatgttattcctaattatttgctttttgtcttctaccttttccattttaatttgtatatgaaaagcaagcagtaatccaaagtcctcttgatactacctagaaacctcaggtttttcatgtatgttggccacaggagtgagacatcattctttatttatttgcccttgctagttgttcacacaagttattattggtttgtgcctctagaatttgacctgaggagtttttgggttttgggttgtattgttttgtttaaattcattgccaccattgaaaaatgggttttcacattaaaatctggatggcacttcttaaaaagaggagaatctggaacatgagctagcatgctagatagga

SEQ ID NO: 96310 - DNA, 1136 bp, Homo sapiens
cttagcctggtctcgaactcctgggttcaagtgattaacccaccacagcctccctaagtgctgagattataggtgtcagccacagcaccaacccctaaccatagcttttttgacatagctagaccgtaagccagtgcctacaccccagtcattacttattacattggtaggcatcttaaaatttacaaataatttttatatatgttaccttatttgactgttctaacaaccatagaggtaggcaaaaaatattattatccccattttaaacaaatcatcaaggtgaaaaaacctgtatcatcttgtttgatttcagcaagtagtttcaattaaagatgtatgcaaacattgcttcatgcttaagtcaactgtagattgttttttaagaaaaagatgcagattttgtgtgctttctactatttttggtaatctctcacttacagatttatgtgatcagtttggctgaaccccgtctgcccctgcagctggatgatgctgttcggcctgaggcagaaggagaagaggtaaaaattatacttatgaaatattatgcttccgctgtatatttagtttgcaaaacattgaaaacctgatgtactaagggtgtctgtgaattgattttgagctccattgttatttaaacttactcttaaaatcagcaattctcaaaccttttggtatcgagttgccttttacattattaaaaataattaagaaccctacaagcttttgtttttattggtatatatatcaatatttacagtattgggaattaaaacatttttaaatatttattactttattaaaaattatatatacattgcatacatgtttgcatatgtagtattatgtaaataatgaagctaataacattttatgaaaaaattacagttgtccaaagcaaaaaataattattgttaagagtgacattgtatttagcagtccattgccttaaccactcagctccctcatccttcggatgacattctgtttatataaccacaattctttgtgatttctggcttaatagacaactagattctcatattgcctctgcattcattctattgtgataatacacatcatagaatctttagcagactgctcagtatactcatgaagagtgaaaaacaaaa

SEQ ID NO: 96311 - DNA, 1050 bp, Homo sapiens
ttattaccttaaaatcttttcagttgaccgtcttctattatttaattccatcacataccagtaattgcatttattgaagccagtatttctcattataggaaatgctgatcttagtgattctcaaaaatagggagggaaatgttctttaataaataattaaaagactttttactacttttcccaattcggtactggttttattaccttttatgtccagagtattttataagtggtaactaaattatggcatctaaaaaatcatctcttcaaggaatctcacaaggtatgctacgtaatagcttattctaagtaggttaaatagactggctttatctcaagtggcttactgtattaaaaaagagtttaacatattcagctttactgctgaaacaccagaggagttctgacacctctgatgagatgattcaagttgggaattttttctcttgacagcatcaacaaagagagcattgtggatgtagaaggtgttgtgagaaaagtgaatcagaaaattggaagctgtacacagcaagacgttgagttacatgttcagaaggtaagttttttcaaaatataaaatcgcatatagaaatagatttgggttctaatagttttcatgtcaaatttatatgttcttactaattaatgtaaaatactgaggtttataaattagttactgaatcaattagcttttgttatataacaaatcaccccagtacttagtgacttgaaacaacaaacatttatttgcttacaattctgtgatgcacccaactgagatggctcatctgctccatgcaacattggctgggctcactgataaatctggcacatctctttctgtggcttcctctcatccagcaggctagcccagatatgttgatattcaggtaccaggagggttcccaaaggcaagagtgcgaaaccctaagaacagacacttttcaagcttctacttgtgtcacatctgctaaatattccactcgtcaaagtcacacagcaaaacttagatttaaggggtagagaaatagattctagcccttgatggga

SEQ ID NO: 96312 - DNA, 1391 bp, Homo sapiens
aacaatatgaaattattatttaaagattttgctgaatttctactaaggttggcaacaacagcaaaacatcaagatacatcagtgttactggggaaggtagtatgattcctggacatttgggaaactattactaaagggcctattattttcagttgttgttgtttttttgtttttttttttttcacagaaactataaagcaatctagcagctcatgagcttctaagaatgaaaatgtattatttcatagtgagctgatgatgcattctgagatatttaaatttagttctaatttgtcagtctgtaacagaactgtctagtgcaataatcattaaatgatcttattagctatgtgatggtagtctaattacttaaccttgtagagtctcagttttctcatctgtaaaatgttgataatacctaccgtgtaggcctttgtgaagcgcaaatgagatagtgtctacctaaagcacttcacacagaacctggaacataaaagggaattgctaaagaaataatagaaataatactttagggatttagttgttaaatctcttttcttttttctcttttttctttctttcttttttttttttttctgagatggagtctcgttctgtcacccaggcaggagtgcagtggcacgatctctgctcactgtaacctctgtctcctgggttcaagcaattcttctgcctcagcctccagagtagctggggctacagggccacgccaccacacccagctaatttttttgtatttttagtagagactgggtttcaccatgttggccacgctggtcttaaactcctgacctcaggtcatccacccaccccgacctcccagaagtgctgggattacaggcatgagccaccgtgcctgggctaaaatcactttcatttgagctataaaaataaaagtgtgtttgccaggcatggtggctcacgcctgtaatcccaccactttgggaagcagaggcaggtggatcacttgagcccaggagttcgagaccatcctgggcaacatgatgaaaccctgtctctacataaaatacagaaattagccgggcgtggtggtgcctgcctgtagtcccagctactcaggagtctgaagtgggagggtcacttgaacctaggagatgagtttgcagtgagttgatcccagtgattcttctctatatgctcaggaggactcgtcagagtcaaaacctgatactgggacccagcagcaagagataaactgctttttcccccgatttatgtctccatttatttgcaagatggtgacctctttgactggagttgtgtgctgttaaatattttttcacgtgtctcctatacagaaattataccttcacccttgattttcagatcatctacggtagccatttctc

SEQ ID NO: 96313 - DNA, 1050 bp, Homo sapiens
tggacattaaagcatgtgaactcatacacaacaaagtgggagaaacaatggtgtttatatgttaattccatgaagccctatatttaactctattccctctggccatataccaggtggaaaaaagcaaggactgtgctattaaaaatatcaaatcagatagttccagctggggtttcttaatcatttaaaaggcaaaatatgaggtcacttttaatatcttaagtagataacgatcttagcatttactttagatattaaatctgaagtgcttatcttttgccttactggctagacaatactactagcagtttctagctttggagtattttccttaaaagaaacattggaatttaatacggagccaactattttgcctcaaattgtctgtcttaggaatatccaattcatcaatagagtaatctaaaaagttgattcactaattggatttaagtgccacaggactcttcacacattattttaatcaatttgttggaaagatcaattttctcatggatgaatgcatataaaaatgaagcaattgaatgagttacataggaaggttggcacatctaattccctagaggttctaggaacaggttcttaattatatatctgaaatggtttgaggtttttaaatgaaatttgtctagaagcaggaagatgcaatacccatctatccaggcctgtatttctggatccccatcttatctaatatttaatagttgatcctgaagttgagatattatccctttattcttttaaaaaaaatttttttgtatgtgtgccattttaaagtaattaacagagtagtttgtgttagttttggttaagtgttataaagccagtttttttttaaaggaagtcctggaggcctttttgtattgactgttagagaggacagtgagtgtaaacacaagtttttaaagtttaaagttacagtgcccactataaaggactacaattaatgtgaaaagtagttttaaagttaaaatttatatatcgctgtttgtgcttatataatacttcccactctccccaaacatagaggta

SEQ ID NO: 96314 - DNA, 1111 bp, Homo sapiens
ctaaggtctcttagattctggattcacactctagtctctgtgtcatcctgcctctctgaaatagtgtgtaatggtgttagatcaaaaccctccacattatagctccatttagaatacagtttgttagctagacactgctcccaaggtattacgagtcaaaactaaagggaaaaaagtttagtttaaaaaatagaactgggccaggcgtggtgactcatgcctgtaatcccagcactttaggacactgaggtaggaggatcacttgagcccaagagttcaagaccaacctggtcaacatggcaaaaccctgtcgctacaaaaaaaaaaattaaataaataaataaaaattaaaaataaataaaaagtggatctgattataaagtaataaaaaatatttttatgtttgagtgataaattcctgctaaaaattccaaaggaggaatttatttttaaccattagtaacactaatgagtttgtctcttccactataaagcagtagctgccttctaaggaatcaccctattgttaaaaagcatgctctaaaaataagggggagggacagggagttggaacctagagagtttcatgttttcagtgacagttattcttcctgaataatctcaataagaaaaattttgatagttaaaaacatgaaacctaacaccactagaggcaaatctaataatcaattgcatctacttttgcttaggctttgggcttttttttcttatcagcactgccattaacacaacacaatacgttttgcacctttgtatcactctcttgagaagtaaggcacaaagtcactcaaaaaagcagctgtgtggtgtatgccactgatgttgaaaataaaaccacagactcagaatttaaaataagaatttatcttttactaagattgtggatgcaggaaagaatagaaaggatttggctggataactaatactgttccttaacacatctaattgcaggcgctttgttagacacttgtaccaactaaagtcctttcctagaattgctccatcaacagcaagggagaagagatcttggaacatttaggtatgggtgtccttttagattagctttttgtagagtgtgctaatgtactgt

SEQ ID NO: 96315 - DNA, 1043 bp, Homo sapiens
tactttcaaatggtctcccaaacagaacttagttcactaatgccctcataaaattaaagaacatctttttatcattattttattaaaggctttcatccaaatgggatgatatacgggcgatctttttttttttttttttttttttttttttttttttttttttgagacggagtttcactcttgttgcccaggctggagtgcaatggcgtggtctccgctcatcgcaacctcctacccggttcaagcaattctcctgcctcagcctccccagtagctgggattacaggcatatgccaccaccatgcccagctacttttgtatttttagtagagacgaggtttctccatgttggtcaggctggtcttgaactcccaacctcaggtgatccgcccgcctcagctgttcaaagtgctgggattacaggcatgagccaccgcagccggccatgggtgatctttcttttagacaagggaagaatataggtaatttagcctagattttttaattcctgaagtggaactccataaggatctagatgcagttcaggcttaactaaattgtgacttgatttttttttttttaagcaaaggacatgcagctatttttagtccctttaaaaaatggactttatataaagtagcaatgtgtaggaaaaggttgagctgttccaaattataaaccttgtcactggttatatgtaagtgaatggagccaattttatacaataggttcaacatgtggtacatagataactattattaaacttttggcactagcatgttaaggaatcgagcctgaataattaccagtaggtgggttaatggcttttgctatcttgcgaaaaaggaaaattcttatggctaagactcgttggcaaaaaatgatgagtttttaggttttgtagttggttaagataattttcttaggaacatgattttatgttccagatgggtcagtcagtttgtcctttctgtgtgatgtaacctatacttctaagatagttcagaaatcctgatccttcttggtaggagaagtctactttt

SEQ ID NO: 96316 - DNA, 1205 bp, Homo sapiens
tagattatgtctgtgttgacactttgtttgcaacctgtcttttttaacttgtgattgctatctgatttgcatttcaaaatactgtatgttgaaagtagtaactgtaagtctgcttgcatttttgctttcctttttctttcttcttttggttaaggcccattctaaatgtaaaatataatgctcagtttaaaaaacaaaatcttgtgatgttttacaaaacaatctgatgtgtaaagtggtcttggagagattaacccattttttatgaagaagtaatttcccagaatttgatcagagacttaagaaggatctgctttggaggaaaaagggatgtcacaaggatacataataacgaaatatattatgaataatgtttttcagaaggttaagaataaggagtaacagttctttatcaaagaagaaggaataaagaggcccaggatatgtaaaaataaaactggttatagggcttgaagaaaatgatctttaatagacaatataagttatttggagtaaaaaaaaatgcgagactcataaaatatgaaggactaggaaggtgataaaggaaaaatgaagaacgtagaacatgaaaggcactagcctgtcaatttaaatgctctttaaaatgtactttggtaggaagaaactctgtagatggaccaccccatagtgtttgtgtccttgtttttaagcactgtgttagcacttttgtggttgcagtattgaaacttccatagtagtacagtgcctttgcatgtggaatatactaactattgaatgaatgttgaaagtgatctcaagttacttgaaatttgtttaataaatcaatgcaatgacaaaataattttcttgatttagaagtttttttgaaattggtgatttgcctgtgttcttataacaagttgaaagcatttcttgttactcatcataggaacttgagtttctttaagggttgtcagttgagtgtgagtattttgtctgtggaagccaaatggatagtatacacatgcatgcgtgcctgatgagtatagtaaattttggcccacttttaaagtagagagcattttccttctttgtaaaacctgaagttgcgtgtccttaatacatttgtgttctttctgtctttttcagggaaacagtgcttcttagtcctacgtcagcagcagtttaatgtccaggctcttgtggcggtgggagaccatgca

SEQ ID NO: 96317 - DNA, 1054 bp, Homo sapiens
atttccgtctggctccctaatttttctataaggagttctgagtttgtggtaagcaacatgagaagtaaggtcatcttagaatactaaatgaggaagagtcactgaaatattaatagtactaattatgaatgcaacttttttgtccttcacacaatttaatctccttctgttgccctcaggcttcattgtgtgactgtatctctctactctggccagggttatctttttctttaaattgttcagtaagcgccttaaacatgtctggttttattttggtgtaaacacaaaatccagcaccctcctgctctaaaggagaggattccaacaggtagctgtaaagtgacagaaacttaattgtttcatacagatcttaagttaccttgtaaaaactagggcaattatttttgtgtactcttaatctgcttaattacataaactatcagtgtacccttacagatagtataggtctagatacaaggtagacattgtggcagagttatgccattttatagctagaagaatcttagatcattttagaggtaaagtaagattgaaataaaggccacttatctatttaataagtatattttgttaacagattggaccctaggtcttctgtttcctgttcctaactctaatctgtaacaagaaatttgatattattatattgtcagtgtcaaactcctgtaacctggtatcctgaatctggtttttagaaacaggaagctggtgaattttttgatgatgttttacaaaaggaaagttgtagttagcttatacccagcatctccagtttctaaaaactgtggacatctggtgctcagaaagcttacccaaaacgttggttctctttgaacatttcttcctgtaataggaagttaataaaactgtggtacttcatcctactcccttcacagaggaaatttatgtccctgctttgaagtagtttcatctttttgaagaaggtagttaagatgtgttgtacatatgtgtaaattttatctgagaatgttattaagtatggtaaatccatctaggagtggtgatcttcaaa

SEQ ID NO: 96318 - DNA, 1049 bp, Homo sapiens
aatggcgttggaagcttggccctacttccagcattgccgcctactggttgggttactccagcaagtcactccccttccctgggcctcagtgtctctactgtagcattcccaggtctggaattccatccactttagcaaggatggacgcgccacagagagacgcgttcctagcccgcgcttcccacctgtcttcaggcgcatcccgcttccctcaaacttaggaaatgcctctgggaggtcctgtccggctccggactcactaccgaccacccgcaaacagcagggtcccctgggcttcccaagccgcgcacctctccgccccgcccctgcgccctccttcctcgcgtctgcccctctcccccaccccgccttctccctccccgccccagcggcgcatgcgccgcgctcggagcgtgtttttataaaagtccggccgcggccagaaacttcagtttgttggctgcggcagcaggtagcaaagtgacgccgagggcctgagtgctccagtagccaccgcatctggagaaccagcggttaccatggaggggatcagtgtaagtccagtttcaacctgctttgtcataaatgtacaaacgtttgaacttagagcgcagcccctctccgagcgggcagaagcggccaggacattggaggtacccgtactccaaaaaagggtcaccgaaaggagttttcttgaccatgcctatatagtgcgggtgggtggggggggagcaggattggaatctttttctctgtgagtcgaggagaaacgactggaaagagcgttccagtggctgcatgtgtctcccccttgagtcccgccgcgcgcggcggcttgcacgctgtttgcaaacgtaagaacattctgtgcacaagtgcagagaaggcgtgcgcgctgcctcgggactcagaccaccggtctcttccttggggaagcggggatgtcttggagcgagttacattgtctgaatttagaggcggagggcggcgtgcctgggctgagttcccaggaggagattgcgcccgctttaacttcggggttaagcgcc

SEQ ID NO: 96319 - DNA, 1132 bp, Homo sapiens
aggtgaagaaggaaagagagagagagaatatatataacgcttttaggtgttacctttgatcagggcgattgaccaaggtcagctttcttcaacgtgtattcagaggagggctcatgtcctataaggtattcattggtgttttacgggggaaatttttaaaaagtggggcagggaaatccactggtcccacccatttgggaagtgtttggttcagcaggtttctctggtgtagctcctctcagagcctttcgtaaactggagtgcattatggagctccaagatggggccatagtatacaatttctccttacattattttattgagatattgtttattcaaggacaagcagtctgagaaatggagtttttgaaataatgatccaggcctttcctgcaacactgagctgtttctttccttttcttttttaaccatgcaacaaaacctttattagcattttgaacaggttcagctattactgaaacttgtaatttctaaacttaagttggggcaaatggctatacggcagagtaatgccatcactgggcactgcgaatgcaagactggagaattaacagccacccctcaggtgcaggaccaggtgcagggttgactctttctggatgttgtagtcagaaagagtgcggccatcttccagctgcttgcctgcaaagatgagcctctgctggtcggggctgggggtgggggggtgccttctttatcctggatcttggccttcacattttccatggtgtcactgggctccacttccagggtgatggtcttgccagtcagggtcttcacgaagatctgcataccacctctcagacacaggaccaggtgcagggtctactctttctggatgttatagtcagaatgagtgcagtcatcttccacctgcttgactgcaaagatgagcctctgctggtccggggtaatgccttccttatcctggatcttggccttcacattttcgatggtgtccctgggctccacttcaagggcaatggtcttgctggtaagggtcttcacgaagatctgcattttgacctgttagcggatatgacgaggctccgaaacaccagtcatgtccagccacagggacaccaccacatactcacccaacaaagccagt

SEQ ID NO: 96320 - DNA, 1024 bp, Homo sapiens
actgttgtaatggcagatctatttttatactagttactgtcttgataaaatgtggaaatatatgacttatcctatatatataattgcattactaatcacacaagaatgctagaacactgcttggtctaaactatgcaattttgaaaacctcccagtgaaattaaaaatttcttacatgaaacttctaaaaacctaaattataaacctcgttgccattttcgctttgtagaaaatcataaagaagctttataaagttgcactataaaatattttaggtgaatcaaattcaagcatcaaaggtctcctaccttaacatagcattttgtccatcacttcttgtacacgaaacctgccgggtttgataacctatctctattgcccaagacttcgaatgatgatgtgctttgtaactttgatgtttaaaggtgactcgctcatttgaatcagagttaaaatccagaacagttcttccgcttggattaatttctttaagatgaggcagtctgcatttactccatggtccaaccttaaggctaaatgtatattcctcttccccaagaggacaggaaatgggagcatcacaggctcttgactcagtcagatttggacattgcaaaccaccaaagagagggggagctatgaccgcgcgagttctatgctgcaatttcttcccacatcccttgctacagttggaccatggtaagaactcagatactacacaatcccggggacaaggaatgaggcaagcctgttctgtaggaggctgaagggcaaagtgttcgcatatttcatttgcaaccacagttcggttcagcttctgaatgcagcgcaccatccggtgctgcagtccatgctgagccgtcacacactctgcagtccgaggcttgacttcaccgcgagcgtaaggaacaagcacacagtggtgccagtcagaaacctcccactgaaagaggtcactgtgccagtcacaaactcggaaacaacttctttcctttggaggcctgttgctctcaccacagttaga

SEQ ID NO: 96321 - DNA, 1033 bp, Homo sapiens
aaagtggcagcagatggtccacagagctaccttcacttgcaggatactgaggagattcccctgcagaaaccctaagagctggtcccagcctctgtaaatatgcctctggtgacactgagctcattactcaccattgctaggcagctataatggaacatgtattctaatgttaggccaacatctgtcatctttttatttctacctatttgccttctggaacaacacagaaataactacctctccttctcaaagaatccttagttaagtatatttaatgaactctgatgtaataaagaccactttggtgtatcgaattttgcttgttttttactaaacttactcatctcaatatggtgttattagcagctccactatcaccctcctctaggaatatctctacgatgaaggagtgaaaagctgtttatccctaaagagctgtctcctatcttctttgtgatttcacatatctcctttttcagaaactctacttctctctccttccaatccattctgatgaataaattctatgctgcttagctgtctgaatgtgatcaagattagaattacagttgcagggaaaaccagataagtatgtactatatatctaacttaaactcactttgtgccagagggaaatgtgtgtgggctttatgttttcgttgtacaggtgatctctcttgctcttagctcacactaaggaaagaaaaggcaacatgcttagtgtatggttaggaataggtttcatgagtctagcccactgagttggcacaattgcctctaatgctgcattgagaataaatctcaggccaagttggactttaccaaaaaataacatcttaactattgaaagttattgcatagtctggtacagggcagggtcaatgtagttggtacatgtgacatgcatttaccaagattcataaagcagaataagcactggtttggagtcctgcaactgaagttcaaacttctggtatcagaaattactagtttagtgactttaaactatcaacatctctgcctacaattttct

SEQ ID NO: 96322 - DNA, 2304 bp, Homo sapiens
ctccatggggcacttcatctacctggaaagttctcgatttccaactggagcctgtatactgctggttgtgtctcagcagttattacagctctgggcttacaacgggagcttagcaaaagttccaccctggcttcctagactgctacagctccaagaaaaatcctgtgcgcacaaacggccgccgcctttggcgtctcccgcggattagaccagttaggaggtctcagtaggcttttaggcaggacaagttttacgcctggccaaataagggtcagactaagcaaggcgcctccgtgcgcctagccagagcggtgccggctgcggaacctgccccgccgggagcctagtgccatgcagcagcggcggcggtggcggcttcccaagcgcggcggcaaatccgggcccgcccggaagtgcccggcgctgtaggagggagcaagggcccaggagccgccgccgccgccgccgcgcgcacgcgccctcgcgggctggagccggggctggagtcgtaactcggaagccggagcccagacgggcccgcggcgggggggtgggggctgcgcgggggcgggagtggcggaggtggccgcccctggcggcgggtttgtttatcccggggaagaagtttaggagcgggagatagggaaggagggcgggtcggggaggagggatgcggttcggcggaggcggccgccacagggacttgccgccatcacccctgctgccaccaccgcagcctcgggctcccagggcggacacggccaccgcctcagcgggagaggagtctccaccaggactgaccgctgccgcccagcacgtccaggtaggcgccccttcccctccccccagtccccgcggcagccccaggcgcttgctcccctcccccggctctccgtagaccggcggcctcctgctcgcgcctcactgcgccctctgctctctgggtcccggacccctgctcgggcggcgagctccggcctgctctggggactacctcccacgcccccggaccgcccttccctcgcgcggcggcaccactttccccggggttgcccccaatccctccttgatttcccagcctccaccttccaggatcccctttagttttacccccgggcctcgccccttcttttcctctggcttctctcctcctctatacctgtatacctccacacctgcccctttttacctgagtgctgcccaaaggcagaaactgcatgctctgccaccgcgcagcgtccactttcatacctcctcatcccaaatacagacacttgaaactctcgtccctgttagcccattttaggcagagttctcagcttcgcagaccgctcactacctccagtccggtggtcatgcctttaacctctctttaacctgctttctaatacatttttgctcacttataccagagtacatcaagctaaccgcgcggttcggggtccaagtcttcaaagagcccacttgtattcctgctgctctcctttttcctaattctttttgagtcaatgtatttgtatattgattcaacataaaagaaaagggaaggtagcattttctctctcaaagcagtcacacaacccagtagaaataagattcaccatctgcttatcctaactttcgcttgtctctttcctgactgaactctgtcattcagtgattctttccaggcttctgatgctttgtctatttttgaataatcttgggcctagtttgacccattgtggtactcactttcccacttgcaattgaatccactgtttcttggactagaaactgacagaggtaaaaggttcataccttgaaaaattacatctctcctgccacgatgagattggtggaatatttcaaattaccatttcatcattcttgtgagaaatgttgcctagtggttaagaactcttctctagagctcagactagtatatagttgccagggtgtaaacccttgctctgccatctaccagctttggctttggggaagttacttaatatttcttcgcctcagtatacttacagctgtaaaatggggttatgatatgacatcacaggatggtgctagtaattgcacaagtaaatacaagtaaagtacttaaaacagtacctggcacagggcaaatatctgataaatgctatcatcacttcttggtttgacttgatctggcttgtgggtagattaattctaagacaggaaggtgggaatggaaagctactttcttattctttgacatttaacaaccttttttgatatagatagcatgtataatttgttattgtataaattaattccttctgatttgaaaac

SEQ ID NO: 96323 - DNA, 1027 bp, Homo sapiens
aatgtatacttttctattccataatgttttataaaagactaattatgcataggtaatttctgattccttctgtcttttaagagctttaagccattgctgaaatttgcaaaactttgtaggccagtgctcaagtaaatttgtttttagagactgtagtgaacttgaaggtactgctttggcattaagagtatctggatgatcctgttccttttatcgtgtttgtgttgcttaaaaatatatacatacctgcgtacatacatgtacacagacatacatttgggtcacaacatttggtttcagctatttgtaatttttaccaaaaaaggcatggtcaggttttgctattttgtttattcacttaagcacattggaagttgtagaagattttatctggaggacctctgagagctagttcaaattatgaggttagaggctgtctttgtgttgttcttccttgtttctacatggcctacattagtgtaggttcccccaaaatactcaaatgggtcaatgaataagagagaaagagagtgaacaaatgaatgaatgattttttaaaaaaagaagaggctgtgcaactttccgttgtgagtagtcacctaactgctagtctggcccattgtagtttactaccctgtttatatattactataatttgaaatcttacctcttataactgtagttataaactgtgatgctaactgaataaagttgatttttaaaaatcctaatactgtataagactattaacataggtacactgggcttcgtcttttcttatatgccttgtttatacaatattattaatacataatagaaaaaattggacttgtcacaactagcatgccatataaatgtagttgtttgcaaatgatgattgtaaaaaatggtttccagagatccagaatatctttaatatgttatgctataggaaaagtaatcaggttctgcagtgacctgtagttggtattttaaaagaaggtaattgcagtgtgaggaaattatttggtgatgttgagtaaatctt

SEQ ID NO: 96324 - DNA, 1833 bp, Homo sapiens
tactttgtgaaagtgtttttcttgctgtcccttttttattaggtgagtgtggtccaagattcagtaaacatatcaggacatactaatacaaatactttgaaggtgcctgagtgtcgtctagcagaagatttaggtaatctctgggaaaacacaagatttacagactgcagttttttcgtgagaggacaagaatttaaagctcataaatctgtgcttgcaggtactttctagttatggggtaatatagtacatttaaaaaaatgcatttatgcataaaataatgatacataatcttgttacagctcgatctccagtttttaacgccatgtttgaacatgaaatggaagaaagcaaaaaggtaaacatggcttaaaggctaatattgaatttatataaacgtaaagtagttgggtgtatgttttaaaagtaatagtacaatgttctcattgtcatactgtgataagcagggaaaatttttacaaacaggaaaaaaatgtgttctataatagaacaatagatgtagctcagtgtggatgtgcagtcaatattccagagaacagctattttttatgcccttctggtaggtaaattggatagttgttatccaaaaggatagttatccaaaggactattctggtccatagctatttgagaagtctctgttcaaggtatatattctccctttgtaagactttatggattgatttttggaatctgttttctagcaacaaaaataacatagatgacatcagtattattgtataccaactgtaatcaggatgttacctacttgacttccccagatgtttctcttttacttgtcatcatgaaatgtaattatgttagagatcagaggttgattctttgctgtttgcataacttgtgaaccgtagggctccagctggacaactccagagttttttcatgtggctcaattttattctttctgcagaactagatgctgcaataaaataactgctttctttctccaagttttggtttggggagatgctatgatcagccttctgatcacttccaagttgggagacatcaatgatgtcatatactattgacatcaaggggtcagaaaaatttgctgtcatttagttagatatttagctttattgatctcagcaaagaaactaaatacaaaaacacgcagtaaaaaagcactctttggacttgactatttttcaggtaagcaaggaagtgccagtatatgataatacatgccatttttgcaaatgggagaattctgaggtagtgggctttattgttacctctagtaccttgccctacttttgcttaattctgggaattaagaactgtttgttacaggatcttaggtgttgtattaggacctagggattcaacaaagaaagggttaatagccagtgtcctttagaatactggtcagaaacttaacacagatgtattttatttggcttatagttttctgtttgtttacttgttttttttttttaactttttaattgaaaaattggggctcctttttccacatggtggtgcttggcttggtctgaatatcaggatatgggctctccagctggtcatggttcccacctctccgatagtgtatgcttttcctcttggacttgtccacttcactttgccgaagtacttaatgaagtttacctacctcaattttaaagtagaatttagaaatatctgtgtatgtatatttgagttatacactattttagtgtagatttagggcttttaaattactgtcaaagattcactttggttcatttgtgtgtactttttttttttttaacatttttgtgttgtttttcgatatcagaatcgagt

SEQ ID NO: 96325 - DNA, 3799 bp, Homo sapiens
ttaataaatgaaaaaggtgtaattggtatctatgtgattctaaacaactaattgaaattttgaacacaatgacacactggtattaggctgatgcaaaagtaattgcagattttggcattacttttaatggcaaaaaccacaattacttttgcaccaatctaataatttgatgtttgccaacttaaaaaattgttttgttggtatcagctactatttagttcagcagacattactctagcatcttctgtgtttcaagtacaatgctagggtgctgcatataaaaaaaatttcaagggaaaattcttggtcttgggaaagttatctaatagagatagatatataaatatatcatttcattataatatggtaagtaatacaatagaagagaatatgtacaagcacttgactaaccctggaaatttagaaatggcttcctggatatagctgagtcttaaaacacaaataggagttagcagaagtaagaaggaagtagcaagcattgcagacagaagggacagcatgaaccaaagtatagaagcgtaaagtagtagttgatcattcatttgacagatacttatcctttattatccagtaaattcccaagtcacagtgcacagtatagagaatacagtggtgagcatgacatatattttccctgccttcacggagtttatggtctagcagcagattaaacagctaattgcagtaaagcgtgatgatagggaatatgtagcatacccataggagcatatagcagagacttaacctaatctaggaatcagagcacaaaactaaatgccggaaatattgtagaggttaccttggtgaagaagagggaagagaggaagaaaagtacaccccagaaaaaggaaatgagatgcgcaaagttttaacaatgagaaagagcagtatagtgtgtgtgtgtgtgtgtgtgtgtgtgtgtgtgtgtgtgtgtgtgtgtgtgtgtgtgtgtgttgcgggcggggaggtagttaatgagaagaagctggagaaagtaggcagagatcagaccctgaaaggccatgtaaaataacattagaatttttagatattcagagtagtaggtgtccagtaaagggttttcacccagagtgggacatgattagttttgcatttttaacaatctctgcatgcagggtggagaacgaattgtggggaggttgcggtggcaatagtagttgagaaacaaggttgaatacaggtagaccagttggaaagttactagagtagttcaggcaagagatgaacggtggaaattagacttgattggtgacagtggggctagagagaaaagaaagtaagaaatattttgaagggagaatctaatatttggatattatttggatggtagatggcataaagtagagaattgaggcaaggaagggtaactagatttgttgcttaagcatttatttacggttattgtttggtgagagcatagtgtacatagggtacaataagcagttcaatatcagagtataaaatgccagatcatggaagtgggaggtaggaagtggggggtagagtaagaaaccaaacataatatgatgctgtatttctctttctaaaaaacttggatatgggcagtggggaacaatgaagagggcctcatatagtcatatttgtgttaccaagggaacattatggaagcttggtttaagaggagcaggaaactagaagaccacttaggagtctgttgtcataatccaaacgtgagatgatgtgggccttaaactgggattcaggacatctttgaagcctttcaaaccttaaaataaggttttgatgattggagaggagagtctagggtgactgccagatttccagcttgcatcactggatgatggtggaagctttaggtgactggaaaggtaggaggaagaatttggggttggggagagggatgatgagctctcatctgacaatcctgaatttatgggtcttgaggcacatccaagtgaaaaaaacaagtggctgcgaatgaaccttgtgtggaaccctagaatttagcaaatcggtagttaacatcattgaatttcatagttaaaattgtgaagagtggatgagatagaattagtaatgcatgttaaggggggagagtagagtccaatatttgtaactcaagagaaaatctgccttataagaggcatgtaaaagaagagaaagggactcttgaaagagctggtacagaaattgtaacaatgagagttgaactatgaagacccatgtcacatactttaagggagccgaacttccagaaaaatttaatagtttcagttgccacagaagataccagtaagataaagatggtattttaataaaagcaaatgatttgaatacataggtaaaaagtgttcaaatattttgaaatttgcaagtttttaagaaattaacagtgcaatagtgcattttgaaaagtattctttagtaaatatcttttaattctatttttcagccaagcaaccgacataatggaaacatcagggtggaagtccatgattcagtctcaccctcatttagtagcagaagcctttcgagcactagcatctgcacagtgtccacagtttggcattccacgcaaacggctaaaacagtcctgaaatcttccatgaacagttgaaaaatggaattgactttcactcctccaggtccagaaggattctaatacacaaaccataagcaagagttgtttctgttattttgtccacagaacagaagctgaaaaagcatattgcttgcatttcaggtggataatttatggtttattcttcagctttaaattagactgattaattcacttcaaggccttaaattatcttcaatgacttgtcttgttcatataatactttaatttttttttattgtgccttgtcattttgaccaaggctatgcaggattgcactagctccataatgcagtaatattgataactgaagatactaagtttcaaaaggatcttccattattttgcaaaaagaaaaatgaattttatagggtttgtcctatgctatctcaaagtttaagttctctttaaaagcacttgtattggagattaccagtaatatctccaatctaagttctataaatatgggagaaccctcttaccttcaaggtaagttatggcaatacactgcttcaattctaatttatttttcatttcagggggcaaatatgcaatgagttggcctagatttttagtgacatttatgatgtttgtcttgtatgttaactgtccaacaaactgtgggtttattctaagtttacaattattgagaactgattgaggttaagatttcatgaagaaagcatgtattgtgtggaagtaatttttttttaatttatactgacctacatttatacgaagaattctgtacatgttaaaagtaaggatgaccaaatgcaaatttaatgagtgggccaattaagaaagatacatatgcacttttactgtgtaacttttgtatgctgaatggtacatatatttttttgcttttgagggaattaataaggtataattaattgtgtcttaacttttcaaagaaatttttagatggaggcaactgggatgtttgtgataatagatgagaaagacatccttgattgtagttaaattggtttggattacagatattcattattgaattgactcctattttctcacactttggaaaagacacctgaacaataaatgaatcctggatagtctactctccttcaaacaattaactgatacttgcctttgggagatgcatacaaaaggagagaacccttagactat

SEQ ID NO: 96326 - DNA, 2766 bp, Homo sapiens
gaaaaagtgtgtcactggaaaaaaacgcatatacctatgtttgcaaacataactattcttcagattaaaatttgtataatttgtttatttaatgtttgaattcaggacaaaagaaaaaatgaagcttgaggtgttttcaaatagaccttatttttgctatctctttgttaggtgttaactgaagcaattcgaatatgtccagattcatttggattcatatttacattgaaaaaactcaactaagcatttgttatccacaacaacctagagtttaaaaagatcgtattttcacctgtcttcattactttctatgtagtttcattctttgtcgtggtaacttaaatttgaaattggaagaatctcttgggatagaagaaagattcttacctggtgatggaacttcatacttcatcctgtgtaagagtattatgggaagtagaaattcacttccttaaatccatcgtaagattgagcctcaagtttgcaatatacaattttaaaaatacacatacatacatacatatgtatacatttccagttttaagattttgcgagggtcttataagaaaacaaaaattccctcaggctatagaattatgttgtcatatatcagaaaagtactgatgtatccatttatatccaatgcgcaccacaccggcacattgtgatttaattcaccgcttgaatctatatttctaaccacagtgacttcagtaaaaataccgtataatgaacatttcagcttcttcttacttactcgagagtttattgcaaatcttaaggattttattataaagattttttttttagtttggtagcacattttgtaccaaaaatgtcaaacactgtgctgtaagaatatccatgtttgtagaaatgtccacttttcagataatataatgcctaccattatactaacagaatcatatggtagttgatttatttttttatttattatgtatatttttggtattgtgggttcttgaggcaatgataaaaacacttaatgtattctgacatgagtgctctaatagcctccttctcctcatttttaaactgcatacattactttcaaaataggtatagatactctgtcccgccttttgagctattagcctgttcctgtttccctttgtcacctaagcaaggctttttctgagaaggtagtgaatggtttcaaatgttgcatactataagaataatcattgggtaactgttgtttagaccaacacttagaaatactatatttgtgccttttcatttttaattttaatgtgtgttgatatttggagcacaaataatgaaggtgccataatatggcttgccaatgttacctccttgaatagtcatgtgtcattgtcttgaattggtaattggagaaccttgcatgaaatatgtgatcgtgtgtgtgtgtgtgtatgcgcgtgtgtgtctgtgtgtttgtgtacatacctgtatttgcttggggcttgtgtgtggtatgttacaaagagtgaatttctggaaatagaaatcagttaaatgttgaaagttcaggttagcagaaatatttcatttaaatatgctttactttggaggacaattgattaacagaggaaatgataattttcaaaaatgtgatcaatttactgcatgatgaaatgtgaaaacagtgcctttttaggacatcaattataataaaattgttttaaaatattaacaaagatctcaaaaagttgtcatgaacattattcatttatttttaaactggatctaaataagagcttagatggccaaaattagaattaataatatacccatttaaattttgttcataaatttaaaatcttaatcagaattctttataaaatgtgggtcatagatatgacccagtgttactaaaatagaacagggattgtgaaaatccagctcaacatacttaagtatacttggcttagagccaagtatacttgaagaggtgaattattctgacttggacatgcatgctctttgatggataaaataaaaatattcaatttattcttacaaaagaaggtgggtgggtgagtgggttcgttttagtgttctcagattataaagacagctataaagacagcactttccgcacacaaagtgtattttacaaaccttttttatacaaattaatgagctctactttatttaagtgttcatggaatgatgtaaattttaggtccagttgaacaaatattgagtgcctatcatatgcaagactaactccttactaggaatgaaatcacacagtgtcttctgtttgcagtatgtgaactttatgtttgaaaagaaattattatatttaaatttttttgttgtcagagtttatcattgtatactgtaacccagtaaattttgcattcagttttaaaaaatgaagatgtaacttacctgagtctcatttttgaaaatgaaattctgcaaaaattatttaaaaattagttcttggggaaattgattttcaagattcaagtgtataaaaacttatattgaacttttcagcctcgtttttaattagctgatgttaatgataagatacataatacatgtatcttgttgctgaaaatattttttgcatttcaacacattgagttaaaataaagttgttactacttattcaagattaattggcttatcttgtgtttatttgaagaatacatactcttctttttcaggttggtatgatgctttgcaaaagagccatgtatttgatacggtaaatcatgcatagtaattgtcttttctacatagggg

SEQ ID NO: 96327 - DNA, 1010 bp, Homo sapiens
cattcttttccctgttagggccttagcatatgttgtttattctacttgccatgctctttatactgctctcctcattcttcagttttagtataaatatcactcctcaaagtgcttttttctgatcaccttctctaagtaggtcagtcacctgctattctctctcatagcaatttttttcaaaatattttatgagtcataattatatatttatgcacttatttagtctggctcctccactggaccataagccccacgaggatagataatacatctgtttctcttgtgacttatcacctatccagtgcctagcatatggtaggcactcaataaatatctgtgaaatgaatgactgaaacaatagtattatttctttttttttttttttttttagaattcttttctggacagactgggatgcaaattttcctcgcattgaatctgcctctatgagtggtgctgggagaaaaaccatctataaagacatgaaaactggggcttggcctaatggactaactgtggaccactttgagaaaaggatagtgtggacagacgccaggtttaaaaaatcatctcttttctgtatttttttttttacttagataatatttacaacattggaaagtgtcctaacatgtcagtatcatgtatacatatattaaaattggaggtgtattttttttttgcttgccccaaatcagatacagacccataaaaatatttataaaataccttttttgtcatttagctgagttacatgattatgtctctggactagttgaatgagttttgacaaactactcatgtatttatctttctgtaggtcagatgctatttattcagccctctatgatggaacaaacatgatagaaatcatccgaggtcatgaatacctttcccatccctttgctgtgtctctatatgggagtgaagtctactggacagactggaggaccaacacattgtccaaagccaataagtggacagggcagaatgtcagtgtgattcagaaa

SEQ ID NO: 96328 - DNA, 1043 bp, Homo sapiens
tgttggtggggaaacagtgagaggtaattgaatcatgggggcaggtctttcttgtgctgttctgcgcatgtctcatgagacctgatggttttataaagaggagttccctgacacaagttctccctctttgcctgccaccacccatgtaagatgtgacttgctcctctttgctttctgccatgattgtgaggcctccccagccgtgtggaactgtaagtctattaaacctctttttccttataaactacccagtcttgggtatgtctttatcagcagtatgcaaacaaactaatacaccaataatgatgttatacaatgagagatggatgcatgccttatttttggtgcttctgtaattataacattattaaaattattattaaagtaatagagaaacttccatacgagggcagattaaagtctatagacttttagggggaaataaaactttacatatatcataaacaatatgattctgatatttacaaatttatttacaagtataggaggattagaaacacaattttaaagtgataactccaagaagttactaaaactgaaaactactaaaagaaaaaacttatgagtactgtagatggtaactttattcaattccatctataacaagttcatttagtctgagagtgaaggaagagttacataagcttatgaatactggattcatagaagactttaaaaatatttttggctaggtaacactttcacataattcagcaatcaaaaagcataaaaaaggaataaagtgagaaatgtttttcttctctttatctcaatagtaggattctttaaaatggaaagtagaatattcggagtctatcattgctaatgaagatgaggtatctgcaacacatgtacattttaataaagtgtgagggtaatgactggccattgtattaccataatgaaacatcatcattaacagttggccaatgtaaagaggacctgcagcttcattataacatctgagagattgggttcttaggcccgtttcccgggagtccacgttacctatggaagagtca

SEQ ID NO: 96329 - DNA, 1050 bp, Homo sapiens
cacaaacctgtggcggcttcagatctccaatccctgccaccaccccaactcaaattaaatacagattcctagagacgttatgatggttacacatgtcctcggcatcacatgtaggagactgttcaaaaaaaatatgtggcctgttgtataaccgcactcatgtatcccatatgtggtgccacattgaatttccggttgaatccgtttttatcctttgtactggatgacatggtgcctgaattctttcttttcgccgacacgatggcagccaaactgcagcttcaaacgctcacacttggctgggtttctacctaggttgccaggttatcatcggagccttcttgtgtcctcaaagggccacgaggcctgaaaggaggatcagaatgctttgggattaattgggcagccatcgcagaattgtttgtgggcaaagggctgctttagcacttttcttttagcaaattaatgactctcaggcacagggggttttaagtgaaggtattaataagaggtctggcaggtattcccatgattcacagagttacatttgcatttaattaatcttaaagttgcaagataaacagctgtaattcggacaaacatgacaaacacagtgaagccaactatcccataaaatgaacactgacatacttgttttaatttttttcccagcgtaaaaatagaaaaatcaaaatactcctaacaaaaccagtgattttgatagaaatatttctccaatatacttgcatccacctacaaatataaccttttcaagataaatcgcttatgatttcaatagtcaaactgctgtgtttgttgatgtaaagatgttttgaatggctagatggtaaaataaattcttaataaagtacccactgcaatttttaattagcatattcatttacatatagatgtatacatctacctatgtgtttctcactgaacgttttccttgtgacagagacaacaaatacaattgtttcttttccggatgaacaaggatctgttttgcaaatgtttgtaagatattatgacatttccaagattttc

SEQ ID NO: 96330 - DNA, 1074 bp, Homo sapiens
aaaaaagcaagttttcaaataacattcttcattgttagcatacacatcccataatgatggatttttataagcaggtcagtgttgctgcaattgcttacagattttttttaatgatacacacagaaaaatcagggactgaaagtcacaccaaattatttaaacaattgactagttaataatatgcaactgttgtacgggtacataaggctatagtaccagttctttgaaaaaaatctcatcactaagtatatcacatatgcattgtgttacattagaataatgtattttaatcacccaaaggagatgtctaaacagcacaactacacagtcttatttagcattaaacatccttgtgagctgaggtaaccttataaaatcatgcttaaataatgtaaaacacgaggcggcacagagcaatatgcatttttaattagtaaagtgactaatatcgagtgtgtgctttgaggtttttgtttcattaaaaatgtatctgtttttcctgcagctgaatatctgtattctacacctgaacagctttcaaaaaggctccagaatttctgcaagagaccagatattataagaaaacatctctataaggtagttattgagaagagatttacatggtataaatgccatattgaagtacaaagaaaaatcttaaaaaaaaacatttaattaacatactaatgtttaaaggaaacatgctagggagggatattagttgttacactaacaaggattaattaaactggatgccagttgtattaacctaggtcttatgaaatacgtgcacttaatgcacagtacatgcttttttaaaatttactgttttctaagatgactgtcctttacatttagcccctagaggcttataaaaatgaacctgaattaatgtaactcattagtttaaaaggaagtaaaggaaagattctacaattatactaatgaggataagcctttcttcccatcataatgaaatctttagtcctcaaaaattcaggtgaatgacattagtgaagtttggtgttcatttttgaactacttgaaaggtgatttttaagaattgaatatttc

SEQ ID NO: 96331 - DNA, 1041 bp, Homo sapiens
tcatttacttagtgttttgcaatccttaatgtgcacagctggcagctgaatgcaggtttgatactaacagtttagacatctttagatgtagcagatggaaaattttacacaaataaagtaggagaaagtgtgcaattaggtttttatctgcagttatgtgatgcatcctctgttttagtttagaacatcaccttagtgggtggtcatgatcttttcttgtatccaggccctaccttcttgacaccacatttgatgttggctaaatgcccaagtaccaaacttttgtttttgttgagtgtgattgaaatagggaatgcaacaatcagcaaagcaaaaggcataccatcagtgagattgtaacagtccagtacattatggttacattccttgctagttaagtcactatggtaaaatccttggcaggatttttttcaatagtttattcatgatgttcattattatgagttgtaaagagtatgagaatttcatttttaaaatgtcttatggaatgtatcactttcttagatcttgtagacatgctgtggaaaccataacataaaatatgagttacttacaataactaattttaatcccatctgctaagtatgacaacattagcatttccacttaattaaaaacacccttaaagcagcaatgttttaatcactccattttatttactctcctccggtgtcacttataattgtaactttttattttttaataatgagggattttttttctccttgcatcacacaaaaaagtgctgtcgataattagcagtcttctgttattagtagactcaggtgtcacaactgtgtctcatcctcattacagtaaaaaatttcacctatcagattcattattgctagataatgcgactgagagcctttgcaggccctccagaaaagtaattcagccaagcaaaattatcagctaattatatttagaatcaaaagcccaacaactatttgcagataaattgtatgaattgaagtgaatagatctgaatattaagattcatagatttggcagatgatt

SEQ ID NO: 96332 - DNA, 1029 bp, Homo sapiens
ggctccccaaccagcagtagaccatgaaaaaaattgatactgtaggaagtgaaaccacttttcctaacacatgccctaaggtaacacaagttatattttgtgtgtttatttccagggagcatgataaagatccagaaagcttttttaaggtattaatgcatcttaaagacttaggactcaatttccacgtgtctgtacttggagaaaccttcacagatgtcccaggtacctctgttgaattttctaatgtgtatttttatagatgacataagctctacaacgtaagtattaatttccatgtttccctttgttagaataatcaagatgagcactgttaaccaaaagattatacgatggcattaaagtctgattcaattaaaaaaatacttaagtaagcattctttgatttaagttgagaacgtgaagtcatctctttgatcaaatatagtttatacagtgcatcttgatgtaaataaaatatattgctttaggcatcttaacacttaaggaaagtgggaatttgtaattggatatacaacctctcacctctggggtcactggtttgaatcctgctcacattggtattggctgaaatatattaccatctgttaggtggcctatgtaaagcattttggcatctaacttgtaatgtggaatggactatagtccatgtcatagttgtcgttggtccatgccttgtttattgaacttgagaaagacaaaaatcggaagctgatagcagcagatcctctctttattaatgccacacggagccttttcaaagagccatttccttcaccctgcatcctcacagttcacatttgggtcagtaaaatgaggattcataagcacacaagttatacaagtattcatgtcttttaagctttgggtgttcagcattatttgaaaaatcaaatgtacaagcaacaatatttcagaaataacctttgccattgtgcattatgactcctaaggaacacctaaagtttactttcacttagcaagtgcttcttgattctagtacagtgt

SEQ ID NO: 96333 - DNA, 1033 bp, Homo sapiens
ttgtttgaaacatcaaaaaattggaaacaatttaaatgtccattagtaggataattactttatataaaaactgtgaaatgtattagaactattttaaaatgagatatctatatgtgctgatgtagatagatgttctgttatatatttggtgaaaatgcaatttacatgactgacgttgatctcgtttataaaatgaggaaggtattgtaaaaatatgcttatacaaatctatatgtttgcatatgcatagaaataggtctggaagcctactcgccaaacagtagttggcagcggttacacttgaggaatgggatcaggtagggtgaggagtgagagctttgagtgcttatttcatgtatttctcaattatttggattttattacaatggacacgcattttgttaaaattgaaatatttattaaataattatagattcacgtgcagctgtaaaaatgagagtcccctctggtactctgataatacatatattgggtcttctgtttttatcccataggtccctgaagtttggttcttctttttttaaagtctgttttctttctgttgatcacattgtataaattctattactctcaagatcactgattctatcctgtataatcctttctctaccactgagcccatccagtgagggttttgtttttttttttaattctgttacattactgtatttttcagagctgtgatttccatgtaatacttgctgagattgaacactttagaacatggttttaagctccctggttgtcagagtaaagcaggaaataagaattatacatctttctatccaagaggtagaaatacaacaattcttgcaaacatcaaagagtctcttaaactggaccttggggaaatttctaactagaggaggtggactggactgctggggcagctctcaggataactagtaagcgttttgaatgtatttcctacatgtttcttggaggaaaacaatgttaaatccaaatgattagtcagtttgaatttacagccccaattaccacatttgacaag

SEQ ID NO: 96334 - DNA, 1260 bp, Homo sapiens
gactcttcaatgaaaatctaaaacgcctatattttctttaggagaatttatgcaaatgttgtgagctgaactcctaccctttagtggtagatgctttatcatctgatttatgtaaatttgctcataaaaatacagtttatttttaattggtgaatatgaattagaaaattaagattctggttcagcattcatcaaacatccccagctacaagcacacatttatttagacccctgatcgtatgggtggaaatcgtataattgaccagtcaaaatgaatggtattcagaaggaaactatggtttctactacaaatgaccagggttgtgtttcttgttcaacccccttagtttgagcctcccccatccttgtactttacatattcttgtcagtattttgagctgctttaactccctgcttgaaaaggggggttttctttacagtagcctgcaggaagctctttagaagcaggaagtctgttgcattttcaccttggccatgtatctttaccagagagaaggcattgatgattgtttccatgtaaacctaaaggagaaaggaacactggagagggcaatttggattcttagatcttgtcattaccttgcctaacaaaacaaaaataaaaccctcctctatcataaaaaaatatgcccatgaaatcatgcagttgcagtagccaactctaaaaatgaagtgatgctgacctcattgtgttagttccacactgggatcatgaatggtctaaaatatagtgtcagcctctaacatatctcgtactaagccaaccaaatgtagagcctacttgctagaatatgtatcaaaatcaaaagtgacattttctagaagacacattctggctttaaatctgtgttaaaatgtctgtgcatgagaacaggcccttaaatgcaatgcttgcccctctcctcattctttctcaaactgagcttgtcaaggattatagtgtgcaacatctgctgacagtagataaataactgacagtattttagcagagttgctgggttctctgcagagtaatttgttttctcctttctacccagtctttaatgttttgttataaacatctatagcaaggcacggttagtagaaataacttatagagaaagacctgtaaaaaacaggctgcaattggcactgcttggtttttttttttttaactattttctttccaaatactatacaaatgttgtaatattaatccaggttccaacctttatgtaagcattctctaataattattat

SEQ ID NO: 96335 - DNA, 1047 bp, Homo sapiens
gaacaagtatggcctgaaaataagcactgggccatgtggtgattggaaaacacaaaatggaaatccagaaggatgagtgagggaagagtgataaaccatctctgtaatcttatgttttatggtatgtgcagtgcaagttttatagccatagaaactctttggaaactattcaaagacagcccagtccaatttcaaacttttgaacttctcttagtggctactactttttacactttttctggaatttttgtataacatctttattttttctcagttttatatataatcattatgtacttacaggaaggtaaaggacaaattttacatatttttttccactaaaagtatattgcattctttttttgtaacagattcatgcccaagcacaaaacaacccatttaaagaagatgctcggccttaaaggaaatggcggtgcggttctgtccatggcccttccttttcagccagagcagagagattcagaggatttattgaagaattttaattcagagtgtgatacacactgtggccttgatactgcacgacaagaatatttgggtaactcattaagacaggaatcagacttgaaaaaatccacctcgtcagataattcaagctctcatcatggtgaaaataaacaaaatctgactgttgatccctgtgacattttgggtggagttgataatcagcaaagactgctacacattgtctggcctcacaggtggtaagtcaaggcatgccaatttagtaagagttgtagaactggtaaaagaaaatatattctgttgattgacataataatttgttcttcttattgctttagaaaaagattattttaatgtggtggtattactaatgatctgccaaggtggtactactaaatatcttcacatgaatggtcatgtgcttagattaaatttgaattacaggtaattatttgctgcaatttgctcaactaacagtagtgggtaggcacttctagcatatcaagtcttgttcagaaagtttcaaaatataagaatcagattccattttatgcacacaca

SEQ ID NO: 96336 - DNA, 1080 bp, Homo sapiens
acggcacatgaatcaacatgaatgtccaaagttgacttgttttgtgttaaccttattgcctgccttctgactacctctgtgagtcaactgcaagtactctagcctctcgactatagcagaaataagctaaggtgcccagagcacttcttttgcttaccatcaatcttagtggcatttaaaactgctctcaaatctagtcttttcccggctgatatgaaaaaggcaaaggcctttggttattcctacaggtcgatcttaggtttgtgtttggacatggggactgtggtgaggggtatacatttagatctagaaagtgcttgttccagctgtgtctttaaacattgcccaacatagtactggggttttgtggcaatgcttctggaaccatactggcggacagaggtgggaaggaaaggagtctgaggggatgggcagcaggagaggggctctgtttctgtttcacatattggctattggttggaaaggagttgggggtggagatcccatggctaataacagattggaaatgattatggcaatccgaatatttctaaagttagaaataggttctgatggagtttctaagagatttggaaacaggaagaagcattctgtaagatgggcagtagaatttacttaagaaaaatggggaaattattaaatgggaaacctgacatatgtggattactgtttttcttctgaccctttcttttctctctttcacttcttacctcgggaccttttctcttctcattagcacctccaccagagttggaactgggaaagagaaaggaagtgttcagacatgtgcctatttgcatagtcacgtcattgaattaatgccaggacagcacaaacattctgtccagttctatagaaaagccagtttcaccccatcagtaaggtattatttccttttttttttttttttactagcatagaacagtttattgccaggcttctcttaactgtacattataaatagtgtctgattaagaatgttctggatgggttaattagtgtggtgactattattaagcaaactgcttgttagtattatgcctatttgatcttggtatt

SEQ ID NO: 96337 - DNA, 1075 bp, Homo sapiens
ctctctttttattgttttttttttcaccgttcctgccgctgccctttggcaacatataggacatttttcttttgacatcccatctaaaatttcaaggtagttgtcatgctctaacaatttaccttattgtctacatagagttaatttaatgaaagatctcttagttctgttttgtcagcagagaaacaaaaatacgacaatggaagaaatacaaagcctttggaattaatttgtattaattttgaggaggacttaatttgaaatctaggtattattatttgataataaaatatatagatttgttgttctatgtaaatgctctagattgtgggcttccggaagacagaaatttgttttataactctttatttcttccttctttcccacgtctgcaataccaattataaacttactatgtgcctgctatatctttactaaataggtggcttaattatatctagaaatgtaaacataatagatttatcttagtaaaactaatatagtatttagctcagacattccaaatctaagaaatattggtctctgatgtttacatgagacattattaggctgctgacattatgtatgactctattctgaatgggaaccccgcaataattcttcagcctaacaaaaaagagccattttgacaagtaatgggtttgtatagactatgtctattagtactaggaagcaaagtttaaaatctcagaaagttgctgttgaatgtgtatgtaaagtttttcaaagacatgccaagtttggattttgctcactaaaggttagggttctattagtagataatgctcattattttattccatttccttatttttaccaattatttacatatctttttctggccattgcattttattgataatagtgaaaattaaaataaatatattgctctaaaagtagtttccacaactcgtatcagtaacttcagtttttgttctatttttaagctgcttgccacaatattgacaggcatccgattgtgtgaggcttagttctaattatagatataggctacttcacatggagttagatatttctatgagactaaacaaaa

SEQ ID NO: 96338 - DNA, 1036 bp, Homo sapiens
agtgagtggcataaccatcaaatttcttattgtcctcgctaaatgctatagaagtatgtgtgcatgcacacacctccttgtaaagcttatgaagagcaaaccaggtaaaccttttgattctcctaaatcagatgaggggaaataatttcttagaaacaaatcattatatattaatttttaagagccaatttaaaaaaccttaaattttgtcctgatgtactgtattagaaatagcaaaagcttggaatttgccaggcatagttttaaatcctagtccttccatttcctaagcatgccattttggcaagatattatgtctttctgaagcctcagtttcctcatctgttaaatggagattaaaaagaccatcaagaggttgtgagacataaataaaataatgagtgtaaaagcatctagccaaggtggtagcagtggaattagtgaaaagtggtcgaattcaggatatattttgaaggtagaacagaccgaatatgctgatgaattagttgtggggtgtgagaaaataaataggcgtcaaagacgagagccaaagttttggcctgagcaacttgaaggatagagaagaccatggtagaaacagatttggagggattggattcaggcatactgagtttaaagtactttttagacatagagaaagcagtttgctctgattggaaactattttgtgcagtcacctaggctggagtgcagtggcgagatctcagctcactgcaacttccgcctcccaggttcaagcaattctcctgcctcagcctcccaagtagctggaattacaggcatgtgccaccacacctggctcatttttgtatttttagtacagacagggtttcattatgttgaccaggctggtctcgaactcctgacctcaggtggtccacccacctcggcctcccaaagtgctgggattacaggcgtaagccgctgcgcctggccagtgcttggtcatttcttaggcaggctagatggactcagaattcccaaattgcatttgaagaataggggacaccatttt

SEQ ID NO: 96339 - DNA, 1060 bp, Homo sapiens
cttcttgctgccctgcctgacttagaactgtgttctgccttgcagttgacatcaactggttgaatgaccttggacaagtcaagttactaaaactctctgagtcttagtaaatgagaagacggactaagtgctcgaatctagttttaaaattctgtgagtcttcaagatagcctatgtaactgaaaatatgtatcctatcttttgaattgtgctggtaagaaagtaagattgtctttacacagacacatacactctgacactcctttacactgggatttgctacagtgaaaccaaaaaaattagagatataagttatagggaaaatgtgaaatacacctcttttctgctttttttctgggcatcggattcctatttttcctccacataaaactgactgagcataagcaaagtaaatactaagtctcattcttgatcattcacagcttgaacttggattgaagttgcttgctctctgatccagagtttttggatgcatggcttttcgtgtgagcaaagaaataaacatactaaaaaggttgtagaaaattgtagatttagtagaatctctgagatgatttactctggggctaggtttagaatggcaaacagatgcaaagctttttctggccttaatttttgagttggctttattcttgtctacaagaggcctagattcttgctgttctcctcacccctcccttttttgtgcacttctaagatttaagagtgtgatatgtctgaaaaagatttgtttgattagaagaaagtatgcccagagaatattgccatattatcttgtatgattcattttattaacttgccaccatccaaggcaggaggacagagtatagaatttgacataggcaacattcagcctcccagaaatttagagaagatgttgggcctttcatctccgctagatggccattgagatgaaggcttttcctgggaggaggtccaaaatcatctcagatgtgtaggttttggagatgattcaaaagggctgcttcgtggaacgtgagacattcccaaggtcaaatcagtttatttaggcatgatt

SEQ ID NO: 96340 - DNA, 1030 bp, Homo sapiens
cattcaattgaacagtgcattatttgacagagcagttgcctatcatttatgttcaagaagtgcacacaatatattcaggactgacacaactgtccagtagcacttcatttctggttctgtctcaaatcactgctacctatggacatttggctatgtttgttgaaaagatgagctcttgccgaaaacagtactgtctgaggttggaaatctaaaatgctgctgttagctgattgcaaaaacataaaacacatcaacagttttggcagtagaattaaatgtgtgaatgaattgaataaaaggtgaaaacagcacttctctcttagccatggttctatgcaattggggccattaaacacagtttatagagtcctatcactacttctttgtaagggctacagtgacctcaagttccctttgtgtttctctttcttttccacaaacatctatattaaaaaaggaatccattaaataaaacttctgaaagtgccttataagatcaaaacacatccaaggagccaatacttgagaccttgaaaagaaattaaacattaaatttgggttattcccatgcttaattaaagtagaatgagttggatatagaagtatatcttgtcatgtaatcagaaaaagtgacgcttttaacatgtgagtgcgtgttacgacccagattagctatgtagcattctcttaaaaattcaccctttcttattctcgatttctcctaatatgtacacatgttctgacttcccatacatccagcatctttggtgacttcatttcccgtaaactttattacctttcacaagtttcatgtagaattttttctgcttagatgagtaaggtagaatcagtgagaaagctctagattgtaactatcaattataatactaattacaaaacttattccgtattgcttacctcctcaaaagttaattgcgctttccaacctcaaatgttggcaaaacttgagcttttcactctttgcaacatagcatatgtcaaaaatagctgtacttcaaggaggaaacta

SEQ ID NO: 96341 - DNA, 1050 bp, Homo sapiens
gactttttctgacctatattttttcagttgaaaactgccttgggagtcattgtgtatcacaaaagccacccacttatttccatcttgccctacatggcactggtttgaagtagtgaaatacatttagtgaggtaacataaaggtctcaagttgtgaaagtgcaaatttgtaaatatataggattcttaatctctcttttttttttttttggctttttgaattctaagattcttagttttttaatctattgtttatattacctggtttttattttattttatttttgtagtttattatttttttttaatagaccgagtctcaccttgctgcccaggttggtcttgaactcctcggcccaagtgatcctcctgcctcagcatctcaaagtgctgggattagtggcctgagccactgtgcccggcctgtggttttgctatgtgagaaagaaaaaacttcctaccttgatagcacagtataaaacagtggttgtgacagtgctgctaacttgtataaagtttaggattatgattggttttaaattttataattcctgtttttctctttttctaagaattggtgtcaaaaaagatacacttttttccccaaagtaatgtgaaaaatttgcattgtcccgtgttgttttcacctattaagtgagcagactgtttgcctttacccagaggggttctgaacactctcgagtctgcagaaatcatgttggtagcctggaatgatattaataattttctgtctgtcctgtggcatcaatttatcattccatatgtccttaatgtgaccaggtatgtggcatttgcttgctctttttccttgtggaagtttatttctaagtgacccatttaaaaatcccttcagtttgggactgtgcacctcaggtgaacaccacttgcctatctcaagaaggcacagcctaggagtttgttttccagtgcagtgatttgtgtagtgccctgatgtggtgttcataaggcattctttcttttcttttttcttttgaggtggagtctcactctgttgcccagcctggagtgc

SEQ ID NO: 96342 - DNA, 1075 bp, Homo sapiens
aaaatgctcagctggtcaatattatctgttccatagatagcaattatatttccctaggtgtgtggactcattggctatttactatgaattgtaagaggtggtttttctaccctttgacttgcagataaaatcataatgtctttttgggtttactttcatgagaaggaagttgagattttcttaaatgcatatctttctgcttatgcagaattgctgagtgtttttgagaaatttaaaaggcaaaagtaagaaactttgtgcttgttgcatctaaaagcaagtctgtttgtgtgtgtctctccctttgtaacagaaggaatgtttcttatgtttctgtcttcagacagttggcacacatttcatctcagcagctgctttctcttaaagtgcagtagagtgtaggactatagtgacaccagcattaatacttcacattctgctatcatatgctgtcactgggaaatatggatctaggttacatgtgtttgcagactttgtactgctgaattatgaaagctgactctgttggtggattgtgttgtattcagagactgtgaactgaacaataaatgaatgcagtaggctgtttagagtgctatagcatgctttcctttcagggactaattgagcctgagctttaaaatttaaagtgccaaattgtgctggaaaataccttaaaataaacattaaataatttttgtcaaatggcatttttatatgctatctttgactttaaaaattttttagatcctcattttttctactgttgcataaatccttgcacttcagatacgtaaaacaataagcatattgcagacgatcaaagaaaacttttttcccattcagataaaaatttgcaaagaaaatcattgttaaaattgcttactatggttgtaaaaattaaaataatgtttcagactttgtgtctttttataaacagtttaaaatacaacagccaggacagagctagtaagataacaatcattcttttgcctttgtgtctgagctatgcctacacacacaacacacaggcacatacatatatatttgtgtagatagacacaaccatacatat

SEQ ID NO: 96343 - DNA, 1047 bp, Homo sapiens
tggctaaggtacaaaggtccatgggatttagaggtgggggagatgtcacatttcacctgatttggcaactcctgaataaaactttggaaaatgtcttgaactcccctgttgcaaatattctttgcaccctttcacagaaagaagactaaatgggccgggcacggtggctcaagcctgtaatcccagcactgtgggaggccaaggcgggcggatcacgaggtcaggagatcgagaccatcctggctaacatggtgaaaccccatctgtactaaaaatacaaaaaattagccagcgtggtggcaggtgcctgtagtcccagctactggggaggctgaggcaggagaatggcatcaacccgggaggcggagcttgcagtgagctgagattgtgccactgcagtccagcctgggcgacagagcaggactccatctcaaaaaaaaaaaaaaaaaaaaaaaaaaaagaaagaaagactaaatgaaagtgaattagcaatcagtatgtgaaatattgtagccaagtcttttcaaggaattcctgaatagatgagacattaagcaagttaatttctaagttcatgtctaattaattctctgatagcctacctgtataagtaagtcaacacgatgtgcatatagaaatcagtaagattaatactggatgtctccaagtataaattcagaatatattgataacattggatattatcctgtttctaaaatgtgtattttagaggaggaggaatttcaggaacttcctgtataaggaagaaaatttaagttccaatggttattttagccccaattcaattcaattattagttgaataacagccaaagtgatttggtgatgtatatgacttacaagaatcaagaataaatcatttttctatgcttattctagtgttacttaatttactgtgaacagggctgtatttaatctttcttatttgagtggcatacacaagcaagaaaacttggtgagtcatttgaataatctggctggtgtaactgtgaatattcttgggaatgatggaaaggttaaatgcttt

SEQ ID NO: 96344 - DNA, 1049 bp, Homo sapiens
ttggttttccttatattcttagatatatccaaagaggaactctaaaccaaaaaagattagttgtccgacttaaaacagccttggtctaagtaatcatctaaagttctaagtaggatgataaaatcatcttttcatttgatgatgggccatgtggaaaaaacaaactttatttagttatctgtgttataaaataattttcatacctatatatcaggaatagatactcaagtttacacctgtggtctggtaagtcaagtttatgcctgaagcacgctcaaatgttcaggttataagactccaaaaaatgccttagagtgaaaaaggactgacagacttttaatcatggtaatgctactgtcacttttgaagtctgtgtaagttatctattactgtacctttatgacagaaaaagtaatattctaagaacaatatgtgataatatgattgggaaaatttggtatagtatggtatggtgagtagctggacactgtttttccatggcttgtagttaagatataatgatagtgtatcaaattctacttatatggcttttaaatccttatagataggtaatttaacaatttttaaaaagtaattgataagtaatctaattatatggtgtgtaaaaagacatataaatcatttattatgcaggtcatatttgtctttcttttataggatattattgttaagaggggtgcgtgtgtgtatgtgtgtgtccatgtgtctgcacgtgtgtgcaccttcattttgggtactttgaggcagttctattgcctttcacattgggcttgcaaccccagctgcatatgagaatcttgtggaagtttcaaaaatctttatgcccaggtagcaacctagacaaaataaatctgaatttccaataatagaactgagatatcaatacatctttaagcttcccaggttaaggaccactgataaaatacgtgaatacttagtaaagtatttacagcttgtacacatgtagataattgcatggagaagatgaacgaaaattttccttctcctaatacagaggagagtttttt

SEQ ID NO: 96345 - DNA, 1095 bp, Homo sapiens
ggaagcaaatggtgtcagattgggttttcatttggaaaaataaatcaacatctgagagaagcaaatggtaattaagtttaggaacacaaggtagcagaaacctgttactaaatcaaggtgagaactgaacaccggaatttggtttgtttgaggaataaactttggtacatagaataatagggccctggctctgaaacctgcaccagggatagctcccagtgatggtggcttctccatggctcttcagttctttcccattcagactgaccctctatctagagcttccactctgtggcttagtaatgcctataaaatcaggaaaatggaccctttcatcctgctaatgttaatattagaaataagtttataagcgaggtactgtaaaattcattttgcatatcttatttaattcgtatgacctaatatgttaggtattataactcacatttacatatgagaagataaagttaagtaatttgcctgtagtcccatttcaaatgaatgatgacaccataagttaaactttgatgtgtctggcttcaaagcgtgtgttcttaataactgtaccacaaagttacatgagactgagatcactggtatggcacttgcttcttataaactaaagtggctataggaacattctgggggtttaaagcatagttgaggaggaaatttagaacgcttctactagcagtctagggtgtggataatttgtatgttcttctgtcttccagaatcattatggatagagttgttagaactcagagacagtttcttgtagtccttttgataggatccaagttatttgactagaaaacaatgttttagtttgtttagagggaattcctgtattcttacaagtttggttaaagtaatctgtaaattactttaaacttgtgatattttgattctagatcctatatctttgtcttattccctattttatttcctcttattacgcactggtatcaatgggtgtaaaagatcttcttgcactctaatttagagaatatgaaaccataagcttgcttttagttggatctatgactctaagattaaaaagacaaggactgaaaaattatggatcatatttca

SEQ ID NO: 96346 - DNA, 1057 bp, Homo sapiens
tacagtaaacccccacttaacattatcagtaggttcttggaaactgtgactttaagtgaaacaacatacagctggtcctcaaataataccattttattcaatgttgttttgttttaaagttgatgagggaaaaaaatgattttgtgtattgtttcacttaaaattgtactttccaagaacctattgaagccgttaagtgaggacttagtgtatgactgtatgcatcccctcaaatacatactgtgattggtttttctgccttaagtaaaagccagtcaaaccacaatcataaccaggttggtaaaatatagctcatagcagtggtttttctatgttaagtggacatcataatcacctggagagctttaaaaagtcctgatctctgagtctgttaagtcagaatatctggggttggaaccaggtgtttgtttgtttgtttcttgttgttattgtttttttttttaagttcacaagttattctactgtgaaaccaaggttgagagccactgactgaaagcagttctaccaaattacaaactgtggaaggtccacataccttcagtagcctctcttggttgcatcatgacaccattttcagtattgccaaaattatattcctgtctgcaagtgtcctcaggcaatctatagtaaaaaattatgtctccaagaaaatgaatttgtataattttctggctatcctgatgaaaaataagaaaatgttaaaaattgtatttatccttgatctctttctccatacgtgttggcattcctccatttcccattgacttaacgttcaatttttctcttcactgtttttcttgggtgacattgggaatttttaccatctgataaggcagatgtattttcaaataaaaatgtcttaagcatttgttcttcctactattcctttctttggcagaatattcatatagttgataaatagtttgctttctttaaataccttttcatataatctttgtagcatgtttcatgggtattttaacctagttttatggtttttcatgaaataaggtattttctaaatatgttatgctga

SEQ ID NO: 96347 - DNA, 1901 bp, Homo sapiens
ccaaatctgttatctgatagctggggaaactacagtagagaggtgtttacctgagattgttagagcactatggcagcagaatcagaatttagaagcaaagagaaaaaacttcatgaaattgttagaaatgtggtactagagtcattcactgcattagtagttagtagaataggattagtcaacattgacaaaatagatccatttcttcaggaatagatggtattcagaaatttcttagaagagtctcaaatatttcagttgcatcacaacttgtggctatttttcactgaaaataattttatttctctgatctgtaactcattttgagatgaaaatgcatatgactcagtgaactccacttgctgatagcgtattttgttcttccagtaaacactgggctactcatataaaacttatttgaagagtgaggaataagagtttccagcatttgaaactcagaacctgtaagttattttcttgtctctcttttctgagatttgataccacagatcctgagtgaatcagtattatgtacaaccatcaaaatttttaatgctttctctttgcaagttttatataaattatttatcttttatgaataaatttttttcctaagctctccctccaggtttgtcttcagagcctatttaaattttccattgcagggtggctgtagcaacactcctgttctgcctcttcctgtggctatcaggtgaatccttctttttatccctgagtcctgttgggatagctggctgacgtcatgaggcgtgggctgatgttctggtcagttcagagtatgggatagggtaagggagagtttcatgtgttataatgtggtacagggggaagaacataaacttaggagtcagacttgggttccagtcttagccactttctagatgtgtatcttggtcaacttatgtcacctgttcagactcttagattctctaacattaagtcctagagatcaagtgaggatcatgtgagagagaacataggtaaagtgtggaatatattccctgcacatctctctgcccttcccatgtataaggtcacacctactcctctgtttcactttatcaactttaatcgccactcacaggcatctaaactgacctctttttgttgctacctcaatttctgatgctttgagggattattaaagtatatgactcaatttgctattgtatggataatccacataccactaccatgttttgtcagtgtgttcttccatctcttccctcatgactaacttaattcaattcaataactttttacaatgtaagtcctagtcattttcagcaactttttgcaatgtaagtctagtccttttatagaacttgggatactcatgaccctttcctgctgcttatgggtaggtttcacctgctctgttttgtttacattttttttgtgtgtgtttgttatgttttatttagtggctgttattcagcattagcactgtggaagagggctgttatgatcaataacaatcagctattcatatcattatatgtaatctttgagtacttgactctgattgaaaacctgtttctcttcatgcttgtaagtatttcttttatatgtcctgaatgtgcgggttgggttgagggtgcattacttctaactgtaggtagatgattaatatgcaggtaagcgttaatgtgttaatagattttttgtgtgtgttctaaaaagagagagtatgtcttagatgtatttgtcagaaaaaaagttagtataagattttacagtttagcacaaataatatacccagagctaacttgtgtcgggttcaaaaagccttctagttattaccaaaaagattacattagaattttgacccttcaaaaatatagtccttaggtgatagagcctttctcctcccagttgat

SEQ ID NO: 96348 - DNA, 1048 bp, Homo sapiens
ttttgatagaaaaaatgaaaatggtcctaaagaagcagaataggaggaatacttcaaagaaacagctgtgggctcaggctgtgatttcatgtgtaagaaaacatcttttttttaattttatttctgaagttatgtctcatttatacaaactctcttgcctcacaacttagcttatagcatgaaacatgtcttatagggcagtgcccagcccatcacattagatgttaaggatggagcaggctgcatctgcgcagcatccaacttcttccgtctgtccccctacaagattctctactgaaggagtatccatgattttcatgtcagtagattgtcttcacttccaacaaattggatcatataagaatgtgttatagacttacagcaaattacaaagtagcatttctcatccttgaaaaagaccaactcctcccaaggaattccatgagggagtcatgaatagagtgtatcaaaatgggtatcatcttcttcaaatcatattcagctggattaaacgtgaagcgagacaaatgctcaggttgtcaggctgatatttgtatatatttatcaattgtctgctttctctgtcccattatggaaaaagttaaaatttttttcattatggttgcatataattaatataaaaagatcaaatgtttatgtttcctgtggagatcttaaaaaaacacccacttgtttattttttaatgaggagatgaatggatgctatatccttaggagtttaagtttagattttgagtaaattaaagcaaatatactttagattcagaaatatatactttatctgggtttcaggtccaacttagttgtcacagagtatatccaatgtcaaccttgctatgatcactacaacagaatttcatatattttcacgatcatttcactgtctgttcctatttcccaccacattggattgtcagagttgccacagagtaaacaacagtgggtttttcctgtgaatttcctcaatttgtagtagattttacatccctggaatagggattatataaagagcatttctgctttccta

SEQ ID NO: 96349 - DNA, 1045 bp, Homo sapiens
gcaaacaactgatttatttaaattgagcagaaaataataaaatctttaatctcgaatttcattgtgtttaactgtttcggattctttaaacatatatgacttgaaatgtagatacaatgtgtattggaaacaatcgaaacgtgtacaggtccttttcccaaatacatggaatggtgttaatgtgcttgcagcatagagccgttttggttagatgattatagtagcagcttacttgtacttttggtgaaatggtaagctaatgatgtagctgttaatttgaatttagcagacattttaaatataggtttctcttacagagacaaaagttgcaatttaaagctctttggtggtctaaaaacagcttaattctgtagtagcatggtaataagtactaatccagcttatacagtgattgtagtatgtcatgtttgtgaaagattgctcaactgctttctctgggttttatgttaatttaaaaatattaaacataaaaccttataacatcttcatgctgagataaactgttcaatttaacttgtgctcaagcagcagctgtcaggaattatcttgttcctagtggtttttgctatcaccttgtgtcctttcctgctagagacacactgtgggatgataaaatgcaccttgttaggatttattggttaaataatacctgaggcaggatgagcatttgtagcccagggattagctgctgatcaagtgatgtcattcattgtattattatcaatttttaaaaattgatagtagggagcagagtaaaaattgcctatggatcacctgcattccttttgtgggcatattcattacttctttttgggtgttgttgagctaaatatttgagaaattgcttattgaccactttaccgttttacgagcaagaaaagcaaagagatgatggagataatttccactatttaaaactagtgagggctatttcaagattaattatacaaatacagtgaattttcttttaatgattaaacaaactgaaagaagtgttggcgtgggcagtctcaaatggggaata

SEQ ID NO: 96350 - DNA, 1055 bp, Homo sapiens
agtacacatattataattcagaaacagttttgtgttattctatttactgctgtctcttcaccctctttttgtttctgtgcctttggctttccctagctgggcacagtcaggtccactgatgccccctatctgcaaactcagtcttgcacagtacctgagccattcttacctgagtcagctgatagacacatccttagcttcagatgcacacctgctcgttgatgtgacttatagttttatccatccaagacctggaattcgtccgcacagctgtttgggctcctacgttcttccagctgacattcacccctaggtctctcttgttgccagttgccatgagatcagccctaggcctttactttgctgctctttcccttatctctcctcacctttcaactgccacctttagctaacttggccagatttttctctctttgtttttttcccctgatatattctgctttattctataggcaccttctggggctttgatacttcttccttagttcctgccagttctgtccgctgcataatcccagtcaagcttgacatctgtacaagattttccagagtcacttcctaaattctgagcaagacttctccttgaaatctttactcttctgctttattcattgaatttaaccagcatcttgcccaagttatgctcttttgacctaggttttttgattggcccactgtcttttttgatgacaggtgttgtaggtggtactgtttcctttgaagtatattcgttcctggaaccaggtctcagcctcatttgcaaaggcctgaaaacacccaggacagtgtcagcatggtttctcctgaaggcaaattaccgtgtaaaaatcaggagagcaaaataaaaattttaatgcatgtagttactcttctaaattcactcactgatttttgttaggtctattcagatcctttttacagctgaaccatttatcacttgaagcaaaaggagcaactgtctatgccacgtccaaatgtctttgtactatgaaaacttgagatgcaaggcatgttgtgtctaggtttaacatcac

SEQ ID NO: 96351 - DNA, 1405 bp, Homo sapiens
caatttaaattatttaaaataatatttagcatgcttttaaaaaatctaaatactgctatgttttagcaacaaaaatatttttattttgctatggcggatctcaactccaatttccttatctgtaagtggaacaaaaaatatctatactttttatgtcataagatttttataatatttaatttcatattatgtcatgaaaatactttgaaaactctgagaacacataaaatgtgaagcgtattttttagaattacagcataattttcattttgtgtcaaaaataactatacttctgattttcaaaatgcccactacagtgaagatatttttttgaagtacatgtgtgtattttaggaaattccaagttttctctatttgtaacctggttattattctagtctaatggcttcgttccataaattatttgggcttctattttatttattttagtcctggatcagtttggtgctacctttatcatggtgaattccgttattgctctaggggtttgagagtctgtggtttctactcttttggtgtataatttataatttacagtttgttaaaaaatatttcctccaaatattgaaatgtccagtactgtttcattgactcttatcaacccacagaaaattattgatttacttcttaaaaaatcacttcagtttttcacataattaaaatataaagattttcatttacagtaatttgaatttgggcagcattattttgacaccagtaggatcaaggaagttaaaaaatttttgtagatgctagaaagccttttaatactgtcacggaggtgaaagttgtgaagcattagaaacaaaagacatatggtcatttcagacctctttacacagtatataatgaaaaggtaaaaggtccagagtacaattgggatttcggagcaggagaagtctgtcttcattgaagctgtggtatctgacatagctttgaagtatgggtaggattgggttggacatagaggagcagccagacgtgataataatagcatatagttacatagcatttactatttgccagacatggttttaagctctcttcatatatcagcacatttcattattatattaattaataaggtgattatcttcactttcaagatgaagaaactgggatgaaaatttgttgagtgactgcctccaggtctcacagctagtgaacagtggtactgctatttaattcagccctttcagcctcagtctctgtcactgtgttttcttcctctagttactgtgctatattttgggaggacagtaggacagatgaagttaaggaaagttgaagtcatggaaacttttgaaagggaggcagaagcattcatatgttatcaatgtgaatatcaagtagttcagtctttctaggacgtaatttggtacta

SEQ ID NO: 96352 - DNA, 1044 bp, Homo sapiens
ttatttttgagatagttgatcatgctttggtctctaggtgcgacagagacaagatataattatttttttgaagtgtcagaaagttttataattctcaatccctatccatgccttacctatcactaaaatgtccatcacccatccatccatccatccttccatcagtccatccatccatccatccatccatccatccatccatccatccgattgcaaaaggactcagcataatgtcattaattttctttgcactcttgcatggctgattagtttgttaaatctcactttttaggaaaagaaactgatatgttcaaaagtcagttggtttctctattttcaaaggggaaattagtggtagatggttaagatgtagtctgtgttttatcccgttcaaaggcactacttttcaatgttgtgaaagcttaaattaaaaaaaaaaattggtgctacttgtcttttagtttcactaagagaacatatttcttggagttcttctaataatttttttatttgcctggctatctcttcttgcactgatttgaccatctgtattagtttcctaagggtgctgtaacaccagaatttattctctcacagttctgaggccagaagtccaatatcagggccagcagggccacactccctctgaggctctagggatgaatccttccttgcctctttctggcttcttgtggctcctccaaatccttgacattctttttggcttgtaagctgcatcactccagtctctacctctgttgtcacatgaccttcctctgtgtgtgtgtgtccttttttataaggaaaaacatcattggatttagggcccacactaatctagcatgacctcatctaaatttgattaaatcagcacagacattttgaatggggtcacattcacaggtactatgggttaggacttgcatgtatctttttgggggatacatttcaacccactacatcatcatcatcccagaattcagtgtaatatgcctgtcattttctgtgccttcagtttttgttgttaccgttaaataaaggact

SEQ ID NO: 96353 - DNA, 2116 bp, Homo sapiens
ttttttttttaaacaaagtcttgctctattggagtatagtagtacagtcatagctcactgcagtcttgaactcctcagctcaaatgatcctcccacctcagcctcccgtactagctagtacaggtgtgtgcaaccatgcccagatactttttagttttattttgcagagacagtgtcttgctgtgttgcccagattggccttgaactcttagcctcaagttatcctcccaccttggcctcctgaagttcaggaattacaggcatgagccactgtgtgtgacccattgctgggatttaaataaggggaaatgatgctttttcagacaaaaacaccaacgagtgctataatagaacatgagagtgaggcaaggaaaactggataggatgattattacagcagtattggatggagactattgatgagtataggagatgatcattggattctaaatatctaatagaaaaatagtgagattctaaatgagaacattaatagtaggaatggaaggcaggaaaggaactagcaatatggatgaaagttgtgttatttgctttttactagttaagaaatttgtctggaacggaactgaaatttaactttgtcctatctatgtgaaaaggatttgggatataaattaatttagtcaaaattacagaggtcacaattaaactactttagtggttataattattttaaaaactagataatgctaataataaatttttcatatttactcattacattggctcagtaagtttgttttggcagcattttaagttactccatgcacgtaaatgttctaaaatttttctttaaaaatctaatgtaatactgctttcttccacttaaatacaattacatatatacatatacacacatacatatatctacatatatatatatatacacacacacacacacacacacacaaatatacagtcatgtgccacataacattttggtcaacgatagattgcatgtgcaatggtggtcccataagattataattgcctgtttttactacagaatttaccttttctgtgcttagatacacaaataccattgtgttatagttgcctacgatattaaatacagtaacatgctgtacagatttgtaacctaggagcaataggctatgcaaatatagcatgggggtgtagtaggctatactgtctagatttgggtaagtacactctgtgatgctcacacaataagaaaattgcctaatggcacctttctcagaaggtatcatcatcaagcaatgtatgactgtatatataaatacacacaatcaataagtgatccattatttggcattaacttgtcaaacttatcactatcccccctgccaaaaagtaaagtattaagtgcatctgtagagttcatgtattatgctagatctcagagtgaaaatgaatgagtaaagtttctgctcgtcactatacttgatatatagttcagaaaagccagtttcctcctcagtgatctggaatagcaggcatacatttgatgaacactcattacgtgctaggcacaaatgatataaaggtgaataaggcaatatgctttaggaagtaaatgtcttcttttgaatatagtttcgaggtttttttgtttgttgactttggtaccatttgaacaatgttcacttgagtcagcattctgaaagggtcatttactaatatgtttctaagaaaatttcccatacttggtaacctatctttcactatagtagggatctaaaatgtagggcatggggggattttagctcatagtttctctgtatatccagtattgatacagatatttatttgtattcagactgttttggtggttccaagatttttataaaattaaagtagataagaatgtgaattagtttttgtcattattttttcctttatcgtaaatttaaatacaatgagaaatattttcataaaagccaatataattcaaagcatatattatatatatatttcgtgtgtgtgtgtgtgtgtgtgtgtgtgtgtgtggctatgtgtgcatgcacgtgcacatgtgacaattgtattatggagtttctcattcaaatgtaatgattcttagctttcattttgtatcattgcttagtattag

SEQ ID NO: 96354 - DNA, 1025 bp, Homo sapiens
ccaaatgctcattggaaaatttagacatcaaaaggaagcctttttgctttgaaatgcaatttaagtagccattactttgaacaaagtgtagttttattagtgaagaacatcattgagtcattgagactaataattttgtggaacaacattattaagaaaagcattatgctatttaatgagtgatatttacttaagtcataaaggaaaattcaaacatctggaatattttttaagcaatatagcatttatgcatggaatgatgtttttcccctatgtcttacaggaaataacatataatttgagatgtatattagagattttatgttcatagatatctttttatttcactgagcacattaacaaaaattatattcaaatgaaaaatggcttgatagctaattctctgtgatgaaattttatcatgtctttagtaaccccattattgctactttatccctcttaataggttgcttgtctaaagaaaggttgtagaaaccttactggttcacacacatacaactttaccacattgttttggtgttccattttggggtgatacattgacaagtgtggggaagtgatcaaagtatgtgtagtgtctcaagaaattgcttcctaaagtttttaacactagaaaatagagatttgcatttggttgatatgccttcttttaaatacgtattcactaggggcagttatacctgatgaatttaaagatggagtaatacaagagttacagaatcacagaatttctgaaccagaaagggccttataaatgaaggactcttgaagtgaaagtcgtcattagaagatgagttcagtgactgtccaagactagagctctaagtcaagtagtttctgagattactgagttaggcttacagccgaacaaaccaggaagtgagtgatcacagcaggtgagggctttcagctttctgatgttggagaaaaaactaagagtcatagtggagacaatcttatgacatgaggaaaacaaatcagaaaaataaagacacctttatttc

SEQ ID NO: 96355 - DNA, 1156 bp, Homo sapiens
gtttctattgaatggtggcctaggtttgtatgcctggtgttgcataccaaaatctcagaatgtaaattaaagtaaatgtttattaagtttatcagtaaatttttggaagtgtggttgcctggtaatgctaaagatagactattttagcttttacattttcatcttaatattttattacagtggtataatgtgttatagaggtggacaagcctgcagattgaagtggggatcgtccagattgttcccttccctggaccatatggtatagttctaaaagccttttgtacgctgtctgttcagtttattgtaaactcaatctttagtgcgcctaaaaagataaccaaataaaagtgagcctgagaaaacggacttcatatcatatagggaccccagatatatatttttgaaaggagataactgaaaatgaaattgaagttgagatgatattataaacaagggagatttgtcattctctgaattttttttatatcacatggattttcatagattgtctttgaatactgcttttaaaatgaaagcatttatgttatgtgactatagttattatgcttatttatcccattcttagggtttcaggaaaaagaatgtagcattgttctgttttacagaggaagcctctacctgtgactgatggtaaggaatatataaactacaggttttatgaatatgtggattttttgacttaccttcgtgacaatttaggctagataactcagtaatttcattctgtgaggaattacctatacccagagttgaaaggtttctaattcttatttgttttcctttcttccccccacgcctaacttaatatgtttctataattctattttaggaaaatagagtaagagattgcttatcctatatgctaagatcctttagaagcaggaatgagtgattgctcctgactctcactctccttccctccaaagtaagccactgtttgagaagagcattagacattacccactgctttttggcataagagatttgaagttgaaatcctaccaaactgggggataaaaaggaaagcctgtgaagaacatggttctttactctatcattaccctgaaccactgaaagggtaactgagaggaactcaaatgtttttggaatgtgtaattttcctttgaattgc

SEQ ID NO: 96356 - DNA, 1181 bp, Homo sapiens
tgcctttattatatggatttttatgccaaggtatctcttgttgagaccaaaatgtctgccattgttttctatttttgtctaaaattcagggtcagttcatgtcttttacaaattgaatactcacttttagagtgtctgataagtcttggtagataagcaagtgaacttccattaaaataaaggatgtgcatttaaaatatttttcctttgaaataaaaaatgcaaggtaaaacacagaagtgtttttaagtttaccaattcttgcaaaattatagttagtgccctaccattaggagtgtgaaaatgtggcataatgaattttaaagagatgatttgagcaggagactagattttcactatgagcaagcattcgatgaaatttcgtagaatgttcctcacaatgtaaatatgttttctgttgtattaagcaaaacaaatgatttactttcaggtgatctatttttaaaattagattttttagagtgatctattttaaaaattagttttgcaatcaagataagaacagttaatagtcagaatatgtttttatagaaggagattgatattattttgactgatctttattttaaaaattgtcaatgatttttggcaataagaaaattactttgagaagaaaaactcatgtatttttgtaacagtgtaacaaatgtgactgaaaaggaagtaaacagtggctcatgtttgaattattaatgtgaaacatttttatatgccatatatactgggaaatacatctattatgggtactttaagataaaattgtgcaatctaacagttgtttcttttgcggggatttatttttaatttagaaaacactttaaaattattaaaaggatttgtaaaacagaggtgtatcagcagtatgcattaaataaactcacctgttattttctctcattcagaacaggctcagcaacatattggttcactactttagcaaaacaaacaaatattcaaattgctttgtatgcataatacacatgtaataaatgctacagttccccattgctcccaatgctatctttttaaacttgcaaagtggctttttttatgcagagctactaaaatgaatctgggtgggatgcctgttaagttatatgaattaaatctttaggtcaacattttaaacttctgaattctgacagttttgcgaaggcatg

SEQ ID NO: 96357 - DNA, 1096 bp, Homo sapiens
tgagaaatgtttttagcttgagctttgtgaatacaggaagttagagtgcatgctagaaagggattggagtgcagcctgggtaattctggctcttggtctttcataagctgcaatcaagatgtcagccagagtgacagtcatttgaaagttagactagcctggaggatctgcttagaaaatggctctctcacatggctgttatgttgattctggctatttggcaagatgccttgtgtacctttccctaggatggcttgagtgtcctcacaacgtggcagctggcagctggcttcccccaggaagatccaagagagtaaggaagaagctgtaatatcttttaggacagacactgtcactttcactgcattctgttgatcactcagaccaaccctggtatgagcaaagggattacacaaaggcatgaattccttgaggtgaggattattgggggctgtcttggaggctggctacctgtaccctcttctcccctttctttgacagcacaagttgatcggatttatctgtggaagcaaaaaatgaaattcttttaatagaatggaacttgacaagaatttggatagaacgtggttctttatattaagggtacacagtgtgcagtattgtcagccaggttttaaagagataacgaaacgctgttcatttacttgttgtcaggtttatattctacaagcagagcttgtatcgtaacattatcattcaatctaggtatatgtattttgaagtgtagagataatgaggtagtgatactgtcttctagaatagctactctgtcttcatctctgaaattcacaggtctggctagctgtccctaacgtcatttcctggtctcaactctttaagaccctgacatactctgagattggagtgaagatttctgtgacatgctgggtgggtataggctgctgtctcatgtcttggtcacatcttattgtttattttttcatatcatgtatcacaaattgaaatattgctgatatacttgtttgtcaccctgcatccttctcccattccccaaagtaaagcttcagcagaatagggctttgttgacctgttcactgctgagtcctcagcactg

SEQ ID NO: 96358 - DNA, 1606 bp, Homo sapiens
tgcagagacacctgtagagatcagcacacctgccctcaagcaaaagacagtaattagttgctcatcttcccttgcaaacttccccaatgttgttgtacatgaaacacgtagatcacagcagtgctgtcatgagctccgcactgttggagttgtttatgcccattcaatttttaatgtttctataagacattttgatgggaaccctgagcccaaagggatttgcatgcttgatcaaacttgtgatgatttgaatatagaaataaagagaaacctttgaattactttgactgttaacttttaggaccgccttagtggaaaacattcacatgatacttgaggcaaagatgtgtttgatcaccctttacaacttttttgtttcttgacagcaggtatagcgccagtaaatctaaacaagttctttaatgcttatagatccaagtgcatgtgaatatctgtatagcatggtctgaatattttaaaagatgattttgtaccaatcacttttattgaaattaaaccagtcaagtaccaatcttttagtcctgccacattgtcatatatagtttatattattaaagaatgagatgataggcgattgaactttagtaaaatacagtagtatatatgagttggatatattggggccagataaattatcacttaaagtacttggatgccttttgatatcattgttttaattttaacactatatatggtctagataccataagggataaaagctagtattttaccaagtgacctttcaagtcgtttctaacagctgggattcagttctttgattatatttgtgtaggttattaataaacagcttcaatagagtttcattactgtttcttaaattatattgtttgcaaaatgctatcattcctaatatcatagcaaattccattcacatttattctgagaaaaaataaccctagtagtgccttgttattcaagcatagtctgatggccatacatacatgcatcttaaattggttcttggagataaatgggcattatggagttgtcagattacagtaaaactaaagaagaagatgttatacagcattggactgtcattgacagagttagaaaccttagatgctaataaatgcagtcatcccattgtaccttgcagtttttcctcaatacataggtagaatcttcctgtgagtttctgagcgtagtttttgattagctcttcagcacaaaatggaatgagtgatgtgaatatttaaagcttacctctagattttatgtttgcctgccttttttagccatatgtaagcctaaatgtggattaactggggttactccatttgtgaggtgatgattatgatgctagtacggtagtataggcagaatactctttttttttttttttttttttttttaagtagagtcttgctctgtcgcccaggctggagtgcagtggtgcaatttcggctcactgcaacctctgccacctgcgttcaggtgattctcatgtctcagcctcccaaagtgctgggactgcagccatatgccaccaagcccagctaatttttatatttttaatagagacggggttttgccatcttggccaggctggtctcgaactcct

SEQ ID NO: 96359 - DNA, 1088 bp, Homo sapiens
ctgcaacacctccaatactaccaatattggaaatcaaatttcaacatgatgtttagagggaactaatattcaaactgtatcacctcccattggccccaccttcaaataccatcacactggggataaggctttaacataggaattttgggagacagaaacactcagtccatagcactacagttgttattaagtataatgtattgaaatacctatttagagcatgtgaatgaattgtaatcaaaagtttagatcgctattagggctaactcacctctctctctttttgtctttcagttgcaggaaaattttcatctgttttactacttaaatataactttcaggagatttttaaaaacctaagtcctatttctcctgtggaagtgttaaaaatcctaagaagctttcttgagataaagtttgtcccctttcaattattaaatgtgcttttctcttatctgtgaatttcaccttcagtttactggcaactgcttttttgtgttaggatcatagaattatgattaactccttgcaatctggcttttgtcccacctctgtactggaactgcactcgtgaaggtcactggtgaccacatctagccaaatgtagagggttatttttctcagttctcaatctccttgacatgctaatgtcacatgaccttggcttttcagctacatgagcactttcctttgaagtctctgctgcctactcttcttcctgtaatacctgtctctgaggtgttagggtgggtttgtacttttcctttgctaggcgtttacttattccattttgaatcttataataactttagttcttcttgtttagcatttgtatcacagataaatcataattctcacactctgatgggtattgccggtgattctcagagttctatttcacatcattgcctatcacctaaactctagtcctgcactttcatcttagaatagatcccaaatcatctccttcagattatttttttttcctctaaatatctgcatttcttttaaagaagcattctcttaataccttgacatttttagtgtggtgtcctttatgctgtgtcccttaccttccaatacctcta

SEQ ID NO: 96360 - DNA, 1480 bp, Homo sapiens
cacggtatatattgtatttatactcttttgggcagtgggatggggctgaaccattcaaaagtgacgttttaccccttcagcttgtttatcttaagaattaaaatattctctctctgggcgcggtggctcacgcctgtaaatccagcactttgggaggccaaggcaggcggatcatgaggtcaggagatcgagaccatcctggctaacacagtgataccccatctctactaaaaatacaaaaaattagctgggtgtggtggcaggcgcctgtagtcccagctactcgggaggctgaggcaggagaatggcgtgaacctgggaggcgcagcttgaagtgagccgagatcgcgccattgcactccagcctgggcgacagagcgagactccatctcaaaaaaaaaaaaaattaaaatattcttctatgtagtcgtaatacttttaccacaccgaggtctttaccattggtataataatgtatactatacagtctatattcaattttccctaatgatctaagactttttttttcttttttaagagatggaatccagcccggcactgtggctcacacctgtaatcccagcactttgggaggccgaggtgggtggatcacgaggtcaggagatggagaccatcctggctaacatggtgaaaccccatctatactaaaaatacaaaaaattagccaggtgtggtggcacgcacctgtagtcccagctacttaggaggctgaggtaggagaatcgtttgaacccgggaggtggagattgcagtgagccaagattgcgccactgcactccagtctgggagacagagagagactctgtctcaaaaaaaaaaaaaaaaaaaaagacggaatcctgctcccaaaggtctgggattacaggcatgagacaccacgcccagccaagactagtaattttgaattactgaaccgagacctaccatttaaattgactatatgattttctcttacttatgagggaccagaaaagtcatgaggattatttgaatttttactataggccaggagttgatttattcttgagtaagtgtaatagaccagaaagagacaaaaagaaagtttttgcgtgaaatccattgtttctccgtggtcaagctggcaggcacacttttaaaacaatgtctgaattcagtatgctcttggcattattcaagaatagatttcttgtaggtaaaattgacagagtaatgataattgttgaagctgggtgatggtggttcactaaacttttctccctactgttgggtataattgaagattttcatgatgaaaagttaaatgatttttttgactctttgtgttttctaatttgtagatttggaatgttagtaaatcacgtaatgcattccttagtatcagaggaaatcaatttataaaactaaaacagtaataataatagttttccatatgtagggcaaactaagctaagtcttttccaaattcacacctctccaa

SEQ ID NO: 96361 - DNA, 1043 bp, Homo sapiens
gttcatttatatttttctcatacaatttgtatatcatttggccatttaattatagataattaaaaaaaatagtttttactgtggtaaaatggacctaacataaaatttactatttttaccatttttaagtgtataggtcagtggcattaggtacattcccattgttgtgcagccatctctaccatctttatccaaagcttttcaccttcctcaactgaaactgtacccattaggcagtgggtactcactccccaggcaacctggcagtccgtggcagactttgtctttatgaatgagactactctaggtacctcatataagttgaatcatacggcatttgccattttgattgactagtttattttacttagtataatgtcttcaaggttcattcatgttgtagcatatgtcagaatgtttttcctttttaaggctgaataatattacattgtatatacatataccacattttatttctccattcgtccactgatggactcttctactttttggctgttgtgagcaatgctactatgaatgtaggtatacaaataatctgttcaagtccctgatttcaattcttttgagatgtatacccagaagtggaattgctggatcatagttttattttttgaagaactgctatactcttttccatagtggctgcaccattttgtattcccaccagcagtgtacacggatttcaatttctccatattcttaccaacacttgtttttaaatttttaaaaaattaaaaaagagaactctatattacagtagtagctagcattaagtaagggcttactgtgagcccaagtgctgttctgtaagttttacatgtgagaaacttttagccttcacaacaggtttccaaaatatatatatagagaatacgccattaatagagttcctcggataacagagtgatacactggaactttgaattgaggcaccagtattcaacacatgcttctatatccaaaggaagtgctagaccatatacagaattatagaaagctggttttgtgacatttgaatccct

SEQ ID NO: 96362 - DNA, 1012 bp, Homo sapiens
acaataggggactatgaaagatggaagggtcacctttttgcttgctgtaactgatgacccctctgctgtgaagtcacttgagagtgactgagaaataatggaatttatctggggttttgagagatggggaagtgagatccagagaaatatgtttgaaagcatatattccattgagttcagttcacttgaccagttttttagttcaataggatttttgttcagttgaataaacctttagtaagtgcttaaacagaatatgtaaggtactgttctaggcatttcatgaaaggcaaagatggctgtggtgttttctgtcctcagggagcttctgctttagtgtaaatagctgaagttaattcatggcagaatgacataggtactttaaatgtgtaagtggcagtactatgggaatttggaaagaacagtgaataccactggggttcagaggagtctgtggaggaggccaactttgggctggatcttgaaagaacaaaaggatatcaagtaggaagagaggcattctggcatgagggaataaacaaagccatggaaatgggtgactgagaagtaattctcattcacactggaaaatgataattttactttttaaataatgctttcaaccatcaattaagcttgcttgcccatgttataattccagttgaatcttggtatttttatgtcatctttgcagttctctagtgatgcgcaatgtgtcttcctttatgagctatagcgtgcattatcaagttggaaacgttactcactttagtacctggatggttataagcatcaaaaccaaacttctaagtctaatcacaaagcctattactttccctgatttaaaacagtaaaatgtagagaagatgatgatttttacatatcctaagaagcacttggcagagcaattagtttcataacaagtgattgttttttaaagctctctctagaataagaatgagtatcttgatgctagtgtcacttttaaatagctatggctccaggaatgtgt

SEQ ID NO: 96363 - DNA, 1800 bp, Homo sapiens
ttttagtattgggttatctcactgtaagggaaatacagtaaagaaaaacatctgttgactaaaagggttaatttcaggactatgattttcatgtggaagtgtttgcctggaggattcttgaaattttgccttcatctagagtatttaaaatgtttctatttgcaaaaagctattatactcagaattttctaggaaaacatccttttcagtggactcttcaatagtaaagagtcacactgtatggtgttagtgtccatagaacagttgaattcataaattaatatttttagacctatcaactaaattaaattcacttaaaatgatttggcaagcaggtatgaactgaaaataaacctatgtatttttgttttttagaagtattgaatcagaagaaattggaacatcaaagtattctctgaaccaaattgatgttttatttggttgagagtccttacttttggtatactatttataccagtaatagagtatttgaaagcagtgctgggaaatgaggtgcatggattctctcaatgttgaatcccatttttttccctcagtgaatcttcaacatttttaaatcttagcattcaacaaaaactctacagcctagatataaaccatagattactttttatatagcatatacagttcatcaacaaacagtaaagtttccttcatgacttaccttgaaatctttattcaaaggatatactattcaatttttcagtgtgccactgccaccactgcatgtttttggtcagagtgcagtgcaactaacatcgccatcctgctaggaaaaagatctgcaggttgctggatagtggaagttgcacacatctaatttacaagtcagattagagatcagaatcttacaatagctttatgtggaattgatttcatttcatggtttttaagctgttttttcattgaagcaatgcctgtaactgaaagacaggtgtgttgtagcatttgaataccttaaactcttttgaatctggaatgaaagggatgttctggattctaaaactcagagattttgaattaaatgccatcattcatttattgtgccataattgaactaccttgagaactgaatttggaattactgtgattaatatttggaaagctttgccattttcaaatacaagtcactttaggaaggaccacaatttgtgtgtgtgtgtgtgtgtgtgtgtgtgtgtgtgtgtgtttatttaaatagagcagcaggcacctttttaccttatagataaggtaaatttaataagaaatacgtggtttttaacattgatatcccattctatttaagaagtccattgtggcctttctggaggccttcaataaggggaaagggacgatgaatagaacactgtagattgcagtttatgtttttccttttaaggcaaaccattttcaaaatataataatgccaatgaatacataaatatagattgatagtttgaagttattttaagtttacctgtctatattaaaattgagagccatctcataagagtgagtataaaaaagttgttcattttagagtgcatagtgccatttaattgaattagagaacacagttgcaaaaaaaaagcatcttttagatggttcttgagccattaattgatttattgaatataatcaagaagaaaaatccagatgtttaaaactagttttgtatcaggtcagaagagtatttagctttattctcctccactcccttgtctgatgagttctcataaattgctttctgaaatgacaaaacattgggatttggaaagccttgagaattcatcagtt

SEQ ID NO: 96364 - DNA, 1086 bp, Homo sapiens
gaatgccgtgactcagccccttgcccacatgtctttggcaggaaatactgccagactagactgatgtctagtacaggaagtccattacagagaatggttgatataaagcagaaattcagaaccaggagagtttggggacatggagcaggccaaagttggagaactggaatttgacctgaaggtgagctccttgtcctcttcctgcccaaagtcaatattaaccccttggattgaggcaaaactgagccaaaagggagaccaaagtgactagagctgtctgcattgtagtaacaggtctggccaaacaaatacttgttagttgaatggatagaagtaagacagggaaacattatagtctttccacttaggttcttcatgtgacatacactaggtatcatgttacctactcaccaaaaaaataatttaggccaggggtttgcaaacttctccttggaaggaccaggcagtaactattttagtctttatggaccctatggactctgttgcacctactcaagttggccactatagcctgaaagtagctgtagaagcatacctaaatgaaagaatatagccatgttccaataaagccttatttatggaagtggaaatttagcttcatataatcttcacatgtcacaaaatattagtcttcttaaaaaatctggtttttcaaccatttacaaatataaacccattcttagatcatagatatacaagaacaggttgcatgccggattttagtgcccaggcaatagtttgttgacccttttcaggcaaataaattactatcagtcatgatgctgaaagcttagcagtgctgaaatagatgttttataggacgatgctgttggtgacactgtcttattttataggtgacactgatgataaaaatccatccaagaatttatatgtgacatctgcagcaggttcaaatctctcagctatgagacaaactggatacttcctaaggattgccatctattatgcacagagagccaaaatccgttactgaaattgtctgggtgagccgcctgctgggtccagtgatgcactggtagacaaaggagttgaaaaagaagtgtg

SEQ ID NO: 96365 - DNA, 1571 bp, Homo sapiens
cgagattgtgattcttttaggtcatgttaggaatcattgatgggggaggcaaagttgctctatagttttgttttttctttgctacacaggaatccagagtgtggtattctgtgacgagtataattgctcatctctcccctgcactgcctgctgttttaggtggtacaccacagccttccattttgtcaccttcctgtcaaaagtgtgtgtgactccttaagaatacaagttgtttgaaattaaagccacactcctctgtccaatctcaagatgtttataattcctaaaagttgagttacagcaggttataaaagatatgggattgaggtagatgaaccgtgattccttctctgtcctcctttgggtttaaatattaagcagctatcttgtagtgtaggcccttaaaatagaaacaaagggttggggcatgatgcctagcctttatagatcctaacttgaaatgaaaattttatggattgattagagttttaggagaatgattatctgctgcaaattactaaggtttgcagcattcctgggctcctggcatctgaaagctattgtataatctgtggagagcctgttaggtgtgatgacgtttgtcttctaggctttttttttttttttaaatggaagcaagcatgtctcagccacagagatgtgtactgacaccttataagtgaatttacttttttctttactcaaagcacctgaaaacatggctctttattttcagtgtgcaccagcttccttttcacctcttggtctttaagatacaaggtgattcatatcttgattaccttgggtaggtgggtatgatatcagcaagctctgtgtccggaccttgtgagcaattcctaggtcattgcctgaggccttcttaaatatatgcaggtaatgtgactgcagattttgggtttcacagtcagtccagattgattttgactctgggccatttatgagcagcaagcctttgcggggagttagtaactgctccgagtttcagttttctcctatctgatgggggggattagtcttttttagtgttatcttttttttagtaacttagttgtattaatctgttgtcgtattcaaatggtgtgaattaatgaactatctagagcatatcattttaaaaggaagtaggttttgtactatttaaagacagaggtaatcaaattagtaaaaatctttccaaatagaggtcttactcaattgactttaaaactgtataagactcttgtagttatcagtttatttatatacaaataatacactcctgcgtggtatagcaaggcagagtatgtattgtattctgtagtcagacagacttgtattggatgattcatcactttccacttcggtaaccttgggcaggatactttacctatttgattcaaagttttagtctgtaaaactactaatgaagatttaaagaatagagatgtaaagaacaataaagggtaataaggacaataaaaaggtggttgtgaagacttaagaggaaggtatgcaaaatgcttggttatgcctgaacccaataaatactgatagttgctgttgtgaccttg

SEQ ID NO: 96366 - DNA, 1347 bp, Homo sapiens
gattaagaactgaagcccagagagggtaagttgtttacccaatattacccagcttaattggaaacaaagccagggttcaaactcagactttctgtctcacatacctgccagcatctggctcatgttaatatttaacacttatataaagctattcaacatcaaaattccttgactttgcagctttgcctacatggtctgagtgatgtataaaattgcacttggcattagctaggaaggtatttctgtcgaagctgttttgtcccactggtttcaaggattcctgttgcacaactttcatctcagtcagggttcatctgcatgatccaggcaattctggccagacctccggagccatgaaccaaccaaatgcattcatcctcggtggtgacaaggtctttgcctaattgtaagaattattaagaccctattgccaagaaaattacagcatcaccgggaaggtaaaatatgaaacacaaaatgataattcaacactactaacgaaggattcgattgtaaattaccaattttaagatggaaaataatccatgtaaattaagggaagacttcttaacaataacaacaaaaaaggacaaaaagtgaaatttagaatttaggttgccttatggagaaaaaaggtaaaggaaattgcttaaataaagaagttaagaagaaaataagcacatcaataaccaagaaaaagataggagatcagctgaggtaaaacaggagattcattttagaaacaacagaaaactagctgaaataatagagtaggatcattgataaggggcctaaatttgagcctgagatatttattctaataggaaatcatctgggtggacttgcaatggggaaaggaggacaagacagggggaccatagccttgtccagttctgatgaagcaaatagaatttaaaagaatcgttggtcgtaaatgcaactaaggaaagacttgggttcactgagtatatgtaagaatcaaagatgagaatgaagtccaagatgactttaggattgtagcaggagtcaataacaggacatacagaacttggcaccttagagttggaagatgatcaacactcactggtacagcctctaaattgatagacaaggaagccagacattttcccaaggtagaccctcatcgtcacaaactcattccagaaaactgtagtttactgtttaaatagaattagaaggtaaaaaaggaaatgctcaccctgctcctgtccctgctggtgttttatggtcagctaatttttatttctacttcagccccactgatataaaagtgctcagtaatccagcatataatattacaataggaaataaatcaataagtgtttg

SEQ ID NO: 96367 - DNA, 1110 bp, Homo sapiens
cttttgtttggtttcacagattcttctcttggtagacaattgcaattgttatctaatcaaggaaatgtaacggtaattttaattatcattttaggtgaaaaaccttacgagtgcccaaactgcaagaaacgtttctcccattctggttcctacagttcgcacatcagcagcaagaaatgtattggtttaatctctgtaaatggccgaatgagaaacaatatcaagacgggttcttcccctaattctgtttcttcttctcctactaattcagccattacccagttaagaaacaagttggagaatggaaaaccacttagtatgtctgaacagacaggcttacttaaaattaaaacagaaccactagacttcaatgactataaagttcttatggctacacacgggtttagtggcactagtccctttatgaatggtgggcttggagccaccagccctttaggagttcatccatctgctcagagtccaatgcagcacttaggtgtagggatggaagcccctttacttgggtttcccaccatgaatagtaatttaagtgaggtacaaaaggttctacagattgtggacaatactgtttccaggcaaaaaatggactgcaaggctgaagaaatttcaaagttgaaaggttatcacatgaaggatccatgctctcaacctgaggaacaaggagttacttctcctaatattccgcctgtcggtcttccggtagtgagtcataatggtgccactaaaagtattattgactatacgttggaaaaagtcaatgaagccaaagcttgcctccagagcttgactactgactcaaggagacagatcagtaatataaagaaagagaagctacgtactttaatagatttggtcactgatgacaaaatgattgagaaccacaacatatccactccattttcatgccagttctgtaaagaaagttttcctggccccatccctttgcatcagcatgaacgttacctttgtaagatgaatgaagagatcaaggcggtcctgcagcctcatgaaaacatagtccccaacaaagccggagtttttgttgataataaagccctcctcttgtcatctgtactttctgagaaagga

SEQ ID NO: 96368 - DNA, 1042 bp, Homo sapiens
ctctgtaccttccaagatattttctttttaaaaagaattatttattcattttgatgtttacttaaatggcttaacataatattcaattttcttccattttttatgaaaattaaaagcatgcaggacactaaaccagtgataatagagtacctgtcttccactgtgaacacaggcttgctacaaataaagaaaatgaatgccaaagggaaacagaaaatgataaagaataagtatctggtctatatttcattacctgtaaacactaagcaaagcccacttttaagtatctttgagaaagtattctaaagcaacttgattatgggggctgactaatttggggaccaatatttctcttttatttagagttctgttaacatcgcttgaattttaggcaataatttttaaggccagtctatgttgatatttattattatctgtctgaaaaatcaattatctatctaacgcagccataaagatatctataaaagtgtcattaataagcaacattagtaagagtggccaacatattgccaagagaactgaggctttcctgacaaaaagggacctgaaaattcaccctaacaatctaacagtattaaaatacacatggtcatgaggaaacatttttaattaacattcttttttatggctgggcgcggtggctcacgcctgtaatcccagcactttgggaggccgaggtgggtggatcacgaggtcaggagatcgagaccatcctggctaacggtgaaaccctgtctctactaaaaatacgaaaaattagccgggcgtggtggcaggcacctgtagtcccagctacacaggaggccgaggcaggagaatagtgtgaacctgggagacggagctggcagtgagccgagattgcactactgcactttagcctgggcgacagagcaagactctgtctcaaaaaaaaaaaaaaaacaacaacttttttttggtttttttgagacaggggtctcactttgtcactcaggctggaatgcagtggtgcgatcacagctctctgcagcctcaacctccc

SEQ ID NO: 96369 - DNA, 1042 bp, Homo sapiens
ggataaaactcctggttttttgttttcttttgttttttgttttgtttttgttttgtttttgctggggaggggagaagcggagtcatcaccaagggccttcttttgtttttcaggcatgttaaaactgtataaccaacagaaccatttaaaaggaagaaaaacatcacccaagttccgtgtctgaatgaaggctgtcttctcaaatgctcctcattactccagagcagttatatttggattataattaaaacgaggcttcttttttttcttttattcttcttttttcccagaatgcctcaagtgaagtattcctcccaaagttattgcacctctttactaacaagtgctgggattttaataagcctgtcccccctccttaccctgtacagaggaaaggatggcaaagagtggctgtggtacaaaggttacatattcagtgatattttctgcttttattggtaaaaatggggaggtgggtggaggatttcctttaattatgaaataagtgtgatgttagtagttatttctgtaacctggtgaaaatgctgcatatttcaggcctaatttttagcatatgttaccacgtgtgtaataaaacggtgatctgcgctctccgaatcttttggctgttaaggagcactctgattataactagttgctgtagaaacctggtcatccagatgcttatcaagaatgcattattattttttaaaccttggtggagaagccacagactgcagcagttggacaaggtcacatatcgatggaagtgacatgtctttcctctttccattgtgtgatcgtccagggcctgggggcattaatatgcaacggttctgtttttctttcagaaggacttgtaaactctttaaacagaggcacacagttgcaattgttgcggtactgagtgggtgtatagaagctagggctgcagccttgtccagttgcagatagaataaaactgacaatgatgcaatgggcctggcatgtagacaactctgtgggatggatgaatggtgcggctctcgctgtccctccggtg

SEQ ID NO: 96370 - DNA, 1097 bp, Homo sapiens
tgcctgggtaactgctctggaaggttggaatatctgttgttgaaggaggtttgtgattgagggccctctgacacaaccttttgttgcattgaggtgtttgatcctctttccctttcttctaaaaccaatcccatccctttaaaaaatggataaccagcacttcttttacttattgtcagcttttggaaagttactctgggggtttgtagaagtttaactagttaactctttgcatgctgatgtcctgtcgctaaatattcttcttctttctaaacaggaaggattttaatcacttatatcaggtaactaccgctgttatgcaggcatagcaagtgaaacatattaaggtccagaaataaagcatttgtgttcaaggtcttcaaatgtgagagtgattcaggctttgcaatgagacacatccttattttctttttgtcctagaaccgaaacatgtgagagttatgactctgccacttgaaaaaacatgatgatatactaatttttcattgaagaacaacaggctttggtaataagtaaatgcaaagggttacttcagaactggggtacataactgaatggcaacaaagaaagagagccttagaatgaaaagtgtaggggtcttgttccagtctgctgactagatgctggaatatttttttcccaaaagaagggacacaacccaggctctaggaaagaaaagaagcttaagtggattatttaacaaaaaagcaacttatggcttctagatagtgacctacattctgcacacaataatgatgttttacggtggtgatagggttaataacctaacatcattcatgtagtgttttttgaaaattgaattttactgctacaaagtaaatgtaacagccctctggagacaatattacaggcactttattgtttgctaagctgatgtcatctttctacagactgactttaaaacaaaggcagaacatttattacaaatatcactgtgtgaaaggaaatctactgaaatattgtttagaaggtgagctgataaaaaagtattaatacttggctttgatcatcttgtactataaagttatgacttcaaattttttctcatgtgatct

SEQ ID NO: 96371 - DNA, 1024 bp, Homo sapiens
ctgtagcaagttgttcagtctaactgcatctctgcttctcataataatactcatgttatagggcagttgggaagaaatactggtaacaggtaaagtgccaagcacatagtaggtgattaatgttctgtccccttcctccactcttctttgtcacttgagcattcactttgggttggcatttagtgagctccttctgcccgtcaacaagtcaatcaacatttaatacataccatgggtagatatcttacccctgttccaaatttcattatgaaaattgggctattttctactcaaggaaatgagcatgcagaagtaccttctgtacttagaatcacaatcattttagctattttccgcttaatctgacggtttctttgttcccatcatcttttttagtgaagcactttggtgtttctgcaatcctttgctatcattctgtgcttgggtatctcagatctctcttctcccccgatcctttgaagacatcagaaaagaagaagcacaaggtctcttgactatacgtttgccacacaactgtgtggattggttagttaatagagttgattaaaacactttgtttgattctgcttaagcataccagaaatacattcaaaatctacagctacaaaatgtaaagaaggtagtccaaatatagtactacataatgaggctccctgttggtagtatataaagcagtttagagtatagcttcaaattctaatgaagatcattttaaatcttgcactgaattgtgaatttaaaattcccatgttctccataagtatctgaagaggggcatgtaaataccataagtgaattaattactgccttaagttggtaaagcatgtgtgaatccaaactttattcttgaacttgcacttctcttcccaaggttttttgaaccatttcctatatgctgagttctgagtacctatttaactactgaggacatatgaagaaggtagttttctttgcatggattaaatgtttcaatctctgaaaatcaccaccaccacaacaaaaa

SEQ ID NO: 96372 - DNA, 1040 bp, Homo sapiens
gaatgccttaggtatgatttcactttcgctcacatcaatgctgacctgaatgcctttcatatctgatccgctgtgtctctcccagtaaacatcccctgaggggagaacaaagaaaggagctcttcttcttcttaatcacaattcagccctttcaccgccggcaggctccatttgcattctgccacagaaagccaagatgaaaagaaagagagagagaaagagagagagagagagagagagagagagaggcacagggtagtagctgagtaaaataacttaggtgtttgtggctgtttgttgggcttcccctagttaccagccttatatagctgatgctccaccaggccctgtccctcctgacaggcatatagtgttacaagatggcatgtctgtactattcatggccacccgctcaacacttgaggtaaaaagtgtcaggaggggatcgaattctcccccagaagcctgttagatttggggtcaggtgtgtggacttcccgcccttaagtgctgcctacgatttggctttaataagtctgattgtttaccagcggaccagagaggtgagggccctgggggtgggagggacgggcgagctggagactgggcccctggtctggtttcagtgacgggtcctcacacccagcctgaacacactgataaatcctcaggaaaactggaaaagactttcccatttttccccctgactttttatgataattcatattttcaaatgaaaggggaaaaaagccaagaagaaactctcaaatgagccaaaaaggaaaaaaaaaattctctgaaaagaattttagggggaaaagttgtgctattttaaaaagctttgagggctgtaaagtgccacgtttttcacaccttctccatacttttttttcagatttttttagtatgtttaacatttgtgagatgacagcctttttgtatctcaaactggatgcttcaggatttgtaggggaggggttggtggtattcacgttctcttgtgagagaaagtttgtgcctaaaggcctccttcctgggaa

SEQ ID NO: 96373 - DNA, 1010 bp, Homo sapiens
tgaaggtaggaaaggagggcgttgctagcctctagcagtgccgcgtttattctaagatgtgggagattcttttccttgcaacagtttttgtcatctgcattcttccaaggcttttaaggtgcattttcttctgtgtgaaaggaaattctttgtccttttcctctcagcaccgtggcttcccaaggtagacactattttgtgcctgtcacagagagagggagtgcaggtttgcaatgctcacagacaattgattgtctgccctaatgtgtttcatttacatgtttataacgtcaatggtgctggggtgtccactgtaccattcattcccgcattcccacaagggggcaattgtctgaatggccaagtcagacacctttttgattgctctttggttgtcttttcagagcaaagagataaaggaggaaaatctgtgatgcagaaacactagttgaaaatatacagaattaaatgtcaccacaaaagcagatgttaacataagcccaaatatgctttttagccaagatgtgaaggttgaaaaaaataattcagagcagagggaaggatgatttaaaccaataaatatagccctattccccctctttacttcttttctgtctttagcaatcagaagatgaaatgtaattttccttttcatttttaagccttgaaacatccaggcacctcctcattatttgtatgtttgctgtgatttgtgaattttgtatatatttacatagctctgtttatgccaacagcatcagcttaccacttggaaaatctattgaatgactatttgggctgtggggagggtaaacttttaaaaagtaagatccaagtatttcttcatcaagcagtttttaaaaggaaaacgataataatcagtaggctccatggaagcctttgccttaatagctatgtgccaaatacttttatcttgtgtgacagtcatgtcagagtgaaatctctcaggaaaagtgtaactagtagttacaaagtaaataaaggatttc

SEQ ID NO: 96374 - DNA, 1066 bp, Homo sapiens
tgtatatcgaattttaaaacagtgtcatctcggccgggcatggtggctgatgcctgtaatcccagcactttgggaggctgaggcaggcagatcacaaagtcaggagattgagaccatcctgaccaacacggtgaaaccttgtctctactaaaaatacaaaaattagccaggcatggtggcaggctcccagctactctggaggctgaggcaggagaatggcgtgaacccgggaggcggagcttgcagtgagctgagatggtgccactgtactccagactgggagacagtgcaagactccgtctccaaacaaacaaacaaacaaacaaaaaacagtgtcatctcattcaatcttttcctaagttaattacatgatggaatttaagtttaggtgacagacataagtgaatttacatgtttgtacctttcccctttattacataagtaaatatggctttcaactgaaggaaacaaaggtattagaatgtaatattggaggatgcaatcatttaaatgagaaaccttagtggtttatattaagttcccaacatgttggtttgatagataattacatgattaggaagggttttttttttgttttttgtttttttgtttttttgttttttgttttttaatcctcccttatgtagccaagaaaccagaatgccttctttggaggttaggatacaaattacctaataagtcatacactttgtgtaataaaatcacatatataaaacctatggagtacataagtggttatcctgaatattcctgctttatttttcataaaaggataaatagtaacattcggggtgtggttttatcaaattttactttttattattaattttaatctaatttaatttaagaatatattttaatatgaaagacatgtaataggagtggcgtgtttgtgtaataagaatgtttgcatgggtatgaagaatggaggaaaaaactatttgcttcatgttaacatgaaaactttatttccttactaacatgacattattacagaattaagtaatttataaaggtaaaatttttattgcaatatgcttctgaa

SEQ ID NO: 96375 - DNA, 1341 bp, Homo sapiens
aagtaaatgcaagggaggagaaacattctttgctttggctttctccttcctgccccccgcctcgtttttctcattcattcattcattcattcattatcttttctttatttctgtatttattcattcctcttttatttttacctttttcttagggattcccttgctattagttgtatgatgtacttttggaagacggtggttactcacgaaaaataccttttacacttgagaaaaacaaaacaatttcttttaagtacagtacattatcctgctgagctgtcatatgagaacagaaaagtattcttgttcaaactcatgaagttggaaaaaaacatgcaaattaagtgtgaagcataaattgttctgaaaacaaacaaaaacaacaacattaaaaagaacaaagtcatcaagggaaattcaaattcaggacacagctgtgcacaaccttacaaagcagagagtggcaaagctcacataaagaaaggaaagattacattaaaagagaatgctcagtgaaacaagacatgggctaagtctacttttatttagaggagatcattgtaagatattttaattactgcttagaaacacctttaaggaacaatttccttttatattaataatgaaattaacttttgtttcaattttgttcggttttcttcatagcagtgggacttataaagtgaataggttgtcatcaaatatgcttaagagatcactcgttcacttgtttactaattcagtaatcttttattgctcccctcctatgtgatgggcattcatgtttcacaattaggaggtacagtcctgaagtttcatgtactttaacatcctgcacaggatactcaatgtcaaatataaacacaatgattacagtaaaatgtgttgatggaggtatatccagagttcaaagtggcacacaaaaagacccttcagtcatattaggggcataaaggttaagttgtgtgtgcgtgtgtgttgttggctcactgtaacctctgctcatggttttaagcgatcctttcaccttggcctctccagtagctgagactacaggcacacaccaccacacctggctaatttttgcattttggggaaagatggggttttggcatgttgcccaggctggtcttgaactcctgagctcaagcaatccacccacattggcctcccaaagtgctgggattacagatgtgagccaccatgcctggtggtggctgtaatagggtgagcaaggggaggtttctggcatttcaagcaaagaggcccatgtgagacacagtggtctacaatagtttgaagcaatctaaagctacaggtggttaactgatggtggagcag

SEQ ID NO: 96376 - DNA, 1378 bp, Homo sapiens
ctttttgttctgttttgtttttgattttggattatgctcaattatgagtgtcagaaaaatactataacaatcagatataacagaggtaaaggacctggacagagtacccatttcggctacctgggcaaaaagaaaatcaactatttgactgaaacaataacaccagcaacaatgaaaacagcacctggaacaacacaaccctccttctttttaaaacttggagactcttagttcctggcacttgcaatgaatattagtgttcaataaacaatagattaatgaatgaatggttataaaaatgacaaagtactttttttacagcctttggatgaaaacatgattattaagacttgctgctggaaaaaaataaatcattcttttatttatcttcaaatccaagtagtttccaacatgtacacccaaatcaaaattatgagtattatttttaatagattcttttttcttcttgagtttaaacaatgagtcaaattttataggcaccccaaagctatccaaaaaaaatctgcccttgaaatgctgaagaccttcagtgtgaactaccagtcaaattgcaatcgtattttgaaatcttaatttccttcccaagataggactttaagcctttttctattttgatgatgaaatattggatttatagtatagaagggtaaacttgaattttcataatagtaaaaaaaatacaaagtatcattggcaaaaccactataccctcacaaaaaatgaagcactataaatagaatattccaatgggcagatgttagcttaaagtgtgcattgtttggaaaaggagttaattaacaacttattaattggatagaaaatctgaaactgttgtacttctagcaaatacataattttcttcaagtattattaaagcatttttgttgtacctattaaagattcttgtctctaagttaatttcattatgctaataagctatcatcgttacagaacctaagctttgatccatgttaattgtcgtgatcttcaaagacaaagtcaccacttactttaaatgaattttacatctttttaaagaatcatacggaaattaggggaagtaattaattttttattatgtgtctcaatatttttaagggaggaagtcaatggtattggctagaattcattttaacatttaactagggaaaacagcatgaagcaaaaaaaactgttcagatgcaaaagattaaagaaaatttgaaactgggacctaatttgtcttgataaactttggtgtttaatatgcttcttttgttctcagtgtgaaactgcagggttttgatttgtgaaaactttttgaagaattaattctttctaatttttcttcatttctttgcctttcttttacagtaag

SEQ ID NO: 96377 - DNA, 1154 bp, Homo sapiens
tttctgaagatatttacatgagtttttttcttttaaaactaagttctgtaatagcatatgaacatttattgtatgtgccatcttacaaattttcatagacaaaatcacacattttcatgtgtatgaatgtgtaatttctctcagaactgcctggtggcagtggggggctggaggctgtctacattatattttgagattgaatgtaattcaattatattcacctaaattatatttcccattatattttgagattgtttcaattgtattttgttttgtattttgagattgtttcaatactgttttaatctcaaaatagaatgggaacaatctcaaaatataatgggaaatataacttagggtgaaaagactcataaaaggaaattatttacattaaaaaatatataactcccaaatcctaagcaactcttatccataacatctccctcaaacatattaaatcatacttcaaatgtattatagagataatagtaataaatttgtgaaattattctcttattgaaaatgttcactttaggctacaatgaaaaatctggggacatgataaaagtgacaaagaactcaaagtttactcttgagaggattgtgttagacttgggttgaggagggaagaggaataccattcacatccagctctaccagtttcttcctaagctgtcagagggccctgctgtaggtaggagggagaagaaaaacttgtagaaagtggatgaacaacagccttttgtttttccacttttgtgattgtaaggaaagaatgaagtgtggactgctttccttgacagatcttaacacagaaattcatagattcacatacctccttttgtcccaagcaaagccctctggtcactaagctaagaggtcactgctagatatgactgtttagagcaacatgtgccatgtacaagtggcaaatcctatggaggctcagaccctctatgtatagctttaatcaatttaaagttttagaccagctgacatatgatgaaaattatgaataaacaactttaaggttaggagataagaggtttacgaagctaaaattgttagatagtttaatcaaaggtggaatttattgaatataaaactttgttttaagactttttattaaactattagaacaacactgcaatggc

SEQ ID NO: 96378 - DNA, 1032 bp, Homo sapiens
ctcatcattgcatctcaaacagggcacagaaaagggcaggttatggtcctcttccacaataagccatctaaattttcacaacatgaagaacttggagaagtggcaattatctggttaactgactaactgtagatcataggcatcatttgttgtaaacattatttagggttcagaataattcagtttggggaaataaaatctagtttgaattcaatgacagattttcatgtgactctgctctttgtgtcactgggtagatgcatgcgattccaatcatcacatagtagcttagcagaatggagactagtaactagctcattcaatttagccttctctttgggggtattacggcctactgagtacagagtgaatgaatgattctgatgattataaaggccattgaagatctctactagtcaatttttcatttgccttttaaaaaattgtagtttcagctttacttttatagctccaggaacatccagttacatttttctttattattttttctttaaagataagatcatcaataagacgattgtcttgctcatttaaaaatattctttttctcttcccacatcccaaaaattacataaacttttccattcttaattcaatgacttaaacaactgttgtgaattcataaatggaagcatttgactacaggtggggattaataatttggaagggcaggaaaactgttgaaaacaaagagctagtgtccaagtaaatatctcttgagaaattaggaagtacaagttacactgcatgagaagaattgttactgagtgtaatggtttaaagaattccaggtggtctgcgtgggtcataatgctagcatttcatcttggaataatctttattcttttctttcctttttttttttttttttttttttttttaagaactagggctgctcctgcaaagtgctagaaagtttgttcctataggctctttaagtctgtagctacattaatacaaaataaaatgtgaaagaataatctgttaggaaagtgtttcttttgtactaac

SEQ ID NO: 96379 - DNA, 1154 bp, Homo sapiens
gagtaaactccttggcatggcttcttctacaatctagtcccaacttatcactgcattcgtatctgatgtcacatacctccagtcacaccatacagtgacatttccccaagcatcatgcagttttaagcctcttcacaaagatcttttctctacctggaatgctttacttctttcttactcaccaagtgcatcctgttcctttttcaagacccacctcaaatgtcttattctctttgaagccgttttcaactttcttaggaagagtcatggcttcccctattcgtataacacttatcattaactatcacccctagaagcaatacactgtatctccaccctaataattaactcatcactgccacaaggtaggccttaagtaaattagtatatgaaaaaaattaaatgaatgagcaaatcgatagtttattcacacatagggatgtcattcagagcccacagtgttcagttttctcttctcttttcacatgggtaagtgatgcactgacctcatcagtgggaattgttctagtttatttttaaaaggattttgctgcatcgggcagtcagtgccatcaaagaaaccttgatatgcttgtgccttttggggttggatagggaaagtgaaaccaaaggtcaactacagaagcagaggccactgatggctggataatgaatggccactgacttgatactacaaacagaagaaaaaagtggcaaagcaatggaactgtcaggaacaaggtagtcatgagcctatttattgacttgatccttagtcaaaaactttgtaaaattgttttagcagtaatctcccagtttttagtagcgggactgcagctaaaacaatttcacttaatagcagttagatattataactacaaccacctggaactgtaattctctcactaccttccttcaatatttccactgtcacagctcctcaacgaaaataatctcttcttatagtggaattactgaaattgatctatcagtttatatccatgaatcagcaacaaatacatttttaagaaataatttctgttctcaacttaatagtttgtttaaataactgacatctacttttgttgttatgggtattagtacatcaaaatcgtgcttgtttagcctagtaagtaaattatacaatcgtggtt

SEQ ID NO: 96380 - DNA, 1096 bp, Homo sapiens
tttcataggtataagcagccctaataagatttggtgattcagaaattagagtttattataaggaaaagttttttttcatattttagaaacagattttaggttatttcatatgatatcatgtgtatgccattcatcattataataatagcactgccctatatttgtctaatagtttatagtatagaaagtattttaaaattaactcatgtctttatagcattgcatatcttatggtgtcatacttttatcactccccagagttagaaatatcctcgaaccatgcttgttcttcacaggtgtggatacaatgctatttctgtgagattttcccccatgcactcacattgtttattgctcctacagatcaagggctagaacagagccaacacataagctactcatatgttgcattcatattctgaattataggacttgtgtaaactattaaataatctctttaatttgtctactaagattgcatgtaaaaacagttaaatatggcaaatttggctaaagagaacaccagaagagaagaaatgcatgctgtcgctttctctttctgcctaggaggatctaactatcactgtagttgaagccctgtgaatgcaaatgcttggtgtcttagtttgggtttccccagaagctgaactagacataagggcacgagggcaagcagtttatttgggaggtgcaggaaacactagttgagggtggtaggggagaggcccagggcagtgaagtcatccattaaagagtgctttattaagctagctatcactgtgtgtggctggagcttaatcctgcaggggacctctggaatatagtagaaaacacacacctcagaatgaccccatctgagaggtgagaaagttgagatatttacataccacctcctgagactcactgtatgaagacttattggataggggtgggggaagagagtggcagtggtgatggtgtgttcatgtttggtatttctgagctgacatgtgtgcacagagtagctttctttggtccagaaatgaaaaccccaggcacatagatgcaaatgatggcaggtggacaccagtcagatcacagaaccaactctgcagat

SEQ ID NO: 96381 - DNA, 1021 bp, Homo sapiens
ttccatatctcttacttcccagtaatacaatataatattagtaattttatttcatgtttatctcttcccgaacccactagggtatagctccatgagggctggtgtcattgtatgttctgctcatatgtttactgaaggagtgatcagcacttgtagatgctcaatacataaagaacaagataattaatgttctttcctctttctcttgaaatttgctcttactctgttggcagaaatagccctctgaatccacagtgcccaggattccttattatttgaagggttttgtatacaatttccatattctttgaaggttctctccattgagaaatggagtgtggtatgaaataaagaattgttatttagtctacactttgaaagacaccttttatttctggaaaattactaaagttagatccatattcaaaaaaaatctaataacatattgagtaactccaatatggcaagtattgtatgtattatttcattcaaatttacagtaatactgagtgagcatcatatctgctttaatgatttgaaaattagaggccagagaatttggtaatttgccaaaattcacacagaaaatgaactgttctggagttggagcctaggttttttctgactccatatcacctattgatcagccaccttgataagataaattattaatagtatatactatgtggatatgtatcatgtggatgtgagaaaaattgaaaatgcacaaagtctctgaatctaacgagtaaagaataaatactatttaaagaaaatatacctttatctaagacactttatcacatttctaacttaccttgcttgtaggccaccccacacggaatatcttcatagctgtagaggagcctttgttaaagataaatgagatcatgggaattgaacattcatatgcaaaaaaccaattagtgaattatacttactaatttatgccaaagatgtatggactataacaactttagagttcaatataccaacattttcaaagtgctgttcaaagtag

SEQ ID NO: 96382 - DNA, 1044 bp, Homo sapiens
ttacacacaacacttgaagggtgcagtcagccctatgggctccacatggacccatttgcaaggaatagtgacagttaaagacagtgtgcactatagcacagcacgtaaggaacagttgagggaactgagaaggcttacctttagaaaagtcttgagaaggacatggtgccttgaataacagacttggcaaaaaaaaaaaaagggggggttagagttactctgcatgatcaagaagaaagagaaccacattgtagaatccttggagggataaactagaaaaataatataggcatggatgtcagacagatctaacatggaactctggcttataaagctactctatgagtttgaataagtttattttcctcttcttcacctctattttcattttaataatatgaggaagatctctatagttttgatatcaggattagaaaaatgcacgaaaaatacatagcttagtgcttgttggagtacatactcagaatctacaacagctgtgataagaatcagagatatctagagcataatggacaacattgggaagaaatgaatgaaattatcctcactagaaatgttggtaatactaatggaccaaaggacatatacagtgttggaggtggataggtgattaaatagatgatgtatagggtttttgttgttgttttgtttctgtatcctgagaactgatgaacatttattatgtagttggatacatagaaaaagaacacattaaaagtaaaatgaaaacaaagagcagtcaatctatgaagaaaattatttttcctcttacatgttttgtaaatatttagaaagatgatgatattttcttttaaaaacagaaatcttcgctggtcatggtggctcacgcctgtaatcccagcactttgagaggctgaggcaggtggatcacgaggtcaggagattgagaccatcctggctaacatggtgaaaccccatctctactaaaaatacaaaagttagccaggtgtggtggctggtgcctgtagtcccagctacttgggaggctgaggcaggagaatg

SEQ ID NO: 96383 - DNA, 1046 bp, Homo sapiens
taacattactaccattttcctaaagatgtccctttttaatatctcttttaatgctggagattatctaaaggctttcaatctttctgtttaaaatattcaccaccgagcttaaactaggtgtataagaaattatttgtttagaacaaagtcaaggtggagtaacatgtgttacagaaaatgttttccatgcaagaatctatctcatgagggtgtgagttatttgaaccaggaaggctacaaagctagcaccactagcccatatttctgggctgtttgcttttcatgaggtagtctaggtatatctactttcctctcttgattgtcacttttctacatgaatctccttttacaattggcaaattccatttcatgttttgtgtaatgtctacatttcgtgagtaagaaagctggctcacaggaacatgaataaaactttgacttgataagaatgaaatagcactaaatggaaacgcgttttttttattgtatagaaccatctagaaccaaatggccagggatgaggctgactttgcaactctgtggttgatttaacctgcacaaattcacatgtctaataaatgtcacgacgaagatctgcacctatgctcagaggccccagctctttccgttctgccatgttgtctttctggaggccgtgtgggtgctagggctcggtcccttaaaagcctcatcagtaaatgacccagatgatacctttgagtgttttttagcttttgttggttacaaagtttatagaactgaaaattcaaaagaaaaatgtttccccttccctcatgactccaaaacaaatttaaaactggtattattgaattatagattctcaagaaagacgcaataacagattttttttgtttgcttgctttagagactggttttgctgtattgcccaagctggtctggagttcccagcctcaagtgatcctcctgcatcagcctcctgagtagctgggagtagatactcaagccactactcccagcaggagatttttttttgaagtgcttttctcaaggtatcaaagaatctg

SEQ ID NO: 96384 - DNA, 1048 bp, Homo sapiens
ctgctggaagttctcacaataattgtgctgcccattatactcccattgctggtgacacaacagtattacagtaagataacatctgtaaaatagattttggaatcggtataagtggtaggaatattgactactgactgtggtcttactgtcacttttaatcccaattatgatacatgattaaaagctgtaaaagatgctgctactactggaatgaagtgtgctggaattgatgttcatctgtgtgatgttggtgagtccatccaaaaatttatggagtcctatgaagttgaaatagatgggaagacacaacaggtgaaaccaatccataacctaaatggacattcaatcgggaaatatagaatacatgctggaaaaacagtgtccattccgaaaggaggagaagcaacaagaatggaggaaaggaagtgtatgcaattgaaaccattgatagtacaggaaaagatatgatgatatgggatgttcatattacatgaaaaattttgatgttggacatgtaccagtaaggtttctaaacaaaataattgttaaatgtcatcagtgaaaattttggcaccctcaccttctgccacagatggctggattgcttgggagaaaggaaattcttgatggctctgaagaatctgtgacttggaaattgtatccaccattgtgtgacagtaaaggatcatacacagtgcagtttgaacataccatagtgttgcatccaacatgtaaagaagttgtcagcagaggagatgactattaaacttagtccaaagcaactttaacacctttattttctaagcttttttggaatacatatcaaattaatttgcaacatgttgtctattttaacagtggacctgtataatatttttatctgtgtttaaaaaagaagaaatttggccatgcaaggtggttgacacctgtaatccaagcactttgggaggccgaggtgggtggatcacctgaggtcaggagttcgagaccagcctggccaacatggcgaaatcccatctccactaaaaatacaaaaaattatgcaggc

SEQ ID NO: 96385 - DNA, 1050 bp, Homo sapiens
aatagaagcacaagatgacaagcataaatgcttaaccgtatttcaagcctctactcatgtcacacctgttaatatcccattggctaaagctagtcatattgccaatgccaaagtctagggacagagaagtacatgtcaccaaccacgtaaggccatggcaaaggaatggatggataataattctataggtaagtgaagaattgataacattattttctgtacctccgaggacatagtgcaatggaaaaatttaggaggtttttcaaaccctggtttggctacttgtttatatacatagatgcagttactcaacattttcattacttggtttcctcatctgtaaaaaggaaataaaacaattattcagaattttgttgtgatgattacaggtgttatatatgaagtgcctagctagcacggagtccagataataggtatacaattaatgataacgtaattatattgaatatgtctcagagcttcctcctcagaagcactaatgaggataataacagctgatatttatagagtatctactatgtactcactattatcctaagaacataacaggtagaaactctttcatatgatttgtctgtgtgtgtgtgtgtgtgtgtgaacaaaagaaggtgagaaaagctaagaaacatgcccaaagttagcttcattttatctcaaactatctcaaaaccaagtggcttaaaataacaattgtttattttgtttatgattttatgggccagcaatgagagctggactcacctaggttgcttttctggactcatctggatgcaggcctgtatctgcagtcagctgcctggttggctaaagctgcctattctagaatggcctcagctgttatggctcatcagtgttccagtgacctctcatcatccagcacaatagcctgggcttatttacctgatagctgggaagggttccaagagaacaagtgggaaagcttgcttgaggcctgggcttctgatgtgtcatcacatttacctctgtattaaccagaacaagttacaagaccagtccagacagaaggca

SEQ ID NO: 96386 - DNA, 1049 bp, Homo sapiens
tttgagaaccttgctcttcactcttctaccttccagaaaaatagacaattttgagcccaaaatctttcatttccaacttgtgagccctaatttgaggcagcttttgatccagagactttagattttttttccaaaaagaaaagttatctgccccattctccttccaagacatatatggactctgtgactcagttttgtcttcattgaattatcctagctatcaataatgaattgatcaaaacagtgaatgataaagtctttacaatccaaatgctattcaaatactgctcttattttagagaataaagcaatagcttcactcagttcagattgctcagagtctgcagcagtcacttggagaatcagatgttggaaatgccagaagcccgtccaaccccatgatagtcttgatctaatccagaagtatactttcctcagaatcaatattttaaaatattatattatctgagaaaagcaatacctgactaccaagactgttttagatccttaggaacctaggggttccctaggatgctgattaccacttcaccagggatacagtaaccatatctagacaataatacacttgctgcaattcccatcaaaataccactgtcattcttcacagaactagaaaaaatcctaaaattcatgtggaaccaaaaaagagcctgcatacccaaagcaagactaagcaaaaagaataaatctggaagcattctgttacctgacttcaaactatactgtaaagccatagtcaccacagcagcgtgggactggtataaaaataggcatatagaccaatggaacagaatagagaacccagaaataaagccaaatacttacattcaactgatcttcaacaaagcaaacaaaaaagttgggaaaggacaccctattcaataaacggtgctggaataattggcaagccacatgtaaaagaatgaacctggattatcatctcttacctatataaaaatccactcaagatggatccaagacttaaatctcagacctgaaaccataaaaattctagaagataacattga

SEQ ID NO: 96387 - DNA, 2319 bp, Homo sapiens
ccggaaccggaagtttggggggcggagcccggcggaggccaggagaccgaaaacgcggccgagcccggagcccggagctggagccagagcctggaccagaacttggccgccgcctgcaccgccgccgccgctgccgcccgccgccccttccccgcgccgcagccgcctcgccgccaccgccgcgagctcggccgccagtggtcctcggactttaggtgtctgggttgaaggtcggtccggacatcggacccagtcagttcccagactgtccgggcggcagcggacgccgctgccgccgccgcctcttcgtcgcctcagcctggcgttttgttccgagagacgggagaggcgagcggagctgacagtgattttgacagtgatttaaacccgcttttgttgttgttggcttttcgttgtttggttttgtgtgttgtgcgtgtgtgtggcggtttttcccccgtggtgcattttattttttatcgttgtgctcttttttttcttttttttttttaacccagtgagcgtttttttttttttttttttttttttttggtctgggcttccgaatatgttttatgacggttgattttacaccaggaggtttgtctccgaggaagacccagggaactggatatctagcgagaacttcctccggattccccggcgcctcgggaaaatgggagctgctgcaaagttggcgtttgccgtctttcttatctcctgttcttcaggtaggtgcagggagcgcggcgcggtggggctgctcctgcggccgcggcggccgctgctgggggccgcggctggtgttgagtcggagagtccagtggagcctggggaggttgcccactccctgcgcccctcggctgccaccgccccccccccccgcccccaggtctgattgtgatctggaaacctccatgcatttttctctttttgagttgggtcggcgagctgataagagtgagtgctgtgttgttgtggaagtgagaaagtcatgttttgtggccataacactggatgacagcgctggttgggttgcaattaagccgcaaataccacaagtgacaatttatgcaaaggttgagatctgaaaggagtatttagtgtgggctcctccaaaacaagggttgctttttgtcatcgtttaattagtgcttcaccggtgaatatcacgacatagatcaagccagttgctgcttaattttggctgtgggaaacaatacatcctatcagcaatttaatctgggtctcccctcacgttttcttcaacttcagcgtccagcagtgttaaaaatagttgtagttgttgttggagtattaactataacccagtgcagaagaggtatgccgcttggtattggtaatgtgctggcgttcaaccaccatttgtgtgctcttttggggcatagattttgcttacctacggaatacttattttaaacgctttgtattgaagcattgttttcggtttagaacaacccatgtgaaattgtttttgttaaatatagtacactcataaaataggttttagctcaaggttgggggaataaacgggccattttatattggaaattttgattttgtgaggacgttctatggttgcaaccagtggttggaaaaactatctagtcttttgtatttgaaattctataaataaatacagcatctagctgaaaggtgtgcagatgtacataacaggagagttagttcaatagatgaaacattttaaataagtctcattggatctatttattgtaaaatttaatattcagttacaagcttgtggcatagaattacgggggactcttggaaacgggggcgaattgacaggtttcatggccatgtctttatctcgtttgccacaggaaaattaaagggtggtagtcttctttgtgtacctctgtggggtgtgtgtgtgtgtgtttgtgtgtttgtgtccgtcttccccacccccctttaaatataatcttttgtaatgtatagaattttgctgaatggtacatttccttgtggttaataaatggataaagtctagtcttatgtctgtagtggtattgatcagttccgggtgggctgaatgtgttgtgaaatggcgatcattgccagagattaaccaaaagaatcatgtctgtttaaatggaagaaggaacatgcttaaggcaggctgacagttctttttgtgcacggtttgggaaggaagctaaacaatggtgtgtctgaaatgaatgaaggccttgataacattaaacctcttgcttttgtgacatgacttaaccatgtagtttttatctttccagtagtactcttttttcctctgct

SEQ ID NO: 96388 - DNA, 1054 bp, Homo sapiens
ggattattttcagtgggccaggaggttaatagctataattttgaaataaagtgattttgttgctgtagggcatatagatattccacttatattaaactaatattatgttgttgcataggctttttaagatgaacattcccagttgaactaaaatatgtgattctgttgaagataattgaaataatcataaagaccttaatccatatttatacatgaacaatttgagtacttaaaatgtctgatttttaaaagccttttgttatggatcagatgcactctaaaaaaggattattatgtttctccaactaattgatttttctacaaaatgtgtgatctgacatgttggaagcatgaggtgactatttttatgagaattttaaaaattctcaggttgtcagtttttcatttctagatatttgattttttttaaaaatcaaaatgggaaacaatagtaaggaacagttttgttccaggtgtttaggagggatgtttactatttcgtggactctgatttttcagtttccatcccatggtatgtattctggagactgattatgcagactattcctgtaggatatggccaagtgtataatttcctcctctctctcattccaggggaaacattttaaattttgcccctatcctggagtgccttcagattacctttgattttgaattttttcattcctctcatactttctcagattctgtttcaaaacataaatcttagttttctttttatagcattgtggtttatttgtgtctttccccacagtttgttgaagtatgagaatgactttaatacttgctttagtacttagatttatcctatctagagttatgcagctattgtggtatttgagttgcatagaagtaagttgagaattcctttggattttgtgggagctggagcagtatggtcaatgtatttgatgaaagaggaaatggaaatatggtaattatgttttcttcagttcagctaggcagtactgtgtatgtgtgaatgtatgtgtggttggagggggagttagcattacagagaatcttttgggat

SEQ ID NO: 96389 - DNA, 1052 bp, Homo sapiens
ttactggtttctggactacctcgcacaccctcttgggaatagtgttactctcttagaatcaaatggcttgaactttagattgctcttattctcttttttaatattcaggttttccttaactctttgctgcttcagaaaaagtttcgctcatcttattattcatttatcatctctgtttaagccaaaatttgactagaaccaagagtatatttattgctgctgataggaccacattagacttcctctgtggtagatttaattctgttagattgtaaaatagtcatgtctagacagaacattgatttcaaattgactattgaacatgaaaattccaggaatagtgtatagaggaaggaggaggaggaggagaaatcaagaaggtaagaaaactactgtagatagcaagtgactttctgtcattctccacctagatttcttgttagtcacttttgtatacccagtgcatctagaggtcaggctttgttttaataaagggacttaaaggaaatatgtttttgtctctgagattggattttttgaactgttagagtggtggacctaagggaaagaattggaaacttcatatggatagtgatcaagaatgtggtcgtagaggttggtagacttgagctgtggtgtcagtgctgccagtatctagcttatgtatcattttctgttacttgattattgtagcacttttctagctaagattcaccagttccctatcactacttccttttctttctagtccatctgcatagctgctggagtgatcttattaaaaaataaatctgaatatgttacccttgcttaaaacctttcactgactgtgagtcacctttagcatagaatctaaagtcttagaatgtcataaaaggtccttcatcgtttggttcctgcctattttttctaacctcttggtattggttaagagtatagactctggatatagacctaattggtttaaatcttggtttcataacttaaccttggtcaagttacttcacctttgtgtgcctcagttttctcatctacacaatggggggatatta

SEQ ID NO: 96390 - DNA, 1075 bp, Homo sapiens
ggtcattttatttattattaccttaagtaaaatagttctagaagaagaactggatgctaggcctttcttttacctggtagtggagtttcatacttcaggattagtgaatacagtttgctaattaattttatataacctaagactcaaaatgaacttgtaataattactaaaattatatgaggagaaatgaaaagtcaatgagtaaatgaggacgatgataaataatgaataattgcaagataacatatacaagacggatatggtaatagtaaagcaatttgattagtgggcattcaaagtagaataaaacacctttctgaatggccagaaaaatggttgaatagccactgaccatctttttaattctatattatataacaaatctttcttggtaatctttacttattttcctcctcagttctttagagatacatatacttggtttgggtgttgaattaggaaattaattgctaattgtagtttttgttaaaatgtaaatagagattgcttattagctgagagggttagaaataatagaggaaattaaattagcaagcttttactgctgggagggcctaacaaactgtcaggtactattttctccagtaactacctttatcggaatgatgcttaggaagaataaactactcaagctgatcctcacttctgaaggatggagtaaaagtaaaaggttagggtcagagaagaagggtggttatactttattttccttttgaatcattgaagagtagttttgactttttacctgcagatcttatttttcactattgtatccctagaatatccccacatcaagaactgtagtttctagttagtctagcaacatatatttagcagtcctcaattagacagtatttttgtaattaatatctagccttgcatctgtgatggaaggaaatcagctcactaagccagagcacagaagagtagaggagcctactctgttatagataatagaaccattgaaacgttatttgtcagttagggctggttaatagaaataaaagctcattttgttggtacatatgtagccgtttgttggcaagaatggttt

SEQ ID NO: 96391 - DNA, 1041 bp, Homo sapiens
ctcagctgtgccagctgtaacacaaaagcagtcagacaatatgtaaataaactagtgtcactgtgttccagtaaaactttatttgtgggcactgaaatttgaatttcatataatttcatgtgtcacagagtattattattttgattttttttcaaccatttaaaaatgtaaaaaccattgttcaggggctatatacagactggattttgacctgagggctgtagtttgccaatctcttggacattgtataggtggcatccctcccccaccttagaaatatgtttaaaaaactttgttcgggagcattttcttatagaattattgttatatatgtaggttaagttcctagactaatccacaatcctgttttacttccagtgttttagtctagcaatacaactttgttttacccccaagaataactctgtctctgagggaaaatagatttagtattccttcttggaccagaagcagcacatattctccccagcactctcacagtttccttcttccctgatctctcttctacctgctggggtttgcatcctaggaaatactcttctaggggctcctgtagggtggaatggtaacaaaactaaaaagagctttctgtgtgtgattagagaggagggcatgggaggagaaaggtggagagaagagtgcaaagtagtttcttttaaaactgcagattacagcccatttgaggcttataaaatcagtgtagagggtcaccacagacaaaaaaaaaaaaaagaaaatagaaaatattagaatgaatcacccatagcatagtattgttttgtgaaacttcagttgtgtgtgtgattgtatgtgtgtatgtactgggtcacagtgaaaaatgtgctatgtggtcagaaaagtttgagagcctgtgttccaagggtttggggtactgatcctgagtttttttgtttgtttgtttttgtttttttcccttactgtatatgaggcgcatgaaaagtgtaaaggcagtctcttgatttcttgctacagtacgtttttggtactcagctaccttat

SEQ ID NO: 96392 - DNA, 1502 bp, Homo sapiens
caacattgaggaaatgattgaacagatagagtggctgtgttctaagaatgcctcatatggcatgggttataatgaggtcattgggacaatcaagtttagcactatggagtgtctagagtggtgctacaaaagaaatgcaatgccagcagcaaacatgagccaaaaaatgaaatttcagattttctagtagccacattaaatgtttttaaaataaaattaattttagtaatgtattttattcaacagtatattcagaatatcatttcaatgcataatcaatatgaacatgattaatgtgggtttttttggtgctaattttttgaaatccagtgtgtatcttgtacttacggcacatctcaattcatattagccacttttctaggactctaactatacatggctagtggctactgtattggacagctaaagtctagagcatttggtgaaattgtgaaattgtgatgatgccaggaaattggggaaagcataagaggagcaaatatgaatctctaaggtagaccttgtgcagggaattctataggaaattatatacttttgggagagagacagaaactggtgtggaatgaaactttgatgatggtgaaaccatttggaaaatgagaatggcagagattcaatagaaaatgaaaataggaaacggcagaacttgacaatgcttaatattctatgacaaggccaaaatataatagttggttctttttaagaaaaacatctttttcatccaagggctttttagcctaggctgtgtctgtgtagcctggaggagagaagtagttattcatgaaacacaagagaagccattgagatcagcagataaaattgattgcagaggaataatgtggatagcagcgtggcatggaggatgaattatgctaatatagtagagaggaagagtctgaggtaaatgattgatttttgtaaagtaagaactggacaaagttcttggtgacttaagagcaaatgaaagattaggcagaatactatatcagaatttattgctttgacagtgaaataagataggacctagtgatagggactttggtcacagtatataagtggttaagagctcatgcacttaactttaatccagtcttgaccacttaactttgcatttctttgcaagttacaattatccaggtctcagttttttcatccataaaatgggcagaaacacctacttcatagaattacatggattaaatgagattatatatgtagcaactttgactagtatgacacatcttcctgttatttgtcttagtttgggatgtccagaggggaaaaaaagagttaccattgtgttttcttggaatacatgtttatatcacatcttctaagttgttaccccttaaagcagttttcagagttcagcttggtgaaatctcttgattatttctcaaactgtggtgtgaggacctccggcattagaatcactttggttgttagataaaaatatagattcttgagctgcacgttagggc

SEQ ID NO: 96393 - DNA, 1064 bp, Homo sapiens
tgtggaaataaaaaaactgcttattaaaaatgcagagccccagacgaacagtacactttgagagaatttcagtgagtctggaataggcctgcaaatcagcattttgatgattttgatggaggttgtgcactgtgagaaacattgctctgtttcttattacctccagaggcataaatatgtaggtgctgtctacataaaataaattaggaatggtatgcttccagcttgaaaatgaacaaataaatgtacatcagaactccatgtatgttggtgtatgtttcacataggaactgaagatgatattagcacagatgtcagataaagggacaaacctaccatccacaggttacaagtgtttagtattacagaaaacatttttataaaaaggaagatcataggacatgtaacctctcaaagtttatacttctcagccttcccttttaggttagcttcagggatctagaaacattaccatccattacagaaaactgaaagattatgtggcaaaataaacagggaagcagaaatagaatagacagtgtacttctgttaagaaaaagtacttacattaagaaaaactattgagctttattagatactgagtactgtgctcttgcaagcatcttctacagcactagtgttcacctcttaaaagcattaaatgatactggcattgccttcattcccttcaatcctcagtttttggtcctctttcctcttcctaatttaaacagtctactcactgttattctattcttgtaatttgtctcacttttttggcttccatgacttcttgcttttcttttttattgtatagtataaatacaaaatgaataaaacagcttctaaaagaaaatttaaaatatgtatcaaaagtgagcaaaaaatttaaatttggtttaataaaacccattttctttatagcagtgttgctgttttttcttttaggtatttaccccaaaattatgccttgaggcatatgcctcaaggttgaggtatatgccataaattgcttatttatatttttaaaatgctaatattaaaggctaagatcttggactgtg

SEQ ID NO: 96394 - DNA, 1039 bp, Homo sapiens
agttcgagaccagcctggccatcatggcgaaaccctgtctctaccaaaaatacaaaaattagctgggtgtggtggcgtgcgcctgtaattccagccacttgggagtttgaggcaggagaatcgcttgaacctgggaggcagaggttgtagtgagccgctaagattgggccactgcactccagcctgaacaacagagtgagactctgtctcaaaggaaaacagcaacaaaaagaagtccctaagtaactagtggttaaatgttgacttccaagtatttttactctccttacacatgccacatgcacattgtctagtgccacaacatataatgtttatatttttagtttattctgtgctagttgtgcttttagtttagtaatagaaatatattactttagttagatggatggaatcttgtaatgttttgtcagactgatagtaagtactaagtatggggtattacagacaagaggaaaaaaaatttctgggaagaaagccagacaatgtttgtgttttcctttagaagtgattgtttggtggtgggaaggggcttagtttaaaaaaaaaaaattagattgacagggcctaaaatgttgtatggccaatgcagaaattttatttgaaaatttattctctttcttcatatatctaacttgtctatcaaaagtcttttgggacagtgtggactttatgataacttttgaacagtgttacctttcataatgcttaaaagcaacccagggcagccaaataggaaaggtgactgcctctaggatgtgtatcaatatagaaaagaaaagatatcaaaagactcaatgtgtagtaaaatgagtttttttgtttttgtttttgtttttgttttttgagacggagttttgctcttgttgcccaggctggagtgcaatggcacgatctcagctcaccacaacctccatctctcaggttcaagcaattcttctacctcagcctcccgagtagctgggattataggcgcacgctaccacacccagctaatttttgtatttttggtagagacagc

SEQ ID NO: 96395 - DNA, 1108 bp, Homo sapiens
tgtgcatttaaaaaactagcctataaattctgttgcaagtattggcctctagctgcagtcaccattatcccttctccccgcaaagaagaacatctaatgttagaaatctgttttgcacagcctagttaaaacttgtatttacttgtacctgttttgatgtaattcatcttatgagttagggccagagaactgcatggaactattttaatcttaaaacccgggcatttgtagatactctacacattttgtggctgtaggcaaaaagaattttctgttgtgtgttaggtatttttgaagatgcctaacttattctgggcaatatacagtgtatctttcatgacagtaagactaaaatattaggaagataattagcagtgaagtgaagcataggataattatgtatagaagcaagctttgttttctcagaagtttataagataaaacatttagaaacagctaactacccaacccaataaaccaaatcatttttatcttttagtttcttatgcttagggaaaacaaataagggactgtggaaggcaaaagcttcatctctgtattctaatttgacaatgcatttgatacctgtggcctttcagcatagatattgtataccccttgtttttattgggtagttaatatagtgtcctgagttttgttctgttccaacagtttactcattgttttctgattaatctttaaaatactacctctattcttttgatgacttccaaacctctcctggctatacccaatactacagaatatagaatgctgtagtccaatgagggcagtcttgtcaaacactctggttattcacaaccctgtttatttggtcttcatcttcccaacctctgtttaacttacagttctgtgtctccttaatagccctgctttagtttcattttctctgcaaagccctcttttttcttactattctaggccttgtgaattgttgatttagtgcaaatgtaactgaattcctatactgtgctaggcactgatgatacttcatctgcatatgtccagtattaagcaaagttttctctaaaaaaaaatttctaaaaaaaagtcatcttatatttgagtccttaaaaagtttttcata

SEQ ID NO: 96396 - DNA, 1055 bp, Homo sapiens
tttaaaaatcagtgagtaaatataaaacaattacattggattgcaagaagtgtgcactttgggagaaggaggagtcctgattaaaagatttttaagattttattatgcataccttgagaaaacttggaaattgtcaccatatgagaggtttttctgggaggctttctacaagagctgggctttctggaactactgggataatagagtgaggacattcaaaatgtatttgcctgaaccatgtctgattgctccagctccatttgttggaaaagctattccttttccattgaattgcctttgcttatttgtcaaaaacgaattagacgtgtttgtatgtagatctctttctgggtcctatatctttttcactgatgtatgtttctgtccctctgtcagtaccttgctgtctttattattgcagttacattttaagccttaacgtcaggaaagcgggtggtgatttctcccactttattattatttttcaaaaaagtttagaatatacttgtttacagtgaaacttgctgagattttgatatgaattgcattacacctatccatcaatttagggagaattgacatctttatgttcaatcttccaatccatgaacagtttgtctttccaaatgtttaggttttatttgatttctttcatcagcattttaaaattttaatcatagggatcctatacatgttttgttaaattatacctaagtgttttatttttcttcagagcaaccgtaactggtgttgcatttttaattttagtttcacttgttcattgtcaccaaatagaaatgcaattgatttttgtgtttcgttcatctatcctgtgaccttacttaattcgcttattagttcgggggctgctgctgctgcttcttttttttttttttttaaagattccttcggaattcctccgtataccagcatgtcatctgcaaatagagggagttttatttcttcctttctagacagtatgcccttaagttcttttccttgccttattgcagtagttacaactttcagtactgtgtttcagtactgtgttagag

SEQ ID NO: 96397 - DNA, 1085 bp, Homo sapiens
ctctctaaaaatatcctcaaaatctttcttggtatagtgccctaggcagccattactaacgctgattggaattgactccgaaggtaaaacctatttggcacttttgctctaggcagtgttcaatttttttgtcagttttgtttagtttttggggtgttcctatgcctgagtgggattcttcttttggaaattggaaatagttgcatagtggtttttaacatgaattaaataggtgataattcacagagccccctttcccaacaaaataaacaaaaggtaggttagacggactattgggattaggatgttgttttaagctaggaggtggcagaccgcacaacctatgggccaaatccatcttggagctaagaatgatttttatatttttagatggtagcaaaaaaaaaaaaatccaaaaaaagaatagtattttgtgagttgtaaaaactaccaaaaaaatccaaaaaaagaataatattttgtgagttgtaaaaactacatgaaatccaattttcagtgtccataaataaagttttaatgcaacataatcatgttcattcatgtattgtctatggatgcttttatgctacaagggcagagttaagtagttgtgacagaccacatggcctgtaaagcctgaaatatttactgtctgaatctttacataaaaaaattgccattcctgttttaagataacagtgggggcattgaatattgcttttgtattatttggtaaaggaggaaacttaccttgctcatattttcaacatgtttctgaaaataatttagaaagtgcctattgtttgcatacagataagtggtggtagcagcccttcttttttttgttttttttgttttgttttgtttttttgagacagagtctctttctgttgcccaggctggcgtgcagtggtacgatctcggctcactgcaacctccacctcctgggttcaagggattctcctgccttagcctcctgagtagctgggattacaggtgcgcgccactatgcccagctaatttttgtatttttaacagagaaggggtttcaccatgttggccaggctggtctcaaactcctgacc

SEQ ID NO: 96398 - DNA, 2048 bp, Homo sapiens
tttgttattaagatacatcttttaagttcatctgatgttgattttttttaatagttttagctgtttattagtggctgattaggatttgttctagaggctaaatccaggtcttttcatgacttaaggtcctatataaaaggctactttatttttatttttttggtttaattctaatccgtttgagttagtaggtgctatgtgattattgtttacgtgtttgttttctacttattgctgctcatctcaaccctgttcattgcattcagggaatttaaatctacactctaaaaaacagtgacagtattaatttctcagcctagtttgggtttctgatgttgaaatgtttcacccatgagatacgagcttttatcacttagcatgtgtgtatgtatttatatgtatacatacacacacatacacagttttatatatagttttcagtttttgtattcacagaatggaaatgccatatttcctgtgagcaaaagcactctttgaccaaattgcctcattgactttatgtcctcttcaagcttttctaataattaaaaaaataaaaaaagatgcttgccttaggttgctcattaaaaaccaaattacagcaatagtctctagtagtcagtgtgattgttataaaatcagttgttaatttttttttcttaagagatttagtaacaggaatccaggaacatttttggtttttaagaattattagatataaatacgaatcttgaagttgaatataaatgactaatttattattttattgcagaataaaaacacttgttgtagggtcagtataataatattgattttaattattttttctctgcttatttataggactgattgtgtagaaaaaaaagacagccctgaagtatatttttgttgctgtgagggcaatatgtgtaatgaaaagttttcttattttccggagatggaagtcacacagcgtaagttcacagggaaaatacgtaggtttgctcaactgtagattggaaacaaaatatatttgtgttgatggaataatttgcccctacctcttccccaaaatttgagactatgacagatatttattatagaattttgtagaccaaatctgagttatttttcccccccttttccacagccacttcaaatccagttacacctaagccaccctattacaacatcctgctctattccttggtgccacttatgttaattgcggggattgtcatttgtgcattttgggtgtacaggcatcacaagatggcctaccctcctgtacttgttccaactcaagtaagttattgtcctgtactttgtagtgttttaaattgtatatttttgagaaatattactgtggtgaaacccactaacttattacagattattttcctttggagttaatttttgaatgtttattgtcatgagaactctagctaactttgcaaacttattaatgtacctaccgtgtccttaacttttctcactttagggttgaggtcgagtagaatgaagggatattcccatttctattcctctttggagagttttactctcatgctaacactaacctgctttgcttcttgagaagtcatttatgatggagaagtgaaatcataaccctgtctttgccctctgtcccctcctccatttctagatttctgtgcctttttcaagaccacttggcaaaacattttatccatggggatagacttaggaaagtaaccaaaaaagtatagaaaagagaggtttcataaagccttcaggaagatacctccataaagatgtttttgtagggaagaggagcagaaaagtaacctttcttaccatatgttgttggtagatcaagtattttttttggttgcctcatatcaagtgtgtactgaagactaaacacttcttttaaggctcttgattgtcacacatcacaccccaaatatttctggaaatataggtgtggagagtaatcagattaaattcattaaattttctacattctcttatcatgtagacactttgtgcaggtctggtatttataaggacttttcatggaagtagtt

SEQ ID NO: 96399 - DNA, 1036 bp, Homo sapiens
tgatatttttaatcttttgttttattatgtgtttttaagtgaaatgtaatagagttttattgtatgcttatgaaatagcaaaatttgattttttggtaaaaattttgtatatttaaggtgtacaatgtgattttttttttaagcttagagtttgtattaggtttctgcaaagacagaactcacatctcacaaatatttgcaactgtattgttttagtatgtttgaaatatgacataatgctgttgtcttaggcgtgagcattcttttgtgtgtgtgtgtgggtgtgtgtatgtgtatgtctaagaaatagtatagggctactatagatgttgttctgtgtcctaccttggtgtgtgattatttttgtattggtaacctaaattacaacttactttaaatatatacttctaattgtggggagaagtgtcataagttatctcgacatgcaggttgacaaaaaaaattactctcatcaggcatatataatttattccacttacaaatgctcagacaaggccagttggagattgtctaaaattctgtgtccaaaagcaaaaagggaggaaggggagaaagtagaaaatttaaacctttatcaatagcttaaaataaggtaaagttgcacattaaaattaattagtgcaccttatttctaaaagtgacttctgtttaaattttgaaatcttgagttcaggttttctttggcttgtacagggtctcgtctgtcagttgattggtgcatatggaccagactatataatttatcctccttctctggcaaggagatgtgtatttaggaggaagtgagtttgtttttttcctgtgttcttcatttcctggacctcatcctagaccttgttctttcattcctagttacttcattgctgtcaaatcttttttttttaaattaagataatagaaatgaaaaacgtcccattgttagctaaagctgcttgtagcacatgagctaggaattgttcagggttttcatttttgcttaaccgctcactcaatgcttgattgcctatggtgtgcc

SEQ ID NO: 96400 - DNA, 1639 bp, Homo sapiens
tatgaaaataaatcaaaataaacttctgtagccagtcataaaacctgattcttttaagcatcaaccccaaaaagagaatgggcatacctacgtttttttcagacttttaactccagtgctggctaccttgaggtgctctacttcttagggaacatatccagaatcttcatttcacctgccttggcctttctttgctttcctttcaagaggagtaagatgagagaaactgtaggaagtaggaattatcacagaggaattttgacgatctaattggctggaatcattgctgtgcaattgacatgtcaatactgttgaatctcttaatgtatgtcttgctttccttagttcagaaacattgtcctcgcatatactgtattatttataaattctgtttctattctgcttggcaggatagtctttttaaaatttaaaatggtaaaatttcttagaatgtaaaataattagttgatattaagaggaaacaaattcagaatttgtcagttttcatatagtttggataggaggaccttaattcgtcttggtagtcctaaaaagttgttgagtgaggtatctccactcccagaaaaaaatcagtctctctctctctagatacagagatacagatatttcttggaatggtttgaatagtaaataaaagaaatcttataacacatatcatatatacatatttatagtatataaacaaaaatctctattttctggaaagattttttgtattccagatctgtgtatgtgtttactaaatatctccatttatatgtctccaagcacttaccattcacaggtagtgattgtctctcacaaacctggttctcagtaaatggaaccactgtccatttggttgcataagccaggaaactaggatgtctcaactctgtttttcaccttaactgcttctccctagtacttactccatttttcaagggtgttctccacagggaaatcttctcagactttacctgtcattataagtcaggtttctctttacagatgttgaaggtactgaattcctttttattagtgtgaattgttgattagtccttctgtcctgcactgctgcaagcttcatgagagcctggctagtcagtgcctggcacagactagttactcagtaaaatttgttggatgaatgaatgaatgaatgaatgaactattcttcattcttttctgatatttggcagtagttttttttccacctcagggagaagcaacaaatctttttctcacctacaaacctaatagcttgatattaatgtgcagattcgattttcaccgttacctacagttatagtatataatagtcaagctacattttctatgttgtgaatccagagttttgtttgctttttgcttagttgtatattttagtgcattttattttgctttatttttatttttggagatgaggtatcactctgtcacccaggcgggaatgcagtggcatgatcacagcccactgcagcctcaatctcccaggctcaagatgtcttccctcctcagacatccgagtagctgggaccacaggcatatgcaaccacgcccagctaatttttaaaaaatttttttgtagagaagggatctccctgtgttgcctaggctggtctcgaactcctgagct

SEQ ID NO: 96401 - DNA, 1023 bp, Homo sapiens
tcatgtacttaagtgaatgtatttttttgttccgtttttacccttcatattttgttgcatagttgatattttgaggcttgttcttggtgtcagtttgggttattttatagcttatcctaatgttcatttcttgggaaatgtattgggcagagacatactttttggtaagatgtatggatagcacctacttgcacagtgctagtatagtgtcatctttatagtgtcatctttatctctgaaaacacctgtatttaaacaagatctgagagatccttgagcctttggaaaccatagtctacttattcagttggcatgtatttctttcaagggattaattttactctggagtactggataagatgttttgatagtaggattatctcagccttttggatgaattataaatactcttgaatcattatcacaggaagaaaatctagaaggaagaaaactagttaagcaactggtacagataaatgagttgtccattctgttttgtcagtgctattgttctctatagaaatattggaaactggggaacatagccatcatccattggaggaattctcagccttccctaccactggtgatcatatttcttttaattttaaatttagacccttacctattttgggatgactggaaaaatgaaaatcctgttctctatcagtgtctgagtgtctttagaatgtgagatgtgtgattacttgttcccagggccacctctgcttaactgcttcaccttgatgtgctgggcaagtaggtttgataatattctgtcactatgttttacttaattctgatgatcttgttttcctgtcttagtttcttgccatggtgtattatggtgcacgcacatagccaccagaaacatttttctgtctcaccattatgattctgtcttccatgaaagggaagtgaggcagttcaggaaataggaaattctagaggttcttaagacaactatcagaaagtctgagaaactgatttctagctatatataaatttgttagggctgctagc

SEQ ID NO: 96402 - DNA, 1039 bp, Homo sapiens
aagaagaagttttctatttagaggaagtcattctgccggaatttcatctttcaaggagattattctgaatagtaccacaagtaacttcacaccatgatgaaattacagtgtaatacttgcagtaacttacgtgttgccattgtaagacacagaatgcagcatttccgatcaccttctgtgtttgtaaactagaaacacagaaaagtacgttttgagggaatgaaaagggcaggcatttagtataaatttgttaacctattgtcagagctttttcttattacaaaacagaacaaaaaattttttaagacttttttgttttgttttgttttactttggaacttatttgagtaatctcttatgcatggtttattaaacctgtattccttgtgttcttactattctttctttttgactctaggacaaacagtcatggcaaaatgaatacgaagtctacagtttgcctggaatgaagcatgagaacatattacagttcattggtgcagaaaaacgaggcaccagtgttgatgtggatctttggctgatcacagcatttcatgaaaaggtaaaactacttaacgttttactttagtaaagtctgagttggcctgcctacctaatgctggctataaatccctcagagttatttttcgagacatcttatagttgattaatatttaacctgaaaataaaaatcattcttgaataaaaatgttttaaaaggtagtttattttaataaaagagcaaagatggcaactttttaacctaaaactctactcatataaaccacccttttgttccttatttcttgtgctgtaattactcttacaaacatttattttagtgtaggtaatgcttagtaattttcatttaccatttacaattcattttgattacgtgaaccatttttttaagttttaatcagtcttgcttgtgacaaaaccagagtcaggaaatttatctgatctttgatctgtcactaacttgcagggtaattatcaccaaaatgtaattgctagttttcctcaatttttctacttt

SEQ ID NO: 96403 - DNA, 1064 bp, Homo sapiens
attcagatcagaatgttaacagtggtgcttccagctctggaggctctaggttcaatctattataaccatgtttattctatggcatatccaaaccccctgcatgccccacatgaggaattatgcacctcagagtcatacctcttctctacactccctcacaacagctgccaaaaagtacatgtttattttttagaaaatcacaaacaggctctccaactaggggtcccaacaagtcaggatgtgccttcatagacaacattaaacaacataaataattccttttttcttaggcctactcagataaatagaaaattgtatttaggagttaataataactaacatccagtaagcacctatcctgatcagaaactttacatatattacttacttcacagggttaagatggcagtacctctatttactgataagaagctcagaaaagttacataatttgcacaaagacatacagctgttaaacggtagagctggaattgaacccaactctctaaataactctgaagtctggttttaatcactggattgccttcctttgacagacacaggtcaccactgagcagtatcagtgaccagatagatgtatgtgtgcataaacacaaattttgtgaagctcttgaaatgcactaaatactcctgggtagaatacaatgaatcataaaggggtcatctaacttaaccctcttcaaatataagaattatctatggctggacagttggtctctgcttgagtacttccagtgacaaagtaccgacattctaaggtgtctattcaacacttatgtggtgtacaggccagcaacactgccgtcaactggtagcttagcttttaagaaatgtagactctcaggcttcaacccagacctactgagtcagaatctaaattttaacaagattcctaagaatctggtatgacacattaaagtttgagaattacttcatttaacaaacaagtaaccatcaacacacgtgaaagcacctactttagcaatcaatgctcacactatcctctctaccccaatttctgacttaacaattgggttctgact

SEQ ID NO: 96404 - DNA, 1021 bp, Homo sapiens
aaaacactaacaaaatttgaataataaatcgatccatgttttgtaacaaattcactgtgttatttaaggaaaaaaaggtaagctatgcttagtgccaacaataagtggccattcgtaaagcagtgttttagcatttcttgtgctggcttgtaatgtagggaaaaaaagtgctgttttttgaaaagatggtgtcatttcccccttcttcccatgttttaaagccccatcttatatccagttcccaaaatttgcatacttacctaagtattttttttaggtgtgctgtgtttggggaatatttgaaaatttaaagcatgatttaaaattttttaaagtgagctgtgacactggaaagctcttcattttatcttttaaaatagagttttttctatttatatatgtaaaattgtagtgtatttcttttcaccaaacagtgtgtgggacattctttatcactgttttaggatcacctcaggaagtgtcgttacccagaattccccactgtctgctatgagacttgtaactttatcactatacttctgcttggtgccatcttgtcagagtaatatttgatgtctgtgatatgtaaagaattatcctaggataaagatattaaactttaagcagatttcagatgttactgctttaaaacaaatcagggataacaaattaaacgtataacttaaaatatgcaatgacatttagaggtaaccaatgttgatataggtagcatagcctagcctcctccccaaaattgcttttacaactaacactgatactaatttaggatagttcatgccttatccttgctaagaaaatggaattgatggtaggcaggtgctaaagtgcttttcaaaacaatattacgttagaatacaattggattcttcctcaaatttatacaggccaaaaagtaaaacattaattttctgaatttccagattaccaatcaattaatcaacaaatagccagtattatgctgtgtatttctgtcaggtcattttaaaatccatgttaattt

SEQ ID NO: 96405 - DNA, 1572 bp, Homo sapiens
atacataggtcaacagactttaagcagggaggaaaagaagagtaatagcgtctgtgtgctgcagaccattcagaactgtcacgtgtgtccccatggtctcattcattgtattcctagcaattcccttttcaatgttgagttcacctctttatttcacaaagtacttggtctctcaatttcttgatctggttttgcttccatttaaaaactaatcaagaagggaaaatattgagaatgtgcatacaagaaaatcattaatttcctgaagatgaatttctacctgttgtgaacatttaactttctttttaaaagttaaacaaaaataaacaagggatattatgatgaatgtttggcttatgtgagtactagagataaaatttttaaacccagttattcacaatataaaatgttttcaagttagaaaaaatttttagaaatcctgggtattgtatttaactgtagctaaccaattttaaaacttgtattcttttgagaactattattaatagaaaaactttttataagcagtaaaataagaatgttccagtgactacctgtccttatacctagtcttgttaaaactttcttttgcagggtatttagtgtttggtttacagtcagtgcagagtgggcaagttaacagaaagtttgagctagagatactggaaaaaaaaaagatcaaagaatgagaaaaatggtgatccattttggggcaaactgagaccccccaaataactctttcctcatgtgtatggtgctcctcatgactcgtcttgtattttgcctttctgatacccatcagaactgctgctgctctaacttatactctttaccttgcccagatctccgcgtaaggaatgctttatgatcaacttgccataggactgatggattaaccagtgttcggctttatttgaagtctatgccctgcacagctcttgtatgtattttagatgctagaagtttttttagcatgtgatgtgtgattcttgtttgaattctaggtaccttgtgaattccagaaaaagagactgtgcttcacgattgttagtcccatgaacttgcactatctatctttcatggtgatgttttgaaaatacaatcaggaaaaaacccaacacctttggaatttaaaatagaatcatatcatgaaatttaaaaagaatctcttctgttgcatttcctcacccctaagtaacagctacatttaagtaaaatgcaggtggtaggggaaaaaaaaccatggcgagatggtggtttagtggaataaactgattactggtttttttgtttttttttttttttttaaagaaagaagcttcatcacagatactttccagtttctcttttatacttttttgaaagattactttttaggaacatttggtatgatatgcataaaattatttatccatttatgggcaaaatgatacaagtagcatcttgattgaacatcatttacctcagatattcaaccagcagtacgttttttatgcagtctcaacccatatcccatttgttacctctcagaatattggtaagcagttattttcgctttactctgtatttctt

SEQ ID NO: 96406 - DNA, 1014 bp, Homo sapiens
aacatcaccatgaaagatagatagtgcaagttcatgggactaacaatcgtgaagcacagtctctttttctggaattcacaaggtacctagaattcaaacaagaatcacacatcacatgctaaaaaaacttctagcatctaaaatacatacaagagctgtgcagggcatagacttcaaataaagccgaacactggttaatccatcagtcctatggcaagttgatcataaagcattccttacgcggagatctgggcaaggtaaagagtataagttagagcagcagcagttctgatgggtatcagaaaggcaaaatacaagacgagtcatgaggagcaccatacacatgaggaaagagttatttggggggtctcagtttgccccaaaatggatcaccatttttctcattctttgatcttttttttttccagtatctctagctcaaactttctgttaacttgcccactctgcactgactgtaaaccaaacactaaataccctgcaaaagaaagttttaacaagactaggtataaggacaggtagtcactggaacattcttattttactgcttataaaaagtttttctattaataatagttctcaaaagaatacaagttttaaaattggttagctacagttaaatacaatacccaggatttctaaaaattttttctaacttgaaaacattttatattgtgaataactgggtttaaaaattttatctctagtactcacataagccaaacattcatcataatatcccttgtttatttttgtttaacttttaaaaagaaagttaaatgttcacaacaggtagaaattcatcttcaggaaattaatgattttcttgtatgcacattctcaatattttcccttcttgattagtttttaaatggaagcaaaaccagatcaagaaattgagagaccaagtactttgtgaaataaagaggtgaactcaacattgaaaagggaattgctaggaatacaatgaatgagaccatggggacacacgtgaca

SEQ ID NO: 96407 - DNA, 1075 bp, Homo sapiens
ttcagtgtgtttttacatctgaatccaagggatccaagtggcccagcagaaacggaattcttgttaaaatgactgattctcgtgcatgtgaaaggctctggggaatgaatacctgtttggtccaaacttactgtatcataatgctgtatatgttgaaaacgtaatacctgttaatgtcctaatgaatcacgttttgcagaaaacaccgtaagaaacacttcagtctttctgtagtttccatgcatatttcaccatggttcgcactctgatcctcatctggtttagaaagcaattcagtttctttcaaaccaccataacctaagtgctgccccatccttcacctttaccctagaaaatctgagaatccattggtgtgtactgtgtgacacaatgccaacaagcctctggtttctaatactggcaggaccaacacacatactttagtgggaatataatctgtttagacgataatagagggaaatgccataattaacaaatctcccttcactcaccactatcctcattcttgcagttgtcaaggtgtaagcctcactgtaagttacaaagctaccactcccctctttaagaacacatagcttaggattgccttggcgatgtgggctcttttttggttccatatgaacttaagtagttttttccaattctgtgaagaaagtcattggtagcttgatggggatggcattgaatctgtaaattaccttgggcagtatggccattttcacaatattgattcttcctacccaagagcatggaatgttcttccatttgtttgtatcctcttttatttccttgagcagtagcttgtagttctccttgaagaggtccttcacatcccttgtaagttggattcctaggtattttattctctttgaagcaattgtgaatgggagttcactcatgatttggctctctgtttgtctgttgttggtgtataagaatgcttgtgatttttgtacattgattttgtatcctgagactttgctgaagttgcttatcagcttaaggagattttgggctgagacgatggggttttctagatatacaatcatgtcgt

SEQ ID NO: 96408 - DNA, 1067 bp, Homo sapiens
tttttacagagaactggaaactatttattaaagtactaggaggagctatgatagagaatgaggctaggaagaaaaccatattgtatatattgaattaaagtttgccgtgtttacattcaacaatatatggacaagtaagtgtgcactgacactgttttacctgataatatgagttttcatggggttgtgagagtttttttaatcctattgattgttgttacattttgcttcccagtactctgttctgcagctgaccaaaatgctaactgttctctgggagagaacaggagagttgtcactctcctctcctattcaacctaaactatttctttcatctttcaggcttttgaacacttgcagcaattagaattaataaagcccatggaaagaacttcaggaaattcacagagagagtaccagctgatgaaactgcttttggataatactcaaattatgaatgctctgcagaaatatcccaactgtcctacagatgtgaggcagtgggcaacatcctcactaagctggttatgaatataaccagtgacttcaactttggcatttcattcatacttctgtagagaacggaaaactattgtccattaacatgatatgctaaacattctataaacattcttgtatttatgtgagacttgcccatctactgtcttggctgtgtcttgccttttaatcatgaacagttacatgatttataatttcactgattgagattactttgtaagtagctgttcagaagaataaaatatgactgttttagggactagaccatgtgcttttttaacacttatatatataatggtctatttgaagagctcacttcaacctaacagctagatgtctttacaaaccttaaaccaaaggagtaaaaaaaacaatggtaagcactgaagtataataagtaacctttggtacagcaggtttgctgcagtgtttttttctgtccacatgcaaattttggattctatcccagacccaggttttctagttcagaagactaaccagcttagtcagaagatggttccatggaagaaaaaggccaaggagtttga

SEQ ID NO: 96409 - DNA, 1014 bp, Homo sapiens
tagttttaaattttctagtacctgtaagaaaaataaaaaggtttaattttaattatatatttaatgcaacatatcaaaaatgtgtcattctataatcattatagaagaacagtaaggtattttacattcttttgaattaagtctttaacatttggtgtacattatatttaagcacatctcaatggcctaaatgtttactggaaattcttgctgtttagattccataaaatgtatagctgagaaagtaaatttacattttgaaattgttctaaacatgctcagaattttctaatagaactaaatatccatttttaagtttaaaaaaaaattgagtcacacattgaagtgctcagtagcctagcgtggacagtgcagctcttgaagattttaaggaaagaaacttttaaaacagtggattccccaagtccattggcatcccttataggccctagtaaccagaatttcatttcttgtagcaacaaaaatgagtacagagcattgccatttcttcaaagaaacaggaaaagtattttacaatactggagggtttttttcccctaatagtcttattttgtgagagctgtgaaaatggaaaggttacccaagtatttaaattttttttttttttttttttttgagatggagtctcctgtcgcctacgctggagtacagtggcgggcgcaatcttggctcactgcaacctctgcctcccaagttaagcgattctcctgcctcagcctcctgaatagctgggattacaggcgtgcaccactatgcccatctaatttttgtattcttagtagagacagtgtttcaccatgttggtcaggctggtctcaaactcctgacctcatgatccgcccacctcggcctcccaaagtgctgggattacaggcgtgagccactgcgcccagcctgcatttaaattctcaataatttgtagctgctcatttctgaattttcaattatgaagtattttgctatttagaaatgttttaaatctgcacagttcta

SEQ ID NO: 96410 - DNA, 1440 bp, Homo sapiens
catgaaggaatttggggactagtaatttttagaggaggggtgtgtgtgtgtatgtgtgtatgtatatatatatacacacacatctccatctgggaaaatatctctgcctcagtattgtcaatattaacggccattgttctgccatttttctattacatttttaattcatggtaatgaattaaataatggcttgttttttgtcatatgggattctactttgagggctgcttactcatattcttagctcatcccattatttgttgtcattgtcttactgtggaagctcattatagattacagattttcagcctctccagtaaccagagaaatactacaattaaactttttttttcttgccaatctagtgggtgttaaagattatgcttgatggtatcatgactgtgactattaatatttattgctgctgccaatgtaaatatgtgtaagtgctttggagagcaatttatttagcaaattaggtaactagagaaacatactaattagagaaagtctagttacctaatgcacaggaagacatgtccaaggttgtttattgcagtcttgtttataattgggaaaaaaaaagaaatgaaagatgtctgtcaataggaaattaggaaatgaataatcgtggatatatacaaagaaatataatgaaaaaatgaataaaccagaattgatactgcctcaacatgggtaaaacctcacagtgaagagagttgtgaagatacaatatatttatataaaagttgaaaattactctgttgtataatacatgtatatgtagtagaagtattaggttggtgcaaaagttaccattactttcagtgcccaaaatggcaattacttttgcaccaacctaatagtatagacatacttggttgttttatgtggggaagagtagagtccaatccggaggagatgggcttcaactctaaaatcatatttcttaagcaggtaaagtagtcatagatatttattattctctgttgcctttgtatatgttaaaaaaaatttatgcctttgtgtcctcatagcttagctcccacatatcatatcagtgagaacatacgatgtttggttttccattcctgagttacttcacttagaataatagtctccagtctcatccaggtcactgcaaatgctgttagttcattcctttttatgactgtgtagtatccatagtatatatataccacatatatatatatatccatatatccatagtatatatataccacagtttctttatccatatccatagtatatatataccacagtttctttatccactcgttgattgatgggcatttgggttggttctacgattttgcaattgtgagttttgctgctataaacatgcacatgcaagcatctttttcaaataatgacttctttctttttcaaataataacttcttttcctctgggtagatgc

SEQ ID NO: 96411 - DNA, 1050 bp, Homo sapiens
tcactttgccagtaattgaaactccagtacgtgactactcattttctgccaatgtgataattttcctgctactcatgctgttccctgtaactggaatgttcttccttcttttttaaatctcttgtctcatccagtttaagcattctttgtaatactttaccttgtatccctaggtacagtaactcatgcacttctgtttttgtgctgcattttgttcatttcactagtatgactgtgtagtagtttcccttattcaagtacgaatttggggttagccaggattgttttatcattgtgtttattgaattaacgtaaagaacaggataagaaaatcagtagactggaaactttattttggttttagtgttctacaaataagaccaacatctatttaataatgaattaatattagatagagttactaaggtacaccaaccagtaaggcacaggattatatttaggttttaaactacatctttcctcaattttggctttttttttttttttccttttagtatctctcagaagatagaagtgtgcaagaagtactacagaagcatttcaatatcagcaaaaacctgcggtcattacacatgctattggtttgtattagttttgttttattgcttgttgctttgtttttgtttttaatagtgacggggtctcactttgttgctcagactggttgcgaactcctggccttaagccatcctcccacctctgcctccctaagtgctgacattacaagcatcaaccactgtgcccagcctacttttatcattttctatctttcattagataattaagtttttatgggaattgattaaacctgtaggtaaattttgggagaatcgacatgcattggaacactacatcgagtgttccaatctctgaatagggttcatatctccttttatttgatttcttgtttgattactttcatcagcattttatagctcttactacacagatgatgtacttatttaatgtgtataccaatatttaatttgttagaacaattgtaaatgggttttgaaattttggtttccc

SEQ ID NO: 96412 - DNA, 1537 bp, Homo sapiens
tattatactatactgtatatatatagatgtatatatacatatataatataaattatatatattatatataatatgctgtgtactataatatattttgaaaaattgctcaagttcattattaaaaagagatttaggaatgacagttcctgcaatatatgtgacttaggaagacagcttacctattgtgcttttgatgtcttggatagtttgaatgcctatcagttttgtggaagtattttcttcatttaagaacacttcgtatgtccttacaagcagtacatattagttatcctttggtttttagtgttctttgacagtaaatttgattcctgatttctttttaaggaaaaatagcacaaatacaaatagagtctaaaagcattactataaaaaaaaaaaagccggaagataacttacgaatgccatgttgcatttctgccactttcctctcctaaagttggttcctgctgcctatcatgctattaattttttaatctcagttcttcatagaatgtacagaattccttattgacactcttggtgttattgtgacatatagctattcaatattgtcagtttttttaaacagtcatgttgggtcttggaatgttacagattagctgagagtaacatggtgggaaaaaggcatgacatcaccaagccagcaaatgcctggaggtggattatttagtttgcataaaatgttttaaatgtttaattatgtattgtagactaaacattactaattataggtgatagtttacttatacctctaacattggtacagtgtttttgtttttttaaaaacattcatcttccttatagagatttctgtttgtttttaaggatattttggaactcttagaaaaaagagtgaagtcaagattttctcaccggcagatacacttaatgaattcatttggttttccacagtatgttaaaatatttaaagaacagttatctctacctgcagagtttccagacaaggtttttgctgagaagtggaatgaaaatgttcaggtatcttaaaaggcaataaagctaaatgttccttgctatatgatttaaagcaattaaaacacaaattttagaaattagtaaattaacacaaagtttctaatattgctgaaggataatgctgcagtaatacaaattatatactttttaaaaattttcttcttagacagttgaaatgtcatttctcctaaattctatctcaaaagaacatcacagttaagctttaggatttatgttattagtttgaagtaaactttaatgaggctttagttttatctgtatgtggtttatattttagataattttattttatatattttacatatttagcaataataataaatagtaaataatgataaataaatgttaatgactcatacctattatgtgtggatattttttttcttccagttttcattagcaacttcagcttttattttgttgggccttaagaggcagtacagactgtggcacctccagttatattatctaataggtgatcacatctcacagtccctgg

SEQ ID NO: 96413 - DNA, 1050 bp, Homo sapiens
tttgtatttttagtagagatgggatttctccatgtttgtcaggctggtctcgaactcccgacctcaggtgatccacccacctcagcctcccaaagtgctgggattacaggcatgagccaccacgcccagcctagactgaacttcttgagagcagtcggggctgtgtttgtcctttgaataatttttttctgttgaatgaacgtatatgcatcagtaaatcccctacccaaagtaggctatcagaatgtttacagaattgagttttaaaaactgaaatatagtaaatggtttggaaatttaggaaaggtggatataatttcttattaatgtaatgctcttattttatcttaggtgaccgaactagcagttgcccagtgatcttcatattagatgaatttgatctttttgctcatcataaaaaccaaacacttctctataatctttttgacatttctcagtctgcacagaccccaatagcagttattggtcttacatgtagattggtaagtctttctgttcattaaaaaaattgattataatattttaaaattcaagcttaattgctgacactgctagtttttttcacttatttaggtcattttaaaaattttgtttcagcagtgcctggtgtatttatcctgctttcaactcaaattgaggaaaacagtttagtagttaccttagcccattaatgaatacctccctcctcccagtgaaattactgaagaaaaaagtatgaaatcagattatgctaataaatataatttctacattatcaagtaatgaggcggttaaatctcaccaatatttgagaaaacttggtaatagtttttattttaagatttttttccatattttgaaaaggcttgaaatcaactctaagtaatactattccaactttcaaagtacacatctccagaaatggaaaagattctaccaagcactgacagtagatagtggcttcttcattccatgggatattttagaatgattttaactatagtctcaatatcactatcactttgccttgtgaaggctctgtacatattg

SEQ ID NO: 96414 - DNA, 1258 bp, Homo sapiens
catttttaaatgttacatattcatattggttttatgtgaaataataaaaatgacaattttttatcattctgttctaatcttcgctattattatcatatatagagattattagtttaagttgtacccaaaaatgttttggctgtgttccgagtaagcatagccaaacatgatacgatatacataaattcttcaatgtactcttgaatagagaaatactgctatagaaattaatagtttaattccttcattatataaatttggcttctgctcagagagcataattaggttgccgaaggtcataaaatggcagagcctggacattataagaacctaagtcacttaattcaacccacagcttttctggtttgatataaacagacatatatatgtatattatacatgcacaaatacgtatttatagaagcatatacttagtatcagatgtaataatcttttaagcaaaaagcctgaaagacaagctacctttgagtaactgaccactgatttcccaacagattgtctctttgaggatttgttatattacggtaaattatggataacacctcttggtctgcctgccttggaaatagcataacaacatcacaatatgtgaaagttttaaaacctttatgctatttttatgttagatctctcaactggagagtgaataagtgtgtttcttttctcctttatatctcctcaaatttaaagttggctgtttcttttagttatgaactctgaatgaagtaaaagttaataattttaatgaaacaaatattttaatggggcttctacccacaatctggagcacctggataatgcatctactacactaagtttcatcaagaatatttaatagtatccaaaaatgttttggctatattccaagtaaacatagccaaacatgatatgatatacataaattcttcagtatactcttgaatagacaaacactgttatagtatctaatgtttcaaaaaagccttttctttttgtttctcatttaaattcatggttatttctttaccagtacaaattagagacttgcaagaccccattgtgtttgaagacacaaagtagaatccatttctaggtctcaaactatatttagaatatggcaattctacaaaactaccttcaaataaatttaacattctttcagattttttccggaaaatataaaatttcttacttttctttttcttctttgaccgttttatcctcaagttctaaaatataaaatttcaaagatgacatt

SEQ ID NO: 96415 - DNA, 1128 bp, Homo sapiens
tatgtttgtaaaattaaattttaggcacaaagaatgtggaaaggagatgaccaaatttggttatgttggtcagtgtgatattaataaccaactaaatatttttagtgtataatgtagtttaaatatttgaaatgataacatattcaagaaaaaagctaacttaaatggttgattgcataaacaataaattttagcaatacccagattagaactaacattatttgaagactcacttgctaatatatttatcatttcagaccatacacacaacccataaaatattagtgggctgatccaagcaaagcataagttggtgtttaaagtaagttgagtggaaagaaagctataaatctgttacaactctccttatgcatatataaaatggaaggtattattaaaatccccattccttttagcaaaggatttgaaatggttttgaataattcatcaaaacataaaacattgtatgaattaaaacaaaatcataacctaggaaaaaatatattaagcaaaatatcaagagatggaagaaagaaaataccatggattgcaaaaaaaataaaaaataaaaaatttttgctgaaagcactgttttgagagaccaactctgtatcatctagggatgtactcttattatagtgtctgacctgatccagaggtgaagaagtacctctatgcagtcctttaatgttacttctcattaaatgtcacttctcattaaatgtcacttctcagttgggctattactggtagtatgacaggtgatatcttgagattgtctccttttcagaggacctggaattccctatgctttaaaaaccatgcaggtataacaggaaattttttttatttttgttgtcttgttatgaaacatatgtaatttaaaatgaggatcatatttgcttttttctttttagataaggtgttgcaatgacaaataagtagcatattgcaaatacaaacagtattttgttttggaaaatagtttaccagttgtcccagtgccttcgttgagtaatactttttgtcctaagttttgatgccatctctattaatattttgtgtatacaactgcttttcccagttcacttatttatgatagtacctatattttaatattggaaggaa

SEQ ID NO: 96416 - DNA, 2000 bp, Homo sapiens
gcaatagcactttaactttcaattttgttttgtttctgttatctgatactgtggagagaattctagccatcttgcccttaatacccagcagccagctatggagtaaaagtccagagtattagtaggaaaagagatttgaatccaagggtcccgagagttgccactattgtcccttgtcccctactatcgtataaatcaatatattccaatctgactacgttttcacctgaagatttcagagaatcaatactgccctactatttcttttgtatttttctatttaggaccattcagaagctaggccaagtacccagagggagagaagagaggaaatttctgtgcatattcaaatatgccttttaaaaactacaacataacaaagtattccagcttcatttttaaaattttgtcctatttatatcattttagacacttaagtgagctgctgaaaagaactgctctccatggagagagtaactctgtccttattatcggaccccgaggatcaggaaaaactatggtaaaagctgttgatttctggtgtttgttggcatgtgatgattcttattttatataagaataaataaattcatatataaatcttattttatgtaatactgaaaatacttttcattattttgtaatgttttacttttttgtttttttcttttttaatcacagaagacatgtaaaactttataaacttagggtggtatatttgagtgtagcagacctttttcccccttatttgtcctcctagtgaaaaattgtcaattgatgtttgttccaacatggtcttttgtccttaaagaagtagagatttccagtggaaaaagaaaatagcatgtattgagcatgtactatgtgtctttttattgtgttctctcatttattctttacatcaacactgcacggtagggtttttccctttgttataggttagggaactatcatatcatgcattctttttatttttcctacatcattactatttgtttaaccctaacttacacagtttttcagtgcatgctcacatcttatatcattcttgtctccttttgctctttatcatatttgcttagttacctcaaaaagatattcttacttatttccctttactcttttctttgatatcctttatgcaatataggagacaaattatgggtgttaacttttgaaagcaattaatttcaatgctaagtagtctgtgtaaaatctgttctcatgtattatatacaataaatttcaatttttgaccaatgtactttaaaaaaatggatgagaagcaaaattttttttaacatttaagcaatgtatattgaaattacattattaagatgagtacgttaggattttactgttatcacatctgaagtattgtttaatataaattgagaatttagatctaggtaatttctttcaatatttcacaaattgtcacatttatatataatcatatttgcagtaattttttagtttcaaatctatgtttaatttgttttagtcctcatactcagcttctataatcactatttcttcattcttgagttttttattatggtttttctttgcatttgaattcactgttattttgggtagttttcacaagagggctatgtgaaatgtttttaaatttcaaatttttaaatttttaaatttaagaaactttttattttaaccattctaataggtatatattggtgtctcattgtttgtacttgtaattctctaatgacatatgctgttgagcatcttttcatacacttctttttcatctatatatgtttggtgaggtgtcttatgcccatttttaatttgggttatttgttttcttattgataggttttaggagtcctttatatttctgattttcagttttgttttgcaagtattttcttacagtctgtggcttttcttttcatactattaatattatttcataatattaaaagaatattattcttttcatactattaataataacattgtctttggcagag

SEQ ID NO: 96417 - DNA, 1071 bp, Homo sapiens
tcttttttaagaaggtacatttttctaggaaaggtctctaggagtgctttcagtcccaagtcactattcatgttcaagagttgggattccttctgttatacacatgacattaaggaagactttaagatcatgaattctattttccttcaatttcctcttatcctaatgatgttgtccttaaactctgaacataaattgggtagtttatctgagtccccagctttgttaggcaatgtgcttttatttttatttttgattttgattttttgtgtttatttttattttaaatgaggtctcgctgtattgcacacaatcatcctgaattcctgggctcaagctatcctcctgccttggcctgtcaaaggataggattacaggcatgagccaccacacctggccttgtgctttgatttttttaccatagaccggcacatcttccattagctcagccttttttctcagccttttcttctagacaggaaaatgtcctcagaacaaaagttacttggtgtatggtttgtttctggtttaccttcacatggaatttggtaagtaatttcacattactttatttcattcattatttagtttttttgttggcgtcagcagaaaggttggtcctgtctgccactaccataaataaaaccctaattgtctttcttttttacttctgagatttgattttaatatatttatgctttgagccaaaatttttttaacttaactcatatatttaaaaattttaatttttaattactatggatacataaaatggggagtatgtgatatttgatataagcatacaatgtgtaatgatcaaatcaggtaattgggatatccattacctcaagtatttgtcatttctttgtgttagggacatttcatttccactcatttaattgttctaaaacatacactaaattattgttagctgtaattactatattgtgctactgaacactatattttattccttctatctaactatatttttctacccattaaccatctcctcttgattctcctctcaacactacccttcccagcctctgctaacatctttttactcac

SEQ ID NO: 96418 - DNA, 3337 bp, Homo sapiens
cgggagaggggcggggtgggagaggtagtgcgtgcgcggggcatgccgggagtggttgtgtacggtccgcagcggcaggtgaagtctagcagaggacgcggccaggcgattcggtgaagcgattcctgcaggcgttggttcccctctttgacctggtaaatgcaggcttttatgcgagaggtaatggtgggggtaaacttgctgcaaacgaaggccaggggcgtcggtggcgcaaggtgaatcgaaagtgggaggatggaaggctgtggagattgggaattgggaagggggcaggcttgtataggccgggaaggccaggaccaggcgagctccgtcttgtggccactcccgccccgtgagcttgccgaggaatccttgacaagtgcagggatcctgagtctacctctgcatcggggtagtaggtgaggagcgtgacggtccgagtgtaagagagaagggaactgtgaagcctcagcaattgaccctcatgactgcaggacggaggacttctatctagggacagagacaagtcctctgtatgcattttgaccagatgcatcacacgcgttgctcatattggatattgcgcccttcatgccttacctctcaaccctccctggtattctggagtggctttggggaaggagcaggcagggaagtcttgagtggagcttccctccatgtcttgcgttgttgctacaacacaaagcctttgctttttctcggagagggatgtgggattgtgtagtccttaatgttgagttctacgattgatgaaggagaagggacgtgatcaaagtttccccttatagtgtagatgagagttttaaaaggactgttttgtcaagtttctttggttactattcttagtttttgagcctttggtttcccaaatgccagctgtttttgctgaaaataatgaatttctatcataaaattagaattaactcaaaatatttaagaaaggatttataaatttacattagtaaagcttttatagtgaaacagtgctggttctttttcattgttttcatacaatcaatataaagcatcacagtctcaatatgttttgtaaagatattttgaaggaatatcatctttgtatgttttttaaaaaccaagaatctaaaattcttcgtatttattatgttggtacttaattctgttgggtgggttctttttgtttgttttttgttttgagacggagtctcgctctgtctcccagacgagtgcagtggcgcgatctcggctcactgcaacctctgtctcctgggttcaagcagttctcctgcctcaccctcccgagtagctgaaactacaggcatgtgccaccacgcctggctaatttttttgtgttttcagtagggacggggtttcaccatgttggtcaggctggtctcgatctcttgacctcaaatgatcctcccgcctcggcctcccaaagtgctgggattacaggcgtgagccaccgcgcccggccggtgtaggttctttaggtgtacactatcagttaaagttactaattttccacgttttgctttctgtaagtttgggcagtggaccccgtttatgcatcattgcttagcccttagtatcttctgtattgtgtacggtaatcatgtccgatggaatcaaaactagactcctgtgctttaaaattttctttgtagtgtaaccaattgtctgtctttatagtgtaaccaattgtctgccactttgtaatgaaaaaaaaaaataccagcaaggcagttaatgtgccttagctacaattttaaatattttgtgtctttttccatacatttagtatttaagcatacaaacatcgatacatagtataatgaaaaactataaagtgtgaactctatgtaagcgctgccacagtcaagaactagaacgtctgtggcacctgagaagctcccctctccattctattcctgatcatccctttcctcaattcttttcagtggttaacactatactgatttttatggcaatcatttactgctttctttcttagtatttcttaaccacctatgtcagcattcctaagcaatttaggttcgttttgcctgtttcttaattgtatgtaagtggattatatattacatatcattatgtatctttttctctcatgcagctgggatataactctattagtacatttagctctagttcttatattggattgtagtaatctatagtataataagtatagtataaaaagtcttaatggaaatgagccacagtttagtctaatattaataaacatttggattgtgttccgtttttagtagttatgaacaatgctattatgaatgttcttgtacatgtattcttaatgtacattaccatgggtttttgtagagtacgtatgtttatcttcaacttcactagttatgccttttccaaagtagatacaccaatgtataccccgacagcagtatatggtagatccctttacttttactgtctcaccaagagttatttttcctttttcccaacttgatgaatgtggctttatcttattgttgttttaatttattctgcccaggacactaaagagtttgagcactttttcaaaaacttaccggctatttgaatttcctctttctagaattgtctttttaattcttaaatcttttgtgcattgtctttttaaatctttttgggaggtttttttgtttgtttgttttttgttttaattgggttgtctgttttactcagggatttctagcagtatggccaatatcttctctgtgcttggagcattactctcttctgggatggcaacttttatcttcatgtaggtcttataggctgtcattgttctttgaattgtatacgtagtttaaactccagataacaagttctatgcttgtgctattcattgcagtagctactagctgcgtgtggcttttgagcacttgaaatgtggctagtatgactgaggaactgaatttttagttttatttagtgttcaattaagtttaaaaactgacacttgattcagttactgtaaaacctgtatgtttggaacaactcggatacataaacctttcttaaccgcaaattattaaattattattttttaatttttggagattttttcccccctggagatggagtctcgctctgttgcccaggctggagtccagtggcatgatcttggctcactgcaacctccgcctcccaagttcaagtgattctcctgcctcagcctccctagtagctgggattacaagcatgtgccaccacacctggctaatgtttttatttctagtagaggcaaagtttcaccattttggctaggctggtctcaaactcctgacctcaagtg

SEQ ID NO: 96419 - DNA, 1021 bp, Homo sapiens
gcaggaaaggtaagtgtgtctgtgggggcttcattgccttcctctggctctgactttcactccggggcaacagtagcaccaaaccacatacgcagtggagctccggggtgaggagggggtggtgctggggggggtgaaggaggggttggagtagggaggggtgtgtgaggtggggtgcccatcctgtcaggggaggaagggcacttttatttttatttgctgttgtcaaaagtggtttctctcctccatctaacatctgattgtgtcttgctccagtgggggagaatacaaaaacaaccccctccttcctccaatgaggcgccagggaaagagacagaaagaggcacactttctagatgtcacttaaaaaaaattcattggagagctctttttctccaggaaaagctccactgcatttgtttctgagtgggaaaatgtcgggatctggattgtattggaactgcttatccatttgtagacctgagtgttttcccctttttggtcctgtatgagatttggatattgacttcagtgttggaagacttgattggtttttgctttaagggtttcattttccattttttcgttttgtctgacttccatggaaaatttcaaatttttagttggtagaggcctttggttaggttttgacttgcattattgctttttttttggttaaatgtctgtttcatatatcagtatataaagtccaaagctctaaaatgcttaaagtttaaatgccactgctattgtctgttcccacatacgttcctgatacttattttccatatgatgagaatattagctattttataattaatctgggtatatttgtaatctttgtaacttgtctgaacaagtaatccccattgaaaactttatgttgttctggctgcatggaaggccaaacctctccatcaatagtttgctggattggtaccactttcagttttagctgaattatttatttactgttgtaaattgagatgagtttttcatctcaatttctcttggggttctg

SEQ ID NO: 96420 - DNA, 1025 bp, Homo sapiens
aaaaaggaaaagaaaaagaaaacttgaggattggggaaattaaggacacatttttttttcctgggatggttttgatgtaacaccagtttgtaatcttcttactgtgaattaatcttcactgtatctgataataaaagagtttataataagttagaaagcatatcccatcaatcacatgtaaggttttgactaaactaacggataaagatttgtaaggaagttaggtgattttatcttactgtccattgtatttttttaatttggtttttgatgttactgtttaaattataccaggttaacgaagggtttgatttttgtttcaaaaatatatattaaatagaaaaactgagtacacatcctaatacttactttgacttggggacagcaaagcacaattataggatcacactttgagaagtaaataaactgtttgaaaattgagtctgcaaagctagacatagtaacaacaggaaacatcccacctacaatgcatatggcaaaggagaaagatagtgcagcagactacagacaaaaataatagctgagagctgaaaacaagtattctgctttacaaccttagatctgtcatctcaaaaatagagataatctttcttcaaaatataatatggtgatgtgagcatattttaatttataagaaaaatctttttctttaggtatcccatatcatatttttgcattctttatagtggagggtacagtgtctcctgtatgttttaaaccttattatttttctggtgtatatttgttgttttgtcttctagggacacatactatttttactttactaatgtgccaaattttaagaaatttaatacttaaaaaaccgaatatgcaaagttcgtaaagtaaatggtgagaagatttcactgaagaattgctttaaatagaaagctcttctgatgtacttaagtgtttgtaaagtcacttcctaccctgggctaaaagagacacaagaaaactcgaggcttaaaatgttggaaatcactgttgcttgaatagtaagc

SEQ ID NO: 96421 - DNA, 1405 bp, Homo sapiens
aaaagagaaaagaatggagtagaaaacagaggactgaatgtactcaggggaaactctgtggttgaaaagtcccccagaaggcctaaagttactactttgctcccttgagaaaagaagtgaataaatttcctagggtgggtatgagataagcctctctgtgaaaaattgccctgtctcatcctgggatgttggaatagtctagtccactcttcttacatgaattcttgtgtactcccagaaagtactgcagtgctcaaagggtgaggcaggaggagcaaagaaatagaatttcattagtgatgttagtgtctgagaagtggtgccagcaagagtcatattgaccacattgtgggaaatggtaaaaaagaagcattttcctgtggttgctgggagtttctggtaacatgtgatggattgactggactgtagcttgactagacagtggcatcaacctgtgtattcactggttctcagctgcccagtgattgtacccagaaactggacatcaccttagctctttagaagctagaaatcttgtggcaagtggatttcgtgcaccatccattcttcactttgctttgaaccaagggaggaatttggatagcactagaaatttatggaaatctgtcagtgggagctagccatagaataattgttatgctgtggttttgcactccagctgtatttctagctagttaggactatggcaatatcttttgaacaagaaagcaaacaggaaaaataactgaaatttgttgagtaattactgtttacctagtactgtagtacttgctttctgtgggggagaagggtggctttcattttttattgaggtaaaatccacatagcatgaaatttacaatttaaatcattttagagcatgcaattccttggttttcagcatattcacatttttgtggagccatcaccaaatctaattccagaatatttctatctccctgaaaagaaaccctatacctgttagcagtaacttccaagtacctccctccttcccatatcgtctggcaacttctagtctactttctaactatatagatttgcttattctggacatttcatataaatgaatttatataatatgtggccttttgtgtctggcttctttcacttgaataaggtttcattcatatgctaatgtgcatcagtacttcaatctcctttatggctaagtaatttttcatatgaggatgtaccacattttgtttatccattcatcagtatttggtgatggacatctgggttgctttcactttttggttatggataatgctgctgtaaacatttgtgtacaagtttttgtgttaacatatattttaacacattcctaggaatgtaattgctgggtctcatggtgactctatgtttaacatccaaggaactacca

SEQ ID NO: 96422 - DNA, 1044 bp, Homo sapiens
aggtgtgagccaccacacccggccaaattataccaagatttaacaaaataacagacatatattaaaatattaagaatcattttgttcaaagtcaaaaatcactaatacgggcctttttctttctctctgtgtttagatatatctgtatatgtgtgtgtgtgtgtgtgtgtgtgtgtgtgtgtgtgtgtgtgtgtgtatgtgtagatatgggtttatgtatatgtaaatgtgtgaatatttagcaggaagccacaattattgaggcaggtattgtggtaagtcactttatattctcatttaatccttctaataatctagtgaaataactactatttttatccccatttttgagatgagaaaagtgacttctagagagaggaagcaacttgtgcaggattacgcagtcattaaattatagactttggaacttacataagatctctcagtgctttatgatattgtagctaacagatatgctcaatatgtttttacctgttgtagaatccagatcattaaaagaaaagatatttgctctgtgataattcagcattacgtttatcctcttaagttttctccggcttccctctgtctttagaatgcgttctgtgtctaaacttttgaaaaacaaagcccattgcttttgtcctacaaatatttcatagaggatgctacgttggctatctctctttttaagttgaaaatagaataagaatttaacttcacatgagaacataagaataagaatgctctaggttttgtaatcattaagtttagtttttaaaaaatgttcattgtgaatcataatcctaaatttgaaagatcatgtgaagaaaatgttaaaagcttattggacagtacatttaaaaaagtcttgcatgttcagacattttcatcctctagaggaaatcatagctaaatatacgtatctgtacttcttgttttagcctttgtatactagtgtttattcacctagagaattcagtattctaatttgaagataggttctaccctgctcatactattcaatataataatagcacttat

SEQ ID NO: 96423 - DNA, 1096 bp, Homo sapiens
cctgaaatatttactgtctaatcctgcacagaaaaaagtttgctgacatctgttctataataactgtacttaaatttgaagctcttcaaactaactgctctctagcccattgtcaaaagtcacagaattgtcttgtaagctccacatatctcttaatagtgtgccttttgtttaatctgatactttatttcatggaaatataaatcttttcctgtgtctttggaatggcaattttattggcatcttgagttgtcttgttactgggcattgtaggcataggtgactatttgatttgttgcatagttaggtagctgtgagatggccagactcttaaatgtctttatgcagatattaagtaatgacttgttttggaacaggaattatagcaaccaagaggatacctgcttccttagttttagaaatcaaagtcagagaatggaagtacatagaagtagatttttatcttctctactatggactgggtaactctattgaggataattttaaacggagtaagagactgtggttcaaagtgtatagaatgtaaaaacaatatatagtgtcctgctccatatgaagcacttgttgataatacctaaggacgtgtaagaatcactcatggtactcaaattcataatagaggaggagggtattttgattcagactgagaggagtgggattgtataaaacaagtctggattgttctaaagcagtttttgaggaaaaatctgcaaaagatgtgacttttatagcatgagggtagggtgaacaacaggaaggaaatgatgccttgaacttaatacataatatactctcatattgaccatcagagctcaatttatgatagagttgggagactcgatagattaaagaagtctgctaaattccacaccaactttaggatctacttaaggtgtaaggggttctgttatgtggaatgtagaatgtcaatgccaaaaacacctgttcagcaacagtttgtagaattctagatggccttggtaaaggacatttcctatgccgttgagttgcttataggaactagatttttatatttttgggaaaactcctctttcagatctgttgcttcagagct

SEQ ID NO: 96424 - DNA, 1063 bp, Homo sapiens
atttcatgtacccaaaagactatattttctatagagtatatttcagcataagaaccagctcacagctcagagtgtcagggtgctaggcaatcttcaaaattaatgtccaataaattttaatgtaaaagggtctaaataaatgtcaacttgtttattgtctcctccaaacttcttcattccctccaacagtttgaataaagtacaaaggtagggttcttgactgtcttttaaaattgttatatctttagcatttagaacagtttctgggagaaagtaggagcttaatggtatttgttgaatgaatgaataaataacagatgagggagataatgcaattaactcctaattgtatatgcacagatatttccagtataaattgcttatgttctctcaccatctctcctggtttcgactacaatactagagaaatattaaactttttacaaggattaaggataccttgaactagctgagaaagaatatagcaccttggggccaagcaataccagccgtggtaaggagttacatcccatcactcatatcaccctgactgtaataaggaataagagtacagtagatagggaagagaggtaagaggagcatattgtaagttctggtctcctttttttcaaatggaccctgtgttgccgcagaacccatggtgccacccactcagaaggcttcctggatggctctgtgcatgcttaagatgaacgggtctacctttctttgttccttccccattcttattctacatagtacctactgcactgtaacttatggttttgtgggagaaattccaggtatcttagaatacagaatcatataaaagagcagtaactactcatcttgagagtgattgcatttatttcataggtaagtaatcttgcccatagctaatacacttattatttccttttattcacttccgcatgagtctatataattcatttttaggctcttctgaatcattctgcttccattctgtagcatcattctttttggttgctgttttcttccatacttattcctctttgaggaaatacttcgcacttcatatgca

SEQ ID NO: 96425 - DNA, 1025 bp, Homo sapiens
cattaaatatcttccattttggggtgttcgtgtagttcttgttaaattttgctttaggtattttgaagtgatgttattatttacatacaagtaaataaatgaaatcttttatcatttttaatgatactcatatctaggaatgcctttttccttagagtatatttgccttagactaataataatatagtttttgctaatagttttcatgaaaatctttttctactttatactttatgttatgtaattgtctcttgaaaagaaaaacatataactaattttaaaaatccaacctgacaatttttattttttgctgtatcatgatacatttatatttattgtatttgctgttatatttgaatttatttccaccactttgtgtttttattttcctattattttttacttttttctcctttattgccttctttttgtattactcagtattcttattatcatttgttttcccttctactagtttggaattcatgcagtctatttgtaggtggttactcaagaaatggtatcatgtgtacttttcaatttatgtgcatacttttactatctaaccaaacaaaacaaaggccttaatgcagaatatttttattacatttttccaatttatagatttctgttttattcatttaattttgtcattttaacaatgtaataaataattattgttttataacatttatattccttaggtttactcacatatttatcatattttttcttgtcattcctttggcattacagatcttctatctgttattattgtccttttgcctggaaggatatcaacttatcctacttactctatctggtattttagttgttttaagtggtattcatccaataatatcctgtgaggatattagagtagtaaaacctctcaatccttatttatctccaaatgaccttatttcactgtgattcttagaagttattttgagggggcatagaattttaggctgtgaatgaacttcttttagtgtgttgaagatattattttagtgtcttcgggc

SEQ ID NO: 96426 - DNA, 1015 bp, Homo sapiens
gatgaaacacaatgcacctaatgttacacaaaagtttaactttatgaacaaaaaggaagcattgatcactagatcatagaatgaattattacaaagggtaagaagaaactgcaggtcataccacctatttataaccccaactgcacctcaagtattaggagtttgtgtgataaaagcagcaagcttttagccatagcttgtcagtgaatagctgtagaagccacataataatgaggggcatggctgactcactgtacgctaaagtagaagtaatactggtgattgctatctgtgtaactggtctaatgagatatttatttattcattgatttatttatttaagagacagggtcttactttgttgcccaagttggtctcgaactcaaactcaaacccctggcttcacgcaatcctccttcttcagcttttcaaagtactgggattacgggcatgagccaccatgcctggccaatgagatttttagatgatcaaacaggtgcctgagttttagaagtagtaagtgccagaacaggactcctgggatttctgagtccagattgaatttttttttttccaatttcagcaccatagtagaccaaatgagatggacaagccattaacagaatatggtgggaattagatttaaataaaatgtaagtataattgggtaacaaatgaaataatgattcaacaataagcatttaaaactaaatttgttgggagaagaaatagcacctaagactatttgtattaagtactgtaaaccatgaactgcaaagaggctcatgtgataattcctcatgcttatgttactttgcaaagtgttaaaaattcataaagacgttcgttttgcaccaagtataaagtatttggtacaaaggtttgttaggccattttaggaaaacatttcaagaaaccttataaatggtataattttatagagaagaacagaacattttagtttaggatatttatgacagagcagaactactaataaaatgtacatatgctgagg

SEQ ID NO: 96427 - DNA, 1071 bp, Homo sapiens
taggaaaataatagcttcaagcccatgcattttgtcctaaaagagaagactataactatcatcattattttgaagaaatgttaatacaaattttaatttaattatttaaataaactttatcttccattttctcctgacagcgctcaatttttcttacatagcagattagaactactgtacttctcatagctgatgcagtatagcaatgaccctgtacatctcagatgcccctagagtatcattcttttatggaatggtacagcaaatgatgaactaggtcactgaaaccatgcaaaattatttttgtatgctgtcctttatgatggatatttctgttcattactatataaacatgtagaaacaagcatgtagagaattttcaccaagtatgaaacatttgtattggatggtctaacaaaatactggctgtgtgatattaaaaaaaaaaaaatgcactctggggatcagaggaacctatctcacagaccggttaaattacaataccaaagaggttcttatgactcctcatcaggggagacatgcctgtgtattaaaacactgtagaaggaaaaaacagtcgtgttaaatatgagtcaccaatcaaaagtcccaaggatggatctgccacattgcaggctttggtttgctatccagctctttctcgtgtagcatactccagagttaacagcagcaggaatttactcacttagtgatggttaatgattctcctgggcaaggttggggagactagctaatatgtaatatatttttaaaaagctcaccaaaggtgattagaatccaaatagtttgggcacttaataagtgaagcttcacttaactgaaaactgcatccatccataacatctcatttcctgataatacgagatgaaagaggagttctttggcataaaatgtagtatacaggttattcaaagggacttacttgttgctgtttttataaaggggagttataggtcaagttatattatcaactaatgcaatgattaattgtccatattctaagatagaaattaatgagggcttactagtttgaaagcacttattttcctg

SEQ ID NO: 96428 - DNA, 1033 bp, Homo sapiens
gatttctctatatttgaaatattggtaatgtcctagaacacagattcttttattcccatttcagtgctctttttaccacatcatattggaaccattatttaagtgtatataatgaaaagcatcttgtttttttcatgtatattgacaatggatttttgctttgaattttagacaaataatgcattttagtgtaactaaattgaaagcaccaaacactactactaattttagttttgtttaactattcaaattttgtaggttgttttagacaaaagcagataaaaaaattatgttgtacatttactttaaatattttaccactttttttggtaagtttatttgcattttgccatcccatgtaaaggtagttaactagtcacaattctcccatttagttaatctcttgaggaaattactcaaatactgtttcttattctataaaataaaataggtgatctggaatgatagcttaaaattctttctagctctatatttatctgaataagagctatctaaaacttgaattttaaaatgctgtcatacaaagtacttttttcctaatacatttttgagataagtaggatatataaaacattgctaatatattgtgaaaatctctggaaatgtcttaagtaatgtgaactttattgttggtaatgctgttcttttttttttttcccgaagatagggcctattgtattgcccaggctggagtgcaggcagtggtgtgatcttggcccactgcaacctctgcctcctgggctcaagcaatgctgtcacctcagcctcctaagaaactgggactataggtgtgtaccacctcgcccagctaatttttttattttttacagagattaggtttcaccatcatcatgttgcccaggctgttctcgaactcctgggctcaagcaatccacctgcctcagccaaccaaactgctgggattacaggtgtcaggcaccgcgcccagctggtaatgcattttaaattgacaaatttaaaagtgtaatcagaattagctgtaaaataattt

SEQ ID NO: 96429 - DNA, 1050 bp, Homo sapiens
tgctatgaattgataatctaaatattttggtttttgttctagatttttccctaagtgttagagctaagaaatcagcttggtcattatagtgctcttgccagtctccttctcttttctcaaagagggaaagagccccagctagaggaaagagcccccaaacttggagtaaaaagaactgttttctcatctccgatctgccactgactataacgttgtttatttaacctcttttgattttggttttctgtactgtaaagtggattgaattacctgattgatatagctctttttgaatcttcagtcttaaatttaacaagccctttctgttagagtctaaaattctatgattttaaatgagactgcataaaaatctcaaaacttccttaaatatgaatgtaaaagaatacagaataactggatgtgttcaaaattggtaaattcaccctggtatcgtttttaacaggaccaaggaaataaataccagaaatcaagaagagcacacactattttccttcatcaatccatagaaccctaatgcttctttagttccatcaaacacagaggaatgaccaccatggcagatggcaacagaggatgtcaacaattttttggaggcaagcaatgaaatatttctactatgagttttctgttattaatcatgtagacacaagtagaattatattgggttttaatttaaaatgaaaagtattatttcctgtaggaatttatgtatgcatgtctttttctttattttctttttttcctcttttaacactatagcatgtcaaaaattacattaagatgcatttgcccttacctctagagtaacagatagaataaggctatcttaaatcctgaaatacagaacaaggatttaaataaccaaaattaagtacctatatttgaaagcagggctttttcatatctctcttggacacatatataactgtaaatactaaataaaattggaaatcagaattattttctatttattttagagttagtcatactatttatgagttttatatagttaaaggtagcccagcattt

SEQ ID NO: 96430 - DNA, 1044 bp, Homo sapiens
ttcatttctatattacacacacatatatatatatattcatttccatattatcacatcaagaagaattaactgcaattctgaggaaatatagaaaaataagtagggcattactgcatggccagtgttctgggctgtgtcctttttctcttctgggtacacttaaagccagcccactgttaggtcgccagaagatattactgcagtatttcttttctatcaaagaagaatgagtctaaggaagtttctgattttagagtcagatggaatttccagtgagaaaccaggcccagtgaaataaatatgtgtgtatgtgatcagtgaagaatgtattaaaaaactaccactatataatgagctattctattgtcagagtttccttatgactaaaaagtgagtgatttgtacccttgctaaacatgtaattttaaaaactgcttattgaatggtctctgcaatgagtagttaacgtgtctgtcctgcctattagaatcatattttgaatgtgtgtatgtatagattgttttgtgttatttttaagcagtgcataggattttatgtgtgggtttcaaaaacgttttgctatagtggaagtaatgttatgctgaagacaacaggggaaactggttgaggttgcattaactctctctgtaagcattattacagttgccattcacatttatgccttttcaaatagaagcccatcaatcacgtaaacttagggccagattctgatctctaatgcatagcatgaattgctacatatcttttttccaccaaaaaaaaaaaactgctcagtaacatctgagattaaaatctgtcctttcaaattgattttatttttatctagactaagaagcaaagtatagtgtcagtcctgtcaggacgtgatttctttttttatatagaattcttacagaatcaattgtttatgtatttctgtaatcataatagtagctctgagaaatatagaaaaattattgttatactttttaaaatggaatctttttatctctatgcaatcacatgtgctaatgtagattgtag

SEQ ID NO: 96431 - DNA, 1574 bp, Homo sapiens
tctttcagtgtcttttgagagaaaagaaatctaccatttaactattgttactttacagatcatctttttctaacctctgatagcattaagacttcttattaaccttgattttgtccttgctctgtggtggattgaggtgtggatatatttttatggattttatcttctctggatttgatgataatgatgcttttaatccaaggtattctactgatctttagtactggggatatcttagacattatctgtgcaaacattcttatctgctatgccttctacattctatttctaaaatttgttctatgttaaggcctgtatcctacatgacttaacgctgtttcagttttcatctctctgtatctctgtatcacattctcagtgaattgctcaatcctgttttccagtttactaggtgccttttctactatatccttttctaatatatcctgtctactaggattttctttttcaaataataaatttcaatttccaagaatttttgtcatttttttgcatacaccaattcttatattttcttttaattttgttttcaaaatttcttattcttttttaagatatttcttcctttacttctgtatgaatcttcaactcttatttttatgttttctgattgctcgtaaatatatttcctcttgcatttttttaaaaattcatgatctttcaattgtgtttgttgactttcttagctttagttttcctcgagtgctttggaaatcattttgcaggttcatcctgacagtgacttttttttctctctatctctatctccttttgtttatcccaatcattgagtcagtgggtggattgacttaagttttaggaactaggatttgtctccctcctctgtcttcctggttttatataatggtttatccccaaaagcttttttcagcttcttttcacagtttggggaatcacatcttagtgccatttttatgcactgagacttgctcaagtcttttgccaggtggttctttttaatctccactaacatgcaatattaacccttggtgcatctaaccgctaccagacttggagcttaactattctataatgtcagccttgcgtactactttgtgttctgttacacagtgacttttatttttagtacagcagtatcttgatttttttctttactatatctcttatactttattctgttatactttttcaataatatatcttatactttatccgtaattgctgagtactgttttaaatagagaagtctctaaagtgtctattgccagtaccatcttgaccaggaatcctgtcaaaacagtttgcacatacatatttggaaattaggatatgaatctttgtcaaacccatcacctttggcatatatatgattcattctatttatttgtttaatgcatagatatgctacagcaaaacaagaataagaataccaattcatgttctcatagcatgacttccagactcaaattggatggattcaaatcctggcgttgatatttgcttcctgcatgactcatcttttcaaaacctttgtttcctcatctgtatttatgacatgtctgcttcataga

SEQ ID NO: 96432 - DNA, 1051 bp, Homo sapiens
aacaaagtgatcatagttaccaccaccaatattgtaataaactttcatttcctgtgtctcctgatatgatgcatggagaaggacacagcatcgcctctgtaatattcccactaaaatgcgtgacctcaattgaattatgaggaaacatcagacaaattcaacatgtggtaaaaatttttaacaaaatgaccggcctacattcttcaaaagtgccaaagtcatgaaaaagaaagactaagtagtggttccatttttcaaaaaacttaaaaaaaaaaaaagtaggaaactgaagacacttaacaactaaatgtcatgtgataattgattggttcttggcctagggttttttttcaatctataaaatcccacaaagggcattgttgggacaattacaaaaattgaatagcgtatgtagattagatacattacttttttaatttgataagttgtattgtaattatgcaagagaatatccctgttctaaggaaatgaagtatttaggggtaaattggaacattgctccagtttactctcaaagattccagaagtacaaattaagcagatagatgctaagatgacaaattaaatagagaaaaatgaaaatcattgaggaatctggataaagagttacaagagtccctcagcctattcttgcagcttttctgtgtgtttgaatatatactgaaataaaaagttgtaatactttttctttttgttgtaatactttttgttgtgattgtttttatttcaatagcttttggtatactcctgtgttcaaatcaataaaattatgaagcaaaattacagtgactaatctgcctccctcaagaaaagatagtttatgttatatttgtgagccatgttaaattctttatgttaaatgtaccatttgaattcaggatattaatattttaagtgaatgcacttaggggatgtataatagatagctatttcaaaacacataaaactactacatccagtctcttccaatccccaccccacctaccatacatttactcattctttattccccactttacctggctaattg

SEQ ID NO: 96433 - DNA, 1011 bp, Homo sapiens
cttagctttgtactttgcacacaaagcccatttccttattccaaactaaatatgtttatgcatacacacacacacacacacacacacacacacacacacgaacatgcatatgcccatgtattttcttactacaaagtcagatggtggaacaattctgaatgtatatgtagatagttaactgtcctcaattaccatattgtgtcttacattgtaaaagacccttgagcaacattaaacaatatgcgacttccttttatttttcttgttacaagtcttactgagatatccagttgttgttttttattacttccataaattatagttagttagcaagtgcttattgaatgctttctaagtgtaatgtagaatttaaagtgatattaaagaaaattaaggcctagcgcctgttgaccttccgtttgaagtttttctccacagtaggtgggcctgaaggtgacccatatgctccttcaccctgaggttaaggtgcaaaagacaaagtacctcctctcaggattctgggatattacagaagatgatcgctcaggcagacgtgcaaattggtacaatagatacagaataatcatagtacaaattatactatcctcttgaattgtcatgcctagcttcctttctcccacacatgcgtatgactattctcccacacatgcgtatgactatacttatattttaaattattttttactcctatgtatgcttttttcttaatattagaaaacaatactatttaaaatacttgattgcttatccaacttagtgatattattttgaattcatttaagttcttagctagcattgcttaatacctggtgtgtataaatattatgctaaatatcgatcctgaatgctacagtctcagacttctcatattttagcatcttctccaaagtataatacaagtcatcaatgaaaatacagtaagcaccagattcaaaactttatggtttcatagcatatcttaggcctcctaactgctgaatcttcagtaac

SEQ ID NO: 96434 - DNA, 1045 bp, Homo sapiens
gagcttagtgagctagagccagagctggtgttagagagcaatggcagcatggtgaccatgcacagcggcggctacaagcaaaattccactgccctgttttcaatatctaacattcatggcagctttcttccacaaatgttccactcccttgatttccatgaatctacactttcacagtgctgctcataacctctggatattctttctttttttccttttgtagattccatgcttacctactactttttttattctgtgtactctccacttttgtagatccgagtatcacagataagctgctgattccaaaattcacatttccaacctagacttattctccaccttgctctttgtgcagtcacctttatgactatgtcaaagagctttcttgccttctggcttccagttgggtttggcccaatgaaaggcatttggaaaagatcagaaggtgggaagtgagtgagactggggtattcttacagggttgccacaggttagctacatccatttactgaagggcacaactcctgtcaacacccaggaagtgcccttttctgacttagatatgataatgggtctccaatattgcctgtgtcagttcccttaaaccttgcccatgtccttatagataaatttttctgcaaattacacttttgagcgtactgtctttttttctaccaggaccctgactcatataacatatgagttataacttatttaccatgcctttcctaaactccttacattgtcctgaggccccacacagccatataattactaagacttgctgatttcagatcccaaatattactcaagtatataccttttctctcttttcactcttaaaatcctagaggcccttaatacatctctatgaattttttttaagtgtgagatagaaaaggactgattaaggtaaactgtgtagtaaaaattgtcaaccaccagcaaactgatcatatggtcaacgtgattatatttggctttattattctctagctaatacatgaatgtgcatcttgtggcccaaatgtttctgtcttct

SEQ ID NO: 96435 - DNA, 1039 bp, Homo sapiens
agcatgaaggggtgttgaattttgtcgaaggccttttctgcatctattgagataatcatgtggtttttttcgttggtcctgtttatatgctggattacgtttattgattttcgtatgttgaaccagccttgcatcccagggttgaagcccacttgatcatggtggataagctttttgatgtgctgctggatttggtttgccagtattttattgaggatttttgcgtcgatgttcatcagggatattggtgatccttatattttaaaagatcattgaattctttcaattttgttttatttataaacatagaatgtttttatctagtggaatgttgatagaatccttttttaactttttcttttttactttttttaaatttttttttcagtaatatggtattccccagaaagaatcctaatatacaaaataaattaaagtgaagctggttctggttaaagcagggttagcacctaagacagagcaggaatgttaattctctattaccagtgcttattaagtatttgttttctcccagttattttctccaactctaactctattgccatcctggccctgggctgaaacccttattcactgacataatcagaaactggttataatgagatcctagctcccattccacctgggcaggatgatttttcaagaaagattcttgtttcaaaggtatttggaatctccatccaacatgaaggttggtttattctttttttatgtaggaattaaagaaacttgatgaaagaaatatggaaaagctttcagtaaatcagaagagttccccattgtaacataagctctgaatatcactttctgagaggtatgatcctattagccctattattaactatatttttgagtagacttatcaaacttgcagttagccaaatgtcttttttatgtcatatactataaattatatctcttccatttaatcttatatttaaggtgattttttacccttttatggatatttggattctacttctgcattcattcttgctgatattgtcttcatcctagt

SEQ ID NO: 96436 - DNA, 1050 bp, Homo sapiens
gcctataaaggcgggtacctggaaatattaaccgactcacactgtaaaaatgagaccagtttctaaacaatagagattgtcttagtacaacatcaaggttcaagacaaatgttgaactaaaaactttacactccccacccccacttcagacaggtaccagcattggtgaattatgattttccttagtcagaagcactcatttttacccatgtagaccatccttaggaattaaatattggttatttaatgtagattataatgggaagctgatttttttcacaatggcatatttcaaggacttggttccaaactgagctgaagcttcccaatgcgttttgtacagtctgggaaaaactgtgctgcactggcccacttttgaaggccatcatgctctgtaatataaggatatcatcttattgctgatatctttggagagtccctagcagacacagaaaatgaatggaggcaaagagtgtgacggaggggacaaggaaggaggtcttccagctatacaagttcctgtgggttggcagcgtcgtgtggatcaaaatggagtgctttatgtcaggtaagttcttattattacctgtggtacctgcaaagttgtactccaaagactaaggagagaaccaagcatggtgactgatggcacctcatataaatgtgaaaaagtgacctttgtgctagaaacatatgagaatttttattgccttagatttccagagagaattttttgcattacttgtttatataaggtgtcattctgcttatctctgtaacaagaataaagaaaaataagaagatttctaaaagaaacatgcaatcatcattaccacattcacaggagaatgtaaaatactgggaatatcacttgacctgatatcacttgacagaattactctgtccttcagagtgtgtcagctggcttttttgataaaattgagtttttatccatagaaagtttcaattattagacttcttaatgcctcatgttaactaaaaatacatttctttttttctgcatagtctttaatctatttccttgcgtgt

SEQ ID NO: 96437 - DNA, 1060 bp, Homo sapiens
agtatgaactctagtgttcttcagaacatacctttaagaggggaagccgtgcactgccacaatgcaaacactaactttgttcacagtaacagtccagtccccaaccaccatcttgcaggtttaataaatcagattcaggctagcgggaactgtgggatgctcagtcagtcgggcatggctttaggaaattccttacatcccaatccacctcagtcaagaatttcaacgtcctccactccagtgataccaaacagcattgttagcagctataatcaaacaagttctgaagcaggtatggttttattagaaaaaagtacccaaaggtactaaacttttctacttttttaaaaaatttgtaccaaaatatttattatgataagaaatgatcctttccccattgtgaaattctcttcatttctttagtatttataattttatttacagaatgctagggatttgtctattgggaagattaacagctaagaggatttcatgtgtttccattatttgttgtcaatctgtgtcattttgaatattgttcgactttcacttggttttataaccattggactccaaactgcaaaataagccatacgaggcagggtttcctggtttgtgagacatgtccttggtctatgccaatataaaagccatctccctagcttttgtttgtattcaggtaaatgaagtttatcttggaaaaatccaaaaaggcaaaaataaatggattttttttcttgctgctgaacagaagtaggtgaatggataggaaaaggtaactagaagttgtacgaagtagaaggctgtcttctaatgtgttttcttatcctagtttgctatccttattatttgtttgagaaaactcaaaaatggatattggctactcccttttaaaaaaaaagctaataatttaagctttctaataaaaaaaaggcttgaaaacctgatttccagaatttttaatcttgaaattgttttttgagtttcttgtagaactaaaccatttttatcattgacattaaggttttgaacccaaatctattgtatctcttcagccacc

SEQ ID NO: 96438 - DNA, 1649 bp, Homo sapiens
atagggggcttccagcttttcactcactcatcatatttctttttagataactcgacacaaatgaaaattttattttatctatttagcagaaaagtcacacaaagttcataactatttaaaagtacaccatatttattgagcataccttaaataattttgatgggacatttttagtctcattgcattatacagttttgatatcccctacctcagtttacttcatttcaggtctgagttcatgtgcaaagtgtatgtatttcattgatgtatttcaattcatctataatggaaaagaccaacatttacttatattcttgtttcttctgatggtcaagtttagacttatttaatactgttttggtcatttattttttttgtttcatgtatctttgtaatacatctgacctgtactgttactgctgggggtgtcaaagcatataggttaaaaatttattagtgtcagaaaagtgtgagcatataaatagctaaaaaggataaggatacatgtctagaaatgatatgaatatgaccaactagtgtaaactaacaggaagtatgtgcttaataaaaatctaagtagaatttttaaagtattaaacctaataaaattaaatactaattaacgtgcataggtctgatgtgcagctggttatgaaaacggattgattcactaatgaacataactctttcgatgagctaaatattgaagcagtctctaatgccatgtttctttttgccatgtagtgaactgtgtcaactcaatgtaccatcactgtaattgcctagcctaaatatctgtttacactgacatttattcattcatcaaataaccgttgagccttaaaggtaggcattcagaatgagacagtaaatgatagtcacagcttttcctctaggagtgttactgagtatttctatgataccagaaagacattagaagaaaaccacattttattcttaaaatgttgctatagctatctatcgtcaagtaccttttatgtaccaggtgatttccctatattatttctaatctgtgcagttttctaaagtataaagtattattgttcaattttacagatcaggagcctgaggctaaaaaaacttaagtaactgttccgtatcatacataactgaatcaggatttgaactgaggttcatctgattctaaaatccattttcctcccagctgcataaattcttcatctgaaacatttagtgctcaaaagtattgtgttccctttcaaaatcttttaaaatgttcaatagataataaattaaatcacattaatgcatgttaaaagccacatttgttaactattgatatacttcagatgaaagtcagttatttttgccaatattatagcaaataatgactagaatttttacgtcagtgcagaagaagaaatacccaaaatgtcaagaaaactgccccttattagtgaatcacatttggtgacctttcttttaattaattatcacctcactcaaattagaatgggtttcctagtaggtgacgtgtcagtaggcctttaaaagagatgtagatgctagtcatgtcattccaagcatggtagcacagtgaggatgaaaaaaaccaacaggtaacatggtccaactgtactctgtggttacagagcttagatacaact

SEQ ID NO: 96439 - DNA, 1028 bp, Homo sapiens
agtggtgtcaatggcagaaacattgctgaatatatctaataatgctgggaatacacctggtccagctaaactcaacagtaactctgtggtgccacagctacttaaccctctactggggacaggtctacttggtaagttaaattttttcacaaattttttacaaaagaaacgtttttctaattctattttctcctttttaaaaactccattttgtcacactatttttaaaaatgtttttgttatgtcacagcttgcttaaggaactaaatataacaacacccacacacaaccatagttatacaaacatgagtgactttttcctctttcccctattctagcaatactaaatatcattttaatctgctttctcttctaattctgatgccacctaaacctaacctacccatcacctcttaaaccaagtagagtctcatttttcaaataataaagcacaggtacatcttaaaaatcacttttatttgaattttagttggtgtggcatcacagggttagtatgagcagctgcactgtggatggaaacagattgagaaagtgttttccaggtgaaccctaaataaacaaaactaaatgcttgtctagcaaaacaagaaacaagatgtaaaaacacgcaaagctaaagttttcccaagttcaagggaacagacagcccctctagctgctactagatttcctcagtcagtattaattttttgacttttgtggcttaaaaatacagtttttcatctgtattatcctatcacaaaatagttcgaaaataatgccaggtatatttaactgatggatataggtaactataatataaagtgtggggatggtgtccataaagtctagaaacagggaaatgtacatcatgatgtcaatggcatcttcaaggtgtaaaaaatttgtttattatttatgtgtttttgattttatgaatgcctttataatatagtataattagttctatttggcattgaaatctttgtagttaaataaactacgaagcattacagatttacatgttt

SEQ ID NO: 96440 - DNA, 1030 bp, Homo sapiens
tctgagttcagaatgatgtctcctttcaggaaaagttctgggcctttaaaacatatggaaatgtttaacctcatagtctggttctacttaacacaattagatcacataaattaaatgaaagcttctccatgaaactaccgttcaatttaaaagaaattagtaggggtcttctgggcctttttttttttttttttcggcctttacaataatggtggaattggctcactaggcaagaaatatgcagagtgtttaaagtagatagaaaaatttatatctgaccaggaggagataattatgcacattcccccatatgattaaaaacgtataatttttcatcttcttaggtaataaaaattactcttacaggtatatgttattctcgtaaagagtgtattgtataaagcaatttcaactgtgctcaaactttcactggcacttaggtttaatgacaggaaaccaaaagcatttttgccagcacaataaagggattgtctttctccaaatgactaggaggtcctaaaaccttgctcataatgcctaatatatacttgtcaggatacactctggccataatgtttgtacatttgataagaaaatgaattccatacccctattcacaaaatattttattctctatactctctgagttcagacaaacattctttaggttgaaaaacctaaatatttttgacagtttattcaagaaataattagaaacagaaaaagtgggcttttatgatataaatggaactgctacaaatacaagatgtagacattgaactgttttacaatgtctgtgcaaacgaactaagtcttttttatgtgccattttaccaaaagcttaactaaaaaaaaagattatggcctcccttccctggaagcattctccctgtcctaaatgccttgtctaaatatctttttatgcccttaggagaataaaggcatgtacttttaacacatttcacattaaacaatggtctagatcttctgattaatctgtgctcgaaaactcctgagactgaggtattca

SEQ ID NO: 96441 - DNA, 1009 bp, Homo sapiens
ccgggcgcggggcggacgggctctgcctgctccgcctggacggccgtgctccgtgcgcaacgttagagaggagccggggatgcccggaagcgagccgccggcgttgcgttgtcctcgagaattgtcattgcgaggtggtccttagaagttgaggacctagtgcatctaaattggcagttgtaattttgataatacagcaccttttgggaaaattgctgcttttcctccgatgggttaaattttgcagacggttggatttcatctggcttgacagagagtgtttatgactcgagtggtgttacttgcgtgcgaagttcatagtaactgcaccctcaagaatttcttcaatgaacctacagtcccgccttattgtcaacctcgggtgtgtgtggattggttctcttgcttcagtgactgtcaaaaggaagctcgaggtttcagtgattggttttctcttttgactattaatattgcaggaaatgcttttatgccttcgattggctggttgagttctgacctcattatgttaccctgttaatactactttgctcttatttaatcacatttctctttgatgtatagttacttgaaagtcttacattttcagtagaaaatgcatatggccgtagcatcgggatgaacttaactgtgtgtgtacacacacaaatatgtaatagatatatatacacgcacatacacatatatatttgtgtgtgcatatatataaatatgtttataatcaaaacccagcatttatccctaaggtttagagctgtgagaacttttttttttgtatgtgagaacttttttttttaatttgtttctaacgactcagttttccatgggaaggaaaattaaaataaaatcatattatatacaatagttaattacattgaaccctaataagcacaactttggatatttttgctattttgtgggtcttgatccaaagaaagatggccttaaaagtaccagtattgtgtgtaattactttgatcctattatttta

SEQ ID NO: 96442 - DNA, 2902 bp, Homo sapiens
gtaaaaacatgaagcatttcttcttctaacaaaagcaaatgacatgccaggtattatctaaatgccagttgttatctaaataagatattgggaaactaaagtgttctgtataggaaaagtatgtgtaaggccgtgtactgaaatgttaggaataaaagaagatgcagacttcaatttcatagaacttaaatgaaccattaagtccaaaaacatgtatctggaaagttagcaaaaactacagggttaagacaacctgacagacatcaaaagagcattagagaaagttaaatgttagtgtagttgagaggcatgaggtgattcattgcatgtcataaagaaggcttcttggagagaggcgtaacaatttgggctttcaggtttggttgtatggtgtatgttgaagcaaatatttgagcataagaatatctaaaggaagttctgaggatgctgagtagaccaaaggaaggttcttccatgttagatgctttctgtcaatcatttcctattcttcctgctaatagaaactttaggaggatagcactctgatgttgctgaccatatcattcccctgttttcgttcggacatgcagacatcttttgcttctgtcttccccttcattttatccctgttacatcttcagcactaaaaaccgtttaaaacatagaagcactcagtaaatatttggtgaatgaaggagtaaaaataggggtggagattaggttggaaaaaaggtagaattagactaaattataggcagttttgaatgttaggcctaggagtttgtagggtggtatagatgaaagaccactgaagtatgattctggagtttttgtttctagttctggttgtcatggattaacccatttatgcctaagtgggttaaatggccatataatttggaagttgcttagcttttctgagcctcaggttgttcatcactactatctcagctaacatttgagtgtgtgttgttgagtgtttgagcatgtgccaggcactttgttaaacttaatagatggtttagagttgattttaagagtaggacatataggtgttactacttctttttcagaggaagaaactgaaactttagaaattaagtaactcgcctaagatcatccgtctaaaaaagaacatgctagagccagaatttgcactcaggctgattgactctggggctcttgcttcaccgttgtactgcttcatctgtaaaatgaatgggttgagaactagaagatatctaaggtcctttatagctttactgttctatcatttattttcccatttaaagttcaaaattccagattcttgagatagagagcgttattggtctggcttgcatcaggtatctacctctgagtctgccattcaaagagaaggggaagttagtatacctatgttgagaagtgttaccctctcagctggagagctgccctgagagatctgctaccgatggtaatatagcatgatcaaaagttaggaagttaaagtgttaaatcattttaatccatgatttgtcccaaggtgaatttgtatacttagtgtgtttttacaaaccataaatttgtaagatgttttaatgagcttagaataatttgtatgtgttatgttttaaatgaaatttgaatcaaagactgtaaaagaagtctccagtgtccttttaaaaaaaagcaaactcttcacacttattaattttcaaagttgtaagggatgagttttgtttgaccgcgtagaaattatttaaccttcctggcccttagttttctcatttgtgaaatagaattggactgagtgacctttaaagtacctttgactctaaaaattacttgaacctctgaaaccgcatgtctatctactggcatattgtccaggattataattagatgaaaagaactaacaaatgtgacattaaatattgggaagaaattaatgcttaaggtttaactctttaatactgctgagatcctgtcaatttggcttatcgttcttttatgaggatcgattatattcgtcctctatctaatattaatttttcctagagcctagtagagcaatccattctgtgtatgttttggttatgatcatcttgctttcatgaaattttcttcactttactaggcttactcattgctgtaagtattctgaagttcagtagtacttttagtctttaccacttgagtttattttaattttctagtatcatttttctcacttgagtgtgtgtgtaatggtgtgtgtgtgaattttatatatgtatgaaaaagagcatgtgcacgagagagagtagacacttatttccccaacaagactaaatgtcttgagggaaggtatcatgtgtgttttattcagtacccaagacaggcaggatagcaatccaggtacttctgtcactttctgtcttaagtgataaaaagtttgtaatacaggcacttagcatgttgctggtcacttggattgagtttcgttgtattggtaaacaatgcagctctgcatcttcatttagttttaagtagagttgaagtagaaaaacagtaatgggtgtgtagagacagcatgaggaggagaggctgataggaataagccctgaaggagaccaatgcagatggcagaaggtccatcatgattatttgattttaacttaaagttgatcatcgattatttgccttgtctatactatttaaatgggacagagctttaaatttacatattctatcatgcagaaccgcttcttacagggttaacactgtggaggaagatgccagtcacttccagtttctcctcagcagtttcattgtatctgtcttcttttaggttttttgttttactgtaagcagctgttgctataaagtcagaggaatgcagactggagagtcagcctatctgctacctctcttaactcct

SEQ ID NO: 96443 - DNA, 1046 bp, Homo sapiens
ggccaggagttttgagaccagcttgggcaacatagtatggcttcgtgtctacaaaaaataaaaacatcagctgggtggagtggcatgtacctgtagtctcagctacttaggaggctgaaactggaggattccttgagcccgggaattcaaggctgcagtgaactgtgatagcgccactgcacgccagcctggatgacagagtgagactgaggccctgtctcttagaaacaaacaaacaaaaagagagagcgctttcaaacattacaagttaatatgtgtgttttcctccttccttctgttttctggcacagcagttgacaagcaaattgattttaaaaactaaagaccttgaaaattttttgctaagagaactaaatcttcacttaatccgtagagtaataattgggccctgaataattaataaatattgtttttgttcctcagaatgattttttttaggttagatgattagttagttatgggaaagataagttttagtgatgaaaatctatgcagtgggtgttgtacactagagaagtgaatagagacattccagtataccattgaattcttggatgaacacttttgtttggaaactttcaaaagtatggtattgatgagggtagtcatgccatttatttgattcttgagatgtttctcaactggggcactattagcattcaatttgtagttggttgtatgagacggtcactggcaaaacaagtttattacatctatcttctgcccattaatttctggaactttctagttggaataaccccaaaatgcttcctccttcaatttccaagtgaagggtattggcatctgatttgagaattatgatccagggcttcttaacctttttttggtgacatggactcttttggcagtctgttggaactcctcagaatgatgccataaatgcataaaataaggtcagataaatcaattgtattgaaataaagttatcaaaataaacaatttttaatatgtgtactttattagcacattaagtacagaatctacagttggatctagttattgta

SEQ ID NO: 96444 - DNA, 1062 bp, Homo sapiens
tttatatcatgaaggacatgatttgaaccagagtttaaatatcaattcatgtaatagctaattgactataatgtactattgaattagtttttacagattagtcttgaaatgattcctgtatgccagaatgccatgagtttttttttagatgcctgttgttacgctcatatagggaagtgtatgacacccagtagagttattaagagagttgaaacagttttgggatctagtgtagagtcaccttttaggacgggcaaaattgtattataaacagtgcctattgaacgaatttggaagaacagaaactgttacggaggatggactaaagaaacagtgctgcttgattattaatcaagtaatgcatagattttacttaattttggcttaaagtgatgggtcactttctgtaaaagccaagtacttggaagaagattgtttatacattataggtgcttggtcagtaggagtttatttgaaatagcctagccaccttgcaaaattcatcaaggctttcaaaatacctcccacaaaaatttccaaagatataggtcagtgattctcaagctttagcatgcttcagaatcacctagagggcctgttaaaacagagatcagtgggtcttattcctcttagtgtctgattaagtctagaatagggcctgggaatttgcatttttaagaagttcccaggtgatcctggtgctgcttgtccaaggacccaactttgaaaaccagcagtttgagaggtagtattgtagttcttatcttggccacacaccagaatatctaggatgcttttataaagtacacttaaaagctttatcctagatctaccaaccaaatcacaagttaggggtgattctggattcagtagaattgatttgtctaggtagaaaaaagggattggcgtgtgtgcccatgatccatgcctttctgccttaccattttaccacacctttcagggcttctttccttgtggtctaatttattggctttcaaatgtttttttgactatcactcattttgtgtgtgtgtgtgtgtgtgtgtaactgaaataaagtgc

SEQ ID NO: 96445 - DNA, 1052 bp, Homo sapiens
ataaataaaagttgccctttatttactgttaggacattaacacagcacaggaaggtgctgattctgtagagtaataaaacagtacagatggtcgttggaaaggtactcagccacctaagcatatcttgaggtagttaatttctctgtaaactagaaaaatgaaaccccagattgtttacattatattctgtttttggaaatacctactcttccattataacaatatcatgtgtgttcatttgtaaaaaaattcagaatatgcagaaaaagtgtgaagaagaaaacacaaatcccttaaatttccacatctctgagatatctctgtggttgacctttgggtgaatgtacattcttccatactttttttctatgtaatatatttgtatgtgaataggtctatgtgtgtaagagagagaaagagaaagagaggtttgttttttaaaatctatttcagattgaaaaatttcaggaaagaatttctttagctccttttgagccatcacttcagttattggattagctttattcactgtagcctgagacatgggcgttgtaagagaatggcagcttgtattgggtcactggtctaaagggagcttgagaggaagggatagtcattttccaaaacaagagaattttaaatatagatatggtcattaaagaaattcttgtgtgctgagcatcaattcttatttgttattactgtaactagttagtggtctggtgtatatgttgactgtaatctattcagttccatattgagggaaattgacatatcagtcagagtttttttttttttaagtccttaataaaaaatgcttttggtttttgaattaaagttaagtagatttcccccttcaagttaattacctcattttttccttagaacttttgtagtttgttctagtatacactgcgttgtagatcagtatattcattcaagtggatatccagttgtctaaacatcatttaaaaaaataatcttttctccctggtatgagatgctacctccatcctatttgaatttttttttttagctcatttggtgtata

SEQ ID NO: 96446 - DNA, 1039 bp, Homo sapiens
ttactactgtcatttccagtctcgagtgaatatttaagctacattgatgttagtgtcacctttctaagttgatgttgaagaccgtggtcttacttagcattaggaaattgttgatttaaaacaaggttttcgaaaacccaacaattagatatgggaacaaaagagtaaacatttgttgcattatcaagtggtacaagttagcattatacaacttataattaagttttccaaaagttgatttataattcaaatattctagaattatgatgtttaggataacagttttctgcacaagattgttttcacttttatatttctgtttaggatatcagttactcagtccgttaaagccatccactcacacctcttcttcatacccctcacaggcagttaagacagagcaactatgaatgattcagttcttattaatttaaaatttaataacagctgtttttcaggagaaaaaaatctttataatataaaattctaaaaggaatttatagtaaatgggcacttatctgtttaggtgataaatgtctttaaatatagttttacagaaaaaacaaacatcaataatgcgactgcttattttattgatttttagctaaagctgatgtgtttctttgggaggcaaagttaatgaaacttatgtaatgtttctacaagccagtatttagaatattagtgaattggatggatagcatgttctttaggccacgtttttcaaattgtctgtggtgaaagaccagtttttgtgttgttgtttttatttttatttttttgaaacagggtcttgctctgggtcagcccaggtttgagtgcaatggcatgatcatggcttactgtgggcttcatcccctgagctcaagccatcttcctgcctcagcctcctgagtagctgggattacagccatgcttcaccatgcctggctaattttttgactttttttgtagagatgagggtcttgctgtgtggcccaggttggttttgaactctggagttcaagttatcctcctgccttggcctcccaaagtgccg

SEQ ID NO: 96447 - DNA, 1033 bp, Homo sapiens
ctgcaccaggccagaggaccaatttaaaaaaaatttttaatttattgcataccgatacttttgtcaggtacaataaaaatacagaaaaattaaagatatagaaaatacaagttcacacttttaaaattattagtttcagcagataaaattactctgtctgattgctttaaactcctaaatgcttacactgaattttgtgcttctagagaattgcagtctgagtagcactgccttaaactggtggttctcagagtgtagtcccaaatgcacagcatcatcaaacatcacctgggaacttagaaatgccagttgtctggttccatcccaggcctactgaatcagaaattctggtggtttggctcagcagtgtgttgaaacaagacctataggtgattctgaagctgaagcacatgaaactttaataagccattgttagactttttttttttttttccaggctcaggaggtatttccttctaaaatgctgattatctgtgcttttttgagtaggagctggatagcactcttataagtctaaactctcttagagtgccaactatgtaaatgaaagactgaaagacatgattggttataagttaaatctgtcacagattcttagaaaggaaataatatgtgtaactgaggattgatatggttgaaaatatatgtgcttaatgaaaaggaaaattctggtgttttaagataccagtaggatgggccacgttattaacattctgttgatagaattgagaagcctgtcttgctgttccgtagatgaatgaagactttgccaatcaaaactcttcatcgttgtaagacctcagggtcacatagcaactgagtcagacagccccaagttggatgtgtggcaggttgtttcagtacaaaataaaaggaactagcacactgttatgtttcaaaccagtggagattgaaatgggatctttacagagattgtctggaatctgttttttcacttcagtgtcctgttgtttgtaactagtatatagaattacagtagatttttttgtgt

SEQ ID NO: 96448 - DNA, 1020 bp, Homo sapiens
atttctttctaggtcttcctacctctgccttttatgttcttagttttggagattttcagatttcaggtgatttttaaaatttttcgtatccctaaatgctacttttgagtatattaggtttggagcatttttcttgaacatttcttttttctcccctccccagagtgagagttgttcatcagtagagatatagctgaatcttgtcttctcgttttaagataattgaatagatttattacattttcttctgttcatttttttagatttgaggtattcacaacattcttagtttaatggtaccctcttctatctgtataaaatgatgggctttcaacaagtaggcaaggaagtgcttttttcattctaactctttctagctggtgttcataaatccctatcatctctgattttctgtgggtcagatgggcccagtatctatcctctctcctgctcttttcaattttagtttcccagaattttacggcactcttgtgctgatggcctatctcattgtttttgtcattgtggttttatacgttttttagtccattactaataagcttacattataaggtggtagagtatataagtataggcattcagtcagctatctttagttgggagttttaaaatagcaatgaataatctttggctatgtgtgtagcctaattcagtggataaatcctgaaagccaggaagttggggcatgaacttggtaagatggaaaagcgccagacaaggattcaaatttcattcttgctgatttctaccagtgtggccatagaaccttagttcattcgtccccaaaagaaaaacaacaacaacaataacatactacttctctgcatcttggtactcattgtgtatgactaaaagtcatgaattacttagtttttttttttttaaagtctgctttatttaccatgtaatttcatgttttcaggggaaaataaaaagtagaaagtgtataatgtctttacagaaactcagaaaaatgctcaagcgtaattatagtaggtt

SEQ ID NO: 96449 - DNA, 1095 bp, Homo sapiens
ctatctcccaggctggagtgccgtgttgcagtcacagctcactgcagcctcccattcctgcgctcaagtgatcctcctgactcagcctccaaaataactaggaccactgatgtgagccaccacatccagctaatttttatttttttaatagagaatcatagtctcaccatgttgcccagggtggtctcgatctcctaagctgaagcgatcctcctgtcttgcctcccaaagtgttgggattatagacataagccactgcgcctggcaaaagtttttactactaatagattctaactaaatttgtagtaatacttgaatgggaaaatgtatttggtgttccaacttgggattctgccctattaagaaaaacatatttctgcctggcactggaagcccttttctcaagcccctttttttttttttttaaatgtttctggacctttgttcattttggacataatgttttctctgcctcgcttatttatttcttcttttgccctgctaaatccctattgatcctaaaagtcaatagtttagattttactttctttgggcatctttccctaaccttccaagatgagtggtttgactagttgagattggacatgcttgtgaagttcaaacatgattgcatacttcattatctctctctgactaggtgagtttcttaatggcagagactgtttctcattcaacagttctcaataacaggataatatccggtgtttaataggtgttctcaagtgtatagaaatgatgcctactgataaataatttttaattcatgcattgtagcatattcagccatctagtttcgtttactctagtgcacttctatatcttgaggccggatatttatttcgtttggaggttgataaatgttcacttagaaagcctctgtggtgcttaaggaccctgaaatatttgttgagccaacttggtcactataaacatagaatgaagttgacagagaaattgatggcattgaggtaagatgagtcatagattctagacctgagtgaagaaataagagctataagggaatctgatgaagaaaatggaaaggtcaagaagctggagattttcatgaatttg

SEQ ID NO: 96450 - DNA, 1001 bp, Homo sapiens
aataaataaatgagtgaaagaattaatgaaattaaaagcatatactccatggcattttcgagccatcagtatttgttggactaaaaattgtacacagaatcaaatataaggctaaaattattagtgcatacagtgaaattgagcaacccgctgtgttagaaattaaaaggtgagttctgttattcaccaactgttaatttagcccaaaaagtgccgagaaggagttgggagtggactccaatctgttatgaaagtgagacaaacattcttgttccttctgatccctttcagtagcagttcttcatagtcacccttaatcagctttatgcagaatttattgaatcataacacattgagctgtctttaccaggtgggaagcatcctgaaggcacaaagtctttgatgacctaagatagtaaaacacttcagttgtgtgccacatgcagaaaaaaacactacctactttcattaagttacatttactttgggttcctcaacccaaatgttataattttcattcctcttggagttcaataattttattaaattcagtacccaaacttttctctttaaggaaacaactttgtttacatttcaatagtatctttatttgatctcctattacctgttttatttaatatgataacattttacagttgatactaaatatcttggaattgtagaacacgaaggaacttaacattctcctccccccgcccaaaccctggtgacggaatcttgctctgttgcccaggctggagtgcagtggtgcaatatctgctcaccacaaccttcctcaccgcccccaccaggtttaagcaattcctctgcctcagcctccagagtagctgggatcacgggtgcgtgccaccacgcccggctaatttttgtatttttagtagagatagggtttcaccatgttggccaggcttatcttggactcctggcctcatgatccgtgatctgcccaccttggcctcctaaagtgttgggattacagg

SEQ ID NO: 96451 - DNA, 1935 bp, Homo sapiens
tgttgtcaagtctacattggaaaagagaaaaagttacacttaccaacataaagtggacctgtgtataccactaggtttttcagcatggttaaaatagatgctggcctgacatccaacttcagtctcattatccttggaaatgtcttttgatattctctgcattatgcaaaaaatgataattgacctgttctttcagggcaaacatattttgattggaaagagttggggaggattcagaacaaatgaagagcattgttttgtttatacagtaagacttattggtagaaaggatgcattccaggaacatcattttcttgtaaaaaaaatactattggatgtgtattaagaaattggacataaattctgtgaaaggacatcacatattcaaataaataaagactggtaaaacaatgccatgggtacagaagcagattttgtcagatttgtggagaacacattacaggtgaagctggatctcaatttcaggtgattagaagggacagggaataaggccagcccctgagggcaacccacattcagatcagctagctctaaggatattcctctctcctcagattgtgcactagctgcaaccgtgtcctattcttgggcaaagctgtgagtgtggacatgggctgaaatggtagagttgtatctgggtaggtactaatccaggaaggaggagaagcctccaaacctagaagataatagatatgaaaggaggccaggcacagtggctcacacctgttatcccagcactttgggaggccagtgtgggaggatcacttgagtccagaagttgaaaactagtttggacaacacagtgagaccttgtcactacaggagaaaaaaaaggtaatgccagacattgtgtgaaaagcaaactaatcattgggtagtctgagataaatgaaagagaagcctgagtttaaaggagaacgccccttcaggctatgtgcatttatttatgtccacttttcaaaaaagaaaaaaaggcatttgcagtgacttagagtaaaatacaatgcaataaattaaagaccatggttaaagaaatcagggagagaataaagacactataataaggtaaatttgatgtatagtggcacatattttagccatgatgtgattacaaaatataaaagcagtattggtcataaagggtgcatgattcttggtcttcaagcattttgaaccctcctatggggcctcccaaagaagataccctgaggtaactcagcagaactgattgtgttaggaggagttaccaaagataggccttcagcatattcacctagcaactaatatctccataaatgattctccaatgatgccacactcccctgagagcaccttacagcatcttgtttcccctaccttaagagactaaaggaaatttgccttctcatcttactcagtaacataattccatgggctgtctacctacaaaaatattttctcatatgtttatttcttgaaaattttaaagaagtctaaacttttccttccacagttatgggtaaaagatagtaaaataacatttactgacctctgtatttacatcctgttatggtttgcatacattttttgtatgctaagccaattattgctcaaaggagccttctggacagataatgtatttctcccattttaaacctaagattaaagagcccagggtgatgcagctagcaagtagtagagtcagaattctaatccaggccatctggctccagagtgtgcctgtttaactgttttatactgcctcttagtcatggttcatcattacaagttgcaaatatttctacactttaaacgtagaaattcattaccattcaaagggggttggtaatagaatcagtaatggattcttttttttttttcaatggataaattgcagggtagaggcaggttgcttgctgatagaaaaggcagacg

SEQ ID NO: 96452 - DNA, 1033 bp, Homo sapiens
tcatatataaagcaaaattttattttttcttccactgtgcagtaagtctctgaaattaattgtggataccttctcctgagctcccctttagtcagtgcactgtaatttagaggtagtctgcagtcaaatatgatgaacaatgtataatttcataatttctcctgagtttgaagaatttttctttcttttctagcttttaatctagacaacgagcaaccagattatgatatggattcagaagatgagactttattaaatagacttaacagaaagatggaaattaagcctttgcaatttgaaattatgattgacagacttgaaaaagccagttctaatcaggtactgtaccatgtaaagatgtctcttatcttctagttaacccaatttgcacctttataagacctgagtgtgttgcattttactgtttcttggatttcttttcctgacatcctggaatttctgtttacaatgttccgtgagtggagagtacttaagcacaatttctttgaataagagtatgaagagtactgttctgactgttttcctgtttggataaaaataatactagtcacaatgttataatattttattgatcctttccatatgactagtattggtgcttccataactaaatttgcttgcttggatctttaaggcagtcatcttatgtcaaatcttgctcagatattaaggtactcatcattttaaatggattttaattttaattacttatacattatttcagttcagtgagggaaaaattatttacaaaagaatattctttagtgaggtattttatatatggcacaggtaatttaaaatggcactgtctttctggaaagcagttaagcagtgtaagtcaggagcctaaaaatatttatgcactttgatttaataatctcatcttttggaattgttcacaagaaaaataattagaaaaaatgtcagtgatttttgagcaagaatgttcagaataaataagatgtctctgaggtagactataacacaggcattaaaatcatgattttgaagg

SEQ ID NO: 96453 - DNA, 1047 bp, Homo sapiens
attctgttcttggttttcttatcctacatatttttgtgtaatatcagctcagtgagtatttttatagatataataatgtattacctttggccttgacctctttctcaaactccaggatttttttcccccttttggttttgcctattaacatcttcacctggatggtccacagtcccctcaagtttatccttttgggaactgaacttactgtcttaccctatgtaatcttgtaatccttatctcttcagtaactcccaaactcagatccatccattttttatccctttccttcattgataactaattcacttcagggtttgtcaggttttatcaaagcactgaatgaaggaaagggatttgacaaacccatgaattgaatgttatcaaattgtttgatttagtatcttctttccagtgtgacagacaactaattgcagtacctaacctgagactgaatcttgtagtggatgggagtagggggatgctatgaagattatttttgagtcaattgacaatattggaatatagagagtagattacataatattttcaatgttaaatttactaaagttgaaggctgtgattatgaaagaaaatatccctattcttaagaaatatacacttaagtatctaggagtaaagagccatgatatgtgtaacttcccaccctcaaaaggatcagaaaaaaaattgtatacacacacacacacaattagagcttaaatgcacacaaatgttaaagcaaatacaaaagctaacaatacatgagtcttggtgtaaatggatatacagtgttctttgaaatgttttattcttgtaagttttctaaatatttgagattaaagttaatttttaaaaatcacaagccatcttaaatggcattctctttcataggattttctctaaaataaataataaaacactttccaagaaatgtgtttttaatttttcttttgaaaaccctcagtgttttaatgtataacccttatctcattcctaaactattgaacacccgatttttagttactgattaaccttctatatacc

SEQ ID NO: 96454 - DNA, 1033 bp, Homo sapiens
gatgttttcatttcagattggcttgccgtaattttgtggcattgtgtaaattaggggtcatttgctaaataagatgtttccagtgttatctatttagaatcataatttcagtgtgttggttttgagctgtggtcattcattcttgaagagtataaggtaaaaagtggtcatttaactctttttgaatttaatgtaaatgcttgttatttggaagcctgcctttggtagtatttaggctgttacacaaataataagccatagatttgaaagaagtaaagttaaaaaagaagttgtgtagcaaagaggtgttcacttatcaaccctgaacacagtataggcagtcccagatggaaatttgtcctactctgccctgtatcttattacagtaatgctcagttccaaagttttcacattgttcccttattaattaatttgtgtttgtcttacctttgttgccatgtcatgagtttctttaggtagcaaattcatcttaaagttttttcccttatcttccccacattctataacccattaatgggctgatggtagttaatttttaataactacctagttgactgttttgtaaattaaattactgcttaactcaatgttttataaattagaatacattaatttttacatataatatattcgtttatgtattcaaaatatatttattgaaattacagattttgttgattaacagactaagtggtccttgtcttcatagagctagtagccatctagaagaaaagcctatatggtaggataatttttttttatctccccatccctgtaagtaaataatgtaaatcaactcagagctatcttggaaataataaatttaccagacttttttgccagttaagtaactggtttctactgctttttagtgaatgaattacgtgctaaatgatggaacatttttatttttaatttttttagagttagggggtctcagtatgctgtccagactggacttgaactcctgagcttaagtgactctcccgagtagctaggactacagttgcat

SEQ ID NO: 96455 - DNA, 3490 bp, Homo sapiens
gaggaattattttatatgtcactggtacaaagaattcaaaattgcataatgttgaaacttctggaaacatgctaagtttgtttttataatcaattccgaaagaggtatattatagtaaattgcaatatattagagaatattcatcttttattttggacgcacataaaaagaaacccccatacctcctactttgtgtaggggaacaaacaagctattagacttgaaaactgatagatcctcaaatgtgtataatatcagagttttgaaagatcttggatgtcttctagtccaagacttgcctgaggcatatatttattatagtcttcccaaatatcattgatccagccttcttaaatattatcagtggtacaactcactgtctctcagggaaaattactaatttttagataaatctcctaattaatgattccttcattaggttgaattgaattgtgtcttcacttactataatattatctgttagtagttattgaaactggtcgcatttttttctacagccataagctaacttttatttctttttgcaaacattgtagccaatgacattttgtatttttcatttagcttgtaacacttcaagaagcaaaactgctgctaaacgaagatgattaccttattaaagctgtatatgactactgggtgagaaaacgtaaaaactgcagggggccatccctcattcctcagataaaacaagagaaaagagatggctctaccaacaatgacccttatgttgcctttcggagaagaacagagaaaatgcaaactcgaaaggtaatgtgcaaattaggtttcattgaaggtagcttaatagtattcaagatcaatctttttttttctaataacttgaataattttaacataatggtagctaatggcattgatgactttctataagaaatcctacttttcgtctgatccgtggtcagacacattatccattgcgccactggcccaccacaagaaatcctacttttcagtagcttctattggccagttgtttacgctgtttatctgctacctatgccttttataaatttactgatcataccattttatgcttgcagttgaagtgataagaggaatttagtgtccttatgcaccttggaagttttgatctcttcagtaaactaaatattctatcacagatctcctgtgtttgggaagctgataacttgaaatactactactattccttgttgctcgcttgagactttacagttccttggaaaccatattgtagttcttccaagtgaaaatggaccttgctgcctctggctgctacaaggtcgtgggaagtagggaagggttcattttcaaccctcttctgcaaacagtcagaagtaagagtggaatctttctccttttctgagttgtcagttgtgttcgatttcaaattgatgagcttgttcccatctggctttcagaagcagtatgaagcagaattttaagtaagagaaacaggatctcatactgttaaatgatatggtatagaggaaagcactgttctggaggagtattcactgtcttccatttctcataattaacagttaacaccacacacagtagtaccttctctaacattgcaaagtatcaggaacgtataaatgtaaaataaggaattataattggaggcaaagcattttctgtggattctcctaacattgaaagcttgtccttgtcagctgttaatataacagctgtgaagcatgacagctgccaaggatagtatattttaggaaaaactctcttcctggttaataaccagaatttctataattcttgaggatgtgatttttttaaacattagaggatggatttcccaagtgtagatgacattccctaacccagacttgagtttttaatttggcattctggttcttagctaagggaatctacaatattttatgaagatttggcacttttctaagactgaaacaagataagttcataaatatattaagactttataaatgtggactattggacatgaggaaagagaggtttatctaaatcattaaaaaaaaaccctgaactatcaatcgctttttgaaagcagtatacaggcgtgagaagtagggaagggttcattttcaacccttaaatatgtcatatatatgttgcataacatttcggtcactgacgggctgcatatatgatggtgatcccctaaaattataatactgtacttttactgtaccttttctatgtttagatatgttagatacacaagtacttaccttatgttagagttgcctacagtattcagtacagtaacacactgtacaggtttgtagcctagcagcaataggctataccttctaggtttatgtaagtacactgtgacatttgtgcaacaaagaaattgcctaacaacacatttctcagatctttatttgttcgattatttctttaagagactggatcttactgtattgcccagactgttcttgaactcctgggctcaagctgtcctcccgccttggcctcccaaagtgctgggattacaggtgtgagccaccacatccaacctctcagatcttatctgtgtcattaagcaatgcatgactgtaattaatttcagatatattgcaaaacagaccattagcaatgccttttgaaggaaattattggacttcctttagtgaatgggtatggaatacttaagattagcagtatttattggcatattgacaatattttctgagtgttaaaatatgttttctgcttcttttgttctaaccattagagaattgctagtaactgattcttgtgtttaggcatttcttcattttgtgatcactaatacaggttttcctgacactctgattcctaccctttctcttgtttgttatttttccattttcctctgcaaagaggtacactttcttttctgatgctctttactttttattcctttctgttttcagttgtgggaccaaagacgattccctatcatgctcaccattgctagttagaaatgtttatgtgatttgaaacgagaaaaatgggaaagcactcaaataatgaatactccctaggtgttcaggaggtggcaagcattgggttatgcaaaaatgaatacaactaacaaaggctctctgttttctgtttgtgcaaagtcaaaaacacttgtgtagttgatgcaaagggtaaaaggtcttctgaaatatttgtttggctgtctggaatttaattttaagtcgctgaactaatatttaattaaggagcatgtgaatacttcagggcattcttaaatgagatagtcttaaggcaccagcatgtcttaatgcactgattgggaaatcctagatcagcatatgcatttaatatatttaaccacatagattcaactcttagtgtctgtgccttctctcttccctctgtgaggcccagaagaagtaagatagttaagagaggaaattcccagcgtagtggttgtcagttctagctgctctacataacagtcacc

SEQ ID NO: 96456 - DNA, 1186 bp, Homo sapiens
agacttagcacttcatgtttagaagcaatcaagcaataccaatgccatctagacttaacctgaaagaactaatccattaaaaacaatgatttttaactatagaaaatttttgctagtcattgaatgttttggggaattcagtacttatgatatgtaatatagaagtgatttactgtttgtgatcagatttacattttagagtattacaaacattgatctattgacttttgataacttctaaatggaatgcctcttttgtctaggtattgtccccagtatcagaaccggaagaagaaaatgatcctgatggtccctgtgctttcagaaggcgggcaggatgccagtattatgctgtaagaacttttgtgtgtgtgtggtgtttttgtgaactggaattaacaggtaacccatgtcaagatgacttagtcttgatctaaaaatgggaaatgcatcagtactttttatttaacatcctttatgtggatactggtaaaagatgctaaaaggtactgagtcctttcaaagggcgtcggaatcctcttcttggaaattgataattcctcacattttagaaatttaggttcattttgggctctaattatagcttcagcagctgtgaaaattactcagtgtgtcattactagaattaggtaaacccagaatttgtaagttggttctagaacctttgatggctgctaggtgtttattgaaatttattgttatgcaagcccatcttgtgcatacataccagtaagtatcaaacaaaataataattttgtttgatacttccataatggcaatgttttgtctaataattgtattcataactttttgacacacctagaagttgctttatgctatgaagtcgcattatatcactctccaaggttctcaatgagatataatgtagcattgtgaggatggctttgactttcttatatggcttgtagagatcatttatcttgctatataatggtaagcatacactgacagcttttttagagtgtgtaaatttaggagaggtggagatttgtttactagttatgttgatgagagaagggaaaattcttaacgaaaggggacagacagcatgataaaatgatgaagggaatgggaaggcagggaacagcttgtttgtttctttatatttatttatttacttatttatttcttttagagacagggt

SEQ ID NO: 96457 - DNA, 1052 bp, Homo sapiens
tgaagccccacttttacagttttatatctagattttaattgttctgctaatgttgcagttacttcatgtttatcatgatctaacctgtcttcatttcagatttactccatgagttttttgttttttgttttttctttctttgcagcctcgtttggaccaagctaaccattcatgtgaaaattcagaattggcagatttggataagttgaggtataggcattgccttacaacacttacagtcccaagaagatgtataggatttgcaaggaggcgaattggcagaggtggaaggtgaagtatttgttttcacctggtttttgtttgctatctggaacagaagacaaagagaacatgttcagctctctcagttaatatttggttttattttgcttttcagggtcataatggaccgaatatccacagaacatgacccagtcctgaaacagatagaccctgaaatgctgaatagtttttcaagctcttcccaaactatagacttttcttctaatttctctcggaccaatgcttccagtaaacattgtgaaaatagactgtctctttctgaaatattaagcaatatcagatcatgtcgactacagtgtttccagccaaggctactaaatttacaggacagtgatagtgaagaatgtacctcaagaaaaccagggcagactgtgaacaataaaagagtttctgcagcatctgtagctttattgaacaccagcaagaatggcatatcaggtaagctgttgctgtgttaaaagtatatcctgctattcttttttacttaattttattgggaaaggaattttatcttaacctacttaattttttttccaacctaagaaacaaaattgttctgttctgtctcacattttaaccaaattgtcctaactagtactgtaaaaccactgacatctgtttcgggtgtgtgcctggtacggtaaatgtaggcagaatgcatacagagttccctgtggccacactgcttataagctgccaccagatcatcacagcacagtactatctgctgcttatgttaaaggtagttt

SEQ ID NO: 96458 - DNA, 1083 bp, Homo sapiens
cagaaagtgtatatatgttgtatatattgttatatcatcaatacaacatatgtattggtccaaaatataacttaatatgacttaaatagttccattataatcacctctataatcctatgacactaccatacaacataaaataagcatttaaactgttatcttaggcgtgcatgtacttctcagggaatttaagtcacaagtaatcagtgttaacatcatagacaacaagtttttttgtattcttacctttaccttaccattagaaaaaaataatctttttggtctgtgtgatttttcctatctaaaattttttaatatcctcaatacagtaccatttctttcttcccttaaaaaattttaaggcttaagcaacaagtaaggtacattagaattcagtgttttgaaataagatctatcttatttaataatttattcttagagtaaaagattttgtttgaactcattcttcttcactgactgtgacccctctagtcactgggaccacaagattttttgttttcaacagatgtcttttgttttaaaataataggcatggcaatataaatacataatgaaaaaagttttttaacagcattttttaaaataattgaaaccataatttaatgatttatatcagttacattcattatatagatttcttagttctggttagataattttaagtgaattcagttacagttccatgaatgtggataggaatttcctcatctacctaaatagaaggatgagggagttttagaaagctatatttttacttttgatggatatatacaaaagaatgggatcctcatgtgtttggtttttctaatccatgcgtcttgaacactttttccttctgcttgttcttagtgggcttggtcatgagagcacagttgtttttaagagtaataagacaaaaaataaaggaacaagactaacacaggattatacttttccctagcagagaataacactgagctaaacagattattagtactgaattgtccatttcacagctgggaaatcccagcaaatgaagcgtttaatgagaaatagaaacataatgcactttatttatatcac

SEQ ID NO: 96459 - DNA, 1057 bp, Homo sapiens
ctttgagaaaagtggtttctgtaacttagctgattttttcaacaaaagttgtagatgtcttgttttcatttgaaacacacttttaacacagttggtcgcagtagaatttactacatctgaggatacatagtatcttcagttttctgaatacttgtctgatttctagcccatatttttatagatggatttactttaggcgttgaatctattggcttaaactatggtttgtggttatgttagatgaatgttgttctctactttgatttgtaatcagagaataaagtattttcacttcagtgttttatgaaaccagcagtaaaaatcatttatagtcttgcagatggtcctgctttcttattaaggctataacttagtcatcattattattaacatgaataaatcaaagtttttttcattacatgctctccataatatagagaattaagagtggtctcaaagatactaagtctgaataaatggtaaaatactcatgttagaactgtattattcaacaaaaactacatttaggcacttttcttagcatgtgatggagattataaatacaagcatacaccacacttgctggaagatttgccattttcattagattattttctgatattccatattgtaatttgtaattgctttcatcttaattgtggaataagtttatatcatattctgcttgtgttattaaaaatcttttaaaacgtactcatttccaaaattcatgttctttaccagtaacagggggtatcacagaagagcagtttcagacacatcagcagcagttagttcagatgcaaaggcagcaacttgcccagcttcagcagaaacagcaatctcagcattcctcgcaacagacacatccaaaagcacaggtaaactgctcttttcgtcatagttacgtttgtttctttcatcattatgtagttttattccattttagtcaagtcacagaagataatcttggttttgccactcttgatttggggtctgtaacctgaatttcttttcagttaatgtacgtaattttaagtgactagcttataaacta

SEQ ID NO: 96460 - DNA, 2083 bp, Homo sapiens
aatacaaggagaacaatgaatcagaaaaaaattgatttgcataggttaataaatacatgatcttaagcctatagaattaaactctaatggaaagtaatttcagtaatattgtgctcctaatgattattctttttgagtgtcatatgcttcatctctcgagaaaaaaaaaagaaaaacttggtttgtcctgtgatacatatttcataagtaatttctcattggcttctactgaaatgccatgttaaattattatctttcctaagtaaatagccataataaaaaaattaggaattaatggaatttctgagctgaagaaaagtttttctcattcctatctagaaatggcaaaaatgggaattgttcttgtgaagtcatgtttagttgtaattatgtaacaatgtttttgtaaaatactaaatggtaacgtcatgttctagagagtattgatatttattttatcctttgccttattaccatagagagaaccacgaaccagaaagattgggcttaaatggaatagcagagacaacagtagctatggaagtgacataacctaaaacacgtggctctgacctgtgctgatggtgtgcagtcattcatattccagctgaatgcaaaaggcaacactctgtggatcacagagtgtaacaatggacctaaatggactatagtatattggatgttaaatccatatatgatgtatattttgtaaaattgggaaaatcactaccttgtaaaatagtttatttgtatcatcaatattatttctgttacttgaatagtagatattcatcatcatgcttttgcacttgaatttgcaactgaatggattttaaaaaataattctttaatgggatcatgagcatgaaatgggatcctgcatcacttgttttaactatttattttgccatgtttacattttgtatcttgtaaaaataaatccaactttgtgtctaaaaagttaaagattcatagctaggaaatgaaattcttgtaatttttttctaaaggaactgtaaagttttcacttggttcattttgtttcacaatttgactagatggactttttggtaaatactttagtggcatttcactgtcaaatatgaagttcaaggcaaaatagtattttctattactgtgcaggggaaagggatggatcgatacatgcaaatttaatgtagtaactcacttttccatatattttgaatgtatatttctatttatgataccaatttataaaaaataattacacagaaaaaatggaataggaaaaattatgcatctagcacatttaaactgtgcaaatatgaaaatttttcgaggattacattttatctgaaggctgcatattttaactggctttaaaactgtaacacatcacataaaagatactttaccaggtatgtattgcattatatcattgcaataattattggaagtctagatatcgagccatcccaggtgttgggcggggggagggttgtggcaagattgtcttttcaattttggagagttttcctgtggctacaaggcaagtaacgggttggaaaaagtctgactgtaagcgttggacaccttcatagtgtagtgttttagtgactttttttatacggttcttgtaaattagatacgtgtagtggtgtttcagaatgtttgtttatgcactagttcagacaactttccctgttacttgttcttgataagtgaaaactgcagggaaataaaaaatacatatcaaaacatggacatgctgcatatgtgtttatttcacaatgtgcacacagtataagtgaaaatttaagggagatgatagcacttaacagcacttttcatgttcacatgctttccaagcattaatgaaaagaactataggaagctcatctgtgggctctattgggtttcagataatccaatataaactacctttgatatgaaagttcgtaagatattttacagaatgtaagtaatttgcagtatcgcagtcattgaaatgtcataagtgagcctcattttataaataaaagtttagagtagaattatattgcaagggggttttgtcaagtaagtactgggaaatgtaaat

SEQ ID NO: 96461 - DNA, 1041 bp, Homo sapiens
agtgacaaatatttgttttcactttattaaattgaagaatagtctatttctgcactggacagcactgctctcttagttttctcaggaaattagtgttggtactcggagtccagtaagctttcagaatctttggagaatgtgtttctttggaatgggtggaggtggttaatttttttaaaaaaataacaaaacgggtaactctcacgtggtaggatattcttaattcagcacagataaaaacatttttgattgtatttttcttatttctctaccttcataaagagagtacacgcccttcctttcccaataattcaagatcatttttatgatgtagctctaagtatatttgaggatttgttttcttttgcaaaagaccaagggaaaaactaaaaaatttatagggcacattttaaaactatatatataacacacacacacgtatattctggctttttaaaaaacaggaatgtatttgcaactgtgctaggtgtttttttttttattactaaggttgttttaggggggaaggtagggggagaacaaggaggaccaacattacagaaacttccctagtatgtactgctgtatttgagtatgatgctacacttttcaacaaattttgttgatcaacaatatacttgtgactgatgtgttttattgtctcttaactgacttggcaaacttccaaattttaaaaggtaagaatatctgaagggattatgaatattacatcctgtaagataagagatgtttttcatcactgacagcagcatcataatagctaacatcatggagcatggaacattctctcttaatgacttactcatttactcctaacaacaattctgtttagtaatattatttttcccattttaaagatcaggaagatgaagtttagagaagttaggtaactcactctatgtcacatagctgttaagttactaaggaattaaactttggagtcaccacacttctaaccacactgccttctacctttaacatgaaagaagccctcctcaaagaagtatttattctatttct

SEQ ID NO: 96462 - DNA, 1043 bp, Homo sapiens
ttaaagaaaaacttttgaagggagatggagttggaggaaaagtgcaaataaaaaacaaaccccggtgatttatgcctttagcatctttggctgcagggtatgttcttaagagctgcagatcactaatagtattttagaagcattttatttgaagatgttcgttacacaattctgtattgacacatggtgggactcttcctttgtcaggcttagtcttttactggtctctcccatttccaggtcttattttgccaagcagtcggcttcaattctctgaggagattatatcatagtttttctctgaacaacctgtctggcacctcactcctaagagattattgattttcacctgggaatctgggcacataacaactccatcgatattagaaactttggatagtcatgggggaagggacttttgttccccttttacagccacctcttgtcccatagtcagggacaaatgccaatctggtcagtatccaaacctcttccagtcctggttcctggtgggcaggatcccgagtgaggctgtcagttccttcctgcatctgccctctgtgacaggctgacctctgtagggtctggtttcctgggatggcttccagggccgacttttttctctcctctctgaatgctgctgaggggataagttcagctggctccacagattcaggcccaactgggctggtcttaagatttagaataggttaggctgcaggatgttgggtgggaaggtaaggaaatgggaagactccacataagcctcctcacctgggtctttggccaggttccgtattgggatgacaggtttgggtgacctacctaggtggtgcttggatacctggagtatcactattcttgtgtagatcagacttgcccacccagcatggaagaggctgttaggggaggcttctggcactgggtccctggtactaatgtcatcatgatagcatcaaatccctctaactactaattgtttgtttatatgatatttgttgtaaagtagactttagaagggaaggaagtagttagctgttcca

SEQ ID NO: 96463 - DNA, 1058 bp, Homo sapiens
tcttcgagtgccattcccatctatctgtggctgtaaatttgttctcaccctagaaactcacagtgaggtatttccatttctctttagtcacttccttcttggaattatcccacttggagtgtgagctcctctcaggtcagggtttgcttgatttattttcatattctcaacacatgattccgaatgggtacacataatacatgataaaatgaatgaatgaatgaatgaatgaatatttcttgtggcacttacattctcattttcatgattatttttagtctcattacctccctacatcccattatcgcttccacctgaggactaaagaagctgcctacatattgcttttgtgcaattcaccgtctttggaccaaactgcaaatgcaggcatttcttaggggagcacaattcatttatcttaccttcaagcaactcactgtttagtagaggagacagatggatagaagtgcacacacacacaccccaccacacacacatacacacactgggaatacagtaccactgacaagtgattgaatagtactaaaggattatggagcatgaaacacctttaagggtggggcaaagtggttttgcagtggtttcatagtagtttgcaaagtggtttcattttccacagaatgaaaatagttttgtattgaatatccaaactccattatcttctatctagttatccagttggcagtgccaaaaggaaagaaattagagattcactaagtacagaaaatgattgccttgaaatgatttctccttctaccaaaatatagaagccacatgtacaaaacacttttctctttttgcaacttgctagtcataaaattattttaatgtgaactaaaagctggcatcataaagaaagtaaggtccaagaagttctaaattgaagacattagtataaatggaccacacttaaaattctattgatagtcctcagctctgaaagggaaatgtctgtaatttacctaaattgccttgaaatgaaaagaaataagagacttccttccttggatgtctgtttcctggtgttttccttataa

SEQ ID NO: 96464 - DNA, 1036 bp, Homo sapiens
cctgactctgtggctcaggggcagtcaaagtggttagcgacccgggacatacccgggacagtcaactggggccgcccagcaggctgtccagagtaaaagcaattcccagtcattggggtcatctggagatctatgttagagtctccagactgggagcccctgctgtagtcctcgggctgttcctgtctcaaatctgtccagccactcggttgcttttgtcactatttatgtgaaaagttttggctagcctggattttcttttgtttcagcattgcccacaaacaccaatgtggaattaatctggaaaaggcatcccaatctttaccagagttgaaagttgaccttttcaggcagctcatatgattacttttagaagcactgtcaacatgcattttccaaagaaatgcatcagagacagactaggtaggtgagtcctgcctccctcccagcaagatcccacagtctgcacattctttatctctgtcttcacctgccaggctgagggtgaaggccttttcttctaccattagggatgatggagaacagctctctccgtttatttaaaaaatatcctgaatatgctttaattaatcactctcaaagatttctctcctccagacaaaataaacctaggttcatccactcttgtttgttatttctaaccctttggtcaccttaaagggccaccctgaccttagcgtagtaggagaggggttatggacatgggctcttgttctatcccattcttactgggtggccttgtgcaagtcatgtggccactgcagcctcagtttctccagtattacctacaccatggggtcatccgaggattcagtgagacagtttctctagcatgctccccattgtacctgcttttagcagccagtaaatactctctgttactctcattccccactttgcacttagaatcagtcataactgtttagtgaggtactgattagcactgctaatattctgaatgcttgcttaaaatagaaaagagttactttctatgagactttgcattttttaaagc

SEQ ID NO: 96465 - DNA, 1048 bp, Homo sapiens
acgtgttcccatgttggcagcgccatcatgagactcagcgtaactgggagaggtttgtcgagcggcagtttgaccggatggtactgcactgtgccaggaagccccaccagggcggtgtaccccagagagaaggctcagtgctatccttgttatcttccatttggcgcaagagatcctccattctaccttctgtgaaatggctttttcacctcccatccagtgaagaaggtttgttttttttttcttcagacttgacttggcagaaaacttgatctgctgaaataaccatggcagcaatttctgctccttcctctgagtgcagagaacccggagctctctcctgtttacagcttaccttctctcatgctataggtcaaggcagaagccattctgacgggaaatcacagcattccttaccgctcattattgtgatagcttgttagagccagaactattcaacctttgactttacagagaggaagaggcttagaaaatataggtaaattgatcaaggtctcaaagcaggtgaggggccagtttctggactagaaccagttgcctgacttttcctcctaccccctgtaggtaagggtacacagcaatcaaaggcgaaagagcttgggggtgggagagaaaggagttcactgtattttgatctgaaatgaaaatcacatacacataagaaccttatttttgaggcacaggttccattattctctttaacagaagtaacacttctgtcttctttatgcctgttagccaggcaatgattctgaatttcttcattatcactcgggcagtttgccttctcagaatgttcttttgtagctgtctgtgatcttgacagtgtctgtgtgtccacacagtgggaattttggcagaaaggaaagaattctagcctggtttcccgcaggaaggcttacaagattcattcttgtgtgttgcctttgttccttctcaatacgtgaagtggttggcattgccttggcaactccattagaagccagtggctgctttgtggacatttgtttcattgcagattctcctg

SEQ ID NO: 96466 - DNA, 1047 bp, Homo sapiens
ggcacagggtgcagagtggcattatgggagatgaggctgggacatttaggctggagcaatttgatggcaatggatggactttatcctgcagacaatgtggacccaatgaagagtgttaagcttaggatgacattatcagatctgttttgttattatcttatatatgactctgaagaaaaaaaatatttttagctgtgacttatcaggcactgtctatatacttgacatatgttgttgcattttaaatcataacaactttctgaagggtgagcattattttcctcattgtacagaagaggaatttgaggctcagagaagtgaagtaacttggccaggttggttcgggggccatggactgggactcaagcctgggcttgtcagactgactgactgatattcttctgtactcccctgcccccctttcctggtgggcacacagctagcatttgatgacaattattttatgagtggtccctgttctgtcaggccatatggactattatctaagcattgcaaaagacagggctaggaatggtgtgggaggagggtagagaagaggggacagggatggtggctcctacaccttgtgatggccctggtggcctgccagtgatgaggtgcgtttccattctgaagatgcagcatgcccttgcctgggcacagggactgccctttaggctggccagccggcatgcgggctggcctcaggtagtcagcaggaccgcctcatcatcctctgattatggcctacctgagtggtttggtgactggtgaggatggcctgtcagccaccatcaccagaaaccctacaggcccccatttcccctggagagtcggtaggaagccccatgcctccgtaggactactgatgggtaggtatgatcacatcctcccccaattctaatctgaagatggcactaactcttttgctttagcaagacctggattcagaactgagcaaatgggaggcaaggagcattttaagtatctactgctatccttcctcctcccctgggagatgagaaggctctgggcacctgcagtgga

SEQ ID NO: 96467 - DNA, 1073 bp, Homo sapiens
gctgtggaattttgtggcttcagtctgttttccaaacaaggcaggtctgcagacaaaattgaacctctttgcctcctcttttccttttttttttttctttaaatcaccaaatcctatagggccttcagagcctgataattcttctaaaggtgaggcccacttgataggtaaggagaggtggtaagcgtggttattataagaaactgcacagaggaagtttggggaattcagcagcagggtaagatgaatccttaatccttccagcttagtgtttttcatttacgatgccctcctgggaatagcactgagacggctgctgcagaatcggtttagcttatgaatcattcctattgaagaggagatttcaaaggcacgaggctaaaatcctcagggctctgatgttctgctcatactgatttcaagtgtggggtacagtgccggggatctcatttctgcggtgttgactctctttcacctgttttgctgaagacaaagtggttcagagactgcacagattaaaggaagcatgaggtttatttatcacttctttctgactaagcaggtctttcccctgacacctgagtggcatcagcccatcttctcctcctctcacactctactgcagaacgtcttggaaacgccaccctgctatcctcacgctcctgtcccggcccctcgcctttccctctcttactaggcccccgactcttgaccttgagactatagaaaagttgcagttctacatttcctgtgtcccacctagtccagtacctgtagacaaaaactccctcctaggtcagatgacacttgaaagagagatacggtgtctagtgaggaattcaatcagtctagaggtttttttgtttgtttgttttgttttattaccaaactatatataatgccaaacaacaacaacaacaacaacaaaaacaaaagcaacctgcattatttaaaatcccccaaaatctcttggaatgcttacaatagtgaccttttaagctttgggattagaaaatataaggtacttgctaaatgccagaaatttaagctgtaagacatcaagagagagaatg

SEQ ID NO: 96468 - DNA, 1747 bp, Homo sapiens
  misc_feature (1326)..(1747): n is a, c, g, or t
aaattaaaaaccaaaaccaaaaacaaaaactaatagaagagatattttgctagaggctctcaagccctctgtgtcttacagtgtaaacttcacaatgcctgaccagtgaggactcatgggggacctgaaaggaactgggttctggacaggtttcacctccggttgcctcttcatctttgtcagttttaaaaggtcagttgtaatgagttgctttcctttattgtgacttttgcagatcacatacttgtgcctacagttagaaatagttgatgtggatgggagttttttcctagtgccacccaccccctcacttaatcgagttctttctgtagggtaattatagattggagaaaaggtaggggatattttcagaggaagacagagggaaggaggagccctaagctgaagtcatagatactgcgagagaccaagaaatccaggatcctggaatgcaattaagtcaaaaaagccctacagggtctgcattctctgaaaggaggattttatgtattcaaattacacattgtgatcttccaaaggctttcggaaggggatgttaactccctgagtgtccctgagtggaaagagaggtcacattttaaagatgtttttcactttaatccccctatttttggtctgacatccagtggtgattccattaccttgtattgaggggaacaaacagacaagcctacataaaattggaaatattagcttctcaagatggagcatttaaggtaggttttcagtaaatatatgactcactggacagtgttaatgctaagctcggtggacaccaccacacagaaggtcctgggcttgtgcagcccatacccagggttggcgctggggaggacacagggggttccagctccagctgaggaaaaagagactgttcttttgttctgtgagtgatgctgggaagggcctctcctggccccgtgccctcctttgtgatcctcttctgcacactgatatagatggatggagacaccttgtgttttttctttctgccccaagagacgcttggaggtcatctgaatggtacaggcttcccagccgtcccgccaagcctgccaagtgattttgaactaatctgtctgaacgcacggtgctcatgtgctgacgggctgatgtcttaagtgtttcaggaaactctgccctgcttgggaggtcaaggaggcaactggggctggaacaaagagagtcttgtttggtggctggtggcctgggtcttgtttcttctttcatatgtgctcctaaaagatcacattccgtgggaaaagtttgcggatagaattatacaggatgcagttataaagatcnnnnnnnnnnnnnnnnnnnnnnnnnnnnnnnnnnnnnnnnnnnnnnnnnnnnnnnnnnnnnnnnnnnnnnnnnnnnnnnnnnnnnnnnnnnnnnnnnnnnnnnnnnnnnnnnnnnnnnnnnnnnnnnnnnnnnnnnnnnnnnnnnnnnnnnnnnnnnnnnnnnnnnnnnnnnnnnnnnnnnnnnnnnnnnnnnnnnnnnnnnnnnnnnnnnnnnnnnnnnnnnnnnnnnnnnnnnnnnnnnnnnnnnnnnnnnnnnnnnnnnnnnnnnnnnnnnnnnnnnnnnnnnnnnnnnnnnnnnnnnnnnnnnnnnnnnnnnnnnnnnnnnnnnnnnnnnnnnnnnnnnnnnnnnnnnnnnnnnnnnnnnnnnnnnnnnnnnnnnnnnnnnnnnnnnnnnnnnnnnnnnnnnnnnnnnnnnnnnnnnn

SEQ ID NO: 96469 - DNA, 1045 bp, Homo sapiens
cttaagtctctagggctgaattttacagtctggatttctgtgttgcatttgtacttatgcttacttgttttataaataataagtgggcaaattagttgctgactactttgtattctgaaccggatagtgagaggctaaatcaagaaaaagaggactgactaaggcaatatcgaaaatctgctccttaaatgagtcccacagaggttttaaactttatttctgaacgtcctatttcttaatgccaaacaatgcctatttatttttcttccgcctagtctcacaaagtattttaaatgacaaaacaacaaaatcaccaccctcgcacacacaccaaaagcagaaattaatgaaatcagaatcctgtttctacttacattaaatgtgaatatgattctaattgccagatttgccagtatctagtttgtgacttttttttagatgtaattaattttctctgtaatctatggaaataaggccatatgtttaagatctcaaaaataatagacaagtcttaatgaacatcagacaattctgaaataaatagaatgcgctgaaccagggtggagttggctgcaggaaggactgggttagagatgtccaggattggaggtcagacagacccataaggatgtggggagtgtggcagcatgaaagattagagaaagctgtaggcgtgagtctttcaaatgtcacataagtgtgtccatgagagatgggcctcagggacagggaagtctgacaggtgttcaagtaggcagatgttgctagggatacaggcagccaggagagatgcccagcagtggattccagggctcaagctaggaccccacatctcagagtagctgggatggttccagtcaggtagttccagaccgaggcacattaaggataatggatcagggctgagtcagagctgggaccagtgctgggttagagtctttgcttccccttgactggtccagagctgggatgtagggatgaggttttacctgagtagtcacatcccagctttacaactttacaactgttttcctttctgcccact

SEQ ID NO: 96470 - DNA, 1244 bp, Homo sapiens
acttttatttttccttgctttccaggaggctgtccccctttgccctcgtgtgaatttgaaatttctactttgtgcttctgccgtcctgtgctgctcactgctttcttttctctctggtaggtcagcaaaactggtgccgagggagctgttcttgacgaagctaaaaatatcaataagtctttgtctgctcttggaaatgtgatctctgctttggcagaagggacagtaagtgatcctgcccccatctattaagtaatattatgagaaaccaccttttggggcctcatagtccctttgccacacaccccaaaggctggtttgtttttctgtttggaagaggacagagggaatcctggctatggatgcctgcttgctgggagttcccatctactaaaaagtatgaatggtgatgctaatttcctatgacataggtcaaagaatgggcattctaaactttggcaagatccaaagacccagccacaaattcttgttttactcggtttctaagctcagtgtcttcatccctgacttgcttgcctctgtgtttttctcagaatgggctgtcaaaaccaatactttttcttttcctaaatagaaaacacatgtgccataccgggacagcaagatgactcggattcttcaggactctttgggtgggaactgcagaaccaccatcgtcatttgctgttctccttctgtcttcaatgaggctgagaccaagtccacactgatgttcggacagaggtacgtgtggtctctcaggacccatcctctgtgctaggtcttgggtcttaagagtgaatggcaaggctgggtgcaatggctcacacctgtaatcccagcactttgggaggccaaggcgggtggattgcctgaggtcaggagtttgagaccagcctggcccacatggtgaaaccctgtctctactaaaaatacaaaaattagccggccgtggtggcatgcgcctgtggtcccagctacttgggaggctgagtcaggagaattgcttgaactcaggaggtggaggttgcagtgagccaagatcataccactgcactccagcctgggcgacagagcgagactgtctcaaaaaaaaaaaaaaagaatagtgagtggcaaggggctattgtcagagaatcacaaagtaagggacaaacagccttttactaaattacatctagcaggtgatatgtaaacttgaggcatcacttattgaagccaaagcaataattatattttaaaat

SEQ ID NO: 96471 - DNA, 1063 bp, Homo sapiens
gtttacctctcccctctgagccccagtcttctctcccacagagagatatataataatgcctactttcaagaatattgggaggattatatgagttgcttcagtttttacctagcacaagggctggcatgagtccaggtaaaaaagtccgtgaccgatggcaggctatcggtgattgcaagttctgcttttccttcgtcttaaataatctcacagtattgcggcttgaaaaggtcatagtagtagatgggactagactgaatataatgcactgtaagggacagcactgtcatataagggagaggattaaataaagtagaattagaattacattttgggaatgaacaaataaaaaatgctgcaggtaatttgggcttccaggaagtaaaaagtaatataaattatgttttcaaatgaaataggtcggtctacattcttttatcagagtcatctagattctgctctctgtgacagcagggactgagtttgtcacagacattagtttctcatcaaccactgcacaactagttcacagtaggtggtcaataaataaatgcttatcaaatgaatgaacagatgaatctaaagcttattgtgtaaggttacttggaaagttagggcagttgctgaacattgatgccattacgtccagaagtttggttgggtttggatctggtttgctttccaaactattattggaaatgtgtgaggtttcgttcctttccctttatccccaagttagttaatggattatttaaggatgctgagctattctatggggccaatacctgctgtattgttaaatatactcattgaacccaattatacagcagacacaagactgaacatcggattagacatggtatgtgatagctaatgagattaagcactttgaactcagaaaagactgccgggcacatcccaaattcattgtaatgagtgttcattatattcttactgcagaggtggccaaaccttagggcagcatgaggttcctccgttattcctttgtggttctttcaaggacgtgaagagagtacacgtttgttctgcttgactgtactga

SEQ ID NO: 96472 - DNA, 1026 bp, Homo sapiens
attggtataagaaactgcagtctccaagaggacagagacctcgtctatctgtcttggtgtaccccaaattcataaatgttaattgaactgaaaagaacctcaacttaggcaggtaaatctggtgatggtatgcagggggcttaaaggagggtactgaacatttgaaaaaggctgtaaccataaggatggctgagaacacagactaagacagtggcagagggaagagagaaagaggaaaccctgagacaattcgaataaatgttcattagatttagagaccagtgggatgtgaaggagaaaaggaaaggatgagcttgaggcctcaagggttagtggtgccgttagtccaattaggaggatggttggtgaaagccacaggatcccttctgcttccctatttccagtcttttgacatgaggaatcttgggcttaatcatattggtttagctaatggtaataattagctgaattgtccccttatgtttttaatcccagagctaagaccatcaagaatacagtctctgtgaacctagaactgacagcagaagaatggaagaagaaatatgaaaaagagaaagagaaaaacaagactttgaagaatgttatccagcatctggagatggagctaaacaggtggaggaatggtaaggaaaagtaaggaggaagagtgaggcatgagtgtgtgctttttttatttttattttttttgagacagagtctctctctgtcactcaggctggagtgcagtggcgtgatcttggctcaccgcaacctctgcctccagggttcaagccattctcctggctcagcctcccgagtagctgggattacaggcgtgcaccaccacacctggctaatttttgtaatttttttttttttttttagtagagatgaggttttaccatgttggccaggctggtcttgaactcctgacctcaagtgatccacccaccttggcctcccaaagtgctgggattataaacgtgagccaccgtgcctggccgtgtgtgtgctttctttttcttg

SEQ ID NO: 96473 - DNA, 1007 bp, Homo sapiens
ttttctgtgccctcttgggtgagatcctacatgagcctttaagttacataatttggggaaaataatgtatgatgatatactctggcacagagtagacctccaataaatgtatgggaagcaaacatatgcttaatgcaggtgctggagattaaagggtgggcagtcagatgtggtctcttccctcaggacggtctgagcggggaggaaggtaaatgccagtcctcaccaataaatgtatgatggtagtccacgctgcataccaagaagtgaaagcacaggtgccaagagttatacaacagggggccctgaccttgactgagaagccagtgaagggttccttgaatatgcaatgtagagattagtatctgtgagaagcgcagttagccaggcaaaatagggggcatgaggtgaggtgggggctccgagaatggaggacataggccagcagggagcactggcctgagatgggctcgagggataggcggggctctcctgtcttcaggattttggtcaagggtgttaagctgcaagtcataccttcgcatttttgaagatccattggctgtattggagagtggactgcaggtcggagaggagggctgggagctggggtggtcttccagggatgagatgatggtattgaagtgacagggtagtaggaagggagagaaatggatgaacctgagagatatttaggaggagaaattagccgggtgtggtgaggggttggctatgggagagggaggtttcaatgacaactgtgttttctggcttgccgagttggatggagggtgagaccattctctaagactggggatgctggaggagaaccaggggtgagggaggagggagtttagggtccccgtggaacatccaggggaacattattcagataagaagttaggtctgagggtctggagctcagaggatctgcttgagttggagtcatcagtcttttggtagtaattgaaggcataggtaggtgtgagggccctttggactacaga

SEQ ID NO: 96474 - DNA, 1867 bp, Homo sapiens
cttctcttgaataattgcctataagattaaaaaacagtggatatagatttaccttatctgctgaagtcatgcaaagaaatgatttcatcacaggctgagaaagtgtggaaaaatcggcagtctctaacgcagatttgttcatccagttcaaaacctgtgaggccagcagacatggttcagtaactagctaaatctgtagcctctagtctgatttggggctttgtggaactttgggaccaccacaattggaacacaatttgctcttttagcattaaatcttcgaagatgctggctcccttcttagatccatgattataatggactctcagaaattagcatttcattggagcgatctaatttactaggccctctgcttgcttttgagaacacaaccaaactctgtaatagaaataccgtctgtctactaagagaatgttgtggcctgttcaggtggtcatgaatgtaaggaggatgcagagtcccaggtgaccagtttattagaaaatcgctctagaagggattagaggatgttttaagctgcttacagtgtttttaggaatgagggtgaaagatgctatttgcatgcaaaataatctcataaaagaatgattttttttttttaacatcacatttatataatgacatcttgtagccagctgctctcacccatctggcaacttaaagatttccttttagtttctttgatacagaaattacctaccattaggtctgccactgggcctatttaattggaattaaaagaaagcacctcgtttgccagatctgctgtggttcctggcggaagctgtgagtaaccagcaaatctctgctctggagttactgagagaatgcaattacctttctgtgttctcctgaggctttaggaactcaacttatgaaaaggataactagcttgttgctatttcatgtgtgaagttttaatgaattactggcagtctaatggttttctttctttaaaaaaaaacccaaaaacctattttagaaattttaatagccctaatgagaatttttgattagtgtgtcattctcatctgttgccgttgatggatttctattttttgtagaaatgttatttacgccctctgggagtttttattttataattagaatgctctgtaagccttataggtatgcttcagtgaatgctcctatgtaaacacaaatctttttagtccttaaaggtaattacatctgacgatagtaaatgccaggatgcttatttaaagaaggggaaggtttccagtgtgtgtgtgtgtgtgtgtgtgtgtgtgtgtgtgtgtgtatgtgtgtggggaggcctttcagatgctttacaatattatgagctcttttcctatagacagcaggtataagcctccggggctaaactaagagaaatctgcttttaatgcaaagagggagactcaaaatagatgctaatcttcctttggtggtctttttctccttctcccaccatcagagttcagggcgttatttctctagggtctgtttgcagctgtcttccttgttagaatcagttattccataatcaccatgtgggggcttctccagagaattggtccactgcagtgcagggaatattctccattaacgtggtgagattgccatggagacagataacctagtgtcaggtcttgcctagtgttgggaatttacaatccccagacgtgtttgtgagctggacagtgtagttaccaggacgcttctggaagtcattttctcggtcctttgaagagtagtggtgttggaaaacctgcccttggttcctctctgggcaggagctgggctgctttagttcctgcgtgttgcggctttgttcttctccgttgaaatggctgctgtaaaa

SEQ ID NO: 96475 - DNA, 1030 bp, Homo sapiens
catctgcctgctgctttgcctgcactgggggtggactgagtctaaggggaggtggggagaggtgggcagcgaatacccttgcttttgtggcagcaacacctagtggcagaaaaagagtgagaagagcgaatttgcctttcccacttcagtgacagcccagaaagtaagcatgaatgcttctgtccctcagctgccctgaggttttttttttttttttttttttttttttaactgttaagaaaattaacttccaatcgagagggaggtcttccaatgccaaatctccagttcatttttctctggtctgagaggtttgaagtggaaacattggctctccctgccgatctggtggcagcactcctgcttactgatgcatttgacaagatttgggataataacatatgacagtgcagctaggtagaaattcactcctttattttttgaattaggaatttcactgttagcatctttgaattgggagggatatctctaacgtccctttcagttcccaaaccgtagatctctgatttctcaatgagcaggaattgggttgaatgtgcaggatattatatttccagaatagtcagctgtttcatctgctgagaaaggtgggtgaggaggtattttaactgaatgagatctcggaatctgtctgttttctgtgcagtaacaccacactattccttccttcttatcagcaagcttatggtagctgcctgtcactgggagactgggatatcaaaaatgacataactaaccaaaaaaacaaacatgatgtttcgtttcaggatgatgaaattaaccagcagagccagctggctgaaaagctgaagcaacagatgttggatcaggatgaggtaaagaatgcaatatatttttttttccacaaagttcttctattactctttgttgttgatgtttgttccaggaatttaattggcatagaagcttttcataattacagaatcatgtggaaatttcttggtagatgtcccttcactgcctcttacaagctgattatcactgaatt

SEQ ID NO: 96476 - DNA, 1059 bp, Homo sapiens
aaaaaggtgaagggtgtttaattcagcttcactctgaaaattggaagacttttttttttgaagttgttttctaaacttattaatgttcttctgggccatctattctagacccatctgtctttatcaatttaggtgggaatatggaggtggcccagggagcaggtttgtttaggagtgaaggtggggacccttgcaggtaagtttagaccctgaaatgaaacagataggactgacatagaatatctggtaagtaggaagatgcaattacatgttataaatttaaggacttcctttttggcttaacttatttccctgacttggaaattgtcatctgatatgtagacatataatgtatcaggccatgtgatacaacttgttgataaagagttccccttcttatccaagaatgcagtgctatgcgagagtttgccttaaaaggattcttaggttgaagtcatgtaaaagaaatccattctacatgatggtgttattctttgtaatgtggagtgtatgaaattgatgggcaaccctttgaatttgttgttgaaatttgtttttcagactacattgacaaccacacagagagagctgagccagctacaagagcttagcaaccaccagaagaaaagggcaactgagatcctgaatttgctgttgaaagatctgggggagataggtggaattattggcaccaatgatgtgaaaactgtaagccagcccttcttttatcctctctacctgctcctgtcaagttagtagggtctgtgctttactcttttaagcattcaatgcttagcactgtgctttgcatctgccatgtgctggttagtgtttgaatgaatgaaaaaagggctaattgaatgactgagtgaattgtttgttggggtgaggaggaggagaaaaaaaattatctttcaaatctaggcagtgtcttcaaatgttggttggctttgtgtaaattggtttatttctcaaattggtttatttctcaacttatttcctaatgttgcagaagtttggaattaaatagcttaagcaacagttctagtctcagaattg

SEQ ID NO: 96477 - DNA, 1106 bp, Homo sapiens
aagttttgatttgagtttttataggaattcagcatcacctttcggagcattgggtgtcgctgctgttacagagatgtaaggtgtaagacattgaatggaatacctttttgaagttatctccttttaaaaatcttcagtgtttcttcttatgctgtcatttctctttctaaaaattgatggtaatgaaaaacctagttaattgaggattatatttagtagggggtttcaactgaaagtttcacctgaggtgtaggagaacttggggttgaatgtttagtactttccgcttgtcctttaattaggattctgaaccagaaatccatggacaccttggggatccaggggcaggtttccagggagtccgtgaacctatggaaattgtgggcaacatttgagtgtgtccccttctttgctcagttggcagatgtgaatggagtcattgaggaggagtttaccatggcccgcctgtacatcagcaagatgaagtcagaggtcaagtccctggtgaaccgcagcaaacagctcgagagcgcccagatggactccaacaggaagatgaatgccagcgagcgggagctggcagcctgccagctgctcatctcccaggtgggcccttcccttccccatcattgcactcttgttgtcttgagatctgctccctccatgcccttgctggtgctgatggtgcaccttaggcttagttgagggactgctttgtgtaagcttggcctccccaggtgatggcagcccaggtctattcctagggctacattttgttgtgtgaaatagatgaattctgttgagtccgttccctttttcgaggatatatctatctacccatccatagatggatggctagctagctaatgaatgtaaaagattgggtggaatctctaaaactcctgtaagtaaggcaatattccctcatcttttaatctctaccataggtccactttaatatggaaaaacagaaactactactaatagtagtagtagcaggtggcattttattgagtgtttactatgtaccatacactgtgctaagtacttcacatgcattttctcacttaatctgaaaaaaatcctggtaggcaggttttattatt

SEQ ID NO: 96478 - DNA, 1099 bp, Homo sapiens
ggtgctgtaagaaagtgttggggcctgagtgataaggagctagccaaggtagtgtgtgtgtgtggcatgtggtggggtggtgatggtggggagggaaagcttccagggagaggaaaatgcaaaggccctgagatgggaattggtgtgtctgaaggacagaaaaagggaagacctaataattgaatggtgaagatggaatccagaggtgcatgttcaatgaatgaggccttcagccctgcacttttcccagcccctttctctcatgcatgcttttctctgagaagggaaaccagctcggcctttggcatctcatgttaactggatggtgaggaggggcctgccatgagtggtgtctgtggggaatgaagccgagaagcacagggagaagcagaggtctgtcttggtatgattctgaacaccaaggcaagggtaaaatgggcaccatttggttgtggcactcagaaaagggactcaggaacccctcctctctcgcattttcctaccagacaattccaggccagcctggatgaccacttgctagtcattcactcttcctttttgcttgtttaaagcacgaagccaagatcaagtctctgacagactacatgcagaacatggaacagaagaggaggcagctagaagagtcccaggactcgctcagcgaagagctggcaaagctccgagcccagggtaaatatttgactaacgtgcaggtgtcaaacacctggcctgagtcagacagcctctggttggctggaatcatgatgtttagtttcgttcagttaaagcatttctaggtctactgcaaacaaaaccataactagaaaaaaaggagcgatttcttttctttctttctttctttttttttttttaagatggagtctcgctctgttgcccaggctgaagtgcggtggcataatctcagttcactgcaacctccgcttcccggttccagcgattctcctgcctcagcctcctgagtagctgggactatagatgcgtgtcaccacacctggctaatttttgtattttttagtagagatggggtttcaccatattggccaggctggtcttgaactcctgacctcgtgatctgtct

SEQ ID NO: 96479 - DNA, 1069 bp, Homo sapiens
ccagcctaaaaggagagatttctgagagaccatccccacactgaatctgctcatcttcccatttcctcacagtccacccagttacccaaatcagaatcccctgctccccacctcctgactctagttggtcaccagagccggtccatttcacctgccagaggcccctctggttcactgtccaggttaactaaggactgtggctacatccatctacccatgcccaccctcagtctgctctgggccagccactgtgtggcatcctgagggatgattctaaaattcacattctctctctgtccaaacggacacttctaacccttccatggcatcctgttgctcttaatataaagtttgaactgccgtggcttccctggcacccccttgaacaagctctaccctttgccagccagccttgtgatctcctgagcttagggaagtgcctcgcacataggaagcacttcataaatattaatgaatataagcagaaattcaagagaagggtctagaaatgcagaaagtagaacaggattaagaatgtatgtgccatgcaatgtgaaactagaacatatatattatgggttgcaatgaaaattgttagaattttctcagaaagccatttgaaaatacatattaataactgtaacatttttcataccttttgatcatcacacctcagatattcattgcagaattttagatcagcaaaaaagaggaagccatctaaatgtctaatagttaatacactatggcgtgttatttaatagaactttttcttcacatgaaatacatgaaggtgtgcagcaatgtttatgatgcaatgttaggtgaaaatcacaatatatcattgtattcttactatggttataactattaaaaatgaatggatgcagctgggcacggtggctcacgcctgtaatcccagcactttgcgaggctgaggcgggcggatcacgaggtcaggagttcgagaccagcctggccaacatggtgaaaccctgtctctactaaaaatacaaaaattagcagggtgtggtggcacacgcctgtaatcccagctactcaggaggct

SEQ ID NO: 96480 - DNA, 1052 bp, Homo sapiens
aatagaggaccaagagagagaaatgaagctggaaaagctcttgtgagtgcactctaaatatttcctctattttctctcatccccatgatattctggttagattgggctaatttaaaaacagacaatggctatttgtgtgcttgttggtgggttttgttgatttatctgtggatgcaaatagtatctgctgaaatctctgagtcccctgtggtggtctatggttcctttttgtttttcagattgctcaacgataaaagggaacaagccagagaagacctcaaagggctggaggagacagtggtatgtcaagatatttcccgatttatgtttgtctccaagaccggattcatttgtgatttgtcggattatttcaaaattttatccatgcacacctttctgtgtaatgttttagataagacattctatggaaaagtaggatttgtagaatttagtcctcaacttttcacagaatcagtcaaccaatccatctatccttagagcagtaacctggagcccctgagtgaggattaagctgaattgcaacttagcaattttacagccctgcactttgtgacatacttccactcaacattcaacagatatttattgagcatctcctaacggctggcattcttcaaggtgcttgaatatatccataaacaacagagataagatccctgtcctcatgaagcttacctttagctgtgggagacgataaacagtaaggaaacaaatcttgcactctatcagattgctatagaatgtgcataggttggtgcctgggggaggctccatgaggatgtgacctttgagcagggactcgaagaaggagaagaactgagcacagagatgtgttggggagagcattccaggcagaggcaacagctcatgccaaggccctgagataagcccgggactgtcctgttgggggccagcagggaggtttgtgtggctgcagctgagggaaggacagggatataaggtgagcacagagaggtaaaggcttcagtgattcaggccaggtaaaaccttgagacctgcagggctttggg

SEQ ID NO: 96481 - DNA, 1052 bp, Homo sapiens
acgtgcgtgcacagtggcgcccggggtttgagaagctactgcggcctctcagctcagatttgctaaaaggtgaagacagcgctggcccactctggaacatctgaaaggctgggttggagcccgcaggacgcagccctcaccgcaccctgtgctcaccctgtgggaatgggaatgtcaggcgcccccgttatcctactctgagatattccagcatacatcgtggtctcaaaacttctgagctgggcagagagaagccagccaaggctgtaggcctaggtcttgggctataaatgggtacactcttagaaatactggaataggaggatatttctctgcaaggtgtgaagggccctgtgttctgcacccggtgggagcatgaaggagcccatatgtagccagagccccagggaaagcctccaagtgcaggtttggaaatacccctggaagagccaggctggcatccatgacagggtgtggctacaggctggcacagaacctggggaggtctggagtctcagcctcttcaagacctgtatggatttgggcattttgcccatgtaggaaatgagggtgtagccagagtcctggttcccaggatagccatagggacaaaaacaatttaggaatattctctaaacagcttcttctccttttttttttttttaaattgaaacatctccaataacatgtaatttatttcccatcagatattgctgtgtagatgtattgcaaaccagcagtttcacgtttctagttttaaatcataccttagaatagtggttcattgcatgtgtaggatttcataccctttgagaatctattaaaagctatggaccctctccccagaaaacagcatcacaggcagaattctgcatccaatttcaggggctacacagatatccttgaaagtcatggggaacctacgatccatttcagatgaaactgaaaatctttttttctaacttttcttggcccaaattagaaatgagctaattgatgtttaagttctttctgtcccctaaatatttggatgccttggatttgctaagtat

SEQ ID NO: 96482 - DNA, 1501 bp, Homo sapiens
tagttttcccattttcagagagatctggtggttgataagaattgtactgttggtaagaattgtgacttttagttgtcacaggtgacctgtagatatcagggttgctgttaagacttttctaaatgtctgttctctcttctttctgttggttggatacagccaagcccatccgccccggacactacccggcctcatctccaacggccgtccatgccattcgagggggaggaggcagctcttcaaattccactcactaccagaaataaatacaaagtgagtcccatgtcaagggtggtttctctatctggaggcagaggcttcttgcctttccaaagcccctgcctggcagtggaccttgagtagagaggagttctgctctactccagcacacaccctgggggttccaggtaaacagagacccagacctgtcctcacttagtccagagccctggggtcttctagctgaggctgtctggggcccatgggacctggagccaggcccggcctaatcccctccaggggtaggggtggtgagtgattcagccgagctttgttttgcctgtgggactcccctctttaattggcatcccaaagggcattacctgtttgtcaactgctttacccacagcagacagaagttgggggttgctttaagtctcaggaacagaatataaagaaagagccagataatagaaagtgatgtttttatgtttactatctgaactcaacaagtggggattttaagaagatatctagatgagtccaggatgcttttttctttgagatggtggtctgcaagcttctctacccacaacccatgtgcacgacatttctctcccagcaaaaagaaaaggaacgagtgatattctttccaaaagagaagaagcagagagcgaaaactgtcatcctgatggaaatggagaaaagaggttactagttgggcgggcagacagatgactaggtgaccagaaaactttgtttagataaactctgactttgaacatgcagatgggaagaggtggctctgaacattgtccttggactctaagcccttgctagggtagctggctcccaaggcaggcaagcatgcaaggtgtgaagcctggacccctcctcatccagtcctttctgcatcaaggcaagaaggtgagcaggaggggctggagccatcactcagggtcccggcatcgcccaggcataggctaaaacttccaagggaaatgctttggtagttgcccccacacaacttttacctgtgctgccccaggcagtgccaacgagcaggccaggggctggtcagagtagtgggaacaggagggaaggcggaggcagcccgcgggcgggcagtgtgcctgccatcatctgccatcttctagacaggaaaatgggaaatggtcttggcggtgggccaccccattcctatctaatctctgcttccaatcagaaatagaatgaaactggaagttagaaagttgcttttgactacatattgtcagtatcg

SEQ ID NO: 96483 - DNA, 1073 bp, Homo sapiens
taatcttacctatttcttttcactttttaatgtagccactagagaatttaaaattaaatatgtggcttggccgggcacggtggcttatacctgtaatcccagcactttgggaggccgaggtgggtggatcacctgaggtcaggaatttgagaccagcctggacaacatggtgaaacaccgtctctactaaaaatacaaaaattagccgggtgtggtggcaaacccttgtaatcccagctacttgggaggctaaggcagaagaatcacttgaacccgagaggcagaggttgcagtgagtcgatatcgcgccactgcaccccagcctgggtgacaagagtgaaactccatctcaaaaacaaacaaacaaaaaatatgtggcttgtgttatatttgtatctgacagctctggtctaaacatctagaattaaacaaaacttttttgaggagtaaatttctactgtgttttctaattcctatgttctctctttggttctctttcaacagatatgactccacgtagcatgtcaaggactacattaatcaccaattcctttatttttccccccctacagtttccattttttttttatacttgcttactccagccatctgcagtacaccagtttcaggtcttttgagctgtgtagagtttctgtgtgtacagatgtgtgctcggacttttctctttttgagaaatctgaaggagatggttgcagaagatccacttactactgagaaccattaccaccgactcggcctccggggtgttgggtggtttctgggtggttcctggagcctcctctgggcagtgcactgtcccatctgtacgccctaatgtgccattccctagaggggaacaaccaagtgccgtggaggcagatgatcatggtctgcctcaactgtctggtttcctgtaaaataaacacattgttttatatttttagggaacaaaaagtgctgctatagggttcaaagttttccttctgaacacttttccgaaacaaattaccccaaagacacattttgaatatcctggtcacatctttggatctgtaaaatataccttttagtat

SEQ ID NO: 96484 - DNA, 1385 bp, Homo sapiens
caacatcattccagcagttgaaaaaggaagccttcgggagaaagtgcttgtcaaaattttgttctttgtgcttgtgtatgagtaagttgccatgaataagttattattttaacccataattggcgactgtttatatgaattctttctttggcaccaaataggtttcatcttcttaggcacaattagaaaaaatccacatagatggatattttacatttagttattgctttatccaaatacatgaatctaaagctgaatcaacccttacttccagttgtgcttattaagaagatcaatttccaagtagtaaagttttcagggaaactgactgtgctgctatttgttttgacaaatttgggggtaagtcaatgacaaccaaaccaatctcggtggaaactcctatcctatcatgttgtgtgcccaagatgagtgagctggcactgtgccctgaagctttcaccactgtaatgaaatatatgccaggggagactttgggcttttctcatgactgtgtgggtcgaaggtagctcaagtgtgtgtgtgtgtgtgtgtgtgtgtgtgtgtgtgtgtgtgtgtgtatgtgtgtaaagtgctaagaactgtgcattgacatccaaacatttcttgtacaaaatttccctagcaaagcaaacctgctttgacttaatttatttgttaaatgttgcactttgtttatgtatgttttgtttttggtggggaataaggagagagaggacgacaaattctattgaagtatttattttgtgaagatggcaattttgcatttgtttaaatttttttcattctttaattttgttatcagtgccagcccaatatacctgctctaccattatttgcggtctgataaaagggtccttgtggggcaggttttgcaaagcttatcaggtaataacatatgccacataaccttgttgatatgtttgcttctgatttgggaagctaaacattggtgtttgagaggattgccaattattaattgtcattaccactactctccattactttttgtttggaaattgaacaaaggtcagtaatggtttttggctcttgttaatatccatcataaaatagattgttttagattctttccagggtgatttttccctgggtaccccgtttctacttctaaagaattgcttggcactttcatgtttcaaagggaaacattcgcttgtagttccattttacttgatctctacaagggactgacaacatttgctttacttttattcacagagaaagttggctttgatgtctcttaaagataattctgctagttgctgatcagccagtcagttcacctagcttcaatctttataggacttctaatctaattttcctatagtgtgactaaaagggaggca

SEQ ID NO: 96485 - DNA, 1136 bp, Homo sapiens
ttgtttctatagcagaggataggcaaagtacacagaaggtactagactcaactccccatattccccttgcccccaggtcagagtcttcaggggctgtgactctgacaagcgtagtttgtatgttgctctggactctatttcttgtcatggtgagtgaggttcagcttgcaaggggtcagttcaaggctggtagatttaagacctgcctttttgtgacttctgtcaagttttggagcaatcaccgatagttactggcctagttttgtccaccttttcttctcgggggcccttaaccagctgtattactaagaaatgtaattctcaaagtatgctacatctactgctcttcatgatccatttcaccctggagacagtcttctgagcattcttgctcattgtgaaaccacgtcaccatcaaaatactgcacagaagccagatattacatcattggtatcgtgttgaaaacatctcctgcattttgggactatttcactagggtgaaaaacagaaaatgaagtacattaccgaaaaaataggcacggtgtgttttatttgtcttttagtaaggtatgggaaccacagtttttaggcaactacaggaaagttagaacaaagatgagggctgcaagtaacccactgctgtgccagcaccacagaggtggtattagtgttactgagaaatgtgcattatacatttctcctagaatttggagctgggattgtagtttgtctcttgggaagagccagtaggtcaaacaggggacacctctgttttatatttctctttttgccttggcacccaggaagcccggagctacagttgtagtgataattttatttcaagttataagttcaaagatttcctgtcttaatatgatttcaactttttaaaaacaataacttttttcttattacaaagatgatatatattcattataaaagatgtataaaataacatgttcacaccccaaccagatattttcctaccacacagaaatagtcacggtttgcattttaatcttaatcattataatttattctaaacatatatgtatatatttatacatatacatatatattacaaaaatgaaatctctttcacattacaactcatgtttaaaacataacatttatc

SEQ ID NO: 96486 - DNA, 1092 bp, Homo sapiens
tgagcgcgccccgcggagggctccgctccccccgcgcgcgctgattggtcccgcggccctcgaggccgggccggccgcggctgcgggcggcggccagtgcccggcgcgagtgggagtggcgcgcgcgcccctagccgccccccgcctctccccgctgcgctccctcgctccttccctgagctcccgggctccggcagcgggctggcggggcgccgcattgcacactctgggggcgccgcagtgttcgtgggatggggcagcgggctgcagctggcggccggaatccgcgcgcagcccgggtgagtagaggcgggcttcccgggagagcacaaaagaacaggggattggtgccagcggccccggcttaggcggggcctggccaaggcagggagtgcgctgagtccctggaactacccgatgctagggcagtcccctggggccagaggaactggggtcccggcctccggcgttttgcccctagtgggcagagagccccgcgagtagcctggacgggtccagaggggcgtgtgtactcgtgtgtgttgggctggcgcgtggagggtgggatggaaaggtcaggagctgccaagttcaaggctggaggaacctttcccaggagtaattcagcatcttctcacggcccaacatgcgtccaccaggaactccagccggagggagttcctgggcggcggactggcagcaccccacatgttgctgcggggcggggggcagtggcggtagcccggctgcggccacccggagcctctaagggaggtgcagtgtgctggaggtacctccccgccgctgcaagaccacgctaggcctttcagccatccaccccgacaacccagggaagggaccatccacccacagagttgggatttggcctgggcttgacttggcgacctgtttttctctccggtaacagcagttccgttgattcacatttggctaagcgttcagttacaacctaaagctcactatctgacggtctgactcgctctgacccccaccatatcctcactatctctaccgctgccctcctccagtcccctctcccgccccagtatctgccctgctcctcactgcggg

SEQ ID NO: 96487 - DNA, 1626 bp, Homo sapiens
aaataacttaaaagatcatctaaataggaagaaaaataatagaagattaaagtcaaaatggaagattgaagataagtgtacttggaaaaagcaatcccaagaacatttataggagatagttttaaattctgttcccatcagcagatagcatagctggctagtagtctctcagctctctaaaacacatgtgtccaccaagttaaagtcagtgttagaaaaagtgtaggttataaaactctgtattaatgtgatgctattttaaaaatatatatggctgaataagtttatataaataaaccctctctatttgttcatctgtgtggaaagaaatacatcaaaatattaacagtgactctctctaagtaatatgggattggaagtgatttttattatcttcttttacctgtgttctccaaattttctagattaaacacatattcttataagacaaaacattatgaaaataagatttagtattataacctcaggtttcatgtagtgttaatagaaagaaagctcatttgattattatttctatgtcttctgaaaatctgtagttgaaaatttttttgcctttttctcccctctgaattccccatgtaaaaagggcagcatgttgaaataacgtgtgtgtgtgtgtgtgtgtgtgtgtgtgtgtttggtgttaggaaaaaatgtggttgatgtgctttttaaaatagaactaggaaatgtaaaaagatttcgtttttacattcaatggattttacattcaaatccataactcaggatttgaagaacaaagttatagaagcattgctgatttctttctagactgtaagcgctatgaggacaggcaccgaatctgtttctttcctttctgactgtgtagtgcttgccttggtgtctagcacagaagactctcccagtaaatacgttggaatgttttgaattgaatgataggattaaaaactctgataagcatgtagaaatttgaaataagagtttctagggcccattgtatcctctgaggtcatatgattcactcacgttttagtttgtttctctgtaagttatcctggcagtctttgtattatatgacccctgggccacaaaagtggtttgtgctggtcatctgggatcctctggcttattctcaagttttgatccagctcctgccacttgcatccatctctcatttcagttggttttgtgctttggggctggtgttttgtttctttccttggctctggattttgtctctctttcagcctttggcttgggttcatcatctttttctcccactgtggacaccagtgtatataatcccagttagctctggccccctttaaaaaaaaaacttatattttaggttcaggggtacatacacaggtttgttagataggtaaattgcatgtcacagggatttggtgtacagattatttcctcacccaggaaataagcatagttctcaataggtaatttttcattcctcactctcttcccaccctttaccctcaagtagaccccagtgtttgttgttctcttctttgtgtccacgtgttctcaatgtttagctctcacttataagagcatgtggtattaggttttctgttcttggattagttcacttaggataatggcctc

SEQ ID NO: 96488 - DNA, 1090 bp, Homo sapiens
gcctcctatttgtgggagggaataatgtgcatagttagggctggtattttttaaacaaagaaatagacaaggccagatctgtttaatctctaacggccagtgttctttctgttcattcccatagattagaatcacagccaactggcttaaaatgttgttttaaggagcaccaggtgagaggtggccagatcagcatcagctccccacagtcctgataaatgactcaggtttgaactcctcctgttgccaatgttgttattctttggtaaggtgaaccaggcaagcaaaaatcaacatggtacaaaaaaatttttctcaccaaagctatttggaggctcaactttctcaatgaagggcactgcatttcatagatagaatagcattttaaagacatgtactgtctataatggtactttcttctcagttgggaactatttaggagagatctgtgctagaggagacagttttcagctaggacatgcaaattcaagaaaggtccagtgccatagcgtctacaagacgtcttgtagagaagcaagcagactcatttcctatagcttctgggcagttctggcattgcatgtgtgtttcagatctcttccggagaagcagtgtactgaataagatcgaacatggaaaatggaaaggaagagtgggcagagaagaaggagctaaagaacttttaataaagaaagtatcatctactttataatagattaaaaaaaaacttttcgatcctatctgattcctgtcctatcagagaaatccctaaaatgaacaaatttgaggagaatgacaaacatccatctgccttaaattatcttccaaatttctgccactcccagcttcaaagccactcctttggcaagtcattgattcagccttagaagatcactgttaaaagccttccctgaagggaaaatcatgctcgttaatgaatgaatctaagctgggtaacatactcttccagtaggcaagtgaaagctgggggaatatgagtccaagcaaggggactgagatggggaaatagaggaggtaactttttccttgtaagatgtgggtggaaaggaaagatgttgagatctttgct

SEQ ID NO: 96489 - DNA, 1042 bp, Homo sapiens
caaaatattggactatctggtgtctgacgtccttctatgttttaaattctgtgaatgtacaattagtttgtctctcctcctatttctttcctagccagcccccttgcctcttacctagaactgtttttgtgttgtgtgtaaaccatttgatcaacaatgtactctgttagaaaatctctgcatctactttaagagaagtgcatgttgagatagtgcaaatctgcaagctatgcacttttcccttttatttttatattttagactacattaagtcaaaggcagtcaaaaagcaaacaataaattccccaagtgctgtacaccctgcccaatatcctaataaaaatattgaaacatttatactaatagaggggataatatttcagaaaagaataatttacaaaagacccaggttttattccgacagaggcgtttctaagcaaagcagggcaattaatcatagagctgtaacataaagatgaaaagatgaatactgaatatatagaaaatgtgcgctattcttcccttcatctttagaattacaaaagatgtttatcaccccttgccttaccaacaccaatcttggattttttatttggcttctgcaccagattcacccttgacttgatgaggagcaggtaaaagctgaagtgctttgtgggagtgggtgcgggagtggaggaaggtatagacatccaggatgtaggatggctgtgtctgaattagacctcctcctacaaaaatagctcctcttccagatgttttttaaagtgagggaatacaaggtggtcatctgtaatctcttgagtcagaaagagaaagaggcaggcatagtgtcttgtgcctatagtccacctacttggcaggctgaggcaggagtatggattgagtccaggagtttggggctgcagtgtgctgtgactgcacctgtaaatagtcattgcattctagcctgagcaacacagtgagactccatctttaaaaaaaataaaaagagagtaaggattctcactgagacaccccccgaccccatctctgaaaaaag

SEQ ID NO: 96490 - DNA, 1085 bp, Homo sapiens
ggactgagaaaattctggaaagtagttgcccaacaaaataggttagtactgtactgcacactttgttcagctttactgtgggcattgtcagatcaggttacagcataggatttaaaggtcaattatgccatgactttaggggaaagaaagagtgactagaaggttaaaaaaaacccctaagttttggcttttaaagacttatgaaattgtattccctttgtgacatttgatgaatcacttttcttaatttccattctgataataatctccctaacgttttcctaggaagctctttcatggcaaaaatactgtcctgtagatgcccgagagagttggggccagttatacagggtgggggagagttggggtagctactcctgtctctccgagttgatttgatactgcttccttgaatttactgaaattaagacacctgaagagattaaaattttgtggcataaaaacagtcacagctaggcatggaactggtttcagggagaatgaccaagttaggcatttagaggatgagaaccaaattacagatatacgaaaattagagaagccaaaatgaccccatgcattaatgaatggcctgagggaacatctgtggttgtctgcgtcttagcttacaaactgaatccagggacgttttcatcacaatgcctgcatctgaatagcatggaaggtcaccaggattaagagttttgacctgtcagcgcaatggggtttaggtttggtatctttatttttggtctgtaagctcttttgttcaaggcaaagttgatctctccctgagccaggccttgagtggaggtggactggcttcgtgtttctaattagtcagacactccccctgctcctgactactgatggatgtcatgttagttcaggaccccaagccctctctctctttgagctgcagtgcagggatccactttagtactgaactgtcatttgtatggttagcatggtggccggctgtcttgagattatgttagcagaccccctccctatccctggctcttgaccttttagcatacagcctcttggcattttcccaaatggaataatatatgtgtaagcac

SEQ ID NO: 96491 - DNA, 1049 bp, Homo sapiens
catgtaaccaatgtattttatttgaatataatatttatatttggcaatttttatttagttttaaagccatatatggactttaaagcttaatatcagttttctgtctgtattcataagtagtatcataattaacattcattagttaacggaatgggtgaggttctgtctgtgaaaccgttttctccttttataggagaaaacacttttcaaatttgagaaggtctgccccagaccttccctaactaatttgcttcacttctgcctgtgtttttatcctcaccacaagatgctgatcttagcttgggatcagctagaaagtctgacaggtggtgacccaggcttttgacttcttataatagagcttggcatgctatggcgcctcttggaagacctttcaaaggtctttctgaatggaaagcaaacgttcctgggcagtgtcttgacccagatgagtaaccaggtgccttcttcacctactgtgagctgattttaaggactatgttagctagcaagcatgtgctagcattgttcaaagtgtactatctcctttaaacctcctaagagccctttaaactagaggttttaatttccctattttgcaattgaggaaactaaggcacagagaggttaagcaaccttcccaggagcagtcagcgtgctaggctgagctggcccactccagagcctgtgctcctggactgtaccacactgctttcgatgcattacatattctccttcacagtaagcctagcaagtgggtaatggggcctggggtctctctgctctggagcccagcacttcatgtccttgctgtagtggttcctggtcagcctgcttgtggctgttgggtgtggctgccacacccatttgaaatatgtgtacattgtgaaatgattaaatcaggctaattaacttatcaatcacttcacatacttaagattttttagtgatgagagcatttaagaactattctcttagcaagtttcaagtatatgatacactgttattaactctagtcaccatgctgtacaacagatccccagaactta

SEQ ID NO: 96492 - DNA, 1082 bp, Homo sapiens
gctagatcatttcagatttccagaatgcataggaattggaggaaagggatattaaggcggtttaagtgttgcatgtgactttttacttatttagttttttaaatatttggagtattaaagtagataggtgttcatgtttacctaaaaattattactaaaatgtctttcttactaatgagaatatttcgtttttatttcctcagttttttggaccatatacaaacaacactctttttgaaactgatgaacgctaccgacatttaggattctctgttgatgaccttggatgctgtaaagtgattcgtcatagtctctggggtacccatgtagttgtagggagtatcttcactaatgcaacaccagacagccatattatgaagaaattaagtggaaattagcagaaatatccattcatttgctgtactatttgtatgtaatatttgggttgatctataaacactgtcagactaaagtttttaaaatatatttatttctaagtatttatttcagcatttatgaatttacaacattggcaagtgatttgggattttaaaattgcaaatgttcatttattcatatcattgaatacacgttgaacacatccacattgtataggatgtggtaattagcttgtaaccagggtatgatctgctattgttatttctcctctttattggaaaaaggcctcagttttaattattttcttcccaaaataaatcacacatttggttacaataatgtgtgttttcattacagtattttttaaataccattattgattcttaagtttctatattaatctttttaaaattctttttaatgcaattgagaattttggattcattgtagactttttcaaattttcttttatctttattgtctattaagtgttggggtaccagtctgagtattactttgaaataatttatgttcaggaaaagaagaagaaggataatacatctttaaacgcatatgagtcttgtccttatccctactaaaaaggtaattctctcttaactcctgagttgagacagacaaatagaactatgccttaactgacaaatttatttttcaattttagc

SEQ ID NO: 96493 - DNA, 1213 bp, Homo sapiens
gataaaggctttgaaatgtcctgtgacatctgacctcatgctgccattagataggaagagtaaaatttttaataacttttttcctaaggctaaattaaagtcatttttactcctgggtgattattagagttataattttatgagttaatataatacggaaaaatcttaacagtaagcatttttgaaaattatattaaccccaaataacgtgtaatcctacttacccttcaggattgttggtagtaatatttcagttcatccaacaaaagcagaagtaaacaaaactaagtgaattttacccttttcaaaaataacatacatttataaaaattaactaataccacagtaattttacttaatcagcatttttctaaagaagtacttttatccttctttaaaaatttgttctttaaaaatcaaattcttttctacctggaatgtttattcttatttgtagattttgaatcactgtttccagaagtagctaatggcaaactaatgattctgactgtaacacaaaaaactaagaatgatatgactgtttggagtgaagaagtagaaattgaaagagaagtgctcttagaaaaggtaattctttcaattgctaataatttaattttatggtcattatttaagtaatagtgaaccaatgtcttaaaatgatgactgtcatttccaccctttattcattttctgccaaagtattataatactaaaggacttacatcttttttgagagtaaaagtgcagctttttagtatccttaaaagtttagattctgtttattactttcctcaatttatttttaaaaagtctattttggaaaatttggtaaatgacaaaaaggtaaaattaactctttatccttctcccctcagcctccccctccctctccttctccatctcccccttcatctccccatcttcccctccaaatctatcccctttctcctgggcttagaacatgtcaaaataaagagtgaaaattatgccagttctctccaagagtaaacagtaacagtatgcagtacaataatagtgtaataatgtatacccacatttttttctgtggtttgcttttaacctaaagtatgctttgacatgtttccatgcttacacatagatatatttcattctttataaaatctgcatagtattaatatcacagggtaaaccataaactttttaatttatttaagaattttaactgggt

SEQ ID NO: 96494 - DNA, 1039 bp, Homo sapiens
gctgctgcacctccagatatatgtaagtgaaagttgttactgctttacttataattgtttcaaaacatttttagttgtattttcctctaatatttcttcttaaggcttaatggatttttctaaagttgtgtttgttcagttgaaaatgaatcacagctctgcctaaatatatttatgtcagaaagctacagtattgaaaaaagagtaagtactggtttctaaagcttacttcttaaacttttctttctgtcttcaaacatagagtcttccctgaaacaaatctccttttggtcctgttaaaccatattattatttcttcccattctttgctagatttcataaatgtaccttgtactttttatgtgttagtgtttattgaacttacctgctttctacaaagtctgtttcttctaacctgtttggtacaccactaccatgctaatcattctaaattattttaaccatgtccctttcttgaaaaacctgttatctttcattgctttcagcagtagttcccagactaccttcaagccatgaagctttgttcaaggttaaaaagaaaaagtgggggtagggggatagtctctgtggtaggtaagtttgagaaatgctacatgccatattcctgccttggaggcttataaggcacactaaaatattaaagactcttagaaacttaacctaatgtgtcctaaagatattggacatggaatccttttttcatggcacacattacttacaacgtaatttaagttcacttgagcattcagagccttccatcctgcccaagttttctaactctctgactactccccaatttacatcacctaaagactaaccatatatttataataaatgaaagattttgccattcaaattatataagatgttagtatctggaatatataaagaatttataatagatcaataggaaaagataacccaacagaaaatcagaaaacaaaaggacatgaataggcctttcacagaaaacaaaacctaaaatgaccagtaaacatatggtcaaatccactgccca

SEQ ID NO: 96495 - DNA, 1176 bp, Homo sapiens
ttagctaaactgaagggtttttttaatctttttttcttttttttaaaacagtttccatattggaagtgaccttctaaatcctacaaaataagaataggagatactctcacacaccagagatatttattgactgtaactttgcagtgattagacacatcctatctatagaattcatatgtagcggtcataagacatatataaaaacagctacaattaaagtataaagtaataattttttttagaacctacacgaaggtgcaatgcagattcaagtctttgtggagaggagtttgggatcacttcatgagggaaacatttaacttgaggtttgaaagataggtgggatttgtatagtctaaaatatgagcgggaaggacaggaaggtatattcaaagaactccccaacccgcctacccctttgaaaaactgaaaagtgactgctgcctgccaacctgaatgtaagctgcatgaaagagataagtgggagataaggttgaattgtgaggttggtaccaagtaaatgagagccttgaatgccgaactcagtaatttagacttcattctttaaattgtgattattcacttagagctgtgtgctaggaagatttatatggcagcatttagccaggatgctatttctgtaattgaacatggtatattaagtctaaagtgtgactatagagacaagtcataagaatagattactagtcttggccaagttctatggtgaatttttgcctgcccataacctgcacagaaagagaatgctgtaaaagaagtatgtggtactttcaaaggagagaaattaattgaagtagaatagaatgctattatttgacctggttttattttggtttaaatgaataaattataatagttcagtagggaagatccttttataagtcttttgttagaaagaagttcatattaaaataaatttaagtttcagtatccaaatgtacgataacaatttttgtgttaatttatatggattgtaaattgtggatggatgttactaatgaaatatgcagatagtgtttcataacaaggggcaagaatgttcatgtttcagagtctagacaggtacattaagaagccttcatggggactgtgacaaagcctttctgaacaaaggggagcaacctttccttagctacagtgatttgttgctaacta

SEQ ID NO: 96496 - DNA, 1462 bp, Homo sapiens
gctctgacacccaggctggagtgcactgagtgatctctgctcactgcaacatctgcctcccaggttcaagtgattcttctgcctcaacttcctgattatctgggattacaggcatgcgccaccatgctggggctaatttttgtatctttagtagagaccggtttcaccatgttggccaagctggtctcaaactcctgacttcaagtgatctgccaaccttggcctcccaaagtgctgagattacaggtgtgagccaccatgcccagccaaaatttgagagtttttaacaaagagttaaagccattggaaccccttggactggagtacaatgatgggctttgcagagagtgaagaagatttgtgaaattcctgaaaatgcatgtaaattcctgaataattataagtaggttctgtttccccttcaagggagctgagcttctttaggtctttgaaggagtctgtgcctctgaaaagatcaagggccactagtggagagtataaaagaaaaagggcaaaagtcagagctctaggaagtatcaattaaaggagtaaccgaagaagaaaactggcaacagagactgaaaaactttagtcagtgggtagacaaaaatcaggagaaagacatattttaaacatcatgaagataattgctcaagattattagatgctacgcaatggtcttattaaggaccaaaaagagatcatcatatttgataggccaatggtgactttgctggaggaatttcagtggaacagtaagagatgaaattttgattactgtggtattcaaaggatgaaacataaacctcttgaggacagagatttttttgtctgttcactgtcttaggacttcactatattcctgctacagagaggtaatcaataaatattgttgaaagttgaacagatgaagaagtggtggcagtgaccattaataacagcttttctttgttgttctattttcaggctccatacctacctaacatctatcttctcaagaactctgccagggaaggagtagtttctgtgtttcataaacagactgagactcaaagaggctaagtaaactacctgaagccatatatagcaacacacaatgacggatgtgagattcaaacttggatttatctggctccaaaatttctagtttttttttttttttttttcccactacagcaaaactaaggagaagagacagaggtgaatagctgtctctcagtggttattctgttttcccttatctacatgttttcctcctttcactctctcttggtttgttcttatccttcagaggtaaagaggagccttcagagagctataaaggttgatcaaagtaccagattatgagattatttggaggctaatatgtaatccttggggtttcctttctcatctcacccttacagctgcctgtattaatgctttctgattaacatatggtctcctttttattctagaaaac

SEQ ID NO: 96497 - DNA, 1038 bp, Homo sapiens
catgtgtgactttattttcagctatcttttaatattattcactcttagtcacaccaactatgcttatccctacctaagtccttctcatcttgttatcaccagctggtaaattcttcctgcttcctttacttatataaatgtggctgctttttcaatatcagctccaagccatctcctccatgaagctatctgggtaattcacagaaatctgctttcctgaatcatagagcattgctcagtgtagctcatgattataacctagtcttagttgctttttaattagtttgcacacgtgtacatatacacacacatgcacacacacacacacatgaccaactagattacaagcttttcaaaagtgggggctgtaccccagtgacatctagtaatatgctgagtatcatatatacattttcaatagatagccattttttgtttatctctttgattgcggaggctaaaacataataggtatttaataaatgttgagagatctgaggaattgatttaaattactctgctgaagtactagatctttgataatattagattgtgacatttggtgtgacaattctggtagtcattagcatatacctttgcaagagctagctcaagtcttataccttccatgacaacttctctaggctaatacagtcctcattgttcctcctggtcctgaatttctccttctcctgtttctgaactcctaaagcatcgtacatctacattgggcaagtgccttaggactacatctgtagaatgggtttaataatagtgcccatctatttggaactatgataattaaatgacaatatgtataaattacttagaacatttctggcatattataagtaatcaataggtgttttagtcatggttctccagagaggcagaactgataagatatatgaattagctcagttgattatggaggctgagaagtcccatgatagacgtctgcaagctagagaaccagggcaactggtagcatggctcactgcaaagtgtgaaggcttcagaaccaaggaagccaatagc

SEQ ID NO: 96498 - DNA, 1039 bp, Homo sapiens
ccagtcatttcccataaaatacagacattttaccaacataatatgctttgattgatgcagcattatgctttgggcagtattacaaaatagctggcgagtgctttctgtatttaaatattgtaaaaagaaaataagttataactgttataaagcagaacttttgttgcattttttaaactgttgaagtcactgtgtatgtttgtttggtcaatgtttccgcagtatttattaaaacatactttttttttcttcaaataaaaaagtaaccatgtctttgtctaaatgtgatctgtcttttattatctacttcctgatttagctgtttagctttgttctttaacataggtgattacagaatctggcctaacgttttctgaactagaaggctttggaattttttgattcttcatagtagtaacagataaacctgcatatataaaagttttcatgatgctttcaaatcacaagaaaaaaatggggcataattagattaagtgatttgatcatatacaaaaaagagctatgatactgcctaagattaacttgtagaaaagatggaaatccttcaagtctttaagaatgaagcaatatgatgcagtctcaagtcacaggtttaatactaatataagcctagtttgcctctctgccctgtggggtcctaagccttggtccttaacccatgccacctcgcaaggcatgcccttgttcacagcagttgtggggatgacccagaacacagcttttgcagcaattcgtggaaggataaataacacagcacaacataatacaagttaccccactgatctgggagatgtacagtaagcatggaacagcttaaaagagaggactatctccccataaatccagttgattctcagtcttcagctaaaatacttacatataagttttacataagtgtccaaagatactctgtgggattttaaaacagtgcttctttttacacagctaagtcacttcatataaaaaaatgcatccttgtggcttctttttttctgagtggctttgggaatcttggagg

SEQ ID NO: 96499 - DNA, 1650 bp, Homo sapiens
caaatatggccaaacagattggagcagctacttatatcgaatgctcagctttacagtcggaaaatagcgtcagagacatttttcacgttgccaccttggcatgtgtaaataagacaaataaaaacgttaagcggaacaaatcacagagagccacaaagcggatttcacacatgcctagcagaccagaactctcggcagttgctacggacttacgaaaggacaaagcgaagagctgcactgtgatgtgaatctttcattatctttaatgaagacaaaggaatctagtgtaaaaaacaacagcaaacaaaaaggtgaagtctaaatgaagtgcacagccaaagtcatgtataccagaggcttaggaggcgtttgagaggatactcatctttttggaatcctgaccttaggttcggcatgtagaccaagtgatgagaagtgaatacatggaagagtttttaagtgtgacttgaaaaatatgccaaaaaatgagagatacaaatgagctagaggaagatgaggggggatgcgagtacctccaagaagaaaaatcacactctgaatggtgcttgcatttttgggttttttttttttgttataatctattcatggatctccactttgatttaatttttaaatgttttaatctcctttacaaaaagtatacgttaatataccgtcctcaagggggaactggcactgtgaccttagcatttagttttctagaggatgtgatctaatttctttctagctcatcattaaaaaggaaattgtatcaggacccatgggatatatccagaggcaaactttatgaggctttgaaatcttgccttcctgaagatagctgagtaggatggttctaaggaaagcctttgcaatcttgcaagatttgtagaccagcactacaaagatcgcatagatcaaataggaaaaaaaatgtcgatttttattcagtctgatggttctgttcttcattgtgattgtcattaaaaagtggtaaattgctcaatgtaatatttttgtgcgctgtttagaagttgtgtgattttttgccatcgttgataaaaatgcaaagtcaaataaaaggtgtcttggtttgatgtcatagaatgatccaaggagagaaaaaaggtagttactgttttcaccagaaaaggtaatgagtgaaggaaagaatagtagcagaaagcacagtttgtgagtaaagctgtctggaattaagttaccaaaaatacaaagcaaaaggactattattttgggttgaagctccaaaactgacagcatctgataatctgttggtttatttcacttttcattaaatgaacattgatgagagaagatgccacttacccaagctttagagaatccctagtggaagattatatgataaactttcagtcctgacataacactagggcatttctagagtgtcattgctaaaacctcactgaacagatgcagccaaggtctgtgttcagcacttggtctctgttgttacgtaaaataataagcatttaaaatagtttacagatatttttgaccagttccttttagagattctttcagagaagaaaccagatctgacctgtttattgttggcgcttgttgaaaacgagctttctttcccatgatagtgcttcgtttttgaagtgt

SEQ ID NO: 96500 - DNA, 1059 bp, Homo sapiens
ttagtaggtagcagtctccagcaggtgactcagggctgagcacaaagccagatctcctttgtggccataaaatgggtgggggacgggaaacatagtccacaaaggggggaggggtattcccagcagtcatgtggtggcctgaatgttgaaaccattcctcaggattttcctggcagtctcaattttaattaaactcttttatcctctttgtatttcttcaatcgcttttcctaatttttttatttggaaaagatggtctccattgtcatagagcagtattacatctggaattagcagtgagtactctaacatcatacaaatcgtatcctgaaaggagctggtaggcacctggaacagttctctaaagataccaggtctgcttgtactggaagctctccacagggagagagtggtttttcctaatgtgagtgatttctgggaaaggagatctctgaagcctcgttaggtttctgacaatcctaactgttggcagctttgccttcctgggtctgggatcaggttgtctctcgcggactttgaggagtagaggaaactctcatttatatgtccagtatttggagctccactctatgatctagaattttctgactgcctgtttggaaagagtcattcaaatgtttacagcaggtgccgtgctagagttagactttggacacagaaacaggaaaggttctagttgagaaagtgtgaacttcttagaactaatatggaaatactaatgtagccataaatagtgttcaaccatctcgtttctgatgcctttcgaatgttcaaatgggtgaactatttgtgaattattctcttcacctcagagtactttcagcgactgaaaaggcagccacagcttgtcattttcagagacggcctcattctaatataccttcatacttaaaatgacttgactttttaaactctaaacgctttaagcttctgggaaatatctttcagctgtcagcctctgctctaccagggtcctggttccagatgtgggtaggcagctgctgcagctcatgaacagctctgacttaattctctatt

SEQ ID NO: 96501 - DNA, 1065 bp, Homo sapiens
gcaggtatgtgtctgaagaattagtttctgggtgaggcacgttgtgactattctttggctggaaattttgctctcacccagaattaatgatcttgaatacaaagatgggtagatctgaaatttcaaaagctctctagaactttgctgatgtttgccaaacttgagcaactcagagaaccccaagtgtacacttgttccaatctacccccagcaaagcctttcaactatattttctgggtgagcggggtacacattttgcatatatagtgtagttgtttctttacaatatagagtttccctaagtttttccttcagaggtgtggcaggttacttaaaaaggaccttggaatagggttgcgagcttaaaagtttcatatagtaccagagaaatgctgcatctgagaatttccatatgcatgaagcctattccacatgctgaaaaagagtttcatttgacaagccaaacgcagtccctaaatgttattggactttagtgcattcttaggtactagagcacatactctgtgtatatcaatacctaccatgtactgcagttaaagttgaatactttcatacttagtaaaaattgttgagccctcctgcttgtgctgtgtttagttctacagttagcaccttgggagtttttcatgtgcatcttttaaaaacacctatagaagttaattttttttttttttttttgccgtttggcttcacagggtgttgtaagacttttctggagggatataggagttaggggcaggtattgttcctgctttacccacttactttcagctccttcctttggtgtcatttctgcccctctttattgcttctcacttcacagagtcatttctggaattcctcttcctttttttttggcatgcgttgtctcacgcatacctgtgattccaccgtgccctctccagctttgcttgccttacttcctttgtgcagtctcttgggctttatggggaagaaaaggaaggattccaagtgcttaaacacagagtaaacactgtaaagttacacaggaggtgtttttgtgtgtgagtgtttttgtttttt

SEQ ID NO: 96502 - DNA, 1047 bp, Homo sapiens
tatgctattgcctcatgaacactctttcgaatcttgtcatgatccaagtttcttttaagccctgagtgctaaagttagtacttcctattttagtttttagcattactaacacttaaggtggtatcctttatttcttagagaaaaagagaggaaaaatatcttagttacctaatggccttaatatgaggacaaacttctctataaacagaagtctatctaagctgttatatttagattattgtacatcaagtatgaagaatggtcttggtgacaagctctctaatgaaatatttcttaacagggatggaaatggttcagcagtattggagattagtatataattaatccagaaaagcagcttaaaaggggatcactgctctctctctccccctcccctttttttttggtgatttagcatataaatgaacacatctagacaagacataaaaatgattataaaaccagtaaacatggtttagtgctttctgtgtgcatacaatctgctagatgctatgggaggagtacagagctgggtgagagcagcttctgcccttaggtactcacagtttcaccatgtgataagacagacatggtgaaaacatgagtgacaataaaatttaaaatattcaggctttcccaaactaacaaaagaaatcaaatgagaagcccggattaagtgtcaggtgtttaggtgagaggagatgccagtagactgagatttgaacagggtaaagacatccttcttccctgacaaccttctttgaatacccacaggacaaacagaggacatagaaagacttcctcctgtctagtgctgtaatacctgtttataggatggtgagcccggaggttctaaacctggatttttcaaggagcaacaagatccaaagagttcttgaaggccacaagggcagcccaggctccctaactcatgacttaatggtcattgaggcccaccacaattcccttcctttctagaagttgactaagttctaagaagtttttaacgtttcttccacgtggaaactcgcttacatttagtggctc

SEQ ID NO: 96503 - DNA, 1038 bp, Homo sapiens
agaaatgctaaaccagccggtgaccaggtgtccatcaagccccacttctttcaattcatgaaaattatagactttcttttatatactggcacatcctaagacctcctctaagaatcgccttatggtcaacaggggaggagaggctctgtgatgctcaggtagggggaaggaggacatcatagaaagggagggaagagcaactgtatagtgataactaagcagatttttaaaaggatatttgaataacatgattataagcttttgaaaggactactgttccagtaaaatattaagaatcaaccaaaaaagaaagtcatttattttattgagatctgagatccagtgagaactgatatagagggtctgatttttttccttatagaggctcatagaaaaaaaaaaaaactacatttgaatagatgccaaagacccattatttctctctctttctctcttatgttttgttggacattgtcatatctgcatggcatgcttgtgctcgtgaggtcagctggtcttggacaaagtggcagtgatgaagatgggagaacaaaaagatggaaaagttccagatcattgatgatgtcattgagctaataagttaaccatccctagagtcactctgcctcaaaatttcttgctctatgagataataaaaaatccttgttgcttaggctactgtgagttgagatttctcttttttacattaaaaaactccctaatatattacttaatccagatttctttgtctattcagtggaaaggataatatctcttttagtgtaatgcccggcgtatagcaaacatgaaacaaatgagcctaagcatttcagctggagatataattttctgaaggagtaggtaagatgagtggagttgcattccagaaacatttaaagcaagtcagtgctgccttatattagacaaacatttccaagaatgtatggtttaggatgctaatatactctaatgtcctaggttccagagattccagagtcagttaagtagacttaataaataatggtctaaagaaattca

SEQ ID NO: 96504 - DNA, 1051 bp, Homo sapiens
caatgttttgcaaatatttatttccattttgttgtttctattttcattttcctagtactgtcttgtaaacagcagaagttgttgattttaatgaagtataatttaccaatgtcttcttttatggtttgcactttctatgtatcatatgtacgatacatatgtatgtgtcatatgtaagaaatctttgcctaacccaaggtcacaacagttttctcctttgatttctccccaaagctttaggtattacatttagatatataatatattttgagctaaatttatatgattttaaggtaatgcagaaaaagttgagattctgttttggttttgtttctattttgcatatgaatatccaattatccagcagagtttattgaaaaaatacccatttctacatcaagttcccttgacaactttgttgaaaatcaactggctatatatatatgtgggtctatttctaaactctcttctgccccattgatactaactagtcatatgccaatattatactgtcttgatgctgtacttttatattaagtcttagaatcaggtagaatgagttctccaacattattatttgttttcaaaattgttttgataactctaggttttttgcatttccatgaggattatagaatcagcttgtactttttctttctttctttttttttttttgagacagggtctcactctgtcacccaggctggagtgcagtggcacaatcttggcttactgcaacctgagtgatcgtcctacctcagccacctgtgtagctgggactacaggcatgcaccagcatgcctggttaatttattctttgtagagacagggttttgccatgttgcccagggtggtcttgaactcctgagctcaagcaattttctcacctcagcctcccaaagtgctatgattacagacatgagcctctgcacccagcccagcttgtaattttctataaaaaacaagaaagatactcttggaattttgattggcattactttaattcatagatctatttgaacataatttatatcgtaacaacactaaatca

SEQ ID NO: 96505 - DNA, 1017 bp, Homo sapiens
tgagggtagacaaaacacagcagagtaaaaatatgcgggatttggactgcatgggctcaaagctttgctctgctgtctactggctgcgtaaccctgggcaatttacttgacctccctaagcctcagtttcttaatctgtaaaagaaggataataatggtatttccccactgtgcattaatatggaatcatgcatttcaaatgttgagaacagtgtctactgtatcaagttatcagtgttaacccttatttcattataattaataattcccagtttttgtattaaggagttcacctgcataattacacatgtatgttttgtctttcatggagattgttgctaaattaccctgttactgctacttgctggaactctaagcactcttctgttggctccagaaatctctctactattgcaataacgttgatgtctgcattatgtttgtttcttgtggaccaataaaggaatgtcataggcatcacactgaaaaggattcactgactggagcctctaaaaggcctttattggctttcctgtgatgtggtcctattaatttagtgaaagaacggactcatattttataatataatttgcaaccctcatagactgagctattgtacttcctgtggtagggttagactgactcgaagtcttcagctctaaccttgggctgaaatgagaatgaaatctcctgaataggcctgtacagctagaaaattaagcagcaacatcttaaaagtatgcctacttcagttaagaaaaaatagttaaaatatttatagatgaaaaaaatagaggtcacattaacaaaaaaatggaagtcagcatgtagctggcacttctagatcccttgtgtgggactactgagaaaacacaagtgtgaactgagctcccaggggctatcctgctttgcaaaatttaacaaaacataaaagttgtttctagcagtgagctgtatgggagaaactttccatgaaatcatactatcatcagttttatgatagtatgatagatacaa

SEQ ID NO: 96506 - DNA, 1040 bp, Homo sapiens
attgttacccaattagcttgactgaagatggacagtttctcttgaagctgcttaactgcccttggacattgagtgggaatgggtaaataatttcttcaaaacattttctggttctacttacttttagttctgaaattctttttttttatcttttatttttttaatatgctttggttcaatttaccattgaatttcaaatttgaatcccaaatcagacccactgactaccagtgattgacttggctggattttgtcattgagtttatccacaatggctgtttgcactagcatttgtccatgtggttcttttacacataagagtgatgtgcagatggaggtctctccttctccttctctttgtctaaatgctcttcatttttttttttttaacttgtgctaacttctgccttgggtaaaatagtgcagaaaatctttggtgaattatttcatcatagagtttgtgttctgtggtttgtaatatattctgggccacatcaaagaaagagaagccatatggagtgtaacagcttaaatgaaaggcaacagaaattgtcagaagaagttaacccaaaggcagcattgaaagacaggggtcaggtgaaggggcaggagatggaagcacagctgaagtaggcaagggtgggacatgcattaggtcacagaataatattctctggaggagaaagatactctaaagcctttggaaagaaatgcaataaatatttcacaagcttgccaagaaaagcaaaaggtgaaggagttatttattatccagagacctccatatggttgctttcctcttacaccaggaaaggaagaaaacttttagcttacatttatttatttatttatttatggagacaacgtctcgctctgttgcccaggctggagtgcagtggtgcaatcatagctcaatgcagcctcaatctcgtgggctcaggcgattctcccacctcagtctcctgagtagctgtgactacaggcacatgccactgcacctggctgagttttaaatttattgtagagatgaggtctcacag

SEQ ID NO: 96507 - DNA, 1029 bp, Homo sapiens
ctaaacttgttagaaatttctaaaataagagttaatggaatctgatgagaactttcctaggagtaaaatatatcagatttaacggacatagctttgcatagttaatgcataacggattgctaatcattattttttaatttacaatttcataattagctttatatataagattaaagttacagcttgcctgttaggtatttataatatggtccatggaaatatgttttatggaaacataatagcacatttgtgtgtctgccacctgacttaattaatattttttccatttcaagaaacatcaacaataatctcaagtcattatattggttgaagtcaaagctggtattaataactccaagtatgttacttagatttaacattggactattatacccggtgtgggcaggttagaaattagcagcaatgtggttgaaaaattctcttatttcagattgatggggctacaaatgctatgcggaattctgccagtttttccccttaaccacatgactgtaactgctacaattacagtaaagtctacagtaagagccagagttcctccaagtgcggatgttattgtggggggtttcggattgtttgcacatctgaatgtccatcaatagagttctcccaactaataaccagagcagaatgtctgccagctcacaagcaactgttgctaatttggatgttttggatgatgtgaaagttctctaactccaatgaatcataattttcaagtatacattttgtgagttggattatcacaaaaattacatttatctgttgtgagagccctaaaagtgctcaggtgattgtctttcaccctggctaaacataactcctgtggtaaaagatgatcttttagcttattcccagcagctactatagtacctggtataaaggagccaaattcataattaaatgttgactaacaggtaaatttatgtttatttttataatgaaaaattagataacagaataaacctggtgaatgaattctagtaacattttaaaggaattccatct

SEQ ID NO: 96508 - DNA, 1184 bp, Homo sapiens
ttctaaatgaaacaactgaaggccagtagaaggggtattacaaataaaacaaattattgtcccccactttagtttaaatgaaaacaaattattctttccatgctggattataattcctgttatattgctttcatcttttaaaaaatccaggttcattgatttctcaaatatccccattttcgtgaattctttttaacatgtgacttattctggcacaaatgcaaatatgcctaagaaggttaacacacaaacttcttagcagtcatgacatcctggtaaaaatatatttaccaaattgccattttctaaaataggagatgtttagtgttactcatgttctggttaccaggagctgatttattcagatgaaggtagaggaatagagaggatgtggactgtggcaaagcagggaaaaaggagctctgtgctggaaatgatgctgaaaaggcacagacagaggaaggagatcatttgtacaattgtttccttacttctcaggttggcctagagtttgaattttgttacattctacactttaaaaaaaaaaaccacaaatatattccctaagtctccataacattaactatcctctttgggtaattaacccacatgccacttgcatctaagggactgccctgctttgatagctgggaggaatcacaccagctctcagagggctacttgctttattaccacttggtggctaaagctcctaccgtagccatgatgacaacttttttaatttttcccattccaggcttgttcacactctttgaattcaacaagaatcaaattctacaactaataagcaccttcttgtgctaagtaggagagtctcaaatgtctaggtgataatctagacaattttaccaccctcatggaataatatccggggaatatggataagtaaacagacagctacatcaagcagtttaacatactgacttcagaccgtgagaagatcctctctgctctaggacctgagtttcactcccacctctgtcccattgcagttgctgcttgtgggtggcgtggggcttcagatgttccttgcatggcagccttgtggtccaagcagtgcgaccaggtcctttttaactctcagaaaggttcggacaaatgggaactgacaagtggtactaagattccatgactctcaaaaattcaaattgagagaatcctgt

SEQ ID NO: 96509 - DNA, 1035 bp, Homo sapiens
cttctttccttcctgaaggtccaggcttccatgtggaataatttctgttcatcctgaaattcctttagtatttcttgtagtgcaggtctgctagtgacaaactgcctcagattttgttcatctaaaaatgaattacttttgttttcaattttgaaggactttttggataattatagaattttaggttgaattttgttgttgttgttgcagaagtttaagacaccaaatcactttcttctggcttccattttttatgatgacaagacagtaagctttaattcttcttattattattgtttccccaaattaatacagttttcctagtatttgtcctgcatgagattctctgagcttcttgtatatgtgggttaatgtctttcattgactttgaaaaaaattccagtcattatctcttcaaacaattcttctgcctgattttctttcttctttgtctgggacacaaattgcatacatattaggccatttgttagtgtgccacatgtctcaaaagctcttttttcattctttttaaaatttggtggttcaatttatatcatttctattgagctaagagttctctgatactttcttttactaaatttagactactgttaagcctatccaaaaatctttaatttagataatgtattttttacttctagaattttaatttggctctttttaaagtcttcatttctatgctgaaattctccatctttttctctaaattctttaaaatgttatgatttatttaaagatcttgtatgttaattctatatgtgtagttttgcttctattaaatatatatatatatacacatatatatgtgtatatataattttgattgtgggtcaaattctcctatttccttgcacatgtgttttttaaaattgcatggcatatattatgtttaagaggctcatagagactaaactaagttttctttcccccagagagggcctactctttcctctgtcagatagctagagagagatccctttgatccaatctgcagctgagctaggtctgaggttg

SEQ ID NO: 96510 - DNA, 1035 bp, Homo sapiens
agatctcttgaggtcaggagttcaagaccagcctggccaacatggtgaaacctcgtgtctactaaaaatacaaaaattagctgggtgtggtggtgggcacctgtaatcccagctacttgaggggctgaggcaggagaatcgcttgaacctgggaggcagagattgtagcgagctgagatcataccactgcactccagcctgggtgacagagtgagactccatctcaaaaaagaaaaaaagaagggtttaatttttacatttaactcttaaattcatatagagtttatgttggtatatggtgtgaggcaaggatttactcccctacaccccttttaaaaagtatctaaccagctgcaccggcacttttatagaataagatattctctccactgaagtgtgatgtcatctttattatatagagtcttgtgtttttaaagaataacctgctgtttctcttacaggcatcagttttgaatgtcaaggaatccaaagctcctgaaagaacggttgtagttgctggtcttccagttgacctttttagtgatcaattattggccgtattagtgaagagccacttccaagacattaagaatgagggcggagatgttgaagatgtgatatatccgacaagaaccaagggagttgcatatgtaatattcaaagaaaaaaaaggtatttccaagtcaaatttttgtaattttagaaatacttcttcaataaaatttaaaaattacattttattaaaatgatccacggaattggtaaattttaaagtagttttttttttgagacacagtctcactctgttgcccaggttagagtgcggtggcatgatctcagctcactgcaacctctgcctcccaggttcaagtgattctcctgcctcagcctcctgaatagctgggattacaggaggcgcctgccatcacgcccagctaaattttttatttttagtagagacagagtttcaccatgttggccaggttggtctcgaactcctgacctcaagtgatctgcctgcctcagcctcccaaa

SEQ ID NO: 96511 - DNA, 1044 bp, Homo sapiens
aaacaaatgcagtcaatgaatcttctgtttcttcccaatgccttacttacaaaagtaaagttttgctatatactttttgctttctgataagatggccaagtctgttataacacaatactgatgcaaggaaatgcgccatcacgttagtatgtcttggctaaaagctgctcgtttcaaagtccttgaaaggactgtctttctctaggcatttctttatcttaatcgtgggtagaagagatgaacaaccctcattattcataattgacctcagtaaaattatctatgttagccatactttctccaacctatgaaagggagttaaggacaaatattggcaagtcattgaagtactaattcattagatgattcatagaaactagttcttaccaaacaaaatttacatctttatgtttttttcttctaaaaatactggttcagggagaagtttctttgattttaaagataaattaccagtagacattcgaataaagaaatatggtattagtactaatgagggcatagagctgaagtaagatttcctgagtttaaattgattgcatgtttttctttgatattgttggggtgcagaaaatgatctccctgcccggcacggtggctcacgcctgtaatcccagcactttgggaggcgaaggagggcggatcacttgaggtcaggagtctctactaaaaatacaaaaattagctgggcgtgatggcatccacctgtagtctcagctactggggaggctgaggtgggaggatcacttgagcccaggaggcggaggttgcagggagccaagatcacgccattgttctccagcctgggcaacagagcgaggcgctgtctaaaaaaaaaaaaagacttcgagaggccgaggggggagcggatcacgaggtcaggagtttgagaccagcctggtcaacatggtgaaaccccatctctactaaaaatacaaaaattagtcgggcatggtggctgatgcctgtagtcccagctactcaggaggctggggcaggagaatcgcttgaacccgggaggtggag

SEQ ID NO: 96512 - DNA, 1697 bp, Homo sapiens
ccgcttcccgggtttaagcgattctcctgcctcagcttcccaagtggctgggactacaggcgtgcgccaccacacccaactaatttttgtatttttgttttttttaagtagagacggggtttcaccatgtgttggccaggctggtctcgaactcctgacctcagactcggcctcccaaagtgcttggattacaaggtgtgagtcaccgcgcccggccagctcttagtcttaaacccaacagtacgttatctccttttgctaactgatttgttgctaaaacttcaacaagcactggacttggagtttgaacacttagtctgagggcccactatgttcagtctagtgagtctgagcaattaactcacattttgaatttcaagtctctcgccttaggcaaaacaccaccacctgatgctcaccagaggggcgtgacgcggcagctgggcagggaagggatgggaagggatgggaagggaggcgatcgataactccggtgtgccgctgactgttggattggctcgaacttctcccgccaggcctaacctactcccgcgcactcctgggcccgcccagccgccatcttggtctaggagggagcgcgccgcacgcgtgagtaaacagccggagctgggaaagtcgagctctggcagcgtctgggtgctgaggggcagaggcggagagaaccctgtcctgatcttcctaggtgggataaatatcggggtgacagtggtaggccgcggggaaccctcagtctgcccaccctccgccccctcgcggcgagatgcctcgttccccgggcttctcccgccctccgccgatctcctccctctgttgaaagctgcccgggaaagtggtggcgggagcgggcccaggcccgaatgtggcgtgggctcaggtgtctggtgtcgggcgccggaggaggttcgcgctggggtttggtgattcggaggcctggggtgcagacgcggcgtggctgtgaggcccgggcgggcgtgcgggtgtgagggccggactcacactgggccgccgcggggctgtttccatcggtcactggattttctcctcttccggttcgggcctcagggtggccgacatgacggccaggggtcagagccccctcgcgccgctgttggagactttggaagacccttctgcctcccatggagggcagactgacgcttacctgactctgaccaggtgaggtccgccacggggcgtagcggagagtggggcgctctatagtggggagaaagaaggtggttgggaggggcgcgtagaatgaatgtgagttctagaagtctagcaaatgtgaggacgcccgagtcgcggacgccttggggggcgggggagatgtattctaggtgacgttcccgggtactgctgctgctgcgcttgaggtgtgtgtttggaacgagggagcatgcacgtgtgttttgcaagcgagggatttttaaaagtttcggttggaagtagttgttggaggaggggtcttcagtgtaaacctccgatgtgttgggaaaatgtggctacccagagtttttttaacagagcaatacactgatttttattaattgcaaaatgcttcaaagtaattttcatagaaatgtactaaagttttgtaaaaccctttggaaaggcttagcaaatcgttagtaactaggaatagggatccctgttctgtctttttggagtcaggt

SEQ ID NO: 96513 - DNA, 3109 bp, Homo sapiens
attgcactccagcctgggcaacaagagcgaaactctgtctcaaaaaaaaaaaaaatttctagattgacatggattgaaattctcttatgtataaggtttaaaaaattgttttattttactattaattgagataataatagatactttataaacgttacattctaaccccttccttctcccagtcttagaggaagagatgtcactccactctaaagctaggatgttagcttttggatttgagtctcttgtttactcagtggaagggccttgctcccttttccctgtcatgtctttagcatctttcatctgttgacctctttgctttcataggtgtagagatatcctttatcttcattcaggtgatctcgatccagtttcctctcctttctttaccaagctgtacacatggcctttggattttattccttgtttatttttatttttattttttatgcgtattctcaaggatttgttggagtaacatgatgaatatgcttgttctgtaatcaacttctgctttctaaaaattgatttacagttgtgcttgtttgtaataaatgtgattttgtttttgtagactcacatttccagtcaaaactcggagctgagtagtgctgctctacaagccctggggttttgcttatataatcccaaaattacctcagaattatcaggtagataaatttcttatgacttaatatttttagagtataaagtataagttttaagtataagtagtttgatgctgttaaaagtactgttatgtctggattagtttcagaacctgtagtttaaggtttgcttttaagaaagaaagaatggctgggtgtggtggctcacgcctgtaatcctagcactttgggaggccgaggcgggtggatcatgaggtcaggagatcgagaccatcctggctaacatggtgaaaccccgtctgtactaaaaatacaaaaaattagccgggcaccgtggcgggcgcctgtagttccagctactcgggaggctgaggcaggagaatgacgtgaacccgggaggcggagtttgcagtgagtcgagatcgtgccattgtactctaacctgggtgataagtgagaccccatctcaaaaaaaaaaaagaatgtttagattatcattacctacacatagctctaacttcgatactacaaaatttgctcttaaaaataatggtatttgacaaaagattagccgggcgtggtggcaggtgcctgtagtcccatctgctggggaggctgaggcaggagaatggcgtgaacctggcaggcagagcttgccactgcactccagactgggactctgtctcaaaaaaaaaaaaaaaaaaaaaaggatattgctgggtgcagtgtctcatgcctgtaatcccagcactttgggaggccgaggcgggtggatcacctaaggtcgggagttcgagaccagcctggccaacctggagaaaccccgtctctactaaaaatacaaaaaaaattagctgggtgtggtggcgcattcctgtaatcccagctactcgggaggctgaggcaggagaatcgcttgaacctgggagatggaggttgcagtgagccaaggtgttgccattgcactccagcctgggcaagagtgaaactccgtctcaaaaaaaatcaaatgaaaagggtatttaaacatgattgctgtaaaaagggaaacttttattcaggcatatgcactaaggaatatgctgaattgaaaagttctttgacatgataaatgtgggataatttggaactaaaagtggtaatgaaagcacagaacctaatgctttccaagttttcaagtagtctgcactgttgctccatagttagatgatttccattgtaaaggaaacccttatctttagagaagggaagttaggaataaagatgtcaaagttgttaccatctgtttttgagggaaaagctgctgcctgctcttttttatacatggaagtgttagcaacctaaagcaggagttgttcattttggagcagagatgcaggattgaaaacatcttaccaaaaattgtcttgtatgttcaaacctacagtgatatctagttatttcagttgcacaagatatctgatttggtgtctgttgttttattttctctcagtatatcctcccctctaatctgaattttgtgtttttgggagaagtttggtatcagcattggttctctgatctgttctctggatatacatttaattttatgattgatgagtatattgttttctctagttttatatttgagactttaaagagtatcacctattctatacaaaattaaaactgcttgtttttcagaggcaaatgctctagaattgctttcaaaattgaatgataccattaagaattcagacaaaaatgtacgtactagagcactttgggtgatatctaagcagacatttccctctgaagtggttggcaaaatggtgagtatagtttttgggtatgccatcttaactatatgccaattaaaagaaaaaactataatgccaataaaaacagttcaggcttatttcatttgtatttatttggttcgttttttaggtatccagtataattgattcattagaaatactgtttaacaaaggagagacgcattctgctgttgttgattttgaagcattaaatgttatcgtaaggtatgcatttggatgttgtgcaaattgaagaatagttttcataaatttagctgaaggagagggtttttgggatttaaatgagagacagacattaaaaggggggaatgtcatttacaccaaacgactcaaggacaaaaagtaatagaaaaaagatggaagtagatatgtgtgggttactaggttttttgtttatttttactgggaccatgttcaaggtgaagtcttggttatgttcctgctagtaacatacacagttcaggtttgaaaaatatcttaaagtttgtgtaaggatttaaaaaataatgtaaactcataagtgggcttgggttgtttaggaaggcagtcagtgtttagcagggaatagagtaccttcttcatttttgttgtaacaggcatgccaacgcataaactcttttaagtgtaaactctttgatgacatttctgtcttccctg

SEQ ID NO: 96514 - DNA, 1050 bp, Homo sapiens
accattgtgaatgtgctgcatctttgaccaaaacgttgctctgtggtgaatgacaatactgtccttttcatattggacttgagcattattgtgaggtcctggaaccaatcccccagggatactgagggatgactgaaatgtttcaatctaaagacaagattggttctttaaaaaaaatttacaaaagcaataatgtgcaaattcgtaaaaataagatctatttcttgtgtgtatatgcatatttgtatatattctaaaacaaatgggccgtactgtgtatatttctgtttcacctattttactgcttgtttagacttaaaacatgaggtcacgctaattattcattgatttctctattataggctaattgaacaagccccaattcaaatgggagaagaggcagtgaggtgggcaaaactggtcatacctttagtggttcattcagcacaaaaggtacatttgcggggagcaactgctctggagatgggaatgccattattgcttcagaaacagcaagaaatagcatctattacggagcagcttatgactactgtgagtgttcttttatgtaagaattttctggatactgcatcggaaggttctgcactaagcttaaaattcagtctggtggccaggtacggtggctctcacctgtagtcccaaagcgggaggctgaggtgggaggattgcttgaggccaggagttccagacccatctgggcaacatagtgaagacccatctctacaaaatatcttaaaaattagctgggcgtggtggcatgcgcctgtagtctcagatgcttgggagactaaggcgggagggttgcttgaccagaaatttgaggctgcagtgagctatgatctcaccactgcattctagcctgggtgacagaatgagaccctgtctcaaaaaaaaaaaaaaaaaaaaatctgtctgggcatattggtatagttgcactatgatataggattttagctttgaatcaaaaccttaagagttgcataagttagcaaaggcacattgctcattacatagtagtaaggaagggag

SEQ ID NO: 96515 - DNA, 1678 bp, Homo sapiens
acatatataatttttttttttttttcgagacagtttcgcaattgttgcccaggctggagtgcagtggcgcagtctcagctcactgcagcttccacctcctgggttcaagcgattctcctgcctcagcaggagtagctgggattacaggcacctgcaaccatgcccgaccgatatttgtatttttagtagagatggggtttcaccatattggccaggctggtctcgaactcctgaccttgtgatccgcccgcctcggcctcccaaagtgctgagattgcaggcatgagccactgcgcctgaccataaaattctttctttaacccatttatcaagcttgcaacaaagcatatatgaaattctttatataaatttgagctaaaaattatttcacgtgtctgttgattatgaagctattaatgtattttttcattattgtgaaaaaatacagtgtcatttaaactagttaatgatatgcatgctgacatttttagggtaaagtatattggtagaaaaaaaaagttggattgatggatggtaggatggccagataggtgataagaccaacatagtaaagtgttaatggtagaatctgagtgtttgtattagagcatttactgtaaaaactcactcggatttgctatatgcttcagttttccttttggagtcttttgggaaaatttttttttttttttgagacagtcttgctctgtcgcccaggctggaggacagtggcacgatttctgctctctgcaacctccacctcccaggttcaagcaattctcatgcctcagcctcccgagtagcaggaattatgggcgtctgccaccatgcccagctaatttttgtgtttttagtagagacagggtttcaccatattggccaggccagtcttgaactcctgacttcaagagtgaggccgaggcaggtgattctcctgcctcagcctcccaaagtgctgggattacaggcttgacccaccgcacctggccttgggtggggtaatatttttattatggagaaaactatttggttgaatcagtttttgaaaattattcctagactttggtattggatttttttttctaagagtctgtttggtaaattaattgcttttgtttgcagaaattaatctcagaacttcagaagctatttatgagtaaaaatgagacttacgtgttaaaattatggcctttgtttgtcaaactacttggaagggtaagtgcccagttaatgaacagtcaacagtttttacatgctggactctttattttcttaccttttctttgtacagttgatgctcattatttcctttgtacagctgatgctcattatttcatgcctactcactaaaatttatttgtaaatctgaaaccagtacttgcattgcttttgctttcatttgtagacacccaaagtggcaaagaattggagtcacacaacgtgcatgtttccagctgaggtcaagcaaggttacgctctgcctttttgttttagttctcataccttaaacaggtgtcctttttataatccatgtaatgccacatttttcacttttctgtgcttttcctggtggtttcactgtttaaatttggaacctaaagcttgggtccaggtgctttctagtttgtgttcctaagcaaaggaaggctgtgatatacccaatggtgaaaataaactt

SEQ ID NO: 96516 - DNA, 1187 bp, Homo sapiens
tgagccaaaatggcaccactgcactgtagcctgggcgacagagcgagattccctctcaaaaaaaagaaaagttattcagttttcttgatttttatctcacttttactattttttattagcagataatactgtttttaaaaaatatttcttttacagccatgaaataagatgtttccttaattttccattcagtttgtttgaaaggttatttttattattttcagggttcaatgccttttttctctaatataattttttaatgtatattttgtttggtattgatttgataaagtttgggatttatctgctctcctaattttctgttttagaaatgttctgtgttgtacattgtctgcttcttcaaactttatatattttgtgatcttgagtttagaatgtgtgtttaaagtttattttcttatattcctaagacttttaacatatctaacatttaacacatctctttatgttttgtgaataatttgtcttttgtctccccattagattatgaagtcctaagagcatctgttaagtgaatgaataaaggaatgatagcaattattctgtttcatgcagataaataacttcttaatgattttttcccctttttagaccttgcatcgaagtgggagtttcatcaattctctcttgcaactagaagaacttggatttcgtagtggagcacccatgattaaaaagatagcttttattgcttggaagagtttaatagataattttgctttaaatccaggtaagtaatattttaacaattttgattttctgtgaatttgttttgcttaaagcaagataaatgaagtttttctggttttttggattttaagttgaagttaagtaactactgaattattttcattttaagggaacaggaataaatttgtactgaaaatagaattcacatactaggcattggaaatcacaaatatgaaatctgtttcacagtatttcaaaaactgaacaaagtgaaaaataatgatttgtggcttccttttttatttatttatttattttttgagacagggtcgctcttgcccaggctggagtgcagtgatgggatcttggttcactgcgacccccgcctcccaggttcaagagattctcctgcctcagcctcccgagtagctgggattacaggtgcccaccactacacccggctaatttgtgcattt

SEQ ID NO: 96517 - DNA, 1902 bp, Homo sapiens
accccaaaaaggaagtgtcttggactggagaacttgttcatacagtgatagcctttattttcttatagaactgttaattgaaatagctaaatggcagagtagttgtaacagacattgttgagtgccattccaccaaatacatggcctgattgatgtttcagaatccttttcaagttatttatttatttatttattcaggacggagtctcactctgtcacccagcctggagtgcagtggtgtgatctcagctcactgcaacctctgcctcctgggtccaagcgagtctcctgccttaggctcctgagtagctggtattacaggagccaccgccatgcctagctaacctttttgtagttttagtagaggtaggatttcaccatgttggtcaggctggtttcaaactcctgacctcaagtgaccaacctgcctcatcctcccaaagtgccaggattataggcgtgaaccaccacgcccagcccttttaaggtctttttgacaagttattttagcacagactgtgtcttaattttacatatccccagtcttactcatttggcataaatgttttttctgaagattggatttaatttctatgctgaattttaacaatatgattattgttaagatagggcagtcctgaatctaaatgaatctatttagatttcaaaaatgtattcagtcagtggccccagtagtaatgatttttgatggaatatattaataattgatttttaaaatgatagccttttttgacataatgtaaacatatgcttccgtttctttgtcaaatggggataatgagaatgctaaagcagctaggacagtatttgtcaaagttttggcattttgtgctggataatttgtttttcaggactgtcctggtgtggtgttgaagtttagtagcgtccgtagtctctactcactaagatgtcaatagcatcccctcatttgtaaccaacctgaagtattccctggtgggaaattgccccggcacacaatatctaataaatattacttatttgttttaaaatatatttttgatttattgagtgtttttggttcagctgtactgtagtttatcaaaatgcaagttttgggtagagcaaggacagcctggggatttatttttttaaaaaaattttaaaatacgttctcttgctgtgataaaagactgttgcatagctagtgttagagttaatctttagcttggacgtctctttaactgtgtgcttattttcttttaagatatactatgtagtgcaaaaagactcaagttgttaatgcagcctttgagttccatccatgtgagaacagaaactctagcattaacaaaactagaagtctggtggtatttactgatgagacttggacctcatcttcctgctaattttgaacaggtaacattacaagtgttgactatagcactttatgtttttgttaatgtgttcttaaattcttaccaatgtaatcctgtggtgttatttttgctatttattagcagactagaacatataaaaggtctttcactttactggcagagaacttaaattcatttcccacaagggatattgttcagttgcttgaaatggagcccctttacctgaaatgtttttatttatttattattaatttatttattttgagatggagtcttgttctgtttcccaggatggagtgcagtggcacgatctcggctcactgcaacctccacctcctgggttcaagtgattctcctgtgtcagtctcccgagtagctgggactgcaggcgcacgaccacacctggctaattttttgtattttttagtgtagatagggttttaccatggtggccaggctggtctcgcactcctggcctcaaatgattcgcccatgccagcctcccaaaatgctgggattacag

SEQ ID NO: 96518 - DNA, 1026 bp, Homo sapiens
accattataagggtccaataggctaattctttgcatttgtccaatacattaattggaataatttatttggtaactacatgtgactggtactaggatgatgttagaaatgagctttgtctgagttcatgttttccagagttttaaaaagttaaaattagtctaccagtaatgtgtacagttcagatgttgatgtatataaacaaatttaggtaatacatatttagggcaaatacagttgtaatgttcatattttttccaaattccactttttagcctgtttgtgcatggaaacgatctgtaaaatggaatatattaaggctccatttaatgaaatttatattatgtgaggcttttaaaaactgtgacagttgtatagtttatagatcgatgttttcttttaccccataggtttgtgtgcctctgattcaaagtacaataagcattgattctaatgcctcacctcagggcaattcgtgtcatgtagctacatctccaggtttaaatcctatgactcctgtacacaaaggtaagaggtagatattcttgttttttgcttttttaatcaggctttgttgacctagaagcatagttttgaagtaggaaaaaaaaaggctttgagaggttttgctcagtgtttttcgtttgaaatgaagcacttcataatttttaggttcattaccaaaaaatccattatcatgtttttctgttttttgttttttttttttaatattactgattactgttgtaagcgcattgttgtggttagaagagacggatgttttttcagtacattatgtgaggtgccttgcaaaaaaagcctcagagcagctaacatgaagctgttgattttagaaccagaatcttagcgctattaaaaacaacacatcggccaggtgaggtggctcacgcctgtaatcctagcactttgggaggccgagcccagcagatcacttgaggtcaggcatttgagaccagcctggccaacacggtgaaacccagtctctactgaaaataaaaaaattagcc

SEQ ID NO: 96519 - DNA, 1440 bp, Homo sapiens
gccaggagttggataccacctgtgctacatagtgagaccctgtctctacaaaaaatttaaaaattaactgagcacagtggtatccatccatctatagttacagctacttggaatgctgatgggagaagtgcttgagcccaggagtttgaggttgtagtgaactatgattgtaccactgcactgcagcctgggcagtacaatgagactctgtctcaaaaaaaaaaaaaaaaaaaatctcagcagttataaagtgtcttctttatgtatgtcattgaaagacatatgatatacatgtgtgtcatatgtattattttgtttgccatctgagtcttcaaaatttgttacagaatacctgcatattaatatttcaaggtatggattaatgcctgagacatttaaactctgtttttaaaagtttcattgaaatgaaatgtatgcatttgggtagctaatataaaatgagcttgtatgacttaactctttttttttttttcttaaaggtgcttcctccccgtacggagccccgggaactccccgaatgaacctgagttcgaatttaggtggaatggccacaatcccatccattcaacttttgggacttgaaatgttgcttcatttcttgttgggtccagaagccttgagttttgctaagcaaaataaacttgtgctgagcttaggtatttaaaggttttaagaataattttaattactaaaacagtctaggacttaatgcattggggtgaggagaggtgttattttgtcgcagccaaaatattttacagttgtgtatgaaatatgaatcttttttttatagaaaacacacctacttaatagacattttaaagttttatagtgagaaatgtatttcataaatctgttgttttacataattatcttttattcttccctttcagagccattggaacatccgttaatcagcagcccttcctttttttccaaacatgcaaatacacttatcactgctgttcatgatagctttgttgcagttggaaaagatgcccccggtaagagaatttgatttattatttgctcaaatgtgtgtttaaaaagaagaaaaaataggccagtcacagtacctcacacctgtaatcccagcactttgggaggccgaggtgagtggatcacttgagctcaggagttcgagaccagcctgggcaacatgacaaaaccctgtctctacaaagcatacaaaaactaggtgggcatgttggcagatacctgtagtcccagctactcgggaggcggaggcatgagaattgcttgagcccaggaggtggaagttgcagtgagccaagattgtgccactgcactgcagcctgggtgatagagcaagactctattaaaaaataaaaaatatgaagataaaataacaaatatttatatagtgccacctactggccagattgtgcattgagaact

SEQ ID NO: 96520 - DNA, 4123 bp, Homo sapiens
ggttctgaagttttgactctcttattaaagtctttggaaagcatagtaaagtctgaagtatttcctgtatcaaaaacgctggtaagtataatacccgtatgttggactttaaaaaccattttctgaagttaaattttatatagaagatatttgcacaaatctagtttgggaagacttttttatatcaagcattcatcagcagtttagtcctattgcaataagtgccattctattaactgtagagtcatttgaaacctttttaatagtgactataacaacagccacaaaagtcttcaacgtggtaagaaaaaagtatccgccatacagagaaaaactagggtaaaggacatgaaacttgaactgaagaaactcagatgtcctttaattttatgacaagattgctgaaaactactaatagttggtactttgttttcaattaactgtttttaaccaagataatgactttggtattaaaaccccttttttttttaaacccgtgtagtacaggaagaaaagtgaattggatatgattttgaggatatgggcatctcaaaataagctccagtggaacaaacaatacccttaaattctgattttgtttcctttatgtattttgatagttacttgttctgtagcagtatagcatagtggttaatagcaagggctctggagcatactaggttgaataccagcctaactattcattagctgagtaaatttgtgcagtttatctattcccttggctttgcctaaccccatatgtaaagagggaatgtagcagtagttaaagactaagtgaattgatacatggaaagtactatgggccaggaacaaactaatactgtctattattattactaatctgtttcaggtgacagtgtgtgaaaatgtattttcactgacataactcttctatgacatttaagttatgtagtgcatgttcataccagtatattaccactgggcatggtggctcacatctgtaatcccagcactttgggagggcaaggtgggcaaattgcaaaaattagccaggcatgctgacatgcctctagtcccagcttttatggaagcagaggtgggagaatcacttgagcccatgaggttgaggctgcagtgagccaagatcgtgccactgcaatccagcctggacaacaatgagaccctgtctcaaaaaagaaaaaaaagacagtatggtagtatttttggagagcaatttggtaggctcagtcagtttgatttagcaatcttagacccaactattagcagtcctttgaatatttgctttgggtaccagtataattaattgcagaatttctattagtagtataaaaaaacatagaaatagccccaaggtctcttaatagaaaaatggttgaataaataatggacattcatatagcagtatttttatatattgatgcaaaaattccgtaacaaggtaaaatgaaggttagttgcagagtttaatatcattagtgatttacagtgtaatggctttaatggtttaaaggaatgtgtgtataactggctgcccaagaagttgtgtgtttttctgtgtacttacatatacagaaatttagaaggtctaggaaaatagactctgaactgaaaatattatcgttggagattaaagactttacctgctttttatatttctgtgtttgaacttctaaaacggatgcagatatattcatgttagtgaatgaatgtatttgatcttttttaactaatgagattatatttacgttaatgaatgaacattacttgtaattgttagagatatagttaacactcagatttttattagataatatttttacggctaatttactgtaaaaccttttatctctcataggtcctcatggaaattacaattaaaggacttcctcagaaagtattaggttcaccagcatatcaggttgctaatatggatattcttaatgcaagtatcttaaatgtaatatgatgaagattggccaaaaacatttatacttcccttttttattttattttattttattttattttattttatttatttttgagacggagttttgctcttgttgcccaggctggagagcagtggcacgatctcggctcactgcaacctccgcctcccaggttcaagctattctcctgcctcaacctcccgagtagctgggattacaggcatgtgccaccacacccggctaattttgtatttttatagagacggggtttctccatgttggtcaggctggtcttgaactcctaacctcgggtgatccctccgccttgctcttccaaatcctgggattacaggtgtgagccactgtgcccagcatatttcccttttttttaaaaaaaaaaaaaaaaagaaagatgaccttatgtaaaattctgagagtattggatttgaagtatattgaccaaattaaaggaaaaactgatagttaatataaagaattaaatatgctgctatgtgaatgaaaaaactattttcctggattaaataaatggctccaaaaggaaagtttcctagttgtttatatacgataatactgttggttactgccataaatattggaagctaatgtaaaatgcacttagtatctctaggatataggcattgggattccagtaagttttaaatctatgttctttttatatctggaatctcataattccttgattttctgtgtagaggaaacagctatgattagactataaagagcttgattttttttttttttttttttttttgagacagagtcaggctgttgcgcagtctggagtgcagtggcgtgatctcggctcactgcaacctaattctcccggtctcatgccattctcctgcctcagtctcccgagtagctgggactacaggcgcgtgccaccctgcccggctagtttttttgtatttttatttagtagagatggggtttcactgtgttagccaggatggtctcgatctcctgacctcgtgatccacccgcctcggcctcccaaagtgctggcattacaggagtgagccactgcgcccggccaagagcttgatttttgtgtgcagtatatggaaataattttactaacatggttgtcataccctaagtaatgccaaaagttaaatttgtcatgctaaaacaattttatttcttaaataaccaattataaaaaacaaatgttctattctttgtaactgagaagattgacttcattttctccttcagggaactccagctttgttcttaattcaattaattttcaacaatttcttggaatgtggtgtatcagatgaaaggtaagtttgtactttaacttgaaactttgtcttggaaaggttatgtaatgaatgagattatttatgtactatttcataagtttaagtttttttaaaaaaaattcgttaactttttgtcagttattttagaattttgttaacattaaattaatatattcctgccaaaaagttgatgcattttttataattttttgttcaggttctttctcagtttggaatcacttgtaggctgtgttctttctggtccaacttcaccactagctttcagtgactcagttttaaatgttattaatcaaaatgcaaagcagttggaaaataaggagcatctctggaaaatgtggagtgttatagtcaccccattaactgaattgattaatcaggtatgaaataaatctgctacgtattttggataatagaccttttttttttgttagtgcagttggggaaatgaatagaagtttgaatttgaatagaagatggtaaatattttttctggtggaattggtaaacgttgtacttttgattgattttattgcatttctccctcactggtaaagaaactataacttaatggggactaatcagcttcattttcttcagtagtgattataaacctagaaggctcacatagatgtaaattcttgtatcttggattctttcagtagttttattaacagggaataacagcggttatcttgactaggctatatattcccatagttaagccacgttggtgattacctcaaagccatatagcatttccttaagtcaggaatctattgagagttgaataatctgtgtatttaaatacttaaatcctcaatgtttacctatttaaca

SEQ ID NO: 96521 - DNA, 1135 bp, Homo sapiens
tagaatgatccagaggccctttttattgtatgagtttttgctggaatgctgtgtatgtatagtagaagactttggagttggccctgggattcatttttagaacttaaacatagtgcataatttccccagattgcaattaacaaattacagccaactggtgacttaaaactacagggatttattctctcaccgttctggagaccagctatccaaaatcaaggagttggtaggattggtttctcctggagctctgagacagaatctgttcatgcctctcagcttctggtggttgctggcaatccttgaccttccttgggttgtagctgcatcacttgactatgcctccatcttcacatggtattgttgtctgtgcctatccaaattttcctcttacagaaaagactgttcattggattggggctgaccctaatccagtaggacctcatctgaacatatgcaaagactttatttccaaataagactacatgcgtaggttcgaggggttaagagttaaacttattttgaatctcatcattggggaacacagttttgcccactacttataaataagttatgttactacttaggattagaataagatggtaatttgtctaacttcattatttttcttgttttagaccaatgaagtaaatcaaggtgatgccttagaacataattttagtgccatctatggtgcattgactttaccagtaaaccacattttttcagaacagagatttccagtggtaaggcattgtcaagtattgatttccgagggatttgtatttttctgaaaatattatttcatcctttataatcagcttccacaatgatttgtttttctttttctttttctcttttttttttgagacagtctcacattgtcgtccaggcttggagtacagtggtgcaatctcagcttactgcaacctctgccttctgggttcaagcagttctcctgtctctgcctcccaagtagctgggattacaggaccatgccactgcgcccagctaatttttgtatttttagtagaaatggagtttcaccatattggtcagtttcacctgacctcaagtgatccacctgccttggcctcccaaagtgctgggattacaggcgtgagccactgtgccc

SEQ ID NO: 96522 - DNA, 1117 bp, Homo sapiens
tctttgataatttttggtatcatggccttatttcctctcttcagttagacctctgggatgtgggggaaaggttattaccctgtgttagtctcttttttattttgagacagtttcactcttgttgcccaggctggagtgcagtggggcaatcttggctcactgcaacctctacctcctgggttcaagcaattctcctacctcagcctcccgagtagctgggattacaggcatccgccacttcgtccggctgattttttgtatttttagtagagatggggtttcgccatgttgacctcgaactcctgacctcaggtgatccaccaacctcggcctcccagagtgctggggttacaggcgtgagccactgcacccggccgttagtgtcttttttgacacactaaatgttgcagtgtttttaaaaaatgttaaagatgtattgattctataaactttgatagataggtatatattaacaaaacttctttttttgttgttattggtaggccaccatgaagactttgcttagaacttggtcagaattatatagagcatttgctcgttgtgctgctttggtggcaacagcagaagagaacttgtgctgtgaggaactttcttccaagataatgtccagtttggaagatgaaggcttttctgtgagtttgtcctgatgctacctttttttgtttgtttttaaaggattcttttcaagtaaatggagataatatttgtgaactgtcacctattactgcctctatttatatgtgataaagttgatactgcaaacaagtatgctttgtgtaacagttttgtgtctttgggctctaagattcagttttgggatcattaatagtgaagatcttttactatactgtgttatctccttgtgcttgtgtcattctagattaacacttcaagggccttgctctcctggacctcactttctcatacgtatctgttagatctttaaattcaatccctttgaaagtttgtagtcttagaaaatataagtctcttttctctttcttttttttttttttttgagacggagtctcgctctgtcgcccaggctggagtgcagtggcgcgatctcggctcactgcaagctccgcctcccggg

SEQ ID NO: 96523 - DNA, 2005 bp, Homo sapiens
ctggagtaccacagaaataatgctgtagttctttttcaattcattattttcccattactggtgatgttaacacttcctgtttgtttgaggatggcatctgccaggttttccactgtaaggttaattactaaatacttactgtggcacaattattgcttgtttctctagatacactttcatttaccatctaatatcacatggattatgctattcattccttttctgtatttttctctactgtctctaatagtgagaaacctggttttcattaccctcaatgtatttacaacttgatcattcacttgtatgtaaccagtctcctgacataatggctgtcacctcacctcagcattctgtcagggaatttctggatatagtttttcagtgtacataaatgtctgaaaaattgattccaaggagaaagatcaacttccttttagtagcaacacttgtttttcatgttaccatatgagattaattttaattaagcattcgttttctgttaaatttgagatctcattccttaaaagaatggattgattgagagaaacaagtaattttggaatgggtaaattttttgggcaagggctatgtgggtttattcttctaggtagatgtttacagagggattatctaagggtacaaaaaatcagacagtacttttaggacaaatctttttctttatatctaggaaatagtagacttactgcattctttctcagctttgtatctctgacttgttcaatgttatttgtagggatcaatgtactatagatgagcaaaaaaatggtccgtcattcttagtggaaattttttgtttttaaaactaactttcaaaatttaaatttggaacctatcttatgtaatttggtactttcttgcatattagttgttgaaattttatgaaatgtaaaattaaagtttgagatgcattttataattcctaagaaaaaatgaacttgtttttctggaattcatattcatgatccgccaagtagttttcgtctcccattctcatttgtaaagataatgttctagtgatacttatccattaatggtacattatgttatgatttgtttggggtgtcagtcagcaaacggacatgtatttgatgtatctaacatttaaatgtgagctataaattgtaaaagtggacagtgactcctattttcaatttatttgagtttttaattaattcagtttttgtttttagcaccacagagaccttcagattggtccaaaaagaagaatgagcccctagggaaattgacttctttatttaaacttattgtgaaagtgatctattctttccacacactgagcttcaaggaagcacattctgataccctcttcactattggcaactcaatcaccggcattatttccagtgtacttgggcatatttctttgccttctatgatccgaaaaatatttgcaactttaacaagacctctggcattattttatgaaaactcaaagtaagtattttggactaagtagctttgaattaaatgtatacaatttaaatataggtagcaacttttattttttaatcagctgtgttgtagatggtagtcttgacaattttgtggagaggataataaactacacttttgttgaaaagatagttaaaatagtatagaaatatgagagagaaattggaagtctattttgcctgttacttccctttccctttgcttttcaatgcttaccttttcagaattgtttatgcaaacaagcatacctattaaatgcatgatagataggaaagcttacttggcatgctgttttgcaattaattatatggtatgcacttaatacagttggctgtttgtatccatgggttctgcattcatggattcaaccaaccctggatcgaaactatttagaaaaattaataaaatgaatgcaaataaatacaatatgacaattatttacattgtattagatattataaggaatctagagatgatttaaaacatatgggaggatgtgtgtaggtta

SEQ ID NO: 96524 - DNA, 1057 bp, Homo sapiens
aagcagtgctttaaaacctgaaagaaaaaaaaagcctcagtaacaaactcgtacaagcattttgaaaggattcatgaatattctttatagcaagcttgtgtggttcattcagaagacagtttatctttcataaattaacaaagttttaggaacagattttataaagtacgatacaacctccaaatccatgaacttttctttgcaaatctttaagtctatatttcatcaaaagtaatgcctaaaagaaatgtacagaaacaagcagttaatatgattattactttgaggtttattgtagatattttctgtgattcatttttcaaagatgggatggttttatgcttaatatttagtatttgagttttttacttgttaagtctttgggcacctttttatatcatcaatttatatttattatgtctttattacctttttcttaggattagcttgatagatagtacagtgttaacttgcagaaatataaatggtattctattttatccttcctaggcttgatgaagttcctaaagtatatagttgtctgaacaacaaggtaaaaatagacaattctccataaaccatactttcatgatgagaaaatgatagagtttagataattttcttaaacataattctgctgatttttaaaggggttattccttctttctttctttttttcctggagacagcattttgctcttgtcacccaagctggagtgcagtggcaggatctcggctcactgcaacctccacctcctgggatcaagtgattctcccacctcagcttcctgagtagctgggagtacaggcacatgctaccacacccagctgattttttgtgtatttagtagagacagggtttcaccatgttgggcaggcttgtctcgaactcctgacctcaagtgattcgcctgcctcggcttcccgaagtgctaagattacaggtgtgagccaacacgcttgtcctgttcttcatttttaatggacatttaataacaccatatgaacacatttatagggtttttttttttttaaggatttaatactttaaattcat

SEQ ID NO: 96525 - DNA, 2268 bp, Homo sapiens
tacaggcatacaccaccactcctggctaatttttgtattttttgtagaggcggggttttgccatgttgctcaggctcgtctcaaattcctgagctcaagcagtctgcccgctttggcttcccaaagtgctgggattacaggcgtgaaccactgagcccagcctagttaatcaactcttagctcatccctttgtatatgatggcgattggacccaaagttttctaggtgaacgtatgtaggtaactatttatcttgttataattattacaaaaacataatttcttttgttaatagaaaataagttcaaaattgaactgtaatattaataaccaaagcaaattcacctgataatttgtcgagttataaagagggatatatatttaaggcaacagtgggggttagtttaaaattgtcttaattttaaaaattgaaatagcaacatatattctgtgagttaatatttagtatatgttttgcttttattttttcgtttttcctagttagaaaagctactgggagaaattattgcttgtctgcaattcagctacaccggaacttatgatagtgaacttcttgaacaactctccccactattatgcataatatttctgcacaagaataaacagattcgaaaacagagtgctcagttctggaatgccacttttgccaaagtgatgatgttggtttatcctgaagagttaaagtatgctaacaacaaaacttatatacaactaactattctgttgtgatcatataaattgatactttgattcaaataatcttttcttatggggtattgttacagaggattccttagttgaaatattaccatttggaatacatgataattattaaacattatttcaccttttcattggtgcttagaataatcttgatttcaggagccaagaaaagcagtttaaattatccttaataaaagagacaaggaggacaggaaatagatgattttttttttttttttttttttttgagatagagtctcactctgtcgcccaggctggagtgcagtggtgcgatctgggctcactgcaagctctgcctcccgggttcaagcgattctcctgcctcagcctcctgagtagctgggactgaaggtgcgtgccaccatgcctggctaattttttgtatttttagtagagacaaggtttcactgtgttagccaggatcgtctcaatctcctgacctcgttatctgcgtgcctcagcctcccaaagtgctgggattacaggtgtgagccactgtgccctgcctggataattattaaagctagacatgaatactttatataatattctacttcttattggaattttccatgataaaaatttggaattcagaaaagtacagggaaaaatataaaaattgcctaatttttctcagttttatatacacatagtaaggaacagtctttatttaaaaataaagatgtattttgctgctctaaaaattaaagtgctgttgttaacagatcatcagtgttcaccagtactacttgacttaaggtatatattttatgtacttttttaaagaccagtactaacacaagccaaacaaaaatttctgctcctgttgcctggtttggaaactgttgaaatgatggaggaatccagtggaccatattctgatggagtaagttggggggttttattgttcatttgtttttggacatttaagttatttgttgaaagttataaataagtagaacctgaacagaaaagagttttgtaacataggctttttccacattgtcagtggtgtggcctgaaatttcttttgtgatttttcactagagattctcatgtaaataatctctaattcttgtcattaatcatttgttttgaactcgggtacctcatctgtgctgttcacaaagagtaaaatacataattgttgctttggaaaaactggaaataatggttactaagccatatctaagccagagctgctgttcattttcttatttttaaaaaattgattttctcaattcttctatcaggaaaataaatctttgctgtcacatggcattaggagcaaagtttctttggctaataatatttgattactgcctgaagatatagtagttaaaggcacgggtactatagacttgtgagctagagtgttcttagaaaacctttttctattcaggagcagctagggtatagctaattttgtttagaatctttgggagaaaaaagactgttatagccaactaagtatctcatttgcttttggctgaagtaaaaattt

SEQ ID NO: 96526 - DNA, 2660 bp, Homo sapiens
gaatgtggtctgtaaaagctatatattctgttgaggggaaatatgctctgtcatacatgctttattaaccctcagttgtttaatgtttaaagttctatggctttgaatattctcttagaaatattttcagttacaggtagagtgtttgaatgtagtaatttaattcactttatgtgtttatgtgacatgtctcattttcagaattcataaaattgaatggtattaaacagctactattaaagagacaccaaagccatttgctgttgaattagacagtggctttcctttctttgatttttatgggattgaataattagaaaaattttgacaatatttgcaattactatttattaggaattttcaaaacgtgaaaaggaaaagcaaaatattaccgttctatttaatgaaattgtttcatttttaataaaacagacagaaaattcacaactaaatgtgaagataagtggcatggagagaaaatcaaatggaaaaagagattcatttttggcacaaacaaagaataaaaaagaaaatatgaaaccagcagccaaagtatgttttcaaaagtttaatcaaaaattttaagataaagtatattgtaacttacatacaactttaaaaattggatgaaagaactataaaagactaaataaaggttgggattgcaggggaattgagggcatttgatgtagaaagactgctaggatagcatggtaacccagaagccttgggtgatgattcctgtttaggaaaggtaagtttctgtgtaatgcttagcaactgttacatgtagttattccaggcagcagcccccttgagatggaatgagactagttatgaatgactaacataggtagcacaagagaaaatattttagaacttttgtttaggattattgttattttagaacttaatattttgaatagaaataaataatgcctagataagacacctatgttcttatcaactagctcatgctagttgccagttaacttgacttttagacaacagttctctcttccatgacctccagtaaaggttattctagaatcttgagaccatggccctggtgaaatgaaagaaaagtgttattttttaagaatacctctgccacattcttgtagcaactataaatagaattaaagcaatggttccaatgaacatttattaagataatattgtagtaccaaagttacttgtatgtagggcattttgtattggcgactttcactaagtcatgcctcaacttgagagctgcaaatatactctcctcctgccaaatcagttcatttccatgtgttagcctgacagacggttttgtccatactttgtagttaagcacagacttccctacttcgtaaagaggtttaatactgtctactttcttagtatttattagaggcagaaagaaagtggggaacattgtactaatttgttacggatcatgagtatcatcaactttcataatcactattgaaaaatggtgtcattattagaggagagtgatagaaatattggaaaataatttggaagctaaaatgtacatttgcttattttttcaaatctgcagctgaaacttgaatcttcgtctttaaaagtaaagggtgaaattcttttggaagaggaaaagtctactgactttgtgtttatacctccagaaggaaaagatgcaaaggaaagaatattaactgatcatcaaaaagaagttctcaaaacaaagcggtttgtaggccttttatcttgagttgggtatttggtattcaggcttagatttcatgcaagaaaagtgtaactttgtgtttagaactaaaatatgtgtactaattttttttttttttttttgacacggagtttcactctgttgcccaggctggagtgcagtggtgccatctcggctcactgcaagctccgcctcccaggttcacgctattctcctgcctcagcctcccgagtagctgggaccacaggcatgtgccaccacgcccggctaatttttttgtacttttagtagagacggggtttcaccatgttagccaggatggtcttgatctcctgacctcgtgatctgcccacctcggcctcccaaagtgctgggattacaggtgtgagccaccacacccggccacgtgtactaaattttaatgcgaaaagttatactttacataaatgcatttcataatgtataaagctacctagtaatgtaccaaatatttataaactgaatttcttctctgaggtgggaaatacgcatttaggtcatgattttataacaatttagtagaactgtaattttcgtttctttttatgttttgttttatgttgttgagacagagtctctctctgttacccaggctggagtgcagtggcatgatctctgctcactgcagtctctgcctcccgggctcaagtgatcttcccgcatcaacctcccaagtagctgggactgcagatgcacgccaccatgcccagctaattttttattttttgtagagataggattttgccatgttgcccatgctggtcttgaactcctgagctcaagcagcccacccacctcaacctcccaaagtgctgggattacaggcgtgagccaccgtacctggccataagtttaatttctaattgtaagaatatcatccggtttttgaagttacttatat

SEQ ID NO: 96527 - DNA, 4455 bp, Homo sapiens
aaaccaaaggaggattctaagatgatgattacggtatgtttgacatttcatattttgggctttttagaatcacccttccattatacagtctgttaaactgctgaaatgtctgtaggtcttccctttattaattttaaaatttattgtagatttattgtatgatttccttttaactcccattcagatactagcagaatatcagcagacactagtcagtgtgtgtgtgtgtgtgtgtataaaataaatgtacttggcttttcttgaatatttacaattaggaacacaaactgttaggtatctaccactaactttggaatagttgccatatattgaatgtcagtgattatctttgggttaccgaagttttacactaaagttttcccagaaagtcaaactcgtttgctggttattaatctgtgtgtgtatatatatgtatatatttctgtgcaggaggagcaaatggacagtgacattgtcattcctcaagatgtcacggaagactgtggtatggctgaacatcttgaaaagtcctccctttcgaataatgagtgtggttctcttgacaaaaccagtccagaaatgtcaaacagtaataatgatgaaagaaaaaaagctttaatttcatcaaggaaaacatcaactgaatgtgcatctagtacagaaaattctttcgttgtcagcagtagttcagtttctaataccactgttgctggaactcccccataccctacaagtcggaggcaaacctttattactttggagaagtttgatggttcagaaaatagaccttttagtccatcccccttgaataatatttcatcaactgttacagtgaaaaataaccaggaaaccatgattaaaacagattttctaccaaaagcaaagcaaagagaagggactttttcaaaatctgattctgaaaaaatagtgaatggaactaagagatcaagccggagagctggtaaagctgaacaaacagggaataaaaggtctaagcccttaatgagatctgagccggagaaaaatactgaggaatctgttgaaggcattgtagtcttagaaaataacccacctggtttgcttaatcaaacagaatgtgtgtcagataatcaggttcatctttctgaatctacaatggagcatgacaatacaaagcttaaagcagcaacagtggaaaatgctgtattattggaaactaatactgtagaggagaaaaatgtagaaattaatttggaatccaaagagaatacacccccagtagtaatatcagcagatcaaatggtaaatgaggatagtcaggttcagataactccaaatcagaaaacccttagacggtcttcaaggcgacgttcagaagtagtagagtctaccactgaaagccaagataaggaaaatagtcatcaaaaaaaggaacgacgtaaggaagaagaaaaacctcttcagaagagtccattgcatataaaagatgatgtgttacctaaacaaaaactgattgctgaacaaactctacaggagaatttaattgagaaaggaagtaatttacatgagaagactcttggggaaactagtgctaatgcagaaactgaacaaaataaaaaaaaggcagaccctgagaacattaagtctgagggggatggtacccaggacattgtagataagtcctctgagaaactagtcagaggccgaacacggtatcaaactagaagagcatctcagggtttgctttccagcattgaaaactcagaatctgatagttcggaggcaaaagaagaaggttctaggaagaagagatctggaaaatggaaaaacaaaagcaatgaaagtgttgacattcaagatcaagaagagaaagtggtgaaacaggaatgtataaaagctgaaaatcagtcacatgattataaagcaacttctgaagaagatgtaagcataaaatctccgatttgcgaaaaacaagatgaaagtaatactgtaatatgtcaggattctacagtaacttcagatttgttgcaagttcctgatgatttaccaaatgtgtgtgaggaaaaaaatgaaactagcaaatatgcagaatattcctttacaagtctacctgtgccagaatcaaatctaaggactagaaatgccattaagagattacataagcgagactcttttgataattgtagtttgggagaatcctcaaaaatagggatatcagatatttcttcgctttcagaaaaaacttttcaaacacttgaatgccaacacaagagaagtaggagggtgaggagatctaaaggttgtgattgctgtggggaaaaatcacaacctcaggaaaagtcactcattgggttaaagaatacagaaaataatgacgtagagattagtgaaacaaaaaaggcagatgtgcaagcacctgtaagcccatcagaaacttctcaagctaatccatattctgaaggacaatttttagatgaacatcatagtgtgaattttcatttgggtctcaaagaggataatgatactattaatgattcattaattgtttctgaaaccaaatcaaaagaaaacactatgcaagaatctcttccttctggaatagtaaactttagagaggaaatttgtgatatggattctagtgaagcaatgtctcttgaaagccaggagtcacctaatgaaaattttaaaactgttggcccgtgtttaggagactcgaaaaatgtttcacaggaatctttggagacaaaagaagaaaaaccagaagaaaccccaaaaatggaactgagtctagagaatgttactgttgaaggaaatgcatgtaaagtaacagaatccaatctagagaaagcaaaaactatggaattgaatgtaggaaatgaagctagctttcatggacaagagagaaccaaaactggtatttctgaagaagcagcaatagaagaaaataaaagaaatgatgactctgaagcagacacagctaaactgaatgccaaagaagtagcaactgaggaatttaattcagatattagtctttctgataatactacacctgtaaaattgaatgctcaaactgagatttctgaacaaacagcagctggggaactagatggaggaaatgatgtatctgatctacactcatctgaagaaacgaataccaaaatgaaaaataatgaagaaatgatgatcggcgaggcaatggctgaaactggccatgatggtgaaacagagaatgagggcataactaccaaaacctcaaagcctgatgaagctgaaacaaacatgttgactgcagaaatggacaactttgtttgtgacacagttgaaatgagcactgaagaaggaatcattgacgctaataaaactgaaacaaatactgagtatagtaaatctgaagaaaaattagataacaatcaaatggtaatggaaagtgatattttacaggaagatcaccatacttcacagaaagtggaggaaccatcacagtgtctggcatctggaacagctatctctgagctaataatagaagacaataatgcatctcctcaaaaactaagggaacttgatccttcacttgtgtcagcaaatgacagtcctagtggcatgcagacacgctgtgtctggtctcctttggcttctccgtctacgagcattttaaagagaggactaaaaagatcccaagaagatgaaatctcatcacctgttaataaggtaaggggaatgaggctaaatattaaggaacccagtatttggttgggatattttggccatacagtgacctctggtgaatgacaaaatattacaattatatggccactcatttgattatttaccataatggttgctagggaaaaggtaggtagaagaaaaggtttcgaaaaaaggagactgaagccttttagataagtctttcattttacaacactaaagatctttatgcagctgtgcacattgttcacctttggcaaaattgataaggctcctagcatcttttctgctccccataccataatatcatatgaggaaacagatttaggaatgcaggcaacactgccattgataaagcagatttagtagttgtgtgttggaacattatgctgttttacgttttacatacatgttccagaccatatctaattaaaaaaaaaaactcatgtgccttcatcaacttgtagatgtgatcttatttagttatttatatccccatttcctcagctaaattatagatcttttactttagaaaagatggattatctatatatctgctttagcttcaggccttgtgccttgcacatagtttgttgaatgaatgaataaaaaaataggaaaagttaaatgtatttacgtaactcaacttgtcttatacttaacaaaatagatatcctgaaaaggtatgatgttggcattccttaattttgaacttgaacctgctattcattgtagaatacattttatatatacaagcatgaatatatagac

SEQ ID NO: 96528 - DNA, 1008 bp, Homo sapiens
cgagatccacccgccttggcctcccaaagtgctgggattacaggtgcgagccactgcgcctggcacatttctgtttttacatcagtcttctttctagtctggtaatcccataaagttcctagaatcagatcgtacacttttaactgccacatctggcttcgttaagtttttgttactgtgcctttttcacaatctttggtattatgcagagacagtttaaaatatagaaaattagagtgaattgtggtattgagttaatgtgatctgtgaaggcagtcgctaggaactgtgcagctgacttctggtgaaataaattttctaaacccacattctatttttgggtaacctcataatgaaaatttatggtgtaattttttaaaaactttaattttgttaagtaaaatcctgacctgtgttttcaggttcgccgtgtctcctttgcagatccaatataccaagcaggattggcagatgacattgatagacggtgctctattgttaggtcccattcttccaatagttctcccataggaaaaagtgttaaaacttctcctactacacaatctaaggtaagctataggctttaaaatatacatatatgtataccgacacagaattacatgtacatgatgtgtcataaaatgaactatatatgtgaaaaacttcttccttggtttaaaatatattcttttgtctggtacacggtaagcagaaaggaagagaagcagaaaggtaagaggcagtaatgatccagcaagtaattgattaggtagtagattactctttttatgttttttgaacttttaaagaaatgattgcagtctaagttgtaaaaattgtgaaattatagtcatctagggttctgagtgtttttttctctcctttcttctatctagcataataccacttcagccaaaggatttctgtccccaggatcacgtagccctaaatttaagagctcaaagaagtgtttagtaagaagtgctttagttttcatgtcactttata

SEQ ID NO: 96529 - DNA, 1053 bp, Homo sapiens
tgatgccttgagatagtttctctttaactgaattatcaagctgccctgtcgtagcataatccccaataggagatgaagtattcttaaacttctctgaggaatttaatgatgcagtaatatgtatcagacataccaagtccatttctgattaaagttggggaggggattatgtgtacttaagaattatctattaatgagatgtatgtagaagcacaaggcacgcagtgggctcattcagttgccagtactgttgcttataccagacatacacatcagattcgaattttgttttaaattacacatacatgtgcctgtcttcactgtgggctaacctcagttatgattgagcttaaatggggaaattgaactggataaacccttgcaaatagcatataaataaaactatataattataatttcctgtttctgttttgtttagggcaagaggcctgggacaactcattagagctaagaatataaaaactattggtgatttgagtactcttacagcatctgaaataaaaactcttcctatccgttctccaaaagtgtccaatgtaaaaaaggctctcagaatatatcatgagcagcaggtaaaaacttagatattagctatgatgtatattaataaatgatgtagcagtacagttacagaagtttgttaaaagatcacttcataatggcacagggaaattgattcatttattttgtactgtctttatgcattgcacctcagataaatttttaaattgttttttcattaaattctgttcatccccttctctctttcatttccaccattcggtatttgattccatggctgctactgctaaaacctagatgttcaaatccaaacatctaccaaaaccatacagatttgtaggtcacagtattttggtttggatgcctaccacatttgtgacttatttttcttatttttcctttttgtcagtattgtgcatatgaacattttgggtcatgggcatttttcaagattctgatgaaagctaagattcttccctgctgtaaaactatatagaaaattttgtatat

SEQ ID NO: 96530 - DNA, 1079 bp, Homo sapiens
gtatcagaagttttgaataaatgaaaaatagaataagcagtgttctgaatcagaatttctcagacctggggtttgccagccactgaagacttctgctgtattcttgaaggtccttgattttatattaacttatttgtgatcttctaaacattcattaactggttactcagaaaaccaatactactagtaattttctgtctcacagattgaatttagtttctaaagtattttcttactcagtttccatgggtcttgggaaagtctatgagaattaggttttttttaacagcttcattaagatatgatttacatcgtgtaaaattcacctaccctatgggtgcagttagtttttaatatattcacagagttaaataatattccccatgatctaattttgaatctttttttttatcacccagagaagaaacactgacccattagctatcactcctcatttccactgtccagccaatgcctacttttcctctatagatttgcctattctggatatttcataaaagtggggtcgtacaacttgtgatcttttgtgaatggcttctttcacttagcataatgttttcaaggtttatcctcaaaaatttccgttttgaggttgaataattctttgtagattctggatattagccttttgtcagatgagaagattgcaaaaattttctcccattctgtaggttgcctgttcactctgatggtagtttcttttgctgtgcagaagctctttagtttagttagatcccatttgtcaattttggcttttgttgccattgcttttggtgttttagacgtgaagtccttgcccatgcctatgtcccaaatggtattgccaaggttttcttctagggcttttatggttttaggtcttacagttaaatctttaatccatcttgaattaatttttgtataaggtgtaaggaagggatccagtttcagctttctacatatggctagccagttttcccaacaccatttattaaatagggaatcctttccccatttcttgtttttgtcaggtttgtcaaagaccagatggttgtagctgtgtggtattatttctgagg

SEQ ID NO: 96531 - DNA, 7724 bp, Homo sapiens
tcatatgttgaaccagccttgcatcccagggatgaagctcacttgatcatggtggataagctttttgatgtgctgctggattcgttttgccagtattttattgaggatttttgcatcaatgttcatcaaggatattggtctaaaaatctctttttttgttgtgtctctgccaggctttggtatcaggatgatggtggcctcataaaaagagttagtgaggattccctctttttctattgattggaatagtttcagaaggaatggtaccagctcctctttgtacctctggtagaattcggctgtgaattcatctggtcctggactttttttggttgaataatatgcattatatgtatataccacattttgtttatccagttgacagacatttgggttgtttccaccatttgctattacgaataatgctgctgtgtctgcaagtttttatatggatagatgatttcatttctcttgtatatatacctagaagtggaattgctgagtcatgtggttactgaacttattattttcagaaagttaactttctgaacttagtattttctcaatcagtggtccatacgtcctaggaacacttaagaaaattgtatccttttttttttttttttttttttaaatacagtgtcactgtcacccaggccagagtgcaggtggggcatgatctcggcccactgcagctgcacctcctggactcaagcagttctcctgcctcagcctcccgagtagctgggattacaggcaccgtaatttttgtgttttttgtagaagggggtttcactatgtttgccaggctggtcttgaactcctgacctcaagtgatctacccaccttggcctcccaaagtgctggaattacaggggtgagccactgctcccagccagaaaattgtgttcttttttttaaaaaaattctatattttatttaagcttggaaatctctggtatagacttttttataccacattcttaaacttgggaaatagaatgtaattttcttagctgccatggctatatttcctgagaaaaccattatgaaatattgttaaattctaaccctctctttgaggaaatactttgtaatgctttattttgtgtagttagaacctactttcttagcagtattagctcttaattgtgatgggtggtagaacataggttctatgcaatgttttccagtgtttgtactattactcctattaaaagtaaagtttcaatttgttgttgttgttgttttgcgtttttttctgctccaactgtaatcaaggtgaagactcgtggactagaagagattccagtttttgatatttctgaaaaaacagtaaatggaatagaaaataaatctttgtcacctgatgaagaaagacttgtctcaggtatattttagcaaaagtgggataattttatttagaagatcagctgactttcttgaaatatgttattttttttagtctgatttgaccatgccttatttcaacaattattttatgtttaatgtgaagtatatgaaaaactaaccgattggacatcaaatgtgtctacttgtttttcttgtcaacttctccatcaaggtctcaaggatttaaactatacactttctcttctagttatattaataaatgaagtagtctaccatttttaaatttctttaatagcacagaataatctatgagaatagcacagaataataagcagtggtaggttgggtatggtggctcacgcctgtaatcccagcactttgggaggccaaggtgggtggatcgcttgaggtcaggagttcgagaccactctgggcaacatgaaacccagcacctactaaaaatacaaaaaatagctggatgtggtggtgcatgccagtaatcccagttacttgggaggctgaggcgggagaatggcttgaacctatgaggcagaggttgcagtgagctgagattacgccactgcactccagcctgggcaatagaatgaggctccatctcataataataataagcagcagcggcagctctggtagatttttttgtgtgcttgtcctcatgaagacttaagcctgctctctcaatttgaaacctaggcacttggactaacttaaaagatcatgtaaaaaatttaatttttgtctggtatagatttaattgtggttttttttttctcttttagatataattgatcctgttgctttagaaattccattatccaaaaaccttctggcacagattagtgctcttgctcttcagctggattcagaagatcttcataattattcaggaagccaactatttgaaatgcacgagaaactaagttgtatggcaaactctgtaataaaaaatctacagtcacgttggagatcaccatcccatgaaaattctatttagtattttcagagaaaattgaaggtttttttaaacatcactggatttcttgattgaggaaacaagttctgaaataatagcacaatttcaaagaagagactctttgcaaagttgataacatttcaaaccctgaaggacagtgacttattatgtaagttcaattttgtaagttcattatgtaagatccttttttttttcataatatgtattcttggctgctatgcgtggtttttcaggaaatttaattatcttactgagatgtgaaagcaaaactagtaacagaacttacattttatttcatgctttcttaaacccgtgcatattctggtgaaacatgtaaaatactttaagtaaaattgaacatttttatttgaatttttgctgaactgataaaggtgtttatatttttgtttgttggtttgtttaattcatgtttgttgggactgaggtttaggaagtttgttactggttaaaaacctcaaatgaaatgcgaaagaatttgaatttttcctgcatatgtcaactttggacagctttcaagaaaaatgagaaaagtttcaacttctggcggttaaaatattaatgcagaatttactaagattttattcatttgcattagcaaatattcatgcagcagcagttgactgaaaatttattcttatgagacgtatagtattcatttttaaatgcatgattgtacattatgtatagacgacaatgtttttaatttataaatttcattctttgttaattgcatgggtttttctgcagcttattgtgaataccttggttctgttcaatagaaacattttgtatatattaaatactgaaatatcagtatcgacggtggaagtgcttcatgggcttgctgcacatatttgtaggatactgtatctgcaaatgcaacaacaaatagttttgtacttggttaacagtcttagttaaaacatgagtttattttctaaaagtatccagaataagtaaaattatagaaataagaaaatgttacacaactttgctgttcatacccttaccttcttactacttttggtttggaggagggtatcaccactagaaagtgtgcctccttaagatttcttaaaggaaagttagtttcagtatttcacagcaagttggactacaaaatctagagttgatctgctttttaaaccttcatttaaaagcaaacttggaagaaatttgaaactgatgtttttaatatatgtctgtgttgcctaggttttctttttttaaagaggtatgtaattaaaacctttgtaaaatttgccaactaatattagtgcctgacttcccatatttgtttcatctttttaactgacagtatatctcacttcttctttgaatagaatgagtgagtgatctcagttttcacattttattcagaagctaatccctacttagcaaggcacacattctacagcaagtcatagaaagtttaatccttgtgcctccttagctctcgtatattcagggatctctataaaagttggtgtcttttttcatcatcataaattcatcataatcacagatatttttgggtctaagatattcatataccaaggatggttttgtaaagaattctgggatcattgaattaaggattgtggcttgaagtaactaaagaaaaatactaatttccttaaaaggaattataattatgatttacattttacatcattaatttcccaaattatatttaaccgtaaggaggtgcacatgagtttttagcaaacaggtatgaataagcagctatgtatatgtgtttggggcagaggggagcagattactttaacacacttcagaattaaaatcagttcgtttcatgactctgtgccttaacgtttgtgtgaactaaacttgctgattgaatgaaattcttgggaagccgaacagtaatagcagaaaatgtgaccaaatgagtatcatgtacttaaatcactgaattttatataagcacaagtattaattttaaaaacattatagtttaataaagctgcatttaaaaatatttgggagcaaagacaagcatgctaaatcttcattttgctatggctataagcatatatttttggcaacttatttgcaatattcttgccttaaagtttcctgcaaatttcccccttagtaattcccgaatagcaaaacattaatattccatgattagctctactgtgttgtctcactattaaaatggaattcgttttttcagatcttttctaatggttaataaaacaaatgtcagatcataataacactcaaatgtgtcttaattgtcttatgcatatttaagaagaaaaaactagtggcatacaggattgtcatgtagtatctttttttttttttgagacacagtcttgctctgttgcctatgctggagtgcaatggtgcgatctcggttcactgcaagctctgcctcccaggtttacaccattctcctgcctcagcctcccaagtagctgggactacaggtgcccgccaccatgcccggctaattttttatatttttagtagagaaggggttcactgtgttagccaggatggtcttgatctgacctcgtgatccgcctgcctcggcctcccaaagtgctgggattacaggcgtgagccaccccacctggccattttcttttttttttgaggtggagttttcgcccttgctgcccaggctggagtgcagtggtacgatctcagctcactgcaacctccacctcctgggttcaagcgattctcctgcctcagcctcccaaatagctgggattacaggtgcctgccaccaccactggttaatttttgtatttttagtagatacggggtttcaccatgtcagccaggctggtctcaaacttctgacctcagatatccacctgcctcagcctcctaaaatggtggcattacaggcgtgagccaccgctcctggcccatcatttccatatctatgaaatctattttggattttagagtggatttaaattttcaatatttcagtgacctcattgttaaagctgctttgccacttgtacaagtttgaaaaccattgttgaatcatatggagctttactctaattccaaatagttaaaggatgaatcaggttaaataatgctgttggataatacaggcaaaaacaggatttaaacccgcacattaaaagcatgactgaaggcccggcaggtggatcactttggcccaggagttcaaaactgacctgaacaatgtggcgaaatcctgtctctactaaaaatacaaaaaccagccaggcatgttggcgcatacttgtaatctcagctactcaggaggctgagacatgagaattgcttgaaccttttaggcggaggttgcagtgagccgagatcatgccattgcgcgacagagcaagtctctgtctcgcaaaaaaaaaaaaaaagtttaattctaacattgcccatggatttttttttttctgtacagcttgaagataagatagttaaagactctgttacaatttaaacatcataaaaatgtgaagagtaagtggtgaggcaagaaacaaaattgggggaaatggtggggatcgtgaatatataagtgaagttttatttttttaaggtgtaaaggagtgagaatagagtaattgctttttaaaaagaaagtataaatgggttaatttttttcttccaactttgactttaattcagtaagaaaggcctaggtttcatctcatattcttcataattgattttcaagaagttaatttgtcattcagcctaggaggctataaaacagcagttagttggcattattagactaaaacttgggtggggggaggagactgtttcctcattgctgcaacccatggtctatcctattcctaagccattagaaagaccttgtactttgtatagaaacattagagtgaggttttgatttttaacatagtactctcaaactttgatgtgcatatgaacaagtggattctgattcagtagatctgcattgggccccgtgagtctttttaaacacagtcccaggtgattcatgcagatgcctgtgaactgcgctggtagatgggcctaagaggcttcaggctgtgttttaggttttggtaagccaggcagattcaagtccttttataactgtcaattttgtgaattggggatgcagactggttttgaaggcttaaagttcaaaaattataagaaagttaagaattttgcttaagagccttttaaaaatatggacgatttattttttaagtaggcagactaagaatttcaagttataaagaatcttattgataaggcaaagtagacaaagtattttctcatgagtatttgtgggttatgtttttgttaatataaaagttgatttctaagtattagaatatatttagtctctaaataaatcttgccttctattatggatcatcgttattaataaacatggaaaatcaacactacccctaatattaatctggcagttaaatttagtagtgctataatgaataagtcagtctagcagatatgccctgtcattatactgcggacctctggtcacttaattttctgttatattatgtggttgaaaattcctgtttcatcgtaaagtgaaatttgaaagatggagttgaataatatgattctcgaaaagtgagtttttcttggaattctgttaaggtgttagattttcctcacatatttaaataatctgtaagaactaccctgaaagcactaaggaaaatgtagccgaaagttaagtaataggttttaaaaatttatcaaaatttattgatagtttgatctgtaaaacaaattgggtttcgtgctttctgatgtccagttaataagtatattatgtgccaggctttacatattgctctttgcaagtagccgttaaagtgtaagtcattgaagtttgaagatctataaatatttaatatagtagtctaaacagttgtgagaatttactcagttctgaaatagaatgttaaattttccgatgtggtcctaatcatttttttctttacatactaagccttcctttctccaaagaacagttaaaaccaaatgtgttatggtaagctgtaaataccgttggaataaaagataaccgttcatcttacctaaaaaattgaagacaatattttccattgttgatgtcacaagtaagaaaaaaactctaacttttgtactctacttgtagcagagggaatatttttggccacagtgtgccaatttataattgtagataaagctgaatttactgggcagcaagcttatatgctgatagaagttgatgcactgagaagtgatgagttgaagagaatggaaaaggcagattgag

SEQ ID NO: 96532 - DNA, 2301 bp, Homo sapiens
cacagtattataattgatgttcataaataccctgagagattatgttaaaatacattattaatactcccacaaaagcagtaagttaataagtatttccaacaaaaggcagctttgtttcttaaacggataaacaacatataactaggaagatcatcttcaaaataaagtgtcatggaactgaaaatagagtatagtctaacaattattttgatacactattgaatagctaacaagtgtctaaagaattttttatttttatagaataggaagtttctaaaagaaaacaattaagagcaaaattggttttgagtatagaaactgaaggatggcagtcttaactcctaagttttttacagagcacagattggtaaactagcatgccacctgttttttgtactatctgtgagctgagactggtttttacattttttaatggtgaaaaaagtcaaaagaaggacattttgtgacacatgaaaacatattaaattaaaatttcagtatccagaaataaagttttattggaacagctgtgcttattgtctttagctgctttcctggtacagtggctgagtttagtagtatagcagagtctgtatggcttccaacagtcaaaatactgcctggccttttaaagagtttgtcaatcccttttatggaggaaggttttgctcatgcatggcatgttagtcaatttagttatttgcttctagctggcagaatgtggtcttgattacttaatttctgttacccctgtgttttccagaatggcttctcctgattttacttacgtgttttactattgctcaaattacagatactaggaaacactactactttataagtacacttctttttcctacttaaactctcaaactacagttacgtatttgccatgatgttaagggaccttgatggtctgtgaattatcagttgctttctgcactacctcctgtagatagacctgactgatagcacttacaaaaagactgatagatgccaaatcagtcatttattaaccctctaatattgttgtcccgatcatttggtaaacgctaagagagcttagttttacattcacaaagtatttgtatttgataagtcttaaaaatgatttaagttgaagcctaacagaagtacttgttcattcctcagttacctgcaaataatggaaataatggtgcagtcagttttatttgattgtgtaatgctttatactaggggtctcaaacccctgggtggcattagattcttacaggagcgtgaaccctattgtgaactgcacatgcaagagatctaggttgtgcgctcattatgagaatctaatacccgatgatctgaggtggaacagtctcatcctgaaaccatctaccccaacacctgtgtctgtggaaattgtctccacgaaaccggtccctgttgaaaaaaggttaggggaccactgctttatacagtgtttgaagtaggcacacttacagttactatttctggttctttatgactgttgagggggggcagaattctatgtttgattcacagtaaaacttttcatgaatcattgagggttaactgttatcacttgccaatggaaactggatattgaaacatttttttaagaaatgcacttttacctgaaataaaactataaaaactaaactctggtacttgtttttgttggctacattttggttttttgttttgttgttttcgtgagatctgaaatgagtatgaatagtttaattcaaataccacaaagtgtatgttatattcctccacaaacatgaacccttccttttctttttccccttttatggcctgctttttaaccacagaggttttctgatttatgcatagttttatgggttccactggtttctaaatccagaggtggtggtttttctgttgttgttgttgttaatgagttcagtttctcattgaacttgttagaagagaggtttcgtcaaataagggctgagtagatgcaggcaagcttggagaggcagtccacatggtgtgggcgagggcagaggtggcactgccaggctagtcaccagatgaagtaaatgcctcaccccaacatgaccttaacttcctctgcagaaccaagcatgttgatggcagccgaagaaaagctccatagttttaaggaaaacaacaacaacaacaattagggtaaacagtgatgttgaaagacactgtattagtttcctagggctgctgtaacagtaccacaaacctaataagttaaacaactgaaatgtattgtctcagttttgaatagtagaggtctgagatatggtatca

SEQ ID NO: 96533 - DNA, 1019 bp, Homo sapiens
ttgggaggctgaggtggtcggatcacctgaagtcaggagttcaagaccagtctggccaatatggcaaaaccctgtctgtactgaaaatacaaacattagcccagagtggtggcgcacgcctgtagtcccagctactcaggaggctgagacacaagaatcacttgaacccaggagggagaggttgcagtgagtagagattgggccactgcactccagcctgggcaacagagggagactctgtctccaaacaaaaaaatggctcattgtaatggagatagcatatactttagtattctaaaagtttgggagttggaaatcacaataggattgttgcctacttgcatttttatccagtttaaggcaagatggaagacttgggagcaggagagtagcaccatttggcaccatttggatggttaagcataatctgccttttcttgggtctgcaaattccctaagggcatcaactgtctcttgttcttcacttgagcttcagcctctaacccagtgcctggcatagaggtgtacgttggtcattcgcaagtgagtgcgctctcttcacaagagcattttctccctgtgagtctcagacacattaagaagcttgaggcagcattactacggctgtaaagttacagggacttacctaccttctaggaagaacagtctgtaaacttaaacattaagccattatggttgcttcttctccctttgcctttgccacatgctgccatcctactggatacagatgggaaagatgcccttgaagttaggattggagtccacagatgttcttaaaactgtaatagaagcttgctgaatgcaagtatagatagaattttgagaatgtctactcttaggcataacagtacattttttaaatttagataattttttagtaattttatgtacaatttgcttcattgaatttttataggtagatattaaaaccattaaacataaataatgctcattccatccacagagttgcagaattagaggttttattagttgctggt

SEQ ID NO: 96534 - DNA, 1051 bp, Homo sapiens
ccaaaggaaaaaagggtaaatttgctaaagaaatttcacaaaatttaagttgtctttaaaaagtaggattaatatgtattattttaaatcataaaagtagtttttaaaatcagtaagtagtttttttcttttctcgccaagtaccgagctaatattttcttgattgtgtttgactcgctccatctcgggagtgacagctaaaggagttcccttgcccatgttttctttgtataacacctgtgcgatgagaaagcatccagaaaaacaaccatgagtaacatttcatttgttgagaggttttaagggtaaggtcaacttccttgttaagaaaacacagtcgtccaaggagccagaagttatatgctgacaaaatgccaccagctactttagtggaagctgttgttgggatggggaatctgcaccctctagagaagcagggacctcagctgctggggaaaggctgtcagagttatccatgttattttttttcatttttgtgagtacggtgcctcctaaacaatcacatgaggatttgagactgttagaactcagtgttgttatccacacaaacggaaaaactcatttttaaaaaatgattgaaaatatcagatgaaataaaaaatcaaaattaactgtattatggaaatggtgttaggctagaagtagcccaaaggaaaaaaggataaatttgctaaagaaagaagttcacaaaatttgtctttagaaaataggattaatatgtattattttaaatcatgaaatagtttttaaaatcagtaagtagtttttttcttttcttgcccaagtaccgagctaatattttcttgattgtgtttgactctctccatctcaggagtgacaggtagaggggttcccttgcccatgttttctttgtataacacctgtgcgataagaaagcaaccagaaaaacaaccatgagtaacatttcatttgttgaaaggttttaagggtaaggtcagcttccttgttaagacaaaacacagttgtccaaggagccagaagttatatgctgacaaaatgccaccgacta

SEQ ID NO: 96535 - DNA, 1116 bp, Homo sapiens
tcacagtttagtaagtaaaaatatgaatacaggcagggtataagcatgatcagttaacattaaatatcaaatgaaagcttgaagttaatagaatgctaaggtaatattcaaataaaaaattagaagaattaacatgggtaatagattaggtggtagtaccaagcacatgagaacccaatttgaaacccacagttaggtggtgatgtaaatggtaggaggaacacattaatgagtgtcactagtgcaattatttggattaagagggaaagaaaagaccaagtgggcactacctcgcttgctattttagttgcatatttgacatgtaacaaagctggcgtgacctccaggccagtcaggtttctgcctttaatggactcttcataatctttcctatattctttctaatgtaagtaggaaggaaagacaagttaaaaaaaaatctttattacaatatatctctccatctcaggaagaaaaaaaaaacagcattttctatgtatgggctcttaatcatagttctgctaatggtcacacatttgaaacatgtatgattgtacttgaaatactttgtctggagcaaatggccacaaggaaattcaggctgagacactttgatgggcccctcactcatcagtctaatgttgtgactggggcaggcccttcacagagtggaaggatggatgcaccatcaggactctgaatcctctgttgtctcttctgaactttcccacacctttcttaaggtgacaaaagactttatttcagaattacaagtcagtgaggcaaggggaaaaaaatcgcagtggaaggagagcctaaggctaccaaatgctaacttgctttttttcctaatcatgacctgtttttttaatatggggtcttgctatgatgcccaggctggtctcaaactcctgagctgaagtgagcctcctgcctcagcctgctgagtagctgggactacaggtgtatgccaccacactgagttttgacctgttttttaaaaatcactgaatagcttaggtgggcagtgaggcacagaggaattgtatggttttgtccactctgcctccctgccccatctcctctccagtctccagacttagctgactcacagag

SEQ ID NO: 96536 - DNA, 1066 bp, Homo sapiens
gtttgtttttaaattataatgatatgaccttgtacatttaaaaacattaactttttgcattaataagttcttgttacatctcattactcttagagattccactgtttttttgttggtggtggtgatcccatatcttagtttcaaatacttatacaattccattaatttataataaaatatgttacataggaattttaagtttaaaaacttttaaaaaataatatttgcttttcatcagtcatctgaccctcttgtgttttcataattctaacttgttctgtcacttgacattactgcattatatcttccaaaagattggaatcccatgtttgctattgctgaaagtcagtcactcacgacaaccaaatgtatatcccaaacctatttcttcaaacagatacctgagaggacaaggaaaaagaaggtaggatctgtaaattggaggagaaatgagatattcttaagctaaagtcctataggatcaaacttgcactctgataggtctggtggtagatgatgggatctctgagctaaagtctgaaaacctgtcataacttggggaattttagataattggcctaacaagggaaaataagtcatgtggtaactgggtttgggcaacacatttctgagtccatttgcttctcaataatatgagatctgcaagaatgtggcattctccatcagcaccctgtgcataccctgatcaaacacttgccaaacaaaattttaatgatttatccatggacaagtaatctgaagacatctgctcatccctacttcctagcccgggcagttaatatatgtatgtttaatgaaaaaaaaatgaatattttcatctggttggattctagaagttagaatttcattgctcttcatgttaaatctatcccaggtgactcaagtatgaatcagaccccgaggatgaaactcttaaggcctggggagaggttccagtaggatctcatgaactgatgtttttgtcacataaagatagttaagcacacagacacccagacaaatgcccataaatggtaaagtggagaacaagaaaggtctagacagc

SEQ ID NO: 96537 - DNA, 1160 bp, Homo sapiens
tggcgtcagtctgggacttagataagacccatattctagttcttctctgtcatttgtgtcctgcaacccaacactagaaccacctggcaatcttcggagaacctgggtagaggcaaattaagctcttttatttactatttctaccttttaaaaatatatggaaccatatgggactcatataataccaaggttactacagcattattgataaggatagagcaggcagagattactgaggcccaaagaggtagttttacctttctaaaattgggtagcagtttaataataggagaggccactcctaatcaacaatgtttccttctgttattaataggttagtaatatctgatatggctagattacatgtcctgtagcaaaacccacatttgccataattgccagaattggaaagccaataaatactgggtcattttaaaagtcagagtttaagattcacatgtagatattgatggtaagagtgaagctacataaaggaagcaaaaggcaactgacattatttcaccagattctacagtcaagtggcattgttgctgccaagagaccggtggttgatcacttacatcactgacatgcttggtcacttccttgacgtgaacagtgtcccgggtctctggtagtgttgtgtatgagccctgtgccaagtgcttcttgacatggtccttgtacttgttctgggggaatccatagagagctcattaaggcatctgcctggggcgttctcccaagagggaagcagaactcatgggcggctgggggttacctcagacaccaggttgctgacagtcttcgccagcaggatctgaggcgtgtcaggtacggcatggcaggttcctctttccttgacatgtttctctttgtatttcagcttcaggggcaggaaaaggggcatttctttagctctgctggatatcctacatatttttattacaccctcaaaccagtagaacagcagcgttgacaatactaaactcaataaaagatgtgatacttgcaaattttgggaaatattcaaaagggttttttccttatctctagcaagttgtggttttaataacaatcaaaatggatctcgtgatgaatctttatatagtcacacttacgttcacagcacgctcagatatgccatttgtccctcccat

SEQ ID NO: 96538 - DNA, 1055 bp, Homo sapiens
tctgtcccccctaattttaaccactgtgtcatgcatcattcacatgatctatatgcaattaagagaaaaaagggaacaaacattttctgagtaactaggagcccagcagcatgctagacacttatacattatcttgtttggttttatttaattatcacaattctcattatcattccacatatatgaaaagagactcggaaaaattagacagatgatatagagtcatacagcaggcaagtaacagcatcaggatttgaatccatgtctggctgactgcaagaccataattttatggataagtaaattaactgtcaagtatccccagaaaatgctgctgaagaattataagaaagggtcatatttttattcaggagagaattgagaagaataggcttctggtatctctcagctattttgcctgactagtattgtttgggcatttttttttctctttaaaaaaatgtgtgtttttttcctaggccatggtttagaactatggatatggctgaaatatgttatgtttcttaggtacttcaacctcagctctccccatcacaacagaagaaaaaaggaagggatgcatacatcactggcattccagtaagccctcttggctctgatgaggattggcgtatctggaaccggagtgtacttgtctttcatcttttcatattgaatcttgtactttttctgagaaataaatgcagaagagagagacaagcttaagtgtcttcccaatttccaaccaagccacctacaggtcttgtggaggggcacaatgtgttacacactttaagagaatagctctgccttttgtgttttgatgatgctgagcaccatttatagtaatgagctctctgatcagaggtagcaggggaaggttttaacaaagtatttttctttttacccagtgcctcagtgctgaattcccatcttacctcactgaccatgtccttcacgtctttagcatgcttcaaggctgtggtctggtttccagcgtgatgatggggtctctctttggtggcaagttcaacatacagatactgaataataga

SEQ ID NO: 96539 - DNA, 1045 bp, Homo sapiens
acatattttcccctgatttttgcgtgactgcatgaaatacagcttcgtttgtctgcggataacaggaagattctatagaatgatcaagcaattattttcattactccaaaacacaagttttataacacttaggaaagaagatgtggcatcccttacctgagtaaaacacaaccataattatcatggcccaaaagagaactgcttcttcaagtgcagtgttaatgggcatgaggttgcagccaggacaaccaagtgtgtgagtctgccactggccaggtgaggccaggcacatataatcaccccctgtgatgcctgagtggcaggcttatgaacctctgagcttacctgactctgaagcttctgccctcgcttggctcttaaaagatcaggagtatcaggaactgaagtaaagattgacttctgcttcttgcctgcagctctgtagaccagctagacataaaccaagttatcaccatcatttctgtttcatgggcatgttatgttctctgcagatgccttcactgcttttacatagaaaaggcaggagccctcccactgcaacgattgcagtttcttcccaataaaccaaccttttatttacctcctgcaccctccttttcttttttcccttgtgtcaaaacaagagacattctctagcctgtccaaaattcaagactcctgctgtgttcttggtcccatttgcagttgtcccttctagtaccctattccagcaactgtctccatctcctctgtatcttccacccttcctgttttcccaatcccctcttttcacctgcaaacagactcaagacctcctgtcattaattaagccttttccagtctctagccaatggccttcattcttcttttctcagccaagttgcctgtgtttcttctttgcctctcttttgattaatttctcaagaccatagtttggctcccacctacccacatcagtgaagtcacactcattgagactaccaagaacttcatgattgccatgaacacttctctgtagcaactgaagctgctcagtgtttcattc

SEQ ID NO: 96540 - DNA, 1086 bp, Homo sapiens
catgtgccatcacgcccggctaatttttgtatttttagtagagacggggttttaccacattggccaggctggtgttgaactcctggccttgagtgatctgcccaccttggcttcccaaagtgctgtgatgacaggtgtgagcccctgcacctagcgaaactcatttttctttaaacatattcaaatgaattactttaagacaaaaaattatttaaaaaaagacagcattggtgtgcgtttttcagtctgaaaaaatattaggaaaagtaacataaacatcttcatgattattagcagatgagattatataaggcatgagcctctaccacatctattctgcttttctgctttgtggaaaattgatggtgagaaaacataaattttgccccttcagttaaagtgcagcaaagacatgaatgacttttactttatgagatatatatttctttctttttggtttaatttatttttcctttaacagagattatacaaggaaaactatgagaagacaaaggcaaagagtatgaattactgtgagaccccaaaatatcaacttgatactcagctgaagaacttcagtgaggttcgaaaagccacggttacctttcgggtaggagggctttcctactgtttgacaaatgattgttaacttgaattacatttgttttatttttcaggctagatataaagacttatatgtaaaggatgttttgggacattatgtaggcagcatggaggacccatatcacacacactgcatgaaagttgcagctcaaaacagtgatgtaagtttgaagacaatggttcatgcctcacagtgacattgtttgagagccataacaatcatgatctatttttggtttttctcattatagaaaagttacaaagcagaatatgaagaagataaaggaaaatgctatttccctcagacaataacacaagaatatgaagcaatcaagaagctggaccagtgtaaagatgtaagttagctgccctgaattattgaaattgagcttgggattcctgtgacatctagtggtaaatttagcaggagtttacatgctaatatctagtgattagaaggag

SEQ ID NO: 96541 - DNA, 1006 bp, Homo sapiens
atttaaagaattctaatattggcatctatatgctatacacactgcaagctggtcttctgatggactccacatctctgataatgctctctaatgagcaaagtccaaatcactacctcaagccagtggtgagaagatagcaaggaactagaaaagctacatagaaaccactggtttggaaaccattgtctataacaatagttacaaagaaagtttagaataacctccaggacagagatctcttcactaatagtaaatgaagatacaggagagcaaaggatacctgagctatggggaagctgaccttgaaagcaatgaggtccagattacatttggagagtgggagaggtcaaagttacgaggagaaacttgtctctacccagccttgaaaaagtgattgatgacaacatacaactgggcagttgagagaagactggagtttggagataaccgatgatgtggtattatctcctgtatacaaagcagagcctattacacgtacattcccaaaaatgcctccagagaaaactagaaagttgtctatagattttctatttacactaatataaacaggtttggaggttgtctgtactgtatgtggttgctgtagtgacaagaaatgtaaagtgcctatacaagagggaacaatagagtcctatttctaggcatcttaatactatatgctgagacaaaaaggaaaacaatgtcagggacttcatgcctttgctcaagctctgtgcatttctctgggtctcaaatgacctactaggcactttttaaaggccagaaaataaaaactcttcttccctctatttcatcccatgcttctaaagtcactttcactgcctatattaaaaatgccagccatcagtgctaaagcacttttatattcttaaggcaaaatgtcacataagaaaatgaatcccctatccacttccccactataacccctatacaacctgccttcgttgtatcctttgcccattatgaggaccaagaggtactggga

SEQ ID NO: 96542 - DNA, 4205 bp, Homo sapiens
aaatttaatattgtaacatagttttttatgtctgcaaaagcttgtcatagataatagttaatacttataacagttcttcattttattgcaacttaatgtgtacaaccatttctctcttgctcaacttttagtttcttttcccacagtgaacatcgttttctatattttgggttatgttcaattaccagttgttcagtgataactgatgttactgataagaaattttattgccttcaaaagttttacatacttacattttataatatttatgtaacatgtgtatactttgttttaataactacaatatatattttgttgaatatcctgccatttttcatttatatcatgagcattttatcctattataaaatggttttatttcctccatttcctggtgatgagaattatgaaatcattttttaaaggaaaattttaaatatttcatcatacaaatgtcttgtaatttatttttttctgtatttttagacaaaaattattttcctattaaaagtactttaatgaacagttttgtatgtaagtctatgtttatgtctgattttcttttttgggatacatttctagaagtagaaaaaaggatgcagagtattgatattttaaatatttttgatacgtattgccagatatatttttgacatatgttgctttctgtgggcactcattgcataattataaagcttttttaaagtgtcagacagcgttctgggtgctagagatataactgaaccaaaagagcacagatgtattagctgggtgtggtggcacacgcctgtagtccctgctgctggggaagctgaggtggggagatcgcttgagcccaggaggtcacggctgccattgattgtgccattgcactccagcctgggtgacagagtgagaccctgtctaaaaaagaggaaagacaaaaaaagcacagatgtattgtgtatgagaatatggcttcactgcagcagcccaagcactgaatattattgatttttaaatctttgttatttagctaaatgaaaaatgctctcttttagtttgctgttcatagtttgctgctcatagcttcttagttcagaatttaatcaaatgattttgttttctttatagattgtgccaaggacttgaatggatgatgtcacgacttaagattagatgatctctactgacctcttctcatagattttgtataaatgaagtgctggactttacctgaaagctgcaaaaattaatggtttagatatatttataataaactgatttaaactttttctataagaagaaaaattaagaccacttatttgaaaacaaagatgaagtctcaccttccagtttgctttctcattagttttttccaaagtaagttattgaagctgtgattgacatttttctcataatgaatcctctcaggacattgtgtagcctatggtaagtacaaagggagaggaagacattttgaattttaagagctttattatcagtttaaccctccctagttgaatgttattttcttcttgttccattaagtcagaatacaaatcagcacagatattcgaatgtttccaatattttaaaatgtaatgttacttatgaaaagtattttgcttaaggttgtgtgtgtattgtgtatatacctcaagttcaagttaatggcattgatttatgttccagacaaaaataacacaaataataatatccttcgttataaccacaatgagataagtattggcattagtgttcagtgccattttatactttctctctgtgttctctgtattgtactaaccaacctcccaaatcgctgagctgcttgtttaaaaaaaaaaaaaaggaaaaggaaaaagcatgacattgtgtatcgattttttgttgttgaccaaaatcacacacatggaaacatgtaattcaacagagtgggaaagctagcagattcttggcttagtattactaataggcaggattgtacaatgagcaactatcagattattcctttcagtggttcttatggcatctaaattactgaataaattattaatccattaatcagtgaatcaaattatgattacaattatcaaatgaatgctcagcattaattgaaaactgttttgtgaaacatgtctacccagaaaagtagcattctataaatactattaaacaacttagctatattatttttaagtattaaattatatgtcaagcagttaaagtgaatttcagagtaaaagtaaggcatgtttctgagcaacattgataatttcttaatttgcaaatttcttcttattttggtacttggaatatagtgtgagattttttatttctaaattttgttgtatcttctattacataaatgcattgacaattataaaatgcaagtgttttttgaatgattttaagaatttggcttaaaaattgattgatacaacgtattatttgtactaagaagtaacttgacccaaaacaccttttatgtttgcttagggtatattttttcagtgtctgaaagtcaaaggtattcctgtcacaactgtaaacaaacttatcctaaatgtgttaaaacatattcttgggtactctatttatgtatctttcatgccttgaaaatctgaaggttaatccaaactcacatgttttagcatatttgagaaaaaaaaactaccttcaatatcagccttttaaatttcatgaagattttggtgaggaataatagtatatagtttaagtattgacaaaactttgaaagtttctttctttaaaatgggaaatactcaatatctaaatccaggtcaggcatgggatatcagtatttaacattggatgttttatgttttatatttataatgttcaaaatgcaagcataacatttaatatttgtccacatggttttacaaaagtaaatcttaaattactaagcttttcccatatgttctcgtactttctcaaatccctataaagaattacttgttatctattaaaaatctcctttacccaaatctgtattatggtttcgccagacaaatattatgtgatgtagcccagaaaatccacaccttttgtcctttttatgttttaatttgaataatcatgtgcttagtcccttggattactgccacatcagtttaacacgatatcagcacattcccttgtcatcatcaaggtgttggctcagatttattcttaattggatgtttaaagcatgtactaccttgttacagttggtttagtgtagtggattattgacatgacatcatgagaagatgtgtaattttataccacatttataaaacatgattttgttttctacccttcaaggtaaacattaaaaataaggtggtacttgtgtacttgtacataaaaccaaaattatagttgggaaaaaaataaatttatatatgaaaatgtcaaaatcattttaaaagtattattttcaaataaaatggagaagctggtgaaaagtcatattggcaatttttatgtagtttaagtggaattaagcagagggagatgcttttgggtttttaatatgccacttctgagtgaaaacatctcgtggagtcattgtgttcagctctgagaagaacaaagattcatagttctgtacatgtggctggatttaaatatcctgtttttgatactaattttgaaagtcatgtaacttcttttgatatctgggcaaaagtaaccatatgctataagcatttgaatatgtttaattttatcataatagcatctgtaaaagtacatcttacacattatatagagggttcttgtttgaaattttcagttctctttatcttcccagtacctcttggtcctcataatgggcaaaggatacaacgaaggcaggttgtataggggttatagtggggaagtggataggggattcattttcttatgtgacattttgccttaagaatataaaagtgctttagcactgatggctggcatttttaatataggcagtgaaagtgactttagaagcatgggatgaaatagagggaagaagagtttttattttctggcctttaaaaagtgcctagtaggtcatttgagacccagagaaatgcacagagcttgagcaaaggcatgaagtccctgacattgttttcctttttgtctcagcatatagtattaagatgcctagaaataggactctattgttccctcttgtataggcactttacatttcttgtcactacagcaac

SEQ ID NO: 96543 - DNA, 1060 bp, Homo sapiens
ataatgactctttacattattacaaaatacaaaactgtaaaaattttaaaataattttcaaagttttatcataaatgaagtatacaactttagaactcattaattttaaaatggttccaaacaccaaagtctgaaattttattcagaatgactcaacttctaggagttaccttcacaaatgaagtttttttttttgttgttgttgttttgatacagagtcttactctgttgcccaggctggagtgcagtggcaccgtatcggctcactgcaacctccatcttctgggttcaagcaattctcctgcctcagcctccagagtagctgagattacaggcgcccaccaccacgccagctaatttttttatatttttagtagagacggggttttaccatgttggccaggctggtctcgaactcctgacctcaggtgatctgcccgcctcagcctcccaaagtgctgggattacaggcgtgagcgcccagtccccaaatgaagttttaagaaacaaattgacaactatatatggtatatagaagatgctaagtaaatgtgtcttgcaattgctgttattcatctccttgataaaactaaaatatatcttagactagaaatttgtagcagaagtggttttaaagtgtttgaaatggtttatgtacaaaagatcaccgttgttcaccttatactttgacctcttgttaagtcacgttgatgaacagccttaatttaatatatctattttctactgttctaatatatacatatttggttttgaggttatataataaaaagcaaatgaagattttcttctctttctaaatatgtaaaaattgataaaataacttcttagaagtcaagaactctaaattaaagtttgaaccttttagatctagaaaaactgatttaagatatttggagaccttttattaaatggctttgttttttgtgtttttcaattttcagttcaggggcttctacaaataatttcatcattaagagtgaatacagattacttataataatataaaccgtgtgtcctaacttgtgccaagtatttgtca

SEQ ID NO: 96544 - DNA, 1049 bp, Homo sapiens
aattctataaacagaatgcttggaaaacatctagatttgagtccttatagttaatctttttgaaatatcacagtatgttaatacatagagagtttaagcagagtaaaatctgatttcctattccaaggtcattgttcaatatgtccactatcattgaacctctatagggagaattggtggttaattatgttctgattgtgtattgatctcagaacttgtctttaatagttttttttaatgacttccatctcatagtttataatttcatttctctctatttatgtttgactgagtttagctcaccaaatgagagggttttgatggtttgaatcctagccagttttactattttcttttacaaaacacaattgcacattaaataattgtttttcttttgattataaggcattttagacatagtcatatctttttatttacacattatttcccaaaggaaatttcagacctttgacatttgagtgcttcattgcatagacctgtgaattaaaagactgaccgttgtttttgtagtgttcattattacaagttaataaagcatggtttataagtatataaagctgacttttaagtcattaagaaaccattaagtgtatctgacaacttgatttcctaacactgcattaggcatttaatcattttttaataagggaagttatgtatgattataaaggtatatatgctactgtatacatatgctataggtttcaaattcatgccaacagcctgaaaattaacagttttattaaaataccttggaataaaatgggccttacagtgataaagccacctatcagtaagctgtcaagtgagaggagaggtaaagtagcagttctctcatacatctgccttttggttgatgaagtctgaataattgaaaagatccagaaaatcataataatttatttaaaaattaagatctaggtcccaaaaataaatagtgcatgttactaataggcagtcagaaccaacttgggcatcataaatgttatcataaagtaagtaagttaaatctccatctgttcctgctg

SEQ ID NO: 96545 - DNA, 1006 bp, Homo sapiens
ccacacacatgcacccagttgatgccttaagttccagttagaacctcattgatgtaatccaatgtgaaacatttatactttaagtcatttgtaaattgtgattatgtttggtctactttactgagagtaggcttgcctaggaatagaggaaatgtagtgccatggcttcctagagaggtggttggaaagatgagagttgtctctagaataatggcgatggggaaggtgagtataatggcacacttctgctggtcttgctaggatgttcttttgacttctgagaaagtataaagtgccatgcactgaattatgccatagatagaagggtgagatacagagtatattttttcctataattaatctttttttttccttttttgaaaaaaaatcactggtgttttctctatttcagagcacaaagttatcattgttgggctggataatgcagggaaaactaccattctttaccaattgtaagtattaactattttaaaaattattttatttctagttacttttttggcctgggtgatagtcgatcaatgaatgcagtaagaaattacatgaaacctaagttaccctgtaagaaagcaggttggctataaacctggagccagatctcagcaatagttagtagaaagcaagaaatttatatgatattgagcatatagttggcattgagttgtccacttgttttgtgctaaagctcttttgtttgtagaaagtagaaaaatatggccgggtgcggtgcctcatgcctttatcccaacactttgggtggcagaggtgggaggatcgcttaaagccaggactttgagaaaccgcttgggtcacatagtgagatgccatctctttataagatatatatgaatatatatatattttaaaattagctggatgtagtggtgcacacctgtagttccagctactcaggagactgaggtgggaagattgcttgatcctattcaggaggtcaaggctgcagtgaacctcatgccactgatta

SEQ ID NO: 96546 - DNA, 1267 bp, Homo sapiens
ttgcagtgagccgagatcatgccattgcactccagcctgggcgacagggcgagactccatctctaaataaataaatataaataaattaaaaaattagctgggcatacggcgagactccgtctcaaaaaaaaaaaaaaaaaagaaaaaaaaaaaaagaaagccgggcatggtagtgcctgcctgtagtcccagctgcttgagaggctgaggcaggaggagaatcgtttgaacctgggaggtagaggtttcattgagccaagctcacaccactgcactctagcctgggcaacagcgagactgcgtctcaaaaaagtcattggtgctttattgtgaaaatacaaaaaaactcaaatagagctacgtcttgggaggaagcaactagaactttgtaatgaatgtagtttgtaggtgtttgggtggagtaaggaggtaaagatcctctggatcatggattcttcattggaatggccctccagagatctcagaccacatgactacatgtggtttttttggatattttccaggttctgcttatgtttgattggagtttctttcctcctttttgtttttgaagtattttaaccatttggtaagaatatgatatgttcaaatatattagtttggtttcccttgattgactttagaaatctgcttaggtcttaagagtttgggggcatggttgcatatttatgcatttgtaagtatataggaattcattgaatttgtaaaataggtaggcagaagagtaagattgtagtgtggagaatggcatgagcaaagttaaatgattggaaagtttatgacatgttctagagactgagtagagcagcttttctaagttttagtacgtaggtcaagaagagttaggggaagatttgggctaaggcttagctagctttgtcacactcatcctttttcatcatgtttatctaatgatcttacctggatttagttattcactttcaggtgcagacagaaggttatgggtcctccaaagcttcagaccttggctaatttctctcctcttgttcatagccattttacctttcatctttccttctaccctaacaataacctaacctttcacctgctaggacttccggacattcttaaccttgtagggcaggactggatttctttcccggcccaaattccatggctagccacttcatttctttcttatcactgtctccgacacgcttttctctattaacattttccaccatgccagacatatggattctgtttttttttttttttttttttt

SEQ ID NO: 96547 - DNA, 1519 bp, Homo sapiens
atttattttctgctaaacagtgtggctgtcttatcaatagggtcacttttccgaatatccaccatttaatctaatgccagatatttgttgggttttgtttttgtttttgtttttttgagatggagtcttgctctgtcaccaggctggagtgcagtggtgtgatcttggcccactgcaacctgtgcctcctgggttcaagcgattctcctgcctcagcctcccgagtggctggactacaggtgcgtgccaccacacccagctaatttttgtattttttgtagagatggggtttcaccacgttggccagaatggtcaccatctcttgacttcgtgatccacccgccttgggctcccaaagtgctgggattacaggcctgagccatggtgcccagcagggttgtttttttttttttctgtataggacatatataagttagatatgtgttggatgctcttgttttaccttcagtggattcagaatgcaatcttactttcttttcatagaaactcttggaaagtatgtttcgggagattacagaatttgccatctgatgaaacttaaactatgcagtatctcctgtttctgaaacccctcgagaacagctttttcagttaaagctcagattgagtgcacagtgaaagctatttgtataccgctcgaactagaaaaaccagaggtcacatttagttgatactgagattcagtagagtacaaactttatcctagatgctgtcatttaaatcattttattttattttattttatgttttaacaatcttttgaagtagttatttcccctgaaaagggaaaactgaggcttaagtggaatgattttttttccccaggccatgcaactggtatatgccagagccaggcaagttaaaaccctgaaggaatctcttaaagaagagattgacatcatttttccctccctcctcctccccccattaactttttcagttgctaatctctaagttgtctttagaacttcgaaaagttgccattagtaacttttttttatagaagagcttgtgatcagtggtttacttgttctcaataaacaaatattttaacacctatttagtccaggaagtgttctacatggtgggataagggaacaaaacagacaaattccactgcctttatggagctttcatgtagtgttgggagacaggaaattaactcactttgtctctacaagtaaaataatagtggttaacacttgtgcaaggttcacacaggttgtttgatttaatattcacttagttgatttactctttacaacaaccctacaaggtagatattattccccttattttacaggggtacggaaacaggtaacttgctttaagcactataggtaaaagtgatagacctggattttaaccacgattacgtagtgccggagttatttctcctacgcacacacacctggattttaacaagattatctagtgccagagttagttctacacacacatgcacgcacgcacatttgcacacaacttcgtgtaagaa

SEQ ID NO: 96548 - DNA, 1103 bp, Homo sapiens
gaaacatttgttaaccataggtaactagcaagttactaagtgtaaagtgtgttatatagggatgcttaagttcagccaacttcagacatggccatgaaatacctatcaggcttgttaaaatttgttacaaaatgactaaaactggggaaagagaatacaattttaacccaaagactggatacttattaagatacagtggtgtacttttgtttctttttaactcaagttgggtggttcatcattccgctgtcaggaacttagtttgtgtttttctgttgtgtaagctgatggtgtcacgtcccagttttccaataaagacttacgtgaatggtggcatctattatgtacacctactactaccacctcctccttcatgatctagctgctcttttaagaagcttaggggaagcaagcagaactagaacttgtgatccctaatgtatcttttacgcacacacacacacacacagatgtgtaggtcacgtgataccgaaagaaagggcagtatcaatttttctgataagaggatttttcataaagtagagaaaatcagttctaatcagcactgtctctgactggactggctgttagtgttgggagcaggagagtgggaagcagtcacttgaactctcaggttttctggtctaggttttctcacctagaacaccagggatctgtggagcttccaaatcttgtaaactttatttctacattgcaaatattaaaacgtacattgctgtaagactgatggtacttatagtagataagatctattctagttttaacatccatcattttgtattatttttagcaaagctagtgtttcatctgctgtgaggtttagcaagactgtgaattgagctctagtgctgccagaaaaagagttatcaccactttctattttgagtcaatgataaaattatttgtttctgtaagttaagaataaatgagaactttgccaacagctccttggagtagtaaataataagggtgtgtgctctggtatcactacaaattgctaatagtagtgtttttataacctgtattttgtggtaatttttgacgggacatttatggcagtttggcggaaattaatagagaaa

SEQ ID NO: 96549 - DNA, 1037 bp, Homo sapiens
agtcacatggtttcaacctgtggagctgttacctaaggcagttctgagcagtgccgaatccactggccccataacagccctatctgaacaaatcccatcccataagacagtgttagattattttggtctataacatacttatacgcaacagtgctgttaaaggtttgccctcaagaatgaagaatctgatgttcttcctcaatcctgaggcccagaaaaagggaatttatttaattgtaacagcagagatttgtctcgaatcaagtagaattgtcgcatccattactgtacacatactactgaagttggttttaatagaaattgaatgcaaatttcaatctcaagtattcatggggtctgatgacatggcagagggtctggaggaagagcccagcagtagcaaaagtaatagctgaagagagagacttagccctggagaaatctgatatatttctccagcaggagaaagataggtagatattaaaggggtgaggggtgagagaatggacttgatttcaaatattaagaggccaggcagcagaatgaacaataaggagttccttggttgagtgtatgtggagactttgataagaaagaaattcgctggtagcgtcacactgactctgacatgtcttcttcgtggggaatatcgttaggttttgagctataacatcatgctgcattatgttttaccaattgatacaaggagagaaaaaaacaaatagtctttaattgaaaccagccaagagaacaatgacaaggaaggctttagcacagtgacacggcataaacaatatgttctaatggaaacctactctgtgtttcatgggctatgaatgcagtacgttagacaaaataggagaaagtcctattatttttcagaaagtacaaagaagggatctgttggctacgaggctttcttctttaatctgcttttcagatcttagtagaaaataattcaacaaattggatgaaagtccaacagtttgactattgcagaatcataaacttgggatttttttgataccttagaaatt

SEQ ID NO: 96550 - DNA, 1021 bp, Homo sapiens
tttgcagtaaaaccaagttctctggaattctttggtaaaacaatgattgcttaaaatgggaaaggcttgtttttcaaattctcattctcaatataagcctcaacctctacccagggaggcattgtgcttgcccatcattgtcaatttttatgttctttggttataaataacttctggaacaagcaccagaccacatttcaatagcaattttcaaaacggaatgcacatttttaaaaactccttcgtgatcttttctagtaaggaggttttttttgtttgtttgttttgttttttttctaattgtaattttgtagtattgtagatggtattgtattgtcttggacctgcatagctaaaattggtgaagaacctttccacaaaatattaaggttactaatgatttcctggacttttcagtaaataactcaatatatttaaaaacctccccacctctactacattttatttttcagctctgatattagtttctccttgtctcagctgaacatcagaagatagacaaactgctgatggtttgttgataaatttaacacggttaccaaaaaaatcatgaaaaggccaggcacggtggctcatacctgtaattctaacactgcaaggctgaggtgggtggatcgcttgagctcaggagttcaggaccagcctgggcaacatggcaaaaccctgtctctacaaaaattagccaggtgtggtggcacacacctgtagttccatctacttgggaggctgaagtgagaggattgcttgagcccaggaggtcaaggctgcaatgagtggtgattgcaccactgcatttcagcctagacgacagaatgagaccgtatctcaaaaaaaaaaaaaaaaaaaagaaagaaagaaagaaaagaaaagaaaatcctgaaaaataccaaagtcttcaagttgaaaatggttaaattaaaagatgttttttcccctttagtcaatgtctaatgctgtgcttagtgtctgttaagcagtaggtaaattgtgtatatcccct

SEQ ID NO: 96551 - DNA, 1062 bp, Homo sapiens
ttattggctgatgcttagcaaaaacgtttcccattagaattctgtaggccagtctgaaattatctggccaagactgatattttgtacttgaagaatggaatgtcagctagatgccatccgggcctccacccaggcttcctccagctccctgcacctagtttctataacagcaagtcatgtgctcagcaaggggctacacggggtcatgggcctgctgccaagactggggagcaaagcatggaagttcaagtctagacagcaatgtgttgaaagccaagctagcaggtgagagatccagcacataaataaagaccaagatgggatggcagagtctttaaggacaccctgccctatgcaactgagagggcaaatgaggtgaggtctaaaagcaaagtagtggagtcctctggagtttaggtgttggacccagtttcagaatagaagcaatagctaggaggaggagccaccacatagtctggaggctaactctgacttgcagttgcttttgtttggttgagcatagttgttattatttcttaaaataatgcttacctgaaatactttcatgtgctctccatttcaccatggttccacctgttgcctcacacccattcagacaagtccgcaatgagcccagccttgctgtttcttcagagttctgggtattgcacaactgggcagggagtgagcacagttccttaagacaagctggcaatcctcatagactcacaaatatgaatgtagagagattccaacttgaggttcttttgcagtaggcaaaatcaacaaacgctcagtattgactacatttgatcttttaggaatcaactcaatgttttatgaaactgacttgcaaaattcaaaaggtctaaaaaatattagaatgaaaacaggatttgtgagttttaccagctgctggagtccacaaactgcaactgtcttggtaaatatcttttggaaagttctgattgtcagaaaacttcagactatacatgccaaagatctgatactggaaatgtcatgaatcatataagcccctgcctcacacagggcaaatttcat

SEQ ID NO: 96552 - DNA, 1915 bp, Homo sapiens
ccaactttttacatattggaaaatagaaattgcaaatacatacatgtatggaaacatattcagattgggaaaaacaatggacattagtttttaaaaagttacgtggaagcaagatttctatatttgtttttttaaaggaagcagtcattctttctactaaatccatttcaagctagttctctgaaaattttgccatttatctacagaaatttgattataaatatgttcctttttcaaagaaactttattctagaacaaaatagtctatatggtacttgatctacatttaagtggaaaaattagcagtatttgaaagctcagtttatgtcattgtcttaacttcagatacaaataactgaacagaaagttttaacctttaatatctcatgttctgttttttattcagtattttcctttatgttaattcaattatatacttctgaatggcaccttactttttggaaacaaatcttctgttatttacaaaataataatttttaaaaaacatttaaaaaaaatccaaagctgctctcgataatagtcaacatttgcatatatatggaatttcttactttttttctcccaaactctatttaataaacttattttaatgtttgtgtatttcatgtataattgtgatctcaattataaaagtttaattcagcatgtctttgagccaatataattactgcacacccactaaattgggatcagccattataaataatgtagttttagaataataaaacatgacacatatatatatatataaatatatagtatatattggcacatcggtgaaagtttatatgtgcagaagtttttttctttctcaagttaaaaattattttttgccatatgtaattttgtgttgcaggctgtcgagagataaaaatgattttaaatctgtgtactgatgattctttcggtgttaagaaacacagggttgtgtacttccctttttatgggcttatggattctatttatattaagacctgtttataattgttttctgccaaagggaattgtctaacttcagatttctacattgggttcatacttactgttttatatcagaaataaaaaaatagcttctgctttttcatatgaaatcttggtacatcagaaagaattcctgaaaatttataatagaatgaattttattaatgcagaaaaataccccagggtgttaaaatatatgaagtgtgggatatattcttatagtttgtaaaatgtagtcaaccaatactgtcttctaatttggtaatttatttataaaattacttaaacattaggtaattatatttgttaggatttgaaattatttgtagttaaattgtcatgctgtttgaaataattgatacttgtctacgtaatacattttactgtatgttttgaagatggttataatttcactttcaaaatttaaaaaatcaattttaaatgttttaaaaacatatagcttagggattttttttaaaaaggttttcttagtaaaaacataaatttaaaagcccctgagttctaggagagggcttattgaattgctataagaaagctggagttactttgataagtaataaattataaatagcactgatctataatgctttatttctatcggaaggtactttttcttctttcatcatcagttttagccagttagtaaatgggaatactcagttttagggatttgatttttgtttggtttaattttctttcaaaaattaaaagtatatttctaaaagttttccccagaggccagatacagtggctcatgcctataatcccagcactttgggagcctgagataggagtattgcttgaggctaggagtttgagaccaacctggcaacatggcaagaccctatctctacaaaaattttaaaacttagccaggtgtggtagtgcacct

SEQ ID NO: 96553 - DNA, 1572 bp, Homo sapiens
tatttctttgcaaatgaagactccgcccacagtcagtctgattggttgtggacagcaaccattcagaggctgaagttacaaagttgcaaatggagactggacctgtaatcagtctgatttttttcggacacccaatttcccatctgctgcacagaaaacgtggggggtttgcaaaggaagtagcctctggtccttttgttacttaggtgtggaaagttagggttggttttcctttcaatttagttataagaagtcagcttgaaaatcagccttagattccctgcctccagaccctattctcctgcctcaatatcagcctagctattacaaggattaagcagttcttcctcttagtttccctttgtgaatattctttcattaaatataaaaaagccttttaatatattaatagaaattgtgctaaattaaaaaaataatttatattactaaatacatgctaaaaactagaagagtattataatacttttcttctacatcaggaagcattcagaattgtctgaattgaatgttaaagtcctggaagctctggaactatataacaaattggtgaatgaagcaccagtgtactcagtctattcaaagctccaccctccagcacattacccacctgcatcatctggggttccaatgcaggtgagcatgttttttgagaacattttctaaattataaacaacttttaaaagtaaaagaaaatgttttatagcatagtattaagatttcttttgtctgtgaataaaattataaaatttatctttgattgtttcagtaaatattggctaaacaattaacattcaccagagcaaattagacagatactgatatttcacaaatacattttagttcagttttaacatggatgaaaagaccattaaatatgtgagggtagttctggttcttcatatgcttttgtaagtataaagcataaatcttttatgtaaacataaatcctttttgtaaatatggagtataaatcttttgatttaggacaatacctgacatatcagaagttccccaggtgaggtactaacgctttcctgctgctcaacaagatttaacatttctttacaaatttccataaagatttatttgacttacatgattattaacaggcacaatgaacttctagagtatgctttatacttcctttacttagctgcatgacttacattgttaaaaatctgtgcatagcaaagatatgatacatgtctaggaggtacagactccgtaagccatccatgaacatccataagccatctttttccagtacttttcaccttttttgtgtgcttgccatgtgaagcgaatacttacatttgtcagtatccccattcggaagcgttttttgaaatttcagccaattagccaattgaattcagaatgagcttggatgagcaaaattcatgttaatttatgaaaactggtatgtaaaggtgcatgtgaaggagacaccaaggagaaagggtagaatgtgggtgcataatttagatgacttgacacaacataattgttaagtaaaaaaagaatagtcactatggtaactgtcacgtcag

SEQ ID NO: 96554 - DNA, 1025 bp, Homo sapiens
gatctcctgacctcgtgatctgcctgcctcggcctcccaaagtgctgggattacaggcataagccaccgcgcccggcctgatatttttgataatagagtttgacctgcttaatgcagtcattcttaccagagagagaagacttttcgttgttgtagttcagacataacagactctagtagaggaaaagtgacaaatcttgataggactcagtccaggctatttacttggtagtcctgtgtctgtctgtgtgcctctgcttgttgcctctctgtgtttatgtagaaagaaccacattcagtaaaaaggcttgtggatgtttcaggccagatgaaaagtggttgcttagcttttgtaaatttgacagtgcaaagagagttctttattactcccaggggaactatcaagtagaaagagtttgctctgaagcttcttgggcaaatttgaagatgcttttatttgggtttgttgttattacataataaagcattggtttactttctcaaaatcaaccaaccaacaaatgagctgtagagattagtcttacttacacattgtttttacttggattttcaaggataattatttaagtaggttttttttttttcagttgacactttcatggatataaacaaatgaaaatgtgtgtgtgtggtttttttttaacaagtgtttttaaatttccatcatattgtacttcatagaggttctgagccttgcctgggtactttcttttattgagatttttaattaaggcccagattcttacccaaattgagaattttctttttaataattgaattctcaacaaaaaacctagaatgtgtgaaagtaaattctctcagcaccgaaattatgaattgattgcattttatgaggtgtggaaggacttttccctaatattataaagtcatattgtcaccagtagaggattgtgactgcaagttgtccatgttcttagcattttgaacaaagaattggacaaaatgcccagcaaagcaaagaaagatggaagcaacaaaagaac

SEQ ID NO: 96555 - DNA, 1027 bp, Homo sapiens
caactccactgactttttcctctttgagaccatcctgccttaagtccaggagggtccccaactaagagcagctgccaagatggctggggagcctggtgttttttatttaggtaacagttttctggggtttttttggagattgacttttgctctgatgcccaggctggagtgcagtggcatgatctcggctcactgcaacctctgcctccccggttcaagcaattcttctgcctcagcctcctgagtagctaggattacaggcgtgcaccaccacacctggctaatttttgtatttttggtagaaacagggtttcaccatgttggccaggctggtctcgaactcctgaccttgtaatctgcccaacttggcctctcaaagtgctggaattacaggcatgaaccactgtgcctggccaagaattgaattcttatgagaagtggtacttataaaaattttaaatgaaatttctctagtgtttgaagctaaatcacaccttctcttttcatttcttgtccttgtatttgtttctattgctcttttaattttatcctacatagttttgtttttctttttttctttttttttttttttgagatggagtcttgccctgtcacccaggctggagtgcagtggtgcgatctcggctcactgcaacctccacctccagggttcaagccattctctggctcatcctcccaagtagctaggattacaggtgcctgccaccatgcccggctaatttttgtatttttagtagaaatgtggtttcaccatattagccaggctgatctcgaactcctgacctcgtgatccgctcacctcagcctcccaaagtgttgggattacaggtgtgagccactgcacccagccttatgcccagctttttttttttttaaagacagggtcttgctgtgctgcccaggctggtctcaaactcttggcctcaagtgatcttcctgcctcagcttcccaaagtgctgggattataggcatgagccactgtgcctgtcccttattgtcctttaa

SEQ ID NO: 96556 - DNA, 1027 bp, Homo sapiens
tggttatgaatatagaatacagcgttgtgctctttattgtgtcagtgttcacattgggaaatacacagtatgtttaatcttgaaatgtcttaagtaaatgaaaaatcttcatatctgatgggcaaaggttacatagtttatatactgtggcttaagtttgttttagttaactaatcatagttttctagatgtctttaagactttgggataactccagatttcacagtctgtcaacttagttaatagtttcaagaaaacataatgaggtttttattttaaagttgaccttgcttttagtcacatgatagtaatatgtagtagtagtgctgaatagtagtctttctctagcatgagcttaatctgtgtgtattatgcatagtgttgtatattggtgctatattgttaaaaattgttgaaattggcttaaactggattaagtttctatatttgtaagtatttttgtatttacagatatctgccaacagatgggtccaatgatagatgaaaaacttgaagaaattgataggtgagatttttcgtgcaggaataaaaagtatagttttggggggttcacttgtgttttggcaaacagtaaagtagggaaagtttttgtggaactgtacaattcatggaaattgtttttcagtttcccaggcttttaacaaatttatagcaaggtggtgctttttatcttgtttttgtttttctaaaaaacaagctctgacaagttttattaaataaaaattttgcatggcttacttttaaccagtctgttctagcatgcttctagtgatattagaactgcctggatcagtgatagccagtgtgcctactctctagtattttctgcatgccgtgcccatcattgccactgtagtgatggacagcagttttggccaacattgtatagcactctatttcagatttcctcaaagctggacagttttagtgaggatgaccaattttgctttgccttttctgatcatcttcagagtctacttttaccccagcacatactttccacttt

SEQ ID NO: 96557 - DNA, 1019 bp, Homo sapiens
tatacccttgatcagagcaccaaaagctatacttggctcctccccaattcttaatctactactgtattctcctcagaatttctctgccatttaaagctgtcataaaaaatagatcaatctctgtagagcttaatactgttctgtacttttaaaagaaattcatgaaatttagcaagagtgagaagtaagcttgttgctgtgaacacagattgcagatgtatttggtatccattataaataacttagttatttataacacactagtctaatatatttctagtattttttaaataaagggtagataaataatggttttactttactgtggtaaatatttcttgagaaaatgttatgtaatcaactatttaataacaaatgaggacacagttctgtcttcataaaacctagaataaaataagggagttaaaattaccatatagacaattgtatggaaggcagaatgtggtgaataccataaaagaggtgctgttggagcccagatagcagatttacacttggtgcaagcatctggcaaagaaggcttatcctgcggctccatttcaggtgtgtatcttgattggttttgataagataaaaaattttgcaagaagttgaggatgggaaaaggaaggtctcttaggcaatcaagatagtaccatcttcacttagaaaatcttttttccataaagaaaaattttttaaataatcatttggagtggaacaccatgatccctgaaggagaatagatagaaatacagatgtttctcaacttatattagcctacagttgggcaaaatcatctaacacaaaacctatttattataataaagtattgaatatctcatgtaacttattgaatactgtactgaaagtaaaaaccagaatggtttatgggtatctgagtgtgtatcacttttgcaccatcgtaagtcatgccatcatgagtttgacactgtctgtaaagatggagagatagtgtgggctctgaacactgacagtctgaaatgtcaggcttatga

SEQ ID NO: 96558 - DNA, 1097 bp, Homo sapiens
gtaggtagatattgatggaattattctttatcatattgttagaatctttctaagctatttcacattgtatttgaggctctttttatacagtaatcaaagcctggtgatgaaatgttatgacttacacccaccaaatgccggcgatttagcatttaggccccaggagggctcttttaattttctacctctctatgcgtttgacacagaataatgtgatatagggccccaacattgggcaaagtgacatgctataaaagaatggtttcttaattataatatttaaaattttccaggggtttaaaatactcctaagtgcataatttaaatgttatttagctcccttgaaaaacaaagtcctttttggcaggccattatgaagtcttcagattttatatttttaaaaagagtaattgtgagtcttatatttgtagagactaaactatgcttgatagagtattcaaatcaggaatttcccattttctatggaaattaaataaacaatagtctaattagatattttaaaaattgttgggcggctttagaaggcatgagataggcttcatatttaatgtattacatgaccagaattggaaaaatatcatgaaaagttgagttctagctggactaggtaggttattagatggtctaaaatcagattcacgtgattatgtgtgtgtctttgtactcatacatatccatactcataaaatttgataattgatgatactggctcctcaaatcagtgaagaaaggatagattcttaaataatagaactgacaaaaaattcgtaaaaatatttttctgttcctgcctcacaccacgtgtgaggttccagatacactaaatgaagttctaaatacattaaagatttacatgtgaaaggggaataatatacagaaaagaatgtgggtagatatttaatcttcaggtaattcaaacagtatgctaaatgacactataaaaagaaaaatggtagattctgttatagcaaaaactgcatcataaacaaacaggaaagattagcatgaagctgtaatatatatgatttgcttttcagacttagtatataaagttagttacctatctaagaagcttt

SEQ ID NO: 96559 - DNA, 1510 bp, Homo sapiens
aaggcgcaaaatagaattagacaaatgattttaaaacttaaaaaccgtgaattcttttcttcaatataaatttttcttgaaagttcattgttttctgatggaaaaattctctggtacaagtaggcagagttgctctgtctgttctgttctaaacctttccctgcctggctcccgaggccccagcattggtttagtggatcacagtttagtcctacagttgtaaaggaggcactgctgttgagattaaaaaaacaaacaaacaaaaaaactgtgtctagattattttatggccagtgccataagccagagcttcaagtagttacatattagcttaagcatgactgaattcagaaccccaaaggcattttaagggtgaaagaatgaatttgaggccctcctgtaacttctggacaagagaatggaattagaaaaagtagaatgaaatactaaagagctcaaattggacttgcacgtatatcatagaagaaaaattatatattacgtttttaatatcttaaaacttttcatttcaaatcgttaatacaaagcaagggtcaggcgcagcggctcacgcctgtaatcccagcactttgggaggccgaggcgggtaaatcactggaggtcgggagtttgagaccagcctgaccaacatggtgaaaccccgtttctaccaaaatacaaaaaattagccaggcatggtggcgcgtgcctgtagtccctgctactggggaggctgaggcaggagaatcacttgaacccgggaggcggaggttgcagtgagccaatatctcgccactgccctccagcctggcgacagagcaagactccgtctcgaaaaaaaatatatatatatatgtatacatatatatatatatgtatatatatgtgtgtatatacgcccacagacacacacgcatacacaaagcaagtcattatttgacttgagatgtctacaggaaatgttactttacattgtcattgtctttttcacttgttctctttgattcagtcagatttttgttacccttttttttttttggtcattcctttgttcactcttcattcagcaggcatacattgaataattactgtgtgtcaagcattgtgttaatctatggacacaaaatgagtaaatagactgtgagttcctgccttcaaggaactctcaatctaatggaggaaacagagagacataagacctgtaatttagtacgataagtatagtgctacaaatatacaagaagctttaatcctcttttatttaaaatagtcatagtccctgaagaaaagacaaggaccttcagataggagctttctctgtaaaggtgttgacactatcctctccttcccaccttttcttttttctttttctttttttttttttttgagacgaatctgtctctcaggctggaatgaagtggcctgatcttggcttactgcaaccccgcctcccgggttcaagtgattttcctgcctcagcctcccgagtagctaggactacaggtgcgca

SEQ ID NO: 96560 - DNA, 1036 bp, Homo sapiens
agtattccactgttggggtgaggagggtcaaaagtgacaatatgctatctccagagactacggatcgcctttgctgcaaatggtcccaacccggcctggcgctctagagcaggcgtggtttctgcgcgcggacactttggagagaaactacgcgtcccggcagtccgcggggcgagtgggcggagccgggccgggggcgggggccgggcgccgggcgagaggtggcattgtgtaggggagcgcggagctgcatttgtctgctccaggtgctagccaggcaggcgcagccgtggccggctagggctggaagtgtcagcggcggccgcgggcccggcagaaggccgagtaggagggaccacgcgccgggggccgcgatctctggcagggggcggtgtgccagcggagcaccatgcacataggcgcccagcgccccaactacccctcccgaggaaaagaggccggggccgcgctggggcggcggagagcatgagggaggccggggggcggctcggcttggagcgctgctagggagcggtgcgcgccgcacacccgcctgggcgcggcggagggcggggagccgggcaggtcgcgcctgcgggcggcagccgaccgccgggagctgttctgatttccgacgcgcacgctaggggcccggagcagcccccggccccggcgcgccgccgacatgggcaacgcagggagcatggattcgcagcagaccgatttcagggcgcacaacgtgcctttgaagctgccgatgccagagccaggtgaactggaggagcgatttgccatcgtgctggtaagtgcgcggcggcggtcgggcgcggggacccggggccccgggccgggcggcgcagctgacccccgcccctccccttcaccccgtgccgggagcgagcctccattcccgagggggaggctcccgctttcccctttgtggccccccagcactcctcttcacccccctggcagtcccccgcgctcagtctctcggggtcccgggatggggatgggggctcagggccggctgccc

SEQ ID NO: 96561 - DNA, 3441 bp, Homo sapiens
tggactgctgttggtcccccagactaccagttttagtgtcccagcctcttctaagggatgttgggagggacacacacaggcgagattgggctcattcctactcctgacacttggacacttctcttttcctagttggttacctctaaactccacaagactaggcagcaagggaaactcgtgatccgggcagccaacgattgtgcctgcctgcgggttttcttttcttcttttgttttcatgaaaacttagaactttggcagaggactcgagttctagatcaaaaatcggttttctgaggtgtgctcagctacaggacgttcaaattgcctgccttcaggccttgaaaaaggaatggtttggtatgggaagtgatgttctggatggcaggttagctgtgtgctctttgggagaactgagctctctctcccgccacctggaaactctggtgtggccgtcggggagacagatgaggttgcttgtgttgctttgcatctcctgtgatctcccacagctgctcccaccgttgtgcaagatgggacactgaaatgaaacggcctaggcataactctcaaggcggcctgggtgcatacttgacctgcttttccagagacaaacgtttttcttcaaaaccctcttcctactagacatatggttcttacctcctggctctggctttttttcctcctggctctggcttttttgtttttccatccatgctgtggtgctctgtgtgtgtgtgtgtgtgtgtgtgtgtgtgtgtctgaatacttgtggtggaggagccagtgacacagggaaaccagtgcagcagccataataataacaataatgcaattaagttctgcttgactaggatagcatttttttttgcttgagctttcatttaccctgctgattaataacacatggtgtgaattaatctttagaaaaataatgtcccatcattaacatggtggatttgtgttcttgttaaggctagcagttgcaaatatagtatttagacaattatgattgtacatcccaagcttcttggggcagggttgttgtggctacttttacactactgtgtgtcgcagttactgggtgcaattccttttaaaattgtttacaatattctaagcctctcaatcaagaaacaaaaacaataccaggctgaccttttattgagtagagacaaagcttttgggggaccaggtcagcttgggaaccctcttcctagggacgcatttggaccattgatgcgttccttgtcccaggtcagctccacttgctctttgacaatctgtgagaggagttgaaaccttccagatcatctccgtgggccaatagaagtgcgcagtgttggtgatttctcttgttttttttttttttctggagttgtgtgtgtgataatctcaactttgcttttcttcatgagttgcttaagaaatcagttcaaaccatttaattgtggacatcaatcttgaaggacaagttttaagtggcagatttttaagtatgtatgtggagggcaatggaaattgtgttggcattattgataccagttcaactttcttgtataataaagatcatacgggtgttttgggaggaaaaccagatagtaataccgtatagaaaagtgtctaagcacctcattgtaagtatggctaacatcaataattaacagactgtttcaagctaggagaacagttcctcccaacttccagctctagaatatttaaggcctcagagagaagtaaacaaaaattaaaatgacaaaagtccattttatttcttgttaggaaagccttaagagagaacaaatctattcaatgactataccctccctccccatcagtttatatgggttaaattgtgcgaatataaaaaattagtgggtatgaatggaaatgagagaataaaagactaatgaattaagactagaggggtgaactttgaaaagtaatctttttaatagaaaaaaatggagttagtgactagcaaaaattggatcccagtgttaggagtttaatcctcccaaggataggtatcttcagtatcattatagtaatagttataaaacttacatttaagggaaaaaattactgtcttagtgtatacatttaaaccatttgcttccctgtattgacctttcaggtacagctggaaggtgagatacacacacacacacacacacacacacacacacatatatgcatatgcctttgtgtgtgtgtatgtgcaatgtttctgttatactctaacctatgtataatttatatggaagtgtttcataaattataaagtcagccacgtacttcaatctttgttcttttaggatgtaaggatgtatatatttcataggtaatattagcctgtgttttttgggggttcttcatatctgtaatagccatgtggccctccattgtatttattaaccattgtctaattttgggggttacatcaagcttgtcaaccactgcctgtgggcctcatgggcccaacgcaaattcataaactttcttaaaacattatgagatttatttcatgatttttttttaagctcatcggctatcgttagtttttgtgtattttatgtgtggcccaagacaattcttcttcttccaagtgtggcccagggaagccaaaagattggacatcctgggttacatacacacatccacaaatactcccatgtcttttatttttaaagatgatgataagaaggtggttctgggtggatgtggtgaacaactgatggtttttgtccgagaatacctgtttctacattagacactgcataatattattcactcatttttggcttgcagtcactgtttacaacttaaaaggcacacccttggatgcctttgttgaagagctatccttaaaattcttttgttgagtttcagaggaaaggacaattttaagtctgtgtcttagctgctgtatcttgtgcaatatcaggtgtcaggcagcactgcaaacagatttaaaattattaggaagtaatggtttagggcagtattatatttggtatcaggaactgctttggtatctgattaatttgagtccatttccttctcattttttttctgcatgtcctgagattgaatgtggtcattttgttttaggaaggagtgggaacattttctgagtatctactatgagtaggccttttacatgttctcatttaatgctcacagtaactaatgctatcagcaatactatagatgcataagtaatgattatttaggctgggcacagtggctcacccctataatcccagcactttgggaggctgaggtgagaggatcacttgagcccaggaattcgagaccagcctgggcaacatagtgagatcctgtctctatgaaaaaagaaaaaaaaagattagccaggtgtggtggcttgcacctgtagtcccacctacacaagaggctgaggtgggaggatcatttg

SEQ ID NO: 96562 - DNA, 2573 bp, Homo sapiens
gtagaattccccagggtcagtgactgaaagtcatatgagcatagggaaaaatattctaacatgtagagttgttgaaaatggatggtgagttctccgttaaagttattcagataatctgtgtgacaaacactggtgattggaaggccctttgcagcccaagaagataggaagtacattattggctcgaaagttgccctctttgaggtgagtctgcaacttgcaggttctagacatagaattataacacctgagagtggggaaagatctcctggtaggtgcttcctgggcttaaagaagaaaaagatacgtatgggctgatgtttgttctggaaattcatttgactttataagaactgttgcttaaagggtttggtcttaatgaacagtgctcttctttttcatatttagagcttggggaatagggacaaggtaaagtgggctctccagccctcaggtttaagcaagtaatagatgtcaaaaaagtagctaatacaagaagcactgattatagatgattgcccctcctttgcaagaggacgctgtaactggagtacttttaggaacaaagcattgaatccttataaaagaaggaacagcctagaggaacttaggagggaaggtgagttacaagctatacagttgcttggcagatctcatcttgtagagcggctctttatggagtgccactgccatccctgcaaataagaagtgtgtccctaggctttggagtcatggttccttagagagccttcatgtaccttcttagttctcacctacttgaacactggggacagagatagctcattgcttgtcttccctttagaattccatctgttcatactgcagggtgatcttcctccctcctccccagtgaccccttcctcctttccagaaacctgtctttcaacataaatgccaaggactatgcagtttccaactgatagcatataatttggaagcaatgtctaagggaagagctgttaggttggagagctgcctcttgaactgtgatctcaaccaaggcccggagatgtggaccagacgggcttggaattctgaaattgggcaacattcagccctatttaccaggtatgatggtatttgatgttgacagataaaaatgtacattcttttcactctctgaaaaaacaaacagaaaaacatgaccatcagtgttcactggtaggcaattatcacaaactctctatgatttctagtcttgtatagtttctaggacaaacttcatatagtttctgtgattccatgatcttcagtgttcttgtttagcctgtaattgactttggtgactctcatttcacatgtaaccttagtctccttttttctttgcagaagttctgatgcatttgtaagcccctgtaaccattgccacagaagctgaaagccttgaggtgtttagaccctgctatccccagaagtaatctcacttgactgacttctgtgcatagaagatgcccatggcttggttttgggaatgatgtcaaatatcaaatagttcatatttttttgttttgagatggattctccttctgtcatctgggctggcgtacagtggcgtgatctcagctcactgcaacctctgcctcctgggttcaagcgatcctcctgcctcagcctcctgagtagctgggattacaggcacgcaccaccacacccagctagtttttgtacttttagtagagacaaggtttcaccacattggccaggctggtcttgaactcctgacctcaagtgatccaccagtcttgacatctcaaagtgctgggattacaggcataagccaccacacccggcttaaatagttcacatttttgaccatgtgcctggtgctgggacactaacgtgtgactgatggtgcttttaaataacacatctcactagtctcaagacctgtcttggttgagggtttgctcaggaacctgacttcccttccttgttttttttctctccgtggaagtttggcagaacaccttatttaagctagaataagggtattggtaagttaaagtagtggttctcaaacttggttgtgcattgacatcacttggcgatcctcagaaagtacaagtgggccaggtacagtggctcacgcctgtaatcccagcactttgggaggccaagacaggaggatcacttgaggccaggagtcctagaccagtgtggagcaacatagggagacctcatttctactactaatgaaaattagcagatgtggtggtgcatgcctgtagtcacagcttacctgggaggctgaggcaggaggattgcttgagcccagaagtttgaggttgcagtgagctatgatcatgccactgcactctagtctgggcaacagagcaagactatctctaaaacaaaaacaaaaacaaaaacagaaacccacaaatgcctgggttccactcccagaaattctgataaatttgtctggaatgtgacctgggcatcaggatttttaaaagctccctagaaggtttgaatgtgcagccaaggttgacagccactgtgctagatgttttccccctttttcttcctaccccaaagaccaagccaatttg

SEQ ID NO: 96563 - DNA, 1001 bp, Homo sapiens
acattattaatagataaaatttgaggggctcatggccacgtttgttggtctctcttcttttctctgctttgtaactcctgtatccctcacagccttcttcctgaagccagctacgacttggccagacccatctcctcttctgtttctttacaagtccctaacttggaagttttttttttttctttttcgttttttaatccctgtccccagattaggcctgtgctttctctccttcgtatttttttcccccggtgattcccctgcataggatgggctctcttcgcttctctgcttactgaaactataccagccttcaaagttttctacagtcccactttttccgagggtccttacagacccacgtcagcatgggggtgatgagaaaaacaactctccttactttgatcgctttgtggtatgaattatctcttactcatgaggcacttgattaaatatcactttgtataacttctgattgtaaaatagggagatgctttcatatgtagctttgtagttgctcattacattcttagccatttgtttgtgtctttgtttcacctgccagttcacactgtgggctcctgaaaggcaaggatcatgtcttacggggtctgacagcttttacttggcttagccttgggaagggtcccagcaaatgattgctgacttgataagggaacggtgcccactgaaagaggactgggaattggagtggctgctctggatacctatttaactgaccacactaggctgactattaattgcacataacttgcctttgtgttgaaatgacacttggtcatagattcttattcatcttggtattccccttatcacttgactgtggtaggtgtccaagaatacgaaacattcagagacaacaagttggcatcatgcttccctgactccttgtgaattagcagaagaggaggagggcagtttatattttcttttttgttggagtgaggtaagtttaaatgggcagcgttctttgttttggc

SEQ ID NO: 96564 - DNA, 1003 bp, Homo sapiens
cagtggcacaatctcggctcactgcaagctccgcttcccgggttcacgccattctcctgcctcagcctccccagtagctgggactacaggtgcccgccaccgcgcccggctaattttttgtattttttagtagagacggggtttcaccttgttagccaggatggtctcgatctcctgacctcatgatccacccgcctcggcctcccaaagtgctgggattacaggcgtgagccaccgcgcccggccacttctaagggttttaaataaatgagacaaatagggcatgagactggatggcttgaagttatataagaaggtggtgaagtttgtgatccagtcctaggtcttcatactaaaactccggggtgcattccactgtaaactaatgatgtttatgaattctctcgagttctgttaggtgctttatatgcattatcgttgatgctcatgacaacttttccagggaggtattgtcttccttttactaatgagacaatgggctgagggtgttaacgtggccactacccaatcctgggggcagagtttgaatccaggcctgcctgagacagcctgcttctttctactgcactacactattatgttttctgagttagctctaagatgtcattaaatgtatgcttcttgttcgttcttcacataccctctgtactaaactcattatttcatacaatagctgctttgaatgagtccaacttgtgttatatgctgcaaaatctgaccttaatctcaagggactcaggatgtagctggggaaacaagcaacaataagcaacccagagagcttcataatcagtgtagatgtagatatgctaagggtttggagggaaggtgccttttctgaattctgagtgttcagaaaatgtttccttggaataggaagtaggtgagattctagctcagtcccaaccactgctgggctgcacttttcattctacattgtgcatttttgctcctttggtgcttatatgctttattcagacag

SEQ ID NO: 96565 - DNA, 2898 bp, Homo sapiens
cctgactttaataatcaccattctaactggcatgaggtggtatctcatcgtggttttgatttgcatttctctaatgactagtgatgatgagctcctagaaagcaattcttatgcgtgttaaagtttgagaacctttaagcatgattaaaagagaagccacaaaagaaaagtgggcaattctgacttagaactctcagacctctagcagtgactggaggatgggtgggaattttggtatcttcctgcttgccagtaggtttacacaattcgatatcagaataagtctttaaatacatattagtggctttgtttattgtgaggattttaaggtagccctaatgtgggtttaaatgtggatttcatgcatgttcagtaataatacaatataggtcacttgtgtatttctttaatcgtttcagtaaacatgaatggtagctcaggaaacctgaaaggtaggtatatccctgtctcatatatgagaaactcaggattagggaagttaaaaatcttacctgagaacacatatttctagtaggtaataaagctgaaaatcaaatttctcgactcaaaagccgtgctcctaacattctgttttgactcccaatgcaaaaatattatgtaaatataagctatatgtagaataaatataaatgtttcaaagtaaattgacagccttgtgatggcaagctcatcatcttttcagtctgtgttcattttgttatatacccagaaccaacagtaactacatatccttcagaaaaattacagataaaatgagaactggatgaataaagccactgttcactattgaaatagtaaaggccaaataagcttgtgatcaaatcttttttttttttttctagtaacagttgtcctctgaaggctttctgaaggctctctttcagacaactgtctctgaacctttgtttttttaaatgcccctagtaaaatggctgtgttgttacagcttgaaggctgtgtggtaagcctttgctcagccctcagtgataacccatagacttggacttccatgtgagaagaacaaccattattatattgtgttagtaggccttgtgttggagattgcttatttttaaaaaaacaaatgccatgtgatcttatttctatttaaccaatgttttgcttgagtgtaccaagcaaggcctcttgagatgctgggacacaaaggtgaattttattttcccttttgcctttgagtagttaactgcctagtagatgagatactggaggtaagagaatgaagattataggatatttaaaggcatttatcatacatatatgtgttatgtttataatgtgctatagaaggacatattaaagttgaagtttctaatattttagattaagctgataaatctagacaacttactttggctgaaggttataatacataattgcatgaattctgctctgtgcctgaatgcttagagatttgagtgtgtgtctaggtatatctgtgcaaacaacttggaagaatctggtaaaaagtattaataccaggatcagccttttaggtggtaagagaatctaccccaaaggcagtcgactctaagccttacttctctaggttgcaagcatcagaaagtaagtatatgtccctatactcactttgttagaaagcccacagtcttttctgcaaagtctatttaacaaagcttgtttatgatcttggactttggactaaacctgagtttgaatcaggattttgctgcttactaattgattgacctttctaagccttggtagccacatccgtcatgagctcaagagctacctttttgacttgttatggatattaagtgatattgcttagtacagtcaagttgtggcagtcaggtaagcacctcacaagaagtggttgttctgattattttgtactcttttaaaatttgactttattaaagcactggctttagggtccaagctgtggactttaactggattctagtatattttacaggtaactttagttaaatcatcatcaacctcaaatgtgaagaacaagtgaagcagggcccccagaacgcccagaattgaactaatggtggcttgtatttgctactcttgccataagattgtacctactgaccttctgtgatacatcagtgttttcaaagttctggtccatgcatgcagccccacttggatttatgttgactcttgtatattttgttctttctagaaaaagagacccaggtgtttcagggcattgggctattccatttcagagcctaatggaagtgctagtgttttcataattggaacagacaactgccatgctacatatggtgctgtgaccactgagcagcttgttcacaatgagaaaatacattgaagttgtgaccatttgagccttgaagaaactgctgttgaagttttgtttggctccagctccatcctggaatggatggagtcatttggaattattctgaattccagtagtggcaaaaaaaaaaattgtgtaacttgtatatagatggttttctgtttgattaacagcattgttcaataaaagatgcattgttttaaatcaagaatacggtgccatctgacttgatctaggaggcacagaaagaagacattacagattacattccccagtaaacccctgcgttattttttccagaaggttctatattaatctgtttgggttgcgtcctacgtgatcttgctgagtcagacagagctaagcttatgaaacaaaggctagtcccaaatcaaataaaaacacaccaccatccagaaatgagagcctagaattttctaaagatgcacacatctttcttactatctggtgaggaaaattgctcatttttctctcagctgataaatatcacttttgccctaaatttttgtagtggcaatctacttttttaa

SEQ ID NO: 96566 - DNA, 1034 bp, Homo sapiens
aaacatttattttttcttgagcagaaacaaaattgggagttagatgatatctttttcattgccccaagaaaaccactgctttattccattgaaaataagaccttgatgggtcatccccggtctttggcagtagaaactattcgtcttgtcttggtttccattcaggagctttccttcccaaaccttgtcccctgctttaggagtaatttttttagggctttaggtttttctcatgtcccagtgactaagcttgcttttgggtggttctctgtgctgcatgtagtccttctgggaagaaactcccatgaagttcaaaggagcagcagatatgcagggtgcatctagaaatgaaaatctgaccctttgtccctctccttttcatctctcttttgtacaggccttctttccttctgtgcaaacagacccttgtcatagtcatagtccatcacgctgttaaatgatttccagcactgctctatgatgtgctgtaatttcagggagtagttttattttctacaacatgttgctctgtagcacgtgtatttcactactgagtggtagttctaatggacatattcttaacaaaatagtcccagcattacagaatactaggttagaatacatacccaaataaataaaatgttacagacacagtccaagctcgttctctcctgacttcctttctcccgctacagaggaaaattaccccgaattggcacatctcattcctatgcactcttgttaaaaataacttatagtttgcttctgaatttatagaaatggcactataatccatatgtacttttgaatctttatacatttgatttgagaagtatttatgttgatgcatgtggctttaggtcatttattttattttgtttatttttttgagatgaagtctcgctctgtcacccaggctggagtgcaatggcacatggcaacctctgcctcctgggttcaagcaattctgtctcagccttccgagtagctgggattacaggtgtgcgccaccacgcctggctaatgtttttgta

SEQ ID NO: 96567 - DNA, 1262 bp, Homo sapiens
tatcttaagtctttattgcctgcctttgcatgttgtcatgatattagccagagaaccaggcttttaaacccaaacattagtaaaccgtaaaacatatcttgagacaatctagtgcaacaagagcaaatttggcagaatttctgaagcgattccatgaccagtatttccaatacattaatctatttagatatgctttgggtacttttcctggcaaaatggtaaattgtgcaactggcgattaactcagatcttggaattagcctgtgactttgatcttacataaataagtttcctcagtaaagtttttgtttagtatctgaaatccagcttttttcaagagagcttttagctggactatcttctgtattgatactgagaattcagaattctctctcatgagtgaaatttgttaataagttcttgagagattgagaggtcctgtccttctgtctagaacacccctcctgcaaaccctaaataatgccttagttaagctgaagattcggaaaattgagatataacatgaagtaaaagtatttttgaagtcttttcaatccacctatgtattgcacacctgtgtgcccagcacataatatatgattatccatttagtgacaatgtattgggtgaccatggtgtgctgggtactgtattagagtataaagagatgaaaagacaatgtctttatgtagttaatgctataataggaatatgtattaaatgggagcctagaggtgatacatgctctttggaggcagagattgacgaggaattagaaaaggaacttaaggagagttgacttgaattggagagtggaagatgaatgtaatggcttggaattgaggagaggtggggagcagttttgggaggaagtcattctagggaaaggcacggtggtatggtgtgttttgaaagactgcatatagttgctatggctagaagaacatagtctctgtggatatggcaagagaagttgtggtcaaacttatgttttagaaatgttatttaggagtaatgctgggatggcttagagtggacaaagacagcccaatcaaaagtctcctgccatgaccgggcgtggtggctcatgtctgtaatcctagcacttttggaggctgaggtgggaggatcacctgaggtcaggagttcgacaccagcttggccaacatggtgaaaccccatctctacaacaaatacaaaaaattagctgggtgtggtggtggacgcctataatcccagctattagggaggctgaggcagga

SEQ ID NO: 96568 - DNA, 1051 bp, Homo sapiens
ctcagggctccaggaagctgactgagcacgtagtccaaagaaattttgcattctggtatttttcagtgttttcttgtgattttcatctttaagctaatttgttgagaagggcttataggatttgctctctttgggcaagcttcctcatcagtatcaatggctgtagtcatgcagtcctgttgtgaccatgttcaactgaattgacaactaatatgtatcacgccacaccactctgcggttttgccctttgtaaatgttggcttcatctgggaaattgttagaaatgaagattcttggttcgtgttcttgacctactgagccagtctacgtattaacaagatctcacacgtgactcacgtgtgcattaaaatctgagacttactggactagctcaggaacatggcctctcagagcccttttgctgaagttcaaggctttttctgtttattttctcctcagaagtgatgagaaacatctggtcaccatctttcatgcagtatacattttcatggaattaaagataatgatttaggtgcctctaagctgtctcttcttcaagcttaataactgaagtttgtgtgatctctttcttcatagagaagatgatcttttagcctttcatcctttattgcctttggtctctgtttcctagataagtttttaaaaaacgtcatttctgaaatgggcagaatactcttatcagagtgtggttgctactaaataagcaaaataacttaacccatgtattttttaagatctaggggcatttggctaaattttttgttttattttaaaagtttttttttttaagcagtaaaaatagcaactaattcttccttgagggaacttcaaacccaaaaagtacctcctctcttttctgaaggatggaataagttgaccaatggtctttggcattcttttgggttggtacttcaggctaattttacaatagaggaaggaatgatggaaagagggaaagaagtaaagagagaaaggaaagaaggagggagagaaagggggagcgaagggaaccagattaataattcaaagc

SEQ ID NO: 96569 - DNA, 1003 bp, Homo sapiens
aatgacttccagttatctattgatactataaacaaggtggtatttcattaatgataggacctgtgttggtcccttaggaatgatgcattctttgcagagaagagttgatcaaggtgagtcctgttacttgaacctttgtgaaggacaaagtaaagaatcatcccaaaacaggaaatgccacacttttatttcctgaggattgagttcatcaggaaagatataatagttatctcttgttgtgtaaacaataacaaactactgcaaagctagaggcttaaaactatggtaaatatttattatctcccagtgtctatgggtcaggaatttgggtggttctgccttagggcctctcacgaggtcgcaatcatatgatggcttgaccgggccacggggatttacttcagaggtgtctcgctgatgtagttggtaagttgctgttgcctaatgatgtgaagcctaagttggtaagttgctgttgcctaatgatataaagcctaagtgccactccataaaggagtttctacagactgcatgttaacacagcatggcatctgggagcaatctgagagacagcaagatggaaactgcagtggattttattccctagcttaggaagttctttaccatcactttccaatattctgctgataacacaagtcagccctatttatcatggggggactggacaagggcattaatatcaattggctaggatcattggaggctggttgtaccacaaaggacacttgattggctttttatctcagttgctttctctaatgttgtcagtgctatggtttgaatatttgttccttccaaaactcatgtcgaaatgtaatccctgctgggcgcggtggctcatgcctgtaatcccagtactttgggaggctgaggcgggcggatcatgagttcaggagattgaaaccatcctggccaacatggtgaatccctatctctactaaaagtacaaaaattagctgggcgtggtgccatgtgcctgtag

SEQ ID NO: 96570 - DNA, 1182 bp, Homo sapiens
tggtatgtattttgtccctgctccctgctaggctgtcctgatgcatttagactgaggtggtcactgcttttcactggtgctattgaactggaactatagtttcccattggtgagatgttgttactacagtttttcacatacatgtatatttcacatacatatattttaattttttacatttattgtttctccagtgagttaaagccttagaggattgagtttacttttagcacctaagaatactactaccttttcatggaggaagatcattgaaactgtaagagtttgcagttacagaagcagtatcctctctggagcactgaacaggtgttgggggccagaggattcaagccctgtccaccattccctgctgagcaccttctctaccagcagtagctcttcagcctctgaaggcatggcggaggcctggagtagggccctgccaaccttgaatgctcatgcctggtaggttatgaggattaagttacataagattgtatgtgcttaaaataggagttggcatagaacaagtactccttgattttgatctggtctaattcattcatatttaggatgaaaaaatggtagcaatgttaagtttaattcagatgacaagacttactaaaaggtctttctgatacctcatctatacatatagtattctactctgtgtagatcatctaaaatttctataagttggagatgatcttggcttttctgttttaagattacaatgaaagacagtgaaatctgcagctgaatttagggaagactccttgaaaacatcatcagttggctttctcatttggaatacaaatggacagttgtatcctcctgccattgctttgttatgattatctaggagttttcttatttttttaaaatgtgactttatagacatttcaagtactataacatttagccattgaagctctctctctctctctctctctctctctatatatatatatatatataattattattattttttgagacagtcttgcttagtcctccaggctgtagtgcagtgatgtgatctctgctcaccccaacctctgcttcccaggttcaagcgattctcgtgcctcagcctcccaagtagctgggattacaggcatgtaccaccacgcccagctaagttttgtatttttagtagagacggggtttcaccatgttggc

SEQ ID NO: 96571 - DNA, 1027 bp, Homo sapiens
gtccttaaaatgtttcacaattttggcactgagaagccagagcgaagtgaaggagttgctcattgttctccatacactctgggttctcccacctctgcaccttggctcaggttttcccctttagctagaatgccctttttccttggctttggctgtctcctaatggattactcgctgtacctacccttctaggctgagctcatagctagcatatgtaatctaacatttgaatcagttgagaaaactcttattttcctgctctatacacccagtatagttggtttgcaggtgtctgtggagtttgttttatacagtgcctgttgggctagagctgcattatagctagtgtctgtaagaccgttctagtttaagagcatgcagggtggcgacagtgagatgagactggctgtatcagtttatggctgttcagtttatggcaggtgacttaaactgagccttcattttctcataagcaaaatgggaacttagtataactaagtaggaaaatgtatataatgcctaggaatggcttttgctaggtgcctaataagtagagtttccttttcttctctttatttcaaatgatgtaaaagaagccttgttttgaaaccaagagttgttaatctgaccaaatttcatgaaaggatattgatcacaacatatttgttatcagagtttggtaacacctgactaattttttgtattgctttgggatttatttaagcatgtgagactggtattacctaaggttttagttgacagaagatggatagcctgagaggtcgaaattatgagagcaaaagacttttgaaaatttctgccatggcatatttcatacgtttcagcttggtgtccagggtttccctgaacagacgagtttgtgacatacgagctcataaatatacttgcctgtgccctcttccagaagggaaagccagatctccagggatgctaactgttggggagacaatgagaggagcttcttgtctgaatatctttgttcacagcagagatcatatttgaagtt

SEQ ID NO: 96572 - DNA, 2495 bp, Homo sapiens
ggcagcctgcctgggtcccttgagtgcgccttcatcctggggcatcttgggatttaggaagcttgtatctgaattttggaatgcaagggcttctggtgggggccattatattttcagctaagattggccttccctggtccagagcctgcacacgtttctaaaatctttttcaaactctctgctgcttcattaaagtaagaaaaaatagctacactctagatttggtttcttgtttcttcaatgacactttgtctcctcatcctaacacagtaatcaactaacctagtaaactaacccatgttagtgtagctaatatccataaatgtattagaggaagaattcttttttagcaagaaactccgaggccatgctccctatctttgtctaactccttggtgactttagtaatgagaattttaatctagaggctccagggagacaccctccccacaaagtgtgggattgctcctgtattctgttaatgcctatttgttaaaagagttaacagtgacccttgaaccatgaagcaactctttttggtgctaaaagaacacaagtgcccaagaatgcagcagcatcgaaactggggatgaagtgatttgttcttgacatcagttggcaggtacattctcttgcagagagtaaagatgaaatagaatcccattcatagaaggcagtttgtagggagggaggctggggatgggaaaatgagctcaggctcagaggccttttacgtcttagtgttctcacaaatatgcttccaataaaaaccatttaaaaggcaaaatataaaattcttccatttaggaggaccttgctgagatctatggtggtggtttaaactgtgccgtgattagaaccatgccctatgaatgtgtaatatgttgtcgaccagatggtcatataatgctcactgtcctggtgagtttgaattagggagctggggaaatcttggctgagaaaaggtaagataaggcaaaagtatatctgcttgaggggcaaagttgcattcaactgatttggtctctgcagaagtttgccatagaaatctgtcagtgtgtactgctttctactattaattggggttttagtcacatgctttgtggtttgttcatgaagtttttatttaaatgacttatgagaactatcaaaatgtttgctctgaaggcttaaattgtgttcttatgccatggattttttttcagatgatcaacttacccatgtgaaaatgcttgagcaggttggctgccaaattgtaatgaaaggctgtcagcaatgccttgatttatctttctttcacctctcctggatatgctgtctgcttcctaagtctaagagggatatactcagtcctgcagacaacatctgtgcttctgcatcaggttccctgcctttcttgggagctttaaacataagagtatcaggaaaggttccatagttggtgacaatagaagataggttagttttgggcaaatgaggaaatgaaatgagcttctctttctcctagcataccctgctgagatttattcccagcaccttcaagggggctattgtagaatgcaatccccagtgctctcagtgaaagggagaattacaaagtacagagtcttatcctttcactgtaatcccgggtgcacacttggattcttgatctgtaagtgggagtgtggtccagacctcattcaatgtaaagctcttatagagaccctgattttttaaagggaatttctgctgttgccacttgtcttgtcatcttctccctgagaatgttttaccatagcagttaataagttatgtgattttaaatacctcttcacttggaggagtcagtgcctgtggtaagtcctttgaccattcattaactcattcaaactctaggctttagctgacaactttttcattagcagctttctttgcttgttattttactttgattttcatgcttttcaccttatatgtgtctatctgttttccctctaggactttcatgaccctacattttcagcaattcattgtctgtctgatttgatgttattaccttgaggcctggagatttcttacacagaggtgtttttcattgacctggataaactcagaaacaagtcatcactgtcttttggcatcccgcctccccatttatgtgttattcaccatagtctaattaaatatgttaagtagcaatgccggaagaagtagattctgctttcaaaatggttttaatttatctcaacaaaggtagagaaaacctttgttgctttaggagtctaggagactcccctgggcaaagtttgctgttttttcttcccagattccccttgcccttcaccattcctccaagacgcttgaggaatgatgatttaaaagaaaaaggtcatgagggaggactggttcatagatatttcatgaaaaagtgtggcctgtcttgggattaaaccattcctgggaagtagaaatgagctcttcattgctttgtaggcaaccacagtatataaata

SEQ ID NO: 96573 - DNA, 1135 bp, Homo sapiens
ttataagatatgtcttaatttcagatacattaatacttagaaacaacacccatgactcttaaaacagagggaaacctatgaaattgctactggtttttcattgtgttaaagataccataataaatgtctttatttataaacttgcctatatttgagattatgtccataggatagatgagaagagagttatggacattttctaagacttgtttctttttgccgcattgcattctaaaagggtaaaacatatttagagtgccacctgcagcttcttagctcttgtttgactgtccccctgacagcaatgtgtgttgacttttccacaaatctttcctaatctgataggccaaagagagtctttccatttggaagtgaaagtgaacattttctattttattaacaggttgtatttttcttttactttaaaaaaatctcttttgcctatttatttattgggtcttactgtttttcatatgcatgagctctttgtgtagtaggtcagaggttagctaactttttctataaaggaccagataatagacacttcaggctttgtgggccatacagcttctgtagggtgaaagcagccttagacaataggcaactaatgaggatggctgtgctcccatatggacgctgagatgtgagtattatatagttttttatatgccctggagtatcattcctctttatttttttagccatttaaaaatgtaaaaaccattcttagctcacgggctgtagaagaacaggcggtgggctggatttgattagcgggccatagtttgctgacccttgtaatagatgataactcatttaatttattttgactattttcctcacttccttttttagataaattttttaggcctacagaagtttgaatttcttacaacatcaaattttaaatttctgaccatttttgtcatgattctgaaagttagaatgttcttactaacgatcatatccaaaaatacacgacttaattttagcttcggagacaatgttttttaaagaattcgcttttattcatgtggaatctagttgtgtatagtgtgatttggaggtctaaatttaatttttttgcaagcagcaaaccaattgtgggttgcttttgaatcctcctggttagtac

SEQ ID NO: 96574 - DNA, 1561 bp, Homo sapiens
ttaggtagtttcagatgttgtgtttaatctttttttttttttttttttttttttgagacggagtctctttctgtcacccaggctggaatgcagtggcgcgatctcagctcactgcaacctccgcctcccgggctcacatgccattctcctgcctcagcctcctgagtagctgggactacaggcacatgccacccagctaattttttgtatttttagtagagacagggtttcaccatgttagccaggatggtctcgatctcctgacctcatgatccgcccgccttggcctcccaaagtgctgagattacaggcgtgagccactacgcccggccgtgtttgatcttttaaaagcccataaatgctaagcgttgttctcatctgtaaatagtggtgaaacatgaaggtatgaacaggtgtgctctaagtcagagggcggagtggaggggaacctgcatgaagtatctttccttagcaggccaggcacattccctgctgtttttggggagcgggctccaggatcctttccctcttggaaaagagcagaaagtgccaattggatctctggtcactgaataaaactgatctaccctctgagtgtggcccagctcttaacaggagcaaattgagacctcaactgaattctgccttgaagatcttttgtgatgtttactggtccacgaagacaggagagtgagggtaggaaggtgcaaggacagatagttgctgccaaaatgaatttggccaggttcattcatctgctctcccttgcacacagctctctcattccttcctctttgactttttaaaaaataaactttttgttgtagtatagtttcagatgtatgggaaaaatgaggctataatacagagaattcccacatatcctgtatctagtttcccccattattatcttaagttagaatggtatgtttatcacacttaatgagccaatacagttaccttataattagctaaagtctgtgctttattcacctttcctcagttgatacttaatgttctttttcggtccggggatcccatccaggatgcggtgtcacatttagttgtcgtggagccccaggctatttttggttgtgacagtgtcccagactttccttgtttttgatgatcttgacagtttcgaggagtactggtcaggtgttttgtagaatacccctcaattgagatttgtctgttgtttttctgtggcgattcaactggggttgtggattttgagggggaggatgacagaggtaaagtgccattttcatcacatatcagtgtgacttatcacatgctgatccttatcacttggcggaggtagcgtttgccaagtttctgtactgtaaactgaaaaaaaaaaaaaacccacaaaactgtaaaaacaacaagcaaaaacccaaacagctctgtcatcttcagaaggacgtcactgtgtacagcgtacacttgaggagtgggatgttgagagaggaggatctatctaacttatttggaattcttctgcctgggagatttgtctcttcttccccatttatgtattcagtcatttgtatcagtg

SEQ ID NO: 96575 - DNA, 1131 bp, Homo sapiens
ttggacattgaagcacatcttcagacttccatctctgggtctttctgcagccccagaacatgtttattgaatgaattaatgcatcttcaatgaatgtaactgttactactgtgtatcatcggtttgttcagttaaatacgtatcaatggacaagcttttcctttcctacataaacattttgttttttggttatcttgtatctcctcacatcccatagcattgcagtggttcacaggcacttaacagagaaaggggacaccaagctgaatttaaatagaaaaaataatgaaatatatatcatctttggggataatgtcattttctgtttcttcctacaacttgagccctcagaattactcgtaatggggtgtttgtgtcatctgattgccaatgatggctgagtgagtgaatgcatatttggagtgacctggaattctgatgtaggtaagggattcagaaggattatgtttagattaatttttctgcagagttctccagcagagtcctaatcaaaaattggtggtggtggcggtggcagtggcagcagcattaaacacaacaaaggcagaacggatccttatttgcatcattcagtccagtgggtgccgttagctaccatcctagagtgggtgtggaataaattatatgtataaaatttttttgagaagaggaggatgagctggtcacatgtggcattttctcccatgttgaaataacatgagatggagaacattgtgtgttgatgtctatctacaagttgatttttgtcttaagataagcagagcctccctacaacaggccctgagtactgcatcaccttcctccagtttgaaaaactgacgggggttcttaccagtctttgttaattcctgtctccggaaagaatggttggtaaaggcacatccgtattctgacatgttgagaaagaaaggatacatgcttgggaacagaagttgaggctgtaaattgttggtggtcttactagtattgggaggctgttttatccctggcatctagctgcttgtatggacgctggggttctagaaataagtttttactcctttggctataatgagctgggcattatcattaactagaaggctggattggaaaggtttgggaagcaaaggt

SEQ ID NO: 96576 - DNA, 1007 bp, Homo sapiens
tacaaaaggaggctggattagattagtttcatttgttgtttcaggctctgaaatgttatgattccctatgtctataagtgtatgctgcacatttttttccttcagtagtagagaatgtctgcaatgtggttaaatccttattctttaattccagtattatagaatatgggttccatgtaatttacattcatgttgtttttcttgtcaaagagggaactgagatagttatctactgtgttcagtagcattttgagtggggagagagagctatagtgtaagcttgaacttgagcagacattagcactctgttaggttacaattggtgttaacagtagagaaaagaatcagaggaagaggaggaaagagactggtgtgtgggagctaaggcccattattttgttatgggcttcttccccttttgagtgacttaaatgatgtgattgaagatatttgatagctccatcaagatggtagtctcaattccttctacagcccacactttctcctcctagatttgaattgttatgatggtagcataatttttgacaaatgatgtttgtgtggaagtgtaccttttatctgagttgagtcattgcttttgatattatcacctccattttacagatgagcaaatttagtctgagagaatggttaaatttagaatttaaccatatgaccttccaggcaccacgtactgttccactttaagtctaagacgtttcatttacattttgttcttactgatttagaaaagtttattgttttcattttctcacattacttcctggtgcctggcataggactataactgaaacatttttataaatgatttaaaggtattgaatgtgatgaactggaaaagaagaaaaaagcttcctgagtcacccagacttcatcctggctctgtcactttgtaatcttgagaggaaagattaacttctctaagcatcagttttcccacctgaaaaagtcaggaaaatattattttccatactgggttgctggga

SEQ ID NO: 96577 - DNA, 1962 bp, Homo sapiens
caccatcacattgtcttctcatttagccagtgaaatgattggcgtctcactgcagtagtacagtgatagtcattgattgacaagaccttctctgggaaggactacatttattctgatttctccagatcagacttttagaaccaggagaggaagtctgttcatggtcagagttcttgctgagtcaatgtagtattttgaaagctattgtgccaaggccccaggattctcagacctggctgagcaacatgtaactgatccaatttctcactgactcaggaggaatgctagctaaatcttgaatttggtactgtgacttcaatagtgggccagtcaaggggctcacgcctggtggaccaccatcccttcacccccaccccaccaaggtctgtctgtgcttggcttttcggactcatggtgaatgcttgaacctttttattcccttaacataaacttattcttctgggtaaaaaagtgaatcctatccccatgaaggatttgcttgattgaaatgagacccccccttgggagagaagtataaatgttgtgagcagagtggccttacggtagcttgctgacttcctagaggggtcgttgtgggaggagagccctgctagttccctttgccccaaattatttcccctctgtgcttgctacagaatcactaagtgtactgatagctcttaattacttctagttaaagaagagcaagccacctggtctctgaattaattagagcaatactctttaaaagaaacatcctcctttccctccttctttgccccccagcaaaatatttcctattagaaaaaacatatgaagccattggttagttttcacttcctttcctaagggatagtcagctaaatatgctgtcctgagagaatttgacagaagcagataagatttttgataagagttgaagagaaattctgggaagggaaggtaaattatactccctaataaaagccctaacaaacagcaggcataattggttgtgtatttgggggtgtgtgtgtcagtgaagtggtgtgtattctacataccaccagtgggaggaagaatgctgaaaaaagagaagtaggtgcttgctcaagacaggaaatataccacttcccttaggaatctgcccataggccatctttgcttatattatccatgcatttcattggcagtactctcctggagtgagaagtggtgtatgaagttggtcctaaaatccactcctcccatctccttcctaagagaaagttaacccactttgggctaactcaagagccagccagttatttttgcccatcactgtaagtaggattacagctcaccttaaatattggggaaaagtcctgatcatttgttcattctattagctagggccaggtgttgtcactgtctctagcaccgcttccatttcactcccattaaatcttagcaaattcctagcactctgaacagtgtattttacttgaatgattcccatgtggccagacttctgggagctgagcacatggtacccttttattgggtgccatgaggtaaccttggtaccctttggacattcagctttcctttgaggttatagctaattctctgatgaacatttaagtgggtggggctgtgtgttagccctactgtgtagcttttgtgatccagggaggtgtgaccccattgtggtattcccatagctgagatcataaaagcatcccaagtgtcatttggaagccaaacagtaggttacaaactcattttgggttaatctccctctccctaagctacttcatctccttgaatgctgctaactgtaagcttttatttcctttcctgtgttatcactcattaaagccttctctgacctgtataaatgagactggctttttcctcttagtattgtcttcgagcacttggcaggtggcatttggagccagagcctgatgaaagttgcccttgtgtattgtttttataagc

SEQ ID NO: 96578 - DNA, 1216 bp, Homo sapiens
agtttcaacttgaatttgtagatctggatagtcaaaccttaacaatacaggcataggttgtcctctgtgggtatctgtagtgaattacaattctgtattaacttctacacgattacttatcctagtctcattagggaacacgaaattacctgaacaaaccataaggtagcatagacgttcaaatctgacatgtgcaaagttccttaagctaattagaaaatacacacattgatctgtgaatggatgcccttctgctcctttagggccagtgattgagaggtgtctgttggaggttggtgttgaacttgtgcttgaagtctccggatacaaaacttcacggttctggtttaagcagaagtcttcattgaatgacatcgatgtggagagaaaattccttggctttctgtcagctgaatctgctgatttgtaagactcttggggcaggttaacagccttgttggttgttgtgctgtgctgacagtgggaccaagcggggatcaggaaatagtctagggcattgcaaggttggatttgcttacattgaggtgttcctgtgatctgtgcacatcacccaaggtgatcagggccttgaggcttaggctgaaaggctggctttcgaggcaaaagatcagaaggaagaaaacatgctggcacctgatgtatatccccttttgctctgcttccatctacggttgctgcctgctcctctgacatgtaactcacctcctctgtgcctcatattgttagagctaaatttcccactgaacccagactgttatttttgacctgccctgcctatttatttgtgcaccagtgagtgtgtgagtaaatgcattatttttattattattattttttcttttgagacagagtcttgctctgtttgcccaggctggagtgcagtgtcatgatctcggctcactgatctcgctgattgaacctctgccttctgggtttaagcaattctcatgcctcagcctcccgagtaggtgggactacaggtgcttgccaccatgcctggctaattttttgtattttagtagagatggggtttcaccatgttgcccagggtggtctcgaactcctgagctcagataatctgcctgccttagactcccaaactgctaggattacaggcataagccactgcacccagcaaatgcattaatttttaaaaattatagcagctcttttggaagaattgaaacatagaaaa

SEQ ID NO: 96579 - DNA, 1172 bp, Homo sapiens
atgattaaatcaagctacctaacctattcacctcaaatatttaacttttttataacatttgagattttctcctagtgatatcgaaatgtacagtatgctattattgtatttaccatgctgtggaatagccctcaaaaaaggaagaaattctgtcatttgcgacaacatgagtggaattagaaaacatgctaagtgaagtaagcgaaacacagaaagacaccacatgttcttacatatgtgggatcaaaacaatcgaattcatagaggcagaaagtagatgagtggttaccaggggctgggggaaatggtaacgtgatggtcaaagggtaccaagcctcaggaggagtaaattaatttatttttgagatctaaaatgactaattttaatagcttttttctgggatccatcctgaagttaccagttttctgaagaaaagcatttgaaccaagaatccaaatgtgggcttcactacagaaaggagaaacacagggcaaaactgtgtctaggcgcccctgagaccaccccaggaggactgttgggctccctgtgacctgttttggaactctgggggagctttatcagggaatacacttgctggaagctgcagaatatgggagagactccgattgtaacaggcaagtttctggtgagacaaaaatggattaaaccaagactaatgccaggcatcagagacagcaaaatcatccaatttatcatccttccctcaaggctgagaggtttttaagtagtttggaaaaacttggaaagggatagggaaagcttgagaataatttaaaaacttgtcccctgcaggccagtttgctaaaagccgagttttaccaaaaggctaaagcagtaattaaagcaaaaagcctttgaaaaggaatcttgaactaccccattaacagagattacagggtatggttagtaaacaccagagtatttaaaagagagtagtgacacagaaatgaatgccttgtgaaaagacgaatttggtcaccacaaattatagaaactttcagaatatacagagaatgcctgtaagccaaatggaactgttggtagaactgagttaaaaagtgttttctgtagagtttcatttgtaaacgtgatttttaagagtacaagctgaatattacttaaaatgccagtaggaaaaaaagtcacaccc

SEQ ID NO: 96580 - DNA, 1360 bp, Homo sapiens
ggaaacagccagagcttcagatagccctgggtctcagatgccttagtacagaataaaataagatccgataaatccatcctggtggtctgcatggcatttgtcagtaatctaggattcctctgtccatttaccctcctcttctttgccttggtatcatagggagcaaaacatgctttgatggacttttgctttctatattggacctcagagagctagagtgatgtgcttttgaggtcccttacctgagggagttgggggttgggggtgtctgtgttctggtcaaaaggtccttggtgaaggtctgaaaagcctggtctggaatgatctgtgggaggaactgggcccattgccccatatccttagcccacctccttcctcttcttttgcaaatggttgtattatagttggtgggtctgcccattaaccttgcctattttgaagcctgggaccttttctttgtttagggggaaggccttttgatctcctagtgtgctaggattctggggagggaagctcatgaggctggtatagtcattaagttcagctgttcactaaaaattacctttctctgaatttggaagatagcaaccatgatagtaattccctctcggcctcaaagggaaaatgaccactctagtttttgtttagcattcccctgtccttagggcacaaaaaccttgtggaagtattcggtggtacacatgaaggaacccgggctgggtgtctgtccacctttgtatttagtaaatataacggattagcgcgttttggtgggaggaaaatttgactcttcatacttaatgtgtaatgtacttgggatttattaattgattgatttgctgcttgtgttttttgggcctaccatcttttttttttttttgagatgtagtctcattctgtcacccaggctgcagtgcagtggcatgatcttggctcactgcaacctccacctcctgggttcaagtgattctcctgcctcagcctcccgaatagctgggattacaggcgtgcgccaccatgcgcggctaatttttatatttttaacagagacagggcttcaccatgttggccaggctggtctcgaactcctgaccttgtgattcgcccatctcggcctcccaaagtgctgggattacaggcataagccaccactcctagcccgggcctaccatctttttattctaccaagttatgcccctccatttgcttctggcagactttcatccagttcaagacccttttaacttatcaaaggtcacaagaagatgctcaagagggaatcaaagtgagtatgtggaatgcagggtattctgtcaaaactgttagaatatattaaaaattggaaaagccaaagcttgaa

SEQ ID NO: 96581 - DNA, 1060 bp, Homo sapiens
aagacttcctcctcttcatgtaaattctatcccccagtattaacgtttgagataacctctatgaagcttcttataaatccttccagaatcgtgtatgcagtcaagcagggcccctgggattagatatatggattgtatttagattatagtaggaatgactccccctgggtttgtgcagtgcacatacccttggccacacgtggtcaccctatatgcagagtatactctacctttaaaacaatacaacataggattacattcagtgtactgtgctataccttgcctttttcaattaacagtatataatggaaactttgccattgtctttaaaggatattgtcacactgccaaattgccacattccccctttgtaaaaggcaacacctatttaaattaccagtggtgtatgagagtacctgtctcaacccattcttgccaactttgcattttatcaaacttgaaaaatatttgctgattggtaacatattcattccaaaaatgttttaagtgacttctgtgtgcaaggcttcttgctctatcctgcaaaacaaaagcaaatcagaaccgtgctttcttcttttctagatgtctgtggtttaatggcagtgagggacaaaaagcaagcaaaccacaatttacaattattttatgtacagatttatcatggaaacaaaggggcagctgtagtaagccattatagtttaatgtaaagtttaaaatgccatagaaatatgggttattgctctttgtgttgcctgcagtatttttcttctcatttgtaaatatattttccatttagtttcttgatgtcttctaggttagcttattgcataatttaagagcctttttccttttgctgcatcaaatatatggtagatagccaactttttaaggactctcttttaaaaaccttcctgaaatgataccattttattctttttgtaaagacccctatagaatatctagggaggttgagaagtttctagtattttgaaataagaatttatagcaaaccctgtgttttgactaattgtgttctataattctgtgatgtggctat

SEQ ID NO: 96582 - DNA, 1001 bp, Homo sapiens
caaatttattctgaggatagacttccctgccattgcaagtagaccttctgtcagttgttataaataaactcaagtctttggatgttccttctgaggttgaattggcatagggggccgttaattaaactgtagcctttcttgggactctaacaaattttaaagatgagtaagacaacattggaggtactccctgatagtcctgcagtgtaggataatacaggagaagctccaggatccatctcctgagagctggctttgcagcgtaggataatacaggagaagctccaggattcatttcctgagagctggcttcaaaagaagttttcaggttgcatggcaggcattgacatggactttggagtcaggcagacccgggcttgagttctgcctctgctctatactagcagcgcttacctcatggagctgttagcattaaatgaggaggtatttatctatctgtcatttcccagaactgatccaggacctaataggcgctgaataaatggtaggccacttaattttatatcacaagagcacattcttaaatctttattcaaggacaggaggccctggaactaactaatgaaggaaagggaaattgctgtgtgccatcaagcagaggatcagaaaaagaatatgagaataattttattagcacttacaattcactgcgtttcaactattgcaaaataacagtatgcaagagtgtaggttgtcttacagaaatgatgtgctcttgtttgtggcagctcattttaggggagaagtcatctaggttaccatgtgtttgtagagcagaagacttaaaagtggacaaaggaagttggcattattctggaggatagaaaatcaacccaacttctcttctcttcccaccactggactctgggtgagcttgagaatgggaagtcttttctgttgcctagtgagtcaactcttaatgtagtctaccgtggacatcagggttggtctgaatgtaaagttgcatgcccctggacaca

SEQ ID NO: 96583 - DNA, 1018 bp, Homo sapiens
attcaatttctgtgacatcagttctagaagccctccttgatgtatatgggtagttcacaacagtgagtaactgtggttaaaaaacaaagaagagtaagttgttacaggtagaggcatgtagagaacacattcttattagtgccggaagtccttatccaagagtctgcatgcagaacacagaggtgaatttcattctttttctttgaagcattttcttaatcttttcacatcaaaatgagggaggacttttgtgggaatgatgaaaacactacttatgaaagattgttaagttcttatttgagtctgaaatatgactaaatcttgccagcctatcagatgcagttgaaatgggaacctctgcaaaactgtgggaatcaaagaaaaactgccttcaccttgtctttttcaaagaaggggatgtagggaaggcaagatcctcttcatgactttttggaagggtgatttctatagtcttaacaacatttgtagaccatgtaatatgtgcagagcactaaatgggtttataggtaatgaaattttagacttggagttgaccttaattgtaattttattcaacctgcttattttgaaaatgagacaattaagaggaagtttactgcctctttaggaagttaaacagctacacatctttataaatatttttgagttttatgatgtagcaagtgattgatactcacaagcacacccagcacattcaaatacagaggatctacagagcattaacaagttcgctagataatagtgatacattttctaggaagaggtgggatttgaaccaattttagtaaaaaggggaggaaagacagagtggtagtgcatgcatgtagtgctagctacttgggaggctgaggcaggaggattcttgagcccgtgagtttgaggctgcagtaggctataatcatgccactgcactccagcctgggtgacacagagcaagaccctgtcttaaaaatgggggacaggaggccaggcgtggtggttcatgcctgtaatccca

SEQ ID NO: 96584 - DNA, 1036 bp, Homo sapiens
tggagtgacccaagatcacatcattgcactccagcctcggcaacagagcgagagactccatccaaaaagaaaaaaagaaaaaaaaggagaggagagaaacagcatcagttgctgctggggaatgccaggaaattaagtactaaagagggttcagttgagttcacaacatggaagtccgtcgtgcattcacacagtgctgactcagcctgctttgggccaggctctacgctagacactgagggttcaaccatgactgagattttcttccagtggcttggaagaagcagaaggcagccagcaatgggttaggagggtcaggacagaaactgactatttaagcagtaagttccagaagactggaaggagagagggcagccgagtagagggtggggtagctgggggattttcacgatgatgatgatgatggaagagacttgagagtgtttaaatgtaataggaagattcagagggagagactgaagatttggaagggagagaaaagctggatagaggcatgtccatgggagtatgggatgggaaggagaccaccgcccagaccctgcatgggtggtctgcatgactatcccacaagaaccagcttgatatttagtctgatttgagggtgcttaaaggccccattcgggtttgcctcacttaggtgccacatagccttaatttccagcatgaaagatttattcctttggactactttcatttagagatatgcaagatattcctggggcaggcaggataacacattacagaaatagactctaacgagcaagtaaatacttagctcccctttatcctaatgggaggtagtgagcttgcgtgctcaggaggaagagactgaatcctggagtctgtcctagcctgcctagtttcagttctgatttagtggagacaaaaggccctgtatgattttaacatagttgtggcagctgtttccttgagatcagttcaataatggtattaaaatatgatagagtcgattgaatgttcagcaagcctatgggtaactcagtgtcccctgctc

SEQ ID NO: 96585 - DNA, 1068 bp, Homo sapiens
cccttctgattaacataacgaagtgaggacagagccagctcagttctctccttttgcagtgttccgtggagcgtggagacaacagtaccttcaggtactaaaggcttttcatgttttgtagttacagcagttagaaatttagtaagacatttcagtgttatacttaaagatgaaaactaaaaagcttttctgattttaattagattgtttattcgaaaaaccattcattctcctaaaatttttgtttaaaaaaagattggctcatcttcattatccagactgctgcatataccatgcacagccagaagttgccatagttagaggggccaggagcagagccatcctcagctcctccctactcctcccttctcacttaagtcagccccatgtggcatctcctcctgctgtctgacctcccatcgcagtctcctctgcctgacttcactgtctcctgcccaagctctcacaaaagctcatagcctcttacctgtccactcgttccttaaaatcattgacggttgtcatctttacaaacaggacaagatcatgaggtgatgtccctgctccatgtgtccattacccatggcggtggattttgaaggttcttctgggatgtggcaggtcgctgggtctccaggtcatgcccttaccccatcctcagttggcacagctctacttttgttctgccttctacgcttggagtaagattttgttgaataaaacattccaggttgtagaaaagtttgaaaaccatgggaggagataactgctaaaatgctgtgtctttccctgtattctgttggaggtgctaactttgaactcttggacttcagtttttttttgttgttgttgagatggagtctcgctctgttgcccaggctggagtgtggtggcaccatcttggttcactgcaacctgctcctcccaggttcaagcgattcttctgcctcagcctcccaagtagctgggactacaggtgtgtgccactatgcccggctaattttttgtatctttagtagatacggggtttcaccatgttggccaggctggtctcgaactcctgacctc

SEQ ID NO: 96586 - DNA, 1059 bp, Homo sapiens
taattggaaacaatacatgccccaaatgtgctctcgtgtcctagccaagaacatggtttcaaaaacatgagaaataaggataatgaaatgaaaaacactttagaaagcttagatacctcaggtattgtattgtgggggaaatgaaaaattaagtattagatttatatgttttctggctgggcgcagtagctcacgcctataaccccagcacttcgggaggctgaggtgggtggatcacttgagggtcaggagttcgagaccagcctggccaacatggtgaaaccctgtctctgctaaaaatacaaaaaaatttagctgggcatggtggcagatgcctgtaatctcagctacttgggaggctgacacaggagaatcacttgaatttgggaggcagcggttgaagtgagccaatagcataccactgcattccagcctgggccacagagcaagactctgtctcaaataaagaaaaaaagtgggttttttctttgcagttgggaaaagaatatgaaataaagtggcaaatatggctcatttgattattttcttaatctttattttttctcttgtattaaatttaagactgtagacttcccactagatcttggagacactaaggtgaaaatcttcacacattaagttgaaaatatctcttttgggtgggtgtaatgtttcacttgtgaaagaactgttaaaatcctgctggatcacgggtagcatagggtgcaaaggcacagaaaaagctcatttttactgaaggagttttagagcctatgtcaggtgacaaactttgtctatttctgccaccttcctggagtatttgctccattgttggcttgctgtgaaggaatgtgggcagaaagggatgctgggagctcttcattaagatcaaggcctagttcttcaaggactactgaatgattggacctttcatcagcatacaagaggaagggattgagagtgtctgttcatgccattgatttaattggtcagagaaagggccaaagaaggggcaataacctcagagaagagcactgactgcctgtagctgttcttact

SEQ ID NO: 96587 - DNA, 1033 bp, Homo sapiens
aaaaaaacctctgattgtctgccactcccacacattctggtttaattgatggagatgacctagtcattcggagtttacaaagctccccaggtgattgtgatgtataacaaatttgggaacagatctatgcttgtattataaattctccacaaatctatttccttgctattcatattatatgtaagtttgctaggaacaagaacaaataaagaaggaaccacatcaataccttgtgtttgctagattcctaagactactacatatatactcttaattgatcataccctgtgcattagatggggtagaaatgatcccacttggctaacaaaaagagattcaaaggttagttgacttgctgaaggtcacatagctggggggtgatggagtcctgtcttaaacctggatctcatgtttctgccaccacataagcagagaaatgtagcgtatccagcttcctccaattcgtggcttgttttctctctcttcataatagagcccttgtgcttggatttataaagaatgtttcttttgatatttagggggaaaaaatctcattaacaattggatgtttgtagtccaacagattcgttatcctctaaggggcactgtgttgggtgttagcagttctctgctctcttcctggtacaacatatgatcttggtgaccttgggttagccagttagcacgtcggatttctagttgttagaagaggagttatcaaacctgtttgttctatctcttaaaggattgttgtcaaaaaatatcattgctttgtaatggagaccaacatttatacttctgcagttatacttgctcctgaaataaatttttttcttacctttttgaaataatagtttttaaaattgagccattttcatatgttagacatgaattaattcaaccctcacaacagccctgggagatagggcctattacccttctcttggtgatgaagaaatcaaggttcagtgacttgctgaaggtcacacatcttattagagacagagctgggattagaaccaaggtggttttg

SEQ ID NO: 96588 - DNA, 1012 bp, Homo sapiens
ttgacatttgtgcttagcgaagtggagggttctgtgggggataccaaaaaattgccctaatctctgtcctcaggaatcttattgagaaggggagatgacctgattgctagacatccatctagcttccctctgctaggcacgagatgtacaaaggtttaaaaagagccatgaatgctaacttcttggcttacagcttagcagggaactcagccatgacttgtaatacagtgggatcagtactaccatggcagcatcaacaagaaacaagtgcgatctcatagccctgcgcaagtagtgaactaccagcaaagtcggagaggcttcatagagaaggggagttgagcagagttctgaaaagactcccctctgactagtgggacagggcattcgtgcaggcaagaacaccctgtgcgaaggcactgaggtgtgaagcagcctggtgtgttggtgagtgctccacaagagccatgtcagacctcaattcagtgctattttgtgtgttgcaggcaggaggttcaaaggagcccgagagcaggaaggctgaccaagccagatttggaaatacttggctgggatgttcctggtcagtgggctatttgggcaaagtggttaaagtgggacaaaggcacagggaaggaatccatggagggaaggggagaaatggctcctttagtatcttgaatgaggcttttggatgtgagtccaggtacagtgctatagtttaattgcttttgcttctgtttctttaaggatacattgcacttaaaccccagtaattattccagattttgttagtggatatatccccaccccccatctggctcaagctaagcagttggcataagtaggggaacagaaggctcagaattgtccactggaagtactcggcttttctttggagagatcaggtttcttccatgggaaaatgatgtcaacacacttatcttagcactttgcctcgagggcacctgtgggcttgcgcctagagcaaaggaaaggggttccctaaaac

SEQ ID NO: 96589 - DNA, 1048 bp, Homo sapiens
aacctcctgtgtccttatgctccgcttggagaggtcatcaattgaaaattctttgcttaattgagcatgcaattaagagtaaggaaatacatgttctgatctttttcttctgctatgttttctggttataatttttttaaaaagaaaataatgtctccgtcctttagttttcccaccttgtaaaatgggagcagtatgtgcatcctaaggctagtctgaagaagcattatgccgtcatagagaaacacagtaattctatggtgtgccgtatttggctgtatactgcattttagagtagttaactaccattggatttgaaatagtacatgaaactgaaacactgcatttattaatgagggtaatttattcctaggaaacctttttaaaaatgaatgtctcctttaagtgtttgttggtttcccctttcctgaccataccctccctgctttgtgtctgtgttatttcttttaaaatttcaaatagatttgaataacttagcttaaaagatagcctctcccctccctaataaaggacaaaggtggctattttagaggtgggtgatatttgaggctgaataatgcaatgtttacggcatacacaggaagtgggaagacctgggttctggttccatttctgccttttcaatcattttgtgagctgagcaagtcccgtaatctcaggtgatgtgtatgtcccttagcacagggcctgttctctagtaattgctcaataaatattaaccattattattggttgtcttctgagaatatcacttgaagatttagatgaaagtatttggaagattgctgtctacgatttgtcaaccgtggctgacaactaggacgtgggaaagtagagaagaagctgataaagatgaaaagctcatctatagaaagatattgaaaatttatttcttctagattacaaaatgacattagatattataccctatgagaaaaaatacgcttaatcaacccattttcctcttatggccataattagtacatagtcgcatcaataaagattgacaatatagccttctcatatt

SEQ ID NO: 96590 - DNA, 1081 bp, Homo sapiens
aagaaatatgtacaatgaatatcttggaccatggagtatttgtgtagtttatcacatttggaattttctgccccttggagtttgtttaatcgtaagtcaaatttatttatttacttacttagagtctcgctctgtcgcccaggctggagtgcagtgacgcaatcttggctcactgcaacctccacgtcccaggttcaaacaattttcctgcctcagccacctgagtagctaggattacaagagtgcaacaccacacccagctaatttttttgtatttttagtagagatagcgttttgctatattggccaggctggtctcaaactcctggcctcaagtgatctgcccgcctcagcctcccaagatgctgagattaagggcatgagccactgcacctggcccaaatttacttaaaaccaaactttttcttgtcccatctcacttgcttacccagtgttacctgctcatcctgttcctgtgacactgacatcaggaaagccactagctctgtgatttacagttgccttttgagtattggctgaagagaaattttacctctaaatgtaaagctttttaattaaatggaaaatgagcttcacttactttatataattaagatgcagtcagagctgggtgcagtggctcacgcctgtaatcccagcattttgggaggctgaggcatgtagatcacctgaagtcaggaattcaagaccagcctggccaacacagtgaaacctcatctctactaaaaatacaaaaaattagccaggcgtggtggcgcacgcctgtagtcccagctacttgggaggctgaggcatgagaattgcttgaacccaggaggtagagtttgcagtgagctgagattgtaccactgcactccagcctgggtgatggagcaagactctgtctaaaaaaaaaacaaaaaacaaaaaacagatgcagtcagcacttatttcacgtacctgtttagactgtgcttagttgccaatgattgataggcattagttgggtctgaatggacctatggagccatggagcttttatttaacaattctttatctgatgtctgggaagcagaggaga

SEQ ID NO: 96591 - DNA, 1345 bp, Homo sapiens
ttaccaagaattatagtgcagtaagccacagcagacagctagctgctgaaatctataaaaacttatttagagacgagcttactcatcattagccttcacttttggagctagagtttttattagttaatttcattagtaaaggaatactcctacaaactggggaagtctcaggtgctcagattcttcatctataaaatgaggatgttggaaataaatgacttttgaaaaatcttccaaaaaaccccacagtgtctagattttggtgctgttttacccccatcccaaacttgtttcttcttccttgatttcctgtcagctctgattgctgtagatcctggatgatgacaaattggtgtctcagagtaaggagcaaacaagacaggagcctcaagcaggctgtccgttgatttgttgtttgggtttttggtctatttgcagcttctcaggtcctagccaatacaaataggtgaggttcttatataattttacactggcaaattagaacaaaacaaaacagtggagggaagcgggagatggacattgagtataggttggacaataacgatagaaaagtggtttggattctttataattatggtctgacatggttccagtaaaggtgtctttggttaaattaggtaatacgtggtgtatatatatacacacaaactatagacacatgaacatagcagctgctaaatttaatgccccagcgttgcttcatactacatgtagattttaatgagtcagcacagcctgctaaaccaagcttctggcaccgagagcctttttaaaactcatctaaacactattattgatcattcacaagtggtggttaaatttttttttaaatagcagaatctttgttacccaaattaaaagttacacagaaccacagtatataaaatagttaaaagccaaacactgccttgttcctgggctccctggggcctccaggggactttgagaactttggttacattgtttgaaaaattctgactaaaatgtatatacttaatatacgtatacatatatacatatatatatatatatatatattttttttttttttttttgagacagagtcttactgtgtcgcccaggctggagtacagtggcatgatcttggctcactcccgggttcaagtgattctcctgcgtcagcctcctaagtagctgggattacaggcacgcgccaacgtgcccagctaatttttgtatttttagtagagacggggttttaccatgttggtcaggctggtctcaaactcctgacctcgtgatctgctggccttggcctcccaaagtgctgggattataggtgtgagctactgtgcccggcctg

SEQ ID NO: 96592 - DNA, 1059 bp, Homo sapiens
actttttggctccttctatagtttgagtatgtcatctttatttctaagtctgtatgatatcaattttgcattagcacctcgactttgatgtttttacattctaaattatctacatgatgtaaaaaataattacttggaaagaaaaagcttaagtacattggctttaaaatatatataactgggagattgatggattcatggatgttgtgggttgtttttttttttttttttttttttactctgtcatccaggctggagtgcagtgtcgcgatctcggctcactgcaacctccgcctccagggttcaagcgattctcttgcctcagcctcccgagtagctggcactacaggcacgtgccaccgcacctggttaattttttgtctttttttttggtagagatggggttttttggccatgtgacttacgttgcatgggagtgtatgtcctgctttacaggtattggccttggcctataactcgttcggcggaagaacataaatgaatgtgatgcaagcatatacttaaatgggatgccttaaatgtaattgggattttgtgctaatgtgagtatcatgagaaactatgccccagctacctgctacctcttcagcctggacaccagaatgacgtaggtggtgtagcagacctgattcttagccttagcaggcaggctgaagatctctaggatacatcacacagcaactacctgttggtctatcagatctaatttgaccactacaactcacaaatctaataataatcttgcatttttttgtctgaattagcagaaccagaagttacacttaagataggttaggtaatttctaaattaaaaataactctgggccaagcgcagtggctcacgcctgtaatcccagcactttgggaggccgaggcggatggatcacctgcggtcggagtccagaaccagcctggccgacatgatggaatgaaaccccgtctctactaaaactacaaaaactagcagggcggagtggcaggtgcctgtaatcctagatacttgggaggctgagacaggagaattgcttgaacctggga

SEQ ID NO: 96593 - DNA, 1018 bp, Homo sapiens
gggctatgcagtaacttgggattcttggcagtaggcattttcaagaatacagtatacatggaaaccagatgcatgcagtaaaaaatgtatcaccagccttgagtgcactgttcatttttccagtgagaccttcaaagggtctgtgaaatgaagcctggtgttttcctcttcaaggactcatttttgagtacactaagaacaaaattttggcctctctgttaggcataatttcagagtctctctctacacattcattggattttgcaagatatgtctgtatatatacacaagtggctcccatcttagtctgcagatttgaagcatatgtatgtgcttgtgcatagtcattctgcctctgcgcatgtttcactaaatttattgcatggactcttttatggctctctaaaggaaagtaaacacttaactgaacaaaaagttcagctttacattttaaaaaatttcttctaagcagaagagtttgagataaaacatgtctagtgacgcctccatttatctactgcttacctagtttactcgccaaaatagatcatttaattgaaactatccagtttgtgtgatgtcttcctaaaatacacttaactgattgaagtttgacccacccgttcattattatccattttcattcaaataattaacttgattatgacttcgatatagcactttcaacagccaaaaaacaacgttttggcctttttagtacttttctaccctggtatttcacgtgagactcacgtggggagctttaaaaaatagtgctgcccaggcttttcccccaagattctgatttaatttgtttggggtggagcccaggcactggtagttttttaaagcctcccaggtgagtctaacttgtagtcagaattgacagccacagctacagctacagctacagcgtttttgtaaactttattattgaaactaagcaattcaggttgaaatttgttttacgtgtaggattgtcgtgataggtcctctccagtgttcagatcaacctgat

SEQ ID NO: 96594 - DNA, 1022 bp, Homo sapiens
aacattatacatttaaaaaatcgaatgttttaacataaatatgggaggagtactccatgaaggtgaaagccagtgattctccttgaagaagggtattgttctgtgctagcggcatctccatttcgcctagcaattgtagcagaatagagactgcatcccctctcattctacaggtaaagaatagtttgaagagaaagcttagtgatttcactgccaaaagaaagcttttaacaaaattgcttattaaaccacacctcaggctgtgcagggacatgggaggagcgtgcaatttctgaaaaagaatatttagaggaggattttattgtataattggcaaacttctcatctccgagaataattgcttgatttcatggaaaggaccagaacttgggtatcttgaggcctaagataaatagatagcaacggatcatgctagtccccatggttactgggaactgagctcaagtggattgttatcctgaacaagtctgtgtcaggatattcttgtcacctttcagctctttggtatttgctctctttcttgaatcagcaaaagaaatcgctgtaaagttaatgtaatttacgggaagttcccgtgccacactgcatgcttttgtgtgtcacaagacttaagcttcctgctaccctctgttaaaggagaactttttatgttcctaacaatatacgattctttcaggagctatttacatagctgggttggttaatagacaactggggactgggctataagcattttgacctggaaatatttctttggggttatgtgaactactgtacaataaaacctcaattaactaggattacttggagaaaagacagtttctggttgaattttcttttaaatggaaggttaaacactttccttttctcaacccttcttattcactttcttcctttggcttttggaattcagatgttaagatcttgaaaataagttaatgtttcattgagttagtccgtaacagtgctttggaacatccttgagttatgaagcttgttat

SEQ ID NO: 96595 - DNA, 1057 bp, Homo sapiens
cttagttaattataacttgagtaggatgggaggggtcaatggcattttaacgtagaagaaccaagtgttagtaaagagcttttcttctccgggagcttggtcagctatgttttctgtgaagcctgattggggagtcaaagtcccagtggaaaagtgttgatgagaaggcagattctagaggatcaatatttcgaacctccttttaagctcatccaacttcacagctaaaaagctgttgaggcttcagaaaaaggaaaggcacaaaggaatgaatgaatcagaatttgcctggatgtgatgttcctgatgatggtcaaaagtcctgagagttccagccttgaggcctggcttccctctctctgcaggcctcttgctggttgcttttggaggaagctgagtgtttgggttgttgtgattgctgctgttggggatttcatataacatagctctggaaggtcttgtactcatgactattagttattcaaggccacctaaaatctaaatcaaagaaatgactagacagaagtgaaaaaaagggcctgattcgtgaaacgatttcccaactttgtgataggtcactcaaggcttagtgtaggcttttttcaaggtaggtgtcttttaggactgaatcggttccaagctatatgagaaagcttgtgtgtgaataggtttctgctggcagatggttggcaggctcaaccatcagccttccagacttgggattctaacaaaattctattctgtggcacaagcctagaataagtatgatccatataaatacattcatttatgcacatattagcagtacactgagttcttgtttttgtgattttgatgatctggtgcttttggttttcctaatactggttcatggagaaataagttgtactgtgttggctaaaacccgactctggatgcactaaataattcttctgagtttctttctctttttcctctagcctggaggaagtctgtctgctttctcttttgcagtctggagatagagcattgacccctgaagcaatgctgggtttactttattagagctcacccgcag

SEQ ID NO: 96596 - DNA, 1002 bp, Homo sapiens
aagtccatgttttttctctctaagcaagtggttatatagtagaagagttcctgttataaaatctggtgactgaatgcttgtgagttttaatttagagattacaaggacaaagatatattacataaggtgtatttcatactgttcaatttccctcctgtgtgtctccatatcactgtgggtttctaagtatgagccttgagaatatttgggtaaaagaaggattttacaagtttgcattaataccatgaaaccaggtcaggagctgatatcagaaaactctgttttgctaccacataggtctatttggttgtgaatgatttgggcaccatcattctgttctgtgttgtgtatgataatctgtgggtataacttgagatgtataggctaccatagattcttcttcaccataattactttctttataaagtactcaggaattttgggatattctatttttctttattttctagttataatttctattttcaaaaggttctgagatggaaaacacatttaaaagcaaattaagattgtacaattatggataaaaaccaaagtagagaccatacatgtaactaccacttggaatagataccaatctgaattaactggcactgaaacaaagttcagattcatggtttcatggtttattgtatgtggcagaagacgctcatttttcttttcaggaaaatattgctagaattgaagatttttttcccccgtgagttttttttggaaaataataagcaacagatattatcatggaatgatgttttacaagaaactgaaatactgttcagtgtgtagacattgttaatagctataatataaatcctaattcattaaggatatttgcaggctgggcagtatggctgattttgtttgctcttcagtattcaacaacctgcttaatgcctaccgtttgccatactgtgccatacgttgatggttaagaagaacatcaaaaattgttcttgaagcactcagtccagtgggaaattt

SEQ ID NO: 96597 - DNA, 1038 bp, Homo sapiens
tctgttttagaatcgatttctaaaggttttctgaaatctccaaacttgtaaccttcaggctagatggctcagacctcagcattgagtcctaatgctcaccctgagttgagtgtggcagagatgctgatgtttatacagaagactgagacctttcctcatgcagaattcatcctacctccaaaaaattccttccacatttttccagttctgaatagaaaggaaaaaatatgcacactcctagggagtgctgcttaggcccccacttccataccccacatggaggaagatgcttagaaggaagaggtgggcttcctcctggcacagttccaattttcctttagatcagctgtttctgggtttaggcaaagagaacaaagtgaaacaaaacaacagataagcttcccagaaaatgttttgcttcctcacaaataataaactggagcaggacataagatgtctgtttgggccttcattcccgacatttctgccctggcccatgtgcgttcacctgaatggccatgtttggtctgtgcttcatctttcaagatcagtcattcagctcagaaaaaataaaatggatggtggattaaccacccctgctttagtaagattctgtcaggagctggcaggaggaaatgatctgttccacacaacataattgtaatgcttaaagcctggaaaaaaaggagatttgttgaaataagacatggcttgcagttaaaatgagcttaaaattctcagctgtattatggtgggggagaaaaagatttcaattcggggctttaaatttcagccagacagtctaggttgggcagttttcctttaactgtgtctggagtcctcgaatacttgattcgttaatcttttgtgcaaattgaatagaagatacttaatttgctttttttaaaaaaaaattttaagcattttctatttagattttcttctaaatagttttaaatgaaacctctcgggcagaaaaggaagagcctaaattagatatctctatgaacagaactctccaaaccagcctccttattt

SEQ ID NO: 96598 - DNA, 1937 bp, Homo sapiens
cctcagcctcctgagaagctgggattacaggcacccaccaccatgcccggctaatttttgtattttcagtagagacggggtttcaccatgttgggcaagctgctctcgaactcctgacttcagatgatccacccgcctcggcctccccaaagtgttgggatttcaggtgtgagccaccgcacccaacctagaagcactcatttctatgtgtgtttcctttttctgctgtgtgagagtgaggatgagctgagaggaacacacgctgaatggcgtgggagctgtagagtagcctagcgagggcatcaatgccacgagtgatttcaggatgccctcctcgtcttaccttctctcatctcagtgattgctttctctttttagcagttaaaattttattagattaccccattctaactcttttatgttcagtattacctcctgcagccaaaggcatgacagaattgtgaccagttgcctccatggactttgtgcatctatctctgctatctgattagtcttttataggtgaaagtcatcaccaattttcagatgaaggttctaaccaaatattttattttggcagttatacttttataaaaagttacactttgatttccaatatgtattattgttttttcttctgcagtatcctctaagattttcctgaggatattaagtgtagctaccttctgattgttctactgtctgatcaggtgttgctatggatagaaacaattaatacaatttcttttttttttttttcttttgagaaagcacagttactttgtgaggggggaaatgcatggagcacaaaagcctgtctgtttaaaaactttgttcctaaaactatacaagagtgagcaagttaacttgtcatttattctaacatggttaacatgagtaataacctcaaaaaatgtcagagaaacaacagtcttactttaaagagcaccacactgggaggagattccaaaatcaaagcaaatccataactttgctagtaatgtatcacatatgcttggaaaagtacacttgccaacacactaggagaaaatgctcagtgaaaattgatgggtaggaataaattagtataagcctaacatattgacttgttaaagcaaaatgaagacagctgtaagatcttttcccccttccatcataccaatgttagtgacttatatattagcaagccttataaaataaaatacaaataatatatcactatttaatttttgctgctcattgttccattattcttttgccagacccattatttgtcattctgtattcttaaagctaacactgagcccatagaaattccattatatttcctttccagttttctttgtttacaaagactttccatactaaggtgcagatgtcttgtaggaacagcaagttatacatgttcgtttatacatgtgaatgtgaatttttcagtcttcaatggcatttctcttttgttttagttttgactttgaaagtgtggagagtactgtggagagctcggtggacaaatcaaagccctggagtaggtccatcgaggacctgcacagagggagcaacctgccctcacctgtgggcaacagtgtctcccgctctggaagacattctgcactgcggtgagttcgtttaatcaggaggcaactttggcaggatgcactgggacagcaggctcctacttcttttgatgattctgggcactgtatctcataaattgccatacagcactttcatttgcaatgactctaaatgaatgtttctttaggagttcatgggatcttcccttgggcaatgtttgataactttaaatagcttctggaaacaccataccttgattcagcatagaaggtgggaaaattctgctgccaagtgatagaacaggatagtctcataggcagataaggttttgaaaccaggggaatgttgacatcctgatg

SEQ ID NO: 96599 - DNA, 2872 bp, Homo sapiens
tgaatatgtggctttcagacctttggatttggttgtctaattacctcttgtccctttgacttggtttttggtcatggaaagttaaacatttctctgtaatgaagttaagttctgctgaaggatttgatatttgagtatgatacctccagtaaatcatttagattttccttgtttagaactggaaaaaaatgttaatgggtttggaatgaattgattcaatattaagagcagtgtttcaattcaccttattatatttgcagtaggccaaaggttgtgcaacctgctaatctgcatcagcttcacatgtgggcaggaatatatgggctgatttggcagatatataaagaaaggctaattgtctgaagaatttcctgatcaccttggaaattcaggatgaatttcctgatcaccttggtactggaatggaaattctcaccactagtttaactgtaattatttgtaagggatttaatttacaaagtacattttaatttggttttctatcattggacacttagaaagtatcatgtattgccaagctaccaccttagtaaggatttgtttttctggttaataattcagtatgcttactttttaaagtattttttccagtagagcagaagaatcgggaaaatctgggaaacttcccaggttcagggagggatgtaaccctggatgctggaggtcgagggacatccaaggccagcctgttttgcttcacagttttgcttcaaagtggatcttgctagaattaatttcaaattggaaagtcagaccaaaagcatgcagatagggaaattgtatctggaaaaacataggcattatatatatgatgtttctggttggcaggtgtgcttgaagatgaccagctaagaaaccaataccacattcttctgttttgtgttttaatattttcaagctcaagaacagaacatttaaatttcctttgattctgctttatggtttctagtagcccaagaaagctgataaggcagtaactttcatgccacttaaggacctgaagcttagatttttgttttgttttttaaacaatgtatatcaatagttttccagctcttgtggttcatggatttatgtctggattctaattctgtatttggtcattggatatagcatctgtgacataaaaacagcaatcagaagtacaggcatatggtacatgttgcttttcatatacccaaacattgtttacatttttttcttttcctccttctctcccctttctttctcttctccacacgctgccttcacttttggctttctttttaccatcctcccttttcttttagccatctcatttctgattgtcttctcctcttctactttgtcctttctcatcctgctgtctccttcttctctggtttcattaatctctcatgccaccaccagattggtttctctgcctgagtattttcagttccattgccactagagctgcttctcccctcttgcctctggagcagcttcagtttacatactgatgatgaggcttcaaaccggaaaatctcataagtctcgggtgaaaacgacatccaagcgagttcacagtgcatgctggcagggcaatccgactgctctccatgttataatatgataaccttgtggctttgtgctgacatgccatactagaataaagcctgctgccttttaaactttgatacactctgttatcatattatgattcctcatttttagaatttgaacctttacagtatcttgcattttaatagcacaggttgtttttttttttgaaaaagaaaaagtatataaattcatgctctatgaaaatgatttattctggtagctttgtttaattagtatatgtcttctgtatccaaatgcagattttagtttcttctttttaatctcccgataataagacagacatattaatcttatctgataccacttggcaaaaggattggttaatcttggaagaaaaaaaatgagatttcaggaaatttaaaacacattgtaaatgggcatgattaaagaaaaaaatgaaaaacactgtgttcagctgggcacagtggctcatgcctataatcccagcactttgggagacaaaggtgggaggatcacttgaagtcaggagttcgagaccagcctggccaacatggtgaaactctgtctctactaaaaaacaacaccaacaacaaaaactagctgggtgtggtggtgcacacctgtaatcacagctacttgagaggctgaggcatgagaattgcttgaacctgggaggcagaggttgcagtgagctgagatcatgccactgcactccagcctgggtgacagagcaagactcaatctcaagaaaaaaaaagacaaacactgcgttctaaaatacaaggttggttttttttttttttttttttttaaccaaattctaatgttgacacacattttcctccttgtagtcatactttactttttaattattcaaaattgattgttaaacattttatgtcataacataccccttgagtcatatcagctatgggattctgtattaccatgtatttgtcagcttggctagagggaaactgttgctattgatgcagtagagacctggtttgtattgtcttctaaaattagaatgtggtgtgccttcggttaagataggtttctgtcagtgcggctacagagctagctaaatttaacaatgccatataggcacatatgtgcacatcagatctatgaagacaaaggctgtgttatttcagatgcaagagaaaatactttctgatttttaagaaggtccaagttaatgctattaactcgagtaagaaatgacatagcaagtaaatgagtttttaaagaaagaggtggagtactaacttagggtttggag

SEQ ID NO: 96600 - DNA, 1026 bp, Homo sapiens
atattaaataatatatttgtatatgatttgtggctgacaagggacttaagtatatatatgtttgtgtgtacacatgtttgtgtacatgagcacatatatgaaatgtcatgtgagtgtaacaaactctaacaatacggaaatgtagaggtgagagtaaacagcagaacctagggagtgattcacgagacttggtgtggatgtgaaacaacaatgagtaagacccagaggggtggctgggaaaagggagaagtcaggagagtgatctgagcggaggttcagtggtaagaccgcatgcttcctttaggagacagtgaagagatgagcctggctgcaagtcgtttagagacagtttatgtactattctgaaggttagtctgtgaaattgtcactgcagctcattggcagtgattttgttggtttttgaaaagaggggataatatgggaagaacatagaaatatttccatttaaaggtcacaggagtgagatggtttccttggacacatttcacatggggctatgtcctgattaattagcccccccaatagcaaatgcctttgacaaatggaatataatgaaaaataagaaaaatcaggctaatagtgactctccattcatatgatgggttgccagcctcccctttcatttgctccattcaaaaagtatgcactgaaacctttgattagaggctctgatctagctcttatctggtcctctaatgggacgtatagacagcgtttcaatgcctgatttaaaagttcattaggaattttgtttacttttttctttctttccctctttctcttcttgatccctctacctctcctttgaattatctggattcagctgtttcagctctatttcttttggctgtagagacagtcagaaaactgcctggcccctttttttagcatcatatattttatgagtttaattgatagaaaaaatatgcccaagtgatgtcatgtctgaaggataagaaagaggaaacctaaaaccccaaatcttggttaaagttctattagccc

SEQ ID NO: 96601 - DNA, 1854 bp, Homo sapiens
tgacaaatgagtcttaattacatgaatacagatagtaagcttatactgtgcgtggtttgtgacatgcctgaaaacatgagtgtattgagtagatgaagactaaatcattaacagtcaaccattgtgctccttgaattcttttttccttaaaaaacaattttttaaggggattaacacatctggttttgtgttgaaatatctcttaacgaaaatttatggtcttgaaataaagaccagggtgagaaaaaggagtcatctattttttcttattggctaatttattaatagccccatggaaggacatatgaccatcttacctaaattgatgttttcttagttgtgtggcagtgtatatttttgagccccgagactaccaaacagaaaaaaatacatttggaagtaaaaaccaccctttggatatttatattagttcagagtcttctttgcaagaagcagaaactgactctaacacatagaggaaagggttgatcgaaaagatgttgagaaaagcacagacttgacaaggagcctggagaaccaggcttggaaaatgggcaggcattcctaaaatgtggctatactctggctctgcctttgaagctgcgccaccagaaataccatttggggttctggtcatgctttttcttctcttccaaatgacatggaccatagctagcaatctgctggctcataaaactcttatctactggttaaggacctcaaccagtccccacttcagatttctaaacactacgcttcatctcattaccaaggggaaccttgaagtcttcaacctagctcttgctctcaactttttcttagtctttttactttttccattatattctttgatatatttgagaaaatggcttgcttttaaaaagtgtctccaaaggtttggcaaaaaaaaaaaaaaaaaatgcttccttctgaagtcaaagaggaaaagtactgaggccctgtagactctacagtggaacagccactatgacatgagtaataaaatcctctgagggctttgaggcaccagctctcccaggctgctgggaggtgcacctggaattcatcaggatttcggatcaattataactgtattctcatctgcttctgtaatgacagcatctggctttagcaaaaaagcctgagtttggttattaaaggctcaactccctcccacttttgaccttccagtacagaaagatggagccttgttgaatgagtcactcgaggccaccagcactcttgtgcacagcactcttggcagtagttgttcttttttctgcctgttgctagaaggcttcctaagaaagctgatgtgtggtttagctactgggcatctgaaggcactcgtgctacacattattaagttgaactaagaaagcctgtcaagttttatttatagtggaccaaattgggcaggaaggagagtgaagattttggtgtgcttccagcatccctctgagtttaatcccatgtaatctaacctcccaagcatttgagggtataggattgtaaatctagcatgagaccatccagataacttcctaagtggtaaagtaagggtactcacatttttcagtctctcattgaactataagcaatgtattctctcaagtctcaaactgtaggagccacagccgtagagcatgtatgtatttcatggtatcaggccagaattagattgatctaattaaccaagattcttcttgactggtcctcctccttagcattaggaagcaaagtcctagtcttaatgtggtgttagtgctgctgagtaactttttttgtctgtttatcaactgttgcaattttttgctgtggatacgaaagtaccccacacttcatttttttagg

SEQ ID NO: 96602 - DNA, 1137 bp, Homo sapiens
aacccggatgcaaggggaaggcaatggcttctcttcttgatgattggccgtcgggttactgtgcagaacatgtggggtgggagagagagctgtgggctcataccattgtagtctgtatacctcagtaagtctcgtacctcagtaactgtatgagatttaccaaaatgtttattgttattcgtctttcattttctccctcttctttactcaatccaatacttggtttttccttttgactgaaaactttataaactttttgattggagataaaaaagatagtttttaattctttcatgtgaatctactatgggcaaatgatattgtgagagccttccctagagaaaggagccattttcataggatgtccaagtttattttctggtaatgaactagttatttctttaccattagtgtctttaacatctggttaagggaatgaaggctggtatcctcctgattgttaagggatgagtcatactcacttactgaaaaaaatgtgagtgctttctatgtgtcagaaacattgataaatattggaatatgaaaatgaatcagacatatgccctgcctttaaaagagagcctcccaggctagttgaggaagcagataaatacttcgacagttgtaataccaggctttataaaggtaattgcaagatgctctgcaaagaagaggaacagctgaccaagacaaagtagggctggaggcagatggggaaagagctctcaaggaggctccttataggagagggtgcctgaacagagtttagggtgaacaaggttaaccaggtgtattcctttcccattgctgctgtaacaaatgactacaaacttagtggcttaaaccaacaccagtttattattctacagttctgtagaccagaagaataaaatgagtgtatagggtggtaatctctgaaggctccaggagagatttcatttccttggccttgtcagcttccagaggccacttagattctttggcttccagccccttcctccagctttaaagccaacaacatagcatcttgtctctgtctctctgcttctcttgacacattgccttttctctctgacttctctgtccttcttcctttaaggacccttgtgatgacattgggcccatccataataatct

SEQ ID NO: 96603 - DNA, 1052 bp, Homo sapiens
cttttaaaccagcaattctcttcagaaagaaagcatgagcagagttcagaatcaattccattttcttctttattgtcaacattagtgtatttatgtcatgtacataaaaaggcatatacatatgcagaaatagtaaggctactattagttaattttctatttaataaaaaatttgtttgtttattgtttccttagtgctggcagactagtatatattattttgttaattcttagatgcaccatctgaggtaggaacatagagggagagctcagagcaaatgggcctactgacgtctctagtaaatggcaactctgggatttttacacagatccatttaactcagagttcatatacagccttacataacatgtctcacattccaggcactttccacacatgttcgtatattgtcctcaattttccaccgaaaagcaaacctaatgggaatggttagagattggatagattattggggtgtttaaaattactggtaaaattcagaacagaccatactgtttgtacagggcccagtgggagaagtgggtaggtcctgagcagggtgatcaggaagggaagagacctgatttgatggagagaattctgggagcagagagattggcatgaaatctgtctcaaaggcagcataagtcagaatatatttgttctttaaccaggaaaaatatctgaccagggtccatgttacagaacaaaacatggcaagaggcaggcatgaatgaggttctgaggaaacagtggtggagagactggaaacctgtgattaaaacaaacaaacaaacaaacaaacacctcaactagaagatagatacaaatagaagggaaaaaagagaaagggaagaaattcacagttacataatactttacagtttagaaaatgctatatatatatattgcatttgattctgtggaaatctgcaaaaagccttttatgtaatttggataaaactttaggagtattgtgtagctctgcagaaaatacagtagaggggagagatgctggagtctggaagacaggtggttcagttgtcaaatg

SEQ ID NO: 96604 - DNA, 1019 bp, Homo sapiens
tagacgacccttctcggggcctgcctgagaacaaaagttctgttttcttttcagggccttgtgaagtaaacagttatttcatagttagtcctaggtgaaaaccatcttttaccatctactgagtgcaccagcagtctgagggctatatgagggccataatggcctgacaaaaccacttttctggggtgttctgtggctgtcaatggtctgttattgttgtctcttgaagtgattggacatttcatacacatacaccatgcagcagccatgacagaagcagatcactccaacctgctgctggctctcatgtctccttgggatttaactgtgaatatgttcatccagctgaaatgctctgaaactgaacaaccttatctcactccgctaaaacaaaaactaatgaaagctaagcaactaaatgtattctataacctagtcaactctcctccttcataaatacaacatttgtatcaatcctggaccaggagatgactatgagcctgaggtttcattcgcataatgctaaacacccttgtgaaaacttcagtaacttttccaggtgtttccagatatccagatgtttggcaggaggcacacagagcagccagatgactgtcttactttccacacccatattttgctgtactgaataaagaacccaaagacagaagcaaaaggatcgtaaaatccccaaaggacgactcattgacgcatcaccccttcaatgagaaatgtctttttactacctctctaaaaaaaaaaaaaaaaaaaaaaaaaaaaaaaagatgaccttcaataaattctagagagtaaaactcctccttacaataggtcataaatgatctctttccgaaatatgcttcaagtccagcctgaacctctctagcttcaatgcaagactcacatctcctggtcattaggaaggacacatagagtctttcaaggctacttgtaatggttaactttatgcgtcaacttgagacggtgaagtgatgtccaagagctggtgaaatatttct

SEQ ID NO: 96605 - DNA, 1033 bp, Homo sapiens
cttacgcccaaagagacaagcatctcttgcctgcaaaaagggatctgtgggtaaaaaaccctgaggttttatacgaaaggtcagaactgcaatgtgaattttctttagcagaaaccccaatacaggctgggcacggtggttctcgcctgtaatcccagcactttgggaggacgaggtgggcagataacatgaggtcaggagtttgagaccagcctggccaacatggtaaaaccccgtctgtactaaaaatacaaaaattagccaggagtggtggcatgcacctgtaatcccagctacttgggaggctgtggaaggagaattgcttgaacccagaaggcagaggttgcagtgagccgagatcataccactgcattccagcctgggcgacaaagtgagactctgtctcaaaaaaaaaacagtgtactttggtcttgttgtgggtgattggtagtggcagtaacagaagaggaaaagaggccatcctgaattcggggagagctaccagctctcctgagaagcagaccgtgattcatgtttggttgaggggctaggcacacgctaaactaaatgaggcaacagctgttcgtgaacagtgacaacaaaagcaattcctagggaggcaaagctcttcgaagaatgttagaaagctgaaaaatgccttttgcataatctgatgctctcaatttatgaattagacctacacagagattagacttctctaacctgatgaaaggttgagagagtggcagaaccaaggctagaaccaggtccccgatggccagcctgaggttccttctcccacatagcccagaatgcccatataaacatattccattaaagaaggtagttaaggcattccagcagtatctgagacacacagagatgaaaaacattatcactaaaagacatagtcattataccatgcatactttgacatccctgcaccagaaacttccatggaacctcgaaaaatgatagattcctagagtctatattgagacatactgaataagaatctccccagatgggccta

SEQ ID NO: 96606 - DNA, 1043 bp, Homo sapiens
ttagctccatgtattttatttcatgtatatgcaaatacctttgggccctggagttaccagtattttatgtttgtttcatctgatcaatgaaaacattaattagctgaatgcatatgtttcaggattctgggatgctacttcacaaattactgcagatttctatactcaccttaaatgggttaatatagcttccacggtgtctatttctgtattgtagtttatgcactgagattttttgattcagttatacatatgaacattttaaatgtgccttttaaagaatttaaatactcatatctttttgcatgtcttttttcctttttacaaaaggaagctatggtcgttttttttttttgttttttttttttttttttaccatgactgcattcttggattccaaatgtatgctaaaaaattcgtgagactgcaaaggcaaccaatgaaagaaaaacacatttgatatggatttcaaaatatcaagagaatctggaaaggaaaccaagatcagcttttggttgcagctcatatggctgtttgtgagttaactagcttagaagggaagtaaatagtttatgagagagaaaaagatagatattctggaaatcattattaagctgaaatttctgcatctaattttggaatgtttatgtttagaaagtcacatgcacaatgaaaatgtgtgtttcaggtttgtggagaaaaacagcgctttgagaagttgatggaacatttcaggaatgaagacaataacatagattttatggtgagttatttcagtattcaataaagcaaactcagtttcaatactttttttctaaatacacacacacacacacacacacacacacacacacacatatttatattacaaaggacagggaattgcaattaatatgctatagatccaatctagaatgtccctcttaatctgtatttctctttgatttccattttattccttacatacacggtatagtaaagacaaaagtactaatcatagcaaataaaggggaagccgtgcagttggaaacagccatgcctgg

SEQ ID NO: 96607 - DNA, 1048 bp, Homo sapiens
cacacaaacccatggacaggattagctggtgtctctgtgatgcatgtctgaacattcctgtcttacggtactcaaattcttaatagagtcatttcaacaataggcattttcaaggacatcggtgtgctttctcatatatcctgttctttgaagaatgtcctcagtatcgttgtcagctctatcacaggacagggtctcatttttctttgagggatttttcttgccatagactgatttgaatatgactctaagggcctttagagattatttgttcattcattaaccacatatttcagtagtaaaagaattaacagaaaaatggtgcttctcaaaaacccaagcattatgaagaccaaattcttttggtgagtctggtgagcactttccttgattatgaaatgaagtgtctccttttggaggattattattttctcctttgaacagttcatttatttttctccacatgttttttaaagagtgctgcatatgctcagtttccttcacctttccccatcactgtgaaaatgggtctcttcatggctgtgggtaagccaagttggtgagccaaaaaccctccctttaaaagtgccgctatgacccagctggcatccgcttaaaaagagaattttacaggcccagtatatcttcccttagaagatttgtgttatatgctgaacccaatcagtgtaaatctccactcttcctccttaccttgcctccctggttttctttacttgtaatgaatttaaaggagatgttagaaatcagaagttgctcagtgttagagccctatgtgaaaagcagctgtttaacacatggctcaccctgtctttctcctgaagcctcagccaacattgcatgaccatacttacatgtccacttttgtagcagcaatctatttgaatggcctcccccaaataacttttattattattattatttttgtgggttttttttttttttttttttggagatagagtcttactctgtcacccaggctggagtgcagtggcgcgatcttggttcactgcaacctctgcctcctggg

SEQ ID NO: 96608 - DNA, 1049 bp, Homo sapiens
attcctgctgatgtagccgatagagggaacatcatcacgcatgggaggcactttgctctgagtagtctttgtcacaaccacaccccacaatgggaggttctgatctcctacaccatcttcctgccttccactggccccaccgagagaatggaagagagacaagctacctgcttgaggatcagtgcatttttgtgggttcagcagatactttctggacacctgtagtattcaaagctcagtattaggcacagacattgagtgcttctggatctttttttttttaaatggtatttttgatgtcatctataaaagggaaacatgcttttatgtgtaattgcctgacgtaggcttccaggcatgtcttctgagcattcgagaacatcagaatttgctagagtggatttaaacttcaaggaggaagtgctgccaacagccgtattatcatgccttaaaatgctgccaaataattcatgtcctcttgccaaccagaagatagaaaacagcatcctcacctcaccagaaataaaatgggaggtaggggttagagcaggaggaagagtcactctaatgccttgaaatctaagctctttgttttgactcacggaaacaaagatgacgctacgagccgttttctcagtcctgaagtgtttccctggcatctggaattgctctaagctttgccatccctgtgacgtggggtaattctgcctcctcatttacttcagcctgttcatgaggtctcttatttacaataaagaactaccactctaatagcctccatttccaaggctgtgatagttctcagagccttttgcccaaagtctaaaagccagtcttagctgtaaagatttcccaatctccatcccttccaggatcccatctgcagctctgccagccggtcactggggctcattcatcccaatgactggagcccttttggatgccccagagtcacctagaataaattcactccacatcaaatccatggttttacttccaccccgacttctatataaaactgtcagggaaacaagattccagttcacagt

SEQ ID NO: 96609 - DNA, 1048 bp, Homo sapiens
tcaaacagctctcaaatttcttttagtccactcaccagatctaaactctgaagtttaaatccataaactgctcctcttttactgctattcatgtagtttccaagggctaagatgatctgcaaaagaaggtgaaaacagaagcccatcagtacagcacatcaggcactgaacgcagctgaagtagtccttcatacctacaagaaaaactgcacttgcctccagaattttcttgagtttttgggacgactttatagagacagatgctgctataatcgcatgtagttgctagattccaatcaaagaaagaaaaaggggaaaaaagacatgttaaaaatgggaaactaattggcaagtaaatattaagacagaagaaaacaggcctgcatttagagcatacaggcttcatggtgagagtctactttttctaagtataacaaatttaattgtcttgctaggtctcaggtaatattgttacatgcacgatctttactgaaactgttcacaatagcaagtaacataggaacttgcttatcacaaaatctgtaaccaatctacaaccactaagactcagagttaagagtccacagctgcttctggtagaactcaatttcctgcctaccacctctaatcatgtcatacaattaatatttttaaatcaatgaaggaggcatcaaaaatgaaaaaaaagggaggggaatataacaccctccagaagttctcagaacatgttttcaacagacatactactataagcagaaaccaacaaatttatctagaaacagaattgggaaagaactgactactataatcagtaacaaagtctatttagaaacagaattgggagagaactgaagtttatgatattcataaatctccaccagattaacacaagggaatgagagatggttggctattatgtctatatcaccacagtttattataacaaacttccaagaaagaaaactcttatggtaaatataaagctttcagcaaaagcttgtaagtctgctcactaaagatgaggcaacatttttagaaatgaaagtct

SEQ ID NO: 96610 - DNA, 1064 bp, Homo sapiens
ttaagacatctatggtcattaccagttgcctcttgttgccgtagactccagccttcttgttgctgccaggtgaagttttgtgtgttcgtcagtggaagtttttgtttccttcccagaagcttgagttctctgcaactgagcagaatgtgggatgtgtgtgtgtttttggccgaagctgcttattagtaacataatgctcaggcacattttggattttcacaaactcctaatgggtgctggcctcactaatctctgcccttctttcttctcagtctccttctcataaatcaaagaggcagcagcaagagttaattgcagaattaagaagacgacaagttaaagataacagacatgtatatgagggaaaagatggtgccattgaagatattatcacaggtaaaagatatttcttcactgtggcccatggagatcccactggcctcacctagactgggatgcatgcagattttgcagcttcttttgtccagggttgtcaagttcattagttgactttattcacacccagagtgatgcagagaggctttgaagtccatttacagcagcatgtatactgccccaatactctgcattggaaccctgtaagtttcagcagagctccttcatttaaaggatttccattgttattgatatgtcatcatgctccattttttttttcctcgtggccacacctagccacctgcctgattaataaacactgtggacaagacccattcagcaatgtactaatcacagtccatggatgctctttaagagcctctttactcattcaaagtaactgaagtcagtaggtactttaatttgggtgagccaacaggcttccagcccagggttgggaactggttttatcagccaagaattgtgttaacccagcctggttcctgtctgattgaattagcataatgctatctcctcgaaccaattctcccaaatttctgtacttccttttacagatcagagtaataacttgggcactagtaggagaggcagcaagtgacttttccttcatgtctgttgcacatgaatgttgcttataagcttccaga

SEQ ID NO: 96611 - DNA, 1080 bp, Homo sapiens
tggtggctggtgtctgtaatcccagctacttgggaggccgagacaggagaattgcttgaacctgggaggtggaagttgcagtgagctgagatcatgccactgcactccagcctgggcaatagagggagactctgtctcaaaaaaaaacaaaacaaaacaaacaaaaaccaaagaacgtggagttcctttttcattagtatgtcctccatcccaattacacctggcgttataaaatgaatgtacattttctatttgcttgatctaagtcattaatctactagaagaggggaatgagtatctgtttatagggcagtttttatcctccttggagtatttttcattttctgatccaccccaaagccccagataaattcctttgtacctttatgaactaacttgagtatatattgccttccccctttcctgcccatcttccccacccccatccccaggtatgattaacaatgcactaaccatgtactaatgcaatagatcttggctttttattctcttctgtttgtgttgtttggctgtcattttcaatgcagtgctgaagactgtgccctttactgctcgcaccgccaagcgtggctctcggtttttctgcgaacctgttctcactgaggaataccattactaaactattactctttctcacctgatgctcttaaaaggttgctacaggttttttgatgtcttatgtccccctctgtgtgtctgtcagggcccaccaacatgctagcatggaattgccatctccatcatgttatattttgtgttgttctcatgctgcatggttttgcatttcaattattattgctcactcactggccactttcaatacatgtatgtattcacattgctgtaacagtctgggtgtgtttgacagctgaattcatagaattgttcacagaaattttcagaaaaatagagcaaaaatattaagagcacttctttgagaatcagtattggtaccaagtagattgcttataagatttttgagctaatgtccttcaacatatccattaataacaataactgctatacctaacatgtattaagaacttactgtgttcaggt

SEQ ID NO: 96612 - DNA, 1222 bp, Homo sapiens
tggagccaatcttcaaagcagcttggaactgggtggtcagagagctgggtgggaagatgcactcatccttcccttatttgatctaacatttcttgtagtaatggcttctcattctcttcctctgttggctaacatgcctgggaatgttgagcactaagttgagttgctttccattttcatcccattttttcttaaccatcattttgtgtttttgtttttttctgtttagccttaaagaagaataatatcactaaatttccaaatgttcactcgagggtaaggatttcttctagcacaccggtggtggaggatacacagagctggcaagcatcactttttacttagcttcctcctctctctgtatgcagatcaatggttttcaatctatggctgagggtaatactggtgagaatctgaccagggagtttttgtacctcacattccaatgatgcagggattgagcctctctgttggactctttctcggcctgcttttaagttctaagtgtgatggcttgggcaagggtatttgctgatgattgtatttgctttgagtgttgggctgtccttcccttacccctgtcttggcctttgagttactcagttaaacccattttgatctgaagcgactgaaagcaggtcctggccaggtaacattacagcctttgaaggattaagatctttagaactaattgctcagaggatgaagaaccacaaagctgcatatgaggcaaaagtgtaattctggcctttcattaccagtgtgggctaggaagcagaggcttgagaggattggggtatgcaaaactattttttccttaaatttaagagtagaggctgggcatagtggctcacacctgtaatctgtaatcccagcactctgggaggccgaggtgggcaaatctgttgagttcaagatcaccctgggcaatgaagcaaaatccccatctctacaaaaaaaaaaaaacaaacaaacaaagttagccaggcatggtggcaaatgcctgtagcccagctacctgggacgctgagatgtgtggatcccttgagcccaggaggtggatgctgcagtgagcagagatcaccactacactcgagcctcagtgacagagactgtcctcccctcacaacccccgcccacccccccagaaaagagtagggcagggtcacacaaattccaatgagtcaaggagccaggaaggtaacaggcctggtaggaactg

SEQ ID NO: 96613 - DNA, 1038 bp, Homo sapiens
ttattaattctgagaacagaaattggtgccttgcaaggaagtttactagctctatcaacaagcattcaaggttacatctgctagcagagtagtgttaggaacctggccttactctcctctgacaatcgcaattttttcttattttttataaattcaagaagatacacttggcatcgtgtatcgaggctaagtttttcatgcatttcccagactacttatggagaattgcagtttaagttgctgaaaagtattaacatggtattaagcttaaataatacgtaatgggactagatggcccactaagccactgttattttccttcctctctggcagggcacttgatccattccaaagtcaaaaactggactgaagctaaatttgtacttttcataatatacattctgcttctggcttatcttcttggtacatcaatatattaattgtaaagtttattgtatagtatttaaccgctgaagttcctattttatgttgtgcttatgtgaaccccttggtgaaggtcccttttccttggatgtgtagttatatgatctttttaaatgtacagatattttgctataaaatcggtgcagttttttatggtttttacacttctctttaattcccacctaagcctctgggtaatattgtaaatattgttttaaaatgcatcagcctatgctatacaatctgaatgttattttaacttatagttttttttaatatatatatttaactataaggacagtttagggaacaagttacctaccacatttcactttagtgtacctatttacagaaagattaaactgccacctgcgggcacattcccataaatgtgtactttactttaaaaagaacatgccacgattttgtctttctgtggactcaacattcacttcgattaaaaatagcaatttgaccaagttggacttccactacaaagcagctgttttccaaagttcaatgctgacatatatgtatattaaaataattgcctatttattaatctacaaatagacaacgttggcatgttctttt

SEQ ID NO: 96614 - DNA, 1008 bp, Homo sapiens
cttctggtaatggcgtataccagtctgatgattcttaccatccttattcttacattactcttccaattgttttgattttaactggtggtcatgtaagttcctcggtggcagggatttatctggttcatttactgttatatatccttgtggaataggacagtgcctggcatataataggcacttttggaatgaatgtaaaatactagttgaaatatgtattcatctggcatccatggtacccatcatctgtattaaagggcttaaaaaagcatcattgcaataaaccatactaacccaccactaaagtcacagtcataattgaagtgcacccaaaataaggtccagtgactgtaccttagcttttacttcagacatgtccaaaacttgtgagaacatacaatttaaagttgaaaactcatcattttgggctatttttgaatagggctgaaatatggtgacatgtcaggcactcagttttttggagctgtcttaaaggtgaggtggaaagtgagagatgattttgctctaattacccacacattctccctaaccctccattttaagacacttagctataatagcttaagactatcaaaactgcttttgtgattctcagtaggatctagttcaaagccatctcagtgctagtgattggtaattgttaatttgatggtaattaccctacttgtaaagttgacattcatactggctaatcctccctgcccctagtcgtggacaatgaaacagtgagtggctggtgaattagatcagattcaaactaagccattccttgatgctattcttcactgctgttccttagggtatctaaatgtgttatttataaacatttttgggggctcctgcctgcaaacttcggtaggtgttggtcttccccacctctacaactgagccaaggacttgttctgaaaggtgagtaataaataagggaacaaggtttctattttctgtgtttgtaattaccagattttcacctctgtttatatatta

SEQ ID NO: 96615 - DNA, 3140 bp, Homo sapiens
aggaatccatatgcttaaagcatactacttctgtttctgtgataatacttgtggaaccagggggaagctacaaaattagcaaggaataggccaggtgcagtggctcacacctgtgatcctagccctttgggaggccgaggtgggcagatcacgaggtcaggagtcgagaccagcctggccaacatggcaaaaccccatctctactaaaaatacaaaaatgagccgggcttggtggcaggcacctgtaatcccagctactcaggaggctgaggcaggagaattgcttgaacccaggaggcagaggttgcagagagccgagatcgtgccactgcactccagcctgggtgacaagaacaagactctgtctcaacaaaaaaattagcaaggaatgtattatctaggaaatgaatacctggcttccattaaatggaaatattgcttcatattcacacagtctttaaaccctgtgaaatgtgtttctttggaagagagtttatatagatattggattcttttttcaaaggctcagcccgtaaacctctgagtactgatgtcaactataattgtaatcaatgtcttttcagggtaattgggatacttctggcagcgaactgagtgaaggggaattggaaaagcgcagaagaacccttttggagcaactggatgatgatcaataaattataccaaatatatgtttacagtatgatttaaagtctgattcagaccagggactctattttaagttcaactgaaataacactgggttttaattatatcacaggaaaaaaaaagtgcatttaagtattgttatcgtggactttataaaagcaaaggaaattgaaagtaacttttgattctgtatcaagaatcatattttcatacagtcataactgtctttctgtgaccctttcacagggcactgtaggatggattaaaggtggcaatttactgataactgcagatgtctctactttgttctaaaatctaagtcatgaggtgatttgatttactttatagaagctggattttgaagatctaatgaaaaattttttgataatatagtagtacaaaaaaagcaccagcaactgataaaaattgcttttttgtgcgctacccaactggttaaagccaatgtgatcttttatggtgaaactcctaagaaacaggtggttttgctggaaacttggtagacccttaattatagtggtgctaatgagcactactgtaatataaagccaccattattttttatcaaacatctgaatacattttacaaaggctattgtgagggcattattttgagcatctattttgaggtgatgtttaaaaaaactttaacatcaaatcaaattgtaaattaatttaaatatattgccttaaggacctactaaagaatgtgccaccagactttaagtgatagttgcaatatccttgtctaaaaaaaaaaaaaaagttgacttaaacattttctttaacagttgtcttttttttctaaattcagtctttctcttgcttttttttccctgctattgaggaagtattttgccttccctactcactgagaagtattgacttcgtggtacacattctaaagcatttctgatttgaatatttttgtacatttttatcaattattaaaccttctcttctagtgtgtactagtatttatttctacttaaactgctcagctctaaagaaattgtatgatcactttaaaggtactaaatccctgaaattttgcttcatcttacccacaccgctagtttactttccttttttaatatttaagaatattataaatcagtgcatttgaggtccctagatttgtttttcacctatgaattttttacagactattttagagaggctgtggtttgaagacagaatactctttacatgctaacttttgaaggttggtaatgtaatttatactattttccttcagtgcaggagattttttaagtaaataagtaaattttagcacctattcttcggtattatctgtgttattcttttaatgtgtacacttgaagagatcctatttcaaagttgggattttgaagaacaaaaagtttttttcttacccatcctagtgagttttgaaagtgggcctgaccagaatgtctctttcccattttgccccgtttgaattaaatataatgtctactctttaaaggctgaaggggtgggtgaggggattgtttctcattttgtctcccaagtcatttttctgctgtgaaatatgaccaggcttgtaggaagactcatcttggagaaaatgtgaagtaatcaaattgcttgagattagtctcctattgtatattagagccaaaacacataataactttggcaacagggagttgtctagactcaattttcagaggtcccattgtagtgagttaatattgctaatcatgtcaatcacttgacatggaagtcagtggcaaatctttaaagtatgcatttgatactggcaaatatatactactgatgtttcacaaaagaatcttagaatctgtagaaaacattaattacttccatgaattatttctaaagtataactttaaagttttgatttttctatttaaataaaaagctattgatgtgttttagcatgtcctcaaaatagattcctgtatttcttacagagataatcttactataaccgcaaatccctacaacacagtataaagtttccctgtagttcacccatgaaaattatttgacttaaaaacaaccatagtagtaagccaattgcaattcaaaatgcaacatccttgccataaaagatgtaacttaagtgactgtgatcctttgtctacctttcaggatcccatcaaatgggatttagttgctagaaagatacttgacagtctgaaggcacaggtgataagattttgttctctgtgaatatttttaaactaataggttatgtttttaaatcttcaatttggtaaaaaactgaaacgtcttggaatattggttctattagagttaaatatggtaaaacaggaaagcgtgtttattttcagataaggggaatttatacttttcattaaagtcttggagtcttaggaaaatgttgagggtttgtcttcccccagtgtcattaatactaatgaactattagatcaaattca

SEQ ID NO: 96616 - DNA, 1093 bp, Homo sapiens
tgggtatcaccacagacctgttgaattacattctttttatttgaatttgtgcatatctaatgaataaccatttaagcactaacgttaaattttaaataattcctactcagcaatttcaagaaaataattttattaatacagctgtctgccttatgtgttaaagctaacagcagtatactatgtacatatataaaccaatattatattgagttggtgagaaatgtagtatctgtctgtatttacataatagatactacacatctattatgtggtagtaagtctcatgagtggtattttatccttcagaatattatccttcccaagggaaagctgtccccatgaatcttgggtaaattttactaaatccttgaggttaacaattcacattttatttcatctctctaagagcacataacctgttacacatagatgttcttaaatattacctatataacaatggtatcttcatcaaaatgctaacctgttattttctattcatacaggactctccagaatccgatgctgagcgagagaaggataaaaaagaaaaagatcgggaaagtgaaaaagacagaactagacaaagatcagaatcaaaacacaaatcgcctaagaaaaagactggaaaggattctgtaagtatttagaattgtttcatgcctgtattttcaaaatgcaaaaatgtattctgtggttaaaccatgatggtgttgaaagaataggcttttttccaggtgtgctaccattgaagaaaacagtgaaaattcagttaagtacatttcacacaatatcatagtttttggtcatgcatgatcctagattttattctcctaaatttgatattttttaaatatagcatttcataactatagccttattaactcactaagaaaggatatggtcactaagaagtgccactggacattttttacctaattttcaaattttttttttaagtgagagactaaatctgggattctacagatgtctacagttgtcactgttattaaatcctttgtttcaaaaggtagcaattccagtaacttttagaaatactgatttggggtggaggaagggcaaataaataggagag

SEQ ID NO: 96617 - DNA, 1051 bp, Homo sapiens
ctgtgtagaaaagaaagtttctggaaagtaatggaataaatggtaagtttttgttaaaataagcaatgaaacaataacatctcaggtcactttaataggtaaggttcactgggcacggtggctcacgcctgtaaaacaagcactttgggaggccaaggtgtgtgctgatcacctgaggtcaggagtttgaaaccagcctggccaacatggcgaaatcctgtctctactaaaaatacaaaaaaattatcagggagtggtggcgggcacctgtaatcccagccactcaggaggctgaggcaagagaattgcttgaacccaggaggcggaggttgcagtgagccaagatcatgccactgcactccagcctgggcaacagagcgggactccttccccaaaaaaaaaaaaaaaaaaaaagtattttgatgacagtttcagttaggcccttgtaagtatgctgaattgaccaataattattgaataatagtattcgatgcctatgtgggccagtgttctaattgctttatgtatattatatttatgaactgaatcctttcaataagcctgtgaagttaataggtgaacaaactaaggcagagagaagtaaagtgacttacagggttggaagccgggcatgttgaccttggtcagtgcttttaacaagtatgccatgctgtcagttttagagtagctaatactttataagctaaaaactagtaggtgcttaatattacagtgttgcattgtaaatgggcataggtcactaaattgactatttcctatttcttgatttattgttcttgattaatataatgttaaccacagttttttctgtaccatgtactcacgaaggccctgtattgtttcacagctgcctctagatgtggtcctgttggcctttttttttttttttttaaagcggggtctctgtcatccatccactcctaggccagagtgcagcggtgcagttatgggtcactgcaaccttgaactgttggattcaaacaatcctcctaagtagctggaactgcaggcacgtgccatcacacttggc

SEQ ID NO: 96618 - DNA, 2272 bp, Homo sapiens
gcttgttccaccactcacttcttgctgtgtggcttggttccggttccgtggctgggggttgggatcccctggtgtataggattaaactccctgaggattgggttggaagcaggaagtgtggaaattgaaactagatatgggtttgaatcctaggtctccaaactactttgggaaaattatacatcctcctcttaaggccccttgttttttaaaagtaaataaaaatacctagaacacattaggcactatttttaaagacagaaagtatatatttaaggaaacatgcatatacattctttagcctcatcatttgaggtagatatccagtaatttaagttaacttttacctttttttttttaaagctaaaaattaggttctatcttaaagggtaggaaatagaaccttaggaagataatgtgcagtttcaaaagttattttctctaaaggacaaaatatttttttgcctagaggcagttgttactttgcccaaatagcaaatattctttgtgcccaaacaggtttgggataacattggtagaagagttttaactatgtcaaagtttttgtgtgttttcatgttagacgcttatttctcatgtactcgagatgactttccaaatataatttttctccctagatatttttagatgaattacatgaacatggacaactgcattctatgtcatcttggatggaattgtatccaactattagttctgatattagattcactaatatgcttggtcagcctggtaagattattttctttcctaatttaccgttatggtagtagttgaaatgggccaaatgcaaaggtgattgtgttgggggaaagggtgctttatttttgttttttaaacaacaaagtaattgcagctctttggttagagctagcttttgacttctttagttttttcattaggatcaactgcacttgatcttttcaagttttatgttgaggatcttaaagcacgttatcatgacgagaagaagataataaaagacattctaaaggtaaatatatttattcttaccttttaaccaatagtatatcttaaaagttagtactgtattcctttgatttatgcattattaatgttaagatttcttttttttaggataaaggatttgtagttgaagtaaacactacttttgaagattttgtggcgataatcagttcaactaaaagatcaactacattagatgctggaaatatcaaattggctttcaatagtgtaagttatgttttctgttgtaagtaactagtttagtagtatagtttttaatttattcagataaaagcagctaagttgcagagtgttggaataagggaatatgaatagaattttacagagtggtagccagtctttcaggtaaggtaaaacaaaaaactttatttagatgatggattgatattaaacttcctttgctcaaattaactggtattatacataaaatggccattataaatcaggccttgggccacacataaagtacactaacgatagctgatgagcttaaaaaaaaaattgcaaaaaatccttatagtgttttaagaaagtttacaaatttgtgttgggccacattcaaagcggtcctgggccacaggttggacaagctcgttttaaacaatgcgtgattcctaaattaacaataaattatttcagctaatagttatgatactattataactgattaaatatgattttcttaatagttactagaaaaggcagaagcccgtgaacgtgaaagagaaaaagaagaggctcggaagatgaaacgaaaagaatctgcatttaagagtatgttaaaacaagctgctcctccgatagaattggatgctgtctgggaagatgtatgtatacttgttatttttttctaatggaattcttttctttacagttgagaaatttaaaatatttttatttttcattttatagccacaaaaataagctaaatttatttgtagaatatattaaatatatttagaatataataaaagcattaaatcagctgttgactctgtttaggaatatttgtaaagaatggtttggacttttgaagggaggaaataatggactttaaggggactgattcatcacagttttcacttgctgttatgatttattttagatgtatcgttgtacttttcttggtattcatatatttattttgtatctgaatttttcagatccgtgagagatttgtaaaagagccagcatttgaggacataactctagaatctgaaagaaaacgaatatttaaagattt

SEQ ID NO: 96619 - DNA, 1017 bp, Homo sapiens
tcacctccttcatttgggttcagttgctgagaatttagtcacagggccacaactagctacacaaaggaggctagaaaacttagcttttagctaagcagccatgtgcccagaaagaaggggaggacagattcttaggagggctattatacactcttccacaacttaagctttaatgtctctgatgaaggttttgcagtggtttaaaataaggagacatatatgaaaaaataataatacagtgaaaataaggtctgggtcatagaaaatacgagactataatgtaaacaatattgaagatggagactgtgaggcaaaattttgatgtgaaggctgttacggttccttaaataagcttaaatgtggctttgaatcagattgctatgtgtctggcatagtttctgattactactaatataattggtgttaagtatgttgtattaatattctttcagatattcagcctggtaattttcctgttgtgctatttcaaaagatttatttaggactttagtgaaatgaattaaaagagaagattggcattagacaataaaagatcattaatggagagcttctcagtagttatgattatgatgatgactagctttttatttagtgttcatttgctaatcagaaaattcatcatgtctgtgacaaggaaactatgatcttgtttttcttatgtcttaaaactggtatttgaagtcagttttgtctggaaaggattgatctgaggctttcaaggagaaccagaggaatgtatagtgtctcagaagccaagagtttggaattttaagatagagcatgatccccaaatgcacagaatcagtatcacctgggaaattatgaaaatgcatattctcaaactccacgtcagacttacagaatcagattctggaaatgggacctaacaatatgatttttttaaacagtccttcaaatgagtctttgagaaacccctgaggtaaaggaatccacctaaagtaacatgttaagaaatttttatggaatgaggactga

SEQ ID NO: 96620 - DNA, 3427 bp, Homo sapiens
cattttgaataattgttttatgtagcattcttcattttagattgctttattatgtaaaattgtgggtaatattaaaatatttttgatatgttatgaagcctattttctgtatgtatttctttgatctcctcagtattccagagaagtctgtaatttagttctgtaggcagtttggtagtctgtgtagctgcctttagatatagagatagtctagactataagcagtgcctaatgtgaattatcccctctatctctaaggagagagggaggcatgtgttttttgtttgtttgttttgttttgttttgttttttcataattatccaggagtttgtctttaatatatttatgaactttgaataggaagtattcattttgtagttttaaatttagtttaaaaattggttaaaattaatttttattgtataatttttttttaacagaaaagcagagcaaatgtttggagagatggaagtttggaatgcaatatcagaacgtgatcgtcttgaaatctatgaagatgttttgttctttctttcaaaaaaagaaaaggtattctttattcttagttattggtatttatagataacacaagatgtttcctcattcggatgaggattggttttataatatgtacatttttctggcttagtttatccagtttatgtggtatagcagatttatttattggaagtaaaatttaatgatggaatgtatagcttctgtaataatcttctttatcgttcatgtagcatattaagtactgatgtagactcagtgggtactcattcaattatttgtattgtcattagttggctatcttatgctcactttgaaaagataccttttttgctcattaggtttaaaaatgctgggtttttttgcttataaccagcatgattgttacaagaatgacagcaacatgcagttgtttctactaaacttacaacattttaaaatacctattttactcatgtctctttttcattgtgcactattatattttatgttatctggtttccaaggaacacatacagatgcaagtattatcaaatttaaacatagctgaaggtcattgaagattttagcatttacctgcaatgcgacttgtccatagtaaccttagtttcagactgtctgtaatacatagtggtagaaaggtttatgtcgtatgggggaaaagccaaaaacatggtttccagattctggcttttagaaggaggtggaaaatttgaagctaagtaccaaagccaagcgcttaggaaagagcattagcaaagtcagcagtgtggccatttaaagtaaatgaaatttacttgaagtttgacttaacctttgcaatttggtcatccgttagaatataaagaagccgtcactaattgcaatttaaatatcttaatttcttggaactttgaaacatacatattcatacttttgctataggaacaagcaaagcagttgcgaaagagaaattgggaagccttaaaaaacatacttgacaacatggctaatgtaacatactctaccacttggtctgaagcccagcagtatctgatggataatccaacttttgcagaagatgaggagttacaaagtaagaataatggctaagtaagagaaatagttttaaacagcgtcctccagcagcaaagaattattttcactttttatatgagataactaattgaattttatgcagttgtttatttctgaaaaagagttttatttatttccaaataggatatttctttctgattgagtttgtgattcatgacaaaatattttttcaaatttaaagtagctttatcaggtaatccttgaaatatttaaattataggtcacatttgaaattctgcttagccgtttgtatgtaacttggtaagaactaaatgaattaccgcattttactcaggttgttttcttgaggtaataacattatagattttgtaaaaagaaaaaaatgtattagaattatcttaacattaggcttccctaagtactctttctgagttaaccaattgctttttaaattatagctttatcagctacccctctaaaaatcatgcttcagtagatttttttatagggtgtacagttctatactttgaaaagctcctggaataattatgatattgcaaacagattttatcataacacttttcattagttttgccatatgcacgtcctttgttttatcctatgacatgtttcagaatgtcttttattgagttctttgtgaaattttccttaaaactttcctatgcagatgatcacaaatcatatttgagtttaaatacaagtttgtttgtttgtttgtttgtttagagacggggtcttgctgtgttgcccaggctagtcttgaactcctgggctcaagcaatcctcccacctcagccttccaaagtgttgagattacaggcatgagccaccacaccctagcctaactacaagtatttttgacaggtgattttgaaattttgggggagctaatgcaagtaaactactttacttgttgacatttgacactctaaattttaactggcaaatactttagatatggacaaagaagatgcattaatttgctttgaagaacacattcgggctttagaaaaggaggaagaagaagaaaaacagaagagtttgctgagagaaaggagacgacagcgaaaaaatagggaatctttccaggtaaaagaaaaagctctctttttaacttagttttatattatatttactgaactttgacagtgatacaaagagttttgagacaactgttcccagatcatagacttaggctttgtgaggactcatacacatttaactctttaagttcttcagatgaacattggtaaatgaggtttcggttgggaaaaacaacaggagagatgactggaaacaagatatgtgtggtgagtcagtagtagatgatatttagtctctggaggacaaagggactgctaaggtatagtttggggatgggccataatttcttaaacactaagaaaaggacctgggattgcatgttttttaggtagtagttcgttttcatcttcaagtatcatttttattttcagtgatagaaaatatcatggagcaatgaattttttgcatttcatatctcacctatttcaataattataatagctaatattctttgattgcttactgtcaatacaatttacatttgtaatctcaatttttatgacagtcttaccttataagggtacttactgtttttgttatataagtttatataactaaggaaatggagaggtgaagtgacttgcccaagttcaacagctgctgaatagtgaagccagaatttgaatccatgcagttttgattacagggtctcttccattaaccattgtattaggataaatgctaggttacaatggcttaaataagtttttttcttgaagtaacagt

SEQ ID NO: 96621 - DNA, 1045 bp, Homo sapiens
tgaaattttaatttttcatttaaattattttcagcgggtaccatcgaatgcttcatgggagcaggctatgaaaatgattattaatgatccacgatacaggtagtacttcaactttttatttacttttcactttgagcatatagcaggcctagcacatttaaagttgtgtagaaagataaaacatttaactgttgacttctgtttaggataccaagtatagagttgttttatgtctaataaccaaaaagtcaaaggcttatcaaacaatttgagtactccgctacatataaaataataattattttaaaagtagaaattactttctacaatcatttgtaataaatttttgaaaatttttaaattatatgtgtaaacagttttattttttttttcaaaccactaatatttgattcttttgcctgtgtttactcttacatggtatttttatattagtgctttggcaaagttaagtgaaaaaaagcaagcctttaatgcctataaagtccagacagaaaaagaagaaaaagaagaagcaagatcaaagtacaaagaggctaaggaatcctttcagcgttttcttgaaaatcatgagaaaatgacttctacaaccagatacaagtaagatgtttagtgttacatggcctatgtttactacattgttgtttgtgtcatacttttctgccatgtgcagtagctgatccagagctcattaaataaaactagatgattatgaatgtggaaacttgatgaggtacaaaataaatctgtagttaaatgtagaatttaacttgttgacttaataagtttttgagagactggaagaaggggagaaagactgtattcaataatcaagttggaggccagacgtggtggctcacacctataatccctaccgtttgggaggccaaggcaagcagatggcttgagcccaggagttcaagaccagccttggcaacatggcaaaaccctgtctctaggggaaaaaaaaaaaatacaaaaattagccgagcatggtggcacgtgcctgtagtcccacctccttggg

SEQ ID NO: 96622 - DNA, 1909 bp, Homo sapiens
aaattagattttgttttttttgaacttttatggttttccaactaatattagtatcagagaagtctgttaaatgtggatgataggccgggcgcggtggctcacacttgtaatcccagcactttgggaggccgaggcgggcggatcacgaggtcaggagttcgagaccacggtgaaaccccgtctctactaaaaaaaaatacaaaaaattagctgggcgtggtggcgggcgcctgtagtcccagctactcagagaggctgaggcaggagaatggcgtgaacccgagaggcggagcttgcagtgagccgaggtcgagctactgtactccagcctgggtgacaaagcgagactccgtctcaaaaaaaaaaaaaaaaaaaaatgtggatgataatcttgacctataatggggtgtgaatggttacagtaaataggatttgaaattcatatagaactggttttgaatcttgtctctgctttttaatgagtatattaccttaaacaagttactttctgacttcaagtaacagtccctagatacagaattatgttacacattttgcagtgttataaagattaaataatgtattcaaatggcatcactcagtgaatattcaataattgatagtttatattattaccatcatctcacgagttttagaattgtatcaattggtaatttctagtgaaaacagccatgtaaatgatcagtgatgttaaatatattattattaacaaacagttttttccttttcagcaactcttatctaaatgcccctggaaggaatacaaatcagattctggaaagccttactattataattctcaaacaaaagaatctcgctgggccaaacctaaagaacttgaggatcttgaaggtaaaatggggaaaagtagttttcaatgtatatgttttacatatatatgccattcactttgaaacaattcctccagaataggattgttcaaacaaaggccttatttttttttttaattaaatgattagaacatttaaaatggcgtataacagttttttgggctcttattttcttgttgctttagatctcagttctgtagattttaaatagatttttatttgatttgattccactgaaactaggataccagaataccattgttgctggaagtcttattacaaaatcaaacctgcatggtgagctgctttgataattcattttctgtcatacttaacatttttattagagtatgtcactaatattcactaaccataattggataaatctgcagtgaaaaatctctaagaattcttttcattaaagggttatattataaatgagcttgtagcttttaaagtcgtactttggtttttagaaaaaagatcgtttatcattcaattgaacaaggagttcatatacaaaatttccaagtcctactatgagtggtgcatacatagaacatgtgttttaactcatttcatggtaatagatagtggagaaccttgaatctgtatccatttatattttgttagtatattgtcagactatatatttaatgctagttttgtttagcacagtgttgcaaaatagccttgatatgttctttatggaagaattaaggtaaaccaagtatcatgccttacttataaagggaaaatttttcaacattggaactaatcagaataacccttaaaaatctagaaatacttaatactaaatataaaacctaagacttaaaatagagataataagtaaggattgaaaatctagtttttatactcacttctaatagaatctagtgtcataaattatacaaaactagaagcagcagattgtaggagaatggggctaataaagtagatagtgatgtggaatgacatctggcaggaaaagagaataaaaatttcctaaaagactgtcatattaagccccttta

SEQ ID NO: 96623 - DNA, 1500 bp, Homo sapiens
tttattttttcttaagaggtttgtacaataatatgtcttagatttgagggaatattatataaatcatttttgtaacccttcaagcatagttaaatttgtcaccatctggaaaatctggtgcttgaaactaggtttactacctttgatatcatttagtaaatcattcattcatgatgccttttaaaacttttaaccaacttttatctgagggatgtctagtgttgcctggagtatcattagcaacttctagtaggttcttagtgtgttctgttgaccttaatagtggatttatattctgtagtttcattcatgtaaaattttatctcacctatcttgttttgaggcattcacatacacattttatccctgttaaatttcatcttgttgatagttaaattctgattgttgtccagaagctgtgttttgacagctgtgtctttctttatggaatatcaattagaactttgtctaagttgatacaagtattccttggactacagtagatgaatagatgatcacatagtcagttcaaatatattagcatctagttcctatattttctttatccactaggcacagatttgtattctgaaagattgtcttttgtatgtaagctataaagttactgttcttaggagagtagtcttatctttgtaattcagagagatcctgaaacttgaatttacccttgctgcttttgaagtactctaaaaaccttgtttttcagttcccttcctacttgtattgatgaattattctagattacttaaactgtcaaaatatgcccagtttttacttttgattgatttcttaatatatttattgccttggaactaatgatactgatattgtcaatggcattgttacataatttacatcttttttaatctttattctttagaaatcaatgtggactgaacataaatcacctgatggaaggacttactactacaacactgaaaccaaacagtctacctgggagaaaccagatgatcttaaaacacctgctgaggtaaaagtttgagagctggaattcagggactgtcaagtagactggggcgtattttttaggattctataagtagtcgattatcaaagagcagtactgcttaaatgtcagaagaggatctgtaaagacattcagaaaaaaagagggttagtatagtcacaccaatcgggaagaagagcaataaaactcaacagaataattttatttactgattttacccctgcttagaaaacctagtagagtgggatcaattttaaaaaggtgatttaaagaataaattggaagtggggaagactgtttctttgcctgccgctggcttttttttctgatagcaaaactgggtgattttaaatgacttctactgagttcttaaatttccagtagggttaagggtagtggagatgaaattaagttacctacaaatacttccttctcttagagtgggaagttttctctttgcaggaaatgcccttttaaaaagtgtgttttta

SEQ ID NO: 96624 - DNA, 1014 bp, Homo sapiens
gtagccactagacacatgtaattattgtgtatttgaagtgtggctggtgcagctgaggaactgaatttttaaaattttatttaatcttaatttaaattttaatttaaagggatgtctggtgtctgctcgctactgtattttacagcacaaatctggaatttagataaagttaccaggaatctaaagctatagaatcagtggttagaggtgttattgtgctttggtaatatacttagtagagaaggaggaataagaaagatagatacctattatagtagggaaaagagaaacaaaaggctaagttgaatacttatcaaactgcctccaagtgagtccaagtaagtttgtgcattgaaagttcaaactctgagcatgttttgcactatagatgtttattttgtgggaaagatagcaagcacttaggttatatgagacagtctcaaaatctttagagaggatgaggaggagtaagtactatgaatatatgaataaatattaaagctattatgaaggagagcatgatttatcatggtgtaaatattttgcctgttttttattttttaggtacagcatctggtgcagtaagtactcttttaacctttgtaatattttaattttactatactttaacctactttacagttattcttatttctgttctaaggattatctgctaaatctttacattaatccatagttttcccctttttttctatgacaaggattgaaaaattgatttattttaaaatctggttttggtgggacttaatgagagatgagaattacatgtatcaacttttaaaaggatttaaattcttcccatcacaattagaagggaagcagaacttgtaggtacacagtgcttaacctagtaattacaagttaagcattacattaggagataatcttttttttttttttttttttttttttttttttttttttgagacacagccttgctctgtcactaagactggagtgcagtgatgagatcttagctcactgcagtctccg

SEQ ID NO: 96625 - DNA, 1041 bp, Homo sapiens
ttggaaatccacgttctgagacttcagctgtggcaaattaattagaaaatctattgaacagccttaccacctctgtcgggtagtatagcaatataaattactatgaaattcaagttagtttaacttctttattctttatgtggttgtggttgtaataaacagatgtggcatactccttggggtggtaagtttgcagtgtctttcccaaaaccctaagaccagatatatttcaaaaattctttataatactggaaagtaacacattgcatataatatgtaaacatttcctgtggggtccagggcaatgctgtctaacttaataatgttaatatttttgcagctaaactaaacggatattcactctgaagtgggataaatgaagatgtggagtttcatgttcatgtagggcaggttttgccactatagtgagttttggtaccatacttgaaaaaagttggctttcagagggttttggtttccagaattgtgggtaaaggattgaggaccttgtgtacacttggtgaccatataacatttaaactactcccgtagtctcggttgctgatctcttttacaatttatagcaagctcggggaactgagaccactaaaagttttgctaagaatatgagtcagaggcttgaggattatacatagcaggtactgatttcactgtgctttatgaggaacttatataaaatacacttttaaaaagatgaataatactaatttcatttttcttcttacagccaggagtaaatagtatggatgtagcagcaggtacgtatactctgtatggtggtatgtgttagacctcatttggacagtagcagccctattatgaggagtaaaagcaggatctcttggactttatataacctcctttttcttttttctgcaataggaaattgggataggattgataattgaattctgtttttgttgttgtttttttgagacggagtctcactctgtcacccaggctggagtaagtggtgcaatctcggctcactgcagcctccgcctcccaggttcaagcgat

SEQ ID NO: 96626 - DNA, 1077 bp, Homo sapiens
tatatctgttggcgggagatgtatgggctgggagtaagcctagttgtagttctttctcatttgattgttgtattttttctccttactttgtaaattatttatctgattctcttagtctggatgatggaggcttgccagtgcttcagttttcaaattctataccttagaaaaaaatacatattatttggaccatattccaagtcagccaccacattcttatagtcacaatttttgtcaaaaagttcttgtttaatgatgtttagacagtttattggttgtttttaacccattaactcaatgctactttattttaataggtactttagcctcgtttagcttcatgggttactttcacaaggaatacaattcagtgtatgaatgttcttacatacctttaaaaggcttcaatctatatgttcctgctggccatatgcttattcttttctgttgtttctatttctcaaaatgttcatttactttgaaattgtttaataactggttaccttgttccaatacctgtgattattgtatgtaatttttgtccccttctgaatttccttagatctttttaatggtcattaaaatcaaaattggaacgtgggattatactaatatagatgaacattgggtcaaattcttgagaaacttgtgttaattttcaggatttatattcaaacttagtagaattaattcatagatttgaatggtagttattggtaaactagattgagctcccaaactaataccttcagatatttatgtatgtgccttaagttttctgtacatgagaggggataaatgacgtgtgacttaaaaagggtttttttagattattttttaagtcattgtttggatattaagcacctttgatctaggattttgaaatgtgccacattgtaaaatttattcagtgcatatattaaaaatcaaaggtgaaaaatacagaaaaaattttatcttaaattctcttgctccaaagaagtgagaaaaatatgaatgttgtgttataactaaaaggagattaatgtttttttaaattcaggctagaaataacataatagtccaaacttttaaatt

SEQ ID NO: 96627 - DNA, 1022 bp, Homo sapiens
tgtatccagagattcaagcaactgcgatggaaaatagtctttaaaaaagcaacaacaaaaaaatacaaatttttaaaaataaagtataataacttttatagcatttacattgtgtaaggtattataagtaatgtagaggtaatgtagaggaaaaaataacaaagtaggatataggccttgcagagaaatttagtgtattggtaccttagacttacctgactgatttgacaaatttatttgttgctgttccttctgaattacccttccttttgagtagctacaggatccatgccattgaattgggcattagccagtgacaaaaaagagatagaatttttgttttttaggtcatctgctcataattcttgaatctgggtaacttctgggtacatgtggatgactcaagcaagtacttttaaaaaatatcttaactcagacctaatgtctgtaaattcttgactcaatgtggttagatttttgacaaatgttaatagtgagactacaaatacgtttattttcattatctttagatagcagttcatttaaatatgagctcatctattcacaaacttagtgtggaaagatctaaggaggaccacatcagttgagaagaatgaccggcatcccctgctccccttttgaaattcacaaggcataatatttactaaagtgatgagaagtcttgcagaagccttttacaatttttacttagtatttctgtcttatttgaccatctcccccataaatctcccacataaagcatttgttttgctttgtgtagcacattgtatgaaattagcattttgtgagaaatgctgaattagggccctttattcttttagtttgctctttaggagaaaaaggcaacatcaaaataagttagtgttaacacacatatgcataaacgaaacagcttgtgtagtgcaatgaatgtattcattagatagtggatcaaaagaggaaacaagtcaatagattaacctttgatttttaaattaggcttgttgaatatcatgataaga

SEQ ID NO: 96628 - DNA, 2017 bp, Homo sapiens
tacttgccaaataattgtggtctttggaatgttaccaatatgacatgaaactgtaaaacttgtttgtaaaataatatgcagactgggtagcataatgatgtacggaagccagggttcataatttctcaaatgcatcaagctatttagcttaaagaagtggtgtgttcaaattttttttttcttaattcatgagatgacctagagtgccatctcatgcatttaggctgactcttagtagtaataaatatttgatgattatcaaattgagcttaatattctttcaggtttatttcagttttctatcttgtagattaaatttgcctcttattctatataactttataggaaagtcatacttttagagttataggatcttatagctgaaagggaccttacaggttgtttaagctttaaataatatgtgatttaagatgctttgaggatcactggttaaatgttagtaaagaaagataaagaattttccctgctggatggcagtactcaaaaatttcccattgggaggctgaggcgggtgcatcgcttgagctcaggagttggagaccagcctgggcaacatggtgaaaccccatctctacaaaaactatttaaaaataagctgggtgtggtggtgtgcgtctgtcgtcccagctacttagggggctgaggcagaaggattgcttgaacctgggaggtcgaggctgcagtgagtcaagatcacgccttgcactccatcctgggtgacaaagtgagaccctatctcaaaaaaataaagattttctgtagagatttctatcaataaaattatgtgtgaggctgtcttcttcctcagtgtccatagtaaatactgttttcatgtcttttgtgttttctacacaaaggacatgcaggtcctgccatctttatcacagatgattatgcctttgccccagagtcatgctagctggctctttttttttcctccctatttgagtctttattttcctctatcagtgagaagagtagagtaattgagttaaggtccctttcagctctaacatcctatgattcagttcagatcatttgataagagtagatatcagattttatgggatgatatggaaagaacagaaaattcctttagtaatgcctccctaattctatttattcagtgctttttttttttggtctttggtcagtaaactgataaatgaataattgctttttacaaatgagtttgattttcttgctcctatattgagtaaggctggctctaatagatcttattttatttcagttcctgctaccacatgagcccaagtcgtcactctcccatgcctaggttattcaacagtttttgagttgagttggttttcttgcttcaaggatgcccccctgcccccacaaattttagatttcaatgtgttatctccttgcccaagaatctccagtactttcagtgcctataacatagtatctaaattccacagcttaactttaaagaacctccccatagtacatgtcaaagcaggattcaaggctgcatgtctttacactccctaatttgaacttaggctggtcttttcacggtgtcttgagtgattatattagttcacaacttcaaacttaggctgttcttcttaccctcctgcccccagctcagtatcaccatgaagtttgctttgcttacctatgttgtactatttcaagtcctgccttctccaaaagtttctcaaaaatgacttttgccaacatatacctccccttcagattattaaagaaaatatttgtaatctacccataactcttaccgtttcacttattttggcacctagttattgacttgttttatggtttcttaatttgctttaattttccaacaagtaatagattgtaagctcttagagggcaggggctatgttctgtactttttaagaagcctataggtgctgagcacagttcttggcacatcatgggtgctcagtaaaatacttgttgaatgaatgaaacaaatacacaggtattctttcctgcagtataa

SEQ ID NO: 96629 - DNA, 1054 bp, Homo sapiens
ttctttccatctctaaggagcaaggagctcttcttgttttcttggtagagctgctctaactagataatgagctttaaaaatatttattctttaaatgctctggttcttatttaaaattagtttctttccacagaaagataaaataaaacaatttgctactgccagatgcttctctcttttctggggccttctgtttccattgggccaatcaaggtaagttttgcaagggattgacctgcttacccttgctgtaatggtgctattgcactaccaaaaccaagataccagctagtcatagttctagttaaaaaaaaaaatgcagattttattttttaaaagtactttcatgtatctcattgacataagctggtcacagtttgctttatggccctttctctttagctgtatcagtgaccatctttctagtaagtttacttgctactcggtacacatccattcaaataactgatttttttggtgtggttttcttctactttttcctaggctaatatatgccacgtgcctttaagtagacctaattatttagatgtttagaattcttctccctctgaaggctcctgttagtataataaataaatgttttagtaggagttatgccctgaaagtcccaaaagaatctccgctgtttttgtcagaattatataattcccttttatccccttaatatttcactaacaaatatgggtcccaaatcttggtaaaacaaattcttgttttagctttataacagactgggagagcatggataatttgaattctcaaatcagaaatcatatttgaaactctgtaaacattgctttaaaaattaaaggtgataataaataggacaattgatcctttttcctgcattatttcttctgccactcttggaagtactcaggaggaataagtggtcagaagataattgagaagaagcaggatgtctgtctgtatcattcacagtagtgacagttgggagggttctgccatgcaatttaaaaaagtcagttcacaaattctttagactttgggactgaaggttataaaaaccttc

SEQ ID NO: 96630 - DNA, 1281 bp, Homo sapiens
gcgtcgaaaagatgaggctttggggctgtcggggcgcgcgctcccgttggtgacgcgggggtggcggaggtctccggccgggacgaagccccgcagggagtggatactcgacagccttcggcctccgctcgcttctccctgcgcgctttcctgctcccctttccggctacagccctggggtcgagctctggtcgaagcgcattccgcctctcctttggccctgcggcttcctttgcaacccgccgcccacccttgctctccgtggtttacccctgggctctgaggcctggtggtagcggccactgccgcggattggctgttgcggacccggggcggggcaggtgggagaggctcgttctccgcgggtttcgttgtgtttcgcgccatgtcgtttgctgagagcgggtggcggtcggctctgcggcgccgcggtcccggcaccccgggccctgtggctcggccatcgtattcctcctttactcagggggacagctggggtgaaggcgaagtcgacgaggaggagggatgcgaccaagtggcccgcgacctgcgggcggagttctcggctggggcgtggtcagagcccagaaagcgctcggtgctcccgccggacgggaacgggtcgcccgttctgcccgataagcgcaatggtatctttcccgcggccgcgggcagcagagcccagcctcggcggtggccggtccaggtcctctctattctctgctcgctgctcttcgccattcttctcgccttcctcctcgccatcgcctacttgatcgttaaaggtattgaagccgacgccttgaaagtctgtccagagtaaagttgagccagggtgtggctctcgtctccacccatctccctttccctcgcgctaagccctcaggctggcagctgctttcacccagagtcctcatttgcatcttactttgctctcccgccctttgccttttctaagtggagcgtcctgatccatgatcaggagacgtatttttaaaaaggatcgtttgattaaatgggtactcttgaagaaatatcttcaagtccttgaacactggggatgaaatattgtgaagattaaacaaaatgcgaaacacccaccattaaaaggagacagtgaaaagtgcatataattaaaataggccatgttcaatggccttcatccacaaataaagatgtgctgtccaccaattcctctacacagaatcttgagggacaaagattttcatcgcatagtccaaatttcttcttttataggtaaaataattagcctctcagttt

SEQ ID NO: 96631 - DNA, 1516 bp, Homo sapiens
gaaagaagcagagttaagtttaaatttccattctcactagtttgtgacctttgccaagttactgaaaaaaaaaaaaaaaaaaaaaaaacaaaagaactttgttgtatgaaaagcacccaaaacattgtcactgaagtgttatttttgtacttcattaaatataattaaatctatttaactccagtttttatttgtcctcattgcttcccagcgtttagtgggctacagatggcatggcatctaaaaccttacaatgcttgattttcatacagaagacactttggccagttgatgtgggttttacctcttcataaaatggtaaactgaatgtgcataaaatgcaagctgtcagtcttaaatgattggctgccaatgtttcatttatcattcccctccccacttttttgcccttttttgcaattctgatagttttgtctcctaggtggtttatttctgttttgctcggagacattgcctttgtatcataaagtcacaaaaccatgataagtggaattccattgcagaagacattgaactgtgcttatttggaagaatagagaaaggaactgaactccacctagtatgccctttagtgtttaccactaccttagggaataaacagtactctcatcctatgtacggtatatagctgttggctcccttagtggtcaacacattaatttgcttgctgaaggtcacatagctggtaaattgaatcagaatttgaacccagttctttgtgactccagagcactttccacagctccacaatgccttcacagcccttgagttacttttcaaattatagtattgctttcctacctaagtccctctttgtatttgcagagttgcatgctgagaatttgaaaaatgaagatgatgtagacactggactattaggtatggacttaattgccgcttgctttggttttgagctcacgtttgtgtttctagatcatgtttgaactaactctgggataaaatacttaatgtatttctatgtgcagtcattcagtcttgtttttaatttgcatatgttggtgataaatgttattagatttcctttatatgtgtggagtatgtgtatgcatatatggtatgtttgctataattttttaatggggccaggtgcagtggctcacatctgtaatcccaacactttgggaagctgaggcagtagaatcacttgagcccaggagttccagaccagtctgggcaacatagtgagaccctgtctctacaaaaaataaacagaattagccaggcatggtttcactcatgtttgtagtcccagctacttgggaggctgatgtgggaggatcacttaagctgggaagttcaaggctgcagtgaaccgtgatagttacactgcactccagcctgggcgacagagtgagaccctgtctgaaacaataataatttttttaatgggtactggtatgtgtatgtaccacacacactagtaatacattttaaacacaactgcatgtgactcaggtccagagaaatatttaac

SEQ ID NO: 96632 - DNA, 1118 bp, Homo sapiens
ttcactgttataggaaaaatataattggaatcatgtatattttgcagccttgttaaagtgccttttggagtatattctgtattagtatacataggtctacctcattttttcatgactgcattgtatttcataatataagtataccagtttatttaaacatttcaaatgtcagaatctcttacccaggacttggaaattactagtatacagtcacgtttaatcccattgtttacttatgaagttttatgaagtgtgtgcaattgattgcctaacacttatttaataggaaacctttccctagtataggaaccatgagagttttgtttttttctggtgtattctgattatatataatatgtgtaaattggtgcctctgtgtctgacttcataaaacttcttgaaagttgcctcatccccgtaagctaaaactgttaaacaaaatgaaaatatttagagcatataacagcctcttttgctggaaggttttatagaaataaagttgccagcatatttttagaagagtaactgctccctgacaccagaatggcttattttgaaaaataagccaaaacaaatatacccttagataggtgtctataatattccagcaaagggattgggataggaaattcctacccatccctgtttttgctttggatgaaaacagtcttaagaggtttcaattgatggaaaagattagtatacatcatttcattggccagacgtggtggcgtctgactgaaatcccagaactttgagagccccaggcaggcggatcatgaggtcaagagatcaagaccagcctggccaacatggtgaaacctcgtctctactaaaagtacagaaattagctgaatgtggtggtgcacacctgtagtccagctactctggaggctgaggcaggagaactgcttgaacctgggaggcggaggttgcagtgagccgagattgcgccactgcactcagcctggcaacacagcaagattccttctcaaaaaaaaaaaaaaaaattaatatacatcactttggctgggcacagttgctcacgcctgtaatcccagaactttgggaggctgaggcgggtggaacatgaagtcaggagttcaagaccagcctag

SEQ ID NO: 96633 - DNA, 1144 bp, Homo sapiens
agtatgttaaactttgagtaaacttgtcaattattttctcccctctttagacatagtcatctaaataatagcaaataacagctatttggcagtatagcaacccctaagttgtagttgtagactaaatcttataattttttttttttaccctctatcctgatagattggtaggaaggttattctaaggttctgttcacccaattccaggttgggttgaggtgctagaggtggatactgtgccaggatattggggtgaaggtgcagactaatcctcaagacatttgctatagtgagtattgaagtatcttttattgtggtcaggatggtgtttcagatgtggcaacttccagccacatgaccatgtggtgtttctatgccaggcttagggcagaggcatctgcaggcttggctctgtacttacctaccaagatactgtacacagctatactccctgtgtggttttgcatgggcttttctagatgcttttgtcaggaagccccagtagcactactccctttccccatttacacacataagtgcaaacatgcatacaacctactttatttaaactaaggaaatctttctcacttgtcgataagcccctcactctctccctgttccacacaaacattttatctgtactccaatcaactcattgtctttgctgtgcattcaagacatattgtgtttatccacactcctatccctgattatatctgtacactggtttctgtaaatattgtgcaatgtaaagtagaaaaacaggctatttcttctttctgctttgccacatccctcttctggagaaatgaacacagagcccattagctctttaacaggtgggagatgggaggagggaactatcaggagatataatttaccacactttctattaataattcttctgagtctgtactttaacagttttttcagtctgttactgagcttcacaagatttacaaacagtccattgcatgtactttttacctgcttcttgctaaaataagactggtggataatttgtatagtcaggaaatttgataattcgtaagtcatctgctagggttctcaactcttcctgtattcttgaggcatggaacacactctcagaaacctgttttaaagacgcagtttaaaaatgagt

SEQ ID NO: 96634 - DNA, 2147 bp, Homo sapiens
tttttctttttcgaagcggggtttcactctgtctcccaggctggagtgcagtggtgcaatctaggcacactgcaacctcaaactcctggccccaaaccatcctcccacctcagtctcccaaaacactgtgattgcaggcatgagccaccttgtctggcctcaagacatcttaagagtcttgtgaaatgttttgaccatgttttctgtagttgaattttataaaactgaagatgttatgttcttgttgaatttacccttttttcccacgtattatcatttaattaaaatattcaatgatatgacttctagttgtgctttagtaatgtacacttatttctacataagttagcttgcaataagttcaaatctcttaaaatatcagatccatataatttagaagatgagaaatatacatgatctgaacatgagagtactggtttaatttaaattgttttggtgttaataatgtactttttcccctctcttttcctgttaaggattctggactctacttataatatccctaactgctggattctcctgttgcagcttttcttggacagtgacttactttgattcttttgaaccaggaatgtttcctcctactcctctttcacctgccaggttcaagtaagtattcctgtttcctgtttcttttttaaatgcatttcaactcttgaaaatactaaaatactcagaagcaagaggctgatcgtgaggtatgttgaggtttcagtctttataaagcactaataacaggacttttcagcttgtaggctcagcctttagatacatgagaataatatttaaaattctatatctagataatgcttttttttctaaaaactgaaattcaggggcttatttcacaagtaagaacctttgatggctatttgtccttttggaatagaatttgatttaaaacagtttataaaggcaaaattaataccaacaatttgaaagttttactaggttcacacatggtcagacttacaagaacataataattggattggacttttccttaggattttaactttgtgtaataattagcaaacatttatggtacccaatttatatgtctagaccagattggatgcttttcgtagtggaacagtattaaatttctttggtctatattttccatgtttcagagaattttagaaaattcagtagtgttctaacctagtttattcatgccaggaaagttccaattttaaatataaattccgaaataagaacatctaagatctctagtttattctggaaatttggggaggacatgaagacaagaaactaaattatattaaatttatgtatgttattctaatacttactattgttactaccaggtctagcctacctcatggacaggttgtagagataaaaacatttacttgagagactttataaaatcaaaattgtgctagtatagttattaataatcattggtactactggccttcattattagtaaactcccaattttttttgtctcatatcttttaaaattttggctcgacttcaaatgaaatgtgaatttgtatatatgtgtattatgtatatgtatacatttttagtgttttaatccctatgtgtatatgaaatgtaagtcatatgctttccaataaattttagttatgtgtttttgaggtggataaacaataatctaaattgactaagagttaagcctaacattacaatgccatcccgtagtttacatgggtaccactcaattagaagtttactttaataacaggtataagtctagggtaatgagactcgtttcaaaaaaatcaccaaaaaagtaatcgtattttttccttttatttatatctcacttccctgaattctagccacacatttcttgctgtttaatagaccttgctacccagatttcagaaagcattttgcacttagagtgattaaaactctgtctttgctttgaagccatcaatatccacccatttcactcaccagagcttgaaattcttattcattgtatttgtctattcaccaagtccagtccttcctgactttttaaatgtcattagaatgcttcctgtttgcattttcactgtttttgtactatttaaggctagtgtacttgacttcttggccttctgtcctctaagttctcactcttc

SEQ ID NO: 96635 - DNA, 1031 bp, Homo sapiens
tgctaaaatataatctatgagattagattgggaatttgcattatttcacagttaatatacaaatcagcgggtatctgctaccttcctcatgctatcaatctttattgtctgatcactatgaattatccatctttccatttcttcttcttccaaccacaaataacatttgataaatatccagacactcaattttagaaaacatgcttttaatttaatttttatttaatgtaacattatttatatgcatccttgtttaaaaaaattgtattgccttacaatgcaatctggaatctgcaaaataaattgtaagtgagaaagaaaagggaacaagttaattttagtttgaattaatttttggtaaattgtttttagtaactattttagagagtaacatgatctattactcttttacatgtgttacttcctatgtaaagcgttctgtatgtaattagatgctaacatttgtgtgtgagagtgtgttgttaactgtagtagggagcagcagatagtaaaatactttgacatgtgaatttcctggaacattcaggattcagtattggcatcctgtattataatgttacttttctattcaacattagtttgggtctttaaaatattgttattagggtttttctctgacgtcttcacattgagggttaggaagatagagaacaaataaaacagttgaatcataatatgcaattcaagaaaagggaacaagttgatttttgtttgaattgcttgaaatttgaaatttccagcagcactcagttttctttaatacagttagcctatcctcataactaaatacaagcactgattttccctccttggaaataagtatatgtggacatctttagcataaaataatatacgagtgttacaggttcttaacttgggcatatatataagccttggaggtcaaaaacagtgggttagttagtattcaaattagaaatttcttttccatgcagactagatttaacattgagcacagtgaattgactctactactctttgatacagatttt

SEQ ID NO: 96636 - DNA, 2265 bp, Homo sapiens
agtcaaatcaaagtaagaacagacagcatggaaacacaccgctaattaatgaaagaactgtttgtaaaataacaaaacttataccttagaattaggttatggctacacacagtgacaatgaaacacagtaaagaaataatagggatgaaactcagcattactcatcagtaatgatttgaaacaactgtaattgttaaccagtacagttttgacacaggacttaataagatctatccactatttatcctgcagatgtccaatattctttaagttttgtattcatatgtgaacatttgggaaatacactccaaggtcataagtattttcgatgaaaacttttggtgtctttgttataccacgttacatttttcttttttgatttgtgtttttctttttttctaggaaactgactggacattctttccacatgggctatagcatggcgattttgaatggcatcgtagctgctcttactgtagcatggtgcctcatgtaaacccacactggagcgatattgttggcaaaacttaatcatgattgttttgtaataacaagaaggagcatcactgtctactcagaagactgagaaacctgctgttcattatgtagttcagatatttatcacaatcatcctcattatggaagaccttttaaagcattgttttagaatgtctgagtattaagatacagattaattgggaatatctgagtattaagtactttcttcagagtataagatgtttacctcatctttttacttttgtgtgtgtagttctttcaagttgtaggaaacattttaatggaatttaaactcaaaaacttgaatacaggacaatgcttgccttttcatgtatgtactacattttttgctaagaaatactgatatttctgtttagttgagctagaaatacttcttatttatacatttaggaaagcaaataatgcctactactccgacttttatagaagctacttttaaatcagaatatttaatttttgatattcatataattaatagaagttgcatttatattttttatggggcatagttccttatgtgtttttttaatgtattttcatactacatactgaatttgtatgtttttaaaattgttacatctagacaactgtaaacattatttttttagctagtgcaaacctagtacctgccatttttactaatttttgtctttaaaaaaagcaaaaaagcacattgacctaagttgaaaattaagtaagtttatttttaacaaaaaatgcctgaaaaaagctaaattatttaagtcattaagatattgagaaaaaatttgaaatttttactatttctgtttccacaattccaaatatttatcttggtgtatatattgttactttaacagaacttgcattattttgtttttaataaatataaacatgaaatttttgtatgtgagaatgattgaactagtttgttcttaatctcaaaaatttagttaccaaagtagaaaaggtattttgatactagatattaaaaactacatatagttaatataattttataatttttgtaattaaatgtgctcctgtaattgtgatattttgttttctaagtaattaagccttaatttttcccctatgttactaaagacttttaatgtttagaaagttacctcagttttagaaagatggactacttacaaagctgttttccctggccataggaaaacttacaataagaaaccattaagtagtcaaactgcttattcaggctaagtgggaaatgaatttgtgcagtgtgttcccttaattatctactgaatgttgttaccgactaaacaaggtttctaaaagtctcgcatttcttttactattcaaaactctttggttggaaatgactaatactgctccaatttaaattatctgaaatgtgtgtgtgtgtgtgtgtatctaaatatcaatcccatggcttaagtattcctaccagagtggtggttgccatcagtctattttcactccctgccttccttcctgcacgcttaaactcttcaccctttgactccaaagagccctttcattgcaaagatgtacacaagtaacagaatcaatttatcttctctccaccactctgtattcccacgcaccaccaatgtgagtaactccctccagattgtttgtgtctaatgactaggaaagttattaacagtagaccctagatagagatatgtacaccctagacagtcatgtgccatataacaacgttttggtcacaacgaactgtacttatga

SEQ ID NO: 96637 - DNA, 1103 bp, Homo sapiens
aaaccaaggtgacgggatagggataaagggttcctgtaggctgttttaggctaatagggaaggtctgaagaggggacactcaagctgagacctgactatccagaaggcccttttggtccagtctgggggaagagcgtggcagatgctgtggaacagctggtgcaagggccctgagctgggaatgagcttgatttattctgggaactaaaaaaaaggtggaggtggttgtagcagagtgagccatgtggagagtggggtgagaagtcagagaggaggaagggcctatctgcattctagatggttttattgcagcaataggaagtgttaggatttcattaaaaagcagagcctgtatttatacgaaagagtaataatttagtaatctcaaaatgtatataacaacaaaaaatccactttttacccatagtgggttgcatgtagttaatttaaaaattagtcattctgaatgtcttggaaatgcattctgagacactctgatgcctcaaaaatgcacaaaattttagacagctaccacttttgtatcaattatcttccctcttttaccctcctaccctagcacccctacccaatttctccattcacagcagtgtgccggtggtaagaatcttctcatttcatttagtttttgctcattcctattgctgtggcctcagcaggagtggtggggggagggaagtgagaaattagcttcctaattttcttgagagtttcagctttcagcccaggactcaaatgttattttccccacttttttggaagtactcctcattgatcagacacaggtttgttgccctccttgcttcaaatgagttggattttcactctcaagccttgcctcttcattaataagctttacatctttgctcatctagcaaatttcaaaacagaggttacctctcactcttgctctctttgcaacttctcccaggagagagagcactgctagaggcaaacaaagcattgcagatttggctcattagaactccatgctttcaaacttcaatctggtttctgctgctatttggcagtctttttaattgtcttttctgtactctcaggcctgctccccatgggatctattt

SEQ ID NO: 96638 - DNA, 1046 bp, Homo sapiens
ttttttttaactaccaatgaattttgcaaatataaacattaaaccccatataaggtattatagaaacatcaaattttattgtaaccttaatcatgctcacatgagaagctcttttctctccattctttttaacatattctagtttgaatctcatcatagattaaaaatgcccttccagtagatggctcttcatctaaaatatattgtcaaatcacaccctgcactaacctataattactccctatttgaagtatggtgaaataaacctaccaaaaattgaaatcacatttaaaaagtaatttagcatattttttctaaaaagaagtaagaatataattcatttagactctatgttatgattcttataatactagaagaatgccgagtacagaaggatcatttagagaagaatatgattaaatgcctctgagagtttgaggttaaggtagcctattcagatgaagtgtcatctcactagaattttaaaaagatgaatagaattttagccagcaccaagagcaaaggcttgaaggagtgatacagtatggtatgatttgggtaacattacctgcccttctatgtgagacagggtgtgagaactctgaaattctgcctatcaaaaataagaggtggagttgccgtatcatgaagctattcaaatgtattcttttggattagcaaaatcccaaacaattttgaaaactcaaatttatatggtgaaatttttatgttagaattagtagctttagttttgtatcatttttacactttgtacccaggttcctatgcccatttttctgttttgtgaataagagaatttatctagttaattcaaggaaaatttttttttctgaaatgtacaagttatgtacatatttgagttgaaatgtacaagttaagtacatatttgagttaaggcaaataacttctttgggtatcttttaaatatacataactcatgcttttttgtttataaatgtaaggatggtatctatgtattgctgtcttatatatttgttgtcatatgaaattaccttttcaaatag

SEQ ID NO: 96639 - DNA, 1070 bp, Homo sapiens
gtatcaaccacaattaagtgtgagccacctcaaaacaaaacaaaacaaacaacaaagaccctatatgtgtcctataaagaaaccagcatctgttgatggctagaatggagagcaagacaaccagcctgtgttcaacaagatagaatggagaagtgcctgtgtttcacccctctactattaattctcatgcctactgttctgtccagttttgtaagaaagagaaggaaagagggtgagggaggagatggagagagtgaaaggtcagactacacatccctattgatatagaatgaaaaaaacattgagagtgaggtttgattttatagagttttgaaccacttagtaataaaagtgagttgtaattatgggcaaagatactgttctatactgagaagttacctgaacggctgagatgttgtcagagtatttaagaatgaggactcaacagaatgaattgaacggcagaaaacagagaaaaagggagacattttttcctcccacatcaaattcagactgttcaataaacaagttccatttatgtttagtcaaaagtcaagtgatagtgacggctttagctatctagactttccactccccttgtaggcctgtgtgtgtgtgtgtgtgtgtgtgtgtgtgtgtttgagacggagtctcgctttgtcgcccaggcgggagtgcaggggcgcgatctcggctcactgcaagctccgcctcccaggttcacaccattctcctgcctcaccctcctgagtagctgggactacaggggcccgccaccatgcctggctacttttttttttttctttctttctttttttttttttgtatttttagtagagactaggttttaccgcgttagccaggatggtctggatttcctgacctcgtgatccgtccgcctcggcatcccaaagtgttgggattacaggcgtgagccacggagcccggccataggcctgtttcttattctatattcctgttaatgtaaacctcctgagattggaagacaatcagttttacagggtaagaattgttttaattatgtggcagcttttctccaaacatgaaga

SEQ ID NO: 96640 - DNA, 1043 bp, Homo sapiens
acaatccttttcttccccctgataataagaacctatgtttggttttcttcccattaatttcatacttcttttgcattccaataataacctgtagtctgcagccttaatcatgataagcagtctcaaatcactttatttcatcacagtgttggataaacacttctgatttaaatttcaataattctacattagcagtgctgataggagccttcaatgtctgatggaaattctgcacagggattacttagtaattattggtttcactgaggtttatgttagagctggagttagcttttttgccagaaatccaagccccagagagcaagctgggccaagtttgcacaatcactgctgttcacctattagatgtgtcacaaaaaatgaaattaaagtctctctaatgagtgatcaaactgtttaaaaacctcatagaattttaggattatggaaatttaaagaagagacagctctattaggttatctaatcaacctacctcccctctctttctcttaagggactgttctttaatgccatttttgattattttgtctagtcaactgaaatgatttggtccataagacttctataattcccccaggataactttccctgctctaatagatttcattgttaggaagtgcttcctaataactaaaccttcccattcatcccctttaattcatgccattctcgtattttaacctttgttttactgtccattagttcctgtaccttgtataaaacccacatcccaaataagttttgcctttatcccattgagatttaaagcatggtcaataaaaacgtgtccaacgatgtcatatttattaatcaaataagaaattttcttatttcgtgtcttgtagaaactgatataatcatttttatactattatctctctctccatgttcttatatgaaaatcatgagccacacttgatcatgcaaagctatttgcaccccctttttggtggaagaaaagttagaataaatattccctttattatgtattaacttatatatgatatatgggtatatatgg

SEQ ID NO: 96641 - DNA, 1078 bp, Homo sapiens
attcatattatatatttatatacataaaggaatgtgaagctatttattgactactgtacaccagtatttaaaataaagaatatacagctggataacatcctgattattacaaaagtattgttttccttgattttcttggcttctgctaaaccagtaacccaaatactgaaaaaaatgagcctacatgtaaggaatgagttgggtaaaggaaaacacatgcaggtcaattgtttacattatacacgtctctttacccatttatgccagcaggtcctaactgccttttctaaacttatctgattagttttccatgagccaagactgagacattccacaaatcatgatgttttaatcaatacagcacaaggattacagctttttctaaaggaaaggcttattagaggaatctttaaatatgtctatttgactaacacttgcttagccaattaaaacagcaagatttgtctagtttccttgtctaagtgaggaggttgttggtagtaataaaaaatcttccgtttagaaatttggaaaacaaagaatcacatttatatgaatataggtagaaatgtgtgttctgatgtggatgcttttaaattatccagttaattatagaatcatctatgtaatttgaaatattacgacttcaggaaaaatttcaatttaacttgaagtgatttatttcttaggttgcacagaattatggcatcccaggaccatgggcatacccatggtttttgttttgatgaaagtttaaaaataaaccaagaaagaaaaccatttacatttgtattttaagcataaacacacaaaacataaaactcagaatggttcttaggcatacgaattaaacacaagtactgattgtataatgactaaggaagtttccctcaacattaacaacgctgttctctagtgcagaggacaaaatatgccatggtatcaaatgttcttttctgataaagaaagcaactacagaaagtttcgtttatttgttgaaattaaccaatgtgattgatgcaaaaaaaaaaaaatctcctggcaaatctcccaatactactttgaaaacaaacatatc

SEQ ID NO: 96642 - DNA, 1013 bp, Homo sapiens
actggcggctttccggacaataacagttctatcccttgctcattggttgacagaataacatgcccaatgttgtgataatatgagggctaatggatcctagacttgctttcaccctactcaagtgagaatttaaacactagcagtttccaggcttactaacctgtgctttcacatccaccaagaagattcttatatggaagtaaaagtttccatcatcgcccactagtccttattagagaggctgttttccagttcttgcaaacacatctgtaggctggtgccccaacatcaggtgcccgcaggtcaaattcatttaacctaagaaacctggtcaaatatgagcaccttttgtcagcattccatatagtttttctcccagaaagaatgaccaacctgaagcagctgtgggtaattctgttagccaaaacaagctggaagcaaaagggaaaaaggtaacagtgaaaattcttaaaggaaccaagtacaatctcactaataagctacaaaacatttaaatgactagtgtctgtgtgtgcttgctagtattattataccatcagaaagtaaaaatggacatacatgttatgcattaaacccacaagagagaaaacttgaggactgattaatttaagtagtaaatgaatccaagaagtgtggatcacttgatggaaaataaccaagaaagcccattattatctctcttgctggcttggtgtatgatgaagaagagacatatattaaagggtgctgccagaagagaataaatttgtatcttaatagaaaactcaaggcaaacttgcgggggttaccaaatcaaggaacatttcttgaattcccactgactacggtgtttctgtcacattgttgattgctgcagacatttccttaactctagagtgccaaacatcaagaaaatgtgcacaaataaacaatattaagaaacactggtgtggtagactgttagaactccccccattcctgtatgtacatctctttgcaatgtgactttgctg

SEQ ID NO: 96643 - DNA, 1044 bp, Homo sapiens
tttgagctttctggagctgaaataggctgcttcaggagttaataagctccctatccctgggcagttttaagcagaggccgggtggtcccttgatggttatattgaagaggactcttataaatatggtggagttttggccagattctaattcctttaaagccttgagaatcaattagattctatgagttttatagtaaaagcctcatataacatgattggtctataaggcatatggtaatcctgttcatagacattggcattcatgtatggctttatggagtatttgatttattttaggacttctgcttgatttcctcttggtctgcctcataattttcattagctccatttggagatttttttgggggtttggctctatggcccagtacccatattcattgcagtaataaagttttaatactgaaatataaagtcatgtgttagttatcaaatttccttagctcattagctcctgaagaatagaaaccaaagttttttaggatgatcttgtagagagatcagcttgctggggttaccaaggtcattctgtgactccctgccatcctttgcataaccataatttcaagaaccttttaactcaatcactgtaattactttacatgttttgttggagagagagacatagagaaagaacagaggtgttctgtgattttgggtcatttttagccatagcttcttaatacagaatgactgcattgctgaaccaaatgaacagatttagtcttcagtttccaatccttgagatttctcctgaccctagaagccaaagtattgcttaatgataattatgtttcttcgggtttccagatcaatttggcatagaacatatctactttgttgtccagacaaggcacagagaatgaatgaataagatcatcttccagaaggtagaacctcgttaaaaataggaactgagaaatatattgccgtggaagcatttgttgttatgttattaacagggactcagatgtgtgagatgtaggtttaatttatatttaaaatatactgatgaaatatattgct

SEQ ID NO: 96644 - DNA, 1020 bp, Homo sapiens
gtctattgtttctatctttatgtccatgtgtacccattgtttagttcccactcagagtgagaaatgcagcatttgactttctatttttgcattaattcacgtagaataatggccttcagctgcatccatgttgttgcaaaggacaatactttattatttttttaatggttgtttagtattccatgatatatatgtatcacattttctttatttaatttaccattgatgggcacttggattgattccatgactttgctattgtaaatagtgctgtgataaacatatgagtgcaggcgtctttttggtaacatggaattaatcagtttttgcacaatgccttgtgactggcagtttcctggttgtatttgcctcattatattttcgtctggatgtctccttgaccagactgttaaccttaccagactgaactcttcgatgacaagaactccatcttaggcatctattttttttccctcaatgcctagcacgatttctggcatggtacaaggtaggtgttaacacatatttgttgaatcaaaaacaatgtcattggtcatccttatagaaacagattgttgtaatacctagaagtgaaaaagaaagaaagatggatcactaggaatgacatgattaaacatctgcaaggagtccatatgacaaggaatctgatagatatatgtggctgcagagccctctgtttctttaagatattttttaaagagcattatttttatttttattttcactgaagtttagaatgtatgtgacttttttatatcatctatctttttaaaaaataaattaggacacatccttgaggaatactctgaaaactccatcaagcttccaaacttgaagaaaattgccaagttatgcacatcttgagatttttctcttataaagccaagatatgtgaaatttattagcagttctcatgtacagttttacgaagaaaagaaaaatgcagacgttagtgttcctatggcaatgaggcttcagttctgattccgttcccagctt

SEQ ID NO: 96645 - DNA, 1722 bp, Homo sapiens
atatcatgtcctttcataattattgtgaaattataagacgatgcttctccttttttttttcctttgtagtggctgatttgttacctagtgctttagttcgataattttgataattattatcaaataagatcctttgtgtgtgtatataggagaaaatcttatacagaacacattaagatatacataagttatggcaatcttgtcttctggggctgttttttaaatcttttaatggctgaggttttatttctctttgtagcaccagcactcgatgtgtcttaaatgtgatcagtagtgatggtgagcttgtcaataatgactccatctccatgacttgtgaataggcggtgagtgtgtcctttaatcagtcacacagaacttgctttataaagctgttattgtcatgaacagatattgcagtcttgtcaggcccagtgattattaaagtgttccttcttcaaaagccaggccgaaagtcctgctgtgcttcatttcacaattgaagtccattagtaaataaaatcccaagccgcacgatttgctgttcctcaagttataggcttacatatatttcattaataatcttgggcccttttgtagacataagtaggtatatttttggtatatatatatggcaacaaaaataaaatatgtatcttgcagcatgacttttattttaaatgaagatttgatggatgtccattgttactctaaatgaggtggctggctgccaagggaaaccctacagtcagaaagtactagaattgttactatctacagggaatcactttctattttttgagttctcaacttcacctcctcctttcaatagtgcccctccatattgctaatctgagaattagtctgaatatgaaaacttttgaaaatatgtttgtgttgtccaagaaaaatttcaccagtgtttctggttgcctgctggttttcagcctttatcttgagtgggcatgtttattctaactgaatgaagaatgactattgaattaggtatattccccatgccaaataattttaactgtgatgtaatcctagccgctttcttatttttactcccgaataaatttaaaatatttaagattggccaggtgtctgtttttctcagggtaacatgggacagctatggataggcattaggcctctcatagaactcttcattcaagtgagtgtggctgagaggaacaaccaggaaagagtatagtgccccattgcacttgccctgttggcttttcaaatgcaaaatccacgttgttgcatttggaaacttgtttctctgttttatggtatttcatttaagaattttttttaactgccagtctgtaaatatttaaccagccaagcaggaaacagccttttattctcgactgtatacagcttttgtttttatctgggttagcatgggtgccatgtaaataccatataaaatttgactttggttgtccttactttgaagattgacaggggtttctttaattaatcttgtttcctttcatgttctgtattgagatattgaaatacagtattttatacatttataggattgtgtttgcatttatttaatttatgtttctttttttgaagcatgtagccttgaatgtttgttctaccctttttttttttttcacatcattactctggtgctgcttgatgtaacttgattagctccctccccagtcatgattggtaattaaaataggcattaaaatt

SEQ ID NO: 96646 - DNA, 1030 bp, Homo sapiens
agcaggcttcccacttgcaaccccccgccacccaaaaaaaaaaaacgaccctgcccactgagcatgcccagcttacttgttggaactcctagggctagacaagcccaaggggacctaaggaaggcaaagttggggctcaaatggaccccacttctttaacagctttgctccgaagacctctgggtgctgtactaataacctttctatcgtggtattggaaaatatccaggagatggacggaaatgcctttccaaaagaaggaagaaaattagtgtgaaccaaaaagcagtggtatttttttaaataaagtattaagtcactcatttaatgtccttaaataccgcagaattcctgtagttgacccagaggaatgcatatatttattaaatcccaaactcagtaacttcagggaaccatccatagtccacagaggagcaatgattctcacccttggacacattaaaattggggggagggggcagggaggggtggaatgccagatttccatccccaagtccaatgagtcagtctggacgtgggatctgcaagtccttgtattttaaaactggctctaaaagtgtagtcactggagcccgcagcatcagcatcacctgagaacttgacagaaactgtactccagtgacctgattcatagactctggggctggggctgagctacccagatttaacaagccctttgggtagttctgatgcacattaaagtttgagaaccacggtttaaaagctcccccagttgaatcatgagcaaccagaaaaaggaaattgtagttgagaaaagaaaaatagttcagagcatttgagcaatgtgaggtatgcaaaatttatcaggcccagagagaccttgaatatgggacataagttgcaccccccacactcatgctcagaggcgattgtttaaaggcattttgttcatgactgactacccaaccatatcttcatgttcctggaatttgtgatacgaagaacaatctatagacaattaatagtttgtttttttatgtaaattatt

SEQ ID NO: 96647 - DNA, 1056 bp, Homo sapiens
ctcgttagagactcttactagttctttgagttgtgtatttctttctatatcatatcggtgctcttatttcctatttttcagtagagaattttatgttctttcaaaaccaaatttctgatttatgcagcaaaaacatgatttctgatttatttaggtcaagcttcggttcaattagttcacaaaattagtgggaaaaattggttaatagatgtctctccttctcaagtacaaatgtattgtgacatattgtgatatagtaagaaagatacttgtccccagttctgactaaagaacttttaagacccttcgaatctctggaatgatgagtgtctttttctacactgctgagatgacaggtgactcttggtagaaccctagatagcttcaggatggagatgggagctggtgccagaggaaccaactatgtaattagagggttggaatttcagcttcactccagacctccggggagaggagaggggctggaaatccagtcagtcaccagtggacaataatttaatcaatcatgcccacatcatggagccttcataaaaaccttaaattttggaaagcttctgagttggtgaatacatggaggtgctggaaggaaggcatgcccagagaggacaccccttctcccatttcttgccctgtgtacttcttcatctggctgttgatttgtgtcttttttaataccttttgtaataaactgttatatgtaagtaggcctgttgtggtggctcacacctgtaagcccagtactttgggaggccaagacaggaggataacttgagctcaggtgtttgagatcagcctgggccacgtggagagaccctgtctctacaaaaaattaaaaaagaaaaaactagccaggtgtggtggtccatgcttgtagtcctcactaccctggaggctgaggtgagaggatctcttggggccaggaggtcaaggctgcagtgagctgcgttagtgccactacgctccagcctgagtgacagagcaagaccttgtctcaaaaaaagaaaaaagataaaaaagtaagtaaatttctgttag

SEQ ID NO: 96648 - DNA, 1029 bp, Homo sapiens
ttctggttgtttaattgggcattttctggtgcccacttagaattgtgggattggggtatggagcattctagaatgttggtgaaaagtctagtcctttaggtttcttcaaatgttggtcttcttgggccaggcgcggtggctcacatctataaccgtagcactttgggaggctgaggtgggcagatcacctgaggtcaggagtttgagaccagtctggccaatatgacgaaaccttgtctctacaaaaatacaaaaactagtcgcatgtggtggcgcacaactgtaatcccagcttctctggaggctgaggtgggagaattgcttgaacttggaaggtggaggttgcagagatcacaccactgcgctccagcctgggcaacggagtgcgactctgtctcaaaaaaaaaaaaagttggtcttcttgatcctacatgaactaattaattctgtattccaaagaattaagataatgcaaatcagatggcagcagaatgaatcaagtaagagtgggaagggcaaatgtgaaatgagggggcaggagtgagtcactcttttgtgtagatggatagggaatgctggaaaggggagggtgaaggtgggttgggggctgtgggagagtctgagcaataaggagatggcgtagcatgggtaaaggtggtttgggcgacacagtggttagcaagctctgtggttagcatgttctgcatgagtgaccaagcaaggcccattttggcacttgagatgggatcactgaccctcgttccccagttctcattgtaaggttaaacaaagatgcagtgtatgctttcatattttgagattagggtatcattctagaagggacacattcttgagaaatagcttgatttctttaaaaaaaaattgactcatagactgtttccatggcattttgattttttattagtattttttcctaaggtacttagatggtgtccagagtttgtgacagagccagaaagcaactccccaccttctctgaaataaaaataaataccaagaagtactatt

SEQ ID NO: 96649 - DNA, 1049 bp, Homo sapiens
taatcccagcactttgggaggctgaggtgggtggatcacgaggtcaggagattgagaccatcctggccaacatggtgaaacctactaaaaactactgaaaatacaaaaattagctgggcatggtggcgcatgcctgtaatcccagctatttgggagcctgatgcaggagaatcgcttgaaccagggagtcagaggttgcagttaactgagatcatgccactgcattctagcctggcgacagagcaagactccgtctcaaaaaaaaaaaaaaaaaaaaaaagaaagaaaaagggaacatatagaagatctcaatcttttacgtaaggacattgaagtccagggaagtctgatggctttgttcaggctgagactatcgtagggtagactgacatctcaggttgctgactgcccattctgtaatctctgcagagcacttggctgccacatagtataatctgaaaaactggcagctgccagacgaatgactgaaggagtaagctcaagtgcactaggtgaggtcaggcctgaaggtcattggactgatactgaacctggcgttttgacaggaatcctattagaaatgccacttagtcacttgcctcctgactgcttcatggtaggaacagaggctcaaactatggcctgaattttttggattaagtttaagttttacttaatattatcccaattttatctcagacattatctcaaaattatttcaaaatttatggttgaagagaggctgttgagtataaattgctaatgtactctgctgaattccatcagctatgtgatttgactgagaacagtacgatcctagcccactggggtctggtgaattgcatctgctcagtcagagtgttccttgagctggaattgaaatgcatggccctttagtttccagtgtgatgccaacacttcaggcaattgacttttgctcttcagtctccaatagggggaaaattatgaaataaaatggggataggccaggcatcctcaagattcaaacccataaatataaataactgtaattaatcatatgcagtctc

SEQ ID NO: 96650 - DNA, 1064 bp, Homo sapiens
tacaagcgtgtctttccttccagaataccccctgatgattttcttttttaatttagagttttgggaatacaacatagagaattatatatttttgggaaagactatagagttcttttttgaaaaaaagatcaatgacagcttcaaaaggaatattgagtcgaaccctttattttctctatttatgctatttaaattttagacctgtcacctctgtgctattagctctgtagtgttgataccaaacatcttatgcagaataactagactatagtacttgaatgcttttcatgagggtttgtgctagcccttttaaagaagaaaagaaatatctttttctttagtttggaaaggatgcgttattcaactgaggagagtaagatcttatgaccaagatcattttagccaaaatgactgagatagaaatacagctttcctcattatttttgcataggtgaaggaaaatgtagtatattttcttcactttttttggagtggggatggagcatttaggaaatacattgttttcacttactttaaatgggaattttgttagcagtatgaattacttcaatctgtttctctcatctgattcttatttccttgtgagtcagacatttttaggaagtgtaatcagtaagctaaatattctaatacatgattattttcactacagtacgtctcaggtttcctttttcatatatgcattgtatctgtactttggctctttgttgtagttccatttatacttgtggattattagatgtacagaggagtaaattttaaatgtaaatttcaacaggttacaggagaaaaaagactgcaggatggaaaaactagtcagcttttttcctagggatcttctctctgttaaggaaacagagtgactggtcttcccaccacagcgcacttcttgatctcttataactctcagtcaccacttatacattaaatatatgtgtagtgatgtttataatagagctgtattcaaattgagaactttcttttacaatgaactgaacaataactgaagttattgtgctataactaattattattaaaaattc

SEQ ID NO: 96651 - DNA, 2408 bp, Homo sapiens
tatagtatcctaaaatgagttttctataggatcatagttatcaactatattgcaattctttatttaggatagtatgataatagatacagtttattcagtatggacccaaatatttaaccgtatcataatttatgttgagatactgtttttttagtatcctaagttaaaactaccttcataataaattgttttcttgagttgtgagctatcagtagaatgtaacgtgtgttgtccagacaggccagtgctccacccctacaaggaaatagggtagtggcttccctgtttccctgcttttgtgaatgtaaagtcttaggcaggtcaaattactcaactctagaattttttttagttgatcacacaggattatctttttacgtttaacagtaaaagcggacaaaaggatttttgatggaattttcatttttatgcaatcttcttagtttctgaaagagttaaagaataatttttaagtcctcatcaaaactttagaaaattccattatcagtccagtagtggaaaacaagtgagaggaaagaaagttaagagctaagacaatgcagaacttgagaaatattcagtggagcagagtgtggggtggctcatgtttgtaatcctagcactttgggaagccaaggtaggagattgcttgagtccagtttgggcaacatagcaagaccttgtctctacagaaaaaaaaaaaagaagaagaaagaaagaaaaaaaaatagccatgcatggcggcatgcacttggtagtatcagctacttgggagaatcacttgcccaggagtttgattttatagtttgctatgattgagccactgcactctggcctgggtgacagagccagactcagtctctacaaaaagagagaaagaaaaaaatataaatacagagagcacaaatatacagtgagtgcttgatctggagggttttctcttaaaattttggtgtcatgcaactctggctagaagaaaactttttctgttaagttcccctaatgaaaggaattacagcaggttaaattggtcagtttgtgaaagtcttaaggcataatacctctgacttcttatctgtaaagtatactctttttttttgagacggagtctagctctgtcacccaggttggagtgcagtggcatgatctcggctcactgcaacctctgcctcctgggttcaggcgattctcctgcctcagcctcccgagtagctgggatcacaggcatccaccaccacggcctcccaaagtgctgggattacaagtgtgagccaccacgcccagccgactctttcaataatagaaatataacactgctggcttttggctgtagtgaaaacttcattagaaagggaaaaacttgggaagggagtcttaccacaatttgaattaaacacttgccaaagaacctgaagcaagctgatgtttattgtcttgttgagtgacccaagacttctttctgctggttctccttgaggagaggattaggtgttgagcaaatttacaagtatagcatgcagttttgttaaatacccaatgacatttcttttcacagttcttttgactttatactgtttaaatatcctcagttatctcttaatttgcttttctttctttaattcctgtcgaaccagaaagtaacttttatgtgatcaattcccttgtctagaattttttggctatttattttgagttgcagtatacacattggtttgttagtaatttccttattttatgttttcttttctagtttaacatggtttcataatctacacagtgtcttattattgggatggttatgcgataactatcccaattaacttctttttgtttcttatttttctttgtaggctaagaaatggcatttcaaaaggcagtgaaagggacgattcttgttggaggaggtgctcttgcaactgttttaggactttctcagtttgctcattacagaaggaaacaagtaagtaactgtacttgtgttgattacagtatgcaacttaaatctgctaaagagctgtctatggggaatgtgtgcactaacggttttgtttagaaattacttgtgaagtttctcagtttgatctgaaagatactaatttagaacagtgccttaatgatcctggagaactgtgtgtatctccttttttaaaaagtgaatttctttttcaggaagcattatttagcctgtgttttggctctttggtttttaaaagactgcttcatttataagtgccaggatttcttcatttagactttccttgtctaattcatcgaaatgtctggataccttctatgttcctgccaaaagtttgtcttattagaaggcaggcagctgagaaaggaaatggaaaagaaaaggcccaactgaatcctggttttatttcttcaaggtttagttacttatgaag

SEQ ID NO: 96652 - DNA, 1098 bp, Homo sapiens
tgagtcaacgactgagctatgattaacgttgacagctggtgagctgctaggctgttgctaactgagcaacattgacattcattttgatttgactttgcatttcattttcaactatctattcattttaaggcctctttaaaaactttttagggatgttgtagacggaggaaactttctataaatgctttggggagagtcctttagcttccctctccccattccccatccttcagcttaatagttaaattatgtttatgctaggaaagcatcttctaggtagttttagaaatagatgatttaaatagaagttaggcgattccaattttgctttatttgttttgtaatttgtgatttcaacaaagaatttctgtaaactaattgtacaatagtgagtaccaactagaaaaatcatatttatatttgatgaaataattcacagagaaatgatgagtatgcattataaatttggccaaaatgtatttttgaacataggttaaagtgtagctgaaggccatctagattataaagcttggaaccggctggttggctcagttgggcatcattttattcacctgagagggatggggaaagagtgagccctctttaacttctggatctacttccagatgctttagggagtttattaagaaaaagtgctggctgggtgcattggctcatgcctgtaatcccagcactttaggatgccaaggcgggcagatcacctgcggtcaggagcttgaggccagcttgaccaatgtggcaaaaccccacctctactaaaaatacaaaaattagccaggtgtggtggcggggggcgcctgtaatcccagctactggggaggctaaggcaggagaatcgcacaaacccaggaggtggaagttgtgctttggagctaaggtcatgccactgcactccagcctgggcaacatggtgagactctgtctcaaatttaaaaaaaaaaagtgctatttcatagaattctgtgtgacaacttaactgcccaatgtggttggctttaggtgaggcagatgccctaggacttctgatctcactaactgccatcaacagttctgcactgctgatgccagaaaggcagg

SEQ ID NO: 96653 - DNA, 1498 bp, Homo sapiens
tcatttaataactttatggaaaaactcattgcaatgatgttcttattaattattctttaggttgtttttgggtggttttttttttttctatttaaaacaatgctatttgtcaatcaagttctgaaccagctctgagaatagtaagactagtaagatgtggccttgatttcaaggaacaacttagcagtttattactatttattgaacaaataaactttttcttctggcagtgaagggcattctgtagtgatcaaggtattagctagtatattagcagatgattgtgggtgatgatagttgtggtggtgatgataaggatgacaattttgaatagttaagagtttccagagcctgaaagttgatcaggtttttaatttttacagttaacagtagctaagaaaacgatgtatttttaatatatcttggcatattaattgtggtcttaaaataattgcctgtcttattttatatatgtggaattatgatttataaaaaggatgggcaaactttagcttgtatttctcttattatgctggtagccctctgggagtagcatttataattaaaatttataaagagatggctgaaggtaatctatatttatccttttactacaattcctgatcatatcagtggccctctgaagtgtgaaataatcatgggcatttggttaatgaattgtgcattgttgctgttcattcatggaatttgctcttttatcatatttgatgcttcacttaacaacaaattttgctttctctgcatttgatatgtttttaccaaattattcctgattgtatccattaatctttagtcacatttgacaaaaataaattactgtgatcttttaaagttaccagtaataattagatttttcaggacatcaaagttttggggggaaccactagatgttaaaggacttgtacaaaaatgtttgcatgagctttttgataaaatactgtgcccaaatgcaattttagtaatggataaacaaagactatagaggacagacaaaaagtcatggagtcttcataatgaacatttatttgcattcttatcatctgcattttcttgggaatcaattttcatttgtttcatttgggaatattattttataaacacaatatgcagacttctcctcacgttctcctgcaggtctctaggatcaatagaaattgcttcactctttaacacctctgtgtcccgttctaggacagaagcatgtcccaaaagcccagttgtgggcactttgctcccaaaggaagctggaaaaggagaatctgttaaatatattcactcccacaggttcttcaaggtgttctctttagctttttatgttcttttatgtaactttacctgtatgtatctgggattatctagtacatttttggtttaaaatctgatgtatttgcattcttggtgggcctgtagaaaataaaataagatctgatgtataaaatttaacctttatgtcttcagttcaaattccagagaagac

SEQ ID NO: 96654 - DNA, 1050 bp, Homo sapiens
aaaccaggaggccattagtatagttttttacatcattatctttttttgcctttctatattatttggatattcttcctctctttgaacattgggtatgtttgataataccaaagtaaaaataaaacgcaacagcagcaactcccttattcctcaaaattgtgttattgcaattgttacagcctagtacagttttgtgactccataatcatgtgtgtacttaacaaacattaaagtatgttaatgatgtgttctaacaacatcatatctctattaatctgttttctaatatatctgttttctaatataaacatagaaataaataaccaactcaatatcatatatttatataaaatgctaatattcacttttggaaaataccaggccaaagcattgtatcgtgatcgtgaggattaacaagtcaggattactttgcagctttacaagaggataatattttagaggaattgatccttcccataaaatgttcagccttcgggttagtcccttttcttattaatggcaatggctgtctgaaatccaaagttaagtgcccaaagcttttctaaagaaagataaactcacctttaaaaaaaaaaactatattatttttcctacatgcagcatgtggctttaatacctgttcttatggtgctaacatacaaagcatcttaaattttttgattttttgtgctattatcttggtgtctctgatacttatttcagagtgattattctcacctttctatttagaaatatcttaatagtgacatttcttaaaatttgttctaatgatataattaaagatacaaggagtttaaatgaaaatataatcttgcagcactatctgtaatagtgaaacaatgggataatccaaatattcaaaaataagaaattgaataaattattaaaattaatagaatattatccacatgttaaaaatgaaattatagaaaaatatttattgacatgggtaagtgtttacaataaacagtgttaaatgaaaaaaattaaatcaaatataccatatgatcctatttttacaaaaatgta

SEQ ID NO: 96655 - DNA, 1392 bp, Homo sapiens
aaccaattcagctgtcaggctttcatatataaatgcaaaaagtatatgtacagagagggaaaaggggaccaaactcaagaaaatgtcctaggatcaacaatattagaaaaatgttaagggtcttaggtaaacattaaaagctagaaaattcacagtttacagtgcttccgagcatctgaacaccacaggggggccacttaactatttttttggtgcccttgattgagtctacatgttaaaggacaaccttaactgtgaatttgctttctctgcattggacccttaatgttaatccattgtagtttattgggtgattatagtaaagaggtttttggtccaggaggagtatgaaggcattctgtaaatagcgtcctgcccatcctgacatggaaatgtttgtggcctttccctcttattactaatccctcctgcacaaaccctctcacatacttactcattttctatactttgtgatctattaggcactaaccaattttatttgtaagcttgtcaatatctgaatcttttaaaaataagtattagtgggctgggtatgttggttcacacctgtaatcctagcactttaagaggccaaggcagccagatcacttgaccccagttcaagaccaacatggcgaatcctcatctctactaaaaatacaagaaattagccaggtgcggtggcatgcacttgtagtcccagctacttggggggctgaggtggctgcagtgagctgagatcccgccattacactccagcctgggcaacagcatgagaccctatttcaaaaaaaaaaaaagaagaagaagaaaagaaatattagcaaatgtcatatctgaatttgtgacatcctgttttacattggtttggtattgttgtgaattatagattcttatttggaattgttgtgaattatagattcttattgattctacatggagaagccaagggaaacctttgttacacaaggcagaagaaagattattctcttagaatcatgaggaaaaagaattctttaatctagaattgatctttatagcctgttataggttgcaaaattatgagcttagcaaaaattcctgaaaaatttaaaaagtatttaaaatattttcaaattgctctttggaaattacttgtaaaatcttaagtcttgaggcaaaggagtaaaaataagtatattctactcatttgatataaataatttgtcttttgaccttgttctgaaatggtacaggcccaactatatcatacttgaggtgaggcaaaacaagcatgtgcaacagtgtagttttgtggttttacaactatatttacatgtggggcaactcttgttttacataatatggtgtgatgatcaaattgaatatcgacatggaaacaaggtgacgagg

SEQ ID NO: 96656 - DNA, 1230 bp, Homo sapiens
aaaatattccaaagtgaagcatcagttccacaagcatccccttgtatgtttaaaatttgaagattcttctagaaaaacttgccaaacattcttaggataaaaggaaaaaatattgcacatatgaacatgcctcaggtaagtataatctttgaagtttaagaattaaaaaccataacattttaatagaacttcctctaaacattccttcctcttagacattgatttaaaacatatttgcttttaatatttctccttgttcatatgcaattttacacttctaaactaaatgaatagttttaatcttgatttcctactgtcagctttcctgttgtatttctcctcttgttttctatgagttacataaatgaaactgacatcattgctcatacagcaggcatatttttttttgcccccaaatgctgcctttttgctattcagtgtatctggataccagctaatgctaaatgaagtttgacatgtacccctaagaaacaaaacttataaattgtggcttcaaaggaaaccttgaataaataggacacactgtgtccacccaggctaacatccagcatatgttttagcttcctgatgatgagatagagcaaaatagcccccaggaaactttgcaattgtttattgctcacttgcccagcatgtattaaataccaggctttcattctcttataatttgctttttttaaaattaaaatccaccaaagtagatttgatcaggtatagcaagccgagatagtagtcatccatatttgtactctgtatataaaagcttaaagacagtgctaaaaattctccagtagtaggatgtatgtaagttgtttgaacagatagttctagtgggttcatagtaagctatttacctctcccattctgtggttcagttgacccatttaaaaaagattcaggatcaaaggcagaagctattgtatcaaaaatctttgtccactcttctcttgatttactcattcatccaaaaaatatttatggaacctctactatttgccaggcattgtacatatatgccatatattttgccaaatacatggtccctaccaccaccaatgttttacatttgtgtagcagagtgtggttttttaagctttttttttttttttgcagaaattatctttgaactaactttgtatgtatgctgggataggatattatgatctctattttacaggaaggaagaggaatcatagctaaaaatctaca

SEQ ID NO: 96657 - DNA, 1023 bp, Homo sapiens
ttaaggtatattgtatataggaaagtctggataaatgcttgattcttttcatttatttgtactcaaaaataatgagttagcttttttagtatcctccaaatgtaatgagatctttttctgaggggaagcttgtcaacataaactcatgaatttgaagtatttgatagatacatgtcaatccatcagaattattgatgttcatattgcccatctctggccctggggcacttcctgcagttggcccctgagcccttttgataccctgtcagtggtctatgatgatttctgtgctgtttgctatgacaagatactccggtttcatcttgaaactttccttccctagttttggaagcagccatttcttcagtaacacttgactccctcatgtggaaaatggtaactagggaccataatctatttgctatgaaggttcattgctactggttggtcattatttctaggcctttcaatagaaaaaattaggaaaaaaattatgtgaagaagaaaaacatgttgagtttttagatacagttccacttcaaatttagtattacatggtttttatttaacgttatcaatcagacttccaaaacagtttaattttatttttcagtttcgttgttgaatggggacatacggacaaattactgtcttttaaagtgacttaacatatttatttcctataagtgtggttatgtcaccacttaatacaacagataatttcattttgctttagatgattaggaatttatttttttaaactgtgcttctgttttataaattatgtaaataaagtgttttaaagtaaaaaatgtaaacaaagacaattcaaacaaggctagcttctttccttgttctgccctattccctccttctttaaaattaacttaaaaaatttttttaggattttggtatgttcttttaacgtatgtatgcatatgtgtttattatatgtacacttgtttttgctctgcctaccattttgtaggtggtagtagtgccatgcttttttcacctaataga

SEQ ID NO: 96658 - DNA, 1482 bp, Homo sapiens
tatcaggtcacacagacaaattgaaggatggtaaatgcggggtgtcttatttccaggtggaggtggctctcagcagatggatggggagctagaaaggggatggagtgggaatatgaacttcgcctggagtttggccgtcctgtggccgatctcctctctgaccatccacagccaaactcttcttgatgtttaaatgccctttctcttctctcctctgctgtgccactcttctgcttctttgctcttctgcttatctgttatctgctcatctgctcgaggagcctggggtttggggtttataatggtacacgatgcagggatgcagcaggccaaaaggaaatgtttgggtgcaaaaacaggaatgcctgttcccatttagggccatgggtttccaggcttgagggtggggcctttgccagggaactgccttcttctacccagtatttccttgcctcctgtccatatcaaaatgagtatcaatactctgtaagattttcttttgtttacttctgtactctattcttcaatattagatttaatgtattagtcttgggattggaatgactataaaggaagcagcattttgtatagtaagttgaaagaatctgtaggtttatagctttctaagtaagatagtattctcagttgttttttcacatgactagcatttacatttatttatgtatccagtaattatatgaataccatctataagtcagctaatgtgataggtaatggagatgaacagaataacatgaattgctttttcttaaaaaaaaaaaaactctaacagaggatacagacaaggaaaccattgatttatggttgcctgtgagaagttctgtgacaagcatatacctaatatgggtatgtgtgtgagagaatctaggaaagcttccttaagtaagtaatgctttgctaaattttaagaaagggtagtatggccaggtaaagtcagtgggggaggaagatgacagggaacactgtggccaaagcatgcagacccatggaattacaggaagcagttgtgtagagcttgagtgtagggtggtgtagggcctgaatcatggaggacaaggtatgccaggatgaggagtttagtttgaattctctaggcaatgggcatccagtgaatgcaaacagcatttgatacaggtactcagggtgcagaaaactgaatgattaataggagggcattagatgagattttatgctgatgggaaggaatcccaggtgagagagagagagagaaagagagagaaagaaagagaaaaagacctgggaaagagagagagagagaagagagagaaagaaagaaagagagagagagcgagaaagagaaaaagacctgggggggggcggggagagagagagacctaggaaagagaggggggtggggagagagagagagagagagagagaaagaaagacctgggaaagagaaggcatattacatgggccattatccatctgcttgcttta

SEQ ID NO: 96659 - DNA, 1083 bp, Homo sapiens
acttcacaatgtttcgtttatatggggccaaagaccacagatccaccccgattgctaattattgagattgcaaatagcttatttcagaacttagggtgagacaaaggaaacatgaaggaacaaaaggcccaggataatgaaaaggatattgtgaagagaaaggcctgtagaattatgatgcaggtcacatcctgtgcctgcatttaattgtacctttgtatttaataataaaaatgattacatgctcactgctaacaggtgtccctgcttcagaactgtagtatggataggtgacagcaaattactccaattcataaacttggaatattatgcttttattttgagtttcaccagtctatactagaatacattttctgccaaaatgtacatcaacccaggaagatttttaaacttagcccctgataaatatacataaaacataggtgaatattttaaagtataaatgaaagaaaaaatcaactttgccaggcacttaacacattgaggttgtattaataccatagtcacatttctagttctttatattttatataagctttgaatgtaatgtaaattagcagtgatgtaagtggtctttctgttagaacttaattgcctcctttatgaattttctctaattcttgcttaacttgaacactttctgtaactgcctgtccaaaatatagcccctgccctagggatttgttctcctctgtttttccctttattgccattattgcaataacaatgttcttattaatctgtttgattttatctgtcttcctcattagaatgaagttccataggacagagaccaaggtaatcttattctccctaaatcagtggttgcctagtaccttgaccatgcctggctcataatgtgtacccccaaaaatatttgttaaagacattcgttaatctgccacttaccgtcttaatcatataccaaaaaccctgcttgctaccttaactttatcactagcctcctccctttgcttatgttttcaccaaagattttgtggttgaagacattctatttccattgtctgttgggtagctaggtagagagataatagtccccct

SEQ ID NO: 96660 - DNA, 1066 bp, Homo sapiens
gaatactgagaaatgctctatggaagataaagctcttgattttgaatattagatagagcacatacacataaaaatactcataaaaattgttcatcaacaccagttggggtgtcaaatattctaaagttttgaattgcttcactttcatgcttacgatttgtctgtattaggaaaagcctgacatatacatatgttccaacactgagagaataattacttatttcttaactttcagataattgatgtcagctctgtaggaaagggatattttcactatttttatggtacacgaaatgcacttgctgaagcggcaggtagatgcctggctgagaatgaccgtgtattttaaattgtgccctgtcaagctgcccagccatcatgcatatcctgggtgacagggacagatgtgacatatctgttgtgacacacttttgtaccaccagtctgtggctcgaggtgactcctctccctcccctgatgctttccccgctgcaggacaacataacgatgcacggatgaaccttgccattgctctgactgctgccaggtatggggctgccacagccaattacatggaggtagtgagcttgctcaagaagacagacccccagacagggaaagtgcgtgtgagcggcgcacggtgcaaggatgtcctcacaggtatgccaggtatctgggagggaggtatttcttagtatcttgcctagcttatataatgactgaattataatttttctgtcacttctctttcatttatgccacgcttcagagtcatattaattatattcgttattgtcagcaatgactggtttaacgtgaaaatttcccttgtaggacttggcaatttttcccctttgtattatagttgtaataatgataatgataataataaaatgcccaccaaattcccacagctatgaatggattcctttttctttacaaaaacatgttattaataaaattaaataaatgtgccaagtttcaaagtatcatttgggtgacacaggcattgttacacgttgttaaagtgaatctttaactttatttagattttcattattgccct

SEQ ID NO: 96661 - DNA, 1042 bp, Homo sapiens
ttcccaacattcaactgatataattctcaggctaaaaagctgaatcctaagatgtcaagcaaagtaaattaaagttcttaacacattatgaaccctttgtgactcggaatcttttcttaactcttttttatttttgactatcaactccaggagtattaaaaatggtatcaatatagataatgttttacatagtgttcctggatgaatgaaaaacttgaatgtttcagtttcagacaatacaatttcatagatgtgcttttctgcctgttataacagaaaaggtaaggcatttgccacagattatttgcatatgcctcaaatttactcgcaaagcctaattttccatcaaataactttaaaattagtcagagagcttcaagagttggaaccaaattcctgatcagtgtggctacctaaggaatttcacagacactagagggactgtggggtgaccacaatgacgttgtaagcgggtttgctaacttttatttttatctcagagggtgatgtgaactctaatggaaaatagtggtaatttcctagttaggtttttggtaacgattaaaacactttttacaacttgttttgaggttttatatgactggtaaaattgtgtaaagcaggaattaatccccattccacagaagccatccagattaaatctatttaagagaatgcacacatcagagggggcagagctagagatggaatcccagcattgagatcctgtattgtctccagttagtaagactgagaaggcttaggctttcctcgccagttaattatgttggtatttcagttacagtgtttggattatgggtttgattaaacatcctgtagaggtgatgggtatctactctttcagattatagttatgtcaagagtgtagcctttaagaatctatagtaaaatatgccagattaacttgagttgaatttatttttagcagaaacctattattcattttagatcaagatggagaaattatctgtcatccaacatagcttgttttgcttatacttggtaaggcatggttttgttt

SEQ ID NO: 96662 - DNA, 1059 bp, Homo sapiens
ttactatagcaggtatgagatactaccttgttattttcttttcttttttttttttttttgttatagggacagggtctcaccatgttgcccaggagggtcttgaactcctggactaaggtgattctcccacctcagcctcccaaagtgttgggattacaggcatgagccactacacctggccttctgtcttgtaatttggatgtgctttagatataagtttgacttaaattgtcctgccagaatctcttttaactttattgaacaagcattttttttattctgaattaagttttacacaatcccatgtttgttacaaacaacaggaaaattttgttattggtaagttgataaatggttaattataagaaaaataaggggtggcaacctgatgaattgtctatcaatttctttataggtggaaagtggacaacttatcggtctatggcagaagataccataaatgctgctgtcaaaactcataatttaaaagcaggaccaagtagaacagttgggcttttccttcaagggggtaaagattggagccccacactctacattaggcttgtgcaggattatggacttgaaagcgaggtgagtgtgcattgccacatcatcttactctttacctaatctctcactgctgccagtgacagaactggcagcaatcaggtctccctgattgagatttccttttgctgaatacatttctgccagtctgttatggaaggaaaaaaagatgatcttgctttgctttacttgcccaacaagcaatgtacactttatgaaatgtattttattaaaaagtggagtttatttggtttgtttctagtgtatagggcatcccaaattctgtctcaggcatgaagaaggctgttcttcagaagtggtatcaggagcaaaatgaagctgaagcttcatcagtcattgatgcagtgatacatgtgtaagagagttagtgctggcctaagcattcgaagcccaagtggtttccttccacaaaatcaaaatataatactctccgagagctattagttacaggctgtaagaaaactgacaaga

SEQ ID NO: 96663 - DNA, 1153 bp, Homo sapiens
aacatttacttgttgattgaattcaggattcctatattctggttactctaagacaaaaaactatacagactaaagaggtgagatcataactttttgacactcgtccttttcctagtcagctatgtaaattaaaatccacattatgtataagcatagagaggtaagtgatgactgtggatggttaatgagaagtgatgcaatttgcatgtttatgccaggttctattcaggaaaaaggcattaactcttgtccaatttttgccattttccaaacctcctttggcaggcagatggaaaacttgtgtgatgccactatttgtctcatgcctgctggaggaccagagagtataaagaaaaatattacctttgtgaagcacacatttattttttttaagtgaagctttatttctcattttctaaagaagagtctcaactaataatttttctttaattcaaactcaggtgaaatatgggattaaggagtatgcctgcactgctgtggatatgatttcacgtcgtactcgcctggcctttctaaatgtccaggcagcagaggaagccctacccaggattgttgaactgatgggcagggaactgaattgggatgattataagaagcaggtattatatagaagtctttaaaaccacaattcctattgtaaacgcggaatggcttaatttgttagtagaagctagcgtagtttttgatgataaccttagatttcttaccagtttttctttgtgtgtgtttaatattgttaggccttaggaaaatggaaagatattccatttaaatttagttgtttatggaaaatctcttgtagaaaatgctcataaatttgtggtcataattcctgaaaaagaaagataataatgattgtagtatggaaccttttctggttttcattgaaaacactcttggaacataatcagtgaaatgcaaactcctgctagtgtgcctttggtaagaaatgtggtttttctgcctgagcactaaatgcttatcatttgtgtcatttgagattttatatttatattccaaattttaaaagctggtgatgctcagatgcatacacacacacacgcacaacacatacatacatacatatacacgcacacaaacacacatacagggttaggctaagtagatcttt

SEQ ID NO: 96664 - DNA, 1026 bp, Homo sapiens
taaaaatattagatgtttttctcatctagggttttctacaagtaatatttttgttataatttttaaaagatttagtaacattagtgaaagcatatttataattttttttcttttttctttctttttttttttttttgagacagagtctcactctgttgcccaggatggtgtgcagtgttgcacgatctcggctcactgtaacctcctcctcctgggttcaagcggttctcctgcctcagcctccagagtagctgggactacaagtgcgcaccaccatgcccggctaatttttaaaatattttttgcagagatggggtttctccatgttggccaggctggtctcgaactcctgacctcaactaatctgcctgccttggcctcccaaagtgctgggattacaggcatgagcctccttgcccagccaaagcatatgcataatttttaatcaaactgtattattctatgcttttcttttacttagagtatcaatgtccaaatggatgaaaatacactccatgaaattctaaatgaagttgatttgaataaaaatggacaggttgaactcaatgaatttttgcaggtgagttgtggtgaaaggaaacaaggatatttgcttttatcttttgtttgtcatgatcataaatgcatgttcaagaatggatatttaagtccacacaattgtcagattattctgaagaagaagaaagctcgaagccagcagaggttgatatgtctgccctcaagtgtaaggctctactgtggtgcatattcttttcctttttttgtataagaaacattccattatgttgggcaatttagattaaatccaagttatttatcataaagggttgaatatgaagcatgctttttaaagacgtatgccatggcatatcaatgctggacctttttcttttgcttacttttctttttcttttcctgtacttcataagaggcaacacaagatttctaatcttttatgtagaaaatttttaaaaagtatggttctattcactaatgaatcatatt

SEQ ID NO: 96665 - DNA, 3437 bp, Homo sapiens
gtagacaaatataggtcatggtttgtctttgttcaatccctgagattcctttttaagattttaaatggaattaaagatccaatatttgaagttgctaaaaaaaaaaaaaaaagtgccttgagcacattaaaggacaaaaaatgatgcattaagatttgcttttagaggcagggtgatttactagatggatgtagtttttgtggcagtgttgaaatacctgcctcttcccctcttttggaaacgtttaaaaattagactcttcttatctgagctgtagtacttgttaaggtttttgatggagcacttaattacctctgtctgctgcaattctaacgattatgatgccatgaagaagagagtaagttggcctgcgttctgaatctgttgcatattttctctttaagctgatgagtgctattcaaaaaggaagggtatctggaagccggcttgctatactaatgaaaactgcagaagagaacctcgacagaagagttccaattccagtggaccgtagttgtggaggattgtgagtctgggcagtaaatccacagccaacaaacatagaaacgacaaatcaccatgtaacaaccagagatgactgaaaccactctgaaataatgaatgtggatagctgccttttttaacactagaaaacattccaaaactttaaggtgttggtgtatttgccagctttatttgctgtactttatttgtatttgccattcagtctagcttttaagtatatttttttctttttctcattttcaatgcacattagttttgcatctgttttgtgacctgttagatgtgacacattctctttttgtttattcccttattctaaatgagttctaaaaacataatattttggcaaaaattgaaaaaagctggagacattttgtgacatgcatacagatagcatgtgttattaaaaagagttgcctattgaaatgatcatgtttctggagaaattaagcttatagacagcatgtgttattaaaaagagttacctattgaaatgatagtgtttctggagatttctcagccccatcttcctccagcttgtctaccttcctcatgcaaacaatattccacatttttatatctagagcatgactggctaactggagagggaaggaaaagtttagatctggttactggagcaagtctcaaagagaaactctgaaagcttccagaatcacaggtataagataaggatagcattgacatttgctgggagttacagtgatagtttcatctcagcagttcatttttttcttcagtcactgctggttttctttgactattatagttgccaggaagatccttgctcttcttactttaaaaccagcatttaagtggcaatttggatgtaataggatgagaccaaatttatctaattattacagtagtaatacatttaagagttaaaaatgtgtttttatatatccacatatgataacaaaagattcaattcccaagcctaaattttgaagcatgtggtattgtcaaatctagcttaccatcttttttgggggtacttgcaaccatagtaaaggaagatggaatagactttagttaactttaattataattatatgttaaataaggcacataaccagtttccaaggtcatcatggttgcttaaagtctttccccttctgtactccatggaaatattctcagtaaaccaaaaacaaaaatggaaaaataatcaccaacccccatcccgacacacacacagagtccaaagcaaaagtcagtgtgtattgaatttaacaagtaatgcagtttgggatgcttttgctacattttggtggcattttaactagttatctgaatatttattaatcgtacttcctcttgtaaagttaactacttacttttttgttgttgtttttttaacatcaggttctgtatctaataggagatgtaacactttatttcatggcaggtttttattgcagagacttgaagtcttagttttttaaactggcacataaaacactttttgctgttatttttatttatgtcaatactgcagagtatctttatgccttattcaagtggattctgagcctgtatgtcacaatgtaaacactggaggttcactcacctacgcactcacccaccacctctgaaagaaacagaaactgcagagaaagacagcatcttagctcattttgtttttaaatgaggttttagacgcttgccacttcctaagggaaatcctaaaacagagcaagtgatgctcccaggtatcactgtgaacttttttctttcaaagtgtgaatttttacactggctttttcatttttttaaagtaattgaagcttgtggctttacaacttagtgttttttgctatccagataacaagtttcattgtttagaacccagtgacacttaataggtagataaattgtcctttaaaatatcccagatgatatacacaatatggtacatttgtgctctctctctctgtttttctctctttctctttctagttagatcaagataacgatgacttgtaccctccctgattctgttacagtagggcccgggcagatctgtgtttgttaaacaggccttgtttgtgcatgctttgctatgaatgaagttcctttaaggacaaagaaaagcacacttttcttcttttgagcatatctgcttttactttaaatctgctaatttctaaaatgtagagtccttcaccaatcccagagactcaatttggaaatgaactgatttcaagccgttactgtgaataaagcaccccagcattttgtataagctcttaattaaacctgtacagcttctttacctgatttaagaaagggagacaagcaataggggggaataagcttcttcaaaattcattccaagcacaaaagaaattttttccctttgcatataaacttgacatcagttgattctgttggggtcggggtgggtatgcagggattgccttttattatcaagtgatttatttcaagagcctttgaggggattcaggtgaaggaacccccatctgtgctggagagttggatactcctttaaatagcccccaccacagtcataacaataatgataatgctggattatttgttaagccaaggttgtctgcctcatatccatcatgctgtttgcaatattcttgctttcaatcaatttatactgagtgtaactttaggatttctgctattaaatgcatgctctctatcctgcttcagtttctggctttgctttgtctgtttcaaaatatgtagcttcctcttttgtacaacaaaaaactcattctcacttttactaaatatactgtaggagtcatcattgatgttatttttctcttatgtatctgtaaagatttttggcatatgaatgtaatattaaagtcaatgatgctataacttgcgatgtttgcatcatgtcaaccttt

SEQ ID NO: 96666 - DNA, 1048 bp, Homo sapiens
tattatttaaatccaatttaggcatatctgattttgctttaaaagctatcttattgtttgtctaagtgatctaaacgtaatgacctcaatcaacatatcactattctttaacctgaccttaatgccctcttaaacagaggcttccctctctgctacctcctgcctccaaagattcaaagtaaatagtcacgtcttcccttttaatttcttgcttagatttttctcacctttgcttcaatatcattttttgtttttcatctccatcattaattgatttacagttcatttttctgcatacagagtttttcctatccaagttgagaagctgtaaatcttagatccattgaaatgacagtgagaaatatttcattttatcccatgaatcatttgccatccttattgcagacaaatggcaaaattatggtgtaccatgttttcataaattactctgccgcccccccacccccattcccagttcatttcattatctgtttggaaagactataagagtcagaacccagacacttgcggtaaacaattctgattttacagcaggctaatcaaaatttcataacattaaaattaattcctctggtactgtgaagaatttaattcatgtacaaaatatatcatctattttataagtcaaaaatagcttgatattaaagtacattctgtgatttgctagtatagcaaaggggaagagtgccaaattctttaaataatgtatataattttcataggatttcatatgtcaaagtagtcatttatggcctgaaaagtatgtgcttcgcactatgtgtttgaacactattaaaaaatcatggcttcttccaaaaaggacaaatcttaggttttcatttcacatgtgacctagaatgaaataacttatatggggaccaccctgaacccccattaggaatacccccaaaagtaaaaacctgaaaatatttctaaagctaaatatttttaaaaagcaataaatgaaatcagtttttataatgttataatgttactaaagagatttggctattttccttaatctctg

SEQ ID NO: 96667 - DNA, 1040 bp, Homo sapiens
tctttgtattttgcaaatatgtcaagatttttccatcctccagggctttggcttgccgttctgtctaccagcttcattgtttcccttgctttcttcatgactggctttctctcatcattcaggacacagatcaaatgtcacatcttcagagaggctttctctgaccaccccatctacaatgggtcctccccatgtagcacttaccactagcttaagaatattttgtgcatttatgtttaaattgcttgtcgctttctctttcctaatcctagaaattatgatctgtgagaacaggaccttttcttgttcacctgtgtatcttctgtgcccataatagcatttgacactcagaaagcactcaatacatatttaatgaataattttgttaggcccaggcttgtggtcatggcactcacggaagacctaactttcccacttttctgtaaacacacttgacacaatgagaaactggaatctgagtgtgctaactttgctcagctagcccaggcttaaatgcctttgttaaacttgtatagcaggaaggcaaattaggtctagaatctagagctcatatccgtttataacagtcaaataacagcattgtgaaggtgaaactatttgggggatttgactgaaaaacatgaaagtttttttgtttttaatcattttaagcataattgggtactttttcagaattcttttggttgttttcattgaagtatacggtattaagcaatagagaagtatatgcagtataccgtatatgcaatacggagttattgcatacggtaaaatcacaaagtctacaggtcagtaaatttgtatagacaaataatgccctatgtagccattgtagatcaagagatagaacattcccatcatcctttcctcattcctcttctatgtcaatacccacctcccagaggtagttgctattctgatttctgtcactgcagattacattgtcctgttcttgagcttcctataagtagaatcataagtacctactgtttgagtctgtcttctttcacttaacccaa

SEQ ID NO: 96668 - DNA, 1015 bp, Homo sapiens
ctggtctgtctttggataataggaattcaatttggcaaaacaaaatgtaatgtcagactttgctgcattttacacatgtgctgatgtttacaatgatgccgaacattaggaattgtttatacacaactttgcaaattatttattacttgtgcacttagtagtttttacaaaactgctttgtgcatatgttaaagcttatttttatgtggtcttatgattttattacagaaatgtttttaacactatactctaaaatggacattttcttttattatcagttaaaatcacattttaagtgcttcacatttgtatgtgtgtagactgtaactttttttcagttcatatgcagaacgtatttagccattacccacgtgacaccaccgaatatattactgatttagaagcaaagatttcagtagaattttagtcctgaacgctacggggaaaatgcattttcttcagaattatccattacgtgcatttaaactctgccagaaaaaaataactattttgttttaatctactttttgtatttagtagttatttgtataaattaaataaactgttttcaagtcaaacagtgaaattgtttttcaaaatataaaaaagatctgtgtaacattatgcattttcttatgggagcaatagaagcacaaaactaatttgtaaattgaatttgctttttaaatctactcatgaacttatgtaagacatcataaggatgtcttacagcttgaatttggtataagaaaatttgtttcttcctttggctgtgatttttttgtttttttgtgtttttttttcagtcagtttctccagctgtaaggtgagggtaacaaatctctctgacctgcctttctcacaggggggtgttgtgagtgtaaacgggaaggaggatgttaaagcattttgttgagtgaaaggttccacgtgagtgtaaagtggtcttatgcatccgcccttgctgcttgggagagtccgttctcggttttttcactgcttgtacacaagatta

SEQ ID NO: 96669 - DNA, 1087 bp, Homo sapiens
taattgaatgatggttaaaatgtctgggccattggccaggcattaggaagtgttttagttttaatacttcgtgagttgtgagactgtgtggtcaggatcaggagctacttgttaggatattggttatgctaataataagtaagcagtgatccttacaactaattcccccttttccctccaactccaggaaaatccttccctggaacacagaatttccacttggaggttggcctcattattctctctgtagtgttcgcagtatgtcttttagcctgcctgctgggagttgctctccgaaaatttaaaaggcgcaaccaagaacgcctcaatccccgagacgtggagtatggcactatcgaagggctcatcaccaccaatgttggagacagcactttagcagtaagtcatgaccccacaggaaatcccaagcataaggaaggtgtctggagacacgttcttatttcgagcatgaaacgctaaccagtaatgagtgactgaacagtgtacacacatgctgttggttacttatgtcctaaacaagcacatgctggcacctgtgtagtcttcccatatcagaacagccattttagatagacatttaaataagggatgggatttattttagtagtgttggtagttagttacttttctctgaggggtaaagcaaaagagacagagaatggttgcctacagttttggagggttggaatttgtggtcttcagttactctatttttagccataaaagtgctcctttaaaaaggcaccttttgctgaatattaaatattaatttcctttctagattatttcagcatcctgtaatttaaggcttaaaaacttgacatccaaaaaagcagcttttaaattttgtatgctcctgtggtgccctcttgtggagtgcagtcatttggttaaaccggtgttgtccaatagaaacatgtgcatcacatgtaatttaaaattttcaagtagccaccttaaaaacaaacacatgaaaaaacccaaaaagtttcgtaaaagtagatttaattttaacagatattcaaccaaatacataccatctttgtcatttcaacgtataatcgat

SEQ ID NO: 96670 - DNA, 1146 bp, Homo sapiens
gaagagattaacaacaatagcaaagtaaaatagaacaattataacaataggctggcatcaccactcttgtgctttggggcagttattaagtaaaggaagggttccttgaacgcacctgcaataccatggcagtggatctggtaaccaagacatctgctcagtgactagcaggatggtagcatctacagtgtgggtacgctggacaaatggatgattcatgtcctgggcaggatggagctggacaacgtgagattccatcatgctactcaaacagcatataacttagaacttaggaaatgttcatttctggaattttttgcttaatatttttggactgtggttgatggtaggtaaccgaaatagtggaaagtgaaacggtgcataaggggggataagtggggactactgtagtctggaagttactttgttcactctgtgcttttctgtggggcaggataggttgtggagctagggaaggggagtttaactaagtcaggacattttcacctttagctgtgggtgtcacagtgcctaaaggctgcatttcaagacttgttaaacaaattggagccctgcttaacttttgaagggtttgtctctgtagtttgaaagcttccagaaaggctgtaggggtgtggtggaggctcgctgatggtaaccacagctaagattggcaaccttggaggaggcccagtccatgaatcccagagagagaggtagagtaggaggcaagaagagaaattgaagtggagagctaagcacaaaagccacctgctggctttttctccactgttctatctcatctagagcccattgttaaatgtttcctgtaaaaccaaaattctcagtgtagagcccaggtaggaaacccttactgaaatgccatacactctctggttagcccgaggaggtgggggaaacaacgaaaagtgattcctcagaatcaaccattcttcctgtggcgcgaacagagcttccagcctgagacattcaatcgatggaaccacattcctggctctctcctaagactaaacaaggaatgacttctgaagtgtttacaattcactgggactttcttccctgttcctccagattattctactctctgttactctccctataactagagctccacttagacatggc

SEQ ID NO: 96671 - DNA, 1032 bp, Homo sapiens
gactacatgccgagtgcccggcacacagtgagccctagagcgtgagaggccagaatgtggaggtattcattgttttatccctagtgtctaagacattacctggtgtgcagttggtgctcaataaatatttgacaaatgaataaataatgttggctagaataataattatggtattagagaaaagataataagagacagtgggactgatctgggctgatcacatgcactctttcaaataatttattatgagtttgggaaaagtgaatcagttataagacaaacttatgttcttttagtcaatttaaacaggagtaccagttgacaacactggtaggcattggtgacgtaaacataagcaagaagtggttcctgcttcaagaagtcatagtccagttggatacagcaaaggtcacagcatagcatgaggcgtatggacaggaaaggcctgcattccacatggagctgggtttggggctggtgatgcagggaagctaagttttgaaggataagtagccattagaccagccgaggagggactaagaaggacattgcaggcaggggaagggtgaagtccagagacgtgagatcatgagatcatgagcggtcaccatgtcatgagacggaattaaggttgagagttgagccctgcaggcatggcagagccttatgctaaggtgtttgtcttctatcctgaaggcaatggagaactgtggagagattaagtaggtgcagtttgtgttttgaaagagtggtgtgtggtgaaagtggatcatagagtgtggcaagatgagaagtaaagggatgggaaaaactaatcctcctgcagtttagggacaggcaggcacacatactccattttcaaaggcatcccaactgtagcaactaaatggtggcaaacaaaacaaaaacaaagccttagtgcgaacgtagaactgttacaggtggctcacaaatgatattaacagtgacaaaacaacaataatctaataataatgctattgctagttttattatgaaagcagaagccagagc

SEQ ID NO: 96672 - DNA, 1022 bp, Homo sapiens
gggaatattgctcctttggaaatatttcaaagctgagacgacccacattttattaaatttgtaagccacagttagattttattatagccaggaaggccagacttatgcagaattttttcgcaagagatttcggcctgttctagagaagactgctaggtactaaattattttctgagttatcttgattttagtatttacaaagccatcactactcagactttccagccccactacccaatgatggaaggaaggagataacttcaatggactttttgttagggttacaaaggtgcccctctttgctgctggggggaagaatagaataagcctttctttgattttctcattattagggattcaggaagttcttgaaggggtgaatgaatggaagagaaatgtcttagtattacatttgtttcttcttcttcttagtattacatttgtatctcttgttcagaataaaatctttttctttggcatatcatcaaacggaagatgtttttagggaaagggatgacatactaaggcatttgctactactgggacctagaatgtaaatatctgatgaagcatcatacttttaagacactgcttctttattatcaagttttcttattttacaaaatgatcctatactagttgatgcaaggtgagctgtgacaaagcatccttttagcctttccttcctgggaagtgtttgtttcagccatgagtagttaaactagtgccacattcttttctttcttgttttttttttagtggacagtataagaggggtatggatagcagtagggtgtgggaggatgctaaaaattcattcaaagaaagtcaaatattgaacagatgagaaaacaaattcaacacctaagctcatgaaatgatttccttgtggtcaacagtgtgcagtgcagtcacttctaagtgttctcttttataaagacaggtctccagagtgagaggatgaatgccatctcctctttatggaaaaacttgtaaagcagaaggtttgtaggcatgtcata

SEQ ID NO: 96673 - DNA, 1392 bp, Homo sapiens
ctgggactacaggcccacaccaacacgcttggccaattttctttattttttgtagagatggggtctcactgtgttgcccatgctggtcttgagatcctgggctcaagtgatcctcctgcctcagcctcccaaagtgctgggattacaagcatgaaccactgtgcctgactgcattttatttttaataacagatcaaattcataattttctactctatcggctttctacctttgtgttcttgggcgcatcacctatttttaagatttcattctttctccctacttcatagagtgcatttatttttacttttaacattgttttcttatttaggtcagtgagtgtttctggtcgagtgggtggttttttggttatatccgttctccagtctctctccacccggtatccatccagaacctctccctgcctcctctccctgtctcctccttgttttctgttgtggttacttggatgctaacccattcaacttgtgcactgaccctggtacatggctcgttttctttctcatgatcatatttatacttttgatggatatatttaaatgaacagctgtgtgtttgttgagtcataccacaattatctgattctgctttagctgcttgactggcaaaagcatatttcaagctaaattgtgagagaattccattaatcacattctattcgggggaggggagaggagacagaccactaagagaattcttttccaaggttaatgttaattagtgattccattatttagagtaggttgatctggttgctatttaatgtgtgacttggagaaactttacaaagtttaaataactgtaaaaataactatgaaaggtttaatgataacagccgtgtaggcaaaattccttggaataaattgatgtgcagataaagttagttgctgctgctggtctatttaaatagataaggggtctttcaagagttcctttttgtaaagaccagggttcttgcctcacattgctgtaattcattggctaagtattttgtttgaagcctcctgaaaagataacatctaattcagaaatgttactactttctgtttttttttttttttttaaatgtattactgactgttacctctggtcaagtctttggcttccatcagccggatctatttttctcctgacacttccttggggttctctctgaaggttattaataggcatggaagcatggctttccaaatagcgtcaataaatgttagaagccttcaggggagataatatgtcaatttctgacttgtaggagatgtatattcaagagacagacgctgtctcagaggtcattagggatggctctgggcctatcagctggtgtctgcaactagagatccaagcaatcccttccaactgggatattgtccac

SEQ ID NO: 96674 - DNA, 1052 bp, Homo sapiens
caatttttcttttacacacatggtaacagtatccacggttttatacgttttcttattgaaataatatttcttggaagttcttccatagtagcgctgcattctttttatttatttatttttttgagacggagtcttgctctgttgcccaggctggagtgcagtggcgccatcttggctcactgcaagctctgcctcctgggttcacgacattctcctgcctcagcctcccaattagctgggactacctacaggtgcccgccaccacgccctgctaattttttgtattttcagtagagacagggtttcaccgtgttagccaggatggtcacgatctcctgacctcaggtggtccacccacctcggcctcccaaagtgctgggattacaggtgtgacccaccgtgtcgggcgcattcatttttagtaaatacctggtattccattgtagagatgtgctgtcatttacttaacaatattgatgggtatatagatcatttccagtttttattatcgtgaacaaagctatagggaataactttgaatatacatcatttcaaacgtgtgagtgtatctatgggatccatttctagtagaattgctgggtcaaaggttatacacattataattttggtagaaatttattgccaagttgctctgtttatagaccttgacagattttagatttaacaacgatgggtgagaacagttttctcatgcccttgcctgtcaagtatgactcccaagtgattattttatttatttgccaaagcaataggtaaaaaatggcagtttaatgtgctttaatttgcatttttcttagtttgattgagattgagcatcttttcataagtttaaaagccacttttatttctagttatctttctatgcttgtgttcgttgtctattttgctgtttggttatgatttttattatcaaaatatgacatcaaaattattggtcccccctttttatccttgtgatatgtgctatttatatttttctccgttggccatttgtatagaaataattattactttgttgtgcaggttattac

SEQ ID NO: 96675 - DNA, 1032 bp, Homo sapiens
gtattcttgatagatgcttgtctgcgtccatattgatgaagaacagtagagtatattaaattaaagggttgttggctggttgtttggcagtgacttgctttctgttttctgttcactagaggatgcttggaggatgtaatctgcatactggttatcaatgtgaaggtttccctttgttctgtcagtaaaccctactggttaacagatccttgttttcaaccactggttttcagccctactgtggggcagagctacactgcagtgcattgtgagtattgctaagtaatttattattcattattgaggtaaagaaattttgacatacgttggagctgattcagcacaatactctcccatgtgttccattatgtctttcagagtgagaaaaaaatggaactcaaagacaagtcaaagaactgtatgttttagttagtaaaatatactattaagaaaaagaaaaagtgttaaggaaagaaatgagtatcacaaaagtcagcattatggttataagagcatcaataatattaataacttaccctttaatggtgcttatatcatgttctgttgtgagtgctttacatatattaactcatttaattcttaggataattctgtgaggcaggtataatttttaattgaaatttttcagatgaagggaatgaggcacattaagttagctcctgaggccttaaagatagcgcatggcaggaccgcagttctaactggctcagttctgggttttaaccacagtgtaggggaggaagggggcatagtggttgaggacacatgggatgtggtgggatgtggagtgctggcagtttcctaaaaaggaaacatcaggacccttactaaaggttttagttgcatttttagtctatatggattgttttagtccatttgggctactgtgacaaaattccagaggctgtgtagcttataaagacccgacgtttattttacacagttctggaggctgggcagctcaagatcaaagcactggcagattcagtgtctggcgagggcttcttaggt

SEQ ID NO: 96676 - DNA, 1002 bp, Homo sapiens
tttgtatttttaatagagacagggttttgccatgttgaccaggctagtctcaaactccagacttcaagtgatctgcccacctcagcctcctaaagtgctgggattacaggcatgagccaccgcacccggccttctcattttaatttttctgaagcatctagtgattacttgttcctttctgacttcattctttgctgacctcttttctccaagttttggaattttctgaggttgcttttcttctctttttcaatcgcatcttttaagattctctatgcttgcattgtccagtaaggtagctactagccacagtcaacatagaaatgttactggtttaaagaatctgctgatttcaagttgaaagccagaacaggaaacactgacacctgggtaggaggttaaggttgactattccaggaatggagagaggagcaggaaagtggccacaatttaactagttacacttgcttgttggctgttgccaggttatccgtgtatgttcctggcccctgtctcctgctaacaatgagtcattattgcaaataaagtaaatattaataaatctatgtgtagaatatttttaataaaagcctatgtgtagtgtgccaaaagataatgaggtttggaagcaaagtaagttcttaaattgacagtttcgatgcgtgattctgtgtagtactgctaaacttgctagcttattcaaatactatacaataatgtttgtaggcatttcctagtgtttggatattttctgtaagctacagttttgatatatactactatacttcacattttttattaaacagtttaaaaagtttataatagtgaatgaacactattggaagtatttaaaaaataatttataatttcagaaattccaattttttccctgcaaattttgaagattgatattgatagagagtttgaaacaatagtacatagtgcttgtccaacgaactgtttgtttcttttgataatgtgataggtacagaaattaagata

SEQ ID NO: 96677 - DNA, 1052 bp, Homo sapiens
tgtgtggaagataggtatgaaatgttaggaagaaaaaaatgcttcttttttttttttttttttactcctttagggtctgattgattcatgcttttttatttgttgaaattttttgaatactaactatgtgctaggctctgtgttgattatgtgttggtgacactgagaccaaaggtgctattcctggcttcaagagaattcatggcttagtaaaaggaacacgtaaatcagtgattacagtacagcttggcaaatgcgggtgtgcacaatgtacagcagtgacccagagggggaaacttaacctgcgttagggagaaggatgtagggaagcttctgaccctggaagatattaagtgaggacttgaagaataagtagaagttagcctggtaatgtagaggaagggcattttagcatagggaaacttcattgtaaagatagaaggcataagaagagcatagtaccagctgggaatgcaggtagtttagttgaactgtagcttagggtgcctgtgggaattgatgtgacataaggctggagaggtgggtaatggctatgtcatgaagactacttattgcttcctaaacaattcaggtcttatcctgaaatatgctagctattggattttagggaggaaaaggatcagattagatttggattttggaacggttatgagcagcagctttaagaaggttctttttcaatggtgtctattcatctgagctttagactgaattttgtccttcccaattgatgtgctgaaaccctgaccctcagtgtgatgctatttggagatgaggtctttgggaggtaattagctttaggtgaggtcatgaaggcgggaccttcctgatgggattagtcagcttgtaagaagagatatcagagaacttgctatctctttccacatgaggacacagcaagaaggctgcccctgttagccaggaagaggaccctcactagaacctgacactaggcatcctgatcttggacttctagcctctagaactgtgggaaagtaaatttctgtttaagccacccaatctatgatgtt

SEQ ID NO: 96678 - DNA, 1049 bp, Homo sapiens
aaaagatagttgcagattttttttttttttttgagatggagtctcgcactgtcacctgggctggagtgccgtggcgcgatctcggctcactgcaacttccaccttgggttgaagcgattctcctgcctcagcctcccgagtagctgggattacaggcactcaccaccatgcccagctatttttttttttcatttttagtagagatggggtttcaccatgttggccaggctggtcttgaagtcctgacctcgtgattcacccacctcggcctcccagagtgctgggattacaggcgctagccaccgtgcctggcagttgcacatatttttaatcactagtctcagactatgtgtcctgggatgcagcttctcagggtggcatgcgagaccttagacaaccgaaaggaacagcacattcacagttaaaagtgctttgtgatgtgacttgactctgtagagcacatcaagatgagcaccataggagcaagcttagaaagggagatttagaggcacattatggcttactttgaatgacaggctggaagttaaggcatgaaagcaggccttggtctggcccctttcattatctcatttaatgctcactcacactccatgaagtacctgctctaatgcccattttatagaaggagaaactgaggcatagagaggtgatatgaatgtctaaggttacacatctgaactttaactcaggctgtaaattcccacatcaccatcagtgcaccagagcagaggttgaaaactggtggtctctgagctcagtatacctcagagttctgtcctgtttgatactgtatttaaaacattaaaaaaaaaaaaacatggttgctaacatgtaaaaatgggggacattttcataaaaaaaaaatcgaaatgtccagctgctcctgcaacactgaaaactctggcagccccagggccatattccttcctgcaagaaactgccagatcttttgaccatgtctgtctgagggagatgtgtgtgctgtggctgctactgtctcagttcatcctgttttctcccagacactg

SEQ ID NO: 96679 - DNA, 1017 bp, Homo sapiens
gaggtgggttgctggccaggggcccaggcttgggcagccagcagacactagacttgtgctgacctcagacatcggcctcgccatgcagcttcatagtgtgcagactgcttaagtttgaaatatgggcctcatccatttcactgatggggacataggggtcaggaggttatcttatgcctggatgggacctcgatcacttattttatgattcacttgtttttattttctgtcttggaattttaaaaaatggaattcttttgaagctgaaatctaggccttaagttgatgtaactgggtgttggataatagcatttctgctattaccccttatgcaggtactcacaggtggtgaatgatggatagataaattctggataggtgacaaagactaaggattgggatgattatagattgggttcatgccctccttttccagctgtgttgttgagttttacttgaaatggagagggtggttttaaataaaacttgatttagatagtagtcttacaacttttgtaccttggaagagagtgatcatttgaattctagcaagtttgttgttatctgtgaggaatttaaaggaatattaaggattcagagtaaagatgccatattcaggaatgtaatgtattaatttcagaagtgaggaacttaatttgattaatagatttgtaacgaatttttttcaaagtagtgatttgccagttttcttcatgtgtccaaggaaggtataacagagattgagtcaggagatagaggttatgcctctatcttgccctagattggactgaactagtcccatgattgtcatgataggcttctaggtaattctcaggcttggattgagtagtccagtcttctgagggaggggggacaggacagaaatggatttgaaaaatgattctgctcttcaaggtcatgaggtgaagatggaatcaatgctggggctgggagctgtagtctgtggcttgttctgctcttggatctctgcatcttgatttatttttatgtgaagcg

SEQ ID NO: 96680 - DNA, 1057 bp, Homo sapiens
tctgcccgccctcctccccttcctcctcctcttcaccccgcctccccgccctcccccggctctttcccccgggtggctgccgctgccgccgctgccgctgccagcctgctcctcggccagccgcgccggccccagggccgggaagctcccggccccacgcaccgctccgctgcagccaccgcagccgccgccgctctgggccggccctcggcccccggctcccggccccgcagagttccgggctccctcgccggctgcaccgccccgccccgccccgcgccgccccgcgccgcgccgacctgcagcgcccggctgcctcgcactccgcctcccccggctcagcccccggccgcggcgggacccgaggtgagcgcaggtcgccggccgcgcctgctggagccgggaggactgagggaggaggtagcctagcgggagaagaggcagggatcgggggtggcagggtgggcgtctgcggtgcctccccctcgctttcattcctttctcccccaagcttgatcccctctccgtgggggaagcagccgcggaacaaaactgtcttgctttgggcctgaactgctggtgggatatggggggtgggggggcagaggcgtggagcgggggtctcaggtttgtattggggtgtgtgtgagtgcgtgtgtgtgtgtgtgtgtgttgtgaactccttcagggtgtgcgactctgacttgtaaatcgatctggccgcggggccacggggcttaccttcctagctgagcttgtagagagtaaggagatagataggcgaatttcccccaccctcaaaatatccatctcttccaagaggaattttctgctggagagacagccaataaactctgctcaactccctccctccctcggttcttcctagctgcagtttcaaaaagcttcaaagccaggaatgtgggattcatcttccgatccccagaaggcaaatgtggttacagatgttgcacggtactttgccaagtttaaaacccttccttcaacactgtaaccaaaacagtgaggctagaacctcgggcgcactaagaagaga

SEQ ID NO: 96681 - DNA, 1061 bp, Homo sapiens
ggaagagaaggaaataaaaaatcactttcaaacaaaaataagttggtaaacaacttctgataaatatggaaaaaattacaataattttagaaattttatgattaagaattgttttggctacaataacaaatcatctctacctttaaaaaatattttactaaattaaagggcatatcccacatgctctgcacaagacaaaggcaaaattttgctaaaaataatgaatagccccctcccattcttttctcagtccctgcctgtgaagttgcacctcagattgcaaacattaaatgaactgtaaggcctttctgtctgaagacattaaagacacatgcttctatacaatgtagattttttttaatggaggcttttcataacagcacaaagtaagatttattgaaacacattaaataatcactgtaagacatggtaaaaaaaaaaaaagaatcaatggttaaacaaatctgatatttgctagcatgaatgtgggagatgaaaacatggagtgagcaggcaaatcactatgtaggccctactttcaatgtttgaaatgattgaaggaataaactacataaggtctagagtgttcatagttcctgggattttagttctgtatggtactaaaaatacacaagtattgtgccgggtggcacctaatcttcctaattttcttatatattgataagattctggcaagcaaatagatttaaacaagacataactcaatactgcatgatttcgggaaaggtcagttggtacaaacgacaggcacattttaaatgctaacagcaagaatcttttgccaagtgtccaaataggttgactgtaacccaaacacagaggttgccaaatctgtctagcttgtggcctggtaaaactgcctttcagtactcctatggaagtttcattagacttactcaaagccaacatgttggctaataagtataacaaatcaggtcctatctcaagttccacttccaaggcaatagcatcagggaccccagttttattaactgcaacagttgtatctatgaccactggagtctttgaagtgcagccac

SEQ ID NO: 96682 - DNA, 1054 bp, Homo sapiens
ctcgatctcctgacttcgtgatttgcccatctcggcctcccaaatgcagtgtttttgtttacagcttggcttccaggaaactcagagctcaatctaagtgtttaaattaagtattgtactcctgggtggcctctttaatactgagaacttctagccagacacagtggctcatgcctgtaattccagcattttgggagggtgaggcacgaggattgcttgaaccctaggagttcaagacagcctgagcaacaaagtgagacctcgactttgcaaaaacaacaacaaccacaacaataaaaacccatacacacacaaattcgtggttgtatgaacctgtggtcccagctactctggaggctgaggtgggaagatggctttagcccaagaggtggaggctgcagtgagctgtggtcataccactgtgttccaatctgagttacagacagagaccttgtctcaaaaaaaaaacaaacaaaaaaaaaccttcctatctatttccttaaataaatgcctcctatttttttttttacctctgtttaaattatattattatgcattcctctttcattgaaagctgccacaaatgcttttttaaatagaggcagtacaggtcatctttcgatagatgaatatattacttttttgcaccttatggaatagtggagagagtggtgatcaggagacaggagatgtctattctaattcatctctgttttagtctgtttcctcaggcaggtcaattacactctctagacctcatttcatcctctgagcaaggagcaggttagatctcaaaggcttcttgcaagtccacatcctcagcttacatgcctcacatgatttggttcgttcaaaaacctgctgtcttctccaggaggtccagatgtaatctcgaggacttgagcttctgccagatgtgggaccgttaaccagagatgctacaggataggtagacgatggagccttgtgtacttactggaggtgggggtgagaggctcaccaggggaatccagatagcctccctggggtcatagcaggggagaggagggccaca

SEQ ID NO: 96683 - DNA, 1076 bp, Homo sapiens
agaacagataatttctccaatgtaggtccatatgtaggcattgatggctagaagctggggtagggagggtctcagatggacccaggaccagcatggagtgaattgatcccagcgagacaagcagagactgtagcacatgcagaactatcaaagtgagctcaggagtaaccagcaggttatgggacatgcacaattatcaggggcttgtggcaggaaccaaaaaagtgtggatgagcagatgggggatgggatgctggaaagagaataacataatagtcagaggagttcaagcacatgggaccattcaaaataaaaaatcaagtgaactgtggaccaggcatttcaatatattacctgcacagggcagaaataacaaagcataaagcaatatccaaggggctggtcactataacaattttctatctcgttgttgctgggttttctatagttcccatgcaatggacaccattcccaggaaggtagtggtttccaaactttagagagcaaaaatatcacctgatgggtaatatgaaaatgcaaattccagaaccctacctccagagagcctagggcaggcccaggaatcctcattttaaaaataggcatccttgattccagtgcagttggtctactcaccgctttctgagaaatacaacagtataattaatccagggcccctgctggtgagacaggtctagaaacaccctgttaaagaggcacagagtttcagtagttccatctggtgagcaaatgctgacgcctgtgaaaggcaaattcatggcccaactgtgacaattaacttgttacaattgcttggaaatatctactccttttacttggttttgtcttgtctttgatttttaatgttgttgttttacctgtgtttaatactaaatatcagttcaaatcttgcttggaaacaggagggtagaaatttttattaaattttaaaaaaattgccaacacccttcctcatttaatcagaaatggagaaagtgaatgatgctgtttaaatgttagttgagtaataacttatttttatactaaatgtcttgataatgtatcagagaataccc

SEQ ID NO: 96684 - DNA, 1020 bp, Homo sapiens
agaaattgaaaaccctgttcagatgtatggatcacacacacacacacacacacacgacacacacacacacgattggctgtgcagatagttttgcctgcttcaggtaaaggtaacctttcagttagaaatgctttctatttgttacagatattcaaagagtggaagtttttcaactagtgatcctacacaattgaaaataaccgaaattgtattttgaccaaagtgcattccctccccaccccctactattatgtaaggagagggtgctgcatctggtgtcttatgtattatactgaagagtctaagttgggaaagctaaatatccaattattttaatttttacctgtattgtttttggagggagataagggagcagagtattgatggaaaacaagggaagaagaaactaggggcagctagtattcagccagaaagtaaaattatatacattattgcagcagtaatgcatttataagctgaataaatcaaatctaattttgtgactagttctgacatgatatgaatttaaagaaactactaccaaattcagtttaataaaaattttagcatttctatgaccttgagtatttggattaggtttaaattagaatcgcagttttcttccttttcttgtaaataggcaaagtaaatttaatgtaaaaatttgaaactcgctttaatttttgaaaatgcaattattggcaatttttgaccttagtaatttccatgctgttacccagggatcaatttaaataatattcataccctggatgatgccaaccatcaggtaagtctagtctcttacctgactcttttgaaatattaaggtattttgagaatgctctgtaatctaatgtgtttttctttctgtttcaattgagcagtaattccctaccttgcttaattctaaaatggacatcatatcttcattcttaaatggaaggtaaaatagaggttactatagggttattttagggcataaatgcctatggtattgtatgtcagtttgggaagtttgcc

SEQ ID NO: 96685 - DNA, 1655 bp, Homo sapiens
tgtaagtcatgtgattgcaaagcatttttcctgaatggaataatgcctggtgactgggtgggtgccaatccaggtagctagatatagaataatacagtcttcacaaaatccagaactcacaatatagggtagggagggagggggccaggggaagcacctttctttgacatctgaggcatgtttgacttctatagtttcctctccactaaatataaattgggtgagttgcaaatatttaatggtgttagtactgctcttccttcatctgtgcccctacactgcccccaccaccctgccacaacacacacacactatgccatcaccacatctgtgagcttggcaaggcagaggaagctccttatggcctgagaccatgtacataaaatgtagacattggtgtcctgtattccaggttgaatttaaaacaggtatggggtttgacacaaaaatgatactgtatatgaaggttaggtaaaatatgtatttgaagtgaggctatcagggtactatgcaggcttttggggcctggcccgaaacttggaatgcagtttttcatagaaacccacaatcagtttacaaatagacttttgaaacactggctaggtggtatctgaagttttggcccattgcaagctgtgtctgaattgcaagcatgagggaagtaaaaagcatcccaaatcagaaattaggagatctgccattaaaccttattaccttgacaaaccatttaatgtttggatgatagcttcctccttttaaaaatacaatttggattatattgatctaagttatattttagctcaagattcctgaagttcacagtggtttttaaaaatttttcttaagaaaaaaaaaagaacaaaaaacttttccaagcttgaatatacataatcagccctgtttccccttgtacctcaaatcatggcaacaaggaagttgaatttctcttttgagacttttgaaccttcttcacattcatttttaattgttttgttttaaaacaatatcattttgggaagtgaggggaagggatgaagcacatgttttcaaagtcttgctgtctgcctctaccctagtctgagattacatatggtagttttggccagggaaagtgcttgggatttcaccttcatactcagtgaggctcatgaagtgtcattaaggtagtgaggtgtcatgattagcagccttactgtcagggtccaattctggcactgcaacttgctggctgtgtaacctggcagattgtataatctctgtggtcctcgttttgctcatctgtaggatggagtgataaaagtacccacttcatatggttgttggggagattaaatgaattaatacatgtaaagtgcttacaacaggagctggttcagagccagcgcttaatacattgaaataattatttttacattgtggtgcttttatgatggtttctgcagcatttaccaaatgccagggaaattattggcttgctttctgtgtgggttttgtcaaaatgattatggatttcaacaggatatttcagagaagaaataaactgctgaacagaaaccattgtgagcttgatagtttgcaggacattgtagaaaagagaatccagcacagtaattaagggcctttttaagtagggaagttgtagcttcttgcggtag

SEQ ID NO: 96686 - DNA, 2270 bp, Homo sapiens
aagaaaggctagaaaagaggaagggggtttggaatatacatgatataaatcaacagacagtggttaaatagatatcaagaggctctagttctagtcctggctttgccactatgcaggtgtgtgtcccatgagcacatcatgtaactctcgtgggctttagttttcttgtctataaaatgagggagttggtctagatgctctctagagtccctctagtacttacatttcgcaactcttagaacatcaagccattacattttttcctcagcaagaatatgctgtcttcccaaggatttatgacaatttaccctctgggataaggagggaaaattgaagttgtatacttgaaattctcagctcctgaaaatatgtgtcgcagccagacaaacctgtgacccctctgtggctgagtcagtggctccgtgtcttgtgcggtagtggtgaagtgctccaggagtgaggatccctggggcccctcggggcaggagctgagcagtgagcctttatggagctgcacatctgcagtttgtcacagccctgacttctgggacttacttgtctacaaccagtcccctgtgcacattggaggcttcacctctgattgagactacatttttcagaagttggatagaaacaagaaaggggatttagcatggtggttagaagggactagtcttgttacagtgagaaagatccacttcttacttgctcagatggtttgatttgtcctcagagaagttaaacaactgacagagttgctcctctgaaaacattttgtatgaatactttaggttcatagggaactcgtcaatccatatctcatagaatagagggacttttcattcaagtctaatttttacatatagacaatctaccagtgttcagaaattgtggcagatttcatgaggagaattttttacttggatttgtgctcttctataaaaagtaatttaaaaattcagtgatgaaagtttctcctagaccctgttctcttcctttgtggagaaaaaaaatccgtatagaactctagtatgtatttatctataaaacaattgtttaaaaatattgaggttagctcttcccctttgctaatgcaataagcacattatttgcaaagggaagcattaattatactactattgtatgcagtattaaatgaattgtcaatgtcacgatcaaaataaacccttgaagaactggctgttgttcccataccttcatgagaattgtaaacactcatgtaaaatagaaaccattatttaccactttgcagtgaaatggatcatgtgttctgacacctgtaccctgagttgagtgggaaacagggactgtttgatgaattaaaggtaactttattcctgtataccactaggggtgcaagtgaggggactgtagacaattagtactttagatatttgttggagtcctgctgtgtgtgcagtattgtgtttcattttgcatacttatttaaaacgatactacttatttgaaatgattcattttagttcattttaaccaacattttttagtcccctactccatatcagactgataggccttatggccaaaaagatgacttcctccagggatacttactgtctgtgttagattcagtaatgggagtctcggtctttaaggaatccatgatacatttttcagtctggttgggaaagataagacacatgaggtagagaagattgtcctagaaatgttggtatataaataagcatgtaacattgtttcataagtattaaggatgagctataaaataactaggttgtagctcatacttctacttgcttaattgtgtattacatgataaattacccgattctagagatatgcactaaccactctcattagctttctttgggaaaagtctgcaccaaagataaatagtgatttcaaaataagttttaatcatgaacttgattattttggctgtatctcttgaaacactttaccatatagcctatgtgaaataattaatcataatgacaatacatgatttatgagaaaccataatttatgctgtaagacctgccattttattacattcttatttttatttttcatgcagcagtattttcgtttattgtgttttgtgcttttcttttattctctatgtaatttgtgtgcctttataagcccaaacttgctgttgaaaatattccctcccattgttatgaataaacagaatgtttcaaaatctctcgtgatgtatgctagaataaatggtctcattgaatcttactttgaatctcagaatg

SEQ ID NO: 96687 - DNA, 2587 bp, Homo sapiens
accatttatcctgcatgtttcaaaggaaaaaactatttagactttaaaaaaatgcttttctaatacaacttgctagataaataattcattataccaaattccttagtaaagaaattaacggctgggtgcagtggctcacacctgtaatcccagcactttgggaggctgaggcaggtggatcacttgagattaggagttcaagaccagcctggacaacatggtgaaaccccatctctactaaaaatacaaaaaaaaaaaaattagccaggcgtggtggcgggcgcctgtagtcccagctacttgggaggctgaggtgagagaatcacgtgaacccgtgaggcagaggttgcagtgggcagagattgcaccactgcactccagcctgggtgacagagcgaaactccatttcaaaaagaaattaattagaagattttaaacagattggttcatattcattttaaacttaattgcctggattataaccatagtgagatgagttttcataatgctctttatcatactactaataggcaccaatcaagcaccaagactaagctaagctttgaaagtgtgatattgagcaaactttctgtatctgtaccttttgtgaatcagtaatatctttgtatactcagttgaagagttaagacagaagtagatataatttaaagcacatgaagtttttcaaaggggaaatgttacaaaaatgctaagggttattggtactataaaattacataaatgttaagagtaatgaaacaaaatttcatagcttgttttgacctagttggtatagtaagtaaacctttgtttggtcttaatatagtagatagaaatattcttatacattttggttgtccctttcccaacctcacataatcactgtaataaaatttacagaaggaaagatcctgtgtaccctttatattgttttccccagtggtaacatcttgaaaactatattacaatgtcacaaccaggatattaacattgatgtaatcaagatacacaacatttccatcaccacaacgctcatctctcctactctcatcgcctcctaaatctctggcaaccattcatttttcattacaactatagttttgtcattttaagaatgctagtggcctacacctgtagttacagctactgaggaagctgaggtgggaggatgacttgagcctgggagggcaagactgcagtgagccatgatctcaccactgcactctatcctgggtgagagagtgagaccttgtcaaaaaaaaaaaaaaatgtgggcacggtggctcgctcctgtaatctaagcactgtcagaggctaagatatgaagattacttgaggccaagagttcaagaccagcctgagcaacatagccagacgctgtctctaaaaaaaattttaaaaattagctgcgtgcgatggcatgtgcctgtagtctcaggtaattgggaagctgaggtagaaggattgcttgagcccaggaggttgaggctacagtgagttatgatagtgccactgcactccaacctgggcaatagagtgaaactctatctccaaaaataaaaaaataaaaaaagaatattatataaatagatttataaagtatgtgatttgggatattttttcccattttgcataattctttggagattattccaggttgctgcgtgtatcgatagtctgttctgttttatagccaagtaatattccataatatggatgtaccatagtttgcttaaccattcacctgttgtttccaacttatagctattacaaatagagttgctatgaatatgtatgtacagtttagcataagtatacttttctctgggggaaatgcccaggaatacaattgctgcattgaatcataatttttaaaactttctttctacattatgcactgaattatctgagacctcagtaatccagccatctttatcaatgtgttggtgaattaaaataaagaattttgtaaggtagatttatagctttggtaaattacaaaaacttgtctataaaatcaagtcttttatcttttgttactgttttacaaatagtacttcccataagtttaccttattttttaggaaaaccccattgattttaagtagaattcatgaagttgctttgtagcttggcttcaggatttgtttggttttgttatatttttttctttagatagcaggcacatttaattttctataacaatattatattttaaaatgtaatcatgaatgttggctctttcagaatttcacttatatatgatcataggtaatattcttgcaaaaaaatgttgatagtgcaccatgttaacaggcaaggtgaggatgtaagatgaagacagtattttcctatgtgattggaattaatccagtcgttaggttgaagccagtaagcatacctgatactttaaaaggtgaggattgtttcattcctagaagaaaagaaattagacattttcttttcttcttcttctttttttttttttttttttgagacagggtctcactctgtcacccaggctggagtgcagtggcggtactattataactcactgcagcctcaaattcctgagctcaagggaccc

SEQ ID NO: 96688 - DNA, 1043 bp, Homo sapiens
ctaaatgaagtcttcgtgattgatactttggttagtttttattaatgtcttttctaccttgaaggtcaaatctttattttcatagtttaaaataccatcagattacttaacaagctttatactttgttcagtattacttttatgttcattctaatatttttattatcaatacttcagtcttccagaatcctagctgagaaggtaagtgttgactgtacaatcagtcctaaaatatagctatacagtaacattcatttttaatatggtgcttttaaggatttgatccattttctgtatttgaatgatataacctcagcactatttactttcacagaaatatgatcctcccaataagttgtgtatttcctgaaggtttttctgtgattacctgttatgtccttctctgcctggtgagcccttgtttttcttcttcagggtctaactcaatgacccctctttaatgaagccttccctggcccttcgctctgcccaactccagatttcaaccttcccacctgtgcttgtcatcactttgcacataactctgctttgaacacttgtcacattgtgaatagtttctgtgtctgtttcctggctatttgagctctcagcaggttagaactgtgtcatagccatcactgtaattctctcatgtagcagtattcctaacatatagtaagcaacgatgctttctttgagtgaatgaatacttaaatactttgtttacaaccttagttatccccttctcttctaaccttcagtggctctccattgtttaccctgctggatcatattcacattccccagcgacctaccatataaggcccgttacagtcaaaccttaattactctccttcctgaaccctccacatcagcaagtctagtttctactcattgttctctgtctccctccactctaggttcacatcttcaaagtccttcaagacctagttcaaatagatactgtaatagtatctaacttttttgtggtagaaagaaagaaagcgcagagatcctactctgatgacaacaagaacaaaaaa

SEQ ID NO: 96689 - DNA, 3181 bp, Homo sapiens
ttttttaaattcttacttttatgataggctataattaaactagttgtttcctatgtgaatatatgtggatatgatataaggagaaaattgtattatattgtatgaggtatagagacaatattaattgtatcttgcaaagtagaattgttttcctttgagattgttactagagtaataaatcatgttgaagtgaagaaatttacacagcatatgactgaatattttccactgtatcaaatttaatgggttttgggaaaacgtatagtttggtagcagtatagaactgagtttttggtaaaactgagtatttaaaggacgaaactttgaaggactttgagacccataagacctacagatattattcagctttctgagcagtattctagtttactaagaatgtggaaggtaatgtgtggtggtgaggcaaggggtgttgagaacacagtgacctacattccaaatacaactcttctaaactataaggcagagaatagactaagtaaggcataataagttaggacctgccacatggcaaactgattttgggaagcagtctagaaagatgcttgaaaaatgtactgatgtgtaatgccagcagcaggccattgtcatggtatggaataatggtgactgaaagtcattctcccttgcttgggatgatctgtcttaagcatgagcagcttgaggctgaattgtagacaataaaacgtgagtccaatgacagtctttgtaggttgagtaagagtatttgtgtactagccattttagttgtaatgcattcacagaatgattacagtcagaattacagtaacattttaaatacaaaggagactatcttccatgtcagcttcatagttctgtacctattcccagccctgtgatatattccatatgaaacgttacatcagcatccttatataaagcatacctataaactggggtgggacagagaagtagtggccagagaatggagtttgtcacgctatgattcagcccgtgggagtgattttcacactgcctgtcagcttcgtgcgatagttaaaaacaatttgcaagtgacatagtagagccttaaggccataaataggaatttttaactggcacaaagcctttttttaaaaaaaagcacatttgtataaaccagtgtttctatatagtttctcatttactggttgtcttcaccataatctttggaagtgcataatcttataatcattatgtgtgttttacacatgagaaaacagtaaaagaaatccatgatttgccctaggatcctgcaacttgtgagtaattcagtcagaatccaaactttaattttctgatgtataaagaaaaggcctctggttggatcatactgttgctatgagttaatatgggaggtgtcatatgcataaagtacccatgagtttaaagttttggtttgttcaagtaaaatgtttatataattattcaagttaaatttaaataaacacatgctgaaagaacttgaaggtaaaaatagtttctgcaaatactattccacactttttctttataccactttgaatgctgagtaaggacattgtactggaccattgcccagcatagttctggcttatagagacttgatggtgaaagaaagactgagagagagagagagagagaagagagagaagggggagggagggaggaaggaagggaggaaggaaaaagatttgacaagggaatgtgttttttaagagaagctctttggggaataaatatagtcttgaaatacaccatgtaaaataagtttagtagaaaactatggagatatgcctaaatcataaatgaaaatattgattcgtttcttcagttgtggaattattcatttctgatttctttgcacaggatcaagctatattctaggtagaccctttatgtttttcaatctgttccacctatatccacaaatttattactgccacctactaaattgtttataaccattgtatgatctgatttttgtatacatgtgttgctaagtaagtttcacattgtcatgaaaccaaattataaaaaaaattggaggcaaggggtgaaagatctaggtagtgtatgaaagtttaaccagtatttgttgagcctactatgtgctggggcatcctctttaacacttcctaggcgccataccctgactaaagttccttcagcttctcatcaacacttttccgcatttccttctgagatgactcttcatctgtttttattctgactgttgaagcttttccagaaatggtgccttgctaaattcccatatataccatgtgctctttttttatgtttattatgccccttgtattgtcccactacctctaaataatgtggggaagcagtcacagagaagagagatcattgccaaccctgttttgattctgtttgacactcactgtctcacttacatgcagatatcctttcaccagtaggtttatggtaggcagctttaagatagcctccagtgatcccacctcctggaatccatgccttagtgtaatctctgtcccttgagcatgcctgaatttattattcatttctaatgaatagactatttatttgggtgattgtatatcacttccaataatagcagtgttaacaatatctcagtgttaccaaggattatcagtgattgttgatagtgttcaggaaaaagagcttagaattcactcctgagtcagggaaagaatgaagtctatgggtgtttaaaagagagctgtccaaggagtggctggaatcagataggaacaggtgtgcaaggcagtgtgtcttcaaaagatgtgtcttcatttgcatcaactattttaacaaccttggggaaggcattacatctttcagagccgttatttcgtcatctgtacaatggagttgaacttgatgatgattgttttgataaatcttttcaattcacattctctacatccagaaatccaatattttacattttgataagattttatttaaaacaaagttcatccacatacagtagagtcatttttttttccttcagaaatcattattgtaggtgtgaaatttatataacatctaaaatcttttgatattatttctctgggtgttagcatatctgggcttctcttttttgaactgctatttatagtaactttctagggttttgctttttatagttatggagttttaatgtggccac

SEQ ID NO: 96690 - DNA, 1077 bp, Homo sapiens
tctactcacttgctgcatttaaaccttatgttattcatgtcatttacaaaatgttctttccttttggaatcatttgcaaatcaatttaagctgtgttaagcaagacaaaagtatacattttaaaaaacataattatgtccagcgaaactctcacagtctatagtaggaaaaccttaaggtgagaggagtctggattcctcaagtgtggccctagtgctaatgagcttcaaaacccaggcacagccagttacttcacccccttcccccgtgagcaaaacaacaaaacaactaacagtgtgaatcatttttcttcagctcttggtcattattaagacaacaattaggggaagtgttattctcagattgtctttttaaaatagacacattaatgatactatataaaaccgtgagatttatttaaaatattttcaatttaaggggtgtgcaaatcattaacaccagatggcatctacctaggattttttaaaaggtggatttgggatacttgtagccaaaatgtagaaatttagcttataaacagttactgtgccaacagattggtcagtgcaaattgaacgtgtcgatgcaagaggatttagagcttttgttgtccatctttcctgctaagctctggtacctccctgataacagacctggtcaccaaattgatttaaaaaaaaaaaaaaaagacggcaaacaaatgtgatatttacaagaaaaaaaatactagaatattttagggggttaaaagatgcataagtaaagtcgatgaatttttcttagattttcaaaaagcttgtaacaaatttccacttgttatttttaaaagaatgctgttgagttgtaaatggtaagaatagctaatttgtcatagaggattgaagtttagaaaggggaaatagcaagttgggataagcaggcatttttctggaggaagaagtacaaataggattcctcaggagtcaatgtggacaataattttaaacattgatttaatctgtcttaaggagggcatgagtctctgtaggtttacagtagcaaatcccctggaagactgatctgaccacctcctgttta

SEQ ID NO: 96691 - DNA, 1088 bp, Homo sapiens
tttattttaaagatatgtgtccctgggtggtgtctgtgttagcttgttgattctgactgcagttgagtatttcatgatatatatccatccagttttatctctcccctccttctgtgatggttatttagattgcattcacctcctcaccatcgtaaaaaggggtgcgtgatcccttgggacctgtgtgacagtttctgtgggaaatatgcctagcaccagaattgctgcatcatagactatcagtactcttactttgcctgagctgtgcggtgctgatactctctagaatggctgcatccatctatatgtctccacaacccaacacttagcgtggttcagtctgccaggtgtaaatcaactcattttcagtttgtatttctctgactacttatgaacttgataatgtcttcatctgcttgttatctttttttgggtatcctcttctgtaaattttttgtccataccttttgcccagttttctactgggggttctaatcttatgttgatttgagggacatcattatattctggatatatatcccttattatggcgttacaaaagtctttaatatcccacttgtctgtaaactttattgaacagaaatcattaaatgtgctatcaaaatcatcgtttgttctcccttcaccccccaccccagccatatagcttgaaggttttgttcaaatccttctctagccctagttctcaaggtattcttcgtgctttcttttttatttttaatttttatttttgagacaggttctcactctgtcacccaggctggagtacagtgaagcaagtatggctcactgcagcttcgacctcccaggctcaagcagcccctcatgtcagccaccctagtagctagaggtgaagtagatggagcacaggtgcgcatcaccatgctggagtaatttttaaatgttttgtagagatgatgtctcgctatcttggcagggctggtctcaaacctctaggctgaaatagtcctcctatcacagtctcccaaagtgctgggattacaggcttgacccactgcaccgggcccctttttttaactttatagttttactttatacaatttggc

SEQ ID NO: 96692 - DNA, 1959 bp, Homo sapiens
tttaagaaaaggggattatgcttcataggcatagtctttatacataacctttatttcctccctacctaataatatttattttctaaactgtttatttttaatgtttgttttagttttttattttaaattaaaatattgaaagccttataacaaattataacagtcctttgacccccttgtctcattctttttgccagaagtatatactttcagttactttgtctatttcttctgatactcatctccttatttctaaataacatattattttttaaatcattaattttagatattatctattattgttaatacatagatgagaatctctgccttatacccctttgctgtcttcccgttttcctaataatgacagatcataattttttattaaattactatttattgtttccattattttgactatatatatcattcaccagtgagccaaatagtttctcatcgttttttaaatccaagtgttttttccaccagtggaaatacctgcctcatttttccatttccttaacttcgttttgatctacagccaaatcttctcacaccctcctttagcctcttagtgccattttccatgtggttaccctagcagctcatcagtgaatcccatttaaccctcacatttgggaccagccacctgtcctccttttccaggctggactggttgctctctaggcctgctgcacagtgtcattaatgcctgagtagccctcttccaaaactgaagtcggtgacacagtgacgttagcaaattgagagatttgagaaggtctcaagaggcttctagtccctgtaggtgtctagcactgctgcatgagggcattgagcagcatttggcctgggcttctgttttgtgagtgctgctcacttggcaacatgctttcctccttgaggtttcaggactggtgagcttttcctgctaatctaggtcttactgttgcctttctctcctcttccctcactctccccctttccccacccttgtggaccccttttttcagtcttctttcattctccagtgtgattattgattgcactactaatatttcttggtctttggggaagaaatgaatggagtccaggggtgcaaaattcatttaaaatgaagctgacattttcatttcagtcttatcaggagggaggcagattcttgccatgataaaagttggatcttttttaatacagtttaggaactttaaaaggtaaacactgatgagaagggaaaagctatttgtacttagcatactgcttattcgacttcaactaagaagctcatccattacaccaatttaggcatctcactatgtttctactactctaggacagcagagtatatatttatattatgtacttttttttttttacttatggaggggaaaatgggttctgtataaaacaagaaacagccctaaaaaatgtgacctttatatagtcttacttgaagttagttgaaatatcaattgtgccaaataatatacttgtaaactacagcgttatttgcaatgatatgaataaataaaatgtgttagttatttgaaagtagatgagcgaattatgaacctgatatgtctgaagtgatgattaataccattaaggatgatttgttttgtaataacatatttaaactaggtaatcatggatagtaaagcactttaaaatatggtagtagattactttcattattcagttatttaggtttttaatatgaaattttctagaccagttgcaaagactttttcaaagtactaaatatccccattataaataaagtgcacttaatggttcttttaatttgtaagcaaacagcaaatgattttttataaccaaatagagattttagttttgctatttgcttgctctttaactttgggcagatatttaaactgttttgagcctatgtcctaatcagtgaagtgagaatcgtgcctacctctagaggttttg

SEQ ID NO: 96693 - DNA, 1713 bp, Homo sapiens
tatttgcatttgtatttgcattttgagtggcctgccttttcctcttggttctttgcctggtttttatcttcaaggtaccttccctctttcctgctttttctctttagttcacttgcttctgcttgcccaatgctagataagaatcacacagagaaaatagatactgatttaggagttatattctcttaaattgttttcttttaattctctaaaatctggctttaaaaaacagtctgtcagttattctggaaactcacagagtggtggtgaacagcttaggaatcaggtagacccaggcttgaatttaaactgtgtcactagctgattaaccttaggcaagttatttcacttctctggctctgtgtactcagttgtgaaacagcgataatgtgtaactcagttttgccttaaagattaaatgatataatgttttaaagtgcttagcactgtatgagtcatagtattcaataggtggttgctgatgttgctattatagcattaacttttcagagatgaaggtagaggccagacatcttatttcaaatatcattgtaactttaaaaatcccagtaaatgttgcctgttcggtatacagtcaaaatctcccaaaacaaatccacaaaacagaagtgtagggtgggacacaggtgcatctggtgtttcgtaagtatgagcttagatatggagtgtggtagaaaaagaatgaagagaggataatggaggaagggaaaaactcaagtcttgtttctgactaaatttttttagaaaaaggagattggatgcctgcactgaggcaatgtgaggatgggcagattttaaattgtgcagcttttgacacatttttattttttgttatttttatttttatttttttgagatggggtcttactatgttgcccaggctttgaattcctgagctcaagggatcctcccacctcagcctgccaagtagctgggaatacaggcatgtgctaccaggcccagcttttccacacattttttagtcaatgtaaatatcaaattacaattgttaggtgactgagaatggggaaaatcaaaacctatccagataaaaagcattttatagtccactacattctcatgatggattctgtactttgcttcagattttttgttgtgagatgctttaaaaatgttaacattttatcatgttatcagttttacatagttttccaaaaaggttaactgtgttgtgaaatgtaattttgtttcttgggcttcagttttctcttcagcattccttttgtagtagtgatgactgggaatctcatgcactctgctgatgttggccttatagccatcttccccaggatatttcttctaaatgtctgtggatgctgcagtgttaaacagtggagataggttgatagggcaaacagtcttggcctgttctagaaccttgactcctctgtgctctgctctgataaactcctgctcagtttgttcatataatactgttgacccagtgcctgcattaggtgggttgtgagtgttttttttttttttttttccttcaggggtgagagatttttggtgatcattcaattctgcctctgctaaccaggcacagctttctgcagcacagctgatggtggtgacagcacagcctgtggccacagaagagaacagaactcctgtgctcacctaaggattaagcccacggggctggtgcattagctcagtgctcctgga

SEQ ID NO: 96694 - DNA, 1083 bp, Homo sapiens
tttcttccaattcagagcccgtgccttccttcagccacagagcgcacaacagcatggatgagattgagtcagccctcttacattgttggcctacagctatggagctacctttgcagagttgtccactttggggtttgagcatgggaagtaaattcagagatgcaagtatctgggagagggcatgaactcgtgagaaagtcctcatattctgagctcctatgacagttttgcctttagaagctatctcgtctcttagcagctttgttttgggcagaatgaatagcagaggggcaggaaagacccagaatcttgatgcccagcctccctgcttttactctgctgcttgatactgcctctaatgaaggagccgttcttatagagcagttactttgaggcctgagaaacccagaaaaatttatcatgactgctagacctgggcacaggtggattttagattagacttggcagggacaacaggcatcttggaaactccctaaggaagggtccagatcaacaacactgcaaacaccatattcccttcaggcaggcatccctattttgctgtaccaggccttaatactctctgggttgtagcctccagtggtccatttgacttctgagatgtattaacaagaagactaatattaccaatggtaaccgctcacttaacaaaaacaaaacaatataccccaacatttattgttgccttgcaactctgcctttttggcctctctggatatccactgacatcatttaaaatgaaccattttatttctaattgctacatgccaggttggtttatatgtgtctgtttctcagcattccacagatgccacattactcaaagctgtgcttttgtgcatcttcacagatttctctctccctaccctgcacagcctccctacctgagtttctcatctagcagctgcctgcatgccctgctgacatccatccacagcacatgcccagccagctgagctcaactgcagtgaatgtggctgtagtgccagtgaactggctgtgctccaggactttgcctcccctgccatgccatctgatgttaagtgttttgttgaagaggga

SEQ ID NO: 96695 - DNA, 1101 bp, Homo sapiens
ttaagttttcaggatcatgtgtaagacctcagcagctttcctgaatgtgtgcctcaggagcatggtggttggcatcaggcagtgtctgaacagtatttataaagtgtgtttgatgatgcttacaacattattgaaggttttctgagggctggaagctcttatctaagtaaaatagagtattatgaaatccagttaattgactttgctttattgcattcatgctgaagagtagatcatccacttggatttttaaaaaatcatgaaatgattttttttcatgatcatgaaatcccaagatgttagtgagaacaaatgagccaatcatattttaggaactgttcttgatgatggttcctggaaataaagcactggacacagaagtgacctctagttccatttgcagcttagggtccataagaattctggttctggtctttctgagattgaagtcttcctagtcgcagtaggggagggatccccaaaaagtttccaaagaagttagagccctcattcccaaattagtgccctgggctggaaattttagcttaaattgtctctcaaatccatttgagctttgaatttcagtgacagaaggcctcaccttgagttctctaacacatacttgtctccaagtgaagtgtcttctcatcacccctcaccttcttcccggtccccttccatgtggatcgctgcagtcacttctagttgaaatctctgctaccacctgacttctttccagtcctgtagcacaactagtctgtaaaacataaattttccaagtcacctttagggaactgcccaattgcaattggtgcagatggacacaaaaggtggttcaaaagttgggttaacccgcatgctgataggagttaatggtgatgcagaatatttgtttacatttagtacaacttttacagtgtgttagagatggtttttgtaagaatagaagtatacattcataaaagcaaagaatagtaagttctctctgttttaaaataaactttggacacaaatcctcgagactttctgctctgtggtcgtctatttatatattaagaatgctgtgggaattcttgctaagaagtgttaaagactttaggc

SEQ ID NO: 96696 - DNA, 2814 bp, Homo sapiens
cctgaggatggttgtctcactggcaatttagcccttctattaggaagagaggagacaagttaaacataaaactaagttttcacttttctcttgttagtagtacttaattatttactagaataggtagtattaacttaaaagttctttgagggttgattcaggttcatttattcaagctggccttatgatcttctaaatatccttaaaaaaaaaaccaactttattacctaatctggaatataaatgtatcgcaaatcagatactacttttatatccttcttgcaaattcacaggaatttccaatactctgttactgcattctaacaaagtttattatgagagttctgaagatactgaatatgttgaaatctctttagtgcttcattttccaactatttcagtgcaatttcagtgatgttttgtctgtttttgatggctgtcctgtgcttagataatggataagagttacggtagattgccaagccatctgtttgtatcagtcttcacaaagatgcttcttccaaaggagaaaatggacagaagagcttaatagtgttttcaggtggaaattaagagttcttttcctgttctggcactgatagcatgctatagaataattctgttctgctcctgcttacttcatgaggatgttgtaagagttgatttaataactattttgagtggcttaaggcactgataggaaaggtactttgttagccatacaggtataggaagagtatgagttctgccataggcatgctgaatatctgggaggaaaccctgttgatgactgggagacatgaaatcaaaactgagctcagggacccagaataaaatttttagtgggtagcctagaagtgatcaccagagtattaagattctacccacctgccaaatgtatgcctatcaggaaagccaaagacaaccactaaggagctcttggagcttaggggaaatcgggagattgaaccctagtcatttgtccagggcttctccgaggcccaggtttttcctcctgtactgtgctgcctgctgacagctgttgcagttgataaaccagtgaacaaagtctcttctgtactcatgtagctttctccttgagattggggtagggaggattagtaatgtattagggggtggtgataagcattaaggtgagaaaagaagcagggtgggtgataggagaagtgagggttttggagtggcagggaagggggttcatcaggatcagagtcaggtcaagaaaggcttcttaggtgacgtgactcagcagaatgaaggaagagacaaagctgggagagggcatgccagggcctggaactgcaagtgtagaggtagttgcagggagggatagagtgctgctgtccctggaagtaccggtgtggaggaggtggggtctgaaatgtgcccacctttccaccagcagatctggtgaagaagaccataagtacacaggaggcgcatccctcaactgtgagcttcaacagccctgttttgaaaccttaagtaaaagatttgtaaaataataagcctgaactttttccctccaagctatactgtgaaatgtgaattttaaaaagaatggttgtgtaaatatgaagaaagtactttcaaattagatgatcagactgcgtttccttcagaattgtgttgctttgcttgaacatggcaattgaaagatcccagaagcaagactgtggacaagttatgccctggctttgagcctccagtcaccttgctctgcagtgcagtccttgatgttaagtggccttcctccaagctttaggaagcctcagtgcaggttgtggttgaggagatgaagaaggcctaagaggagcagctcctgtttttataattttttgtatcagtgctccctcccaagggtatttaagtaaaggtattaacaaaattaagaatttggcagacagctcagttagacgatcaccaaggtccttctcatttctaaagttatttgaagctgctgttttcattagtccttaagtatatgttgctaccatataatttggccacaaaaatgtttagatatgtgtcaaagtcctcagggcttcctgacagaagtgcttcttgactgattgtgtatttggtacaagggcttctttggtgatagtttctactctctttaaatactgttctgttatttttgaaatctgatcaagaattgacacaataaatctctttgatatttatacttatgcctacttttaaccttttaggaaaactttatgaattggaatattctaaaatcctgaaataatttggaatattctaaaattctgaagagaatatgaacggattgttggaatggaacttttacccgattccctcagactagagtgttcatacgacattttgccaagaagttcctatagaggcaatatcacttttaggatggatgggtctaaaaggatcatatttagtttctggttattcatggttgcactcactttagaggatgtgttcctattaggttgctgctactatttgtctctcctaaataacagtatggaattatagaaagaaaggttgggagaatagtcgtgtgattctcctggtcagcataaagcctgttccatccagccactgactattttgttctttcttttgctttgaaggccaagatgacatttccattacttcgatgtttttatgttctatacctctctcttgctccatatattttgcagtggtgcagatatattgatccataaatgactggtattacatactgaatcaaggtacatgcattcaactctagagagaattgtttctgggtgtttttcactatgtgactca

SEQ ID NO: 96697 - DNA, 2053 bp, Homo sapiens
taaggtatgttcagtttcccccactcaaagaccatttcatcccttagacattctacccaggacattgaaaatagaaacaaggccaggcacagtggctcacgcctgtaatctcagcactttgggaggccaagatgggcggatcacctgaggtcaggagttcaagaccagcctggccaacatggtgaaaccccgtctctattaaaaaaaaaaaatacaaaaaattagctgggcatggtggcaggcacctgtaatcccagttacttgggaggctgaggcaggagaattgcttgaacctggaggggcagaggatgcagtgagccaagatcacgccattgcactccagcctgggcaacaagagcaaaactccgtctcaaaaaaaaaaaaaaaaaaaaaagaagaagaagatgccagtgaaggaaagttagaaaccactgcgtgtcctaagcagttcctaactcccatggacaattctagcatgagttttgtaatagtttataattgacatataggtagaaaattgataccaagaaacccagctgttcctagagtactagtagtaactcagaaagagtagagaattgtactgtaaaatgagcagattgccttttcactttctttttctactccatcaaagtgccagcttgctccatctttgctaaacgttagattaaatgtcttatttatcatgatacctctgatgttcaaaattacatatgttgctgtaattcttatgaattgtgagcatacattcttctgcgtaaacagatggtactgttgacacaggctttataatcctagtaggctggacatcaaaattttatatttctaccattaccttaattgtagagaggttctggggtgactgtggaaagtcatctaacatgtgttctctttctttgcactgctgggtttctaaatatttattaatcattatttatactctgtaatgccatactttattggtgaatgtaccatctttgggaggtcattagatattctttagtatctaagagaaatatctacctatcagtgaatttcaaattatagtttatggtcttcagattaatgaaaagcaagttcccacccccaccaaaaattaaaatgacacaaaaatgcatcttgggaacatcacaatattttaaactgagaatactaattttttgagatttgattatatcacatatgacttagattctgatagattatgaatttgtaatcagttcaattttgtatactgaaattatctttgcactctgaataaatgaagtatcaagcaaaattttaagagtaacaatattttaagagatataaacacagttaaaatctttgaggtattttaccactcacttttagaattatcaaatgctgctttgatcttttcatcaaatcagaacagatatctatatttttattggcaacaataaaaacagtctgtgaggaaatgaaacaatccagtctttcattttcttgctcatttaatctgaacaggtgatgtttcagtatattgagacataagacaatcaagactttttgagacataagacaatcaagactttgttaacagctttctagattattggtggaattatagctctgatttatagggtcacattaaaagtactcctttgtgtacactaggtctggaggtgatgatatagaaatactagtgtgggccgggcgcggtggctcacgcctgtaatcccagcactttgggaggctgaggcgagtggatcacctgaggtcgggagtttgagaccagcctgaccaacatggagaaaccctgtctctactaaaaatacaaaattagccaggcgtggtggcacatgcctgtaatcccagctactcgggaggctgagggaggagaatcgcttgaacccaggacgtggaggttgcggtgagccgagatcacaccactgcactccagcctgggcaacaagagcaaaactccatctcaaaaaaaaaaaaaaagaaataccagtgtgaccacattgtaacataggttgtgttatttcctgctaatggaatgtagcttccttgacttgtggttatttcc

SEQ ID NO: 96698 - DNA, 1129 bp, Homo sapiens
tcgatttaatgattgtatcccccagggatttggcacatgagggagagaagaatcattcttttcttttgcagatgttggagatttcttctttttgatgtctttaaagtcttcttttcctcacggttgcttcctagctcctcaccgggctttccagacatttccccagtactcctaagttgacaccatctaacttttactctcctgactccaggtcacattaccaccttcactgggaccagtgacacctcattcagtttgactctttgcctcaactttcaccgtcatcttaggcaaatttaaaggctgtggagacaatccatgtctttatttgcacttactattgttccttcgtcttctcatctccagagttttctttctctttttctcccccaccccgcttccaccccaattttagactgttggcattctctgaacacagcacgctgtggtgttttatgcctctctgtctttgtagtaagtctcatcttccctgacgaccccgctctcccatgcgaagttgagctcccctcacttctgtggtggtagattttatgcttgtttactcttgcatttatcacactatttttactcctttgttcctgctagacagctctttcagcatcataatggccacaaaacctaacaccatctggtgtataaatgtgttttcattgaaaacacagatatgttgtcatatcttccctcagtttgtttcatgctcccattgaacaaacacttttgaatacctactgtgtttcaggcactttctggatctgctgagaatgcagtggcaatccagatgaaaagagtccctgccattactgaaccaagagcgtatggttagattgcagaaaagtaaataagttatcatccagtccattgcgttctccatctgtgatcaacagaactctagaaactttatagtggttgttattttttcttgtactttcttcaaaaagctgtttggagatgttaagtgtgaaaatttgtctccttgaaaacgaaatatagtattaagcacacagattctaaatggaataaaggagactgagagataaccatcattcctctatcctgctgaagaccagacagaaagaaaggatgttatcacaactgagaatctatggta

SEQ ID NO: 96699 - DNA, 1055 bp, Homo sapiens
gaggtggcaggatcgtgtgacctaggagttcaaggctgtagtgagctatgattgtgccactgtactccagcctgggtgacagagtgagaatccatctttttttttttttttttatacacatgagggtctctggttaataaatgttgagatgtagggttaggtgagattaaacaggttctttttttcatgatttctcggagtctttatgatgctccacaccagtgcttctcaaagctgactgtgtatacaaaacactggggatctgacccacatgtaaagtctgatttctttggtctggggcaggcctgaaattctgcatttcttacaagttccaaagtgcagcctgcacaactggcacacagattacactttaagtaacaagattcttagggattttttaagaggaaccatgttctgccacatttcccagacttgctaaccataggaacctcattttgagatgctggaagttgtccgtggagcacactttgagaattttaaattgaatctttaaaattacacatgaattaatgtataatttaaatagaaatctcatgcagatcttctaggttatgattggccgaacagccccgtgtaaatcccaagacactgaaaaaatcatttagctagttcatgtagaaagaaaaaccagtatgggctaaaaagacaaccactaggtaagatagcaagtacactggattatatacttttcttttttttttttttttttaagacagagttccgctcttgttgcccaggctagagtgcagtggcacagtcttggctcaccacaacctctgccttccgggttcaagcgattctcctgcctcagcctcccgagcagctgggggattacaggcacttgccaccatgcctggctaattttttgtatttttaatagagacgggatttcactgtgttggccaggctggtctcgaacttctgacctcatgatccgcctgcctcagcctcccaaagtgctgagagtacaggcatgagccactgtgcccggcctacttttcttattttttaatagaccttataaatattgttaa

SEQ ID NO: 96700 - DNA, 1018 bp, Homo sapiens
cttgaacatatttctgtaactctccagatgcctatgtacaagagtgtctctacttaatcaggaatggaattacaggactacagagtgtacatgtcatcagctgcactagataatgccaaaatggattccaaggagtggttcccatttacactgtcatcagcagcatgggatagttaccattattccaggtcctcaccaaaatttgatactgttttgccattctggtgcttgtgtattgactactcattgcagtattaatgttcatttttctaattactaataaggttgagaacttcattattggtcatctagattttctcctcttcgtacaaaccttttgcttaattttttttaccagattatcttgcagtgatatttctagtgaaaaataaattcataatcaaaaacatttaactactatgcatagattattctcttgaactactatgctgtttggcacagagctctcttctaaacaaattcttgccaagaaatttgaattattttatgaaccgcctgattagaaggttagtatgcaactacctctaatcctcctaaagagttgcagcttttggttatgtttctatttctaggatattttaaaaatataactgcaaaaagtttatctgatactccttttagaattctagactcgataccatatgctcctgaagatgtttaacttttcaggcaaattcttaatttcctagtacttcattcttctgcaatatctgttccagtttcattataagtaaaacaaagaggaacttatgtttgctatatgatgatactcctagcaattttttctacttattattgttaaaatattttgttcatctaatgcttattttctacacttttatctgacattagtatctttacattttgaatcaaatttaaatattcacgctttctttaacctttattttttattaatttgttcttaggcatcattattttgtcatatcagttttgaaattgtgtttctcatcaacatttttctgagtgttcataatga

SEQ ID NO: 96701 - DNA, 2295 bp, Homo sapiens
agctgtgtcattcacatcctccctgtccccttacctggaaataatgactggatccctttaacaccccactcatcatctcttgaatggatacagtgtgtgcattcctgttaatgtgctgcccttatctggaagtagttatgtcccaaggagcctgaaggaaaattgtaagctcacttaaacgcccttcctatcatcctagtgacttacatcaacacagcataagatcacttaggtttgggcagtcttgtttcacttatgattcactcattttgctcttgaacctgaaatgcctacatttctttcccaatatgctgctgagctaacctaaatacaggaccttgtatttattcccgttgtttttagtctcattagaggcagctcattactgcagtgtagcagtatattttttgtattttaattttatctccctctgccaaattccatattcttagtcattgaagaacttgtatatgacttgtattgatatcatggctaaaacatttggtagggttgggtcaaggtcagacctctggcattatgttagaaacctctataggttgatgtatttcattcagctgtttacagattgttgaagtcagcagttgcccttattccagccacatttctatgttaatgacaatgtgatggaggacttctaatatcatacacgccccactagagtttgggcaacactgcatttccatggttacgctgccacagacattaggccagcttaacatgacttttctgtggtgccccattttagttctcacaaatcacctcttggataaaatcctttaaagaatctcacccaagatctgtgtctagctctgtagtttgtaatgtgaagagtctaccttccctttttccaaaaacagccatggcattttcctccttccagttttctggcatgccttcattctctgtagaaccctcaaaaatggttcagcaacctatctgtaagctttcccaggtctcctgaatgtgatcagtcaaatcaagcaaattgaggtcactgagggaagcgtgaggcctaatttctcacagtctctttacgatagaagtactctttctttcttttttttttttttttttttttttgctagtggaatggagcaatatcattattctgtgactccagtcttagcttgatactttctaattcattaaatggtcttacaattatgaaaactacaagaaaatggataggaaaccttcataggtttataacttgtcagcacagtggtatccctcccctgccccatgttggttgtggcatattgagactgcttcagagataaggggtagggaagtgtctcacccttagtaacgacaggtaccattggctttgctcctcatctaatgactgttcatggttgcctgtggtgtgtcctaacctttgaggaatcagaatagatatcatccatgtctatgaaaatttcctctcctgccaagcttctcagcattatattagtttcttttacacagttataagctctctgaccctcctcctcttgactttagcattactcctttgcatttacatcttgccgtactctgccttgatcctatgttgctgcatcagctaggtgatgagccccctaatggtcaatgtccctgggagagtggtactcagaaagtgctcctctgggttcattggtcctgggaagcagggtcagcaagataaatactgtgaaattaagtatgatatcctcacagtgatgtaatacaattaccataatataattctatgtctttttaacagtaaggctccttctatattaataaataattacttccccagtgacatttctgtttctccttttctcaaattatctttgttcactgaatttttccttctttttcttcttacacattggttgtttcatattatactcttgacatttaaaatttttggttcttggcattatttgtttcactgttgcatagtaacatttttgttctttgcaaccatctgcttattttaaggtgtgtaatttttcaatggctggaatacttttatatctttacttgccttaaatgctaatctaggatctttgtgtagcatttttttcctttatagaccttagatcttctctttaatgagcacttgatacagaaagaagaaattttatttagttgataatattttgttttacatctcaataagcattccacatacactaaaaaatatagattgccataaaattattacattgtataaagaactagccatttttatcagtgaggaagtgaggctcagcaaggtagaaactccccccagggcacttaggt

SEQ ID NO: 96702 - DNA, 2715 bp, Homo sapiens
acacactgctctcactatgtgttgtcttaggaaaggcattccatctgctgccaagaacctattctatcataagctatgggcctaaaaaatagattttcttttcaacaccacattcctagttattgttatctttgaataatcagattcttctaaagaaaccaagctagctataggactccaccaagggtgaccttgttgctagttattaatatgttatatttcttttaaataagcagacttttatttttaagccttctttaggttttaaactctttttttcttttctgttgcaaaaacctcttctgcaattggtaaaacattcttctcatgtcagttaacatttgtagatgtctttttgtgtgcatattactttgaaaacagacccctatagcaatctagaatgtttattatttagtttcttgataagttagtcatatttacttattggttacctgtttagaaaatttagcaatttcacaagtttttgatcatggtgtgtagactgtagtctactgtagttgctaggaaccatctgtaaagccttggttcctgcaagggagcccagaagaaagtgttaaccctttgcctgcttgattgcaggaggaatgccagctcctgagcaggcctcattggtggaggaggggcaaccacagacccgccaggaagctgcctccactggcccaggcatggaacccgagaccacagccaccactattctagcatccgtgaaggagcaggtacatcctcgtattgaaagttgcagtgaattatttctttaatgcctttaaaaaattaatctttggatatgttttaaatttgtgtaacgtccttgacgccttcacgttttctaattataaggtgtttacatccctgagtacattgggatgactggcatgtagagccgctccaggtgccagtcagaatcggaacatgcaggatacttgtgcgtctgcaagtaaggacaatctcgatggtgatcggtgtctctgtctctcccacattgcagagtgtgtgcatgcacgcaaagctgtgtaaagcatagttctcagtgctgacttttctatcaggactctggcaacctgaggcctgtaatagcgttaggtattttgaacattttaacataggtagtatataggattgtctctgtgatttttggataaaggctatatttgtgtgtttgtctaaatttaagtatattcattttgtgagctaatgttctaaaacttgtcgaactgtgccagtttgcttcaatgtcatgtttatgttgatttttttaaggcattaatactctttatccttcaaactcaagtaacctcctatattaggtcttatcagttgtgcttagagaaattggaattctgcaattttaatttcttaagatttcaaagcttaataaggtaaatgtaaatttaaagctccagggatggtttttttgtttttttttccctgcttcttctctccaaaacaacattatgtgtcccctgtgagggttattttgttgaaataatctaagattaagtttttttaaaacatcttataattaagccactagatgtttttttctcaagataggtaatgttgtatttgctgggatattcctttgaaagtcagtatcagtaactcaaatgatgaatgatgacgaagattgaggaaacatttattaccttattgttgtactatttttcgtaacttggaatgtggcatgaaagattgctctataaccgtgacacatgtctgacgttagaactgtgttttcaagaaaaattatttcagtttattctagtaacaagatgtcaacatttttttttattcctcaatgaaatttgaagtttttaaactttccacaaagagtttgagaagatgcaagatatagtcagtacaattttcatcttccaccaaactataaaatgtctaagcttctgttatctttaggagagaaaaaaggactcttcgatagcacttcatagttgtcaagatttgacccacggagctgttaagatgagaagcctcagatttatttggggctcttagtatatactgtgttttggtgaaacgtggtaaatttatcaaaatgtttagaaatgacttaaaactattaactgcgtgcagtaaacatagcaatgggaatgtctgtttgtaccttgagaccatataccctacatgtaagaaaataaggaaacttgttaagattttgacactagaattccttgatggcctcaaatgacttcaaaattttatcttctggcagtaaatagtgttctgaataagtattttgtgggaagtgctaagaagagttcagcttctcaaggcagccaaaaatgtattcatcttattcattaaaacagttattatatataattgtttagtttagtgggatgctatactctagtctttggttctgttcctatcctgagaaattggagttcattaatatatatttgccgtttcatacataatttcttttaaaaattgtaagtacttagcatttcagttgtttaacccaggataccacatctgtgtctttttccaagatactctcctggttttaaatagctcccctgcaatttttgtggcaccaggcaaaatatagttggaataaaaatttcttaagactctcctgaaatatgtcacttcctatcatctacccaatgggatagagcacagaaaagttagatccaagtaagaaaactaattaccattcaccttatatgtttg

SEQ ID NO: 96703 - DNA, 1631 bp, Homo sapiens
tatctttcacaagtatctttgcaagttgatttctggttttgtagaattgcacatgtaatattcattagagttgttcatcttctgtcataaagttgcttgaataattgagatctctatttgaacttggtcatacttttcaggctctctaaccactttttttttttttttttttttttgagacagactctcgctctgtcatccaggctggagtgcagtggtgcgatcttggctcactgcaacctccgccttctgggttcaagcaactcttctgcctcagcctcccaagagtagctgagattacaggtgtctgccactacacccagttaatttttgtatttttagtagagacgaggtttctccatgttggccagactggtctcaaactcctgacctcaggtgatctgcccaccttggcctcccaaagtgctgggattacaggtgtgagccaccacacctggcccacaaaccgcattcttatatttttggttaatgatttcagaagcttagaatctagatttaaggttgaggccaatccagatagcatgaactggtaagcaaagaatagatttggtaaaatatgctaattttatatgcactctttttactctggtgaggtctcaagttagatagtgtatgcttcttttgttatctttgatgagtgaaaattgcaatgttcctcatctgtgtggctcttaaagagaataccactttcaatatattttctggcttttgtgaaaataaccattctatcttcagtatgtccttattaacttaagtgatatttaaatatcaaagagtgaaatgagagccagagatccttaattttttgaagataaaataagaaaatctgaagcccaactgtgtcctattgatgttacttcatttttacatagatatcttagcttcagtaattacacacccttcctgtatggcaaaatgcccagaagtgaacaaattccagtacaattatttactttattcctctggaactgaaacaactcagctgttacacacctgcctttgtaacttccttttgtttggcccctatgcttattttcaatgaaatagtcctctctgacacacctcagccacatgcagaagagagaatttttatttcagctgtaaacaagcatagtttgtcacttaactagaagtcttgtgctgtaagtacaatgcctgaaacttctgatttttccaattggcaacttagttatttttccaattggtaactgaattatcctggcagttattgttaccgtgtaacccacagtgaagttttcagtgcctgaactgcagcatctaacccaagataagattggatctcagtggtttttgagggatcatcaaattttacagctttatctccataatattataaaaatgaggttcaaaatgaggacaaatggcagagccttgtgacactgtttggcttgtattcaagaattctgaactctaaaatggctctcaggagatcagtcctcttaagttgcatgtaccatggtcagaatttaacatttcccttcattttgttaacgatgcagggtgtcctccacctcaagcgtccctgtgattaaagaatactacagagtatggccaacaggtttattcagtatttgagtactgcccactcc

SEQ ID NO: 96704 - DNA, 1945 bp, Homo sapiens
aagaggtagctaacaacaagcatatgcatttggctacctgcctacattttccgatagtctgatgaatgatcagatggaactgctagcaaagcttccagtcttatatgtcctcaactatatattcagaataacttagtatttgttctctttgatttcatcggaagcatcattttaggttgtattgacactgaggggtttgtttgaaagactgttctatgaacttgaacagactccatgtggctgttcacacataactggatcacacattcaaacatggaaaacatagtaggtgcccaaaatatttattagttaatgaactaaaaatgtaaacatgtttacagtgcctccatacttagattaagcttgcttttaattaattaaaaaatgtttatttaaagactactctgagcaaagcactttgtcaaggaatgggttgagggggataagtagacatataaagttgacctatttcatatagtttctactctcagaagaatgcagaggcacaaaccgtatttatacttcaatatagagtaattgacacattatgaatattcattaattgatgcataagagacaagaatgtgtgtacttttgcccccttttagtttaaacaggctatcagtatgtattatgtcagttttatgtaagtttgttaacttaggcatttttaggtttaatttttaccactgaattaccattagcttttatttacatttgaaagtaatagaatatttttgtttaatttttaccattgaattagcattgtttcgtttacatttgaaaatgatagaatatttttctttgttaacacttaaagccaaccatgactttatacctttaaaattataatttccttttcagttgaataatccagtttacaattcttttcagagttaaattatgaatatatggaataatttccccctgtatatgcaaactttatgctgttaaatttgaaatgagtgactgctgagttgatgagattaaatggatgagaggattattcagcattgaattctctgctttgcatgatcgtttttctttttagaatcacttctggagagaaaaatatttcggaaacatgtttttcccttcaggtataaccctaaagttattccgtagctattgcaaaacatagcctatccagtgcctatcttcatgtttaagggctcccaatttctaaattgccatttttgttactttgcaaaaatgtgtccatatggtctcacttcatctgtttatattttatgaatgtattgttcccaaagtgatcagatctgcttgtacctcagcaaagtaatttggtttatggctattttatttcaggcattcctaagaaagatcatttaaaatgtaaagttattttcagtagttcaaagacaaatctatttcttagcttatagaatcttaagagtttttatgtacccaaaccttaataatgtaggagttacacaaagtagaagcagtctgcaagcaaattgaaataacacattattgaaacttgaagacaaataacatcctatgcaattatattctatataattatatttcaaatatgaaaatagctataataaattaaaagtatacttagaatttcaatctctgtggctcttgaaagaaaatttaatttttcctttaaaaattggagttcaaagcatttcaatttatagactgtttagtgttttaacttgtagtctttttcttatgaaaattcctataaagcaacgcggcatcagtgaagtgttcatcgtgagttatcatctaccctaataggcatatatctcatttaaaaattttccccaaatcattctaagagcctaaaccaagattaaggtcttaaccactgcctatggccttctaataaactattctggcagaattaataactcttactatttcatccatatgtagtatttctgtattctggtattccttcagaaat

SEQ ID NO: 96705 - DNA, 1079 bp, Homo sapiens
ccctgtagtggacagtgcaagtgggggtgccagttgctagactgtgaagcgattcccaaggtaattgatcatattgacagaaacttagctgcctgttgctctactaaaaccatctcagttagcattcccccttctggtattcaatcaccctcgcccttcctcaacctaaagactgaaacataaccaagagttaaaagagataacagccatttatttactctaactcctaagggaaaatagtattttcctaaagagtaatttctaaaataaaggcatatctgtttctaaaatatttttactttatgcagaagtattttttaaatctttgcaactatttatatttgctaatttaccagtacttattctacttagctgtaccatcaacctcatttttaaaattatgtttaaaagttaattatacttattcgtaagtgaaaaaatcaaaataagtatctcacatttacatattagcttcagaaaagtaattttgcagcttttgcaatattaagtagtaattttgaaacaactataacttttttatagacaggatagtcttattataaattaatatgctgtctctctaaactgattgtgggaggcagaataatgctctcctccccagagatttattatcccaacgcttggagcctataaacgttatcttatttcaaaactttatgggtgtaaataagttaaaaaatcatgagatggggagattatcctggattatccaggtgagttctaaatgccatcacaagtatctgtctatgagagaggcagagagagacacacgagaaggctctgtgaaggtggaggcagggattggagtgatgtggctgcaagccagggaatgccagctgtccccagagcctgtaaggggcaaagaagaggtttttccctacagcctctggaatgagtacgtcccagcttacaccttgatttcggcccagtgaaaatgatttctgatttctggtttctagaactgtgagaataaatttttgttgttctattccaccaggtttgtggtgattcgttatagcagccataggatgctactacagagtttggcatcaggaagg

SEQ ID NO: 96706 - DNA, 1048 bp, Homo sapiens
ctttaaacaaaacgttggtagaaatgtgggtattaaaggtggttctggtgagagctcagaaggaaatgaggaatacgtaattggaaactagaggaaagaaaggtgattcttaatatttacaggcataccttggtgatactggttcagtactagaccaccgcaataaagctaatattccaataaagtgagacataaatttttttggtttcccagtgcacataaaagttatgtttacactatactgtagtctattaccttatgtctaaaaaccaatgtacatgcgttatgtctaaaaaccaatgtacatgccttaatttaaaactgtattgctaaaaatgctagtgaaataagcacatattgttggaaaaaaatgtgccagtagacttgctcaactcagggtttccacagaccttcaatttgtaaaagatgcgatagccacagagagtaatgaagcgaagtgcagtgaaacaagatatgccaatactggtagaaaacttagctgaattgtctctcccagtcctgtagaaagcatgtaaatgatggacttggatatttaggtaaagagatttccaagcagagcgtagaaggtacagcctggtttcttcttgctgctaataacaaaatgtgagaggaaaaacaaatcaaggggaaacctctcaagcaaaaatgaatcacagtttgataatttggaaaattctcagcctatccaggttgcaaaaaatggtaaaattaggagattcacttttaggaaagtgctctagagagaacgccaaggatgtagataacctttgactagtgctgaagatatcaggcatgtgactccgcagaaatcaggagtggagatgaaattttccagggaagatctgtggatgacccacttgtttaatggcacaaatacacaggaaacccacaagttttttgaaaatgttgtatcagcaaaaatgctgccagcttgaactgaaaaggacagagacaggttgaaatataggaaagctgttagacttcccaaactgtacaggcttgtcaaaacagtgctcagttgcaaata

SEQ ID NO: 96707 - DNA, 1952 bp, Homo sapiens
agccaggatggtctcgatctcctgacctcgtgatccgcctgcgtcagcctcccaaagtgctgggattgcaggcgtgagccactgcgccctgccagaaatgattcttcatcaaaaattgctatccattggtcttgccactttctctatacctcaagcaaccctactcttaatataccaaactcttacggcccaagaatagggaaggtagtttctttagataaaaatcaaaatgccacacctagaagaaaggtacaaagatgttaggtagcaagaacagcaggggtccactacataatacttgcacagtgcatgtttctgttatgattatttgctatttacttgtttaaataatcctgaatattctaatatgaatagcttccaaagaatatatctcttcttaaaagccatgtttaaacattagtacatgttttatttagtgaaatgatattttctaattgttctccaggtagttgaggaagcttcccaggctcctaagaaggcaacatgcaacatcagcaaaaatgatctgtaccaatccctagtgacctgtaccagtcttatgtaaattatgagtgcttataaagtaattaaggtttgagttgttcagtccgttctttttctctgaagcctgtctgtggtgtctttgtaattgtgagccagctattctcctgcctagcaggctttagggacaccacctttcccatacatgtgtatattaaagaaatgttagctcatcttaataataaagcaaaatgtaattagatctgctacagaaacatcatactctgcactacaaatataagtgtaaataatttggagtagacacacaccactggatagctctattagcatcaataactaagaattggttgtataaaaatagccttacataaatgcttctctgttctttgatttaaatatttctgaaatgttttactgcctgcaacacaatttatacccaagtgtgggaaatgtttgttaaatgtcttgtatttggatgtgaagatggatggtaatagtacttcacactcatctggatttgcctttggttgattttctgattgtcatgggttttgtccatgccacctgtatcctcacctggtctcacttttgatcatgatataattcgtagggtggctgacagtttgagttgtacaacccacagacataaactggttttttcttctgtggcctatttttttgtttgttctcaaaataccatcccagctgagttaataggccaagtccaagtataatctactctgagactgagcttggttttttccatagcttgcttattttggtcactgctgatctaactcaagatactttaaaactcttgatcaaattctaaggacagggcatttatattctgtcataattaacagtgaacgattaaagacatttatgaattagagccaagattcaatatttactagtgataaagggcaatgtcttatttatcacattattacactgtgacattggcaagttttgaaatagcttaaagatgtctgccttattttctaaataagagggaaatgggctacaaacaaacacatctcagtgtgattgtatgtgtgaaaaatatcttcatatcgggtagtttagtttttaaagttcattcagtacactaatggcttacaatttagtttaacagctcggtgtgttgtaatcaagagtgtgaagaggcaatcaaatacttctctgagattctgctccccaaagaattcctggcaagcctgttgctatggtgcagtctcacctgggacttgtttggtatctttctcaattagatatattgacaaaaatgagcttaaaaacagaactcatagaaaatccagaatggagaaatacggatagataaatgaagcattgtggctctttctctctttttttttttttttaacttgtacttaccaattcttgtttctgatcccaggagtcttaag

SEQ ID NO: 96708 - DNA, 1482 bp, Homo sapiens
gatgctggatgtcatagaaggcactgtttatcagatgagaaactgtgaagatgatcatctctaaaaccctgcaaactagattttctgcacccacagctgcttccctggaactttggcagctgtgataattgttgcagaccatccctgtttggtactgccattgtatttagataatgtcaaagaaaggcttatgagtcagttattaaattgaaggagatgatcacgtcagagtaaagccaggtagtgagacctctgttggattacttaggcttatattatttttaagagattattatcttgccccctccaccttgaaatcaatttcatttccacaccctgaagatcatggcatggggctgaaagacagagtgataaagagcatcaactctggagtcacaccttctaactgcatatccctgccatgtcatctacttggtgtagccttagacattcatgatctacacctctaaaatgagattaatagtaatatattcctcgtggggttattgtagaatttaaataaaagatgcctctcccatagaaattattcactgggtgttggctatattcacacttttgatatgcatagaaagccttagtatatactatgtggctcattgtatgcacttaatgaataatagccagtaatactattatcatgataccttacatgagtctgtgtcagatgtagacttactgaaaacacaggaggaaatgtaagggaatggctaaaatttgactttatcataaattgtagttgtatgaatgaatgagctggggtagtgaaccagaaaacatcaagtcattctatatactgtcctgaattatatacatgcaaggtttctgggactaaagtcatcctagcagcctttgcagtgaaaatgttgctgttcttaaatccagctaagtacatgctattttaaaacacagtgtttttcaagtgaacttaatgtgtgctgctgagaaaatgccaagttttgccagatcctgtatttttacctgttgtttgatatttatgtcattcataacataatactattaaaatgctttgtttttattgtaatgctttagttcattttaaaagataagtgtcacagatgtatagtaaagtgataacttaggtttagatccaaggagaatgagagatggaacaggacctgtttacgtttgtgtgtggaaggtgatggagctatctaagaggatgcttgggtttgaagaaggcagctggttacagattgctagaatttgtgagagtaaactgatgttctgcatgtgtgtaccttgaggtgattgtggatcatccccaagaagagacccattagatagctggacacatggacttggaccttggtcaggaagatctaggtcaaagttgtcgatatgagatccacaaccacatagttgttacttgaagccatgggagcagcagaggcatgaagaacacaggccctagggtgatcctcagggaatctagtccccatt

SEQ ID NO: 96709 - DNA, 1044 bp, Homo sapiens
ctacaggacaggtggcctaccggctgaatctggccctcgcctgttttttatagcctgcaagctaagaatgttttatacaatttttaatggttaaaaaataatcaaaggcagaatatttgatgacgcctgaaaattagatgaaatcaaatttcagtttccatatatattataaaatcttactggaacacaggcacactcgtcatttatgtttatggctgcttttgcactcccaggtcaaaggtgagtagttgtgacacagacctgtgctatggtccacaaagcctaaaatatttactgtgtatctggccttttctagaaaaagtttgccaactgctgctctaggatattagaacaaaaatctgtgataagaagttttgtatggggcccgaaagcttgttaaagctctcacacaccttaggtcttttgatcatttcagcagccagcaatgcagatggtgttgccttgttgaaccaatggggaatggatgccaagccctgtggtctcatcagcaccatgcagtttgtttatgttcactgactttctaggtgcctacttttatttggcatcttaaaacagggatttgttttgacccttcagcttgaatgttttaatccaattccctgacttccttgaagagaaacttcatatctaatttagaccacctctgctctgtggccccaggccgacttcccaggttacatgagtgctcgtcgcactttgttatgattgtggagcgcaggcactggtgttgcctctgcttttccctctttctctctacccatcgcagtgtttaaacaaatgaatgtataatcaagtcagtctttttttttttttaatttaagttctagggtacatgtgcacaacatgctggtttgttacataggtatacatgtgacatgttggtttgctgcatccatcaacattaggtatttctcccaatgccatccctccccccagccccccaccccccgacaggccccggtgtgtgatgctccccgccctgtgtccaagtgttctcataatcaagtcagtcgtttaaattac

SEQ ID NO: 96710 - DNA, 1641 bp, Homo sapiens
ttctttgataggtcagaattggaacatttaactattagtaaaaattgggattgtagtgtggttttacgtaagcaaacaactcttactctattttatttacaaaaattaataacaaaaataaatgcccaaggtagagggaattaaatactcagaagtataaaatgaaaagtaagccaccctacaggcatccagtcccatttcccaaaggttaaaacttcctctaaagttaagttttttgagtatacatcaagaaaaaatttatttctgcatattctagcatagatgtctttttaaaaacaactgcctggctttattttcctgcataatctttcttaaacatattctgtatcagcacatttggatttacttcaatcctttctagcaattgcatggaatcctattatgtagatgtatatatatatttagctattcccattttgatgattattgggttgtttccagttttatttgattggttggttttgtgtacttttccaagtatatcacaacctcagcattggaactaatgggacaacaggtaggtatgtaatatttacctttttttttggtattgttaaattgccccaccaagagtttgtactagtgtacattcctgctacaccatttcttcatagcatcaccaatgctgtgtactttcgaatctgatgtgttgtttccaattgttagaataggccataataggttattggaatattattgaacactgttagcatactttaatggcttcagaaaagcaaaaatatcagttgtccactcaatcagaataccacgttcgaggaattgacagtttcctcagcaggtttgtcctggtacatgcaaataatacttcgtgtcttttcttttctttctgcttaattttctgaattcaattttaattacagaaattgtgttgtaacaagtgatacaattaaaagagataatataaaagtgtaaataattgtaaatataaaataatataataatgtaatataaaagtataaatagattggtcacccttctgaggtgaccaatcatactgatctgctgtgtctcattcacagttgtgtctgtgttcaaacaaacctatgtaggctttgggtttttaaattttgttgtgttttactcagttcttcagttgactttttaacataatcatatataacggtccttctgaagcaacagataagagtccaactcattcttttgaataaggatatagtatgctgtagaatggagatgccatcgtttgttacaatattactatgtggatggacattcaaattgtttcaaatgatgctgcaattactgtttaatatataccattgcttttatttctgtagactagatttccaagtggggatggcagggcatgaggaatatggctttttaattttaataggtattaccagattgtttcctcaaagtgttatagcagatcccactcccatgaacagtacgtgtaagtgcccatttccccccagttcctcaccagccctggctgttaaccgcttttttaaatgtttgccagtatgatgaaaaatgacatctcattgttatttgattttctttttccttactaatgaaagtgagcaatgtgtgcatgtgtgtgtatagtttgaggtggtaatctagctttgtttt

SEQ ID NO: 96711 - DNA, 1068 bp, Homo sapiens
gcttggggaatattttgggattcctgagtagtcttttcctggcccagcttgatacaaccaggcagtcttgtgggaaaagatgcatataatgacaagtgagtaaatgaagtgaacaaatagaagtctataacaaaaaaaacaaaatgatgctgtttaagagcaaagaaagagtaagtgtgaggtaagcataatagtattttcaaattggttatcttagcctggtactgaatgctgaacaatttatgtctatctagtcttttgttactgaacatttattaagagcctaggaattgttaggcagaggcaggcattgtcccacttaccgattatgatcatattgtacagcattattgagccagctattattcatctaggccctgtccaatactgccacaccagttgggatcattaggaaaggattctcagtatcagaagatggtaaggagtttagggactgtttcttaaaaattattccaagaatagcttgtggaatttgcagagccagtactgtcaagcaattacatgtttgcctgatttcacagggagttcatatacttttcaattaaaatttttaatggcaaacgaatgtatacatataatcataaataatattttaggttgttttatttctgaatagtttctagatttaatactcatatgtctggtattttgaactagcagtcatcaaattaaactacttacagttcagcatttgctttgaatagacttgtgaggagacagtatggcacaggggagcttgagatgctatttgtagcttaaaacctttggaatgtacttgatctttagatattttataacatgacatgttttctacttactaaaatcccatcaagctaacaatgagagaaatacaaataaagttaaaacattctctcctttcatagaacttgtttgccttcactttgcagcatagattcaagaatataatttctgtagactatcttccagcttttgaatatattttaaattctatgttatggcttagtctttttcacttcttgtgttccttctctcctttgcacagtggcacatgattgcttttggaca

SEQ ID NO: 96712 - DNA, 1125 bp, Homo sapiens
ggtatgtttgaacttaacatcactgcactaagccatgtcctttaaaggaccccatgattagcaaaccccaggcttctatcatatgtgggtttggagcccaaatgtaactatccacattgctcaggagtccccagtgagaaaatggcaccactaaagatgagctcacagtgagatagtataaaacacaaatttatgaatgacatcagcaagatgacagaataggacttgtcagtgcccatcctctcacagaaacttcaatttgaacaaccattcacacacacaaataccttcactagagctaaggaatccagacgagagattacagcacctgaatgtagcacagaaataagaaaagatgtattgaagagggtaggaaggacagtttcacactgtgctttgttcgtcatgtatttccaaattagttctgattttgtaaaaaaaaaaaaaaagcattgaattacatatcataaaaaaacttgaccatgagtgagagaatcagtgagcaaaagagtagggtttcacagtccaagaactggataccattggaggaagtctgacaggtgtgcacagtaaaacagatacaaagcatgctcattgcagcaccatttgcaaaagtaaaaaattacaaagaacatacttattccttagaatggaaatggaaaataaactgttaataggtacactctaaagcagttaaaatgaaactctagagcagttaaaatgaaataactagatctacatgtatcaacatggacatgtttgcaaaacagacttgaaaagctgtaagttgcagaagaatagctgtaggaggatataatctatgagcaatttaaaatatatatatatagctatatatatattgctatatatatagcaatactgcataataattaaatagtacttggtattgtttgtcagtgtgtgcatgtggagtaaaattataaaatattttggaatgacaccaatttaagatagtggaacctctagaaaggaagaaaggaggacgatactaggaattaggcttttgcagaatctgtagcattttattcaagagccatctggagcaaatataacaaaatgttaacaactgttaaatgagggagtggttgatatatgcatggctat

SEQ ID NO: 96713 - DNA, 1032 bp, Homo sapiens
gtgcagtgtgtaaaacagaataaagaggccaggcagccagataggaatctattatgaaattttaagggttatgagtaaggtgggtttcttcattcagtgatctctgagctgtggttggaatggtaattgatctacttggattgccctactttcttctcatgttgaattcccatgtattcttgatgtcccaactaaatgcttacccttctttacaacctttctcaagtttctcaggaaaagtcacctccctcatctgaattcccatcactgtttccctgtgcatgttagctgctcaacaggtagtaaggctcattccacccccatggccctggcacagagcctggcgctcagcaagtgggcacccagccaaatgatcattgaatggataatgaaccttaagtccaggatgcttcgggcacatcatgtaaaggtgctttgccattaggggagctaaagttttttattgtgtcacttgagagatcccccttgcatctccagtgtgtttcaattgtcagtcttggaaccagaatctaagtgatacagagaagaacagaaattagctcttagacccaggccccctttccggtatgccatttccgatttgctaaaaaataacaattaaaagtggaattgttgctttgggccatcaagcttctgtttgattcagttcgttcttgcatgaaatgagtttaatcagcaaactgggggatttgatcaccagttacctttcatactgtttgatttggatcctgtggcagagttggtaaggtgatctgtaagattttcttacttttcctggtccaaagatgacactaatgactcaaaggaaaacgaaaagcatttgtttttatttaccttttcacccatccaaagtttttgtcattattggcctcaccctgtgaagaaggacgtggcagtggcatgaggttctgtttaatacctgtttaatgacgcttatgctgtgataaacaaactgtggaatcctcttccccgaatgggtggctctaatagtgagtagttcggttccctcac

SEQ ID NO: 96714 - DNA, 1126 bp, Homo sapiens
agtataactgagtcttgcctaggacatgtgaccccaaggtatttcaaccagtattgcagtaagctaacgtattttaagctaaaaatgtcaccatgaagaattttaaacaatatatcttttatgagtaatagaatcttttttgaacctagaatgttttaatcacagcaaataagtattccaaaataaattacctgtctcttagactgagcattttaaatgttaaatggataatgcagttaggaagaaccacaaaaaagatcaggttaatagcataaatgtttcagattattttaagactattttaatatatgtggttaaaatggaggcacctcagctgtattaatttttctaatacttttaaaaattcagaggcccatacatctaaaatatgtatatcatgccattatttaatcatcttttaaagaacaattttagttaaaacagtatttcattttctgtaatttttcatagtttgctttctgtaattatattattaaattatttaacagtattgaattattgaatcaaaataagaattataatattagcccttacccttcatcattagagtttttgaaattatgtgtacatattgataaagtactttaataggttatacaggatatttcaagatgcttgaacagatttgccttcgctgctttataggagttagtaattacatttaccatctcataaaagcaacaatgctcttaaatcctgtattttcttattactattattattttccccttatctgggttttaaaatcttctttattttgagaaatgttaaaaattgtaaatgcagagaataaaatggaaatgttaagtactcacatcctgtaattaaaaattattaaaaattcattttttataaaaaatattgaacataaaattcaagtcccctttgccacattttctcttccccatagctaaccactagtatgtaatgtttcaattgactttgtatacttttatgtcaatacatatacagtacttatatattatatacatatatattaacacctgtgtaaccaatattttgtgttgctttttttttttacatcaaagattgtaggtgtagtttatgtgccattgtacaccttgattttttccatttgagatcc

SEQ ID NO: 96715 - DNA, 1016 bp, Homo sapiens
tacagagagaaacctttctttttcaaaaagcaaggcagaaatttaacaagtgtattatgctctctcttttcacacttacaattaaatttattaatgaaatttttactgtttataaaaattaaaaatctttactctggataattagtagacagaaagtgaatatcattctttagacacacaccagatttaatagtacctttacatgagtagcaaagaattctctgtgtaaatgattgggggaataaatgtttaattacaaatttaggcttaaaattccttttaagtaaatttttacatagtcttttcaaagcacttaaaatatgaaataatgtacgaaattaaattgtatgcatcaaataaaactatttgtaattataaatttcaaggatttggtatcccagcgtgtctcttactgtagactgctacagcttagtcccatgttaatgctgtgcccagtctcacatagaacaaatagaaaaacagggcccttttcttgttccttaccagcatctgctttatttacaagtataacatatagatgcttttatgcagttctagcagaaaatagtatgtttatatgccctttcttattttaaatttttttaaatttcctttctatttcttcacctttggaaggttttagaagaatagaaatgaggaaggcaacagcattttgtagaccatggacacaaatagttcccagtagcccctctgtttcaaggccaaatctttgcccaaataggatcctaggtttgtggcaggatatttaggaagagagtctgttgttgtgtttagccattttactcttttcatctcagttgctttcattctttcaaatgtcacttgaaatattagaaaaccttccttttctgatttctactttgactagttggaacacctgttgtgggatgggcataaacagaagtcatgtttcctgtataatttatagggataccagagggaactgtttgtctcatttttgtctagtactacgtcctttttgatcttccctttcc

SEQ ID NO: 96716 - DNA, 1082 bp, Homo sapiens
ttggtcacaccagtggttgggtttggagtggagatggattgacgcagagcctcactggtggaaggcaactcaagcctcatgtcctgttgctgatgggtcaggaacagctatagcctacatgaagggtgtcatttttaattcaagtgctcttgcttttctgtaacctcgatatcaccctcagatcatataaataattatgaaaagaagccctttgccctgtctcatttgttatgccttgcttagttcaaactataggcatgtaccattttcaggggcaaggtcataacacataaaaataactaaactacagttaggcacctgttgtcacattttcacttttcctggctgctgagatcttgggaatagccttaggaagagaggggactaacggccattctgatgaaaagccaggaagaattaattagtggccctttcttgggaagaaagaaatcagtctccatccaacagagaattgcccaggatctgacagcatggtaaagagacacttggtcagtgaaaaaccaggaatttggaggaagaggttttgttttgtttttgttttcattgagattgattgtgaatggacactaagtaaatttggaaggggtttcaaaaaatatagttaaatactaaggaggattgctttcagaatatttttgctaagaaatcattactgcctggatttgtgatttttcaaactagggtcctgagagcccctccgaggtggtagtgaatgtggtggtggagatatttgtttgccttccaactccctcgtccttcagctgggcaaagcagttcactttcactgtcttcacgtgttgaccttcctgtcttcaccttactgaactagcttagtgcaatgatgaagagctatccaaacttgttttgggaagaataatcatgacatattgtttaatttgtgtaactgctctatttgttctgacgttaagacagagagcataagtctctagtgtaaagaatttatttcccgggcaatccttacctgactaagagcaacagataaaggccctgtttcccaaacaggaaaaacggaactggttgtaacctaacagttacctatt

SEQ ID NO: 96717 - DNA, 1036 bp, Homo sapiens
tttgcatctgaatgaaaaaaattaatttcaggagtatgtagaattttatagtgatctacaacatattttcatgtaatattatgatgaaggcacattgtcttcctgtaaacaaaactgatttttcgtattaaaatgaactgttttgttaatttggtaataaatttgcttttgattgatgttcaccatctgactggacagccccaaggttattagtggatttcattctaaatgattaagttattaacgtattaaattatgaatatatcttcccattgaaacaaagttatcatgggtgactcagttcctgtgtgtattttaaaatgtgtttcacattccagtggaagctcctagaacgcaagctgcttggcatcttcagaagagaagtgaaagggaaccgggatggagtcatttgtgggcacagtgcctacagacacattgtagccattcaataaaagttgaggaagtgtttctaggaatagatggttggagggagagaaggaggaaataagcctatgtttctaacatgaagctgcctgtgattgttgtaataaacatgggtttattagaacaattgcctttggtggtttaaaacagcatttcaaaattccatctgttttgttgtccaatccctgagtcccaaagtagtgaacaatttgagagtcatttgaagtgagtaattcaaaaagaaaataggctgttatgaataacatgtaatgaccagttatttctcagaattatagaagtttctgtgaaagtagttgggctgaatagatgatcttcagagtataccatggaactatttatttatttttaatttcattattagcttgtttttctaatgatttatatatggtaccttaaatggaggagggaatattattgaggcttcccattgccttcacctaggaatacctattatattttggtaaccaaaggtcctttcagcagcaaaaatgctgtttgcttgattgttacacaacgaggttgctggagcttcctacctagactcggggagaataagttgacctgcttatac

SEQ ID NO: 96718 - DNA, 1039 bp, Homo sapiens
aataaactgtttaacagcctttttggttctttttcatatatatgatacgtatgtggttttcatattatcacgaaaaaactgtagtacatcatgtaagtactgtgaatatcatacagttgtgctgttttgtcttcttcaagtagaattttatgtcattttataatttgccttaatttccaaatagaaacaatttttgtcccaattttaaatactatctaaaaattaacttagataagtttaaattttatttaaggtttttgtgctcttgtataatttaatgtggaaattaaatgttaatatgcaaaacaggtcctaagctaaattttatgacaaaataaataaatgttccatttttttctttctttttctttagctcaactgagaagtcatttccttggagatcaacaggtatgttttttattatataaaagttatgtttgataaacacaaattacatagcctactctcttaacttactatctcttggtgaaataagccaagcaaagcctttaatagtgacaatattgcgctacattgctttggaatagtacttaatatgcttaagtttttagtataattgagtaaatttgtgtatgtcaactgtaatgaaaaagcattgaacagcagcatttttaatattaaccccatatctgaaagtttccatttccatcataagaaaacacagggctgacttcaaaaaaagttattacgtaatcaagaaagctgctaattatacaagttgggtatttcactgtgtttatcatactcagagaaaagtcgcttgaagttttcatttttttaatgtatccacatgtagaatatctagtagcttctaacatagtgtggtagctttccatgtagtctctctatcttttctttttaacctaaattcaccacataggaaggatgaattacattaaggagactgtctgtcacttacataaatcgttgatgtcttcatactcagccttcactcaataaatgtttattgagtattcacataatgtaccgggtgctgtgcacattgctgggcagagtg

SEQ ID NO: 96719 - DNA, 1063 bp, Homo sapiens
tagcaaattgaaaatttatgaataaaatagtaaaatcttattttcttttctttctttttttttttttttttttttttgagacggagtcttgctctgttgccatagccgaagttcggtggcgccattttggctcactgcaacagccacctcctgggttcaagagattctcctgtctctgcctcctgagtagctgggattataagcgtgcaccaccatgcccagctaatttttgttttttttaaattacagacagggttttgacatattggccaggctggtctcgaactcctaacctcaggtgatccgcccaactctgcctcccaaagtgctgggattacaggcatgagccactgcactggcccatatttccttttctagtaactgtagatgctatttataactttgagtatatattaataattgggataaaacagcagtgttgctgctgctttttctataaattttgacaattgttttttttctttgctgctttgactgcaaagatactgaagataatatgaaaatcatctatcttagaattaggcagtcctactcagaataaatgaggagtggcttaaatttgaaaaatatttaaaagaccatcagtccacttagtctttggctgggtcttgacaaaagcaacctctttattcgttttttggtttcctatacaaaatttcacaaaaggatttaggattgaaggtcctcatttatcctcatttatttttatactttgcatgtttactttcagacactttctctaccttttttcttaagttttacaaatttgacttgaaaagcttagctctttaaaagcctttcagcaataggtggattgttagagatgcaatggtttgatcactgcttaggagcgatccctgcttactcaggtgttttcaggatgttatattctgttgaaatgtggtaaactggaaccagcctttgaattggatttttaaatagctaacctactgcagcatcattttctaaggaagagcttaggatgccctaggcagaagagattttcatttcactctcatttcattagattcaggagactcta

SEQ ID NO: 96720 - DNA, 1560 bp, Homo sapiens
ccccagtcacattccatgaagtgaattttgctgcaagtcacaatatcacagtttttctgtttgcgagaaaaaaaaattactagagtttaggtggttgccaacttgagtagatctgtgtaaaatgcaggggaggagaatcggcctcagaatccagcctccctccgccccagctcttcctagcacattagaccaggagcagtccgtcttacagggctggaatgtgctgctctgtccccaccagccagccagccaagctcattctttttaacactgctgtgttcctagaaaaagaaagtgttcgagaaattgatggatgttacgtaggtgataaagaattggtgctcatgggtaagaaattagaggccaaaaaagattggaatctctaccaaaacaacaagtgagagaaattttctggttgactcagaaggcactgaggggttaatagatttggatgaacaggagagaaaatagtaacaattctgtgcagttaggagttttgatgtttgacagtaaatatggaagggaagaaaaaagaccatagtaaaataggaagtttaaaactgattctataacttcacagtgctgcattcatttattgtataacaggtattgaagtggtatgattttaacatactattcatttaaatcattactgtgtgaaatactggcattagttaatgtttactactaaatttaagactgtaggagctaggctgtgcattttgtttatgtatttaaattttgtttctaaaatgtatagatacaagtttcttccactgggatgagctttaaaaaataaaaataaaaaaacatcaataccgaagataaatgacaaatgagaaagtagtcctaagtcaatttatcttttcttttttcctccatctggtgcaagtaatttacaacacaaaaattcatcagcacatcatgagataagaagttgacttaaattgaaacactttatgcctcagtagaaatgtactgaatttataaaggagatacagtaggaagtgagtgttgtattgtacatgttcataaacaaaatattagatcagcaatcatgtataaaggactattattgaggattttggatgccgtcatttattatagccataaactttacaaatgacaaaactttatcatatatttcttcctgtttctcttctaaatataaggatgataagaatttcttttaaaatcagctgtagagtacaagtttctctcccttattttctacaggcccatttagccacacagtcttgactgcctttttaccaactgcagtgctatagcttcctgattgccactataaaagctcttcttaacttactgttttaagatgaaaataagatatgcttctttaaaaaaaaaaaaacagcctggaagaatctgagtaaaaggtagaaatttccttcattccaacatgttcccataccatgaccaacacacctacacaactgcacacacacacacacacataatgtataggaaaaaatctggaataatgaaacaccccagactgttaactgtgtttgtatgtatgtctaagtatccacacacatt

SEQ ID NO: 96721 - DNA, 1096 bp, Homo sapiens
aaagttgtaatgtgaaaggtgtgatgtacatggcaccattcataaagtatgctacccacaaaggcttgacctgaaagcttttagctataaccttctgcttaaagaaatagtgtatttagaggaataagtaaatgacatgagaaaaccatcagataaattcaggatgtggaacaacttaaaagtgtattgctgcagtttcctcagttcatcaaaaacatgaaaatgaaggaatgggtgcccctttctaaattgagggacttaaatcagttgtactcaaatgcaatcaggaaaccttatttcagcttgacgagtacaagccaactgaagaaacacatttccaagacatctgaaaaatttgaatttgaacacactatatggcattatggaataattatggttttatgaagtccttattttatagagatacaaatggaagtatttagagttgaaatgatccgacgtgagagatttgttttgaacttctacaacaaaggaaaaagataatggaaaaaagtatgcataaagtagaacttttatatatgtttaaaacttcaattacaaaaaaattaaatacaaatgctttaaacaaaagttttgaaatatcaaggcaaaaatggtgtgctggagtgacatggtaaagccagcaaaattttgaccatattctgaaggtcagccctgacataaatgatatgaagaaaccaactatgaaatggatgcatgagtttcccagccagtggatattacttaatttgtagtttccacatatttgggattttattaaatgaatttttatcgaacaaattacctatattatacagaagatcagcctttcaagtttagaacgatagatgtctcaatatgtttatcgtgggccaccaccaaataagaatattagattttgccctagcaaacataacatctaaatattccaaagccacttatgcatgatatatgaacagattcccaaaagcacattatatgaaaatcaagaatccagttttagcctttaatattttatgtttgatataaacatgccaaatatttaaactttctcatgcttttagtgatatgtgaagaaatgtgctactatctaaaa

SEQ ID NO: 96722 - DNA, 1877 bp, Homo sapiens
atggatgctacttagatgttacttcctttaggaagattttcctaagctccattcccccagacacacacacacacgcacacacacaccccttaccttctctcataactgcatagggcctggcatgtaatagggcccagagggagacagggagggaggaaaggaggtagacatttaaatccttaggattgtatgttaaactcagaatgtgataagaacttaattatctttgaagtgagagtgaagtagcatttctgaaagaaagtttgttaataatataagggttaaatgcaaggaaggaatggcttgtattgaagtccatcagaaaatgggaaaatacattttgaagatattagagaaagaaggacatacgggaatcgaattgggaaaaggaagcatgatctacaccacctaagtttacggcataaaaaacagaagtttgaatggggtttgtttttttcaagttcaggatggcaaatggtactgttaaattaaagcagataatggaagagatgagtttggctggaagaaacaatggttaggttagacttgcctatattcctttaaaaaaggctaaaggaataaaataagcaggtgaacaagaaaattttcattgcttgcaattctaaaactttgtatagagttcctttgactgtaagtgacatgaaatataacataaaatgtgctctaccttcagaggcttcatcaccaagctcaataatatgaacgttgtgtaagttttcatttttaattgtttggaagatggaggacccttcttgaaatacttggtctccattctcagtcttttaatcccttggaggaaggtgtctgagaggtcagttttccaagaggaacaggatcagttttcagattttgatttaatattgagacttacaatcacaacaaacaacattcatgaaattcagcaaaatatattaatgaagtataagtatatggaacacattcatatagttaagagtcagatgtgctgtgtaagctgaaaataatagccttgtattagcatatagattctaagatgctgttgacaaacatctgaaccttttttagcaagtttttatgtaatgttattatatttagctgattaaacttttcttgttacagacgtgccaaatactggtgtaagcaaacctagagtttctgacgctgtccagcccaacaactatctcatcaggacagagccagaacaaggaaccctctattcaccagaacagacatctctccatgaaagtgagggtctgttgtgttatcttttaagtactggatttgcttttaagattttattcttgaaagcgagtgtcagaagtgtgtataataaagatatttcttggtttcattcttacaggatcattgggtaactcaagaagttcaacacaaatgaattcttattccgacagtggataccaggaagcagggagtttccacaacagccagaacgtgagcaaggcagacaacagacagcagcattcattcataggatcaactaacaaccatgtggtgaggaattcaagagctgaaggacaaacactggttcaggtaagccaaacgcatcaagatctctgcaaagaaataccttccggccgggcacagtggctcatgcctgtaatcccagcattttgggaggccgaggcgggtggatcacctgaggtcaggagttcaagaccagcctgcctaacatggcgaaaccccgtctctactaaaaatacaaaaattagccgggcgtggtggcgggcgcctgtaatctcagcaactcgggaggctgaggcaggagaatcacttgagcccaggaggcagagcttgcagtgagccgagatcgcaccactgcactccagcctgggcgacagagcgagactccgtctcaa

SEQ ID NO: 96723 - DNA, 1066 bp, Homo sapiens
tgttattaaccaggtcctttgaaaacaatttgtgacatttaggagaagacagtctttataagaaattctatctaataagcaaaaagtgtttggcaaatcatagacgtttcctccttctgattttatttggccctgtagacagcatttttattaagataatatgagtcatttaatacttgattgattttgaaaaactgaccttgtccttaaagccatttaaaatattcaggaaataaagatattttgaaactaaaagaattttcatttctgaaagagtgaaattgttgctaaattttaagcgctttagtgttattttaaggcatgtatgcaagatttcattcactcttcgcccacaaatagttgcttcactggaaaattgttataattatcaattcatttttagcagcctaccaacttgttttaatgaatgtgaattaaaatgatgagtgaggttttggtcattaaaacaaaatgactaaagataccttaaagttgagtgggaaatccactgcttcactaaaaccgcttcacttattcacttctattcctgaaattctttaagctatataaatgcatttggttctgctactcctggtttgccacctttttgtcatttttaaggagtttcaaaaataacttgtctaataacacctacagcttgtcagagatactcttactgattttgttttttcaaatcctcaaaatgacaaagacctaaggcacccaaatagatgcagaaattcccaaaagagttttgaattgtaggtaatttagaccatcccttggctggacctgaagagaaaataatagctacctagaaaggcagtgaaatgtgatgagaactttgagtttaatatgtgtccctgaagacttcagttttgacctctaatgtgagttgattctctataaacaaggacttcatgtatgataatatacctcagctattcatagtgtgataatttcatagtctaatgcataaaactgatggctgtctttgattatgtgaaactttactgataatgcatttcgtaaggtgaataagtgattatttggtaggtgcatttat

SEQ ID NO: 96724 - DNA, 1033 bp, Homo sapiens
taattcactacaagttttattcacttgtaagcctttattattaatgctacattacagttggcctgaaaaattctctttaagactgaggaagttattgatctttactgtataaaaggaaatctgtgagtttttttatagttgtctacttggaaaccatatttattaataacatcaatgatgcttctgaaaggagtaacgtaaaagacttcctgtgtattcacgtttccatctcaactcatttccctttggcctaaagaacttcctttagcctttcttgtcttgcatttctgcttgtaacaaattctctcagctttagtttatctgaaaatatttcacttgtttttttaaaggattttttttttgctagatatataattcaggatttacaggtgtgcatttttttctttctgtattttaaaagatgtcattcattgtcttcagatctccgttgtttctgttgataaggcagacatcatgtgcattcttctcattatgtaatgtgtcttttctttggctgcttttcagatttttctctagctttcagctgttttattctggtgagcctaagtataattttctttgcatttaacctgcttagggttcactgagattcttggaatgtaggttgatgtttttgtcaaaattgggaaattttcagccattaattctttaagtttttttttctgccccaaactctcttttctccttctaggacttgaattaaacacataggatcactttattattttgcagattactgaatctgtcttcattttttaaatcttttttccctgtattcttgtaatcagaaatttttattaatgccttcaaatttagtgttctttgtcctatagactacaatctattgtgaagcccttgcaaatttgtttttatttccaatccttgaatttggttccttttatatattccatgttcctatgagattctccatctcttcactccttatatacatctttttctttaagtctttgacacatttatcataaccatttaaaatatttcctctgataag

SEQ ID NO: 96725 - DNA, 1060 bp, Homo sapiens
gggtgctgagttttgttgtggcagagaactaaattactggcagatcctttcaatcccatcaagattggttttgttcattgttaggtctagttcatatttcttttaagccttagaacatgatccttacccctaaaacttggcctttgtggagtcttgactaaattcccaaggtgttcagtgaggtctgcactctgactaggctgggagtccacatcacgtggtacctgttcagccttgagccgtgcagcagccactttccaccagacctgtgcatgtgccctacagctcagggtacaactaaggacttcggatagtccacacgcaaacccggagaatcacctctgcttagctcccttgtctccagtactctgccttgcacattctaaccactttggcacccacaaattccactcgctccctgcctcagctcactaaatccctcacatactacttggcctcagcttcctgtgtcttggtccagaaagtgccctcaggcagaaagccaagtaaacatgggactcgtggatgtttccctcctctcaaggattatattcttgtgttgcctgttttcgagggtctaaaaacagttttctcctacatttagctaaattcacttttataattgtttatggtgggagggcgaaatccagtacgagttactctatcatggctggaaacagaagtctgggcttaggttatactgaagcaaatcctggcaggcattgatgccatccagccagcctacaaattgatagcagtttttcgagggtaaatttctactgaattttcatcgaggttggagttgaagccaagcaagcctaattgcccagctctggcaggagcccaccctcggggctgtctggccctcatggcaccggggatgtcaggaaatcttgaccctcagtgtcccatttaaagaggacaaaaatgtgtatttgtaatgattgtgagtcatcaaagaaagagtaaatcacactccttgcactctgttaattacaacagagatttacataataggctttagacagattttctgagaaacgattgataacagtttcaa

SEQ ID NO: 96726 - DNA, 1983 bp, Homo sapiens
actaaaaacacaaaaattagctggacatggtggtgcatggcctgtaatccccgctactcagaaggctgaggcgggagaatcacttgaacctgggagaaggaggttgcagtgagccgagatcaagccactgcactacagcctaggagcgagactctgtctcaaaaaaaaaaaaaattattaggttaaaaattatagtattcattgaactagtgagccaatgtgttttatgggattctagtcagattggtgccaactataaataagttatagaggattataaccatcactaaggctgaacatacatgaatattttatttcagggtttttttggtatttatagaaacatagcaagttactggttattggctataattctatataacatatagattctttctttaacgtttcaagccttcttctgacccactgtgttatataaaactgaagtgtttttcatcattttaatgtgcataacagtataccagttccagacctaaaagtgaatgtagtacataaagcccagaaatactcaaataatgtactaatgaattgacaaatggaagaaaatttaaggagagtagcctagagaactcattctagaaactaaataacttaagtcaaaaattatttcctatattgcctcaagccctgcagatagctttgctatgtttgtgtatttgcacattgcactgctggagtgaaagcacaattcttgatgtgtgttctgaggcttggaggaggactgtgctgcctgccgatggacattaaaccacttaaatctcctatctttttttgaagccatgaacccaggaaaagtatcatctacaagagtgtccttagaattctgtttttttggtggggggtggggggcacagagtctcactctgttgcccaggctggagtgcagtggtgcaatcttggctcactgcaacctccacctcccaggttccagcgattcttgtgcctcagccttccaagtagttgggattacaggcgtgtgcctcaacacccagctaagttttctctatttttagtagagacggggtttcatcatgttggccaggctggtcttgaactcctgacctcaagtgatccgcccatcttggcctcccaatgtgctgagattacaggcatgagccaccgcacctggcctctccttagaatgtataaaagttgtcttatttggaataaaaagtaacctttgaaatggtctagagatatccacatcctgtgatctctccataacggacttctgtatgatcactgattaattgcatgttacttaggcctggtacctaatatttttcattctaggtgtgtaggttagggggaatcaagcatctggttgaccttctggaccacagagttttggaagttcagaagaatgcttgtggtgcccttcgaaacctcgtttttggcaagtctacagatgaaaataaaatagcaatgaagaatgttggtgggatacctgccttgttgcgactgttgagaaaatctattgatgcagaagtaagggagcttgttacaggtaggtatagaatgtgatctcgtcctagaggaaatgttgaaaacagtctggactgtgcccttgtatagtggcactatggaagagttggaggttccaggtaatagataatgagatatatatagtgctcacaactgtgaaggctgagaattatttagtctaatgagtcagaaaccgtttagaatgcagtcatctctattagtataagttattgtacttattaatttgtaaatatcagctaacagatgtctttttcatggaggactaaatatgacattttttacatgtatttcatagtaaatctagttgtattaaatagactatcctatattatgaaaataaaatatacttaatggattggcagtcttttacgttagctcagctggtgtctgagtgcctgtttgtattcccacgtactttactaggccccagggatagaaagatgaataaaactcagt

SEQ ID NO: 96727 - DNA, 1037 bp, Homo sapiens
aaattttagctgttttttataaagatgccttgcctttgctttaaacacaataactgcccagggcctatatttttggccacatctttattttcagagggaaaaaaggacttttcttcaaatgtattttcccaagacaatatggctgtcattgttaattaaaatggttctctagtatgtaacatgattcttgtgttttcctcattgtgttgaacattttccagttgaaacctaatgagcttttcttttagtaagtgctgatatatgtgagtgcttagggtaatttttcttttattccaaaagtattttttgctgttgttgtacttaaacttgaaagctggatgaagtatggttgttccccagtttggttataaaatgaatgtctgctaggccacaaagtatggaggacagatgggaacatcttgtcactaaaaaagatatgttgaactcatttgttcaaaataattaaatagtgtttctaagctaggaaacatgagtttcaagttattgagcctcctgaaaacatcattttttaaaactatagacattgaagatattgcacaaatctggaggcctgctttttaatgtacgtaccagatgtccccaactgtcacacttctattaccctcttaaataccaaaaagtagcctttgttcttcggtaataatagactttgttcatatgactgctacatgtacatttcttccaatttagtaagtgattattcatccatatagctaagtaaaatatttccactgtttattgtgaaatgtttggatgccagcaatggattccagacactgcagaacatgaaatgaagtgtattgttttcctgatcattagctccatatttttaattcgatgataaattaataagaaaataatagttgtaactaaggaagggtagatgggccaggctaaggtttaacaaagggcagaacagtctggcaagaattagtcttatatactataaaaagcaggagcttagtggacatgccttttggacgattacttgccgttacaggatgaaaacagtttac

SEQ ID NO: 96728 - DNA, 1066 bp, Homo sapiens
gaaggcaaatcactcgaggtcaggagttcaagaccagccaggccaacatggtgaaaccccatctctactaaaaatacaaaaattagccaggtgtggtggcacatgcctgtaatccagctactagagagtctgaggcaggaaaatcgcttgagcctgaaaggcggatgttgcagcgagtcgacatcgcgccactgcactccagcctgggcgacagagactctgtctcaaaaaaataaatgaaacaatcacaacagaaacattcccttattcactgaacatttcaaaccctgaaaatgtgtaatgagaaatgacaaatttttaaaagtttaattactaagaagacaaaaaatgtctattatgaatagaccaattctcaattggtagagaactttgaactggaaagaaccctaaagaaatctcctgtctacccctgttattacagattagaaaccgaagtccaggaaggttgagcaggcaagtctccaggctgagttcctgatgtccaggctggaggtgtttcttccctgacccttcccctgcctaccctggccactgagaagggctgaacaggagctaaatctggagggtacaaatgttatttcccttgttctttaagattaccaccaaaaagggaaaagaaaaaaagccccacaataaactactctctgaattttacccaggaccatagagaaatatccctgaatttcaccactagcactataatatcaaactagtgatcaagtataatcataaagcttcagtttgcttaggaagtctatgaaacgtgattttaggtcttgcgtctatttcaagatttatagttttgagtatgaaaagattcaaccctctaagtggaatatgaccctgtattttgagtgtaggcttccgagtgccaagcacaaggaggcagtcaagtagggagtctcagaaggtcacttataagacttgggtattcaaacatcagtcagagtggaacttctcagcaaaagagaggccctgtaataacatgctccctcagttgactagacgtcctacaaatgcaagaaaggtgggaatatggagaccc

SEQ ID NO: 96729 - DNA, 1072 bp, Homo sapiens
atccagagaaaggtatttttctataactgaggatagtagttttatccctgtctcgtaattgttttcccactatttcagtttcacttagatttcgtaatttgttgacagccttcagccctgttagaaagcttgggcaattgattagcccagcagacagttttatggcactgattctccccaccacccccttgacttcctcatttctgttaacagtgccatattttcacacgtattcaaactcctggcttacctgtgacaccaccctcagtttgcatctggctccaaattctcactacaggcacttcccttcccttttggcctcctccctcctccatcctgtcctgtgaaataggctctgcccctcctagcccattggcctcaccccctccctgggataacacctgtgcctgcagttcaggttttcccacctgcctgtccaaatcagtagcttctgtgacctcctgccagccagctccagcatgtgccgtcacctcttctgcttctttcccaggctatatatagttggcctgaagagctctgcaccccaaacctgcttctttctggcctctgtccttgacactgcaactcaaatgtggtctcccatcctcctgtcaaacacaagttcacacactttgaaaaacatccaaggagaagcggcatggtctcgagtgagtgtgagctttggagccaggttgacttgtttccttccagctctgtggctccagacacatcaccactgtcaaaccccagtgtccccggcaatgacacattacctgctgcttggtgtttttgtgatgatgtgtgttgagctcctggcacacaggatattcaagccatacctgttgctcttcctgccctttgtcacaactgcctggtggtgtaactgtttgtggtaaggcccccctgagaacagatggctcccctgtgtgtctccctcggagtctggcatgaagcaagcaagcatctctgccagcgctgttcaataggagaataatatgagctgcatattttctacattttctagcagccatgggaaatctattttagtaatgtattttatttggcctaatag

SEQ ID NO: 96730 - DNA, 1001 bp, Homo sapiens
agaataactgtaaacatttttttttggaagttgcagaaatgaaagcctgaatttctatagtaggctagtgttatgatcaataagtcattttagttgactaaaagatagcatagtcaacttgtctactgaagggtaacatattttttaacaactttatattttataatttggcagcactgttcctttctattttgcactttgagggatggggattctggcatgttggtgtgacttttccgattctgggagatagaatggcaactggattctcctatccccgtaactaagatggtggtttcagcaaccatctgttttggtctcaatgtgaaaggcaggcaaaactatgctgacaaattttgttagagatcctctcccccagttgcaaacttaaaggacactcctgaatactcagttttacaaaaaggcacaaaggggaggtaataataataatacttataagccaagtctgataggtaggaaataaaagagaaatctaaaaacaaatacaggatataaaaatagatccatcacaaatatttttgaccacctactatgtgtcctgcatatgtgtcacacaacatatatataaaaggatggataatgatagggtatttcttcctcattatataatacttgcctaatgaaattaaaatttaatttcagcatataaatgttcatctttttttaaaaaaaaatcaacatgtagaatttcaaacctataaaaatatttaaaagggaaagttaattaattttgtacaacttggctttttaaggtattatatgtaaagcacacaatgcctggcacagagtaaagccacagtaaatggtgatgctaccattgtttacattgatttatgaatgtttatgctatgtccaatcccaagtatatatactggctaatactaagctgtagaatgacatacaactccatcagtcattctgaatgcctgggaagaaaaagacagagcaggacaaaattctaccaccagcatgaaaatcag

SEQ ID NO: 96731 - DNA, 1048 bp, Homo sapiens
atccacagtcaccttgcctaatagatacagagggtgtataatattcaccctctaaaatccaagagggtgaatattaagaatttgtaatatgttgtcggaggctcataccttcactcaaaactcattagaggtctattcccaccctggttgcaaatataggccatagattaggtttggaacagactgacttcatattaattagagctaatacgtttattttatttctaaagccacaggatctctatttgtttgattttttaaatctccttttttaggagttctttggaatttatcctcatgtgatgctgtaaaaatgacaatcattcgagatgctctctcaaccttaacaaacactgtgattgttccacattctggatggaataactcttcttttgatgatgatcataaaattaaatttcagacttcactagttctgcgtaacacgacaggttgcctaaggtaaattctttatttcttctttccagttaattctgtgattaaatatgtgtcataggtaaattgattttaggaggacttactttattaacatctatctaagtttccagtttttatttcaaaatttaggccactggactttgttattctgggagaaaaacatcgtgagcacagacttgtggccttaaagaagttatcttgtaaatgactcttctgtgacttactcagaaaggccctttcagtctaagattactgccaaaattccagtgttttccactttaacagcatttttctggtaatcgcattctgattgctaatgtgtttgcagcctgctgtttgtttaaattcaaaatgtgatggttaaaaccattttgcttttaaagaggtgtgtgatttaaacaatcagtttcaagttgtataaataagtgaaaatgagcccaaatacttttttagtcattatcttttacagttaaaatctatatataaagcctctttcgagtgtgcacagtagagttcattatttgcccttaacactcatcagctccattttgaccctatttcccagccttacagtaccctgggaactggaagc

SEQ ID NO: 96732 - DNA, 1109 bp, Homo sapiens
tgtgatgcagtcttttagggaacaaaagaccatgtacagaaggcaaatgtcagcagggaaagacaccgctgaacatggctcaaaaggagggtggagttgggagattgagaaggaggcagacatgggacttggggatatagttgtccccagggagggagttggggcatctgttgtcacgccaaggatctgcagtagtgagaagtgaggctcaagcatcatgggtgcagtctgcacggcagcagccctgaagagaaacactgggccggagcctcaagcatttcggtcggcatgaagtcaaatcctcagcaggactgagaagggctctgcatcctgtcatctgggtattccacaaacactctagaatcataattctctcttcagattgtttcaagttctcataaataaaaagtagttctttcatatttcccatttatttcctgtctgtagtgttcagtacagaagtgttttgctctaatgtgccgagttgtttttaattatacgccatgctgggtttcagacggtggagaactgcgtgtgcaccctgaggaacctgtcctatcggctggagctggaggtgccccaggcccggttactgggactgaacgaattggatgacttactaggaaaagagtctcccagcaaagactctgagccaagttgctgggggaagaagaagaaaaagaaaaagaggactccgcaagaagatcaagttagcattttattttatatgagactctcaagtttaatttttctgggagtgaggaatcacatatttggcaagaaaataaattttctgcatagctatagctgagtcccgcaaaggtgaatgttttcaagtattggagatcatgttcattctgcctccatttaacgtgtgctgtttgtctttcagtgggatggagttggtcctatcccaggactgtcgaagtcccccaaaggggttgagatgctgtggcacccatcggtggtaaaaccatatctgactcttctagcagaaagttccaacccagccaccttggaaggctctgcagggtctctccagaacctctctgctggcaactggaaggtaggatgacttccacttatctacacttctttccatctttgca

SEQ ID NO: 96733 - DNA, 1063 bp, Homo sapiens
ttaagagattgcatgccaccagaatctgaacaacaataacaaaaacctagtaccttctggaagtagaatttactcttttgccgttggcaggcaaatacgccatgcgagacctggtcaaccggctccccggcggcaatggccccagtgtcttgtctgatgagaccatggcagccatctgctgtgctctgcacgaggtcaccagcaaaaacatggagaacgcaaaagccctggccgactcaggaggcatagagaagctggtgaacataaccaaaggcaggggcgacaggcaagtctgcggcaaggaggtgcaagcagtgctcttattcctgagattgtcctgtgatgaggcctttgttgaggatacctttcctattggaaaggatttatttttgcatttcttacatgccgataagctaagcagtctccagcacttacaacctgctatgctgggagaagtgttttctgttatggggcctatttttggttttcactttattgtaacaccctcactcctacattggtatttgtctctgtcttagtctgtttgttctgctgtaacaaaatgttgtgaactgggtggcttataaacaacagaaatttatttctcacagttctagaggccgggaaatccaagatcagggcaccaacagatttggtgtctggtgagggccccgattctggttcatagatggtgcctttcagctgtccttgcacggtagaaggagggagaggtctcaggcctgtttttataagggtgctaatgccattcatgagggctctaccctcatgatctaatcacctctcaaaggctccacctcctaataccatcaccttgggggttggaatttcaacatatgaactttggaagggacacagaccttcagaccatagcagtccctaaagccacaactggtcatgccaactcctggaagaattggaaatgccaggatgagaaaaatctagggggcaccatttcccttgtgcccttgtctctctgctccaggcctgagtgcctgttctgcaggaacgtcttcttgaatccccagttctggaattgagtttt

SEQ ID NO: 96734 - DNA, 1039 bp, Homo sapiens
tattacacctgtgtcgacattggagcgagaccgattcaaatcacatccttccttgtctaccaccaaccaacagatgtcacccatcattcagtcaggtcagtgggaaaatgccactccttggcgagaacctttgtgtgacagaacattgttccccagccagagaagatcaaacataagctggttaagcctgtcatctccaacactacccatgcagcagagaaccttctgtaggaatcacacaccattataaaccacaagcccactttcttcctttttaaaagtgtatacaattttacatcagcaacagcgccccaggccctgccctcaagtctgcctcactaagtgtgagaaggggccctgaaacctgcagttgacagactggacaggggatcggggtgcctgagagtggagggccacacttcgagacgcactgggttatgcctgaaagtggctgccctgtatgccagctggccataaggttggaatctcctccaaagtgaatttttttaagttttcttagtgaaaccttttagaagcagggtcctttaccagaggacctttaaggtcttcagatccgcaacctgggagagctgcctgctttccagttaaacctccttcctctgcagacccccagcatctgctgctaatggaagcaggccttacagtgtgggtctgtaggaattccttttgatttttaagttgggaatcctggcaaccatactacctacttctttgtaatgtttaacttgatggaaagaatgttttgagattcagacttaatttttttacatgtaagggcagattattactgccaagccaatcagtcctataaatctaattctttccaaaatgagaaaggaaaaataataagtatcttatttttatttggctttaagtcacccatttggacttttaaatattatctattttattcagcagtgctactgctggcagtcttatttctcatgtggacaaatgtggccaaaaagacgaatatacatggccagtggttcttgccacataattggatgtccccact

SEQ ID NO: 96735 - DNA, 1422 bp, Homo sapiens
tccctttgctccgtcccctcctggctcgagcagtctctgtgttttccacatgcatcagaaccgtcagcccagtgtcactttgcaggggccacatcttctagactggctcatctcttaaattcaaaccagagaatggagatcaatttcatttacattttcatggagaagagtttgaataaatagcaaaaggtataatgtgattcttctcaacgtgattattttttaagaataacaaaaataatgttacatagtgttaatatttttatatcctattcagaaagctgtgcatacaatttatttaaaggataccagcccaaagggttactaagatttcatactgttcccattctcaaccgtctggcgattataactactttagatgttccaaataagtcagtgtgagctaccccacaaaaagtactcttttctcaaacctgtctattaaaaataaataaaagctggtggcagctttactcctgctgggggggcagtctccattgtactgttgtctttgaaattgtgatttcacaggactatttactaatcgactgttgttactatggcaattaatagctcagaaaattgcagatgctacatttcaacaccaagctctgggcaaaaggaaatgcacataccaactgaagtgcatggttgcttccgatttgcagcagcctgctttatcttacagatcacctctttagcatgcatgcccttctgtatcttcttcgcttgcttcaataaactaatttgcctcaactacgtttcattttcctcattaaaaaaataaaaatctttgctagccttaataataatggaagggtaacatcatcaggagtctactatggacttttgaagacaattatctcattattaccaagttccttttgtattaaaacatacttaaatatgccaggtacaagactgtgcctccattgttgctccttccttgacctgagattttgaatcccagttgtttgtttggaaggcatggggcttgttcgaatattgtgtttcgcttctcctctctgacccactgccgtagctcagagccctggaaaaggagtgttcctcagctcaggatcccgtgctgctgtccaaagccagctggagaaaccctcccacatgtgagcagagcttgagcaggaacctttgcgcatgggctctgcactggcattgctttttggggaaacacacacagcctgtttctgccatagttttgccattagcccccaccagccctgaggtaagcagcagccaggccagatccagggaccctgagctgctacctctcccagcccgcattggcactggggaagacaggccctgtcggggacagtgctagccctagtgcaggggagaccacccagcctaatggaccagagtaataagcactagttttaatttcataaaatattttcttac

SEQ ID NO: 96736 - DNA, 2533 bp, Homo sapiens
tggacctcactgtgggagagtgggactggcggttataacacacccaggctttgctttcatgaagggcctgcagtcagtctcaggtccttaccagtgccatggcgaacttggaccatctggtctctcctcttccctttcaatgacacagagcagctggagtttcctaaaacaagactgtatcctgtccttcagataaggatgtgttctaagacctctccttctcgtcatcttttctctgtaggtggaagaaaaagaactttccaagttattcataatttatgctatggttttttagtcaggaaaaatagaccagaatcataactctggcttgaaaggagaatttagctctgaaatccttataatgttagaatgcattgagttccaggacatgacattggtttctatgtggtaaatttgttacatcttactaagtagggggatttgggcataatcaagaacatagacataataaccatcacaatttgaagaaattagtgtgaggtcaaagctaagactgaacaaaaggaaatggagagcagtgtgccctgtgtgggtgcccacgtgtgcctggtcttgcccacttacagatggacttagccctggcttggggaagccttttcctctagaaccatatttgctcacgtgtgtctcctaattttactattcttctgccttgagattgcttattcctttaatattacaacttacagcagagtttccaaagtgtgactgttgttcacctagccacatacatcttttaaaatgtaggggtggactccatcttcatatctgaagtaaatgttctaaaagatggttcggtaattatacaattatccaaggcccagaaacccagtccttgactaaattagtgatgtgctaataattcccctgtgtcaaaccaaatatcaagaccatcctctcattcggcatgcccaggtaacaggtgcctccacagctgagcacacagcagggcctccagtaaagaggggaggtttctggggccacctgccctgagatctcaggctttcttgaggcacctgcttctctagaggtcttaggacaggaaactcagcagcctgcctgagaatgcagcttaaaatccttagagtccaatagtaaacgcatagtgtgcaccagaaacagcttttaaccttaaactgcaaatattgaatattgctttaaaaatatgaagcaggaagcccacattaattttcctaacacatgtatttttaaaaaattgcttttatttatttgccttttcattttgtcaacagcatcaacagctgtattatagtcaagatgactccaacagaaagaactttgatgcatacagattgtatttgcagtctcctcatagctatgaagatccttattttgatgaccgagttcactttccagcttctactgattactcaacacagtatggactgaaatcgaccacaaattatgtagacttttattccactaaacgaccttcttatagagcagaacagtacccagggtccccagactcatgggtgtagcatcaagatgcccaacagaggaactctttctttctaaccttgttcagattgaggtgaaaagtccatcttgctgatttgatgattgaaatgtgaaagtgaagtggaaggaatgaatgaagtgtgttttttttttcttttttgaggaattatcagggaagtgaggaaatgtttgggagaggactttctaagctctatttaggtgttagatctaattacttatagattctgtagtctggtgaaggtgtgggtgacgtgatgagaggtttgagaaatgggtgaaatgaaatgggggatatgtaggtcaaatcaaattaaagatgatttttttaatgtgaataaagttatgttctgatagtttgtacagaaaaaataaaatggatgcccatgttttattgctattactaaatgtcaagattgtatgctattatgtcttgtaaatttcttttgttggtgtaaatatggaaatgccacattggttaagtgccatcatttgtaatgcaatgtgtcacttgaaaagagatttgaagaaactgacaacttcaaaaacaaatgagaagcccaaggaactgtgagcaattaaaagcaaaccgcgacaccctttgtctccaccacacatagtgtactttggaagcacaacgtccaggctggtaccgcagcgccatgcccattcctcgcctcattcataggacacttcactgccattttctattcacataaaagaaaaataaatgtggaaatttcatccttggaaatgtgttctctattctttttaaattttctgtatgtatatggaaaagcagatttaataaacacaaatctaactgcatgttggaaacagcttaaatatatccaactattttggacttttcctagttttatatatactttgtgagatggaccacaccaaagaattaagctatgaactttccttctctgacaatctaggtatttttatttcttggaatctatttcaaatctagtacccttcacagttttatcatgtttttcta

SEQ ID NO: 96737 - DNA, 1036 bp, Homo sapiens
ctggtgggacttctgccctcagtgtgtgttagccctgaggcactggtgacagccccttcttatctactcccgtgaaagagtcctatttcacatattgagattcagtttggtccagaagtttggatgtgctggggtttctgaaggcccagacataccttagggctgagaccagaactgcagaggaatacacccaggggtcacgtggattagaacactatcagctttctcactcctgaggtggatttgggaactatagcttgaaccagaacaaaaatcagtcttctatagatacctgggttaactgaactcacccaaccaaaacttgaggcctccgtgcagtgcagcaccagccaggatagtctgccctgcgagggaggccagatgctccggccctttgctgggcagctgggctccttgagcttactttgtttctcctagtctcatgagatgatccctcctttgcccctgaagaagagtgaggagtgaacagtgaagacaaagatacaaggtttcattccacatcttccagaatgtctgtgcttccctttttatagacttgcagggctatgagtgagtccttattggagatggtctttggtggtagggcccttccctccctttgaggcaacagccctttcccagctgaactgcctggcctcctgcccctgctcctgcccagcagagttgctccttgaggctaagcgaggttggaggggtggggaggtgcagtgggattggcccgtacaggggagggcctctcttctgggttcttttgattccatgaagtgtttagtcacaggtctggactcggagcatattttgtgaacaggccatttgatagttttcttttcgaaggcatcaactttgatttgcgccaacatgctattttcctagtaatctttgctaaggcaacgttaaaatggatttgtattatttgagcctaatttggctgggaagctggtaggaagctggagggggattcctggctgggagagggtttgtcacaagggttgactttagcataaacatcaaggct

SEQ ID NO: 96738 - DNA, 1878 bp, Homo sapiens
accgggaacgcttggggcacgctcgagttctgggaccacccccgcccggcgcgcccgctcgccccctttcccgccttctctgtagccctcgggcttggcaagggcctgggctacgcctggtacctggcgcgggggaggcggggggaggcgcgcctggcaccgcggggtcctgggcgccccccggagtgttggggtgcgcgggtcgcgaagttgccgagagaacttaagccggaggcatggtattgccccagtctgggctgaaagtctattgctttgcttccaagaacactgcgattagcatatccacactcctttattgggggtgggggtgagttaggattagacgttgggggtttttctttaggggtggggcgctgagaagagcggtaattgtcaagattgtgagcccccttgttcttggatgcagagtggtcattttcgggggacgatatcagggcactggcttcctggaggactttggggtgcgggcgcgcagcgctgtgggtgtgcggggctcccggctttggcgcggcggctttccggaacgcctggctgggaaggaagctctaggcattgtgtggtgtgtttgcagacagaaaggtccctggaccggtgttctcaaaacttactggacttattgtgtaaagctccgggaggaaatgtggcgttggccaggtagaaacgcggcgctgcggccaaggggcggaggacgccaggctcggcaacggccttctcccagccccctcctgccagctccagatccgcgtgcctccagtgttgggaccgttctcagtggcgttgttccctgctggagttaacttgggaggtgaggagggaactttcatcttgaacttgaccccagaagcagcgtcgtccgtacaggttacaaggtaaatggaagctgagtcttaacgtgggttggaccgcaaactctggctggcgcggaaaggaagttcctggttcagaatctttgaggaaagggctcaagattgctgagatcgctcgctctggaaatgccagacacaccagactgcagaagttaatgcgtgtttggaggggtgggggtgggagaggaaaggagaaacctggttagttggcacagagggctggtatttctctgtagtggaaatgaagggagtctgcgtctctgctttcaccagatccgctaccctcttttttccttccttggtcatctttattcctgccaggctggcactcctgaggcaggggaggggaaggagaggaaagcagttgtgaagcttcctgggtcagcctggaggtatttcagatctgctactaggaagattccaggattttaacagctgcttcttgattgctgggaatgaaggagtttatgagcggctgagactacttcattatagaagtagtctgagtgttttactcatctaagctacttaaagacctcacaagggaccttccctagagtatgccagtttctgcagtttgtgtcagccagaatgcttggtgagtgttagtcaaaaagcatcataaatatatcctggtggttctgaaatgaaaagtatgtggcagtaaaggaagtatggtatctgatatccttcaggacttcctcctagggttgttcctgttacctgccaagtgaacttggttcaggcttccggactgttgtgatttgacaataagagatgggaaatagtgtcatcgattttagtggaagcaggaaaagtccacaaataaatttaaggtgagtttttatgaccctgtcttgcacatgtggtgccccaaacttaactttttggcaccaagccttttggtttgaagtgttgctggaacttggaagcaatggttttcctgctttcttggtttaaccaccagaatgcccaaattattataatttat

SEQ ID NO: 96739 - DNA, 1312 bp, Homo sapiens
tataatgactcctgccagcatagctggaggttaactttatgtcgttgtttccattagacatttctaacctaattgtaaagattttgtctcagttgggttgagagtagggttgagagtctcatagaaaaagaaatggctttatttttatctttatgataaaataaagtttgtgttacaggaatacatttacagaagcaaaataaagaagagtgtttatatatttgtggggaggatttgttttagtgtttaaaatagtttggttttcaactgtctcttaaatgcatatttcagtggtggaaaaaccagaacctctccctgccccctttctccccacgttatgaaagtgttcactgtacaaagaactcttaagcctttctgggtcttggttttctcatttttttcatccctaaaatgggattaccttgcatccctaaagttctgtgactctccaaaagtttgagaaatgtaggaattctgaagccagtgctgtaatgttagaacactgctatggggtttataagggcttgatttacacattttatccctaaccctttatttgaataaaccaaggcctagaaagttaaattagacctgtatcatctataaatagttgagttgaacttgaaccagagtcttctgattctccctagtctcttctcctctgtttattcaaacctgccaaacagactaaagttaatatgtggcaatttctcacaatacatttttagggttatatatgagttattttgatttcagaaccccagggttaacatctatgctttgatgtcagggattaaaaacagttcaccaataatggtaataaaactttctcctcaagagagtttcagaaagtcacatgcttcaaactaatcatttgtttattttcaacttcttttttattaagtaggcttcagggtgtaatgtgatttataatccggactagtaacccagacagcattcttaaggaaatcacttctcaaatctgtacctctttttaaaaataaaaaatgaacatatcatttgcctttgatcttggtatctctcagcctaattgcaaagcctgggtgagtattcctttttttggtgtcatcattcttggactgttcctactgatggctggataagtctgattttgcagcactttccatgctaaatacatccttcccttatgctgttgggttgatggtaaagaggtagtaggttgcaggtgacccatttttgctgtgtctctaaatgtttgtgctttgtcctgcttgcctagttagcagcactcactgcagcttgacactcatctggaggctggtattgattt

SEQ ID NO: 96740 - DNA, 1084 bp, Homo sapiens
tatgaaaaagatcatacgtatacggctgctggtattatagctctcaagcctcacatccagaattggcctttttgatgttagttccaatttgggaaagccctggagggaacccgaattggcttgatgccagccaaaggagagttacggttagacccataaaatggggctgtggggagacaaagtatcccacaaagaagagggttattgttaatggaagagggagggagctggatcaacaaaagagctagccagggcagtgtacatttccacaagtggtactgctgatcataacaacataccaaaggatatgaagattcttaatgttgttgtgatgtacacccctgtagtcttgagggcagtggacttgtccacattctgtgggactctgaattgctatgtacacagacatgagggggtattgaattactgctaaaaacgtaagagttggtcattattcccatgtaacccattacactcccctctctctgccatgctttgttctaaattacttgggataagtaacattaattattaatgtttattgagtgccggctgactctgaactacatgtttgaattttaaaagtctgtggatgaaacagtttggttctttcttctcctgttgtcctacatacgtagaatactatggcagggatggtcaccatacaacagcattctgtgttctggtcctccttgcttcttgtggcttaacaacaactgtttatttgcttgggattcagaaatgggggccaggttccctgtgcctaggctcactggtgccgtggtggttacatgattcattgagggccattgctgcaatagtttacaacattataaccatccttgatacctatggaagattggttccaggattcccacggatactaaaatcctcaaatgcttaagtcccttattaaaaatcatgtattatttgcatatagcttatgcataccctcatatatatatattttttaattttattatttcgagacagagtctcactctgttacccaggctggagcacagtggtacaatctcagctactgcaacctttgcctcccgggttcaagtgattctcctgcctc

SEQ ID NO: 96741 - DNA, 1034 bp, Homo sapiens
aatgcctgcagatagtgagctgtctgcaactaccacaaagcaaaatcatgggcgataactccccagggtaggatctggcctgagcatccccactgggagatgggaggtgatgggctctgtagtgcttagctgaatagagttatctatgtcagtattccctctatgcaaagatagttgagagttcacaagttgtaggctttcaagttgagctatgttagatatatgctcccctgatggaagacagacatgtctccagggttttgagggtcaaatgacagaatgtatataaagtgttttgaacattataaattgcctccttagaggcaagggaacatcaaatttggttgttttcttgcatcagagacttctagctcagatttctttgttggccatttttaagggcatttccaatgagtttttaagtgtaatgagtttttaagtgttggggttcttaaatggaatatgatataatttttttcagatgaactgcagatattacttaaaatcttgctgtgaaactttcacctgtggagtaagtagaattcatgattaaggtgaatctcttttgggatccagttcagtttttccaaaggatctgtttataagcataggaccacttagctgagtgtggttgctcatgcctataattctagtactttgggaggctgaggtaggaggatctcttgagccaaggaatttcagaccagcctgggcaacataggaagtctctgtctctacaaaatttttttttaaaaattagccaggcatggtggtaccatgcctgtggtctcagctacgtgggagactgaggtgggagggtcgcttgagcctgggaggttgaggctgcagttagctgtgattacagcactgcattctagccttggcgacagagcaagtccttatctcaaaaaaaaaagaaaaaagaaaaaaaaaaacttaccgttttcataaagatgggaatctgtggggcttttatttctggtcctggaaaccctaagtaccaactgaaagactcaaaagagctttgatttcaa

SEQ ID NO: 96742 - DNA, 1002 bp, Homo sapiens
gacacaggagaaagttggcttgctcactggttggtttactcagtcacttaacaggagccaattgagcccccactctatgccaggctctgtgctaagtgctagtctaattcagccctcttgaaggccttaagagagagcaggcattctttcttcctacctcatggggtttttgcaggtgaggctctgtacctacctccaggtctcatggcaggtcgactggacccctgccacctcctgcggtgctgccctcctcacccactccttgcccactctcactatcggcttcctaataggcatttcctggggcgactgtatctgactaaaattggtcattttgtagatcctttaggggtcctggtccaaaggtcagttttaatgagtgatatggggactgtggagttgcagggtggggagagaaatgtggaccataactgacagtgttcacagggagagcacactgggggaaataagcctcactattgcagctgctgagactgcacgtctagttcattttgaatggcccctcaaagataccccctgaggatgctaaatgcagatttgtggatgctgttggcagaatttgcttgtttataatacttttttggggggtgctgggcaaggtcgctcatgcctataatttcagtactttgggatctcacctggctccaccatgatttgggaacaggcatttaagtttagcaattcaggccaggcacagtggctcacgcctgcagtcccagcactgtgggaggctgaggtgggaggattgcttgagctcaggagtttgagagcagcctggcaacgtagtgagacctcatctctactaaaagttaaaaaaaaaaatcagctgaacgtggtggctcatgcctatagtcccagccacttggaaggctgaggtgggagaatcacttgagcctgcaagatcgaggctgcactgagctatgattgtgccactgcattccagcttaggcaacagagcaagactcagtctcaaaaaaaaaa

SEQ ID NO: 96743 - DNA, 1035 bp, Homo sapiens
gataaatttcttcacggccttagtttcttcatctgtaaaatggggattttttttttttttggagacggattctcgcactgtcacaggggctggtgtgcagtgatacaatctcggttcactgcaacctccacctcccgggttcaagcgattctcctgcctcagcctcctgagtagctggggttacaggcccctgccaccacgcctggctaattttttgtatttttagtagagatggggtttcactatgttggccaggctggtcttgcactcctgacctcgtgatctgcccgcctgacctcgtgatctgcccgcctcagcctcccaaagtgctgggattacaggcgtgagccacagcacccggccaaaatggggatcattttacaaggtgagaaataatgtttgtacagtacttttagagtagctcctagcacataatagatgttcagaagttcccttcttgtttgattcagcaggaactaaattgtatcaaactgtaggcagtttgatgaataagatgtggtttctatcctggaggaacttaaaatctaatgggctaggctgacacatgaattcatcctgaggaggttaagtgccaagacccaggttgaggctggagcagagcacaggagcatttcctctgcctggagggttgggagagccttctgggaggaggttatgcctaagccctgtcttgagggattgagtaagaattcacttaagcaagcaaggtgggatgggttgtagccaaagcaacagcatgagcaatggatggagtatttaggaggactacatgcagttgggggttggctggatggaacagtgtgaagtaggaattcctaggaaatgagcctagagagcctggtgagtgtgaacttgctggtgggccttgtgtaccttgctgaagaattcagggttatgggctgagtgctgtggctcacacctgtaatcccagctctttgggaggccagggtgggcggattgcttgagctcaggagtttgagaacagcctgggcaacatggcaaaccctcgtctct

SEQ ID NO: 96744 - DNA, 2271 bp, Homo sapiens
tcccttgggtttggctaaagaggagggttgcagaaaattgagggtgcggcaagggggtgattggtggtggagtccacactgtgggaatgaagaaggggacatactcaagggacatccgagagcaaggacctcaggagggagggggtgtgcgagccggaaggataggaggctgtggtcatgaagcaagagtatggaaatacggcttctgactgaggtgtgaccctggaaatggctggccagagtcaagagccagggatcagagcttaagtgcaggcgtaatgagaacatctgccatcactgaccctgcgctggacactgccctaagtgctttggactattcattcaacccagccccacaaataggtactcttatttattgccatttacaggtgaggcagctgaggcccagagaggtgaagtaattgctcagggtcatggagttaataaatggtggagcggagcttctaacccaggttgtctcctctgctcttgttcctttaggagctgactgctgggcaggaacgtctctcaggagaaagagtggaagagaaaattgtgaactaaggccccctgcccccttttcctggtgcatgtgaagttatcaaaaacaggtaggtgatggctgaggattggggtagagtgtggtatgactgtgagtagtgactcaaagagggatgaatctttacatgaggttagaagagagatggcctgtagaacgtccagtctttccacctgcccagagccactggtgagccagcgcctccaggggagagaagccctgtcaaaagcagagataggggagttagtgtttaatgagtacagagtttcagttggggaagacaaaaaacttgtataggtggatggtgctgatggttgcagaaggacgtgcttagtgctactgaactatatacttaaaaatggttaaaacggtaaattttatgtctattttatcacaatgaaaaataaaaacgtggtggagggagggagtaataatcactaccatttatgaaaccctttcctggttcattgtcacttattaaatatttgaatgtgtgctggggattttgttaagtgctttatgtgtattttcatttaatcctcactttcagagatgaggtaaactctgctgtacagatgaggaatctcaggtttaaccagattaggcaacttgcccaaggtcatacatccagaaatggtaggggctgggctcaaccagatcctcacactccaaagcccttgcttgtaattgttagggaattgaacagtggacagaaggttccagaggctgtgggggaagggagagggggttgttgatggagggaggacctgggatagggaaatgctgggtgaaaagaggagggttggggatagaggagcagctagaccaaaggaatgagaagtcggatggacaggaccatcctccagtgtccagactgggcatgtgctgtcatggaactggcaaaaagtccaagtgacaccaacttgttctcagaaaggggctggaggttatggagaagtgggagagcccagcgtggggtgtgccagtgtgatccaaagaaagtcttgtcagcagaggattcttcccagactgggacctgcggccggaggggctggcggtatggacagtgtggacatgagttcagcctgggtgcctcttctcatcttcctcctgaatgccctttcttcctgctggcctgcccgaggggacccaggctgcccattgagcctgaagtcagcaagctgatcgtgaatttaggtgcatgaacgtagggagggggtggcagtgaggaggactgaatatctttctaatgctgacagaccaaatgccaagggtgagggtaaatcatgaccaattacctggctttgtagatgatcagcaaactgcaaatattttgccacagattttctttgtttttagcagaatggtatgaaatgcatacatgaggaaataaattttatctgactccttcacagagattttgaggttgtaacctgtaacttctaaggcgtggccagtggtatttgtgatcctctgggtgcagatgtgggtttgtctcagatatttgggtttagtgaggcgtttgtgagctgctgaggagggaaatgccctctcgagagtttctgttaccttcatgtgtttactttagattcagcaggattcttttactgtcttgctggtggttctacaatctgtgctaaaagcaggctgcctgagcagtgctttctgtgtaatagaggtgaccatggagagcgtggttctgtgattatata

SEQ ID NO: 96745 - DNA, 1034 bp, Homo sapiens
atctctacaaaaaatacaaaaattagctggacatggtggcttgcgcctatagtgcaagctactgaggctgaggtgggaggatcacctgagcccaggaggcggagattgcagtgagctgagatcacaccactgcactccaacctgggtgaaagagtaagaccttgtctcaaaaaaaagtaaaatttctgtatctattaatgctagtttttataattcattttattaaaaataaatataattttatgatataattttataattttgttatgaggattaaatgagaaagaacttagaacagtgtacagcacttagaaccatgtaagtgctatacatgtttgaaaatttgcctggtctattctgagaccactacaaaaacaaaattgaaaaagaaaaaaaaagaaaattgtccttgaatgtcatttattttttaggatatttgatggcttacttggttttaatttttaagtaaaggccaaaaaatttttttttaaactatggagatgtctttaagactagacctgaataagaaaatgtaattcaagatacaacaggaaggccaaatgaggtctgatttttagtaattagaatgttatggccgggcgcagtgacttacacctgtaatcccaacaccttgggaggccgaggcccatggattgcttgagtccaggagttcgagactggccctggctaacatggtaaaacccccgtctctactgaaaatacaaaaattagccaggagtggtggtgcacacctgtagtcccagctactccggaggctgaggcagaagatcgcttgaaactgggaggcggaggttgcagtgagccaagatggtgctgctgcactccagcctgggtgacagagtgagacttagtctcaaaaaaaaaaaaaaaaaaaagaatgtcacattacaatctgaacactacattaatacaaaatattttataaaccaaacaactagaatacaaacttttagtaggaattatccacacaggaccaagaaaagtatattaggagaaagtgttattgtttggta

SEQ ID NO: 96746 - DNA, 1219 bp, Homo sapiens
tgctggcaaaccctggggtctgcctcacattgtttgtacagtaaagaaagatttaatactgacacgtggctctagtttacagattctaatctgccaaatcctatttcaaggatgtggacggacaggagactacattcagaactatgtgcttatagaaatgaatgaaaggcttttttttttttttttaatgaaagcctttaaaattttttctctgaatgaccttagacagatcactcattcacactggatcttaatttcttatctaaaaatgaaggaaaggtttattggaataatctcctaaagaccattctgcttttgaatctgtccattttggtttttttctttcttttggtttttgttttgagacagggtcttgctttgtcgcccaagctggggttgaatgagtccgttgtgaagagctgaggatggaaggtgatgttatttaatactatccccatgagtgttctggggctttacatacaatagttgctttaatcctgcattattcattcactctataaatcacacctatgagtttaggatatcaccatccccattttacagatgagagtgagtaacagggacaagttcatttaagtactactagttagtgcttgaggtggaatacattgaccaatggctgtaataatgatatcagtgagtcattgtaaggtttacatgaaatgaaaaaagtcattgttttgggtattagaattgttctggtttttctctttctttctgttttctcacagattacttggaagtaaaacaacaacaacaacaaaaaaaaaccttttttaaagatagtaagatctcaaatctactcctcaaagaggaaacactcagtgtttggattctttggatctgatgggggcaggcaataaatggtaggtcagttttccctgtctgaattctgaaccagttctgagagacaaggagaaagaaaacatgtggaattcaaattacaccttaaatttttttttttttttttttttttgccaagacaaggtctcactctgttgcccaagctggagtacagtagcaggatcatagctcactgcatcctcaaggtcctggcctcaagccatcttccctccttagcctcctgagtaattgggaccacaggtgcacaccaccatgcctggtcaaattgcacctttttaagatgatagaactaatatcagagactttgacttacatttttaaaaaaatgattttt

SEQ ID NO: 96747 - DNA, 2042 bp, Homo sapiens
gtgtttcctaaagccagcatcattcagaataaattattttcttttacttgagataccagcttttctaaaagtgaaattggattaaaaacaaacaacaacaaaaaaccctaaccttgttgctgaggccagtgctgctgctgtttctattttagtagaagtcaaagtaaaatattctggcatgtattattcactccgtgctctaagaaagtccctgtacatgattgtgccgatagcaatgtctttcagaacccaaattcaaacacgtgcctctggaaccttaaaataccttggcactctatttttttttttttgagatggtggatagatggaagacttcatgtaaacagaaactgcccctctctattgtggcggttgaagtctctgccacacaagagacccagttttaaagttgtgctttccctcacacagttttttcctaataggaatggaagatactgagactgaaaatttctgtgggcaactgacttgtcaatttctgaagtaacatttttatttaacaaggagtaaaacaaatttgcccaactaaattattcagaggaattacaaaacttgtcacttagagtggatgttgggatattcaggtcatttaggaggctgtggttaaaaataaaatgacctaaatataaagctctactttttttaaaaaagggaattttgagcttttaatttttgtttgacattgttcctaattctgtttctgtggggggatgtaggaggctactctttcggtgttccaaataaagaaaaattcttctcttcttgttggtagttttgcatggtatttatgtagctctattttttagccagggtatataaattctgtattctttttgatatattagggggatgtatgtgtgtgatggagaaattggagaaggtcataaacaaatgactctcttccaagaaaaattgaagacaattcattaattgttctggtcattctttttgtacttttaagcaaggagcatttgaaatatgaacttgccccaatctgcttttgggcaataattggagcataaaatgttgaaaatcaattatgtatttagggaggatgaaacaggctgacatattgaaggcatattgtattatgtttggtgcactaaccaggacagttacgtcatattcctgcagtcaaattgtgtctcgagagggtgagacacagaggatcacacatcctgatgtactcaaacttcacagaacatgagagtatttataataggcctgccatctgtcctgggaacgagtcctatcttaaaaattggctatgcatttgttgttattgttgactgataagcacagagtttgatatttttgtattatacatgcttatacctgatttatagcagtgtgataatttcacaatgcattatgagttccccatgctggctagggggtaagatctttgcaggagagggtagacagagttttagatttctcccgtaaccccaatgtgcctgacacagtaccgacggtctatatccccagttgtagatttgcaggagatttgcagaatattgtcttgtgtcctcctgataggagaggcacccgaggactgggttgtgttgtctgaggtcacataattggtaagcagctgtattagttgctagggtggctataaccaggtaccagaaagtagatggcttgaataacagaaatgtattgtctcagagttatacagaggctggaagtcccagatcaagctgttggcagagctggttctttcctaggctccgggagggatctgtcctgggcctcgctccttgacttgtagagggccatcttctccctgtatctcttcatgccatcttctgtctgtgcctatgtccaaatttctcctttttaaaaagacaccagttaaattggattagggcccaccctaatgacttcattttaacttgattacctctgtataaagaatctatctctaaataaggtcacattctgaggtattgggtgttaaaactttgtattagtccattttcacactgctgataaagacatacctgagactgggcaattta

SEQ ID NO: 96748 - DNA, 1352 bp, Homo sapiens
caatttactgaattagtccattttcacactgctgataaagacatacccaagactgagcagtttacaaaagaaagagatttaattggacttttccatgtgactgaggaactctcacaatcatggcggaaggtaagaaggaacaagtcccatcttatatggattgcagcaggcaaagagaaaatgaggaagatgcaaaagcagaaacccctaataaaacaatcagatctcatgagacttattcactaccacaagaacagtatgggggaacgacccccatgattcaattatctcccactgagtctctcccacaacacgtgggaattatgggagtacaattcaaggtgagatttgggtggggacacagagccaaaccatattagactttgacatgaattttggggacacacaattcaaccctaacagcaaagatctggggtcacagtctctttctgtctcctaattcagtaccttcctctgccctgtttaataagtatttttttttagtttatatgcagcttggtcaaaattttttgtttttttttttgagatggagtctcgctctgtcacccagggtggagtgcagtggtgtgatcttggctcactgcatgctctgcctcccgggttcatgccattttcctgcctcagcctcccaagtagctgggactacaggtgccccccaccacgcctggctaattttttgtatttttagtagagacagggtttcactgtgttagccaggatggtctcgatctcctgaccttgtgatctgcccgccttggcctcccaaagtgctgggattacaggtgtgagccactgcacccagcctagctaggccaaattttctagtcaaagaaatatctactcctcttcttatatttccttccattgctggtttatggattgaaatatttttcttagatggtgacagttttgcttgaggctgtttttcagtgattttaaaaaaatttatctccgccctgtttgatcctaggagtataaaagtaattgctatttgatgtacacattgtttttaaagaggcataaactgcataccttgcctatgatcttttcccttttagtctttttggaacacttctttggcgccctaacaggggaaaatgatcagtgtttgagggtttattatatgggacatacagccacctggggagttgggaccttaactgttaggcaacggtggaaatcaagctgccaggtagttcttgagtttgggttggtactcagaatgtaatatttataagataaaagatattatattctctcactttgaattaccaatagtattttaaggaaccttttatgccaaacagcatttgtgccaaaaagacatcagt

SEQ ID NO: 96749 - DNA, 1035 bp, Homo sapiens
aggtttcaggacaatctttttcttatccagacccctcagcagttggtacttctgggcagttgtccacttgtttggacctggaggcagggtcttgatgatctttgcttccctaactgcagcttgctttctttctgtttttttttttttttttttttttttttttttttgaggcagagtcttgctctgtcacccagtctggagtgcagtggcatgatctctgctcacaaagtagctgggactacaggtgcgtgccaccatgtctggctgagttttgtattttttgatagagacggggtttcgacatgttggccaggctggtcccaaactcctggcttcagcctcccgaagtgttgggatttcaggggtgcagctgcagctttcatatagcaatggtcagtaaatgcatgctgagcaaaagtcttgaaagcactcatgacttctttccaagcgctgccaagagttcacagaaaatctaatttaacacaaaataaaactagtcgattttgagaggattgtatcttttcatgtagaacttcgtaatttattgtttcattacggactcctttgaattaacaattctgactagaataggactttattttttatttttatttttgagatggagtctcgttctatcggctaggctggagtgcagtggcacgatctcagctcactgcaacctctgcctcccgggttcaagtctcctgcctcagcctcctgagtaggtgggattacaggcacatgccaccacacccagccaatttttgtatttttcgtagagacagggtttcgccttgttggccaggctggtcttgaactcctggcctcaagtaatccacctgccttggcctcccgaagtgctgggattacaggtatgattataggtgtgagccactgcacctggccttagaataggactttaaagtgattttttttttccttcagaaaaagtcccaccaaagaaatttaaatatatgctgtgtgtaacacatacaaacctaaacttcttttttttcaataacagccgcagcattt

SEQ ID NO: 96750 - DNA, 1046 bp, Homo sapiens
ttgttggggttttgtttttgacattttttgacagctaagatcaagatctcatgacttgtgttctggccagaggaccctcagctttttgtgatgagtcatttcctaatgcatccggaggcactgggcttggaacccccatctcagagttgggggcagcagatccagccactgcagctgggagggagtccaggtgtcaggaggaaggggctgaggtcttcagggctggtggctcagggtatatgagtagcctgacacaggcacccatgtccccagaccttctctggccatatggagtcagagtgacctccagtcccctggaagattgccaagagcaaggcagctcctcagcccctgaggagttagcagcagattatccagagagggtctcaggctccttatcagaactgagctagagggtgatttaggcctgtggaatgcaggagcaagaaagccaagttactggatacaaggtcagggcctgcctgttaagcagcaagagcaacttagccagagctatttaaatctctatcttagaaattcccgctgggttgagccagcaaggggagtgtgggggcaagggttaagaggcttcagctgtggggaaggaagggccatggacactgaaaacaacaggccaggcctggatgtcctgacagcctagacctaaatagagaggtttttagtgtcctggtaggtcatttcagcctgcttgcaagtgaatgggtcttagggtgtaaggtacatattcaatcatgagcttgaaaactgagaattacttatgtgaatctggaagtggatgtagttttaaattcaatttagacaaaacaaattcctcaatttttcccaagtgtaaattataaccctatattacagaactgtcagttaaattcatgaaagtactctttaccaagcctgaagcaaattggtgcttttgagtgctattacttatcgagaaataaatatataaatcagaaagctgagctttggaaaaaagaaataaatatgaagtcacccaataatccattctgagtagatgaatgattaaa

SEQ ID NO: 96751 - DNA, 1033 bp, Homo sapiens
cacctgtctcaaatatgaaatgtggcattttgtttttgtacattgtctgtcacagtaaatatctagagtctgtctcctgtcatgccaggcctggtttttgtagatagtaatttggtggtgatggacattcttgataaatagggcttttacagactattctgaaaatgaatcatgggacttgcctttaattgctagcagtggcgtgtatgtgacatactcgctcctgctaatgtgtgccaatcagtaagttactgtttaattttctgaattttatgggatgatgcggtaagaaggcactccccagaagtgggcccctcgatcttggacttcccagcttccagaactgtgagccaaatagaagtttataaacaaacttctattgtttataaattaccatctccatgatattctgtgacaaaagtacaaaatggactaagacaagggatctgtgaacttgaatgggtggagaaaaactcaactgtattttcactaacctctagccaaaatatagccattgcttcaatcatgaaagtgggcaaccaaccatgtaagatcaacaggacatgtaactttgtcacatggaaattaactgatttttgtatcatattgtggaaatagtttaaaatacatttatgcccatcgctgctttaaaaactgcagtagttataaaacctgctgctgtgtcttatttatgcgttaagcatactttagtgtatcaggtttgctttttgaacattttgctatctgtgtttcaatataattagttttctttgtaataagactgtctacttaaaaatcattcaaaaacactctgagggtacagattgctgaagccatccatggaacttaaaaggttacagattcatgccttggatatggcacccttgtgtctttctcatcctcatttgagactagatttgttaacattaaacctgaattttttttttttaagtcttaacatatttggcctttgttttctagcatgccttgtctgtgacttttatcatctggagctctggtattccccttttgg

SEQ ID NO: 96752 - DNA, 1034 bp, Homo sapiens
taactgtcataaggaggattgggacttgggtttccggttgccctaaaccttacacaaagaaagactctatggccctagccacgccttctactgagttatgtgagaggaggagaccacgatcagactgtggttcatactcaaaccctaggtggttctccaggagctttttagctgcatggctactgggtccctgaggtgatgctggtatccataactgctacactttcatcctcatgcaaagcctccctttctttgaggcgtgtattctgtgctgtcctgatcacctccctattccccctaccctcagttcattgaggactttggaggcagctattcagtgcctgagctttcaagtcaggcctgggttcacatcacagatttgcctttactaatcctgtgggctttatcattgtctggaattgttccacatccaaattttaaaaattctttaaaaagaaccagactctttcaacttcctcattcatttattccgactgtgtttgttctttgatctctttgagacaccatactttttctctctggctatcctacctctcagggcttcattcccttcctgaccagccttgatttcacagcacaccactctgagcactcctgtactggcccctgcactgtgaactcctgatcattgatcagatcctgcattctctggaccatccctggatggttcttggggctgagagtcagagaagggaattgcacagcatagcttatttatttatttatttatttattttagcccaagtgctgtttatttaaaagaacaaaaaagagtggaggccccctagggacggatgaaacaaaactagcagtgcaagtctgcctctagctcagcataaaagcttgttgccccactgggccatcttgttgttgataggcatcttcaagaagcagtcagactgcatgtaggcagcaattttctccaaagcctcaacggcacatgaaagccttaagatgtgggaactcatccaggcacttgggctcaaacatgcacttttgatccaggacgtcat

SEQ ID NO: 96753 - DNA, 1005 bp, Homo sapiens
aaattggaaaacaaatactttgctggggtggggagcaaggcagggtctgaccattcagaggcccaaagcctggtgaaggaagcaggtgtataaacaattaaaataagatgaagaaggcttcgaagatgaggtgattctgtggtgtgttttgaagtgggtgggcttatgaaattcttttgctttctctaatatatctaaacatctatgtaaatacctggatgatatacagtactagtgacaatattggagttttgtcttctagttagccgtgttttgctgctgtggtagggaggtaagtctcagctagggagcactcaggtgacagggaaatgaagacagggaactcctgcctgtaagtgagcaggagctctctgcaagactgagctctgccttgcacagtagccattggcctgggagacatcatgattattgctggaaatgctgccctttctgaacccttcctttttttgaaggagagtgtattgatttcagatttttggctactgtctttgcacttatcccttctgtgtgcctatttgaaatacccaaataaaacctacctgcagccagtgcttctgaaagcctgttatttgaacagatcttactgtgttaaatgtgcacttcttcatgtatacaccaaattattttgaccataaagttgggaattagtacttggtaccagaattcttaaattattagtccaaactccttgttggaagagaattgccgttgattttgatttcccttccataataaccctgccactcatttaaagactttttttttagtgtttgttgtgtgtaaggtacattgctagatgccatgggggatttgtggagttcaacatttttcaccataattttgatctatcatcatattagaacaaggcaggatgtagaattagagaaaacatatcttttgaccattgtggcctgagaaggctttatggaagaaatggtgttagaatttggattgaacaaatccctttacaggtatatgaagatg

SEQ ID NO: 96754 - DNA, 1190 bp, Homo sapiens
atctgaagtgtttttgcttaggacaaaactataaagaatagaatagtagaatagagttcagcttgtagaatgggttgttgaataaagaatgaatgactggatctatgtgtcttagagaataaattatagtttaatgtcatattttccagctatgcaaattaagaaaaaccagactaggtgctgtacttcatgcctataatccctgtgctttgggaggccgaagtaagagaattacttgagcccaggagtttagagaccagcctgggcaacctaatgagacctccatctctatgaaaaaataagcagctgggcttggtggtacatgcctgtagtcccagctactctggaggctgagatgggaagatagcctgagcctgagaagacaagactgcagtgaactgtcactgtcatggtgccattgcattccagcctgggcaacagagtaagactctcttaaaaaaaaccaaatatataaaaaaaaaagaagaaccaaaggccaattctttacttatcacaattatttacgggttgttctagccatcccccgcaccctgacacacttttctggatgaagcatctggatcctggagaagttccgttagttgtttccagtcatattggcaaggtctctgtcaattcctaggatttctctactaaagtgagggaaagtgtgagagaaatcttggaatgtcaaaaactcatcaagggctggtttttcccagcctcctaggatctcctaggagtgatgagacatggctcttgctttcaggaaatttctgtgtacagggttttccatgagtttctagataacagccagtgtaccatctagcagacctctttgtgtgtgtgtgtgtgtgtgtgtgtgtgtgtgtgtgtgtgtggttttttgttgttgttgttttttttttttggtctcttacgctttgttttttcttatttgctttagtctgtattatttattttgtaggctgcttcagactccctgctaccaccaccactttcttgttgctaatatgaagaacagttctaaaggtgttatacagaaggcatgactgttagttacgtgagtcagactaactacgttttaagaacttttcaagcttctaacacagaggatgtttttgatgcttctttgaagcaaagaagaaaaatgtcttaattaagtgtaccttagtttacagtgtttcact

SEQ ID NO: 96755 - DNA, 1032 bp, Homo sapiens
ccacttaatgccagactgcttgttttcattataatgagaactacttaatttggcttgaatttcattcttgtttgtagagttctggtgcatattgtcactgtgactttaatagcattacattccttgtgctaacctattctaggattattttggtgaatactcactggtacaccatttttctctcgctagaaaaactatatattgtctacctgtattgcacaataaaaatatgttagcatgaattgacttgcctgaaatgttacatttcactctgtaaacccatgttaatccagtctccttggagaatgactggttttctgagttactatgtcaaataatgtttcagttttaatttctgttttaagaagtatgtttattactaaagcatcataaaattatggttaactctttaattcaaaagatcttgcaatgccttgtgataatattaatgtctgttgtttccatacttatataagagaataagtggatttctaacgtttttggttatatagaacctagacaaaatttatttttattgctaattatcccttaaaccaagtctgcaaaatgacaaactcaccttaaaagtagagcctttattgcaaggctgctgttaaagcttctcatcaatgcctgggtgagcagacaccaaagaaaaggagaaaccagtttttaatgacctaaacaggagaccatagttaaccttagaaaatcaacccctggctttgaataattgattagaattgttactctggagaaatttcgttcacagaatttccatccagggggacattcaccctctgctgggtcaagaccaaaatgtctttcttgttagttttctgaaagctgtttaaaaataataacaacaaaaaactttttcagttttggctcatctgtcaccaatcatgggaactttatttgcttctttagaagcctttgtaatttccagcataaagttacctcctaagctgtctgttggggtggaactgccaaccagtgggttatttttctcaggaccagggtccccaagcc

SEQ ID NO: 96756 - DNA, 1099 bp, Homo sapiens
gattgcttgagcctggaaagtcgaggttgcagtgagctgtgatcacaccatcacactccagcccaagtgacagagtagtaagaccttgtctccacaaaaaaaagaaaatagaaaacactcataatacttacaagcaaataacccaagatattctgtattttttgctttatcttttttaaatacaatgtcatttttttgtataaaaaaaagcctaagattttattgtaccaatgtaccatggttttatttgggcccattttgtttccatatttttttcatttaaaaaaccgtctggaaaatacatacctttgtatgaattttattttagaatatgttttcaagcatggagttaatagggaaaggaaatgaactttttataagctgttagtgcctcttgccaaattgttttctagaaagctcatgttggttgccacctgtgtaagcagtatgtgaatgtgcctgcttgcacaattcctattactagggggtatttgtgggttttagtaatctttgtcacttttataggttaaaacttgcacttcattgtttttaattagcatttctttgagattggtagacctcttccagtatttattgctctgttacatttcttcttcaatgattgtctttttcatgcccttgtacttgtttttttctgttgggattgtgaggggcttgttagtcttgttcttcccttttcctaatctggctgttgtgtatagtaatgcaaattttctatatgacttatccagaaagcttcttggggaatttttactgaagtcgctgatggtgaaactgcctatgttctataggtaaaagtttctctgcgttgttaacatttcatgtttgtgctgaggctagagatccactagtctgattggcttatattcaagaatttataaagaaaccaaaataaaagcataaaagcaaccccattgagtcatcaagccatccacagtacttgataacattctgtctttgtgcacagccaaagatgtcaaagttcctcctctacccagatgtgctggaagcctgactcctggtaagttcccaacagtagatggggatagttccagcaacatttccttaataaattgct

SEQ ID NO: 96757 - DNA, 1037 bp, Homo sapiens
ttccagagcccacctgctgcccagccctgccctgcccagccaagccataccctgctctgccccatctgggggtgccctgctcagagatgggccagcagggctatactcagcctccctagtaaacagagactaaagaaacctctggggtcctgttttctggtcgtgtgatcccaggggtgcacacaggccccttgggtgtctgaacagaagggcatgggagagagggccacacccctgcagtcttgctctgctggtgtagcgggcagctgcccactgccacccaaccctgtaccgagggctcctgagtcagcagattaagtattttgtaaattgtatttaaaatacatgttttaaacttgttaaaaaaaaaaaaaagacggtgcttagaacagtgcctgaaccacagtaagcatcttacaaatgtttgcttttattataatttaggtaatttctataccattttggcttgcttttctgctcctttacactctccttttgaccttggtaagtggtggcatctaggatatttttgtttcctagctcacttgtctgtgtggcaaacatgaccctcgcctttccatctggagcagatgggggaaaaagccatggtaataggcatgtccttagcagagtgctgtagggaccgttgctgtaaacaggcttggggtatatgtgttcactaggagacagaagggggcagggatatgaggcctgaatgcagggacctaaaaccagaaacctgtgtgtcttcaaagatgcatgcacattcaaagagtcagtgttcacctttggctttacaagaatgggctctactgtaattgtgtagtgcagtgattcctaaacctggctggttcacctaggcccttgtgactcaaattcccttaagacctaccgaatttagtgttggggtccaagcatctatttttatttatatttttattctttatttatttaagacagagtcttgctttgtctcccaggctggagtacattggcacaatctcagctcactgcaacctccaccacctgggttcaag

SEQ ID NO: 96758 - DNA, 1911 bp, Homo sapiens
gaggataagtggcctctggcagtaatctcagggcttggtgagtaattgggatggagaatggctttagcagtggggtatcctgtggttagttgttgtccctgggttggcctcattgcacagctccgggggcactattaacatagacgtgacaggtgcagcatggtggtccactactgttgtcatttctcatgtcaccttcaagaaagtgctgtgaaaaaaatgtggagttctctgttattataaattaagagggtgtatttggattttttttttttgagaaagtttaatgttaaagcattaactggttgagattgcagatagctggggcagtgaggctccttttaagtgctttgaagcacctagggtgaggcactagatcttggaccctgcagtgtctgtagggtgaagctgatccagaacttcattgtgagaacaatcaataggaaagaccatctgacattagagagatctgggatatggtcagttggagctacatggacaagggcaagtgtgtggcaggcagactgagcaacaacagtgggcatagctcgaggtgcctgaataggggaaaagtgagaccttcctggaagaggactcatgacagcaggagcctcaagaacttggcaggtgtccaatgtggcagcttgcaggggaacctctggaaataaagggagatggatacaaatttgagtttcaaataaatgttcactggaaaataaagtatattttattttataaaacatgtcagaatatatgtcaaactgaaaatgtaaaaggaaggggaaaaaaccgttcatacttccactcccttcaaaataaccaccatcatcttactgactgccttcgaacttttgggtcatgtatcttacttatttttccattataaaagattgtgtatactagcttaaatgttttttctacatgtttttgaaaatgttcatatggtaaactgattttttttttttaatttgagttccttggcaatgaaaacagtcattgtggtgttccgtgctactctgcttgtttagaggggtgggtgggggtaaagagagctttccttgcccagcatcccaatcgtgaaaaatgtaagctattgttagcgagttctggcaggcagcatcagttattgctttaagggtctccagataaagtaagagattctttctgcactgtggggtgaaggatgtggttcaaaaagcccgttcctgaaagagaaggctgtggaagaggggcagttgagtgaagtgctggaaggccaggattggtttatacagtttcttatattttttaaaaaccataatgtccccactgttgagtagtggattctgttttttctctgaaggaacttgtttctttcagaaggataaatgggttgtacattttctgagcttttgagtatctgagaatgttttctggttgatatcatgtataatagcctggtgcagttttagaagatttggccgtgctttttttctccctcaagttttgtagatgttgctttttttgtttttccgtttttttttttttttgtcgttgtttgttgtttgtttgttttgtttttgttttttttttgacacagggtctccttttgttgcccaggctgctgtacagtggcacaatcacagttcacttcagcctcaacctcctgggctcaagtggtcctcctacctttgcctcccacagggttgggattacaggtgtgagccaccacacctggccaatgttgcttttttgatttcaggctttcggtgttggacgggaggggacaagggttgtgggtgaaattgtgttcaccaaaaaggtacattgaagtctcaacccttgatacctgttaaagtgatcctgtttggaaatttgctcgttgcagatgtcaggaagttcagatgaagtcacgctaggttagggtgggtc

SEQ ID NO: 96759 - DNA, 1023 bp, Homo sapiens
cttctgtggctctcggtcctggctgcacagtaaaatcacttggtgagctttaaggaccatcacctgtgccattttcccaaccagttaaaacagcctcgctcggcagggatcgggggtccctctgtgtggagggtgttggaaactgaatcaggtgtagcatcagtaggcctggcagagccacggaattcaagctgcagtgtgttccacaggactggtagacctggacaagtctgtgctggcaaggaaatgtagaatcccaaattccatgcagattgacggtgaatcctgccaggttgccttccaccacagctagctcgtgacttcacccttcattgggccaggcagaatgaccggagccagcgccactgtgctgcagaagcagcaggcccaaatgctgcaagagttaataaatgtccagtacccacggagaggagaggaaactagggtgcttgatgactaaacacctatcctggatccacttcgcttgtatggtgacagcatgaggtgtgactgagagaagattaatgatcactgggcctgggtacctcccaaaaggagtgctgcaggagtgctgtggagctaattaaccagccggcatgaaaagtgaaaatagacgagggaacagggtgtttttttgttttttttttcttcccctctgtggtggcccagtactgtgcgtagacctacatatactatttttggttttccttcttaagtatgcaaaatgacataatgttgaaagcctttctcagtagccttctccaaggggagcaatactgagacagtggactctggatcccgctgcctgggttcagactcagctctgatatatgccagagtggccttgggcaagatacttgatcctttctgtgcctcagtttcttcatctgaaaagggggctaatagcaatgcctaatttgtggcgtggctgtgaagattaagtttaaataatatatgtataatgcacccagaaccctgtcctggcacctaatacatctaaaaaataaaaagagcatttatttt

SEQ ID NO: 96760 - DNA, 1096 bp, Homo sapiens
gtggcacaataaatggaaatcttatttcctgcctctgcagacctatttacctgagtgtctaagtgcacccttgcctttctcaggccttcccttcctgaaatatgcttttactttcatctccttgccttcgttgccctcattttttaaagctgtctctaatgctgcactctatgtactttaatctgtgatgttggatgttgccattctgcatagctgcctttaaacattcatctcccagattgacattttcttccattatgaattgaaatcccttttcacagcctgtaatggtaaaaacattttaaaataaagaactgttatcaaaagccatttctgccaatttaaaacgccttattggatggctttattccctttgataattttgttatctttgcaaactatgactttgacttacttgtatgcgtatatatttttatttattacgaacagagaggttcttatagatgtctgtgtgtccccttgccctttctggacttttatttttggacttaagggaattgatgattttaaaagaagcaaaggagtgtgtgtgtatgagtgacagaggctatatgtaacctgcaaagtctgaaatatttactgtcataccctttgtagcaaagtgtgctgacgccttatgtatttaaaatactcactaaaaatgtgtcgttttggggatctctatctttttccccaaattaaagctcttaaacgtgtgaagtggtgagaatgttagagcctgagctgaccggttgtggggaggttctagctgtgatccctgttcctcagggttaccttccaggccccagtctcccatctgagacagtgtgattgcatttgatgctgtgcgatggaaagcattttggggtaggtgggactgtctgtggtgtgtaaatgttccaatggaaacacctgccagtgaagctggaggaggtaaattactagtcattgataacatagttttcataccctggagaggttgcatcgtcctacctggcatttctgcctgcagtaacaggaagggtgattgaaatgtgcttcccatcacttaatcaaggtggggaataaaataggtcatagttaaaagaaaacagta

SEQ ID NO: 96761 - DNA, 1049 bp, Homo sapiens
agcttctggtggatttgggatgttctctctattagatgtttttggtccaaatgataattaaataaactaagcagatacatctctaacggagcagtgcttgttcactgcccaaatttgtacagcaaattagtgtctcacagtggtaatttggcttcattatcttggtaattttaattggaaaagtttagggcagagatgctgtttaaaaatggcagtgactcaatacatcaaatgatgaacagtattttttttcagtgtctaacacagatttctgcttaaaccattttgttggtaaaagtatccagagctctaatgttctacctgcctggttttaataatttaaaaaaaaaactgacatatggttgtgaatgtgtactggatttaaaaagactcatctattttaaaagctagcactgttgctgctaatgatagagtcaatacagtgtgtctgcagcacccagaggtatggagccactcccctcctctccttccacgctggccccacagtgggtcatgctccagggtcgtgccatcattcagacatgtgctccgaaactaccttgatgacttttgttctgatttgtaagatgccccccacccctgccaattcctctcttgttcaaggttaaaaaacaaaaacaaaaaaaccaaacttgtttcagttgtttgtatagaaactcttcactaattgatgctaatccagaaactgttagggactggaacaattattcttgcaaggatcaaatactacaaacccctgtaagaagacactctgaacaacacagcctgtaataataaaaatatgtatgttaatacaattgatgattacttcctggatcttgggaactgtgggccagagataatttaattaaccttgcaataatgtgaccctgcatgttacatgattgagtttcttactttccactcatattgaggttattatttttatttactcttctgccaccttcctccatttatttggttttttttttcattgttagaagattgttttctgagtattgtttcaaaacttttgtttttaatggtaa

SEQ ID NO: 96762 - DNA, 1011 bp, Homo sapiens
ctcatttcctgtgatttattagtaatatcattagatactttataaagtatctgcatttattttcccagatcactctgggcccattatcaaacaatcaaaacatcatgaatgaatgagaagcaaccctttgaaatgctgtgatggagtaagacagcagatggtgacaagtgggcgatactgccctactccttgtatggagacactggagagtgccggccacttccgcttctgccgattccagttccagttctgtctcacagtggacatagctgatgtagcagttttgaaaacttctctgcctgttttgttaagggaaaaaccactaaattgacaggctgtggagtagaagccatattgtctctttgattcttggaccatgagttaatgtctgcgaaggcactccctcccccaacccgcaagtatttcttgtagaaaatctggaaatcccatcgaaaaagaactactgtgaacatcttttcttctagtcttttgaaaaaaatctgctccacctaaacctgagaccacattatgtaaccctcttgtgtgctgcttgtgtcacttaagttttttttatttgttttgagacaaggtcttgctgtgtcacccaggctggagtgcagtggtgctatcaaggctcactgtagcctcaacctcctgggctcaagcgatccttccacctcagcctcaagtagctgggaccacaggcatgcaccaccatgcccagctaatttaattctttgcttttttcttttttttcctagagatgaggtttttgccatgttgcctagtttggtcttgaactcctggcctcaagtgattctcccaacttggcctcccaaagtgctgggattacaggcatgagccactgcacccagctcttgcttaatattttatcacgagcaatttccagtttacttgaagagtttgatatttgttgtccattgtttcattattttataattgatttttaaacatttctgattgttggatatttgcttttttttttttttt

SEQ ID NO: 96763 - DNA, 1062 bp, Homo sapiens
tccttggggtagcaggttcccagcagtggaattattgaactaaatggcctgcatttataaagagtcttgatacatagtgcccacttcctttccagaaaggctgtattgatttcatattccccccagcattctttgagtggctgctttttgaaattcacatcttctgggaacagcttaaatggatggtgctttgtgcggcctaactgtggactactgacaattttaagaggctgagacgtcattctgtagctgccttctttagaacttcccttctgtctgcacttctcaggcaattttcattttctttctttgcatgagactgtgtcgggaattatgacagctgagtcagatcaagttcatggtcagaaaaacattcagttggctcccagtttcagccgcctggtgcggatcctagagatcatggaggttcacaggcatgttggagttggagaggcctccagagcacatcctgtccaggcctctttgcagatgtgcaagcaaagaccccttggtcattagggaacttgtccaaaattcatacaagttattggtagaccctgatcctccatgctgtccccagcgtcttctcttatgtcagccagcctgtgccgatgttctgcctgtacgttgttggcttgtgagctgtaaataatgtgagtgtgttctgatttcatagaaggtgtgggcaggaggagggcatgggcttaaagcctcacatggatccatgaggctgcttcttggagggtgaagaataacacaggacatgcacagccccatttctccttgtagagccagctggttctagtccttgcttccactgctgagtggttgggaccacagttgacatctaaccttcagaaaggatagttcctcctgctgaggtgaataggagagcattctttgtttcctcctggaaacttgttatatgatggcctccttactgcgtgcccagctgtgaacgtgacgcacagattttctgttgtacttgaacatgtgttcatacatagaaccagtgtgcatgcatttgctccacttcaagtccatttattcccctgccaatga

SEQ ID NO: 96764 - DNA, 1357 bp, Homo sapiens
aacattgtagatgaattattatattcttaatggccattggtaactttttcttttggaaattctttgtgatagttgtcctttattctactaggacaatatgtgtttcttattgatttagcacagcttcattgttttaagggtatcagtcatgtatgtttaaaaaaaaaaaactgtttctggttcgttttccatctaattaggttacagtgttttatgacgcacagaagtttttcattttctccagtcaaatttatgtatttttccattgtgatttattccattgcatttttttaaaaaacagctttattgagatataatttacataccacataattcacccatttaaagtttacagttcgatgttctttttgtagcattttcacagggttgtgcaaccatccccacagtcttaattttagaacattgttatctcctcctcaaagaaaccaaagcaaaaaaaccccatacccgttactagtcatttcacattccgccctgcccttactcttcactccctacttcctagcccctggtaaccacgagtctactttatgtctcttgatttgcttattctggtcattccattaaaatggaatcataatatgtggtattttgtgactggcttcttttatggagcatcgtgttgtctaggttcatccaagttgtggcatgtatcagtactgcattcagtaaaatattgtttggtaataaaatagaatgaagtactcctacatgccactcgttttgtttatccagtcttccattggtgggtattttgttgtttccacattggctatttattatatataaagctgcaatcagcttttgtgtctgcatttttatatggacatatatttttcccttgggtatatacctagtgaaattgttgaatcatatggtagttccgtaaaaccttcttaagttgccgccaaattattttttaagtggctgtactattttatatcactaccagctgagtatgaggtttccaattgcttcatatccttgccaatgcttgtattgtcttttttattatagccattctagagaatgtgaactgatatctcattgtaggtttattaagttgtgaaaattgtttttatattctgaatacagattccttatgagataaatgatttacaagtattttcttccattctgaggattgtcttttttactttgattttattggtggcttttttgttttttgtttgtttgtttgtttgtttttgagacggagtctcgctctgtctcgcccaggctggtgtgcaatggtgctatctcggctcattgcagcttccacctcctgggttcaagcgattctcctgtctcagcctcctgagtagctgggactaaa

SEQ ID NO: 96765 - DNA, 1004 bp, Homo sapiens
gatgccagagatgccagagacacccaggagttgagtctgctgggggacatggacaaggacgtaggtgacaatagtgtatgtgctgtggggaaaggatgactgtgatagcatgtggaaggttctagaattcagagggtaacagaaatgagatggcagtccttaccagcagggtgggcactgtgggatagggagtagacaatggtggacttggacttgagggagtagtttgtttatttttttttaatttttttttagaatcttgaacttccattgagtattctgaaagggagagattgactttacatggtggagggactattttgagccttttgatgttgagagaagcattttatgtacaaatgatatgaattttgcattgctattcagtgcattatggttaaaaattttaaatatggcttctcacaagacttaaaattcaatgtgtcaatcttgtgtttaaaaaaattttaattatttttagaatgaatttcacttaaagctaaaaattatgtatttcaggatagggtgtggtggcacaatggatcatcactcactgcagcctcaacctcccaagctcaagtgatcctcccacctcagcctcccaagtagctgggactacaggcacacaccacaactaatttttgtatttttttgtagagatggggtttcactgtgttgcctaagctggtcttgaactcctgaacttaagcgatcctcctgcctctgcctcccaaagtgctgagattacaggcatgagccaccgtgtctggcctctcctttctcttttacttacggcagttgaggcccacctagataagcccctcatctcaggatccttaacttagtcacatctacacagatgatttttccaaatcaagtagcaaataccataggttccagggagtatgtctttgggaaccattatcagtttaccacaccttcctaacacaaggtaacctgatggtctaataacatgtttgctggagtactagctagcatgtcca

SEQ ID NO: 96766 - DNA, 1970 bp, Homo sapiens
tttatttttttaaagagacagggttggcacaatcatagctcattgcagcctcgaactcctgggcttaggcagtcctcccaagtagctgggactacaggcgtgcaccaccgtgcccaactcagagttcctttcttaatctgtgtcagttgctgtctttcagggtaggtctttcctcacctgcctggtggtccttggctccttatttgtatataaggtgctaaaagctgattgaaaggggtacgttgagggcaagctgtgctgcagcatgatggtcagggatctacctttcttggggtggggggtccccaactatgattatctttaggccttcttctcttgatgagcttccccagagaggaatcctcccatctcttcctgccgtggcctataagcttggctgtcagatctcatagctgggggctgggggtgggagatacgtctctggcccatcagtctgcatgtagaatatttcttaatctactttttccttagcagttacaagtttaaaaaaaacatgaaaagaaaacggcactcatgagtttagctcttgaatctctctccatggtcttagaattgagcctttccagagaataaacttggcctccaggatgagggaggggaagggatgttccaggcttaagaaatttctgggattggggggtctcacttttccttcagtagttttcaaccagccacactactggatgtcacccgcgcccctgccttccgatgggcctgctgtcaccgaggctctggcccgggctgagccctcatcactccccctccccccgccccttcccctgcccccacccaacactaacctttctgctccacctgctccactgctccttggcaatctgtttcctaccttcagaggcttggtttctggccagtggctctttctcctttccccactggtctttctttaatctttttgctacaactttaatggtgttttgagagggagtggaggcaaacacgtatcatctgctctgcttaatgcaaagtatgcacaaattctctaatgagtgattgtgggggacaataaaacctatggttataaatttatcttgttttacagcactttatgttcagctgtttgtgaaaagcaatttaaatacaaggatcatgcaggagaacagttgtttatattcacttaatatttcctctagtaaaagggaagatcagagacaagtaggatgcataaacgatttgctgcctctgcagccagcgtccatggatgttgatgactgggtggtggaagttcccagtgcctgggctttttctagaattgcatatttaatccagatttgatagttgtataagtgctcaatggtgattcagtgcctgggcttcaaaactgcatagaccagggtgtgaattccttcctgctttgtcatgtgtgggccgagttcagataagaacaacttatttgaacctcagtttcctgacctaaaaatgagggaaattgtacttttctcccagagttattaggaatgagtgaattaatgtatgtgcgtgctttgccttgtgtgaccactgaatatatattttacttactttgttatattctaggtctcctttcgtatgtgacattactgtgatttagtgtgcctgggaaccaggtgggcctggtctttgtgcgtggattttccccttgtagcaagaggttcatttgctcacctttagggtctgggacatattaaggcccgagttaggggacatgaggagggaggggtacagttttgttttgttttgttttgtttttcttttgttttgtttgagacagtctcactctgttgcccaggctggagtgcagtggtgtgatctcagctcactgcaccctccatctcctgggttcaagtgattctcgtacttcagcctccaaagtagctgggactacaggcacatgccaccacacccagctaattttttttttttttttttttttaagtagagatggggtttca

SEQ ID NO: 96767 - DNA, 3776 bp, Homo sapiens
gaaattttgtgtgtgtgtgtgtgtgtgtgtgtgtgtgtgtgtgtgtgtgtgtgtgcgcgcgcgcgcgtttaagggaggggaaggcactggctcttcctctaggcatatttgggtcctggtaaggacacacactgtacattccaaggctttgtttgcatctggaaaaaattagccacactcagatctttcccactacaggtcccgtcaggaagcccaagtatgtggaaagccccagagtgcctggagatgcagttataatgccattcagagaagtagccaagccaacagagcctgatgagcatggtaagaatttcagtgatttccttccccctctaccaaagattttatacaatgacacttcatttctgaatgaaacttgagtgtccttgcagtactgctttgctgagaatgtatttgggaggtattttcccctccagcagttacagagatctgtttggctaacgcaaattcttggaaattgtatacctggcgtataaatagttaagtgggtacatatgcattatttaaggattgagtcctatttcctctgaattttgacctaccaggtcttggaggataggaagcgtcacccagtagattgcttccaagattttgttttgtttttaatattctactgcttgagaaaattcaacaacaggctttggctgaaaagctgaaaccttaactggacaaagcatgtaattgctagctttaaaaaaagcatttggtgtcttttgaaggctgctttttttaacatctgaagtttttctttaggggatgttgaagtaggagcaaaaaaaaaaaaaaaaaaaccaaattgatggaaatatttttaaagacattttatatgtatatgtattttatacctggaaatatgtgtgacattacaaatttgcagcatttaacagatatattcatagttgtttattttaaaaaatcaattcaagaattttcctgtttgttcctttctggggagtccccaactcacatctctcttgcctttaatttgggtgttttgaatttccaccctgtttttctgcagaaacatgggactaggaatcttgctgtatgtaaaggggcttgctttatcctcagtgtggacaaaagtttatgtagcaatgctgaaagagaactcaaccatatttttactttggcatatctggcaccttcctctgcctaattgtgggtggtgggagatacagaccctttatgtcctaacctgtgtgtgccttttgtgttgctggtgctgtatggcagggagtgggtaataagtaggacatgggaagacaatatactggagtggtggtaaaaatatagctaaaaatgagctgtgaggaaggatcagcaaaagctgaaaactgggaagggaaggggagtttgggacatggggaaaagatggggccaggcactgggcactctgggcaggcaagaggtgctattgcaggtgtcttggcatgagaaatgccacccttttcctttctgtccaggcactcattgtgtggttgagggaagaggatttgagctgaggatttgtgcacaccgaatgttgctggtgaaggtggagattccactgtggtgtctggttaggatagccaactgctggtacatgaggcctctcttgattgtgcgttcacgtgggcaggcagtctgttctctctctcctcggtgtcctgaaaggaaagtaaaatctctctctctgtagtgaatatcagtcatcaaatgtctaagctgtctgcctggctcagattaagcctgctacctacctcttcccttcttccccacccaccaaagcctttgtagccctggtcaattatgcccctggcattttggctggcctaggctccattatgtaacctcttcctccctggctgggagtatcgttaaggttctgtacagggattgggacctcctcctcctggtgtgggagtgggggtagaaaatttggatttttattaggcaataaaaggttataaatagttcctattgttaacttttctcccttgctcaaagcagaattggccacctttcttgacgaatggaagtgttcttatgcttggctgtgggctgagctaaatttcaaatgcagcaattggtcttgctggagtggcctgaagtttgcatgtgtgctcactcctgagacctgagctttctgattcggcatctttagtcttcatggggaccaaagttatgagatctatgggctacaaatacaggaccagacatttcggtttcgcctgaaattaagaagcagggtatgttttcatttttgttaagtgtctcgggagcaggtgtagttcacgtctgtgggtgcatggtcttgcctgaagatagccatgatgttggtggatgccgcagcagggtgagctttctcttggttgatgaggagaggtggctgcctaacaaagtcgaacaggacaattagtatagaatggtatgttttgtaatccccatggagtcccttaaatttcaatggggttaattaagtctgccatgtcaaagtgtaaattttatccagatcactgaacccaaaggaaatgatagagccgactaaaactaattgagtttgagtgttaacccaggtgtgtacagatacatgatgggcaaaccctcatttttagggtttaatatcagcatcatcacttaagttttactttaaaatgtggtcttctgttatctatatttcccttggacattcttgtttaagtttctaagacgcttttctgggtgctgtcaataatagcatgccagtattcaccagactaacagactccactgaaaacagctctttgtgaagtgcttttgaaatttcccatggactcgtgaaatagcaggttattcctaaatgcttgaaatactttcctgcctcacttttgctttggtcatgtagctccatcaactcttgattcttagctctctgtttggattttaaatcaaaggaaaacaaaccaaagaacattttgaatttgcttatttataagtaattgcatttatgtgtgatgcacgttttagccttctgggaagtgtgggttcgatgatgtaagaagatgaatttttttttgtaagcaaataacttgtttcttaaagcttgcaagctggggactgtagctcacacctgtaattccagtgattcagggggccgaggtgggaggattgcttgagactgggagtttgagaacagcctgagcagcatagtgagaccttgtctctttaaaaaagaaaggaaggaaaggaaggagtttgcactcacctggaaacatctttaggaaaaaacattctatcttagtatgtttaaatatatttgaaacacagcattttctactctaggaaaaacggatgacttaataaaatcatcaaacaaaatacaaagcccattttcatgtcaaatggtcctaataagctgtgtgtcaggtagaataagttcttaatgagtaagcttcctattgctaaatcaacatatcgtttaggggaaagctcatttacccacaaacaatatctgcgttaagggaaaaaaaaccttcagataaattagagatgattgttataacaggatccacgctttatttctttgatttaggggtaaccataatttatttaggtttgcattaatatatttctagctactagggcaagttttgaggaggggctagaaagtttttagtctcataagtcattgctctgtgaagatcaatctcaaaatatgatgaaactttttttaaatgatatcttcatgtcagtcagtgacgaaacttttttcctggcagtctgactaagcaaat

SEQ ID NO: 96768 - DNA, 1364 bp, Homo sapiens
aagctgcagtgagccatgatcacaccattacactgcagcctgggagacagagtgagaccctgtctcaaaaaaaaaaaagtgaaaaaaagaatatgattgaaaaaaatgcatagtcatgttttatttcttaaaaccctttctttcccaagaggtaaccttgatcctgctttaattttcagcttcttagaatggcagtgcaacattcaaccaatggttgaatgaggttttatttgatggaagtatagaaaaggggcatacctggtatgtgtgcacagaagagagactcttggaagtagagtatccattcattctgcatttccttgaataagtattcagtttctatgctgtgaaaaaacactatgctaaatgctatttgagatgggttatcaagcatgggtcctgtctttatggagccttagagtctggcaggggattagagacctgtatatggcgtgactgtaataaaggaggaagtaatgactaatccaagctgtgtgatgaactaggagttcagcagatggagattctctatttttttttttttttttttttgagatggagcttcattcttgttgcccagactggagtgcagtggcacagtctcggctcactgcaacctctgcctcctgggttcaagcgattcttttgcctcagcctcccgagtagctgggattacaggcacccaccgccacacccggctaatttttgtatttttagtagagacagagttttgccatgttagccaagctggtctcaaactcctgacctcaggtgacccacccgccttggcctcccaaagtgccaggattacaagtgcgaaccactatgcttggccagcagatggagattctgagcatggaaagacttaattgtagctatgccttaagatttacctgttgtcttagttcaggctgctataacaaaaataccataaactgagtggttgataaacaacagtaatttatttcttagatttgtgcaggatggaaagtccaagatcaaggtagtctgcagatttggggtctggcaaaggcctacttgctggttcatagacagccatctttttgctgtaacctcatgtagtggaagggacaaacaagctccctcatttataaggtcactaatcccattctgagacacagacattcagactatagtacgtggcaacagagtaggatggagtgggactggaaagagactacggttaagaatgattaaaaaattgttttagtaattaagtgagaggataaagtctcaaattagttcaggttcagtgaagaagaggtggtgaatggaagattcttgaggaattgcaaggacctgggaactgaaaaagacagagacaacaacttcacgcctttgag

SEQ ID NO: 96769 - DNA, 1032 bp, Homo sapiens
tggtaagtccctctcatccagaagacctcagctctggagaccatgcctcccactgtgttttcctgcaggttgcaagggctgtagagggatgagagggaggcactgctgttgacagcgttcctctgttctccttccgtgacatgcagaattagaacctgttgccaagggacacgctggaggtgtggtagggaggagaaggaaaagacgcaagaatttcctctccaggcagactgtagccacaggtctttgaagaggcaggagtggtggggacagaaaggggaagagcttccttttaaatcaatacagggtgtgcaggttccactgcctcttcacagagcaggttatctatgactcagttgtggttctgtgattgctggagtaggggtgtgccttttccatctgaagagcatgcctgtttttataaggtgtagcctgggaatggcagcttttgggcattgtaagtgtttcacagagtaaagtattcaagagcaccatgaccctagttgggcggagatgaagatgagataccttggcttcctgctttggaagacctaacagtggcttgtaaaacaggctggtgaggacccatgctcccaattacacagggcctggagaaggcaggaagaggctttccatttaattttccattttaagtagtttaatatttgtcagccagtagagctgggtttggaatggcagaggctttgggggtggactgttacaaagtgcacacagctgccgaggccttgcaagctttgggcagctgtgggctcaaagcagggttccacatacagtattcacatggtttattcagagcagtttggggaaatttcagacaatgctaaaccatcctttaaaattcctggacctttctttactctttaagctgattcgcatcatgttggttatatttaatctaaatatttttgtccagcagatgcagggacaggaagcttgtgttcccacatgcccaggcacccagtttagaaagaaatataaagtatgtggtttcatcaggactgccacagggtg

SEQ ID NO: 96770 - DNA, 1246 bp, Homo sapiens
ccggagcatttttgtagtgtcctgaatcggcctcctttggagaaacggtgctaggacagttccatgaagggaggggaccctgagggaacagtggctgcctctccccagctgggtgtgtctgccacacagagcaggtatgtaatctacctgcccagctctcagcacctgagctggcaggcatgagccgccacattccacctggctaggtggctttctgggtgattaagtgctcagaattcaagctcttctgaatgcctttcctttgctttcctcatgcttacatttgttttcttcttgctcagtttgaagcagagaggcaggtatgcatttagacaggggaataccttcgtagaaacacttctgcagaagtagcttgcagtaaaatattagacacctggttagtatcctgctagagtatcttgctagagtttgataatatttatttttctgcctagttgcttaggatgtttaaaaaaaaattatcatgggctgacttttatcttcctttgactctctcctacctcctgctaggcttataaaatgaaagtgattccagaggtagctttagaccttttatttcctggactttgtgccccaagggagataatcagatgcagaggcacacaaagatgaattaattgtactttattttcctttttgacttgttgtaaatcctgcccttttgattttatgctaatactgctttgttgccacctgtatcgccctgctcactactaaattgaaatgctttgaaattgatttggtaataactatttagactgtttcaagtctgggttaatattcattttgctacgttgcctgcaatttttaaaatcatccttaattatagaagccttttttttaaaatctcttgggtgaagagaagaatttttctttatgtatataatttggtaatatgcttaatgtgggaaagaaattcttggcaatgatttgagtcagcaaagagcctgctgtacttttattcagactgtagttggattcttcaggctgttctattggtgtagcaagcatttattggcgcctactgtgtaccaggagcaagcatgttcagtactgggacaataaagataaggcacagcatctattgtcaaaacttgtccacttgtgggactacaaaatggtcttctgttctgtggagagtctgagcaagttgtgaattactgagaagaatttaagacatgacagtgattgatacctctgacggaagatgtatgctgtgggcgca

SEQ ID NO: 96771 - DNA, 1265 bp, Homo sapiens
cttctcagttgggcagtgtggtgggtcccatcctccccgcccagcaccacctgctcccagccattcctttaggtgtttccttagttgaagagcctgatgaatgtggctgggaatgtgcggctcgggcccctggccttgctgcatgtcatagcagagcatgccttgcgcaacacaggtgagcactgagctagaaatttcgtacagagatctggctgtcacaagccagcatacggggctcccagagcaaggccagagagggagcagggccctgtggcgcattggatggggctgggcagttgcagaaggagaagccagaagtctcctgaagctgaaggttaccatgcagggttggggcgggggtcccacctgggacattctgttggcattccaggcaaggtggcttaagtgccttcactagacccctcaggttaaaagctgtggccgcaggtgaaccagggactttgttctctgtggttggttagtttgcaggtggccgggcctaggtaggggtggaaataaaagtacagtctggcaattctggccagaaaggtttaagtcaggccggtttcattgtgcaggctttcccttacacacttgggaaaatccaaaatgtggcctggtggcttgaatgcctgctgggtgtgaggtgtgggtgcacaagagagggacgccacctgtcagccaagaggcctacagacttctgcgcgcgttgccttgacttgtctctgatcttttcctgatcggacttcctctgcagcagtgaaacctaatttggaaagttcttagtcacaggaggcagtctcgctacagtagtgggcttttccttttctattcacttcttcctttcatccacttttatgagcggccattatgttcctttcttgtttgatccttaattcattggtccagtgttttaactttaaattcttcctgtcaaccactaagctaaatacagaggttaaaaaatgtttgctttttaagtgctactttatttttcttcagttgtgtggggaggaaaacattcctgagcattcatgatgcctgaggcacttgacatatgcccttatgtctaattttctctgcaacccagggaaggacaaatcactctcttcagagagtcctctcaaaatgcgtattttctattataatagtatatgtacataatttatagtacatgtatttgggatgtatgccaagtcttgtcttaatagtatggtatgatcagagcagtgtagagaggccgggcatggtgggtcacgcctgtt

SEQ ID NO: 96772 - DNA, 1434 bp, Homo sapiens
tggggcagtgtgagtggcccaggtgatgatgacctgtggttgcaaggggatcccatatggctcagcatctttaaattagaagtgactctttgtagaagctatgtagggtgagtattgcttcgctttttgaccatgttctttctgctcttttgccaagatgtttacaaaaggttttttgtaccttttttctgtgctggttttctttcttggagattaaatgtgaattctgcagtcatagtataccttctcctgctggtacttcacctgcgctggatatgggaaggttttccatttcgtgttgctgaggaaataataagtcagtctctctggatcatcttgaatagatgttataagctttaagggtcaaattctctgtttgactttataattgtatttttgtttctaaagattttctcctgcaccgtttctgcattaaccattctgttgtttgttcccactcccccacccccagcaaatgtttttaatttggaaagtatatttaaaggttcaaaggaatttaatgagaaatgaattcttttgtgagtaatctttgttaaaaagaggatacattatctccaggttacataattttactcttaactctgatactttttagacaatttttttcattatcttcctatcagagtttctccctcgctcctcttctctgtagagtgatttagcagcttatttcccctggtaagccacattcttctaatttaccaaaatacattgtatggaacatactttgataaaaatctgtgtggactggaaaactttccattgatcctggggagggcagtgtgcatgttttaattcttcagccccagctgtgcctggcctccttcaaagtattttggtctttcatttcagccacaattacaagttcatccgaaaatgatgaccggagtggctccagtttggaatggaataaagatggaaacctaagattaggggttcagaagggagtgcttcatgaccgcagggcagataactgctccccagtggcagaagaggagaccaccgggtcagcagagagcacgctgcccaaagcagaatcctcagctggagatggtccagtcccttattctcagggctccagctcactaataatgccacggcccaactcagttgcaggtaaggccacacctttccctggaaggattatctcagggataccaaggtgccctgtgttcactgtcttcacatgggaagacactccagatacaagccagcttcgtggccgtgggtcaggcacttaccttttctaagcctcagtttactaatctgtaaacacaataaggctgtacttaatggtctttaagtgatccttctgctctggaattctttaaatcgattatttggactgtcaggctctttgtatataagagaagaaagtataaaaactctcctctcggtttttgttttaagcct

SEQ ID NO: 96773 - DNA, 1049 bp, Homo sapiens
aagaaaccacaaaggctggcaactgtcagtagtcagactggtcaccaggtgtgtgtcaagcaaggagaatacagtcagtcccctgtatctatagttctacatctatggattcatccagccatggagcagaaatacccaaggaaaaaaatcgataaaaaataataagaatttaaaaatacagtctcacaactatttacattgtattaggtattataagtaatctagagattatttaaaatatataggaggatgtttgtaggttatgtgcaaatattataccattttatagtaggaacttgagcatctgaggatttcggtatcctcagggggccctggaagtgatctccagtgcatagtgaaggatgactatagctccaggtgggtggggaaaggagctctctgcatctgagctgtggggcctgtttttaaggtttctagtttctaaactccatgccctgtgctgagtttagaagaggaacttgttacagtcattctttgttatcagtgtagcacttaacatttctcttctactactgcagggacccagattctccgctcctacgtcagagaatttctctgtgatttatactgtgctttcaggatgcggtgggtcactctggtggttgttgggtgttcttttacaatgggactctgaagtagctgataaataagtggccctaatggaaaagtgctgaggcacaactctaattcactttcaaaggaagtgaaatggccttgttccagaagagggatttggcatgtctgctggagagaaatactagagaacattatacgagttgactgatagtccttccacaagctttcctgtcctcccaccactgtcccaccactttaacagagtatgtggcacccaaggcgctttagaccgtatttacctagttatgatgaatgggtcatttgtattatcccagaacttgatcactttattaacttcaacaaaaatagtgaacttgtgctcaatttagtcaagctgttttaaaattaggaaacattactgtgttaattttaacagtgttaaaagcatccca

SEQ ID NO: 96774 - DNA, 1049 bp, Homo sapiens
tgcttcttatccagatgttagatatggtgtgtgtgtgtgtgtgtgcacaacaagtgtataattaatttcgctgtagagattctagcagtgggtttattgtagcatgaaattattgctttacctttgggtttttggggccctgagtagtgtctaggattttgaaagcgtttatgggtaaatactgaatgtgagtctgacttttgcataggtaacaactgagaatctactgtaggcatgcctgagagggcagagtggcccaagttacctgctcagagggtggggagcacctgggcacatagctaagccactgaaatcttcctgccctattcactggcacctctattggtggcttcgaaaatgcctcagaaagctgagatagctggcaggtggtggcttatggccctgctgcagctttcagctcggcttaatcgtatttgaaattgagaatcagccaagagctgtggaagtgctgaggctgctctgttgcagattttggtgccgaagctctagtggctgggaatctgaaaacaggcctgtggaatcttaacatctcctgtacctgtttagatacaatctagggcatttttgcaatcctttatttggaatgtcttttatggtcacatatttttaatcctttcagttgttataaatttataaactgttctaaggagtcaggggaagaagggaaataggcaacacttttgaggctctaaagcatctttttattctctagggctgcagcattatgtcagatgttcatgactgttctggctctgaaatgaattacgggttatgaatatggctgcctgccccttctacctgtgccttggtgggtgcattcaccatgaggcatgtgaggagaagggtctcagtgctcaggcaggagcctagaaaatgttccaagctgtgttactgtagggaggtaagaaggtttggggaagacagtgtagtcctgttagccctccgggagattttatacaccctacttatgaagggcctagagagaagctagacgctgtccttggattaccgtacattcgatccattta

SEQ ID NO: 96775 - DNA, 1915 bp, Homo sapiens
tatactattactactgagccaacttttagtgttctcggtgctgtggaattgtacacatagaatctgcccatttaattaataagttgggaattccaaacagcagaaagctccccagagctgcagagaagaatctagcagcatgccacctgcttgtggtgttaagtactgaagctttgctgtgtgccacatgattgtcagatttcctcatcaaacactttatggtgaattctgtctctttccaggaataatggagaattctgacaactcagtcaacataactttaagaaaaagaagcatttggtttttaccacttttcaactaatgatactgccagaaaaataaactggggcaaacaatatcaaaatgaagtttaagtaaattttgttgaaagcctgaactgaattgcttagtgatttataagttatagtcacttaggtatgaaatttaaagtcacctttgaagatactaaacttcagtttaatattacagcaacaagctcaaccaaattggaagatctgagttatttagacgggcagagaaatgctcctctacggacgtcaattagattaccatggcacaatacggccggaggtagggcacaggaagttaaaggtatttatcctggcatcagctgcgataatggttatgactaactcagtcagtaactttgaaagtctgtgataaccagcattgaagccaactgtgtttataacatgatggaaagtgtgtttgtgctaaaagcatatctgtgaggtgtgctaagaggtcatcctcaacagtttggggcttcttcctttaaaatatgtgattaacttgcttctggaattgaaaaagtaattctgcagtaagttattttgaagtgaggggtagttttgaagtgaggggtagtttaacactcattaggtgtttattactaataaagtataagctttgtttcaattcttggactaggccaggcgcggtggctcatgcctgtaatcccagcactttgagaggccgaggcaggtggatcacctgaggtcaggagtttgagaccagcctggccaatgtggtgaaaccttatctctgttaaaaatataaaaattagctgggcatggtggcaggtacctgtaatcacagctacttgggaggctgaggtaggagaattatttgaacccaagaggcggaggttgcagtgagctgagatcgtgccattgcactccagcctgggcaacaagagtgaaactatctcaaaaaaaaaaaaaaacacttggactgtattggccatgttctctgtctacctgtaacacagttgtgtgaggtacacagcagcctcactgtacaggcagagtcatcacacctggatgagagcagagccctatttctagggaaaacatgtttctgttttattcatacagcagggaagaagcacgtcttaaatgcagttccagatgaaccaatgagacatgatttggcccctcacatggctttctctaatcctctgtgtgtctgccttgagtcctgagaataattcaaagccatgacaagactagagagtaatttcaataggacactctagtttcctattggtccaataggtccaatagggtatggtaattgaggtattacagaagtattaatagaacgagattggaaatgcttacagacagatcctagtgggggtaaagctaaggatttagtgtaacacacaagcaataatatttgagtttcttagtttataaaattatgacatttttctaaaatttttttttcttcttttgaagcacgatttgctccctacaagccacaagacattttgttgaaacccttgttgtttgaagtaccaagcataacaacagactctgtgtttgtgggaagggattggctctttcaccagatagaagaaaacttgaggaacacagaactggcagaaaac

SEQ ID NO: 96776 - DNA, 1271 bp, Homo sapiens
gcactttggtaggccaagatgggcagatcacctaaggtcaggagattgagaccagcctgaccaacatggtaaaaccccgtctctactgaaaatacaaaaattagctgggtgtggtggcgggtgcctgtaatcccagctacttgggaggctgaggcaggagaatcacctgaacccaggaggtcgaggttgcagtgagccgagatggcaccactgtactctagcctgggccacagagtgagactccgccttaaaaaaaaaaaaaaaaaaagaaaaagaaaaaaaaaatttaatagaggaaactggaaacagtacactgatggctgttctccagggaggggaaccagttgggtggcagacagatgggaacctgtgctctcatgtggacctctgaattttggaccatgttcactccttgcttattaaaatatgccctggcacaaatcaagaaatatattcaataccacaccctgctcctactgtgatgtacataatgaaatgggtctttctctgcagcctctgaccccactcaggatcttcatttcactccgttgctttcaccgagttcttccacaagtgcttccagcacagctaaaacacctcttgggtctatcagtgctgaaaaccagagaccaagagaggatgcagtgaaatatcttgcttctaaggtaatctttcttgttttattggagccttccacatagagagatttgctggtttggtttctgagaagtagattggaaaagggagcttaaaacagagacaactgcttaatgataaagtatagcttttaatgaaatagtgatacagttctccaagtaaaagtgtgaatgacagtaagtatctgttttaagacattggcagtggacctgatccatcttaaacaatggattgaaagagttcctcaaggcagcagaaggtagcatgtgcactcgccacaaatccatgcttatctgcatgtgctcttcctaatttggtatgtgagcaggaaattgggagcttttgacttgacccagacctcttcccctgcactctgttgtctgaggcctttggtttccttggctttctgacagaggtttctcgtgaagttgtaatagagccttccttggctaactttcccttcttaaatttgtgatcatcaaggtctttctgaagtttttcttctgcttagcacccatcactggctcaccaaccgcactcctgcattaaagcagttacatcccttgctcctagtgagctacttaagtttccctgggcagcagtggtgtgagtcg

SEQ ID NO: 96777 - DNA, 2127 bp, Homo sapiens
tgatgaccatttttaagatccatcagttttttggggttgcacaggaagtctcatctggaacagtcccctattagctctgttctctgttaactcgaggagttaataggtattagtaggtagaacaaggctgttgcagacaggaggagctattgaagacgtcgcatcagaatgagcaggccgtgttctgcaacagcaaatctagtttgacttgaccttttttcatggaacagaggagaggaaagagctggcagaagggagtgtgcagggcacagagtgtatagggcctactatagcagtcaggagtggggacttggggggactggggttagagacgggccttgctgacatgaggtagctcttgtggcttggcctcatgggcagagtagaggaagaagagccagaaactaggtgtggcattgctcttgggaagggtaagaaaggcaggtggtatgtggcaggctttgcagggacagagctggttttagttttcagcagttgagattgcaagatagccgtctgtcccaggcagacaggttccagcgccagggcgggtcggcaggttggaggagaagctgacagttgaagatctagcatcactgatggagaggtgtctggcatgactcggtgaggaagctcatgtcattagagaaaagatagcactgggcttccagggcgtggaggagggtttcagggagggaccttacggatgtaagtgttgccaagaggtgaagggaaatgacggttaagaggaagccattggattttcagtgagggaggagggtcctggatccttaggagactccgcctgttgggttgagaggagagagaggagggagccagcgtcttgggatgggaggtggaagggcttagggggcgggtggttttgtttgtttgtttgttttttaataacacaggagattggaacattgtcagaaacatcactgagagatagtgtggagaaagatccataaagaaggagaaattgggaatgtaaggaggagggaccggggcctgagtgacggggcaggttgcctcctctttgttcccgtggaatctgttcacagcacccagttaactgacttgcatatcgtttgcgtgtcccctcccattgcttagagcttctcaatggaagcaccttgcattgttcccccatagaatccccccgtcagacgtggtgccagtgataaggtgtagctgtgaatgaatggaggactcaagctccgcaggttaagagcacaggctctcctgtctgaccaactttagttcaaatctctgttctgtcatctagccatgtggtcttgcataagtcgcttaacctgttcaggcctctgtttcttcatataagcatatgggggtcatagtacttagtcacaggattgtgcaggtaaatgagataattcaattaggtttctgcatctggcatagagtaagagcttgatacctggaagctttggaaattaacagaatcatgaatgcagattgtcttagaaggggattgcttggtctcaagaacaggagggcagggaggaactatgggcagggtatgcaggagtataggtggggagcagtggcatggggagttgtctcctcagagaggtgggatgccctgtgctcagctgggagcactggaaactttaggcccggccaccaaggggtgtgtggtcatcaccctgtaaagtgatagttagtgtgtctttgtgatggacacggttggcctggccacagagctcagccaactgggagacttaggaggacttagcctgtggttgggagagtggctcccaactgacatgaactgggccagaatgaatcctgggatcagcccatgggtaggacctggggaggccttgggggcctagagcactagagagatgctgacagcggtttccatgggaataagggaggaggggaatcccaggctcaagatctgggacatggaaggtgttcagggaatgacagggcatgtgctcgtgggaaaacttcaggccattacaagacaatggacgagactcagtgggcagtgtggccttaaacgtcatgccctcccctgtagtataaaaactgattccttggcctccatctgccttgatttcctcatctctaacacggtttataacctatttgaga

SEQ ID NO: 96778 - DNA, 1687 bp, Homo sapiens
tgggaaggagatgctcaggcagatctgtctctgattgtttccaagatctgtctcgattgtttccagggcctcagtaagaagacgggaatttcttcaagccatctccaagccctgtggatcggctacagcaccgaggggctgtccgccgccctggcctctctcaggaatctctatactcccaacgtgaaggtgagcaaccttctgcacagagagccggagacccagccctggccggctgctggccgttcctccaacagccctgtttccctctgccctgggtggtggtgagaggacgcagaggagcttctaaagatgtgcttccctgatcacacgggcttgggtgctgtattactcgttcttccagaagtttagcttttctttggcaggaagatgtgggtggtcagggctgctctgagcacatgtggtgactgtttcacagcagatgtgataaggaagcaatttacaaaagaaatcaaagatcagagagatttctagggaaaacggattttttaagtgtcctgcgttactaatctggaccatctcttcagagttcatgggaaattaagcatggatgggtgatgcatagagataagtacacagaaaaacaaacatcgaggtttcatgtatccatatttctgcctatggaaagggtatcagcatggccttctgtggagccaagagcttcttcacttcttggtcagtggctttcatgtcatgatgttccactcagctttttaaggtagatttttcttcctgatttcatgtagcctgggaatctgaagcacacagaggccaagcagcctgttaaggccacagagacagtgtccaggcctttcagcttcaggccctgatgtacccggctgcctgtggaagccctgggtcagtttagggagccaggtcttccccccgaatcactcacattgtttcatctttcatttcagctaagagtgtatctctcggcttctccataactaataaaattctataatcataagaaagatgagaataaaaatggcaatatgttttcatatgttaatgaatttctgggcatagaatttattttaatatggaaataagtaaatgggaaacatctgttgagtacaagtttttaagacagtaaatttaaaggtactgcataatagtgtaatgagcatggccctcctgagattataaactttgctctttaacgtatgtgcgattttaagagttaatcatttttactttgttttgtaaaactccagtgtcacctacatctacaccatctccgaaattatttctataatgtggttatagaatcttaagtcttttcattatccttctgtttcttttatctttcaaggggggaaaacggttttcacaggatcttgaacaaattacagtaattttaaattatgcatgcaattaaggaactttttttagagtgtattaaatgttgtcatacaggaatgaatgtcattttgaacaataattgcagtttgccactttggtaaattaaagtgacttgctctgggatgattacttggtagatggattttagttgcagtggcatgccagcagtctctaaccatgttgtctcctgtggccaggccaggatggggccagcctgggccccgctggcccactggagtcccatccagccagtggttttgttgtaccatctcataggactggtggccagccgcaagct

SEQ ID NO: 96779 - DNA, 1026 bp, Homo sapiens
tcatgatcgtattgcctcgcatatccccagctcccttcctgttttcctgttttcattaaatccagaagttgagagataccaccacttctgagtgttgtccaaggagggcttctgtgatcatggtcggaaaatttccatatcgttgggggaaaatctataggatgaatcatttaaacaggttccttcagcacagtgccgtctcagccaagactgctgctctgccacctggctgctctgtgaccatcattagctttgtgcttagcgctcagctcggccttactccctctgagccttggctttctcacctataaagtggagacacaaaagaggctgtctctcaagtgatgagaaaccttactgagatgttaaaggtactgggaacatacttggcatttattatgtttacatgaattgttgttagtgctttgcctcatctctggaaacagtggctctgctgtaggcacctgggaagttttggatgtgccagttggtgcttgttaacaggagctgccgaccttgaggatgtgatggttgcaggtgacttacctctgccctcatctcggcatgaggtgtccctgctgctctgtgctggtgaacagcccaggctgggcatgcagggtgatgtggacaggagggcagagctccctcctgtgccttccagaggtcagggacctgagttcttgtcgtttctgaagactccatgaaaggttgattataacatcgattaatgtttatttaacatgtacagatgctgagtgctgtgctaaatgcttaatgcacatatatatacatacacttttttttttacacattgatttttaatctttacaaccaccaagtgaagtgaaacttttatcctcatttttttagatgagaaaactgaggtttagggcagttgatactttccaaaatcacacagctggaagggcgcctgacactcagcaagcccttgctctgcaggtgcctttatcacttgatgtgtttacagccctggctgccagctaaaatcacctgggagctctgggc

SEQ ID NO: 96780 - DNA, 1088 bp, Homo sapiens
gggcctgggtgcacagggtaccctctcccccatgtcctggcactggagcagagccctgcaggaagtgattatatttatggaatgagcattccagtcagggaactaaaagggggtaaagaccatgaggccggccctgcttggcattgtcacagcacgtgttgggtccaaggtggctgcagtgagggaaggattctgcagagaagatcagagaggaagctggaggcctgtatcacagaggttcaagcttcagcagccaagacatcttcaaatttgacacctggggttctaacctgtcactatgccattgtgagttatggtttcactacttggtagtataattttccagacccatttgtttgtaaatattctgtttgtcagctactcttgtggacatctatcactgaaataccatgaagtttttatgccttgtcatctctctgtatcttttaatgatccccatgtgtctctagtcaataaatgatagtctctgtggttttcacatttagtgggcaggtggaggacctgccaggctttggcaggggcagtgattgatgtgggtcaggaccattgaagtaagccattgaaagaaacacactgggcatcttaatagctgttaaaggagcatcatttgtatctaatgatctgaagatctgaaaaaaaaaatattattatacctaaaatttgcgtatgttcagtaattttattttaaaacctgtagataaaaagcttttcccaatacctagatccagggagattactaagtgggggatatagtaattagtggaagcagcacattattttctagcagtattatgctgcggacaatcatggcacatgtggacatttccatattttctgtttcttttaggaacacatccctataaagtatttgtatttacttttggccttatctcactattaacaccatgactatttttttctttttaaaaacattttttatagagacggggtcttgccatgttgcccatgttggtctcaaactcctgggctcaagcagtcctccctcctcagcctcctaacatactgggattacagttgtgagccactgcacccagccacaattatta

SEQ ID NO: 96781 - DNA, 1461 bp, Homo sapiens
cctctcaaagtgctggaattacaggcgtgagccaccgcacctggcctctactgacatttttaattaaaaatttttttttttttaattttcacatcagggccttgctgtgttgcccaggctagagtgcagcaggctgttcacaggcatgatcatagtgcactacagcctcaaactcctggccccaagcaatcctcccacctcagcttcctgagtagctgggattacagtcacgtgcctggggcagtagttctatttttaatattttgaggaaccatcttactgtttcccagtaagctacactattttacattcccaccaatgagaatgtgcattgttaatatattcccaggtgatactggtgcacattcaagtttgagaaccactggattaaaatgataccgaaaattgaggatactgcccatttccagaaatgtttagatgacatacatgtgacaatcttgttggggggccttgtccaacaggtgagccgtctcctgattttgggaggggccaacgtgaactacaggacagaagtgttaaataatgccccaatcctgtgcgtccagtctcaccttggccacgaggaagttgtcactctgctcctggaatttggtgcctgcctggacggaacgtcagagaacggcatgactgccctctgttacgcagcagctgctggccacatgaagctggtgtgtctgctgaccaagaagggagtgagagtaagcggcagcctgctcttttggggctggggcagggaaatggcttcatctcattgctagaattgttatttgctgggccagactctcttgtctctgaaaccacagcatacacagaaagggtcgggctccagggattggtcactttgtaatgtggcagcctcagagaggtttgttttgctcatacacagcaactctgcttaatgttgtccaggggaaggcagaattccagggagaccctggctcctagccgcatgaggagggccagcctttaaaaagcctgcaagtatcgatctagaaagcaccaagattggtttaaaatattttaaatgtttgcttttttcccctctcttcttcttatcccattttatgtccttttaaaacagtaggatgagttccatgaactcatgaagaagccatgtgcctgagctccaggaactagattgcctggaatcttcatctttccacttgccagccctagggtattgggcaagttattgagcctatatatgacttcaggcttcttatctgtaaaatgggcataacagcagtccctaccacagggctgttgagtaagcattcagtcatatatgaagtaagtatgtattgctatacaagttactctagagcgatcaacttttttttctgttttgacagtctcactctgtcactcagtctggagtgcagaggcatgatcttggctcactgcaacctccacctcccaggtttaagtgattctcctgct

SEQ ID NO: 96782 - DNA, 1051 bp, Homo sapiens
ggtgttttgtgaccctgaatcttgcaaagggaacctgaggcctggaatggtacattcattaccatctggaagtaatccagactaaggttccatgttctccagaaagacaagttggaatgtgaaccccatgtacgcttacagggagtggggtttgcacacagctaggtggtgcatctgcatgctcagaggcaaagtaatgctcagctgtaaccttcccctactcctgcccccaggtggaccacttggataagaagggccagtgtgcgcttgtccacagtgccctacggggccacggtgacattctccagtacctgctgacttgtgagtggtcgccgggtcctccccagccaggcaccctgaggaagagccacgccctgcagcaggcgctgaccgcggcggccagcatgggccacagctcggtgagtggggcaggggtttccctcctgggaaacaagaagctgtagcccagcaagtcagttgacacactgaaggaccgaaagaaggaggatgccaagaactagcatttggcgttgaccacctgcagtagaaggtcttctatgggcaccacatccttcccgtgagtgacagtgcacactcctatgcacacgtgatggggacaggcaggcttatttttctatgggaagccttttgatgacattcactctcagctcttcctcatgtctctcctccttccctgctctgccctctagacctgctgttttaaattttttcccctttgattcgtttcttctgtccttgtgttcatttaaaaataatcacatagaatcctgattctaaaatcgttcctgagtatttgaaggatttttaaaaatagagctttaatgctttgatagcacacaagaatgcttgtcatttacagctcctccactgaatgaaaactccatgcagtagttaaatagagcatttatttctgacagatgttggtattcctcagtttgaagatttaattgtcacctcctgacctgtgtgtcttggctttctttatctgtgaatttaataatgttttgctcgcttcctcctgtgtatttct

SEQ ID NO: 96783 - DNA, 1076 bp, Homo sapiens
attagaattctgagtacctagtaatcctgaaccatattgctgaaattcactgagatttttttttaattcttctccaactgaaagtgtgaatagcatatgaattatgcttgaaaacagttttcattatatttttctctccttgggcagtgtgagataatggttaaaaaacaacacactgtctcctttgatacatgggctataataagcacctcttgctaagagaactcattaaatcaccttgccacttctgacaggtggtccagtgcttgctggggatggagaaggaacatgaagtagaagtcaatggcaccgacacattgtggggagaaacaggtaattataatgccactgcttgtagtctggggcagcttgcttgatgttttagccctattttggcctaattgtcttaagaatgactgatatatgtagtcctgtttctattttatcacaagcatttgaagtttagagctccttgaactttctacatgagtagcaaaactttgctggaagcgtaagattttattttttaaagcaatcctattaactgattattttgaattagactagcagttacggtacatctgatgaatgtcagatggaagtacctaactaaggtgttgttttctgatttgccaaatctcacacatctaaccaatgtgatcttcctgtgacctgtgcatggcgagccaggcatgaacttctgtccccatcgtcacacgaatcaaaggcggctcagcacagaaggcagtggcctgccctgccctgtacagaatgagggtaaaactcagcctcgtggggtttactcacattaccgtacgaatgcaagctatcgggtcatttccattggtctttacagtgagaagcctgggctgagcacatcctggtgaagatttgagctggttacttgtgagactaaaagtaatgctgctttccagttttccacttgactggattagtgttagaaatctaagactttaaattacaagttgtttttaaatagatgtcagcatgagtatttaaaatgaatttccaggttatgtttctgtgtgtgtacctggtatatatgatttccattt

SEQ ID NO: 96784 - DNA, 1069 bp, Homo sapiens
gtcatcctggacctaacccttacattcttaggtccacaagaccaggactgcctgctgcccacgcttactccctcactttccggtgacgaggccccagatagaacgcagagctcaggtgatccacgggagagatgtggctacctctctgtgacatgtgaagaggtgaggttgccagccacactgcaccatggccctaaggacagtcggtagagactgttcagtaggagagctagtttcttgcagggagataacaggtttgccgccttttgtttatgtggctcctggaggttaaaccatggccatgctgactggtgtgaccagaggaggtcacaaatcagcaacagactcccagcttccctgggcattattgtaggcaccagaggaagcaggcatctgttagctgctctgaggggtgtcaaagaagacaggcagaccaaggggtgtgtgcagacaccagcatcactgagcccttggctcccggggcttagctctgagacccgagctcagaaggtgcgcaggagacaaaccaggtcccgcccttgctaatcggaagcccacagatgaccctctcccgagatggctgtcgtggcactctgcttttgaactatgtatgaacaaaatcctctgtgtgttttcttttgggtttggtttctttcaatccttgttaagtttgtgagactgacttggtcagtcgtgtttagccacatggtgtttattcttgtagacatgtagtgttctgctgattgactatgccactttcttgaagcttgctaatgatgatgatgatggttgtttggattgtttgcagcccggggtgcggtgagcatttttgcttgtgtttctggtacaccttgagagtgcctgcagggtgcatctctgcaagtgggttgctgggtggggagatacacctgtcttcaacttactcgtagcgtcagcctgttttccagagcagccaccatgcacctttctgctagcagggtgcaagctttcctgttgttccgcatccatctctcgttaatgagcctggttactaatggggcttggtgctcttcataggctccctggcatg

SEQ ID NO: 96785 - DNA, 1061 bp, Homo sapiens
acaagcaaggccggacgcccctcatggtggctgcttgtgaagggcacttgagcaccgtggaattcctcctttcaaaaggtagcagcgtgatgccctcaaaggtttcttttggacggacacagagagaacttcagcagacccattcagtgctttctgattcaaattctaagttttctgttaatggaaattttctaataaacagtagagagaataggcaacacagccacatgcctggtattcctcttcagcagcgatgaccattctgccagcccatccggccagtgtcacccttcacagtgcttgactgacacttggttcaggccgggtgttccgcaggtgtgaaacaatttgctttctggctttgtcatctcataatgttcatgttctgtgaatgggctttcctttcaggtgcagccctttcttctctagacaaagagggtctgtcagcattaagctgggcttgtctgaaaggtcacagggcagtggtccagtatctggttgaagaaggagctgcaatagaccagacagacaagaatggccgcacacccttggacctggctgccttctatggcgatgccgagactgtgagtaccagcaggtgttccccacctccacctgcattggaaagaaaccccaggaagtgaacagctcaatccagggcctgcatgaggttgtgtctcagtgtcatcagagagtgtgtgtgtgtgtgtgtgtgtgtgtgtgtgtgtgtgtgtgtgtcttgtcagggatctttcatttttctctaattctgtgacatgcagtctattccaggacttaagattttagtcgactcttaaaagcttaaaaatacctgcttgcaaatagcacatacaacagacacatacgtgaatatgcatacacatgtgcatatgtgattttctcagtcatccatataaataaaacttttgcatagatcatttagaaactacttttatatatggtaagtgactaatcaaatgactacctggttgctttttttttttaagttgttttgtttttaatttattaatttttttttcccaagatggagtcttgctctg

SEQ ID NO: 96786 - DNA, 1012 bp, Homo sapiens
gtctgccgtgcacaggttgtgtgggtctgagtatttctaaagtcaccactgctgtggcctgctcatttgttagagctcattgaagaagtctgctgcctacttcattggagatgcaaaggtgactatgtcccgtctctgtggcctgggaagtggtgtgagacagagacagatcacgcatgtgtgcacacacccacctgtggtagcgtgtcccctgctttcctcatccctgacagcaaaatctcttcagcagtgaaggttttagctgtggattgcagctcctcttctctgtttcgtgtccactttatttctagtctaggatccttaataggcagaggcatctaaaatcagagtgaagctaagactgcccacccctaaatccgtgtgcgcccctgaactcctgttcccagctgctgcttaggcttctgctgtctctgcaggtgctgtacctggtggagaagggagccgtgatcgagcatgtggaccacagcgggatgcggcccttggacagagccatcggctgccggaacacatctgtagtggtggcgctactcagaaagggagccaagttaggtcagtgagcactgcctccattgagcaggaggagcggtgagctcccgattgtagaagcctagacagcacagagagtgacctgctcccaggttaggaagtaagatgtcagatgtttgcagatctctgtctcagtctcacttaatcaccattatacacaatgtgtaagtagctcacggtgtttctgcggggagggtgtggaaagcagaggctggtgttgaaggacagtctggagtggtatcagtggccaggaaccacgccagagaggaaccacagcctcttgctgtggggtggggccgggtagtgctgctgaaagctcccccaggtgactctgagcagcagcggaggctgagccactgttctagagccaccagtcagctgtgtggggaaatggccaccacagcaagtttctgtgaagaagtagtagtatgatttcatggagaca

SEQ ID NO: 96787 - DNA, 1028 bp, Homo sapiens
tgtggccgagctgtagggtaggagagagaagccatgacatctcggagtacagcagatgacacagcacagggactgcgtgctgagaacacatgcctgcacggtggccgctgcaggaactgaggaggttatgctaaggcctcatttaattaattttccccacatcccacccggaagggaggaatgagttttcgctgctcggatgccttcgtttctcattacttttttcagtaaaataacaaggacagatttgagtgcccaggtcagtgggaaaggattagcaacagcctcgccggcgtcctgctccctccctcatcgtgctgtggtccttgcagctgggctcctgctggtgctgacctccagccgtggggccacggaggaattgggatcctttccgcagggcctctgaagtgcctctgaatgcgtgtttgttttgcaggaaatgctgcttgggcgatggccacttccaaacctgatatcttgattatacttttacagaaattaatggaggaaggaaatgtgatgtacaaagtaagtggttccgcccttttctttgccattgaaactgcctgggagcaccctcttaattgggtacataatggctacagctgtgctactgcacagtctccatgtaatagaagtgcaaaaagtggctgggtggggtggctcacgcctgtaactccagcacttttggaggccgaggtgggcagatcacttgaggccaggaattccagaccaacctggccaatatggcaaaaccccatctttactaaaaatacaaaaatcagccaggtgcctgtaatcccagctactcgggaggctgaggcaggagaattgtttcaatctgggaggcagaggttgcagtgagctgagattgcaccactgcactccagcctcagcaacagagtgagactcagtctcagaagaaaaaaaaaaaaagtgccaagaggtgctgacctggcctcatgcccgttgttggcttaatatctttccggcagaatcttaaaggtagaaagcacctctctttgtgt

SEQ ID NO: 96788 - DNA, 1077 bp, Homo sapiens
tgttctgatttttaaagcccatgttttaattcctcttagaagaaaaattattattctgcagcaagctctctaggtttatctacaagatgctacttgtcctaggaataggatcagtttttcatctgatttctattacacttagcattcaaatagatttgagatcattcttgaaataattttcaaaaatacataccagaaggtaatctgattcattaagtttggtaattatcaatctagcagtttacagacaccttattgtaaaaccagcttctttctcactgtgtaaccacaggatgcgggtgcatgtgaggacagtgaagccctcatgtgccagcccagttagtgaactagctcccaccttgacacttgtttggatgctttcaatgttctgtcgtgggtttgcaggggggagtaaactccccacggtgttccaggtgtgggagttattcattttagaacctctgaaaaaggacaaatgtttgtgatttttgaatcctagaaagggaaaatgaaagaggcagcccagaggtaccagtatgccttaagaaagtttcctcgagaaggattcggagaggacatgagacccttcaatgaattaagggtttccctctatctcaatttgtcgcgatgccgaagaaaaacaaatgtaagctgtgcccctttattccaacccagtcttccagcaacagagcccttctccagcagtgaaggccagcccttctccagaccagatcctgggccctcctgtccaatttgcttgcacatttacatgaacctggcatgtgggaaacagctcctatccgtgactatcgtttggtcacggctgctacgctcctcgcatgatgttgaaggaatgcacttgggtttcgtttccttggcctcagtaatgagaagcaaatgcagtctgctcctctgcagcttcccaacactgttgctgctggcactgccgtccccggattcaggagagtccaacccaagcctattgtggtgggcctgccttctgtgttaggtttgctcagagggtctgccagtaactaatttgtaaccggtcgtggggaactcatagtcgatttgtaa

SEQ ID NO: 96789 - DNA, 2878 bp, Homo sapiens
ggatcggctgggccccagccagaatgtccgcctgcagtgtggtgagaatggccctgcacaccctttaccaagtaagacgaaaaccacagagaggcttctgtctcattcctccgtggctgtggacgcagcccctccaaaccaaggtgggctggcgacctgcagcgacgtgcgacacccagcttccctcaccagctcaggctcttctggttctccatccagcagcataaagatgtcaagttcaaccagtagtttgacttcgagcagcagtttttcagatggcttcaaggtccaaggaccagatactagaattaaagacaaggttgtaacccacgttcagagcggtacagctgagcacagaccccgcaacacgccgttcatgggcatcatggataagactgcgaggttccaacagcagagcaatcctccaagccgcagctggcactgtccggcaccagaggggctgctgacaaacacgtcttctgcagctggcctgcagtctgctaacactgagaagccctctctcatgcaagtgggaggatataataaccaagccaaaacctgttctgtttctaccctgagtgcaagtgtccacaatggggcacaagtgaaggagctagaagaaagcaagtgccaaattccagtccactctcaagagaacaggataactaagactgtttctcatctgtaccaggaaagtatctccaaacagcagcctcatattagtaatgaagcccacaggagccacctcactgcagccaaaccaaagcgatcatttatagagtcaaatgtgtgaaccttaagaaatccccatttgtggaatttggaaacgtgtgttgactcctggtggtaaattaaatagtttttttcatcagaaaaattattttttagccattttttttctttggggtggatctgatgccattgatatatctaaaatgtgggataaaacttctttaatagctagaaatcaccataaataagaatgctaaacagaattgaaaattatatcaacttaaaattttaagacagcccagaagacattaatgactctcacttatgaaattgtttggcttttgccactttcttccttgcctttgctatatggtagaatcacagaacttacttagagaataaatatgtctattgttcaagagtaacaggtttaactcatgaccaagtgatgtacatccaagtgatgtattctggaaacgatggaattttacagttacagttccattgagtcaaatcccattttatatatacataaaaattaagttctgagtgagttctagctaaatataagtgcgactgtaaacgcagccaatttttttaagcagaatatgagaacacctaagtattctcttcatagcagttcctataaagggattaaacacttatttctgtgttatggttcttattcatatatttttatagcacttttggaacctatatttgtgcttgaaggtgtttttgatatttggaaacagtataagccatttggagtcatgattggtggtcaagtggattcaagctaaaatactaagaccagcattcttagtggcgcttataaattagctctcacctggtttccaaactgcttttaacaatggtagtgctcctggaacaatccttccaagctcctctaaggacaatatttaattcagatactaaaggtaagactggttgttacttttgttttgttgtacaattagtactttatagtcacatgttgtatatattaaatagcccagttttattcagacttgtaaatagaactatttcaatgtagttaatctaaaaacaaaaaagaaaaccccagtcacgatttgcatgttctctgtaagcttcatccatgctggttattgcactgaatgatatattattagggcatgttaacagtataccagtaacagcactttatctcatttatatgaacacctttgaggtgctacttaagtccaagctctgatgtattattcatttgtaaagataaggtacaggaatgaaccttggtttaaaggtatttttatatgaaaatggtgtgttattggaagatgttaaaatgctaatttgagagaagtaggagtgtatctgttttatatgttgggatgtgaaatttattttctaaaattgaggagaaggaagttatatatttgcagaatgttttaaagtgaattgttgtaatgaagttcctgtgaacatcattatggttttgtacaaataggaacctctgatgtcattcttcaacgtttgttcctgtgtgtacaattgtactttgtatgaacagctttatcatttttataggctttccatgagttttgctgtaactactatggcttatttattttctttaatatttgtgaaagtcttactcctttgttagttttgtttctgcacaactactgtacttttccatatggaataaagactattaatagaatgtgttttgcactaaatgagtcaatggataagtagagaacagcctgatgacagctatctctgttgcttttaatctttgttaccctagagggaatagtgaaaagcatattttatattaacactacaaaatgcttatttaatttcgttttataatttcagaataagggtgacagctgctagaaattccacaatactcaagggccaaatttagtctttttgcctcaaatagaaagaaagcatgcaggaaagcaatatatacttcctatctatctgtttcaagacatcttggtgtctgtttttactggcaacgggacatctttactactgtaattctcaaacactttggcaatacactgaacactgttatgacagtttgttctttaacacatttgtattatctttcagttaaaagtatgtctttatgcctacatatttcaaa

SEQ ID NO: 96790 - DNA, 1188 bp, Homo sapiens
gctaagatagtttattagaatagaaaatactctattttctagaactctagagatggagtttcgctctgtcacccaagctggagtgcagtggcacgatatcagctcactgcaacctcctcctcccttcaagggattcttctgcctcagcctcccaagtagctgaaactacaggcatgtgccaccacacccagctaatttttgtagctggggctccaggcatccacaaaccctattatgaactgcgcctgcgagggatcgagggtgtgctgcttatgaatctaatgccggatgatctgaggtggaactgtttcatcctgaaaccatcccccacaccccagtccagggaataattgtcttccatgaaactggtccctgctgccgaaaaggtggggaccactgctttaaaatgttgatgtagaagctttcattgagcaaattaaaacattttggcccttttatatagactcaaattgcatgtatctgattcctagaataaataatctttatctgcttaaaaatttcaggctgtttttcttcaaataaagaacatggtgaaactgattcacacattagctgatcatggtgacgatgtcaactgctgtgccttctccttttccctcttggctacttgctccttggacaaaacaattcgcctgtactcgttacgtgactttactgaactgccacattctccattgaagtttcatacctatgctgtccactgctgctgtttctccccttcaggacatattttggcatcgtgttcaacagatggtaccactgtcctatggaatactgaaaatggacagatgctggcagtgatggaacagcctagtggcagccctgtgagggtttgccagttttccccagactccacgtgtttggcatcaggggcagctgatggaactgtggttttgtggaatgcacagtcatacaaattatataggtatggatatttaaatccttcctgttttaatcctgttgactaggtgtacttaaaaaaaactgaaagcaaaatattttgatactctgcacagtctaagtgatgtagaaaaaaagaaaaatattttgatgaccctaggaagccaatagttttcaggtagcacaaggaaaaatattttaactgggccaggtgctgtggctcacgcgtgtaatcccagcactttgggaggccaaggcaggcggatc

SEQ ID NO: 96791 - DNA, 1098 bp, Homo sapiens
ctttaaaaactagggaaatgaatagaatcttatctgctgggaatcttgcttcaacaagatctcttagacttgctttggcctcattacaactctacaaaaaaaggaattttttttaaacctcaaataattgaggtaattaatttctttcttcaattcatggcacactctttacattattcttgcaaagcccctctgtgttactttttttgttttattcttcagttcatctccactttcccctatatacaaccacttaaaatatgcctttccagtcgactacttatgtatttatttagcaatatgtttctttatataatatgaaaaatacgtatgtacacacagtggtttttagacatatcagttgtattatgctataaatcttattgtttttaaattctgtttctgtttcttttgagttgaaaaaatgtgtaactctagttcattggttttgattgctataaggtattccatcagaggcatacacaacattttacttacaaattcctctagaaatgaaaacctaggttgcctgcaactcattgtcactgcaaataatacttcagtgatttttttaatacatggacttgtgtatggaatccagtttccaaggtatccccaagtgacccttgtcttctagtattcatgcccatgtataatccctttccacattgtgtcggggttaatctttgtgaccaacctaatatggcatagtgatagctttgtgaattcccagactaagtcataaaataacactgctgcttccgccttgttctcttggattacttgttctcggcaaaaccagccattatgttatgaggatgctttagcagcccagccctatggagcagccaatagctaccaccagcttaccagccctgtgcctgaggcatcttagaagtggatcctttagcccaagttaaacattcagatgaccggagccccagccaacatctcgactgaaacttcataagcaaccctgagccagaactatccagctaagccactcctgatttcttgacccacaaaaactatgagataataaatgtttattgttggtttaaaccactccgttttgaataatttgttatccgtcaatag

SEQ ID NO: 96792 - DNA, 1996 bp, Homo sapiens
gagcaccatatcttggggtgtatatagaagctacaggacaagtgtaatttttatcattgcatggggagcattgacataatttctactgcagctgagcattttttaatatggataataggattctgcaagtgatacatttggtcagagaacttaataaactagtcaagtgggataggtcctgtgacagaattgtgtgatacaggtcaaacaggagttgggttatggggaaaatgccagttgaaatatgttttgatctttggagaaacctattttttcatttaacctgttctttaaatccagtatgttccagaacatacaaaaatgtttaaatgttccatttgtaagaggatatcatgtattttatatcaatttaaatgcagttatcctaatcatttttctttcatttttaccctttattaactcttcatttgtttacaaaacaaatccactctatgaacgcaatctctaattatttgttttctttcaggtatccaaaccttgaaacctttgctctagatgtcaggcttgtttttgacaactgtgaaacatttaatgaagatgattctgatataggcagagctggccacaatatgaggaagtattttgaaaaaaagtggacagatactttcaaagtgagctgaagttataataatctctttatttttttccttctaaacaaggacaaatgagaccagcaatgtgaactgtatttacataaacgtgcaaggcacatacataatgactttctttttccttaagtataaaaaaaaagtatcagaagaatgataccatttttaaaggcttcattcctacaacaaccaaggccctcggttattggtttgtgtgatttatcagctaatttaggtagaacagggaagcacacccaaagaattttcaaaggaaagggtgttatagtgcaatagcaattaaaatatatcaaatcgcactgaatactcaacaccagagctctaatgtgggaaatggttctcctttccctctcaataaatatctatttttcatttttttactttgtagtttattttttagtgaatgtatttaattttatgaattatttatgattaaaccacatccagaatcttcgttttctgtgaaaaggaagaactagaaaattgctttaaatcttgaaaatacaaggaatgttttaaaatataaaacaaagccaagttaaactgtttacactgatgtgctataaaagcaccaaaaagaaactttactgtagagttacaagtacatttatatatatatgttgctgcatcacttgtgtagttaaattgtatttcaaaacagtgaaaaaattgacatgtatatactgttcattcttgtttatattaagtcttgttttaaatatgtattatgtgtatatattgtttgcagacattattgttcatgccttagaggattgtagcattttattttcgtctgaaggtaatgatagctatacagtctgtacagtaattatcctctaccaacactgtggcgtctccttaatcttggtagtgcctgcctttgaaacagggtgtaggggatattagttttccatttttctattttgttatataattttaagccaccagggcctaaattaaagtataatcatttgtatccatgtggaataaaattgtgacaatttcctacgcacacagtattttttcatagaaacatttccctcccatttgccttgcctcagaaataaatttaaaagacgtttgtaaccactgtgttttatctactgtgtgttgtggtggcctgttggaggcaaatagatcagattttttttgtacctacgtaagagtacttgaagttttatttaaaataaaatgttgtggaaaaggtagcattctttttttaggagtgttatttttcactatgtgtggcacggatacaataaaagacttttacaaactaattttttagtttttcttaatgtacctgaaaatatattcttttttaaaagccagttaatttaaatttgatt

SEQ ID NO: 96793 - DNA, 1050 bp, Homo sapiens
tcaagacaggtgggtcacctgaggtcaggagttcaagaccagcctggccaacatggtgaaaccctgtctctactaaaaatacaaaaattagctgggtatagtggcgtgcacccataatcccagctactcgaggggctgaggcaggagaatcacttgaacccgggaggcaggggttgtagtgagccgagatggtgccactgtgctccagtctgggcgatagagcaagaccctatctcatatatatatatatatatatatatatatataaaatatatatatatatatatatataatatatatatatataatatatatatatatataatatatatatatatataatatatatataataactgaaagcttttttaattaaaaaataagacagttgtaaagtatggatactgatttcaaacattattttctttagtatgattctgactgaaatggaaactcatgaggatgcatggccttttctacttcctgtaaacttgaaacttgttcctggttataagaaagttattaagaagcctatggatttttccacaattagagagaaactaagtagtggacagtaagtaaatcatttcagttcactaaatatttattgaatacctgatatatgctaggcatatttttagtgagccaaagatattttaattaacagcaagatataggccctgcctttgaggcaggtgtgtgtgtgtgtgtgtgtgtgtgtgtgtgtgtgtgtgtgtgtgtgtgtgtgtgtgtgtgtgtatttggttagagtagaatagtatagaagagaaaccaactaaaattatttaagaaattaaaaacccgtgtaataaacctgcttttgacattgaaagagcaccacaaacccaagctgaaggtaaggaaaagtatcaggagagcctcccaaagtaagtaacatataagccggaatttgtattttgcatccatggagtatcaaccacacgtcatatggatttaacaaaaattgactcaaatattgttagattatcacaatgtagaaatagaagatctttggaagctttacatatt

SEQ ID NO: 96794 - DNA, 1065 bp, Homo sapiens
ttatgtgactttgcagtctaggatttcttaacaatctggttaagggaatagtagttttctaaaagtgtttggtgtgtaccacatatttggaaaataaaaataaaagccatacgttgccagaagtttacatatctttctttcatgatctattatatttattataacatttaactctcaaaaggcagattttttttctctatgaatacagggtggggcacccttcttgttgcatcagtgtgctgcctgcaatttgtagttatattgcataagaccatgttgagagttcttttttgcatgtaattctagagctagaatgactttagcaagtatgtggcttgtcatccttattttttaagtgagaaaacagggcctcacaaatatttttgcttaaagttagtagcagagccatagctggaattcatatccttcgattccaagtataatgtcctttatgtcatttctttctatgttgtttttctcaaaaacagacatctttttgccccatctttcaccactgctttgttcacacctgggaaccacaagtttgtggaactctcttcttattgcaaatacctgttatcttttatccaggaaaaaaaatcaaatcaatttctagtagatttgatcacttggacttctctatttgacacttccttagctctttttcattttttggcctggctttttattacctcttcaactttcttattaacaatctctatattttcatttatattcatctttgttcctaattctgttgtgctccaaaagagaattcttttgtatctttaaactcattcaagtagtgacctagactgaaagaatactacagacaccttctgtagatgaattaccatgagattagcatcttcaagttttaagaattcttaagatgaatagacttttcatgttttattagattttatccttatattatgagaggaaaaaatacacagatctttcttaagaataatagttatcaacattctagatcagagttattctttttacttatttgtcctgtcagactttcataatttaaaataataggtctgtagacagtca

SEQ ID NO: 96795 - DNA, 1091 bp, Homo sapiens
tgcaatctatagctttatttccatttttgcaaattcattaacctttctcttgttcttcatctactcttattaatcatataactccatctctcacaatcttcatttcctttttaaaatgcttaataatacatttcttgctatgaaactaccttgaaaagaaggcagtgtttcatattcaaagattaagaagcaccttataacctttagagacataacagtgcctatagtaatcctcatagtaagtcctgacaaaatattaaagtgctcgatatctttagaaatacccttttggacaaagaccaaggttatcaagaaaaagagggagttgtcataatttgcctccagataattctctacccacagtatgctttatattgttaaacagtaggcagcatccactattttttactgtagtagcagaggaattaaaaccaaataataatatatttactgtaacatattgtgagctattactataatttttcaaaattgttatgagtttgatatctgtcaccctttctttaaaagtatcaggaaataattttatttttaaatcctaagtgtgagatgtaagacagatcttgtagcatttatagttgcctagtagagaaaacaatgagtatttacttatgttcatgaatctgatttttaaattgtgttgttacagggatatacatataaccttgcaattgttatttctcagtgaatacttttacaatagaagttttaacgatgtaactcaaatatggagaaacaacaccatcttaaggtattcagtgatggtgatgttaggaaaggtcaaaaaatagatactgattattggaatgttaaactgctgcttttgcccttggtaaccgcgccaatgttaatatgaaatatatagtatatacatttgataaacatttgttaacttgaatagtgtgtctgctgttttgataagattctacaactgtcattggtatacatactaagttataagaagaccattttagactttcccagactaagatataatgttgcattgaaaattaaagtaagttggaacagttaagctattttgtttttaagagcgtataaatacctaactttaa

SEQ ID NO: 96796 - DNA, 1869 bp, Homo sapiens
ctagtatataagataaaataattatatctaaagagatgtttaagtttattccatttttcatttaatatgcatttattaaatacctattgcatctcaggcagtggacaccaaaaaattggataaagtgtcgttcctaccataagaaagcttgtcatataatagggagatcagacatatacatatatgcagaatctagtagctgattgttgagaacagagtaatgtatgaatttagaagaagaatactgacttctggcagagatatggaagatttcatttagaagttgaaatggaacttaagaaaatgagtatggtttggacaattggagaccaggcaatatcatcccaggaagtgggaacagcatgagcagagcacgaggattggaaagcttatctcatgtttgtggaagagcaaattatagaatttgactgcaacataagatgtgtgaatgggaacatgaaaagggatagattgaggtacttcaatgccatggtgaacatttcctaaagaataggaaatctttgaaggattttgagctacaggatcattgattgttcagtcaacatacatgtattgagtgcccattatttgcctgcactgtactggagataaatgagtaaaagcagacatagtccctgctctcatggaatttagaagtagaaaaatattcatcgaataattacactactataaaattacatttatgacaaggctaaggagcatggtcctatgagaacctgtcagagagggacttagctcctgaaagaggtcaggaaaggattcctatcaggatcctttcatgttaaagtgaatcttaacatgagacctatgaaatgagtggcgttaactaggtgaagaggagcaaaagaaaagcaatacagataaaggtaatagcatatttgaagcccctgcagtcaaaggaaaaatggtgagcacagaaggacctgtacagaagaataatggaaggaatgaaaacagaaaggaagagcaaaggctcagaggctacccagagatttccatttaagtgatcccatgaaactgataagcattttggtctaaaatccttcaaaatattttgctgattgttcttataccttttataatatcaaaagtttataaattttatttttcaaacttttcttacaactatttcttttaatttttttcttcttatttccacctagttttaggaaacacaaggtaaaatcttttagtaacaatccttgagatctgccagtatccaatgctgtattttaagtaaaggtaattcacccacctagcattttaagaggaaaccataataacactattctcttgatatatagggttggatgtgtccagagcctgcatcagaaagggaggacttggtatattttgaacataaatcatttactaaattgtgcaaggagcatgatggagaatttactggcgaagacgaaagcagtgcacatgcactagaacggaagagtgacaaccccctagatatagctgtaaccaggctggctgatttggagcggaacattgaaagaaggtatctgaagagccccttaagtaccaccattcagatcaaactggataatgtgggcacagttactgtccctgctcctgcaccatccgttagtggtgatggtgacgggtaggttattgagattaacttgaaaaattattgtgcttctttgctaattggagcctattttctattgcctgttatctatgtatcttcttgtatgtctgtgatccatacggatcatgctatttgcatggtgctttgtaaaaactttttttttgttatgtgcgttgataatcctgcaaagtgatcttacatctacctggttgtgactaagctttgaggcacgtagccacagtctg

SEQ ID NO: 96797 - DNA, 2191 bp, Homo sapiens
cttctaatattccatttacatcatctgtacctagtctaggatcggggttagggttatcagaaggaaatggtaattcattcttgacttccaatgttgcttcaagtaaaagtgaatctccagtaccacagaatgaaaaggccacttcagctcaacctgcagctgttgaagtagcaaaaccagtagattttcctagtccaaaacctattccagaaggtaggtacattgagatggtttacagccacttactcaatttcaatattatggattcctgtattataactgaatatttgatggttctatatatagttaataaatctttttatttccatggtgtcatttcctattcaaaatatttgtaaaagttctacttatttatcttgacttagaaatgcagtttggttggtggagaattattgacccagaggacctaaaagctttgctcaaagtgctgcatctcagaggaataagagaaaaggcattacaaaaacaaattcagaaacatttggattatattactcaagcctgcctcaagaataaggatggtgtgtacctaaaagatatttcagctttctttcttgcttagttatgagaattaattattctaaaccatattttagtacagtctattggtccttcatattcatgggttccacatctatggattcaaccaatcgcagatcaaacagtcaaagaaagatgggtgcatctgtactgaacatatacaggcttttttttcttatcattcttccctaaataatatatagtataacaactatttccatagcatctacattgtctcaggtactataagtaacctagaaataacttgaagcatatgggaggatgtacatagattacatgcaaatagtacaccttttttttttttttttttttttttttgtgagagagtcttgctgtgtcacctaggctggagaatggtggtgcagtcatagctgactgcattctcaaagtcctgggctcaagcaatcttcctgcctcagccttctgagtagctgggactacaggcacatgcccccacacccagctagttttttttattttttgtagagacagggcctcactatgttgcccaggctggtctcgaactcctggcctcaagtgatcctctcacctcagcttcccaaagtgctaagattatgggcatgagccaccactcctggccaacaccattttatataagggatgtgaacatctctaggttttggtattcatgggggcagagggggtcctagaaccaatcccccacagatatcaagagagaaatgatatcttaatgcactactatttttttctgttttactcaacaaactatttatattttttaagttggtgttactgtcttgtaattttttacacccgtagcatattgttttgtgtttcttagcgtgtttctacttttaagagtaagctgcctgtacatacacaagtgcatttgtgtatgtcaagttagatgtacatgggtctcctagaattttattcactttctggaagaggtctctgtggggaaaagcttaataagtggatttttaaattaatttctttttaaatgtagttgctattattgaactgaatgaaaatgaagaaaaccaagtaactcgagatattgtggagaactggtcagtagaagaacaagcaatggaaatggatttgagtgtccttcaacaggtagaagatctagaaaggagagttgcatcagcaagtttgcaagtgaaggtaaaatcgacttggaataaaatatgtttttaggataatggaagataactaatgtttattacttgcctaatatatgctagttaatgtgctaaatgtttttattttgtctcatttaattctgaaaacaatcctggattaatttgccccatctgttaaggaaccaggctcagagtaagtaatgtgccaatggtcatatagtaagtgcctaaatgtgcatttaaaccaagtctgactccagagcccatgttctttttagtaatcttgctacctccttaatggtattcagaggtattatttccgatgcgcagttctttactaccagcagaattccagtttcactgagatgaatgtgatgatctagtacaaatattatcaaactcctattgtagtgtttcatatagggccatgaacttccttacatacaagccttgttatatgtcagacttttatactatat

SEQ ID NO: 96798 - DNA, 1012 bp, Homo sapiens
cactgtgcctggccatattatatgtattatttgttatatactgtaagcaatagaattgaattgaaccagtttgctttggctccataaaatacttgatcccattgtttattatcaagtaaaaggataagttttattttatcaggtagcttatccttttactccatggcaacaaaaataattatccttaaaatgatttctatctttataaatgttactgaaattgaagtcaggcatgaatatttagaccttttgctcttttcccagtagtgaaatttatgtgcttaaaggtacaataagtataaagttacatatatattaatttttaaagcatttaacatcccaaacctaattatatgtaccatttttttaacagcaacagagtcagtacagaaggaagctctttgatgcgtctcactcattgcgttcagtgatgtttggccaagatcgttacagacgccggtactggattcttccccaatgtggggggatttttgtagaaggcatggagagtggtgaaggttagaactcataatccgatacaaattgttaaataagaaactatatattttaaaactctgttacttcttcaatatattttgtgttcccataatcaatgtttggtaaacatgtaaaaccttaattctcattccttttgcactcataatgccccttcactgatacacacttcctcctagcccttgatattcttttgctactctttctgacatcagacataagctgttctttctttctttggtggacagagacttgtatttccatctatattaccttttatagctgctgctccatttctctttcttcccattgtcaaacttcccaataagtggtttattcttttacaataagcatacatcctgacagtaaccccctgcaggtaacttgcttaaatctaagatcttcatcataatcctcattccttttcaaatcttgttaatgtttgaaatttgtgatcacttccttctccttcagacttcttccttttttgaatttt

SEQ ID NO: 96799 - DNA, 1047 bp, Homo sapiens
attgtgtgtgtgtggtttgctatgttttgttttgtttcttctggggatagggtctgcaggctggagtgcagtggcatgatcatagctcactgcagccttgaacttctgggcttaaccaatcctcctgtgtcagcctcccaagtagctgggactgcaggaacaagccactaagctaattttatttttcgtagatactgggtctgactatgatgtccaggctggtctcaaattcctggcctcaaatgatcctgccacctcagcatcctaaagtgctgggattacagacatgagctaccatacctaggtttttgtgttttttttaaacataatgttttatgtatctctctaccagattattagtttatagaaaagaactgagtcttaatacctttccgcagtgcctataggagactttcattaaatatttactgattgaataaataaatcttaaaacagataaatgacactgtattttcttatgtataggatgaaggtgaccaagcagcaagtgttgaagagctggaaaaacagattgaaaaactgagtaaagtaagcacttttctgattaacatttaacttcttcacagtgttttagaaatctacattgtaaggggattagtttttctgactgctaagcaaaaataggcttttggtgagtaattaaaaatgaagattctgaatagcatttttgtcagaaaaaaaaataagatgaggaacactagaaacattcttacaattgaactttacaagcttaatgccaaggttaaaagcctgcctcttaaaacgtgatattgaacttaatcagagcctagaaagaaaatattctatactcttcagctcttcatataaatacaaaatgtcaattaaggcatagttttatttcttggaattaattactaaaaaattcagttgaatttcatagtaacagtttcagcatcttaggttttattttacatttgtatatttgtgggttttatttgcattggatttgtaaactgtggatgtatttacatacatcttgttaaaaattccatttcagaagtggtt

SEQ ID NO: 96800 - DNA, 1148 bp, Homo sapiens
cattccttcattccgtagagttgtgttgagacctatgggagtttaacctcacaagttggcctgtgagaggttctgtggacaattaaactctgacatatagggacatataatgatgctgttttttggttggggaactgtgactgggatagattctgtgttcttagttgttgttgctgctactacctttctgtctattcttccaaggtttttttaatgtctgaaaattttaagtactattagccaaaactcctttaaataaaactttaggagacattttatttctttttgcatcataggaagagtcttaaaaattgcagttagaatatttggctgatacatggcattttcaaatatttgatatctattttgaatatttattgattgaactgtatttttgcatgaacagattatcagacatttgtcctgctgatcagaagatcattttagaatctatatataaatattcacataaaagtcaagatttaagagttgttgagctagttatcttttgagttttcttttaattccaaatagaattcatgttactgttagcacaaataatgtgcctaaatacctttgtaactgggttccctaagtttgggtaaggagcggatgaatgagagataatggtacaactatgggagtctttttttcactttttttttcattgggtagtagccatactggtcagaaatatatatttgtgtgtggttggtgacagtgtggctttttataaatgcttataggaagtaaacatcaaaaacaagttgttatttttctttaatctgggctgtacctgcatcttcttattaaagtaggaacactgttggttactttcagatctgttcttacttagtcctcacaaaaccttcatgtagtaggtaacattatcaccaaatttacagatgaatagacttacaaaggttaagtaatttgcctatgtctagtagtgcagataagatccaaagaaacccgtgtaccttctgttcatgctttccctctaaaacctacaatttggagatagttcttctgttgtcattttctggaatgacaaatttcacacaattacttacaaaccttctatttatgaaattaggactatgcatgttaggaattatttttattctaaaaactcaatgtgttcaagt

SEQ ID NO: 96801 - DNA, 1812 bp, Homo sapiens
tatgaattgcaaagatagaatttaaacttttattgtctaaagaaaagataatgctcaatttagatgggatataaaattaataaaactcaggggcagaatttgcaatggacaaaagatataatgagattcattgagcttatattcttcatacttagaagaaagtcattttctctttttcttttaaacaagtcaagcaattacattttctaagattgtggttgctattaagttgcttttatcacaaacagaatgtttggaactgtaacttgttttcttaattgctttctaattaaaatttgcttttacggaatctagctaaacttattcagcattaaaacttaattatcttcctgccagaaaatatcaggcagaaattactcctatgttaagaggttagtttctttgtagtaatttgaattgaaatttattcagtcagttagtatgggatcagaaattattactcagccattgttagaattcttcttttcaactttcatcattttttttaatgagtctaattccaaagagatatctagaataactcttgaaagtgaatgcatcctgtaatttatggaaacatttcttaagtttcctaattctaattttttttaacattggtatatcgcttaacacaaaagaaatgccataaggtatttttgcatacaactcatgttttgctcttttaaaagtatattgagaagtctttttttccttgtcatcacttttcataatatttaaaggctcagaatcattcatgctaagaaaacaggcaaaagagacacttcaggtggcattgatctgggagaagagcagcatcccttgggcacacccactccaggacgcaagcgaagaaggaagggaggagacagtgattatgacgatgatgatgacgatgacagtgatgaccaaggggatgaagatgatgaggatgaagaagataaagaagacaaaaaaggaaaaaagactgatatctgtgaagatgaggtaatgaaatttaggttgattttaagacaactagaactgcataacatatttttaaaaacagaatttggagtcagatggattcggatttgaattcagttttgacatttacttgcctcagtttcctcatctgaaaaacaaatattacaatctgtatcccataaagatttttgtgatggttatgtaaatatcttgtagaatgtctatacataaaagacactaagactgaataaaagaagtttttttaatataatttcttgagaattctccaaagagatatgcagatttttaatttcaggtattttgtttcattctgttaacatactgtgttacatttgtacagcgcttcatgcctttaaaagtgttgtcaggtttagtgaaaataatgtattcctcaaacaccaattactatttctctagttctaggtatttttaatcaaagacgaataaggcactgaaagtcccatctcaatttacagtctcactgagaaggatttgcaaaaagaaaacataatgtgataactgctttgagaggggtattgacaatgtgctaggcagatacaacttaagagcatttagactttctgagtaataaactcccacaaagagtttctggacccatcagctcaggctataagctgagctgaacattaacctgggtaaaggtctagggaagagtgttccaggcagagagaaatgcatgaccaagggcacagaagcaggaaaccacaatgtgctttaaggggattgcaagtgcttcagtgttactggagtctcatatgcaacaatgatgaactaggatcttttgcttttttagtggcaggaagccac

SEQ ID NO: 96802 - DNA, 2024 bp, Homo sapiens
ttattaatggttgcttacttgtatgaagatacttcaagacactatgcttagttccatgggggttacagaaatgcccccagagaatttagcatcccaaaggaagctactggtacaatacaagaggggaaaaaaggtagcagcttattttactttagaagatacgaaatcatggcttttaaaaaattaagctgtttttattttatttgtatttcattttattttcagcctttgccagagttgcctcgtattccaggacttgttctctctggaagtacattttcagactgtctcatggtggtgcagttcttacgaaactttggtaaagttttgggctttgatgtgaatattgatgttccaaacctgagtgttcttcaagagggattgctaaatataggggacagcatgggtgaagtacaagacttgcttgtgaggctcctctcagctgctgtatgtgatccaggtctaataacaggatacaaggtaaaaaaaaacaaaatataaaatgttttaaatttgtactgtcagtgcattggtagatagctttagcatattagcagaagattatatagattgatctaatttttccacataatgtctcacaaagttaactgtagatttgtgtcaggttacacttcatacaaagaaaacctggttataaagcttaaggaatgtagaccattctcaagttattcttttttcctctagctgtaggcaaagaccaaggtgatttaaggaaatccttaagcgatattcatcaacaacagaattcataattcataaggcaactagaacttgtatgtgccttctgatattataccttgttctctctcaatcactgtgaataactgaagctaatcaaggcacctacagaccagcacgttaagaccctgtgctgctcagtggatcctcaataagttcatgtttatcttaattccaaatacagtatacattccagggagctttgctctagataatattgtggagagagaacctcccagatgcacctgtttttcttctatctccctcagtgtttccctatttattatccccagccagtaaaacctataacactttaagggtagaaaacaatactgttttttaacctccccactctgtcattcctgataaaatatccagatgaaacttggggaaaggttggtgtcgcttttatagtcatggaaggcttgataggtaatttaaaacttctgctacccatgaatttgcatactcttctccctgcctgacttggaaccaaggatttgaagcggggaaagaaagaaacaaatacttgaatatttgtctgtcttctattgactatttttgtgtctctttcattaaaaaaaaagtgaataaagctcttgtcagtagtatctaaatcaaataatatgaggatttttaatcttattgtttttatggtataaatggttgtgagtaatactgataaaaatgccaaacttttataggctaaaacagctcttggagaacatttgctgaatgttggtgtgaatcgagacaatgtttccgagattttacagatatttatggaagcccactgtggacaaactgagcttactgaaagtctgaagaccaaagcttttcaggctcacactccagcacagaaagcttcagtcctggctttcctgatcaatgaactggcatgcagcaagagtgtggtcaggtgagcatatgcccaggcttttccgtgatttttccattttgaatttttctaatcaaaaagtaatacaaattgattatagaaaattggaaagttacagactagcacaaagaagaaaattaaaattgtacttatctcagtatttagagatggccactaataatattttcatgtatttctttgtagtgtattgaaaaaaaatttggattatactgtgtgtctgtaatacgtggtctttgtcacctgttttgtttaataattctgttaattctttatacataactttttttatatttttagttgctatggtaccagaatgtggtaccaccacaagaatacagaatttttt

SEQ ID NO: 96803 - DNA, 1048 bp, Homo sapiens
actgattttacattctcttaagtgttgtttatggtggtgaataatatttttctttcctcacaggtgctgtcttaagactagctaattcactttgaaagaactacttgtgcaaattcaaacatgttacttccactttcctgctgtaaatcatttgcttgctggagccacactaaaatttgtgctaataactttatttaataagatatgtagttgcccatgttcattttatgtacctgcttgtattaataagtattttattcttataacttggcaaatgattgaacaaattttgaataacaaaatagtctaggtcaaatctaatattgatattaaatatatacagtcataagattattttgaaaattagagagtaagattaatgaaaagcaaaataattcaatgttgctacataattctaagtttattccaacatatataatgattaagaagaatatgtgtacatggttttctttttaaggaaaaagagcggttgaaacaagaaaaacgtgatgagaaaagattaaataaagagcgtaaactagagcagcgaagattagaattagaaatggcaaaggaactaaagaagcctaatgaagacatgtgcttagcagaccaaaaggtaatttatacgtcatgtacaccatttcattcataagtttaatttttccagttttcttacctgatttctttgccagagctgctattgtgaaagcctttcatttttaactatagcagtgaatttccaactctaggtcaatttgcctttcctagatagctagaagtaaacctctctggagctcttgtgctggtaatggcggtttttttgtttgtttgtttggttggttggttggttggttggttggttggttgttttcagacagggtcttactctgtcatttaggctggagagagggcagtggcaggattatagctcactgaagcctcaacttctcgttcccaggctcaagtggtcctctcacctcagtcttctgagttgctgggaccacaggcgcttgccaccatgcctggctagttttttgggtttttg

SEQ ID NO: 96804 - DNA, 1094 bp, Homo sapiens
cttattttcatactgtgcctttaagattccacctgtgagcccatggtgcagcttttgtggctttaaatagagtatcaggtggcagacatcagtaaataggaatatcccatttcattggtggtgtatgtgaaacaagactagtttaactaaattggtataaaagccttaaaaaaactctaatttattggtggcttattggatttgcaaaatgattttgtactgaaaataacctactctaaaatcatgaagttaaagtgactataaatcaatttcttcctgatctaaaattttaagaacaacacaaccgttagtttaattggccatagtatttgtggtttttctaatagcagatgtaaggtaactgacctgttccagccaaccattatgctttttgttctgccagcttttgaaggagcatcacaactgaccataagtaaatcttgtatgcttctgtttacactgtctccatgttcattgctttacctttttgcttttgattgttgtatttgctttctaaacctgaactaaaacatgcacagactggccattcttgtcttatatttagtatttactgtgacttgtctataaatgctaaacatgctatactgagtttttgttttgtttttgtttttgttttttcattggaaaatcaaactgttaattgtggctgagttattttccacattttatctggcctaataggaacgagagcgaaggcgacaacacatgatgcttatgaaagctatggaagctcgtaaaaaagcagaagtaagtgtatgtttctagaaaaatattaccttataaagtaatgctttttcctaaagcattggctcttctaaatataaatttttcagaatataggtttgttgtgatttactggttttcatatgcaaaccaaaagtttagagatagcaactgagtgttagaacataaaagaatgtaggaagagttccaatgtatgtgttagttttcctggctaagattttaattgtctttttttagtgtagtaaataacattggtttagataaaagtagctatttatcacaccagagtttcacaaaactagtattacagcatgcctagacaaatcctg

SEQ ID NO: 96805 - DNA, 1028 bp, Homo sapiens
agtcattcgttaaattttaagttaaaatgactactgaagaaagatccttgctaccatatttaccatattatatgatctctatgtaagtatttgttaggtagaagcatacaaaatcgaattgacattttataaataaaaaataattgaatattggccatttcatatggttcaacctaatgaaaaactatagaatctcagaaaaggaacttttaatacttttagcatgttctaaatcttctctaaaaatcacgtattaaaagtttcttatttttaaggaaaaagaaatgagaagacaacaagctgttcttctgaaacatcaggtctgtatatgtatagttatacaattgttgaatgtacattttataatattgcttaaacctatttgggggaaaatcttcaaaatattttctttaaaatttctgatataatttctgcttaagtttttccttcaacctacagtttattgccttgctttggtattggtgtctttttggggggttaaaaaattggttttatgactctgtgatttctgtttcataatgttgtgccaactctttctaccaggagttggagaggcatagactagatatggtatgggtatgtttatttttgtacatctaacaccgcattgtgatttggttgtgatatggttgtcatagcaatgcataaagtgtagcactggctgctgtcatattacatactgctgcatggctttacagcacagtgcattgcatacatctgcttgtctgtctataaagaagtatgatgcatctccaagattttacattgaattgtacaagccttaaataaggctgctctctaaaaatttacattactgatgtcacaaagaaagttggatcactatacaattagatataattatgacccgtattctcccatcattctagatgcaaaactgccattgaatacagtgggaattttgagtttgtttgatgagagaatatgaaatatattctggtttcatagacaaattttagaaataattttagaaatatccctttggagaa

SEQ ID NO: 96806 - DNA, 1032 bp, Homo sapiens
atgaaaaaatagctttcttcaaaatgactatctgaaaatatgtttagcagatactacatgtgtatagtgtatgtttttatttgtatgtatattgtatgtgtatttttattttattatgcagggttttttgtaatgctttgagctgtttaggagacatcaaatcagaaatgcaaattgttgcttaatacctgtatgtagttttgctagataagaatgaccccccccaaaactgttttgtgtgttatttatgtttatgtttatgtttatgtttaggcataaactagatatggtataggtatgtttatatttgagtctcaatctgattctcccctttataactttttctttgttaatattcagcaactgttttatctattaaaaatgaaaagcctacagaaacaaaagccaaacttcatcaactgttatttaccaataataaaattagctgcttttaattattttaacttcatgtatttgggggtgttttgttctgatttcctggcatggggtataggagagttgtccccttcctcccctcccccaccctgccgtccaccagtaactgaatactgaaagggggtagctgggtgagcctactggtactggaaacagccaccacagttatactttgtaaagccagggaactgtttattttttctacatagactgtcttactttattttttaaatttctaccttttcatgtctgccgttaatattaatttcatccatattgtaacttcatagaaatactgagatcagtgacattcctagaatggtttgccttaagccccatccccttggaatggtgccctgaattataggtggacatgaaaatttcacactgattgcctagtttttgtcactttaattcatacgtagtgtatagaaatgaaaaaaaaatgatgttaattatagagtatatttgagagtttatattcagaatggagagagttctaatcagctagatttgagggttgcaccataatgtattaaactgatttaaaaatacatgtgtgggttatatctgata

SEQ ID NO: 96807 - DNA, 1051 bp, Homo sapiens
aatgcataagccataaaaagtaaaatgtctacagttcttaatgaaaagagcctttttttctgagtcatttaatcagtaaatatgtgtggcaaatacttaatgtgccaggcagttttttctgtaagtagatgtcccctaaaggcattttcccatagagcaaattgtgaacacacctttcagtacagaaatgaagttgaaagcctgaatttgaagaaaaactaatgttcatagagaaactgaagaatacaaaaaaatgattgttggtttagagaagcttattctctgaggaagataaaacagtaggcacaatgctgcccagctaaaaattagggttttgttaataaggagtaagaggaggcttcacagtaaggtgggcaacacacagtttctggcacaattataatgctggtaattatttcgaattaagtgaagaacaaaagattggaagtcaacaaccagagttctaattcagctctgctgttaactgtcacacctaatgcaacatagccgtgggcacgaatggacactgagaacatgaaagatcagtaccagaaatctataagtccggaaatttatgtcactaatctaccaggtaggatttttgtggctaggcgaggcctatactaggaggacaactgtgtgaatccaaggatatagaaggaggagatattgaaagtcgttgactattagaggatgacatactttgagtaagtagaaagcatagtcagcattgtggaaacagttgtatcaaaccacatctttctcacttgtttttaatagatgacaccttttctcatggttcttactctttcacatctttaaagtgctatgtagtgtatggtataataagctatatgactagtgtgacttaagaatatctgtcataaagttgataatctatcaccctttcactgcctacctctggcactattaagtagctagaaatagacataatactaaattgaaaaggcataaggaaatccaacaaaattttgatttttttctcatgatgttaatttttttatgtgaattgtcaaatttcgtcgcaaat

SEQ ID NO: 96808 - DNA, 2611 bp, Homo sapiens
tatacagtgttttattgaaaaccatctaaaaataatgtataaattacagaaatacactaaatccaagttattaacatatacttttttaaagaaaagtttctaaactatcaatattattatttatattaatgaatgttttatattaaccaattgaatttttttaaaggcacttccaaaagaagaagagtaacagatgaacgtgaactgcgtattccattggaatatgggtatgcaaaataaggttttcctttttctttttcccccatatatttatgcaagtttgatgtatacttgatttctcattctctacaattaatagaagaagtacatagctgcatagtatttattagagcagaagagccggagcaaagggcaaggaatttggtatatcagaaaactgaaattaatcctgtttcctggaggtatggcagagctggggtgggatgatacagccaagtaggaacatgactgaaaaagaaccaagagcaaatcagatggcaaagggcaggagtacatgagactgtgagaagtttttgtgaagatagaattaaaggacagtaaaagccactttggtcaaaattgagggactcaaccagagtttggctaaaatggtttaattagaaatgacagcttttagactggatgtacgtgaaccccaagcagcagagagccaggtttactttactcctcccttaaagcttttcagatgtaaaaaatcagtacacattaacatgttactgaaatgtcagagtacccaaagtaatcaagtatgatttctaaaaattttgatggagtttaatatataaattgaataattaattttctagttgaattagctaaaaatctaaataattttgagagttaatgtatttgggttgtttgaggagtttatttttgttttcattttttatgttttctagagaacatgtatactttaacttatttttaatttttaaaagctttcttgaaattaagtatgtcataaccttcatttctgttatgtgtagctggcagagagagacaagaataagaaactttggagggcgccttcaaggagaagtagcatattatgctccatgtggaaagaaacttaggcagtaccctgaagtaataaaggtacatacttttcaccaaataatgtacatttggtgcctattaagcatgatcatgtacaaaaaaaaagtgtactcctttctcagataaagttccttgatactaaatattctcttgtatgggactattgtacttaacctaaattgatctcctataaatttagagccccttgatagaatatgcaaaacattagtgtcctgaagctagctatacatcaaagctgggttgtaattattaaaacctgaagtggaaaaatatgtgattttttcagtatctcagcagaaatggaataatggatatctcaagggacaatttcagcttcagtgcaaaaataagagtgggtgacttctatgaagccagagatggaccgcaggtatccactttttaaaaagtatagtctttgaaccaaaaagtagtaccataacctaaatgaagtaaatttcactacactctggagcattgcctttctttaattagttcatatggctatacatataactttgtggtaagcactcattaaggcctcaattaactatgtttcagtaacaaggagctttgacataataggtatctttttcatatttaagtaaattttttctgtttattaattcaaccaataactttacagtttatataggtataaaagcatctgcatcttcatatgaaatataggaaaacattagttttctgaaaagtacagctagttttaaaaactaatttgaatatgaagaccctattattataagtcagtccaaaagaggatatgtatgccctagtgttttggaagaatcttgtccatttgattatgccacgctatatgatgcattttcacaagtttgataagtttttttttgtcatttcttaaaattaggtgaatgaaatttctggtttttgcagaaattcagtttttacattaagtggtacacatttctgaacatatcaccacagctccctttgagcttacagtgttaagtacacatcctcaccagtcagcaaaaagaacccaccaaggagatctcatttcctgtatgttttctttaatgctttccctttgttccttagttgtattcagctgcatgtgcttattattccctttagctgcattgaaaggggtcccagttaaggagtgatgagacctagattcttgttaatccgtgaaatactcttgtaattctgaacaataacaaaataatgcccccttttccatccactttgttatctgccaaatagaaacgattataattacacttcttgtctcataggattatggcaagattaaaatgagatcatatgcataaaaatgtttcaaaaggctaaaatgctcagccagctgaagttgatattttccttcttccttgaacctctctctcttctgtcccattataatgcatagaaaagttttttggcaattaatattttctttgtgaatagggagcttttctatcctatcttaccctttaattttataattttgaaatggaaaaggtctccctcattc

SEQ ID NO: 96809 - DNA, 1010 bp, Homo sapiens
caggcattcccatcacagttaaagaaacaagagtcatcgaagagcctgaagaaggttattgcagctttgtcaaatccaaaagcaacctctagttcaccagcacatccaaaacaaacattagaaaacaaccacccaaatccattcttgacaaatgcacttttaggtaatcaccaaccaaatggagttattcaaagtgtcattcaagaagctcctctagcacttactaccaaaactaaaatgcagagcaagattaatgaaaacattgctgctgcaagtagcacccctttttcctcacctgtaaatctgagtacaagtgggagaagaacccctggcaatcagacacctgtaatgccctctgcctctcccatcctgcatagtcaagggaaggaaaaagcagttagcaataatgtaaacccagtaaaaacacagcatcactcccatcctgcaaaatctttagtggaacaattcagaggaacagattcagacattcccagtagtaaagattctgaagattcaaatgaggatgaagaggaagatgatgaagaagaagatgaggaagatgatgaagatgatgaatctgatgacagccaatcaggttattttcattttaaaatttaaagtatttctctaaatgctatgtgaaccaaacattttaaagggtttcttaattcagacttaaaatcagcgtcatttactatgtttcacacaactttgtgcatttctataatgagctcataaaatacaggagtaattgatactggaaatcctaagtcagattctcagcttgttattcatttgacattaaacaaataatcactttagggtgaatacaaatgatgcataaattaagacataatttcatcaacttgcttaatttttatttcattcaggaccactcttttttcatttcttctgctacttgttaaaatgcatcaccagctgttttgaacacagataaaattatagtcgtcattcagaaagtaccaaaaacctaaatctctatgaatgtt

SEQ ID NO: 96810 - DNA, 1012 bp, Homo sapiens
ttgctgattttagtgttaggagcccaggtctgatgctgacaacactactgattttaatttcaaggcaatcattttcaatgcagaattttaccttagattaagaaattcagctccttctgttaactcaaaggattttaataattctgctgctgttaatttttatgtaatattttaattatagtagcttaataaaattcatgattgtgttgttttcaaggggattctaatagttaaataagtttttgtttatagacataaattttatggcttaatagtttataatcttttccaagaaaattgtatttttctaaattgtttactcgggaatattactgtgcaaaggcacactaaagtagatcccacagaatgttgaatgtccatttccaccagcttagtatcttaaatctttgcttcaaagaagttcttgctcaggaagttattcattcagcaacctaaaattgttttttgagtacatatcaagcacagggttctgagcaatgtcttaggaagaccataaaggtgaataaatgagtgtttctaccctgaggaatttatcaaagatgttaagttatctccttagaggtataagtcatataggcatattctatgtatactaaaggtggtatggcataagagtacatatagtcaccaacttagaattgtttgacttggccgggcgcagtggctcacgcctgtaatcccagcactttgggaggccaaggcaggtggatcacgaggtcaagagatcgagactatcctggccaacatggtgcaaccccatctccactaaaaatacaaaaattacctaggcatggtggtgcatgcctgtagtcccagctacttgggaggctgaggcaggagaatcacttgaacccaggaggcagaggttgcagtgagccgagatcgcgccactgcactccagcctggtgacagagcaagactccatctcaaaaaataataataataataataataattctttgacttatgatctttcaacttcacaatggag

SEQ ID NO: 96811 - DNA, 1031 bp, Homo sapiens
ttcaggcacatcatcagacacctcaagtgaaggcattagtagcagtgattcagatgatctagaagaagatgaagaagaagaagatcaaagtattgaagaaagtgaagatgatgattctgattcagagagtgaagcacaacataaaagtaacaaccaggtataatttttttcatggacagtatccaaacattattcatatttaggaattaactggtttatcttgactctcaaagtctgtagttttaaagttaatcattactttgagttcatacttttgcccaagaaagaagatgaagaaatgtttttaaagggacatacggtatttcttttacgaatttttagatttttagatattatcataaggcattaagaacactttgaaagtacccgtttttatctccaggttttactgcttgatagtctttgtcttaatagatgttaggaacttaccttttcatttttatatctaggtgctattacatggtatttcagacccaaaagcagatggacagaaagcaactgaaaaagcccaggaaaaaagaatacaccagccattacctcttgcgtctgaatcccagactcactcattccaatcccagcagaagcagcctcaggttttgtcacagcagcttccatttattttccaaagctctcaggcaaaggaggaatctgtgaacaaacacaccagtgtaatacagtctacgggattggtgtccaatgtgaaacctttatctttggtaaatcaagccaaaaaggaaacttacatgaaactcatagttccttctcctgatgttcttaaagcagggaataaaaatacctctgaagaatctagtttattgaccagtgaattgagatccaaacgggtgagttacaaattatttatacaagaattttactattagagaaagatagagcttctatattgtcttacaatacacaagtttaagttaaattctaccttcatttttatactttcttagtctccaggaatagaatatgtacagcagaaaactaaatttctctgattttat

SEQ ID NO: 96812 - DNA, 1060 bp, Homo sapiens
actcatatgaatgttacctgaatcaatgttcagaagacacaataaaaagactacagatttgcaatctgtaaccgtggcttcaatttggctctctgttgtggagatatattactgtatttcattccccaatcccgagtagtcataaaaggatgtatttctgttaagatcataacttttgtaatttattgttattttttctatattttgttctttatcagcaaatgccattaaaatgttcctagattgtacttaatcttgtggctccatcatttcaatgtttctccttttcagtctttctattggtgaaattttaactttcccattgttaaataattatgaatattttcaataatctacatgacagagcttgtactttttattgaggagttcttttataagttaattgattggtttgttaatttgttataatacatctcatgatttttcctctttttgtccactactattatgttttcttgaacacaaaacttcacttttatgtgacctaataaccactttctaccagctttggattttatttttcttgcagagtcttaaatgttccaaaaataaatctctctcgtcatatttatctacctcatcttctaccttttttttaatattttctgaaatgaaacataaacagttaaattccttgaccctaactaaagcagccccataggtcttttgctaccctactttatcttctctacagcacttattattatatggaataatttgcttttatattaagcatttgtgtaccctcccctatcaccagcactagtaagtttcttgaaggcaaggactcagtcttggacatacccagaaaggtgtgtgtggcatgttataggtaaatgtttggctactgactcactgtctgcaaaaagaaagaagactaaagctaaatgtgtaacttttgatgtatgtatcatagttggaattattttgtgaactgatctttttaatctgtcatacattttgaagaataacagtcatatgagtacatctacacatatgctatattgatattttcaatattctacatgacagagcttgc

SEQ ID NO: 96813 - DNA, 1976 bp, Homo sapiens
cagcatcaagctccatatattttctggaacaaatgaaacagaactgaacaaatacatttattttcttttgctgagcatatttcatagatatatttcctctaaatctttaaatttccttctcaatagaaaacattttccagagtataacatgcttatatgaagacttgggggaaggccatctggtaatgctaagaagcttgacggtacccatcacaaaaatgcaaaagtactgtacataggccccaagacaaccattttctttccctttcaacctacaccactgagcactgaagcaaacatgataaaagattcttaattgtttcctcccagggacacaggtatcagtgtcatactctccacctgttgttctgtacctgctcttggctcttctcccataggatttgtttcaatggcagtctcggtgtaagcgctaaggtcctatctctgagctactgccagtttctctgatgccagacactgactgaaaccatccatttctgattcccatattattttgaaccaaatcccagacatcatatcattggatgcatttttatatgtgcttccaaaagttaaatgcccatgcttttaacccttatgctatcctacctcttaagaagtagtgctaaaatcaagtaaaatctttgttgcctctacaatgtgtaaggcattgtacaagatcttggaggcatgaatatgacacagttcctgtacttagttctaatgaggaatctacattgacattcctaaacagaatcagtgctgtcatactaaaaactgttactaggagaacatactgaaaactcaaagaggcacctctttctacccagttttagagatagattctgaggtaccatagtagtgtctaaggcaactaagcagaaataacattatagagagattgtctattcaagtgaggcatactagaacttatgatttcaaaagaacagcactttcagatgatatgtggttcagcatgggtttgtgggagtgggttgctcaagtaaaatggagataaagggcattggaactaaagaagaaaatcctatactttttcacccagtatttcttcagttttcaaaacttttttaaaaagttgcttcattcattcttttcacatgtagtttgaaaaaaaagttcagctaattttgatacctcccatgggaggtggggtacttatctcagccattctcattgaaagtcattgattaagtccagtcccctcatatagtctgcatatacatttagaataaatattgatattttaattaaataattaaactaagactaaaatatacagcctgttaagaaaagaataaaacaattcaaggttgaatgagttttatcccaactgtcgtacaagttattcttaccacaacaaccaaaatagcctttaaaaacatatctgattttttatggtttgaaagtatcacatgttagggaatagtaaatgatactgccactgtggaaaacagtatggcagttcctcaaaaaattaaaaattgaattaccatttgattctgcaattctacttctgggtatataccacccaaaattgaaagcagtgtctcaaagaggtatctgtatacccatactcatagcagcattgttcacaatggctgaaatgtagacacaaccaaagtgtctatcaacagataactggataagcaaaatacatggggaggcacatgtgtacacatacataaatacatgttagtattatccagctttaaaaaggaaggaaattctgatatttgctacagcatggatgaaccttgaggacattattatacaaagtgaagtaaaccagatgcaaaaggacaaatactgtactgtatgattccacttatttgaggtacttagactcatcagaattatagaccgaagtagaatgattgttgccagtggctagcatggaaggagggatgggaagttagtgtttaataggtatagaatttcagttttataggatggat

SEQ ID NO: 96814 - DNA, 1154 bp, Homo sapiens
ggtgcatgctaccacaccgaggtaatttttacattttttgcagagatgggatctcactatgttgccaaggctggtcttgaacacctgagctcaagggatccaccgcctcagcctcccaaagtgctgggattgcaggcatgaaccaccacatgtggctgggacttctttttctggttctagtgttttcttctttttcttacgctgtggctgccaatgggtggcttgcttgctggctgacagcttctctactggtggtatccaggagatccagtggtggtcaggagacccagtagtatacactgtctagtgagtttcattggcatctcagcaggcagtttactagcaagttttgaaaagtaggtggctttcaaactaattttactgccactgtagctgacaggttcccagccatgtttttctggtatcttagcaagcagtgttttgtgtgtgtcagccttgactgtgatacctcattgagtttctctgccatccagtgggcaatagccacatcctctcccacaaagtctgaaacttagccttgggtgaatgaaggggttgggggaaaaagtcccttttcaaaggttatctttatttcattactctaccttagccctacaaaaagtacatattccctacatctccttttcctgtattatttagaggtcactttattcctcttagtagttaatcttctgttattaatcaataattctttatgttaaatttttcctgttcagattgttaatgcgatttcttcctcctgagtagatcttgttggctcttatcattggttccaggagtagggtgggtatgcagcttgcaggtggtaaattcacttctacattctgatcactctgcacttttggattccctcttccacattatgtcagaagctgtgacatctcaattttataaaatgtaggtcatcattgagtccaggtttcatttatctaactaagtaagctgagaagcctctaactatatgatctagcatattatgtattagaacactcttatcagtggatttagtctgctccaatttttaatttcttcttgagtgagaggtcccagttaaagccttgtcatcaactgcaaacatttgggaaacaaagataagagttgtgtcttctcttctgtgttttataaaaactgct

SEQ ID NO: 96815 - DNA, 2947 bp, Homo sapiens
ctaggtagaacttagctttcaaacttataaataacaagattgtgactgtgctgatacaagcccaaaacacatactttttcttcctatctaaatgtacatctttcatctaaacggtggataaatgatcaatgcttttgtatagttattcttggttcagttcccattgttcaggcatggctgaatatacattggtgtcattttactagtaatgccttcctgcagtgcagaagaatagcttttgcagttttctacttatactgttttttagacctttgagactggcagctaccatgaaaatttcacttttcttttaaaccagattttgccattagataatgaaggtgcataccattttacattctatttttaatgaaggatattcctagaaaagtttttaatattatataatataaagactgacaattttgagtttctcccatactgtattgttgtgggtttttttcctctaatgttcttatggttgtcacagtcaatgaaaaataccccatatcttttgggagattggtctgaaagataataactgatttggtaatctagcagactagccagttggagaagattgtttttgagattttagatgggtcaatataagattacttcatccttccttgaaaaatgtataaaatttggcttatttccttttctaaaactttaagagacactatttaagtatttaccttttattgaatgattttctaccactggtcattttatatcaataaaacaatcattgttatctgtaattaatgagtggaagtaaaaacaaaattcaggctttcatcattaactttaaggggagaggctttataaatctttaatattttaatgtgaaattacttgtttttgaaatctcctttgagaacttattttttagaacataaaaaggcctactgattttgctatatttatggttatctttaagtatagaagttttcttccataaatgtacttgagatatagtggattacaatagtcttatattattatttagactaactgatttatcagagccagatttatattgtatgtaatttgaggaaagtcttaacataggttgtagatgtaaacttaaattctaagggtttgaaacagatgagaaaagttatgggataagtcatcaaagagtgaaatacttcttttatattccaagttttcactttcattttttaaactatggactacctttgtcctttacaagtttgaactctacaaagctgccaagtgaagatccttagatactgacctaatgagaagagtgataagtgtacaagttctactgtttagaattaggaaaatgatcagaagtatgagtaattcagttttgttccaagatgaaacttgaaatttttttaaataaaacatagaaagccattgtgacgttaactggaaagttaatttatatatttttgtttggttggtttgtttggttttgaggtgcagaatggtggcgaacaactgatgctcatactcgtacaggagcaaccttctttccaccattactgggaattccaccactatttgctcccccagcccagaatcatgattcttcttcattccattcaaggacttcgggaaaaagtaatcgaaatggtcccgaaaaaggtatccacatttacataagtgaagtactataaatcttccattctaatattattttcataatgttcaggtttaatacctttttttgttttttgtttttgtttgtttgtttgttttaatagagacaaggtctcactcttttgcccaggctggagtacagttgtatgatcatagcttactgtagcctcgtcctcctgggctcaagcaatcctcctgcctcagcctcccaaggactacagtcatgtaccactatgcccagctacgtgtttaaattttatttttattttttgtagcaacagggtctctgtgtttccagcagtctcaaacttctggccaccttctggcctcaagcaatactcacacctcagcctccaaaagcgctgggatcacaagcgtaggccaccacacccggccttaataacagttttatagtgttatgctagaccttttcacattttcttgcttaattcttaaaataattctttgagattagaagtattttaattttacagccaaggtcaaataagttgttcaagaaaatactacttacatatggatgtggcctagtcaggattttagcccaattctactgttttttcctctgtatttcattacctccctatatgtaacccaatatagtgtgttacttcttttgtaattaagtattaacttcattaaaattaataacctagtacttttttaaatgatcactaatatttctgcaattaataacttgttagaatataatttgaaaattataacaacattttagatgatttactatctttcttttcactgaagtgttttacaaagttctctaatgtgttttacaattaaaacacaaagttttgcatttcattatctttctaaacattttgtttaattgaggtgaaattcacttaacataatattaaccatcttaaagtgaataatttactggtatttaatgcatttgcagtgttgtacaaccaccacctctatcttgttctgaaacatttttatcactgcaaaaggaaactttgtacccattaagcagttgcctcccattcccctctctctcagccctggaagcgatcagttttcactttgtccctgtaggtttacctgctctgaatatttcatgtagatggaatcatacaacatgaccttttctgtcttctttcacttatcatattttcaagttcatccaactgtacatatatctgtacttcatttttaaatgatgcaataatattccattgtataaacatgtttatttttattttcaaggtgtaaatgggtcaataaatggaagtaatacatcatctgtaattggtatcaacacatc

SEQ ID NO: 96816 - DNA, 2374 bp, Homo sapiens
aatgcatccccatcattaaacaactcatgactgtgttagagaacagagcttcaactctggcatgttgaaactgggatggccttgcttagagtgtataataatttgagtattgacctggtgacagatcctggacttatttcagtggctttcaaccttagattaataggatgttttttatttcccttcttatgagtaaaatatattgaaaatatattaatgtatatatattaacagaaaattggcctcacttcctcaggtcagacaattttaattagtgaaaattatctacttaaaacattggttctcaaatctcaaattcaaaagttaatttatgccatttattttaatgatttttagcatgtcttcatgtttctagaaacattttatagggtttgaagagtagaaaatgcagcaggaaaagggtaaaataaaaatgtaataggtaaattattataaattttaactataaacactgaaatcagataagtctcatctgttttttatagtacaactttaagtgtgtttttttccctcccaggacatttattcagaacagctggggatcaaccgtttaacctgtccacagtgtcgagtgccttcccaatggtcagccacccagtctttggtctacattcagccagctcagggcattcagaatttggtggtttggggacacttggtacacccacagccttagccgcacatccccaactagcatcttttccaggtaaacatctgttacaaacagtgttcaagggaaggaggaaagcttgagaatgttcaagcaataatttgtctattgaacaaaaggaatagtctaatgcctggtatatttaaaactttggtgcaagaattggcttaatcctatttatcatgtgcaaaaaattaaacaccctaagtgtgttaggtggcagagcagttaattagatatccaggtatttaactagagaaataggtgtctgtcacaggagagagtaattcaggcaagtttttctcatgtttttttgttgaagtataatatacagaaaagtatacatagtgtaaatgtagagttgaattaatttttctcagccttatttgattttttaaaaaattatttagtgtgaaactaaagttcaggttttatgagtatttttacactcctatttcaaggtcttacttttcttcactgtaaggaaaatgagctagactcttaaatttctttatttttctgttttttgtttgttttgttttgttttctgaaacgaaatcttgctctgttgcccaggctagagcgcagtggtgcagtctcagctcactgcaacctccgccttctaggttcaagcagttctcctgtctcagcctcccgagtagctgggattacagccacgcaccatcatgtctggctaatttttgtatttttagtagagacggggtttcgccatgttggccaggctggtcttgaactcctgacctcaagtgatccgcccacctcggcctcacagagtgctggaattacaggtgtgagccactgtgcccagcctatttttctgtatttgatcaaaacaactagagagttgtaccacttacatggaagaagaccagtattatccaaaattctatagataatgaggatttagtagttcagtaagacatcagttaattaaaactttcgacaaacgtgcttcaatttgttatattatcttgaaagcctaaatttgtatgtattttctatagattaatttggctttaataaattttagtgaggtctgcatgttttagtgtatgtaagataatttaaaacgttatagcataattctagagacaaataggcctgaatttaaatctggctttgttagttcatagctgtgtgaccttgaacaaattatctgacctcttagcctcagttttctcatctgaaaaacgagaatcataataatagtatctgacttacagggttcttgtgaggattaaaggagttaagtcatatgtagtgctgagtacagtatctggtgcacataattagtccataattggtaactatcattattatttcattttgcccactttaatggttaataatttatcaaatccttccttaaaaggaaagaagtgtttttaaaactacgtgtagaaaggatagatggttaaatgtgtgtttcaagtactgtttcttgagtcatattacttctttaattcagttgtctgggaagcagggatgctaaggaggagtaatgtgagtggacagttaaagaagtcttaaaccaagttttaacatttccttcaaaaatattaataggaatttattcagtttctagcatggttgtttagcaagatgagcattccacagatatttactgaaatacaagattgctgaataaatatcaaaatagat

SEQ ID NO: 96817 - DNA, 1004 bp, Homo sapiens
ccacatgtcattccttttagagttaaaaaagaactttttgttgtcaaagtatgtatcattggttcttcattgttgccacaagagtgataacttcatttatttactgcttatgttttctgcttgtgagactacaaagtttagcttgtttgcttcttcccaataatgaaattaatgctgtaactatgcatctaagaatgctgcttactaccaattatgtattacttattatttattactaccaattatttattacttactaccaattattaccaattagttattacaactaattgtaattacagttagttattgcagaagtgtttctatcagtttctaatccttgataatttcaattattctggatttttgtaatatttaatatagcttttgtaattttgaggttacttccctcaaatttctttgtattaaatcacaactacatacatgtaattgatataatttaggaattgttatttgtaaaacataaattacagatgaccccaaattctccaaaactgcaatgttcagttcaacttgcttaccacacaaattgatggagaaagaaaagaactgatcatagtatgtttataaataaaacatttaacaacatttgagtcaggaagttgaattgactggtgagaaccagagattttatatgtaataacaaatgaaagtaaaaactggtttttatagttacaagctcatttttttgagaaactagctgggtttctgagaatttgccaaaaaaaaaaaaaaaaaaaaaaaaaccacaatatttctggtaacctatcactggtcttaaagataatgacatttgggtagcttttttggcagtagcatactctgttttattttgactcatcttcagtgctaatgcagtccactctgataaaacagaagaaccaattcaacaaaaacaatgattagctgatttagaagagacacccaagtttatgccctttccttgtcctcttacctcacagtatccttgtgggccttccttg

SEQ ID NO: 96818 - DNA, 1008 bp, Homo sapiens
gttgttatgaggactttaattaatatcagtaataacttagtgtaatagcaaaaagaacatcatcaaaattactgtaaatcaaagcaatattcaaattactggctcacatattaaaattcttaagtatattaatgtttaaatatttctgaactcaaaatgtccaaattctgtaaacttgaactttgattaagaacagaaagaagtctacagttactggtgacaaaacatttctctccaagtaattctcatttcactcttgcattctaaaaatgctttgagccagttaacctttatatataattttagaacaaaacaggtatatttctattagactatctcatacagaagatagtgtggtatggatggatagtatggatgacaaataatacaaatatattttatttgaaataaacaaaaatgcatacacagctcaatgggtacttggaaacaaactgttccttgactatattactgagcaaaaacagaactgaagcacaaacacgttttttttttacatgtatgtggagataggcaggaagacattacttgttttttttttaaactgaccttcccttaaggcctggtcatagaactgtaagcaatgtaaatgaatccaccattaccagttgttatattatatctatgtcacctgtgtattctgagattacacacatacctgccaatatacctgggacaggttattttatcacagttacacttgagttcttggcaggcaggactgaggaagagtaatctgaaataagttttacatcctatttagaagaaatcgttagtatttccttaaataacaggttacaatagaaagatactgcctggaagttatccttttcattttggttcattttcagtttttgtttatgatttacatagctgtttaattcatttgcttatagtacaatcctgccataaagtattaaagcacaagatacctgttattccttcaacatctgcatttttcaagttttatactctatatccacagtatgt

SEQ ID NO: 96819 - DNA, 1614 bp, Homo sapiens
agactgtagtacagcctctttaggtgctggtggatcagtaaaaaccactgcagtatcagaagtgcttggaaggataggggtagaaagtaatgaccatataccttgtctaaatcagtagcagcgcttcatggctaggaaacttttttaaacagtaaaatgtctctaggatagatctctctctccaacattaaatgtggcagaattaaaaaaaaaagacttacacttggatatagcaataacagaaaattacaaagcagagaacacaaaagaatcagacaatgctataggttcaacagtattccatgaggttagaaaactggttaactttgaaagctctagcaaaatatcactcttgtttataaatcacttatttatcatatgaccacatgttgaatccttgtctttccacatactgaagaatcctacattcagcctttaggcattctgcatttctttgctaatgttgtagctgagtaatcttgttccagtcaattttggtgcgggtaaccggaagctgccggcgcaagaccttgaatgtggtatctgacattgtttgacagttttcactaattgctgtctgatattcattttctgcattctctatgattttaataaactccttggcagtttgtgcgtcattcgaaacagttagcgaatcctgtacatctttatgactaaccaactgaacactgccatcttcgtaatagtgaacctgaatcttaagcactccaaccacctgggctgtaggtggtgtgatggtaaacttccactctgatctccaacgaccattccagaagtttttaggctgacactcatggctttcaatacatgcaataatagtctgttgcccatcgatagtttttagcataaacagtacagaagccgttggaataatggtctttcacataggctcttaaagcactgtcacaggattctctccaagacttcagacctccatctacttgttttggctgggggtcacttgcttttttctataagtgatcaaatgtaaaggaaattttgtttcttggatctaaaactctgctattacccaggtcccccatgctctgtaattatgacctgatcttcacatccttccatcttcacgggtgtgaactgatccatgttataatgggcaaatgcacgtgctgccctttccctgaggagactgtcattattacatagtagccgaatatcactgaatacttcattaaattctcctgcgggtgcatgagtgatgaatttagcagctatgcataccttctccttatccaacacacaatcattgaagttggccatcttgggctgttctcaacatttatattttgacacttaaaaaagacgattccttaacgtgtctattgttaatcgttctgcaatgaacatgggagtgcagacatctcttagacaaactgtttacaagtcctttgggtaaatcccacaaacaggatggctggattatatggtaattctatttttagttttttgaggaacctccatactattttctataaaggctgtactaatttacatccccattaacagtgtacaagcgttcccttttctccacatccttgccaatacttgtcttttgtctagttgagaaaagccaat

SEQ ID NO: 96820 - DNA, 2204 bp, Homo sapiens
gtgaaacatctgggcctggagagttttggttgtttgtttgtttaagttgttgttgttgttgtaagatactaaatcatgaattcaccttttaaaatgtaggtataggccgggcatggtggctcatgcctgtaatcccagcactttgggaggccgaggcaggcaggtcacttgaggtcaggagttcgagacctgcctcgccaacatgatgaaaccgcgtctctactaaaaatatatataaaaaattagccaggcatggtggcgggcacctgtaatcccagctacctgagaggctgaggcaggggaatcgcttgaacctgggaggcagaggttgcattgagccgagattgtaccaccgcactccagcctgggtgacagagcgagactcggtctcaaaaataaataaataaataaaataagtaaaaaatgtaggcatagaacaattcaggatatctttttctctttgaatgagctttggttggtgtctttcaaggaattcgttcatttcgtctacatcattaaatgtatgggcccaaagttgttccagatattgcctcattcttttaatgtctgtatgattggtagagagattttttctttcatcgttgatatacataacttatgtcttttctttttagtgactagaggtttttcaactttacagatttttttaagaacaagcttttggtttcattgagttttctcaattttctgttttttttctctcattaattatttccttctgtttttctatgggtatgattttctctttttccctacttttttttttttttttttgagacagagtcttgaactaacgcctgggctgagtgcaatggctcaatctcagctcactgcaacctctgcctcccgtgttcaagcaattctcctgcctcagcctcccaagtagatgtgattacaggcacccaccaccacacctagctaatttttttatatttttatttttagtagagacggggtttcactgtgttggccatgctggtcttgaactcctgaacttgtgaaccacccgcctcggcctcccaaagtgttgggattacaggcgttagccaccgcacaaggccttttcctactttctagagggaagcttagatcgtttatctagcacctttgtccttttcttatatatgtatttaatgctatgaatttcccttgtaattactgctgtagctgcggcacataagttttatgtgtcattttcttaccattccagtaaaaacattttctattttcctttgttaattcttctttggctgatgggtagtttggaagtcattaacatttagtttttaaaatcgatatccattttagttttactgtggttagaaaatgtactgataatatttgtgctatgattcttttggcttcccacttctgctttttcatgctagactcctctgggtctcctctgtacctgtgaaaattcttgattggcaaagtatttaggcagagatgggtctcctttcctctgtttcttttttgggttttgtttttgttgttgttgttgttgttgtttttcttctaagattaccccctaattttcagttgctctgcctgctttgggctcagtgctgtgacacttcgtacttcctgccgcctgagataatcatgatgagggagtgcacttagtaaataaatacatcaaacccagcagatctgctatatacagctctgcttttcaagagtagatttatcttcattctctgccagctagtttgtgctgaccctggagtcctttttcattcatgcacagtatacttgcagctaggcgtttggatagtttaaattgaatttgggtctcatacttgctgtggtttgctcactaccaagatttcccctttacattttgagatgctgccttagctctgaattctgacctcttgcacctttagttgataagcctgctgttttttatttgaccatcatctgtagttataactatgtgatttaggcagcagaccagaaagctacaaagtcatactttttacttcttgttaaccattggtccagactaaactctcctctgccattcttctgcttttggatgctttccagtatttcagggggctttttaaagcccaattttagtaattattctctgtggaggatttatacgaccacctcactccaccattaccagcagttgtctccgaccccaaaataaatcacttaatttaaaaaaattt

SEQ ID NO: 96821 - DNA, 1112 bp, Homo sapiens
gcctttagtgaatttgagaagtttgatataaatatggaaaagcagagtttattggcacaaatagatttcttggttggcaagttaaattttaaggttcaatctggacagagtgctatgtgcctgtagtctcaactacgcaggaagctgaggcaggaggattgcttgaggccaggagttagaggctaaagtgcactagggtctgcctgtgaatatccactgcacttgggcctgggcaacatggtaagaccctcatctcttaaaaaaaatttttaaggtttcaacactttattaaaattaagaggccattgggagatatacctaatgctagatgacgagttagtgggtgcagcacaccagcatggcacatgtatacatatgtaactaacctgcacattgtgcacatgtaccctaaaacttaaagtataataataataaattaaaaaaataaaataaagaagtattacaaaaaaaaaattaagaggcctaagtgccaacatgcatctcttatcagaagaatttgtataatattctttgcaagtcatgtttatttaatgttaggataaatatactaatcaacatttatgcttttgccttactaagtttacagtatattcagaaaacattaaagcaaaatatagatgtttggcatattttattcaattcactactttgtgggaacttttgaagagattttctgatttgccagaagaagccagatatcggccaggcgcggtggctcacacctgtaatcccagcactttgggaggccgaggcaggtggattacctgaggtcaggagtttgagaccagcctggccaaagtggtgaaaccctgtctctactaaaaatacaaaaaattagccgggcgtggtgggaggcacctgtaattccagctacttgggaggctgaggcaggagaattgcttgaacccgggagggggaggttgcagtgagctgagatcacaccattgcactccagccagggcaacaagagtgaaactccatctcaaaaataaataaataaataaaaaagaagaaggcagataaaaaataaaaaattgttatatagtacaatgttataagtgacttaattagggaatacacaagattaacag

SEQ ID NO: 96822 - DNA, 1106 bp, Homo sapiens
tatatgtatatgtgtacatatatacatacaaatgtacatttatacatacacactagtatgtataaatgtacatatatacacagttgctcatatatacatgtacatatatacatatatttgtgtatacatatccatatatttgtacatatatacaaatgtacatatatacatatgtttgtacatatatgcaaatacatattaaatatgtatatatgtatatcacatttgtttattcattcatcttttgagggatataggtgtacaagtatgttttcaagtccctgttttcaattcatgtagtaattttacattaactttttggaggaaccacaaaactgtttccagatagctgaatcaagcattgattttattctgttacactgtatagtgaatgtaaaagattaggctgaatgaatactggcttcagcacatacagggtatttttcttaaaagagaggaaaaaagccatatgtgttatgtgtgaaaacatatgtatgtgtaaatagccacctcttaaagtgaacttttaaaaaataattaagccttctggttgtatgtaaccccagttttgtaatattttctagaagtggtcgttgagtttgaatttcttagtccctaggaacaatgttataaaaggatgtttccacaagtaattagaattaaaagtgtatttctgcccatttttaagatatctattagttgccttttttgcattataatataaaatcactgaattatatctgactggaaagtgtttccaatatattctttttagtcaatttattttctttgatatatgttaatattttatattttataagtgagagagaggactataatgatttcattcagcatttttgagatcactcttacaagtataaattctggaattcaatatggattaggagaacaatgtttacctatcttttcatagatcagtgagggaccactaagccaaaaggcagggattatttcactggcttgataaggttataagagtgaggaaatggggagcaatattaaaacagggaaactttgacctaattacaagtttccctaagagggatatataatatcacaaacccacaaacagtaatgaattacca

SEQ ID NO: 96823 - DNA, 1059 bp, Homo sapiens
gtgttgggtgcctgtaatcccagctacttgggaggctgagtcaggagaatcacttgaacccaggaggcagaggttgcagtgagctgagatcacgccattgcactccagcctgggtgacaagagcaaaactccatctcaaaaaagaaagaaagaaagaaatgtccagagaatgagtattctgattaattttttctggaatagtttgtcttaacattattaaaatttgatgtatttgtgcaagtataaaattgaatattttttgatgatttgaagacatagagggctactgggtcctgatttgacaatctgcgctattactaatctagtttggtaaataaagtataaacaaatattaaatgagtcttgatttgataatttgagcaaccagtctagttttataagcaaagtgtaatcaaatattaaatgtgttacagtaattaaaaaaaccagagatgtcaaaaggagcataagattaattgcttaatgagtgatatgtaagtaaaatattatgagttgacagtaagagagcggtcattggaatgaccaggaaagctcctttaaggaaaaggaactagaacagtatcttcaagcactgaagaaggacttcaaacattaatttttacaaatagcttttttgagatataattcacataccatacagttcacccatttaaagtatatagtttaatggattttggtatattacattttttttacattgcagtaaaatatctataacataaaatttgtcattttaaccatttttatctacacaatccagtggtcttaattacattcacagcgctgtacaaccatcattagtgtatttccaaaattttttcatcatcccaaacagaaactctgtaaccattaagtaataataactcctggtcagatgcagtggctcatgcctgaatcccagcactttggaaggctgagacggggtctcaaggatcacttgagaccaggagttcaaggccagcctgggcaatgtagtgagacctttgctctacaaaaataaaataaaatagctgggcatggtggcacacgcctgtggtc

SEQ ID NO: 96824 - DNA, 1824 bp, Homo sapiens
aaattgttcagagtagagggaagaatgtatgtatatatgtattatggacatataagtgcaggtgatctatgtagtaagatgtttaatttttaaactgtagtattaggtatgttgattatataaaaagaaaacataagattatgaaaaatcaaaagtagttactgaagaatgttatagaacctaacatctaggaatgttaaaaaatgggataatgtaaatagactccttcttttgttgaaagaattaaggtagtttctttcacataatgcttatcagggttattttaggtaactcagtaatttttgatataaattactggcatattctgaggagattctaaaggttaagtttgtgagtattctagcttagtcaagttatcaaagtaaaagttataatagtgcctctattttaatttataataagtaatttatgtcatttattgaatacttactatatgcaaacctctgggctaattcttttgtcatttactattcatgataatcacatgaggtggaggtaccattattacttccatttttatcaatgagaaagtaattgtagagaatttaaataatttgattaaggtccttagccagtaaataccagagccagactgaaaacactaacacaattcagaatccagaacagtctccagtgtcatacccttaaccattgtgtttatattttggagatagtaaaggtgcttacacacttgatttggatggttttatttttttcattaatttatcaaatattatggaatgcctaagtatcaggcactttaaggaattacaggcaatagcattataaagcagtacaaaatcccttgtctcaaggagcctgcagtctagtggaagaggcagaaaattaataggctgttaacagtacaatgtgataactgataaaatataggtcagtacagaatgctaaaggtgacgcaaaggagagatatccaatgtattgttttatttccgtatttaatttgcatatttgtgtggtgttctaggtacatgggaaatatcagcaaatgaaactttcaaaggtctctgcttttgtggcacatgtagtaggagtggagattaataataataaataaactgcatagcattttagaagatgacaaatgttatgaagtaaagaaaaaggagcaggatgtgaaggttaggtgatgatgggattcaggggctgaggaaggattcacaaaaaagatgatgttgaggaaagattaaggaagttagctatgtggatacctttggaaagtcttccaggcagagggcatgaggcaggagcatgactggtttgctcagggaaatgaatggttgtcattgtgagtacgggtatggagagagagagtaagaggaggtattgtcaaaggaaatgagtgagtgggttattcatgtagggcctcagtggggactttgaggagccactccagggctttcagtatttttaaaaaggatcactccagctgctatgtttagaatagactatatgtaaggagtcatggaccaccagttagaaggttcttagagtaatctaaatgagagaaggtagtggcctagtagcagttaaattctggatgtttttgaggtacaaccaaaaagatttctggatgggctggatgtgagatacaaggaaagaggagaaaagatgattttaagggttttggcagctggaaggatggtgttgccatcacctgtgacatagggaagaatttcaggtggagaaggtgtgggatgaggatgaagaatcaggactttgactttggatgtggtagaccaaaatgttcattagatatgcaagtggagatgtgagaaggcttta

SEQ ID NO: 96825 - DNA, 1033 bp, Homo sapiens
ctcattttgcacatagttcttaatatggacgactgagctctgtggtttcttggactttccagagtacaggggaattcactctgaagctttttgtctgtatagcactaccaggtccagttaaagaatgcctcagaggataagtagggctgaaatatacccaagagaaggaaaagatatatttttctcatttgtcagctctgagggcaagtctttttccaactggtttttgttccttaccttttaactgaattgtaaactcataatatcaaaagttactgcctcttgataaaaaccaccttcagtgaaaccaaatatcaaatttatttgctgtacctctttatgttttcatttcatcgtgctctaaatttgacacattataggaaactaagatggtcataaatcattgaaacaattgaaataataattttctgatttaaaattttgttttgttttggtgtatgaattacatactcaaagctacttatgtggtaggaattacatctcaaattttctataaaggaaataagaactgtgttttgcattccatgtgactactatggtttttaaattatttaatgttaacgtgaccaagaaattcagctggaaatgttaacttcgtagttgtagttttttgaaaacttgctatttcatgtgtcattgtagtaaaggtggtgattagtgatgttagcaacttgcattaatgtggctcaataccgaatacatactccttgaaatgacatattacgtatatgtaatgagacctgttctgagattctatacccttggcacagtcttctctcctgggtgttctttttgttatttgttatcattctgttttgttctatttcagtgcattataactttattttgcaaaatgaataaatacaaacctaatttaagtagtataattttaatatcttaacatgattatattgttgtaacgggctcttaagagctttttgcattaaaattaaatcttacttgttctaaatagttaggatattgatgcatggccttagtaaatatagaattt

SEQ ID NO: 96826 - DNA, 1323 bp, Homo sapiens
atctaaagactactaccttttacaatagcagaattatatattgagattactaaggtttgaatttttataaaataggaagttcagaaataaattttaatggctacacattggaagaattctttgaatggtaataaagtaataagcttcataaattttatgttatgagttcaaatacgaatcaaactgtattggatgaaaattgtcatttaatcttcgtcattttgaggtttgacactagcttacaaaatagatttggtttttggtagtgttctcaaaagttgtctcacaattgaaattattttgacaagcttgaaaacagaaaagcccaaggtttgattaaatatgggttgattgtataccatgcagaaatcacctgtatggtaaaaatttgccttctggttcaattgatgcaatcataataaatatcctagttatgttgaacaaacatgagctgttataaatatatacagcagtttattaatgcattatagtaagtttatttgtatttagagtatttgctacatgttgagcattttgttattcatggtgggtaatataaaagaaggaatttcaagatctaataaggagaatccccaaataattatatagtaatatatagctaaattatgtagagaaagcttttatgggcccttcaagtagagtctgagagagagccatcctgaaagtgatgagacctaaactgataatgaggtaggagaagagatatgaaacaacataagcataatctgggaggcaggaggacataaatttaggatctttgggaggcagagagcagaccaacccagtagtaaggaagatatgatttgctacaacctatttacctgacatgaaaaccagaatgcatcattgttacattttattagtgttcaggctggatattataccatggtagcatgtcgtttgacatcactggtagatcttgttttttcttgtataataaaataagagataggacatttcctttgtatcagttttgctgtctttcctctgcaccagtaacaaaaagtaaatgttctaaaagtatgcaaatatgaatctaaattgatgcaaactgaatgtgaagacagagtcacatttatctactacggttagaaataccaaactggggaggattaaacatcatcatagattggactcccagctgttgtaatgggcaggatcatagaaggaagatcaccaacgaaaagaggaactcatttcagttaaaaagaaaggtcccttggccagtctcagctactggggaggctgaggcaggagaatggcgtgaacccgggaggcggagcttgcagtgagccgagatcg

SEQ ID NO: 96827 - DNA, 1063 bp, Homo sapiens
tggagttaaatgattaacataagtacttagagatttcagggcagagatgcaagtaaacttaagtccctaacttctaattccaaaattccttcttatgtaacacacttcctatcactgtacagtgcattgtctttttagatgcttgttcatgagtgcatttattatttccgcagtttgaggccatgagtcttgttttaaacttttttgttctccccgtaatattttgcacataataggccttaattcattttttatttatttggtagagaacatttactttcagataaaagtgtaagactttattttcatttgtacggatattatagccaaggattttactgcttttgtttaaaaggatggaagaagtgtttttaatagttcttggtagttagcattctacaaaatataattgaaaaattctctggttttattttattactatgtaaatgggtttcacttgtttaaaatgttaaaaaacattgattagagtacaaaactagaaatgttatcaatatttcttcattgttttagtgttttcaatttctaaggaaataaaatattttataaaaaataattttgtggcagattgttaaatggaaatacaatgtacttctgttgtcttagtttctaagccattgaaaactatgtcaaactaaagtcattttaggttttaaagttttaggaatatatttgatttcaggtacataaagcaaaaggaattataggaaagtatatgtaagtgtatagataattgaatatatacactttaaaattcttttgcaagttagcatgaataaaaatggtactttagagagcagcttaaatacctctcaggtgaataaagcatgggcttcatgcttgtagttggggatatatgtatcatctgctgtagatgtattacaaaggtgatgtcaaggtgaaagcaggcttgcagaatggttggaaatcattgatattctgacttggaggctgtaaatggctcggtggcagatggagtctttgtcaaggaagaaaaatggcagctttggagcacatagatgttttgctagcagctcagcatata

SEQ ID NO: 96828 - DNA, 1051 bp, Homo sapiens
tgagataagcaaccagaaaatacaggacatagtagaccataatgagaacttctgtttgtttaataacaaggacttttggctggccgcagtggctcacacctgtaatcacagcactttgggaggctgaggtgggcagatcgcctgaggtcaggagtttgagaccagcctggccaacatggtgaaaccccgtctctactaaaaatacaaaaaattagccagggatggtggtgggcacctgaaatcccagctactctggagtctgaggcaggagaatcacttgacacaagagacagaggttgcagtgagctgagatcatgccactacactccagcctgggcaacggagcgagactccatctcaaaacaataataataataataataataataataataagggcttttgtttgtttaccctagagcaatgggaaatgtttgaagtatgtttaaattatcaacaacccgattttaattgaggcttatagaagttaaataactctctcaaggtcatacagtgattaagcagtaaaacaaaggtcataatccaggaatgtttggatctaacatctgtatcaccccatttcttagaaatacaaatctaggaaatgtgtaaaaaatttaaaggctgaagtttctgtgacctgatgttattattatttcagcagatgaatgcctactatgttgagagatgtgattttaccctttgcaaatgtagtcacatttacattaattttgttagctctgcttgtgacttgttgcttctcagtaaacaggtgaaccacagttttcaacagtgaacattagaataaagataggtttgatctattcttatgatttcttctacttttcagttcctgctctctaagggagaactaacaatgaaggtacttatataccagatagtttccaagtatcgttttgtcttagacttagtgaaattaagtaactgctcctagttgacataactagtactggttgtaactaagattcaaattcatatttcactaactgaagaccatgctgtttttactacaatactctcaaaggatata

SEQ ID NO: 96829 - DNA, 1091 bp, Homo sapiens
ctgttgaaagagaataaaactagtattacttttaaagttccaaaataaaagagcttttttttttttaacttttcagtctgcatgaactcctttctcatgaatgagaacttaagaactcatttaaataatttatagttaaattacatataagtacaaatttaatcattttcagcagttgattcatctgataatttttttgttgcatgccttaatccagtcatgatgaaaaaattacatgctttttctttttcaagctataatctattgattttcatagtttttgttgaaaggctgcatgctgctttaatatctacctttttctgattatttgacaatttcaagtttttgttgaatgttaacaatatgattttctatggacatcagctgttcattagctaggcaatacatctgatgggtgaggaggaagagaattcaccagagacagaccaaggaatggagagtgactgcttaattgatatgttgtttcttttgggaatgataaaatgttccggaattagatagtggttatggttccacaacattgtgaatgtactgaaaccactgaattgtgcactttccagagattaaaatggtgagttttatctcaaaaaaatttattgtgatttttatgtttatttatttttagttttttgagacggaatctcactctttccccaggctggagtgcagtggcacaatcttggctcacggcaacctccgcctcccaggttcaagcgattctcctgcctcagcctcccgagtagctgggactacagatgcgtgccaccatgcccagctaatttttgtatttttagtagagatggggtttcaccatgttggtcaggatggtctcgatctcttgacctcgtgagctgcccgctgcagcctcctgaagtgctatgattacaggcgtgagccaccacacccagcctgatttttaaattgtaatattttagggaggaatacctgaaacatgtggaatactgctactctggatattgcaaactcatcctggaattaaaataatgtgcaacattctcaaaccctcttattttagctaaaatgcccaagcaatatgccattgacgaact

SEQ ID NO: 96830 - DNA, 3553 bp, Homo sapiens
catttaaataattcttcaaagagcataaaatttgtaacacttaaaataatttgccattacaaaaataaatacttaaaatatgaaattgattagaatatataatttgctcaaaacttcctctacaatataaatttttaacacttatgccattgattccagaattatgatttcctgaaatcaaagtttatagggaccctttccttttaaataggttgtacattactgactaaagctaagatttatattcagacattatgctttctcaaccctttttacatagtagccatacaactccttaaaaagaaaatcattctgttacctttgactatgactcaatatttaagaaatgtatttactcataacatatttttgttgaggtagatattcatataaatcaaattaaggaacattgaattgtgtatgaaatgtgaacttttttttaaaggactcctgatgcttagtttatctttagagataatatagtcttaattgtactacacataaacatcctgtagtttaagtaggaattttcaggcatcagatttctagaaggaaggtaattctcaatagaaaggtcattttaaaagttcaaactttgatttacagttttttctgttgaccgtattaagtatgaaattatgggtaataaatatatttaattcattttcaactgcatattgagttataaaatattggccacatgtttattgaaaacaggaaaagtaaatgaatatatatgacttttaaatgtattttgagtgctatttgatttgtggcagtcataatagagtttgaaatataaaatatttaaaagtatggatatttacagttaaacattgagtttttaaccttaatagggttttataagaatatgaggtgaaaatatagtttttattccacatacttaaatttttactatataaggtaagagtatttcaatttgttttaaaagataacgctttaaaaatagtttttataatttataaaattcaacttgtactttggcttttgaatgcctttcattcaaataaaaactattgcatattggggataataataatgatggcaacatagataagaacctttactaattttgtgttgtgcacatgtgtgcatggtatataagaaaaaggagcatttggtttgaagataattcttggattagtacttcagctatgtgtagacataattgggtgttttttcctgttttctcctcttaacacttttccacaaacatgcactcattaatcaaagacggtgcactcctgctgagggcagagaggttcatcaaattggcagtcagtttggtgtaaagaacggtgtactgaagctcttaactcgctaggacataaataaatctaaggtctttgtatgcaaaccctagaggttaatactgtataattcagtgtcctgtctttgtttttatgattgatgtttttaaatgtttcaagcttggtgaaagtcttctagtaggtcaggtctgacaatctgattggctgtagtaagaaagcattaggttgtcagaaggactttgagtatgctgcagagattttgattttttttcctatgagatcattgtcatattgcctgagctgttataggaatgtaccaatgattgacattgcctgctgtgataatggacctagtgcatgaaatgccaatagttcggtcctatttgttcagaagcttactgctatttgtatccttaacacagctaacatgtagaacaagcaaaactactgggatttctctgtagaaatagtgctgggatttggctttaacatgaattggttgcatattcataatttaagaacagctggttacagcaagcacatagtcatttgcaagctattataaaccattccactcacatggagcctgtgcttggtgatttttttttttttttattgatctacctgcatttaaaatctggtcactgctgctacagaagctctttattttagctgtgtttgcaacacagaacaggttcaattttaaatatttaatttaaacttaatgctgaataaaatgaagaagctttgaaggaaacaagtgtaaaaggtcatgtcctacctgtcacggccagaatcaaccaaacaaacctagattatacaactattgtaatttttggaatatgtgttttatgattttgtccatagatcaataacagaattatcctggatttggaaatattgctaataatattttactagttatacatagttttgggaaacaacattaacagtagattgtgattaattagtctaaaacaatgtcatctaatatgtagaaaagtagtataatacttttagcttatgagtggtggtgtaaagcaagatagaagggaaaattggcatgactttataactggattagaataatgctaatcctaaaactatagagttactctagttttttagaagaaatctaataaggagtctcttttgctttttgagtcacttctggagtattaagcacaggtatgctcttacagtatttaggtggtattggtaagttaggccagctataatagtttcctgcatgttgtcagtaataactgtaaggaaagaggagaacacctttgtgtctcaagcttttagtgagaagggtgggaggagaaaatgttaaatgctatttcagctctccttttaggaatcacagggagctgtgctttgatttgtgtatattaaaataagtgaatacctgagtgatttacaatgatgcgtttccacacatggtgttaggctcacatgtgcatgtatgtgtttgtccccacactagatgatgaagtagctctcagcacttcaaggttgagtaccagtcctaagagtgcattttactctttcttggcttcagaaatggctggataggtttgtaatataacagaatatatggccaaatttaatccagctgatagtaggctgtacttttttttaaacaacaaatccaaaggttattaaaggatgatgcattgtgttttagttttgagttgcataggatcataactataattagttaactttccattatttgagattatatcaggcattttgtaaattattttatgtcttcttcactcccttttgactattgtcctttcatttatttctctgctctttagcatctcatcacagaataaaggaaggaaaattcaaacaaatctggttttccctgccttccccacttcttgatgaagaggggttcttagtttttgactaaaatgcaggtttgggattttatttgtctgccttttctggttctcattacataattatatttagaaaagaagaagggtgagttaatggactggatttttatttttactttttatttttttggagacagggtctcactctgttgtccaggctggagtgcagtggcacgatcccagtttactgcagcttcaacctcctgagctcaagggatccccaccgcctcagtccgccaagtagctgggactacaggcttacgctgccatgcctggctaatttttgtatttttgtagagacggggttttagcatgtttcccaggttactcttgaactcctggact

SEQ ID NO: 96831 - DNA, 2077 bp, Homo sapiens
ttatttacattttgaaaagaaatgactatggaaaataccttaagataatggatactttaaaatttagtagcagatattaagtcaaacaattattgagtatttaagaggcagaattgattttaaaagttattttataatcgctagctataaactctttgtcagccattatgaacagataaacaaaaactagcactgttttaatttgcttgtctaacatagtttttcgcctcacaaaagttggtttggtcacatgaccaagcttaatgatacactgactagtatataaataagaggcactgtatattgaatgggaaagtggaattctgtctcctgtagtcattttcagtcagcatatttacatctcttctaacaaggacatgaaactgtctgtatttaatttgcattctctttgtcttctgggttgagggaaaaacactgactacaattaacttaaaaaaagctaatagaaacaattctgaatacattgaaaaggtttgtgtaacacacagaaatttatgttctatatggtaagtttttatttctgtagcagtcttctttggtgttatctatttatccaggaatttgcttcatgtaatatgctatatagaaagcttgactgagttgagtgtctgccatttatgtgaattgtaggtaggtgaaaaatgtttaaatagttaaaagcacatagaacagatggttctaaattatacatgcaacaaaggactagaagatttggcagattataaatggcaagcaacagaggataagcagtttaagaaaatggtagttaagtacatttgatgtctcacacctattgtaaacactgtacatattattgtcactctgctgcataatcagtaatttggacaacattaagacactcgtatggttcagatagaaaaaagtaatttttacaagtatttgaaacaagtggttgaatttaaaattattttaagcctacgatgatgaagagtcttttttttttttttttttagaaaatcagattgtatgctttaaaaatacaaagttatttatgagaacttaatattgtgttcttataatggttggagagaaacaggaatgggtacatattttaaaatccagataatagtagcttcactgttctcacatgttaaactagtgccgaattgtagtaccatttactcttacaaacactaatgaaaaaatacttctaaactcttcagtcttggaaatgcatttattggaatactgctggcatcatttatgaaatacttattaaatgaaggaaggatatattttagttttaatttttgagttttatacataacattatgatactgattttacttgaatattgtttatttacaatttttagaatagatggattcttatgcaggttttttctttctagaacagtctctgagtaattatatttagcattttcaaaaaattgggaatagcttaaagtattcaacttggtagaaatttgtttttattttttataagccattcatttaaaatgcacataagactgtaatggaaaccttagaattttaattctgttgccctttctcccatttctttgtttgcatgtttattatagaactgcagtgtaaaggagcagatgttttgccaaacatcctgatgtgttgctttttcttatgggagtgcataactgttccttctgatgcatcaacttgacagctggttgatttcatggagctgctaagaagccattagtggtgtcattgaattgaaacagaacagtcattcccagcttgaactgcaattgttaatgtctttgttgctacttttgtgttactatacaagatgtaggatatcacagttgcatgaaagttcaggatttctgtcttatctccttgaattagtgaaagtatattttggaacttgattacttttaggtttaaaggtttctcagagaagggatcttaagttgtagtttctgagtagaactaccaaaagaagagatatgatttagcacaaattaatatggtgattttgacccttaagaggaattacgtcatcaagttttagtgattattaatatatttgatttcctgggggattaattaag

SEQ ID NO: 96832 - DNA, 3579 bp, Homo sapiens
tgtggcgggtgacgggaagaagcctgagccctcctttggcgcggggcggcctcctcttgggccgtggggcggggggtcttcggagccctgcgggccgcgggtgtcgcgcgtgagctcgccggtgagcgcggggcaaaggcgggcagggctccggctcggccagcccggcctcgagtcgaagtgacttcggtagccccttagattcggccaagattgtcttattggtaacgtcagtttttgaatatcgtgacgccctgagagttatttttgtgttgtggtgaattgtgggttctgcaactcgaagtaggtgattgtattaaaaatggacctgttggcctaagaagtaaaaatatagaaggcgccgggagtaggaaactccctcattttggtgaaactgcgtattgaagatgtgtgtccaccccctcaccccaaaatgctgcacttaatactttttctcaagtaccaaagtaaatatattgggaaagtctatctgggtaataaattcgtcacgactaatgttgtttgttactattagttaaatgtgtgaaaactgaaatttggcgaggttttctcccccattttgtaggattgattagctatttttctgattacatgttattttaaatctccacctttctgtccagaaccaagatgtaggattaaagatgaattttcgatttaaaaatccaatagtatacagttattaagaaggcacacatgtagtgtaactagatcttttacttgaggtagcaaaaagtttgtttgagaaatgaggtcagtataatatttttatttaacagctctacagcattttgggagacaggactggtgcatgaggcagtagcaccagactcagaagacctgggtttgagtcttgatttttgccatagttatttaagttcacgagattgtctcagaaacatggcagttaatttctagagaggattaaatttgctgaggtggtgtgtgaagcagtcactaggggacataatactagtcttggtttttttccaagtttagtgctgggtcaggtgtcttgaattaagaattcctacttattcaagtacaaatgatttcttttttctgccacctggaagagggctattttcccagataaagcacgaggatgcccaggttatgttctacatgaaggtgtcaggtaacgaacttggacacaaaagtcatccatgactctcatgtagccaatttttagtccgctccatacccaccttacacaactcttttatctgctctatgttcaagaatcgtctacattttgacattttattgtaggaaaataattttataatgcaaaatctgtcaaatatcttaaaacttttttagataatttgtaatttgttgtagtcaaattacaaattatggagagcttcacattacaagaatgagcttgacatggcatctgccctccacaactcactgtttagtcatcagactaatgtataaacaactattattatcttaatatgactgtacagtggttctgtgggagcataggggaggggtgcttaatcttggaaattttacaggatttatttatttattgcctgaactaagatgtgaaggctcactaggactttgataaagaaactgcaaagtcatgatattatggtttgttttaggaattcatgatttgttcctgtagctgaaacatacattgaatggtaagttagagcccgacataaaagactttctgtactgtactagaaaattagtgtctgggtgtggtggctcactcctgtaatcccgtcactttgggaggccaaggtgggaggatcgcttaaggctgggagttcagccaggccacaaagaccccatctctacgggcatggtggtgcgggtgtagtggtgcgcactgctactactagctacttgggctgctgaggcagaacgatcattttgagctcacgagttgcagagactgcagtgaggtatgatagagctccactgcactccagcctgcaccacagagtgagaccctgtctctaaaaaaataaaaataaagttagtgctctatgctgcggaatggagagctattgtgttccttaacaaaataaaaataatttttagataatctttgctgatacatccttctgttaccacagataattaagtgccagtaataaagaacaatgggacatgaatgaatgaaatgcacagcgttgcattagactttacttttaaacaacaaattaactaatgaagcttttaactgttaaataagtgaatcaactgatcacattagaatgattacaatttaaaaagaatcggattttgagttcctactaagattacttgaattcaccaaagcagaattcaattgcagtcaaaaaatttatcttaatatacagcatttgctaatcataggatgagccaaaaagtctgaagttggggagaatgaaattataatttgagagtttaggtggggggggtaataattttgtgtgtgtgagtgtgtgacagggtctcactctgttttttaggctgctgcagccgcagtctcccagactcaagcagttctcccacctcagcttcctgggtagctgggactacaggtgcgcgccaccatgtctgactaatttttatatttttttatagagacagtttcaccatgtttcccaggctggtctccaactccttagctcaaggaatcctcccacctcagcctcccaaagcgctgtgattacaggcctgagtgtgagtcactgcatgctggggtttaattttcattaatcttaattttcagctttctgccctggcatgaacttacatggtcagagctggtttttcctgccctcaaatatatttctctgactctaccggttagactaggtaagttgaacacctggttttaaaatcacctgctgctctacacccatttttgtcaacagcttaaaaagaaggcaagttttgaaccttaaaagtagttatctttccattatgatcattgttcattagtgtgatgtttcatactttgtagaaagaaccctaaaatggtttctacttaagatcgaaacttgatgcttagagattaaattcatttcaaggagaacagtttgccttttacagtggtgtagtgtagacttaacatcatagtcatattttctcatgggatgttaagcttttttctaattttttaagatttgggcatgtcatatttttgtgttttaagtatttgtcagctaaaagttagttaagggagacttttttttaaggcccaaaatgttgtatactttcaaagtgattccctcattgacccacccttagcttccatgtctccatgtttactatgatttcccactaaggaaaaaaaaaatttccccagaagcagatttttttttttaagaaaaggatatgcaaagtatatgtaaataatgaaatagtaactgcgtgtttgtatttctgcaagactcttgaaatattgcattggggctgggcatggtggctcactcctgtaatcccagcgctttgggaggccgagacaggcagattgcttgagctcaggagttcaagaccatcctgggcaacatgatgaaaccccgtctctactaaaaaaaatac

SEQ ID NO: 96833 - DNA, 1030 bp, Homo sapiens
ttcagtacctgtaatcttccctggatatttaagatagttcccaggttagactcagttaaaatcagagttttcagagactgcaggcataagataatggtatggtaacagtagaaaataaggataagtaatgaatctttgttctatggctgcataacaaaccacctcgggacctagtggattaaaacaactgttcactgttttttacagttctaggtgcctgttgggcagttctactgattttgcccggggcttactcctcatgtaccagcattcagctggaggatttccctggctgggagatccaagatggcatcactcatgtttggcagctagtgttggtggacatataggccttactctttgtgatcatttatgacacaggaatcttgggacagtattctaagagaagcttgtaagacctcttacaaccttgaaaatcttacagtgtcacagtccattctcttagtcacacaagactggggtggggaagtaagactgcctcatcctaggcagtgcagcaacgttgcattacaaagggggctaatactaggatgggggacatttgtagccatattttgtaatttaccataggttctttagaccactataagaatagatagcctcaaagatgtcatgcttgggattgctttaaaataatagagtgggtggtaaaataggttagggaggttgaatgtggataatagttgaagacttgattggtacatggaagctcattattggctgtacctttgtgtatgtttaaaatttttcatgataaaaactttaagtcatactcaggtaatctgaacttcattttgtgaagtattttaactttatctttcacttagtctttactagagttatttttgtggtaagtagctactaaggctgtaaaccagcaaattagaaagggaattattctccttaggacttctgtaatacaagttattttaaaaatgccttttcctctggcaaataattgttgccctcaattaacaaagtacattaaagaatttttttgaaaactaag

SEQ ID NO: 96834 - DNA, 1181 bp, Homo sapiens
gtagaggcggtttcgccatgttggccaggctggtcttgaactcctgactttgtgattcaccctcctcggctttccaaggtgctggtattacaggcatgagccaccacactgggcctaataccttaactcttaatctgaggttgtggtcttttggagtccaccttattgtgaggaggtggcctgttaagattccttaccttgtttatgtcctggatatcttcagagtttcttaggatgcccagaggaatggagtcactcatttaaaaaagcagttcatttttttcatagctaaagcaagcccacaggtttgtgagatatagacagactacataaattgttgaattggtatgaatacaggttttttactcttgttgctgtgtcagccactattaaaatgccttaaggtgaagacatacttaacagagtaaaagtatgtcttattaggtaaactagcagctgcattatcagcttcagagaatcttcatccagaaacttcatctcagaagtcaaaaagttcaataagtgaaaaatctcaaataccaatcgtacgatttttgtctgtgtgtgtgtggctttgtagctaattagattccttacacactcaataccagttctggagaatagaaagtgtagcctcttgtcagtgcctccccttcctcagtcatagacttgttgatgaggaacatgaggataaaattctagtggatctatcatgactgggacttcagtgaggcatacttcactgccctatctgactccacttataaaacacaaattcaaagatagaatttcaggatgtcagttgcaaaacttttaatgaagcttggagcccacacctacaaaatcagccctggtgataagtttcttatcaccaaacaggaagatagcctaactgtccagctctgaaatgaaatctgaattttaaaaagcatgacatagtgacagaaggaaaagaccatttcattgaccattgaggaaagattgtacatgtgaactttttttgcgctatttgtttttaagtcttggtttaaaacattaagcttcaaatgcctctttccagtagtctgctcttgcttatacctttttcttttttctttttttgtttttgagacagtctttctctgttgcccaggctggtgtgcagtggcccagtgttagctcactgcaacctccacctcccg

SEQ ID NO: 96835 - DNA, 1009 bp, Homo sapiens
cctttagtgtcttcatagctgccttgataaaataccacatctgctacttgttaaattgttcatgggcttttgcattgtcactgtttaaccattaatattcttttctctaatgaatgcctttaaaaaatttccagttcagaatttacctctttttaatgaaatattttgtatggacttaccaaatacgtatatagtttgtaaaaagccgatggtagaaaagatttctaagttaggtgaccatatgctttatcatccaaatgaggccacttttaagagacagcgtaggtactattaataattattctgggataataagcataaattagaatttttcagcacataaactgggactgttctgggcaagtggggaaatatggtcatcctgcttctaaggaaaagagcagtccttttccttaccctttaccccatctctagtcccactttgcaaaggcagtgcccctctgctatttagctatttcttttaggacttacatactttcatttttctaaacagtgtgcttatactgttatttcatggtttttcattgtttcctaccattcttatttccactgcccacttccatctcacaatatgtagcaaattgattcagtagtctatatttacattattaagactatgtaaatattaaagagctcacctaataacaatcatgcctttcatgaacagctaagtttttccaagttaaaaaattaatttttaaaattgccttttcttctatatacacagttttttcaagttgtaccaccatctctaccacatgccaatgagatgtagtttccatgtgatgctttttcttttcttacaacttctgctacctgaggtcctgctccagtccgaattgtttgcttgccatgctttctgcatagcatcccccttaagttcccctttatcgctgcttcctgggtttcatatcttgttatttcctgcctcacactcccatttttctaggacacgctgttcatttagcttcctctggtagtgtttttg

SEQ ID NO: 96836 - DNA, 3216 bp, Homo sapiens
cagcaacgggatcatgattcaaaaagacctaaactttcctgtacaaactgtactacctcagctgggagaaatgttggaaatggtttaaacacattatcaggtaagaatgagtttctgtaggtattttaagccgtttttctccaggtgtaacacagttgttcttagttttggaatgaggcaagtagattttatatgaagacagtgggtcagaaatgtagtggaatttccaaaatcttactttaaattaatgctagaactgatactcttctgcatttttcttgtaaaattgatatagatatcctaaacaggacattagcagattttaattagaatagctggtattttatgataatcaaattggtaaatgtatgtattcttttggttattatattttgtaattgttacaaggaaagctaaatctactgatatgtttaaaatattgcttaagcatgtcttatataaatgataaacattgtagtacataatatttattttcagaaaatacggaggctaaggcaggatgatcgcttgaggccaggagtttaaggccagcctagacaacatagtgagaccctgtttctaccaaaaaaaaaaaaagagagaattagctgggcatggtggtgcatgcctgtagtccccagccacttgaggggctgaggctggaggatcgcttggtcccaggagtttgaggttatggtgagctatgatcatgccaatgcactgtagcctggtagacagagcaagactctgtttcttaaacaaaaaacaaatacagaaactcttgagttacaaaaaaatggtggttattttagtaggagttcttttttttttttttttttttttttttttttggagacggagtctcgctctgtcgcccaggctggagtgcagtggcgggatctcggctcactgcaagctccgcctcccgggttcacgccattctcctgcctcagcctcccaagtagctgggactacaggcgcccgccactacgcccggctaattttttgtatttttagtagagacggggtttcaccgtttttagccgggatggtctcgatctcctgacctcgtgatccgcccacctcggcctcccaaagcgctgggattacaggcgtgagccaccgcgcccggcctagtaggagttctatacaagggattagaaagtcatagttttagtcctctaactagatgagtggcattgggcaagatactaaccactctgggatttggatggtctatccataaagcttcatgcctggtattatgtactgagacacatatttttcacacacgttgaaaagatcttttgttgaaaggtcaggaggctaccgtctcactcatactcctcttccaatgaaatgttagccagtgccagtgtttaagaggagccaaaacttgtggtgacacaattggaggtaaaattctttaaatgtttgtgtattaccagttgaagtagtgtaagcagttcctgtctattttgataagctggaatgccatgggaaagacgtgcctatctgaaggatattaagaatgttgtgatagctaagagcagactgttaataactttgtagacaaacaccactgtgccagagatatttttgttctcttctgctatgtgaaaacgttataaatactctaggccatttctcttaataaagaggaattattaaggctactaagattagggaagaaagaatcaaaatttcaaggtaaatagtgaaggaaagaggtttgagacttaatgtttaatttacttttaaatcatatctaataaaattacgataactgtaacaatactttgattcttagaattaagaattctagaataaaaaatcaagcaactgtggtagcagtaaaaataattctgatgaaattgtgttgttcacatcttccctttccggatgcctttgattttgatactggcagttctccagcatcactttcattgactttttttgtgaaattctccatctttggcaagatttacatttttgttctgtaatcgttttacataatgtataggtagatgttgtgagaagtgattgagacattgacattgtgtatggggtagattttaatgttaggcagagaagaatatgtttagagtaggaaataattttataagtgattagttcatttgtgaatagttttatgttttactgaattgtgtttctgataacaactatataaccggggattctcatgataaacaacagtaaggccgggtgcggtggctcgtgctgtgatcccagcactttgggaggccggggtgggcggatcactagaggtcaggagtttgagaccagcctggccgacagggtgaaaccccatcttcactaaaaatacaaaaattagccgggcatggtggcacgcgccttgtagtcccagatattcaggaggctgaggcaggagaatcacttgaacccagaaggtggaggttgctgtgagctgagatcgtgccactacactccagcctgggtgacagagtgagactccgtctcaaataataataataataataaataacactaactttcctctctattactgaagattgtcatcatccaaagccttgaaagctttctctgaaataaaacttcttcatttattttaagattcatcttggaggcatagtcaagttcctagatcttcatcaatggtacttggatcatttggaacagacttaatgagagagaggagagatttggagagaagaacagattcctctattagtaatcttatggattatagtcaccgaagtggtgatttcacaacttcatcatgtatgtataaattacatcaagtataacttctcataatgttccattttcctctttatgcatgttactaaaacaacagtacaaaggagtaaagtgtatattttgtcttatgaagatttcagaataccttaatatttttttctagtacttgttttgaccttaaaaaataatttaaaatacagtcgatgaatatgagtatctagattccatctacctttacgttgtttaacttgcatttttccttttaagaacgtctgttagaaagtaacatactaaatcgtatatcctcaaatagaatttgcctgtaacagatgtagtttaataaataactacttctgattattcttctacttctgaaataactgaaagttgaaatcaccattttaaggcataatttgcaattactttagtataacatggatgtgcctctagttt

SEQ ID NO: 96837 - DNA, 2637 bp, Homo sapiens
gactgggtttcaccatgttggccaggctggtcttgaactcctgacctcaggtgatccaaccgcctcagcctcccaaagtgttgagattacaggtatgagccactgcacacagccacactttgtatcattgtacatagccttaaactatcatactaagtaactgaagaaaaaggtgctaattgaagttgacaaatatagtaggcagaaatggagtttgatttacatagtaggaaataatgttttgtttttaaaggtttaggttattttaatttatcttactgggggaaatctttatttatgacaaatgaaaacattttatctgcttggctttggatggtagagctttagtagacagtatcaatagcttttaggttttggagtataaaagtacaggatagaaatagatttagttcctaacatttaccctttcataaagctccatatatcagcagagtagtaatttagctcttacacaggttaatgggtagtttctttgcaaaggaatcctgtagtatttctcatcccatttgaagatttaaaccaccagttaaggaatcctttgaaaagtgcagatgtcatagccctattctgattcatagttcctagccagtattttagcaaatataacacacgtaattctaaatattggctaggaactataggataagaaccacagctgttaacctgaaagaaaaaaaaattggaaaaatttttagctattagcaagatttttcataaaattacaagggtttaaaacagctttttaatttattgcacagagtaaaaaaaaatctccaaaacagtctccctaggatggatttgcttttaatcattttaagagtcatttacattgtattatttggcctgttcaaaatcgtctcaatttaaatactagatattattgtatcataccaaataatttctgatcaataaattcagctgttttaattttatcaaataaaattttcataagctcataatacatttcttttttatatatttgtaatgttgactttacacagcagtactggattttaccagtaggaatagaaagagaaatacatttatgttttttctataataatagtaaactctgtagttacaatataacagtattaagtttgaatccagtgcttcgttttggcattcaacataataaatgcaaataataatgctcaaattatttcatgtaattggttatcttcctttcaaaaatagatgttcaagacagagttccttcatattcacaaggagcaagaccaaaagaaaactcaatgagcactttacagttgaatacatcatccacaaaccaccaattgccttctgaacatcagaccatactaagttctagggactccagaaattctttaagatcaaatttttcttcaagagaatcagaatcttcccgaagcaatacgcagcctggattttcttacagttcaagtagagatgaagccccaatcataagcaattcagaaagggttgtttcatctcaaagaccatttcaagaatcttctgacaatgaaggtaggcggacaacgaggagattgctgtcacgcatagcttctagcatgtcatctacttttttttcacgaagatctagtcaggattccttgaatacaagatcattgaattctgaaaattcttacgtttctccaagaatcttgacagcttcacagtcccgtagtaatgtaccatcagcttctgaagttcccgataatagggcatctgaagcttctcagggatttcgatttcttaggcgaagatggggtttgtcatctcttagccacaatcatagctctgagtcagattcagaaaattttaaccaagaatctgaaggtagaaatacaggaccatggttatcttcctcacttagaaatagatgcacacctttgttctctagaaggaggcgagagggaagagatgaatcttcaaggatacctacctctgatacatcatctagatctcatatttttagaagagaatcaaatgaagtggttcaccttgaagcacagaatgatcctcttggagctgctgccaacagaccacaagcatctgcagcatcaagcagtgccacaacaggtggctctacatcagattcggctcaaggtggaagaaatacaggaatatcagggattcttcctggttccttattccggtttgcagtccctccagcacttgggagtaatttgaccgacaatgtcatgatcacagtagatattattccttcaggttggaattcagctgatggtaaaagtgataaaactaaaagtgcgccttcaagagatccagaaagattgcagaaaataaaagagaggtaaattcgaatacctgtcttaagcctataaatcaaaaatagagaaagaactcttcatttcttttttttcttttcttttttttttttttttttgagacggagtctcagtctgtcacccaggctggagtgtaatggcaccatctcggctcactgcagcctcggccttccaggttcaagcagttctcctgtttcagcctcccgagtagctgggactacaggtgcactccaccacacgtggctaattttagaattttagtagggacggggtttcaccatgttggtcaggctggtctcaaactcctgaccttaggtgatccacc

SEQ ID NO: 96838 - DNA, 1081 bp, Homo sapiens
ttgttgttgagatggagtctctgttgcccaggttggagtgcagtggcacagtcttggctcactgcaacctccgcctccctggttcaagcaattctcctgcctcagcctcccaagtagctgggattacaggcgcctgccaccatacctggctaatttttgtatttttagtagaggcagggtttcaccacattggccaggctggtctcgaactcctgacctcaaatgatccacctgcctccacctctcaaagtactgggattacaggcatgagtcactacttccagcaggaaatttcatccctttacatccagtaagatgtttcattcataggtaaatagataagaattaataactgaaggtaggcaatggttggggcggggggggcggttgtgaattgtgtcagaaagtaaaggttattttaaccgggttggaatacatatacatgcaaagacaaaaaccttaatgtcttacccaattccttagtagactaatgctaaatggggttagtaagaggaactggatgaccatggattaccaataaatctgtcttagcctttattaagatgatttattaaccatttatttacatttctcactgcaaatctttttttggaatttgatgcacaaaatttactttgattcacaagataaaatttgatgcacaaaataatttttgtgtttgaagtccaagtatatactgaatattctctttctttaaactttttgtagagacagggtctcgctttgcttcccatgctggtctcaaactcctggcttcaagcgatcctcatgcttcagcctccaaaagtgctgaaattacaggcatgagccaccatgcccagccagttctttagatattagtatttaacagagataccagtttaggccgggcgcagtggttcacgctgtaatcccagcactttgggaggccaaggtgggcagatcacaaggtcaggagattgagaccatcctggctaacatgctgaaaccctgtctctattaaaaatacaaaatttagctgggtgtggtggcatgcacctgtagtcgcagctactcaggaggctgaggcaggagaattgct

SEQ ID NO: 96839 - DNA, 1588 bp, Homo sapiens
tttttgtagaaagagatttactctaccctggtagtgtttgctttaatgtttgcttgttacagcagcttcctccaattgcaggctgtctgctgtctgctaagggatgtagtaacatattttcagcccttaaggttagattaatttaagtacagtagtgtaggcagagagcaaagcgttactttagttatcttcagagagaaatgattgagccagtaccactctatctggttaattaaaaagcagcatttggttattttgccagagagagtgtgtgtgtatgtttgtatttctgtattacatctttcctcatacctaaggattttaagacattctacaattaaaaatggtacagaaaaattgaatccaccaagtgaatagttgaaaccaggaagggaagaaagttaaaggtaaaatgtaaataccatgttttcaatctttaaaaataatttatgcttgaggttatgtctgattaacccagggcatgaaagtctcctagcggctgtatatccatctcttttcacaaatcttttgctaagttcatttaggaatccatgtattccaggttgtatttcagtaacagttcagcattctgtattaccaatttactgtatacctgtttcatgccaacagtggactaacgcagtaggaattttaacaactacttaccttattatataaaactattactctgcatttatatattaagcagtacacaatggcctgttaaatagaggacgtaggttaatggaatcttttataagattgctgcgccgagggggcagatggagaattttaaagcattctttcaaatttttttctgtaatacaaaagtttatcagtttaaacatggttctggtaacatgtaaatgagaatctacaagccagtatgtgtttaattcatggaagtagccctaaaatttgaggggaggcaaggggcaaaagtgataagtttatcttacctttatactgttggacttgaagtagtctggaatactacagaaattaaaatctcttaggggtacttgtaaagtcattgagaaaaatatagatcttaaactgtcatttgccaatgacaaaattacttaaatcatttgaaaataaatgataggttagcctattttacttacctttaaaatacttgttacaatttttattctcaatgagagagtttttcattttcaatcagagggttgctgatgaatataattgttattgttttgttgttgttactgtttgcttttttccacccagagacagtgtgagtagaaataacaaaaaagaaagcttgtgattatgtatgactgaagtaaccaaccaggatgagttatgatagctttgggaaatgtgccttcttttccagcctccttttagaggactcagaagaagaagaaggtgacttatgtagaatttgtcaaatggcagctgcatcatcatctaatttgctgatagagccatgcaagtgcacaggaagtttgcagtatgtccaccaagactgtatgaaaaagtggttacaggccaaaattaactctggtaagatttacccttttgtgttttcacaatttttctaagagatgcatgtatgtatgcg

SEQ ID NO: 96840 - DNA, 1064 bp, Homo sapiens
atttatagattgttgaatttagacttttaacaagtgtcttaatcatttttgaagtctcagcagaagcattaaagagcattagtgtttctttgtaaatttttagtaatgtgtcttatgtttcatttcctaccaaactgtttactacttcatacatgtataatacagctgtaatttgtgatcactagtgtgtcccttaaatcatggaagatccttttgaatcaaggaaatagactcaccatttaccagctgtgtgtccttgagaaagatttatttctaatgttgctgttgtgtcacttggcaaattacgattataggctactgtggggatttatttgttcattgagtgcctgtaatggagcccaggcacagtagttctagatgttggttataggatggtaaaaagacaaggcacctgcttcttgtagtgatattgggtgttaaggaagtgcctttttgaggtgagaacatgtaaattgagagctgagctattccataattaggggaagagcactctagcatagggaacagcaagttcaaagactttagggtgggaatcaacttaggtctatttgaggagctgaattatgcatagtgtggctggtgtataattagtcttagtcggggaggggagataaagttgtgatgagaggccgggcgcggtggctcatgcctgtaatcccagcactttgggaggccgagacgggcggatcacgaggtcaggagatcgagaccatcctggctaacacggtgaaaccccatctctactaaaaataaaaaaaaattagccaacctggtggcgggcgcctgtagtcccagctagaatggcatgaacccaggaggcggagcttgcagtgagccgagattgcgccactgcactccagcctgggcaacagagcgagactccatgtcaaaaaaaaaaaaagttgagatgagaaagattagcagaagttagttcgtgcaagacttttaaaggcccaaatcttggatttaaatatgatgggaagctgctaaagaaaaagggaatgaaatgatcttattaatatttggctgctttgtggagaatg

SEQ ID NO: 96841 - DNA, 1530 bp, Homo sapiens
agacatccagttcagtaaattggatgtgatggaatgaaggagaaacaacaattagggaagctcgtatttttgccttgagcagttaagtgaatggcagttccttttactgaaataggaagctgaaaagggaaccaagtgttctgttttggacattatatttgagctacttattagataaccatttggaaatgtcatgtaggccgttagctagacaagcctggcatttcaggagatacactgaaagttagtttcagttatgaacacgagagtaataatgtttgaggttttggtattaaataaggtcagctagaggaagagcagatatcaaagaaataggcccaggacagagccctgggatacccagatgtttagtgagaacagaggagatttgaaaaagcagcctttaggaaggaagaaaaccaagaaaatgtgttgtgcaagccaaaagaagaatgctttaaggtatatgtgatcaaccctgcacttctgagaggtcaggtaaaatgagaagaaagaataattggatttgatagcatagatgttcttggtggtttcagtctctggaatggtgggttcctaagcctgattagattagactgagtagagaaaaggaggtaagaaaggatagacagcaacataggttcgatactttgaacaaatttactaccaaggagactggagatagggaacaggaattagagttacatgggatcacaagaagtgtttttgttttattttgaggtaggggattttaaggcatgtttttattttgagacttctaacagaaaaaaaagtacgaaaagaggagaaagaagatggggtccagagcacaagttgagtggttgtcctataatacgagaaaggatatttcctcttcagaaggctagtgttgatatgggtgttgatcagtttgttgctttgatgggaagatttatgactccctgtgttaattgcatctgttttcttagaggtaaggtctttagctgataaggagacaggttaggaggttttgaggtgtgaggaaaataacattttaaggatgtggatgtgtagtaggatttccagattgtattagtgtctataaaagtgattttaaagtgaggtacgtgtacaatttttttaaagcagttttcagatgcttgggatatagctatggactagagttcaatgctggtgggtcttttgccaggcaaatatgatgaagggagttaagggtatctataaggacataattgtggcaaccatagaaattaaaaccaggaggaaagtaaggacctcaggaagtgtatagtgagaaagaggtagagtatctttggattttattgacattgacgtaagtaggctaaaataagaattggtacacaggaggggacgcttaaaatggctatttaggggtagtgcagcaaattgtgatgaggtcaagggtatgaactgagttggtgactgaggtggggaagggtaatattggaagcaaagatattgagaaagttataatccagtgggtctggtcttggatgttgaaacaaccaa

SEQ ID NO: 96842 - DNA, 3344 bp, Homo sapiens
aagatataagagaatctgtagtaaattatctccaaggtccatattacattttcatgtatgctagactccaaaaagacgcttggtttcattcatatactcaaaatatagtgaaaactcagtgtaatttgactacagcccattttgagacagcatacttcttcagattagcactcactttcagctgttttctagaaaatgtacataagttactgctgtcttggaccttatgccaaattttactcttaaaaaattctgacactggttattagagttttatgagctccttgaaggcagggcctactacttaatcttttttgaatctccaaaacctctaattaattgcttgcacctaacaatcactcaacaaatgttagttgaattgaatttaaacctatctaccctaattttaaggccattttcccatttgaaaccctctctaaatataaacaaacaaaggaaaaggcagaaagaacctacaagtttaattacacaagactactacctaccaaattggaaccaaaaagcttaggaataatcaaatgttgaatgaatatggaagttttctttttctttttaaaaaaaggtttggtaaaaacaagtagataaataacataaaatatgccattttgaccatttttaagtatacagttggatccattcacagtgttgtgcaaccatcactcctatttccaaaattgtttatcattccagacagaaacgctaaccattaagcagtaactccttacttcctattcccttctctgccaaatccctagtaacttctggtctactttctgtctctgtgaatttgcatattccagatattttatgtaagtagaatcataaaatatttgtccttttgtatctgtcttatttcatttagcataatgtttttaaagttcatgttgcagcatatataaagactaattccttttatgactgaagggagctgtttttatttggacaagggtggggtcccttttttcccattctagcaagtaaggcagacatattccttaaactccaaaaggtcttaggtatgtgaggtatgtgttgtcacatcaaagatactggcttgggtgtgtaactaggtgtttgagatgttacatcactaaacattgttttcatggcatcacgtcaaagtacttaaggaggaagtaggaagtacagatgacattccattgcctctgtctgcttcccatgatcaaggatgtatgagtatctgggaggaagaaaacaaccaaggtatctaaataatggtggtggcttattatcatagggcaggacctgatgtgcacattggatattatagactgctgtattaggggacattactggtttactgcagaaatgtaatatttccttttcttcttctttcctttaaggttttatttattttaagcttaaaacttaacgaggaaaagtgttttatgaagacattataaaactaagctttatttgtaatttaatttttaccaggttcttcattagaagctgtaaccacctgtgaactatgtaaagagaagttggagcttaacctggaggattttgatattcatgaactacatagagctcatgcaaatgaacaagttagtatattttgcctaatttggtaagtgtctattctatgcttcaaggacagctcttgaagaaaagattaaatcatggtcagaaaccttgcattaaaataataataataacagtgataatgttcttaacataattctgttactgcattaggtgttagaatttcataatttttttttttttatttttcccttaagcttaggaaagttgttccaaaatagggatgccaaccttatttccccatagctgtaagttttttgagatgcataaatgatacagtttagaatgaagagctcaataatttcctcctttttctttactgaaggaaaattcgggaggtggggcagatgtgtatttaaggagattacaagggtgactttagagccaaattgttgaagtgtggttagcatatttgtttaaaaaaaacaaacaaagatatgctgtaaaaggaatgcatgaagtgcttgaaaaacactttttggccaggtactacaatggctcacacttatacctagcactttgggaggctaagacgggatgactgtttgaggccaggagtttgagaccagcctcagcaacatagcaagacccggtctctacaaaacagaaaacaaaaacactttttaaatgtaggggtaatgggcctcccctcttttattatattgaatgagatttacaaaacataaaaaccattttgtgcagccgccatctctgtttagttccaaaacattttcatcactccaaaagaaaaccctctacccattaaacagttgctccccattctgtgctctcagcccctggcaactaccagtctgtgttgttttatggatttacttatcctggatatttcatacaaatagaatcatacattaatatatgatattttctgaaccacttttttttaaatgtgggaataatagataccctttgaaaatctgattaaaactatgtacccttcttataaaatatatagacacaaattctgtctctaagggattcccagatcctttgaagctaattgcttggatccagataaagaatcactgatctaaagaatgaaaacattaagcagttaatgtagcacaggtgctactctaatgccagttatgttgttttattctctgatgcactagttgtccaaaaagaaaatcactttcagcaatgaaatgttttaaatccccagggagttctctgtagctggctgagcattggtatttaaaaaccaggggaaacatggaaaagtggaatcatggagagataaatataaatacataacttgtcttctcaaaatgagagtagctttcaaaaggtttgtttctcctgccatcttccttcctgagatgcttcatcctgtctctcaaaggcagttttttccttttttgtttttgtttttgtttttgttttttgtttttgactcgctctgtcatgccttttcctttttgatctcaggaatgtttttattttctaagcattttaatgacccatattctttagaagttttaggaaatattaggtggagtcattgtaaaaacagtgacagccttgattaaactttctggttttaacttgtttgttctgtatgaataatagattctagtggcctgatagctacactgattttaagtgattagtttaataagtctatttccacattaaccagtggcttgatcttttgcaaggtgataaccatttaatttttttttttttttttgagatggagccttccttgttgcccaggctggagtgcagtggtgcaa

SEQ ID NO: 96843 - DNA, 1476 bp, Homo sapiens
tctctggagcactctccccaaggcagcttggaagtgggagcctggcagcagtcctgaaccttgactaaaataaactctgttaaatttcgtctcagtttcttccttttaggttaacacaacagaacagttttgaattgaagaactgtttttaccaactacaaatttctgtgtgaatgattaatctcttacctttattaattcattcttttatttatgcctttatgttcatcatattacacagaaaaacacttgagctatcagaatagattttagttacagcagtatattggcatagctatagatgaaatgtaatttttaactaaatatatatagctatagccatttgtataatgaaatctatgagctttatagaaaaccaaagcattcattccaccatcaaattatttaaaagttccatttttatataaagtcattacactaaagaagactatgtgagaataaaaagtaaaattttatgaaattataaagatattctttttttctcaataaatggcattgtgtcccttattaggaactggatatgaatacatttcctctagtttatcagtgtactgtgagtatcaatctcaattctactaatttttcattctctgtatttttcttttctcctgtttgcttccctgttgaaggctgagtatgagtttatcagctctggtctctacctagtggtgttattgcacttgtgcgaacaaagcttttctgatatgatgggaaatacaaatgaaccaagcacacgtgtccgagtaagtaataatgaagttggggagagggagggtatgatgcagcaagtgtatgccttggaaagcagattgtttcatatgttgacatcttatttcctttgggaagcttttattttttaaatgtttcttaaaaataaagataccgtagatttaatggaaattgctgtcttctataacaagcagcctgattttctcataaagttattttagagaaagaagtaattttctagctctcaaaggtaattggaatgtatttcattgaaaaacagaattggaaacatcgagggaaaatgggctttttattattaaaacaaaacctcagtattatcacttagaaacctgaaattgaactccaaaagccaaagagtatgggaaattaacttcaatttatttgttactgttctacaaaagattaccagtgtactaatttttaagtgtccatattacaaagtattttagatatggaatagttggttgtttactgtgtgtgctattagccataatacaacattttggccagctgtatgttaggtatttataagtaaatgatgctctttgtgtcagtgtaccagaggaaactttatgctttgctgtctgggccattttgtgtagcaagggctagggtctctatgtatctgccattattgtagcattctgaacacttcatgtcttgaaatgtgttcataagtatatccttcaaactttcttacatgtt

SEQ ID NO: 96844 - DNA, 2644 bp, Homo sapiens
agtggaagtcattaggattttttttaatgtatagaactgtatacttttatcaaatttaggtaggaaaatattggttcttgggagttttgtgtgtgtgtgtgtgtgtgtgtgtgtgtgtgtgtgtgtgtgtgcgcgcgcccactgaaactgaatttatttgggtccaaatacaagggtggttttttgttttttgttttttttcctccatttcgtaattttttgaagtgtttataagaagacaatatcattggataaaattattgtatctgctcccaattttaaaaaactggtttctacatgattataaagattatataaaacatttaaaaattaatgccattaagcttgtgatttttgatgttagggggagaaaaacccctatttaaaggcttaaactgatgtttgactttttaagtagaaatgaatctcctatactgattctctctttagatccatttgcaacatttaaactactgtatttctttctgcattgtttctagtttattaaccttgcaagaactcttcaggcacatatggaagatctcgaaagtaggtggaatttcccctccccagacttgttgaatttacttttgcaaattaaacccaaagcaaaacctaagtatatactctgttctgccaaattagagctcatttataggcttagtaataccaaaatgattgatttgggaaatatgggttgggaaactgacattagttgtttttttttttaagcatattttaaggtatggaagcatgtaattttaactgcattttacttttttttttcaaagagaaatttattgttgatcaccttgatttcaggatttataataaaaaaggcataaatcttaactactaatcaaaccaacatttcttaatctgttaggattttgttttgtttcgtttctggtaagaaattttacctgttactcaggtttgttagatcataagagattattcctgggcttacctatgattccaggaaaatatgggacaaggagtcctaattctgaatccatatcagaagccatgaagggctttgttttgtgggttttttgttgttggtggtggtggtagtgggtttttttttggctttttgtaggtcctcatggacctttaataggtagccagctctgccaacagctcaaatctcttaagatcacattccagcatcaggatttctggctgggattataagtgaaggcacttaattctcaaatctctacaggcatctatacagcctaccctcttcttaatgtcctgtaacttccagtgtgcttcataccatgtgggcataggtattggtggctctggaatagtttctagaaattgaagattaccccacccaacccctacatattttactttttcaccctttgttgcccattccaaaacactatccaaagtgtctttttaaaatacgtattcttcagttgaatacttctatactcatcttcagactatttggagtgttatctatagtgtgcataacatttttacttttagagaaagctcagcatcctttgaagtaaggtttaaaaaggacttagtcctcataggaactttttaattctagataatctaaaacatagatttttgtcattgtctatactactttcaagtttttaaaggttttgagatgaaaccaggtaacatattttcacagttttaattaggatatgtgaaaagaaaggagtcagtgtgaattcacttggtataaaattttttccctttataccttctttcagatcccttaggttggcctaatacaaaggtctcttctttgtttttttaaattacaatttatactttgtccaacgtcatgatagtaatttgtttcagtgtatgttttccccagatttctccattttaaaaaactaacattctcgtttaaaatttagtttcttaaacatagtattgtctgctcctaacatgtgggaagaaaaagatggaggtgaaatatgtccatactcaaataagcatgaaagacaagggtgctgcaagttaacccctaaatatcagagtattagtacattctgaaatgggttctgactaaattatcctctcctgtggagtggagttaaatggaaaaacacaagaagttccttaataagctgtaattttttagtttggtatttctcagtgatagagcataaaacttaacagtagagtttattatcagtcatgacttagttatatgctttgtcatttattaaatggatttaaatctattagtgttgcatagtttttctgtgctttgccctaggttgattccatttgttggatgctcttaatttgtccaatgtaaatataaaaagagagggcattaaaccgttttgccctataatgggggaaagatgctggttagatgtttattttagtgagcttgcattttcttacacgtgcaaagcagttcatagaattcatagttttacacttactatgtctttcctaaagacacccaggatgctttatttttaactcttgagccactagtgactcttgaataaattgaggtcagaaatgttgcaaaagtggtaagtttctggcagtgtggagacaggggaataatctcaacagtaggtttttactgaatccaattattttaatttaggctgtgtctatatgaagcttttttgactta

SEQ ID NO: 96845 - DNA, 2031 bp, Homo sapiens
cagcggtaataagccagattttactcaggtgtgtgagagcacttgccttaagttgacttttttcctagtgtttatatatcattagctactatgaacacagattgatctcagaaacattttagaagatgctcttgaaccacatttttaagcactttcatttttataaaaattgatataacattacaaaacggtgtgggggcggggagaattgtggttgggtatcacccacaggcagaccaccctaaccctgtcatacaacttatcattttgatcaaacaatatactaaattgggatttttgtttttacaagtcattgctgttctggcttcatatttacacttcccattcttatcccccttaaaatcattcttgatcatcctgttttctttcaacagcttcagaggatgattccgaagaagacggagaccataacaggacatttgatattgcctaacttcatataagacagatggatgatctgtgaacataagtgtttattaaaaatggcaattaaatataaattacttttgtgggggaatgcctaataaatacattgactatatataaaatgaatatatacatacacatgtatgcctgtatatatatattcattctccagtgttgctgaattaaaattctgctggactttttaacatagcaaatccgatgtttataaactggtaatcaaaaaggttttttcttttaggtgagtgggaaagtattacccttgttttaaatatctaagcaatgcctatcaacccttttttgtgttatgattactgtagtcatatttatgaaaaaaggtttgtgttttactcttgctagtgagaaaagtgggacaaaatatacttttgaaataaaatgctatatggcacctaattattttttcttttaaaatgccttaagttgcagtctcattttgataatcatttgcttccagtgtttaaaaattaaaaaaagaatggggagaaggttatgagaagagcattattaagtttccaaatttaatttgaattccaaattcacctagcaataaaatctaatttttaaaaagtatataaatataaaatgtataaatgatggatagatttttgtattgatttgcaaaatgcagattatatttgataggctatagtatgtagatattccttttaggaatattacagctgtaaattatatgagacttgccagtcaaatgctatttggtttaaaaaaattattgcaatctcaagttaatggaatatttttaaatcccacattcagagtttaaaacactggttttcaatgtgttttttagtgttgtcacttgtttatagataaatatataaataacctgtttggatcctggtcctttttaactgttccttggtaattctgagcatttatttgatgacttaatatttttcactacctttggagaacagatgaacattattcaccatgaatggatctatactgtgtggtcatgagttgtgtatacttccataacactgtatttttcttctgtcagtacccttaggatacactttaaaacaccttaaggtctgatgttatggcaacaaactactttttcaaacctaaataggaaccatgtaatttctcaaaagtgattgaacagtttgcccacacttagtttgttggtcttatgtaaaacattggctcaaaataaagtacacactgatttattttactgtttgaaatgtttccttttaaactggtgctcaaagaagacatcagacttcataaccaagaattttattacaatttcaaatctcattttaagcaataatataaatgttctaaaacatttgctcacctcttgccagttacctttgcattgtctgtcttaaagcaaaaatataaaatttaagggtggtagttttaatatattctgtgggtcctaagggatgctttgaatttgaagtatatatacttttaataaaattcagtatgacagttgtcttctgcttaacccataaaactttatttaaaaaatttaactagatggtacaaaacattcattggtatgca

SEQ ID NO: 96846 - DNA, 1082 bp, Homo sapiens
atcgtgaaagaaaaagaatgacagagaaccgtcctagattaaagggagactaaggagacacgacatgcaatgtatgatcctggattgaatcttggaacagaaaaggacccttagaggggcaattaatgaaatgtggtaagtgctgtagattagctaatcgcattatcccagtgcgagtgccctgtgtttgatcactgcactggcgttatatacaatgtcaatatttagagaagctggctgaagggttacggaaatctcttgtgctgtttttgcaacattttcgaaagtcctaaattatttcaattcaaatgaaaagtttaaaaaacaaaaattagaagttccagaaggccgcgcgccagccgctcctgcgggacgggacacccgggttctcctggtgggagcccccagtgccgttcacgttccgcccgggggggggattaaactcgcacgcgagaagcaccgcccccgctcccgccccgccccgctcctctccggccgcgcagccgctgccgcccacccgcacccgccgtcatgctccgggccgcgctgcccgcgctcctgctgccgttgctgggcctcgccgctgctgccgtcgcgggtaagcccttacgtagtccctcgccgggaccgtgcgcgaccgccttcgcccccttcccaacgcacgctcttcgtccccgcgcacccgagggcggcccgcagacgcaacacccggccggccatcccgcccttccctgcacgcccgtcccccgtgggtcctggctccgggtcacctctcacccgcctgccctcggggaggggaggtggccgagaataagggagggctctgtcttcctcggagtccacatcctcaccgcagaccccactccgcggggagggaacccccaaattaggccagttggccggagaactgagggacttggagtcgcacgacgggcgccgtttcagggcaatttcgggctgaaatgagaagcggggacgttggtggcgatttcccctgctggtgcgcggccggagtggggttgctgggatgggggtgggggccggaggaagtaggccctcttttgcaagcagcgctgtttgtc

SEQ ID NO: 96847 - DNA, 1444 bp, Homo sapiens
gcctctgcttactttttatatagcaaaatgattcctcttggcaagatgtttcttatattattccaaagttatttcataccattattatgtaaatatgaagagtttttttctgtttataattgtttataaaacaatgacttttaaagatttagtgcttaacattttcccaagtgtgggaacattatttttagattgagtaggtaccttgtagcagtgtgctttgcattttctgatgtattacatgactgtttcttttgtaaagagaatcaactaggtatttaagactgataattttacaatttatatgcttcacatagcatgtcaacttttgactaagaattttgttttacttttttaacatgtgttaaacagagaaagggtccatgaaggaaagtgtatgagttgcatttgtaaaaatgagactttttcagtggaactctaaaccttgtgatgactactaacaaatgtaaaattatgagtgattaagaaaacattgctttgtggttatcactttaagttttgacacctagattatagtcttagtaatagcatccactggaaaaggtgaaaatgttttattcggcatttaacttacatttgtactttatttttgtataaaatccatagatttattttacatttagagtatttacactatgataaagttgtaaataattttctaagacagtttttatatagtctacagttgtcctgatttcttattgaatttgttagactagttctcttgtcctgtgatctgtgtacaattttagtcactaagactttcctccaagaactaagccaacttgatgtgaaaagcacagctgtatataatggtgatgtcataataaagttgttttatcttttaagtaaaagtaaaagtgctggagttgatccttcttgaaaaaaaaaatctctagattgggttttttatgttaggcatatagtacaagaaataaattgaccacctattgtaaagcgaggcatttgctaagagattttgtgtgcattttttagagaataaataggcgggtagtggctcacacccgtaatccctcttgacactttgggaggccaaggcagggggatcatttgagcccaggaattcaagttcagcatgggcaacaaagcaagaccccatttctaaaaaaaaataaaataattagccaggtgtggtggcacccatgtgtagtgccagctactcaagaagccaaggcaggaggatcccatgagcccaggagtttgaggctacagtgagctatgaacgtgccactgaactccagtctgggtgacagagcaagaccctgttttgaaaaacaagtcgatattgatccaattgctgaatactggaaaggcaaagtcagataaaactggattctcggaattaggaaaccaatgaccatcttagccaatgcaaatgtagcagagtagtgaagccagaatc

SEQ ID NO: 96848 - DNA, 1073 bp, Homo sapiens
gataagggtcttggaacagcagctgcactaaatgaactcatctgagagacttaaatcattttgaagcaaataacactttatttagccccaggtaagtcaaaaacaaaaatttatagcttttagcaatttgctatcaaagtaggataatatacaagtagtgatgttcccaaattggtgttaggaagggggaatgtgagaataatcatagcgcattaatgtctttggaagaaaattcctatcacaatgaagaggatttgaatgaataggaaaacacttacatttgaaaagaaatcacttaagtgtttcttttgatctgacgatgagtttgaattctatgttagcgctatgaaacaatcagatttattatgtctgtatacagcttacaggtttacatgtgtgacacaacccataatgtataaaatcaataatgatcacttttgtattctctcctccaacatcaaaccttttcctgttccaggccctgattacacagcaatagctatcatagttgccacactaagtatcttagttctcatgggcggactgatttggttcctcttccaaaggcaccgtttgcacctggcgggtttctcatcagttcgatatgcacaaggagtgaatgaagatgagattatgcttccttctttccatgactaaattcttctaaaagttttctaatttgcactaatgtgttatgagaaattagtcacttaaaatgtcccagtgtcagtatttactctgctccaaagtagaactcttaaatactttttcagttgtttagatcttaggcatgtgctggtatccacagttaattccctgctaaatgccatgtttatcaccctaattaatagaatggaggggactccaaagctggaactgaagtccaaattgtttgtacagtaatatgtttaatgttcattttctctgtatgaatgtgattggtaactaggatatgtatattttaatagaatttttaacaaaacttcttagaaaattaaaataggcatattactaggtgacatgtctactttttaatttttaagagcatccggccaaatgcaaaattagtacct

SEQ ID NO: 96849 - DNA, 1687 bp, Homo sapiens
aggtggtgccacttcagctggaaagcaaaaatggagtcctggtggtggtgtgggagaaaggtggggatggagattcctgcacccttcctcttccaccagcatatctttaatgatatgactttttacaattagagtaggggaaggatatgggtccttagaaatctctccctcacaaaataaatgtgcaagcattctgcactttaacggaaacaccacattctctatctgtgttgtccaatagaactttctacaaagacagaaatgttctatatctgcactgtccaatatagtagtcactggccacatgtggctcttgagcacttgaaatgtgactagtgcaactgaagaactgattttatttttttcatttttaatgcattttattttaacaagtggctctcatattggacagcacagttctgatgagttacatgaacccatgcttgtaacttactagtttagtggcagtagacatagttgtatttaatttctttcttcagaccagtcttggagttggttagatggatcagaagtgacatttgtcaaatgggaaaataaaagtaagagtggtgttggaagatgtagcatgttgatagcttcaaatgaaacttggaaaaaagttgaatgtgaacatggttttggaagagttgtctgcaaagtgcctctgggtaagtatggaacctgtccttaggagactttttgcagaacagtcaggaaataaatgtacaatccaattatgtacaaaattctgtatttagtcttgaagtatttagtccttaaagtatatccaactatcttgattaagtcatagagatttccccctgaaaaatagattacaagggacgataactgcacaagatgtccaggactccagtctacattttatataattctttcctaagaaaaacagaagttgccagggtattagggaagtaatttcttttaaaatgttcttgagatgtattttattctatagtttgattatataaaagcttaaaggtctatttctgcagttaatttgcttcctttcttcctaatcccataaaactcatggttaattttaaaacaatgcaaaactggatttagttattgaaaacattcagggtatctataaaaaatcataatttgaacttacatttcattatgaattgatacataaaattaccattaaaatgttatattaacttcatttctggagaaagagctccaaatttttcacagtaacatttttaaagatcttgcataaaacttttgcttcttgtatataaatattaaagataaaacctcaattctaggtaatcagtatccatgtatacacacactgagacagtaaatagagtgtctactatatgccatgccctgttttgcacactgggatgcacctgagaacaagacagataaggtacctgttctcacagagattacaatctggtgaagaaagataagtaaacaggtcaattttttaaagagaggaaaatatcaaatagttataaactctatgtgatggagactcagtggatagctactctagattaggaaaccagggaagaagcctagaagcaggagacaccgaagctaagatctaaaaaatcaagccaagcaaacttcaagggaaagggcataacagacagaggtaccagttggagcaaagagcctaaggcagaacaagttggctgagcgctcaggg

SEQ ID NO: 96850 - DNA, 1364 bp, Homo sapiens
cccgtgacaaatttgatccatagtcaaactgtaaaatgacttctaggggaactacctagagtatttcaaagaccaaaacttgtttacctgcttccttgggtagcaaattagccaggtagatggatggcatttatctaatttattctgataaccgttgtggagacacttgactgattgaaaaatcttgtagttaccgggaacttttgtgtgggaaccattcggttttatacctgaatacacatgatggaaactgttgtaagatatatgtatgttttgaaagtcataaacctttttctcctaaaggagaaaacagaatggtttactgtaaaactaatatgtaggttaagcacttaagacttggaggcatgagggtctgggttcaaatcccagttcccacatatcctagctaagtggcattgggaggttacacaactctttctcttttctcatctgaacagtcagagaggtctcaggggtaggcagttccagggccaaaaaaatattgccagataaatattttgaagaaacacaaaatttctttatacgtgtttggaagtaatttttttgaagtacttataaaattttgacctaaataccagtttttaaaaactgtctctgtgtaaggcttgaatttatcaatgatcttgttaataatatatgtatttttcaaatggctagttgagaataaactacttctctagtttccataaagctaattgagaatgtgttttctttcaacagatcactctgcaactatcgtttccataaaagatgaagatgagaataaatttgtgagcagactgatgagggaaaataataacattaccatgagagtttggcttggattatctcaacattctgttggtaagtgaaataattgtatgtgtagtgtgcaaagagagttctaactcatcctaaataacaagtcgtccttgctaaagaatgttaagtagtggctaattcagatgcctcttctggataaataagctaggtcgctggctgttctggatggttataaattttgaatgaatccatgagttaacttagcaatgacggaaaccactaatgacacagaaaatcctgttaaataaagtggaatctttctagaggcttatttctgggatccttggatcaacatcaggacattttcttctccacaggaatgtctgtgtccccacaaggaacccatgcctgccttctcttagagttctagtgcctgtcaccgcatggatttgcagcttataacttcgttattcagaaagttatcttcttgttattcccttctctctaagaatatttttaccactggttaaaattatgtcttaatagtaatctttaaaaactgtcttagtgttaggttggtg

SEQ ID NO: 96851 - DNA, 1049 bp, Homo sapiens
gccagagacacaaaacacaaaactataaaacacagaaaacaatattcagaacaatatgaaggttgggattgtaaatttgtaattatgacaaatggaagccatttgcatgttgtttaatttcgagtgtcacataaactcatccttcaaaaaaatctgaagaccaggtgtagtaactctgtctgtaagtttaaagttctccataaactgtatcagagcaaatgtcccaaatcaatgcatcagaagtaaatcagacctacaataatagtaggttcagacctacaatactgtaagcaaataattaatattccattataatatttcttaaagtatgtatgttgttctttgtattctttttgaagtcaaacatctggattcaggttatctctattgttcttacaacagggaagtgaatcaagttttgaatggtctgatggtagtacatttgactatatcccatggaaaggccaaacatctcctggaaattgtgttctcttggatccaaaaggaacttggaaacatgaaaaatgcaactctgttaaggatggtgctatttgttataaacctacaaaatgtaagacttcaatttcagtaacagtacatttatgaaaatgtgacataatttatgcacataattaaaagctcagtggaatttttatttaaagatttattcacaagggccgggcgcagtggctcgcgcctgtaatcccagcactttgggaggccgaggcgtgcggatcacgaggtcaggagatggagatcatcctggctaacaaggtgaaaccccttctctactaaaaatgcaaaaaaaatagctgggcatggtggcgggcgcctgtagtcccagctagtcaggaggctgaggcgggagaatggcgtgaacccgggaggcggagcttgcagtgagccgagattgcgccactgcagtccagcctgggagacagagcaagactccgtctcaaaaaaaaaaaaaaaaaaaaagatgtattcacaaataatttttgtgaaaataattttgatactttgtaaatggaaacaaatacagtataagc

SEQ ID NO: 96852 - DNA, 1135 bp, Homo sapiens
atatccctcgcatgcatagttcacaagagggtttgcactcctctgtcaatctaatgccacagtgctctaacaggaggcagagctcaagcggtgatgctcgcttgcctgctgctcacctcctgctgtatggcccggttcctaacaggcccggttcctaacaggcctggttcctaacagtaccagtgtgtggcccgggggttgggaacccctgttatagttcatctaagaggttctaattattatagcgtaatctttgacagtatatcattactatgggtggatttataccaactgaaaaattacctttaaataggggaaagtgaagtgaatcaatgttttaaattctctactcagctactagttttctattataccataagaccaaatttaacatcaaaacatttgaaaactccttaacctattaattttagtacaatgggataattttattttacatatgtttctaattgtccaatattgtttatattttgaagtatattaaactgagaactaaaatgttttaaacttatcaaatagaagtgtactagataagtaattgttaaaattattgattattttttattcaacagatccaaaatcacatattctgagtattcgagatgaaaaggagaataactttgttcttgagcaactgctgtacttcaattatatggcttcatgggtcatgttaggaataacttatagaagtaagttgtaaatctgccaactttctctatttgtttttgtacttcattataacataattatcaagccatagttcttcaaagtacatgtctatcaatacgtgaaagtataattatgtacttagcataacttacataaataccaagacagtttttatgtctctgctctgcctttatcatcgagtttaaagttaaatggcggaaaataattttctgaattagtttgttcccgcactgctaaaaagaactacccgaacctgggtaatttatgaagaaaagagctttaattgagtcacggttccacaggctttacagaaagcatggctgggcagcctcaggaaacttacaatcatgtcagaggcgaatgggaaacaagcaggttttactatggtggagcaggagagagagtgaaggaggaggtgctacacact

SEQ ID NO: 96853 - DNA, 1027 bp, Homo sapiens
tatatggagatttttatagtgactagtataggatcagagctttaaggtatattctgttatgtggtacacaacttgttacaaaaagtctataaaaatctaataagttgaattaataatcattatgttttgcttatactgtagtcgagtgttaaatattgctggaggtgttttatcttatttctaatagtttatctctttaaaaatatgtttatcaagattgccactattttgttttttataaagttaattgccctttatccatgctttgaaagtttttaaagattttctaggaaatgtcatggtcaggtccttcatggaattcttttatagggggacaaattcaatctagaatctaaacttttcttgctaggagcttcagaccattgttacatgattgcatgtatgtatttgcctttttgtttagttttttgaggaagagtctcgctaccactgtgccctaatactcaacctccaaaaatcaccgtttactgggacgtggaattttacatcctgcagtgaacgccactttgtgtctctctgtcagaaatattcaggtaacaattattatctagataactatggtactttatgctattacatatatatatatagagagagagagagtcactttctatagggagggaggggaacataggttgaaaaattacctattgggtagtatgcttaccacctgggtccaatacaccatgtaacaatcctacacatgtaccccctgtatctaaaataaaagccgaaaaaattttttaatactataaaagaatttatattaatttataatcatatggcttaaaatttcagcatggctaaatccatattgggttagtgagtcagagtttatcaaatggaatgtgatttttttaaaggatcattgccataattaattaaattaattaattgtatctgatggaatttgttaatagtagttatcccattatagtaattgaattttgttcttttttctactctggcatttttcagattttacattttattatgggaaaaggag

SEQ ID NO: 96854 - DNA, 1166 bp, Homo sapiens
gtgcagcatttctattttgttgctactaacacttaaattgcttaagttgatctgttgagggattgggatgcattgaatagtcaggactgtctctatggccttataggaaactgacttaatttctggcttgtgttttctttttcccctcaaggagagcatccaagcagcatctgccaatcaaattagaccagcatttcacaaactactttttggggactacacacatgctacaaaatgttaatcattgatcttgcctccaaatgggggttttatgattaaataggtttgagaaatgctgcattctgtatctgcctctttgagatgcataatccatgttggtatatgtatgtattaggaaatgcatttggcttctgaaaagaggttgctacagtatgagaaaagatttattctgtcacattaaagacatttgaagataagcaggtttgtgtggaaacaccatgaagtcttcaaaatcaggcttcttttggttttgctctgccatccttaatataaggcttccgagcttaaattcagggtgttctctctagggtcttttctagaagttacccgatgagtttgtccacattgggtagcttggctcattggccactccagtctataagaaagctgaaaaaaaaattttttttgtaagatatttcaaggaacacaatttgggacataccactctacactaaagtgatcataatgtgaaaaagggaaaaaagagatgtgtctgacagctgaaagcatctgtagtaaagctaggggtacattttaactttttaaaattaggacaatctttttaattcctcaaggtaatagtactgtgttaatttgcatagctgatataaatttgaattaaaatatcctgccaagaaagagatgaatttttcaacagtgtttcttgacataaggagatgatgattaaggacacagattttgaaattaggtggaacagagtacagatactgaccttactattgtgtggctatttcacttatggatgaagttatttaatgtccctgtgcctcagtttctgtctccattgtgagaattaaatgagataatactacacaaactgcttaacacataggaagcactcaataaatgagagatctttaaatatataaagatataatataaaatatatattaaagatataatat

SEQ ID NO: 96855 - DNA, 1166 bp, Homo sapiens; identical to SEQ ID NO: 96854

SEQ ID NO: 96856 - DNA, 1166 bp, Homo sapiens; identical to SEQ ID NO: 96854

SEQ ID NO: 96857 - DNA, 1166 bp, Homo sapiens; identical to SEQ ID NO: 96854

SEQ ID NO: 96858 - DNA, 1166 bp, Homo sapiens; identical to SEQ ID NO: 96854

SEQ ID NO: 96859 - DNA, 1051 bp, Homo sapiens
aattttagtggttagtgattatagtaagacaatgtattcgaatcaaaaccctcaagaaagctcagcacatataaggatggatgtttggcttgtttttcagatatctggtgatggacagaagtggtggataagaattagcgagtggccaatagatgatcattttacatagtaggtgacatcattgattctacctttgtaaagttatcacttaaaagaagcagttccttttactaaatggatttctatttataagtagtttgaatattaatccataaactgcctaaattagagaaaccaagcccttttgcatgttagcatcaagaaaaaaggggtatagagtaatggtattaacattaaatttagaaataaaataacttacagtaaaaagaaaaaaatggaacacctaattacattacgagttgtcaaatctgtcattttcttttagctcacgatatccatggcaccgctttcctgtgacatttggagaggaatgcttgtacatgtctgccaagacttggcttatcggtaaagttaattctaaatcctttaatgctgattatgtaatatgtgaagttcaggttcagtttctagcttaatcttgttttccttttaattatatgtttggtaatttcatcttattctgatttattattagcaacaatagctcaaattcccaatgcaaataaaggtacttttcactgtgaatattttaacttcctttatcctaaagcagttacttagtaataaacttaccactttcctaactgataagtgtctaagcaaattttcaaagataagcaggcagcagttctaaaatatagtttaagtcccctccccctgattacattgccccttcaactctcttcctacctcctgccttcaccctgggatggtatggtagtcacacaaaatgtgtgctgtttcatagacagtattggtatgctgtaacctactgataaaaataatcatagaagacagaaatggctagagaagaaagggaatatattttaagcatttaggaaagattgatttcaagagcctttctttacta

SEQ ID NO: 96860 - DNA, 1088 bp, Homo sapiens
ttcctcatacaggccgtactccaaaaacaccagactggtacaatccaggtgagttaagaaaactgaaatttaaccaaagctgcttttaccttgtcactaatgcatttagttaattatttaagtgccagcttcttctctatacatcttcaagtgagacaaaatttctccaggcaaggaaggtgagcgactggtatgggatgaggtgatgagggtgactttttccttccctgtgagtgtaggggagtggcagagtcactggctcaggaatctcttgttccttgtagtcagtactgccccagccagagagggccggtaatctgaattactatttatagttttgaacattaactcatgcttagaggacacagtttgctttgcatagtcataattctaatctttttcttcttcttctttagaccgtgctggaattcatggacctccacttataattgaaggaagtgaatattggtttgttgctgatcttcacctaaactatgaagaagccgtcctgtactgtgccagcaatcacagctttcttgcaactataacatcttttgtgggactaaaagccatcaaaaacaaaatagcaaatgtaatttaaaagaatatattttaaatatatttcttatttttgtatttattccatttaaaaatattacaaaaattttgccaaaatctacaaaagttaaatttttctttaatgtaaaatctgcctcacagcatccaaatttgtttcatgttagaaaaattaagtagaattgcttatgttttaaaatatacaagattaataataaatgtcactttataaggtaaacatcagtagataatatagatcattctaatttcctgtcacattttttactaaaagtcaactttatagttaacttgagtttctgtttctactaataagtaactttgcaaaataatttttgggaagaaaaataatttctgtatttttaaatttataatcaattgcaataggatactgtatgcccacttaaagtattagtctaattaatatatgcccataattacagctaccatatttcctgtacccacaataggatctgtaaatatactgagaaatt

SEQ ID NO: 96861 - DNA, 1022 bp, Homo sapiens
aattattctcagatattcaatatttactccaatttttgtcaccaaaaattggtgactccaatgtcacctccttttttattctttctaaatgtaaaactccttgagtttattttcaaattggagcatatctgagattagttaatcaaataatgagcatttcaacacatgcaaaaaaagaaaaaagtattttgcaaacctgattctctatgactccagcggcgaacttaatacactattaacttccacttctgaaactgtggcttcctttgtttggaaacttatgacattatgacatttgctaagtcctctcatgatttagcatcatgatataaaaaagagatggaaaagttttctttctgtggcatatcaacgcacttgagtgattaaggctgcctaaattacatctaaattgcaaatatttatacatcagtcttaaattctcaagcctctcttgtcttttcaggtgtctactattatcatgccaaatgagtttcagcaggattatgacatcagagactgtgctgctgtcaaggtcagtacaatgctggaaaatctgcatatttaaaacataagtccatcatcatatgcagtcaagtaacagatccatggagtgtctttttatgtgaagcatgatgttagatgcagtgagagataagcacacccatggcctggccctcagcagcctaacttacacttcatttgagaggataaaattcatattcaagaaaacctctctcattaccacgcagtaatatgctccaaatgagggggctgaggaaggctaatgaaattcagaggagaaagtgagtcccatggccatttcccaggaagaggtgggacttgaactgggactttaaggatggatagagtttctacaaatgggatagggtaaggttttttcatgaggggatggtatgagaaagtggtataaaataaggtggaagtggaagagggcagtggagaacagaatacagatcaagaagtttcattggtgctgtccttgataacagtattaggaaatc

SEQ ID NO: 96862 - DNA, 1282 bp, Homo sapiens
ctgtgggctgagttcttctctcttcaacttttatactaagtgtgctttgatggttttattgctactcttataagaaaatgaaatttatccacactgtgacctggaggtgatgctgaggtaactggctgtgagccatcactttgcaggcctgttgagtagcattttctaggagtgtgttctcacatttgataattcacttatattcatttctctctctctgtctctgtcatagtttttgtgagttcagttctgaatatgcggtaaataatttcctttccaagcaaatgtttttgtctcctttcaaagctaggtcagtggaaagtccaatcatgtgaggagaaactaaaatatgtatgcaagagaaagggagaaaaactgaatgacgcaagttctgataagatgtgtcctccagatgaggtaggtaaaatccctatgtaaattttctcaagcagtattacaacttcttggttagaaatggtagctgagacttaaataactcagacttataaaatagaggaaactactagcttctgttcatttaagttagaacaagccagaaggcagtgagtcatagcatattggccttcttacagaagcagaaacttgaaaatttctataaatatttgtagaattactatcctcaaggctgatgtctttacttcccccactaatatcaatattcaaaaataattcatccagtgaatattatactcttatgatgagccagccacccatatgagaagtaacccatactttttgtctgacacaggcccacagtcttgtggaggttatctgtgaaattgcatcccaccctcatcacatgtatgatttcaatagccatgtcctcaatttccacaagttctaagacgttatcaatgtagcagaaacatgcttgccagacgggacaccatcaagtctggaaaagagtttgacaatatttttcctctgacttagggctggaagagacatggagaaacctgttacaagatttatgaggatgaggtcccttttggaacaaactgcaatctgactatcactagcaggtgtgaccatcagtaaacttgtactcataaactttcaactctgaattcttttgccaaacagtcttcctaagtaaaaggtgcatcttcaaatagagtcaatcattgtgaaacacttgccaatttgattctccttttgtagatttgagcaagaatacctaaatgatttgatgaaaaagtatgataaatctctaagaaaatacttctggactggcctgagagatgtagattcttgtggagag

SEQ ID NO: 96863 - DNA, 1040 bp, Homo sapiens
ttatgatctcttcctagaatagaactcttagctagaatagctaagagtaggtacctactcagtgccagcctggtgctccttgtttcacttgtgaaggcagcagagtcataccagggcagcagtggacagtatttctattcaaattgggatatgtatgattgtatttatagaatttcattcaccccacaaagcaaagtttatctacaccagatatcaggaacacccagcctgcagatgttctacctgtgtactttacttgcataagttacttgaaaagccttcattacccaacctgcctgtcgtatcaacatattaataaccgaattaagaatactacaaaggctcttaaaactccatatcagaatataaaaatttgtataacaatgtacatattacagtatttaattgagcaaaaccaaacaaataatacatttttcttttagatatcaaagaagaagtgtggataggccttaagaacataaacataccaactttatttcagtggtcagatggtactgaagttactctaacatattgggatgagaatgagccaaatgttccctacaataagacgcccaactgtgtttcctacttaggagaggtacgaaacctcctgtggtttctttatattcttcctgttttacctaatgataatattaagacttctttggttgggaagtttgcgtataagctggaaaataaaaggtaagagcactctggatcagggtacagagccacggaccattacctgttaagaattgggccgcacagcaggaggtgagcggcgggtaagcaagcattactgcctgaactccgcctcctgtcagattggcagcagcattagattctcctaggagggtgaaccctattatgaactgcacatgcaagggatctaggttgcacttccttgtggaacagtttcatcccaaaactatcctcttccccaccctctgtggaaaaaattgtcttccacaaaactggtccctggtgtcaaaggttggcaacaaataatctaaagtctagactgtctttctggtagc

SEQ ID NO: 96864 - DNA, 1052 bp, Homo sapiens
gaggaccatctgtctagcagaggggaggaaagaagtccaggggtaacctttgccctctcatctcttggatgcgaagtgtataaatgtcttattctgtcccttaaatctctgcctgtcctttgttcaacggtgagcgttaatctacatccccttgctaagctggccatacaagaaaaggaggcttgccctcttataatcttctcaaggacagagactggagggaaacctaacaaattccatatccaggaaaaaatttgtcagaaaatgacttaaggcacatctttctactgtctacttggactaagggcaatctcccttgactgtgtccaagcccttaatagtctgtgctcagccatatagcacattgaagcatgttaaagtcacatcattttctgaatcccagcgggaattcctatgatgctatatatacctcatttatgtggtaggcaccacatgaattcatgtcaccgtagcatctgacatcacgtccccagttttccaggactctcattattcaagaaaaaagaatttgcaatgttattgattcacaatagatgtatctttactggaatataaatagctgcttttcccccagatgtctggacatactcagatacccgctgtgatgcaggctggctgccaaataatggattttgctatctgctggtaaatgaaagtaattcctgggataaggcacatgcgaaatgcaaagccttcagtagtgacctaatcagcattcattctctagcagatgtggaggtggttgtcacaaaactccataatgagggtaagtttttaaaaataccctatttgagaggcttaagccattttaaagtatccctggttttagactctttgtgggaatgaaaagcttacagtttgatcccacagatcagccctgtcagataggattgtctctggtgatggaactgttctacaattggtctagtatggtggtcactagcaacatgcagcttctgagcagttggcatgtagccagggcaactgaggaactgaattattacttttatttcatcttaattaatttaagt

SEQ ID NO: 96865 - DNA, 1041 bp, Homo sapiens
agtaatacttttattatttcagtaaatagaatatttaaagataatttaatctttaactcaaggccttaatggcatgacaatgataaattaatatttttattttatggagtagcagattaagagctactaagcatagaatatggcctggaagtcatttgaggaaaaagtttggtttttgtttttaaaattaactacaacatatcatgatgttttccctttagattctatattttagaagaaagacatatttaagcacataattattcattgaggcttatacgtttcaatttagttaagttttaactataatatgagttcccataaaagcataaaattaggaatacaaattattctttctgacaccatcctggccctaactttctcattctaatgctttgaaaaatgttcccttttaagacaggcccagtgcacctactataggtggctccagctgtgcaagaatggatgctgagtctggtctgtggcagagcttttcctgtgaagctcaactgccctatgtctgcaggaaaccattaaataatacagtggagttaacaggtatctttctcacatactcatacaaatagacaaataggtcttaaaatcatagttttgtgaaaacaagtaaatcttttccaacatccgtttccacctttccttctcctgatactgacagtacagaaaagtacttgatttttaaccctgtggttagatattatcaaccatatatgaataaagctttatttgaggtaatgaagaatattaaatataaatatgtatgcgcccagaagaaggcagagatattcgagataggaaatatacttctgttcgtgtgtggctcttttttctccagagcagtggttctccaggggtggtccccagaccaacagcatcagcatcacctcttcctgttagaaatgcaagctctcaggacccaccccagatttgctacatcagaaactacaggatggggtccagcaatctgtattttaagaaactttccaggtggttctgatgcgtattcaagtctgagaaccactg

SEQ ID NO: 96866 - DNA, 1111 bp, Homo sapiens
taaggagaaatttggacatagtttcccaaataaggtagtcacttgggctcaatatcttggccatttaagcagcatgtctgtgcacacacataaacatacagtggtttttatgcaggctgtgggcaaaccctctgtcatctgccactatgttcaaatgagcttgttttccattagctcagtgttcacaacatgtgcacactgagacccatatctcaggcagagggcagtcagggacatgggcgaaaacacagcattgtaattgatagggataaaaggagaatggaaaataagaaagagtggaagcttcaaccagcctgagtcatttggtgtgtcatgattccaattttattgtgatcaaaatatggtctaaatgagtgatggcagtctccctttgggcatatcctaagagtatgcaaattgacttgcagtatttctaagcattctaagtaatagaaaacattatgtccttactttatgatcactaacgtgtctttatcaacagaaaacggttgtgaagataattgggaaaagaacgagcagtttggaagttgctaccaatttaatactcagacggctctttcttggaaagaagcttatgtttcatgtcagaatcaaggagctgatttactgagcatcaacagtgctgctgaattaacttaccttaaaggtagattttatttgcatgtgatagagcaaattggctaaaattgtaaaggtacttcttcttctgttttcatatccagatgtgtttctttgtatgtaacttttctgacctctcttgggatttaaacttctacactgaaacccataagcaaaaaagtactgaatgtaatcatatttcaccattgagaaatgtatcttgtgatggaaactaaagagagattgatgttcagaaaacaaggttgggtagcaagattaaactgctaccctaatcctaaatgaaaggattttcaaaaagcgaataattaaactctttgaacattgaaaaatagagaattaaaggaagggaaggaagatggttaagttacactagatggcctcagtaaacatccttacattgagtgaaagggtacagtcctcaggggcaaggagtgttttactaaatcttaaa

SEQ ID NO: 96867 - DNA, 1060 bp, Homo sapiens
ttatccccattttacagatgatcacagtgaggcacaagggagatatgtaacttgcctaagatcacacagctaataaatatcagaactagaattcaaacccaggaagtctggctatgaagtccttgtcccaaacagctacactaggctgactcattgagtagctagccaggtggtattagtaatgctgatccctccttcgggaatgtgagcttcagaatgcagaagctcttggagagcttggagagattatactgggttaagacttaagatttcagggtgcaacagaatcacatggagagtttgttagaacacagatatctagggcccagagattctgattcagtagatttttggtgggccccccaaatttggcaagtttccaggtagtgctgataatgctggtctgggaaccacacttggaggattacatatctaattagaggcccaggcttctcaacacctgtaacctacctactaaaatagaaaaagccagtattttcttcagctataattgataataagcagagtttggtcagccaggtatcaacttcatttaactctccttatcatttggatcagaaatttagatgtgaaagtttgcttagaggtaatccaatgtaaacccctgtttctcaggtgagaggcagaaggcccagatcagtgaaatgacctgtcagggtcagaccacatttttgtggacactagtgaaggattctttatcctccttccccactgtacatatttacccccactgtaccttgctgccttgacaggaatgtatcttggtgcctttagcctcctgtgggtgttgtgtgtgtgctggggctttgggggtgtgacacatacagtggtgttaatgcatgcatatgcttcctagagttactttttatggaagaagcaagagaaagtttctcaaacctgagggctgctaaatcatggaggtcatgttgtatagcaaacacactgccatcccactcctggaagcttctggatttacaagtgtagggcctcagtggtaataatgaacctttagacaatgtgctttcaaatccaccctatt

SEQ ID NO: 96868 - DNA, 1060 bp, Homo sapiens; identical to SEQ ID NO: 96867

SEQ ID NO: 96869 - DNA, 1060 bp, Homo sapiens; identical to SEQ ID NO: 96867

SEQ ID NO: 96870 - DNA, 1060 bp, Homo sapiens; identical to SEQ ID NO: 96867

SEQ ID NO: 96871 - DNA, 1060 bp, Homo sapiens; identical to SEQ ID NO: 96867

SEQ ID NO: 96872 - DNA, 1030 bp, Homo sapiens
gggagggaggagagccgggagctcaggatttgaggaaggccaggcagtctctgcccctcgaatagcaacgcgatgagctcagccccctcagtccaggccgagagccagatgggggtcacgtggccgcggggccccccgggcgcagggtcctcggcacagctgacgggtgcgcgccgagctccgccgggcgaaggaattccagccccgcaaaatggctccagagtgtctcccgtgactcgctcggtggctgcggaaggcaagagggtgtgtgcgcttgagccgctagagggagggtgttttgttcctcagccgtcagacgcgagctctgcaggccgaaaacccagacccgctgcagccgacatcgggaagcccctgggcggaggtttagcctgtcggggcacacaggcctgggtcacaggggtcttgaatttggggttcctcgtaagactggagcgcaggccgtcgcctgtgctggcagcgccctcattgtgagcgttgttggtcagactggggagtgactgaaatgtgactttgaaggttcagggcagctgggggcggctagggaggaaaccgcgcgccttgccagaccacgtgactcggcgcgagaaagcgatggcaggtctctgggctgctcagaattgaaaacgtggctttgaattaaagaattcggttgttttatgcgactctgagagacttaagatttgatgtaggctattccagtgctcacacaggacccagaccataaaccagactgcagggatttcctatcctctagtatccttgaagccacctgccctacttgaacacctccagggaccaggcactgcctgcctcacagggcatcaggtagctttagggaacagctctcaaacttgtttgcagaggagtccaaattgtggctttgaaattcccacttaccggccttagtgctgccaaccgggatgccacagagtcagtcagtcatacttcaagtgtggaaacgtgactccatggctctgctcttctctgggttgagcattccttccagctt

SEQ ID NO: 96873 - DNA, 3664 bp, Homo sapiens
gtttagcaacatcttgattatgaatttagataaatgtcaatatccttagattgaaagattatattcccaactctcacttgaaccacaaatttcaaaacttttcactttaccatgcagactgtaataaaatagctgtgtagaacttagaataccctggtttctgcattgccctggtgatatagaataccttggtttctggattgccctggtgataacatgtatttttgatttcataaagtcactctttagagacccaaatgaatttggctctaaattagaaaagaaagtattttgcaagtcctggatgtgacaggcattgaaagtaaccatcagttccagagtctgcatttatcagtctaccatcagtgatgagcataacctttttcaaacacatatctctttaaaacaagaaacagattacaaagctctgtagtgtttcacaccaaatctacaaaagcatttgtcttttatttttctcttccagatgtacagaaaggtgttcttacatgaagaagggtgtgaaggctgaacaatcatggatttttctgatcaattgtgctttaggaaattattgacagttttgcacaggttcttgaaaacgttatttataatgaaatcaactaaaactatttttgctataagttctataaggtgcataaaacccttaaattcatctagtagctgttcccccgaacaggtttattttagtaaaaaaaaaaaaacaaaaaacaaaaacaaaagatttttatcaaatgttatgatgcaaaaaaagaaaaagaaaaaaaaaaagaaaagaaaacttcaattttctgggtatgcacaaagaccatgaagacttatccaagtgcatgaccggatttttgtggttttgttcattttgtgtttaatttgtgttttttttttccagctgtatgaaatgggctttctgaagtttaaatagtccgacttcacccatggtgttctgtgcttgcagtgcgagtgttgctgtaattcagtgttgccgtcagtgtctcttttcttagctttctgtctttctttcaacgtagtgtgaagtgtcttatccttttctatgaattccaatttgccttaactcttttgatgctgtagctgtttcagtaaaagttagttcaaactaatgatgtagaatgctttgaccaaatgagctggtctattatgccttgtaaaacagcagcatagggcttttaaaaggtagtcaataaaagttgctgaaattttggcttttttaaatatgtagtaggtgtttttaatgatttttcacataatgtgtaaggtagtgaaatgcaagaagggaaaaatgttttgtgtgaaacacattttctgactggggaacttttattagggtaaattgtttgtaaggctgtacgccaacagtttcctctgatagtttgactgatttaggatatctgctgtatgatgcaatgtaaagtcttttttgccttttttcaggaaaaaaaaaaagctaacttgatgtactagatttagtgtaggtagtgttggggttggggatgggggtgggggaggggagtcactgaatgttttgtccttcctttatactaatgatagtgctttagaatgagaattatgcctgaaatctggcaaaccgaaaaatgttgctattgcaacaaagtggcaaaagctaaaagtaaggatttatcttcaaacataagctgagataacgaatagaagcaaaacgattggctactagctctctctctctctctctattaggtaaatttgaaaaataaaaatgacttggcacttttaaaggtaacttcaccaaagaccgaagagccagtaaccagtagctccaacttgtctcagcatcacatcttctgtgctctttatttttgccggaccagtttgcggttaggagaatgtgccttttttgtacctttgcatttaggttttataattttaattgatgtatggacacacacaaacaaaaaagcatgaaggaagatttggatccaagcagtgccacactttacatcatcactacaagtgttcaagtgtaaagaaaaccaattttgaaactatgaaattcctgattcataaatacacagttatttctactttagtacatataagataattcactgttattaaagctcttttattaaggcaattgcatatgttttaaaagcaatggtaaattaagttgtcttccaaaactgtgtacttgtctggtcagctgtgtatgatcagttatctacctcagagtctattttcttttgtgctgggacaggttgctggccctccctgtttccacagaccaaatcctcctagctcaggagctagggctaagcagttatttctttcaagtattttttagttcttaaattttatgcttgtatttgatgatagatgtcagtgacatttcatagtttcaaaagtccttgctgctctgagaagtgtagattctagtgaaaattacatagtcataagagaaatgtgtttttgtttttgtttttgtttcatttttttaaagttgtggtattattggttctatgctccctggaatattactgctttgtgaaagtccagactgaacgcagcaccctctgtgtacctagtacagttataaacctgggtctctcactacttgatatttttgcattagttaagacagaaatttgatagctcggttagaggggaggggaaatctgctgctagaaatgtctgaactaagtgccatactcgtctgggtaagatttgggaaacataacctctgtacataaaaaaaaaaaaatcagttaaacatcacatagtagacagccattaaattataaaaaaattaatttatgaagaaagaccttttgtacagattgaaaaaaaaagattttcatagagatatctatatgatcaagagagttaattttttatttttgttttactagtgccacagacttgccagtggtaacttatttgtccggttcaagataactctgtagttttctttcctaggacttgttgttaaacgccaaaagacatttttgaactgtacatttgatcagattgttagcttttctgttttatttcttttgagaacctttgaataaaaaacatctgaaattttatttttcctgtcaattttttttaagtcgattaagtgtatatcagaatttcatttcatttctgatctctttcttcagctcagtagattggtttgaaagtgagttgaaagttatgtcagattcaatatatcctcaaaatacatttccttgaaaacaattggaaaaacctttccaccccacttttgctggttatttaaatctgtgtaatgaccagagacgtcaaccctcagctcagcacgtcaaccgtcagctcagcacgtcaacggtcggctcagcaaatatccagcccaaaatacaccactagtggtctgttcttaaagaccaaaaaaccaggccctttttcttcctcctttcttgctgctacgcctcaactatttcattgcttgtcaatgctcagcaaggaagacagcctaacagcagccctcccacctgtggtaaggaagcatgtgggcgagaacctcgggataatcttatctatgcgtttatgaccaaggtcctctttcagagctacctgttcagctgttcccgactggaggctcccgtgcagcattcacggaggagcgagaact

SEQ ID NO: 96874 - DNA, 1052 bp, Homo sapiens
gtagtaccctgacattgctaacagtggttgtattagactggctgagttagaagcaattgttttttttttccctcctattttcctaaatatatttaatttgattttaatgactaacattttttcaaattaaataaaagaatctggactcagattattaatcatatctgaattgccttccctcccaggcaccaaaatgtaacttaaagttctgagaaacactgagtgaatgaagaaatgtgctcttgatcctaacaacctgatcttgaaccagacgattatctggatagaacattgttaaacaaaatactatattgatcttattaaatataatacattgtttggtgactggagaaaacatcaactgccttttttttccagatttttttttaagaaagcgttttgtaaccctaggcaggcagtgataatcagtttgtttttcctatgatagctcctcctgctggactagcttgcttccagttactggaagtgaagggaaagggaaggagaagagggacactggctttaatacagggattgttgtgaagtgaatgccaagatatcatttcccctaacgctcttaaaaaactctcaggaagagcaatttagaagatttttaggaaactgtttatgatgccatttgcaagattgaggaaggttgtttttgcttcacattcttaaacaaactaaggtatttcctttgtaaaaagtaattacaggatcttaactcttgcctcagtttgtctaattttgctcctgtctccaactccccagggtgccgtgttaactccctcaatggagcacaccatgtcactacagcccgcatcaatgatcagccctctggcccagcagatgagtcatctgtcactaggcagcaccggaacagtaggtggcaaataattatcatgtgtctctgtaaacagaggagggtaaattaatgcagcctgtatcttccctatcaaatgacagcctctatgataacagattatgtctaatcccctctcttccccccacatgaccttccataaagtaaatactcagctatttcttaatta

SEQ ID NO: 96875 - DNA, 3732 bp, Homo sapiens
ggattggaatgaacccaaacacttccttcaccaaggggccctgcttttggacaccatgtgtcccaaaaattgaaacttaagataattgccgttagatataatacagaataggtgtgtacccttgcttttgtttattcttcagcaggaactgataaaagaacaagtataaacatggtaatacataaagatgtgtctctagtaggtagcattaagtgagcaatgcagctgacatttgaggtaaaaatataaaagcaaaaaggtgacttcctgtttaggttaagtgaggaggctttaccttaaaataaattcccaacttagcaacaaaaactcttgaaatgtcttgtatttcaagatttgatttgattttaatgcaaaggtagctcctgtccgccatgaacccagtagtgtacatgcatttctcctcctgtgtcagaaaacctctaacaggattacttcctggacccagataggaaccttataatggagttcagttgcagacatgtgggagcagagttcccttttgttgaccatcaggatcctgtgtgactaaatttttgtgtattcttgattttaaaacaattgaattagatgttgtagtcctaatttctggggttagaggactacaatatgtaatctaatagttgtgttattttaacttctataagcctcagtttcctcatctttaaaatggggataataatagtttctatctcataggcttgagagaattatgaaaaccaaatgagactgtataaagagcccagccaaggacctcacatatcattatcactcagttaatgttagctatgattattatcattaatatgcatgattaggtggctgataataagagtatattagttatacgtttaaataatgaattggccaacataagcaatgtcatataactaattctgcctaaaaacataaaaatggttttgaataacagaagtgattagatacgctaaaactgaggattggcattatcattcacagtctcctatgcttctaggctcttacagcctcctttccctgagttgtcactcgttttcttttcttttttctctctgggttcttatgttacttattctggtgcttcattctgctgggcgtagtattgactaatttaatgcctctttagttgttttggatttaggattcctatcctttctttgactgtataagactcagtgagatctgctctagtgcacttccctaattaacaattcatgtgtctgctatgaaaaggtagtctttcttaactgtctgaacttggaaacctctgtcatttatatgtcactgaaaataggggcaagtgtaagttattctcaggcaaatgaaaggttgtaagtattaatttgaatttatgttgctatagatattacagctattaacacatttctccaacacctctttttccctcttataatataaaaccagtgtgcatttggccacagaaccattttgtacaataaaaattaggagatctgtgtcagtaatagatttgatatagctaactagaaataacatattatttcagaggccttatttcctctcctgggcattctgtatttctctaagatacatatggaatttcattgcattgcctgacactcggtgccatagcctcaaagactgatttttaactacataagttcagggacctagtagggtcagtggatgagctttaagtgatctgtgactccttaagttgtttgcaaaatgttgcttgtgtgtgtgcaattaagtggggaaaaatgttctatttccctaattaggttttcagagggctccatgaccctaaagaggttaagaaccaatagtaaagagtttacaaaacattattattcccattttataattagaaaattgaggaatagaaattgacagcagctgatttgctgcttaagaaagaaaattagatgtcatagttccctaatcctgtaatgctataagctattagattattaagaccactgaagcatataaaaaatgggggcatctggcccaaattagggtctgtagggagttgtttgccttcccatcatatatccagtgagggccctgcactcatgttggagtgggcctttctccactaaaccaccataagcttatgcaattggatttgagaaattggcagctgcaagaaaccaccaaccccaatggggaaaggctacagtccagataactgaaatgttaacaaggcagaagcacttaactttggtctgccttaggtggcaaaggaaaccagagaaaacaagtatcggggctctgctatcaaggtaaatcgcaatacattcttcccccatgactcttccccatatcctctctgttgaacctctgaagttaacaataggggataaaatgcaggagggttttgttgttaagaattggaaactgaaacttaataaaattacttagactctggaaagctctgggcatcaagaaatgggctgatatgtttttctcttgagtggcagactacacatgctttctttcctgccacaaaacctgactctcacatctatttctcaattcagagggtctactgtgtggatgcccatttgactgtagatgtcaaaatctagttactgaagtttaatttccttaatctgaatttcagatttttattttctgcactaagtagaaattgttgaccacaatacaagatttctaaaattaatgtcctagatatgaaagagaaattgaatttggttttttgtattaaataagcacatactttaagggttagcttctaataagatgtgctggaattaatcgtcattcatctgtaattctaaagcacctagttcataccttgattgttaacacttttcactatttgagttgttgctgtgtttatctcccttgcatagatagtaaatttcttgagggtggggcccagtctgtttcgcctttttctctttgttgcctgatactcaacaattacttcttgagtgggcaaatagaaattgtttctaaataatcatttcatcctgttcagagtgaccagtttgccaagaattctaactgccttaatctttttaatcattgatagtattgtttccttgttttctttctgtagatttttaacatgattaaaaagagttctaaagaaataggtaagctttacaatgaaaatcaatatttctttcaaaatcctcccttttctaggtgcaaagtccttcgtggatgcaacctcaaccatatattctacagcaccctgtaagttttttatcttaatgactttgtgttttacaagtaagttatgtgtatattctctctaggttaaaaccatttgccaagggtggtataggatttgggaaattttaaacatggaatatgagaatgtacaatttcattataaaacttcttctcatccttataaaacaacttggtagaagatattaagttacattttctataagaacttaaaatatatcatatttgaggcagggcaccattttcttattcataccagctctttagagatcattcaaatgagaggctacatttttaatagtacttgggataaaaccgctctcattttttacattctgtttaatgcagatataaagttcaaaaccgagatgaagattttcatcagtgttacttggcctttctatggagattataaatactaaagtggtagcacattatttggtaaataacaaatgtgatttcttaatgacgtgagcattcatatatattacatttttttaaattgaatga

SEQ ID NO: 96876 - DNA, 1051 bp, Homo sapiens
tggcacgatctccgctcactgcaagctctgcctcctgggttcatgccattctcctgcctcagcctcccaagtagctgggactacaggcacccaccaccatgcgcggctaattttttgtatttttactagagatggggtttcaccgtgttagtcgggatggtctcaatctcctggcctcatgatccacccacctcagcctcccaaagtgctgggattacaggcgtgaaccatcgtgctcggcctaattttttaaaatttttatagagataggatctaactatgttgcccaggctagcatggtttcttagaggggtttatatttataatatttagaagttatcctaaatagtaatctaaatatttatatataaatagtacatttatcactgagttggggtttttttcacctctcttttgaatagttttttttttaattaaaactctcaatttcgtaataaaatgttggacgtccatttccctgtattgactttccatgaattattattttaaaaacaataacatattgatccaagaatgtctagggaaaatgttctagaatctgcactgtccaataacagccaccagccacaggtggctctctgagcacttgaaacgtagctagtatgctagagagattgattttttatgtagttttaaatagctgcatgtggcttatgactatcacatgggacagtgcaggtccagagattaattttcatatttatagtcattttgactaacagaaactcccaattttatcaaatgctactagactctaagtacaaattcccctccctcccctttttttttaagagacaggggtctccttctgttgcccaggctggagtgcagtgatgtaatcatagctaactacagcctcgaactcctgggcttcaaaaggatcttcccacctcagcctccccagcagctgggactacaggtgcacaccaccacacctggctaaaaatagaatttttaaatcatgcctttctagatgaatgtttatatttctttctctttcccataggctggaatgacacttacttacgac

SEQ ID NO: 96877 - DNA, 2066 bp, Homo sapiens
agttgtcattcagaagtgagttggcattccaacccatccctccagagtggttcacaccagggaaagaagaaaggagtgccaggcagcagcccagacagctcacccagaaggagttacagttgggctttttgttttcttttgttttgttttttggcagagaagtgttgaaagacactactgcttccaccctgtcattagtgggtgggtaatcatgaaataaaataagagatgaattaggataataagaggcacaggagaaaggagtaaattttccacaagtaatatttttctcttcgtggttatttaactttgaaacagaacttgaaagtagtaatcatggttctacagtagacaaaggacagaatgtgggaaccagacaggaaggtgtgattgcctttattacattaactagaaacacagaaaaatgcacaactttctggaatacactgctatttccattgcagaaaagcaaagaaaaggaaaagttactggtgccctattgtgctgtctgtagacttttttttttttttaactctaatgagtatatatctttgaaaatattctctacatcttctgcttttctgttttggcctcatggattctgtaagaagaatttatataaatgtataggtatatagtaatatatattataagtaatatagtaataatatacagatctatatatagtggtatatagatatatagtaaagcaatacccagttgtatgattaaaggcacagaaaaacctttaaatagggtggacaagtatttttagctttctcacaacagccatcttcactgacgtatcccaaaaataaacatatgagacctatttctattcattcactgatgcaaccaagatgtaataagcaactacaaagtccagacacttaggcactggggatacagtgatagacaaaacagacaatgttactgcccccatggggcgtatagcctagaaggggaaacagacaccaagcaagtaaacatactcaccaattgttacaaattgtgaataaaaatatatgtgcgagcagtgtagaggtggcttgttttctactgggagaagtgaagggtccctcttaggaattataatgggacgctaagggaccattttaagttgggggaggggaggatggcacaatcctattgaatttgaagattattttggtgacggtccagaggtggaattggagagggcccaaaaccaaaagaaatgtgtctactcttaagtgtgaaagtgaatcgaaagattcctttgcttcctcagaatagttatttaaatgttcagaaataataactagtatgtttttctgcactatgtttttcatcgtggacagttttacaaaggtctgagtaaactgcttttgccttaaagtgttgtatgaattttctaatagcgtgaacactattcctatttttgtaatacattttgtcatccacatacacgtatcattgtggtttcattttatttttctctgtttacttagcccccacagaacctttattgtgtaagtttgctgatggaggacagaaaaagagacagaacccaaacaaatacatccctaatggaagaccatggcatagagaaggagaggtgagacttgtaagtcctttcttgaaactttgcggggtgggggagggggtgtgatcttgaatgcccacatgaaaagtaacacaaaaaggcatcttgacttggctgcacacttctgaaataggtgccaggattaaatcttcctttcggtacattataattcaagtgatgccaaattaaaattcttttcattatatatggtgataacagagtgattctccagatggaccgataggtggtggaagcagctgtgtttaccagctagctacacatgaagtaaaagagcattctaaattgccataagaaaaacacaagtgatttgggtttgtttttggtttttttcagaaacagggtttctgtaggctaggcgcggtggctcacacctataatcctagcactttgggaggccaaggcaggcagatcacctgagatcaggagttagagatcagcctggccaacatggcgaaacccc

SEQ ID NO: 96878 - DNA, 1697 bp, Homo sapiens
atgctcaaggtaacactgcagttgtcaagctgttggagatgcatgttcctgttggttctgatgaacaggaaaataactctttagttttgggtgatgagaatgagaatccctttacaaacccaaaagatcacaactaattaaggggaaatttaacctagaatgctctgcatatttggcaaaatcagttgatttaagggtaggttatatcatttttatagtactttaacacaggaatacatcttaaatcacaaatcatttgtcagaattatttgtaatcactgctttgcagaataaggtaaaaagttgctaatctggaaaagtaaccatgcatatagaagattgacagttacatattaatttttatattaatttggccaaacttacatatcactcaaagtcatatgactagtatttatggcacttccttttctgcatgtcagtcttccggtatctctcccttgtaaaaaacaattggagttcagctgaaaggtacgctctatagaacaagctactgtcacataggatctcctgattcttcaacctgtaacctgtatattcagctccaaaaggcaaactagggactaccgctggtttggtagaagccacaggagatgctggccaaatgaggatctctcattttgtaacacgctcacacacacttaaaaataagtgggtcatgacatcagtgtgttttgtttgtttttcctacccaaaaatctaacagatcatctaacccttgctcaacatcatggtaagaccacatatcaattacaataagtcaggcccttttgccaccctaaaatacctaaaaatttcttaaatcttgatgtaatttgctttcctagggcacatggacaatctttgtaatgaataaaacattaagaacttatagggagaagctgtttctaataatgtccttcaaataaatggaacagcaattgtcaaagaaatacagctgtttctgcatcaaaagtattttgcttctggttagcatttttattgaaaacaaatacctctaaaaacaatgctctgttccataaatgactaaatgggttttcatgagattaggtacactcttttctccattaaactgcaagccccagggaggcaaggaccctgttttatctaccactgtatccccagctcttgtgtacttggcacatagtggacattaagttaaaattttgatggttaaatagaccaaagagaattttaaagaggaaagctgttagaattttatattgcttcacatggaatattggggtactcccatttccctgaaacaagcagccagcaactatctcagaaatgtgtcatttttactggttataattcttaaaaagcttgttttcctaagatatgaaatgcctgccagtatacaaactgttgtaactacttccctttttgcttttagcggggaaaaaatagcttaatgacagcatagaatcatgtagtaaatataattcattttttgaaaggttcagctatatcctcttccatttgtttattttaaatgatctaattgcaaacatgtcatcactcccttgatgtttacctccttgttatgcatttttagcaggctttattgtcacctgagattttttttttctttgacaggctggagtctagatgaaggaaaatgtgttagaagcaccttatccacagatggggacacttggtcattcagcacatgttga

SEQ ID NO: 96879 - DNA, 1100 bp, Homo sapiens
ccactctggcctggggcatggcacataataaagcacatggttacagttttgtaaaaatctaatgtaccacatcacaatttctagtgccgtctgctttctgaaatgctcttttaaaatcttgtgcttttgtgtctgatgtcactatattttaaaagaggctttatcttttcttatagcagatgtttctttaaatgtatattatagtttgttgggggaaaaaataattgcttatgtggcctttccttctgtctttccccacccagtcctgcattttttcctgaaatattggaggtggcttgtttgtattaagtcagatttacatggaatgtccccaaccagggtaaaagaacccatggcttcttcatgacacagctaggtgaattccatcgagtttttccacaaccacttaatacttgcttgataaaaattccattatgcagaaatagtatggtggcagttttctacacaatgaatgttagaaacagagatgggaagttttagttatctagaaccagtgtccaaattaggagacatgcctcaggcaaaaacactgaaacacatgatcatgattcagtgatttgtctaaaaatgctcttctaggaccttcctggaagagagtacagtctttgagaagactaatgcgtatggcatgtgagctggaactatcctagagctgagaacagctctggcgccctgactccctgcacaaacacctctccccctcgccaccaccaccacctctcaaagacaaaggctaactgtgtgttcagtgctgcaggagacagtatgatttcccatctcgctttctgaacctctccatgacattaatggagtgtgaataagtccctgtgtgctaagggcagggaatgcctgttagattctcagtgttgcactgttatcattctgccacatcgctcacagcttcatcttgtcacagaggagcctcaatgaagtgcatatgtgtctgctggcagactcccttcaaaggcttcagcttgttttacatctgctttctgtgttactctgacttttccaattggttatgtgtccagtggggcttgaaaaccgctcttgcccacatttcataactctgtgtgtat

SEQ ID NO: 96880 - DNA, 1048 bp, Homo sapiens
gggggtttgcagactattggtcacatccattcaagggaaataaaagccctagatttccaaaccacatgtaaatgatcgtaggatcctcttcaccttcacagctagtaaagagtaatttcttccaagctgtgccaagttacaaatggagcacaagaaacagattagttccttttacattgagagcgttactgcaggggtacagtttttcagtcaagctgttcactttgttctgaattagcacttaattttgtgccattttgaatgtgtaatgatcttttgagtgtgtaagtcttggttgacaattagattgcatgttctttgggggcaggagctatgttttctttttaattttgtgctagactcagggaacttgtgcatcaccctaccaccagaagttaccaacaggtttctaagagcatttttcatgcagagctcttcccaagaattattgctaatttgagggcctttttggataccacctttttgcacaggaggttaaattgcctttaggcatgaatgttaaatgtataatgccagacttggaagcacactggcacagtgaattcagctttttccaaaacaagtccccagtagacttgaaaacccacaaagaatgtgaaagagttttcaacttctctagacttcttttttcttttttttttttttcttgtatacatggtgacttcagaattcttttgagtaccagtttgtgtattagatactgttctttctttatatcccctgaatggttactccatagcatcagtttctctgtggagggcatatgattattatcagaagaaccagataaaaaacaaaaatattgtcaggcaggggtcagttgaatgagcctccacttgaatgtttgcataatgtagtctcattgataggtagacataacatttcataaatacagtcagaagacggtttatttaatgatgcaagttgtttagctggcgtaagcagaattatctgggatgattcctgtcagaatacttggattcttgcatggctggcagtttgcccatgacattggagccaagtacag

SEQ ID NO: 96881 - DNA, 1348 bp, Homo sapiens
tttggctcaggattctgataatttcatctactctcaaggttttaactactacttatattcatagtcattgactctcattcatctctcatcctggctgttccccagagtttcagactgcctgacctcagttaccttatattcatcctctccagaactacactagtcccccttacctcacttcccatctaattctgctcttcctcctgttttcctgctctcagttagtggaaccagtatctacccagactcccaagctagaaacccaggactggactcccctacctcccctgtgctttgtatctcacatacaaataatcattcaagtccccaaatttttctttctgattatttctagaatctaccttctccctccctttcttctgccactgcctagtttaatttctgatcatctctcatctgcaccattgcatcagccctatttcttcttacctctctaaggtattctccctgactgtagccagagagacttagataaaatatatacctatgtgtcactttattgttaaaaatcgaccccctctcagttagaaggaaagattgaggattcctggaatggcatggaaagccaaaggtgacaggagcccttgcctacttctgcagtcctgtctccctccatcctctgccttcctgcttatcctcctccaacattgaactacaaatggtattcccaacacagcgtgctgcatcatttttcttggctttctctcatggtttccaatgacccagatccctttggttccctttagcctggctgtctcttcctcagctttcaagactgtgttcagggcttgccttctccctgcaaggacctcctctgacccagttgggttatgctgtgtctgcagatcatcaccttgaggacacctccgtgtgtgctgtggcacttaacatgtttacatgtgtcagtcccactaaactagaagctccttgaaagtagaaactgtatcttcagctttttattttcatgcccaccacaacttttgagccatactatgcaacaacaaatatttggtggttttgaataaattttactacactgtaacaccaggccaataccatgttcttaacaagctaccatgtggggggaaattgaaatgtcttctgatctgatttgcagccagccactagcatgccacctgccagaaaggagaaagtttcaaaatttagaaaccacatcaccttgctttgagggggaggtaatgaaattgttaaaatggggaaaaagaaaaaaagccacatacaccctcctccatctttctcccctgtaattttagtcatcttatgtttagctggcataatgcatctgtaattctacttcccaatctgt

SEQ ID NO: 96882 - DNA, 1056 bp, Homo sapiens
gcttcagaatatactctattgttatcagttgtcattttactatagaagtacaaaagcagcagttagataaaaggtagaatagaccctttatcatattcacatttttactaggtttcatttatatccaaaaaacctataagaatgtttatgcatgcaccgaacaagatgaaagttaagaaacctttaaatatttatgtattctatttttattataaataggatggaatcaacagaaaaatgtgaagctgttattggtcattttaatggaaaatttattaagacaccaccaggagtttctggtatgttgtttgtctgaaacttcatcagtagtcttctatatgatgtatgtttaactttagcacatgatgactcttcaatagaacaaaaacccctcatttcactctttaagatgcattttgttggatttagaaataagacttaaaaattcacctctccctaggcataggcattggatgtttaaatgttaatggaagcagtggtaaggagctgacttgtaaagcattgtgcaattcactcctcttttgatgcagcagccagcttctgaaccaccttatcaccatcctcagtgaacctcccttcatttgatcatatccgttgagcactgtggtacctttctatcccagcagtgcctagacctcagttcctatggcctttatgtccactccactttagccactttctcccatggttttacattgtgttgtcattaccaagaacaccacacttcatgggtttttcattccaatgtcacacttactctaactcccacaaaccctgatctgaaatacaaagggatccttctcttttcactgtttattcatcctcctttacctgtttctctttcctactaagtctggtctccatttttgagtgttaaaatcatttcttaagtggcattctcctttttcttgcaccccatcccttgttcacactgtcatgacagaatgctgaacctgaattaatcctgctgtaattcacgcacaccactcctgttatatccatgcagccaaagattggcactaccacaaattaaat

SEQ ID NO: 96883 - DNA, 1043 bp, Homo sapiens
atatactccatatatatgtgtatacacacacacacacacacacacacgagagaaacaatcttgctcttgcccaggctggaatgcagtagcatgatcacaactcattacaaccttgaactcctgggcttaagcagtcctcctgcctcagcctcccaaatagctgggactacagatgggcaccactacatctcgctgacttttttttaagagatgaggtctcactgtgttgtctaggctggtctcaaactcttggtcccaaatgatcctcccaccttggcctatactgggattgcaagtgtgagccactgtgcctggcctcacaatattttgatatgtgtttcttctgtaacattttttataccatatctctgtccaaagagtgttttagtgccctttaattaaggggtccccatctttattaaaagatagaacctaaaatcaaaactaagatgggtttgatcatatcattcccctgcttccatgccgccaaaaccgccctatttttcaagatgtagctttcaaactgcagtttcttcttcctcctgtttccccgtcacctaccagtgtgcaatcatgtgttgcttaatgacggggatatattctggtgaatgcattgttaggtgattttgtcatcatgtgcacatcatagagtgtacttacacaaacccagatggtgtagcttgctgtacacctaggctatgtggtatagcctcttgctcttaggctactaacctgtacaacatcttactgtactgaatactgttagcagttataatacaatgataagtatttgtgtatctaaatatagaaaaggtacagtaaaaatatggtataaaagataaaaatggtgcacccttatagggcacttaccatgactggagcttagaggactggaagttgctctggatgagtcagtgagtgagtggtgagtgaatgggaaggcctaagacattacactgctgtagactttataaacactgtatacttagactacattaaatttattttaaaaaatttctttctggccaggcacagtggcctac

SEQ ID NO: 96884 - DNA, 1033 bp, Homo sapiens
cgacaggtctgctttttctatctgcatctgtaatctccccttcatcccactcagcacagcgccttctggacacttgtcctgtgcctccgcagcctccacagtcactattgtgcaaaggactgttccttgtaacttaatctatgaaggaggatttataaatatataaaatttacatagtaaattatgtaaccccataagtaaattgagaaatagcagcatattttctcaggtaatcaggtatttgtgagtctttaagatctgtactgttttttttttttttaaatttaaatgtcaatgcccagggaatgaatacacttctagacatgtttcaaaagataattatgtatagcatatagcatattctatttcaaaaatatatataactggcacatacattatacaaataataaaacaagtagttttaatgcacatgtgggctacagatgctatttttactgtgcaatagtgagacatttttaggtattgattattaatggtatataaatctactttttagtagttctataatgactttattcaaaatttatttctgatgaacttttagcatattttagatgagcaatattgttgaaaatttcttcaagtgagtaacttgcttgaatgttaggggattataaaatgggagaccatgtttcatgcttaatatatattttagcacagtacacatggatgttaattatgataaggtacattttttttttcttgaaaactttcatattatggtagtttccctctacggttttgacttagaatatcacagtttctggatgtaaatggagttgatcagccagtcattgtgtccttctctttgcattaggttcatcctgaaagttagtttaagatgctcagaccctcttccaaaagtaatgatgccttagatagacttgatggccttgaaaaagttggccttacatgatctaaatccctagttcaggtgcagtcataattctaaagctggagggaccttagattgtcttgtgcatctccccccaaccccactttcaaacgggca

SEQ ID NO: 96885 - DNA, 2651 bp, Homo sapiens
tctgtcacccagactggagtgcagtgacgagatcatggctcactgcaacctctgcctcccaggctaaagcgaccctcccacctcagcctcctaagtagcagggacaataggccccgcaccaccatgcccagacaatttttgtgctttgggagggtagagacggggttttgccgtgttgcccagcctggtctcgaactctagggctcaagccatccgccggctttggccttccaaagtgctggtattacaggcatgagccaccatgctcagctgggaatcatattccaacatgagatttggatgggtgaaatattcaaacgataggagctggtaaatatcaagcatgtaacctaggtagatagatggttgctgaaaggttgtctttagatcacttatttttttctcatttgtagatttttatagattatttctttgtaagcctagtgatctgtgttaatattgttaaaatgctcagaatctcaacagggaattgaaggtgtttgtgcagcattatgcctcttagatgtaattgtcatttgaacctgaaattatctttactttcatgcctagttagtaatcatttgattacatgattacacagagtgaacataaggaagattaactgaaggagagaagtggctcaagccatttttttttcttctagataaatatatttcagcttgtttcagtgcataaaatacaagtgtgtaatattcacaatggtttaaaatgctacaaaatacttccatttcctaaaaattttaatatgctttttgtcctcaaaatcattcatgagaaaattaaagtagagcaaatgtggaatttttgaagtaaatgtctaggaaagtagactgtaaatgaggaaacgtgagactcagatgcatcgagtaagttaaatgcatttcccagagtcttactttgatttgatttgttttgttttgtttttgagatggagtcttgctctgtcgcccagggtggagtgcagtggtgcaatctcggctcactgcaatctccgcctccccggttcatgcgattctcctgtctcagcctcccaagtagctggtactacaggcatgcactaccatacccagctaatttttgtatttttagtagagacagggttttgccatgttggccaagctggtctcgaactcctggccacaagtgatccatccgcctcaccctcccaaagtgctgggattacaggtgtgagccaccgtgcccagccttactttgatttttaagaaacaattttaaaagttatctttcaaaactttttttcctcaatttttagaaggcaagcatagataacagtgcttttccttatagtatggccactatggagagagtgtggggttcggttcatatttacattatactgtcgcttcgttttcagtagcagtatgctaaattttaatgttcttaatttttcctatattccccagcatctatggcacataaaggaatttgaacatatttctcatagaaacttcataaaattaatgattaatccctgattaattcttatattcttcttcattatattcttgattgtccgtttcttagacacatgtgcatgcacacaaagtgagtttactgtataattattattactgagttacaagtggtgtaaataagtgtatttatgaacagttataaaagtcctcagtaaaaaggatctgtttgacaccattaagtgtgctaaacataaacatgcgcacacacctgcccttctgtggcgatatggagccttgcaatggtgtccacagaaccaaaatgaatagaataatgcaagcagctttccgctgttactatttcataaaagctgtatggatcataggacagtactttcctgttagaattctataaccttgcatttggctttgtattttaccactgatatactgttattagaagaaaatatttggtatagagcccacatcccatgtttctgtcctaagattgtcaggtaagtacttgatttcttcagagttgaacttcaaactgcaatcccacaattcaaacaagaggcctagccattccctttttttcagttttgagttcagaattctcatttcctgtctcttagtaaagaaaattttgtactctaaagtttgcagatgtttgaaaagaatgtgtgttctttggatttaggcattaataagggttccttataacttctttttctttcttttctttttttcctttttttttttttttttttttttagatatgggaaaatagtctccacaaaggcaattttggataagacaacgaacaaatgcaaaggtatgttttcttggctggttatttggtaaatgatagctttagaaaaatgatggaatttaaaacctgatctttggtttcaaaaccaccttcgttttattaaaaaccagatcttatatatcacccagtttctgtcttgcacagtgtcagcatattacttacatttgtccctggttgggttttggctacaaacccaacagcagctagcagtttgccagaattccagatttgacgccagtagagttaacatgcaaaatacgggttggcatttagcccttgcttttaaaaggggagtagagttagaaaatagcttttctttcctgagcctgaggagattagagctgcttactgaagaccattggact

SEQ ID NO: 96886 - DNA, 2616 bp, Homo sapiens
aaagtgctgggattacaggcgtgagccaccgtgcctggctgatgatttaaaaaaaaaaaaaaaattaagctacagataggagcaaggggaggtgaagatctggttgctttatgaatttgtacccagatgtctgttactcttacaggcattggtgattgacaacagaattagattaaatgttaactgtctataacagctccccctcacccctcactttaaatcttactgcaagtaaaatgagtagagagagatgatgactactgtgaaccctcccactccttatcccagtccctgaggtgccatttgatatatggctcctcctcatattctagatctggacctttcctggctcttttgtcatgacatcaaaaactactggttctatactgcattgccacaataagatatccaagttgcccactgaggagctaacttagctagggcctgacggatttcaagggttgcatcttctagttctggggtctgtattttaatgggagcctcttgtgctggaagtggtataattgagtggacagcccaaaagaagaatattttaggaaagggaagcccttcagcaccttaggtaaatccaaataagcagcttcctgtgccacttgtttgcagaaggccagtatgcagctgccccacagacagagtggaatccgtttctgatgttctgtgaaatcacagtctttcagtcttactccacaacttgcaaggaaaaccacaatagaaagtaaaactgataaatgtcagaaatcactctttttctactcaccatcctctgtcttgttatccctctttcaaccataagccacgtgtttatttcttatgtttaaaacaaatgagtaaaaaatgtcctgtgcttggaaaatgaatatttgagtaccgtacagaccttccattacccttcttcttccatactcagagggcattgtttctcaaaatcatttcattgataagttgccatgaaaatttactcatttgtgagctctgggatttcaggcaaggtgtaatgctcaaaacttgtatgagctttttgttttctcatatgcacaaatgggaataataacacctacctcataagattgttgtgaagttaattaaataaaagcatacatgcaaagtacctggcacagtgtctaggacataagtaggaagtcaacaaatgtaatgccctttctagtttcttagaaaatagccaactaaatagttgaagagattagtgatagtttcatggaaaagataatgtttgaacaagttcttcaagttcaagcatgggtagaataggtaatggagagatgtttaaaggggtatttaaggtaaattaatgcaacagacagggttgaaaagctggatgcagggagaactattatgtgttttttgcatgtgtctaggaacagtgaagggagaaagtaaagattggaaacatatcaaagacaaaatttggaagagttattgatcacctgggttcaggaattactgagttagtggtggcacgaggaccccgagcttggtaggagattgggagagtgagtgctagtgaatgaaaagagatatggagagagacagggaaagccatgtttgagataatattgaagatgagatttagaaagtcgtgggcttgatatttcactacttaaatatttcactggatatttaagaatcctaataaaatattaaggtatttaagtagaaagaggaagagagaaaaaccaaagctttggtgagttttaaaaaaaacacatacacacacaaggaagaactgagcagcatcagaggagattcattaattaaaaacatggcactgaatgaatttcctaagagaagaaacagttgaagaccaaatattaaacttgatgaaagtacttagttaaggagggagaagaggaagctgaatgggcaaagaacccctgaaagagggctgtgaaagatggaatgagatgggggagtacctgccacagagaagggaggtgcactggcagagcggactcatgccagatgtagcaaacaagctgagagagggtgtggcatggcttgcattcagcactactgagccttttctctttgcctacttcctcattcccctttctccatgcattttcctgtctttcccatcattaaatgttgaaagcagaactagaagtgtcgaaggccaaccctttaccttccttctcctaaatgagcctttcttctgtttggtttacaaaatgccctgaactctgagagcttgagcagtctcttaatcactgtgactctcaatctccttaccccaaattggagtcatacctaccgtccccccgcttttggaaaagtatgaaacagggatacagtctaaaagtgcttttgtcaaggacttgtacacacgagagagtcctggtgcctttgtccatttttcgtgttcctgtaaaggaatacttatgctaggtagtttgttaaaagaaaaggtttatttggttcgtagttctgccggttgtacaagaagcacagcatcagcgcttgctgcttgttgagggcctcaggaagcttccactcctggcagaaggcaaaggggagaaggtgtgtgcagagatcacatagagaaagaaaacagaggaggaggtaccaggctctttg

SEQ ID NO: 96887 - DNA, 1047 bp, Homo sapiens
gagctttggcttataacctggactcttcaaaagctgcacgttccctagcacacaggaaaattgtgtgtgtgtgtgtgtgcacgcgcacgcatgcttgcacgcacacacatacgtttatacatttgtacgtgccagtggataaagtctataatgatatgcaccaataatcatatccaggacttcaggtgattttaatttttcaacctacttttctttgtcttctaagtgtacaataagcttgtgtttcttttgtaatataaattaccaaaaaggtagaatttaggagtaactaagtgatagaggcagaggagaaaattaagctttatatactaagtgcaaactgagatatacctacattttatattgtagcagatgaaagaggagatctaaatggaaagaaagaaatgagtaaaactgtggtgtaaactaaagaagttttagtaaattctaagtaaaaggttttattagccaagctcacttgggccaagaggtttgaacatgagcttttacctgttatcctctccctttgaaattcatattattatatagtcatgtctcttaattactcttcatctttttactgtcagagcttgctctggagtggattatctactctagcaaagaatattataatctgggtagctggggctgtggtctaacccagttactttgaagccagatgaaatccaaagaatcttcatagtcacagtttttttttttttttttttctttcatgaaattctacatcatgctgtttggtcgtgcactttcttagtgtccttagagtgtgaattccgccagtcaggagacctgtttctcctagtacatcatatgtccctattccgtaacagtgattttttttttaaacagggggtctcactctgtcacccaggctggagtgcagtgacgcagtcctggctcattgcaacctctgcctcccaggcccaagtgatcctcccacctcagcttcctaagtagctgggactacaggcgtgcaccaccacgtccagctaatttttgtattgtttgtcgagagggtgttttgcc

SEQ ID NO: 96888 - DNA, 5831 bp, Homo sapiens
tcttacattcaccatccccctgagctttgggacatttatatatttgataagtgtgccaccaatgacctgatttatgtcattgtttaaaatgtcttttacaagtgctggccaagaacagagctatatggcatatccccagatgcctcccttcgtgttcaccatgaccgctaaccaacagttgacaactcaatcactcgttcatccagttacccactcactcaagccacatttcatcttcccaggtttcttcatctgatgtatgagcaaataatgatttttttatttaactcaaatcagaatacattatgtaacattcctaagcagccctgattttctcaccactccccaaagtagaaatagcaaaagtttaatgttcttacagttctggaggttacaagtctaaaattaaggtgtcatgacttgctcttaaggactttgctagtacttgttcttttcataagtgtctctgaccttctatttactaatccaatctagaattttgcctcagatcaacattggtcttatctgcctttagtttctagaatctagtttttttgttttttaaggaatctgaatagcattttgccatcctatcaacagctctcctattatgcaaggtttctcaaaacaagattggtaaatgcttactgacaatcatatagataagaagcacttttagccctgatctccatacccagaccctacacttgccaactacaagcagaagaacatcattatctggaaaacagtggattcaagctctattgagggtgaggcatgtttaccttcatttgggatatggtaattgtgagaaactgatactaaagtaattttacagcatttggtgctctttatagttacgtgttttcatataaagataattcctctctgattttcttgagtttcaagattctgaatttttggagccgtactatcctacctccgcaatgattgctcatctttatctgcagtatctaaggacagggtagtttgcagacaaaccagtaagaaatcaatacggggggctatgtatccttttccatcagatccgctcttacagctgtaaccattgtcacaagtgacctttgagccaaacgtctaagtttagaaacgtcaactctgctggcaggctgtggtagcattcccttgcttatacagtccaagtgtgtcttttactagggatatgtttatatcctatccccaaattttttagagctgaagtgagtaaaatagatatcattttccttgtcagtctgttcttcagactggcttttcaaggtcacagggcagtcaggatttattacttgagaaaaggatggactacgtttgaaaatcaatatgctggtggagtgttttggatcaaagccagcgttagtgttcagtcgaagaaatgtccaatttgactcttgcctttttagcttgtatcagaatcaagagaaatttctaggtaattttgcacactgttttaatagcttcagataactctgttttgcttcagagaggatgtttacttttactgtctgtcatgctgttcttgttttgaatgaagcagtcatttatggttttcagtgatggagtttaatgcattcactttctacagattctgacacagttatctggttgtgtatgtgtgtgtaagatttccagttgtgtgatttactttaaaaggagtgacaaatttagagacacttgaaaaacagtttagaaacgaaagcttttctgggttttttgcacacgttccgccccaccccagccccttatagttttgtttccgtggtgttgggggcggggggagggtgctaatttttaattccattttaagttcctaaattgccttgcttccctcctgtgattttttgagctaaattggcataaactataaggtcatattcattttctaaggcaaaatgtatttcccttctcctcactgctgccaattccccacaccaaacactttttgggggaaaatcatattacatgtttatattttattcactcaaaccaatgtatgttgagaggttacaatatgaaaaaaaaaaaaactgtgctgaaaagttacaaaaaagttgtgtctctcttttctcaatattttgccacattggatcacattgatattagggtaagaaggtagtctaggtaaatgctctcaagtctcaagtaattagaagtgcccttaattgaagggtatgggagaaaagaataacacttattagtcattgaatattcattatatgtcaggcaccatagtggtcatttataacagtgctgtgagggagacattatcatacaactttacagatgaggatcctgaggccaggcaactaactacaccagagtcacagggctgcccattggccatatcagcacttgatatggtctctctggtggcaactctctcttctttccattataacattgtcttccttatgtttcagtaaagttaagtagtatataaacacaagggtgacactgtcaaagcaaagaaaatacattacaggttttggtgggagaggaagaaaatttaagaaataattattgtcagttcataaattcaattcagaaatagaaggccactttctatgatcaaattgcctttgctttaaaagttggacattcatcagtgtttgagacatttagggattcatttttatgatagataatatacattttacttgcaaaattctgggtttcattttcggcacatattattttcctctgacatgttagtactcgggagcactaatttgggtctggccatctgtgactacatccttaagtgctgtagtacagtgacttctggtaaaaatattgtcataagataatgtaaatgaccttttgtgtgcaatgtgctcttaaaagaccataaaataatgtaaagctacgttaccttgattgcagatcataatagacttgatactaaactataatagcaagtctgtgtaataaatcaaatgctttataatatgctcttttatttagaagagaggttatacatttttcatagtctatggcaaaaaaatgcatcttagcgatttttaatgagatagttttagtgttttatatgaattttttagtccaagttatacatacagtaaacagcatcaattgttaccttcatatactatttataatggattcacccaggcatgttggtaagacattaacaggaatgattctcaatttagtgagaaaaggttattagtctcaaaatctgggtagagatgaccagtttcatttgtactctcaaaggatgtgttgatctgaaaatttcaaagttatgaaaaatcaggtatgtagatgtctgtatcttctcttgaaaaaatgtgataactgtcccaatgcttctgtaattcagtcttcatcagctcacatgctgtaaggcagctaggctagctgagagttagaccacatgaggattgtctgaacttctgctaaatcacctcaaatctgcaggctttgcatctgtggctggagctgaaattgttttcctttccaggacagttcagaaaagtgaactttgtgattctttttccccatcttctaaattcacagagacaagccactggctttccattgcacagataccatggattatttttctcagatgtcaagttaagcatttaagacttcttcaaagaaatcctttgtctttaatctctcctgccctgtagagcctttccattcaccccctccgtctcgtcatccctcattgtaatttcttgaacttaagtgttattgccaaagtacaaaaagcaagaaaataaataaaatgtggcatctctctctgctaatcctggacaaaaattttcgttaatcttactaaaataattgctcttgtgatttcattctacagttccaaatcctccagtctcattctgttctctctgtccttttcttagaatgcagagtcctccaagacttttggagacttaagtttccataactcactacataggtttgcattagattctttattgtcctacagagcccacctagatttttgttttctccagtttttcttactcaacttgaccttccctctatgtttatgcctcctttatttagcatacatcatacagggtctcatatttttagttattttttagtattaaaagttttttacataccccaaaggactgtcctccttaatggtaggtgtggcatctgctgtatttttcacaggccttgaaagggcatactgtaaacatgctataaatatttttgagttgatttcttggtttgatctctcctttcttgactgtacttatctttcccgtaatcccttcaccttcagcgcctggttttcagttgtttctgacctttaggtctgcagtagcttttcttgccaagcattctcctttaaaccctggcttcaattccagctacatacaccaggaatcttttattcataaaggtacactcagccatataacacaagtggaaggggcagctatctaatgtaagagttaggccagaacaaccaaatgaaatggggaatatctttctatacccttaatttttgtgtcttggaagtagaaacattgaaaatcatcagggcaaaagaggtaaatgtcatataaaatttacttgattttgattgcctaataaatttttacatcttctatctcatctccaaataccactttacatgccaagtaaataaaggaaatataaccagctgaattattccaggtagtgagaattcagaataacatgggtaatgaccctttctactatttttaggcctcattctccaaaaaactttatttgctaaacagacgtaatgtatactttgtgttccttcccctatccaaccactgttgaaagagctaaagcaagttttaggaaatcccctttgtctgggaggccattgaaaaaacaaagcagccaaaaaagtgagttagaaaactgcattcatctgtgtgtacatgtgtgaggacgtgtattgtattttttcttttttcccagcaactccaaaataacaagagggggtttcctcaaatagatttgtagtcctcaaattcatttccctcaaatagataccttagttattccttttaagctttaaagccagtcctgccgaccccctcactgaggtatatgctctactgggcatgttattccaagatagaccaatgtcatgtatccagaaggtctttagtcaggtaacttcttcctgaatgtcatcagcatctgtcttaaggaccttagcaattacggagtccacccctcatctccttactcttttggagctgtgtgcagagtcaaactgggaattactttcaatctgtggcacagtctgtggttggtgacccaagtttccatagctgtcaacatgcttggcctttaaactccaaagcaaacattctacctcccatctttgctacttagttgtgtaaccttgaatacgtcccttactgactctgctcctgagtttcacatctacaaagtaggagtaatactccacctccccaaaagattaagaagattaaaataattggcgcatatatatgtgtgtgtgtgtgtgtgtgtgtgtgtgtgtatatatatatatatatatatatatacacacacacacacacatctcgcttagaatagtgcctggcatagagtaggagctgtatacctgtaagtaattacttttattattcccctgaattaactcacgaggtcataagttttctgatgttgatgttttatttttctcttctttttctcatttcaatcccctgtccctcctacttgctaattatggtcatatacataggcacagcgtcttttacgggatgtgtgaatccctgtttgtccttcaggagcagctattatgaaaa

SEQ ID NO: 96889 - DNA, 1745 bp, Homo sapiens
aacattaaaaagtatatagaagaaagtaagaatcaaaaagtaataccattggtgaagaagccctctcaacagttgattggctaatactgaaattaatctaaactgatcctttaaggtctacacaacagagcaacagatttgtacatgttatgtgtgtgtctaagagtgagaatgactgagacatcagaacctgaacagtacaggcttctaaaggatgaggacatagagttacatagcactctgagtattgtgaacatttgatgagcagtaatgatctaaacatcaatgcaaagataaatacctttaaaacatgttgctgtgtgtttactcacagtagcttataacggtttactttggttgcaaaggctgttttttatatatacgtgtatgtatgtgtatgtgtgtgtatatatatatatattttaattgcatctctcacacacacgtatgtaaagatgtatgtcagtatggggaagatatagactatattcattttgctgttttggacctttcaataagaacctttttaaaagacacatcatggtgtgtaataaatacactcttgtgttttacttcctggcaccgtggcaaaaattaatttacagatgcttttcccagaacttttagatcaccacaaatgatttagagcatcaccatggctttgacatctgtttgtttccaactacatccaaaacacaggaaaaacgagtaacaagtcattgttaccataaacttcaaaggaataagagctcaaaatatttttttcctggaattttatcttgaatgttattaaaataacttgttcatcaatttagaatttgtgctgagatggtcatgttattcaaaatgaaaacatttgtttcagtggactggaaggagttgtgttacaggtaaaggaaaaagggaaaatgtaactctctcgttagatgacatgcaatagaatttttcttcagagtctgtgcagctggcttcttggctttttcttcagcagctcctcccaccatgcctggcctccagtgctgagggcgctggggagagagatgtgatttggctcaggcaggcctaatgaaaccctgcttgcctgtgtaataggtggatgatcctggacaacttgcttttgcttcctggcctcagtgttctctgttcataaagtagggattataatgcctgtgatgaggattaagtaaggtaacatatgtaaagctccttggccagtgcctggcacaaatagggcctggaaccaatagtgtttgcttcattctctttcctcaactctcctcttctgcctattgagtgggtgattatcagaggctcctctgtgcacaccctgtcttctctgtcttatggccactaccttttcttttttgaacttttaagtcttttaaattaaaaaatcaattcaaccaccatttatttagcaccaattatgtcaaaggtgttgtggtagatagcatagcacataaaaatgaataaaacagtttctatccttaacaagattaaaatatatgtgagaaaaagatatatagatagcaagcaggatatgatgactgctttcccaatgtataaggaataccagatttggttggggagatgagcttgacatgccattattgtgcactttcatctagaccttatttagatagacaatagaatgtactgtaacttttttctagtatacataaaattgagtactctatagtctctcgtcactacagtaaaggaggagtgaaaaagtgtgcaatcaa

SEQ ID NO: 96890 - DNA, 1031 bp, Homo sapiens
agagcctaatttggtagccactgttccaaggaatgtgccatttatccctggatgcagcaatattatcagaaagccttgtgcattaaccacatagctatttgcccttgtagaattccagtacttgggccccaggtgatcccttgaccgtgcattgcacatagagtatggcttttaggaggaaccacaggaagacgctccttccggcattagagctgggaaaaacagaacttctcttaagcccaggacctggttttactctaatgaatactcaatttcgtaatgttgtatttccctatgttcactactaagaagttatgagtcagctttgcatccaacattagcagctctgcaggatctcactttcaggttcatgtgtctgtggaaaaactactcctgggttgattttttcttcacttaccttgaactttatatctatttttgtcttgtggtgttgcatatatttttgccagcagcctcaaactttttggggaaagaggtagaagcaaatgtttctcatgctctctgtttgactacccttaaaatcacagaaggaacattgcttagtcaccttcttttttcagtttgtatagcaatcgttatttttattatcaaagtggctcacttgggaatgctgatattttggatatctaatgcatttccattggaaaggagaatctggtcccttctcttaatggccctgcaaagaaattagtggatgcacaacagtttcctggactgtcagtaaacattaaagtcagcaaatactcaaaatcatgatttctagcaacttttagcttgattgacatctttgttgaaagttttttaaaatgtgatttttcttatacccattcttggtaggaatttactttggcattgaattaattgccccgcctttaattatttgaagacaggaaacattcagcaacttgcctggatatgtgtttcatatgcagaggtttgtattacctgtattttgcctgcttaataaatcacaatttaaaagtattggttctgacttttaaacctcctgt

SEQ ID NO: 96891 - DNA, 1023 bp, Homo sapiens
tattgcaatactcgctgtatggcagcggtctggaaccaaacctgcaatgtctctgagatatgcctgtgtttgcagaagaattgttgcagccacatgctacccacccctgattattgctcatcataataattactgtggcatgtgaaatattccattatgtccagccttttttaaagatttacaaatagcataggtgtgcaagatttggtaatggctctccctgatttgtagtggagtaaatgtctgagagtctctgttggccaaggccgggtatcttaaaggttgctgtggtattgacatcatatgcagagttctagataactcagtgtagcagtaacttattttaatggaaaaaccagtgacttgatattaaaagaaaaatctctactctttgcgtcttttacagacagcccttccttcattcctaaaccaattcttgattcagtaaatttttaacttgtttccaagtgcagtaaaacatatgactttaatagaaatgtgaaattaaatctagcttatgatatgatagcctgttactatttaaaatgaaatatttttgaaatgtaatctgtttcctcatttataatattcaatacatatttattttctgtccctatgttttattttctctgtaagttttccttgtgcttttgaacacagcacagatcttaaaaggtgaaacagtaaagcaagacaggtcagcagagagacaggatagtattatcatcaatgtggtgtactgggagaagccagaagaaagctaaccttgatgtgaaggaattggggtagctttcaggaaggagatgacatctcagtcttaaaggacaacaaaaatttcatgaagggtgaaagcaatagtatcctccaggcatcaagaagtgcccaagaggtgtgagaacccttggatgtttaaaaaggcacagaaagggcttcttggtgcagagctggcactcggcagttgttagttacccggggttcccatgacggggtgtcagtgggtgtaaaggaatatgaggctggagg

SEQ ID NO: 96892 - DNA, 1009 bp, Homo sapiens
aacaggaaaaattaggctagagaaggctgagagactactaggctcttttgggatgagtgggcacttagcatgcttatccagccaccaggtcccctaattagattgaatgtgtgtaaatagttgcaagcttcatccatagagggtcttttcacgttccaaggcagcttccgggttttgagaggcaaaatgtagaaggactaccagtgatgaaaatggaactggctaaaatattgtccctttttgtccctttgtaagctttttaaaaatttgtttatcatttgtgctgccaagacacctaatctaacgcaaagtgtaattgctgtaaatttatcagagttctgaagctgtaattaaaggcttgtcagtatttgcattttaatctatgaatgagggtttaatttttcactgttttaagtcacgtcatcctaaaatgttgactctaatgtttagcagtaatatgctgaagctttcagaagttgtttgtagaatttattctttaatgaaaagatttttataaagtagaatttttaaaactgatttttttaagagctaatctttgtttttttaatacttaacagactgtgtgttaattaagtcaacttaaaggcaccttttactttcttaaaaaacattaaaggcaccttttactttcttaaaaaacatatctgccaatggtattaagtatcaaatttcagagaagctggaatttggtaattagtcagcaaaaatgatgggcacagaaaatgaaagaatacaaatagagcattcaggacatagaaagtgttttggggtcccacgtagagtactgtttgaaggctctgctctggctttgttttctagcagacctgcgttcaaattctagccctgccaccttctaaatgtgtggccctggcacatggcctaaccttttttgagactcggtttcctaatctgcacaatgggagaacaataacctacctgcctgtctgattgaattaagtatggtaatgtatgtaaagtactcagcaga

SEQ ID NO: 96893 - DNA, 1922 bp, Homo sapiens
ttcatttaatttgctttgtgatggaagttcttctaaaggtaggatgatgttttaatttgagcaatttttatgtaactggagcaactactgggttgcggggaagagcagagtggctgccaccgttccctgccacgagggtgtgggtggacttccccagcttcctggccgcagtggagaaaaggaagcttgtctattccttcctaaattgttttccatactagaagttatcatgcttggttccgatctttaccagaaacaaaacaacaacaacaacaaaccaccatttctcttaatgcattctttttgctctgctctaagatttaaactgttagatccgaagacttgaattttaggaatatgtgaagttgtctttttaaagaaatataaattttaaaactgtttgtgtatcctcttcctgcattttttcttttttagcaaaatgatttgatatcgtacggggcgctctgaagtttccatgctactgcttttttctgtttacttcgctttgaggtcctggcgtagctgcaggccacacctagaatgctgttcctgtctgccctgtcctctgggcaggggtccaccatagtgtttctccatgtttgggctctagtctgtttttccctttcctgttctggaaagcccactggtggctttggcttaggtgggggtgggcagagagctgctccccgtcactagtcattgagtgtgaggctcctgaagccagtttccacttaggcatcattttcttcataaatgtgtttctctgtggtgagtgaggagagatggtgtcattttcttattttgtgcatttagaaaggctgagatttacaaaactcattttgggtactcgtcactaattagtttaatctgggataacaatggaaaatgaaagattgcatgtttgatcatgcacagcaaagaaaaaagatttataatgaaactaaatatcatgaaagaagagaaggatcagaaaactcaagtgtaggaactgagttctgtgttgcccactgatctccacacccagcccccaaacacacagaggtcctgggtctctgttctagaggccagaactttatgttgtccgaggttctttggaaaagaaattttctttgacattttcaataactagcaatgtgcacattttggtaaaagagatgaaatgatgctttatgattagctttagcaacagaaaagtaaaaaggtgcagagaaagactaatatcttcactttttttcttgttgagcaataacttcctactccaaatagaatattgtgaaataattttaaaacgaaaagaaaaaatgttgcatccgatttctgtaaacattgaaagcatttcccagatcctgcttaccacagaatgacgttctacttcaatttatctgcttcagaagagatgaagagaggaatgaggcttgccagcatttggtttggttagctcccagggcacctatgtattcccaggttgataccatcaccactaaagtgattagacaatagtgcatgggctgactccataaaacagaggaaagtctcagggctgttgttagcagtagatactcagtccaaatatgcagtatcattaaatagaaatttcacctgaaataaactttgtccctgtaaaaatgggaaaatgcttaggtcaaattagaaacagcccttcagagtataatggtgggctgctggaagcaaggttcacattaacttttttttttttttttaagacaggttcttcctctattgccccccaagctggggtgcaatggtgcacactctgatcactgcaacctctgccaactgggctcaagtgatcctctggccacagccaccagagtagctgggactacaggcatgcaccaccatgcccagctgatttttgtgtttttgtagagatagggttttgccatgttgcccatgctggt

SEQ ID NO: 96894 - DNA, 1075 bp, Homo sapiens
tgtatttcatgcatattttgcagggcacagcattttctggtatttttctcaggctttctttaaaaattgtgtttcctcatcacatttaaaacatggatttgctcatatcaaatttttccagaacacatccagggtgtgaagttaggtatacttatcggtcattatctcagcaagaattgtcagtgtgtgacagtgctctgtgtcagggatgcgcctagaggtgctccaccctttctgattaaaatgaggtcgttgggttgaccaggacagctgttttctgaaatttttgccacaaacaatcacgtcaactaaagtaaggatggagacagtttgtgagatgagcacatgtggaaattactctatgcctgaataggaacagaaagatctggcctgtcactgtgtgggtgtatgctgtggaaggcctccccccagggggattcatcccagcaatttgtttatcccaataaagtttgtagacctgttaacctaggaactccctacatgtcaattagaggagccatgaaaacctctcgcatcgcagggagggttggttagaagtgtcagttcagggaaccggaaattgcttggctcagctgacacaaaagaggatctgaagggtgcgggcagagagcaggcagttttagaaccaggagacgccttttcctgctggggagtgacaagtcaagtgtcatttggaagagttgaaaggtggactctgtgtggagcaagggacaagatggggctgctttgggagtgacacggacccagagctagagtgcccagaagattccgattagctgtggaatcccgtggagtagcccttccagcttagcaggggcactgggtctctgaatttcaaagacttgctgtcttggttttacccctcaccgtaccacctgcatcagaaactcttggggtgctcattaaaaatgtaaaccattgggtccctctgtcgccggcaaaaacaatgtggggggcattttaggctatctgggttacctggaatctcactgaaggctaaggaccactgggtgaattattcctcaaagagcggttgctctgtgtgtttgaacct

SEQ ID NO: 96895 - DNA, 1046 bp, Homo sapiens
tgaatacatatgattgtcttcattgcaaacttgctttttggctcttagcttcttttttttttttcctcatatatatgtttgtatttttcattttgtttctttcgttttttaaatttaatttaatttaatttccagttccgagatacatgtgcaagcttttccctttttgaaagggccgtgcagtgggaggtgtggcttctttagaggtttctttaatgtataatggaagagtaaggatttctgtaagaagtacaaggtacagataatgtcagcattgtagaagcagctgttagtgtataacccaggggagttttcagtgtgtctggggagttttaggtgtgcactgcagaggctgcaaagctccagagcaagatggggaggagcagggagtgctgaagagagggaaggggaagtaggggctaagagagaagaaagcactcttaccttgtttgtttcttactttgctagttgatgtatcactttgcaaaattggttccagtctcattgttttggtgctgtgtaggttgggagcaaatatgtagcctcattgttttgaattgtcttagattcttaaatctccccctttttttcttagttatcggtcctatcgtccagcattttctttctctgttctaagacaaaatctctttgtctctctcctctttggagaactgcctataaatcctttttggaagaccatttgtgatcaacccaaccctgccaattcagatattctagaaagtactttggctctattttgtattctcagttttatatgttaaatgtatcagaccaattctaagacagtgaatagttcttttgtttaaactgaaagtttaagaggggctcagaaacattgagttataattaattgagttgtaggtgtaagtgatttaaaaaaaaaaaaagcatacaggaatctttgcgaagtaaactggtggcatgcaggagataatactggtgcacattaggggagaaactgggcagggaaaccagctagctagttgttaaaactgctgagagctagtgaggacccaaaagaagtc

SEQ ID NO: 96896 - DNA, 1029 bp, Homo sapiens
ctagattacttataatacctgatactatgtagatgctatgtaaataattgttatactgtattattttcaaattgttttattgctatttttattgcttttccctgaaatatttttaatccacagtaggcggatgcagaacctctttatacggagggtcgactgtgtaggagtgagctagtttcagttaaagcagcggtggttggtactcatctctcacctgcccccacgtagtgtagctagggcatcagggagtactgatctctggcatcatctgggatcaacaggattttcctgcctcacaggcctgtgagcacattagaaatacacctgctcagctcaagtcaaagtgagaagcttttgaatggagtgataaccgagtaggcagtatctaaataaagatgattggttcaagtctcagtggacaaatgtgtacgttctattactgttgactgtgactttgaagtatatggtgttcattaagcaaatccaatctgatcgtatgaaaagagcaccccaaaaaccaaaatgaaaccatttatcaggacttttgtagctatgaaaatattttagtgtgttttgaaacaaaaaaagtgatttatactcaaaggcttttagatatagaaaattggtattttcatttttcctttgtgttgtttcttgaattcttttattagctactcctcttcctgtttccttccattttggaactgctttcttgaggtagctaagttacaaaccaaccatactttggtttctgcacatcgtggcatgtaggaaggccttttttgctaagcagtatgttgtcctagtggtttccagtagggttttggaggtaggggagtgaatgcaaaatttttctgcatgtgtgtatgtgtgtgtttatatctgtgtgtgtttaatggtcttgccctccaatagttgtacttgttaaatgttgctaacttttgatgagggaagtacttatcttcccagtttaagtagatttacatagtttactgccttcttcaagattaactgggtgtagctgca

SEQ ID NO: 96897 - DNA, 1030 bp, Homo sapiens
gatgtggaagtccatggaacttttacctgggttaagaagttctttcctttaattaattaaataaataaaatctgcatttatgactcggctgaaggatatgctaagatagtcaagattcagaagcaggcatctcgaagtcatttcatgtggcttcatttaaaagaaatgctctcggatccagtacacttacatcaacttcataaatgcagccaatttacaataaacattccccttgcaacccctcctcccccacccacctcactctacctgaaaagatggctaattatgttagggccttgtgtattcatttatttgttgtcaaaacccggcggggtgttagctctgaaatggggaaaaggctctgagggcgaggcctttggctgtgaggggctggaggttttgtgtgtgaaggggggtagcctgctggtctggagcacgctgataagatgctcttcttttcacagggctctccttagattcaaagactaaaagggctgactgaatcagaaaaacaaacagactttcttttttctataggcaaagaaagaaatgaatgtgtaggcattatacagacacaagaccccgggtaccagtggtatttgagtcaaaggtttcttttgttagtatttagccattcactgggaaagcacacttccagcgcggggacctggttaccatgagtgactttgtgatctcatcctggcttagcctaaatgggaagtctaattaatgctttttataagattttgtgatgttaagcttcaaccttgcagttcatattagtttgttcattttgatgaaagaattggcagattttaggtatatgatgcagtttgattttagtctagaaatacataatcagctgttagagctgatctcagctaatttgccagaaaaaaaaaaaatggaatgtaaggaatactttacagtcacctttggaaaaaacaccgtaatggtttggaatcacacttgcattatacatacatagtagtagtagctaactttcattgagtacttcactacctgctga

SEQ ID NO: 96898 - DNA, 1083 bp, Homo sapiens
tctattcttatctcttggacatcttctctgcccccattttttttccttctttcaaagcttagcttcgccaccatactttctttgtagtaatttcattcaaagcttactcttttatgtggggctcggtaatatgtgtattagggtgttgggtcctctaggacgcctcaccttccccttttaggaagttcatcaattagcaatgatttcagcagtgattaccccaagtctgcattgtccctcatgctagccttctatctgtagttctgtttttctgatcatctgcacaatgcttctttctgagtatccttctaacaaaacatttatacagttgagcttcccacgcccatgttatatccaatattgatctctccctgctgtggactcccatagcacacgattgtctagaacacttgcctggcacttatcacttaatgtcttgcattattagtgtacagcaagcaatttgggcgctctatggtttacaagtactcacctaggaattgaagcatcatcatctataaggctttttttgagatgcggcgttacagagttttagagagcataagacttagtaaatcttttaaccctagccaggtctagattttaatcctagtttgctacttgcttactagctttgtggataggtcacccagccttaactttttttctttcatctgtacattgaggcttataacccttccaacctcaaaggttgttgtgaaagttaaatgagacgtgaaaggtttaaaaatgaaactttcattttaaaattgttgctttgggacaaatgtctttcaaattcaattctctaatttcaggtatatgagctcttttaagtggcagaaggcattattacctatgtgtgtcatctcctattttagattgcaggcttctgcatgtactggtggctgcatccttattattctagttggtatacacctcctggcttatgagagtgatctctgatactgctcacagtcttccaattcattcaaaaatggctcttctccaacacctaacttctttaaaggaaactggacaaaaacagatgaagaaaaacttcagtgcacctaggctcttgaa

SEQ ID NO: 96899 - DNA, 1033 bp, Homo sapiens
attctgctctgttctgggtagttgggcaggctatgtagtatatccgaattccaaaccattaagtgaaatgcttgttattagtgatacccaatcattgtttcatgacacaccagtgtgtcacaaagatttcctgcagtgttggcagtgagcctcacttttcccaaagctctggctccttctctgacacattgccaccaggtggcctgcgtgacctttactcccttttccccgcccaaacatcttacattccttataccttatatctggatttaagaaaagacttcttttggacaattgatttgcagttcctaatctgagttcttacacagttgccaagctattattgctgcaaggagttaaatcggttttcacacagttctaatagtttattgtcaaaatgtcatttatttgagttaagcattgccaatgcccccattaaaccactgtttcttttatttcctggagtttggaaggcattcgggaataccaagtgaaaaggaagagtgaagaacagaaaaatgttagtgggatggcaaacactgtgaacattgctgtttctagtgggccagaaaaatgtatgtataaatcttccctgttcttagaggcgctttcagattctcctccacaaagcttcctatggtcaccatttagagtcaatccccttttccctgttctccatggtatgttatttagttctcttcatattactggatcagagtctgctttaccacttggtcatttgtgcatgtctttttcttactgaaactgtcagattcttctttgtatcttcagaagtacatataatataatgtaacatatgcaagtttatatgtagacatacatttttaaattctttaaatataatagattcatgttcaataaatagtattgaatacctattctgtactatacaaaacactggtgataaaacaatgagcaaaacaggcacaaccccgtttctcaaagagcttttataatgaggcagaaaggatggacattaaataataatttagattgcagctttgtgagtcca

SEQ ID NO: 96900 - DNA, 1048 bp, Homo sapiens
ccacttgacacttaatacattttttttttttggagctgatggatatgcatttaatccagttaacatagccagatgggccttgcagtgatatcactgaacagtatctccaagagaatgtcagacctcagcaacaaggcagtggggtgaatgaaaaggcagatactatcttcctctgagatactgggagaagaaactttcccttaactcccttatttataaaaaccagatagcttagttgttcctctgaaactgtcagaatttctctcatcaccgcctctgaactgatggatggggattggtcttgcttactaaatgtgcattgtagcaagacacaactttatttaaaataccattaagatgcaagcacattgtggctactctgaaggccttcacttacaacatgaattattcaaatagcttcttaataactgtattgatttccacagttaaaagcagatcagattatggaatctgctcaataccacttaaatgtttatagatgttagagttgacaaagaccttttagacactgataattcctttcactgatcagaatgctagagatttggcattgctagtaatgctttgtgattatttttaataaatcaggaacactgtaacagcaatcatttaaggtcttcattcttattccattttagtcccagagtctttgcctgaaaatctagttatgctaaaaatctgaccagaaacttttacatttatattgatcagaagcttttatgtttcttttgcaaagatcaatgtagtaaacatgtcttaacctgcatgtattgatgtgaatattaaaaaatatctatgaatatttataatgataaaatccaataaggtttcagtttctcagttgcttttagtaccctgtgaaaaggtaaaagggggcaagtgtactagtatgagaagaaattataggtggagtaaaaattagatcttttattctttctgattctccccttatttggaagtctctgggaagggaaatttccagagtggattgattagtctgctcgggctgccataacaagataccata

SEQ ID NO: 96901 - DNA, 1024 bp, Homo sapiens
aatgcaatacttatattgtttgcaactgagcttaagcactcaccttatttggacttttatttaagcttgtataaaaaagggagattgtatttaattacaaagtgaattttatttgtttgaaaataacactagaaattaatacaaaatgcatttcctgatttcctctttcagacattttcaaaaaatagcacatgcaaagaggcaacaatattatcgattaaaatgaaacaaaacacaagctaacttttaagttcacatcatattttgttaaagttagttaggctaattttatagttatagctcggccagaatgttttatccttcggtgttgttagcaacagtaaaagggaatgacacacaactgaagcaattttttttgaggaaaatagaaatatttaagagattgatttatagttctatcactcagaaatacaaatatatatatttttaatgtaggtattgggtttttattgaagttttctttctctgcctgtttcccagaaatgtttggctttgtaattctgagaaatagtttacatcaacaccagaataaaatatagttatgtcaactgacacaaaaatgcctgactcaaaacgaggaggaagatttgggctcaatttaggtcactgaagccagtgacgccagctgtttttgcttctgttttctagtctgttgtctgaaatttggaaatttgttaagcatgtttctagagagaggatttaactgcttcatacaagtttacctgttatttagcaaaacataaataactgtcagcccgataaatagatttacagcaggatacttgaatgattgagtgctagtgtacctcaaaatatcaaaacagttcctaaaatgtaatttttcaatgagaaatgaaatgtttgcctccctctaaccctggcctgaaacttgtagtttagagcccttaatacaaacaactttttgtcctttactttctcttagagtataaatcctcttcacttcttctaatacctagtggacttctacttataatcagaatgt

SEQ ID NO: 96902 - DNA, 1091 bp, Homo sapiens
aaaggagagagaaaaaatcaacatctgaacctcctaggggagaaaagtgtataaaattaagcattgttattctctccccatgttgtctcttaactaattcttaaatggatgcattttagaagattgagaatatgttggacattgaatatgaaaacctagattctaaaagtgaggttggatgctgatatgaacagttagcttgcatgtagatctggcactgtaaacatgctaaatcaatgttggtgggtgatttcctacattcactataatatctgtgttttggattaggtaaagatttaagctggtagttgttgtaaaattgctgaggctcatgatgaaggactaaaacactagccaatcaattgtatttactgagtgaccccagtacatcattctttgcacttgacattgggaaagtttaaagagttgaatatctggtacctgctctccagcacctcacaagctaccagggaggacagaatagacacaaggcaagaaataagcacagaatatttacaaagtagtgcacccacgaaagcagcacaccagctgatgtcctgggttttagtgactgagaaggcactaagatatatgtaggattaaacactttgccatgtcttttgcaagaaagtgaaaagtgctaataaaagctacaataaatctgggaattttagaaagacataaggctttaaatgaataaatgaatttttttacttaccagcattgttttgcattttttctgctgtataaattcttttaagagtacttagaattttaaacgaataatttttttgtactttatgttaacttctccttaaagtttcatattcaattaatttatttcaccctattatttttctagttttatgcttacaaatgtgctgttaagccaacctattagaggtgtggcaggttggaaatgtactccttaaatgatggcatagtggttatacagaaatataactttgattgttttgagccatttggaatgatgtttatttctcctaactgattagctttgcttccggcaaaggggaggaaataagtttggggtttgtaatgctgctaattagatcattgcttgcctgcaa

SEQ ID NO: 96903 - DNA, 1019 bp, Homo sapiens
ttataaacataaccacatattgtcctaaataattttctcaattttaaaatgacctatgctgtattatattaaatttaatatccatcttttagctacacagaaaaaagatgttgataatctaacatattttaacttaaagatttgtatgtacacattttcaaccagtggctgcattaatttcacttattgtaaaagcaacccttgaattatggtctgtttatttcaaagatactacaacatacattattgccagtgcatgtatgtaaatagttatggggattgaaatattctgtttcttttgaagaaagggaagtacaaaattttctttccatgattagttagctacatattttgtaccaactgaaagcaatttgggacagttgtaatctttattcacatagttctaagaatatatttctataaaattaatggaaagcttgatttttttaagtttttgtgtatgaagaagtattgttttccatgctgaagaaatgtctatacgaaagatacgtttctttctaaaacaaaacaattttgtttttacgccatttttacatacgcttatgacacagaatatatctgaacctagcttcagaatctgaaaataataaatgatataatttattctattaataaaggctagtagaacaaagcagtttttctgcattgaacttttgcatgcattttttattgaattccttaactcttacttacttctagccaaatgaatattgtatcaatctgtttctccagaaattagtagtcctgatttgatacataaaactgttgcatctaatgaagtggaagtacacaggcataatattcagacatggggcgctttgtgtcataagaagtaaccacatttatgatgtaaataaagtttgcttaaaatatgtcagtttggtaatgcagtattttacactgatgaatcaaccttatttccttaagtgagtggggtattatgtatgactatctggaagtggtattgaaaggctgaaggacatgtaactattaaaatg

SEQ ID NO: 96904 - DNA, 1016 bp, Homo sapiens
acaactatgtgcaaagcaggaagtgaaatccttctcagtcctctccccagttgtaatccaagccttccacatctttcctgtatgtgcataaccatgttattttgctttcttatgaaaatgagattatgcatactgttcgataatctgtttcagattaaatatatatatatggtgaaagtcttgccatatgtagctctattttattgtaatgttggcgtggtactgcattgtgtagatgtaccaaattatagttaactgtcacttactatgtcctgtccgtatatattgcccagtattcttcaaaattatctgtttctcattagactacagatttcattaatcctttgtgaaatatatggcaaatattttcaagaattatcaatgctttggtttaaaatgcccaggctttttatctcaggtaagaaggtagtccccactcaaaaattcttaaaatcttctcctatattgcctgttaattctctttttatgatttactcattaaaacatctgaaaatgatttttgtatgctaagataaggatttaatttttttctttgtttttatgactaggcagccattttttcctgaaatcatttgttgaaatcatttctctcccaactgactagaaatacctccttaatatagtaaattctcaagtgtacatgcatcttttctttagactcatctgttgctttgatctttttgtctcttcctttaaaaataccaatctgctttgatattacgttttctagtaattcataggacaagtccctcttcatttttccttttcaaaattttcttgaatataattgcattatctttgagataaaatttaacataaactgttcatgcttcattaaaatactctttttgggatttaaccattatattttcttatattttgtgactggtatgtagatgagtgtttatgtatctggccaactttctaaatttattaattttaataaattgtttcacttgaattttctaggaaaacaatcatctaattataattca

SEQ ID NO: 96905 - DNA, 1024 bp, Homo sapiens
ttctggcctccttcaaagaaataataagtgggcctgtcctcttttttggtttatatttggtaggaaaaacatgtacatcttgtgctataaggtggtacaataatgcgtattgcttttctctattgttttcttttcaaaaatgtagtttttttcggctttttttttttttttttttgggggtaaaacgattttggcctaattggccatccaaggatgtactagtatcaggagacattaaaaacaggacttcaagaatacaaacaatagtgaaggcatagttatcttcatttttttcctatagataattatgcaggtgatgctttcttcctctttattatgatgtcttttctagcactgttgtccaaaattagattcagtatcttccctctcctcctgaaaattttctttctgtcactttatgtctggctatcaccactttctactgggtgttttgaaaaccagtggctggtgaaccatctgcaacaaaatcacctgaggcgctttgctaactagaatgtagattctgaggtcccatttcaggccaactgatttgcagtcacaggtacctgaattgctgccctcttgtctattgtgcacatccagtcggccaccaaatcctgttgattctactcttgaaatgcctcttgaatccactcatctttatttcccctgctctagttcaagccctcatcttttacctagaatacagcattagttgcctgtggtatagcctcactttgtctccctcgctagtttgtagtccatgctgttatctgttctgtctaaaatatgtccatcatctccttgaaaatctctcattactccttgtgtcaacatgttaaagtctaaatttcttagagtgacattcgaggtctactatagtctagccataactgagtctgctgcatgtggtttatgcagccagtgtactctacagctctataggatgccattccaatcatggtctttatgtatggtcttccctagaatttttgtagtacagcacagtcatacatgctgaccc

SEQ ID NO: 96906 - DNA, 1095 bp, Homo sapiens
tagcttcttccttaaatacaggagctacacaatttccttctcctttctaattgataaatctataaaactagctgtcattcataactccctccattcttcagaaatcattgttattctttgtgagtctcctcttggtttacaaaagaatactccattatggaatacctatgaatacttatggactgtaagtcttcattaggggtggataggaggaaagagcgcacagtatgagagagggctttctaagattattgaaatgaagtttagaatttgaatttattttttttttcagttcaggtttaagacataactacttttgtagaaagcaaaaaactcaacgttcttcttaggttcattaagaaaccgtgacaattctatatttcttctagaggagtattaagatatcttttggataagacagaaacaggaattcctgttaactcctatattttttgcactagccattggtaagcaattgggagtttaaccccttatctgctgtggaagaagcctttgctcacattagcatatattccaaagaaggaaaaaggaaaatttttttacatttagttttcaaagctaatatttgttaagtactcaagaatggatgaagaaaaaatgtataatatatattcttgtatgttaaaatcaaaatattctggtagatttatttaagaaacatttattgagtacctcctaagtactgggcccttcatgaagttttgagaatactgaaataaataaaatatcatttatatcattaaggaactttaaaaagttcaaataaatcataaataaaatagatattttactatatagtagaataaaaaaagtagttattactatagtgtattttgtactataatagagatcagtataggataatacatgagcacagagaagagacacttggtctatgagaatcagttaataagctcaatgtgagtcgatacttgagctaaggttaggaagaagcaggaggagcactatatattaaaaaaaactcagaagtgagagagtatatgatacatttcatgtaccacaaggaatcatatagcttcaaagagaatgatgggacattccaggaaaagaacc

SEQ ID NO: 96907 - DNA, 1044 bp, Homo sapiens
gatcttggctcactgcaagctccgcctcccgggttcacatcattctcctgcctcagcctcccaagtagctgggactacaggtgcctgccaccacgcctggctaattttttgtatttttagtggagatggggtttcactgtgttaaccaggatggtctcaatctcctgacctcgtgatccacctacctcagcctcccaagctttaatttcttaagctaatttatatttgctaatctatgaacagctatgtaatttattaaaatttttaagtttattggtctctgaaaataatagagcttcactaattttgaactttaagaatcagtttaaagtgaaatatctagtatctactgaagatcattctgagattattagaacttcattttcattttatatttcaaggaatttgcaacttagtcattatttatttatccctccagggatagaaattggttaaaaaaagagttctctgctattgtttggtgatacgcttttaagactgtactaatttggtaattgtgatacaacagtttcaaatttgcttgaatgtttgcagcatctgtattcctcagtacaaacttgtgtcttttttcattgctttattctcacagtcactgcaataacatagcaaaattaatggattaacaatataagggaaactggcatttaagacaccaaaggtcaactatattctcttaatttcttaaaacttagtggagaagtttctggtcagtataattttataatttgcatttgtccctttgatttgtatcaacacttccttagtgtttgtgtactctaaaaataaatttagaagtgtgtttatttgaaagacacaaaatcttaattttttaagttagtatgtatttttaaagaatcactttaatatagcatctgttgtatcatttgtgcttttttttttccattaaggaataaatgctaaattacagttttgatccttactgaaggatcaggaaatcatagattgaatccttgactgaaatgtctttaaataagttaatctttaaaacttctgcggtgcttt

SEQ ID NO: 96908 - DNA, 1032 bp, Homo sapiens
agctattttggagaactatacaaagttcattatagccagagtatggagtgaaagatgagcatggagagatgaccaggggccagtcatgaacagtctaataagccttttctgagatctgaggggcttgtagagccatcaaaagattttattaggaaggtaacttggtcagattagtattttagaaaaactactctgagaatgaagggatggaggggaagttgcagtgaagagaacagattggatatgagacaaattcagaggcaaggaagcagtttaaaggctgttataataatccaataagaaaggatggtatgaagagaggtataaagagaggcagtaggtatataacaaaatgaaccaaagaagttggttgcattttactacacatacccaaacagaaaaaaatatattggaatgtgctgtggcaaaagacagagaggtgtcatgagactgccaagaccaaaggaatataaaggaactgacatttgttaagtgcctactaacctgtacagatactttgtataccttgtgttctgtataccctgtctacctagatttgcatcattggtaatgtctccatttgtgaatgttcaacagtgctgatgacaatccttaaaatacatacattaccaacttcagtgccttctttaagggacattgtggagcttaatttggctttttctagtgtctcagaatcatcaacatggagagtactttgatgattgtttttttgtattgagcactcattggccctatactagactgtagtgttttctaagttcttatatcagcttctttgtctttcttatctcttcctatgcttttagctcttgttgatatctatgtctgcctttagcaactcatactcccttttaatttgctgtttcaaaccagctatgagctgtggaaataccaccaagtttgttagaataaatctaaaatgacaataggaacaaaattcatctatctatgaaccttgtggctctaattctggctcctcagaagctctgttttctttctagcttttgactg

SEQ ID NO: 96909 - DNA, 1147 bp, Homo sapiens
ttcaagatctttcataagtaaataattgcatcttacatttctatttatcaaaataagtgaactatctttcagtgaatacttctactacatcttcagttatatagtacacagatctgtagggtttagtttggttttggttgctaatctggaaatgaacatgtagcctagtatattttttaaatagtctctgcatgtgtatgatatcaaatattttatttaatgtttctaaagctcacagactaatatcccccaaaccactcctgccctcccttttagattcaaattctatcacagaatgattcttttagttaaaaaaaagtttaatgtctgaaagcaaatgaaaactatataatttttacaaaaaacagaagcttatgaaaatacagattgatgtaaatgtctatgtaacttgcaaacatttgtctgatttctctttgccttgagatatttaatttttttaaaaaagttattaatacccttttgctttaagtacacatataggttatagacttaaatcagcacgcaaagaaggcagttgtcaagctgtggtatattttagtagtgggaagaactaggcatggctgacaataagttttaattataacctcacttatgttcttgttcattgtactttatttcacatcatagtctcagttatagttgctactaaatgaaacaaattaaacaatttcatttattgcaagtagaattcctgtggagctgtgaagtgcatcagttctaatgcttgttacttttttctctattatatgtcttgcttgttcttttactagtctgtgcattcatgtttcagtagatggcaccctgcattgtacatttgctttctatactacagcaagggaaacagctggtatgtgattacaacttgatggaaaagtattcagcttaaaaaattcaggagaattagtgttgagttgtcacaagacatggggcataaggttagataattgatattttggcagaaaaagcaaagaaattagtttgttttgaagaccatgttacagtttaggatggaaagaatatttcttaaaatgagttttttaaaaaaaaccttttaagctattttattagtattaataaagctagtattatgcaagctagtataagtacaaagctagtataagtacaa

SEQ ID NO: 96910 - DNA, 1028 bp, Homo sapiens
aaaataaaaacttcccagcgtgtaccagccagaatataccactgtacctatctggtgaaaggggattctttttttcccctgtccttttctagatgggaagactttctctcaacacagttgacatctactagcttgctgacaaccagaggaaactccgtgtcccagaaggtgactcaaattaaagtgtaccattgaccttcctccccagcccatcctttccccgcccccaccacttttagcaggactagcaaactcggttttcttctggattccagcggcaccctaagctccacgtggtgagggacatagaccctttggggccacaggaaaggcagcctggagagcagccccctgccctgctctacagagggagcgcgggtcaccgctctaaaggtggagtgggcacccgccaggtctctccctctgtctcatgactgagtcgtgcagggtctggcttttggcatctgctaagcgtggccgggtaagaacagctcccaggtaaaaaagctgcacacgcgaaacgccgagtctgaaaaaaccacccccgccgaggcgaggcagttgtgagcgggatgcctgagaagtgggaggtgaatgtcctcgggagggcccccccggtgcagctttccccggaggctgaggctgctgccagcggggacatctgctttcttacactccagcctggctcaccccgccccctcagccccgggttgcgtggttattttaccaacacggggggagggagagctcgaggaggtagaaaaggggtggatagaagcttagaagattttcttcccactccccccacgtcccctcctttcgtcacatcttttaaccttcaaggtaaagacttaaggaaacaataagcgtgtccgctggctcgcaggcccgccggggttctcgggcgcggggccttgcccctctccatcctccctgagtccttccccgagtcgggccgtgcttcggcggttcggctgggcgcaggggccggccgggcgcgcccagcctgtggcgcctcctctcccggg

SEQ ID NO: 96911 - DNA, 1948 bp, Homo sapiens
cggaagccgaagcaaactagtgaacccggaagtgcttcgcggcggaggcccgggcaactcttttgaatggaatcgggctgattcatcgccggtttgcagacagagccgcgtcgggtgtgcgccgctgctgctgttgcctctgtcttcgcgtcaccacagaggcaagacaagggtccatatcgcggcatccggctcccgcccgtcttcaggtaagacccagaaggcaggcctgggaggtctggggaggcagccgtgctaggccgccgccagccccgtgctttcctgagtcacgttgcccagctgagttgccacaggaggcctgggccgcgagggaggagcccggcctccttcattctcttcgcctgctctcagggctctctggcagggtcaggtctggatgtcgcctcctttctccattcttttctgtttggccgaattcacatcatgggaacctcttccatctatatagagagaatccttgtttatggcctgtttgtctgtgctctatccatagttgttaaccggtctgctttgaagtttttcaaagcagaccgggaaaacaagggagagagagtagaattaactttcccattgaatacgtttgttttatctcttgtccttcctgtaagccttaaccctttttctgttagtgttaggttttcagctccctccaaaaagtaaacaaaagtcctgcagatacactgcttttggaccttgaatatcttaaaaacaaagtgtgctactatggctgttaacttactttcaatatcatactaattgagtaattgttggtaaattgattacatttctcgttttaagtaaagtagaaatctgctaccgtatgttacatcttgcaacttaattttcctggggatgtagctctgtgtctgtcaaaagaaaaagaatgtaaacttttgagtctataaacctagtgactgaaggaaaaattctcgagaaaataaatggtaatataagttgataaaatattatggaaaggcaggggaaagggtttaaaaatgagcataaaatagagttatagtgtgaaagtgattttgttccactggtcacaagtgtttttttagtgcttctgacttaatgtgtttgagaaaagcagcaagacatgcactgatactgtagaaataacaaaaacatgaacacagttttagtggagatgattaatataatggtggccttcctgtcacgtaaggctacctaccagctgactcatttgaagtttagaggttaagatatatagtggttctgaattaactacagttaaggtgtgtttagtgaagtgctatttagtgaaaaaggctaaatgttgtcttgaatttgtccctaaatcttgccaagggaagaaagttttcaagtgatgatcttttattgatgcttcacctgttgactttgggagtttttggttttttgtttttttttcagcctaaagtgcttggtaaataatacattgccattttaatttaggccgggtgcggtggctcacacctgtaatcccagcactttgggaggctgaggtgggcagatcatgagatgatccagcctggccaagactagcctggctaacatagtgaaaacccgtctctactaaaagtataaaaaaatcagccgggcatggtggcacgtgcctgtattcccagctacctcaggaggctggaggtggaacctgggaggtggaggttgcagtgagccaagatcgcgcaactgcactccagcttgggcaacagagtgagactttgtctcaaaaaaaagagaaaaagctgaattttaatctgtttgacatgggttcatcttattttcatactggccatgtaaaccatgtgcttgttaatatatagtttgtgaaccatatgtatgaaagtcaataaatattattgctgttgttattgttattatcttagaagtggaagagattaatctagtcctcttatttcag

SEQ ID NO: 96912 - DNA, 1062 bp, Homo sapiens
ttctaaatattattgtatgtatgacattatgttaggtataaacactttattcatattgtctgataatattttccataaagttaattatatcatgaatgagcttttgagtcttctactttttgatagctgtaaaaacttggtttagatccatcgacctttttattgcttttatttctaagaattgaaagtgttcccttttatgttaagtataacacattcactttgtgagtctttctgctaaattctgcgaaatgcaagtccctatctccagtgtgatttagtaatgtgaaatatgcccagcattttgaaacccagtaagtggcaaactatgtgaggaagaaggatctgtgttggtagccatgctcaggatggggttgccaatgacagtagctagtgtttattatatgcttactatatgataagcattgtgttaaatgtttttttttgtgtccattgtttttgttaatctaaacggctctgtgagatagatctccattttgcagatgaggaaactgaggaggagagaggtaatttactcaaggacagggaacttgtaagtgtcagagccagtatttgaatctggcactctgactgtagagtcatagtacttgactctcatgtaccaggcaaaatagtcattagtcatcgccatttaccatctaggtccagtagaccataaaaggatagtgaaaaaacaactgtattagaaatgttagtaaagcttaaacatagcaaatacaaatttttattttaattaattaattaatttatttatttttgagatggagtcttgctgtgtcgcccaggctggagtgcagtggtaccaccttggctcactgcaacctccacctcctgggttcaagtggtcctcctacctcagcctccccagtagctgggattacaggcgtatgccactatgtctggctaatttttgtatttttagtagagacagggttttgccatgttggccaggctggtctcgagcttctgacctcaagtgatctgcctgcgttggcctcccaaattgctgggattacaggcatgagccaccacgcccagcct

SEQ ID NO: 96913 - DNA, 1037 bp, Homo sapiens
tctattaaggggaaattcacataatataaaactaaccattttaaagtgaacagtttagtatcattttgtccattcgcagtgtgccattaccacctcagtttagttccagaacatttctgtcattccaaggtaaaaaaatatcttagcaatttagcactttctccattttcctcccttccccacccactgataaccaccagtctgcattctgtctctatggatttattggatatttcatatacatggaatcacataacatgtgagcttttgtgcctggcttcttttacatagtgtgatgttttgaggttcagctaacttgtaacatgtaccagtaagtagtacttcattcctttttatagctgaacagtatttcatattacaatattcctatatgtgtttatagtagaatttgtttatccattcattttttggtggacatttggactgtttccaccttttggctattgtgaatagtgatggtgtaaacatgcatgtacatgaacttattttgagtatttgttttcagttttatggggcatataccaatgagtggagttgctggatcgagtggtaattctatgtttaactttttgaggaactgccaaactgttcccagcactcattggttcttaagtttgagaaaattaatctagggtattatcatctcaagatacatagtctgaaattttgtttatatcagtggttctcaattgagagtgatttttgagacaatcaagaatggcttcaaacatttatcccccggggacgtttggtaaagcttggagacatttttgattgtcacagctggataggtgctgctgttgtctagtggagctagggatgatgttaaacatcctatgatgcgcaagacagccccacgaacaacaaaaaattatctggtcctgaatatcagtagtactgaagttagtaaatcctggctaattttattgtcatcattagagactagagtgctataatctgtctccttcccattcatctttgattttgtagtaatgtgaaacattttctttgttgct

SEQ ID NO: 96914 - DNA, 1632 bp, Homo sapiens
aaatatacaggattccccccgccccgtttttagcctttaaaaagtgctgtgtgttgaatgccatatttgatttgaggaatttcaatgagtatttgatggagattttatttgtaaatgttgctattaggaggatgagttaagatcgtgaagtggaaattttgtctgtattaccacgttttcttatatgccttttcattttaaaaaaggaatttttaaaattgtgagtcttataaacatgttacatgaaacaagccagatacgaaaaatatatgattccgtttatgtaaaattcaaaagcagccaaactaatctgtgctgttgaaagttgaattttacctttgcagggtggaatagactggaagcggggcttgggtggcgtttctgaggtgccaataatgttctgtttcttgaactaggtgatggttacatggatgtgttcacttttgaagattccatggccatatcgtttgttttcttttctgtatgtgcacttgagtgaagttcttttctgtatgtggacttgaataaagtttgcgatattaacattgttaaattgttaccaggattcaacaaaggtgattggtgggggataatatataagtacattattgagttttagtttatatagcaatttgaactcgtaaaacaacatggacgaaggatgaaatgaatcttagcatttaatttagaatataatttgtaataataccattttcttaagcatacacttaggaagaagaggaatttcatttaggacatagcgattttcaagtagaaaaaattgctttgttgtcatttttaaattacttagttgtactgttattaacttttaaaatttgattacttctttttgttatttaaggccatataagtacacttgatatttcttaacttcttctgtgaggttttcaagcttgtaagagtatcttctgtagttactctaaacgttaaaactaaatcagattgatatagtaaatccactttgtattggttaactctgaagttataattgagaagcacagttgaatttccttagtgaaaaaggtgtatatatctctacaacatctgaaacaacacaaaatatctgtgtaggttctagaacactatcttaatatgtttaatgtttatgctatagtatttcttttagtataatgagttcagtttttaaaagcctttgatgctaattcagagatccataatctgctcacaatgtctttcacatgtagttttgatggtaactgacaagctgtaagttaattagcacagaacttactaatgaggatgttaaaatttaatttaaaagtgaggatttttatttgtacactctggaccaattgaaggaaattcaatcatacatatgataagcatttcaggcactttttctacattcaggtactttattagataacaataagaaaatataattaacttaatgatagcaaagttttgaaagtatgctaagattgcttgtctttaaaactggggataacccaaaaccaaagcagtaaaataaggtctgttaattagcatggaagacagcttcttgaattaatatgtggtgttaattaacaggaagtctgatgttgtgttgtaattaccaccaatatttttgacatactgagtgactgaagg

SEQ ID NO: 96915 - DNA, 1009 bp, Homo sapiens
ttcatctttcttcaaagtaatctgtgtttactataagaagcagtttttgtttcagacttcatgaaattttcagtgttttagaagaactttcataagaactgtttgattaggtctatcatggtttatgacttttataaagttgaaatctttttgtgattctgtattgcattcttggatggatttcagttgtttttcgtttacttttgttagttttgatgatttctcatgtttctttgttgtcagcctatttcttcatgattcttcatttttataacacctgtataactcattctctcaagaggcctaagcctctttgaacttgatcctgaacctgtttccattcttttgtaaacattctagagagcttctagaatttctctaatttattctgaaattagtagtaatagtgttcaggcatgtgaaaatgtgagaagtgagcagaggtggtatgtagatagtgcagatttacctgcaaattataggtgaagatgttgccttagaattcttaaggaaagttgtatcaaatttaaatataaaaataactttccttaagcatagatacaataaattacccatcttggaaatccatgctggaaaacccctggacatgaaataatggttttactgaccacaaattgagctacattatatgtcaatggcgacttcaaagctttatatcaagtgaaaaacttaatgttttttcagtaaccttattggtttctgattaatcagccattgtgtccttagtttgtactcttttttgaagttaaaaatctgcttaagaatcatttcatctcaattagatgataaactctaatttgtggaactcttatttttatggtatctcccttatcctatactaggtgtaattttctttttctctaaaattttattttatcttgttataggaataatttgacaaatacttatgatgttacttttgtaacatgaaacgttaagtgtatttttttgcctaataagaatgttgtttattatttatttatttatt

SEQ ID NO: 96916 - DNA, 1072 bp, Homo sapiens
tttccaagagacatgaccccaccttgagtcccagtgcctttaatataacccagtagtagtaaaaaggtctttgggctttgctctatatgctaattggtcatgttattgttattattattattttgagtcagagacttgctttgttgcccagtctggagtacagtggtatgatctcagctcactgcagtctcgccctcctggattcaagtgattctcctgcctcagcctcgcaagtagctgggattacaggcatgagcctccacgcccagctaatttttttatttttagtagaggtggggtttcaccaagttggccgggctggtcttgaactcctgacctcaagtgatctgcccactgcagcctcccaaagtgcttggattacagatgtgaaccattgcgcccggcctggtcatgtttttttaatggaggaattcacagtaataatataggaatatcagtattataatcacagttgatactgatatttcattgtttttgaggccacttggtcttagttgttttatttgggagttgtagtagggctagtaggtaaaaaaggaacttgtaaataatcaaagtccccattcattctagtttcttaattttctctaaataggaggtgacttttctcttttccaaggctattccttccttgttcttggatctcgttctcttgacacactgcagatctccattgacccctttctctgcctacaaagatgtttaagtctcctgtatccaaaaaccaaaactctactgcatactgccattaaaccttttcttctatttatttctagaattcctgaaataatagcttaaactccataatctacttaattacctctgttcactcacatgagaatgcattctggccaactcctgtattactgtactggaattttttaaactgccaagtctattggcctatttttagttctcttttaactaaacttcaatattccacacttactatcttaaacctttcttttccattagtttttatcatgctgtcttttcctgtttctcattacggtgtccattcctacaaaacaactaagttttatttttttta

SEQ ID NO: 96917 - DNA, 1087 bp, Homo sapiens
ttgggaagttctctaattatcagattcatttaaaacccaagcaggtaggactgattctcttacaacacagactcaaggtggttctctgtgggatgttgtctgggttgagtgccctgaaagtatgccaccagagcagggcagtggtctccactgggcagcctctcagtgctgctttttaagctgttgcccgtgattgcacaggctcttcccttcagcagactgaatgcctgtgaagggcataatggcttagggacaatagagtaaataataaaaataataaaaattatgatagttgtacttttctcttactcattgtacattttcccctctttttactcagttacattcttacctgcctgtggtaattttctattccctagtgttgtaaacggagcctgagttattagaaggaaaatgcttatcaaaagtagacagtagaatgacaaaacctagtttttgaaaagttcaccattctgttttatagaaaaggaaaactttcacttcataggaaacaacatatttcactacctagtagaatacatttttgttgtcattgtatagctatatcactatagggagatgattttgattttgctttaatttgtacctggtttcacggtttctggttatttctctcccatttgtgatttctggttattgtattcatttcctgatttctactgtatagactagatgatgtctttggaattttttttttttttttatttttaagacggagtctcactctgttgctcgggctagagtgcggtggtgcgatctcggctcagtgcaacctccgcctcccaggttcaagcggttctcctgcctcagcctcctgagtagctgggactacaggcacatgccaccagggctaattttttgtatttttagtagagacggggtttcaccatgctgaccaggctggtctcgaactcctgacctggtgatctgcctgcctcggcctaccaaagtgctgggattacaggcgtgagccaccgcgcctggcctctttggatattttatagctcagccattctataaggcttttgccttgggagctttcaacttgaaatggtatgaaaattgt

SEQ ID NO: 96918 - DNA, 1732 bp, Homo sapiens
agaggttacaaatagtacaacttttaaaagaaggtttacatttcttacttttttacgtctttaaaacgttttccttacagtccagaaactgattagtgcttctaattgccaaaatatgttgttttatttaaaaaaattattttgggaaaaaggcttctcttgttaagctaatttcaatgaccaatcttgttgtaccttgacttgtaataatgaaaaaagaggtacagagagctgttttatttgaataatagacttgccaattagccatcaagtgcttccatctgtgaaattgttgatcagatgggttagctgggatgtttccagactagggcatcataaatggcacttgaaaactctcactttaatgatgaggtttcaagtattacactgcttaatgctgtggaacctttttctccttttgcagtaccatgtttttttagaacatactgatcccatttatgaattctgtggcatcaagagaatttgggagacctgccactgatgaaaagttctgcctaatctgctgctctggcctgtgctgggattacaccagagtgctaacagcttctttcatagcctttccagtaattttggttggggatctgactggcacaggcaggtgatgctcattgcttatgggccatggagctggcacactttggcaagtttctttgcactttcccattaatgtaaactcattttcaaatatctcacccccttaaataagtgtataagagcatagtagcctaaggccacattagtgttgagatttctacgtgtaccccttgtgtgaaatgactttagcatctgtcttgtacatttttgaaggatttaaattgcttattggtaattattacattttaaaatttgtttaataatagcatagaaatataaatttctggaaataattgttgtatgtctttccttactgttccatatcttcattgctcatccttatattttataggaagtttccttttttagtaagttgacttcctcaaatgcctgtgcatgtgattagatgttagagtctctgagtgacattttcccttggtaggactgtactgtgcttttcttttcctgtaaatccaaattcctgaaatttggccagacttctgggttaccagtctgtgtggggtcaaattcatggcccatgtcactttttggacagtagcatggccttctgcctgtcctggcacaggtttcggacctaccaactcactatgaaaggcagtatatattgggcagtggtaaaaacccagggctctggagttaggccagatctagacactagctgagatccatggaagaggaagagagaatgagaatgcagtgtaaatgttcaagaaagcagatagtttaggatcttgttcctattcttcttccagagtagatcacaatttagcatcattcccagacccttcaacctcctcaagtggacaagctcccaatgagagaaaggtatcaatttttaaaaagattatgttattttgccaggtgtggtggctcacgcctgtaatcccagcactttgggaggccaaggcaggcggatcaccaggtcaggagttcgagaccagcctggtcagcatggtgaaaccccatctctactaaaaatacaaaaattagccaggcatggtggcatgcacctgtaatcacagctacttggtaggctgaggcaggagaatggcctgcacctgggaggtggaggttgcagtgagctgagatggcgcca

SEQ ID NO: 96919 - DNA, 1033 bp, Homo sapiens
cacctgtaatcctagcactttgggaggctgaggtgggcggatcatctgaggttgggggttcgagaccagcttgaccaacatggagaaagaaaccctatctctactaaaaatacaaaattaagtgggtatggtgttgcatgcctgtaatcccaactactcaggaggctgaggcaggagaatcactttaacccaggaggtggaggttgtgttgagccaagatggcaccattgcactccagcctaagcaacaagagtgaaactccatttcaattaaaattttaaaaattatgtaattttttttgactgcctggccacagtgtcttttttgttcgctaaggtttgtgtgttgttctctctccacagcaaaaatgtccagtagttaatagataaccttgattaatcaataggtttccctttacaggtgaggaaattgaggcatgtagaaattaagtaaattattcagtatattaagacattttttaaaaagtgccttcagagcagaactggaagactgtctttttaaagtgctcctctgtagagcattaaaggaagtataagaaagagaaaatgggaacagatgtgaccatgttgatggaagaatagaattttcccttctttgaccactgccactttttcatgctctttaagtatttttcttctgatgtgttttctttttttgaaaatagagacagggtctcactatatcgcccaggcgaactcctgagctcaagtgattctccctcctcagcctcccaaagtgctgggattatacaggcatgagccatcacgcctgccgtttgatgtgtgtttttctatctgttcccttaattcctcagaaacaggcactgtgtcatcttttgtgtggtatctcaaatagcattgtgaatagatgaatgcttagtgaaattagggtagtggtcagcagtatttctaggaagcctcagagattacttctgtcccttaacctctaccatgcctcagaacttctgagccttttatgcttctaattaacagaattcagggagtttttatga

SEQ ID NO: 96920 - DNA, 1982 bp, Homo sapiens
cacctatacctttttggcatgatcaggatcatctgggagctttctaaaatgattggtatggtagtgtgtcattgttgctggtgaaggtggtcttatcacttagcttatactagggcagaaagaaggttgcagagtagtatcacagaatggcccctttggcccttttatgagttgttctagaatttctatccttcatgatttgtctctgtctacattcatcttttgctctgaccttctcatatctcaaagtagccatattatactctgtaagtcctcaagtttcccataccattctgctcatccattatattactttttgtagggtgttctctgtaaaggaaagccctttgcccccattgtgtattaatgaatttactactttctttctagactgcttaaatgatcccttaccctcctctttcccctggaagtcttctatggtgtgctagtcaggaaaggttgattatgtttcaggaataacctccaaatctcaatggtttaaaaccagaaagctttctttttcactcatactgtatgtctacatgggtcgtctgggtgctctgttccgtggtatcattactgtgggactcaagctgatacagcgctatcattgaacactgactccttaaaaagctttgattgaaagtgacatggccactctgcttacattttattggctgaagagggtcacatgttcatacctaacctcaagaggttagggaagtgcagtcgtactatgtgcctgagagagcggaaccagaaatatttcagggagagcagcaattagtgtctctagcctgattagtctctctacttcatatatctatgataatttgtaaacctctgtatctcactaaattgaaattataataaacgctgtagtaattcagaatttgatgcatttggtgattggctcaagacctctgaaattcctagacaactggctggacaaactaaccatagccatttcattaacctcacaataatgaaatccttgttttataagtttatatcagtgattttcaaccttggctgtactttagaataacttggggagctaaataaaaaaagattcctgagcctcaatccagagcaattaaatcagagtctctgagggtgggcccaggcatcagaattttttaagctctccttgtaattctgagctataaatacagttaagaacctctggcttacattcattgcttatttactttctggggaggcgctttgaaatagggccttgcttttattatattaccaagacttactctctttccttttattttgccactagaataataaactacaccaagttacaatcaagtattgatttttatatatactgtgtattttctgtctcctatattacattttaaggactaggaccacatctaactggtttgtcatatacccagtgcatgtcatactatctgccatccagtttcccaagtctattttttcttcctttttttcaaatagtcgtgcccacattcacccatttttttggattccctctcctctgtgtggtgctttctttttcttgtattgttcctttgtctttctcttctttcattagatgaggtaaataacatttgagaaataaagcaaaatgtaattatatttgaaaaatgtaaagcaagatacacacaaacaggaaggttatttgtattctgtgttaacacctccagggcccagcttttatgactgcttagtggctctaacagctgatcacagtagcatccacttaaccttcagctcctttgatcagtgatccagctaatcccagacttgaactctgtgtcttctcatccagtggtgtccattgcttggatgtcagataatcagctctttataattttattaaaagaatattttgttctgagaactgtatattaaagagaaaataatctggctttaagactatgagtcagatgtaaaatttatacaaattctataaactgaaaagatactctatatcataa

SEQ ID NO: 96921 - DNA, 1047 bp, Homo sapiens
ttcgccatgttggccaggctggttttgaactcctgacctcaggtgatccgcttgcctctgcctcccaaagtgctgggattacaggcatgagctactgtgcccagccctattctgggtagttgggattgcaagtacatgccaccacacctagctaattttttgtatttttagtagagacggggtttcaccgtgttagccaggatggtctccatctcctgacctcatgatccgcctgccttggcctcccaaagtgctaggattacaggcgtgagccaccacgcctggccttcgtatttatttcatcatgtatttctgatgtaattagtctctattattctttgcccatgtttccattatggttttagtatttttaatttgcttgtgtactgacttcttgtcataaatgggaaaactattttttcagggtgttttgttttaaagtctttaggtatttagaaatttagattatgttggcaattttatgttcctttatttgttcagttgagtttctacctaaaatgtgcttcttcacccagatcaaataggcattcaccaatatttttggcatagcatttgttacactttaattttttaaaaaaacatgtaactctttaatccatctgggtggtggtataacatgatataggaaaggaaatttagttttaaatgcttccagtactaagaaaaaatgaaaaattaaaatagaatatgttcaattctatggtgataactttgaaatctaaatgaaatgaaactttctgcaacactgtaatagttcatctagtctcaagatatagataacctgaatttatcaatacaactgaaaagattataacaattagccacagaacagcctcagagccaaatgttttaataatgaacacttccaaaattgaaaaacacggatagattttttttttcacatacatattattggaaaatagaaaatggaaaactttgtaattgggaaacttgtaaatttttcagtttgttttataactctaacataatgatatcaaaacctggcaaatttcacacacacaaaaa

SEQ ID NO: 96922 - DNA, 1046 bp, Homo sapiens
acaaattacctgtatagaatacattattctttctagagatgtttgttttgttttgcctttttgtttgatgcattagacttgtgttgatagatgtgcattttgactgaaagaaaatagccaaaaaacaataaccattccatctaccttccaaaaaaagcacatatatccttctcacctgtttgcttagaaaaatatgcatgtatttttccaagcgatatttcttctttgctaggcaatatttctcttactgagccttgtaaaagaaggattaaagaaattgttgttataaagctgttagttctattcgaagttctgtaagtttactttgataaggtagatgctggagaacaaattacaattttaagtactgtaatatatatagtatgtatattaaaaataagcatttaaaatagaatatttgctacagaatgcaatatatttaaaataatgtaaagttttctctaaatagatgaatttgttgaggtaaactaatttggatctactgattttatccatcttgatatccattatatttattttatacatttggaaatagagaaacactctacatgttaaccaaaggtttagatttaaatcttagactatttattacttgtatctgtctttttatattaggctacatgaaacacataaaactaacttatatatgttatgggtacttatgtagatacccattataatacattgttcttaggctttaatatcattacttccatgtaaatgcttgtttgacaatataaaataaaagattttgatccctatattcactctaattctattttctagtgtcatagaattagaaagtttttcttctgaccccagagtcagtaaactttttctataaagacatatgtctctgttgcatattcttcttcttttttaagacagtccttttaaagtatatatatgaaaagaaagaaaaaaaccgaaaacattcttagcctataagcagcagattgcatacccctgttcttgaggatgtactctctgttggaattcaatatgcatactgtttgttttggtgg

SEQ ID NO: 96923 - DNA, 1049 bp, Homo sapiens
ggagagtaagctcacagaagttaccagtgagttctgctctaatcagtgaaatagtttataaggtccgcttgcagcatttagttcatttgtaaaatatacatatttacatattttaaactttagttctcaagtggcacagtggggacctcctgctgaatgttgtattatcttgtatactcagcccataaccagatccagcagcaaatttagaagttaattcaacttgtaatgtgactatacttctttcttgaggcaaaaagaatggtcactttgggcaaaatcataaaactagcatacaacttaattaggatattgtaatatatttattaaaaagcattactgctttagagaactcattttccttgatgggttcctgttagtaaaatgctcagttattaccagctaactaactcctaacaatcattgtgtctgttctctgttttgaaaacataaaaaaaggaatgactaattatgtccaaatgtgtcttccactggttaggttttcttgaagcatttttatttaatctgatcaaaacactcaatggactttaaaaaatgtgatgtttatctaactgcaggtcagcttatctgcaggtatttcttaagtgtacctgatctgtatgctaatgattctaagatgcaaaatgaattttaaaaaatggtctttgtgttctttgagaagataaattatatacatttagtgttagtagtgagcaagatcttattctgccaattatatactgataacctacattgcatactgatacaaaatatactgaaattgcttgtttctgtaagtattaagttggttgctagagacagaaataattcaacaaatacttattcagaattttgtatatgccagtatacaataaagtattacttgtataacaaacacagtaaatgcaaattaaaattagaacaagggagaaatcagttgtaggttgcacaaagtagataaagcttgggctgagctttgaggggtaggcaggacatcactgagaaaagaagagcttgtacctcatgggaagaatgtagaaacaatatca

SEQ ID NO: 96924 - DNA, 2665 bp, Homo sapiens
gagtaataaagaacacagacttaggggtcaggcctgcattaaaatcccatttttatctcctctttacagtgtgaccttgaacaagccttacctaattttcttgagcttcagatttttcatctatataacaggaatcttagtacctatttcatagcattatgactatcatgaggtaatatatgtagagattagagtacacatgtcatattaggaggtgtgcaataaatgatactttattctgaagattaacataattcatacttaaaaggatcaagaactagaatattaaaaaaatagaatgtgaatgtttctgcaagttttgataagaacaagcccataaattaatctctaatttgctacatttaggaatatggtaatgactacaaaagaaatgaagacttcccttcttatattttgtgcatgctaactaatctaggaatactcttctgattggcctacttttatttagcacttaccattttctaagatattttccttgggcatgctgatgaaaaggaagtgaatatattactttgaaacttgggcctatgaggtgattaatgtattgcacttaaccattttgtattttattcatctgtctgtgttgtcttccccacaagactgagacttctttgaggagagataccaattcatatcttggaattcagtgcgttgcaatagttttttaataaatgtttataaaataaaatcgaggaatgaatttgcatcagtgttcagccactaccaaatctattttttttagtttttagcatatccaaaaaactgcagttaattttgtgacatttattaattttttatatgtcagcatagagtcgtttattaaatgactggaacgtgtgattgacaaggtcagttagccagtttactcatggacattatccttgatcaatttgaaccctgtaaaattagagctagagttcaagtttaatagtcatttgtctactaaaagtaggaaaagatatttagcatagctgctatatttataagataattttttgatcagtatcccacgactatcagctagggctgggtagtcctaatcataaattatacacacctcttttctttgtctagttttccaggtggaaagagaaaaataggaaatcgaatacataaagaaatctatttccattcctgacatagctctatgagcatacccttccaaggtattcttggaacaagttttgttactgtattatcttttgtttgcttcctgtctttcactcttattatcagtttgaagttttataacactctcagatcttgtgaggacagctaagaaaatattataggtactaatttgcctatactatttatgatagaataacatgtaatagtttatcacatttatttagctgatataagaaattgtctgctaggaatgtagaaataattttacttttaaaattctaagagcataagtcgtatatagaggtaagagttcctatggagttcttttaacctagagcttctatattaataatataatctctgatctaatttgttatgctttactacttgctgtgcattttgaatgatgtaaatgtgcttcaaattagtttgaatccaactgtttcagtaaaaatacatcattcattacctgtaagaatattatttattgactctcacttcttgaatgcttttctctctgtagtcatctaattatccctggtcattggttcaacagacacttgttgatcactactttgtgccaagagtacattggaattatagagaagaatacgatctactccctgtccttaatgccagttttgtaccagcaagtggaaacgtggaaactatgactttgattgagaggcgttttcagagcccatatattttaatttttaaagatcacattctagatgtgacattagccattgttatttgtgaggatatttctggacctgggacttagttttgtcaggtttaatgtcttcttgtcattgtaattttctaaagagggtaaaaatgaagtggtaaattttcttcagtcataattgatccctcagttgtgatttttaggctactagtaagctgattaatagatgtttacagccacttttcactttccatatagctttaccatatgcagttttaaatccaaattaaatacatgtcagtgctctatgagtttctcagtttagcatgtcacaaaaaagtatttcatgaactcagaactgagcagtgataagtaaagactatattgttaacaagctactgattagattttgtttatagataatggatatttttcttttcctttaaggaaaaataaacataagtggtaaaaatttctatagcatagtaaccaaaagtgctctttttttttgaggttttcatttcaatagatatttattttgcactgtattttgtgtgccacttactctgttacagaatggatattcagtgacgaatgagacacaaaccttgctgttgagtataactgaacctagtagtagtcctttcttggttttgtgtcaggacagctattataacaaacagctttatgatgaagagtactggctttggcatgctgtataggtacagatcatagtgataacatttactggttgtgtcatttcatttaattgatttaaattctctacactgcagtttcctcatccataaattgataatatta

SEQ ID NO: 96925 - DNA, 1961 bp, Homo sapiens
atagttataacttgatttttagggtaacttttttccaattttaacactcttcatgatagcagtactctgctttgttaactgtatcagtttgggtcttctgtggatcagatgccaaaatgaaattagacatgcaagagatttattgggggagacacccatgttggagaaaggggagagccttcagacagcagtgaagggttgaccatgcaaaggagaaagtgaaggtagattgggtagaagaaccacagactgcagctagtgctcagaaaatttcagccaggctgctggggagtccttgagccaaaattagcctttagaggaatcccttatttggcaggaatggctaggttctagtaccactgctgtgttcagttgttggcagggagctgcccaggagaagtatgacctggtgtgaatgcccagtagagccaaaggtgtaaaagctggaggttgtgagtcagtcatgcgctccacagcaggttctgttgaaagatctgagctgggcaactccatcagtgccacagttagtaacactgaaaactacagtggcagaaacatatatattattttattaccaagtctatgaggcatcgtcattcatgagcaaatggagaaattgaagggttaaataacttgttagaggtcccttagctagtaagtgatagacccagaattctaacttaggcaggattgactccagagtgcctcaagcatttaaacctctacaccatactgactacatgcatatgttgaaaagttttctgtgaaactttatttttattataacttaagtaaattcttttcccagtgtttcatgaatctaaaaatgtctaattaccttttaccatactagtttctaaagatcgatttgttttcattaaagcatatacgttcaaaacttgtggatttactctttgaattttgatgcatgtcttcacttgtcaaaaaaagtaaattatgcaagttacaccccatcccccttttctcccaatatactgaagttgtactacagatctttagctacagtaagcaattctccgaggatgaagaaagaaaatgtacatacacataggaatttcttttccagagctaaaattgacattttataaataatttccgtgttgcaaacttgagactaagaaatcacagcaattcagtgatatgcatttggcatgagtcagttttagttcttagtgattttcattggaaatggcataaaaagtaagatttctctgaattttttatgctgtgggcttacaagagacataagatgtttttctcttatagatgtctggcagtgcatggcagcagaagtaacgaaatggtcacaaaccccagcagtacttcccaggtcacatgcactcttaatttttaaagaatctagaaacaacctaagcagttgataacaggtcatttctaggtgataaagagtattggatatgggttaagtgttgcctttctttccacacctttcatttttataatcatttagagatttactttatatagtgatggttttatgttttaaaatatgtaatctaactagtaactgaatttttactttttttctttttagtgtttgacattgattttgaggtcttaaaatttttttcaagattttaaaaattatttcagttcgtcacttatgtttaccccatatatgatgaactgaataatttttattatatataatatataggtatacatatataatacatacattatatatatagtgagctgacttgaggttatggaagattctgattgtttcatttttaagctcaagaaaatgaatgcatcataaattcttaaaacattacttctactctgtgtagatacccatagtcactgactgtaatataagtgcaactggaccaaaggcaactactgaaaagagagagagaaaaaaattacagctactgccagaagtgtttgtgtattttttttaaaacagctttgta

SEQ ID NO: 96926 - DNA, 1956 bp, Homo sapiens
ggcttggacatttaaggccatcagacaaggtataaagtctttcatagtcacaagaagtaaaaggtatctgactagaagagaatatgtgggcaagtgccttgctggctgtaattttgttgtcatttcaagtactgtggtggtgtaattgatgtgacagggctgggctttagatgtggtcccttaacttgtgctcactttcagttttagtttctctgtcattcattttgattaggtaaaatttaggtgacaaacatatgcacaccagtgaaagctgtttggtgtaagtttagtaatgacatatttcaataataaagatgcaaagttaatttttttctttactgcttcatgaaaattgcaataattggtgtcaccttacattacaagatagagggtggtgtgctgatggcacagtcagcaggaggttcttttttattaatattataattaaatgattttctggatatagtccagaaacagatgcacgtcgatcatgccttgtccactgttgcttggcattatcacttgctttttaaaaaaaaattgacttgacaccttgtttttacaggttgttattgatgccttcagattgatcaatgctaatatgatggtcttaggacatgaaccaagacaaacaacttcgaatctgggtcacttaaacaagccatctatccaggtattgcctatatttgataatgtgttaaaactcttttaaattttaaaagcctgctataagtagtctttttaagttctaattcttagcattttaatttgcttgcaaattaatttttcttttgttttaaaagaattgtggaaatactgttgtaaaaattagatttgctcatatgtgagtcagtttttaatggggtctttaaattttcctatcatatttgaggaccccctttttgggagcatagtagatcttttatcttgaaagcattctggctttgcatggttaacattatagagaaggaccaataggagtttccggtgaaggatgtaactattatcattgcttgattagtaggtatttttcatagcagaaaacaatggagaaattgctgtatattttaagatatccctagaagtaattcttaaatatacttaaaattttcttctttaaaaaacccacctttaaaataaatcctataaaagacatccatatgttacttgtgatgagagtttatgtcttgttttttattgtgatagtcaattaccattaattgcagttactggtattcagacacttaatatcctcttgagtgattgttttctttgtatcattcacatgccatggtgtttttatacaaatctttattttctgcaaaaattattttaaatgtgtttttaaacgcaccacagtctgtgtctatctagttaattactactctaaagattaattaaaaggacagaaataccatgtttggttaagtagaatacataaaacaaagacattatagtagctattgctgctcccttctgaaaccttgctctgtcatgaggttgtctttggggagttgtggctttgacagttaaccatggttaagccttggttacactttgataactttatacttttaaatgcttaattttggggcagtcactcatctgtaatcttcatcaaagtgaagtgttttgttttaaaggattgaggtgtgttgatttgaaaaaaaaaaatgcaagtcaaggaaaactgcaaagtataatgtgtatgaaataagctaccagtggttttgattgggtacagacaagcctgtacttgcatgttccaagagaatatattattggacctgtttagccttgataatgacctttcttataaacttcggtagcatcatactgcttcattattttttgcaaaaggttaagtagcatctcacaagccaagatcattgtgattactacatggtatgtttctgccagaagtttttactaattgcaagtcactcaccacctgtt

SEQ ID NO: 96927 - DNA, 1080 bp, Homo sapiens
ggggtgggttgggaaggtgttggggagcaaaaaagacataggacatgtttaagaaacaatatgcttggctagcatgcatagaacgtgagggtgaacagtggggaattaagttttaaaaagtttctgaagtctagtaatagcacttgggatgtcaggataagaggtttttttgaggagtttttgtttgtttgtttgtttgctttttgagatggaatctcactctgtcacccagactcaagtgcagtggggtgatctcagctcactgcaacatctgtctcctgtgttcaagagattctcctgcctcatcctcccaagtagctgggattacaggcgcccgctgcaacacccagctaatttttatatcttttagtagagacggggtttcaccatgttggccatggctgttctcaaactcctgacctcaggtgatccacctgccttggcctcccaaagtgctgggattacaggaatgagccaccgtgcctggcctaagagttatttttgatcagaggcatgatatgcttagaacctgactttagaaacatgatttcacaacagtatagaaggaacactgtaagagaagatttgaaatggagagtgtgtttaagaggagcttgctactacccaaacaaaaggtacgaagagtctggattaccatggtagcagtgggaatggaggtaccaataggcaaataaataaagcatggcactggtcggatagacgaagtgaaagaaggaggaggaatcaaagaggaattcaaagtttcctgcctgggtgaccagtagtatggtagtaccattagcattttcaatttaggtagaagtagaaggattgaggaaggaggtaaagagtttatttttaaggaagcaattagaatgtgggactaggaattaatggtaaaggctagagctcaagatttcaggatcatagttaagattgttgttggttattacaccaaaacgtagtatttcccttttaaaaataaatacatcttaaaaaatattttatccaagagacagtgtataaaatttaccaagtgtagcaataagacttttgagagaactaagctttaaaataaag

SEQ ID NO: 96928 - DNA, 1049 bp, Homo sapiens
aatttttttttttttaagggaccaggtcttgctctgttgcctaggcgggctgcatgatactatcatagctcactgcagtcttgaactcctgagtttaagcagtactcttgcctcagcctcctgagtagctaggactccaagcactcaccactatgcctggctatttttttttttcttttaagatacaaagtcttgatgtgtttccctaggtggtctcaacctcctggcctcaagtgatgcttccccctcagcctcctgagtagctgagattattacagttgtgagccactatgcccagcctaattattactttttaatttcctggttttacagctagtctataagctctgtgaattcagatattgtctcattttatctttagtacactgccagataaatggtagatgctcaataagtatttattaaatgaatgaaattatgctatacttgtatttttctaccaaaaatgtaactttattaagtggccaatcataagcactgttattaactaatattaacataatataaactaaaatttaaggaaatgcaatgtcctctaaggggcacctttcttcctaatcttcaactgttctctatcatggcaccctttgcccctctcccttccttgaggctaactggataaaatataacctcctacgtcattgatcatttccttccacctgcctccagtattctcggagtcataaccttttcatgacagagtatggcgctgatgacaatttgctgtttccagcttgttaaaagagatgagtgatttattttcttagtgcactgagtcttgcatctctttcagttattttccttgtcctcttgccttcacatcatacctttgaacttctgaagtctctttttacttccatggccatacattcccgtggttcccctgactttttggcaactacacactctgctgcctttgctatgagcatttccaagattcagcccttgcctttctgctcttctgtttttatacctttctttaaaagtctgttttcatagtttagcaatgccaacaactttgaaatctc

SEQ ID NO: 96929 - DNA, 2351 bp, Homo sapiens
taacatatgaagtgtagattaacttctttattgagatgttttaaggattcagtaaattaatatttgtaaaatcatgcctatattgatgtttaattagtgatggtagtagaaaaactagttttaatgtcttcatataacacataatattgtttatatagtcaatactttaaaaatcatgaaagaagtaaaatacatatttttgaaatccactagcagttatgcattgattgcttaatagtgaaaaattagtatatgccattttagcagtttgtgctgtcttatgtaaaaattgccataatggtgatattaaaaagatatttaaatgggatcatggcatgttatagtgcgaacaaagttaacatgttaatgtgggaaaaagaaaccaaagaaatagtgaaagaagtatgatgtggaataagagagatacagggtggcaaaagcaaaggctaagggaatagaagagaagacagatgttggagtagctctaagtatgttcagaaagttaaaaacaacaacaacaaaaacaacaaaaaatccattggaattgacctcctggagatccttaagagtgttagtgaagtgccaaagatcccatcagtgtttgtaaaagggtaaataaagtgatggaatttgagatacagattttccatataagaaacttgaccattagcagaaaaaagagaatgaggttaatgggtttagtaaaagcctctgtaagataggggatacattggaggggattatgatcacataacagaccaaattccaaggatttcttagagctgtgcagaccgtgcatgatgggatagccatctgggggtctttgttgataaactgttaaaaacgtttctagtgtgaatagccacaaacattttcagtgcttttttgttggttgagtaaaccgaagagcacgaatgcaaaagcaaaatttgacgccaaatcacagaagttgccataaacacagaagttccctagtgaggacactgcctgtgcctgaatttcatttgtttctgctgcaatcatttcttacgtttttcctggtaactagccagattagaactgtgaatgaagacaaactggtcttgcccagatggtagatgagatacaggtaacttgggtagatagagaaaatatttaggcatttgatttggaatatcttagaattgaagagatatgcttactcttttgtcatgggggtttgcaaccttagtatatgcctaaatctacagctgctcctcatttcccagatggcatctatggctgggagtactttttaccatctgtacttctcaaagagtttgtgaactctctcttttaattattgggaatggaaaaactaattggtaaagtgggtaaattatgtaaaagatttttaaaatttgaattagcgctttttatacctaacttttcaaataagatcagtacttcaagtcctttttgaccttcatctttcattgtctatctaccatctttgttgtttgcaatattccgcaatactccctaataactgttttgtacatggattggtattttgagccaaattccaaaatttttgcctccttccaatactgtagtaagtactgttgttggcatgtacccagaacaactaacactgaatgggtatggagtacaaacttatgtgaattgttccattcatctaagtgcttttaagtcaataaagtttagtgtcacaatttgtgaaagtaatttagaaaaacatactcttaatatgttttgtcaatgtttccatttatgtaaaacattgaatagtgggagaagcaatttcccagttaggaaatacttttataactgaaaataatagagtgacatctgactctgaaaatgagcatattctctgtctagatttggcatgttattaactttttcttctttcgggcttatgagtcataaatgcatttcctaatgatgtgttgtaaataagtatcctttgataatcagtagatacaatacctattcactatcttttctctttaggcaggttctactggggaaaattctctagatagtttgtccatttataaaattagacacttgccatctttgctcattttcaagttctctgtttacaaaactattaagaaggtgtgaaatgcagccaaacttcccagtttatggggaatgtctgatgattacatttcctacatgttcattgttcgcacatgaagaaatttggcagctgtgagattataaagttcagagtatccaaatctaaccctcactgggattttggttccctgctttctgccaccaccatctcacctccttttgtaactctttttgtggtaaatgctgtgttggcatttcttaaggttagtgatccttaaattttc

SEQ ID NO: 96930 - DNA, 1032 bp, Homo sapiens
atcctaagtgccactgatagttaaatagatactgaagctatgggcaggctggattgataagaaaaaaggagacagagaaatgggaaattgggaaagaactgtgcaaataggaaaaggagagagcaacagaacagaattagtaccacagtgccgtaagtgccacctcaggtacttccatctcccatctcctgaagaattcagtaacagtttgcaaatggtcaacacaatcatttagtgatcctgtttgatattttcaatactttctgtgtatttcttgtctgttttcaaaatgatgatgctgatagtttttattgccctgaaggttattctgaagtttagcataattttatttgttcagtaaattatttgaataaaagttgtatgaatgaaaattctggtcatcattatttttggtgattatcctgcagtgggaatagaggatttataattttaaactctgtcctttgtgtttcattcacaggctgtagaagaagaagataagatgacacctgaacagctggcaataaagaatgttggcaagcaggtgaggtgtactgttaataagttatgcagttgcataataacatgttcttatagagttaaaactgttttagggcctatataatttttttcctgtccactctatgtttttcttctgtcatgtaaatgtgatactaattgtaaaggtcactaaatttatttgatgtcaggttctctatagagaagtaaatcacaaatacctaagagatattatcgtcagtgaaaataatttactaggaacaaattaggacacttgtatcctgaattaattttttaagtattatttttacctacagataaataagataatagaagggtagatttatttcatgtgtaacaagttttgttaatcatgtactttatcaatatgtaggtaatattcctgagaaaggttagagccttattgggttatactgagtgaagagaaagggctttaagtatttgctctttcacttttctaagaagaaatatatattttagtctctattatct

SEQ ID NO: 96931 - DNA, 1101 bp, Homo sapiens
gctttgaattaagcattctctcagacattcaagatatatgaacggtagagaatatacacatatattcagacaggtatacatatataaatgaaattttttaaaaaatcagatgattgtgagctgtatagaattccttgttactctttataaaaatctctggtacatagtcattgcattgtataaatcaagctttcattgtgtaatctattattttattagctacttaactttttgatttagaaattctaagaatgtaacaatatactagtaaagttaaattgtaaaatatttaagtaaggtctggctttctttactagtttcatcagctactgaaaaaaatttaagtaatttatctaccagtaatatggttctgttttctctttcctcatttttgttcttttaggaccccaaacgtcatttggaggaacatgtggatgtacttatgacctcaaatattgtccagtgtttagcagctatgttggatactgtcgtatttaaataaagcaacgaaaaacgctattaatgatgccttcagtgtatattcctctgttgttcctaatgctcaaaatcaagggacctctgaaggtgtacttggctaaatgtaagacatctggcatcatttgcagcactgtaacaccttcagtctcagttgtgcaattacttctgtttctttagtcagggtctttgcagattctaaagttatacatgaatacatcaaagtggacaaattttgttaagatcccatttaatatttgaaaaaatcagtagcacaaatatattttgattgtcacttacaaaataaaatacatttacagtctatgcctcctgagatctttttggcaatgggtgggattgatggaataacatttgacagtggtctagaaatctcacacaaagatatgtttccgtttgcattttaagatcttacaacacataaaacatcagtgtgataaaacttcacagatgtataatgatttccattaatgagtggctacctaattagtgagtaactcagaaaaaatgttgacattttattagcatttgtcataagctaaatattgtatactcactatcttataaacatacttttaggattttgga

SEQ ID NO: 96932 - DNA, 1033 bp, Homo sapiens
agccacagaaagtatatgtctaaaaagcaaaatgagaaaagtagtcataatgtgagtttaatataagcttataagcaataattttgctattgtttggtctcatcttttctaaattaggactacccagttttctaatagagaaaaaaaaatggctaataccaacttctaatgtgatgtacaaaagtaactgcccctgttattacttacggttcagaaccatactgattataccatttgtatggcaaaagatacagagacaaagatctaattctagtctgcacccttgtgaaaatatggtgagagtattactgtagcttcattaaaggaatgttttacatggacttgcaatttaacttaacctactagaactgttatgagtgctgtgatagatcaaattactgtcctactggaacaagtctaggctcttattggttccctagtgaagttaccagaaactgaaagtcaaaatggcttaaattcccagtatgtttcacagtatcttttttggtggagtaagaagtattctgagcatttcttgcttgtcctgtggtttactgtttcagatatagtgacagtatattttatgtaggacatgtaatatgtattaatttaagttgttgggattacatttaaccatttaaaattcaaatataagtggaagttagtgaaattttcttttgcctaattcaaacttgtgtgcaggctttttggatatgatttttccctttgcaaataagattctataacttatttcacagatgttgttaatgagtgctagtcaatgattttttggggggtacagtgccctcagaagaaggccttaacatttcaagaactattctcaatatttgggttgaaagggtttttttgtttttgtttttgttttctacttagtcctctgaaaatatcctgagtcctgtgactggaaaggcttaccttgcctgtttttttgcccttatttgatcaccccatcttcctggactccctatagccacacaccacttactctcacttagttcatgttggtgacatt

SEQ ID NO: 96933 - DNA, 1034 bp, Homo sapiens
taagtttctatcaagatttttagaaaatcactatgaattattttttaacatgtttgttggaaattttgctaaatatgagtacataccttcatactttattaaatatcaggcacagaatataattcaatgcattcttgataactcagagccactaccataaaagttaatgaacatactgggcttcgtgacattctgcatattttctgtttcttttcttattcacaggtagtcactgaggctaccagttccacttcttggcatttgctacttttgctcgaagttgatgtgagaatactgatttataagactactagatttgtacaatatttatgattcaataaactctaaatagaaaacacaacaaaacataagcatgacttttttccataaagtaagaggattttgttggccaactctgtggcagttatttcagcagcgtccaagaactcttttgtgtacatcctgagtgacctagagtgtgtattcaggatgtctgagggatacagatggttgagaataatagacaagtgtgggttataaagtataacatcacagccaggcatggtggcggctcacacctgtaatcatagcactttgggaggccaagcggggtggattgcctgagcccagttcgagaccagcctgggtaacacggtgaaaccccgtctttattgaaatacaaaaaagtagccaggcatggtggtgtgctcctgtaatcccagctactcgggagtctgagacaggagaatcacttgaacccgggagtcggaggttgcagttagcagagatcgcgccattgcactccagcctgggtgacagagcgagactccatctcaaaataaataaataaatacataaacaaagtataacatcactatcccatgaggaaagctcagagcatggtatgaatggaccaatattatggcccatagaaatgtatcatctttctgcacagtcttctttctgtgacaatattaacatttacacccaagaatttgaattaatagttaacttccttaattgagagaaaactt

SEQ ID NO: 96934 - DNA, 1060 bp, Homo sapiens
aaataccagtttaaaatctaagtgtttacaaataatacatctgatttttgacttcacttctattaaacatatatatgtaatattgaaatagagtttttccagtttctaggtgctatatattaggcaatattgctttaaaaaaaatcatttagtttaatacagtttatcttactagagtacagagaaatttaacacttgataacagtttaattaaaacaagtgggcttaatgggataatcattccttcccatgcatgctgtgtaagcgccctttgagtcaaatttggaaatggattgggtgttttaattaaaatgtacgtatctttaaagcactattcaataaagccaaattcacagtgagttctctcagcacctgcaaaagaggatcagagacttctgcaggacagaacaacgtgccctggaaaagctctgggggaaaattagaccccctctttgaccccgtttcagtttataaactgcctcaggaattaaaacactctgttttataccatgtatgctcgtgagagctcatttgaatttacgtatttttttttttaagaagagtactgacttcctaattctaacttcttttctttctctctctagtggtatactgatgaagaccatggaatagctagcagcacagcacaccaacatatatatacccacatgagccacttcataaaacaatgtttctctttaccttagcacctcaaaataccatgccatttaaagcttattaaaactcatttttgttttcattatctcaaaactgcactgtcaagatgatgatgatctttaaaatacacactcaaatcaagaaacttaaggttacctttgttcccaaatttcatacctatcatcttaagtagggacttctgtcttcacaacagattattaccttacagaagtttgaattatccggtcgggttttattgtttaaaatcatttctgcatcagctgctgaaacaacaaataggaattgtttttatggaggctttgcatagattccctgagcaggattttaatctttttctaactggactggttcaaatgttgtt

SEQ ID NO: 96935 - DNA, 1013 bp, Homo sapiens
cccggagacatttctaagcccttactcagaagtttttcatgcccttatctttctccattgcaggggcagactctcccaaactgaaaaacatctggagagatttaaattcaattatgtaaagaaaagtgcatctgggctgcaaatttttgtataaaactgtgaaaaaaactgccaggatttgttttctgtgaatcatacacacacacacacacacacacacacacacacacacacaatttttatgaactccaacaaaagtaaaccatgttcatctggatcttaggttaaaatgatagatatttatctcaggtgtttatttgattactggcagcaatttttagtctctaatagaatgaagcagagaacaaatggcagggtttcacatttgtgcctcatctaagttttctatacacaatgcagtactgatctgtggactttttccttgtgttttagacaattttcaaaaatgggatttgtggacaacaaacgaattgcaatttggggctgggtgagtagttgactgatgaatctgtatgcattcgttagtgaatatcactcagagcaggttactttatcttttgtatatacatatttggaggtgaaaatcacatctatcaagtcttaggtctctgggcagtaactctgcagaatctccactgagttaggcttacacctttgtttattatgatgagccagggaggtgaggtagaaagagcaagaaggaaggagtgaaagagggagggaagagggaagggaaggaaggagggagactttttcttatgcatcagtcagtaaagatttcgtgttattgtttttaaatcttctataattggtaccacccagtcactagggtcagcaaattttccgtagttttccccatatacctaccaagaaagggatcagggctctgaaagtgtagtctttaaagatactgtccaattaaggccaatttaagcctcctataccatgctttttatctctaaagaggcacagtatataaagatgtgagaaat

SEQ ID NO: 96936 - DNA, 1086 bp, Homo sapiens
cctacatttggaataatagtgtcacgtcttggttttcaaagctgttctcctcgtcagggttgcgtgtttactaaaattgaggagctttgttaagcagcgtaagccgggtgagatggggtttagaagggaaccaggaattcttcactagtaccgtaataataatggctacagtattgtctgcaggagaatctaatagtaaagtgttttttctgtaagaaatttggaaaaggggatttttatttttaccaactcactcaatttgctttatgaagagctgccattttaggaagacagaggaagttaaaagaaaaaaaaagatcagagactaaatatggagatgtgttttcagtggaatgttattttttgatgagcgaaactggcacatacaaaaaaaactccataaagtgttctcactaaaaatatcatattatttctaactaatctgtcaatcgaagatctatgtgtatatttaaaaaggttttataggtttcagtcataatattgattgtaaagctccaacatagtgaacctgaatttagagtggaaatgatggcttcctaattgacaccgttgactcaggtaaactgatttttctggtggatggtgtctttggcagaacccaaggtgttcttcatactgacaggcatcaaagacttttggtctcagggagacagggtatatttgcaaataataaagttgattttaagaggtttatccttgcttgcacaaagtgataaattataaagatataaacattcattatttaaacagaagtgctttggaccttcaagttttatatagtgtgtatatatatatatatatatatatatatatatacacatattctgtttctgcctgaccatgaaaaggttgcatttcatgactctcccttatgttcattttatgtatattaaattgttggaacatgtctgattgtgataattttatgaccataatgcagacgtttttgtgcagttttaaaatgtgtgcaacgatgttacttttttttttttgtcaataccaattctgtgattattttttcctaggcaggagctgtgaatccaactgtaaagttctttgttgtaa

SEQ ID NO: 96937 - DNA, 1062 bp, Homo sapiens
aatgcttactttagcaaaactagacacacccagaacaggacgggggctagtgaatggggagccagagagagagagagagaggcttaatactattgtcatatatttaagaataaaaactccttgaagtcatattattcatttcaccaagcacaatcaaaagttcaccctcttctgtgtatataataaatgattgtatgttttaaattttttttcaatcatcctactataggaggatattgcatatgtaagcattcagtttccccaagaatcagtgagaaatacgtaaaaatacttgtatggaattgtagaactcttcatggcttagtggtaataaaattcacatgcagcatttatgattcctttattttttcttttacactatattatatgctgaaatttgaaatatttggttatttgtcaaatagttttattattattgaattttattatggaaaagaagtatatctcttcttttgctcctttcactgctttagtggtaaatttcttctataccttctttcggtggaaaggaaatttgactgctcacccatccatcagtaataagagaaaacccaaatgtgaaggagacaggaataatcagagagaaaagatagcatctatgaggtttgcctgaggaagtccaggatctgttccaggtttaaagcacagaaatgcgcctgaatgaaagctttgtatgtttcaggggacaatttctaaacagtatgctctgtaaaagctggagttgactccagcttgctcagttaactattgtcaacctttgtggaatgctcatgaggtcagcaggttagtctttttcaggccagttattttgggttttgcttccctagccatagcatatgccttaagtttctctatcttagaaatctctgcctctcttctcaaaggggatcacaaagagagagaaaatgaagactactcagttgatggtcagagaaagacaatataaaaagactggagctggatcgtgtctttcaaattttatgacttaagaaattactgaggcccatggagaatgtggctgtaaataacatgcaggagcgc

SEQ ID NO: 96938 - DNA, 1038 bp, Homo sapiens
ttgggtgcagtggacccgcagttgcagcattttcattgaggtagagactcaaaagcagcgcttccagcagctggtgcaccagatgactgaactttgttgggagaagtgcatggacaagcctgggccaaagttggacagtcgggctgaggcctgttttgtgaactgcattgagcgcttcattgatacaagccagttcatcttgaattgactgcaacagacccagaaatccaagccagttttctcagaaagcctttctgactgatctcagcattacctctttggaaaaggaaggtagttcaataaatgaagagctgttgatgggatgattgaagaaacagctatgagaggactggctcccatcttttgttacttttgggacatcctgtcatctgagaatgaacaaagaccaattttttgtgtgtgaagcttaagggtcatatgtttgcttgtattttttaatgctaatcttgtgaaaataattgacaggtgaatggaaaactctatttagatgcatattactgtacacgggactatgcttttctcaaagccccattaactgcttcctattattttgatagtgggaccacatacataaaaatctctcatttgtgtggagtcatttcgatttcaagggagatccttgtgtttttcagaaagggcagaagtgggggaagaataatttagtatccttatctagtgtttgattatcaatgctggagaaaaatatctgtaagagtgtttatacagtacacttcagttttcttgatgatctccctttcctatatgatgatttgcttaaatatccatattaagtatagtctcaaggtaaggtaggcagcctgagagtctagaggtctttagttttaaaggaatctagccagtgaacataattcttattactagactgccacaaggaagaaattaacttaccctgtatatcagggtacaaaaaattcaatgatgtgcctaaataagttataaagatttaggccaatcataagctaacagcagtttcaggtagaggtgcatgcctaatgt

SEQ ID NO: 96939 - DNA, 1031 bp, Homo sapiens
gagagcaccctggccaccatggtgaaaccccgtctctactaaaaatacaaaaattaactgggcgtggtggcacgcacctgtagtcccagctactcgggagactgaggcaggagaattacttgaacccaggaggcagaggttccagtgagctgagattgggccactgcactccagcctggtgacagagtgagacatcatctcaaaaacaaacaaaagaatatatgggagataaatttttgagagcttatgtatctaaaaatgctttcattctaccttcagaattgattggccaggtatagaattctaggttacaaatgattctcaagtagaattttaaaggtattgctccattgtttctagcgtcccttgttgcattatctttctctttcctgcctggatgtgatgtgatttgttattcctctctggaaacttgtgagatctttgtctttagtattctgcgatttgatggtaaagtacctagttgtgttgtgtggggaactcagatggtattctcagcctggaaactcctttgctttagatgtaggacgttttcttcaatgatattttctgtttcttggaatgctttttgttttcactgggttttctacttttatcatctttttcctcctatcatttttttttgctgaactttttgggaattttcctcaactttatttcctaaaccttctattgagtctttcatttctgcttttcattaatatccaagagcttctgttctattttcatgaatgtgatattgtcccttatctctctgagactattaatatatttttaaagttttttcttcctatataacctttgttttttccagattgttttttctcctcattttgcttgttttggttgtctttcatgttaggtgcttttctcagttatctgatgatactgctttgctcttattttaactaaattgctgattagaagccctgagatcatggttaggcattgattgtgggcttcactgtatggtgatttggctgggcagttttgtcttggaactctgggtgtca

SEQ ID NO: 96940 - DNA, 1552 bp, Homo sapiens
ttcattcatattaacaagctgctattaagcactttgtaaatttaaactgtactaacgtgatgttttctttatcagggcatgaaattagtcttgagatatgtcagcatacaaattgaatgtaattggattagaaaaattagaaaaggattagaaaaattgaattttatcaataggtcatcagttgtagttctataaatatgaaagtgttaatatttcaaatcacccctggttttaagatagcttgtattgattttttcttccttttttctccccccaacccccgagaaaaaccagttgcttcaattcagatgctcattttttcttacttggtctattacaataaattaccaatggacttacctatttccaatatcatctcactttatattttattcattgtaaactaagtttctaaaatggaaattttagaatttcccttctgcttctgaaaacacttcagtggcttttcattggcccaaactttttgggggtagtattcaaaagtttcatgatttggccctcatttgcctttctgatgtcatcatatgtcactctctcccatatactttaatgcaagttttgtgatctctgagtacatgtcaaacttctactttaactccacttgtcatttgtgttatgaagactggaagccttccttttccccaggcttgggtgaagccaagtgctttacatacctggaatgtctttgtcacagtaattttcagttagtttgtaattgctcatttaattaacttagtcccctcactagatgtgagtactttgaaggcagtaattttttttaaacaatgggtgcttaacattcaataatagcttgttgattgtggtgattttatatattttggcagttttttaatgttttattttgaaactggagattgtcataattttacatagataaagttgggcatactctaatttaaatattgaatatgttttacagccttcagtttggaaacctgcagaattatgattgccatgttggatgtatccttgaatagaaatagaaaatactagaataaagagtaattgctttctgactatcaagccagtggttagatttcagtgcctgtagtaaactagtgaatttaaaaatactttgtaagatcctgtttaaattctaggctttctagtttttatgcagaagtctgttcatataatgagtttggctaagtctacagaagcatactcatgttttagtcaatgatttagagtcagataaactcaggtatcagaatttatttttgttaataaaactatcagagagatcacacaggaaaaatgggatttaatgcattcaaagagctatgggcagctcttaatgcctggaaggaaaacttcatgactgttgatcaagatggaagtggcacagtagaacatcatgagttgcgtcaagccattggtcttatgggtaagaacattaacattctttagaatctataaagctaatctttgttctttgattagatgaacttaattgcttcaatttactaactaataaagggatgtatttttttgccagcaagttcctttg

SEQ ID NO: 96941 - DNA, 1472 bp, Homo sapiens
tcttaatagataataatttcacttatgtattagtttttgcagggcactatggcaatttgaatgcttagaattttaaacctgaagagacactgtgaattcttttgtttggaagaagtgaactggactactttaaaacttttaagggttttctatgttcttcctacctgttaaacctcttccctttctgtgtgtttttattttagcagatagttcaaagcaataaaagatttcttttttaatttgaggtattactgcttttggaaaagttattttataaatatgtgcatattgtcataaaatattgtatgattaattgatttaaataatgcttagccttaattttagataatgtaaatttagaggaatgtactttacaagatagattgtataagaagccaaataatgaaagcctagaaaaaactaatttatacttatctgaaggttacaaattagacttttaaattttctttgtagttggtggtgtttgagggttggctagaaatgaaagcctggattttgtgccatgtttgtaatatagtttgttccttgatcaaataatcagagaaaagaaacttaaagatctttgtctgtgaagaagaaaattatctccctagttcaatctgtagtgaaataagactacagaaggcattgttttttccttttttattttttgtattatatatttttcttaaatatgttttattgtcttctctaagcaaaaagttcttaataaacatagtatttctctctgcgtcctatttcattagtgaagacatagttcacctaaaatggcatcctgctctgaatctagactttttagaaatggcatatgtttttgatgatatgtcaacattcaaaattgtcctaattaaattgttgtttaaatgtaatgtcaactctttataaacttaaaaataaacaagtaattaaccactctaattgttcagaaattttacatttgacttatttgacaacattaacattagtggtggctttgccattaaaaacccagtaagtattttgagtgcatctatgtgatgtggtgttttgagcatagtaggcaccacagcaacttttctgcgtggtactaaaactgccgaaaatgcgacgtagaatcaccagatctttagtgtttaatatccctggtataagatgttataattaatgtaatttctttcttggcaaacacctcatgtctgtcttagtgaagatttaataaaccacttatttttcttatgctttaaatgtgtattttctaacctaacagtgagtgacataattttatgactgctgaccaaattaatttatagattttataaaatcccatgtttcttaatggatggaggatagatggcaatatcttgaacaaaatcttttataaacttacagaattttaaatcagccttcacttaaaaaaatcctggaaaggaagtaacgcatagtcacttgacactgataattttatataattt

SEQ ID NO: 96942 - DNA, 1054 bp, Homo sapiens
gcactggttaacttacaccccagttcttttacgatgatgtaaattattgaataatgtacactcttaatgtataagtgcttttatttatacagtaaacatgtttccatgtcattttgagaatttttttaataaacattcaaatagcttgctgtaaagttttgtatcatacaaaatctgttacatatatatatattatgagatgcttcagttcaaataacagtgcagtaattcacctatatctaaaagactgccaaattattaaatgtcaggtattgcacttctattctgagtggcagtttacacattttaaattacatcaagggtaaatcaatagtatggaaatcttaatttggtccactttaaatgtaatttcaaggatttctcatttgacctatttacacatgcatccagaaaaaagtaacaaaaaatgtagtcaagttatgtttatttccaaaaaaggcatttaccctagaagaaagtagaatctgttaatacagtttaaagtctgtggagttaaaaaaaataacaaaaaatcaatttgtgattatttctttaagtaaaatataagacattaagtttgcctgtaatcttatggcattactaaactggacaaacaaaataaatactctttgtcggaaatgtgctctttgtctttttacgtttgacaaactcttaaatgatatgttttcttctgcttttctagttttctgggtaattaatagaaataaatttgttaatatctggtgaattaaatctgatgagtaaattccaagatttctttcaggcaggcatattctgtcccataagctttaaaatgcaaccatgggtgttttattactttgaaacttgtgttagaagatcccaatttttgggttgcaattcaatcatttacatagtgaattaagcacatctgaataaatacataatgctaaaatatcatccaagaatatgtctagagtttatacataatactagatgatacaaattaaaatatttagaactggtaaatatttagaagttatgagtgcagacaggattttaaatgaatattgct

SEQ ID NO: 96943 - DNA, 1004 bp, Homo sapiens
gcgagtattcaggactcaggtgtgcttctgtgtatctgaatagtgagtagacattggcaacacttctacatcactatgatgtgccatacagtaagaaaatgaggaagctgtttccctatgtgctaattatgttttcagatgtgccccttctgtaacatcagagatggtggcaatttgcaaagcttaccgggagtgagaattggcctagatcatcatttaatagcaatatttgggaacacttaggagtgattaggtcctaattctgacatattgtgagaggtaccccaatgttttcccttaaccataaaaatgtaagtatgtacagatacgtacatacagatatttgcattctagttgactgtattattgaatcaaatttcattttgttgtaattattgaattttcaaaggataacctgaagagtgctagtatgaatatcccagaaacatacttattaaatattcatttttttgaaaataataagccattttcaaatgattataagatttttctgaacttttggatgcatatttaatttcccatagctatctatttgtggtaccctcagatttatattatggcaagagataatttacggtaagttctaaaatatgtagtttcttcatatttagattctcattttctgatcagccttggttgtagataccaatacaattttttctgctatttgtgtttggtttttcttttgtcaaagggaaatgttctcttggtgttctaaacccttaagatgaaggttgggaaatctaagccactaaacagactcaatagtccttagcttacatgccacattatggccaacacattttatttacaagttttcttgaaggtagtttgatatttttccccttaaataatagagaagcaacagggggaggaattaagaaagtatgaaactcgggcaaaagaaaatatctggatattttcattcttgcttaaaaaaatgaagcaaacgtatgttataaaaagttatttgcacatgagtt

SEQ ID NO: 96944 - DNA, 1093 bp, Homo sapiens
taccactgtacctagcccatttcctcaaggatgccttccttaacctgagttaaattcatccagtcacacactttcacagtgccttccttttatcttctatcacacatatcacaattgagatgaaatctttatttgtgtacttatttgtgtcatacccattttgccccactagtgactaagttccatgaggacaggggctgtgtcttttttgtttctcatagttttcccagtgtctgctcaataaaagttgggtgggtgggcaaatggatggatggatggatggatggatggatggatggatggatagatgtttgggcagaaggctatatagaaaaatgtaggcacgcatttgaagaggtaaggtagagtcagaattctaccacatcccctcctaaatcaattatggcatttggcttttaagaggggaatagtatttcatccagtaatatgaaattactgaaaataaataagtattagaacaaaatatttttgtagaatttataatatgtttgcttcttgtgtgtatcagtgttattccctgtgaagacagaaatgacaacctgcttttttttagggcctgactgctggaaaataaataaataaaacttccctcatataaagtccctccttctctattctatctctgaagcctgcaggaaagaccctgttgactttttttctcaagcaggcttgcctaagaactggaaagagagcccaaaggaagaaggcagctgatgaagctgccaggcagctttgtgctccagaagccctgggtcttggctttgactcttgtgctccctgccccttggcagttgagctctgagcactggtgatgcattcattcagggccttagtctcctctggggtgagtccatgttagtaagtgaaaagataccatggcaggaaaatctgcagaatgtcaggaatgatcataaggctctaagctttcaagatactgcctttaatcgttacttactgctaggcaagaattttatacttctctttcactcttgtttttcttactgcggttaggaaatttatctttaaaaatcagtttaaataggtggcctgaatgacaacatttatatgccta

SEQ ID NO: 96945 - DNA, 1052 bp, Homo sapiens
aaaatttctctctatattaagagattttcctctctctatatatattttaatatataaaataaaaggatacataacaaaaatatctatctctctctctatatatatatctatatttctctacccattggtagattttttattatcctttttttatagattttttatagagagaatatatatacacatattctctctctcaaacatatatatgtatatactgtgtatagtgggtctgagaacagcacaggtctcttattcccagtatgttggacttagctcttcattataatttagctgcttccttagaacaggttgtaaaatctcaaaagcttaaaggtcaataagtattatacttaatctaaatatttatgcaaataccttatgtccttttaaaaataaggtatacaaataaataaaagttgattaataaataataaattagattgtcaagctttctgttttggagcaaggtcttgtagaagaagatgcgtttaatcactatggagcaacctgcaggatctggagattaatttgcaattgtcaacaaggtatttagttttcagcaaacacttaagagaacagataatttttttcaccattgatagatatatatattggcttatttataaaaagggtctctttgggagaaagatataattttcttctgttttgttttcaggttgtgctgtcacagaggaaatcattactagattagctgtcatctgacattgattttggaagattttctagagggagagagactaggaaagggatttggcttttttcttttttttttttaacaattgagtgtcctggaccaaggggccaattcttattgttccatacttggggagaattataaaagatgtaactacatcttaaagaacttttcagtattaccctaggtcttttgccctgactggccactgaatatacccaattaataaaattttgatattttctgatcttgtactcacctctcttagtatctattcaagccttttttattttgggggacacatcttaaagtgaattgtatcatatttcttaag

SEQ ID NO: 96946 - DNA, 1003 bp, Homo sapiens
tttttttgagtaatttctattcagagcctcttctcattttgaaatgattggattatttatttacttgctattgagttgtttgagctccttatatattttgaatattaaacacatatcaaatgtatggtttgtaaatattctctcctattccataggtctcttcactctaatgattgtttcctttgttatgtatgagctttttttttggatttcatccatttttctatttttgcttttgtttgtgtttttagggtcatttcaaaaaaaaaaaatcattgctcacactaaggtcatggagcttttttcctatgttttattccggtagttctagagttccagatcttagaactaagtctttaatacattttgaattggtttttgtatatggtgttgatttaagggtctaattttattcttctgcatgtggatggccagttgtaccaaaataatttattgaagagactgttctttcttcattgtatgtttttggcacttttgtgccaattgaccataaatgtgtgggtttatttctgggctgtctattctgttccattggtccatgtatctgtttttaggtcagtaccttgctatttctgtcactatagctttgccgtatatttggaagtcaagtagtgtgatgccttcaacttttttctttttactcaagataccttctgctatttgggctcttctgtagttccacacaaattgtaggattttttttccacttctgtgaaaaatgtcattagaattttgatagagattgcattgaccctatatatttctattgatttatgtcatcttcagtttctttcatcagtgttttatagatttcagtgtacagatctttcacctccttggttaaatgtatttattgaagctattgtaagtgagattgttttcttgatttcttttctggatagttcattgttcatgtatagaactgctactgatttttgtatgttgatttttgtatactacaactttactgaattaatttatt

SEQ ID NO: 96947 - DNA, 1055 bp, Homo sapiens
ttttaatctatcaacattggcccactctggaacaggtacatttctctgggggaactaaaacataggaaatattatgtgatttactcaaggtcaaatataatttcagtggctggggaggcataacagaatatctaaaacatatttctactctgggaaatattacccaatctcatatgaaaagttcacatatagttatttgctaatattatagttttcactgtaaccctttaaaatgtgtagcagaaatcacagtattactataaacaaacctcttgtacctttattttttatgttagtaaaaaaaagttttatattgttcttctgtctgctcttttccaagaaactcaaatataatttttgaacagttggcaggtggattgcttgatcaaagcatcttctgtttctgccattttgttgagatcatatattgtgtctcagaagtgctagaagatctagctgtattgtcagtatttcagatggcttctgttattctcctagtactgtgatgactatggtataggggatgcccgtctagaaaaagtcaatgttagttctcagttgaattgtgaagtagttaaattttaagttttatgcttctgtattttttaatcagttttaaaattccttccccctttaaagagattagctatcaagtagacatcttatacaatgtttaacattctccgtgtttaagcacatgtgtcatttgaaattggtttcttactgtaatgcaaacatttatgaaataatagacatttcatacattcatcaaaccatttcttgttctaacattttttatttctgctggttttattatctaaagtatacattcttaaatccttgaagtcatggactctatccctttgaggaaataaaattaaaagttaagagttgagacatgagtgttattataccctgttataccattaaacctagagttgaatttgaacccggggtctagtttttatgggtcattaagtatttgaccttagatatattgcttaagctcactgtaatttaggtgtctcaaatacaaagtagagataataatggta

SEQ ID NO: 96948 - DNA, 1063 bp, Homo sapiens
ttagcagagcactctgctgtgacttgaaagtgtacctctgtgggcatgcacagcagaagctcatctgaaacatcaggaactttgaaatgtgaagtctgacttttaaatcaagtacatttgtgtagaatgtgttttctttctgatattctaattttattgaatcatgaatactccggctgggagcatgagctgacagttgatttagggtgttttcacttaatttttaagtcatttttttggtcttttccaaattggttcccaaaactcattgatgagaaaaatattttgctgacttcattaccaagtaccaactttctgctggatcctctcagcaaggatttagatgggtaaaggctatctgaaactacatgaaatctgacactgcttgagttgggtcttgccagtcattcataacatagaatagtccattttatcagctcaaagataataataagtatcattattggacaaatccatgaagaccagcttaacacatttgcataatttatactgtaatgaatttacatcagaggagacacaaaatacctatatgtagacataactaacaaatgagaaataaggcaaatgacttgaatctacctcacaatttcagtgccttgaaaagacaaatgttatataatgttatagtcttttcataaactcaggatttagaaattttatctgagtaggaccctagcaataataaaattgccattacaccttacagttgcacaaggttgctactttttaaatactttaaaatataccattccatacctgctttcacgtgaacagatagtatctctagtttctagattaagaaataaaactaaagaatgttcttatggttccaataaaaccccatgacagaatatgcaatgtggtctacaggtaaattctatacattatatatcatttttaactatcagattaatttgatgtaagtttccaagttgttatgaaatatattgcatccgtttttcttttatagtatgacaatgatttccacatagctgaagtttgtaaaaaatgtaagataatagacatgaattatgatttacaa

SEQ ID NO: 96949 - DNA, 1010 bp, Homo sapiens
gtgtgtgtgtaaacacaggtttctgatgactcattgtgcaattctgctgcacagtgtactcagcttctccgcagggccagtgccaaaggacaaacaataaataggcttgggtcattagcagatcaatggaaacaaaaatagaagttctaaaaaaaattctaaaaataagcttatctaattttattatacatgcatgttttgtagtttacagcttagcattgttttgtttcaaattgttatggcattccccacattcattttagtgcttcagggtctataaaagatttgtctggctaattctgagcaactggctttcaaagcccctcttgagtcttggagataattttgggtgtcagatttatttcatacgatatggagcaaagctattttaacatctgaccatctctgctcacattattggcaagtctttggctgtcaccctggaaaactaatttacttccacttgttcttttcttttttcttatctgtcttgtttgatgctcattcatgtgcagaagggtgggttcccttcaatatctactctcatcctttcaacatctactgttaaactaccaagctgtatatcttcataatttcagtgacaatatacaattttaaggacatggtacatactgggcagtctgcaagggtacagattataagtttgacaaatattcagggaggaaaggtatttctaaaggttaatgaagataaagagttcttagggagggcttgagtagagcatttgcagaggcaatgatggctaacaagtcaggagaaaggaattctgaacacagtaagaaaaacaaaggcttaaagatagagtttgccttgggttattgggaaaagtataaacagatctgtttggttggagtaaaattttacaaaagaagagagggacagaatgtagtggaccttgaattccaagtttagaagttcaaagtttattctacatagataagaaatagctacagaagactcagaccaccatcttatgtgagcaattaaga

SEQ ID NO: 96950 - DNA, 1028 bp, Homo sapiens
ctctgacatgagttttccatgaaaccttaaggaatcgtacagttgcagtaatatactattgggaaatatttacctatttttacgtgaaatagcaagagaaaagccaaatatttggaaagaaagaaatactaaagaggaactttataaacattgcctactgatgtaaaatctttccttaggacagaggaaaaaaaaccctcacaaacacacatttcacacacatagactcctgtagcatctttattaaattcctcacatcaatttgttatggtatttgtcacattgtttacacaaaggcaaaatagctaaattttttaatctccggagactactatagtagttgacacatagtaggcagcaaatgaaagaaccaataagcataagtagtaaaaaaaaacaaaagcaaaacacacacacacacacacacacacacacacacacacacacacactgcaaatgccttccttccagattaattttctactaggtattccacccaactaagacagcattactagccctctaacttcccctggtcattcatttctcttaacacaattcctataccccatttctctccctgcaatttggttgaatgtttactctctatggatgcatcaagctctggccatcgtattttctaacaattttggaactttacggatccttttaagtatcagcatggtgacagaaactagaaagaagcacactgtgtaacttgcagtgagtaattggcagtttcagatagtgaaagtcaactgtgtgtgggtgctatttgcaattaacaaactatatctacttggtatatcgttaagtggaaagcaaatggcatagtaataactgataaaaatggatatagatacagggcttttgggttcaaaactcatcaattgaatgattttaaaaatgtttcaataatatttgtagtgtttactgagtactcagaatggtgcttaatgaatcatggctcctgtcttaaaggagcatacattcatttatgaaactaaatttgtacagttgagacaaag

SEQ ID NO: 96951 - DNA, 1002 bp, Homo sapiens
ccaagccagaaagttacttcatgttcatcttctctacattactccagttaaagctccatggggaatgagaagcagaaatatacctaatatctcaggtaaaaatgagtgggagaagagcagatattataaagatatgagagaaaatcccattgccttttaagattatggaatgcagtacagtcaggtcccctggaagggaaattaggaatcataaagtcctagactgagctactgtctcttttagagactacatgatctgaagctctttcctctcttccctctcccaatgcatctccttaatagctcctctttctcctttctctccttctctttctttctcttgtcctctcccttcccttcctttctccaatgcatctttctcctctctttttgtctgtctctaccactattttttgacttatatttggcccaaaatacagtcttcaaatcaatatgtcttttcagctgaacacccaaaagataaccaattcagtcttgcactattttaactacacttaacagagagaaactgatttggcccagatcgtttgtattggccaatgattggcctccctcgacttgaagatgagcacatggggttgtgtacatgtaatacttacatgaagcctcccatccagaggctacatgtaggtagagaaggttcactaggaagggatcatttatattcctagcaccacacaatggatgtggaatgtagtatgtacttgataaatacctgctaaataaatgagagaacggtatattcgtagcttatttttgtaaatgtgtactcttttcatactttactagctttactaataattgacagccaatatgtgtggactgcttatgagccagatgttgtttcatgcacagtccatgtattcactctgtaatcctcacaatattcctatgagaaaaccaggcatagattgcttaaataacttgcccaagtttacatagctagtaaagagcagagccaaggcatgtgcctaggtactt

SEQ ID NO: 96952 - DNA, 1038 bp, Homo sapiens
aggaaactgttgcttctgatatgttattacctttgtggctccacagtgaaggactttgtggtgggcctagccactgttggataacagaaagatgctggatgcatagtgaagagttaggacaggctaggacccaccaggtgtctctgcatctgtccatcacagcatctgactgtgatgaccctcagagactaattgctactcaactactccactttcacctccccaatctcacatatgctgctcttattgtcaacttataataatttgaaggggaggagatttcgagaaacatgatttccagcttaaccagatatacagtgctccatcctacaggctattgatgcctgttccatggatggccttggtgaggatgcttcagcgtccctttgaagctatttaactttattttcagaatagtgcaacagaaacatgctcagaatcattgcttttcttgatactcagatgttttctcttcttcattaaatctctctggtggctctgtttctatcctcattattaaagccaaagttcttacaatgacccacgaagtttgaaggttggactctttatttggtctctggtcttgtctcccaaacttttctctctccttccctcagctccagccacactggccttctcattgttccttgaaaatgtcagacatgctctgctgtagtgcctgtgcacttgctgttcctggaatgcctttctccaaaatagccacatgactcattccatcacctttttctggtctttcttcaaatgtcgacttctcagaaaagcctttcatgacaattttatttaaaactgtgccccttacttcctcttcacccttcctgttttatttttttccattgtccttttcattatctatgaacaatatattacatatgtattttgtgtgctatcttttctcgcatactaggacataagttcagtaagcagagagaatttcatctgttttgtttactgccatgtatggcatatgagggtggacaaaagccagtagcaatgttacaagtatgtgttgaatgtatt

SEQ ID NO: 96953 - DNA, 1046 bp, Homo sapiens
gaagggaaactcctattccaccatgttgctgatgatacccctcttcttatttatttatttttaaatcatgcagcttaaaatactgaacatctggatacctccccaaatcaacataggtcatgttcagtaaatttaagcatgcttgtgttagacagcagcttacatttagaattttttttaattgaagacataattttaaaatactttgctttaaatacattgaaactttttgaaacattttcaaagatattacaccaacatttatttaaacagaatctataaaaatcatatgcattttaaaatttgtttggtttataatagaagtacaagctcaaaaagtcgcattcccagggtccaatatctggcttggtgacttgcttattgtgtggctttggacaattggcttacctctgtgcatgttctcttatctgtaggataggggtaattgtagctacataatggagtttaagtaaggaggggttgacataggtcaagctcatgaaacagtagctggcacacagtaagtgttccaagaatgttggctcatactactagctttttttttttttttttttttgagacggattctcactctattgcccaggctggagtgcactggtgtgatctcggctcactgcagcttccacctccctggttcaagcaattcccctgcctcagccccctgagtagctgggattacaggcacacaccaccatgctcaggtgatttttttgcatttttattagagatggggtttcacaatgttggtcaggctggtcttgaactgctaaccttgtgatctgcccagcttggcctcccaaagtactgggattacaggcatgagccaccgcgcccagcccatactactagttttaactcaagtttgtcaaaccattgaaagggagagtttattaaataatttgaaaaattaattgtctaataagagtggtacagttacaattcagtgtccattctcaggagatgctaagtagcactggtcatagactcttgcctgaaaaagttgcccctaaaaaccacacagtcaa

SEQ ID NO: 96954 - DNA, 1934 bp, Homo sapiens
gtttgcactacgcacttgataaggaaaaaaattagtgtaaaaattgttaaaggtctctatcagaacagtctaaggggcatttcatgataactcaatctttttaagatacagttttaaggcaatattttaaaaaacattttgaaaggtggatttatgaatactgcttctttttagaaggtgacagaatcaaacacaaacatgaggtgttcaataaatattgctgactatattgatttgagccaaaatttcaccaataatgcatttggactgagtgtgtaactaatattcttggattaggaaaacaaagctcttagaaaatgaatcctagaagtttgttcaagattctgtcacctaatatgtagaaaatgtattgaagattttgaaatatctgtgtataattttctaaaattcatgtgtatctcctaagaatcctaccatattaataccagttgtaatgtaggtcaaagatgtggcaaatattttcttatatgaatttttttcaaaagtattagctctgtaattctttcagaaattctctgggacggccaattcacaaggaataaaatgtaaattttaaaaagccttagggcaaactactttcgttttcttaaaatactctgcttctaggaaggatgcttctactaaggaaaacaggaaagtggtataagtgatctataactatgtatagtttacatgggacacagaaggagatagatttttacctttgtttttcattcactgtaagcagataaatgtatatttacttaaggatggcttgaagtcatgttacaacttctattactattcttgtcattgtccacatttttcttaattttatcaagtgtggaaagagaaaaacagaaatagtcttccttttaatttagaaatgggccactataagcatacgcacaactcaaaattgcagtttcttaatgttatgcacttgattaatttgtatgaattcatgccatatttctctgaactttgctgaattgccaggtatatggcttggcttgtatctccagttataagccttggtatagtcacgcctgactagggcagaatggagaacttgcttctggcttacagccctcctaagggcaccatgcaggttagtgctgcccatgatgctctggtgtttggagatctgcacacacaacctcattaccccacctttaacatctatgtcacagatcaagggtttgcaaaccatgatccataagccaaaagtagtccaaagatgtatttactatagttatatttcattcttagaattttaaaatttaaatgcctttgtgtctgtatcctgctataattctggtccaaccagtccttgttttcttatccagtccatgacactcattgataataataacttggttcccaaagatatgtgaatttttcattcctatgaccactcctgttttctgtcaagtaatgttagatttctctgtttaaatatgaaatgttgaaatcctaaaagctattaataaacagatcagttctcccaggtgacttgagtgttttcagcaagaattaccaatgcaataatccagagatattaaacaaatggctgactgctcaaacattgttggcttgacagagcatcatgttgagaagatttctgagacgaaacccaaattcacaatgaaagactgcagtcattggtggccataagacacgagagacaggggttgtcaaacttctgtagtcccagtagatgaggatttaccaattatgccttgcaacaaagtgagttatgtacttgttgtattgccccaccatccttcaaccagattgtacttcttctagatggacctgcatcttaaatctacgtatccttgtgacacttatttcagagctttacaaatggaaggttatccatataattggaactgtgccagatcagaacaggagatgttttctgagaccct

SEQ ID NO: 96955 - DNA, 1011 bp, Homo sapiens
tactatgttgaatagaagtggtgaaagtgggcatccttgtcttgtttctgttcttagggagaatgcttagaatgattttatacatctgtatagttccttgagacagtgaattagaaaatttcatatttgtgaatttagatatacttaatgtttttgctcatcaactacctattctcaagttcatagaaataacattattctaattttactaatggtgtcagatatacttttactttcaaaagtgaaattaagttaatatgattttaaaatactttggagtacatttcttgattttttttttagacaattggaaacactcaggcatgtcataatgaacaggaatagtgtacagaatgtgtcattgtccacagatcctgtaagtaaaaaatgcaaacacaagaaaagggggcactgatcatctgaagtgaagtttcagccaaactccaagtttcaataaatgttcctgttccttttttatgctaaatattgtactgcgaattatataccaaagtaaaaactgtttgctacagtcactcagattccaggggtgattctttcattagaatgaaatatgtgccaataattttgactgccagatcattagcctatgaataatgacttttacaaagtaaagttctatattatctcatgatacagtaaaaagcatttaggctactccacaggcaaaaatgaatcatttaggggctgtgttaccttggggagattatacactctaagtgtcactttcctcatctgtaaaatagggatgataaagttctgtgactggagagttaaatccaatgttataatacattaaaatatttcacacaagtatttaatagatcaacaaaaatgcctacaagtttattgtagacatgattagtttatcattggcagctaatccagaattactttcaaactaatactttttcttttgtctattgctagtttaatcaaagttaattcctcacttatggaaattgaactaaattggaatacattttaaataat

SEQ ID NO: 96956 - DNA, 1039 bp, Homo sapiens
atgaatcctcttgatgtgatttaagttgtagattttcatcaggtttaataaataagtcatgtgtcctactttgagcatcactagaagcacttgatgctggtttgccccataattggtggggttaactttggtcacttgccgtgccatgttttacatgttgtgaaaaaaacttgaaaaatgaaatttaacaataccctgtaaatagcaccaatagaataagttggacaaaaatgtgcaagacttatatcataaaataatcataaacatggctaagagaagttaaaggagaaatagtccatattcatgaattggaacttgaaatattgaaaagatgtccagtcttcccaaattgatctgcaatctttaccaaaattatagcagactaaaagtcattcaaaaatttgtataaaaatggaaagaatctagaataacccaaagaaacatggaaaagaacacaatttgaagactcaaggcacctcattttaagaattactgtaaagccatagtaatgataacagtttgatatcagcataatataaataaataataatcaatgggacaggataagtccaaaaatagatccacacatatatgatttaatttttgacaaagcaccaaagtaagtcttttcaacaaatgagctagattaactggaaaaatatatgagaataaataaatattgacccctgcattatactgtgtacaaaaattaatttgatttagattacatacttaaatataaaagctaaaattataaatttttgagatataaacaaaaatatctttgtaactgtgagcaagtaaatattacaaagaaagaatacaaaaggcactaactataagaataaaaaataatgaatatgacatcatcaaaattaaaaactgatacactgcaaagcattccattaagaaaataaaaactgtatatatgtatatacacagtttccattaagaaaataaaaactgatacagactgacagataatatttaatacatttatttgacaaagaaattgttttctacaggtatgtacatatat

SEQ ID NO: 96957 - DNA, 1014 bp, Homo sapiens
caattaaacatctgcctccagctgtacaggagtgcgggcttgtgcctttgacacctcaatcctattctcctttagaagcaacaggcattataatacctgtgtttcccatgcactgtaaggtttaaaaaccattgctataggatgatctgattaacatggcttctggagggttttagaaataatttaaattcacctctgtttcccacaattccttgcacagagtagctgctcaataaatagtttctttaaataattgaatgaattgaaacattagacacattctcttaaccaagtttccgtttgatctattagttacttctttgataaagtgaaagtagttccttacctgtttgaaagggatgataaggagggagcatagtctaatgtttcatattgtgaacactggagtcatgttgcctaggtccaaatctggaacatacacattgtgtgatatgttacctttctgccctgtcctcactttcttcatcagtggaaatggaaatatgattataatagaacctatcttattcagctttgtgaggaccgtgtttacatttgtaaaagcacttaaaacagctccaggtacccagtaaatgcaatagaagtgctaaataaaataatttaaaaatgtgataaggaattgggtttaaaatacatattaagttgatatgcctattgagtgtcgtgctcaaaatgaagtttgcacccacatctgtggctgagtaaaataatgtaaaacaaatttttacatcataggtcaaagaagaaattagcagcggtttttgaaaatttaaaatgtaaaattttaggggctttattgtggagattatggcctcaatcaaattctggacaatttaatttgtttttaattttgaacactgaaactcaatttaggtgtggctatattgaaaatatcagcagtttggacaacttggactcccagtttctctgtgtacagctgtctttcagctatattaaaacaatttcagtatggtgtttcagaaaccactgtgt

SEQ ID NO: 96958 - DNA, 1001 bp, Homo sapiens
tacacaaaaatgccattaatgatgcacaacctcaactgtcctattagctggcatctattcattcgaaaattgcagaacttgtttctttgcaggtcatgtttccagagtaagcagaaggtgtcctagtgaaatgtcatacccaccaacattctttattttaaatatactcactgtgtatagtgtgagttacacaatattttgtcttaattactggctgccccaataacttcaatgatgaatttttctctgaagaatacttcatctcaaagagttaatactttttgttattaatctaaactttttgaaaatatcaagaatgccgattacagcctttaaatctttaccaagtaagattttataatatcattcgtgatttttcttcaatattagaaaataaaactaaatgttggcagagctaatgctctgctacagaaatgaaaattaatttcgagtgtaaaagaataaagtattttcataggtacttcttatatggcaattaaaaaataactggtaacatctaaattttcttttccagaaggtaattagagattttagttagactgtcagcatttaaaaatctataaatttaaaatataaagaatgaagatgaagcctgctcttttaaccactttagttggatggtgaaattcctggaaaagacaaaagaaatctcaggcattgaattttcattccagcagaagttatgtgtgctaacttctgttaaagattccaagaaacatggactaaaaaagaccagagactttttctaaaagtaatgacattattatactatgaagtgtaataaagactatgttatagtataaccaggcagggccttcttgccactaatcttgttgttctagaaatggaataatcaacccctcctcattaccacacccactttaactataactcaaggcagaaatcagatcctggaatttttaaatttttgttgattttagtttctttattttacattcatgaacactagtatcttgcta

SEQ ID NO: 96959 - DNA, 1034 bp, Homo sapiens
cccaggaggcgggggttgcagtgagccgagactgcaccactgcactccagcctgggcgacagagcaagactccgtctcaaaaaaaaaaaaaaaaaaaaattggtgccatttaccaaaggtgtattttgttctgggtaccattcaagagactttgcatgcattctctaatttagtcctcacagtatcagtatgataggaaacagtgctggagataaagacatagctgtgttaagaaatggtgaaaacgaatgaatgaatatgtaacaaaagataacaaatgaatatgtaagaaaagagatttttccagttccattgtgaatgtggattccaagaagcaaagatgtatgtctttaaaataaactttttttttttttggcaagataaacattttttttttttccctcaagactacattcacaaagaaatgctgtctcgatgttcaggaaaacctcctctgatactgagattgatgattccatggggctgcttctaacaaaagaactttctgatctgtgttctgtggagtttatgggattatttggcttgtcccttgagatagagctgggaggtaggggcagctactccaaaaggcctacagactcaggcccgccattgctggtgccctttctgctggctgttctgggcaccagatgcttcttcctgttgttgtgacagttgggtaggcactgtgtcttgattcttttcatcatcctgctgggcctgttcctgaacttttgacagtagctgctgcttaatgacagcaaggctgttggtgaaatagctgtcgcctgtgttaaatgatctataaatctatgatcaaacactgcagtcgggagaaagtgggtataaagttaaaggtggcccaaccatttaataagatgaaatgtcaaagtgttgcaaggaagcctaagtacaaacaaggcttaacaccatggtcatcagaatataaagacttccttattacaacatggggatgacctggctgcggttttcaaattcaacagtgagttgcattttttattgagtctcagaag

SEQ ID NO: 96960 - DNA, 1072 bp, Homo sapiens
gaagtgggtccataggactctttcctctgggaatatgaattttgagttaaatgttatgatgatttaaaaagcaacaacattgccttccaggagagattgctctttatttcctattacctggaacatggtcgctgctttttttgagtgtgcttggccaactatctcatactttctgtgtgctacacaatatccttttgataaatttcatttctgcttaagctaggttgtcattttctttgtttgcaacctaataaatctaactgacataatgcaatgtctttttcagggggcaatttgtagattcataggtgacatttacagaaatttcacaaattttcatttcaaaggatgggagcttggttgagtcaggtccttggcccaagccaagtaacatgcttgcgccgtagagtgggatacagttctaagcctcctggtggctacagcgttatgctgaagcacggattagtcactcccattctcatgatctgctgggttttatgtatagcatggttgacataaattcttatcttcttcatccttgcaatctaatattaggaatgttgatttcgatggaaaaaaaaacaatgtatgtaatggagatgaagtaattttagaaaacgaaattattacgacagcatgagatatttgtagtatatgtaggtgtcaaatgtcatgcagtttagtgcaagaagtatctttcctagatgaagtgaaatttagtgtttttaataatggagggagcatgtttggaatctatatgtttatgtatctgcataaataacagtatatttacaacttgagaggatgttcaatgaaattcctctctttttcttaagataattgttacacatacaattatgtgtaacataattaagtatgaattgtggaaaattgtctttctttaaaacatcaacagtaacaaagcatgacacaagcatttaataaaggcattattgtaaactttcttcattcctgagaaccaacagaaaaatctcaagagacagaccattaaatcttcttcctcagtgttaacttaggcagcagctcaggagacatctctgagggtgcaaga

SEQ ID NO: 96961 - DNA, 1104 bp, Homo sapiens
gatgtcttcctagatgttattttctcgctgattctttagagcatttcttctacctcgtctacttcagcctgctcactattcaaccaagtttaggtgtcttgttagcatctattttctacatacattcatcttgatggaattgggttgtgataagtggtacttctatccgtgtggactggctaccttccagtaccatactgttgatgattcattcatgccattcagtgtgaagaatgtgacaactttccatcaaacacattgcagattcaatagcaccaaggataacagatcccaactgcagagcatcattttggcatgtatatggagtgtttgtggggagggggaagaggaactctagagggcagggtatataatatcttttataagacagtacaaaaataattttaaaataactccgaatatatttgatgactaatggtccaatttgtcgtgaaattgcagatccatatttcactttcaggaatagacatgctatttcctttcagctatagacaaagcctctttcaggtaagacagtattttaccttacaatcatacaacgtcaagccagactcattgttctaaaggaactgaaccttctgccacttcaacaacctctaagtgctgactgttaactcgtttttcttttcatctgatgtgactgtgacaagaaacaaattcacagaagtgaaattatctgtgatagtggtctgctggatagatgaccttggaaaaattaatacaataagtgagtagtagttgtcactataatcagatctgtgccagagttgcaattagaaacatggacattagcctattgctaattcatagtattccagacacaaaatgctttaaggagtacttgttagatttgttgttattgtcaatgttttgtttgttaatatctttgagacatatggtttcagtaattttaagagttattttaaaattttaatcagctcaaccaagaagtgtgtgtgtgtgtgtgtgtgtgtgtgtgtgtgtgtgtgtgtgtttaatgcataatgtgattccaataaggcttaaagtggaggaatcttttctaggaacaagtacatggctgctttgacattatgtctgctt

SEQ ID NO: 96962 - DNA, 1051 bp, Homo sapiens
gacatttctgcttagattttttttattttgatgggatcattatatggttgatcatatgtgtgtaggaagctgctgtacaattaacttggagatctgaaaatgctttttgtcctcattgttgcagtttcaattgtaatccattgcatctcattttcttgggtgttggcactgtaatatattaaaaaaaaattcagtgctcagtattgtaacaactgtccctactgaatattccttttcataaatacttgctaccacagggaaattaagttttcatatagaataactagtttcagtagtaaccattgaagaattaaaaatgtggttcaaggcagatatttttatgaaaagttttctctattgtaaaatttgttgtatatggctatgctactatcatggaataagaaaagaacaagcatacctcaaataaaaaaaaattctgagttaaaaaaattgcagtttgatttttatcatgaacccgagttatctcatttttcccctacccttagcaatagtgtcagaaatgagaagctaaatctttgttttggattataaaggcaaaataataaacacacagtccctaggatattggtgaaaacttggcactgttgactgggtccagttttagacggtgctgaagtgtgagctgtcacttgatttgcagtgttcccaaaggaaaaggtagaacacttggcaaagctgccattgatttagaggctgagttacactcaactcacaaatgactgaatcctctggcatgggactgttaagatttccccctcgtgaagatgctattgtcctcccatgtgaagaagcactgctttataaaatgaggtggcagaataattgaaggtcagactcaaaatagagaggcctccataaatattttctcagttcagaaactgaatctattgatagctaaccgtaaacctaatgagtggagaaacaccaatattaagacataccttttagaggacaaactcattaccatggaagaaaaacatgcatatttctaggtaaccagttctatcattatttactaaattacgtacag

SEQ ID NO: 96963 - DNA, 1052 bp, Homo sapiens
ctgttggaggagatatggctgacctttgagtagatagtgctctcctgtgattctttgattctgcatggcagcattatgagctcttctataaactagcttaataatgagctctattctgaccatctattctggaacttggagtgggggtggggtaccacatcctcagaagtgaatgtgtacagtcggtgatagtacaactgagtaatggggcttcatacccttggcctctttttgactgctaagaatttggagaaggctattaatgaaggtaaggtaatgagccagtccaaatccctcactgtctggctaagagattgagccattccactttacagcccctaattcccttcttcccaactgcagcaacatttccaacagggacaaaaaggaagtgaaggaaaccacttcagtattgggatcaatagaaattcaagaggtagttcataatgaccttatatgtgacacaaatggaaatactctacacttctggcatgcttctctcccaaatatttagaacattagtgacaatatgaaaaactttgctgactgagctgatcaatggaatgtgaaggcagtatactttaaggctatttactttcacacagaatgtttatctattagtcagtttgtattctactcaaatgcagatagacgggtataatgttttcttgtgcatttgaaacctatcaaggagaaaataaaccattccactaaaatacataggccaaacaccatctgggaaagtgataaaagctatccagaggctatgctatgtaaaatagcaaggtcaatttacatgggttgcatagtacttggctatgcagttttcaaaagaacacatccaaaaaaaaaaaaaatccaaattagttcctataataggtctttgtaaatttaaatatatttgtgggttggaaaatacgtttttagagacatttagaatttctttctctaaaaatgtatccaactccaagcagaaagagacttctgtactcacattctcatgtttcttagaattgggtagcatgatcattgaatctgtattttgcaaagtg

SEQ ID NO: 96964 - DNA, 1015 bp, Homo sapiens
ttatgtcaataactgcaagagttcttagtacattgctccttgataattaagtgaaaatgttcttaaaaggtacactggttaattgaaagctacttattcagtttgtgttagtgtctagacctgtcagccacaagacctgtttaggaccctgaaagtcacagtacctaaaaactatgactgcctttttattgcataggtggtagtggtggtgatggtggtggtagtttgcaagttatctcttaaaactgctgggaatggtgtcattctattcactaatctagcttatagacttgccgtgctgtttgatagaatgcagaggatagcaaccaaaacaaatacacaaataaataaaaacaaaaaccaaccaacaaaccaacttacatacacatatatatatccacaaagaacctctccatctcctccccttctttttgactccactcttgtcagtgcaattttgcttctcattttgaaatctgggctgtagtgctcctgctttatttctacctcagttttgttacatttctcttggaaagtaaagtagaaaattggaagtggacacacacactgcaatgtagcttgccaaacatgttactttgttttcttccatctttcaccgtaaatctagtttccaaagacatcagcatttgtgcttacttccacctcagtctaccagccccacccctacccatggcataagtggcatttttcttaatttcctatttttctcctgctctctgtcaagttgttctttgtatcctttaatgctttatgtgcaacctttcattgatagtgggctgatgtttggcaatgcttctgaactgtcacagagcaggctgtagctttccacagccactgcccatgcataagcagaacagcctggccttttgaatgtattttcctgggttttttccccttttctttttttagtttagagatgcagtaacaaaactgttgcaaagcactggcattttatgtattcaataaataagtgatgtacatttttaaaaaaatt

SEQ ID NO: 96965 - DNA, 1049 bp, Homo sapiens
aatatatgtagcatttgggatcattgaatatagactctagtaagctctataggtccctgagtgtatcactatattatagcacattacaatatcgattcaataataatgatgattagtcattaaaacaggttaggaaatactgcatctattctatttttttttaagtgtaggtatgcttaagaaaggttttcatcacaaataattaaatttcaagcctttctctatgtgtcagtctctctccttcccttctgccctctgcatagtctccaatgtaatgggatgagcgcatctaggctgtgaaatcaaatctttcttccaagtctggctcttccacttcctggctgtgtgacgctgggcaataatggtactcagactctctgtcagtgtaatgttgaggtttaatgagataagtgatgggcaaattagttagcacttaataaatgtttttcttccatgctccgcagggataagcttcagttactaacattttatcatctaaatttcctcttgtaaactcactattcgtgccattttacccttggcttcaattctggttatctattgctgcttaacaaacaaaataccccaaaacttggtagcttaaaacaataacatttcataatttctcatgattatttgccttgactaggtgcacatgagcaattcctcaagatgacgttggctggggctgcagccatgacaggatttatgtgttggaatgtccagtgtggtccctcaaatgctgggtgcctagatggacagctggaaggctgagctcagctgggacacggaacatctgggcctctcttgccttagtctcagggccttttctctctatgtgacctctccatgtggcctctgcagcagggtgggcagacttcttcacattaaaagtcagacccccaaaagcagaaaaggcgaagctgttaggactgaaagtttggaactggcttagtgtgtcttctgctgaattctgctggggaaagggaataacagggtctgactcagacacactgtgggagggactaaaaaatatctgaggagtatgg

SEQ ID NO: 96966 - DNA, 1099 bp, Homo sapiens
tagaaaaatcctatccctaagtagaatactaattttctagattgattcttaacatttttatttagtgaaagtgtgtgtgtgtgtgtgtgtgtgtgtgtttgtgtgtgtgtgtgtgttggttaatggatatggtcctgtcatcttcctctcttatggaattctcttatgtgaattgcctgacactaagtgatctaaatttttaaatacaggcagaaaagctgttattttttatttagcttttacagtgtaatggaatttgtgacaagattatttgctacaacgttattttgttcttgattagtgttctttgtaaaggaccccgagctatgtgtacaaaaggctgtatatgagctgcggatagaggggcaggtgaccttcattcaaacatatccaagtagtcattaacaaagttttaagcatttgaacttcctaactggaggtatgacaacagtaattgcagatgtccttaagatagctgtacacattttgatcaatgaatatcctaagttcactttgaaagaagcaattattactaggtataaggtttgcttaaattatgtcctttaaaattggcatttagaaacttcttgggcaaccctagcctgctgaatgctttggtgctaacaataacatggtacggtgttgtacaacataaatacatttgcccacgatgtaatgacttgctttcaaaagtcttttatctcctaaacagaatgaactgagtttagaggccctaccaatattgtagctctttgagtcagacagtggccaccagcagagtatcaacaatatgaatttgctttaataaaggttagctctcattttttaaagcattacatgtcttattgcatatagaacataaaattttgcaaaatatttaaggtagctttgccagacaatctcacagctctgtaactcctcctcaactgcaatgcatttcctaaattactgattttcaaatgtatttgaacagttgaacttttttttgtgttgttttgttttttgagatggagtctcactgtgtcgctcaggctggagtgcagtggcttgatctcggctcactgcaacctcccaggttcaaatgattctcctgcctcag

SEQ ID NO: 96967 - DNA, 1050 bp, Homo sapiens
tatatatgtatacatatatatgtatatgtatatatatgtatatctatatacatatatatgtatatgtgtatacatatatatgtatatgtgtatacatatatatgtatatgtgtatacatatatatgtatatgtgtatacatatatatgtatatgtgtatatatatatatatgtatatgtatatatagtttgttgctctttttcagtcttgggctgttaacaaaatctcagtcaagtctgaatagtccaccagaggtggaattatttgctgtgttgcaacatggaggttgtatgaaattaagtcttgacttggctatctcaaattgtaaaagatagaatattttctctttgtatgttgcaggtattattaattgatatgttgtcagcacttccataaatatttctatgctgtagtgatttttttcctcactgaaatgtatgctgtgacaattcagcacatttctccacctattagatcagataccatcaatgagaaggaagtaaaggagctcttacaaggtgcatcaattctttcacatctaaattacattatgcagcattgaatattattatgaaagtttgcagaataatagagcactacagaaatatttaggctatgcagaggccccagaataacaaatctcttaagagggagttgatttcttttattcaataagatcagactgtgataagtcattttttcccttaattttttttattttttgtttttttttatttttttgagatagagtcttgctctgtcacccaggctggagtgcagtgatgcaatcttgactcattgcagcctctgcctcccgggttcaagctcttctcatgcctcagccacccaggtactgggattacaggcttgtgccaccatgcctagctaatttttttatttcagtagagatgaggtttcactatgttggccaggctggtcttgaactcctggcctcaagtgatcctctggactcagcctcccaaagtgctgagattacaggcataagccaccacacctggcctctttactatgcacatgccacatgttttg

SEQ ID NO: 96968 - DNA, 1017 bp, Homo sapiens
ggcttatagtaaaaatcctctctagttacaaaaaactgcaagaaaacctagaaaagtgaaattttgatttttggttactttctggaaaatgtttatgggtaatcaattttttaaactacatgggtaattttgtgagttatctttcagttattaatatgttgactgatcacagaccagtgaggggtagctctgtaaatgactgtaaatctaccaattttttattaaatcaggaggcaaaggatagcgtagtttgtcccaagatatcactgtgtagagctctgagttcagaatatacatacctcccaccccaaatgcttaagatgtatttccatgatcgtgagtcccttttctgcatgtttagattcttctgcatgatctcttcaacttccctaaatggttagtatgccacagaggttgattcctttttatctatgctttttgtttttgctgccttgtatttataaaacctcctcaactgtgctacacatggaatatttgccaattgagagagtgtagcaaatggatgatggcagctaacagaggttacatgccacaccttcagcactcatagaaagtgggcacattgcatctctgggcgatcacaagctggtgcaatatcttgtaaaatactgtttgccaagtcacgccagctggatagataatgggaatcaccgtgttatatagtagttccagttccagactgatcttgatgctatggttggttaaatattattgatgagctaattatgctcctaaaacaaaccaacagtattctttaaaaaggactctccaaaaataaacagaaatacagacaacagtcttgtcgtaaaggctaatgtctttttttctctttgccaaatttgttttatgtattgtgcatatatatcaaaagaactgctttagatcaggtgtttaatgtattttgaggaagatattaaattgctgagaatacttcattcattacaaaataaatatacattgtggatgaatttaaaagctagacttttaataagttgg

SEQ ID NO: 96969 - DNA, 1036 bp, Homo sapiens
aaaggaaaatgtaggaaatcatgttttaaaaaagattagcttctctgctgtccagcatagtagccactagcctcatgtggctatttaaatttgtttaaattaataaaataaaagattcagttcctaatttgcagtagccacatttcaagtactcactagacacatgtggccagtggctgctatattggacagaacaaatgtagacagaccatttacaccattgcagccctgaattctgtgctaattgagaagtcagtggggttaaggtatttgggataaaattgttcatatttgcttggatgttatgggtagttatgtttacctatttgcatgtcttgcttaggaatccacagaaacccaaatgaaactttgaaacagtagagcttcctattttacaccttttatttcctattccatgcagggaataagccatatcatctttcagatagataaaatctggcagagccatgcccattctgcaaacttgatggttcacatccttcttgagacagattgtttggcttaaagtacacgtgcaagagtcaacaaggatattgttgctgtcaacaaagtttagcacataagcagagtgggtgacactgtgagagtttgaaagctatccctccctcctttcattgaaatatattatcccttgggtatgtacatgttatcagttactgcctttattaatatttccttgcatacatattttgagtgctaattcttttttgtattataaactatggaatttccatttctgaatatcctctaaattgtgatgaggtacatatcttggatagtacaggtaaagggctctcaaaaggatgacttcaggtactgttcagatatgtttcaggctaacagatgactttggctatctgtgtaaataaaattgggtatttgagttttaagacaaacttaaccacagagctgatatttatcagcttcaaaatatgaactgaaatacttttcaagttttctgatagttgttacaaaatgacatttattattttaatattcttggtcacacatttca

SEQ ID NO: 96970 - DNA, 1010 bp, Homo sapiens
gtgagaaccagttatcagtattttttaaagctccccaggcaattccaatgtgcacctagtttgagatctacttcccatatctatctgtagtaccatattggatttacaaattggaatgctatttttgactccttctttgtctcctttctctccgtttaatcttaccaagttctgcagattctccctctgctgtattggtttgacccttcctatccccagtaatgctagcctagcccaggcctttatagcttaatatctagttttcttcttctagtccctcttaaatggtgttaccagacactttcgaacaacaatctttgaaacaacaattttgtcatttcacttaagaacctatactgttttagcatcctaaaattcaggatttttgtaatcaaactctatttacaaaactaatcttctgatatcttatatttcctattgcaacactttacgagtagaagagaattgaggattcaggaaggtgaattcttttaaaaactatttcacttgtaatcctgggggctttgaggcatgggctggggaggaaaagggagaaagatgttcaacaaaaggcatatccaggctatcttttcctccaacccatatgtctccctttagccagaccaaatccagtctggtttcttaatatatttgggttgtgcttaagatttcattagaacagaaaagagtttcactgctaaaagaaaaaaagaagaagaagaaactttgacaacccctggtggctaatcctctcatttcacaagggaggaaactaaggctcaaagaggttaagtgactcatccaaagtcatatagctaaaatgtgccctttgttcctgctagcatagtctcttcactttctctgaaaagtaagaagaaatgtcatgctagcacttgacacaaggccctatacgtacaggtgttcagcaaatatttgttgaatgaacacttgaatgaatgctatttcatatttctgtttctgttcacattgttactgtaacaagaatgcct

SEQ ID NO: 96971 - DNA, 1436 bp, Homo sapiens
tacacaactatggtaaagatgataatacgtaatcttacctttgggtagctgcttgcaatttatgaaatacctttatatccattactttccttgcttctcacaattccaagaggtaagcagactcagtgctgtaattcacatattacagaagacaaaactgagattaaggaaattgcccaggtcaaacaattaagaagttgcagaggacttgagccctgagctactgactcaatagatattttttttaaccattacatggaccttgcaatttattagggagataagaaatgcaaatttttttcccttaaatgcatgtgtatctttatatagagatatatttccttagtaattgtactataagaaagcatcaagaaagtgtctaaataaagcacccagtgaagagttgtacatctagtgtgttccagaaatatgaattgattagacttgatatatgtctattaagcacttggagagtacagggcactgttttagagcccttgttaattgattatcatggctgtgtgttgttttgggccctgggccctgtttcagtgagaagatagagctatcagaggaaaagccatcagtagttttagacactagacttctctctgctttcacaaaatgccatcccagattcagaggcatttcttatcctcaaatggaacatcttcacataccacagtgttccatttccctcttccaatggcctccattgcttgtaaccttgactgaactctcccctttttgcattctctataaatctgctagtcaccactcccacaacatagcctattatgacattgctgcaacctagcctctgaattctggatttcatcttctctcatccaggctgatgtgttctgaaactagagcttccagacccttctgagttctcactgtcgccattctgcgacaaatcctgcttcttgttatcctatgaaactatatttcagagccctgccccagtgtccccttccttctttctcttcttcaagtgaaactgctcaaagacctcattattcacatgcttccacatctgtacccttaacagccttccaaatgatttgaacagcctcacttttttgtcagttacataaggaagtgccttccttatgtcactgtggtgaaattattttctcaatttattctgtttcaaaaagaacaaaaaatgttcctccagcgttataactaatcacaatgtcaatagtttactaggtgcataactggtgcaaaatgcgaacacaaggcatgatggcttttctgtattttagaatctgtttcaggaggggttcttcttcttctccttccttctcctcctccttctttcctttccaattttctgtatctcttcttccaatcataatttcatacagtcagtcatagggtaacacaaaaataacatgttcctaagtgcaggtaaactcacctcacaa

SEQ ID NO: 96972 - DNA, 1085 bp, Homo sapiens
agtttcagttgcccagcagtatcattaaatcctctggagtgattccagtcccacaaaaattagggacccctttacattgtttccatattcaaatggaaatctttttgcaagttagtaattaaagtatttaacctctctctccctccatttattagaaaactcttttttctttattttttcaattacaaaaaaactgctaaagccaatcaagcatttattttgataaaccgcttgtaacagtctcagctaaattctgcaaataccaaaaaaaaaaaaaaagctaaataatcaccctgagcagattttgcggagaccttgctcaacctgttcagggataattatgccgagcttttagtatggggcaaaggaaaacataaaattaaggcatgaaagaaagtctacctattttgagaaaatactgggataattggtactctttttattaccattttattatagaaagatattgtcttgtcatgaaatataggtttacagcaatgaaacagtactattcggggtggaaagaacttctgtgttagatggattgatttaaaatgtaataaaaatagcaaattgctaaatagtgaatcgctaaatagtcaagttagagttcattatttaaatgactcctttttcttttctttttaatcatatgatgttcataattgctttgtttctgacaagtacgttacagggacttttttcttcttttttcttttttctttcagagtagcctttggtttggagctacaaccataactttctttgagaaatggaaacatcaggaatggtaccactacatgcaaggtgctaggagtagaaagcaatagacagattcacaatgttataaatggtggtgatatgaaatgtgaccctgataatggttatgtggtgctttggaaatttacctctcttacagactttgtccttttgtatgtgaaggtgacactgaacagtgtgtctgaacagaatgatgtgtaatctgtagttctttatatcttatcagctgcagatcctggttttgtggagcctgaagcttgcacaacatgggggccgtgttttaatgagaacaatagtacaaaatt

SEQ ID NO: 96973 - DNA, 1507 bp, Homo sapiens
tgacacaattcctttctgcatcgagggtattttatttgctggaacactaatgaccagtactagaacactaattgatagcactactttgacacagaatttttaacatttgtgtagaaggcacaaaacttcaggagagattttataaatatttgccatttgcttcacagtacagaaacaacctcagtcaattgtttattagttttaattgaacatttcttattcaattaatatttgtattattattttccttatgggttgtcatatgataggatatgttaacatttgtaaggcaatgagaaaataaataacagtttacatctggctagtgtattcctttttatcctagagctttcaagagtgagagtaaaaataaattgattgacctgcccattttaaaacaccattctatttttttctcataaatatgaaaagaaaacccaactttcattcccgaagtatgtgttttatgtttattttaccttgttataggggctgggcagatactgggaagaaggggcttctcgggtaatggaatctgaggtctgcaaagtcctgttcagatagatccttgaacacatagtaaatcgcttcttgagtgggatggggaatgctgtagtttataaggtaggattacctttcaaaggagaagaaaaaaagtctagatatttccaaacctttggtctttctccagcatactgaaactaaggtctgcttgattatctggcctgggctgtaggtcgctgatgatttcatttgtgatctctccagatgaactcttttgtactttatatttcagcttagacaaatcatttatttacttaataatgtgcatgtagtttcaattaagtgaaagatgatcccatgtaattagctagttgtaaagtggattacataaaaaactggcatggaggctgttctatagctaaatattactttttagaaaggcttccacctcaaaaagagtgtctggattgcccaaggagtgtctgggtttgaatttgggctgcacaactccttactgcaaggtgatgtattccttctctgtgtttgccaaggtcaaagttatgtgatgcacgtggaaacttggctttctaaggaagccatctgagtcctcattatggcatcagaatgtatgaagacttacactctggtatgcataaggacacccattgccgtatttacggtaccttagactcttcaggaagaatctattttgagaactttacttttgtcatcttatctcacagaaactttctatatcgttgtgaacaatgaacaatagtctatatgcaaccattacttcttaagcattaatatcatatgtaacttctgaattcctttaacttccttacttggggtagtatagtattttgtttgtggaagcaattctagactcctgtgtctaccttgtttttctttttctccccttacagattttgcctttcctccctccaaacctcagcaccgtccactcctgcccccatctagcaggattctcctaacctca

SEQ ID NO: 96974 - DNA, 1102 bp, Homo sapiens
aaatgtcttttggtttatatacagtagtgcctctgttttatatttttaataaccagaggcaggctctgtgtgtgtgtgtgtgtgtgtggtgtgtgaaagagacatctgtgtgtgtatgtctcatatataaaatcctttatactgctgtttatttaggcatttctttacagcacctttctgaagactctgatgacatagccacttgtactgataattccactacttcacctttaccgaacttgattcactaaggtttaaaagaacaaggctatcattgctgatcatatgtgctacttgttaatcccttaaaataaaattcagatcctgtgggagagaggtgagaagaacaaaacagagatttgcaaaattggtgtaacagttttatattttactgaatttaaggacaatgacttctgtaatatcacttaaataagatgcctatttacataaacaaaataaacaaatcttctaataaatattacttaagctacttttcctcatcctcagagtttttgctaaaatattattcatgtgactgaatctctgaccagatacgtttattaggtgtttgtctgtcatgaggtgaaaatgggcactatttcaccaacgtttactttagaaagcactacaagaaatgattactataatagcttttgcttttaatggttattaaataatcaattagagtattttaaataattctgctgcataatagtccatttcttttggaggttgtttgtgttaataaaaataaaaattgctataatgtgattgatgtttgattacattaacattgtatttgaattctttccatgttggcaacatgaaaatttatttgcctttattaaatggaaaaatattactgttttattttgccttaaaaaaaacctcacaacatataaccaagcatttgaactcagcggtttttattttaacaaacaattcaaaaagtttaggtgttcgtgtattaatgttgcctttaaaatagcacttgttatctttctatatgtatttgattatatgtcttacattttgtacttggaagaatgaattcagtttgatagaaaatgagagtaattgatataaagtgcatttcaaatta

SEQ ID NO: 96975 - DNA, 1009 bp, Homo sapiens
ttgggctgtggggctgagtgtgcccagacatttacttgtgtgtttgtgtctgtgtgcctatgtctgtgtatgtattgcttatgtgaagaaagtgattgcttcctctctgccttctccttgtgtctcccttcttaccgccataattccagtcacgtaaatcaaagtaatgtagatgtaaataaatcaattcaatcacatcatcctaaatctttttattcacttaagaaataaacttaaaatccataaagtcagacagaataaagatttgtaaaagtatgtaggcttcagatcggaatcgtggttttcttcattgtacatattacaatgactagtggctagccaatgcatctttagattattctcttgtcgtatcttctgcctaaaaaacaccttaacaggaaattagattgagtatatgtacaaaagatattgacaggcaatgattattcatatagctgctgttgaagtatggatgttgtattgagggtagacctataatgaaatagacagaagtaagctgttacaaagaatttattcaaatggaccaggtaaggcctgattttatagttatccatataatctgtaatatgtctctctctctctctctctctcactctctctgtcttatatatatataatctgtttattatatcaatatacttaggcactcgaaacatacaatctctctcttgctttctaactttcacttatttgatatggggattttgccatacagcaagaaaagttgtttaaaatgggcagtatattgagttcaaaggacccatacagttcataaattctctggtgtctactggatttttcatcagggagacttccaataaaaatgatctattttagaaataatattgtttagtaggttgaaatgtggtgtaataaaattagaccttcagtcttctaaagttactacttagatggcacccttgggatggtaaaatggctgtataagcagatgaatcagacagttccactgatgggtacatttgtcagt

SEQ ID NO: 96976 - DNA, 1061 bp, Homo sapiens
taataaaaaaacttttgcctaagccctacaccagatcagttagatgagattttaaactcctcagatgattctaatgtaaaccaaacatttatatatatcaagagatcttaaaatttttaccttttaaaaaaatgtcattcttcctggtttgaagttagaaaaatgaagatatctattcagaactgaatatactaatgacatgtacagatagctcatcatccggctgaagttcaacaacctatctagacttttgaaaacatttctgtcagtcttgcaagaacatctcaggaaagtaacgatgatgaaggacagtgtcagcagaagcccacagtcgaagatcattttgttaccttgggtaagccattcaacctcactgagccttagtttttagtttacttttttataaaagaagagatgattgaggtgatccgatgatgactaagatttcttgcagttttgtatactccatgactgctttgtcatggaccagtgaactcaagtaacttggaccttgctagtcgtctaaaagatgcaaaatatttttgtttctcttaagaaagctccaaaaattatcttggaaacaatgtagaaagctcaaggaccatttattactttgttaagcccatcagaagagatgataagcattcattaaatatgcttactaattggttgcatgcaaaagtgtcagcaattctaatatcttaagagttgatgggtattagttagctaatgcttttctcttgtaagagatttcaatagagtggcaatcagattaacttaagcagtggagttagaaacctcaaatccttaaaatatttagtatgaaaggtggacttttatcaaactgaaagcaatacttttttcctgtactttatcagcaactagtctttgtccaccttctttttgcttcctggcatgttcttcttcgcttgttgaaatcctactaggactttggtatccaggtcagttgttgcatcatccatgaagccttctttgaggcaccctaattaggattgatttcgacgtctacttaattgtcccttagaacatttgaaatgtct

SEQ ID NO: 96977 - DNA, 1081 bp, Homo sapiens
ttgcaatctatgtgataaaatcatatcattatacataaagtatttaataaaatatataatagtatatgttaaagttttaaatatttgaaacaattatgtgtctttctgtgtcattacaacatttgaagattagatcttaaaaatataatttatagaacatattccttggcattgtagattgtgttttgttaattattggttttgattgtggtttcatattttattttaataccgattctgggattgtcacaatctagtataaagatgccagtgatttgaattttaaaagctacagtatacacatgtgagctcttttgcattctggctaacaataatttttttaagttccaggtcctttaaaagcagactgctttccaggaaacccaaaaactgcaagccaaaatataggtcgtgtgttacattaactctagcactgcttttcagacttatactaaatgtaacttggatatttatttgcagacacacacagacacatctttttccttctttaggatctaattttaattttgtgtgcattaacataagaaatgtatttctgaacttaagatttatgttctgctatttttgctgcactccttaagatagggtatattaggaattcagatgtatgcacatgtgttacaaatcagttaatgtgcatttttttaatctacattttcacttaggttaaaaatatgctcttcatgtatgtgaccagggaaggtgcatttatcccacatgtaatgtagtagatgaaatgctcagttctaggaatgaagcatgaaataatgttgattatgaaacctgatagactatatagaaaaagaactccaattttgtagttacgtcactttaacttatggaagaataactttccatctttgtatggtattacttttaagccctaaaataagaaactaaggggcacagtgaatttttataaaagcaatcatgttaagatgaatgtttttacattttttcagcttactcttatctttcaattcatatgtatataaaaataataatgaattttattatattaatcctttcctaaactcctccaaatttcttttagagtcca

SEQ ID NO: 96978 - DNA, 1014 bp, Homo sapiens
agtcttaaatgcacatgaacctgtcaaaattcttcatctcttaatgaggtgaattgtccaaccttgaaataaatactttagttttggcaccatgatgagtcagagaaaaaaatagttcccatatacttaatgcagatgtgttatcaaacttatattatttacacagtaataaaaggaaattgagataacaaaaagtacattatgatattttatacatttttttctttctagacaacagtctgctttggtataaaaatgaacattagtaattgaaaattgatgacaaattttatcaatctggctatctcataattaagttgaaatctgctatgtttaacaaagatgcgtaatacattttatatgtttgtatgtgtctgtgtgtgtatatatatatatatatatatatatatatatatatatatatatatttgtctatctgtcaacatactcattgaaacattctttacagaaagaacaatagaagaccacgaactggtgattgaagtgctatccaactgggggatagaagaagaaaacaaactatactttagaaaaaattatgccaaatatgagttctttaaaaacccaatggtaagtgaaatccctcctaatagttacggaaaataaatgaacccgttaaattttatgtgaagaagatagtcactgtaaataaaatacagtcctattcggtaaattgtagatgaagactctggtcctttgaaattatacccatatttcttatgctaacaatgattagtgaacattatacacagaagttcagatacacaggtgcaaaactttttaaagccgtattggtaaagtctgaattgagatgaatttggtttatttaatttaaaagtattaggaaacctagttttgccttttgtgaaaaggtaacaattatacatttgatgtgggaaatgaatttctataggttctcacccagattaggaacaagtgttaagcaaaatattatatcttaacactttctatagaatttaggaaatttaaata

SEQ ID NO: 96979 - DNA, 1018 bp, Homo sapiens
gtggctggaaacactgtaagaaatgatcttcactgggcattttattttatctcattttgcatcctgcttcagacaaacactcaactattgagaaacggaaactctttgccatctagtattatgcaagtgaaatttaatacctagagtgttagttttaaaataactgacttaattttttaaatgttttacattattcatcttttatgcaattttatattctaatatatatcatggtttataagcagataagatgatgtattgtcatatacttatgaaatgtacaggtacatattttgctattttacttaattttaatcctagttattttacatagagtatgtaaggttgtaccctctgttgtaatagagtatgtatttgcaatgtttaagaaacatccccctttttagatttttacacaggttgttatattttattttcccctccattttcctcttatatttattatatagaaagtggaccaccatgcataattctacaattgcctaggaacagtggttaccatggcatttgcagtttgctgtacagaatacagctgtctatacttccaaaaatatgactggtttcattcagtagagaaatgtaccaacacagtataatatttaatctgctcccctttttaaggctttcctagatataatacatactttgccactgtagttttcatcagattttcaaagggtcataatcacaataacaaaagcaatggtgaatgcttatataatgcttactaatgtttcagacaaggctctaagaacattacttatttaatccttatgacaaccctctgggccattacattttaggtttctgacagttttagcctaaaagaactatgaattatgaggaattaataagttgttaaactttaaggaaaaatatattattcaaagagcagtaggtcatttgtggaattaatatggatttctcattcttgtctattagtatgtaaaaagtcgtacctctctaaaataacatgctgagttaataaaatagtatt

SEQ ID NO: 96980 - DNA, 1053 bp, Homo sapiens
attaaggcaaggaagtagaggatgctgtcatagaaaatgttaagaatggtgtaccaagctttttgggaattagcagttcaagaagtacaatggaaatcattagaatggtgtgggtaagggttggtgacaaagaatctgggaaggtgacactgaagccattctgggaagtgattctggatctctgtctcctgagggagacagggctgcgagatgaaaatcctgcatacgggttctttatgctgtgattccagacttttaaaatttttgatttttttagtgttatcactgactgttgtttgagcttcttctcctggatcacccaagaaactgagctgcttgctgttttccaaaccatctcctattcctcctgcttctgttcatacatctagttttccagaaatgtctcagttctacttcaacatctcaagttcatatcccataagaccatgtcaacgctcacctcctccagcatgtgactctccatccctctgcccagttatatgctctgttttatttggcatgacttttaggacactttgtattcatgttattttgtgtgtatttgtggcaggactctatatcttagtatagctcctatgctctctagcaaggtgccttgcactttacatgtatcaaagtactgtgtggaatatgagcagtcagaaaagactccaaacagagtgtaggaaaagccctctgggtttgtgaagttttgatccacgtatgaaaatattcttaattcatttctatatgcagcaaattcaactttgttaactagaattagttttatataatacatagaaacactggaaatcaaatttaagacattattattcatccgaaaaattagatttaccatcttttttaatgtgactgcttcatttcaattccttaatcaaattagctgcctgttttatacctgcttggtacttaaaaaaaaaaaaatctaccttttgttgcggaggaggatttcctctagctatttattttgaatcaaaggagacatcagctgtagcctatgcccctgaatcagcttcctattttcttctttga

SEQ ID NO: 96981 - DNA, 1172 bp, Homo sapiens
taagaatttatacattttttctaaagttgaggtatagtttacttttaatggaggaaagactgaattgaggtattttgtatgtacatgtctacctgtttttctttatatgatataggcaaattctgtctttttccccctctttctctttaaccaagtaggacttcctatggagatactgtgtcctcagaaaacttttgaatcaatgaattattgtgggaaaaaagaaagattagcagaaggaataccttattgttttactctccgtcagtatacatacattgagataaacgtatatggaaaattttagttgatttattcaatgactatttattaaacatctatgtgtcaaactccatcaggatgagagataagacacacccaatgccttcctcagagaagattgcttaattgatcacctagcagaaagtaaagactctttaattttatatataagaataaaagtaataatacaaaaatcaattgtttattaagaccttattagatgctaggtctaatgttaggtatgttgaatatattaatattatagcattttatccttatgtctgtgtgtgagagatactactatctttgtcccgatttatcagatggggaagggtagaggggaaccaaagagacaatgagaaatgaagcagcttctacaaagtaattcattcttgctaccttactactctgattcatctatttaaattatatattattttagtgtatactgtgtgaaggatttttagagattacttttccaaaactttataaaagtagcattccttgtgcctgttctgaccttgttacacagacatgggtctgaatgaaggatgtgccgttttcttattgggtaaccttgagaaagttacttgattctcacagcctctgtcccctagcttataaaatgtaaattacaacccattttgcagagctgtgtaaagcacatgctggtaagatcttaaaattttatttcccagtcattttcctcttatgcatttccataaaatagctcaaaataatcatgtgatcatataaaaaagattttgctgaaattttcagcttgactacaaacagttttcttgtaaattccttgtggtgttccagcagcccaataagttcagttgtgatgctggagagtaaacattggagttgaaattggaagccctgta

SEQ ID NO: 96982 - DNA, 1049 bp, Homo sapiens
ctcaattgaaatcagagctgcaggagtaatataaacaattattattttttaaaagtatggtttaataggacagaggttttcttttgtaatgacttcagacttgtagaaaattcctttgtacataaaggtgtaaaaataccacatatttgaaaatagccaaagtgtttcagaagcaagcctctgaaatgtggttgaataagaagctgagttatatagtagtttgggttcaaaatatggctgtacttataaaatctgatttttttaaatatgatgtgtaggttgactttaaataggatcgaatgctaaggcatcagaatatgtctttaaaataatattaatcattagaaaaattacattgtttctcagtgtgattaatttgagggattaacaccaagtaattggtaggtattctggtatatttttaaaaattaaatacaccattttaccttatagcctaaagtaaagctttacatcatagcttctgtaattacaacaacatatatttttaaggaagtagagttaagatgctcaaatctaggtgagacatttatcgacattccttgaggattccatctctcgaatctgccttcatgcacatgcacatgtactatttctggagaaatggaagcgaggaagtattagatgagcccaaggggagtagcgggggctgaagccaaagttttaatagctactacagttgtgtattgattgagatgtgctggaaaaacaggaaattgagctgctaaacaggaaaatgactactatcctaccattcccagacctgattggctgtgccacagtttctaggccagttaactgtaatcaagataattacaggagtcattgaattcattttctcctttgtgctaagatgaatgcaagttacacacaaaatggaagtgtccgagggtagagcaactctttctcttttttttatgcctgatagtcacttgctgtattactgctttaacagaattaggaaagagacagggtcactgtcttataggacaatacctgtatttcctggtctgtggcagctcccataattc

SEQ ID NO: 96983 - DNA, 1047 bp, Homo sapiens
caagtgagtgatctattttgttctgaactctggctctgtcaatgacaacacacgatttactagaacaaatcaaataagtgcatttgactcccattttgacatttcaaaacagttaagccatatctccttatgcagcaaatatattcatatttttaatttttactttttcttataagacactgttgtcagaatgagaatgaaaataacgacttagggtagaatagttttcaatgctttccaacattatggggagaataatttctgcatggatatgataatgtggttcaaaaatttacagcccccccaaatgactttgagactttgactatgcaatcagcagccaaatatttcaatgcttcattgctcctgttcctgttacaggtacatgtgacagcgttgcagctatgagtggaattttaaaggggaagtttgaagaagtcaacggctcctcaccctgctcttcagtgcaggaatcagatgatgaagttttcagctgtgacagtactgagagtgttgatagtgtcaatcgttcagttttaatgattttaccagtgagtatctaaaactctgtttcagttgtgctctaaattgtgttgcatgggccactcttgggggctttagcttaattcactggcttgtatctgctcttaaattcttcctcatatcaaaatatttgtaaaacatgacataattttggttaattaaacttcagcagtatacttcttctcatttctatggagtgagtatgtaggaggcagaaatgagtccaatcggaggtaagcagacagcaactggaaataatttaatgagtgtcttcagcttgctgaaataaatctatcttttgaaatctaatcagttaagccattttgaacgtctatagattggtcaatgagttacacaatatttacagtgctgagtgtaacacatttacttcctagatgagaaaatgatgtttcttttttaaaagattgcttatgtgaaatcaaggccttgaaagccttgagatcctatagttgtttggacacagttaaaactcagactcaaggc

SEQ ID NO: 96984 - DNA, 1053 bp, Homo sapiens
acccctagctccaacagtttagatctccaggattattttaatatgtcaagtatgtgtccatttgtgctcagataggatctctgtcaaattgcatttcccaacttccatgcctactcccttccagatgggttcagcaaataagatgccttggtgggaaaacggagggcaggggtaagggatacacaagaatattctcaccaacccatccgtgcctcagatgatatatctagtggctgccacatcttctcatgattcaggccttgttgcaatggcccaacttttatattcatagcccccatgcaacaacctctccagggattcggctcccagaaggcagcacccactcttgatctctggtgacttacatcgcctcttcctttgggcctccagtctgaggggtggcggcatctacccactgttgctaatatctgagtttctttttccttttttatttggggtctcagctccctcaaaaccattgtaactacttccttgtatgaaatttcttcacacaggaatcattagaccacccgtcacgaactctattttctaaactggaacctgactgacaaccctagcctgggccgcatactcttcactgaatcaaacattgtcaccagtggatgaggtcctttgattgactgtctcattcatttctcccttgtagtggtaacaagaaaggagacatggaatatattactagaaaaaataggaggaagaaaaatgtgttgggccaccaataacaatggaccccatattagtaattcactttgatctcgtagttcataaacatgaaaaaaagctaaactaaatattttttcaaaacaacactgcaataaaattatttgtaagtgaatagtggaaattactcatagccaattgcttattaaatttataaatattctatcacattctgttccgttttttaattttctggttaataaaaagaactaatatattgaggatatgttgtaagtcccatgatataaaaataagtaaaatgttttacttattttcactatatagtataaaatcagagttcatatgcccata

SEQ ID NO: 96985 - DNA, 1029 bp, Homo sapiens
aacttattgtcccaaataatatttgttgattgaaaaccagataaataaatgagttaaactatgtatggatcattagaaatttactacattgttctaagaaaaaattttctttgctaaattatatagcatatgattattcagttctgtatttaatgctttacttatagtttaagatttctattgattttctcctatgtaatcacgatgttggcacctttagtaagtttgctctttgaaaacataaccttacataacattctgaaacgtattttcttttttaaggaaaaaatgaggaaatatcaacagactgaaaatatgttttcagaggcatagaatcttcaggaaaatactggagttcctgagatctcaaggttagcagtttatacattattattctcatgcttttacagatttgggatataatctgtgcatctgtttcaagtttctaatgtgtaattggaaatggtcttacttaaaatatgtgttttaaacgaagtctcctcaagattttaaaaaatccatttatatcagacatacagtatttagtttcattagggacaataaaaagttgtcttaatagagaactactggttcttataatttgcttcattttaaagggtagcactattagcataaaaataaacatttgacatttctataaatttttctttctgattgttaaatataaacctatttagtgactttttcatttcttttgtatctttggctgcaaaatgcacacatatacatgtagtttagaaggatagctaatcagcaatccttctgaaattccttgaattctatttcctgactttttttaactacagccaaataaataatgctatcattggaaagtgtggcttcgataaaatgacaattaatatgaaggaacaggaggatcttgggaatcttttctaagttgtttaggatgatataactggaaaagaagaataagcctacccattattaagcagcttattataataacaaattaatgtacaatattcatttagaagttataaatgtagg

SEQ ID NO: 96986 - DNA, 1312 bp, Homo sapiens
tttaaccacaaagagacagcttgtgttgtctgttatgggaaagccaaaaaaaaaaagaaaaagaaaattagagatgcagagggctggttgaaggttatgggggaaacaaagacttctcatgcagtttttctctgttagggatagattcttcccaaaccaatattgagctttgttgtactcatctggaaacgtcaatggaaagaactagaaactctggttgaggacaactgaaacttgacttttcaaaagcaggtagaaaatagcatatgctttctttaaattcctttgctttcatcctcccttcatttgctttacaaaattgccaacccaggaatcatttgcaactctgtaccacaaatccagttccctaggaatttttccaaataatgattcttccattctctcacaaaccaacacccacatgaatttcacattacctggtatgcccatgctctaggtggctctttcttctctgaccctgtcttcaaattctccaagtaatttcctagcattcttattcttccatcgttctggcaaataatttatctaatccaaggtttttcaacttcagcactattgagatttggatccagataattctttattgggggaggggagagagctgtcctttgcaatgtagggcgtttagcagcatttctggtactagatgccattggcacttcatctttagttatgacaaacaaaaatgtcttcaggcattgaccgatgtcccctcagagcaaaattagcccagatagagaagcgttaagccagccctaacttctataatctcagtaaacttccatccactctactacaacaaccacaaaacctccttagcacctccagcatcttgttctcagttaaaacagctcaacaaggccaggcatggtggctcgtgcctgtaatcccagcactttgggaggtggaggtgggtgaatcacttgagtccaggagtttgagaccagcctgggcaacatggcaaagccccatctctacaaaaaatacaaaaaattagctgggtgcagtggtgtgtgtctgtagtcccagctattcaagtggctgaggcatgagaatcacttgaacctggaaggtggaggttgtggtgagctgagatcatgccactgcactccagccctccagcctgggtgacagagtgaggccttgtctcaaacaaacaaacaaacaaacaaaaaaccgcttaacagatacactttaaatatcagtttcccttgctaaagtgaaactcacctctatttgatcatctgtatgtttttattttccttttatttgcttatactcggccttgtat

SEQ ID NO: 96987 - DNA, 1045 bp, Homo sapiens
ccacagctctccagccactcctttcttccacagtacatgcagccatgaacccgagctatagtgaatcctttcttgtactcacattcatgagtgctacaggagcaattataccactctgcagatttatggtgttctaatctgaggtagcccctcaatagcattcactaatcctttcattctgactgtggtcggccactatttcaaaagttcattaccccactcaagccacacaatctctccctttcacgattagtgcacctgctattttaacaagaaaattgaggtcattgtgtggaaactacttgtgaatctttgcaatcccctccagcatcaaaccaactaggtctataaacattttttctttccttcaatctctaagagggctcaggagtccttcctgctattcaaggcaaagcctatgtttgattttacttcccatcactgaggctgagaccttttgccattaattgtttcttttttgtcctttatttccaactttttcttccttgctagcccttttccttcagccattcgtgttcttcacactcctatccaaaaaagcaaattgacaaacaaaaacaaaccaacctctttcttcaccaccatccaatttctgtcctcttcaactcattcaagctctccaagcagtagtctacattcattatctccaacttctaagattcagttactcctcagcacagtgcaatctgatttctaaccccatttaacagagcatgcactttctaaaggcacggatgacccacagcccttatcttgactgattctctcaggggtatttgacattgttaactacatttttcttctttcactgctccctcttgatttccctcacatcttgtggatctttttgtaaagacccctctcactggctcttctgtctctattcttccatccagaaagtcacaaaccacaaactcaaaccccaataggtggctataggtaatataaatgagtgaagttggctaactgaaaacagtaaacactacagaggtcaaacaacatgcccacaaaagttcttgatatt

SEQ ID NO: 96988 - DNA, 1001 bp, Homo sapiens
agtaagagtattaaaataatcttgtatgtgagtttgaaggctttctagcaagttgataagtgtaagaaaactttttataaatggggaaatataagacaataaatgttactgttttcaacatatctgttacagaagatttgcattgataaaaattaatacaacatataatgaatcctgtctaggaaacaatgaattcttcttataactgtaaattttgaagcaaaagtaaagaaagaaaataaggtaaaaataagatgtatccagtgaaatttatcatctcatcaaaggttgtattgctttctcaagtaaaggaaattctgtgctttataaaatcaaaactagatgtattccattaagacaagggctgaaaactggcaacctgagaactgaaatatgtttgttttggccctcataatatttactaaaattaaatttgctgaatttctactacttcccattttttactctgtgctgatgcacattttttggtatctatctgtttctgaagtcatctgagtttgtgacgtctgctttagaaagttgctattgaatgagtttaaaaaaactgaaaagtgtgtaggacagattcttttatatattactggtgaacatgtaaattctttacaatacttttggaatatgtttagaaatatttgttaaaacactaattcctttgaatcttccatatgtctgcagccattctacagaaggactcatacaggtgcatagagaatgttcactgacacattggttgtgagtaaaaaattgaaaaaacttctgaatatctatcaataaggtgttgatttaataaactatcataaattcttataaagaaatattatatagctctttaataaaaaaataaagtggttctaatatacactgacatggaaaaacatcaagtaaatattaagtgaaaaaagaaagtggtgaaatattttcaagtttctttaaaaaacaatcccataatattaaaataataatatcttagtacattaata

SEQ ID NO: 96989 - DNA, 1045 bp, Homo sapiens
aagttgtcaatagtttgtgagcaccttcactatatcatgaaaatatccaatgacctcataattttaatagctgcataatattatactgtatggatgtatcaaaatgtatgatcaattccttattactgaatagtaaggtttttatatttgcccactattaatagtgatctgtaaagttaaatctttaaatacatgtatgattattctctctgtataaattcctaaaaattaattttaagacttttgataagaaatgccaaatcaatggaaattcatcttgtatattctacttgcaagttatcatagtattctctcttagtgatagaatttttacattggaatagacacgattatgtaggaatattcacagctctcaagatctctgatgttaagtctgtatgaaatatgaagtagcaaatcccaatttttttctgaatttactgagaatctgtggttgcgtaagtagcagtagactctcattctcctctgagatagatcaagcaagtagttggctcttattatcagttgaaatatgtcatgtggctgtgtcctctcctgagtagactgagggtgacagttagctggcttcctgggatggctgaagtatccattgactcacacttaatttgaggccttgggattttcttctactttactagaccaggttgcctcatctgtcttccttaactataccagacatctatctggactgcagagctcttctctaagctgttcatgtatttttacattgttattcttttattaatgatattttaatctaatttgtttacttttttaattaataaaagaaaatttcttgtaaccatggcatgcaaattaaaaatacatttagctagtaaagacagaaacataaaagttaaacatatttacctacaatcttatgaacatttaaatgatatattaataagatttgaaactggataaatagttattaccacatttccaatattatttagttgaagcttttaaagttcaaatacattgttttctatctatttttaaaaatttggcatgggagatgagg

SEQ ID NO: 96990 - DNA, 1023 bp, Homo sapiens
cgactggttgtgtcaagtgtttctgatgggtaataaaaggggaactgagaattgaccattgcattcaacaccatggagaccactggtggtgttgacaagcatagtttcagtgagctggtggtagtaaaggctaatctatatggttttatgagagaatgggtggagaagatttagagtgtgtataaacaattaatgccaggagttttgctgcaaaggagagcaaagaaaaggggcagtcactacaggagacatggtgtgagaaggttgttaatattataagtgggaaaaataacagcatgcctaggttgagaataatccagtagagagtgaaaaattaatgatgcaggaaagtaaaagaattgctggcccagtgtccccgagcaggcaagttaggattggatttggcacagaggggcaaggagcatattaaataaatttgtaatatacattgaccttgacagggtcattatgaacagttcaaaaagtccaaaattctggtggagatggaaaatatgtagagaggtatctgggttattgtcacttatttcaaggttatgaattcttaacaggggccatggggatgtgggccatatctgtcttatttactctgtgtacctggtgcctaggatgagttctggcccattaaatagatatttaataaatatttgctaaccgatttggtgatgggaatattttattttcttcccttttatttgtgtttcttaaatttagaaaaatgaatatgtattactttttaaattaaataataaacattgctgatcttaaagagagaaatagatccaggaaaatacaattagtcatttcaagtgaaatgtaatatttgaatgataatttacctcaggtaatttgctaaacactctataatgcagaaccaaaataaaaaattgatactagattgcctattatttgttattatttgtctgcagtacataaagttaattatgtgttattagccccactttatagatgaggaaaccaaggctcataaatgttaagtacctt

SEQ ID NO: 96991 - DNA, 1048 bp, Homo sapiens
ctgagtagaaataaagattcattcatccttgttttccagaacaccatcaaggcacactattcttcagtttctatatttagagcaatgtaggtatattttcaccagataaatgtggcacaatccatcctgaatcttgtccattccttgctgtcctactttctccctctgtcacttgcacatgcttactggctagtccttgggaggctaccatccctccttgggcaaggaatgctttcagagtcgattgttctgtgcaagaacagccatttgggaacatgatggatataagctttttctcaaacatggtttccttgcaattttagctttaccacataacctgcccttctccacctccccttccaaagaagacttacttttttttttcaattctgaaatcaacttcttagatctacttttccttacctttttctatcatctgcctccagaactggacagcttttatgcctccttcttacgctatcattctttgattccaaatattcccgagctttagatgtaattccaaggttgttcccacatggagtgttgaaattcctgtttcacccctgctaactcaaactaatacccccagtcatttcatctcaattcagagccctaggctgacatactgtcacgtgttctcccaaccccaatatgagctctataaaacaatgttgaaacagacactggaaaagttcccaccaggagaaaatgaagtttccttcgcaccttatttccatgatgtcttatttatttttcacaaaatcttttagtctccctctatacccaagtgaatagtgggaactcctgctgccctctgtctgccactgatctttctttctctgttgtcccttggtgctaaatcacaagtggagatggagaaattttaagataaaaactctcacatgtgtcttatgtgtatccagtaacagcagcagtcagtttcaaaagcccctgcagatcttgctaatagctattcctgtctaattctagctgttcgctgctaaaatagaaagctgggagaacaaagttgtattcccagaggaat

SEQ ID NO: 96992 - DNA, 1058 bp, Homo sapiens
tgaaaattttcatacctgaccttatctgatgggtcacagtcaaaacagagtcaaaactttgttttgttcacaaaattatcaaagatactctaggaaattgccttcaggttatatgaataagatatacataaatgaattttgtctttagacttgggtgccatccccaaggtacctcattatgtagatacaaacatttcaaaatccaaaaaaaattcaaaattcagagcacttcttatcttaaccattttggataatggatatttaacctttcagttaaatactgtactttcagttaatgtaatttagcaatgtaagatcacatacatgtatctaagataatttataaaatgtttataccctaaaatatctttccttctgcaaagaaagtttgtgctccttacttgactgtgccagttcatggtaaaatggagaaggtggagaaaggtcagcccagggaaaggggaaagtccattaacccaagataaattatttagaagaaaccatatccattctctacccataggcctttcaattcaattattgctatcttccaggtaaatagccttaggaaatttctgaaaaagtggccagggcttcagtaagcaggtagcatggggatgcatgtcacccattgcaatactgaaatggaaactacctaaaatttagaactgtttttacatgcttcattgtgctcagctaattgggtttcttgaattttagaacttgagtacaaaggtcgtgcatacttttttgtgttccagctgaatttcatataatgttgtaatcaaggacttcaggagacattggcattatttttctttacagattttcttggactcaggtggattttctcaatttgccaataaaaaggaataatgatattacattaaaatgaactatgtctcaaaatataaaaaccttttggtaatcaaatggttaaatactcatatttaatttaatcttatttttgttaatttgaaaatagaaaaaaaaatctgctaaagatcctttcaagggaaagctatagctcagctcatgtataaaaagccacataaaaa

SEQ ID NO: 96993 - DNA, 1075 bp, Homo sapiens
agcctggatatatatacatgtcctaccacatagcctctaccttttgcatggtcttattccgccccttaattatataacattggacatatctttaaaatgttatttctcatgagttataaaggaagacttaattagtgaagaggcagattatgtttctggatataaaggtctggatattaatggtttcaacattaatttctaaatataagagtaaaaccaaaacaaaatcttcaactggcatttctagggcgcccaggcatttctaatgtgccctacctaggaatgcatagaaaatcccaacatgttatatatgaaaattttatatataagaagaaaacattataagataatgagaaagggaaagactatttaagaaatggttatggtcttaggaaatttgaaaaagaagtgatttagactcacgtctcacaacatatgccaaaataccagatagattacatggacaattttttttaataatgaggaaagttacattttgccagacatttagtagaatcactatatgaactttgatatgagaagaagaaataatcacattggaaaatacttaatatatttaatgatgtaaaagtattaaacttatttgctatttaaaaaaagcccaaagtgaaacagtttatattggaaaaaatatttacattattttctggatagagtatagcaaaagtacatgtaatttcttgagataaacacgaagacacacatctccaaagaaaatccacatagtaggaaatataattaacaaatgttttaaagcatttaacaacaatagtaacaaagaggcagattaaaaaatgctaatgagatttcattagtatgaaatcacagagatttcatcccttgaaatcggtactcatttctccaataaaaaatactaatacctaagtgctggtgaaggttgcagtacagattgtaggcacacacattgctatgaatggcagtgatatttagaaagcacttcggaaatacaagagccataaaagcattcataagtgtctacttcagagaatttatctgaagagagaaatattaaaaacaaggtgaaaactatata

SEQ ID NO: 96994 - DNA, 1020 bp, Homo sapiens
gctaagatacaatctgtttgcttccttccttccttccttccttgtctccctccctcccttctctccttccctccctcccttttctctctgaatacacaaggcataaatatgccatcatgtgcacccaaagtcagtctttccccagtgtgatttccctactactggctccacatttcataatgggattagacataaagaatcaatagaaaacagatttgacattaaactttattagaagtatgactggaacatgcctgttctctttactaagcagttaaaatgcattgaagatttagatttaatttcaacaaacatggtatcttatgttacaggctctgagctaggacctttcaaacctgtcaaagtgatatattccaaacagtaaatacaacttggcgatacagtgataaattatgtctacccagcattgtagtattagtttgagaactaactttagcaaagacatatgtcgcaatctaccctgactcaatgcttttgtaaacaatggaggagtgttcaggccaagctgaacacaagagttttagaagaagtctttgcttaagcaggaggtaggacatcatgacgctcaaaagatcctttctagcctgtaataatatgcttataagaaacaggatccaaaataggcatcataagttagagtcaaggccaagcaggaaaggaagcagcatagataaaggtgcctctgaaaatctactattaaattaagaggttcccagactcttcacacccacttatgcctggaaaacaaccaattagctttggcttggggtacacaatctgggaccagctgcagatcatatgtagaaacatgcagatcataaataggtcatgttcagacatggaccagttgaatcattaggtgtttattgttggagataaaggagttaagtaaattatgagtggaggaagatatttatgagctagtagtcctctggaaaatagtcacttggatatgcaataaggcctgttgtctgatacaatagaattgttatcagatca

SEQ ID NO: 96995 - DNA, 1047 bp, Homo sapiens
atgaaatgagactgaaaaaatattgaagcttggggcttactattctactgtttacattcatatataattaaagttttccacaatacattttaaaaatatagatgcatatgattgccactgtgctacagcctggatgacaatgagaatatgtctctaaataaataaaaatttaaaaaatttataggtccaacttatcctaaaattttctgaaagagccagagaatatggccaagtatattatagtatatattatatggccaagtacattcaaaattattcttctgaaaaagaataaggaagaggtgaggagtatgcttagcctaacagatctcaatacttgaaaagctgaaatagtttaaaacccatggaattagctcaagagtctgtgcatggaacaaatagggagcatagaatcagaaccacatttaaatggcaacatggtatgtgacggaggagacattgcaaatgagttgagaagtaagagtctgttccagtaaatggctttttaacaaaaaagataaaattagatccctacctcatgccatatatgaaaataaattcccaatgaactaaaaatctaaatattttttaaaattataaaatatacaaaaaaataggaaaatatatgtatgtcagagtaacatactgtagcatgaactgtgaaaattattatgtatttgggtacattaaaataaaactgaatatataaccaaataccccaccaagaaagtgaaaagacaagctacagactaaaaggagatatttgtaaatcattaactgacgaggaattagtatctgaatataaaagaactgcaaaaataaggaagagctaatgcagcaaaaaaaaaaaaaaaaaaagtagacatagaacctgagcagataatacacagaaaaaaggctaacacaattatgaacagctgtgtaactctattaggaaccagggaaattaaaattgaaagaagacatcatttcacgtatgtcatatcatcagattagcaaaattttaagggtttgaaaataccatgtattgacaagcatgtgctgaag

SEQ ID NO: 96996 - DNA, 1065 bp, Homo sapiens
cctatttttcagaagtcccacagcagctttatacttgggtaagctgtgtgtgaaatgttttcagactgagtttggcaattgatattgatgagtatttttttttggtttttactctggctctgaaaacaatttgagtagcttaaccattaaaaaaaaaaaaaaaaaaaaaaaaaggaggccgagctgagtggctcacgcctgtaatcccagcactttgggaggctgaggtgggtggatcacttgaggccgggagttcaaggccagcctggcgaatatggtgaaacctcatctctactaaaaatacaaaaatttgtcgggcgtggtggtgcatgcctgtgttcccagctacttgggaggctgaggctggagaattgcttgaaccacggaggtggaggttgcagtgagccgagatcacacaattgcggtccagcctgggtgacagagtgagactctgtctcaaaaacaaacaaacaaattaaaaaaaaaaaaaggaaaatgagaaaataatagaataatgccatttgaaattttttttaaaaagaaacttctatgtagctctttgatgctttaacttttgcatgactattggcatggtgattttgcaagtttacacataaaggccacatataactggattgaatcacaaattacatcaagtgttaataacaaaatagagcattataaattaattttgtgggccacaatattatttcaatatgttcctccttctccaacaaaagaggaagattctccttgattagtgacatacctgctttactaccttttgactattttactgattaagattcacatgtcaaatattactatttacttgcctatgggtagagaacatgttatatacaaagtttctgtttttttaagcttcctttccttaccttttgcagcttaactcctggaaagattagactatttccctcatttgttcattcaacaaattcattgagtgagccctgcatgccagatactctgatgagttcaagctatttagactctaactcctttaggaaatctataaactagcagttccttaggataaagcattca

SEQ ID NO: 96997 - DNA, 1102 bp, Homo sapiens
gaataattttaaaggacattggacttaactgtttggaatgaatgagcttgattttttctatacatattataagttaatataaaaaaaggctttgggtagactccgtatgtaccttatgtatttgatttcatgagtttcattttctgcagtaactttatcattcatttttcatctcttaggctggaatgtagtggaaaaagaactgaactaggagttagaagatttaagttttggctctggctccatcacatactggcagtgatgatcttagccaagtttgaactgcttatggcggggtcttgtttattcatttcagtatttccaacccctagcacgtgttgggtcacaagcacagtttgttgaattgaacatatcactgagtcttctcatttgttcaagaaagaaaggagagaaagagatttgtaatcacttgctctactacaagcacatagtattaaatatgacttattttctgattctttgcttggtaactatggcagagtcaattattaagatatttaagtgaaaaggcattgatttcatgatttgccattttatttagcattaatgccaataaggattttttttgacgttttctctctaaattggcatgaatttttaaataatcatcctctactttgcaagttcagtagaatgatcattggtaataatagccatctggaattgttttcttggttacaaaattgaatatacaagagataaatagggtctgagtccacttatatccaaactttgaagagaaactctagtttaagtgaagtgactatgtcagtagttcagacagaagtcaaatgcataagagcctttagttttctgtgcatattagagaacttacataattatttgcaaaaacaaaagcctggaattcatttttatgaaaaatctgaaatcaccattttgttaacttactgaaaatgcacttctgttgtctttagtgtctatgccatttaataaaataattccttacacttaagaacttaagttgaaatggcaggggacagagactatttgtaatattgtaatctcttctctaattttgtttttcataataccttaaaggtgaacttaaaagcaacacttt

SEQ ID NO: 96998 - DNA, 1050 bp, Homo sapiens
tgaggcaggagaattgcttgaacttggaaggcagaggttgcagtgagctgagattgcatcactgcactccagcctgggtgatggagtgagactgtgactcaaaaaaaaaaaatatatatatatattagttgtttcatgtgatgatctattctctgagaagtatgacatacttaattgacaggcaggtgtatgcctacaattcttcctggttatttctagttataccaatgctttaagtctgtaatgtattaaatagctctgcttgaatgccattctcattgccttgttcccttaaatggaatgaattttgtttaggcaatcacttactatgaagctgctctgaaaactggacaaaagaattatctttgctatgacctggctgagctcttattaaaattgaaatggtatgacaaagcagaaaaagttcttcagcatgctctggctcatgaacctggtatgaaagtctttctggtttgaaaaaagtctgataactctgatccattttatttttatattgcataaatatgtatttgtattctcaatattttatttgtggttggttatataaatacatgcgtattttttcttttatcagaatgccactctactaaaatgtgatattttgaaatctagtagcagatttatgaaacagttaattgtgttatagaaatatagcttactttccaaaataatatagttatctttaaattacagctatctcatatttaaacacattagcatttttgtaatcttttttaaaaagtagcatgcttcttttttaaaattcaagctctataaaagaatataatgcataagtcatctgtttctcctatgaattccatttgccttgttctcaaattacctccctagtagcttgtaatttaatatatattctatatatgtgtgtgtatatataagtgtaatgtgattttcctgtgcgaaactgttactcttccttttctgcaattttttccacatacgtgtcccagatagtttgatgtcagtacatcatgcatttaatttgcatttctttgatgagtgataaagtta

SEQ ID NO: 96999 - DNA, 1090 bp, Homo sapiens
atgttattgatatatccagtagtatctgtgatttagctctttattattgttcactctattgccagtttgtaaataacagctttattttaacccatttatggttatcaatatggttaatagtgtattgtagaataggaattctctaaggttagttttatgctactgagtcttcaaagatccctgcctggttccttctctctgtttttctctttctttttctctacctttttttccttccctccatattttgtcctttcctttctccctctctccttattgaacagctctagatacaaggtaccattatttgtactgttaataatgcaaaggaaaataatacataaactttgctttcatgaatgaataacccagtagtgcatagagcacatccccagctaatattgtgagaaaaatgatagatgatatgagagatatgtgattaaagtatgcaagaaaataatagctaacatttattgcttgcttactttgtgctaggcactgttttaaattaaggagagatcacacgcttaagtgttaagagaatgtgaaagaatttttttgaaggaactagcatttgagctaaaacctgaaagatggatacaatttcaacaggcaaagattatgggaaagggaagtaggtactcccaaggtgagaaataatagatggaaatgagacatgttacttgagggtacactaagatactcatatttgatggaatacaggatacgttgataacgagaagggaagaaaagcttggagaggtaacttgagacaaattgaaggatcttgactgctagttaaaaatatttgtatctgattgacatgcattgagaggctattgaagacttttaactatggtagtgattttattagagtgcaaatccagaagattaattagacaatggtttcttggatgaagtggcttgagaataaactgaaatgcagtgaaaagaaaaagatagtacttccttgtggaaggttttgaggcactacactaaaatattgtacagtgagtacaaagttcaaaatttttaaatacccacaggacctgtgaactgataatagtttagaaagataacaagttgtcac

SEQ ID NO: 97000 - DNA, 1012 bp, Homo sapiens
atttttttattcccttaaatgtattatttgcactgccacccaaatgaacattttaataaaaacactttaatgtaaaatgtaaaaatgggcctcctcattacttagacttgaggttcaagtccaagtacttaatatgaggcttttcaccccaccttcgtctccaacctcatcatccaatactctctgtctcacttaagcctccagagcagagaatagcaaactttctcaacaaagggccagatagtacacattttagactttatggaccgtatggtctatcacatctaattggcttgttcaaaacagccatagacaatacttaaatgagcatggctgtgtttcaataaaactttatttatgaacactgaaatttgactttcatgtaattttcatgttatgaaatatttcttttttttccttgacagctggaaaatataaaaaccattcttagttcactggctgtacagccagccagccagatatggcccacagagtgtggtttgccaaaccctgctctagagtatggagtggcttttagtcatcttcatcaccactgccatcccaatgtaccattgatgacttgttatctgtgttgttgcagttcctcttcctaactcctgtaccttcctcaagaatcatgaaaaggaaataggaagagcgtgtacgtgtgtggagggagaatgaggggtttgcaattcaagagtcagctctgaaatcctccccaataatctttcccttgattttagtcatccatcctcccctcacaccacattcagttttcaatgctgtcaaaatgttgctatcccacattcccaaaggagtttataagctcttttcttacatttactacattatatttcagttagtcttcagattacagtctcatctgaaaaatgtaggttttccggggggacaggaaccatgtcttactcatttttctattcatagtagctagcccagtgcctgggtactagtaggcagtcagtaaatgttttggattgaataacctaac

SEQ ID NO: 97001 - DNA, 1153 bp, Homo sapiens
taagaaaaaaaaaaatgtggaactccggatagtcgatcaggaatgtccttaggttattttatgattttatgttttttttccccctaacttctttataagtcaccatgcatgcttctgaaaatattagtcatggtacacttgatcaaaaggcacatgactctgaatttcagaagtatgaacttcaagttccaacaatacaatgccttataggtgaaaaagaaataataattaaagtgattttagaaaggtggactaaagtaaattgtgaggagtgttgaaagtttttgaaagacaagatccataaaaaccaaggtggccttgttaaggtcatggtgccagtgttcactgaatgtttaccacgtccattgccatattctaaggatgtttccctttgaacttgagaaatggtcgttcagggtgtgtgtgtatgtgtgtgtgtgtgtgtttcaatatgttaaggttgcaatctatctcctcattctttaatcccaagggctagaaactttcttttatcaaggtaatttaatttaatgtgaatgcacataaaatgagaatgataatcaaaaggaatgaaccatattctgttatgaatgctgaaatctccttctacataatcttgcaaaatgaaatcacattcaaatgtccatattaatatgactttatttgtttgctctttcaaacttctagtctttgttgagcatccgtggctccctattttcaccaaggcgaaatagcagaacaagccttttcagctttagagggcgagcaaaggatgtgggatctgagaacgacttcgcagatgatgagcacagcacctttgaggataacgagagccgtagagattccttgtttgtgccccgacgacacggagagagacgcaacagcaacctgagtcagaccagtaggtcatcccggatgctggcagtgtttccagcgaatgggaagatgcacagcactgtggattgcaatggtgtggtttccttggttggtggaccttcagttcctacatcgcctgttggacagcttctgccagaggtgataatagataagccagctactgatgacaatgtaaggaagttttaaatagttcaggcatggctggctcactattgctgcaccagccagtgtttctacagaacggcaaccttgagaa

SEQ ID NO: 97002 - DNA, 1102 bp, Homo sapiens
gccatctatggattgtcatttctttctcattatctctttgtatcactactatttgtttcaaaattagcttttaatattatctgaaatcaagagattcttattttaaaatatatatattctgtgttatatttttactggttctcctacctgtgcccctaatatttctttttctttttttcagatggagttttgctctcatcacccaggctggagtgcagtggcgcgatcttggctcactgcaacctccgcctcctgggttcaagcgattctcctgttctcctgcctcagcctcccaagcaactgggattacagggacccaccaccaggcccagctaatttttttgtgtgtttttagtagagatggggtttcaccatgttggccaggctggtctcaaacttctgacctcaggtgatgtgcccactttggcctcccaaagtgctgggattacagacgtgagccactgcgactggccatctgagcccctaatatttctttcagattttactcagcatatctggggggaaaggaagtatatgcagtacatttgaaaggtggaccatatttattcctgagctagctcactttgggcctttctgtgtcgttacatgctcatattcccccacagcaaaggcatttgcattgcacaagtctgttcagatttacgatgatctcacaatgtcattcagggacagaatccctcaatgaatcagagaaaaagagggctaagtattgttggcataggggattgttcttctagtaagcacaggtgaaattctcccttccttcaaatgcgctttgtggtaaagctctatctgttttctggactcatactccttcaaagatgatagagggaatgcaggcagaggtgagacttggagcagtgcttctcaaactctgttgaggatgtgaggtctctattcttctataaaatgaagtaaaaattagtttctagaaaactgaaatgaaaaacaggcccacaacaacatccccctacttttttattattagaatagacagacacaacattaattggccaaattgccttacaaatttctaaacatggactctccatatctatacttaaccagtactggttggggg

SEQ ID NO: 97003 - DNA, 1103 bp, Homo sapiens
aaagtaaactctatcaccaccaacagaggaatccagtaagaaacattctagttccttgtatagagggtactatcagggaatccagacaatcagagagggtaaacacaagagcacctcatctgggaattgctgacgaagaagagaaaatctggggcttgcttggtgttacctctaggacgtcaccaaccaggcatttctcaagggtttatgtcggtgtgagcctgacagtgacacacaaaagcatccctccaaaatttagcctggggaccttgaaaggtattgctttctccctgggcagttggagaggctgaacctactattttctccctgtactcgccaaagggcacaaagcctactctcttccagctacctcagaatggggagggtgggagaaacagatcccagagaaggatgggagagaatcagcaattgaaggtcctgtatagtcaccctcagggtcaatggggctgtgctccgtgaggttatcacttcctttttaaattctaattagtgaatgaagcatgttccaccgctcaattgagattgcattagtttagggtagggtgggaagaaatttattctcattgcacttgtgatcagaaaaataagttgtgacagaattccccaagctgccccaaagtttgcttttccaacttttaaattttgtccacattcctagatttccatttattaattgttttatttatcaaaaacatatagcatttactctgtgccagccactatcctaagcagtactttgcaaatatgatctcatttaatcctatgaggtagatactattgttaattttacaggtgacaaaaccaaggcacagtgaggttcaattaacttgctgggttatacagttagtaagtggcagaatccaagcagtccagccacaccgtggccatggcgtctgtgttcttgatgtttgctcatcatccatgtgatggtagagctacagcttagccaagagactcaggactgaagttgggtgcagtcgtacatgtgagctgtaattcatctgctttctgacatgccaaaattccaaaaacagtttggtttagaatgattacccaaatccactccatttgtttgtttgttt

SEQ ID NO: 97004 - DNA, 1077 bp, Homo sapiens
aggtagcactacatgaatattccttctattttcgttcctctgttatctctgtaacccactatatgtccttcagagaaaatattttatctcagtggacttctgttttctcatctataaaggaagagactaacactctatggtttctaaaagtggaaagaagctttgggcaaagaagattttatacatctgacaacaccttcgtcttgcagcctgcagaggtcccactgagaagagccctcactgagtaatcttttaacataagttacaatcccattttgagatgatgagacaaagagctgcagtttgttcaattatagttttcaaagctttattaaaaccatagacagagagaggacatcaagaataccgcgaggatgggccataatgttttatttcattttatgcagctttttctttgtggtgtaatttgtttttaaaaataatgttagtgttcttttcacccacttacatgtttgctattttactgcttcctgtccagtgttttattttagttagaaaaagaaatagctggcaaaactcccaactaaacatatttgcatggcctttaagactttcagaggaaactgccatctcttcccatttgtttgtggtagtgatatgtgcagtcacaatatgacactgttaaaaaaaaaaagccagtaaccatacaaggatgttaagcaatattgacttgccttccactgggaaaactgctgtcagctcatggattggcattctttgacattttactcagtagactagtgagggtttttgcccttgtgttataagaatattgatactagctctactgcccctgttaggagcccgattcttttacccagcctatctttcttagatgtttattcaacatttctagtcactggttgaattaatttaacaaataccgtaagtgactatttttttcctttccctgtcctcctatgactgattttcatactctatcaggttcttttcaaaaatcttctcacaagcagaataattgtagaagatgccttcctacatgagcttatctgatgttttttcatggttacagatttttggcaggaataccacagg

SEQ ID NO: 97005 - DNA, 1039 bp, Homo sapiens
agaaacaaaatgcaggttagttgaggaagatttgagaattacaggagtgtgaggatagaccttaaagtgacctccaatatttcctaccttctagtattcaagccattgagtaagggtggggccttcttctaaccaatagaacatggtaaaagtgaatgacatcattccattgcttatgttatattgcataaaagtccattttgtttaggaaaaaatcaacagcaaaaaaaaaaaaaaaaaaacaaaactagggtctctctctcttgcttgctttgaagaagcaagctaccataattatatgccacactggagaagcccatgtagcaaggaactgaagggagcagcttcaaaaagctgaggatgacctccaacaataaactgaaaccttcagtccttcagctgcaagaaagggaatcccaccaaaaacctaagggaactttggacatggctcttttccctagtgagcctctgataagaatgcactcatagctgacaccccaagtgcagcctattgagaccctgaagcagagaacatggttaagctatgcccaggcttctgacctatagaaactgtgaggtaataaatgtgtgttactttaagctgctaattttgtggcaatttgttacctatgaacataaaatgtacacaaggcacatacaaataaaacataaacattaatttagtcctctataagatcctctagctttgccacctatggacacacctctgccactttcctctcaaaaatgtacaatcaggctgggtgtggtggctcacacctgtaaacccaactccttgggaggctgatgtgggcaaatcacttgaggtcaggagaccagcctggccagcacggagaagcactgtctctactaaaaataaaaaaaaaattttttaaaaaagaaaaataattaactagttgtggtggcacacacctgtagtctcagctagtcgggaagctatgtgaggagaatggcttgaacccaggaggtggaggttgcagtgagctgagattgtgccagtgctctccagcctgggcga

SEQ ID NO: 97006 - DNA, 1096 bp, Homo sapiens
ctaatcagattagagagctaaatccagagatcccagaaccaattcagaaaacttatccttaaaattctgttcctctagaaccactcttggcaacaaaatctgttattcagggctctctagagaaacagaaccaataaagtatgtgtatgtgagcatacagagaaaaagagagacagagagaggagagagagagagacagagacagagagacagaaagagggagagactataagaattggctcaggagagacagagaaagagagagagattctaagaattggcttatgtggttaggggaccaagaattctcataatctgccatcaacaggctggaaaattaggaaagctggtagtattcagtctgagtctgaaggcctgagaatgtggggaatcaatagtgtaaatttatgttgagtttgaaagctcaagatctaagaacatcagtgtccaaggacgggagaagatagctgtcccacctcaagctgagagcaaattcacccttcctctgacattttgttctattctcaccctcaaaggattgcataatgcccatctaggttagtgaagatgatctttgttactcagtctacagattcagatgctcatctcatccatctgcacaggcacacctagaaatgttttaccagccacctaggtatcctttagctcagtcaagttggcacataaaattaaccatcacagtatctttccagatactgtgcctatgcacatacagacacgaaatattttctcaccaatttttagacagttgttaatatatatatatattttgcttcctgatttttaaacacagcaatcttggaggactgtcaaagtttacaagagcttcctcattcattttctcaactccatcatattacctttgttgaaagtgccataatttatttattatgagacagttcctacctgatgaacaattaatattttttctgatattttggttaacacaaccaatgctgtaaagctcttgtgcatattatttcacacgtgtacaagaaactaaaggacctagaagtggagttgctaatttaaaatgtatgtgtgcttgttcactgtgaaaatgtatgtgtattta

SEQ ID NO: 97007 - DNA, 1068 bp, Homo sapiens
cttatatagtgctgagcctctttctttttcctctgctgtactgtttagggatgtctcttccaagatcttcccttcccttttcctgttcaaattcagagatttcactctctactcctctaaattccccactcgtaccagttgatagttaaaatagttgtgagtcttgttactaaaaagaccttcaaaagctttccaagatagaaaaacatattcatttaaaattgattttattgttcaatgttgagtccatgattaggagtaaatatgatataacaaaacttgaaaataaagttaaaatattaatttagtaaatgggaaaatagttgctatcccatcaagcattttgtggagagtaatattagtaacacaaaataattgttggaatgttactgtgtgttagaaatagaattgttaatctttttataggcattatattattgaatacttaataaaaccttaggcagtagatgttactataataatatctctattttataactgttgggactgagaaagacatataggttatataatatttacaagctcaaaactgagtttttgatagagccaagaatttaataccagaacctcaaacaaaacatgtactccttttgtttattagtttttgaagtagaatggtatctattactagaaaggagatgtcaactgagcaggcctagggtagtctaataagggaaaaaactgccctatctttcttagacatcgactgtaatttctgcctgtattattcatatcttctgtcatatactttactatgctattttattattttccatttcaatataaaattgagaaatgaagtaactgatactttaacattccatgtgaaaatccctccaataagattccttctatgtagtcagttgaaaaatgaaatgaagagatttggctactactatctaatgttttttttgaagggtataggtgaagagtaaggagttgagcacatttcttctaagattttttttaaaaggctcatttcctgttagctttttccccttttctttagttggcaatgggaaatgacatcctgtacttaatcttctc

SEQ ID NO: 97008 - DNA, 1056 bp, Homo sapiens
ataaagagtttgaactagggaaaatgagatcattccataattatctatgggtaaaatggtaaaacaaagagggaaatgtaaatatttgaatcaaggaaagattatatgagtgttctatgttctgtttttattcttgcatctcttttgtaatttttaaaattttttcgaagtgaaaagttaaaaaaatgtagatgcaccaggacttaaaatatttaaataatcatatgtaaactataatatagctctataaaaataaatatatacttgttatttttattgagatcaaaactcaaacttgaaaatgtctgtaaaggtgacataacatacttgaaaaagaatcatattaagattatgaattggaaatgctgtaattgaaactaagtattcactgaatgagtttaatggtagattagatccaatagagagatcagcgagctgtaacttgaggcagacaaaacactaaatattatagcaggaagatatagcaggaaaataaaaggagtgtaagagaagaaatagtgggaggaccttgtatatgcatttaattgtagttccagaaaaacaggaaagaggcagaagcagtatctgatgggataatgcctgaaaattttccagaactgtttttaaaaagtcagttcaaaaagaaaagaaaaataaagtaaaccacacttaggtacatcataataaaattccaaaaacaaaaataaaagagaaaaagaaaaatttatgttgacggatttggaaatgttcttaaagcaaaaaaagtaataaagccagtttcaaacaaaactaaacaagaatcctgagtttattaatagcaaacctatattaaaagagttactttatgtagtaggaaaattatcccagagacgtaggaagcagtaaagagcaaagaaggtggtaaatgtatggagaaatctaaatgaaatttggtttcataaaataatactgaaattgaataaattgaatggagagaataaaaaacaaaaataatatgaatcaaggggaaattaagtgaagttaaattggttctttggcccttaaattatttgaaca

SEQ ID NO: 97009 - DNA, 1049 bp, Homo sapiens
acctcccatggctaggattataggagtccacagcaggaatgtggactgctgggggctctcacttccccttttcctgcaatgaggagtctctcccagctcctggccgattctgaggcttttattttattaggatccaaaaccaacaagaacgatttttacctaataaatgtaacacacttatttgttatgcagaaattactgaagcaatatatgaaaatgtagaattatgtagttacctattgcactaatagtggcagttaaacagtgttaggttgctaaataagacctacagtatcagcaatgacagtgcacacaaacatatattttattgcaggaaaatgatacaatatagcaacagcatttagttaaggatatgtgtcacatccaaaggctgtttcacagcaggaagttaggaaaggtaggtgcatgccccagttgccctctttagtaaagatcatacaggatgtactttctctctcagatcagaaaccgcagatgtgtgcacaaaacacttcggaaccaggtatgcccaagtggagtcttggcccagatgactctgctggacatgttggcagatttttgccacatagacagccccactaacaggccctctaaggatctcatagagaacaaatgcaaatcatcaatcttactgttatcagttaagcagtgctgacaagctggtacaaatctttccaaactccttggacccacggttataaagcaacactattaatcagtacatttcatgccttacctgggtgtctgcactgtgcagatatattttttattttcatgagacagctcaggcaaattccaggtctgctggattgctggatgtagctttcacaagcatacctttcctaaaacaagtttcagaaaacttaattctaggtaatgatggcaaattgaaccatgtgcatttactttcactcttccatgaaattctgttaaaatggtagtaaaaggaagctttttcaaaggcataaactcacaaggacaaaaacaaaagaggagacaacagcaacccaattttggaaaacaaaatg

SEQ ID NO: 97010 - DNA, 1059 bp, Homo sapiens
tatgttgcttaatcagagcagttgtgaactctgttatcagaccagcttagaagagtcacagagtttatgtattttgaaggaaatattccagtagtataaagccaggcgtgttcattatccataatgcatttatttattccacaaatatgtgctcgctgttatgtcagtaggtgaaaataagacacagtactctcatgaagctcttagtcaactagtagagacatgtgatctgttaaaatatagtgtgctgtggtagatgattacttaagtgctctaggacaacagaggaagaggcaattatgctgggagtcttataaatggcttcactgagtggagtcttaaaaaacaattctttgtgagagttttcttggtcttcccatatcatcatctgaaaacaaagttaaaaggcttttgtccattttcactgaggtagacctgattcatggtattttttccagcttactttagcacagaggtggagtcccaactcttggtcatcttatctagatacttatttgttggattttttttttttctttcaaaaagcattctatgaatggtaacttaaaatgatatagtagttatatattttaaataaatatattttacacttttttcctagcagtttcagtacgaaaataaccattttgtgatttggaggggaaaaaagtatgtcatatcagtatattccatgaaaggcaaaggtgactccaatgcagttcacccattgagtatgccccacacccactctagggtataacaccctcaggctcagaaaacaagtactggctctaagataaatgttttaatttacttatgtatttgcatttgcctattgtatatctatttacagtatatatctactctgatttacttaaaataatccaaaaccacaacatcaagtttttctcccagccttaagtatcacctaataccaacttgcagagccatctttaaactgatcccttatgtcaatgtaatgcaaaattctaaaatccttgaataataagaattaatgcaaagttaaggagattttggaattaagcaatttatttgtac

SEQ ID NO: 97011 - DNA, 1024 bp, Homo sapiens
atttgtaataaccaattggggactaataagcattttcatggagataacaaaggatttttatgtgtaatctttaatgcttaaataaaaggtgatcgttgaaaaagattttaattgcatgccaaactgcccagaatcataatgctaagtaactgccatactcatttacagtgggctttttggtaaattttgtaaatctccttgaagtacagtttgttcatcatttgaagatgaagataatagcacatagcctgcctaccctgtgtgttactgagaggatcaactatgattatataaggaaaggaacgtttaatttctggatttcttataaaatacaaatattacaattgattataatgcttgtttgtagtcttttaagaaaaatggtttatatatctgagcaaagggttcatacacaggctgacgacacctcccctgtgttcccaagaagatccttgtgctcagcgtggatgtgttagaaagctcacagattgcattgcatgcagataacttagagcacatctagtacacccctgttccctctgcatccagcgtatgaaaacttttctggaaaatgcttaggtatgcatgcaacagtgacccttggtcatctcccaggattctgtatttcagtccccgtggggcaagggttggtgtcggtctactgcaacacaaagtggcatgaatgcagccacatgttccgcatggatatagccacgtgggacctacacattgcaaggagctgcatcttgtgcctacactcctttctcctatgtcagtgctctaccacttgagcctggtatgcatgttgactgttctcagcaacctcaaatcatgcactgatctcttccctgggtattccttatctgccttttaaccttggctgcatgcatatgttattccatcctgtggcactacctgaccacctggtgaaacaatatcattttcggctgggcgtggtggctcacgcctgtaatcccagcactttgcgaggccgaggcaggtggatcatttgaggtcaggagtt

SEQ ID NO: 97012 - DNA, 1074 bp, Homo sapiens
catggtgaaaccctgtctctattaaaaatataaaacttagctgggcatggtggcgggtgcctgtaatcccagctactcaggaggctgaggcgggagaatcgcttgaacctggaaagcggaggttgcagtgagccgagatcgcatcactgcactccagcctgggcaatagagtgagactccgtctcaaaaaaaaaaaaaaacgaaaacaaaaaaaaccacacacaaaaacaaaaaaatgtcattttaagttttgtcctactggaggtgtttttgtacaatctttcttacaagttctccatgatattgcagatggtattcctgtagttttttctaaacaaaaatgaaataaagtatacctcctgacaataaaaataagccttggcaattttgcattaattactcttcatggcatcaaaaataagagagaattttgcctcagaaagctgacatagctttgtgagaaaagatgtggtgtagcaaagcaactaaagtacacaagtgtgtgtagaggagtggtcaggattgaagatttgtttgatgttcagtgatgtttatatttctgaatttttcatgtgtaatgaacaacatactagtaaaagaaaataagatggaatttaaagggactgaaacatttggaaaatatgaaatgattcaattttctttctctcttacttttcgtgcctccctccattatttgaaactgttctcatctaagtttactaacaaggatacaaagacacacatgaccactactgtctttgcttttcactcttgacacaggtaataaactaatgtggttgtgaattaatagcagtgactacaggtgaacaacagaatcttccaatactgtgaaaggagaaggctgtttttgatttttttttttttttttttttttgagtcagagtcttgctctgtcaccaggctggagtgtagtggcacgatcttggctcactgcaacctctgcctcccgggttcaaatgattcccctgcctcagcctcctgagtagctggaattacaggagtgcaccaccatacccggctaatttttttttttttttgtattttcgtagagaa

SEQ ID NO: 97013 - DNA, 1407 bp, Homo sapiens
gcctcctgagtagctaggactacaggcacgtgccaccacgcccagctaatttttgtacttttagtagagatggggtttcaccatgttggccaggatggtctcggtctgttgacctcgtgatccacccgcctcggcctcccaaagtgctgggattacaggcgtgagccactttgcccggccaaatctcttatgtctgttttcttttttccacttcctttgccaccacttaggcagcaacccttataacctactgcccagtttgttaagatcccatttaaagggctttatacttcagcctatcttgatattccatacaagttattccctgcctcacagtccttcaattgtcttttattgcctgcaccacatttattgtcttcctgcgcagtctaattctaacatatttttcatctttatcactcatattatacatcaaccatgagttctcagcaaattggtttgccagaatgtgctatgcagagtctagactgacaccatgttttgcttattagacacctccttatcttcctcttcctcaaatatcttaattcttttcatccttcatggccaggatcaggtgttgtctcctccatgaatgcagaccaacaaaagcagcatgcctaataggctttaactaagataatgtgggacactagttgctgttgctacctataaagtggtcattaagcataagtttctttacctctttctcttttcaacatgtctcaggatgatgatgcatttccagtttaacctcacaggtcaccatctccagacttctgatggctctgagagccctacaaataatttgaaaattacagataatctaaaagtgagctaactttcttggttcattactgcagaaacagaattgacaaaaattgcattacatgggtgaggaagtgaggattggtgggcccagtgctttcatagagtattctgggtgatcccaacttatacagttgaacttgatcaaaaccgtcaaactcatatctatgtattgtatttaataactttgcaggatcaataattacagtaggttgtctagaaatacagtcttacttttaaggaatctgaactatctaggctatttaaatatagtgccattgtatatactctcctagatttattgttcagtattagcctttcaccatctattgtccatgaaaaatatttattaaaactagtccctgtcttatgttttttatattcctgaaattcagaatactttttaaaattatgacttttaaaaaaatccattgtgttttttttagactgacaaattttcacaaccactaagtttaaaatatgtgcaattactttgaacatttgcccttaataccaaatatccgtaatggacatttttaataaagtgtagaaaaattaacatctacagcttttctttct

SEQ ID NO: 97014 - DNA, 1048 bp, Homo sapiens
cttacttatttttgtaagggatagagcaaacctgtaaatgtgttgatcacctggattaattcttggaaccagagttcagatggccagaaatggagtcggagccaattacattagaaagagccaaaggtcaaggcagaaaaaccaagataagtccagaaacccaaagtcctagaggtagaagcatgtatgaggaacaagtgtagttttaaaaaggagtgaagaaagaaggcttctgggtgatttcagtgacggacattgagtttaggatttacttttatgggctattgattacatcggcagattaggatggcctaatggtaaagcatcaggcacattctacttgatagatcttgttttgtcttgttggaggcagctgtacacttatcgttaacagtttttttgtgtatgaataaagctaacaacatctatccaattttgttgagcatgtttgtgaacttttttttagtaataatgaacttttttttagtaataatgactatttcaaacagggctcaatttgaaatagtcaaatcttgtactcatcaaatcttattaagaatcctttatttaagtgtgatatttgaattaacactatatactatacactatattggaattattaacactgtacaatgtaatgtgataggattttattcaattttacctatatgggttgctaatttccagcagtgaattagaggctgtaattcttattaacaatataaggcaaaagttttttatttttttgagacagaatcctgctctgtcaccaggctggagtgcagtggcgcaatcttggctcactgcaacctctgcctcctgggttcaagcgattccactgcctcgcctcccaagtagctgggactacaggcatgcaccaccacgcctggctaattttttgtattttagtagagacggggtttcaccatgttggccaggatggtctagatctcctgacctcgtgatccgcctgccttggcctcccaaagtgctgggattacaggcgtgagccaccgcgcctggccaagcaaaagttattttttaaagc

SEQ ID NO: 97015 - DNA, 1031 bp, Homo sapiens
tcagagtcttggattctaagaaaattacctgtcatggtagcagagatttttttttttaaatatgtattctacatttcaaagctatataatattttgtaaattcttccacccaaaactactgtttttccacttttgactttgaaaactctttggacatagcatgacttacaagatagggtgatacatcaaaatataaatggaatgtaattagtcccatgaaatatatgtatacattccccacttttgctatgctagcctttattcactttcctcatttctgcctttctacacatttacttcttgtcactctgggatgttatctttcattttcatttcattatcttatcctttattcccctccttttccaactttcctgttttaataagagcatttttccgaagtatgagattctcttttgattcattatttgatttacttagtcacattttcattttttattttttcaggttcgttcattcccacccccattccttcatccatgtccccgttgtctcttgctgtagtccacctttttccttctgggccttatttaactgtcttttgatatctccccttcctgaggaccttctgtttcttaatttttttcctcttgtctccttttttgctcgtttcttaataaaatggtgctctgagtaaaacgcatgttgtgtgcaaagttctaaatttttcttaatcatagcaagatgaataaggcatggttcttgcctgtaaagaaggcagcattcacaaagacttttatttttattttatttttatttttttgagacggagtctcgccctgtcacccaggctggagtgcagtggtgtgagctcggctcactgcaacctctgccacacgggttcaggtgattctcttgcctcagcctctgaagtagctgggattacaggcatgtgtcaccacgcccggctaatttttgtatttttagtagagatggggtttgccatgtaggccaggctggtcccaaactcctgacctcatgtaatccacccacctcagcctcccaaagtg

SEQ ID NO: 97016 - DNA, 1042 bp, Homo sapiens
ttgctacagttttctgtatttacagaataattagaaaaataaaaggatcatctcaattaatgcagaaaaagcaattgaccaaatccaacacacatttatgaattttttaaaaaatttcataaaactgtcagaaaactgaaaatggatggaagcatcctcaatattataaaagaaatctgtgaaagacctgtaactaatatgtaggatggtgaactattagatgattttcctaagattggagatgaagcccagaggcccccttccaccacttctattcccccttttgttggagactctagccagtaatattaggaaagaagtaatagtaaaaggcccacagattggaaatgaagaaagaataaaaacataattgtttatttagaaaaccctaaatagtctaaagactaacttctaaaattagtacatgaatttggcaaggtaacagttgaaaaattagcatacaaaaatcagttatgattattgatgccaaaagcaaagttacaaaatgaaatttgaagaaataatttataataatatcaaagcaaaagaaatctagaaaaaataacaaaaattgtaaaaggcctataaactgaaaactagaaaacgttgctgaatagaattaaggaagacctaaataaatggtgtgatatatcatgtctgtggattagaagacttgttattgttaaaatgtcagctctcccccaaattgatccacagactcagcacaatctcaatcataaccctaaaagactttgtggaaatttatgagtctaaaatttatgtggaaataaaaatgacctgacctagaataaccaaaacatagatacatacatcagtggaatataatagagaatacagaaataggcctatacctatatagccaattgatttttacataaggttctaagataattccactgagaaaaagaacatattttcaagaaattgtttcaaagcaattggataagtttatgagaaaaaaagaatcccacctttgtactgcacatcatattcaaaaactaattcaaaatggattataaac

SEQ ID NO: 97017 - DNA, 1153 bp, Homo sapiens
ttgaaacctaatagagtttgtccagttggaagtgaaattacttagagccagggattccttttttctttctgtcttcctccctttggaatgagaatgtctgtatctgttatcttatgcgttccaccattgtgctttgggaacagataatttattttctaatttcacaagttcataaatggaggaagaattttgcccctggatgtcgcttacctacagtctcacctgcacctaatttatatgatttagatgacatttgggacttttgagttgataatattagaggatttttattttaaattgatgctgtgatgggttgagactttaaggggtaggtattaagatgggtgaatgcattttgcacgtgagatggatataaatctttgagggccagcaggtggttgaataatggctcttcagacatgttcatgttctagatcctgaaacctgtggttactttataaggctaaaggaactatcaaaagtgatcaagttaaggaacttgagatgtagagattaccctggattgtctgggtgggcctgatgcaatcacagtggcctatacaaagaggcacaggaggagtcagagttagagtagaaagtgacatgatgatggagattagaataatatgtttagaagatggagaaaagaaccataagccaaggaatacaatggctcctagtagctggaaaaggcaaggaaactgaaccctccccagaacctccagaaagaatacagccctgctgacatctcaatttcagcccaaagaaaccgatttcagacatctgacttccagaattctaagataataaatttgtgttgttttaagctactaagtgtgggtaacatttcaagctgctaagtgtgggtaacgttttacagcagcaatgagaaattaatacaaggtgtctacatgaaactgctttataatgatgaattctggtagaaaacagatgcttccttggatattcaagaagataattcatacttcttgaaaaaaaaatcaaatacaaaaataaaactctttgtaatggggatgggagttggagatgaagtaaaggtgaggaatgtttattacatacattgctggttaataactaagaggaatttcacagtttgacaatattgttttgacttttatccaaaaaactacac

SEQ ID NO: 97018 - DNA, 1011 bp, Homo sapiens
aaatttctagttatcgtgtaaacatgtcctgagagaatagaagcattagaatcaacctgggaagatattttactctcttacaagggttacttaagaatgtatagtgtgcccatcactgtgctaggcaacaaactttgttgttccttgagaattaagagttcctgatctcagaaaggtcactttctggcagaaaaagtcttaaaatttaatttcagtgtattctcataaatacaataaagtaaacatgttaacgatacaaaataattaatggtgagagaggtgacagtggatcattaggaaggttttcctgaagtgcctgagttttgaaaaaagaaataactcatattatcatcatagagtgttcccagactccccctgccacctggagccaaggttcttttcttagtttctttctctccattgccttgctagaaaggggctgcctttggctgatcagttttttgattatcacaatcaagagatggaagaaggtgaccacatgagtgaaccaaggctgggaaaggagtttggggttaatttaggaggacaaataggggatgctattgtctatcagaagaataaacaggagagaaaggtacagactttaaaaagtgtagctcttctacatgatgtatcacatttattgcttcaagaacttaaatgtcgtagagtagcgtagagacacgtgaagtaataaatgttccacccattattttcagatctgggagtgaaccatatgggacacagaagggtaagtggatatttactgggaagatgaaagtgacatccaaccagagaaatcagaatggcagaggcataaatacatgaaatagcatgggcttttaagctgactctaagaaagttagtattgacagctgtacagagggaagggaaatgtaatggcatggacatgtcagtagatgcagctgtgtctataggatacgccatcttaatatggataatttctaatcagtctaatggttcataattttaacagctgtttgactgact

SEQ ID NO: 97019 - DNA, 1071 bp, Homo sapiens
gcaaagcatcagtctaaccactttggaatagaagcaccattagcagagattgcaaggtgttttgtcaggcttcttgccatgacacacatggaaaatggtaatattcctaggatacactgtgagggggctgctcacaagcagagatgactggcactgctgagcagctccagggctgaagccttggcatcttattagcacatctgtaaacacttgtgttggggagctgtgctgctgagcaatacaacctttccttttggaaagccctacagtgtctgctgctttttatgcatgtctatgattgaaatctggacttagaggagtttttcttaggaaaaaatcaagacattgggttctagattttcagtggaagttaattttacctaaagattgaccagtattcctgatcttgtgtcaagaaacttgaacttggaatcttttcctttttcttctccgttaacaaaatgataaagaagctcttccttagaggatccaggggcacatctcaattctggcaggatcccttgttttcttagggttctggagaaatttacacaagacaaaattttgcccccagggtaatgagaactccccataatctgaggtaggtgtgtacttttaggcctcacttcaatatttggactaggccgggtaactcctgattctgttgtgttagtagtcattcaaaaaatgtttaagtgctcagcaggttctgcacctgactcaaagccagactgaatattgaagaattgtaggtttcaggctaatggggcctgaacactctgtggtatttcttctgtaccttattccaatatcatcacaggtaccacctcgggaataagaagtaacaactgcgaaaccaggggtatcaccataaaaggctgcagttacagttctagaagttgtctcatctgaccagaattgtagtctttgtttggtttggtttaattttaacaacttctgtgtctttggttttacttttgctttttttttttttttttcattaacagactttttaaagagtagttttatgggctgggtgcagtggcttacgcctgtaatcccagcactttg

SEQ ID NO: 97020 - DNA, 1044 bp, Homo sapiens
ggtaattttgtatttttagtagagacagggtttctccatgttggtcaggctggtctcgaactcccaacctcaggtgatctgcccgccttggccttccaaagtgctgggattacaggcgtgagccaccgtgcccggctttgccagctttcttaccaatcaaaagtataagccctataccccttccccagagtcccagatctgttcctaggcttttccttccaggttttatcctagctttgaggcaagggatgccttcagggaaaagatggtgcttagaattttgggatgggaaggcctatgtaatccataaatcaatgtttcgtatggtgaagggaatgaaggtgaggaaaggcacctcagaatatttgtggaagacaaaacatttattattaatgtttattaaaaggaattatggcttttaaaaggcatagaatcaatcacagagcaagttaaacttgaacctttaaatataggtacaatttgcttttccagaacatgaaagtagaagaaagaaacatttcagtcatgggaccacatgtacctgagtaaatcggccaagtgtctttcttctgtggtctcgatttctttttttagtacaaatgttgtttaagcttttattcttccagttcatttgcctaaactgacagtaaattatttttatcacacataggacctaggactaggaggtcaactatttcttaaatgaaaaagtcaataccagcttggctaaagttgactggggagtgggtgcccatgaggctggatgtgattggtagtcatactgagcagggccttaagttccagaataaggaattttgacttggccttacagtgaaggtttctgagaaggttaatgagaagataaatttgggctttgaagaggaaaatcagccaacagtaaaggagatggattaaagagaagagtagaaagaaatgtaattagcatgctaattggctaattaccgtgagaagaaacttagactaggctgttggcagtgaaaagagaaagaaggtagtggatattataaggaagtttttaaactc

SEQ ID NO: 97021 - DNA, 1058 bp, Homo sapiens
cgccaacctacatttccagcatcattatccactacctgctgacacaaattctacgttttgaccaaacgtactcttcccttgagtattgcatttccaagaaatttccctcaactaaaatgcccactcaatttctcttcttgaacagcttattcattcttcatatcagcactgaccacctcactccagagcactctttttctaaattgcaattttaaaaatcacaggaggtctctaatgccattccatattccttgatgcccatccacttgctaacacttatgaaatggtcattgccttcattgtattaaaatttcaagtgcaatttgttatctttgctgtatgcatggattccatttacacactagacccatatattttcttatattctaggtgtcttttttgcttcaaattcctttctagcttttctttaaatccttactttgcccatcttcagtgctgggttggtaaaggagacagaaacttaacaatatccaccaagcaacagaactaccacatcaacaccaagaacttcctggcttcctgggcagatatgcagtgggcacaatttcataacagattaattgctaccaatcatgaagaagttaaaatactctcagaatttagaaggtatacttgatcacattgaagttttgtaattctgtgccaagcccatagattgaatgtcttctattatttagttggccttgtttacttagtggtaatcatttcctgagactgtacagaacattaaattggaatggatacaattctagcctagagtctatagcctagaattagttataagtagctcaagattacatagtgtatgcaattatatgtcacccatgaaaacaaacactacccagttttcaggatctcaaaataaatcacctcaaaggtcctgctttgatctgttttgtgattgggttgcatgggaaagcaaattataggactatgtgaccatgaaaatgcctcttttccctttaactagtgataaataaaaagtgaaaagaaaattacttatcagaaaggagtagcatccttcaatcttcattgat

SEQ ID NO: 97022 - DNA, 1059 bp, Homo sapiens
gcaggcagatcacttgaggccaggagttcgagaccagcctgcccaacctggtgaaaccctgtctctaccaaaaatacaaaaattagctgggcgtggtggcgggctcctgtagtcccggctacttgggaggctgaggcaggagaatcacttgaacccaggaggtggaggatgcagtgagccaagatcgtgccactgcactccagcctgggtgacagagcgagactccaccaaaaaaaaaagacagagatactaattctgttcattcatggttcaagcaacacaactctatgatgtctttccttataccccaaagcaaatgtagattctccctcctctgtataccaacagcaagcattgcacacctctgttttcatataagtcgtgctgcccctgctggcagattttttgatgtgattgttgtctttaaagactctttatttttcaccattgtatcaatggcatataatagagtacaatgtgtagagatttaatatctgttcaatgaatgaatgactttgaagcaaaaaggagactatctaaaattaaatacttcttaaaaagatgatttagaatacaatttggttttgtgaaaagtagattaccaccctagaaatagaacttatggcaaataaagtgaatgcttagggaaaagtgttatgtaggaaactcgatgagctgataaagaaaactttaaactttgtggggtgaggaaagaaagaagtaaaaccacatactatgatttatgacaaacattacatatactcagtcattcaggcatgcaagtgctagtatttctgggaggtgaataagacttagaatttacaagggccttatattctaatacaggagacacattatgcaaataaatatccacaatataagtagcatgtggcataatacacacatagataaaataatcatgttgcttggccttcaagtatgagttggatttggatttggatggtggagaaagttaatccatgcaggggaattagaacaagtgtatgggtgaatgtttaatggtatacattgcaaacatcaaatttcattgactggaat

SEQ ID NO: 97023 - DNA, 1049 bp, Homo sapiens
aaagcatcagcaaattccctcaactgtacctcagaaattttctgacctccactccgcctatctaaaccttttccttacttctgctcctactggtggctcaaaatgatccaaaaatctatgatttctaaaagcctgaagccttttcaaacattcatctttaaattcctggatgcttgttcttttttttttttttttttgacagagtctcattctgtcgcccaggcttgagtgcaatggcatgttcttggctcactgcaactgcccgcctccctggctcaggtcattctctgctcagcctcctgagtagctgagattacaggcaagtgccaccacgcctggctcatttttgtatttttactagagttggggttacatcatgttgaccaggctggtattgaactcctgacttcaggtgatccacccactttggcctcccaaagtgctgggattgcaggcatgagccaccgtgcttggccctggatccttgttctaaagtcacctgttcccccagcgtattactttgtggtggcttcctctgattcacgtcatattaacttagatctactaagatttatgccacatctggatactagaaaacaaacaagcaaaagattttaaacactataaacaaacttggtttagctgagtaaattacacacatgcatgcatacaaatacatatctgtgtatatgcttttaaagtatgtatcagtatatacgtatatgtgcatgtatctacatatatatttatgtgtatatctatatttatgtttttaaagtcctgagaatagtagggtggttgaggatataaaacctgaaatattggtgaggacacattaagggtgtgatttcaatctctgtaagtattgtttcacctttttgcttctgtataatatacctgacctctgtagactttaaaacattggtgagcaaattccctttgaatcaccctgggtggagcagcgtacattactctgttcacaggagatgtctttagttattctccaaactcggtctgttttgctcaccaaaatgaaaaattataaagaa

SEQ ID NO: 97024 - DNA, 1076 bp, Homo sapiens
agcagtcttaccaaatgggtggcagggctggaatggaagcccagatctaccttcttcctgcctctttcttgaatgtgcatgtgctagttttctccttagagaaggaaatcaaaaagagaaatcaagcttaccagtgacttcccaactccacctccattatcactcccacctaatacccatgatctctttctctctcataaatgcctgaagactctagttcccagatgcttggcatctcagtatggacacatgactaagttctgatagtaaaaagttaatggaaatagcttgccatttctaggatgtctttttaaaagagagggtgtgggcccttcttctccttttcctccctcctgctgcctggaatgcataggtgtggctggagctttagcagccatcgtggacaatgaggcaacagtgagaatgcaagcatcaaggtagaaagaacctggcttctgacactgagcagatgccataccagccctggattgcctgtccagacgtgtgtgtgagtgtgtgtgtgtgtgtgtgtgtgtgtgtgtgtatgtgtgtgtctatgtatgaaataaaattttatcttaagtcttaaattagattactcttatttgggttttctgtctcatgcagacaaatctgtccaattaaatttcaagaagtaaagcaaaccaaaaagaacttgagttgtctttttttattatttgtcttttttaactaatatttaatctcttctgttcaggaatatatttaacctggttcaagttctacctctcattttgtattaatctacaatccatatatactcttactggcatatgattttatattaatgtttattgatgcctgaatatgtgttgactatccaaataggttgtaatctccttgaaaccaaagtccaatcactttttagaatcacttatagtttctaactcattactgacaacacataaacctctcaaaaaatatttagagaattgtattaaatgaattatcaatgtttgttagctatttataacagttaaaaatagcaatgcacgtatgtatgttggcggggggctcacaaacttaggcaggtgtta

SEQ ID NO: 97025 - DNA, 1119 bp, Homo sapiens
tctgagtctagatgatttgaaaactttacagaaacttgctgccttctctcaacctaatgttagcatcaaatattaccattaaagtcatgtaattttatttttatttttccttttaatgtttgtattgggttattccagagcaaaagtagttttgaggaaaaaaaatacttcggaaatattcttttatactcttactctttgatcagataaatagctataccagacctaccttgcaataggatattctccataatattttttaaggtttttagttttcaggtctcaatttccaattctagttttgattatctatagtagtatttcataccattttctactttgttttaaatgtacttagcttatcactaactctacgttaaccgtaacagttggttctaatctcaaaagtcaacatccttctcatctctttgcattgctatccactgagggagttggagaaagcagatggaatatgcaagctaatctcagataatgaggtaattttgtatagtgcatgcatttcaaaaaataattaagtacacttattatcctttagatgcaagtctgagtacttgtgagggaagtggtggagtttaaaggatacactctagactttgtgacctaaaatgcaataagtctccagaaacttacttttactttaagaacctgtggcattttgactaagagcaaaaaacaaactccacatgttctcttccagcagtaaagtatctcaaaccccaagcccaaatccattctatgataacaactgggaaggtagaaattgcatgatgatctctaaaattttgataaaccagagctacttttcactttactgtagccttgatgtctttggatgtagagaggaaacatggtagcattgaatttcctgtaccatataaaaatagtggcctctagtggttgtctgacttctcactagagcctagcaaatggaaagtggtgcatttttcagtgggctttggtgatgcctttttaaagacattctgttgaaagagggatgaaagagaggaagttgcatctgaagaatgagaatgaagtgacatacacttaaaagatgttttatttagtttttgaatggtagaggcttgagcacgtgcatta

SEQ ID NO: 97026 - DNA, 1064 bp, Homo sapiens
tttagctttgtgcttcttaccagttaagtcaaaaaataaatacagaaaacttacatatgttcaaattcatgtcctttagtttttttctttagttctttagaaagattttaatcagtgttcttttgttgctattgttttaccaccccccaatttaaacagtgttctgaaaacaaggggttatatcatatagtgagcttggaaaatgtggctgctaaaatcttctttttggagcctctcagtacacattagcaaatctacttcttgaggacatcatgcagttaaaaagaaatctgttcaattttttaatcttggttcaattgtcaaacaaatttagtttcgcaagtatagacttttcgattctcatacataataacatcctccacaataattttcttttaaaactattttggaaactgttaagttacataattctcattctggtgaaagggagattctatcttcaagaaacacatttcttccaggtatcacattctaaaagaaattcaccatggagtgaaagagggcttttgtaagggacattcaacaacaccacagatgggaatttcaacagaaaatttctttgaataatcattttgggaatctgcccttaatgaaagtctctgcattcacattaaagcataattctgtataggtgattctgtagtaggggaatcccatgtggctcaaacgtgcacctctccaatgatttaggcacaggctagaattcctagttcacctagaaaaagcattttccttaattctctttattaactgttactgtggcagccacatgtttgataggcctggagagagcaaattgaggattatactccttgagtattctgtgtttctaatcgaagggcagcatgtagacagaggcaggttcagcatttacttggaaaaaagagaaaccttgcttggatcttacccatagcacctcacacagaggggtgctgcagagttccctccagaaacacatgggttctgatcagtcacccagtttatggttcaacttataaaccagagttccaagctatggaacaagaattttaacctggactttc

SEQ ID NO: 97027 - DNA, 1010 bp, Homo sapiens
aaattaacctagctactctatattaatttactgaaaaaaaaagttaagagaagttaagaaagatgtctcttagtgaatatgcacatgagaaaactctgcccctgtagtcctattagacacttaacttgtcaagttgtccttgaaattgagtatattaaaatcttgcataaataaagcaatcaaaaattttttttaccctgcacaattctattcagagatttattataatctaccataaaccttgaacaacaggaatgttagtgaatggattttattactttttcattttatcagtgctctgcattatattggcatgtgagcaattactcttgtatggttgtaaagcatagtattgagttctggaaagggccattcagatatcacctagcctagctctctagcaagagggacatacccaaatcatttcaacagaataagaagaaacatttcctgattacagatgtgaaaacttgttagtgaaaagttctaggactatcgaaggacaaaccgaaatcccatggcagtaggttgtgctaaggctgtagattaccccagacccacactgtcttcattagtgttactactctaatgagaaactgcacttcaaactgctgctagaatcatgactaaatgagttctaggccaggattttcctgattgcatcaatatattcaaaatgaattttcttcgaggttttctcgggggtattggagggtaggggagctcacctttgaaaatgtagcccagatatcttcagcttctgtaataagtgtattttcatcagagaccaaagcaaccaaaatgttctaataagggttctaataagatgttctaataagggttgtcttaaaatcataacagatgtcctgatacaggtaaagaaacaaaaatagcctgtgtgggaatgtagttaagctcttgagctttaacataatatttttgtcatttaaacatgttccagggaaatcccagaagctggaagtcagtggtgctctggaacttaacaggta

SEQ ID NO: 97028 - DNA, 1055 bp, Homo sapiens
cattcgctttggaaaacttttttgccaagtctaccaaaacttaacatctattttttacgatctaataattctacttctaaatttatacccaatataaatgaatatatgtgctccaaaaggcagatgtaagaactcattaacacattcctattaaaacattgggaacaactcaaatatccatcaataatagagtagataattttcggaataatacctagaaaatttaggaataaatactatggaagaatatacaaaaataaaaataacatagatgcttgtcttaaacatactattatgcaagttaagcaggcacaaaagaacgtatatgtatccatttttatggaactcaaacaaaactgatctatgatgagaggtcaaaataggcatttgccctttggagggcttaatacctagggcagcacaagtcaagtgtctaggtaaagcgccattttttggagtggctggtaggtgtattcacttagtaaacactaatgaagctgtgcactttgatttatgcattttcttatattttcataatactttgattttgtaaaagtttgcttaaaagttagattcaatttataagagactctttgttttgaaaaaaattcttcaatccttccttaaatccaggaagcagcaatgtgcaaagtccaggaggcctccttgggggcattttgcccaataatgaaaaaagtcatattttctttttttttctttgagatggagtcttgctcagtcgcccaggctggagtgcagtggcacgatctcggctcactgcaacctccgcctccagggttcaagtgattctcctgcctcagcctcccgagtagccgggactacaggtgcccgtcaccatgcctggttaattttttgtatttttagtagagacagggtttcaccatgttagccaggatggtctcgatctcctgaccttgtgatccgcctgccttgccctcccaaagtgccgggattacaggtgtgagctaccacgccaggccaaaagtcatattttcacagatacctttcaactgcacatttaaagttcattttaa

SEQ ID NO: 97029 - DNA, 1007 bp, Homo sapiens
attcatttatttggagtacttttaaatattatgtaatgggctaaaaaattttcttgaccaagcagtatttaatggagcaatacaaacaggtatgtgtcctataagatgattatttgattagtaaaataaaaattttgaaaaggccgactgtcagaagaagaaattggatataaaacactaaaccaaatcaacccacaccctgatatttattttcacattcagaagggaaaatccgctaatatccaattatttattttccatgtcaaaggagagctttagattcgtgttacaattaaccgtatggcatgattcgttgcaaactatactttctctgcaatttacttgtaattaattttcttctttttaatctttggaaactggcttttgtttctgtccccccctttaatttatgtaatgattgtccattgactgcagaattatatttgggtgtggcacattaaaatgaggctggagtaatgtgtgtagagatatttgtaatgtctgctttctacttgaagctaggtcatataaattagaaaccatcctagatgacagaaaaatcaatgactaggccatatatatatatatatatatatatatatatatatatatatatatgacctaagccacagcaatatttgctgaaaactccaaaacaatttcactttgaagggaacaattttcagctcaactgaaagtacagcaaaagggttaggaaaaagaaaaagagaaggtgatttgaaaagaaacatgaagttggtcatgagcagaataaaaactatttaagtaaataccatatttattttttggtgttaaagtgacagtggaccttagccatatcaagattttttaaattttaaattaaataatacgtttataaataataaaatcatactgaaatctcgaattctaatccaaacccatatagatcttctttgccttcctccattaaatatgtgtatcttctttatctcacagtaagaagctttgcactcaacaatatcaat

SEQ ID NO: 97030 - DNA, 1009 bp, Homo sapiens
gtcctcctttgctcggttcatcaccagcagccatccaaggtcccaccatgcattcttcagtcttatgagttatttttctgagctgttgaagttacctattcacagtagatctgtggagttggtaggcaaagtcttggatatggctccagttagacaagaaacaggagatgccaacctggctacctgaatggaccatcctgaagggcagtacagtggtggttaaagtgtggcctctggagtcaggttggctggttgacatccaggcttcagcgcttattacaccttgggcatatcactttttgtgcctctgttttctcttccagaaaatggaaataataagagcacttaatggattgtgtgaagattaaatgagctaatactcataacacacttagactgcaaggcatttagaatatatttgataataatactatctactattagtctctcatcgggtaggactaaagacaaaactaactccttattaccagcttctgctgacctctgagacttcaccctgtgaaatctcttccaggctttctgctccccacttctcccagcctaggaatgagtgggaagggggagctaaaaaataactctgaaagtctgcgtcagaatgttctctcctttgccaaactcaactgctttttgttttctctctctctctttcttttttttgagacagggcctcactgtgccactcaggctggagtacagttgctcaatcatagctcactgcagccttctgggctcaaaggatcgtcttgcctcagcctcccaagtagctgggatagcaagtgtgcaccaccattcccagctaatttttaaaatttttttgtagagacaggatcttgctttgttgcccaggctggccttgaactcctggcttcaagaactcctcctacctcagcctcccgaaatgctgaaaatagagacataagccacaacacccagcctctttcttttttttttttttccacttaactttagactctaattcttgactctc

SEQ ID NO: 97031 - DNA, 1048 bp, Homo sapiens
ttctgatcaccttgttgtgagtcataaacgataaaccaaagcactgtacttgttaatgtgcagaataaaaaattgaaagatagaaaatgcattatttttaatgatagaaatgcataatttctaaagatagaaaaggcagaaaataattaggtcttgaaataacagaaaatagcaccaactcttttgagagatcaaggtgataattattagattctgtagctttggaaaaagaaattgctgtttattagattaaatcccttagttctacccatttacttccaatgatccaagcacttagggatatacttgaataagattagtgtttgcatactaccttgcccatagtaaacaaatattttataaatatatatttataaaatcaacactaaaatccttatattgagaacccaaaagggtcttaaacaaatacttttcaagatagtattaatataccaaattatccaattagtaatcataacagttaaaaaattatctacttcagaattatttagttagatatttagaatatatttggaatacagttagatttatacagttagctatctagcaaagccttttggggtgaaatattttcacagacctctgactaatcagaaaatttgtccccttccttacattgctgaacaaagatataaagtaatcactaattattgtaacattagctatgcatgattaatcatatagttagatcatttggaagttatatatttactggttctcagttaagctttgctattctatttattcatgcaaattgttattttaattaaatacacaaccatagtaaattgcaacaagtggtctcaggatctacatgaactagtagttaccagaatttagtgtatattaaatacaactaatattggtattaaaagaggaaatttatatttgtatttagggcctttgcaactgtgaatcaaatatttttacttgttattaagatggtgcctgccaacaatctgttcagaaatacccattagagttataaagcaagaatttattttagcttattaatggaaagttaatg

SEQ ID NO: 97032 - DNA, 1037 bp, Homo sapiens
actcctgacctcaggtgacccactcacctttgcctcccaaattgctgggattacaggcttaagccaccgtgcctgaccccactgtcaatttattttcatatatttagtttgaacttcatctcattagcctagtttgctgagattggcctatagtcataagtctttttgctctgaatataaagcttaacagtattgtttactgtttcctataaattacactctagtgaaatattgagtgacagtttttacatttgatacatctaagtgatgaagattcaaccagttacctagagataacatttcaaaatggaatatttggcaccaacatcaatagagacattctccttgcatttatgttaaatttgtcttcagtcaattcaaccatgcctggttgtgcaacactctctttgattcttggtttactccagaggctgaaatgtaagtgaatattgtaatgcccatcaatattatctacaaggcttattccaaagcttaaatccagtccacagtggagggactcagagtcctacaggggaaacctcacatgcctgatgagccagccccacatcaaaacaagtaaataatctaaacaccccaagggcagcgctagtatttcccagacaacttaacatctacaaactcggaaaccaaacgtatttgttcacctttaagctattattaaaggactggttacttattcagaagaacttgaattcttatgcctctatagtagttttgtcaaactttttgatctctgaccctttactctcttagaaattattgaagacccaaaagagctttttactatatgggttatatttatcaacatttaccatgttataatttaaagctgataatgttaacatcttttattgaattttaaagaagcaatacattcattatatattagaaataaatcatatctttttaagaaaaaagagaattatactttacaaatcagcgagaagatgacagtggctggcccaaaggaaaacagctggtttctcatatctgcttttgcaatcaatgtgccatga

SEQ ID NO: 97033 - DNA, 1058 bp, Homo sapiens
cgaaaaccctcttccacactctgacctcatctagttgaaacattccacagttgaccccatgaaccccaaactccagcatcatagtagtgttcagggagatgaagaccttcctgacagaaccatgtgttagttcaggatctctaagaaggaagggtaaccctaagtcaaaccaattaaagtgacagttgacttatttctctgtatagaagaaccaattcagaagacttctgtgcagatattatgccactgctgacctatattttaaaatatttatgggattaaaattttctctggtgttggggatcaaatatgctttaacagatcttgggcctttaagacagagatatgttggtttctccataaaatcagttcgataagtctgagttgtctcctttacaggcaggaagaaatggcttcccttggagctatccatggaacttatctaagggactcatgtttttagcctgcttctccagcttaggtctgccctgcttccaagtatttctagcacaccaagcttctttgtgagtcttgctatgactagtttttgaaatggaacctatgtttttcaagcccagaggccttacactgcaggttaatatttccagtcctaccctctacctattcatcgccttctttgtgctagccccatctttgccaggaatccgcccacctgccccttgtccaggcatattgccctgcccaagacagagactgacttaaagagtaaccaagactaaccttaaaagcaaccagtaagcatgatttaaggatgattggaaaacatttcctgcccccaaagtattcctccattttagacttggaatgtgacaatcctcctatttgggaatgtagcaacaaagaacaatgtgactggatttgcacagggcaccagattaaatattttatatactttgtctagttgacattcacaacatctctatgagataaaaatcattatccccagtttacagttgagggaatcaaggcccagagaaattaataacatgtctaatttaacacaactggtatgtagcagaggcagtttcacacttcag

SEQ ID NO: 97034 - DNA, 1051 bp, Homo sapiens
agcaggaaactgaataaaattcaataacttgaataaatgtctagaaagatgctctgaccatagattttggtcagaaatattttcttatgtctctgccaacatgaaaacaagacacaaaatcagtggcaggtacttttaaagatatttataattgtcatttattgagtacttacaatgtgccatactccatacgaatttccttccaaatactatctcagttaattcaaagaataaacctatgaagaaagtactagtatcctcctcagtttgtagatgaggaaactgagttgtaagagatcatgtaagcccctcaagctagtaagtggtgcagtagggacttgaacccaggaaacatggctccagcgagcatactcctaaccactaaaccataaggatttagagttctggttctgtaaccagccttaaggtaaaatttcagctgcacactgactagctgaaatttgggcaaatatttaatctctctggagatcaatttttcatctgtgaaatgattaaataagtgaacaaaaattggcacctagctagtcatcagtaaatgttagcttgtagtctactgatgctacacattcttcatttatttctttattcctcaactaggtattgagcccttccttgctgtgtgtgccagatgatatttctctgcacacttagttttaaaaggtttcatattttgtgtacccccaggatcatcagcgcccaaagctaaccaggcacttttccttctttcctgtgtttgaacaccatatggaatcaggattagtcactttgagccttgtgtgagttgctgttgtttcaaatgagtttgcaactgcagcatcttttgttttgttacagtactaccagtctatcttttcccaatatctttttcttcaaaatgctggaattcatttgattattttctagggctatttgagcacaccctctgtgtgaatgaaggaaaccaggttttactgcaggcatctcccatttacatggcataatttaaaattaaaggcttccattgcaaggcagcctctgtttcctgttccac

SEQ ID NO: 97035 - DNA, 1047 bp, Homo sapiens
tatttacaggtctataaaaaatattggttgctataaaaattcagtaacataagtccagggaatgttctgcagaagaaactccctatgatactttcagagtgaatcagtgaggaagtaaatgtatattggtctagtcactattcacccaagccaggatgtacaggggaaaaaaaaaagtagaagtagtctttgatctcatttccccccagtttacaagtttgtttgtttgtggctgccactgtaacaccaagttaaatcaatttccaggccacttttgctgtaaggcaatagcaacttttcagtttctgtggacgtggtctgagtgtgtgggaacacagagattactcagagagccaaaaatgaatgacaagaatgagacccccgtgcaccatgtgagtccttggccatgaaatcaatgccatgatccgtttgctcctgaggacaccaaaagatgtgcaggtagtcccaacagccttggcagtcacttttttaaagttctcaaatatggatttcagaggacagagaataaattatgaaagtttctcttgtaaaatttccttctaacaatctgattccccaagtatcgttcctggactgcttttctattaaattaagttgataatgtaaaggggagactgagagacatgttccaagtatgttgacttctgttcatcatattttctctgcatcttttatcttccaatttttctcttttatatctttttccatccatctttctttgcttgatttccaactattttcaaataccttattcataagtcccatttttctgccccctcctcattttaaatatgttcagtcttttatttctcttccctttctgcttatgctgccatcattttctcactctctgttcaagtaactggatttgcacatggttttatattttaaacaatcactccaacaatatttcagctgtctctgggggaaaaggaatacaatcgtaaatataaatcagctggagccaagtgaaagcaggcttaagcgaagcattaaatccccccttccaatttccaaaaccacaca

SEQ ID NO: 97036 - DNA, 1049 bp, Homo sapiens
tcctggtccttaagccatttggtgatcctcccactttccatgcagagagaattcagacatctaaaaagcccttgtgaagcttttttcatttctgggagctcttgtgtctccactgagaaggcatcctggggagattctgtccccacagccacctcattcctcctcctccctgcccgtgaacatgtggaaaaattcatggactcaccaaatggtttgtcttgattccagacaacccacttttctcattgttttaattgcacaaaatttgcttgccaatgatttctcatgttactgttctacattgcagacctttcattcacactgcttcaccacagcccagtgtgggggttctgagagaagctaaactcttctggttgctaatctgagggaaacccaccagattcattcacttagcctctccactcaatttgcactgtgataaactgggctttgctagttttatgcctgctttattcaatagggataatggaaataaaatgcatacctcagaacaaagacaatgaactgttattatggctgatgaaggtctgatttgtttcaaatgccagttgcttagaggcaaggattttgtaaaaatcaaataataaatggttaccgtattggcaatgtaaatattcccttattgatcttctatgaaaatcagatttcagacagaaaaatgcctgatatgcttaagaatagattccagggcaagtatctgtgatgaattgttatcaagttcttaacttgcttacattacattttcagaagcaccctagtacttcgacttacaaattttcctatgttacttgatttctagattctacaggttaataaaattgaaaagtgaaagttttcatgactcagaatgaggctataatgcagcagttctcttaagtctgcagttagactcacctggggagtttatttaaaagaccatttcccactaccgtatcctctagaggttttgattcagtagttagaggagggcctagcaatctgcctttccacgaaataccccatgtatttctatgctggtcacccttgat

SEQ ID NO: 97037 - DNA, 1024 bp, Homo sapiens
actatcagttttctacttgatcttaacttgcctagacttcagtttccttgtctctaaagtagggctttgtactgggaataaataagaaaggaaagataccaaggaaatgggttgaaccgctacatagtctgatgctatgtggagaactagactaggggggcaataattcctaacttgcatgatgtttgcacataaatcacttagcacagtgcctggagcacagagagatcttactgaaggatagcgatgtattttccaatgcaacctaaaagttaaaatgaaagtaaccataaagtgccatggaaggaaaaaaagagaaaatgagggccagagaagcctctactgagagctagttgttaggagcaagccggtaattggcaggattgatgatgaaactaatgggcagtgttgatttttttccactgtgctgtcctgagctgttgcagcttctctccccatcctgatggggagccagaggcaactctgcggggaaaaactgaaacatgccactgtgctagggggcaactgcagccatgtctgtggtaagctactgtgttatcttgcaaagtgtgtatcttgttataataggagagctcagaatttctatagatttgcatggattttgtgttcatctaggctttttggggtgtcgttatagctgagccaccattttgagggtttgtttacttaagtttaactcctcctagggaaagcatagaatgaaaaatacatgactatggtcttggatttatttagctcaagtttttctatcattgagggagtctcaacccaaggtactagtttgaacatctaattaacagtcaagaaggtcattagagaagaacttgagagttcagttaaggatactgccatacttagtttactccatgtaaaaaaaattaaacacaaaactattagccagaaagattcattttttgctatgcaactgttttagaccacataggaaaactatacttgtttaagctttggactaaagtaaaaggtcccctgaaattttcataat

SEQ ID NO: 97038 - DNA, 1048 bp, Homo sapiens
taatttgactgcctttatatgaaagattatttcaagatacttcacagttcaggaaagtaagatgaaaggaaatcaagataacatacctggagtagagctccatttagaccagggcaatccagcctgtcagactccatcatgccacacttgaccagatgcccagaaggacctctgtggtgaatccccagataggaatcctcagtgcttggcagtcaggtcaaatcattattctattggctaatcagacagactgccaggattgctgatttcagcctcttaataactgccgctatggtgctggagacactacctaggatagaagtgatgtgtctttgtcattcctggacaagctctgagataaataaccaggaagacttcaaaccaaacatggtactgtcttatgctgccaccctaaagaccccagatcacatactattgtcatcctaacatcagaagggttgacttagtgccgttctgtgtacttgacccataaattgcaggtttcaattgcctgtattgttcctctgaaatattagtggcctgggaataagttgtagttgcagaatgatgagccaggttgggaagttatgactttcagtggcactatgagtatgatctgaggactccagacagcagatcattgttagtgcctttgttctctgacaccaaaactgaggcatgtgaagtttctaggacaaggctttatagaaccaagaacaatgtcatctgtccctatattcatatcactggattctctgagaatgctcacagagtaaatgtgggaagaataggaagcctattagacgaaatatctaataacagtggagagatgcttacatgattggaatatggcagtcattgaaaatgaatggcacaagagtacatagtcaaatgcaaaagtgttgatgatgcttgctaagtgggggaaaagcacatgaaaatctgcagactacatgatcccatattaataaatgaaaatatgtaagaggaggcaaggatcatcatggtggacgggaggcaggactggattgcagctccacacagagca

SEQ ID NO: 97039 - DNA, 1058 bp, Homo sapiens
tagagttgcacaggcttcagagctgatgactccaagtctagaacttgaatctgggtcttccaatgccataaggctgactgcctacaaaataatttccactgacagcagctacataaaattatgtttggctattatggattccagtaaatcaatattatataaaggaacaattgaaaacaaaagaaaaatcgccaagtctgttccatgtattatcagtcgctgcatagtaccaatatcattctttgaaatatgatctaaaataatactacctctctgtggtgagctgagaaatacctccctagactttgtaaattttagatagtgaatacactaacagctttctggtttctaagaatatccattaatatcagcctcccccaaaataatgggccgaatgaatactctttttgttatcacatagttcatcatttttaaattctcccagctgctgtttatattagtaggatgtctttcctctcatcctctttcacatttctaataaaaaatactggcatttcctttcccagtggagaagccccacccgaagcccaatcacattgccgggcttctaggctctaatgattaaataagtgattgctctgcctagctttaaaaatgtgtcttatataaggcagtcaagacacaatatccatcactgtaaaggaagccaagcatttatttaaaatgatgaaatatcctcattttcatttttccctgagaggattgtagtgatgttaaaaaattctctgaattctagaactagggcaacacattgatttgaagaaagctataatcttcccttctaatttgaagtatactttctcctcagtgaaataaagtgtggctttcagaatagcaagagccctaggcccacacacacaaagacatcctcatcccaaccactcctctttcaggtcggccccattcttcccaaggcagggatttataaagaccttttcaataaatgtcaaggtatattaaactaaaaaagagaaaggttcaaatcatttcttccagatttgggagggaaatgatttcaactgccaagtcatgatgaa

SEQ ID NO: 97040 - DNA, 1044 bp, Homo sapiens
tcatgtgtattttaatccttgagggcaattcttatacccttgttatgtttatttcagtatgtagaacgatgacataaatctaagtgacaactgtactttattgattttgcagagttaagaggaagatttatgagtcatggaaccctccatcagatttggaagaaagtagaatgagcgcagaggtgacagacagccactgaggcccatggacaatctccacctcacgcttctctatcaaacttgaagatttattagtaatatgctgcctttggaagatgaaaacaaactagtgccaaggaggcgtattcttcaatatttggaatagacgtgttctcaagacaatggcttcaaaggtctcctgtttgtatgttttgacagttgtgtgctgggccagcgctctctggtacttgagtataactcgccctacttcttcttacactggctccaaaccattcagccacctaacagttgccaggaaaaacttcacctttggcaacataagaactcgacctatcaacccacattcttttgaatttcttatcaacgagcccaataaatgtgagaaaaacattccttttcttgttatcctcatcagcaccactcacaaggaatttgatgcccgtcaggcaatcagagagacgtggggggatgagaacaactttaaggggatcaagatagccaccctgttcctcctgggcaagaatgctgatcctgttctcaatcagatggtggagcaagagagccaaatcttccatgatatcatcgtggaggactttattgactcctaccataaccttaccctcaaaacattaatggggatgagatgggtggccactttttgttcaaaagccaagtatgtcatgaaaacagacagcgacatttttgtaaacatggacaatcttatttataaattactgaaaccctccaccaagccacgaagaaggtattttactggctatgtcattaatggaggaccgattcgggatgtccgcagtaagtggtatatgcccagggatttgtacccagacagtaactacccacctt

SEQ ID NO: 97041 - DNA, 1080 bp, Homo sapiens
aagcatgaacagcactggcatctcagtaggccatgtggttgtgcttttcctcaattctccatttcattttgattcactgagttccttttttcccacagagtgtggaagagaaaaagaagacttaagtatataaaaaactacctgaatgtactcaatctgattctgatcacatgttgattttgaacttagtattacctaacacatctacatcctgctgctgaaatagttcaataccaaattgttcatttgggtcaaggttggaccacagtattatctcttccactttttgaagaaaggcactatcctacttctccgattatggacccattagtttactgaagattctttttaaacaataagcctgtttcttctgtgataaatttcctgtgtgatgtaagcttttgtttctcaagccagtactttacatgagggataaatgcacagtagaaatgattattctattactgacctttcatcattctgtaccaaattcaatcaacaatagcacagggtagtaacttttaataacattgcttgccctttgatgaattatgagttaaagtatatgggttcgataaacctcttcagctaatgatgcttgttttgtaggctacaattcatgtagggggaagttttgtgtacattgcttcagtataagatccttgttcacctgaagatgctccattaagacatccattggtttgttaaaaaatgcacagttgttgataacctgattgtgtccattttatttccattgctcttagagcttcaactagcctgggtagatttggtgggcgaggtgcaagatggtagataaagggacatcactgttacttgaccatgcattttctctgcagcaaaatagcatcagggcaatcactggggcattttcgagaccatcttttatggcttgtctagtgggttgggagaagcccttttcttggtggtgtttgatgttaattggcagatattttgtgtaggatgttgacagagtcagtcactttatcatattttaaacacatgctcttccaatcctttcactttggatgcattgaacattttaatcatacctggtagtgt

SEQ ID NO: 97042 - DNA, 1050 bp, Homo sapiens
ttattggcaacaaaaggaattttctatccagaagcctatttctcctttcattgttgttatttctgttataatactttaattgtacatctgacaatactgcctcttttatgttgtatttagaaattaatatacttataaaattaagatttattagccaaacttgaattctagttttaaaactgactgtgaattttatttttcatatatttatgcattacacaccttagctataagaaaaaaagggttttgattatatgcttcttgcagttaatctcgttatttaaacaaaaagttttgggtctgtctttggagtatttgtaacttctaaattttgaaatgactgaattaggaatttggatgcttattcttttagtctgtttgcctaaaaaccaatttacaatctgactgtctcttgggagagggaggtgccttgcaaactttcacattaagaatgtgcctgaggctgctttactctggaatagtctcagatctaaaatttcctctatataaggtggcatatgttaagttttgcttcattggaccgtttagaatgctatgtaaaatgttgccattctgttagattgctaactatatacccatctctgatttggctctccttaagtgataggatttgttattctaaaggtgataaacttgaaaatatcagaatctgagttttacttgaaattttgcagaatacccaggtggagtgaaaattggaagggttttgtgcaatgactaaaaggtaaaacgctgttaaggttcaagaatcaatactttcaacccaagtagccctctgcttgactgtatattatggaactagtaaaccttaggattttgaaaattggagtctaatctttcaaggaggtgggctcccaggatggtaccattgctctttcctagctaaccctagatatggcagctctttaatgtacttcaaaaagcaaatatatattactaaggaaaaaaagttatttataattgccttgtcataattgttaaggtgttctagagccatttgcatacaatttaatgtaatttcattccatt

SEQ ID NO: 97043 - DNA, 1097 bp, Homo sapiens
tctgaaaaagtgctccctattcttggctaccaggtactcccaggtctttcatttgttaattcatcagtgcctattagatgccagctcagtgttgggtagtgactgagaatctagaggtgacagatgggtctactgtgaaggagcctcagtctagctcccttgtaagtagagtgaccacatcaatttatcatccaaactaggccatttctgagagtgtagaataaaaaggcacctcttgcagagtgatataaacatacctcctgcagctgtgcctgttacatcaccttcttagggaataacctatcaaaagtaagtgctgcctcttgaaggagattctgatgcttcgtcagccaacttgtgtctcctgtttttggaggggtcagtgctataactgtagcctccaagatgggtggaaaatattgacagacattttatgtaggttacatgcctttctggagaaaaaaaattcagcacttaattttttttattagaatgcactttttaaaagctcattggtgtcagaggggtttaatgcaaactaaaaggatgactaatcaagaaaataaataaatagttgtagacttataccatacaacaaatattgggacgcctataacaagaatgttcaagccgacttctctgtgtcctgtggcaggactggtcagactttctatacagatttgatgtttactaacctctcatttcacaatgactccacgaactgtatcttgcaggctgcctagtgggtctcagctctactagccagtatgtcaagtttctggcaaggacgtcggcactgaatatttctcccaccaccaccctaactagaaacagttagctgcccatgccaccctttgtgttatctgcaagatctctctaggttgtctttcaaggagaggtgtgacttaccttggatcagagaagaaggatgatggcagtggctgtgggaggggtagaggaaggagaaggttattgggatgatctttcagatttaatcatgtgttaaaatgagacctttgcacagtgaaataagatttgaagctggaggtacaaagtaaaagtccgccaaacccatcccagcttgttttcttgcagca

SEQ ID NO: 97044 - DNA, 1062 bp, Homo sapiens
ccacactttctgatcagtccctacttaagacaaaaatatatttctagtggaagtaaagtaggcttactttggtgcaggaaacctagtctttgtgatgacttacatttttctaacattaccaagtgtgtaggatttaaattaaatggctcttttgttgaacagtctacttgttaatagcctgacaggcaagtctcccagtcccagatgaaatctctctgctgtttttttacttcattggttaaaataaaagagaagtcactgcctcatgatttcttatataacaggtaataccgctccttgtttgctcaatcaaaaaaatttgaaagttaaggaagaaaactaaatccatatattttttattcattgtgggcttataatcactattttggctccatatctaattataatcttaaatttgatcctgcatcttatattaggttatcatttttttttttaaaaaaagaggactttcttgccaatcctaagaaagcctagttcttaatcttgcactacttaagtttagcatccaaaaggttgtgtaaaaatacatgtaccccagattcattttaaaacgagagatctggactggtcacctgccgatagatttagaaacttgtccttgtcatcaggtttatgctgtccccattgtatcatcaacgtttgtgcccaattttgttcctttgttgttgttttttttttttttttgatgtgtttccaaattgatacatcatagttgcacatatttgggggatacatgtgatattttccaattttgttcttgggctaatgtttttcagaatcacccactatactgcataacccacggtaaccattccataaaagaaaattttcttgccagattctgtgtctgctgagctatagaaccagatagcaggaattcatagtcaggaaaccatctgaacagctttaggtgcaaacgcatgggcctggccagtgtacccttctgacacaagtaaagagggagctgtccattaaacttgagaaatggatttaatgccttaatctttatccttgtagaatttggtcagcgatgagaggttt

SEQ ID NO: 97045 - DNA, 1029 bp, Homo sapiens
cctcccaaagtgctgggattacaggtgtgagccaacgcgcccagcccatagtcactttattttatgcttataataatctttggagatgccttcagctcatttcatcatctatacctttttcccagtctcactaatctcctttgcttttctgccttacttgattctctgctgtctttaggagtctgttttaaaactgtgccagttaacttttaaaaattgtgtttatgtgtatgaatggtgtagatgccacatatatggcattggtataaatttttaccaaaatgagtagttacagttttgattaaaactaacattgctgctcaggaggcagtggatcctccagatggccttcagcttttatttctctacaaaatggcaaagtacgcttaggctctcaagtatgggagcaacaaaatctctctgctcagtcatgagcatatggttagatgtgcgaagtgctctgttctttctgctacagtcagggatatttaagtctgttatgagtgatccacaatttactgagcagcagtacacttttacgatgaaagtcttggaaaacagtgaacatatttcatctcatattcatttcagtgattatgctgtgatattcactgatattgactttcagtgaagaaaagcattcattattaaaatagtgtctttattacacaactgtactatgattttgaaatggtgacagggaataaaggaagaaaactccttaagccctttctgggtttagacaggcttgtggttagttgaattatgtcaataaatacagctgagtgattcctgattaaaagttgtctatgtgttaagtttaataccttagggaattaggactataagtactttgggggtgctgtgctgattacttttcttatatatttttaccagaaataaatgttgacctgttagatatgacgtagggtttctgttttcaaaaaggcactgcagcctatttgattgtaactcattgctcctggtttcccaattatcttttctttctttaaaaaaaatctttactga

SEQ ID NO: 97046 - DNA, 1037 bp, Homo sapiens
ttataacagttcttctgagcaacttgcaatttatcaatttccctttacaaagccttcagatagaagattagtgtgatcatgttcattcgtaacctttcaattaagtaattccagctgtattcacttgccgcagcctctttagtcccatccttatgagattgcgaactcctgtcacttatcattgagaaagtacggtattttattcaaccacatttttctaagacaatgtatctgttgctatcaaatgatcagtgtcatgttaaaggagtttcttaatagcatacatttaaattgctcatcttaatagtccaacaagctcataggctgtttgtacaaaatacaaggttatatcagatgctacccattcaacctttgctgtaattcactccatagctactaatgataaaaaaggattgatgatggtaggtgggattaaccttggcaggaaagaaaagcagtgtcatagggaacagttataacttctggaggtgcatttgaagattaattcagatagtagccagagggcacaagttttttagttcgccaaaaatagaaaaaataattttgcataacttctgttgaataaatagcaagatgcaaatggcacgtggcaaaatgtatttcatgttgcttctgattttctcctgatagagtctgaattgttgaattaaaactcatgggcgattttagtaaatgaaaaatatatattttacattgtactgggttgttgatttttatgttatggttactaatacatattcatttcacatttggacagatacagcagatggtgtatctcaggagctcttctctgctggcttggtggatggtcacgatgtagttataggtaaattgttttttagtatgcactgtcattttgttggtatataaaatggaaatgtgtttggaagcaaaagtgttcattaaggaataattcactctgaatatttgaagaattcttcttgaattcttatcttttatgtagaagtatatttaagaatcatatttggacgggcgccatgactcatgcctataat

SEQ ID NO: 97047 - DNA, 1051 bp, Homo sapiens
caccaaacaaagccattactttaaatttatttataagggcaacaattattagctggattatcagaaaacttctcagattctcatgggcttgtttcactccctgacaattatcaaggtaagtcaatcccagtctctttgtttcaaaccccaagccagagtgtcagtctccacctccacatggtcagggcctgtttactcaagcaatgctgggccgcttgaggacatgcaggggcctgcctcccccaaatcttgttatgtatgttgggttcattgttagcagctgctgtaggactcagtggaggatttgatacctacactcttgtttaggataggtgaagggatgagacagaaaagatctcagggcagggactaagattggacttgtaaaacacaacacctaaagattatacatattgctgttgatgttttttcactaatactgagtgcttgcagaaggcactgtccatgccttctcctcatagttatgccatgaagtagttcgtgtcactaccttattttatagatgaagagagaaagacttggaaagttaagtaaattgccccaaggtctcatagctcgtcagtgttacaatccgtatttaaactccagaatgttatctccagaaaccaaggtaggacaggctgagtcggcctaagcaaccaagtactttgtgctctcctttgactcctcttgatgaaaggataggaaaggagtcagaaaagaggctgttacaaggagttatgctcccctgccttctctgttcaaataaaataagtgtattgtacacttcagaacagcctgaaactcagtgcacaggtggctcaggaacagcgttttagagccataaatgtaaagcttttgtagccatccagagctctgctacatataccaaggccagagtaggccacagcttctatatattgagtcttgtctgagctgaacccaccatcccaaatgttgactgttggctcactgctcaggaggaatagtttcgtagccggaagtctcttcaatggaacagagccctttacctttcttagattttgtccta

SEQ ID NO: 97048 - DNA, 1008 bp, Homo sapiens
ataaagtaggtgaagtaaaatgaagctaaaatgagattttaaaaatatcttgagagtggaaagagaattgggcagggaacccagagtgatataattacaatcactgagaagaaaatttagccttcagcttgttagcaaccaggaaattatagttgtctatttagtcctcctctcttgacaaaagtagacctataggattaaaagattatatagcgaggcaagcttttgcttgataccaaattcaagtggaatttatctcttggttctttctataaagaaccttggataacatggcagagagcttgacctactgttgcaaaaaatgttcttgagttattttttcttagattgacactccttagaagtcaagggcttatcttcattgaattacagcatacaacataaagtaatttcttcagagcctaaaccaagttcaggtctgttttctttccactgatcaactctgagagaagatcttgagcttaaagttaaggaaatgtttttagcagggaaagaatagcagttagtccaagttaggagttctgaccaccatctaaagtacccatttgctgtatgttgactgaagggaattcttaggtttacagatcagatgagtaactagcagcattaccattctcattggaaaattcaaaaatctgatgtcacttagacagacgagcctccacttgcagacatactgtagagaaggaactttggggatagatcatgcatttttttttttaaagagccaataattctttccccaaatatacagtggacagcatacttgtaaaccatacagtataggagaagtgatattagcctgggcaaattacttttcaagtaggtgtgatcaatggcttcctttcccataaaccttgtgtatcctttggaacttttattattttaaataatataataatattttataataataaatagaataatattattaatacctctccaagagttggactttaggagttggaaggattgcatattttttaa

SEQ ID NO: 97049 - DNA, 1081 bp, Homo sapiens
aacatggcacatgtatacctatgtaacaaacctgcacgttgtgcacatgtaccctagaacttaaagtataattaaaaaaaaaaaaaagaaatatcgaagtattagtcacccactagtaattaataatttataacaagtagatagctcatccttgtttcatttgtttatcatcatattctacttggttgatggaagccagtgaagactaaatgttattattaataatattaattaaacagatgtttaatctgtgcctgatttccacttggaactgtgttaggcactgtgggaatttcataaaagtaaagacagctcgctagctggatgcttttcatctctttgggggtcggggaaggggtggtatttgcaaggacagtttccttaggtagtgtttcctagcttatatagcgtcttaggttatataaaacttttcaactgttatcccattattgatcttcttttgaccagtggttttggaatctctttttgtcaaaaataataagtacatgttttatgactttctgtcaattttgcattatatcctaattttctacataaaaagtgaaattgactttatctttaaatttatagtttcatttgggttcatttaactgaggagggcatttgctaaggcttctattaaagtaacactcttttttatagtagcatctcagttaggtgacatgaaaataaacagttcacaaccctggctggaaacctttaaaaatgcagtgtctagactcaacccacagattctgatttggtaatttgggatgatgtccaggcaactctgatttttaaaaagctgctctcaggattctgattcacagctaggatcaaggactggctaggaaaactgcacaaatccctcggaatccagaagtccagactggaatccaggaagctggtgtgctcaaaattcctgaagatttgttttaaatgtccatcagaaatttccaaaataaaaataaggaaaaagaaaatgtttcagaaatcccttgggaaagttgtgtttatttaatcaagggtaatgaagcaggtgggaaaggtttctggctgaagcccagtagggctcacaaaa

SEQ ID NO: 97050 - DNA, 1046 bp, Homo sapiens
gtcttaggtttttagattgccaatacccatggtctagtatgcgtcattaggcttcctgatttctctgcctttgctcagtcagcaggatgttgcttgcatgcgcttccttaggcaatttgatgcctaccacatggccttttgtatatggcaactaataaagtgttaactgaagtaaacatgaaaaatgagcttgatccttaattgcttatatgtgcaatgttcttccaaaatattttgttcttcatgtatatagtaatgcatttcaaaaaacacagcatttttggaaagaggatgagtttgggaacctggaggctgtgtagtctttttggatcttaaccgctagctatccctggattcacagccactcaggttattttcaggttggtgtgtatgccgtataacccaagttgcagcaccagtgaaatggttcacatttgactagtgaagaattgtgtgggcttgttttgattcaggtaagaagagttcctgggtcaagtggtcaccttcataaaaccgaagacggggactgggagtggagtgacgacgagatggatgagaagagcgaagaagggaaagcagctttttctcaggaaaaggtaaatgacatcgttgacgatgagctaatctgtgtaaattttatttttgtgattgtgtgtgtgtatatatattaatggatacataattgttttacagtcacgaagagtaaaagaagaaaatccagaggtgagctgtggctatttatttattattttgccatttcattcctttcttgtggtatcagagtctgatccatttaggggagatgcttcaaaatctcatggagtagaaagaaaaaggaaaggcacgaggactttgcagctcctaattctgtctgagttactttgggctgaataaatcggggcaaattactttgctttctgagcctgtttcctcatctgtcaaatgaggatgatcccagtacttataagaaagtcgccatgagggttggcaaaatcccgtacacaaaaccctccacggaatccttgtcacagactaggtaatccatt

SEQ ID NO: 97051 - DNA, 1605 bp, Homo sapiens
tagtgagaattaaatacaaacacagccaatattctttcacagctttcagatcactttcatttatgcttccatatttgtcccaaacaattgttcttgaagacaggtagagcaggtgttactgtcacactttacagatggaaatgtgagaggtgaaaaggacctgcccaaagtcacatggccaaataagcaggagtgaactccagttcttattctcaatctatgctctttccaccaaatcatacctcagaatgaagaagaagagaacggagaggacaggaaggaaatatagatggagaaggtaggcagagttaagtggtgtacacaggaaaatgggagcgtatttgtcattctcagagtgagtcggccaccatttaaattgtgtgaggaggatgtctgtgctattcacaggcactaggagatgctacaggcactaggagatgctgcaggcatcattgcaggaatctgggaagtttgccagggttctagcaagtgtagagggaaggaggtgacaaaaaggctttggagattatgttggggagagagatggctagtgagagtttggttagcatcaacagttgttagataccgtcagaagctcagcttctcactcatgaagtggtaatggtaataatagctatgtttgggaggactaaattaggtaatacataatataatagtggttgggacaaaataataagtggcacaggttatagcaaaattttttaataatcacatatattgcttttattactatagttattatagtccagattgtttttgtaacatttatgattgctgccacagctgtgggcacccctgctgctgttcccatttctgctgctgctagaacagctgtttccattacaaccactgctaccagtagtgggcactcaggtgcacatgatacaaggacatagcacagacagtgaaactcacctttctgtgaagaacgcacaaacgtcacaagacatgcaaaactcaaagagtaatagagaataagcgctttggtatgtgggcatagcatctgtgctacagctacgggaaaggtcatgaagctggtagatgggggacatgtgaagggggaagagagaaaaacgatatttattgtgcacctttatgcatcctgctagatgcttacgtcacatttatctcaattactgcagccatacaacaatcagtaaagttctgagtataagatatgttaaataggttaggccagaggataagatacattagactattaagaatgatttttaaaaagctataaatattttgaaataccaacagaaaaggaaaaaccatctattaaaagtgagttaagctatccctaaagggttacaggattttaaaattgagaaccacaaatatctcctagttttccatgcttctgtgtacaggcctgaaaattaaggcctaaggaggtcgagccttaaccaaggccaactgcatcatcatgtcctaacagtccaaagccagtatcccagtttgttaccatttagtttcttcttttagtcgataaagagggaaaattaccctgagtttctacagaattgcttttttcccctcctggaatcttataattaacttataaaatatcgaaggtta

SEQ ID NO: 97052 - DNA, 1051 bp, Homo sapiens
cttccagtcttatattctaacctccagccaaactgaaccatctgtgcttcccactgtgtaacccatactttcctttggagctttttgaaatttgaaaaaatgaagaatctgttcaggctgtaaccttcatttctttgaagaaaaaaattacttggccgggtgtggtggctcacacctgtaatcctagtactttgggaggccgaggcaggtgaatcacaaggtcgggagatcgagaccatcccggccaatgtggtgaaaccccatctctactaaaaacacaaaaattagctgggcgtggtggtaggcacctgtagtcccagctactcgggaggctgaggcaggagaatcacttgaaccagggaatcagaggttgcagtgagccgagattgtgccactgcactccagcctagcggcagagcaagaccccgtctcaaaacaacaacaacaacaaacaacaacaaaaaacttattacatattagtgtgctgtgcattccaaaccccagtttgcatctatcttaaacaataagcaactagagtttcgtgagatgtgatttttcaaccatgtcttctgccatttacttgctctttgcttttagatgaacctcaggtcttgttccatcatccatcccttcaaatgcaaggtggccgcacagctcagtgtcacataggagtgaagggagaatgcaaattagttctttaagcatcctagagaaaagagagtggcctgttttgctgttatcctggctctctagtttcataatattggctgttttccgatcataattctaattttaatgagcaattgggttatcagctatactccacccctcacctgtaggttctttgacatactctgcccgggacagcatcgatcatggctcatttctcattcatagtaagtgcccacaaatgtttactgaccaaatgatcacatgccaaggaaaagccctttgaaactgttttccactcatttgaacccccacaatgcttggcatacacgtgttcctaggattcctgttaatagtgggtagtctccccgcaagccccgct

SEQ ID NO: 97053 - DNA, 1002 bp, Homo sapiens
aaaatagataaatgagaaaataaaaaccaaaaaaaccctaaaatcaaatgggcagcaggacctcagcttttctcacacttcctatcactgtcttccctctgtcattttcttttttttttagacagagtctcgctttgtcacccaggctggagtggaatggcatgatctcggctcactgcaacctccgcctcctgggttcaagtgattctcctgcctcagcctcctgagtagctgggattacaggtgcccgccatcacgcctggctaatttttgtatttttaacagagatggggtttcaccatgttggccaggctgttcttgaactcctgacctcaagtgatctggcctcccaaagtgctgggattacaggtgtgagccaccgctcctggcccctctgtcattttcttaatttcttccagttccattctttcattctttctcatggagatagtttggcatatgtaggattttatcccaaagtgataaacacttcagctgatttgagcaaagagaaacctctaatctgctatttagttattctctgtgtaaagttggaattacctattacttaacaattaagccaataaaaaaagaaggcgggttgtttaaaccaattctattttgttaccttattgtgtttttgtacttactgatgaaggctgagagtggagtggagtgcagagaaaggagttttctttgcagcatgcttttcccttttacatttttggttaccatggcaatgaccttgctggagaaggcaaagtattttcccagccccgtatctcaaggtatccctggtacttcccagctttctctctacagcatcctacacttgacccttcctgtgtggggaggaggatttttggtggggggatggtgcagaggagacagggaggcactttgcctccttacgttggcacttcctctgtcctctttttttgctagcacgagtctcattttcattaagtctttctcctgttccccgctgtattgaacagatgc

SEQ ID NO: 97054 - DNA, 1046 bp, Homo sapiens
ctctgcctagaggcacgggagacaccctgtctcagcagcaggttatgcaagtacatgtgcctgttggtggcaaagagaacagatgtaaggcatagctgagagttgaaatgagtaagaatatatcagcttagcagggagggaggcagaaatattttaaatatttaggtatgtatactactgcatattttaaaggctgaaaatagtttttaatggggaatatcacttctgattttggacaagcactgccctagcctgcaagccatgaggctaaagttaaggaagagtgaagcagagaacatgaatgaagaggcaactggttatactcagaaaatagaatacacatgaaaattaaaatctgttggggtggggggggtgcaagtgctttatagtgaaccgaaatatttgttttgagtttcaggaacagtttataactatgtgaattatggtttgatgaattacgacaaaattctcatacatgaatttttttttggcataagtgaataaggacagtaaattaatgtggctccctgatttttggtatctcgacaaatggtaacatttgataagagctctagaatgaaccaagaatgtactcagttctggaaactgagtttttcattccagctgcacaccatcagtgagaaatacttggggagattgtaagcagcttctcatgctttaacagctgctagcagttgtttgagcaacagcttaaggaaatgttactgggtgaacccggtggaggagaaccactttgctctactctcctgctggaatttttgctcagctctgcacgtttagctgcaggggggacagggttgagcttcacagaagagtgtctaggggggcatgaggcagatgggactcagtctccctccttccctctcttttttccttcctgtaagggcctgcaattcattattaaattaaatttcacatattaccaaatactatggaggtctgcctaaaataagagtttttagacttgaaagcagagcaattcggtcctttgcttattttttcgtttatttttctttttcccagaa

SEQ ID NO: 97055 - DNA, 1050 bp, Homo sapiens
aatgtattttctcatttaccatcacagcagtcctgagaaacagggacagttttgttgtcgttttttggatgagggaggagctaagatccaccagagttcaggctggcaccaggatgcaggtgtcctagtaactcacccagtcttttatctccctgtcaagccttcggttcaggtatgaggctcttagtcctatgtggcagggctctctgctggcagagttggggggtcatctgggtgataacagtgatctgaagttcctgtgtctggtagctggtccacagggctctgtggtctcctgtagagaactttctaatctgagttgataatgtgggtgagagaattggtccttatataccttctttgaagtaatggcttaggcagcccctcaggtaggctttcgagtaggaaagttacccaggtactcaactgtgattcacttgtgttttgcttgccaattttcaccccatggtactatgtcatgttttgctctttttatagaaagaaattcaagccatgagtcagtgcagccatcccaacgtagtgacctattacacctcttttgtggtcaaagatgaactttggctggtcatgaaattactaagtggaggtaagtggattttgttgttgttatttatttgcttgttttctctccttttgttggaaccagcatattggagaagactttagattgaatcctttctctcctgtgtttgaaagtttgtttggtttctcattgcctagaggataacgtccagattgcttcacattgaccttcaaagcttttcataattttgcttaacttccgagaatgtgtatgtcctcttctccaggtatgaaatgcccgaccttctaggctgagaggcagcccccggaatgtattatgtgctctcatgcctttgcccctgacctgtcctctttctcagccttgcatctctcctttgttttccatgtgctcaggcctaaaaggtcacatcctctccacagtcaccgcttactcttcaaaaaagttagccagtcctttctccttgagtcctttctttttaacattgt

SEQ ID NO: 97056 - DNA, 1878 bp, Homo sapiens
agcaagctctgaagaaataagcccaaagagtgttcaaacatcaattatctcagcttctcatgaaagccttgaagtagcttagaccagagtggtttggtttgggctgaggtggaagaagagcttgagatattttaaaggcactcaagctagaaaataccaggaactgaggatggaaatggctttcatgcaaggttgtatgtagatgctcatgtcccttgtcccctgtgtcctcagacatacattgtctggaaaatgcagttttttttttctcctccagataattattttaggatttaagaaactctttaaaaaaaagatgtcaaatggtaatgttctgaatacgctgagtagaagagtttaaaaaaattgatctttaggaaaatagttacagatagtaacctcacagtgtgccatttgatcgctgatgttgtttttatttcattgcaggcagtggagctactgctgtggttcaggcagccctatgcaaacccaggcaagaacgtgtagcaataaaacggatcaacttggaaaaatgccagaccagtatggatgaactattagtaagtaacagtgcagggaatacctgctggttgcttttcttaatctatgggtatatggggatggttgggagaagagcaaggtgttatctccagttttgacatatgcatttcttggaaagcagcccctaccacttcctgctccccagattaatgggactgtaccttatgattgtgttgtataatgaacaccttcccttgctttgagaaacagtattttgctcagttcgaataatcccaaggtgagaatggcctcagcgttggcactccacttgctgtatcaagggcacacactgtggcgtgacctaacatgacaggattactgactgcagttttggatggtgagcttctggccctccatctagaatgtgtgacacaaatggaagttgtcccccaaactatttgttggtcattttagctttcataaattatagcatcacacaaatttgagttattttttttttaaatgctctgtagcttgcatttggctaatgagaggagtttgtttttcttaacgtggcaatttgtacttcttattctaaatgagtactttatataaataattggagcttgtcagtgtggatatgactatagtagcaatggttggttgaaggaacatttgcttttggcttagctgactcattattaaatgaacagcttggcaaatggttattagttgcccggcaaactgtgaagggtttgagggtttaatctcataaatatcgttgttgttctaccggccaattttctttttttcccttttggccatttatttgaggataatagaaaactgcagtggaggagttaactgattggttatccccacactaatcccagtacaaatattagtccagtagctccatacaagctacaaagtataatgacagttggctgcaaatgaagaagccttttgttacagtctacattgagaatggaatgtcattaacaacagctttttgtctttactcagaatatagcttttattttaggcttaattacagtacactatagtataaattaagtacaaggataaagctgtacttttccagatctgtttggccttacattttaaattaggctacacaatgcatagatttcattgggttttattgaagcaatggattgccggctaaaactcagaagagaaccagggcttccacaatttaatgttaatttttgaaatttgcatacattcaaggcttttaacggccttgaaatttcagctgtgctttgctcttactgaaattcctgctgcatgctacttgtctgttgcttgctatcttagtgaccagtaatattgtgcctttgtcacccaaccagt

SEQ ID NO: 97057 - DNA, 1143 bp, Homo sapiens
tattggaccagggctctgtcctgatgacctcatttaacctttaattacctccataaaggtggtaattatctgttaactgtatctctaaatatagtcacattggggattagggcttcaacaaagacattttaggggaacacagacattcagtccacaacagcattttagtcatccctgttaacttctgcagaggaagtgatcctatagaaggatttattccacttgaagcaggaatggtcacctttggcactttattatctagtgaactgcctgctacatggcagggatttaattactgtttgttgatgaattaatataagcaaatatctttttgctgcttttttgcactaaatgcactaaatgcaaagaggaagttattgtgtgagtcatgggagtagggactttgaacatactgttgaaactgcatttgacaatagtagtgatttttgcaaaataaacactgtagtttttcatgttaatttcacatagaccttagtgaaatgcaaagttagaatactaaattatatttccatgaaatatttctttggataactgaaagtataaaatgcaggtatgcagtgttctggttatttaccttaataccagcagcagtacagaggggaaaatgagaagaggtgtcaactaaaggaaaaatctgcatcatggtaatgaacgtgagcaatctcttacctctgattgccattgacataatcactatctaaaacttccaagtagctgttcttagtcgggaattacttagcaaaagtgaattgagatagagtgacttaaaagagtgaactgaaaagatttaaagccgtgcccacttaacttgtgcatatgtgcatacaggccataatcctattgaatgatttattgcacttgaaataggagtcaggaataaaatgagaaattcataaaatgttaagaactcttattccaaaaggggtgcatgatacttcattgaaaatatgctactaatgttaatgagtcatgtgtcagtatcatatattgttcaaaataaatacaaggtgctgttcagcatagtaattgctcttattttatttcatgttgctaacacttgtccagttcctgtatttacaagccccacattttttagcttcctcttaaactaatcagcaaagt

SEQ ID NO: 97058 - DNA, 1007 bp, Homo sapiens
aatagcagaattgaaagtcataattattgtggctataaatgtgagtacattcatgtgcgtgtgtgtgtgagtaaagattgcaatggaatatgcatcatgaaaatagttgtgtttgggcaatgggatttctaatacactttttgtcattgttgtttagtatggttttatttttactttttttttttttttgagaccgagtttcgttctttttgcccaggctggagtgcaatggcacagtctcggctcactgcaccctctacctcctgggttcaagtgattctcctgcctcagcctcccaagtagatgggattacaggcacccaccaccatgcctggctaatttttttgtatttttagtagagatggggtttcaccatgttggccagggtggtctcaaactcctgacctcaggtgatccggccacctcagcctcccaaagtgctgggattataggcgtgagccattgcacccggccagtatggtttaattttaaggaacaagttaattatttcttttaagcctttacaaggaaaagagttgaatggaaagaatacctacaaatactggatatttacatatatattttttagttatacgtaacatttctttataggagggcagtacacatgaatacccatttgtaagatatgattggacagttctttccccctgaaatatctcttgaacacgggaagcacatccccttctcggtttttattgttccttcccctgcatcctcacctttccttgttcctgatgttggaggttcattgaacaatatgtggcagcccaaggctttcaaattgacatctggagcatgcagaacatattctggtggatgggccagcgttggcagggttttgggatggatgaagagagaatcaaggccgttcattataaaatggagtgatgattatagtagaggcgattacatatttagtttcagtacctaaatgtctcctcctttgcatttaacttccaatctatcagcaagtcctgtggctctac

SEQ ID NO: 97059 - DNA, 1040 bp, Homo sapiens
ggctatgctatgaacacatttcaagttgtgaatgcctggtttaaggttagtcatggagcatggaatgagttcttctttgcaacttagtgctctttgaggcatgctctaaacagttatcaggttataccagtgagcccttttcagacatttaactgaggtttttcacatctcacatggctcagagaggttgagtaattttcccaggagcacagggtcaggagagttggccaaggcaatgtggagaggtgggtcagaacagacaacttcatgaatgaaggcttgttcaggagggcttattggtctgtacttaaggttagggaggaagtcggtgctctttccctgcaggtgagatggggaggaaacattctcaagaacagtaagtttcagtagcttccttacgcaaacactccactgaacgaatatattcgtctggtctgtttgttaagcacaaggtattcagataatctttgcctgacaagctgcttttgtttctgtaaaaggaaggtaacaggaaggtcttcaatttacgactcaagctttcttctttcacctcttctaaagtgagagaaacaaaggttctggatgactggatgagatattttttaaaggtgccattcaggttccttttgggtattagtttcaactgagatgtctcattctttctgtggaactaaaacgaataatgatcagtaagtcatttttgaaagtaactgtgacagagtggggcagttaaccaccacctctccattcccagcagctggtatgcacaccctgattatggtatagacttagttaataagagaaccagtgagtgtttgtgtcagaattttgctttcagaaccaggcataggaatttatacatgaacgccctgtgcagaaagaggaggtgtttgcacacagctacactgacagattattttccactcttgcacagtgactagtacagattcctctcatgagctcctcagagacgtaagacagggcgttgatgatgctttatcaagtagacagtatgtttgctacccacaactaagtaaaat

SEQ ID NO: 97060 - DNA, 1549 bp, Homo sapiens
cttgaggtcagcagtttaagaccagcctaggcaacatagtgagacctttatctctatttataaatgtatatattattcacattaaaatttgttaaagaacaactttgattatcatcattattcaaatactcaagcaaaggaaggctctccatctctttccttggacagtacctcatagcataccattatgtttcaaggtgcattctatagtaagatgagcagataatgcttggatgataaagtttaaagtaaacttgtaaatcaaaatttgcaaaaaaaaaaaaaaaagcaagaaaagtaggttaaaggaacttgacgtctcctttttaatatcaaggtaacttgtcagggcctggaaggcatctatcaagttgtgaacactgtctcgtctttttaaatggtgattctaataaatggcttttttagtttctaaacctggaccattagacaacactgagattggtaggagagcaattgtgagaccagagttttgttgcattgagaggagtgcttgcttgccccagaccacttggagaaaaagtcaggaatgggttagatatgttttctttttctttagctaagggcatctgtctgactggcattgggtttggacagtagagggatagaggagacctacacacaactctctatgatttagtaggaggcaaggaagtaaaagaagtcacagaaaagcctccttctccctgaggaagtggacagagatagagacctcttccgtccagggtaggaagtccccatagtgcctgacttatctgtattctgctaggcttttgagcaataaattgagagttaagtgtatgtggaaagtatctgaacacaccgaaaatatctgaagattttttttttttttgaaacaagagtctcactctgtcacccaggctggagtgcagtggctcaatcttggctcactgcaacctccacctcctgagttcaagcgattctcctgcctcagcctcccgagtagctgggattacaggcatgagccaccgcgcctgaccctctgcctactttttagagtgctatcatctcactttttcttccttaatatacaaattatgtgaatctttcaaggttccacctaaatgcccaccccaaattcttgattcatatgattcttagggaaaatgacctgtagctgtgtaatgtagcagcttgggcataattatagcttatttcgtctggtagctttttaagttcctgaagaataaaaagcatgcctgtcctgagttttatgtagtaagatttaacacggttcgtaccactagttgggagctggttgttatttgttgaatggatgcatgaacttctgtcaatcttttgattctcctaatagctttctctgtgtttaattgaggctttccccacgtctttttcagagtctagagcttttggaatctgcttttatttcttaacacttgatttttttgggggtggaggaggagtgtattctgtgttcttctgtttgttctctatggctggaattacttttggaaagatgtgacactgtttcgattttgtctctgagcct

SEQ ID NO: 97061 - DNA, 1032 bp, Homo sapiens
ggtctttgttgcgccccggtgagtgccagcgttgctacatcttggtgatccaaagaagaagtgccctttacggtctgaccttgaggaacttggaaagtctgcaggagagaaacaaacagggaaatgattataccctttgaggtaattctctggtggaggtgtggtaactaatcgttccatctccaaagtcctcctgtctttcatcagtagcatgttatatagttgtactgttgatcctaaaggaagggatttcaattccaacttggaaattccagccatctattctgtcttgcggactagttgtcttgttccaagatagactagtagtgagagacaggactaatgttttcatacaactttgccattttgttcataaaaagtttttgaagtttagtgctgcctatacaaacatggttaaatgctaacactaactgaatatacatgtaagtgtgtgtgtatttgttttttgacacgcatgtattaacataatgttctagcttgtatgtaaactctggactctgagacaatcaatgtttaaactttcaacaaggaagagaaataacgaaaagaaacaatggtttttttgttgtacccagcaactaaatttaccattgttctaagaactcgacaaatgaccacaggatgtgaacttaatcgagttgtgcctttgaacaaaggtatcctagtgatagtggaattttttacttcctatcatcctgctcatgtgttcacttgcctgcctcttctgaaatcaccagcagttcagtatgacttaaccaagtaaatgaattactgcaatgcaaaagaaaccaacccaggaaacaagaggaatcaccattatttctgactctgtctcctagatcagcattcgaagccaaagatttccaccttttactggaaaaatactaaatgaagtgactcacttttaaaaaaatgacccctgcaatgcagcctagatttaattgaaggtggtatttaactgaaagtgagggcagtgtgtataatcttaatctcctcagtcggacacatgtt

SEQ ID NO: 97062 - DNA, 1066 bp, Homo sapiens
ttctcttcctcctgaaccccattctgcttcactttcaaaacgatggctagagggttggatatgtcagtgatcatgaactgctgagtcctaaactttggtgtctgtgtccctcagaacctcaaagggcagtttccctgtgactttttaaaatgagaaccatgttcatgaagtgctgtcttagtttcagatcacttgaaatgtaatctgatttgagagacagtgtttaagctcctgtttaccaaaaggctgttttgattatcattttgcaggaattgttgctgggtaaaagacaaatgaacaacgtactcagaagagatgaccaaatggtctgatttcatgttggaaagtttcttctggtggtcttgaatctgcgttttaatctccttaaaaatgcctttttagcacataagcaaaattaaacattattgttttattaaaaactatgcagtgctccttattagttaggagaaaaatctcttaaatcctttttgttaaggacatgtgtaatttaaggctttcattttgacagcctggtttcagctgacaggtatgttaatctctatttgattgctttggtgaggagttgaaaatcacctaatgcctggcttagtgtgcatttgtaaatgcgctttcttttggttttcatttcatgcaataatgaaatgaattttcctactgttattttgttatagattgatggtttatctgattaccagatttaaataaacagttgaaccatattccctttgactgtgtccccttgtttatccttttttatttgaatgctgatgggtctttataagcattattatcagcattattatcagtacatatgtatgtatagagcctcttcatcagttatcttgtagcataacagtgctctaagaaagcgatttttttttgttgtttgtttttttagtttaagaatttcctattcttttctattttggtttaattttcattactcttttctttctccccttataagtgccaaagtttatgtgaatatgattatatatagaacatatgactatatataatctttttttctttatgtttacagagg

SEQ ID NO: 97063 - DNA, 1048 bp, Homo sapiens
tcccaaagtgctgggattacaggtgtgagccgctgatcctggccctattttatacttctcaaatattatacaaacaataatataaggtcattgtagaaaatttatacaacactgatgagtgaaaaggaggaaaagtaacctcatcacccaaggctagacactgtttgaattttgatgtaggagtatatatttacatggcatagaactttaaaaaaaaaagtgtaaattgatatttttagaaatgtctaccttttttgtattcccagtactttcacatttaatttgttacggcaagtaaaataaactagtcttagattaatacttgcttggcaaaagtgattttatttcttgagattttggcatacactgacaagcatgccttatgattactgcaaagtgtgttaagtgtattttttctcatacttaaatgttttcagaatcacggaatacatctaatacaatctactcttaatgtctgtgttacgacttagatttcttaggagtatctattatactttgccttttgtcttctagatactattggatcaccttattctgatatttggcacttcgttgattggtagaaaaatcgttttggccaggcgcggtggctcacgcctgtaatcccagcactttgggaggctgaggagggcggatcattaggtcaggagatcaagaccatcctggctaacacggtgaaaccccatctctactaaaaatacaaaaaattagccgagagtggtggtgggtgcctgtagtctcagctactcgggaggctgaggcaggagaatggcgtgaacctgggaggtggagcttgcagtgagctgagattgtgccactgcactgtgagactccgtctcaaaaaaataaataaataaaaaagaaaaattgttttacaaaaagttctggcacagagagaagttaagagtcagtaactttcttactgtttgtggatgtgtttgaacagagtagtgacttttggatttcatagtgacttcgtatgaaacctagagctggcagcatgaggattttctagatgaattaaata

SEQ ID NO: 97064 - DNA, 1117 bp, Homo sapiens
ccagcggggcaggagccagcattctgagcatgtgcgagccagccagggggctagggcggatttggggggtcgactttaggtcgtcgccctaagcgcaaagcgaaagagcggtgagagcaggggcgggcgacactccccggagcggtgcccctgcgcccagggcgcagcgactgcgccctgccctgcgggtgtgggcgagttggccgcgtgtgtgcctcgctgtttgacgcgaagacgagccaatcagggcgggcggcccgagctgccatgtgacgggcaaggcggcccctttccccagcgcggccagagggaggagagaaccggggctcgccgcgagccttcgagagcagcggccgcggaggaggcggcggcggcgggcgggagcagcggcggcggcggcacaggctcggggccagccgggcgcgcatccccgggcgccctgcgcggtggagagcttggcgggctgcgggtgccgcaggacaggagtggacaaagcaagatggcagggatcttagcctggttctggaacgagaggttttggctcccgcacaatgtcacctgggcggacctgaagaacacggaggaggccaccttcccgcaggctgaggacctctatctcgcttttcccctggccttctgtatcttcatggtgcggctcatcttcgagaggtaagaagggctgaagcccctcctcccctccccctgcgcacacacacgcgcgcacacactcgcgcgctctctggcgcacgcccccgcgcccccaacgctcgcgttcacgcctcccaacctttgtgttcggggaggggttgctgacccccctgccccgctggctttctgggagccagaaagggtctggcttgccacggatttcctcccgggcgccggggaggagccgcggagcgttagggtcgccccctgccctcctcctgggccctgctctcctcccggcaagggcaggcgaacaaaggtgagcggtggtcgggctcaggacccgccgcattccgcggggctcgcccctctccgccggcgcgccacgcaaggctgccaggcagggcttcccgccggggcccgcgccacccacctgacagccaggaacgttccggacgcgcggcccgga

SEQ ID NO: 97065 - DNA, 1029 bp, Homo sapiens
tcaggaaggtatatttttcaccggacagtattgttgcttgaaaacgaagtcagctgttcgcctgcagaaattgacatgcacaaagcaacagactttaagacctatgtttaaattattggaatctaatacagatgtgtcattgatcctatacaaaaaaggatcaaaaaagtcacagcagtgctgtgaaaaaatgggtgtgtttgcaggtgtagagttacctctagagcaaatgtttggttacagaaaatatgaactctatacagttttgcaggctctccaaaaacaagcagactcagggatagcaggtttgctctatgttggcacatagtaggggatctacacacaattgctgaattatgataaattgtgtctgataaattctggctgggctcacttttagatagataatgcatttgaaagagatgtgcagtcttatgtgttggagaacaaaagcatgatctgtgcacaaacagccgaattttcctgacatcctccttctctatgctgattccaggctgttcactgtgtttaaaaaaattaagttgttagaatggagatggctttgtacttagattgtctctgcctctaaaaagataaacactaatgtgatagttgaaaactggaagttcatttttcctctttctaaacattttttattttctttctttttttccataatcccatgactcgacttagagtttacatagaggggtgagctgctttcaattgtcagtcacagcaaatgtcctcatattgatataaagtgagttggtcagtttccttcaggccattgatctaagtagaagagatttaatggcctgtatggaaagtgaaagtttatggttaatgttcagaataataatccaatatggcacatatgtcacagaatgctactgacttttggaagactatctactttgtttcttcctatgatagctctgtctttaaccattcagaccttctcaattctctgaaaatccacaatttagttgtatctagagttagaagttctgcatgtttctcctcttc

SEQ ID NO: 97066 - DNA, 1121 bp, Homo sapiens
gggcaacagagtgagaccctgtctcaaaaaaaaaaaaaaaaaaaaaagtggtctgcagacataaatagcttctcatagtttctgaatgacagtggatgttttgttggagaacaacctaaaatcagagggttggcattctttgcagaacttagtacagttttctcatctagtaaaataaaaagttttgaatttacacagtgaagtagtttggctatttgttataggttaatttatgggtaaaaggcataacattactgttaaggggcagtgccttagaatggtggaggaggtaggtgagataactttaaattatcaccatgatgtaatgtcatctaggattatgaaattaataccctgagttcacttatgacttctctgttgaaaatatttgaattctctatggacagggctagttttctcttggattcctggttgtaaagtgtttcagaagtggttgctcttctgtgatggggaaggacaggtggcagcagagggaaaatgggatttcaggtgagtttcctccatcagcataccagttccatggctttgtcagacattgctgcaccatcctcaggctgccctcttgtattttactaacttgattaaaccttgttggtgaacactagaacctaggcccatgttgtatattaaaagtttcaaatgttattgcatacacttacatttcttcctcttaccaccaggtgaaaccagattttttatttatttcttacatagtcgggactttcaaaattttattattttttttccttgctcatcttcttttgattaatttcttaaacacttttgaatcagaatactggagttccagattgtatgtctagttgtgtcacttaatttttcttaggaaccattttttcatttcgttttttttaaaggtaaacaggattgcctcgtatagcacagtgatcctttcatattagcaatgccttgagaatctttattcttaggattttattctttggtttcttccccctggccaccttttaaaaatgatttcataagttttttttggtctctctttcctgacaccataatctttattgacatctatactgtagcatgattgaacacaaaaggatgattcttttatttatttactt

SEQ ID NO: 97067 - DNA, 1030 bp, Homo sapiens
aatattattcatcttttaaaaggaaggaatttctgctacagcatgaatgagctttgaagacatgcttagtgaaataagacagtcacaaaaagacaaatactgtaggatcctacttatataaggtacctagagtagtcagattcatagacacaggtagtggagtgatgactgcaaggtgctggaggttggtgcagagtttcagttttgcaagatggaaagagtcctgcatggtggtcttggttgcacaacaatgtgaatgtacttaatgacatagaacagtgcacttaacaatggttatgatggtaagtgttatgctatgtgtattttaccacaattaaaaaaaatagaagatttgctgacttgaaaggtcactagaaattactgccttcattttcttggcttgacatttttctagttaggaacaaacatcccagttctgtttatctcagtttcatcaagcactgcttttttttttttttaactgcttaattcccctcaaatctaggagagcgcctcttctttccagaatcgtctggcataggtgggtgggaggtgaggggtgatagaaggaaggtttttaaacccagagagctcttaagtatcccgtttttttagaaggcacttgaactgagcatatcatttcaagtccatttgttaatatgacaacttaataatagtaaactggctgcatgtgtagaagaggagagcaaagtgtctgtagaaaagcacattgcatagtttcggaggagtctaggattaaagtcaagtcaccctggtaagtacacaatccatttaaagcaaaccaggataatgagataaaactctccttagcagcctaggccacaggtatatcctatggaagctctgggtgagtgaagatcagatttcatcttcctccctagctttcagtttaattttccatgcattttacaagcaaatgattcaaacacttgagtatttaaagatgatttttctcaaatgctgcatattataaaaacaatctgattagaagcagtcaggtacatattat

SEQ ID NO: 97068 - DNA, 1015 bp, Homo sapiens
tgtcacatcttatctttgaggttttcaggttacaaagctactgttgctctcctgaagctgtgattaagattgtattttctttctttcctttcctcgattcctcccccaccttccttccctctcttcttcctttgtcacttcctcctttcttattattactgatacagaccctttcttaaagacacggggaagtctttgagagaagaggagcagcatagagttaagagtgggggagggtgtttagaaaaccatctaaaatcttgtccagggacacagtttggcaagtatcagagtaaaagctgccagctagtctaagtggctctgtagatcttgttttaatagctcaccatttcaaagcagaataaagtgacttggtggtttaagcagtggcagttttgcacacaatagcttgagtgaagaaaaactgagaatgaagcaatcagtcatttgggcattatggaaaatgggagactaaaagggctttgtatgtcagtgggtgtgtgtacatctttgcatggatagacttgataacagtatatttaaattgtgttgctcttttgtatatctattgcaattaatagacatgtatatttatttctagctagaattgaaaggaaaatgggtgggatatcagaaagattacagaattcaggtttaaattcaaacagtgctgtttatcacctgtgcagtaatagacaacatattctctcaaatttggtgtcctctcttgtaaaatggagaatatgccactttgcagtattgagcactctctgcaaaaatgtacataaggggattcaatgaaacctggttcgtaaaaatacacgttgtgtagaaaataattgataccagagtacagtattgagtacctgcttgagaaatactgttctgtaatttgattttctaaaataaaataaatgggtatatgtgtgggggggcccaaggacatggggtcatggtacaacttgtggaagcagtagggcctgtttacatagttgatgctggacctggaggattt

SEQ ID NO: 97069 - DNA, 1064 bp, Homo sapiens
gagtaaccatttcatcctgatttgagattgtctcaggaaatgccatttcagggaaaattgaaacagctggtcactctacctgactgctcagcctattaaacccatcctgaggtcaggacagtaactcatgcctgtaatctcagcactttgggaggactgcttgagcctgggagtttgagaccaacctgagcaacctagtgagaccctgccaactctaccaaaaaaaaaaaaaaaaaaaaattagctgggcgtggtggtatgcacctggagccccagctaccccagaggctgagatgggaggatcgcttgagctcaggaggtccaggctgcaatgaactatgattgcaccataagaaatggcttctctgtctcgccctaagggtgacttagagtgtttgtgggaagaagcttccttggtgactgaggggtgttgcctgcccccactgtccctgtgccacatttcatggctttttaaaaaggtgattaaaaggctccccattaagtgtgggttggagcttctgagggcagaactgtgtctgtagatagccagggtcagttcctggtgtgctaattcatccttagcatgcctgtgttactgagaccataaacttttttgttttccttctgccttcacccagtgtgtgttaagtcttgcttgttaagctcccacacttaaatggctgcttgcagaattgcaaagggactagggagagaacaaaaacagatatgcaggtggtggttgttaaccagacaggatttctaaggagggttcaggcagtcaagtggttttgtgtatgtgttttatgttcatagttttgagttttacaatgtgtgaagcttacttttgctagcattaggtatagtttatttgaaagaatgaggctcctgaaataaacatgccagtaaactatatcttagagtttaatgagaacagtgctaggaaattccagctcctcccaaggctgcctcgctcagaggcaggcgttagctgtgggtctctaagctttaaacaggcttaccagtgtcaatacttgtgatgtccctgccccaggctgtccacacct

SEQ ID NO: 97070 - DNA, 1034 bp, Homo sapiens
ggttaggaaggaaatttaataataccataacaagacattttgccactctttctttaaagaaatgggaatgataatcataaaatacagtgagaaattcaagtttatactttgaactttgcaacatctattgcaaacatttatttaacaaacatatttcacccttcccaactcattgccttagggttacttagctaacaggaatggtgagtgttgtgttatattcctttacaacaaataaaagtcaaccataagttaccttgaacaagaaatcagtaatgaagaatatctgtccttgtatggggcttcctaataatttattatcagaagaattaccttatgattaagctattctgatggtagaaacattttcattcagcatgtaaacaagcaacaagtaaccaagattcagcaacaactatgaactgagaactcaaaaagactttaaatctagaactacgttgttcttcagtacagttgattgcctgtcccaccctaccttttagtcatcatattatctcatcgtgcttgtctacttgggaaaagttatttttttataccaataggatggcatgtattaacattttttgacttttatgaaaatgttcaaatatagagaaaagctaaaaaaaagtgccacgaacactcatattcttgccaccagaattcaatgattattaacattttatcatattttttctgtagcatgcaaagtaaatcgcagctattatgacgcatcaccaatgagtagttgagcacggatctttaaaaagccatcctagactgtctctaagaataaagacattctaggatggctttttaaaagtaactttttgaaaagcaattttatatcgtgggatttattttttctcataaaaatgtacagcttcaaagtggtagagaacttactgcgtatggatttggtgaaatgacagggtagaatcaatgattaaatttaatggatgtataaacaataaggctagcagtaatagtttagtgaaaaaggagtgattatatataatatttttattggtatt

SEQ ID NO: 97071 - DNA, 2105 bp, Homo sapiens
agcgtgcctgtcctaagcaaaggtcttacatttgaattcttccaccaccatttgttagagctgtgatgctgggtaagctaaagaaccactctgatcctgtgaaatggtgatcattttttcctttcaaatagtgaggattggaattaaggcagtaaagtgcttaactggatccctggcccatagtaggtagcagcgactgggttttgcttctttaaacttgtgagagaaatggatatggatgagtctttgagtcctttaatcagcagggcactaagttgttcatctagatatgccagtggagtaaaagtatagggagtcttccccaatgtctttgccttagcatacgtaattgactttcagttgtccacacaaatggagaggagaaatggcagagtaaataacaatagataatgtgttaaacctttatatgtctttatatgtctaggaattaatctgacaaatacttttgcagaatataataataaaatttcatagctggaagagaactttgaaattataaaacctcttaatgttagagatgaaaaaaacagacctagagagttaatgactcatccaagatcatacagtggtgtgatcttagtggcagagctagcatcagaaacgcatatgttaattccaagttccgggttctttatttaccgtttaaggttatgtttgctttaagtgcatatctagagccactaatgtgtctgagaactggcatctgggacctcagcctagtgtaggaaaaagaacatatgagcttggaggaatagaaatgcttttgaacttctgctgagtttttttgaagccagatattagggtttgagccactaaatttagggtgaaaacctagaactggggaaagttatgtgaaatagagtagacatatatctaagtcagaataagagggaaatgttggaaccctcagacaagccagagtctgttgaggacataaattgtggatagaagtcttgagtagcatggggagtccatgttagaaagatagccgggaattaggggcacgcttctatcatgggctagaagtccaggcttactggtgctatgtagagaaagcatgcaggaaatgaaacatcactctgaaagttgctgggcaccaacctgggcttgactcgcagagaggcatctgcagaggatccttgaggagcttgtggtttgaaagagggacagttggccaggctggccgggcgcagtggctcacgcctgtaatcccaacactttgggaggctgaggtgggcggatcatgaagtcaggagatcgagaccatcctggctaacatggtgtaaccccgtctcaactaaaaatacaaaaaatttgtcaggcgtggtggctggcacctgtagtcccacctactctggaggctgaggcaggagaatgatgtgaacctggaggcggagcttgcagtgagctgagactgtgccactgcactccagcctgggcaacagagggagactccgtctcaaaaaaaaacggacagttacaggtcatcagccgcaagctgactttgcaactgagcaacttttttttgcctgtgctcagaaagtttctgatttcctggtcaagtcggatcatttgcagctgattggggcttctaggtgtaaacactgaatagagtgaataaagtaattgctgggtaattcctgacccgtcttcattagctccagatctgaagctggcctttagaatatcataaagctcttcaatgcccaatgtttcttttgactttagtattgagaaataaatgcttaatctgttatgtaagtaggaataacgttgaaatcatggcttagctgaaagaccagttgtttctcccaaatgtgggtttacttattgagctaagaaatcattcctatgtaaatatgaacatctattatcctcttgtgtcttgatgaatttgaaatagtaccagcatgaatacatttgatttaggagtagttttggtttagaagttatttccctttagaaaacagcaatttaagcttaggttgaatttttgaataacttcagaggaaatctttaaaaacatttttcaaagactttcaacagttctgttatggaacccttataaatccagtaaatatgaa

SEQ ID NO: 97072 - DNA, 1051 bp, Homo sapiens
taacctctcaccatgtgcctctcacctagttcaggaatgttggcttcccagaaaatgcacagtacaagttgtgccttcagctttctcacacaatgaggcatattatgagtggtcttgcttctgttctgctgtagtgcataattcatgcaaaaaatttgatttcaactgcgtcagcttcaaagggctgcaatcaggcatctatctggaaggatttgctaagagaaaagtttctgttttccatttatacaactgggggactcacattatctttgattagtgcagtggcacggagctgaaggcagtttttcagtttgcaggcttatttttaagccttttgttttccttgaatttctagaagctctgcaggatgaaggctgtgtacatttgatagaattattgggtttatctttgtaagagctcatctctaaatcgaaataaaaactaagtgtctaatgattggaatagctgctaataaaatagccatctcttaagtactggtggtttaatctcttgtaaattccatcatagcccaaaagataatgagttcatgtctcttgcatgtgatagtctggacagtataaaaagtctgaaggcaggagtaaagagaaacagtaataggtttaaaaatgcccagttgataatggcagtagtgttttaatagctgtagtggtggtggtgtcagtatcaaagattatggttaacatttattgtagctgtgctactgccactcactattcttagagccttacatagactatctcatttaatcctcacataaagtctgtgaagtaggtactatttttacttctttttttatagatgtggagattaggctcatggaggtataataactcgtccacgattacatagctattttttttttttctgaagacgcttatagcactttgcttggagtgtagagtggaagctctgtgtgcttattggttgactcatcttggactggatactggttactggttactcaaaattccgagtttcagctttcttctgtgcaaaatgggaggttgagggagggccaatctctttctag

SEQ ID NO: 97073 - DNA, 1054 bp, Homo sapiens
ttacaataaaataaagataaaattttataaaaggtaaaataaaataaaataaagccttacaataaccttagatgagaagattgaggaatagagacaagctaagcaaagtccacagctatacaaacactaagtggtagagctgggatttgaacctgtcttgtgtggatatagcaccctcactgtttatcactttgctgtaatatctctctccacagattcagaatgctaaatttctcaaatctcctttattcttgctgcctctttccattctcctgtcccaatctggagtaattgattttctgcatatgctacacagccatcttcttaagtctccatttctccttggttgggtccattttttcctccatcctgtaccttctcctttcatgatttaattctacattttgttagagcacatctgtaaataacttcctggaaaaggaagtttaaaaaataaatgtcctgggtttttgtattttttccttttgtttacttttcttatccatcatctcccattgaattgatagtttggctaattggaagattctgggcagaaaatcatcctccttcctttgaaacttcgaagccattgctgtattgtctttttgcttcctttgtggctgaggagaagtcttccctgtctgattctctttcctgtgtgtcttattggtgttctgaaatttcccagtgttggacaagagttggttttgttttccattgtgctgagcatttgtgggcctttttaggctgaggacttagaaacctcagctttgggctatattctggtgttaattctttgaaaatgtctttataatctctgttcttttttctaaaaatggactctttctagtttgttggaacttctcaattaatcctgtttttcttatttttccgtttgtatttaaagtttaaaaaatttggagtataatttacatacagttattcattttagtgtacagttttataagttttgacaaatgcatttagtagtgtaaccaccaccataattaagataaaggattcacaatagccaaaaggtagaagcaacccactt

SEQ ID NO: 97074 - DNA, 1111 bp, Homo sapiens
accagcctctgagttccctcagtttttattgattattattttcatgatttcagtaaaaaggaatgtagtaggagagcagggtgataataaggagaaggtcagcaaaaaacatgtgagcaaaagaatctatgttagaattaagttcaagggaaggtactatgactggacatgcacgtaagccagatttatgtttctctccacccaaacatctcagtggagtaaagaataacaaggcagcattgctgcaaacatgtctcgcctcccaccatagggcagcttttctcctatctcagaattgaacaaatgtatagtcgggttttatactgagacattcagttcccaggggcaggcaggagacagtggccttcctgtatctccaacctggtggatacaatcagcaaagccctctcaataaatgaacttactggcagtttatgggagaaggatttatgtatctgggctcttggtcaaaagccacagttgcttcccagcttggccctgccatatatccaaagggcctgggctctggttttgagccacgagtctgagcaagggtgaagttgggtctcagcacatgtctacatgctgaaagtcatgtgccatctttccctcctctgactaacttctttggtgacttggtgccagcccctactatgctgagtctactccagtttctctcaaatactattgtatttgagattttaagataagcatcagtcacctggggatcttgttaaaatgcggaatctgatgtacttagtctgggatggcagcatttttaacaagtttctacatgatgctggtgccattggtctataggtcacactttgtgtagcaagtactaacattagagcagtgtctatctcttctccatgaattcagcaggtcattatgtgcataccacaataaataagacagtcatagttatgatcaattaaaaatgcttctaaatgattgctagtggtatggcaatgtggaggcacaatgatggggaagagatggtgcataaaataacatcatttcttccctcaagaaatttgtaatagtgttatggaaataagacataatatctgagtatgtgtaggtcaaagatagatattagaaaataacc

SEQ ID NO: 97075 - DNA, 1020 bp, Homo sapiens
atcagcaatgtgtaaatgctgattataagtctggggaaaaaatcataagattggtggacagtctctagttcttgaaaagtacagggttgagctgttttgtttctgttgtggtgatagttgtggttattttccattaatacaaaacagtccctggtttggagaacaacttctgtaattcaaagtacattgttatagtccaagtcactgctcagtgaatgtcttggtgtgcaagactattaccttaaacagttttatatctgtgggttgtattcaggtcagttttagctttgggacagaggtcagcaaacttttcctataaatggccatgaaataaatattttagatcatatggactttgttgcaattacaattctgctgcagcataaaagcagccagagatgatgcaaatgtgcatggctgtgttccagtaaaagtgtatttatggatactgaaatttgaatatgtcattttcatgtgttgtaaagtattatctttaaaaaatacattacaaaaaataaaagctattcttaacccatgggccatacaaaaacagatggcaggctggatttggccctctagccatagtttgcagaaccctgctttagggttataatactatttgtggttctttcagagtttcaaggaagagaatatcgtctcctagtgctaggcacagtcatccatttctcagagttttgccatttaatagaaaaatgtgaatagttctgtaattggtgtgcctgtctccagtattcctgggatatggtgccttgatggtgtgcagtttcatttagcctagccaggcactcttcaaagctgttagtatcctcaaggcagcattgctttcattacagaaattctgaagattgatgaaccggactatggacagtctgctcttttgcctcgagtaagcctttgaaaccttgtccccctcgttctattctagacctaccatctgtggccggtgaactcaggttttccatttagaacaagcctcacacattccttgatggcatatgg

SEQ ID NO: 97076 - DNA, 1206 bp, Homo sapiens
ataactgaatttattaaggcatcatattattatttaacccagtctgttatttttgaacctatgtactatttcttgttgttgcttaatgtattttaaaagttatttgtttctgattcagagcagaatcatgcaaatccttataattgattttgattgtagaggatttataaaagtctacataatgttcatacagaattgtagggggaaagacttcaaagcataccatccagaaatacatcctttatcatttactgcttatacagtgtcgtattttatacaggtgcccacactaatgcttacacatcatgtgtgtctgtacttggcacctgcccttcttgaaatgtttttaatagaaccagcctcatcagagtgcctgaagacggctgtagaaaggttatgttttatgcttcatcttcaggatctgtaagtcattgacctgtgggcagtagtatagtcacttgtgctgtcatatgacatatgctgcattcctaaaaatggccacaccatgcaaaatcgcacaacaaaagaaaataacttagggtttgtgagaagaatgggttagggacacaacactcagaaatttcatcagtgacactttgaaaataagctaggaacctaataaaaacaggagcagttttatacacattaaatggctaagaaatacatagctactacaataaatacggcacttgaccttgaaatggacctaacatttgcttgtagtggctgttgctgtgttagctcagactgtcataacaaaataccgcagactgtgtggcttaacagaaatgtattttctcatagttctggaggctaaaagtcccaggtgacataagtttggtttctccagggccttctttccctggcctttccaccgtgtgtgcatatccctggtgtgtcttcctcttcttataagaacaccaatcatattggaatagagtcctacccttatgacctaatttaacctgaattaccttattaacagcctcatctcccaaggcagtcacattgggaggtagggcttcaacgtatgtgttctgggggcacacaattcagtctgtaacaatgtcagaagggtggcagtgagttactgtgaagtgctggaaggaggaagatctgaaatcagagggaaagttgcaatgccggatgcgtgtggctcataactggtgtgactaaggtagcttggacatatttgaagagagtgtg

SEQ ID NO: 97077 - DNA, 1035 bp, Homo sapiens
agttaaacaaggtcagtttgaccttgtgtccagtgcaattcccaaatttgactgctgcagtttactgaaattgcatacatacaacagctttaggtgcctggattcacagtgagctagtgaaatagctggtgatttcatagtgagccagtgaaatagccatccttcccaagcacccacagtgtacagttatggtatagaggggccttgatgggcatggcctttgaaagacatgaaagctatagattagcctatattgttgtctggtatgtagtaggtaataactgacaaacagacaattgcctaacatgtgccagaaaacaacataggcaaggcttgcagttacaaaataatgcatagacaaatgtacatttaatcaaatttggctggcttgagggaatggttgatatacacagcacagactgatcaatttggtagtgttaagcagaaaatcgctcttataggacaagaatcttgtaaaattttgaaccttagaaatatgcactaatgacagtgtggtgtaggaatagatagtgatggggagggcgtcgagacaggtacaaataagtagtgtgtgttgattgacgggcatgtccttttggcaaagagagactccaccaagaaagtgattgggaaatgagctaagaaaagtgtgagagaagaagacacttcagttctgacattcaagaaacagccccactctgatttggataggggcaaagcctaactatagatcatttttcagccaactacagaatctttttagctttccttgcttctttttcatttgctttctctttcgaatttgaggagtagattgcagtttaaccacatgctatgagctcaggcctcttgggtggcctccctgggtcttagaccaaaccagtcattaggcttttagagaataattttaaaatgccatcccttaatattgtcagggttgtttgaactatgagaagaagataatgagcatgaagcaggacctttagaggactaggttgtctggagtttgtagttagttgaaaggctacagggtcc

SEQ ID NO: 97078 - DNA, 1035 bp, Homo sapiens
tgtactcattaaatcttaggattgaattaaattgatctaatagtgccttggtaatggtcacatgtaagtggtagccaagtctagttcctacttttctatggtattgagcaaagttaaccaccacctgatttctatttaccaataaactacaaaatattttcagtgcatctaaaagtattagatcctaacagacctcatgggttgatgtccactaccctctagagccaatgcagaatgattaccatagaatccaaggcttctctgtcagtttcctcacactccccaccactcagtacttattacacttcagcctacgccctgtgattcaaccaggcaaattggatagatgtgcaccatttcacaaaagtagataaaaatatacattgtcagctgacataacaggtggctttcttttaccacctagaattccataaaaaatgttgacacagtctcccacataaggtcacggcctaatctgggaaacaattttgaacctatccctgtataattgtgactctcagtgcaacagatctgtttctctctgtgatgttaactcatgatttaaattaaacttaatttgcatttatcaatagtattgcatgctcatctgctggttgtttgtggacctctgctttctgaagacaaagaccaatgatgaattctgattaaacagtttctagcactagtgttttcatagtccagccatctcatttcatagaggagaatgttgaacattctcaggtggacgccagtttcttggccttatctttttttttttttgagacagtctcgctctgtcgcccaggctggagtgtagtggtatgatcttggctcactgcaacctccacatcctgggttcaagcagttcttctgcctcagcctctcgagtacctgggactacaggcgtgtgccaccatgcctggctaatttttgtatttttagtagagatagggtttcaccatgttggccatgttgttcttgaactcctgacatcaggtgatccgcccaccccagcctcccatagtgctgagatta

SEQ ID NO: 97079 - DNA, 1051 bp, Homo sapiens
taattttttcataaaggttaatgaataatgtatttttagagcctctgaatatatgagaatacttttcatatattcctctgcaaatgagaggaagtttgcctggcagaagctttctttgattgagtcttccctttcttttggcacttaataatacagcagagaactgtaagaccaactgggtatttgttcttttgatggtgatttgttttcatttgatttgtgtgtgttgacttgttgtttttatgcttgaacactgaagttttttttttttttattgtaaacctaggattcaacatttttgtcagaacatcgctttgaattgatattgtttggaatgcaatttagttgtcttttttttcagttcacattttttttagtctttttgtctttgattattctattttagttcttgtatttcctcagaaacagctataattagatttgttttctagtcttccagatctaggatcttttttcatctttggttcatttctctggccttatgggggtgtttaccctctatgtaaatgacttaattttatactgtatgtatctgtgttcctcccctccagtggataataatgctgcacttcatttttcagactctgtgcaatgctcctttattccacctataatctctttatcttacccggcagtcttttattgacttacaactttctgttttgtttcaaggggtcatatcttcttgtattatattggcaatgcctaaaactttcctaaaaattactaatgattcctctaggaagtcatttttaggaggctgttcttcctttgaatctttaacatgccgttttctttccacatttattactacttagtagacccatgctgccactgagctgttattttcattcccgaatttagagatattcatctagacctgctcacagaggggatgtgtggattgccctcagccccactctctctcctcctgtttgttagtaaaagtcctcttttagatctctgaccttgaagcaggttgatgtctatagacttggccccattttcagtgaaagtttcatataaagca

SEQ ID NO: 97080 - DNA, 1103 bp, Homo sapiens
ttctcatagtcgtacacatattaacaatagtgatttggcataacatggggaattatttttaaaagttctctatagtattagcctccaaagtgatatcagtgttatctttatttattacagaatttttgttaaaattgggaatgcaccaaatttcatgccttattaatcttgtaaatattgacatggaaattttaaatacatttaagattttaaaatctgggttatcaaatattgtccgcctgtggtgaattctattataaatagtggttgtttcccattatcatattgttttagaggattgttttttacttgtagtcttttcctttggtaactgcacttattttcacttaataagaccatatggcccagaggccatttgaatcgatttagaaggatgagttttactctgtggggtttctgtgtatgaagaaattctcaactggagtaaataaacatggtttaaacggcttattttggaattctgttctagttttcagatttacttatctagaaaaaatagaatgactatagcgcttttgtgcttataactttactaccttggaagaggaaacagctttggatggaatttcagctgatgtggaggaggtgtgcttcatgggaaggtcgggttgttaactaaggtcaaggtttggaattcgtgcctggttctgttggtgaggggctttgttggtgagaaaggaaagagaggatgagcacgtttttgctcttttcctttaggcctgctggatatagcctctctagctctcatacggcaatgcggttatctgtcatcagaacaggaaacactttgacgcttagctctggttcactctgtccctaaacaaatggaatggaatgagaataatttttatccaccagtcctcagtgagtctgcacgaggcagtaagaggaactgtcagtagagtgtttccttggaaattattttttcttaaactagaccagttttatgccaatttcctttcaactgcctctggttataacaaatgctttttttttttaataaaaaaaaaaaggaaaggaaagaagaactagacactgttcttcttgttgaattaatttgtgtgggaatttctttctttaat

SEQ ID NO: 97081 - DNA, 1310 bp, Homo sapiens
tagacttctactcaaaagtttagagttgaacttgactatgaaaaacattggtctaatttatatgctgtgacaaaactagctttacaggcttcctttggccggaggcagtgcctgagaagggagttgcattagtattcacctcctgtttctaccatgggaaatagaaaactagtaactcccagaagattcaggtaatttgataggaagtattgatccatgtatcaaaatctgtacctgcacattcactctgcattagctgaaccatcatcagagacctctctgacacagaaagaaaaatgatttactgaatttagcgaggaaagcattactcaagtgtgttttttctaaaatctgaaagctaatggcgttcacataccatgatcaccataatagaacattttcctcatcaacaacaataatgaaacaaaccagatgttctttacttaagaacagctttctgggggaagtaatgagatgttctacttctgcttgtgaagccagtgttctttcccagcagggaagggcctcatcttgtctgggtgtgtttgggatgggggtggggtgcttaggacaagtacttgatgtggagcagagcagcaggaattccgattggaccagctcatgctctgattatagctctgtgtgtggttccaggggaactctagttcagggagtatctggtactgggtctgctgtcaggtgggacaaatggcttagtgtttgtgctttgttttgtttatgtttgcctcccttctcatttattaatgcacatgagaataggcctgcttgacaggggccgttgctgtcattgcttaggatttattagtcaaaaatctggtgatactagttatcttggaatgactattccaaagcacagacaaggtgaccattttgtgcccaagaaatgtaggcttccacaaggaagtgaagagtgaaaaggataaagtaactttttccctcatagaaattaatctatattgatagaggtagttttacctgagtggggtaaagagagactgctggagtgagtgctggcaatgttctcgatatggatagtgatgtaagtatttacatatctagacatacatcaaatttctgtgcccttaggaccgtgtactttaccttaacaacttaataacgtctgttaatcctatagctgccatacaaagcagtccctgcatgttgctgaatggaaatgtgggcataaagcattcaagtaggaaaagctgggatttaaagggtgttccattcctggctatttccaaagagcttctgttcatactggtgggagatactgatctctgttcatt

SEQ ID NO: 97082 - DNA, 1111 bp, Homo sapiens
cattattgccatctccctcaggagggagaattcctttccttgcgtttttcggctcacagtggctgcctgtattccttggctcatggcagcttcttccatcttcaaaatctatcactctaatctctacttctgtcatcagttcgccttctcttttgtagtcaaacctccctctgtctcctttctatacgcccggataatttcttcatctcgaggtccagaatcacatctgcagtttcttttgccatataaggtaacattcacaagttccagaatttaagatgtggatatctttgggtgccattattcagcctaccataccatgccggtctcctactggtgtctcctgatctctgagaaggcattcgctagtatatccagagggaaatgccattttgttaagaactgatatagcataaaaatctttctgtggaaaggtcacatattctttatccttaaacagcttacaggctaataggagatatgacttgcttgcaagtatttttggcatcaggcagcacatggtaagtgctgtagtgatgatgaaaatagatgtctaggattacagaagggggagggaggatttcagatagggtgctcagggaagtctgaactgagcatgtgactgaggatgaaggaagcttcagctcaggaagatgaagaaaggaggtgaaggggaataatagaaagtggtaagtctggaatgtgggaagagttgtgtttggggatggggaagagaggaggcagcagatatgagaatgatgagaggcaagtgaggcagatgaacaaaggtggggtcaagcattcaacttctgtttagtagggaaagcataaagaaatgacagatgattgagctggagaaaggaaagctggtcacagtgtgcagaatgaattaaaattcacaaagactggaggcaaggagatctgtgttagccactgcagcagccatgctccttgttgtccctggcattggtccacatgcaggtgaaacagcttcttgtgtatcacttggagattttgttaggcatacccaagaaaagtcagctgacagccagtttcaggcaggtaaaccatttcctccttgttaggaagacttaccaggcactgaagaggt

SEQ ID NO: 97083 - DNA, 1148 bp, Homo sapiens
gaatccttttgaaaggaaaatttgtgtctcattttttaaaggtaagtttgttgcagtatggaaagaaaatatttggcccagaagcaatttccatattgatcatctctttcctagagtatactttggatgcattgaaatgtgatgtttaaacatagaggcatgataatgagaaatgcctcctggttttaatgtaacagaacaaagaagtgtgcattttatgtgcagacaacaaatccttagggattactatctggagtggcagcggggagcagagaggcgggagggggtggggcagttcatacacagcctggacaatctgagttgcttcttagcatcagcagtttagcagtatctgtgtcccaggaggatgtacatgtgactcaagaaaagggaaaaagagaagccaaacgaaatccaagtatagttgtatcctaagaatgaacatgttaggaaaaggcttatttaaactcgctatcattgatgttcctaattatatttttaaatggaatgaagattaggaaatcatttcaattaggcatgtaagattacctgctagactagcagctagagaattatgaggcctattaattataaagaatttcccaagtaccaaatgtaccattcgtagacaggctgtaatttgtgagttataggcaataagtggaaaggagcacagcgattcacataatcacatttttcatctccgacaaaacctttctcctcatttaaggttatgggaagacactttacatttcttatcttctgtttatatttcctccagtggttcattagtagttcagaggggtattgttttccaagagcaagtttaatgcctgacattttcgctcaagatagagaagtagatttttgtctttctctcatgcattcagggtaagcaatgtaaagttgacaggggtatttagctaagaatcactagcacctttgaaaactaggatccctggggagagccagatacacaaagtaacaagatacagaagcattaaagctgcctggctcccgggctccccactgggatgcagtgcaaatgtctgcaaggaatgctacttgcagctgtactggatggaaatgttacactggtagtgcattttgatagaaacgattctttcttgtattgctaagagtcaaag

SEQ ID NO: 97084 - DNA, 1090 bp, Homo sapiens
gtaaaaggaagagtatcactggtgagggctggagacaggcagtgtctgaagggaacagctgtacctacaaagaccctggaaagggccaggcacggtggctcatgcctgtaatcccagcactttgggaggctaaggtgggtagatcacctgaggtcaggagttcaagaccagcctggccaacatggtgaaaccccgtctcaactaaaaacacaaaaaaattagctgggcgtggtggcgggcggctgtaatcccagctacttcgggaggctgaggcaggagaatcgcttgaacccgggaggcggaggttgcagtgagttaagatcacaccattgcactccagcctgggcgacaagagcgaaaccctgtctcaaacaaacaaacaaacgagccctggaaagaaagctagacccagagagctggggtccagcagcctagcttcccacagcgtacaatatgtggtataaagtctttgcagcttcctgccaaacatcttgttggcatatagtaactacttagtagctattaaaatgattcatctttgccatgaagagaagtcaggcataaccaaaaaatatcaaaacaaggctgaagatttttctttttatcttatcccagtcataaatgaaagcctggaatccagtgtgaatggagcctattgttagacctttagtatcttggtaaagctaggacccgcttgagttcagatctttaggaggtttatgttgttttgcattcatttagcaccatgtggttctctccctttgagaacctgatgcttttgagctactgatttttcattcttgtttccaaatcaccatccagttaaacacagtgtatgtatttttttctttttccaaacttaaaaatgatagtacttttaaaaatgcattattagttcagttgatgattcatgccttttagatttttgaaattatgtttgattaaagattataaatttaaaatacacaaaaggtcataggaaaatataaaggcagtcaagcagttcagaactactactggaatgcagaatttaaaaaaactattataattttattttttattttttgtaaagaggggtctcactatgttg

SEQ ID NO: 97085 - DNA, 1109 bp, Homo sapiens
cctgattacgaataatgccctgattgtgtttaataaaagtggcttaatattatcagtgattcaaaagtctaaattacactggataaattgggttattaccaaaaaaaaggaaaagggaggtctccctatgatgtcaagtttccattcgtggggtcggtcagtaccacggtcagcatgacaaaccaggatttgtcttttgggagaaaaatggtggtggtgaaatttagggcttgaagtaattctagaaattatttggtccagcctctaattttatacatgagcagccagatgggagaattggcttactcagtgtcacccagctggctaatggcagactaaggcctgagagtggggctccagtgtcctttctggtttgctcctccctattccctgctttttcagtaattgcagggattgggaaattaaggaacttttgtctctctactctggattcctctgccattcattcaggaggtgttcactgcttaaataatttaatgttgccagtatttggctgctttgcacgtgtttgaattttgtattttcctgtagcattctcaaataataacagcacaacaacattttttcttttaatatattcacttatgtaaaatatgtcttccatggccatatgcgatcatttctagacagcagatgactaggagtttctcctaggatatgagtttgggaaatacagaactgttaatatgtttggagtcatgattcgtacaccgtgacctgttacgtatgggttttcagatgtagtaaccaggcataatgacaagataacattttaaaaagcaagtcaaatttcatgtgcaagaaaagtcaagccgagagtgtctaagatgtttttgagagagagagagttggcttttcaaccttttcctatataattgcttcaaagtgtcctcaggatgatgattttttagaatagttagaccttaactcaacataaattcatttttaaaaatagatgacttgtgaaaatcctgaaggttgattaagctgtattatctcaaaggccatcccttttcctcttccacagctaaggattgtctaattaaacttctgtattgctaaccttaacaaaaagagtcttcccacac

SEQ ID NO: 97086 - DNA, 1021 bp, Homo sapiens
gtagcttgcccttcagcattctgtcatgtgaggatgctgcaagaagaccctcacaagaccaaatgccagtgccttgatcttggactaacagcctccagaactctgaggaataaatttctgttctttacaagttagtctgtgatattctgttatagcagcacaaagtggaccaagtgccttttcatgtactatgtccttaaccacttgtgtttattcctgctgtagcatgtaatgtaattgttttggttacccaggagatgctaagttccctgagaatggagagcttgtccattgcatcttcatgtccagcccagtacctgatgcatggtaggcactcaattaatacttgaaacaatgtgtgaatgagaagcgtgcagtaatagcacaaatagattaaggcctaggcaaatgggttgataagtagtaaggaagggactgatggggatcttggaaggtgagagcaagttgggtgggtggcagaatagttaattatcactctactgagtgcaaggttttattctctgttatttgctcatcttatttctctcattctactttctcttaattgggaatttagaattattaatgatttgtttgtagttgaaatatcactgtcaacatataaatactccaaaggcagctatatcctgtgctattaatttcaagttaattagaattattgaataatttgagggtggcagtgtattattaacactattaacgttgtttataaatatagagcaaattgggtttttaaaaattattctcattcttgtttttattatttttgatatgcaattttacatatttttggggtacggtgtgatagttcagtacatgtatataatgcataaagatgaaactagggtaattagccatctatcacctcagacatgtattatttatttgtgttgggagcattcaaaacccactcttccagctaattgaaaatacacaataaattgttgttagttataggtgcctgacagtactgtagagtactaggactgttcttcctttc

SEQ ID NO: 97087 - DNA, 1023 bp, Homo sapiens
tctcctttggatatataaccggtagttgggttgctggatcatatggtagttctatttttagtttgcccgtgtgttttttgaaataagacctgttaaaactacataaacttgactttttattatccagataagacttgttcattgcggaaaaattatagctatgacaatatgtaatttaatagttaatatatgaacataagaaaaaataaaaatcccctgaaataattattactcagagattaccactaagcaattttgggtaaatatattgccaggcatttttagtgtgtgtgtctaaatatatatctactttaaacgtaaagtacactgtataccttcttgtaaccggatcttaacttaaaatatgaatgtgcctgttaacatttccgtagctcatctggttttagcatagcggtagtgagcagttgcatgcacccttgacagtatgccacatgacatacaagctgggccatatttctgctctttctccagagctgcagaggtcatctagacacaggaagacacaacctagaaaaatgggggagttaatactacaactctcacaatggggggtgggagttggtggataaatgctgcggcatccctgtcctgtgttgagacagttacaagatccatgctatgtggttctgcaggggctccccatgcagttgcctgcagcagtaaccagctcattcctgaaaattgtgttggtttttctcctttgtctatcttactttctccaaagcagcttacatccgggtctttatctcagtgactctttctagagaatcccaaattaagaaaacgtcaaccctgtattattgaacaatccgatttatcttaatttttgttataaaaagaattataatggatatctatgtataaattcctctacatatgggtctagttaattatttttaaataataaatgctaagtcaaggatatgtttttaatttttattgtaaatagaattataatagatatctatgtatcagtacctttatatatggatctagttaatt

SEQ ID NO: 97088 - DNA, 1168 bp, Homo sapiens
gatgcaaaaaataaataaatgaataaataaaaagacgcaatttctgttaaccaaggcaaaaaaaaaaaaaaattaaggaaggaagcctaagggatcttgtcagtgagataatcattgagttatgtaacagtaagaactggttacccatctggacctgtggattgttctgtagattacaggatttggaggtcctttctaaacctaaaattcagtgtttctaggtaatagctcatttgggggaatctattccaaatgcctgtgatgtttttctttcattactcattcttcgtcacccagagtacccagcggaaggcacagtggaagagcccagctggcctaggtttgatttccactttctctacttatcagctgtgtagcctttaattaattacggttcctctctgagactgtctacaaaataattgatacttaccttgatgcatgtattaatattagaatacaggctaagctactgtatataaaagtaaagcaaaacacactagcttagatatgagagaaatgataggaatttatttatctcatacatacaatccagagggaagcagatcagggctggtgggagacttctgataccagactccatagaaacttccatttcagggccagtggtgactgcttcagttttcattatctcccttcaataggaatggagaaagggtgagaggaactcattcacactgaccttttaggggcaccgtccccaagtgacacacacaaactttgcttccaccagagcttcccaccagaattgtactagccaaggaggctggatgagaagcttatctttagctattgctttactagcagtggttcttctgcttcaaatgattctcgcaaagattagaaataattcattaattcatttatctatattgaattgtgaaatatcttaacaaagtatttagcaagctgcctgatacatggtaaataccaaaaagatggaatcagccttcttacttttccctagtaccttactacttgcaaagtgtggtccgtggcctaatagcatgagtatcaactgggagctttagagatgcagaatttcatccccaagcccagacctcagcctgcattttaacagttggtgaagctctgagctggcatgttcttttataaatctttaatggcgtctgctggcctctgctgg

SEQ ID NO: 97089 - DNA, 1092 bp, Homo sapiens
tctccccagagtactccttgtgcctgtttaaagaaaacctacaattttaaggagaaaggaagaaaaacgcagaaaagctccatatattctatataaagtttgtggccccggtatttgagattcataaaaaggtttaaaggattgtccagcacttctgtttgaactgttaggccagatttctgttttggtgtctctggcttgctagtatcatctatgatgcaagaatctcttatttttctctctgtttttctgaaatcaaccatacaaatgaatttctcaggttgctgaatattttattaaatctgtaacagtcaggaattctacttatggctaatgctgcctttcactcaacttacgggtaatttataaatactggtgcatgatgtatgacatttcaatcgcaggctgaaatgcataaaaatgcaggcaattttatgcatctggtaaggtatatcttataggagattcatgcatattgaaagaaactttttattatcagtttaactacattaatatatcacattcctttctttcataggctgccaaaatggcaaattatgccaagtttcagaaaatgtgtgatctcctgtttgttatgtttgccgtggtttttatcaccacacgactgggtatatttcctctctggtgagtatgccagtctccttcctgatagagccaccctttccaaataagctttctgaaccattttccttttgaattttactgtaagtatttacaggtttaaatatattgggggggaggggaaatacctcaagaagctgcttgatttcttcttccagaagagggttgcactctttactaatgatttccacaggatagttggaaaaggatgtggcttgcatggcttctgaagccacagaaagccatctgtcatagaaggcactagtctagaatatgactcaagaacctcagctgtgaaggttggaattaagaaagaaaccgtggtgttgcaaacaagtatatgacaggaatctcctgtaccaggggttcacagagggttgtccctggattagcagtagcagcatcacctaagaacctgttagaaatgcacattcttggccccaccccagg

SEQ ID NO: 97090 - DNA, 1047 bp, Homo sapiens
ttttccttccaggttttcagatggagctgatgcatgtgtaaggacagccctggcatggcaggcagtgcacgacaggcttgctggcagcatgtcactcatgcctgcccttcccctttactctcatgctacctcgccctcacagaaggtgatgaaattctcttaggctctctcgcctctggtccctgtctgataaatgtgtggatctgactctattttcggtggatttgtctagaatttgtgctaaggggatccgttggtggctgtaccatctctttctctccaccactttttatccgatcctgtgaagagctattgcttcctgcttctgtctaccttgacctcttcctgatagcatgccagcctcttaagaggcacaagcaattgtgatagaggccagactgaggactaggatgacagcatcttccattagagctgtactcactacagttgtgtctgtaatacataagagggtctcaggaaaaacacaatgaaaacctttcaagactgattcaattaagtgcctcccaggagagactgagccaccaacaatggaaaattcaatattggctcgcagaaagacgcttagtcacataaatgtcctttttctctaatgtgtaaggaaaaaattctgcggcgtccttttgaaaatctgacatttgcttttttaaaaagtgctacctctttcaaattctttaataccagtattcatgggaaattcattaggggtgatgtgaaattataaaatgaagggctgcagtgtctaaaaccttttgttctgatacacatttgaaatcctgcatgaaattacccatgcttatgactccaggcagggaccaaaaagaagagtgtctgttgagcttgaaatgcgagtgtggatgccaaggattttgctctgtgtcttttatgtgaataaagaaatataatgtgcatcttcttttcaaaaactgaattcaatattaagcagcattcagggaatgagcagttttcttttgtcctaaaagtgccattgtaatagttgaacatcatatgtacagtttataaacagct

SEQ ID NO: 97091 - DNA, 1005 bp, Homo sapiens
ccaccacgcccggctaattttttgtatttttagtagagacggggtttcaccgtgttagccaggatggtctctatctcctgacctcatgatccgcccacctcggcctcccaaagtgctgggatttacaggtgtgagccaccgttcccggcctgttactgttttctggttaggaatcattctttatatgaactacatgtgggtggagataagtacaccttttttttttcaggctatcagctgctacgaacacactgcccccattttgttgggctttacttattgtctgaaggagtttacaaacgcatgcttcagaccctcgcttcaaaagacaatgtctgcaaaatcctgggaggataagcgtaagctttgagcagctctcagtaaaggagggtgaggaaagagtggtccctgaattatctatgagttgggacagtttggcaacctcaaaagttaaggattttaaagcttgaggctctgctgtcctcaataaagtggatagaggaggaggacaaaatttaaaacattgaattttgcctgataaatatcattcaggcacacacaatcataaatgacccataatcatcatgtctctactgagagcaggaatggatcaacagaaagttattcagaattgttattcaaagttagagattttttaaaaatgagtactgatgggaaatagagaacaaaagggggaaaagcttacagaagtggttcccaaacttgtttacacattgaaatcatctggggattgtttaaaaattccaatgcccaggctccaccccagaataattaaattttaatctctggagatatgtggcaagcggcattgcttttgaagctccccaggtgattcaagtgagcaggcaggttgggaaccatcagcctattgaacaggctctttgaagcatatgagacacaggtgggaagtggagaaaccagatttctgaattattcagataaagggaaatgagttttgcaatggaaagcaccattacgaataaa

SEQ ID NO: 97092 - DNA, 1005 bp, Homo sapiens
tagcaattccctctctacttgtcagtggagtccctcagagatgagttcagtgaattatcagaatgaccaagattttctactttaactgagttaattgattagacccagaaactttgaagctaaaacaatctcacaaccagagcctcacattggtatgtgtttggtctctgtttttctcacctctgcaaaacataccattgaaatctctaagggaaggggaaaaggagaaaaaggtaaggaagcccatggtaatctgacagcattccccacttgggcccaggagcacttggcctgccattggccttgctaggagtgatcctacaatggaaatgagcaaacctagcccttcagggaggagcacacaaatgtagggaggtttcagagccatttctgccatcctgcctctatgaggatgggaggctggttttatactcttttagaaaactggaaaagtaagtccctggaatctcagtctttcttaggtttctacctgcctagcaggagtcagccttatctatccttttcttaaagtaggggatatttagagatacacatctgcctcagtcctttcaaagagaaaagcaaagaaaagggcacagggctggcactcccatttcccagttgaatttaaaaagatctttggttttgtgtcttgaatattttgtgtacatgacaaagtagtaatgaaaggaattatataattttcagtaatggagacaattctgttgggatttaagggtcaagtggggtgggccaaagtggggaaaccacataaataaaaccaaatgggttatttaagcaggcagggcctggcatatggctaccagaaaccagcttatgagcccaagggataacacattgcagggaattacaggccaaagggaaagatctgcagaaatgctgaacagagatattgatgtgtgtcctccatcataatgtggggacggatcggctctgagcataagcctgggtgaagaacggagaaagggatgggagagcctgaca

SEQ ID NO: 97093 - DNA, 1050 bp, Homo sapiens
tcgtgatccgcccacctcggcctcccaaagtgctgggattacaggcatgagccacggcacccagactgcattcattgttctgtaatcatttttgtcaaaaatccttccaatactcatttcaaggcatcatcaaaatgatgtatttcaattatcagtgcttttccaggggaagccttacaaaattaaggaccctctaatgactctcctactagatataagcctaggtctcactcatattctcacttccactgtgtttttccctgtgctaggcatatggcttgtacttaagtaatgtttaggagttaatctctttttttgcagtgtattggcattgaatggcattcttcgcgcttatttaaagcccaaaagcaacttcaaagatcatacaggcctttttacaagtagatatgaatcacaaccaaaaaatgaatgaaaattaatgaaagaaatgatggcaaaagtgaagggggaaacatatgatccaacaattccacttctgggtatatgcccgaaagatacatactcagagcgatatttgtggacccgtgttcatagtagcattatttgcaatggccaaaaggtagaagcaacccaagttccctttcaatggatgaatggataaaatatgacttatacgtattataattcagccttaaaaaggaaggaaattctgacacatgccacaacatggatgaaccttgaagatgaaacaagcctgtcacaaaaggacaaatactatatgaatctacttttatgcggtgcctaaagtagtcaaattcacagagacaggaaggagaatggtggttgatgcaggctggaagaatgggtgccgaatcttggttttgaaagatgaaaagtgtgctgagcatgtatggcagtgatggttacacaacaatgtgaatgtacttaaagccagtgaaccgtacacttaaaaaagtcaagatggtaaattttatgttatatttattttatcatttttaaagaagtgaatagggaaaaatatattaattaacctaaaaccaaatgaaagtcacaccatcagggtaattc

SEQ ID NO: 97094 - DNA, 1050 bp, Homo sapiens
ttaaagaagtcaagaagtctagccctccatgatacttacattccttcataaatgactttgtcgcctacattttatctctccaatgaaggggaacttattgctctggcaatgttctcatcctcttcagttttttaacattgggatctgtttccccttgtgtatgactgcatgtgcttctagcatgccataccttgatgatttcttaggtgctggttatactcacctgcttctactccacaggtgtccaaggatgatcgaagtgatattgagtctagctcagatgaggaggactcagaacctccgggaaagaatccccacactgcgacaaccaccaatgggaccagtggtaccaacgggtatctcctgactggctcctgctccatggatgattaattactcaaaactacaagtcccaagcaaagtgaactatttgttcctggaagtatttaataagttgcaaatgcagttcctttcataatatctcagcaccagaaacaaaaattaagattatcaaagcattttgaatagtgcactgccatgtgtcctgtctgtgaatgaagaagaattaccattctctctttgtaggcatgctgtatgtaattgacacaagggaacagtatttgcatttgtactgtcttagaatattatttatttttttgtatttgtaaatctgtggacaaaagagggtttcctcactccttttactcactgggctcatgacagtgaaggagatgctccatctgcttctccccctttctcttgctgtagtccaatgtgctatgagcatcagcttactttgtcacttagagcaagcaaaacccagtgcaagagtctcgttcagctctaaataggtttgctttcttttagttacagtgcccattttgaaattgcctatacagtcttagtgaccatttaaaccggacgaactaggtgtttaattttcactcttcatgttcaattagcagttcaaattaaagaagatggttattggagaacttttttgaatggttttgtattaaattgctttgaaatagatttcatttcttgtgc

SEQ ID NO: 97095 - DNA, 2452 bp, Homo sapiens
aggcttagaaatacatctgcttgtttattgagaaaacgatgcaaataattctgcttttagagccttgttattttatttcacaaaacaggcatatgtctaggagtgtaatttgtggatggttgagtttgtaagaacaatcataaaaggacttgttagtctccagaacatctgctaaaatgcaagtatatgtataaggtaatagcatattacagctgaaaattttgagaaggtaaaagtttcttaattaaaatatgaacatatttagcttgctttagtgtctggggcaagtcctctcaatggctaaaattaactttagagatccatgtgttcaggtttagatcatatgacactcgagcacagaagaataatttcaaggaggtcatcttgtaaattaaaggtttagaagaattgcataaaacgtagtaaatggggtctgtcattagcaaaggcaaatctaagcaatcatttttccccccagaagttacttagaaggagaactgggaacacttggggtctctctaactgatggcattcacttcacacagtcgtctatgttatccagagatttttatttcattttacattttagggcacagttctttggggctaattaaaatggggtttgcaggctttttatggtgaagaataatatatctctgtctatagctttcccatggtagcctgataaggctgagagagaaaaatatgtgcagtatctcatcctccccctgtaccaggccatagctttgaagtgtattttgtaaattcaactataggttagtcagaatgctgtttttcgttaattaacttagcctgtgttgatatctcctccttcctggtcacattcaaaccttcccagagtacaaaggggtatgtagaaaggattccagaagaagtaatactttattctctaatgttaatagcttttctggatctcttagtagggggaaagtagaaaatcgagtagaatttggcctcaggtcaataaatgatataaaaacatgtgttctatttatgtatatatatgtatgtttctccaaaaagtgataaaaccaaaatatcactgactcatccctacccatattcttttcataaaacccactcaccaggtacaatagaaacttccctccttgtttgtcagcctcctgttcatgttccccacacacctgaaggtggtagaatcttttcagcctcttagccagtgagctaaatatggctaagcacaggtcataagagcacctaaggccagcatataagccaactacagttcacctttccaaatttggtcctatggatgttgagcatagggaagcaactctcagtattttggattattcaagtgtatgtggtaaaaatgcagatgattgctgctttaccccagggtttattagcatcctacttctgctgggctgcatcattatataatgccacaggcatctagtcaaggtaaagaagccagaaaggttaggcaagaagtgagataaaatcagatcacctttgatcaaaatggttggtgaacctccacatgtccagttctgttgccaaactttccattcagagtatttggtggagtttgaatttgagcaaactaaatgccttcatcttaggtagaaagggcctgaatcttccattttatattcaaacctcattgttatttggcctaagtaaaaagtcagatttcatttccatttacctgagttcgctttaaagagcttttcaaagagagctttatagacacccacaattgtccccaatctcttcatgatgttgcattaatagttgtttttgtccctttcttggaaatgttaatgccaaagttgcctgaacattgggcggttttcttaatttgaagtataaaaattataaagagtaattccaaaggtattaaaagattgtttaacagtatgtgtggtgatgtcattatctccagagaggcttcaagaaatcctttggaaataaaaagttaaatgtttacatttcatgtggtatttcaggtcttcaggttctgattagcttacttttttcctttgtctttggctgatttctgctttgtagataaataataatagccctgagatgtttctaacatttaaataagaaaaaaatcaaatcgaagtcagcctgctggaaaagtgatcacatggcagttgcagtaacttgtatggaaagagaaaatgcaatgagcccagttactgcacttgccactaccatgctgtccatggaaggaataatcagcagttcagttgtcacaagccgcccttgaagaaaacgcagcaaaatattttaaaatgaagatattgcagtccccagagccagtgaaggtttcttttggtaaaatgaaattgtgccattgtcaaagtaccccgtagtgatgagcactgactggttcactggccacattttagttcttcataataataggccacaaaagggctctgtggtttgcctccat

SEQ ID NO: 97096 - DNA, 1050 bp, Homo sapiens
cttcctggtttgatgtctgttgcgtggcctggaaaccagggagcagcaactattgagatggtttctgtgttcagtgaaaaattctatttcattgagacaattttttctttatccacagtaattttttgacactgtcatcatgaaactacccttaggaaaataagattacctgcaaaaaaaaaaaagaaatgagttatggaataggaacagttatgtgatgattctgaaactttaacttagagcttcattactttaagaatggaaaacaacctctgagtttgatttcccaaagtttcataaagcccctaagctcatgattttcatcaactctttgcccacatagtcatttacctccacagccgtttgttgtcatagaaggggtggtggtgtttggatttgatttttttcaacttgcagtgagaaataggataggtgacaaaaccttacttgttttcttaagacaattcagtgcttgagcatctctgtcagaaatggaatgaaatactgttagccaattagaattattttatgtattgttattgtgttttgctgatttttatatgaaaatataattattcattcttgatctctggaagcaatcattattatgaggatcattttactttggaaacactttcataataaagataagtattaagagtgcagtgtaagtgccctttactgtaaatgctaaccagctcgtgtgggtaaaacatcacatctcacctgatgaggttaataaaggctcacatcatcccagtagattgttacaagcctcgtcaactcccagtatcattgtgatcattgagaaagtaatgttacgttaacttggatagactgtagtatctctttgaaaattaagattaaaacctcaatgctaaattttatgtagcactttattctggaaaacatggtttatagagatcatctgaaatatatcaggttatgcttatttttaaaaaaattttaaaagaggcacctaggataaacacccaaagcacaacacaaaacttcccttctctgtgtatgcacccctcatcggagtttggc

SEQ ID NO: 97097 - DNA, 1047 bp, Homo sapiens
ccttctttctgcaccatcccctttccaactccccatcccactgagagccacttttatcgaccaataaaatcctctgcgcatacaccgcccttcaatccatttatatgacctgattctgcctggatgccggacaagaaccagggtgccaagaggacagggactcggatgccactgcagggcccacacaaagcctgtttttgccagagaggagcaaccagctagttccagcattcagcaggctgagtgaaacaagccacgccagttcctgcccaaaaagggggtcaatgtcaagggaacaatcccatctcaaaaggacaaaagtaatgaagaaataaggggatttcatggtgattgccagggctcttcagattgggtggttaaaggcaccttatggacaggtgatctgagctaagaccttactgacaggagcagccagtggggaaatcttgcataggagcaatccagacagaggcagtgggaacctgaaagagaaaggctgcaaggtgggactatgcttctaaattcaaggaataacaagaaggccagtgtggatgaagcataatgaacaaaaggaaggcgcaggccataagactgaaaagttagcaagggacagatcatatagggcccatatcctattcccgtggtaaggagggcaagttttaggctaagagtagtgggaaacatttcagggatttgagaagggagtagcgtaatcttattggttgtcatctttaataagagaaaggacatgagctaaacaatggaacaaatacaaatttgtatgtataactggaaaaagccttctcaaactcctagtgtgtcagtagtgtctgcattgcgcgacaaggcaggaagatgggcacatggccatgggaggatataaaggattacatattactgaagatttaacccccaagcaagaaagtcaaagtcctgatggagaatgagaggtggaaggttttgctgtaagtatgctgagatctgggacaggaaatgcctccaggtcacttcaaggaaagcaacttgaaaaaaatatgagaaactggc

SEQ ID NO: 97098 - DNA, 1023 bp, Homo sapiens
ctgtgctccttagcagagtatgtgtagggtggaatgtggggtcagaggagagaacagcccttatccgtctagagtcttttatgatttaggtcctcttatttctcttcctaacgccagtctgctgaggttcaaaacgtgtcaccccaggctggattggggagagggaaagaaagacatataccagccacctgctccttgtccttgctgctttatctctagtcattcaagaacaaatattaagcagccattgtagtaaattgaatggaaaactaactccaattgtctgcccctctctgtctctatgccctttgcaatgggacactaagttcctcctattatgaagtggaagctctcctcacccctttaatctgggctggcccatgactggctttgatcagctggatgtggctgaaatgatgggatgtccatattaagctgtacctccagaggcctcgagctcttccactcactcttgtggctcctctgccataccctgagaagagcctggttagactaccagctgatgaaatacggcctcagccaacagctagctcccagccagccccctgcccagaaaagcccagatgcatggctctgccaagccctgtgtagatgacctgcttttacatgagtgaggtcaggggacacctgaagatccatccagctaaactacagatttgtgaaccaaataaagtctctgtcatttgaagccactgggtttctgtttgttacacagcattattgtgacaaaggataaacgataccaacctatttctgacctccaaaatcaaggctttttgcacattcaaacattcctccgagaagctcaacaaatagccaagttctaattctcagtctggattcagctgggatgccctgctgcccttacaacggcccagtggcagacaggagcaagatggaaggattttaattcagcagatgtccaggaggtctgagggaaagctagtcagcccactgggaatggcacacatgaggagtttggggataggagtgccctaccaa

SEQ ID NO: 97099 - DNA, 1102 bp, Homo sapiens
gctgtcactctttatttaaaaaaatgaaatcttttatttaaaaaaatgacttgatagaaactgggaaatgataaaagatgttttttcttgggagcaattgcagcctctcagcattatttctggcttttgattcattgtactgaattcctgtgaaagctgaatattaaaagaaaatggatttttaaaaacaaatccttttaaaggccaggtgtagtggctcatccctgtaatccctacactttaggaagccaaggtgggcagatcccttgtgcccaggagttcgggatcagcctgggcaacatagcaagaccctgtctctatttctttaaaaaaaatacaaaacaattccttttaaagaaaactcataaaatccatggcaaaactaaaaagcaaatgactggatactgtttctgggactttactttttataaaagtgattctcatgagcatccttttaccattgtaactactgtggatacagaaattcacttacatcaaacactttttattaatgtccttggtcttatggagtcagtcctcagttttggcagaagctttggaagtaacaccaagtttgcctgtctctgagtgcgtctgtctctagttatttggcatcagtggctgtttacttgtaaaggttctctgtgggcactaacgctttggagatgaaaaaggatttcaacacttagagaacaagtcttctcagaggggttcattgaatcttgttagtagatttactgctagtcctttctacctgaaatgaattcctcctatactacattgttctagaataatcttctgtgcatatggatcccatctgttattttctctgcttaagaactcatacagatatgctctagcttcccacgccagatcgtaattcctcctagaatgtattccctatttcctgcacacgtcatctagccaactaaattttaaattacttgaaaaaaattatgtcttagaatagtgttgtgcacaaaaagtggaccccacatactcatgaaattgatatacgcatccccttttacatatcactacccacccctcactgggccactctcactaatgatgtagagatcactaacacctttctacaaat

SEQ ID NO: 97100 - DNA, 1047 bp, Homo sapiens
agtaagagttgctattccctgtccattctgatacttccactggctgcatttaattttaactttataaaataaaacaaaatttttaagcaggataatctttagttttacacacattgttctacctgttcgagacctgatgaataagaaaatattgtcttgttcacaacttttaagtcacatggccgagcactttttaatagagcagattgttctttgaggatggacccttgctatagctatttcattttcttgataaatctatttgttgtatacttactgcttccttatttacttttgttcaagttagagtcctttaatggcccaaatgtaatatcatgtatgtgtttcaggctatgactgcctcaggagtggaagacattttgactgagttctgtgttggctcagtactgggaagatgtgagctaaaacacatatgctctttccagaatgggtttatgatttagttaggccttgaagcataacattaaagaaactagcaatacaagaccacatgcattcacgaatgctacagacaccacgagtgcaggcagctgacagcttcgaggaggcaagaagacgtaactgtctagtcaaggaaagatggcaaagggcactccaggcaggaaaaatggcgggagcaaagggctgggggaggactgtgggaaatgtgtcaggaacaataaagacacctgttgcatgagcaaaaaaataggggaagaaaaaattgttcagggagttgaggctagattttagggctgatgtaggaattttatcacataggctatgaggaatcattcatgatatctgagctttcacatgcattatttcaaggattgaataaaaaagaataggatggtagagttggagtgaggaggttgctaaacatgagtggcagagggacagaaacccatggagaaagacgggaaactaatgactcaaggtgggaggggaggatgcaggcttcgctgataaggaaggagaaaaattaggatcccggctgagagattacctttagatggagcttcacaaacaagaagtgtgaggatt

SEQ ID NO: 97101 - DNA, 1138 bp, Homo sapiens
tgcccctgtacaagtaatccttaatttattggaattcataaaaatggttctcagctcattacacctatgctatcatcttaaagcctttgtagctgacagacactcaggtgaactgctgagctggcacagcgctgtgccctggtgactcagttcctatttctggggaatttatattttgagaatctgatttcttatacagatgtttgggtttttttctctctagataaatatcttccaatctaattagtgctagattttaaaaagcaagccccaaaaacctcttatttagcttttcaattttctctaaattggatattctcttatggtataatctgatagtacatgatagtatattaaaatagaatatacaggatacattttggaccagatgccctttgctgttgtttctctgctgtggtcatggaccttgtttcctaagcaatctgtacaagagagctggaaatctgataatgggtgaatttcttttcctttgaccaccttcactggagacttgtcccagtgtaccagctggtacaactacatacaaggacaatactgttattcgtgactttgagtctcatttgattaatagcccctgtaaataccactcttggaatagcaaccacattttctaatgcctgccatttcacttggaaaattctagatatttctttcataattgtaagttattaaggctgggcattgaaaactgttcttttttcaggctgggcatggtggcttacgcctgtaatcccagcactttgggaggcagaggcaggcggatcacttgaggtcaggaattcaagactagcctgggtaacatggtgaaaccctgcctctactgaaaatacaaaagttagctggacatgttacctttaatcccagctactcagaaagctgaggcaaaagaattgcttgaagccaggaggcagtttgcagtgagctgggatctcaccactgtacttccaggcttggtgacaaatcaagaatctgtctcaaaaaaaaagaaaattgttccttttttttttttaattccagtggtcagaaatgaaaagtcagtcagaccaaagtgttgcagataaaaatgacttaacagtttttaaaaaaagtttaaatagttaaaacaaaatatataagt

SEQ ID NO: 97102 - DNA, 1113 bp, Homo sapiens
actaatgatgttgagcatctttttgtggacttaatggccatttttatatattctttggagaaatgtcctttcagattttttgcccattattgaattgggtggtttttagttgcaggagttctaaatacattctatgtattcaacctttatcagataaatgattgcaaatattttctcccattctttaggttgtcttttccttctcttgatagtgttctttgaaggacaaaagtttttaattttaacaaagtccaatttatctagtttttcttttgttgactgtatttttgatgtcatattgaaactataatatattttaaaacgaatttgtaacttctgcatttggaaatgttggttacatgactgtatatacttagcagtgcagatattgatcaaagatggagtaagaaagggtatctccattgaaagctttgacacactaaatagtttaatctcttttcaggtgagaaattgcagtttattttcactaatattgaccctaagaatcctgagagcccatttatgttttccttacatctcaatgaagcaagggactatgaaggtatgtactaatatctcctaactggtatttaagattggcgttccaaaatgttatttcaatcagcatataaagtaatatggaggaaagtaatagctccagactctattgcttcctttttcagtcttgcttcttggagtatagtcttctaaaggaagtgaatatagtcttgatttatagatactgtctaagatccttaataagtagcatctcttcaggatggcacagtgccacagtgtctgaacaatctaaaaacaaagatcattgcatttatgtgcaaatatgaattgtccttttagataacttttttaaaaggtgaagctttaaagaaaatggctgcttaaatgtgaatattagaatttatccaagtagatgattttaaaatcaaatgtaaagtcaccagaatttaacaatttattttcccaaaaataatttttgaaatacgaatcctgcaaatctcacacattgataataaaggttagttactgattctgcagctggccaaaaggcctttgatttataaggaatatatatcattgataataatgtgaaca

SEQ ID NO: 97103 - DNA, 2604 bp, Homo sapiens
aatttaaaaatcagccaggcgtgatgtggtgtgtgcctgtagtcccaggtactagggatgctaaggtgggaggctgcaatgagtagtgattgtgccactgtattccagcctgggcaacagtgagaccctgtttcaaaaaaatataaaaataaaataaataatagagtttagttatctttgttggtagtttttatttctgtgcttatttggagtggggagctgcaagggtcatgatcttttgattttctgtttcttgatttaatttggtattctcattttaagaagcttttctgtctcattttttttaaagatgagtaagtaggaaagaatagattaggttttttttcttttttgtcttttataattttgaatcattagaaaatgcttatcagtcaaaacattctttattaatctttatgaaagtcagtaaactttggccttttcttagatacatgtcagagagccaagcatattctagctaataccttgtgcttcttacagagatcagcaggcaaaataagctcattcaagaaaaaaaggataacttgttaaaattgattgctgaagtaaaaggcaaaaagcaggaattggaagtactgactgcaaatatccaggatcttaaggaagaatattctaggaagaaggaaagtaagtttcctcttataaacatactgatctaaaatggaaagtggtgacggttcacctttattaagtacatcttgcctgttccagttcattgctaaaaatggattacagtaccccagggcataaccagccactcatctctgcaagatgtcattaaagttaactaactgggttttattttcttttgtcttacttaaagggccttctcttgttatttttaatataatcagtaataatgaaattgataggaggttttaattaagcagagtgagaaatggtgtccctaaataaaatttgctttggacaagccatagtgtactttatgcaacaaatatttattgaccatacattctctgccaggtaatgttaagcgttctttttatgctgcaaaatctcttatgtataaagaactttcatattcaaatgaatgcatcttttagaaaggagccttgtttgctcacaaactaggtagtctattcttcaaatctgaaaatagcaaagtttgttttgtaaatgctttttcttgtggagttcttatccaagtctaaattgtgaaattatttttctcattacttagggactattgtgctactttaaagtatatttagggactattgtgctaacttaaaaaaaaaaaaaagaaaaaactaaactagcatgaaataaggctgacctctcataagaaatagttatgttaaaggaagagaacattttcccatgaagcaattggttatctagaaaaaaagcacagtagtataaatgaagtctatttctatgccagccatacaaatccctggcctatttacttatgctactacataataaagtaagacaaggcttattcttctcactatctgtatacattttcctgagcagtttttccttccaacttgaatgaacagaagcttcttttagccaactggtagatatagaaacaataaatggaagcagatttataggcttggcatcattttatagttgattttaagtttaaaaaattaactcagtgagcattaatttgctattatttaaaacatttaatattgtgtgtgttttttaatcagctatttctactgctaataaagcgaatgcagagaggttgaaaaggctgcagaaatctgcagacttgtataaagatcgacttggactagaaattcgaaaaatttatggtaagtttgttaatataaataaaatataggagattacaaaagtatgtcttttcttaagtagaggaaaattttaaaaatattttcaactaaaataatgaccacattaactttttagaaaataggaaaaaattacaatttttaaattattctaatgtagctactgatgctgtagttatttatcattcggtattttaataaatgtatttttggcatgattgtcaacatgcaaataatttttgttcttcctatcagcattgtattctgagcatttcctcagttgctatagtcttcataatggtaatttttaagtagtgatgtaataattcattctattaatatagcataatttattcaaccatttacctattgtttagcacatattttgcttctaccaacatttggattctgccatttttttcagttttagaaatacagtcatccccacttattcacggtttctgttacccatgttcaaccgtggtctgatgatattaaatggatgagtatggtacaataagatattgtgagagggagagaagctacattaatataacttttattacagtacgttgttgtaattgttctgttttattattagttgttgttaatctctttctgtgcctaatttacaacataaactttatcataggtatgaatgtataggaaaatacatagtatggacagtccctgacttatgatagttcaacttacaattttttgactttataatcagtttatcagggtgttaaatgcatttttgccttacaatgtttttgacttttgatgtgtt

SEQ ID NO: 97104 - DNA, 1109 bp, Homo sapiens
tcctgtgcagttacacttacctactaacaagctgctaggaggtaaaggtgtcctgaattattgctgcacgttaacaacagttaagcccaggtggcttgatctacccttgaatacctagaattaaagataagttgctattttctagcaaaggacaaattgccaaaatactgtatacccgattggaatatgtgggtgatttgatttcagtaacttaaaaaatgcaatatgtattctgtttttagcattgtcctacataatggtagaggacgaactggcacttttcgataaaagcataaatgaattttggaataaattcaaaagtacggacacctcctgtcagatggcgggactaagagatacctacaaggattccatcaaagcatttgcaggtacctagtgttaacttgtaacatgctggttttgctgttctagtttattttttagtgttattgcagctgaattgaaagttcaatttctctttcagaaaagctgtctgtgaaattaaaggaagaagaacgaatggttgagatgtttctggaatatcaaaatcgtatgtgaaaaagtataaatcatggggttttttttagataaaacatctttatcatgaaatctctcatacaagtaagacaatgtattttgtgtacacaagtgtgtatatgttgtgtgtgtgtatatatatatgtgtatatatatgtatatatatgtgtatatatatatgtatatatatgtgtatatatatatgtatatatatgtgtatatatatacatatatgtgtatatatatacatatatatgtgtgtgtgtatatatatatatatacacacacacacacacacacacacacacacacacgtacatgtagtggctcatgcctgtaatcccaacactttgggaggccaagttgggtggatccctcgagctcaggagttgaagaccagcccaagcaacatggtgaaaccctgtctctacaaaagatttaaaaaaaaaattaaaaattaaaatatatatatatacatatatatagacacatacacacacaaatacatacacattaacacatatacatgtgcttatatataggaataaacattgacatactatacagtttaa

SEQ ID NO: 97105 - DNA, 1057 bp, Homo sapiens
ggaataattagaaacacacttttgcacatatattttttacaaacagatgaaaaaagttaacattcagtactttatgaaaaaaatatatttttccctgtttgcctatagttggaggtatcctgtgtgtctttttttacttatgccgtctcatatttttacaaataattatcacaatgtactatatgtatatctttgcactgaagttgtctgaaggtaatactataaatatattgtatatttgtaaattttggaaagattatcctgttactgaatttgctaataaagatgtctgctgatttggttggtgatcattatagtaaatgatccaacaagaaaaggaattgactggggacctttagccgtgtctaaagaagaggcaccactcatatttcctataaaattatctaggaaaggaatccaggccccgctcttgggtccatttttacacattagcacttaattaatgttcaatattacatgtcaatttgattaatggctatgttgataggggccactatgtgttgtatagacatctggacttgactgtagactcctcagataatacagaaggtaggaaaagcaattcagtttggcccttctgtgtgttggcattgtctaaccagaactctctgtttcatgtgtgttctctcactagctgccaagacaacatttttatttgtgatgtctatgaggaaatcccatatcattaagtgccagtgtcctgcattgagtttgtggttaattaaatgagctcttctgctgatggaccctggagcaatttctcccctcacctgacattcaaggtggtcacctgccctagtagttggagctcagtagctgaatttctgaaaccaaatctgtgtcttcataaaataaggtgcaaaaaaaaaaaataccagttaagtaaagcctcaactgggtttttgtttctatgaaaatatcattataatcactatttatttcctaagttgaacctgaatagaaagggaaaccattcttattaagctttttattaggccctgtggctaaatgtgtacatttatattagaatgtactg

SEQ ID NO: 97106 - DNA, 1050 bp, Homo sapiens
tgactgttaatccaatgccaaatattttatgtttttattatggcagtactctacttccctcatcactctatgttattcggagtaattaatactagctgttgcaaccagcatatcctgaaatctcaggggtgtaacataatgaagccttattgagcactcataaaggccaacgctggtttcacagccctcctgcatcttgcagctgtgctgcctggaacacatggcttccaaggttgctgcagcagcacaggagacacggaggaggcacgtgtgcttttcattgcttcagcccagtagtgacacatggcacctccaactgacagtacgttggctagaactggtcacatggtcctaacccagctgcaagggagactgggaaatgtagggaagcacttgtttatttggtaagcacaaactgtctctgtcaaagaaggaagtatcttgcttcataaaagaaaaagttttgattttaacttgtttttacattgcaggtagaaaaccgacccctaaaccttgtacagaatatgaatataagtgtggcaatgggcattgcattccacatgacaatgtgtgtgatgatgccgatgactgtggtgactggtccgatgaactgggttgcagtaagtaaacacttgtttttatagttcattgtagtaactcaggtttacctaattaaaacatgcaataacataatgtagacactgaccacattttctccttaatgtactttttgcttgaattccagtcaagcccatagctagctgtgactgagtgcttatcctagaccagacattgtgtcaaacattctacatgcctggtagcaatcttatgagttagatgttattatctctttcttatgtacaaatgagcaacgaacttagaggttaaacgaattggccaggtcttactgtcattaagaggttgactcaggatttgaactctggtctgtttcactgcagagcaagtcctcttcccagtccactgggtgcctcttagcactttaaggctacatattttgtttattagtctgcacattatggtgggaggatg

SEQ ID NO: 97107 - DNA, 1095 bp, Homo sapiens
ataggcacaaaataaaattcccccaaactaaaaacaacacatcaataacagtaacaaacacaaagtttgaagactattttccagtaggagaatagggacagaggaaggtatgcttaacaggtcagggtgttcagttcttatctcttaagtctgtatgcaataaagagatatttaagaatttgggagacagtaatagtcaaaagaagaagtgctccatgtagtagtactgactgataagtacattaggaaataagtcctctaaaaagaaatcatgatcctgctatccaggattcactgatgtcaattaggagctttcattcttgatgccttccaagctgataaccaaatgtccctgctctcagagaatcaccactgtgactccaatgaatggcagtgcgccaacaaacgttgcatcccagaatcctggcagtgtgacacatttaacgactgtgaggataactcagatgaagacagttcccactgtgccagcaggacctgccggccgggccagtttcggtgtgctaatggccgctgcatcccgcaggcctggaagtgtgatgtggataatgattgtggagaccactcggatgagcccattgaagaatgcagtaagttcctgtgggaggaccaaggcatgaccagagcagggagacacgaggaaacttccatggggactgagagaggacatggagctttctttttcagctgatgggatgctcccccttggcactccctgcaaactctggcactgcaaggcagagtatagctgtgtggcttgcaggtggaaccagactctgtttctgaagtggctaatacctccttttgatacatagaatgtctaaccaaccagaatatgataccaagaacttatattttatatatctactgctttctcacttgagccacagagaaatgttatgaggtagggaaggtgggtgtgaaccaattccattttacagatgaggaaactgaggttcacattaagtggatggttacattactgtttagtgtcagacctaacacttcaacccaggttttttacttcaaaccctgtccttccccaaccccacccacaaagttatactgtaaaacaaa

SEQ ID NO: 97108 - DNA, 1194 bp, Homo sapiens
gagaggcattaatgcagatcatagcatctaagatgcagaggtagacgattgtagtgattaaataagatatctgagattaagaatctagcatacatttatcgtgagaaagaccctcaacagtttttattgccctccaacttcccaaacaatacttttatatcaccctggcagacaatctcaaccaatcactgctcctagaacacagctcaaaacacccactctttatttgtttattgttttttttttgtggaggaaatttattcatcatattaagagcacattttcagtttgtatttggatcttaagaaacctgttctatcttgccaagttatgttttctctgaaaatacaccattgtaactgagatttaattgatcctcttctagggccacgagagagctcatgcatgtcatttcttggaattcagtgttgacttcttctctccagataactgttgcccctggtgctttgctaaagaagtgctgtatgttctctgtgcaggtgcattcctatctggtggaaatgtgatggacagaaagactgctcagatggctctgatgaactggccctttgcccgcagcgcttctgccgactgggacagttccagtgcagtgacggcaactgcaccagcccgcagactttatgcaatgctcaccaaaattgccctgatgggtctgatgaagaccgtcttctttgtggtgtgttgagtcgctttatgcctctttttccgacttctatgttgattgtatacgatcatgattctgtgggtatttcctgaatatcatgaactaaaaaccagttcaaagtcctagaaggaaactcaggctccatcctttttctatttttatgaagtttttttttttttttttttagaaatcttaaggtttttacaaggcaaatggttgaagtagacaataagttgtctctactggtggctcttcaccatgtgctgggcattgaatcccctttgagagctaacattgaggaggaaacgagaggtttccacccccatttttaacagggactctcagttgtcatatttatttatgtttccatttaaaaggcaaaaaaaaaaaaaaaagactgagcacagtggctcatgcctgtaatcccaacagtttgggaggctgaggcaggtcgatcgcttgagcccaggagtccaacaccagcctaggcaacatggcaaaagcctgtc

SEQ ID NO: 97109 - DNA, 1195 bp, Homo sapiens
tgttgagctcatgccatctcgtgagaggcaaatgtgtgtatctctttgtggttccatgttcagtgatgtcacactggaagcctgagcttgaccatggtgtgaacagtcacactggaacatgctacaaatcagagcatttagaaaatttttcctgagtcctgtttgaccagcacactggccaggctcttttcttctcctcttctttctcatttctcctgtattagttgttgaaaccactgatgaaggagtaagttggtgaggaagttgaaaaatagtgacttttcaataatccacagtctttggaagtctttgttgtctgtcttagcatgattcattaagaattggcactgtttagtagaaatgttgactttgaaccattatagtgagttggtcgttgatattttaggatctctaagaactgctttttacctacaggcattaatgaatgccatgacccttcaatcagtggctgcgatcacaactgcacagacaccttaaccagtttctattgttcctgtcgtcctggttacaagctcatgtctgacaagcggacttgtgttgatattgatgaatgcacagagatgccttttgtctgtagccagaagtgtgagaatgtaataggctcctacatctgtaagtgtgccccaggctacctccgagaaccagatggaaagacctgccggcaaaacagtaacatcgaaccctatctcatttttagcaaccgttactatttgagaaatttaactatagatggctatttttactccctcatcttggaaggactggacaatgttgtggcattagattttgaccgagtagagaagagattgtattggattgatacacagaggcaagtcattgagagaatgtttctgaataagacaaacaaggagacaatcataaaccacagactaccagctgcagaaagtctggctgtagactgggtttccaggtaagaaaacactgatgagctttttaaaagttaaaaattaaaaaattctaaccatgttttcatcttgataggaaattaatttttcaacttgggttaatatgcagatacatttaatgtttctgcaggtttattttctgctttgtatctgatattcaaatgatagattcagaacagaatatctaattattttaaaaatttatagtatcatttttatggaaagaggaattgcaagggaagagagtt

SEQ ID NO: 97110 - DNA, 1064 bp, Homo sapiens
agctgtctcatagatctgatgtataccaaaattacaaaagttgtatttaattagtttatcaactaaggaaaaaatgaatgcaattatttttaatagctatagacctactaattatctatagctattaaatggtagcatttaatggtagcatttctaatggtagcagccagcccctgaggaagttgtgtggaatgccaaatattggattcttctagaattggcgattagtggggtagacgaagatgatgggggaaaggggatcaaggacactggtgatcttgtcgaaatggttgacctggcatttaggtagataaagaaggaagcaaaaccccaagtgggtaatagttgaggtttattgccaacctctctgaaagtggtactggatctcatgatacaggtgtgaccggcacaatgactgtggtgactatagcgacgagaggggctgcttataccagacttgccaacagaatcagtttacctgtcagaacgggcgctgcattagtaaaaccttcgtctgtgatgaggataatgactgtggagacggatctgatgagctgatgcacctgtgccacaccccagaacccacgtgtccacctcacgagttcaagtgtgacaatgggcgctgcatcgagatgatgaaactctgcaaccacctagatgactgtttggacaacagcgatgagaaaggctgtggtgagtacaacagaggatttgggaaaaggaaacaggggagactgaatatggattctcaacccttcacgacttagactttccaacctgtcctctaactacaaagttaccataaaatcactattcctgatatagcaaaaggttaccaaagtttcttggtatataagatggggacacacatttttttggaccaattctttgcttagatagtcattagagagaacagaagatgggcaaatattcaggccatcatttaacattattgccaaataaggtactcaagaatgaagggaaccaggttgattctctttgaattcttgtaatgactttttgcctgaagcatccctctgctagaactcgttggcctgttcttc

SEQ ID NO: 97111 - DNA, 1897 bp, Homo sapiens
tttgttctgaatttgtaaagttctccctttttttcttcttggttctccattgatcagcatgcactttcatttttcccataggaaatctttatttcaccaatgcctttgtttctgaaacactgatagaagttctgcggatcaatactacttaccgccgtgttcttcttaaagtcacagtggacatgcctaggcatattgttgtagatcccaagaacagatacctcttctgggctgactatgggcagagaccaaagattgagcgttctttccttgactgtaccaatcgaacagtgcttgtgtcagagggcattgtcacaccacggggcttggcagtggaccgaagtgatggctacgtttattgggttgatgattctttagatataattgcaaggattcgtatcaatggagagaactctgaagtgattcgttatggcagtcgttacccaactccttatggcatcactgtttttgaaaattctatcatatgggtagataggaatttgaaaaagatcttccaagccagcaaggaaccagagaacacagagccacccacagtgataagagacaatatcaactggctaagagatgtgaccatctttgacaagcaagtccagccccggtcaccagcagaggtcaacaacaacccttgcttggaaaacaatggtgggtgctctcatctctgctttgctctgcctggattgcacaccccaaaatgtgactgtgcctttgggaccctgcaaagtgatggcaagaattgtgccatttcaacagaaaatttcctcatctttgccttgtctaattccttgagaagcttacacttggaccctgaaaaccatagcccacctttccaaacaataaatgtggaaagaactgtcatgtctctagactatgacagtgtaagtgatagaatctacttcacacaaaatttagcctctggagttggacagatttcctatgccaccctgtcttcagggatccatactccaactgtcattgcttcaggtaagtgcactccaggtgctgcttgtcctgcaagtagacacaatggggtcaacacacatggatgactgagtgtttctaatgcatatgagactctaatgtctttgtgtgtgcttgtgtgtgtgtctgcctgtatgtgtccaggtatagggactgctgatggcattgcctttgactggattactagaagaatttattacagtgactacctcaaccagatgattaattccatggctgaagatgggtctaaccgcactgtgatagcccgcgttccaaaaccaagagcaattgtgttagatccctgccaagggtatgccatcatcttccttgttatatttctgtctgcttatttctggaaaaaatggggcctgaaattatgttcatagatagccaatgtgttatgggcttataaaactatggctacagattcaaaaatgaaagcatattgagtgattttacgtgggaaggagggtgcagcgcatagctccctttgatggcagaaaggttggcaacatactaggaagtcaacaccctgacttactagatctcctttggacaagttgtgtaagtagaaatgaagtttcttttgccatgttactggcaatttgcaattaaagaatattgtccttttttttttttttaaaggactatgaggttccctgtgaattaattattgactccttttgtatgactaggtacctgtactgggctgactgggatacacatgccaaaatcgagagagccacattgggaggaaacttccgcgtacccattgtgaacagcagtctggtcatgcccagtgggctgactctggactatgaagaggaccttctctactgggtggatgctagtctgtaggtgtctctggttactcatgtgggtgttaagaagaggtttt

SEQ ID NO: 97112 - DNA, 1073 bp, Homo sapiens
ccaatctccattacagaaattgtcagtgaaggtgttaaactcagggtgagtcagctcctgtgcaatggcccacgcttagatgtttgagtatatccttgaccagaatatcacatgcagggactagtggtttagctcccttttcttcaccgtgccacctgaaaaggttgactgactcatgtgagctccgtcttcattatcaatgaaaggggcacagtgacattttcctgacctgctgcttggtgtcgttgtgatgatcaaatcagaaaatagaagtgaaaaatctctgtaagggatagagggctgtataaatgtgagacattataattaggagaatattagtgtttaaatgttcaaaattttcactatgaatccatgaaactaatgaaaattccaatcctttagattgaaagaggaaacgtggatggaacagatcgaatgatcctggtacaccagctttcccacccctggggaattgcagtccatgattctttcctttattatactgatgaacagtatgaggtcattgaaagagttgataaggccactggggccaacaaaatagtcttgagagataatgttccaaatctgaggggtcttcaagtttatcacagacgcagtaagtatttgtcactgaaatacattcatgggtgtataatgcatattcacacataactcacatttgtaagcacacacccacacacagtttcacgtacatacacgtgcatacaaattgaagttacctgaaatatttaaaaaatgataatgaagtcttaaacatggttaagtgccaagggctaatttggcatctgaaaggccagattgacttcagagtaagtttattccctttctcttcccattactttcaattccttactttgcttttacttcatagaactccctgttttctattgtttgtgttacttattagaatataacctctgtacgggcaggcattttgtctgtcttgtttgctgctcaatactcggtgattagaatagtgcttggcacataaaaggtgctcagggcatatgagttggatgcctgctgggaaagtgctaatgggatggaatttt

SEQ ID NO: 97113 - DNA, 1055 bp, Homo sapiens
tatgttttcccaactgaatcttccttttatccataaaaatgttccctcctgaaattttaggtgagttggaagtaggaacttgggaggtgattttgctgctcttactctcattttctattgagctaatttcctcatttccctgaagtgcaatatagattatctgaatctcatgcaaatcctctctcatccatccctaatcgtgctttggaatttgttttgtacataagttctccttcatctcagtttcctttggttccccttatgaaagtcagttctaataagtgattttatgctataggttttgacactccacggagatatcagatacagaaaaacattgattgccaatgatgggacagctcttggagttggctttccaattggcataactgttgatcctgctcgtgggtgagtattcataaatggcacgtgtcttccatgcagcattgttcttgttaatgtcagggtctgacaaaatggaagatttcaaatttaggacatcttctgatttcatatgtcaacatttgaaaaataatagatctcagtgagaaagagaaatagctctgacctatatttaatgtgcaggatattgtttgtattttgtcctatggtcttcaaatgaacaacactggatttaaaattaattccaaacaagcaagaattttaggaattttaaaatagcattataagaattgacaatatattctgactttgaaaggacacggaaagctctaagggattatgtaacatttgcaatagagcttgcaggatgagaagccttctagtaggtggagaatgggttgcaaccaggcagtgactcttgaggccaagggatccatgaaggcacagaagtatggcggcacttagcaggattgtggggagagccggaaccagaggcttagagtagggagctgttgaccacatgggagatacaacagataaggtcatttggggacaaatcaaggagggcctttaatatcatgctaagaagttgaactttattcttttgagtgataaggagcaagtagggattttttttaaaaaatttcaacttt

SEQ ID NO: 97114 - DNA, 1114 bp, Homo sapiens
tatttttagtagagacggggtttcaccatgttggccaggctggtcttgaacacctgacctcaagtgatccacccgccttgacctcccaaagtgttgggattataggcatgagccaccacgcctggctggcaaaaataaattatttgagctttctattgctctattttgtttcctcctaattatcaatactaccttgttgctataaaagtgttttaggtaatttacaaaataatatataagaagataaataaaagttgcataaggaattcaacataaagggaagattatggtaagcagagaattttactatgtttcctcatctaatcttcaatgctatttcagttctcaaccaaatttatagtttgcctctgttcttagatggaaatctttctatggctccagtacagtttttctaacagcaaaacagaaagtagaaacttgattctaattcctttgatactctcttcttcaagataagtgttctttttactctaattcccagaagaaattctagatgaggcacaggtatgaaatcacatgaagtaagtcagaggtaacttgactagtgttggtttgctccactctgagagaagggtaaaacatggaagggattattaattcacaataattttgaaagtgaaacttcccaaaacaaggagaagtttttggagggggatagttagcagagccctgacaatccactgctttaggtgggcaccagctggcaagacggtttttctctggagcattcagaaagatactgaagatgagcaaggcgcacagcagcctgctggctaatttagagcacctatctatactaaaaagcactctctgtagactaagaacacagcctatgtagagttcggtactatctgaggtttcatgcatcccttggtgatcttggaatgtatcccccatggatgagtgcagatgactgtttttatttctgccaaatgaagaaatagggaaaaggtgtcccaggcagagaaaagagctctcactggaacagcgcttgagtttacaaagatctttcactagcatctaatttaatcctcacaacattcctgagggcaggcagttctggtagccatttgtgatgagagggaaatttgca

SEQ ID NO: 97115 - DNA, 1007 bp, Homo sapiens
attaatagagatattattcgttgcatgcaaacactataacattttgtaatgttgccaactaagcaaatggatagagctttttcttaattgcaaaaacttttgaaaccaaaacgaaactatgcactaaccaaacaatgaagtcatcttagaatgttcagtgtgacaaaatcttgtatacttttctcagaaaaccctgctgttgatttggtggttagctacatgaggagacaaaattttctaatccccacaagtaattataggacaagttagatggtttaatctagatttttatataatatccatgtttgcattcatttatttgctctagaattcactctttattcacttttgtctttaggtatttgacagtagcatcatcttgactgaaactattgcaatagattgggtaggtcgtaatctttactggacagactatgctctggaaacaattgaagtctccaaaattgatgggagccacaggactgtgctgattagtaaaaacctaacaaatccaagaggactagcattagatcccagaatgaagtaagacttttttttaaaattatgttgccttgacatggttatgatgagggaaaaacaacagtaacatgatgtagctgatatgcatgttgctgatatgcaaaatttaaaatgatcccttgtttaaacatggtaggtgtccaactgggtgttgctatctctccttcatctgaatcatcctcttcataaagtacataagagcaattgattgtttactttattttaagagcacattgatttattagcttggcaatacaatttttgaaatgtcatataattaaaaattaagtttctaattactgcatgcagtaatagtccatagaggggccagtttgatgtaactttgataactcatgattatacaacaaaaaagctggatttttctgcttcagttttatgttgtttattagagctcccttttaagtcatataaggaaggcagtttttgcctgctgatcctgaagggaa

SEQ ID NO: 97116 - DNA, 1050 bp, Homo sapiens
aactctctaccatagctgagggcctcagaaaacagaaatatttaagacatgattcctgctgtccagaagcctacaacctattaaatagtaaggaagataaccaaagtacaaaaataaatacagtaaaaggaagaatgtaagcatagtttactctagactagtatttagaaacacagttaaatataacccaagaaagagtctattttaagtactcatgaaaaccagctaactattaaggttaagaatgaagtgattaaaatcattcatatggggcttcctcccctccccaccaacttactatagtttggaattacaccttctttctgttaccaaaagtattgaatcaaaagttttaaagagttgttttgtgttttctcccagtatcattgacatttttgcatttttttcttgaacagcatctgagagtctgctgttacttgtggcaagtcagaacaaaattattgccgacagtgtcacctcccaggtccacaatatctattcattggtcgagaatggttcttacattgtagctgttgattttgattcaattagtggtcgtatcttttggtctgatgcaactcagggtaaaacctggagtgcgtttcaaaatggaacggacagaagagtggtaagtacatttctgttgacctttggcctggctagttcctctgtcttgggtctgtttgctgttattcaccagtgagagaaggccctacctcatctgggtagctctcatggtaccttctgggccacatcatacccaagagacttgcgtgttcataactacgaatttatggctgttttagataggagggtggcctctgaatgcagatgtgtgattctgaattccaggtcaggtgatgcagagacctcacaatgtctttacggttccttttgcagtcttttcttgtggatgagagcagaggaaagtgcaggaaagttaaggggttgcttttcttagctttaatttagtgatatttctcaatccatctcccagaatttcagtttcttggctcctgatagttacatttcctctgcctcttacaactt

SEQ ID NO: 97117 - DNA, 2170 bp, Homo sapiens
atgaagttcaaagtaatcatagctatttaagctctattgtaatgttctggtgattctttcatagaaagatagataaactttattattgaatctgcaattggaagtacattaaaaacacaggaaaaggaaacaggatgttcttttgacacaggtactcatctgctagtcagcagttgtgcgttctgtacttcgtttgttgtcagagccactagctgccacaaagaaatatttctatgtactagagtgtgggagaagactctatatcatttagccttaaatattaatttggtcatagttgttactataaacctactattggatccaaaatcatttcctctgagtctagactataaaagggatcacaaattacattcacaagccgatttaccccatgttttccttctagcaaccaggcctcctggtatgtgccactcagatgaatttcagtgccaagaagatggtatctgcatcccgaacttctgggaatgtgatgggcatccagactgcctctatggatctgatgagcacaatgcctgtgtccccaagacttgcccttcatcatatttccactgtgacaacggaaactgcatccacagggcatggctctgtgatcgggacaatgactgcggggatatgagtgatgagaaggactgccctactcagccctttcgctgtcctagttggcaatggcagtgtcttggccataacatctgtgtgaatctgagtgtagtgtgtgatggcatctttgactgccccaatgggacagatgagtccccactttgcagtaagtttcctgaccacagtttactggccataaactcattctgaacagtagcctggtgtgcatcaccattgtcacagtcactgtgtagctttgtaggaaggatttcagttcctctatgagttcacatctgtgtagggggtaaccataattgaattcaaatacatcaccattggataattttctgattaaatcctttgtacttggttatgtgtttttacttctttttatgtctttgtttcaaaaaatgagactaaattgaggccattagattgtcaaattaaatttggttctgttggtaatgtgctcattaatttttctaactttaatattttctaatttcaatcagaacttatcacaaaaaaatgaagtccagggatttgtgttgctgtgattaaagtgctgtgattggcatgtaatcctaattactgtcatttctttctttcctctttaatcaatgctcactctcagatgaaccccagccaggtatgattgtgaagtatttcagattcttatgatttcatatgtgttgtgtttgttctgaaaatgtcctgattatattaacttacttccctttctaacgcatgttctgtgttatgactcttacaaatatgttagagtacacatggaaatagaaggcatttgcatccccaggcatgtgaactgtcttagggtggctttaggcattttcattttggccctgaaagtaaggcatgacgatatgttaccggatctgtgtactctaatatttcaatgacctttcccctttgatttgttcacttcatagattttctggtcttttctcttaaatgtttgtctatcttccatttctgtatagatagtagaatttcagaggaagaaaacgagaaacaattttaagtgtctttgcatgctctatcaatgacacttttcttccttgatgtcaacaatattttcccaagggttctcattgcattaaatggagttatactattgggttgtagtgaagaaggtgatcatactccaatggatatgaaggatggtaaatcctcagacaaattagagcaaaccctgaacagcctgtggaactcacccaagtgcatgctgcacttagctcttgtctgggcatcatattgaaggtggcatgagactgcataataaatattgcataagagtgaatcaaagaagcaaagattcttgattttcttttttcattattctctttcttttttctagatgggaacagctgctcagatttcaatggtggttgtactcacgagtgtgttcaagagccctttggggctaaatgcctatgtccattgggattcttacttgccaatgattctaagacctgtgaagacatagatgaatgtgatattctaggctcttgtagccagcactgttacaata

SEQ ID NO: 97118 - DNA, 1003 bp, Homo sapiens
agtatgttaagttcaatagcatataaagaaaacaaaattaattgcagtatctggagaatctctgtttgttctaaatctctggaagtcatgtagtttgtcccagtgttaacagccttaatttactactgctttttctaggtatctattcttcactgattggttccgtcctgctaaaattatgagagcatggagtgacggatctcacctcttgcctgtaataaacactactcttggatggcccaatggcttggccatcgattgggcgtaagtaggaatcatcatccccgatacttagttctcttttactgcagaacacataatgaggcaggttgggtgatatgatggtgtaaggaaactggtactgcttgccctcgcggaattttaaataattaattggtgatgggagaaggatattgaacaagaacacaaaggacataaacatagttggccagctactgctggggtgaaaactaataaattcatgagtattctgagaaaattgctagagaaagctgaatgacaagatttagtggaaactcaagatgggggaggtgggtcccaagcagcatttaaagtagggtacagatttgttgaactgtaggcagtgtgtaatttcttacagggaacatcttgagtttaggaaatctttggagtcaattaatcaacaaatgcacctttgcttacatgcactttgggaggactttaaaagtataagctatggttctcaagaaattgatgatctatctaggaatataggaaaaggaatagagtaaataagcttataaagatgaaatgccaaggtaacttatgggagaaaaaaagggaagaaatatatttcaccttttaaacatagattactaccactgtttttcttaacttgttgatttcacaaggagaaaataaaatttctggctcaaagatagcaacattttaagttttctaagacaattgattgaaagccacttcatgaaaagtagccgtctctttctgggggacataaaac

SEQ ID NO: 97119 - DNA, 1100 bp, Homo sapiens
cataaccattttttaagttactaatatgtcaatataaagatgtaaacaaatttaatccttttattgttggacatttaggaggtttgcaacttcctttgttataaataatgttgcgatgaaaatctttatacataaatctttgtctacttctttgattagttccttaggaaaaaaatccttgaagtaaaagtactaaattaaagatcaagtatttttaaaaagcaagatacgtgttgtcaaactgctttcccaatgagttccatcaagatacacactaatcaactgtgtatgaaaatcactttcttcccacggatgttcaaataaatatttttatattatcattgggagaatgtttacctaattttctaatttgcatttctttgattatctaattagttgaataatttttcattttatcaaaaatttatatttcttcggttaaatatctgcatggcataagtttttaaaatttctgtctattattgcagaatgtgacagtgcgcattttcgctgtggaagtgggcattgcatccctgcagactggaggtgtgatgggaccaaagactgttcagatgacgcggatgaaattggctgcggtaagtgaggaggggccaggctaagttctattttgagtaacctaagtgcttcctggtgatttcagctgtaacaaagagaagagctatgccttttagtgacagagccaggtctgggcccaagtcttttgagatctgtgtggttgaatagagaactgatggcattaacaataatttcactcccttctgaggtaggggttcaattcacattgatgatagagcatcagtttctatctcacccttatcccttgaccacaactttgatatggaaacatatttgggtgcagttttctggagtctgtaggtgattatttctaatattcactctgtaaattttgtgtacccacaagaacaaacaaaaaataatgttatctgaactactgtgatttgtaagtcaaagaggagtccatttttatgtaaaggatgtagaataacttgtgtcaattaccataaagaaatcacagaattggttagtgtgatttatgttttttaaaaattctagtttta

SEQ ID NO: 97120 - DNA, 1012 bp, Homo sapiens
cagtttcatttttcatatgtgtgattttaaataattgactttgaagtgttttataaaatgacttttgagtctctattttgtgttcttttcatgatgtgtttaacttggtattttagtttggcaaaaacaaacaaatccccccaccccactcctcaaaaatgggacttgtaataaaagttgcttaagaaatagcattaattatatatattttcaaaacaggcaatatatattgttctgataatttcctcctaaatactcagtctctaaatttatatttttcttttctccatagcaatatgaaactgtctgtaagaggactgttctttatgattgttataatttttcaaccagaagatactacctttacaacctcagatactaagggagacaaatgtactgaacttacaaatgtattatgttggattactaacaatagacctaattgataaaagtgatttaatatatgttgtgttaatagctaaacctccaaagcccctaatctcccatggaaatattgctttgtagaacaaaatccaatgagaagttctgggattccagagtgaatttgtacattccttaggggcatttttgcaagggaggttgttgtgttttaaaggtagttgataagagacctgcaccaccaaccccagacctgcaccaccaaccaccatcatgcattagtctatagaaggtatttgggtgtacgtactcctgtaccactcggtaccaccatttagccaagcgaagtttctgaccatttgcagcatacattataaatcaggatgtcactaccagacaatcagatttgaacattccatgaacaaagtagcctatataccctagaaatagatcacttaactatgtttatgtcatgctgttgatatgcctgcatttacacaaatcaggatagcacattgcttatttattttaggagtaggtacttgatctgtatatttacctaattttggttaattagccaaaaattgaaatgggtaatttagcatgattgctt

SEQ ID NO: 97121 - DNA, 1017 bp, Homo sapiens
ctttggtatggatagacatccttctgatattcataagttggctgacagttcactacaattcccataccttgcccacataaacaaggccagtccccttttgaagatttagagtcacctgcttatttccaaaactttacactatagtgatgatagccaagggtaacaaattgtatggagcactctaccctgtctagtgtcaaattgatagaatagtcaaggattcagttaatgaaactgaaacaagacaggaacagcaaaccaacctgctagtctctttctgtgcaacattttaactgtctggttttccttacagatcatcaaataggtggcaggaattcttttgggttttttttttaatccagtttacaaaccactgaatagactgctttgtcccaattattgattcagagccctgatgttttcttagagcaaaacaatactataaggacatttcaagaagtcaaagatttggggacaaaacccacaatgcaaattgatgcattatcatgtagacacatcatttaagtgcaaaaataaatgaataaataaataaggaccaaaagaatatgatgccagattcactaaagccacaaataaattcataactactatatgcaattgtcctaggatcagtggaagaaaaaagaaaaataagatatggtccttttttgctctgcctctccctctccctctccctctccctctccctctccctccccctctcccctctcccctctcccctctcccctctcccctctccctctcggtctccctctccctctctttccacggtctccctctgatgccgagccgaagctggactgtactgctgccatctcggctcactgcaacctccctgcctgattctcctgcctcagcctgccgagtgcctgcgattgcaggcgcgcgccaccacgcctgactggttttcgtacttttttggtggagacggggtttcactgtgttggccgggctggtctccagctcctaaccgcgagtgatccgccagccttggcc

SEQ ID NO: 97122 - DNA, 1100 bp, Homo sapiens
taatatacatggcagttataatttgtctagaccataatgattactattaatagggaatcctgtttttctatttttaaaaaaatttagagatgggggtctcactatgttgcccaggctggattcaaactcctaggctcaagtaaccctcctgcctcagcctcctgaatagctgggactaaggtgtgtgccactgtgcctagctctgtttttctttaaagttactgtgtaataaaaaaagaatttgcaaatgcataaaattgaatatacacatgtcccaagtcaattgtcaaatgattggtttttatgtaccaaaattctgcatttttttttcaaggtcacttctgatataagaatttacttcttccctaatatttggttcagtgaagtgttgaaagaatttgctaagtaatcattgaaagctaagattctagtgaaaaacaaaatgcatggtttaaaaattgaacatactaactgaaagacagtggaagttagatgcttcttgctgtaaataattaaacccaacagtgcagacgagagaacatggcaccaagagggacttgggctaagaaggatcatattgtattgaacactttcgtttccctgtaagggaaatcaaaagggtctttaatagttgttgctgattgtgaatatgtgcaacaaaatcccactgtaatccagatttatttttcaagcattttgctgtgattgaaggaaggagaaagggataggaagaggatggagttttattaaagctgtagttacttcttccctttaggaggtctaagtgtgacttgtcacagtgacctgggactttgattccctccagggccttcctgttctatgggcacattggtggatcaaagacaattgacttttgttttgttttgttttgttttgtttttggagagaagcagtggttctgctaactcagaacaagaacgacaagagtcatgtaggatgtttttctgagtttctctaacagtgctcgtttttttttttttttttgaccgccccctcttttccttttgaggtggggccaaggggtcaaacctccatttttctatctgtaaaaaagagaatcggcctttatgaagtgcttt

SEQ ID NO: 97123 - DNA, 1041 bp, Homo sapiens
gtcacctttgaagttccccccagaccctcctaagaacgttggattcattgaggtaaataactgttgcaggtcttctaatcttttctcacctgaatctgaattcatctcagaacacccctgacacagcccactggcttctagagaagctgtctgttccatgcttggaatggaagtattgaaaaacttcatggctcatttcctttgtatcccagcctcaactctttgttgacctcattgggacttacagtttgttgatcctaccgcctcttcaccatccctcaaatccctcacctatttacttcctcagcttatattttatggccatcattaatttcacttccctgcatacatacgcgctcagcagcttggcccctttatctggctctgttgtgcttggcaaggccctgatcctggttaaatccagttctccacatctgcaactctgtagctaaacatggcaggagaaaaacacaactatactgactagcctcgcttgacattcatgaagccaatctcaagcttaggacttgcttcctagtctgtctattgcctctcttgcttccttatatcttctcctctttcctcaaacctctgacatcaccttctcacatgtagagtgagctttttaaaactgtgaaaatggaagcaaccagaagagaattccataaacttctataactcaaccatcatcatttgaacttcgtcttatatcttctgtctttcctcctattactctggaagaattttcccagttcttaagtccaaccatttcattcatgttctagatctcattccctctcacctctctgcaattgtcccctctttcttttatgaaatcctctgttccacattaccttctaactatcactctattttttcggttccactttacagtaaaattcttgtacagatgtgcctatatccactgtaattacctttcaattttttctcaaatccatgccattttgctttagccctcatccttgatagatatttttttggtcaaagtcactcatgacttccatgttgttaaatccaatg

SEQ ID NO: 97124 - DNA, 1040 bp, Homo sapiens
gtgcacgttcccaaacctgtgaacaccaaagactggatttacaagtaatggtgaccttgaagtaattgtcctcattgatttcacttgaaggatcctatgtgcattctgactaaacaaaggtgttttcttcctgcatatactactccttatcatatgtctttctatacctttagcactttttcagtctctgagataaaagaggaacagtgagactgatggaatcatcttggtcttctggccatcaagactcatctagccagatgttttcactgatctttactggcataaactgctcttgagagagaagaatttaaatgtagtatggttaacaattttgactttcttaactttattcctaggcttccttactgtgtactctgaaatctccctgcacagggtcttgactctggtgctagtgatcctggactgatggcagcatttgtgatggccttagccccaggtaactgaatcccaggtcttcctgcaatggtgtctttatatcctggattttttgttgttgttgttggaaagccttaattttatttaactttttttcaatcagtgagacttgttagagtctctgttgtttctttaaacctttgccaagacttgtcatataactttatttgcaaaccaagaggattcccttgtgatattatacctggtgtcttcatttctgtttgtggaaaatatgtctgttgcactggctgtcctttcagatcttgctgtggctttcctggccctggctgcacaccagagatatgctgttaatttatggctcagaacctggtcctcaggctggtgagtccaaagttattattgctatttttaaaaaggcttcaagaaaaaagtattataaatactggagctgactagtaggtgagatgccttatgatgtcttcttagcaattgttgatcatttcagtctagctctgttttacaaagggcagaggtcaattcaagcttattcaagcaaaagggggaatttttgtaaggatacgctaggttaggatctagatctagagagccgtaaggaactg

SEQ ID NO: 97125 - DNA, 1037 bp, Homo sapiens
caccactgcactccagcctgatgatagagtgagactccatctcaaaaaaaaaaaaaaataggttattgagataaaatatgtaaataatacactaaaatgacaaattctacaaaaaactgtaattgccagaccttattaaaaagaaaaatatagctgggtacagtggcacatgcctatagtcccagctactctggaagctgagccaggagtatcacttgagcccaggagtttgtgtccggcttgggcaaggtattgagactttgtctctataagaacaatttttaaaaagaaataaaaatattaaaatgtatcataattatttgagtaatgttcataaatactaacaactacatattttagtaagtaaacataacccaagaaaatcacattttcagtttgagttgtcttttgtttgttctttttcatagagcttatgaaacttctaaaatgtatcgtgattttaaattaagaagtgcactaattcagaacaagcaactaagactgttgccacaagaacatgtatatgataaaataaatggagtttggaatttatccagtgatcaggtattgtgcaaagagctagtgaaccttttgggacagtgttttggtaatcatttttccattcatcattggatttatatagtcaattctaattgttaaaattagcattataggaaagcgtattacttttcaataagtacaagttaggttgatgataacatccctattttctttcaatacaatgaaatatctgataatcctggaatgtctccttaattaatgaataaaaaatttgcggtgctatgctaggtggtaaagatctaactatggaacagagtaactccgctcctatccttataaagaatacaatctaatgtatattcatggggattattacatatgttttgtttctcttactacaactcctttgccttaacctatccaaggttttgaataataattttagtaaggtctaacatttaggcactgtgttaggattgatttacatgggatatttaatcagatctccattttac

SEQ ID NO: 97126 - DNA, 1070 bp, Homo sapiens
tctctgaagcattcggagctcacttctcctctctctgggttataacatctctttcctgattacaggttccttaagaattgactggaaatcaagttaggtttatatatgaaacctcatcctggttttctcacaagatactgggtgctactgggagctcagttttgaacagttggaagccattttgaatattacctctgtcagggagtaaatatgtggaagaacactgctgaggaaataattgccttaattttttgtttttattttgtcttttttacttccctcttttcaatcaccacgcttttctttcaaactgacctatctaaagtccctcttatgaatgtaaagtacaaatccatgatattttttatgcacagttgtcttagaagatatattttaaatactacattaaagatacctttcaatttttatctacttatggctaaatgaataagaaaacccattggttttaatgtagtaaaatacaattataaatcagtgaaatacaggacttgattatgctcctagatactgcctggactgtaaggatgcttatgattggggtattaggctcattcctagcagtatgctgagtatctacatgtttacttcagcgacttgaaattttaagattttccctccacaatatgataggtgagaaccatgtcccattttagtgtgcagatccaaaggaaaagaggaagagaccgggcgtggtggctcacacctataatcctagcactttgggaggctgaagcgggcagatcacctgaggtcgggagttcaagaccagcctgaccaacatggagaaaccctgtctctactaaaaatacaaaattagccaggcgtggtggagcatgcctgtaatcccagctactcaggaggctgagacaggagaatcgcttgaacccaggaggcggcggttgcagtgagccgagatcacaccactgcactccagcctgggcaacaagagtgaagctccatctcaaaaaaaaaaaaaaagaaaagaaaagaggaagaaacccttctaataaaaagtcatttagacataaatcatgagagttcagggtact

SEQ ID NO: 97127 - DNA, 1025 bp, Homo sapiens
tttcttcatatttgggacataaccctcctagttgagagcaaagaacttgtattgaatttagtgtcattatataagacactacattgaagctcttattgaaattattaatctttatttttcagtttgtagaactgggatgattttcattaaaaaactgattaagtccgggcgcggtggctcacacctgtaatcccagcactttgggaggctgaaaggcgggcagatcacctgaggtcaggagttcgagaccagcctgaccaacatggagaaaccccatctctaacaaaaatacaaaattagctgggcgtggtggcacatgcctgtaatcccagctacttgggaggctgaggcaggagaattgcttgaactggggaggcagaggttgcagtgagctgagatcgcgccgttgcattccagcctgggcaacaagagcgaaaactccgtctcaaaggaaaaaaaaaaagaaaaaaaagattaagtagactaattatttatttttttataaaggtattggtggcatggatggaacacaacagcagatttttaaaatgttagcagaggtactaggaggaatcaattgtgtaaaagcctcggttcttacgccttattaccacaaagtaggtaagttattgggtaggttattagttactttcagaaaatcaaactaatttgaatagaatcatcttatcagttggaattttttaaagttttttgaatttttttcaagttgttattattattaaaattttcaaacggagatagaaagagcaatagaataaatcctcaagttcccgtggcccagtgttgataaccaagagcgttttctattctttagaaaaaaaaaaaaaaaaattaaggtcagtcctccaccaattctaagtaaaacccagattcagattcactgaacatttctggatcttcaaaagattctgtcctctccattcagtgtgtgaaaataagggaaatgactctttaatttctatttcattgttttaagttcatctgaaaaactaagttggtctatc

SEQ ID NO: 97128 - DNA, 1027 bp, Homo sapiens
actgttatatcaagtgcttagtatatgagatttctgataatatgcaggtttattgactcctagatgttcctattcagttttaaaacatttgggaaattgtcagaatatcaactgttcatttcttagctctctagtattgaataatttcactgaatcatagtattttataaccattataaccttgtattatttgaaaatcttaaaatatcttttacctgtatttttcaaacagtttaagattggattataatgaggcctgaatttcattgaagaagacaatatatttttctttattcagtaatattttatattcgagtaatgtggggagaacactagaattatatattggattcagtttttgtttatattttttttcctatttgttacccaagaactgttatttaaaaaaaattgcaagctaattttcagtctttcaaccaaaaacttttttttttttgcttctagacttaaatcaactatgttattgatgtcagaggacctaactggcgagcaagccctggcagtgttgggagcaatgggagatatggaaagcagaaactcatgtctgattaaaaggtatcttttctgaaatttacgacgttaagtttgttgtcattcacaagcacctatttttttctaaggaaaaatggttttcttctttaatctaccagttgttttgaagaaataaggaattaatgcttaagccactgtttatgttctactttgtttttcttttctttttttttttgtttttttgagacagagtctcactctgttgcccaggctggagtgcagtggcactatctctgcttactgcaacctctgcttccctggttcaagcaattctcttgcctcagcctcctgagtagctgggactacaggcgcccaccaccatgccccagctaattttgtttgtttgtttgtttgtttgtttttgagacagagtcttgctctgttgcccaggcttgagtgcagtggtgccatctcggctcactgcaacctctgccccagacgggttcaagcgatt

SEQ ID NO: 97129 - DNA, 1023 bp, Homo sapiens
attatatgacttcttttatttatttattttctaaagaaaggaattatttgagctctttaagggcacaagaaaaaggggcaagaaattatcctgaaagcaaataaacctgagaccatacttctgaaaaattaaaaaaaaaaagtatatatatatgtatgtataaatatatatggctctgaattaatgcctacactttttagaaactttgaaggtgattatttattttaaacaattttcctctttttcgaaaagacagctctgagtttgtgggctttttttttccttttatggtaaatttgaaaactttatgtaaatgtcagatttaaaacacttttaaaatggggtgcagaaagaagcccctttttctggacatttattttttgatcaaattctgctatctggtttagactaagaaaaagtctttagttaatgcagaaaaaatgtattactttaatttgaattttggaatcattttgatattaatgatgtaagcataaccatgttaaaccaattcttttatagaagctgtacattggaatgcgtttacagtcattgtaatggaagcaaaatacatgaaggaaaaactgttatttgtatccctgcttattgcacctgacgactagttgcagatggttttgtttacctaagaaaacttgtgatataaatgaaaaaaacacctgttttcctagagtcattggttacaaatatgcttcgtctaagagctatttgtccattctcctggagagtgtttcaatttcgacccatcagttgtgaaccactaattattcagatgaataagtgtacagatgaggagcaaatgtttggttttattgaaagaaacaaagccatactttcagaaaagcaagtgggatgtgcatttgatatgctttggaagcttcaaaagcagaagaccagcctgttaaaaaatgctgagtatgtcagagaccatcctcaatttcttactcttcataatttagctacaaataaattcaaattaatgaatgacgataccctggtgaatgt

SEQ ID NO: 97130 - DNA, 1001 bp, Homo sapiens
caagtaatccatccgcctccgcctcccaaagtgctgggattacaggcgtgagccactgtgcactgtgcccagcctgacttttgcttttttttttgagacagagtctcgctgtcttgcccatactggagtgcagtggcgtgatctcggctcactgcaacctccgcctcccgggttcaagcaattcttctgcctcagcttcctgagtagctgggattacaggcatgtgccaccacacccagctgatttttgtattttttatagagatggggtttcaccatgttggttaggctggtcccaaactcctgacctcatgatctgcccaccttggcctcccaaagtgctagtattacaggcgtgagccaccgtgcccagacctttttgcttttaatgttaggactaaacttcaattttcatgttgcttaagtgtcggtgattttccctggtttaatgcataaatggtcaccataagaactcggtatttttatttctgtagggaaaaacttgcatcctgaaatttactacagacagtattcagagaaaactgctgttattgggagtttgtacttctagcagcagacaagaaaacttttgaactttgttttagaataatggcttaaaatgatcacacgcttactgaaatttgattatataacacttataaacaccaatcttttatattaaaatgattattttaaaaacatgaatgatggccgggggtggtggctcacacctgaaatcccagcactttgggaggccgaggcgggtggatcacctgaggtcgggagttccagaccagcctgaccaacatggagaaaccccgtctctccgtttctacttagaatacaaaaattagctgggcattggtggtgcatgcctgtaatcccaactactcgggaggctgaggcaggagaatcgcttgaacccgggaggtggaggttgcagtgatccgagatcacgccattgcactccagcctgggaaacgagcgaaactccatctcaaa

SEQ ID NO: 97131 - DNA, 1224 bp, Homo sapiens
atatactatttaacaatagttaaatagtatattaactatatactattctttttcttcttacatgatttttgcttcttaaaaatctcacattttaatcagaactctcatttttgttttctaggagcacagggatcagttgtccttgtttttttttggtcttttcttcatttgaaggtaatctgcttattgagttcactaatcatacagagtaaatacaattttctgtttgagctattaatctgtattccggttgataaatagaaagttgattacataataatggttaaggcttaactttcaagtcttttctaattgcttcacaaaatgcaatctaatctctaaaaagaaagcactaataatccatgtgatttacctcatagaaataaatatcaaaataaattcaaactatatttctaatattgtttcacagaattttttttccagaaatttgtgaaagatctttgctattttagtctgcttgtctgaaactgtattttactcacagattaagtattggagccatgggaataaaggttcaacgtcctcgatgtttttttgacattgccattaacaatcaacctggtaagaatattagttgacatttataaatgggtgtttaatattttaaattagtaaagaagtttaaccaactaccttctttttcagctggaagagttgtctttgaattattttctgatgtgtgccccaaaacatgcgagaactttcgttgtctttgtacaggtttgttcacattttcaactgccctaatagtagtctcagttgactatggcttgcttgcttgcttggttttttttttttttttttttttttttttgagacaggatcttgcaacgttgtccaactggactagaactcctgggctcatcaatccttacacataagcgtcctcagctgggatacaggtgtgagctaccacacctggcatagcttgctttaattttttatttactctattttagatttctccatgcatattacttttctcttaacatgaagattacacagcagtgactagggcgtgaaagtaattcttagaaatattatggctgggcagccaggcgcagtggctcatgtctgtaatcccagcactctgggaggccgaggggggtggctcacgaggtcaggagttccagacgagcctggccaagatggtgaaaccccatctctactaaaaatacaaaaattagccaaatgtggtggcgc

SEQ ID NO: 97132 - DNA, 1002 bp, Homo sapiens
tttacaacatgatttgaaagggtttcaatgatctgtacttaattcttagaattttaatgatagaataggaacttccgtaggtcaatcttaacttttattaaaggagattcagcaatatttcttacaacatccaaattttaggtcattttttctatgaacatttttaaaaaatctttgatattctaaaatttgactataatattttccaaaaatttaagttttcttgctggaatttttttgttgatgtgaagaccatttggaaaatggtctataagcatatttaatgtggaaataatttaatatttttcatccttcacttttgacatttagtgaaatgttgtttaaaattctacatgatttgttcttaatattctaacccaagattggaaaacaaattcctccttttgcggtaagtgatgctatggcagaggttaagttaatgagtccagactaaataatactctgtgtgctcagaaatgaaacagatgaaatgtaaaagaatctaatctggactgtctcactcttttttttaagagatgggatctcactgtgttgcccgggctggaatgcagtggcttttcatgggtgtgatcatagtgcactttaggttcaagctcctgagctccagtgatcctcctgcttcaacctgctgagtagctaggactacagccacactactgtgctcagctgtttcttgctttttaaagatagtttcatttttttatttaaataaagtggtgttatcttttccaaaaattgtgaaggacaaatataaatggaaaggaaggggattgagataatatttgggttttataagcaaataatagaaaattaataatatttgaatcttaaaaagatgagaggggaggctgggcacggtggctcatgcctgtaatcccagcactttgggaggccgaggcgggcggatcacgatgtcaggaaattgagaccatcctggctaacacggtgaaatgccgtctctactaaaaatacaaaaattag

SEQ ID NO: 97133 - DNA, 1048 bp, Homo sapiens
ggttagaaataacactgaaatgtctattttagttacataaaagttttcagcagtaagtagatattgcttttataattagaacaagtttgataaatacattatgtggaaagcattttgccttctgttctacttaagattgaggtaatatgattatattaagatagcagttgatgtctttgttttcaactttgtttccaatacagttattttctttttctttttagagatgctaactttgtttttctctgactttgtttttattcttctatctgatgatttccaaaagaacaacgaaaccaactcctcatttagatgggtaaatattattttatttattttacaacctgttttaaattaaccttgaaataaaaagcttttatttaataattttttacttgacactttaggcatcatgttgtttttggacaagtaatctctggtcaagaagttgtaagagagattgaaaaccagaaaacagatgcagctagcaaaccgtttgcggaggtacggatactcagttgtggagagctgattcccaaatctaaaggtaaaaaggaagtacatatttctgagaatacttacacatacaaaataagcagagatactctaaatagttgacatgaaattcatactcaagctgaaagaaaaatgaggtttttgttttaaaatgtatttctgtgcttttattttttacttttttaagttgacaaaacttgtgtatacttactgtgaacaatatgatgttttgaagtatgtatatgttgtggaatggctaaattgagctaattaacatttattgcctcacataattacccctttttgtggtgagaagaacacttaaaatcttagtggttttgggttttttttttgttgtttgtttgtttgttttgagacagagtctcactctgtcacccaggctggagtgcagtggcatgatcttggctcactgcaacctccgtctcccgggttgaagcaattctcctgccttagcctcccaagtagctgggactacaagcgcccaccaccacacccagctaacttctgtatt

SEQ ID NO: 97134 - DNA, 1033 bp, Homo sapiens
caactgtgatgtatttctcataggaaagaatctcagtgcaaaataaatagaaatcagactggtgattaaagcttttttaattgtggggtaaagagttaccatattttaacaagtatattttatgtttaagtgtagtatttttattttgcttgcacaattttatgtttttatttcattgtgaatttattttctgtgttagatttccttaaaatttgattttttccccctgcatatccctcaggtttattagtttagcatatataagtagatttttcaggttatatgttttttcatacccactctgtctcaccagcagcataggtattggattcaggttaacagttgggctcgtgagacaaaattagcttcaccaggcactaagattacttacccttaagaaaggatatagggcaggaaacggcatggctggtacatcaacagcatagaggcactgtcatgatttccaggcacagcttgcgtatatcccaaacatctcacacttgataatgtacctgttccttagaaacataactgggtaaggaaggattatcttagttcagtgaagccattacatctacggtctcttcagcttttataccttgttcccattctcaagtgcagcaacatctcatcagtactggaaaagcagtctgcacagtgaaccagaagtccttggtcaagtacaagtaacttcagccagattttcatgtatcttgggtttagtatattcctgtaaattatcagttacaaatttcaaggatgattcaggcacagcagcacatgtgcctgtagtcctagctactcaggagactgagagaaagaggattactagagcccaggagtttgaggccagcctgtgcaacatagcaagaccccatcttcataaataaacaaggttaggcatggtagcccacacctgtaatcccaacacttacggaggttgagacaggaagatcccttgagcccaggagttcgagactagcctaggcaacatggggagaacttgtctctacaaaaataaaaattaaaaaaa

SEQ ID NO: 97135 - DNA, 1473 bp, Homo sapiens
aagagctatttcccttcattcatttcattagccagtggtgcagtttgtaccacaaaggcaagataaatgctttatactttatgagtatcactgtgaactaatgtatttctaatataatctgatatatctcaatttattgtagttctcatgtatatatcaatattgtcccatctttggccccagttagcctcttcaaatccaccatgatttgaatgagtatacctttagatgggtcaagctcctcccaatttgtagtatcttcttctaattcttgttatgttacaccttctagcttcacttatttatattaattgatcctttaaactctgagtttttttttttttaccctttttaaagttactgcttccttaactgaaataaaatttcaatttaaaatgactttttgtagagtccccaaaacattctattcatcatgggcaattgacttccctctgttatgagtctcctcttgagctaaatttcttaattattagaagactgcttgggcactgaaatataagcccatgccagtgaaatccatttcttatctctccatgttgctgtaaagcagtttttctgttatttccctgcactagttctgccaatcttgataataagagggaaagtggaaaactacaagattagaacatgggactcttcattgttattctgtgcttttaaaaaaaattcttattcagatgtttgttaacattagtttagcattttagactcacctattttttaaagttctttggattaatagataaaactttgaccagtgaattctggagatctggactctaatcctgagtcttgactcctttcctgtacttcccagttcacatagctggatgatctaagtgctaaatactgaacttagtgagaatctgcagaaaatttaaatctccttccacaaagtttgtctaaaaattgttgatcaaaacctttttgtttttattaaagttaagaaagaagaaaagaaaaggcataaatcatcatcatcttcctcctcctcatctagtgactcagatagctcaagtgattctcagtcctcttctgattcctctgattccgaaagtgctactgaagagaaatcaaagaaaagaaaaaagaaacatcggaaaaattcccgaaaacacaagaaagaaaagaaaaagcgaaagaaaagcaagaagaggtcttaattttacttttctaatgctagctttatattctgatttcctttctgtaaatctgttaggattttgggtcaattatatgaaactgttaaaatagtgagaaatatagcatggagcgtaggacttttgatattccacagtctatagattaaattttgggtacgttcattttcttttgaaagaaaacctatcagttcatttttttgtgtactcaatgaaataatacagctttggtgttacagatttgtgtgttttataggaggattatgggatttatgaaaattgcagaaaacca

SEQ ID NO: 97136 - DNA, 1147 bp, Homo sapiens
caggcatgagccaccgcacccggcccagattcatttttattaaagtaacatgtctggccaacaaaagtttttaaaaaaatgtgttaactttctgtttgcttccttctagtaatccacctaactcccagcctgcttcataccagagacgacttttagttactagatctggcaggaaaattaaaggaagaggaccaagggtaggtgattctttccccagagatcttcacaatattgcatttgtcttccttaaataattttagggtgtttcttaaatattattttaatgtgcaagtaactaaaatttaggggagatgcaggcattgaattatatattctctttcttaagcagcttctgtatgttggtacttcccaacagaaaatccatgagatatgaatagattttacatttacatggtataaaatgggatcgaggtctttcttgtctcccgtgtttcttggcaatcactgtatctctattcttgttaaaaataaataaaaattaaccctattcttgtattttattctttttttatttactagagtgtcctcatcagaatttaaatatcttgtgctttcaaaactttatagaaacttggctatactttcctgtcttatgtcttcacttcctacttattcctcaagcattttagttgtcttccactaccgttgttctgctgaaaacagcacttgatacataatcagctccatgtcacaaattccagtggattcttttcagtcttcatcttacttaatcttgctccttgtaatattctttccaccccccccttttttttttttgagatggagtctcagtttgttgcccagactggagtgcagtggcatgatctcggctcactttaacctctgcctcccaggttcaagcagtcctgcctcagctccccctagtagctgggattacaggcacatgccaccatgcccggctaatttttgtatttttagtagatacaaggtttcaccatgttggccaggctggtctcaaaactcctgacctcaggtgatccacctgcctgagacagggtctcattttcacccaggctggagtgcagtggtacaatcaaggatcactgcagcctcaaccttccagtctcaagcaatcctcccacctcaccctcccaagtagctggga

SEQ ID NO: 97137 - DNA, 1015 bp, Homo sapiens
caccaccacctgtgcagttccttcccaagaataatctgattctcccctttcagtttataccttaactatgcaagtaacttaactatggtaagatacatgaatatatcttacccatcaccgaatactgtcatttctgcctcctaaatattcagaaattcatgtgtttcaagctttacccctgccatgttaattcaactccatcatattgtctgagctgtaaattttgatagttctcaatttttttaaatctcagtacctctttcatgttaaaaattactgaggacccaaaagaacttctgttggtgtgggttatatctatcaatatttactctttcaggaattagtactgagaaatacttgaaacataagaatatataagcacacattccattagctgtgaaagtaatgatatcaaaacatgtaaactgaataacactattgtatgataatgaaataatgaaaatggaacaggcaaatattgtgatattattatgaaaatagttttgaccccgagtctttagatcctagatcccactttgagattcactgtctgatcttttttttaaaatagtagccagaattgtcatttaaaaatgaaagtctgatttttgtgccactcctttaccattgatcttagggtaaatccaaaataactacaatggcctatgacactacacaaaacctagtccttgcttacctcatcaatgttatgtagtactactttcccttgcagtttttagatttggccatgtttggtctgtcttctcatcatttctaaagcatgctatgtttcttcttaactcagaaccttcctgtcagcatcttttcccttttccttttatacccattctattatagctgcatatatgtttaacatatgtgattatatgttcattcacatgctctccaagtcctgtagaatatgagttccaggaaagcacactcatatatcttggctcactgatgttctctcagtatgtaataagagtgtttggtcatcctaagggttgaataa

SEQ ID NO: 97138 - DNA, 3824 bp, Homo sapiens
ctttgaaacattaagtatatataacatttagattggaacttggcaacttatgagttgctctagcattacttggttaggactcttccatggagaagacgtatggctagcagctaaagtttttgtgattaatgtttcttggaatttgcaacatgacaacttaagtttctctgcctcattgatttcctatatgaaaattgggaaattttagtaattttcagggtatagaaatatcagacgttttattttaacctggaaacatatacttttaagctactgtttcaatgctttttatattttttttattttgtaccccttactacctcctgaccctcaccccagtacttccctccctcccagcacccatgcgagtccctctatacttctatacattaatttttccctattttaattttctttagcgttatcgaactccttccagatccagatcaagggatcgtttcagacgtagtgagactcctccacattggaggcaagagatgcagagagctcaaagaatgagggtatcaagtggtgaaagatggatcaagggggataagtaagatttaactattattatttcaaatgtaatgataagtgtttgcttttactattatacataaagttattgtcattttagttattgctgaataccttaagaaaagtagaatatcattttagctaataatatctacagttcttttcctaataacatttccccaattctttttcttattttttaggagtgagttgaatgaaataaaagaaaatcagagaagtccagttagagtaaaagagagaaaaataacagatcacaggaatgtatctgagagtccaaacagaaaaaatgaaaaggagaagaaagttaaagaccataaatctaacagcaaagagagagacatcagaagaaattcagaaaaagatgacaagtataaaaacaaagtgaagaaaagggccaaatctaaaagtaggagtaagagcaaagagaaatcaaagagtaaagaaagagattcaaaacataatagaaatgaagaaaagaggatgaggtcaaggagtaaaggaagggatcatgaaaatgttaaagaaaaagaaaagcagtctgattctaaaggaaaagatcaggaaaggagtagaagtaaagagaagtctaaacagttagaatcaaagagtaatgagcatgatcacagtaaaagtaaggaaaaggatagacgcgcacaatccaggagtagagaatgtgatataactaaaggtaaacacagttataatagcagaacaagagaacgaagcagaagtagggacagaagcagaagagtgcgatcaagaacccatgacagagatcgcagcagaagcaaggagtaccatagatacagagaacaggaatacaggagaagaggacggtcacgaagccgagagagaagaacaccaccaggaagatcaagaagtaaagataggaggagaaggaggagagactcacggagctcagagagagaagaaagtcaaagcagaaacaaagacaaatacagaaaccaagagagtaagagctcacacagaaaagaaaattctgagagtgagaaaagaatgtactctaaaagtcgtgatcataatagctcaaataacagcagggaaaaaaaggctgatagagatcaaagtcccttctcaaaaataaaacaaagcagtcaggacaatgaattaaagtcctccatgttgaaaaataaggaggatgagaagatcagatcctcagtggaaaaagaaaaccaaaaatcaaaaggtcaagaaaatgaccatgtacatgaaaaaaataaaaaatttgatcatgaatcaagccctggaacagatgaagacaaaagcggatgagtgagttatataaacttacttccattctgtttcggattttaagtttgagagacttgctaatgaatctcctttatgttgttttccttttcattgtttttggattgttttatgtttgtccttttttttcttaatgtggatttcattgagttgattttttgataatctgcaatctggataatttgtactgctaaagttttaataaactcgacatgagaaaaacactttggtgtagtactgtgtgctgtgtttaactattttatgtatgcattactgtgttgcaacaattagccaatagcatcctaatttgtttagtcagccatttggaatggttgcaatgcattgttgcaaaagcttgtgtttctcatgattaaagtaactttagaagccactagaagacatcttgtatagattttctgattgcgttataaatagaggtttgcagcggtttcttttaattacacagaagcagggtcctaataacctgagatcttaaatcatcacttttgattttatagtaatttgtgctttaaaatagatgtatttatattgcacttcatactctattctttatagttcgagccatagcttgtttcctattaatgcttttcctgtctagttgtgttttacttaactgcctataaaaatcgtaagagtaatttttttcagttgatgtactgattgagcttgagttgctgttatacagcatttgacaggaactataccttggaaaatcagattgtgattctcagttctgtgttgcttttggtttgaagagttttgggaacgttttaattattaattacccttctctaaactttaaaaaaaaaaaagcttttctcattaaaacataccatttgtgcaggtccttaagctatacagattctaaaaattgttagtattgagacattaacttctaagatttctcttttttggcctccaacctatatagaattgagtgttaactctgcatggattttgtttgttttaattgaactgacttctctaactctcatagctgtgagttccaaatggcaagaaaatgcatcttttctatatatgtatcacgataggctatagcatgtttatgactctggtttctttctcttcaggtggttttataccattactgttaatgttattttaacttggcatgtataacattgccatatagagtagagtagaaagttgcaaattttgatagtttacagagttaaacactaaacatatccaaagtccatttagagttttgggtgttgtattttgccatttttgtgatgtgtggccttttattctgtaatctcttctaaataaaacattgaacatccagcaaacataaaacctgcctcatttgaaaaggaatttcaaaattccaattaataggattctctagagagttttgtactttaatatttgtcagtgtagtgtcaactctgttaccaaggtagcttcttggtaaatccagtagctactcaatgctatttgtactgaataaagcaattattaacatgatacttcccactattgattaatgcaatattgatatatttggcgttgtggtagctgttgcagaatgaatagtgtaatgaccataagattgcttggaaaattgtaatacagatatccacaatgaattctttccaaaatttttttttccgatgataaaagtagtagatgtttattataaaatccaaggtgattgattccttagagactgaccacaaacccacattagggataattgagtctgagtgcccaagctatataacgttatgtagtttaagcaagttattgtttgtcttaatttcagttaactgcattttaaaattgttgttataaactatttgagctttaagaaaggtgctatttaagaaaggatttctaataacagttaaatattttttttaagtccatgctaagtaaaaattcttacatgttgtctgatcccagagctttatctactaaaaattatacat

SEQ ID NO: 97139 - DNA, 1017 bp, Homo sapiens
ttggatttatacatttacaattgaataaggattataggttgataagctgtttattgtgaaaagatgtgttttgttacaaatacttgttttaaaaattaataagcccccaggaagtacagcattgactggcacaactgcccatagtgagcttcccaactaactgccttcagtggattcgggcaagtgcaaagtctttggcctattgtgtgacaaagaggtatatattaaaggaaaagaaaaatgacatgaataagaaaattccgtcaacaaggttggagtagggagttgttgaggggtttagtttgttttaaaaggtatgtgagggagtggtggggtggatttgtgtttctgactttttttctttaagcaaattccatatgttaccaaaagcacatgctgtatattttcttccccttttgtgtgtatatagtattttgaaagataaatgaattgggtatttgtatgtgggatgtacaaaattgtggccgctctctttgtggaaggaaaaaacataaatgaagttaatgcacttcttttcctagcccaaaagtcactgtgattatatttttttaatgaagtttagaaaaaaagctgttgtcttctcaattgtaaaattagtttcaaaatgctgcttctcttatcattagtctagtaattgttgaacttttctgcaaactgcattttacaaaattgaaacttggaagctgtattaacttttatagttaaacattgtattaaataaactatactataataaacagtttggttttgtattttttaaattgtattatccagccttttaaaaattaaaagctaaataatgaaaataaaccaattaaaacatacttttactctcagatatacaggtatttacattatgaaaaaactgaacaaagttttaacaatactgagctttaagaatttagccagcagggaaaatttccaggtttgagaatgttctaatgtaaatatttaatcataatacttcagattgtagtgtgtcttttgcccagcaaa

SEQ ID NO: 97140 - DNA, 1052 bp, Homo sapiens
actacgtgattcttatcgaaaaggattttggacagaatttatgggcagagtctttaagtatttgggagataagggtgtaagagaacatgaaatgaaaagagcagtgacatcattgcctttcactccagggatggtggaactcttcaactttataagaaagaataaggataaatttgactgcattattatttcagattcaaattcggtcttcatagattgggttttagaagctgccagttttcatgacatatttgataaagtgtttacaaatccagcagcttttaatagcaatggtcatctcactgttgaaaattatcatactcattcttgcaatagatgcccaaagaatctttgcaaaaaggtagttttgatagaatttgtagataaacagttacaacagggagtgaattatacacaaattgtttatattggtgatggtggaaatgatgtctgtccagtcacctttttaaagaatgatgatgttgccatgccacggaaaggatataccttacagaaaactctttccagaatgtctcaaaatcttgagcctatggaatattctgttgtagtttggtcctcaggtgttgatataatttctcatttacaatttctaataaaggattaatatgtcagcaattgaaaagtgtatcacttaagattaggttcagcagcataaaactaaaaccccaaataccagaggcttaaaaaaaaaaaagagagagaatttttttttcctctcacatgaaagaattccagaggtaagtatttcagggttgctgtgttagtctaccaacctcagcacttggcattcaacccatgatccaaggttgctggtgaagctctagccctcacagcagcactctggccagcaagaaagagggcagtgagaaagttacatcccctgtctaaagaaatttcccagaagttgtacccaacacttctatttaaatgtcactggccaaacttagtcataatgccttacttgtaaatagcaaggaaggatggaaaatatagctttcattccaggtagtcatgtgcccaggaaaagttgg

SEQ ID NO: 97141 - DNA, 1122 bp, Homo sapiens
gcacacaaggccaccctgtgtggcacctgtgacagcaggcatgccagattgcctgccattggttaaggagacagctgccaagacctgaagggacaccactgcttatcgagggtatctttctataaggattctactgctaccatcttttacagataggtgtcaagtaaaagttgtctgtgttgggaaattcccagaaaggtgatctgttgggtgagttcctccctggcctcctacagagccagctaaggacaagctgaaggataatggcagcatggcaggaacaggcgatctgaattaggtgacagggaatgattttcagcctcagcgttgcagtattgtgtgcctgaatcaaaataccaccactccctattttttgtgtgctaaattttaaaggattattacattaccacactgtggaatctcttttgtttgttatcctttaaaaaaatgctgttttctttttttctttttaaaagaatatggattgtgctcagttccgtttgaaaataagctctatctagtcggcggacaaactacaatcacagaatgctatgaccctgaacaaaatgaatggagagagatagctcccatgatggaaaggaggatggagtgcggtgccgtcatcatgaatggatgtatttatgtcactggaggatactcctactcaaagggaacgtatcttcagagcattgagaaatatgatccagatcttaataagtgggaaatagtgggtaatcttcccagtgccatgcggtctcatgggtgtgtttgtgtgtataatgtctaattgaatctgcagaaatgaccaagcaatcacttttttggagtatagttttataaaaaaagaatgcagggtttgaagttccttacctgataattgtgtctggcacatgataggggatcagtaaattgtaattcctaaccctactgtactcccaaacatggtgattcatggtcaagaaaaatcttatatatatatatatatacacacacacatatatgtgttcatatatatgtatacatatatatgtgtatatatacgtatgtatacatatatgtgtatatatacgtatgtatgtatacatatgtgtatatatagtatgtatgtatacatgtatgtgt

SEQ ID NO: 97142 - DNA, 3186 bp, Homo sapiens
cacgctgtactgtattgttttcaaaactctaagatttcatggatctttgattttttttttaaatttcacttgtcctttttttttttttgagaactactacaacacgatgtgtgtgtgtattcacacacatttttggaaaatatctgaaaaaaaacccaaagcacttcacatgaatggagggccaaaggaagggctggggtacagacgccgtccagaaatacttaaaaataaatgtttatactaacacaaactagcagccattcccctacaacctggagtactttttaacccaatctgtttgggattgagggcgggactccagggtccctgggaggccccggcagccgcgcatgctcagagcacagggaccgctccacctcgtccgtggccctgcccacccaggccgcaagagctgccgggacggtccccatcttcttggagcgctttaggctggccggcggcgctgggaggtggagtcgttgctgttgctgtttgtgagcctgtggcgcggcttctgtgggccggaaccttaaaggtgagtaactctcggtggctaatgagaagctacaaaagggtccgctttgctggtgcgcgactgcgcgtttccgttctttactgcttctcgcggcgtccgtccgcccctcgccttcctcacgttcaggccgagcgccgcgtgggccgcagccggaggcggcggagccgagggggcgcgggcggcggcgaggctgcccccgcgaggaatgcgggatcctggggttccccgcacgtggctggtgcccaggcagttccgcggttgcttagagacgggactgtggctgccctcatccccattgcgtcttttttttttttttttttttttacctccaccgccttctagtctcaccgaaggcttgtggccatctctgtaaagtttctggggaggtgggcacggggtaaacgccggagggttctgtggagcctatgggactgactggaggccaaagaactttgggccgcagatgtacaccagcgtcactcttttggtctgttagggccttcatcgctcacatcaggtttcagtgtgaaacgggaaaacgtgggtaatatttcatttacagtcgtacattctggaaaagtatctgatgaaacgcagttccaaaattaggccaaataggttttgcagggtctaaatagttattttatttcatcgtttgctttgtagggggccctagatcacggtagtaacttaggagtgtagattgtgatagacaagacaatgcataaaattgagtaatttctctagggggatgtggatcacacagtaccccgttgcaagtgcttcctatgtgtatccatggtatcgaatgcaattgcagtgtgtcaggggatgcttccaggaagtgtacctacatcagttcataactagagtcaactaatggcaatattctcgatgatttgttcacataacttttgtacagttgggatgactgggtggcttagtagagtcctggaggcaagtactttgtaagtagaagacttggtttgtaatttctagcaaactaatagcacagcttccttttttcattgcagtgctaatgtcaggaatacgaaacaggaaactggctatccaatgtattagtaaattagtaggcatactccccagtttaatgttgtgttagtatgaccacattctcccatttttgttttcgtatgttccttagcatagagtatctaaggaactgtaacatttttcaccttaaagttatgatgtctaacttggtaacaaggtttgggtaagtcagttgtgactacattttaaaagaaatgaggccgggcgcggtggctcacacctgtaatcccagcactttgggaggccgaggcgggtggatcgccagaggtcaggagttcaagaccagtctgaccaacatggtgaaaccccgtctctactaaaaatacaaaaattagtcagccgcagccgtggtggtgggcgcctgtaatcccagctactcaggaggcgaaggcggaatcgctggaacctgggaggcagaggttgcagtgagccgagatcgcaccattgcactccagcctgggcaacaaaagcgagactccgtctcaaaaaaaaaaaaaaaaaaagaggtgaacccataccaaacaaatgcacagagagccatggtaatatacagatagatagttatctgtttaaaactggaaatggttggtaagtgattggagtttttttccctaaagcttgcttgaccagctaagtgaagataaacagtttcttgttatagaagatggggtagtgatttactgaaagacaagttttttatagtttttagattttttcatcacttattccaaagtgttgctttgttgagatatttgagaactgagtaaagaaactgaacccgtgaaaatagaaattcttgattttttaagaaaacgggatattaatactttgtaaacattatctttctattcttgagttttatataaaaaataactttatgctaatttgggaaattttacagatagccgcaatggctgaaaatggtgataatgaaaagatggctgccctggaggccaaaatctgtcatcaaattgaggtatgattcctgtgctataaactgcaaaaacaagttccttgaaagaaaatacagaaagaacatttaattctagtacatggacatattcaacatttggtttgcctttgattcttagatgaacatataatagcatacagttttatattggtggagccaggttgtgaaacttaagatgtacaaacatttcaaaaggtaacactataaactagagttacttaatctttttaaaattttagtttcatagtctcatataaaattttagcttcatagtctcatataaaatgagaataatagtagttccctcctcataaggtagtttggaggattagtgaatataatgttaagtacttagaagaattcctgacacataagtaacataaaagtccttggtaaagtaccttccctgttaaataacactatatttttgatgatcttagtttttttctgcccagtcagttctcagctattgtaactttaatatagtttttttttttttttttttttttgagatggagtctcactctgttggccacgctggagtgcagtggcactatcctggctcactacaacagtattggctcactgcagcctctgcctcctg

SEQ ID NO: 97143 - DNA, 1074 bp, Homo sapiens
tggtggtacatgcctgtaatcccagctactcaggaggctgaggcaggagaatcacttgaacctgggaagcggaggttgcggcaagctgagttcatgccactgcactccagcctgagcgacagagtaagactctgtctcaaaaaaaaataagaattgagtgattaaccaatttcttccagttctttttatttaaccatctgttctttccacactgatttgcaagagccttttcatataatctttaaatatattcttctttaaggttttctagtctattgacacatctgttacactattttagtaattgacattttagttttatctttttgctaatttgtaaacattattgtatatttggggaaagtgttttgccttttgtaacttatgtatttttaaataacagaacttggtactgtagagtaatgtcaggattggagtccatattatacagtgttctgaaatacattgtaattatctcacagtattattttggcgacttcaatttgccacgggacaagtttctaaaggaacagataaaactggatgaaggctgggtacctttggagataatgataaaattcaacaggtaacaagcttttaaaaataatctttaggttttctgtttacaatgagtgctactgctgagtcttatgtttttatatgtactcttcaggttgaaccgtctaacaacagactttaatgtaattgtggaagcattgagcaaatccaaggcagaactcatggaaatcagtgaagataaaactaaaatcagaaggtctccaagcaaacccctacctgaagtgactgatgagtataaaaatgatgtaaaaaacagatctgtttatattgtaagtgggcctgtaatgcatttaaatatcttacatttatttagaaagtaaagtacggaagaataagggctcaggaatcacagcctcactaattactgtatgtcctttcgtaatattcttaacctaagtttcttttgttttgttttgttttgagacagtctcatcctgttgctcacgttggagtgcagtggtgtgatcatggcccactgcagtcttgacctcctgg

SEQ ID NO: 97144 - DNA, 1152 bp, Homo sapiens
atgacttttatttttgacttaataagatactgatgtgtatttccatttagaaagttacaggtaaaaatttttatttggggaaaataatgactataaaatttttttttttctttttttgagaccgagtctcactgttgcccaggctggagtgcagtggcgcgatctcggctcactgcaagctccacctcccagattcatgccattcttctgcctcagcctcccgagtagctgggactacaggcgcctgccaccacgtccggctaattttttgtatttttttttagcagagacggggtttcaccatgttagccaggatgctctcgatctcttgacctggtgatccgcctgcctcggcctcccaaagtgctgggattacaggtgtcagccactgcgcccggcctaaaaattttttaaagtatgataaatactgcctagaattattttccaagatagtttaatagccagatttatgtagtttataactaattaaataccagttgtataagagatcaaataatattgaaagccattttggaataaaggatgacaaaggaaaacaccaacactatgaaactactttatttatttattattattattattttttgagatggagtttcgctcttgctgccccggcggaagaaactactttaaaatagcattttggtttctagtctttttcttgtatagctataaggtggtgtgagtcatttctggtctgttgttgcttttaagaaactttttgatcactttgtatatttttatagaaatctctagaagaaaagattggatgcttgctgaaattttcgggtgatttagatgatcagacctgtagagaagatttacacatacttttctcaaatcatggtgaaataaaatggatagacttcgtcagaggagcaaaagaggtttggatacatccctatcctttttagcaatcagtttgaaaatctgtagaaacttagacaaaattagtagaaagtaattttaaaaattgtgtttattaaattagtttctacttgatcatttgttattgccactagatgtgatgtctgatattttctgaattatactaaattagtttctacttgatcatttactttgttgttattgtcactatatgtgatgtctgatagtttctgaattatacta

SEQ ID NO: 97145 - DNA, 1488 bp, Homo sapiens
agcattccttttctactgttcagtaaaattcattcaaactggtaaagacatggaaggtttgcagggtagaaaaaattactttggacaaagaaattaattgtgggactaaaaaccaagggtatggcttttgttttctgtctctggtataggggataattctatttaaagaaaaagccaaggaagcattgggtaaagccaaagatgcaaataatggtaacctacaattaaggaacaaagaagtgacttgggaagtactagaaggagaggtggaaaaagaagcactgaagaaaataatagaagaccaacaagaatccctaaacaaatggaagtcaaaaggtcatttattctgatttttctttaacagtttggttgttgaacccatttacttgagcaaaaactttaatcagtgttcaaaaacattgacaagagacttaaaaaaagttctttacagagtgctcaattgtgtctctacaggtcgtagatttaaaggaaaaggaaagggtaataaagctgcccagcctgggtctggtaaaggaaaagtacagtttcagggcaagaaaacgaaatttgctagtgatgatgaacatgatgaacatgatgaaaatggtgcaactggtaagttttttttaagtcctttggtagtttcatgagaaaatttctacttccataaataaatgatttgccagagagaatagggatttggcttttcaactcctggataagtgccattcttggattattaacgatttacctcggttatgctgttgtataagtcagggacaggatatttggaagatgaatctagaggtcaggtctgtactaagagaaaagccttttctcattggtgcaaggaagttgttgcatctttttcaacagtatcattattagtaattgtgctcagtattaaactagagcagtacttacgttgaatttaacaaaaattaattgttacgttataggacctgtgaaaagagcaagagaagaaacagacaaagaagaacctgcatccaaacaacagaaaacagaaaatggtgctggagaccagtagtttagtaaaccaattttttattcattttaaataggttttaaacgacttttgtttgcggggcttttaaaaggaaaaccgaattaggtccacttcaatgtccacctgtgagaaaggaaaaatttttttgttgtttaacttgtctttttgttatgcaaatgagatttctttgaatgtattgttctgtttgtgttatttcagatgattcaaatatcaaaaggaagattcttccattaaattgcctttgtaatatgagaatgtattagtacaaactaactaataaaatatatactatatgaaaagagcaaaaacagtttttgattttttttttctttttgtacccaaagcatttaggaaagaactagaatattagctattgacgatgggcctttcccacaggccatttatggtgtctcctaggctggctttgtatatttacacag

SEQ ID NO: 97146 - DNA, 1035 bp, Homo sapiens
agctactcgggaggctgaggcaagagaatcgcttgaactcaggaggcagaggttgcagtgagctgagattgccccactgaactccagcctgcgcgataagagtgagactcagtctcgaaaaagaaaaaaaaaggaaagctttgtgacaagtaattatttctagtgttaccaactttcctgtgtaaatatacaaagccagcctaggagacaccataaatggcctgtgggaaaggcccatcgtcaatagctaatattctagttctttcctaaatgctttgggtacaaaaagaaaaaaaaaatcaaaaactgtttttgctcttttcatatagtatatattttattagttagtttgtactaatacattctcatattacaaaggcaatttaatggaagaatcttccttttgatatttgaatcatctgaaataacacaaacagaacaatacattcaaagaaatctcatttgcataacaaaaagacaagttaaacaacaaaaaaatttttcctttctcacaggtggacattgaagtggacctaattcggttttccttttaaaagccccgcaaacaaaagtcgtttaaaacctatttaaaatgaataaaaaattggtttactaaactactggtctccagcaccattttctgttttctgttgtttggatgcaggttcttctttgtctgtttcttctcttgctcttttcacaggtcctataacgtaacaattaatttttgttaaattcaacgtaagtactgctctagtttaatactgagcacaattactaataatgatactgttgaaaaagatgcaacaacttccttgcaccaatgagaaaaggcttttctcttagtacagacctgacctctagattcatcttccaaatatcctgtccctgacttatacaacagcataaccgaggtaaatcgttaataatccaagaatggcacttatccaggagttgaaaagccaaatccctattctctctggcaaatcatttatttatggaagtagaaattttctcatgaaactaccaaaggac

SEQ ID NO: 97147 - DNA, 1100 bp, Homo sapiens
ttcctcaaagatttttttcagacaggaactgttgccagaggagagactataactcaggagtagaaaagtgtgttgtaactaggattactgtatgttttggtttctctgagtaagtcttagttgatcccttttgtcccattgtcccggtgtggcctgatgtacttaagggaggcagtaaggccaggttttcagaacacttgagcctggagctaaacagatctgagttcagaaatcacctattcttacttttgcagcatataacacatggagaggtgtataagttgtagtccaggaaactgggggaaggggcagtacatttttttagtgtcagtataacacaatagttaggaacagagattctgaagccagaccagattctctgggttcagatccaagttctgctgcctcccagctgttttcttggtcaaggtaattgagtttcatcatcaaggtaattgagcttttgtcatctatactatcctcacctgtactctaagtgtaagggactgagagtaccaattgtacttcataagaattgtgaggattacatgagttaatatttacaaagcacttagatcagtgtctgacatgtgtaattgctatgtgttagctattattatttaaatcatacatgtattcaaagattttaaagtgcttttgtaggaaaaatacttaattcatgtaaatacagtacgtaagaacccagttggaaataatacattctagttacatggtaatgtgataaccttttaaaaagcataaaatataacagctaaaaagaactatactgctaataataagtagtggtacatgtaggcaagcaacaggacacaacatagctagtaaataaatcctcactcactatatatgaaagcaaacaccagtaaacattggtatccaaacctgtgtccccaagaacaccctcaggtttgatgattcactaggaaatctcacaggactcagcatctagtcttattcatggctatgatgtattacagtgaaaggatatagagcaaaatcagcaaggagaaaggtgcattaggcagagaatggggtaaaccagggccaggcttctggagtcttctgccagtagaataaca

SEQ ID NO: 97148 - DNA, 1038 bp, Homo sapiens
ttgatagagttgccaaatttatgttgacaaaaaaggatttttttaaaaactatttactcttaccattctttcttaaaaatatttcagcatcaaagaaagaaccgatatgagtatatggcaatgtttttaacaagctgaggaaaaactaaacgttttgacttttttttattttacctcagagactgggcacagttttgtcattcttggcattgctagcagagactattttttgagaaacactggtgggtattagcttcctttatggtgcctcttactacataccaaatcattaccccttatcttttacaaaaataatctggaatggcatttggggaggactaagtaatgcaacacaagaaattattttagaaagagtcatttgcacaaattagattttagtcaccggcttgcttacttattctttttttttttattttttagcatgtatgctctatacaatccataacacttatgatgacattgaaaataaagtcgttgcagatctaggatgtggttgtggagtacttagcatcggaactgcaatgttaggagcagggtacgtaatgcaatatatgctatttgggtattgggtggctttaataaggagcatcaatgggattaactgaattatatttatgagactccacagaatgagatatagggagcaaaaatctgatactgaatacattttgaatgggcagaagatctaaacaaactacaaaaattaaataaaaatggtgaaagcagcagttccttttatacaaacctgagtttccaacccctgccgggtttggaaattatgctgttacacttgactgggcacagtggctcatgcctgtaatcccaacactttgggaggccaaggtggacagattacttgagcccaggagtttgagaccagcctgggcaacatggtgaaatcccatgtctacaaaaaatacaaaaattagctggatgtggtggtgtgcgcctgtggtcccagctacttgggaggctgaggtgggaggattgcttgagcagtgcaagatggcaccacta

SEQ ID NO: 97149 - DNA, 1041 bp, Homo sapiens
ctagagggtaatgagcacgcgacaggcggcgaggactggcggtgggtcagcaagtagcgcaggctttgcaggcggaggggatggggcaatgaggcccccaggtggccagcggaaccccggctcaagataaacgctgcagctcggcgccgggccgctgggcggcgaacgcgtgcgcgcgtgcggcctggcgcttccggcaccggccgaggtgcgggtcgcctccagaggtgcgtggtcgtggcgcgagggatcctgaggctgctccagcagtgcgccgccgccgtctcctggggcggcttgggttagccgggaggtgggtcagaggctcgccccgtgccctgcgtccgggcgtctccttagggcgcgtcttcgggtccggccagcggtgctgaaaaagggagaaggttgggggtagggaggaaacaagatcccagttcaatagatttctccgcagatcctgtgccttcaaaccctacgagtccatactttaaaacaaaatgaagaaagtaaggcttaaggaactagagagtcgcctgcaacaagtggatggatttgaaaagcccaagctacttctggaacagtatcctaccaggccgcacattgcaggtagggcggctggttcaccacgccccggctttcggcgttagtccagtctactctgtgataaaaatagaacagttatttggatacagagaatgtctagagaaattctgccctaagatcacctgtcgcgttagagaggccttccttgacactgcagctcaaggcacaccctccacagacatacacactatcattttactgtctagttttctgcatatcccttaacactgccagacatctttttaatgtgtttttttctcttctcacattacaatctctgaggacaaggaatttgttagacttgttcatacttgaattcccagtgcccagaagagtcgctggtactatttaggagctcagtaaacatttactaaataaggatcagtttcccattgctactaattgcctacgcaaggattcttgtgctatatactctgc

SEQ ID NO: 97150 - DNA, 1217 bp, Homo sapiens
tgatctcaaactcctcacctcaagtaatccgcctgcctcggcctcccaaagtgctgggattacaggcgtgagccaccgcgcctggccttctgttcttctttggattgcttttcctacagtttttgttttccttaagttggggtttcattctgtcgcccgctggactttgataacagtaggaatgtacatctcagacaaaatgcagatgcctaaagtacatctgaaagatgatgtgaataattcctgtagtctatgcaaataaagaaataattgcccttattaaagatttcctataaggtgagtactttatttcagtagctcttaacttagaaagttgggagcctagcttggtccacaggcgcccaggagagaggggcgggaggaaggctctgcagcccgagggggcgtgtgtaggggcggggctgcgggcggaggagcgcggacgctccgggtatcgcgagagttgggcgggccgagcaatcgcagcagtctattccctcactctccctggaggagccgctggccctggactctccaaattctgagctctcatcatggcggcggcggccgcggcggccgtcgggggccagcagccgtcacagcccgagctgcccgcgccggggctggccctagacaaggcggccaccgccgcgcacctcaaggcggccctcagccggccggacaaccgcgcaggtgctgaggagctgcaggcgctgctggagcgggtgctgagcgccgagcggccgctggccgcggctgccggcggcgaggacgcggcggcggccggaggcgggggcggtccgggggcggccgaggaggaggccctggagtggtgtaagtgccttctggcgggcggcggcggctacgacgagttctgcgcggcggtgcgggcctacgatcccgcggcgctctgcggcctggtctggacagccaacttcgtggcctaccgctgccggacgtgcggcatctcgccctgcatgtcgctgtgcgccgagtgcttccaccagggcgaccacaccggacacgacttcaacatgttccgcagccaggccgggggcgcctgcgactgcggggacagcaacgtgatgcgggagagcgggtgagtggagccctccccgcgggcgaggcgaccctgggccggggacgtcgcgggagggcctggagcggagcactgggagcccactctgagctgtcaaggggagggtgcgggggagggt

SEQ ID NO: 97151 - DNA, 1751 bp, Homo sapiens
acctctgtctaaaaggagacaacaaatgcccttttgacagaagcgatgcatcagatgttgggacttatgagaaaagacatttcagagtttgcagtgagttacagagagttggtacatgtagggtcgtggcttggaacatgatgtcaatgtcagggacagtctgagaaaaaaggaaaaagtgaaaggggcgattttggatgggcagtagttgaaagaatattagcaactacaggttgctatcagttattaaacttcttcaattttcaggtcttaggattaatgacagagtacaatctttttataaatggtcacctttttcttcggagtacttgtaaggttactgttactccaaaatgtttgtacctactatgtgcaagcaaggcttcttggatattaaaaatgaatgaaacattgaccaaccccttactctacttgcactggagtagaaagtaataaattccttaaacaataacttggtagctagaggagggagatgaggtttctgtgcagagggagtaagaaaaagtcttcagaaaggaggtattttgaatttgctaataataataacaacataattgcagctaacatttgagttttttttttttttttttgagacggagtttctctcttgttgcccaagctggagtgcaatggcgcgacctcggctcactgaaacctccgccccctgggttcaagcgattctcctgcctcagcctcccaagtagctgggattacagtcatgcactaccacgcctggctaattttgtatttttttagtagagacagggtttctccatgtcggtcaggctagtcccgaactcccgacctcaggtgatccgcccgcgtcggcctcccaagtgctgggattacaggcgtgagccaccgcgcccggccaacatttgagttcttgaactgtatgtctgatactttaaaagtactttttaaaatttaatatttgaataggtaaaatatatagctaaaaagtacacacacacacacacacacacacacacacacacacacacggaagtttttctcacatctagtcttctatctgtccagttccttcccgcttagtttctcttggtgcagaacaagcaaagatgtttcctagtttttcagtctctttttatgcaaagggttacatactttccactgttctacatcttgcattttttggttatcttagatgtatttttcctattaaaaaatcagtgtcgtcattctatttttttaaaaaaactgctgcatagtgttccatgttttcaatttgccattctttaatttctttttttatttttatttttattttttgtgcgtgtgaatttgccattcttgatttaatgtctcttcatgggcatttggctttccagtataaaattaaaaacgtggtgtatctgtcttttccccacctggtcaagagagtcagtgggataaattctcaaaagtgtgatttccaaattgccctccctaaggcttagtactaattactctgtgagactgcctgttttccaacagcctcatcaacagagtagtagtaaaattttggacttttatctatttggttaaaagtggccaaattctagctgttttatgtgatttaacttatttattctttgactctgagattattacttttattattctcattgtacagaagaggaaagtagggcagagttaaaaaccttgctcaagttcacacaggcagtaagctaggcatgctggctccagggctctggagccagactaat

SEQ ID NO: 97152 - DNA, 1332 bp, Homo sapiens
tctggcaaccctctatgagttggtacattatatatatatatatatatattttttttttttttttttttttttttttgagagagagagttttgctcttgttgcccaggctggattgcagtggcacgatcttggctcaccgcaacctctgcctcccgggttcaagtgattctctacctcagccttccaaatagctgggattacagggatgcgccaccacacccggctaattttttttttttcttgtgtttttagtaaagacagggtttctccatgttggtcaggctggtcttgaactcctgaccttaggtgatccacccgcctcggcctcccaaagtgctgggattacaggcatgagccaccacacccggccggatacataatatttaaagatttattattatctttgtctgaaaccagagctattgcctgtatgtgtcagcagttgccatgtccagtttcataaagggcaagattgaacaataaacagtattgtggccatgcaattactctgaattttttctaactgcttggattggatagagtaattttcctgggctatacagctaatttactgcctcaagagaaataggtgatgttgaccagctctgcaacctaaaagactgcctctggaacctttttagaactggaaatcatcaacagcttgtaacagtgttctcatgggcaaagctggactacactggcatgaacagaatgtttgaacttttctaagtttttggtattttaaaaacccctttagattgccaaagattgaatgtgtgttgattttggggtttttattctaactgccataagtttgtaaatttcatggtttagtcacttttagaggaaggattcctttttttcagctgtatttgtgctcttagtaaatgagaataaatctttctgtgccataatccttttcaccagtgtctgactgttgcctgtaggatgttcttgattggagatggagaagaatcttgaatctatcacagctgtatttatatttaattttcaaattagcaattatagaactgtggggaggatttagttatttttgactgagtagtattgatataatcaatgtggcagtattagcagatatacaaaccaaaggaagaaaacaattgaggattcatttgtgggatgaaatcacaaaggctatggaaattgtgtgctaataactgtatgtggctgggcgcggtggctcacgcctgcaatcccagcactttgggaggccgaggtgggcagatcacgaagtcaggagattgagatcatcctggctaacatggtgaaaccccgtctctactaaaaatacaaaaaattagtcaggcg

SEQ ID NO: 97153 - DNA, 1418 bp, Homo sapiens
tgtaatgtctgactagctggttttgggctctgatgggatactaactggaaactgggattttaaacatttagttctcaaattttggtgcagagaatgaggagtttcatgttctgtcctatattacagatatttttgtctccttgcttgttcttcctcacatattctaagctccttaaaagataaggaccacattttgctattagccagaggccagcacctactaagtctcttgtacttaggaggtgtcagtaattttgaattaaattggataaaaaagtggctgctatacccaaaaagttactgtaagattacattgctttagttactcatgaggtggcattgattattaaatccatagcagcttttttcagagtgctttcattctttttttagtttcagaagtaatacacattgattataacataaaaataagtggataaagtaaaaagtaaaggtgcctttctccatcctacccctcagtaagaaatttccttttcttttaaggttacttatgtgtttaaaagagattagttataatttatccagcatttctagattttttttttttttagtgacaggttctcgcagtgtctcccaggctggagtgcagtggtgtgatatcacagctcactgcagcctctacctcccaggctcaagtgatctcccacctcaccctcccaagtagctgtgactgtaggcgcacaccaccacacacagctaaatttctttttgtattttttgtagagatggtatttcaccatgttggccaggctggtcttgaactcctggcttcaagcagtctacctgcctcagcctcccaaagagctgggattataggcgtgagccacagtgtggtgcctggcctgtgttgtgggaggtttttaggttttctgatctgtggtagccagaaattgaaccacgtgaatgtctggttgaatagtgttactctcttcagtagcttgcttttttccccttaacatatttatggatactatctcaaaagtagaactgcttcatttttaaagttaaatagtatttcattgtatttccatgtttttgtaatgtactatgatttttgcggtcagtccctactgatagacatttaaattgtttccagacttgggctgttgtaaacattgttgcagtcagtattcttgtatacacttgttcatatgtgtgtgagcttatgtatgaggatacattcctagaagttatatcttggttgaaggaaatttgcaaattcaactttgatagaaccctccaaagaaattaatttacattcctgccaacaatgtatgaaacaatttgtttccccatattctggcagtatatatggtggtatcagtgtttctgatctttgctgctctcataagtgaaaagttatatcccatttcatctgttatctccctgtcccactg

SEQ ID NO: 97154 - DNA, 1028 bp, Homo sapiens
cattggcaaatagttttttaatgacaataggaagaaaacctgtaaggtagatgttcttctttgtctctgaaactgttaatgcattaccatagttttggaaattatatttctcatcatggactcaatttcccatcctgtaattaggtactctaaaagaaagaggtttaggtttttgtaaagtggaactttaacactggtaattagagttaaccctttttttgtcattgagaaagtgggaagtgattacttggatttatttagaataatattgagtaggaattttaacttagattaagagtttctgtattgataaatcttaagtttttttaatattataaacttacatacacaggagagagtttataaaatgtatatgtacagtttaaagaatttcagtacaatggacattcatgtaccactatccaccttatgaaatacaacataaagtgttgataagtattttatattaccttatttctaatctgaaatgaattcaagctaacatagttataaaatctcagggtaaagaagttttctggttgtttttttaagacttaaaaaagcaatagagagtatttaagggattatgtgttgagattaggaagaggttaaaaaggttcatctttaatgctggtattaaaatactatatataataaattcttaaaccaagataatttctcgttttcattaaaacattgtcatttaatgttttaggaccgtgcagcctggattttttgagtcagtgctgattttgatattttaattgtttcttgaaaccattgaaaattatgggaattgcagaatttttgttattttggctagactacattttcctccaggttgactcatctgggaataatatgcagattctttcttggactttggtttgagaaaatgtcttcacgggtatggagaaaaggatgaaaaattaagagatcctgctctaaatcaccatttaattattgggtcaaatggatgtaaatttatacttttgataaatttttgccagattgttctcatatataat

SEQ ID NO: 97155 - DNA, 2258 bp, Homo sapiens
tgtattgttatacaaaacattcatacgcctttcccaagcactctgctttcgataactgcatgcttggtattacgagagcacagactgtcaaaccagaaggtgaattccgctacataattattatctaccatattacctctctgactttctttactgtaattttcaggttcctttaaagttcggatcatgtcttattaattcttgtgccccacattcccttggatattttagatgcccacctactttgtagatttcattatttggtataaacatgctgtgtattctcggattgttagtgctaaacataagcacaaaagtgttatttgaagctatcttatattattcattctagggctcccactccattagaatattcacctatttatagatactagttaatgaaaagaccatactgagattttgaatggaatatttttttctgatttgaagtttgttttaattaggtcttggagaaaatgcttgtgtaaagaaaagtcatgaaaagtaccttatagctttaaagagctctggacttacatatcctgaggataagcttgtatatggtgtgcaggagccatctgctggtactagttctctggctgttcaaggtttgtctaaatatttaatttgaacagttgtaacttttctgtattaaaaccaaaaaaacctctcaaactttactcattattgaaaaaaattattttgaactaaaacagtattattctttttaagaaaagtaataaaagtagtaaaaatttagaggcaaaaaagaatagattgaccaaagaagagaatgcatttttcttaaatggaatttgattagcttattaaggttctggttctaactcatgaaaaatgtacagttgctattcaagagtagcccaaaactttactgcctcaatattttagtaaactatggtttaaaactaaaaagagatccttctgaaacaccatttgtaataactgtattaaatctgagttttcactggagaattcctattgaagtatcaacctattaggtccaaacttatttgagataaatgttggaggctgggcacggaggcttatgcctataaatcccagcagtttgggaggccgaggtgggtggatcacctgaggtcgggagttttgaggccaaaatggccaacatggtgaaacctcgtctttactaaaatacaaaaattagctgggcgtgctggcaggcgcctgtaagcccagctacttgggaagctgaggcaggagaattgcttgaatctgagaagtggaggttgcagtgaggtgagattgcgccactgcactccagcctgagcaacagagcgagaatcccgtctcaaaaaaaaaaaaaaaagttggactttgccaagataactgttagaatgaggtgtcctaacgtaacaaaacttagctttttgatatttgtatttctcagaataatttgaaaataaagcaatatgtagcaactatgaaggacaactatttttcttctcctccaaaggtttcataggcgcaacaggaactttgggacaagtggattcttcagatgaggtgagatttaaagttcaaaactttttaaaaagtacaattttgtgcttttttatacttttttattattttatacttctttatagttctgaaactgtatagatttgtaggcattatgtagtttaagtttctcattctatagacaaggacactgaagcccataatggcttctgggaagcctagatcacacaattacttagtgagagaacgaggtgtgtaactagatttttacttcttgtttataattcatttttctttttcacagtttaaaagtgggtagaaagaggtagagatttctcctcagaggctatccccaaatttacccgtatagttgtcatatgtacaatgaaattatttttgaaaatttcgctaagtttaggataatttattaaaagactatgaaatggaactgtttttctaatcgtataataaagttacattttacatgtcagggatttttttttaaaactatgtactgggaaaaagaccatcaatttgaaatttcaatttttatagtgtttattaataataaataggaaaaatcattgttatatttctatattttattacataatttataagagaaaaattgctgttatatttgcttataatcttgttgcttattcaacttaaattttatatttctaatacatttaattaaaatctaaaaaataaaattacatttaaacatatatatcttttttcttttggaaatt

SEQ ID NO: 97156 - DNA, 1005 bp, Homo sapiens
cccggctaattttttgtatttttagtagagacggggtttttccgtgttagccaggatggtcttgatctcctgacctcgtaatctgccctggcctcccaaactgctgggtttacaggcgtgagccatggctcccagccaagagttgacttttaactttgtaaagcagaagaaaatatactgaaattttattagtattcattgtaggttaaagaacaaaatatatttttgaatttaattactaatgaggctatgaaactactgtgactcttccgctagtctctttttggggttgtgtatcctgttttaatctggtttgttttttgtttattagtggaaaacattattttattaggactaatggcctacatggaataaaaattctgttggtggctaggcatcataagcaagaagcaatgttaattgagtttgcgcgatttatttggaaagaaagataagaagttccatcaacccctttaaaaatgaatatgattattatttaaaatttgcttttacttttgttcttctcaaagtattttttaacatatattaaaatggtcaaaatgcaataattattatagaatagaatagattaaggtgaaaatagatgaagggataagatagatggaaagaggttgatagaggaagagtacttaaatatagatgttcttgaacaaataactattttatgccatttaaatattcattaaggcttttaatgtcatgttgcattttacttggaactgtaggcacaaatgacatatttgctttagtatttatatttgaaatatagtgaagagctaggtatggcttcaggattagaatttctacaccattaccttataggcccatgggattgttaagcaaacccttttcatgattttattgttgtaatttaagatatcataaaggaagataggatgagaataaatggacaatgacattttaattactactatagagtaggaattgtaacaattaaaagatattttggctgggcgcagtagc

SEQ ID NO: 97157 - DNA, 1071 bp, Homo sapiens
tatactcttacataattgagaaataatcactttgcaaaataagttactgtgtagatatgctttgaatattcttgtctttattcaagacacaatccaagtgaacaacagctttccaaaaataatagcaaaagtaggacagttgaaataaaaaatcagagatacttttcataagtgaataggtaaaagaaaaaaggctgggtgcagtggctcatgcctgtaattccagaactttgggaggccgaggtgggcgatccctaggtcaggagatcgagatcagcctggccaatatggtgaaaccccgtctctactaaaaatacaaaaattagcccagcatgatggcacgcgtttgtagtcccatcaactggggaggctgaggcaggagaatcgcttgaacccgggaggtggaggttgaagtgagccgagatcgcgccactgcaccccagcctgcgcgacagagtgagactccgtctcaaaaaaaaaaaaaaaaagttaattttacttttggaggcataaggtttaattttaatttggtatcataaattacattaatggtaagggtagggcagggaatcacataaactgttggtgggaaaggccttagaaatatttaatgtatttcttttccagtgcaggaattgattttacaacattcctgacagttggtaagcctctccataaatacttccaatcgtagggagcttacctagtttatgaggcaacttattcccttgatagctctaattattaaattcttctcaatattgtgttaaatattgtaactttcgcatatttcttgttttgccttctagaaagatttttatttccagatgacacttttaaatatttacttttagatattaatattttctgtcgcgcatagttctttcttttcactgtctagtaaactcattttcttttaaaatctatgtcctcatttagtgcacagtgatgggacatcttttgataagcataccgtgtcttcattaaggcccaaagctttttgttatttttttagcagctatcctaaattgttggcaggagccacagaggtcaaacaaaatgcccaacatt

SEQ ID NO: 97158 - DNA, 1047 bp, Homo sapiens
ggcgtgtgcctgtaatcccagctacttgggaggctgaggcaggagaattgcttgaactggggaggcggaggttgcagtgagctgagatcatgccattgcactcaggcttggggacagagcaagactccgttttgggggaaaaaaattttttttttttctttaaccatcaaaatattttgcaaatgttccaaaaaagtgaaagactacctcaccatcgagattttttttaagttatcttgggcattattataaattagtaatagctgtaaaatgttaacatgatatattgaaaatgattttaaattaaaaattaaaactaatgtgttttttcctttctattaaaatgtttacaggttgcttttacaaaaacttttgttcagcattatgctttcattatgaaaacactgaagaaaagtcatgaatcagacacaatgtctaacagaattgtgcatattagtgttcagttgttcagcaatgaggagctagccagacaggtaacagaagaatgtcagctgctggatattatggtcactgtgctattatacatgatggaaagttgccttattaaaagtgagctacaaggtaactcagaattatattcactagttctattattatcagtattattattctagtattattagtgtacttcatatacttagtaatattactaataatgatacttagtattattaatcatattctagtattagtgaactttgtataactagtcttgaaaacaccttatgtttaaaaaaattataaaataatacatgtttgttacggacatctttgaaaatttccagtgaagtttaaagaaaaagttaaaagcacttgtagttttgttattcacaaatacctgttgttagcactttgctatatttcttttctttttgtgtaatgactatatttatagatacaataaatactttttaaaaagttgccatagtgtacatgtcaaaaacatgcattttaataagtgcaggtattaatatcatggctataccataatttatttagtcatttccttattagacatgtttctgc

SEQ ID NO: 97159 - DNA, 1028 bp, Homo sapiens
caacctgccataatgtttctgtacctcttcccattctcatttctctatagttactcatcttaactttacctcccttaaattctatatatatgtatatgtgtgtatatatgtatatatgtatatacacacatatataaatacatacataatttttattattattttttgagacagagtcttgctctgtaccccaggctggagtgcagtggtacgatcttggcttactgcaacctccgcctcctgggttcagttcaagcagttctgcctcagcctcctgagtagctgggataacaggtgtacatcaccatgtctggctaatttttgtatttttagtagagatggggttttgccatggtgcccaggctagtcttgaactcctgacctcaggtgatccccctgcctcagccacccagagtgctgggattacaggtatgagacaccacgcttggccaataatatatagtatttaaatatttgctatgtacctggtactgtgctgaatactatttatgtattgtttcaattaagcttctgaacaagtctctgagattggcattattattatccttgctttaaagatgagtacattgaggcttaggaaagttaagcaatttgccataggttatacagccagcaaatgacacagttaagaaggatttcctggctcctaatgtcagaactcttactattcttaaccttgacacagccagtccctgtcaaagactctttgataggatgtgtctttacttgttggcactaggagctaaactttaaaaataacaacaaacaatacttcagattaattaaatcttaggacctctccattctctgaggaggagaaatcttatagttgagccttgctttgttccactcttgcctctttgtgcatatcagctcctgttttctccttatactgataatctgtctgttctcaggtgtgacaccatgtcctgaaaattgatatgaactcagtgcaaggcataatgcgttatatataatagctagctaattatgatagctaccatctc

SEQ ID NO: 97160 - DNA, 2072 bp, Homo sapiens
atatgctttgtggttccaaacatagctcataatttttcatgtcccagaaattttagaatttatcttttgaaacagtctttgtaaagtggaatctaaaaccatgtgttgtatgacataggaatgtctgtagatgctcataatcccagactgcctttcctccctgcatatcaaactacttattgaactatattgtttggatgtctataaacacctcaaacacacagtgtccatagcgaagactcattattgctccattaatctggctgcttttacattatcttgtgtgtgtgtgtatgtacatgagcacatgaatgtgtgttttgattccactgtctaactatctaaacagctgtgcagcctaaaaacctaggagttgtctttgacttctttttattccttgcagatatagcacacattaccaactctgtccttcaaatcttctgaatatctttacatagcctcttcatcactgcatctttttgccaccaccatagttcaaaccatggccatctctaagcctcttatctctagttgttgtcactctccttcagtcactttttacattacacttcttataatgttctctctcttaaaaccccctagtggctttccattctcttcatgtgaactctaaagtcctgacgctggtttataagaccctgtagcctcatttgtaccatgcatcctctgtattctttcttcaagtgattctaaccttttcttaggtactgctccttccgcgtatagcaccatctgctccaccatcactagttttatctggttaatcctaattcctgctttattttataggcctcagtttaaacttcacttcctcaggagagtcttttttttttttttgagatggagccttgctctgtcacttaggctggagtgcagtggcacaatctcggctcactgcaacctccgcctcccgggttcaagtgattctcctgcctcagcctcctgagtagttgggattacaggtgcctgccaccacgcccagctaactttgtgtttttagtagaggtgggggttttaccatgttggcgaggctggtctcgaactcctgacttcaggtgattcgcccattttggcctcccaaagtgctgggattacaggcgtgagccaccatggccagccaagtcttttcttgaattgtagtctcgctttatttgttcttatgagtccctctacttttcccattgcagcccttatcacattctgccttcttagatgttaatctccatgaagacagagatcatctaaatcttgatttatttatcactttattctcagagattagttgaaaacttgacccttagtaggtgctcaataaatatttgttgatgagtgaatttaattttacactgaatcattgctctttatatctgtaatgaggaaagtaccagtttgagtaaaaatagaagtcctaatcattttatttcattaatgattccaaggcgttttttacaagaacagtagtatttaagcagtgtcatgaaaatagtgagtttgattaattatattctgcttattcatcctctggtttcaattatatagaacagtgattctcaatttttaacttaaaaaaaatcccaacattccttagcactgttgcatcaatatcaatggctcactagctcagaagtggaacagtagttgtcagtcatggccaggggttagtataaataatttgtaaaaagcccctagtccttacttcctcattgagttagaccctctctcgtccattgagaagtactgaaagagagtgtacttaacttcagtggaccctgttcttagatattgttaaacttatttaatatttggtaaaataattctgtggactgaaacctaagtttaatgtgtggaaattaaaaagtgcagtagaggccctcctgactgatgagtatgacaggtagataggtagttgaataagttggttaaagtgaggaatcatttaaaaaatatgagccgggtgtggtggcacatacttgtaatcccagctactgaggaggctgaggtgggaagactgcttgagcccaggagtttgagtccagcgtgggcaacatagt

SEQ ID NO: 97161 - DNA, 1678 bp, Homo sapiens
actattatttataggaaaaaatgttatttctctgtttaaattttctactgtaaaatataaaacttaaggattaagtaatttaaaaggaaacttcacttgataaattactgtctttgtatgattgcactgaatgctatttgattcttgaaaacattaagggctagttaaaaaaagtaatactacccagatagctcagtcagtagagcatcatacttttaatgctcgattaactaatgacatgaagattggataagaggatgacatgtttctagaattttactgatacttgctttctgaggagaaaaataagctgcaaaatcttcatctggtggcaactataggttactacagacttgatagaagattaatgtggtcttgactcttcagagcacttaactatttgtcagacatagtgttaacctatgatacagagcattttatgtacatcatttcacttgcctcttcagaacagtactgggaagtaggttgtattatgcttatttttacatgtggagaaactgagactcataaaatttaagtaatttgctcaaggtcataaaactagtaagttagcatgcatactgacttttttgggggttgaggggtggtagtagtgggaaaataggagagagacaatcagaacatgattattaaatatgctgtatttgtgaatggaattgacttgtcacctttttaaagagtcttagtacctacttgtcaaattgttctccagaagggtggtaccagtttacacttgcgctaagagcatgtaatggtacctcattgcccaaatgcttgatgaaataggagaactttcggttttaaaagtttatttatctgtgagttacctgctactttagtttggttgtgacagattatttatgataacttataagtgccattaatttgttttcaatgagaggtatggaatagaatgtatcaaatactattttataaagacaaatctcatatagcatagattaaaacaggatgagaatgttagtaaggtgaccaggtaagtgatttcggtctggattgtggcaatggaaataagcatgaagctatattataatatcaagcaagaattgacaggacatggagatgagtaaggtgaaggagaagtcaagaatgaatgtgagactttcagctttttaaaaaggcatatttatataatttacataggtagctgatgagtttaactcacgtggatttgatgctttctgcacttacacattatacgtgatgccccaaaatatctgtttttaacttaaaaaaggagataaaattcaccatttaaccattttaaagtgtatactattcagtggtttatagtgtattcacaaagtttaccactactaccactatctaattccagagtatttccatcacccccaaaagaaattgcatacctcccaattccaacctcccctcatctcttggaaaccactaatcttctttcaacctttataaatctacctagtttggacatttcatataaatggaatcctataatatgtggccttttgtgtctgacttctttcactcaatgtaatgttttcaaggttcagctgtgttgtagcatgtatcagtacttcattcctttgtctggctaatatttcattgtatggatatacaacatttcatttgtcctttaatcaattgatagatatttgggttg

SEQ ID NO: 97162 - DNA, 10718 bp, Homo sapiens
atgtccaatacttttttgtcagccccaaagaaactctgtacccattaaacaatgacattagggaatttataataaattggggggggtgtctcttgaaatggagtctgatttaaatctatttaaaatctatttctgctttcattcatttttagaaatgtattgtaaaaaaggaagcgtattgacttacttaattttcatatttgtcactggttgtttatgaagggagagtttcttgaaatggcaaatataatcttaaaatctatacattttaccattttatatatacacaatgcatataattacatataatttaatgttgaaaatatatgtttatatatcataaatttattatatataacttactattttaggaaactcaagagtatacccgaaatgttgttagatattgccttgaagctcttcaagactggtttgatgctattaacttcgtagacgaggtatgtatatttttgatgtatgtaaattttttgatgtatgtaaagacatttaagaaaagtgttagatttcatttaatgttgaaaataatgaatactttttcataggcgagggaaggaagtaatgaacatattattaggctttgaaaaagaaatctaaaggggagactagttctttagttctttgacatttaggagattctggagcgcactaatatgtctgcttatttcctacagaagagtggcatgatttgtttttccattattaagtatatgtgtctcattatttctcagggtgaaatagtttcagttgaatatataaaagtgacaatgcaaatgtgaataggataggggagattaatgaaaagggtatcatacaactctattaattggacagtgttctgtttgtcagagtaggaaaagatggacttgaacaaaggtgattagtgttaataatgagaagagctggcacaggacatggtatgtatgaattgaacaagtaattgcttttattcgttggccaagtttaccatcagaagctccttttattcctcctatgaagtagggtcagaatatgccatatgcaaaagaaagaccatgtttcagacagctcacccccactttatctgatttctgaacctgggcacacagaaccgttgctgtgtgtttgtgtgtatatgtggagggcaggcaaattttatctcttgtgtgtgtgtgtgtgtgtgtgtgttttttttcctttctgtttaaaaaatttttgacacaatcacaaatttattgaaaagttgagtggacaaagaactttctattcttgaacgatttgagagttcagttgttgacttgatgcctcactacccccatgcatttcagtgtttcctacaaacaaggatattttcttatatagccagaatgcaactataaaaatcattaatatattattaacatttaattcttataactcattcatgttttaccagttgtcccatgataccttttatagaaaaaggatctggttcagaattgcattttgttatcatgtctctaatctccttctgggacattttcccagtctttctttgcattttaggacagtgacttttttttttttgagacagagtctcactctgttccccaggctggagtgcagtggcacaatcttggctcactgcaacctctgcctcccaggttcaaacaattctcctgtctcagcctcccgagtagctgggattacaggtatgtgccaccgcacccagctgatttttttgtatttttagtagggacggagtttcaccatgttggccaggctggcctggaactcctgacctcaggtgattcacccgcctcagcctcccaaagtgctgggattaccagtgtgagccactgctcctggccaggacagtgacattttgaagaatgcctctcaatttgggtttgtttcatgattagattcagattatgtatctttttcaggaatattatggaagtgatgtagtcttttcattgcatcctatctggtagtttgtgatttgtgttctttactaatgatgttccctttgatcacttgattagggtggtacctgctagactccttcatcataaaattaccctttttctcatttaattaataaagtattttgtgatccagttttcaattcattcatttatttttgtctctagagattcatagtttctattttattcaatgggttataagctattgctgttactatttgatgctcagattatttcagatttggccaatgagagcccctttaagcttagtttctgcttgtcccatcattttttgagaacttccatgttttctggcccatcaggatgtttcagactcatagtttccccacccatttctggaatcaatcatttctttatggatccctggttacttttagtgtggaacagtatttagaaaaatctaggtgctgcttgtgctcattgctattggggtatcactgctcccaggacttcacagtgaacagaggagtatatgtacataagtacatatacatatttgcatctatatttttctgtctatagtgaaagctgtgagttcaaactgatatttttaattccagtttaacactgtaggagttattctagttttcttcaacagtgggaaacctggcttccattatctttaatatatttacttatctataaatacatatttatgtatgaccaatctcatatataaatatgagaagcaactctcatctcagttgcctctctttcccctgcatggatgccctcttttctctgctttgactctgagtcctcatcctattcccccttttcccacacgtggacaccctcctcatcctgcctgggctctgacccccactttggactgcccttctgtggagaagccctgttcaccctcttcgtgcttgaaactcccgcaccagactcctcctctttttggatgccctcctcattctgccttggctctgatgcctcctgctctttgcacatgtggataatctccttacccagcttggattttgattccctattccaggctggccccctgtattgttgccctccttacctcagtcaggctttgattccccatgccaggtcagtccccatttggaggccctcctcacccagattggctctgatgctctacactggtctgccctgctgtgtgggtcccctctgactctgtccacatctgatgccctatgctaggccacaccccctatgcctgagcaacccccaacatctcaacccctcaattaccccagcagttgccctcctcagtctgagctctgacttccctctcagtttcctaacctttagatgcttatttttaccctgctccctctctttacctcccagtggctttaggaatggtttaggaagggaagaaccctttgttatctttaattctaatccctcctgccctgaattaatttttctttacccctcattacccctcccccaacatttgtgtcagctcttagccttcaacctagattttgtacatttggattttgattctgccctgaccaactcaccttgattctttgccttgtctaattgttggtctttaggcttaaattttgtttatgcaaatggtaatgagtcagtcttcagagagaacattgtccagccttcacggagcaccatcccacttccaacctgcttccctccttcttcaccctgtccagggtcagtccctcagctggagctttaactgaagcttttctcaatccagttttctttggtatttgaaacttcaggaattattgttgaaatagtagcatcagtaagacaacagtaagattgaactgggagaaaattatacacaagaaaatgatatttaaattaatcatgcttggaatcatgagtgtagtgaaggacagttagaatcatgtatgacatacagagcagctgaactctaggaaatagtgtatctgtttttcacacagaaatatttttaggaagatattgaatgttatcaaaaatttaaatggattcttaaaagaagagaaattaagtatagaacttaaagaatcaaataatatgttatttatttatttattatttttttcgagatggagtttttgctcttgttgcccaggctggggtgcaatgacacaatcttggctcactgcaacctccacctcctgggttcaagcgattctcctgcctcagtctcctgagtaactgggactacaggcgtgtgccaccacacccagctaatttttgtatttttagtagagatggggtttcaccatgtcagccaggctggtctcgaacttttgacctcaggtgatccacccacctcggcctcccaaagttctgggatgacaggcacgagccactgtgctgggtccatgtcatgtttttatatggtgcttaaaggttttattattcctcctttttttgtcattgggaagtggagatgcagagatattaaatgacttgcctattgttatgtagcaagttatggtacttctgggtccacagtcctcattttggaactccttgtctggtaatgttttaactgtattggttgttggcagtggaaagagctttaacgtaggcagatctgagtgtaaattgtggctctgccataattcaactagctatgtggccttggacagatttttttaagtttaattgttaatatatttttactttttttttttttttaacactgctgagcctatttcctcatctattgaaggtgataatattaaccagtgaggattgactaagaggcacatattacatgtgtgataaacattagttcttcttccatccttgtgggtggatgtcagaagttattatggtaatctagtacaaatcaagcaaataatttttttttttttttttaagacagggtctcgccatcttgcccaggctggtcttgaacacttgggctcaggtgattctcctgcctgggcctcccaaagtgttgagattacaggtgtgagccattgtgcctggccaataatatgttttgaactgaagtaagccagatcaaacaatcatatagaaacaggagatggaatacattttcctataagataggccatttaagagttcttaaaaacatgaatatcatgtagggcaacaattgtgagtttgtagcagggtgggtttggctagagtcctctggtaagaggaaagtagaacgtgcattcatccagcaaatatttattgaatgtttactatgttgtaaacataggggatacagtgataaaacagtccctgacttaaggaagtggaaaacaagtatatggttaatttgattcctgtgcttctgtaaagttgtgaccaggtgctatgtgggaccataaaagggagcacctgatttagcctgaagaacccaagaaaagcttcttagtagaagtgtcaactgagcaaagtcttaaagatacagtaatccagtgggagaagggatatatagcatttgcggcagggggaatagtgtatacaaaggcacagaagcttagtaagttagggatactacctatggtgcatgaatttatgtgacagaagatgaggctggagaggtaagctctttcttcttaggaattggaaggttatcaggaggctaaaaccatagggagtcattaaaagattgtgagtggaagaagttcaaggttaaattaatgtttaagtaagactaccttctggcagcatatagagggtaataggagatatgttagtcaaggttcttttaatgcaaggggaaaaaataatttaaagcagcctgagttaaagaagcagtaatttcatgtctaaaacaccaaaagcaatggcaacaaaagccaaaattgacaaatgggatctaattaaactaaagagcttctggacagcagaagaaactacgatcagagtgaacaggcaacctacagaatgggagaaaatttttgcagtctactcatctgacaaaggttcatccagaatctacaatgaacttaaacaaacttacaagaaaaaagcaaacaaccccatcaaaaagtgggcaaaggatatgaacagacacttctcaaaagaagacatttatgcagccaaaagacacatgaaaaaatgctcatcatcactggccatcagagaaatgcaaatcaaaaccacaattagataccatctcacaccagttagaatggcagtcattaaaaagtcaggaaacaacaggtgctggagaggatgtggagaaataggaacacttttacactgttggtgggactgtaaactagttcaaccattgtggaagtcagtgtggcgattcctcagggatctagaactagaaataccatttgacccagccatcccatgactgggtatatacccaaagggttataaatcatgcctctataaagacacatgcacacgtatgtttatagcggcactattcacaatagcaaagacttggaaccaacccaaatgtccaacaatgatagagtggattaagaaaacgtggcagatatacgccatggaatatgtgtatattccagccataaaaaatgatgagttcatgtcctttgtagggacatggatgaagctagaaaccatcattctcagcaaactattgcaaggacaaaaaaccaaacaccgcatgttctcactcataggtgggaattgaacaatgagaacacacggacacaggaaggggaacgtcacacaccagggcctgttgtggggtggagggaggggagagggacagcattaggagatatacctaatgttaaatgaagagttaatgggtgcagcacaccaacatggcacatgtatacatatgtaacaaacctgcacattgtgcacatgtaccctaaaacttaaagtataataataaagtaaaagcagtaatttattatgaatacatagggatgtctcagggttagggcacctggacctcagggatggactggaaatctgaataggaactcctgtcgcctgcctttgctttgccctgagtgtatgtgcctcattttttcttcccttcctgtgctttgcctatgtggtgaaatactgcctttttatagttgcctaacgttaccatttcaggcatactcccagattgtctgtgaatgtctctgaatcctagttcaaattttttaagagagaaagtcattgctcaagcgggggtagatgtcccctgccctgcctccagtcaagtatggctactataaacttgactgtcaggccccaatctctgtgtgtggttgaggtggcagagagtgggagagggagacacattctgagaagatgggaaggttgtgagctaggcagacaccacaaaaggtgttttatgcaggataatggtagaagtaggggttatcactaaaatctaggcactaggtgttgagggcctgagctaaggttagttaggtgcagtgtagacagaaagaagaaagtggatttaagagatacttaaaaaataagtaaacataatttgatacctcatcaaatataggaggcttgtgagaaggaggaagtctacatttcatatttaaattactgggaatctggagaagaaatattgaggaggattgagttttatggcaaagatactgagtttggtttggacacgctgtatttgtggtcctatggaatattaagtattgctgttcagtagacacctgaatgtaagatttggagttcaggagtgagatttccactgagatttggaactcatctgggtagagttagcagctgaagctgtgaatctggataaattcacatagaagactatagagtgaagaatggaatccaaggactctcagtatatataggaatagaagaagtgcttatcaagtagccagtctgtgacattagacaaggaaggaatatggactttaacgttatggagaatgtgaacataggatatgctaaagccctgaaagataaaatagggtccatggcttactagttaatagcaatatgtactgggtactgtgctgttttacttatttctcgcagctactaaactctttattattcctactttaaggatcagacaacttaggcacagagaggtaacttgcccatagttttacagctgggtggtagaaccaggattctgcacttaggaagcaggcacagtggttcacgcctttggtcccagcactttgggaggccgaggcaggtggatcacttgaggtcaggtgtttgagaccagcctgggcaacatggtgaaaccctgtctctactaaaaatacaaaaattagccggtgtggtaatacatgcctgtagtcccagctactcaggaggctgaggcaggagaattgcttgaacccgggaggcagaggttgcagtgagctgagatcgcgccaccgtactccagtctgggggacagtgcgagactcaaaaaaagggtctgcacctaggctgggcctggtggttcacgtctataattccaatcctttgggaggctgaggcgggcagattgcatgagcccaggagttcgagagcagtctgggcaacatggcaaaaaccctgtctctaccaaaaacagaaattagccaggcatggtggtgtgtgtctgtagtcccagctgctcagggggccgaggagggaggatgacttgagcccgggaggtggaggttgcagcgaactgtgatcgtgccaccatactccaccctgggccacagagtgagaccctgtctatttaaaaaaaaaaaaaaaaaaagagtctgcacttatccactgtgcttagtgcctcaaaggaaattgagggagattctgacttagctagttagtgtagaatatgttactaaggcgattatggtaatggagggcaaactttttaaaattttatttttaattgtggtaaaatacacagaaaacataaaattcactatcttaatcatttttaagtgtatagttcagtagtgttatgtgtatttgtattgtcgtgcagccaatctccataacttttttatctcataaaattgaaactatactcattaaatagctactccccatttcctcttcccccagcttctggcaaccaccattctactttgtatctctacgaatttggctgctctaagaacctcatataggtggaatcatatagttactgtctttttgtgactggcttattttacttagcataatatcccgaaggtttattcatgttacagaacattgttagactttcctttctttttatggagggcaaacttttatttattagaacaaatttttatagcctttacatattgaagaggatattattatcttactggttttgaaaaaaataattatttcagggatggtgacatatttagactccttataacctctataatgtaaattatatacattagcataattatctgaatgtccgggataaacatttttaacaagagaatatttaataagaacttaaaaagcattaaaaacaaacaataccttttcagttcttaactcatttgtttaagaaggacagctgtggtgtatttttgccctgtagtgattttgtgatccatgggattcacagatttaaaatacagtttttgtaatatttacaggaatgcctaaggtcattcacatattttttatgaagttttgttatggaggctggtgcgtttggtactgtttggaagcatcttatctaactggtgaaggaatctaacgatgccctgcatttatacctctgtttagggatgtggtcagagtcttcttacagttttgaatatgacagtggagtccagattagctccccagttcactacttttgaactttaggaagttagttaagttttctaagtttgaattttgctacttgtagaatgagaatattagtagctcctaccccatagcattcttctgaggattaaatgtggtaatgtgaataaagtgcttagcatggtgactggcacataggaagtgttcaatgaatgttatatgtgactgttattactgtcatgatgtttggtatacatgcgtttgaagagtcccaaatggtctactgtagctggaaatccattccatcccttgttttaataataattatttgctttagctgaattgaatttaggaaatattaatctgtactggatgcttcagaggattcaaagttgagtagaatacaatttctgccttcaagaaacttatacttaagtgtttaaaatggaaaaattttatctatagtgattttggaatctgcatcttctaaaatgttaagttttgaactaaaagtataggaataaatccaggtgagagtatggtttaaacattttacaaccatcttaaaatttctataaaatagtctttgacttgtgcattttgtttgtttattccagccagcacctaaccaagtcacttttcatctgccactacatcgttactatgctatgtttttgagtaaggtaagactgtcattaaacaattctgttcttttttttttaattttcagaaataagaattgaattagtaacttttttattgtaatttttaggctgtgaaatgtcaagaactagatttggattctgttttaccagatcaggaaatgttaatgaaactaatgattcacccactccaaattcaagtatgtattcaggcatttaaaaagttttgaagtggattccttgtttaagtgattcttcctttatttatatgcctttcattgttattatagctgagatgtttgaaaactttttttaaaaagttgttattgtatttttgctagattatgtttaggtatttttcattttatgagatttactttttagttttactttttccaggaattcttttcatgatatttgcttatggggtggt

SEQ ID NO: 97163 - DNA, 2791 bp, Homo sapiens
cgtcgaaaccctgtctctactaaaaatacaaaaattaggcaggtgtggtggcacacacctgtaaatcccagctactcgggagactgggggatgagaattgcttgagcctgggaggcagaggtggaggttgcagtgagctgaggttgcaccagcttgggtgagagtgagactctgtctcaaaaacaaaaaacaaaaaacaaaaaacaaaaaaaagtatagaaaaacatgattaatagaagaaggaaaactgaatattgagaaataaagcattttgttttcttttaaaggtttgtgcttctagacttgacccagattattttatttcatccgtctttgaaaggtaggcataattttattaagacaggtattaggaagtgtccagttaattttgttttaatttataaaaatatgtttcaaatatttcttcttgtagatttaaggtagtggatttgttgacaatggcatcacaacatcaaaatacagtacttgatgcagagcatgagaggtcgatgttagaaggcgctcttacatttcttgtgattcttttgagtcttcgtttacatttaggtaaaactcactgatactaatacttatgcattaactgttttcctccctttctccccctccctgtggtagtaactggcttagggaaaaaaggaaaggatgtagataaatgtaaacaatgtttcaaactcttgatatgttgtactgtaggtataccttttagaatatcctttgcttaagggaactgcaaacagcagttaaactgcagttatgtttggagcatagcttctttactctttaatttgaagcatcttatatttggtaaaacagcttagtaaaaagtgtggtaagtttttttctttataatttatgtatactcagatttgttaattccgtttttaataattttaggaatgtctgatgatgagattctcagggccgagatggtagcccagctgtgtatgaatgacaggacacacagttcattgctggacctcatatccttttaaaattttactttctgttagttgcaggatctaaaataagtattttttatgattaatagtttatcaattttttgattaattttttttcaaagttgaaaaataatatagaaaaagaagaacaccagttgtgtgctcaagtatgtattcaagcctggtgactgtttttttttttttttaacctcctgttattacctcttggggaactcttcttagactttagggtagatttcaggactgaatgatggctttggccaccccagcatttaacctcctagtggacagcattactgaacgttttataaaaggcagctaggtccattttgtctgtgtagccaggatgcaattcatggttaacagttaaaggtataccttacgattattattaccaggattttaaacattttgagggtttttctgtagaatttggtcttaaaggatttttgaatttatagatttttgtgtacaaacagggaacctgtggttctttgtataggactgaacatacaatgagaatctgattatctttttaagttaatgttaataaaattttacacaaagattatcaagtaattttgtgataaaaattctggccgaatttagtatttgtatatcttatgactatgtttggaagaattggctaaactttttattttgtgaaataagtcctattagaatgcctgtttgacaaccttgatttttgtaagcagcctcaatttgatactgtctgatgatttccttcagtcattatgaactatgtgtcagtgctattatagagtaaaaacgatctctgtgtctttcaattttaaagatttatgtgctttaatgtgaggagagaatctttttggtttgcctctttgcttatatttgcttagtatttttttctttggggatgaaattttgtgtttttggaaaaacaatctttgctcataaaaatcttggctaatttttcacaagttctttctgttttttaaggaaaagttatttacaaaatggtaaaaatgaagacacatttttaaaagtttttctatcgttttctgaaatttgataaatttatttcggggaaaatatacctgggaactactgcagcatacaatttattagtaggctcctagattaaacatattttcaaaaatcacaattaaaaacagttattattgatctgttgtattatatagccctcttgtggccagctttgtatattacaaccaattactatttgtctacttcagcaaaatgagaaactagagtaccttggaaaggctataaatctggctttttgttactaatatttttttcttgacatatatatcatattccagaaaatcctaatcccaaaagtggcattattccaggcagttacagctttgaatcagttttatcagctgtagctgattttaaggctcctgtttttgaacctggaggttctatgcaacaaggcatgtatactcccaaaggtatgtttatatacataaatggactctttcaaatatcagttcttgaatggtgaattcttctgtgtattaaaagaaaatgtttaccttttattcgttcaagctttggttttcttttctccattttgttataaatgtatgtctttattggtaaacagtgatactgctttcaattacttagaaatctatagctttatgttacactaagacttcttagatgactctaaactataaaggaaatttatatttgaactctaattcatttttataagtgatcataaccataaatgaaccagaaactataaaacaaaatgtatattaaaaaatatt

SEQ ID NO: 97164 - DNA, 1023 bp, Homo sapiens
tgatactttaagatgaatagcttgttacatgaaactagggacagtggttaacaatggttaacagtgtcttgtgctagaaggttgtaattatagtggatggttagggagaagcttaagcttcttaccatgttttcaaatgttaagaattttgctagagagaatgagagaaaaaaatctattaaggagatactcttaaggcggtggtttctaaaattattatctcagtttatcctttagatttttgccacatctaaatagcctctctactgaaatatacttagtatttcactattttttaaaatgagttaacttaaaaaaaaccttgcctcttcctaagcgtgattattagtgaggtgtcatgaattttatttgcaagttacaattttctaatatacattatacacattaaaaataattacataattattaaaatgaaaagctttatatacttaatacttaaaatcatcttgtgaaccatcagttgtacacattccacacacaagatagtggttcctaattatgcagaaggtaagaagacaaattatcagttttagcaaaggagcagaaaatcttttataaacaaaaaagacttataaagtgggtctcttcaaaatcaatagctcattaatttttttttttttttcttggagactgagtctcactctgttgcccaggctggtgtgcagtggcgtgatcttggctcactgcaaccttcgcctcctgggttcaagtgtttctcctgcctcagccacccgagtagctgggattacaggtgtgcgccaccacgcctggttaatttttgtatttttagtagagacggggtttcaccatgatggccaggcttgtctcaaactactgacctcaagtgatctgcccacctcagctgcccaaagtgctgggattacaggcatgagccaccgtgtccagcctcattaatctttaaatctagttttcatgtttttacttttaagtactttttttgtttaatactttttttgggaaatgaggtctgtctttgttgcc

SEQ ID NO: 97165 - DNA, 1057 bp, Homo sapiens
tgtgagctcaaatacgcattcaaaagattacatttatattttatccagcttttccaaccattcgtagtgggagaattttcaggtcgtctattttgcttaatcgttacagctggaaatttccttgctgagtacttcatgtgtattctttctgttcatttctctttgttagcactttaaagtttatatattttttaattttcagcttagctctctttactcatctttagccattaggaaaagaaatagtaatgttcattgtgtagagaatagatacctctttggcattttaagcaatttgattaaaaatagcactgcataaaatattgtgacagaaattggtgtctataaattacatttaaaccacagtttgattttgaggctatcatctaattctagttttgttttatttttacagtttaaaacagagtggaaaatttcctggaaatccctggcctccatataagaaaaggacatcactccatcctagctataaaggtcttatgagacttttgcactgtaaaactttacacattgtgctattcactctgctttacaaggtacagtagtaatttgaatagaaagactaagcttagaatttattttcaaataataatcctaaaggataatatttacataaaagtaccacttataaagcaaagtgtatttatgcatttaagatgtatgaagatatgttataatcacatgtatttgaaatccaagttgaacataacagaatagctacagcattctttgtgagaaactatttatcttatctagctaccgataaaagtatttatttatggattctgtagaacagtaagtgaaataccgtggaactacaggaggtgtggaatgagctacagggaccaaacaaccatcagaacccactaaaatgacaaaactagaatggcagttatgtgaggcagtgaatcttaggttggggggttctttttgctttttccctctaatcaggaaagtgacgtggaaggatttgagtgtggtttctatgtggcaagatcaaaaattgtttttgataaacattttaggaactaacaag

SEQ ID NO: 97166 - DNA, 1035 bp, Homo sapiens
gctctttttctttattaaaaaatgtagaatatctttttgtactgaaaagatatttgtatttgttttacaaataatggacagtctttgaatgtttacttagtgccagattttgtttgaaatgctttatatatacttgtagacattattttgtttaagctagcaaaaatccttataagtgaaagttctgttattattctcctttttcagatatgaaattgagttttagaagttaaataactagttcagatggggaagctaagtactgttataagtaataattaataagtgacaagtaattcatgaaaaattaaggaagccttatggcaaattatttattatgctctttcaagttatatttttcaattttttgtatgctaaatgtacaaatagtattttatgaaaaataaaaagacaatgttttagttgttacaagactattataaatgaatttttctcaactttaaaataactttcttgattttactactagtaataataaagttctccattgacattgcgttggcaagtcaactttttaaaaatcaattttagtaaaccacctttatcttctgacatgtttaatgtcaaaataaaactccctggaaacatcatttttatttcttttttttttttgaagtacctaatagagggatgttttcctctttagctctgaagttactcaattaaagctgtaatcccacaagctgtgaagtgaaaatttaattgaatttagctggtaatgttttatttatcaagaggagatagtatagtaatgatagtcagtggcctgggggtctgaggtctgtgttctagtgttgcttacactagctagctggttgtgtggctgagccttggttttctctccataacatagtggatcagaaaggatgacttctgtggtctcccagccttcagtctcctcctgctgctgcctctgctcctcacatcattggcaccacccactcactatttgttgaacacccattgctagacactatacaaagcaaatgacagatattaactcatgcaatcctt

SEQ ID NO: 97167 - DNA, 1104 bp, Homo sapiens
ttcctcagagaagcctttttactaaccacttgcattccttctacctttctcctccatataaatcccacactgacatacataagaatgtagctactcaaaatactcagaggctcagaactttaattttagagacatatttttaagaacattaatgtaccataaacatttattgtgctgccagttatatgccaggtgctgtgctaaacacatttgcatggattatcctatttggtaaacttatttatctgatggccttgtcatcaagagaagagtgtcagcaaattaggatataaaaatattcttattaaattattttattaaatacttatattcgtatgaatttttttagtggactctgacatacctttagaaaatttgtgaactggtatttctagatattaaagtacttttcgtctagaacagtaaaatatttttggatctctaaatgaaataccttttgtggaaaaaagtaattatgaggcattttcttccctttttaaagattttgatggatcatcaaaatctgtcagaacatgtactctgcatggttttatatctgattgaattaggacttgaaaattctgctgaagaagaatcagatgaagaggtaagtagtttttataatttaaaatttttagataggcagcccctatctggctccaaccaattgttgccaaaccaggcatgttatacttttcctagttatgacataccttaggaaaatgtatttgtgaattcatcttgaggtgtatttatgttttcatcagactcataagatcttttaaagaactactagaaaaggccctttgggatcttcaaatacgtacagttttttagggccttcattgatacattaaattctattatggaattattgaatttgaaatttgtaattcctatcacaaaaattaagaaaaatgtttaatgcatttttggtgttatgctaagaaaattgattattggcaaacaattaccagtaatcaataaataaccagtaaaactgaagttaggacttagctccaaaaattctaataatttgattagggattatttttgagtaacaaattcttcctgtaaaggtttgaaggtaatggcatgaatatt

SEQ ID NO: 97168 - DNA, 1437 bp, Homo sapiens
tttatgttagaattttcaaactttaaagttccttaaaagtgaaattaattactagttcagatttattagcttagaaaatttttttaaaaactaatttataattttcttaactggaaactttagcagtcttccagaagttagtaaggagtatcctattcttcatgaatgttgaccagaacagcttttcctcttttaaagtaatgaataatttagtttatgattctctttaatatggctgtagatactacttaagctttgtctgttttcagaaggttgaaaaggagatgttactgctgatgatctcctccttattactgtttctagattgagtgggattaaatatatttgagagagaggtcaagggagaaatttatttaaagagcaaatctattgaataaatctttgtatgaaactgagcattccctttagaaaatatagtactaatatgtttttaaaatgatgctaaataacttctcttgatttttctttgtttctctttgttaatggtagaattctggtacagctcaagttttcagtttagtagcagaacgtagaaagaaatttcaggaaatcatcaatcgcagtagcagtgaagcaaatcaggtggttcgtcccaaaacttcaagtaaatggtctgctcctggttcagctccacagttaactacagccattttggaaattaaagaaagcatattgtctttgctaattaaacttcaccacaaactctcaggaaaacaaaactcctactatcctccttggcttgatgacatagaaattttaatccaaccagaaattcctaaatacagtcatggagatggtataactgccgtggaaagaattttactaaaagctgcatcgcaaagtagaatgaacaaacgcatcattgaagagatatgtagaaaagtgacccctcctgtaccacctaaaaaagtcactgcagcagagaagaaaacattggacaaagaagaaaggtaatttttatttttaatgttttaaacgtgtgtatagttgaaaatttgatattttcttccttttggtcatttgaggataatcacctggatgtttaacaggaacagtcatagctgattagtttgtaacataaatggaatggagcatagtcagtgcttgtacatgtgatgtattgagtttattgatggacaggtgagactttctgaccccaatgtaaaattactaccttaaacctgtgtgtctctttggaaaaattgctactgcttttattgctgtagggatctaataattctcttactgttaaagttgaactgttcagctttaaatgagaatattaaaaatatttaaaatatttctcaaaataaaaatccaactgctttagtttcttttggtcttttctaatctttattaatatatgattgctgatttttaaaaagtgatgttttaaaacacattctgactaactta

SEQ ID NO: 97169 - DNA, 1180 bp, Homo sapiens
atgacgagttaatgggtgcagcacaccaacatggcacatgtatacatatgtaagaaacctgtacattgtgcacatgtaccctagaacttaaagtataataaaataaaattagccgttaagctacaaaaagaaaaaaaatattctttggaagtagataaggcatacataataaatataatatagtgaattaatccaagggaatatttagggctttgtaatacagttttattcttatgttgtgtttgagactccttcacattcttttactttatacaaaataaaccaaacttgaaatatgtcctagtagaaacggggaaacttactggcttctgttcattctctgttaggagaggcctattcttagggtaacagtaaatatgactattcctatcttttagactttgtttatatctaaacatcatagcttcttctagcaatcagtttactgttatttgtgcctgggattaaattgttagtctcttgctaaaaaaatatgttcttggtcttgctaccttctgacgtatacttaggaacttgtgttattggaaatccaaatattctatctaccttaattattatttcacattttaaagtacatcttggcttttatttttatctattaaaccagtgagtttgtaaccttttaaaattagtagaatccttttaaggacaatcaagtattagaagaaatttaatacataatacagaaaatagattgttctcacctgtgtgccaggggcttttcatacattatatactcctgaaatatagtagctaggtcttaagcgcatctgatacttaaaactttatttctgtttaatctaggcgacagaaggctagagagaggcagcagaaattgcttgcggagtttgcttcacgacagaaaagctttatggaaactgcaatggatgttggtaagtcaaaattattagtttagaactctcataattatacttattactttagggatgatgtagtccagtcttttactaatttaaaacattacacacttttgatttctagtgtttatttggtccttaaacaatatagtgatggaagatcagacttttattatagacttttattatattctgttgttagtagctgtaattgttaggaagttcttcctgatggtagcaatatagtatgctccttttgttctcttctgttaaacggtctt

SEQ ID NO: 97170 - DNA, 2004 bp, Homo sapiens
gaggtcgggagttcgagaccagcctgaccaacatggagaaaccctgtctctactaaaaatacaaaattagctggatgtggtggcacatgcctgtaatcccagctacttggaaggctgaggcaggagaatcacttgaacccgggaggcggaggttgtggtgagccgagattgcgccatcgcactccagcctgggcaacaagagtgaaacttaatctcaaaaaaaaaaacctcaaaaaacaaaacaaaaaaaaaacaaatttggaaaggatatatagtttgcttatatagtctgggtcccttctttattgtatattatattaagaccttgtaaatattaaggcatgtttttgggttattcttgtgactagatttgtactttataaagctgtatggaggttacatcatggagagaacaaatttgagttaaggagacgagttaagaaactgtttaagaaccacttctcccactccgtgggatatagacttgaatattatgtactggaaatgaagaggaaagaccaaaatcatgaattatttaggagacagaatccatatgatttgggaactgatattgtggtatgaaggtaagagtgtgatatagaatgactcttggctttctgacttggtgactaaatagattgtggagttattgaaccaagaggagggagatgattcatggagaagataacaatttacgtttttggcacattgattttatattgtctgtgggacattaaactggagatttctgagtggcatgagtacttgtatctaatggtcaggcaagagatctaagtttgcagggtagtcaaaattactgcttaaatcactaggaaaaatagttttaatgagaagagacttgcactgagaatagaaccttgaggattagaggaatagacattgaaggggtaagcaaagaaaaaaagatccttagaaggaaggctgagaaaaacagttaaagaggcaggaacgaaaccgagagagtagcattaaaccagaggaaagtaggcgtttcaagaagtaagttgttaatgtcagaaatcatagagagattcagtaccatactttatctcagcaacagtatagttcatactgaactatagtgtaatattgagagcatatattttatggagcggacaaaggctagttcataatatttattctctttcattatgagtatagaagtttgggagctacaacttcatggtattccaattttaaagatagtgcctgaagactatctagtcaggcattaattgatatcacaagaatagaaactccacattaatataaaaataggaaatcatgcagaggtttatgtggacatactaatatttaaatatgtttgtacttctttaaaattaattgtatttgtcttctttttattttgaagagttcatgtctcttggcagtatcaattggctgggaaggaggtgtttatgtacaaacctgtggtcacacattacatatagattgtcataaatcttacatggaatcattacgggtaagttgattgcaaaaattttttaaaggtgcatgtatctttccaggtattaaatctttttatagtatatacatcccaattccagctcatctttttaggtgattttgatcatcgtataaactatccagtctcactttaacacagacctgttcaacttcaaggattttcattttttaatttcagtttcattttagcaactagccagacgcagtggttcatgcctgtaatcccagcactgtgggaggccgagatgggcagatcacttgaggtcaggagttcgagaccagcctggccaacgtggccacctggccaacctggcaaaaccctgtctctactaaaaatacaaaaattagccgagcatggtggtgtgcacctgtaatcccagctacttgggaggctgaggcaggagaatcacttgactctgtgaggcagaggttgcagtgagctgaggttgcaccactgcactccagcctgggcaacagagagagactccatctcaa

SEQ ID NO: 97171 - DNA, 1099 bp, Homo sapiens
caatcagttgtatttagcagttagaccccttagaagtcactttttttgaggcttatttactcttaaaagctatttatcctagatcaaagaacatgagcattgggataatcttcccagtagtcagttacagattatgaaaacaggggtatggggtaagaggagggcaacccactttaatgtggcctgttttttgaattattctttatcttaaatccacatttcagattaattgcaccatcacttgaaagtttcatattgagagaagagtaagatacttaaacagtgtattggtgagggcaagtgttacgtaattgctatgatgtaagaagtgatttggtgaactttaacagttaaatgaaggattttgtttatttctttatgacatatattagagatgtcttttttctatggtttattaatttactataaaatgggtggtataatttttgttttctatgaatgtgtatatcacgcatctgtatgtttatttcgtcttttagaatgaccaggttcttcagggcttctcggtggacaaaggagaattcacgtgtccactctgtaggcagtttgctaacagtgttcttccatgttatcctggaagcaatgtggaaaataacccttggcaacgtcctagcaacaaaagcatacaagatctcataaaggaagtggaggagctgcagggacgaccgggagctttcccagtaagcatcagtgtaaggcataaatatcctggttaactcagctctgattttctgctttcattttaattcagtttataaattactctggacttttacatatttagtagaaattgcttttagaggttttgttctcttctatttatacttaaataaaagtaatagaacaaattattatcaaaggctatacttctctttaggctaaattctgagttttaatatacgtcttctaggtcaagaacccctataggtttagatggagttagcctcttttaagatgttcaaataggccaggcacggtggctcacacctgtaatcccagcactttgggaggctgaggtggacagataacttaaggtcaggagtttgagaccagcctggccaacatggcaaaaccccgt

SEQ ID NO: 97172 - DNA, 1175 bp, Homo sapiens
gacttgaggtcaatacagcaagtctgtggcagagtaggatctcttgagtcaaggtttactgtttttttcaattgctatcttcctttttcctctcctatgtttagcttttataggttctattatgtatatagttgatcatggctattctctctggtccactcctggaacagagggtaacaaaagagtaaatgaactatacatagcctttggaacccaggagaaatggaaccagatttagaataattgcagcaagcaaattagagctcaagataaggaacattagttggtctgagaatgcaaatactggacatgggttgatgtaaaaggatttaatggattggaaagtaactttgtagtctatatattcctagcctcttgtttatctagaatgtttttggggaagacataacatttagtattttgtttctggagagttactagttactacattcttgcaataaaagacactatgtgaaaacaaaacaatataatttaactttgccagggtgccaaggttttacagaacttccatatgatattgtgattataacattgtagacgattgggttgaatatggatcaactcagttctgttatacatatttatacacaatcacagacctacacacatttatgttgctcatttatttatgcctttaattttattagagttgaccttttaagaaaatctttattgaatgggaataatctgtcattggaattttcctgtagtatgataaatcaaacaatttgatttaaatataatttagtggaagttttagatccttatttcttggtttaagtttgtaagtaacttacagaaaaaagcttgcagtgatagtgggagaccttctggatcaagacattttggtttctctattttttagagaagcagggacagatgtcgaatgctttactaaggtgtaaacggagaaacagagaaaatatacttcccccatccttttctgaaacttaataaattctaaagcagcaaaacaataattctgaaaatgagtgtatataacactttaaaactttattatcttttgcttggaattccccaaaatattgcaaagctcttccagtgaggcggcattccttctctaagttttacttagtcattacaaagaaaacaaaggctgggcatggtggctcacaccataatctcagaacttg

SEQ ID NO: 97173 - DNA, 1004 bp, Homo sapiens
ccttgagctacaagaaatgagaggtcaaggctatagtgagctgtgattgagcgactgcacttcagcttgggcaacagagcaaaaccctgtctaaagaaataaaaaataagataaacaaattgactcagaaattaacaacatatattgaaggaaaaaagtatgttgtatttaaatacattgtaattttctcaaaacaggaaaccaggccttttatgcataacatataacttatttatgcataacatataacattcctaaaaggtgaacattaaaatatttagcaatatttaaatatttaagtagaatatttagcaataaacttactttgaattaagttttgaattaaatgtagtgatttttaaatgtataattcattagaacttgcacatttatttgtatttagtattagtaacgtgagtggaatacaaccctcatttcttagagctggatttctccctgctgaataagtaattttgtttgctcttcagagggtttgaattttggatatttagaaacaaagtatttctggtgagttttacagcttttctttttttttttttttttgtaagacagtacatgtcttttggttttaaattttatttgcatggtgaagccttggagaattttctgagggtatcagagaagaaactgttggaaaatccattcaaatttaaaatgatctaaaaattaatcaaaatcattacattcaagtttcaatatatttccaaaattttcattttattacacatgtcagtcatctatacagataatggaaaccaaattggggggaagaaggttttcttttttcaataccaatcattattttgttcttgaaacaatgaatgacatgaatttcagtaactgatttttccaaggatttttggactcaagtttcatatagtctagagatactggtgagtagcaggtggtttgtatagagaaaaatggaaagaaaatgaaacataagtaactgcaatgtaggtggagagacatctttaaatggt

SEQ ID NO: 97174 - DNA, 2286 bp, Homo sapiens
tagagattttcgcctcttttttttcttccaaactaatttgaatgtatttgtgttagaaaatatagaaaagagtctgcttttctttgacagcaaaaagctcggaaaacttccactcccagcatatctttatttttgcatcattcattgaggaggaaagaaacataatattgctgtgtgattttcagcagtcggacatgggacatatgacccatttgtgtgttctttagcatgtctcaaaggaccaattttgacatatatgaaacaaagaaaagttggtatttagagccatattgatttttaaaatcctagatattgctggatacagtggtgtgcgcctattcctggatacttgggaggctgaggcaggaggattgcttgagcacaggagttcaagtgcaacctgggcaacacagcaagacttcatctctcaaaaaaaatttttaagaaatgtaaaatcctagatattattacacattaatcctttggataggtagtttttgatttttaattcagaaagaatattgcataggagatcttccagtcataatctggaataattaattagattttactagtttttttcgagaattctttacaatgaaattcttagtaatatgtttgtcatccgttatatttggggattgagaaaacagaattgttcttatatttatattttaataaatatttttgcaaatatggtgaaatgttgacattctggttttgacattcatttgtaagtattgtttgtgtttctggttagctctcttaaaagtactatctaggaaatcttagtttttataagagaatatagccattaatttttttctacagattaggcaacagaagatttgtgaaaacaaaatgtattgatctcatttatattcccttgatgaaggaacacatgctggtctccgctcgctttctgtccactagtatgaaatccttgtccctgcttccttgctggtaggtttttagaagttcagtgagcaatgcaaatcgcctgaagggtggaaaattcccttgtcacacagatgcccttatcagcagcaaccagatggagctctgagctggaacgttatcggtgttaaattgctttttctcccaccctgagtagagaggattaaagcattcctttagaaatgggtggcaaatgtacagacttaggaatattaatattctttaacaatttgcatttataagtaaatacatggaaatataatctccaaaaaagtccatgttcaaaattcagccaaatcagtgcaaaatgttttgttttaaataaaataggataatagtctttcatgaattcacttgcaaagagtaagcttgaaactgtttttttttcttttttttttttttaagtgggagacagtatctcactattagggtcaaatgcatattagggtcagttttggttgtagaaaataaaggtatgtctaagtgtattcatactgttgaagaaaaatacaatttaaattatttctcagagttgtcatttattttggcataattaattggttcttttactgttactgtttttgggtaaatccttagattctgcattagtttgatttttgaaatgttgatttattaaatattgctattttgtaagctaataattgctaaataccttgcaatttcaggtctgtatgaacagtattgatggttagccatatcagtagttacacagtgtattttaatgaaactagttttagaagtccgtaagagagactgctgttaaattatatgtgttgttcatagccatttctatattagtgattttgtttcttaatattgatttccagataccatctaacctccaatgaatgataaccatttctctgatagaaaaattggtatgcctttgtgttttatatggcaataaccacctacacagtggctgacgttggagtaaaaattctttcttcatattcatatgcaggtttatgaaatatgttgcagtttttttttttttcttaaggcctagtttttagtatgtgccaagagttgggactttgcaacaattacaccatgatgtgtgcaattttttgcaggtgtaaatatgaacatataagtaaggatggataaattgttccctttgtatttctaaatatcagataaatatgattattactgatacaacataaaaactgcttttgcaaaaaataaagttgaagaactttattttttaggttgattcagacatgtcaataaagcagattaataaagaatcttcagtttaatgactgagatataatgttttacttacagaaccaatttagaact

SEQ ID NO: 97175 - DNA, 1281 bp, Homo sapiens
tgtgtcattcagttaacttttttcctagatttaagaattaattttaatcatatgttaagaagtatcatatctgattttgtaaaatatgacttttgatttccaaatatgtatgtgtggcagaataatttaattattgtcataattaaattactatgtgtggcagaataataattaaattattattctgtgtggcagaataatttaattattgtcatttataacaaaaaaagaaggggtgcatcagatacaaaagcaatacttagggtttttttttttcccagaataattttaaacatgatattttcttctaaatgtcatgagcagaattttgttgaaagccaagattggtagattattgttataattcaggtagaataaatttaaatagttggaattgtaacaaataatactctatttcagttactttttctttatgtagaatccaaagatgatgaattcactcttcagtctaaatgaggtttagagggacatactaggcaaagaaagaacttcacctaacagtgagttattaggatgttgtggttcatattacccagggtagaggattgaagataatagtaaagtttggttaggaagagaacacaatggtgagaagtacaaactggcaaggctgcagcgtaaagtcaaggacaagtatgtctgtgataggagatgaggaaaaccattcctgtattaagattgagtctaaggacagtccagattctagcacagattatttggatatgtatttcagaggttaccataaaagagagtgtgaagtaattgggacttaaacttggtgaattttaattgtcaggatgggaaacagatttccttatgaaataactagaaattttgtctgaattttgttctgtaacaaatgtgtgaactttctaattaccttttcttcaattttttcagatcagctgtttcatgtattagccttgcacatgcggctttatagcattgactctgagtataatccctggagaaagctcacccagttagaagagatgaatccacagtaagtataattgaaagactaaaatcaattaaaactctttatgaaaaacaggtgttaaatataaaaatggaattgaaatttcaatatatgtgattttttcacattttctttatgaagcacagaaatatatcataagaattgaaaacagtttaccattatgctgtctgtaaaaattgcatacaaattcccaccatgtgagaaaatcttttaaagaatcccactgatttttatgcagattaaatagtcaagtggaggca

SEQ ID NO: 97176 - DNA, 1020 bp, Homo sapiens
taattcttgctaaaatccattatttcattaggtgctgcaaaatggtgatttaaaaaaatgctttcttctgattaaatggaatgtttttataaagaactttaccatatcaactatttgttgactctgaaatacagtttggcaggatgaatacttgatacttttctgatttataaattttcaaagtaaggaatggatgccctattaacttccaacagtgaccaataagtttggtctttggtgtattttatgatctcatggattttatatatatttgatgtgtttcactccatttcaatctttcctctttttgatacaaattgttcccttttactttagtgagaatctttccaaactgacttttgtacttttgacatgagccaagtagtctttcatcatatcctcactttctggtacaagttggcccgggttcgttttgtacattttctattttatacttggaatcagccatttctccatttagttccttttaatggcaaatggtatttagagaccacagtctgggtgctagagggcatacatagctaataggttatcattgtttataggccatttcagtggacagagttaggaaatatttttttaaaggaaaaaaagatcctgtgttcttactggtatttctgatcaacataagattgcacagttttcattttatttcttttttgttacttgtatcttttttctcttaaagtcttgattcctaataatattaacataattatttgtataactaaagtatagcctcgattatgtttttaaaataccaatattactactaaccataaattatctttgtcattagaatatgtacttctagggatgtatagtcaaaaactgtgtttttaaatcacataaagtaacttttcccatgtgattatgccatcaacttgatttatagttcagctcatttcagtttttttcctcaatatttaaagactgcttttttcccccttgacttatattttattgtataaaatttatatttttctgaagtaaaaacta

SEQ ID NO: 97177 - DNA, 1055 bp, Homo sapiens
gatcatattaaaccctgtagttgaaatctttggttctcttttctacagaggggtgcatcaatccattcattcattccagttatgggccagtgatgtgctaggaaagatccatttctctctctgtccttagaatggctatttttatcttatcagccaataactgccaggattttttctgattattattggggaaaaaacttaccaaaaaaagtattatcacttaaacattttttggctaatatgagtgattaaaaatgggatcctaaagtaatggaaatctatttgatttctagcaaagttaagtatttttatatttattagctatttgtatacattctttgtgaatgatatattctggacctctgtccattttctgttggcatcttattgtttaaaattatatgaatgattctccatggtttaaaatattaaatcttattttgtcatagttgtttataagtgtttttcaaaatatgtttgccgtctacttttgtaattacttttcttgacccattgaagttttaaattttcatgtagccagatcaatcagaccttatatttcttattttttcctattactttcatacttagaatgcccatgtcttccaagagctgatgtatacttttataactagtattacaatgtgtaatccagtcttaggatttgcaatatctacctatattttcactttagagttttctcatgggatgatttttaaaactatataacgtacttggaattcattctcacctgtagtgttaggtgaagatctaaaatttatttgcaaataaccaagtagtatttttagtgattttatatcctagttattaaatactaagggttcctacattataggcctgattaggagctttcttctttgttctattgagctccaagcctgtttctctgacaataccatgatggtttattgtttaggtgatttattatgtctagttatcgggctgagttaggttcctctcatttctcttccccaaactctgactcccagtttttctttgctgttctcacttattctccagaaggtttttagaac

SEQ ID NO: 97178 - DNA, 1322 bp, Homo sapiens
tattttaagttctgctttggttatctctttttgaaactttgcaaatgttaaagattttatttgaattttgttagttataaagttgaaacattttattttattattaattttgagacagagtctcactttttcacccaggctggagtgcagcagcacaatcacagcccgctgcagccttgacctcctgggttcaagcaatcctcccacacaccactaagccctgctaattttttatattttttgtagtggcgggttttcaccatgttgtcaatctggtctcaaacttctgagctcaagtgatccgcctgcctcagcctcacaaagtgctgggattacaggcatgagccactgtgctcggctgaaacattttaataagagcagttaaccataccttttcaacaggaattgatttgggaactctgcctatctctttttaaagatgtgaaaacttacttattcgttattgctaagtttgtgataagtatcctataagccactccatttgtagtgaaactaattctttcattctctatgtaatactttaatttctgtaatctaagatcagaaacactcataatcaagttaatgtatcctaattgttcactttgataacacaacacattttctatacattttcttcatgttagagtcaagagaatatgagtctaaaatgtaatttttttgcaaaaaatatgactcctaaggtttttttttacatttcttctttgtgtattaaagtttttatttctgttccatagatatatatgtgacatataaaataaattagaaagagaagatatacaatactatgtaaagtgactacatttttcttttaggctgggatatgaagaacaacagcctgaggttccaattctttatcatgatgtaacatcccttttgctcatccagatcttaatgatgccacaacccttacgcaaaggtatgtctttataattcagattctttgattatatactatgtattttgaatattctagagattatagagacaaataggctgggtgtggtggctcatgcttgtaatccccgcactttaggaggctgaggtgggtggattgcttgagcacaggagctcgagaccagcctgggctattaatatagtgagatgctgtctcaaaaagagaaagagaagtaaatacagcagtaagtatgatggatactttttgtggtaataacagacattgttttttctattattagcaaatagtaatcgtatctaaaaaatgacaatgaaaaagtgttttttaaaattcttgtgggtctgttcagctttttagtcactaagaggtaaagacatgggaa

SEQ ID NO: 97179 - DNA, 2010 bp, Homo sapiens
aattccatgtttttattattgttccttatccacactgacaacctaaaagttttaaaccagaaataactttctctttgccccatattaacatttgctttcatagagtagctaggttctatagaaccattagatatataacaactctatttaaaaaataaatgtataaaagaagcagatgacatttaggagttatatttcaaagagatgtattttggggatatttagatataacagctaggaacctttttctctcttgtttctcttactcccttcactttttttcagttgactcagttaagaaagttttcttattgtctcaaagtaattgatgagggtgaccttttatgtaataggaaatgttcttgatgaaatattttcagaatttcctatttcatgtctaaaaggaagaagaagaattttcagttcttgccagctgcctgggacttctgccaacgttttaccaaacagaacatccattcatcagtgcctcctgtctggattggccagttccagcatttgatattataactcagtggtgttttgagataaaatcatttactgaaagacatgcagaacaaggaaaggtatgttaaaagagttgtactagcttgtcacggtggtgatatgctaataggtaagagaataatgaggactgttaaattttaggtcatctgtttttgacagcaattataaaacttgattaaattgaaaaaattgtttacttatgtagattgtatttataatggaagaaatatttcagctaacaaaggtaaggcattagtcaatacttttagtttgtttggggtcagcagatttttattgaataccttaagtaatcataggattagacttggtagatacaaaggaattttaaggtagacaaggaatttacatttttgtttgaagaactggcttatatttttaaaacaaattggactagcaaatctaaaaggtcatgtctttaactttaaaatttcttgggcctatgctaccagctcagctagttaaagggtttgtattgaagataagtagagtgggaacagcagtgagtggctgtgtatgccatggttggagtctcagaattctagaactacagttttttaaaattgaataatgtgatgaaagtagtattttggggagtaattctggtgtctttttagtggataaattaaagtaaggataaagggaagccagaaaatatttaggtggtgaaaaaaatctagactatttttctgattgtaaaacttggaaagtaactaatgtaagagacatttgagaaaaatataggacttggtgaccagatgtacatgactttaagatcttgaactccaatcattaggagagtagtgtctagtatatacagctacagtaggaacatgcggctgcttaaacaccattgctgatgccccattgcctatggaagaaggtatggactccttgcatggcactcaaggatcttcaccatcttgcttgcctttccatctcatcgtatagcctccctctgccattaccttgctcaaatcacaaaagaatgtttcataagtatgctatacatttttaaacttctagaacattacttattgctgttactaaagcaaccttcctacccttctgttgaattaataatcactgtttgctaagtaacatttacctttgctaagataaatgtgacttcctccatgaagatttgtctgatagtccatcttccttacatcctaatcccttttttttctgttgttctataaggctgtacttttgtgactttctctaacagttgccatgttcattacatttgtttctttaatgtatctgaatgggggctccacgaagcagaaattgttccttatttatccccggtttctagaaagtgcctcatatatactagtcacctaataaatatttgtagaacaattaagttgtggggtggtgtctttggcagaaatagaacgtattaaaggggagccaagtttcagggaaagtgagaattttaattttgaacatcaaagggac

SEQ ID NO: 97180 - DNA, 1476 bp, Homo sapiens
atgaactcgggaggcggagcttgcagtgagccaagatcgtgccactgcactccagcctgggtgacagagtgggactccgtctcaaaaaagaaataagtaaataaaaaataaaaaaataaaaaaaggaggcaggcatggtggtgagcacctgtaatcccagctactcgagaggctgagacaggagaattgcttgaacccaggaggcggaggttgcactgcgagagactgtctcagaaaaaaaagaagaaagaaatgcatgtgaaatcttccgtgtatgatattaatactttttttttctttttgttctaggcgaggcaaacctctctacatttgtaaggaaagatacaaagttcttgagcaacagtggatttctcatacttttgatcacatcaataaaagatggggtccacattacaatgggctgtgactctccacctcagcattgcatcgtatcatcattttcgctacgaatttatttttcaacaataagctttaacttaatttgggggattaacacttttgctgagggagaaaaagaaaacatacattatgaagcctttccaaaattaggtgcttggtaatcacgttaatggtataattttttttttttaatatctggagaacattaataacaagttaaattattctttagtggtcattttttaagtgcacaattaataagaagcacaacttgttcacaaactcattcagaaatgattctcccaacaatgcgtatcagctattcattgatacttagagtgggtgtgatttatttgacattttactgcttctttctgtctgtgtgttttaatttgcatctgccaagcataatgcatcttttttcctctgccattcttgtgttgattggagaatttttctgtatgtaattagaaaaaaatgtaaaacatgatttatgtgaaatactgtatagtaaaagttggtctaatagtagaactttaaaattttttcttattgtgaggaatctgttaaaagtttaaagctttgctgaaaactgaattcattctcaggaatttcataaatcttctccccaggtaaataattgaaatagctgtaaaataagtagatagctgctgttaatataatacagtacattttggggggcatatgtgtggttggggggtccttaaaaatcaaaatttgccatttcagttggatgaattactagaggtaataacaaatcttactatgaaatcaagaggtttaagaacatacactgggcagatgttgattccgtgcatgcccaccttttattaccaaacaaggttttgtttatatgattgtattagaaatgctcagacttccccagaaatgaaccataaattttggaacttcctttcagctcaagaggttcagctatattgtatttgtgcagtgtaatcactactatttctgctcggtttcctaaaaggaaaaaaaaggcgcagtggtgatgaccctcatgaatgagccacgctt

SEQ ID NO: 97181 - DNA, 1146 bp, Homo sapiens
agtataaaaatggacattaaatcatggccttgcattaaaatatggaaagcagagcagtacatattcaaatgtattcagaaagtcaaaagattacctatcgttctacaataaaatacatggaaatagcttgctatttttatatacatttccaaaatattaagataactttctgtaagagtcaatgattctgttcgactaaatagctgtcctttccaacacattgctacttttttaaatactgtatcataagttcagcctgtcatactttttgcattgatcgttatgaataccagaccatttgtaagtgtggttgaagagcaaaatgctaattgacatctctagtaaatactgttacaggattcatgaacttgaataattctacagtttgaaactctgatgctatatatacatggtataatgtattcagactttgattactacttatttaaaatggaatgttttatggttgtgcatatggatgtgaagtgaaaatattagccttaactttaaaatttgggtgtttgatagtgtttattttgatattggtgaattagtcaccagtaaattttaaaaaagcacttggttgaaaattgtacttgaatacatacatgcatgctgctaaactagaactttaatttttccccataacttttataagtcccatttataaacccacttttaaaaataacaggtccaagttagagtgatgtgtgtatattattcaaaaaaatgtactggtgtgatatcttgtatgaatgatcatttaaatacagtacattactgtagaagctaaattgatctttataattaagcagaaattacaaaactaggaataatcaacattgtaagatatgttaataaaaacctgctgtcatttggtttgtgaaaggtccttaaaatgtttactgcttacatgtttttttttcccccaaagatattgacagtaatatatgtgagtgaacatggctgaaaagatcaaagcacaacataattagtagttgctttagggtggagtaagtgtaaagggtttgctttgctttttttcttttatttgcagagtgagttcttgcttcttcagtccttgtctcataatcaatgcacattctttgctaagtgtgtgtgtttggtagggggagaaggaaatgg

SEQ ID NO: 97182 - DNA, 1070 bp, Homo sapiens
tgattcaaaatgggcaaaagcttcccctcaagaagaaaaatttcagacctatgaaaacgacaacaatactaataaaaaaattgtatttacttcgaagcattcagaatgtcaacaaaacagctgccactttttattttgtaattacagagtggtattcagttaacagaacaacaattatttcatataagctgcatcagagacaactaaagatgaaaaactaccatccccatatataactaatttgtgctgtgcaccaacaagaacctgctttaaatttccatgccagtttataacccccatactgtaccaggcaaggttagtggctattgaaaataccaccaggacagggctatctaaagacacatttggtagtgtgttaactgtacaaaaaaagacactgtacagtgtaaaaacaaatcttacacagccttacattttaatttttttatttaaaaggagtgagttgtgtacaggggggttaaatgctttatagacaaggaaaaaaactaggctagaaccaacttattcatcatcatcttcttcatcttcctcctcataatcctcttcatcttctgtcctcctcttccttctttttcttgcttttttcagccttgacaactcccttttttgctgcatcaggctttcctttagctcgatatgtagctgtatcctttttgtatttttccttcagctttgcagccttcttttcacaaagctgcttgtcatctgcaaaagtgttattccacatctctaccagtttctttgcaacatcgctaataggcaggccaggatgctctcctttgatttttgggcaatactcagagcagaacagcaaaaaggccgaaggaggcctcttgggtgcattggaatcctcgaacttcttttttgtctcccctttaggagggatataggttttcatttctctttcataacggtctttgtccacctttgccatatcttcaaattttcctttatctttagcagacatggccttccacctctctgagcacttcttagaaaactctgagaagttgactgaggcatctgggtgcttcttcttacactcctcc

SEQ ID NO: 97183 - DNA, 1046 bp, Homo sapiens
gaagcgctttgcctgtcccgagtgcggcaagcgcttcatgcgcagcgaccacctcgcgaagcacgtcaagactcaccagaataagaagctcaaagtcgctgaggccggggttaagcgggaggacgcgcgggacctgtgagccctcccggaggtggacccccttcccagcacctctgcgagagatccggggacctgtgggcagctggcggaggggagactcagcagacggaccctctccgttgcctgcctcccaaaatggagccaggcttccaacttccgctgccttcggacatagggacccagttcccaggagcggggaggtagggttggggctggggcatttggattgtaattgggagctctgccgtacgccagggcggttccaaactctaaaccgttcccaccgtcagggagacctacagtttcgggggaccaccctggtctggccttgtatataggaaatgctgctgaactgaatagaaaggaacttgggagatttgaaacagtgctcgggttttcgctaggaccggtttgggctttgtacaggttatttaatagctttgttaaagataattataataattataacattaataaaaatgttgcttttgtcttcagctccatgcagagctacagcatgatatgtctctgtaaagtgatcagcagttgcagcgtgaaaataaatactttaactcaggggtcactacaggaagaccccgttgagccggtctcatttgatcttttcttcttctgggtggctgtactaagcggtcgggtttccccgggaatttgatggttcctatagtctgcctgtgtcggaggcttctttggtttggaaggatctgggcaaatgtgttgggttcaggaatggacaaaggcaggcaattccgttttgtggtaaagaggtagggcaagattttccaatcacaatttgagtttctcatgcggccttaggattcacccgagactgtttgtcttccaagtttgtttttacctgacgaattccctgtggctttctatttgttggtactctcgggacaggtcac

SEQ ID NO: 97184 - DNA, 1020 bp, Homo sapiens
tgggaagatttatcttgtcttagagagctcccttgatctctcagggattggggcctccttgggaatatgctacagtcagcatcatcctagcttcttgttattgttcactagggaggcctcctaaaggaccccaaacaatgatgattagatagtttagacttgggggcagagtgaggggcccattctctgaaaaaaaaaaaatcatagaatcatagaggtattttcatttatgttacaggtttccctggtactggtaattcccagcagctttctacaattccaaaggtcagaaataaactgccaaaaaatttttactaaatcatgttctggtctgggatacagccctgaaatgcactttgagcaagaaagactttgtagaggagaaaaaaggtggaccaatgaggattgggctagaaccagaggaaagtgaacattcttggtttagataaatatccacaaccttctaaggttttcatgtgtactacagagaagctccaggctcctacatttccctgtgggtagttttaaaaagctactgtagcaaaacagaggctggtggtgactacgcttatcttttagaagagccatcattgcatttctgcagcacagaatatatacgtgttttttactcttagtggtggagtttatatgtgactcatgatgtttagttgttaatcatccaatgatactaaatactgcttagttagctcagtattccctttaggaaaccagatattgctaaagtcactgttcgacttaatggggaaaattccactaacatctaaaatatgtgatttataattcaaaaatgtaaatactgtattggtattacatactataaaaggacaattgtctacacaattacataacatgcatgtaaggatcaatatttaattaagactatttttgtattctcattgggagttagagcccaatattctcaattgggtgagaatttcagccaaatggtctatccattttcttttctttctttcttttttttttttgagacagatcttg

SEQ ID NO: 97185 - DNA, 1684 bp, Homo sapiens
gtatacaattatagttggagattttgacacccttctttcaataattggtaggattaagtggacctaaaatcagtaagatatagaagatttgaacaaaactatcaaccaacttgacctaattgacatttatagaactccccatgtaacaacaactgaatacatattctttacatgtgcatctaaaacatttaccaggatagaccatagtctgggcactaaaaagtacaaatatgtttaatagaattcaagtcatacaaagtatattctctgatcacaatggaattgaattagaaagcaacaacagaaagatctctgcaaaatccccaattatttgaaaactaagccatacacttctaaatacctcatgtgtcaaagaataaatgaaaagggagcttaggggtgggagaggtatcggcaggggcagcgctgccgccggggcctggggctgacccgtctgacttcccgtccgtgccgagcccactcgagccgcagccatgtctggggacgagatgatttttgatcctactatgagcaagaagaaaaagaagaagaagaagccttttatgttagatgaggaaggggatacccaaacagaggaaacccggccttcagaaacaaaagaagtggagccagagccaactgaggacaaagatttggaagctgatgaagaggacactaggaaaaaagatgcttctgatgatctagatgacttgaacttctttaatcaaaagaaaaagaagaaaaaaactaaaaagatatttgatattgatgaagctgaagaaggtgtaaaggatcttaagattgaaagtgatgttcaagaaccaactgaaccagaggatgaccttgacattatgcttggcaataaaaagaagaaaaagaagaatgttaagttcccagatgaggatgaagctctagaagatgaagacaacaaaaaagatgatggtatctcattcagtaatcagacaggccctgcttgggcaggctcagaaagagactacacatacgaggagctgctgaatcgagtgttcaacatcatgagggaaaagaatccagatatggttgctggggagaaaaggaaatttgtcatgaaacctccacaagtcgtccgagtaggaaccaagaaaacttcttttgtcaactttacagatatctgtaaactattacatcgtcaacccaaacatctccttgcatttttattggctgaattgggtacaagtggttctatagatggtaataaccaacttgtaatcaaaggaagattccaacagaaacagatagaaaatgtcttgagaagatatatcaaggagtatgtcacttgtcacacatgccgatcaccggacacaatcctgcagaaggacatgcgactctatttcctacagtgcgaaacttgtcattctagatgttctgttgccattatcaaaattggcttccaggctgtcatgggcaagcgagcacagctccgtgccaaagctaactaatttgctaatcactgattttgcaaagcttgttgtggagatgtggctggacaggtttgccatcagagtggatataccattgtattaaaaacaagataaaaaagctgccaagatttttggcgagtggttggttggtctgaagtccttgcaagacgctgatgctcaagctgttgacatactcattgcctactttaacacctgtcagagaa

SEQ ID NO: 97186 - DNA, 1192 bp, Homo sapiens
cggacccgcagtccggaggcggggcctgcggcggcaggtgttaaatcacctcggcgccggccgagtggcctgaaagaccagcagggcaggagacggaaaaccaaatggcctggaagtaggttcgacggacttaaacagacttgattttgaccagacttttcctttcccgtgccactcctgaccctcccaaaccttctcaagatttcctggagtgggaacttccgttctgttccgattgctgagggtgtggtttagattataaggtttagatccacagtggtaaagaggtagtgcagagaaattttttttaaaaatcggagtatataaaggaaaacaaccctagcttaacttccaggacgcagagaaacatagtatctcaaaaggcgtcagctaagcccctacctatgaacggcctgggcctgggtggtacaaagcatgtggtcttttcctcatggaaccgggcgactttagaagtagcattgatggttgtttgctgtgacacctgtgtgagtgttaacatgaacagtcaacagagtggccgcagcgtgtagcgccatttaggggtgtaatagagtgtcactcaatattagctcctcacaggcaagaacgttttcactgaaagtaagagagtgcacttcctggtgctaccttcatttcctgccctgggtcccatgttttaggtgagacacattcttaaattgcccagctgtctatgtgatagggctgagacagatcatctttctgatcttccggattatcgtgtctattgcctttccattacactaaaaatccctcctctgccatactcttagtaggaaagggtgattttttttttccccgaaaggaaaagggagcctataaataaaccgtattatcttcctatccccttctgctaaccaaacacccaagagccacactgagagaggaaatggaaggagaattgtcagttcccaaatgtgaggtgaaagctgtgcttttctttctattatctggtctgattttgagttctctaccctgggatgttacccagtattaccagctgtttctcacagtgaccgattgtggtcatgaatccttggggattcatgatatttttataatacatgcactcagggaaactcagtaaaacacattagtgttaataagcaaaaaaaaaaaaaaaaagtcgcgtgtttgaaagaaagccatacac

SEQ ID NO: 97187 - DNA, 1013 bp, Homo sapiens
cccacctcagcctcccaaagtgtagggatttcaggtgggagccactgcacccagcacccccaacgccccacctcttttttttttttttttttctttttttgacacagggtctcactctaggctggaatgagtagcacagtctccactcactgcagcctccaactcccaggctcaagtgatcctcccccctctcagcctccccagtagctgggactacaggcacacaccaccatgcccagctaattttttgtattttcggtagagatgggtttttgccatgttgcccaggctgccctcgaactcctgagttcaagcaatccacccacctcagcctcacaaagtgctggggttacaggcgtgagccactgcgcccggcctgtatatgctttcgtacttatgtgatgaggtgtgttttaatgcctgcgctatcatcctcaggattctcactgggggagatctgctgttagtggttaattatggtttcagtaagtagtagagtgtacaacactgattcttctgccttctgggtcagatactaacagggctttttaataattcctctgcaaattttataaaaattgagcttagaataaccgttaacatcagtgtgttcattttgcttactttaatattctattgaaaggattatatatattgattgattcactataaaatactaatgtaaactaggaaatagaaagtttgatatgtgcttttgaaactgacttttttttttttttttttttgaagcagggtcgcactctgtcactatggctggagtgttgtggtgtggtcatggcccactgcagccttgaactcctgggctcaattaatccttttatctcagcctcctgagtagcttacaggcatatgctgccacgtctagccaattttaaaatttttttgtagagagatctttctatgttgcccaggctggtcttgaactcctgggctcaagcgatcctctcgtcttggcttcccaaagtgttgggattacacttatgagccaccac

SEQ ID NO: 97188 - DNA, 1249 bp, Homo sapiens
aaataaaggccaacatctggcctttatttgtttatgaaatgaaatatttaatatgctgtttctactttcttttctatccagctcttaataaagcatgtatttagaaatagagtccaaaattaaacgttaaccccagtaaatgttttagatttttataatcaaagtcatcacaacttcgttagtaatgtgacttcttatggcatattttgtttttacacattgaagccctagatcattctaaataatgttgggttgcaaattccataatccataatgagctattagaaaaaagtcagtttcaagttgttgctaacgtaagagttcttaatttcttgacattcttttacatagaagaaaatttaaatgttggtgaaacctttgttgaatgttttatttatgttgattattaatattactcttatagggccataggatgcttaagctaacattaaatttttatttactaaggaatgtgatttctatgtgttcacagaataaagacaatgacactcttaaggatctgctgaaagcaaacgttgaaaagcctgtaaagatgcttatctatagcagcaaaacattggaactgcgagagacctcagtcacaccaagtaacctgtggggcggccagggcttattgggagtgagcattcgtttctgcagctttgatggggcaaatgaaaatgtttggcatgtgctggtacgtatcaactgtgaactgttactggaggttcatgaagcagtgtggaaagatgttttaacaatggttgtttctggcttaataagattgtaaggatattattaataggcaatttttgccaaaaatcagcgttcattgctttttaagtatggatcaatttttttttaagttgaggaagagaagcaaatgtacaagtttaagaactttttctaatgatttattcattataagatgtgttagagtagatagctacaaaaatattttaaatatttgttaaatattatgtaatttttatgctcagaagtttaaaatatattctgtagtttctgacatctgacacatctctagcaagacagaagtatacagatttaaaaaatcaacataattaaaaattggactataaaccttggaagattattttatatatattaattttagggtgtgtgtttatgtcattctaggaggtggaatcaaattctcctgcagcactggcaggtcttagaccacacagtgattatataattggagcagatacagtcatgaatgaggtaa

SEQ ID NO: 97189 - DNA, 1098 bp, Homo sapiens
gcagataacatacttaatgatatggattagctcatataatcaaggaaacagctgaagaaccagatgtagaaaggacaggactcagaaaacctagggatttagataggaagaagtatttggcaatgtcatcagcattcattctactaaacccatttttgttttttctctgactcccaaggtttgcagccatgggcaagagaaattggcctggctttgaccatgagccattcccttggtttgggcagggcagacactctgattgacaatcctaccagcactgcacacaacagcagagaagtaattccccaaagggaggaaagagaaaggaatgttgagaagacatcagactagaaagaagcaatgtgatcacatcttactagaaaaatgcctctggtggcagtgggaggatgaaatagaagagatctgggttgaacatacatgactgatttgtgtcaggttctgaaagagaactatggaatgtgtaaatgatgtcatcatacagacgtgcttagagctcttcagtggaaaggctgtatcgatgtcatttgtttagcgagtaatcatcaaatgtctgccatgtgccggcagctatgaaggcagtaaacagacaaggtctctgcccttcaggaccttaacattttgttgggggagatagatagtaaataaatatgcagtgtgttggatggtgatgaattcttgaaaaataaaggagtaagggtgatatccacagtggagggcagggtgttgttttctgtggggtggtctgggagacctctgcttagatgacattatctaaaagaatagaaatttgtttgtttttatcttttaaaatctcaaagaagggagtgcatgttcagggcaacttgaatctatgctcttgggttacccgccccccccaaaaaaaacacctcaaagaaatacaagctgtgatagataacaacgttaagaaaaaaatgtttttatagcctaggatgtggcattggatatggttatttgcatcgaatacctacacgcccatttgaggaaggaaagaaaatttctcttccaggacaaatggctggtacacctattacacctcttaaagatgggtttacagag

SEQ ID NO: 97190 - DNA, 1002 bp, Homo sapiens
tgcactcatgaggttggaaatcttgagaagtctatcatgtattaagacttccagctgatttctttcctgagcaatgaaagttaaaacaaataaaccagctgggaattcaggaaagcagtggtggtttaaaggttgaataaaatgatttccaggtggtgaggaaagaggagagagtagaatctcttctagtgtggaagtatgaagaacagcatgtgcaacttggggtagaagccatgtgtctcaagactagaagtgacaggagagagagatgcttacagtgcatggtccgtgacatgtaccaaaattaggagggagtgtctggaggcagacgtgccagatgaagcttgtgacagctcatgtgtgaaccaaatatctatctgcagggcaagtaagagccaatatttatattttctttgaaataaacttaagtaatctttgtgtttttttttctttttttggaaggtccagctgtcctcagttaatcccccgtctttgtcaccaccaggaactacaggaattgaacagagtctgactggactttctattagctcaactccaccagctgtcagtagtgttctcagtacaggtgtgcagaaaaatatattctgttttcagtctattttatgtaatattattgcatagaattttaaaaattgaccagacacagtggctcacacctgtaatcccagcactttgggaggccaaggcaggattgcttgagctcaggagttctaaaccagcatgggcaatatggtggaaccacgtctctaaaaaaaaaaaactttttttaattagccaggtgtggtggtgtgcacctgtagtcccagctcctcgagagcctgagatgggaggattgcttgagccttggaggttgtggcagcagtgagccgtgattgtgccactgcattccagcctggtcgacagagtgaaaaatttaaagaattttaaaaaattattttaaaaaaatttttaaaaaagaatttaaaaaattaatgccagtgt

SEQ ID NO: 97191 - DNA, 1529 bp, Homo sapiens
atgtaaataaaaatagccctttgacaatgcctgctgtcctttcagtgctgggaggatgtatgatctatgccgtttttgtcctaggtctgccacctcttccttccatgcctccccgaaacttacctggcattgcacctctccccctgccatccgagttcctcccgtcattccccttggttccagagagctcttctgcagcaagctcaggagagctgctgtcttccctcccgcccaccagcaacgcaccctccgaccctgccacaactactgcaaaggcagacgctgcctcctcactcactgtggatgtgacgccccccactgccaaggcccccaccaccgttgaggacagagtcggcgactccaccccagtcagcgagaagcctgtttctgcggctgtggatgccaatgcttctgagtcaccttaactttgaaccattctttggaattggcgtggtatatttaaccacgggagcgtgtctggaaacgcaaactatcattaatttcatactagtttgtaccgtatctgtaggcatcctgtaaataattccaaggggaaaactaaacgaggacgtgggttgtatcctgccaggttgagtggggctcacacgctagggtgagatgtcagaaagcgcttgtattttaaacaaccaaaaagaattgtaagggtggcttgctgccaggcttgcactgccgttcctgggggtgtgcatcttcgggaaaggtggtggcggggcgtccactaggtttcctgtcccctgctgctccttccgtaagaaaatgaaatattctatgcctaatactcacacgcaacatttcttgtactttgtaagtcgtttgcgagaatgcagaccacctcactaaactgtaaacggtaaagagatttttacttttggtctccgtgagtcgcatctctactaaggtttacacaggaattccacctgaagacttgtgttaaagttctacagcgcgcactgttaactgaacgtctttttcttcagcctatacgcggatccttgttttgagctctcagaatcactcagacaacattttgtaactgctgctgttgctttctacatacaccttataaagtgacatttcaaaagaaataaggtgccacagttttaaaccagaaggtggcactctgtggctccttgtagtattatagctatactgggaaagcatagatacagcaataaagtacagtaattttactttttttcttgtgttacatctaaattacaacccttaattgccacgtgtgcacttactactctccagtatgtcttattactctccagtatgtcacgcatctttaacttttcacgtcctatgtttgctttctcccatttttaagagatggtaagttaactggaattgatttactgaatgaaattaaatgcagatatccctgtttttgaaataagacaaaagtgcttcctcagttattgccctggtatgagtctgaagatgctcatcccctgcagggaggacgtggctgaggtggcagcaccctcacatcaccctcatgt

SEQ ID NO: 97192 - DNA, 1039 bp, Homo sapiens
caaaaagccaaacatgggaactttctctccacgtacctttctcagctacttccctagactgcatcatgaacgtgttgttaggtgttcttgtttcattgttttttccaaaactatgaaatcttcatggtccctgcccccccgcaccccacatcttagtgtgaaatgaaaacaggataagctatagtaacaaattaacccccccaaaaggtttgtttctcaattatgcaaaatccacactgagcttggtaactcctaggcaactttacaagacagctctcttctccaggtggtggctggggcatccaggctgcttgcatcttatggttctagtcacatcaatctgtagttacaggagaggaaggcaggaaaggaggggacatcctagttcttaaatgccttggaccagaagtattgtctttccttgctagaattgagtcgtggcctcaaatcagctgcacaggaggtactatatctctgtcaccatcaagaatttgcatgacaatccaggtttacatgtaacctgcttgtaccttttaaagggaatctccacttcaaatacatacatatctagtctgtgattcatgacttttgccagattttgggagctgtgtggagcaggaacctgaagagcttagctgaaaacctctcatcagtaggaatccactgaggtagttacagatacctgaggctcagatgggaagccctggaggaccatacccaagaataggagcaaaccagctcaacgccatgccctctgcctggtggttcattgtgattggtttattgtgtagatattgaagaaaaagagaatattttaggttgacatttttaagccaaaaaaaaaaaaaaaagattctagaaaaaagccaggattattttagacccagttaattatttgagattctcttccaacaactctaccatagactttgacttggaattacaaagatggagaaaataaacatttcacttgagcaggggtttgtgtttgtttaaggaaagagtaataaggacaatttgtcgagcacttatggtatac

SEQ ID NO: 97193 - DNA, 2432 bp, Homo sapiens
agatctacttatgtcttaaatgtgtccatccttctgctgattcagttgattgatatttagaagggaaaaagatcattaattgctaacatttcctttctctttttgaggcatttataagacgctgtttggcatatcgaaaagaagatcgatttgatgtgcaccagctggcaaatgacccataccttctcccacacatgagaagatcaaattcttcaggaaacctacacatggctgggctgacagcatcccctacacccccttcttcaagcataattacttactgactttcctccaagattggcatgatatctttgaatttgcttccagatgcacacttaagtttgagagcatttgagtgtttgttttctttttcttttttttttttttttttttttacacaagacgtggttaagaactgtttgtgaactgaagttcctcatagtgtcatttgtatgagagaggatcatggacaatgaataaatgcacacttctgactataattttgagcagtgaaggaaggatgactgcctgttacacagaaacaggaataccatgttaagatagaggaaaaaaattttgtttatttgggggaacactgtaaataacgtttataatacttaaatacatttggttgttactagagagttctaatatgaagggtagtttttcattatttaaaaacacatggaaaaatatgagacatatttctaacatacgaactatagtgcctggatacattcttcagcatttggcagttaatctgctgaaaccaaagtaagaactgaatgacagtgacagttgtgttttatagtaatagaatgtgagagttagaatctttggacaaagttaggctttgtcatttgcctattcagacttttaccaagttgtacctcgagatcacatgtccgttttctttcactggttatattaaagggagagctattatttctaaatactttacacctttgacaaaatgagctgcttgtgttgaaatcagttgaattcactaaattataatattgccagtgttttcaacacgttagaattgataacaggtatttttcttttgttaccaggccttgttcatcaaaacaggtgacagtgagtaaccaaatgcagaccagttctatgcaggataatgataaattcccttctagctctattgtaaattgttgtacagatgtcatatttcaattactaagtttcagcagcttattcttgtacaaatgtttaaaatatggcttttctaattggatattgtattttttttaagtcttcttgaaggcactctaattgctgctaaatgatgttgcttctttgctaaaaaattaaatgacctagaaggtgcaagttgactgtacatcatagatattaaaaagcagacagtcattaacaatcaagatgtaaaagtgatccatgttggacataattgagtttttaaatcagtttattgggttctagggctgtagaacacatagatactagatttttaatttgttcatggttattctacatttctagaaagttcttatcagcaagatggtcccataagcaaatttcttgtggtttgtacagatttgttaaaatgtgaacgttttctaactgcctcgtagggtagaaaccaatatttttcaggatgctgtatttcactcctgtaaggactttttctttattgtcacattcataatgctgatacttacatgtaagttgttcatgttgcagaaaaaggttatacgtaccacggattctctttaatattgtacagttaaactgtatttctgatgttgcaagccattttgttttttcattgtacatagacacattgtctctttaaaatgctgctgaaattgtagagagtatagccaaaacagtaataaacaatgacagttaaaatgtaaagactatgaaaattacattggaagggagctttcaagatggtaggatattgactaactgagctccttcacttaaaaatcagctgaataaattccttaagtatacttcaagacaagtgtaaattgtttcaagctgttaaagttaaacctaataaccattatcaaggcaactcctgggtaagtaacacttagaaccatcaagagtggtttaaggggctggctatacccattcctctgtagagcacagagaaatcctattaaaaaaaaaatactacatggtaatgaaatcttagcattgattgagtgctttacgtgctgcctgcaagttttcagttttgttgttagagttttcgtctttatgaatgataaagtcctatgttcataaagtaacatttaaattcctgaactaaaaggaaatgcctgttgtgcttaaaattttggggagatacgaagtgaatgtgtaaatctaactttgaggttcagtaagttaagtagtatagacctagagatcactgctttaccattttactttcaaat

SEQ ID NO: 97194 - DNA, 1303 bp, Homo sapiens
gtttgaacaaaagaaccatgtgatcaggtgtatattttagggagagaagtgcctacagtttgaacagtggttaaggaggatgggagagggtttcttctactattattagatactgcaaataagaccattgtaatctctttaagtttttgtttcggtaggtaggtaggtggtaggtaggtaggtaggtagatagatagatagatagatagatagatagatagatagatagataaagatagatagagatgaactttatcacaatgttgtatgtgttggctctagagttaaatgataaaagaatgtaaatgctccagaagttcagttgatgattttcactgatgggagtcctagagtttatatatgaataaaattcgtgttctaagattttacacttagaagattttaagttacagattgtcagtagtaaccttttttctctcccacaaaacttacaggtatttacctcctgagtgttttgtagttggaaaagagccaccaaagatttccaacaaggttgatgtatggtcggttggagtcatcttctttcagtgtctttatggtagaaaggtaaattgaattctaccagccttcagctctacagagataaattaagttgaatttttccttcttaaaagcaaaatttcactaacttaaagtcaatttagatccttctaaagaaagccaggcttctcctctatttcttcctaaaatttccatggatcagaattattttaatgtcacaccagtttacttgacctactttttgctttctttcctttttttaagaaaagaagtaactatctgttaacatgctaatatttgtctgctattgggaatactggagtcaatacttttcattatccaccattcacttgacctcctcttacaccccccaccccacccacacacacagtttggcctgggtgggcagtttccccgttgctcatcagggaaataccatcaaacttagtcttatttcccaacttctttttatattgaagttggaagtgcaggttaccataaatattaactagcccacatcccaccccatcccttcatcaataggggaagagaggttaagggatttgtgtgggatctcctcactccaaatccagagctccttcatttaaattcgcctgtgatgcacacagtattttattctttggaaattgtcatagacattttcattactacttcatctcttctctaactgaacttcattgtttattcagaataaagttttaaatttatgtttttatcttatattgcaacagcattattttcttcttcttacagtgtttaa

SEQ ID NO: 97195 - DNA, 1181 bp, Homo sapiens
ttttaaaaaaattagccaggcatggtggtgtgtgcctgtggtcccagctaattgggaggctaaagtgggagaatcgcttgaggcttggagatcgaggctgcagtgagccgtgatcgcaccactgcactcagcctgggcaacacagtgagacccggtctcaaaaaaaaataaaaataaaaatcatacatggattctcaactgcatgggtcagtgcctccaacccctatattgttcaagggtcaactgtatttgatatatttggatagcactataaatactcgtatattttagaatacacatataatattgctcttataaattacctttcatcctcagaaacttaaaatatttagttttgtctctctggtctcaaattcactaaatcctggtggacatcttttcccaagttactttgacgtcaatttctgtggttgctctccttgcatacatacaccttgtgcctggagagagtatagcttaatctttacaagctattcctgtttcagttacacacatagacacctgcgtaaaatacacacttttattgacaaaataaatccagctttttactgcattacaaatgagttattggttatctttgctggttttacttcacggaagtttcatgtgtattttaagagatctgtcaacatcttgctgaaatcttaatgattttagcatagtgaatacaaaactgcattttttaaaaaaaatagtaaattcccattgagcagcattatttgttttgataattttaagtttatctaaatttttgaggtgtgagatgcttgcatccttgtgatggatcttttacttataactggagatgacaaattgatttttacccttcatctattaaaaattatgaactggcttagtgtggtggctcatgcctgtaatcctagcactttgcgaggccaaggtgggaggatcacgtaaggccagtagttcgagaccagcttggtcaacagcacaagactatcactacaaagaagaaagtattagctgggtgtgctggtgcacgtctgtagtcccatctatttgggaggctaaggtgcgagggtcacatgagcccaggagtgtgaggctgcagtgagctatgatcgtaccactgtactccagcctgggtgacagagttggaccctgtatcaaaaaaaattatgaacttataaataggactt

SEQ ID NO: 97196 - DNA, 1864 bp, Homo sapiens
gtttgaacagttttataataacgagtttttttcaacagttggaaaaataactgttaggaactttttaatttttctaaaaagtgagaaagaaatagggggttgctaggaaaagatagatttaaaaggttttatccaacctacaaaaaaagtggtacagtcatctgttttcctggctgcttactactagtatagaggaataagtccatattaaaaacaaataatagctttattgttttatttttattcagtatattggcatttataaaatttaatgtgaaaattcacattaaggttttctctgatttattaccatggaatttctgtcttctgataataaaagtgtcattgagctatatatagtcttagcagagaagatcattaataattgtagggtttgtcctaattccatattattgcaaaaattatcaccaaaataaaaaacatctcttcagctattcaattggtctttcatcttaattgtttttgacttgaaatcctaggcttttgacctttatgaacaaagatatgctgctgtgaagatacatcagcttaataaaagctggagagatgagaagaaagaaaactaccacaagtaaatactaatactttatggttttttaaaattgaatattttttgaatgatcatggagaattaatacactgtcttctcatagacatgcctgcagagagtatagaatacacaaagaactggatcaccccagaatagttaaactctatgattatttctccttggatacagatacgtaagtgaatattaaggttcaatttttaaggaaagatatgcttgctttctctttccccatcctgtgttgatgatataaatactctccatttccccattgtgattctgaattcttggatattacttatgtctaatttttttctcttctctgttgtaggttttgtacagtgttagaatactgtgaaggcaatgacttggatttctatctgaagcaacacaagttaatgtcagagaaagaagctcggtctattgtaatgcagattgtaaatgcactaagatatctcaatgagatcaaaccccctattatacattatgatcttaagccaggtaattatgaaatttgtctaattttttttaaacttgagtatagtttttaaaagtcattcattaagttatctgaaaacatgttttttggtttctcttgtaagacatcagtaaaatactagtaaaattaaaagttattaaagttatgtttttcatgtatgtatcattaaaagaatcttatattttattcttaggaaacatcctactggtagatggaacagcatgtggtgaaatcaaaatcactgattttggtctgtccaagattatggatgatgatagctatggtgtagatggaatggatctaacttcccagggggcaggcacttactggtaagtgtattactaaaaacatcagaatgtctagattggtgcccagtgcttttataataatttagtgtttttttttttatttccatgtagccattaagattactgtggtaaaggtactgatattaagctctcagttgagagggagacttctgtggtcattcctcttttctcatctgttcttaactgcaaataacagcatactggagagagaatgacctggcattaacaagtgacttcagtacctgccagtcagaaactcctaacaggaagaattcattcatgggttttcttctacaatgttagcgtgatgttcatcataaatataaatacttatgttaatataatattttaactattgcaagcaaaaactgcaagcatcaagccctctctgtggaggttatatggttgcaggaattttcattttattttgagacagggtcttgccct

SEQ ID NO: 97197 - DNA, 1047 bp, Homo sapiens
gtggttaatttattttacaaaagtccgaagacagtaaaatttaatgatgaaggccagtttataattatgtttaatcatatgtcaatactgtaaaagcttgattataactcccaatataaaagtctgttttttccagagaagtgattcttgctgagtacataaaggattttatgaagctcttggcaatgcagtaattattaggtctttgtgagagtgctataattggtcattgctcctgaatattgagctataaaagttttgtgagcgccaaagccttaagatgggtggtagtcatgcagatagactggtagagaatgaaaagaaatattgaatgaaatttgaaattagcagtggagtaactgagaaataaatagctaggaatagaataagagagtagaacttcagtgtagaaggaatttttatgtgtgtgttttaatatgtctgttttttgcccccacctctaaggttcaaagatcacccaacattaaatgaaagatatttattacttcatctgcttggtagaggtggctttagtgaagtgtataaggtaatgtatgttttattctgttttttttacactaatgtagcaaggatataggagtatgtggttaagaagtacttacgttgtctgggcatggtggctcacacatgtaaccccagggctttgggagatgggagggtgcctgaggccaggagtttgagaccaacctgggcaacatagtgagaccttgtctctacttaaaaaaaagtcagccaggtgtggtggcgcacacatgtagccccagctactcaggaggctgaggtgggagtattgcagagtccaggaattcatggttgcaataagctatgattgcaccactgcactctagtatgggtgacagagcaagaccctgtctcaaaaacaaaaaaaagaagtacttgtcttttgtttattgattatatgtcctcattataaaaaagggtttgttgtggcttctgttgtcttatttccagaatccaaagactgtccttgccacctgcacagtccctgtgatatttgatacctag

SEQ ID NO: 97198 - DNA, 1520 bp, Homo sapiens
agacggggtttctccatgttggtcaggctggtctcgaactcccgacctcaggtgatccgcccgccacagcctcccaaagtccaaagtgctgggattacaggtgtgagccactgcacccagccctagtcttatccattttttaagtagtattcaaatttgtattgacaaaaaaggggtgggtgtgtgtgtgtgtgtgtgtgtgtgtgtgtatatgtgtgtgtgtatgaatgaatgacatgaatgacatgagtgatatgtgtacttgttttggtggctagtctaaaagttgtatattttaagacaaaaatgtatttatcaaaatatttatattgattattaaatttctttaagatttatttacatctgctctgataccttagagtctactacagcaatctataaattttttgttgtaatgtatctttaggattgcaagtgagtggtcagtttgtgtgtgtgtgtgtgtgtgtgtgtgtgtgtgtgtgtgtgtgtgtgtttgtactccaaatgctgtaaggcgtaggaagaatcattctgcttttttctttcttcctcttttaactattataaaatattttcattttatttgttttctactagtaaattattccttcttaaattaaaatttgcatggactagaaatggctcattttatgttatgtcagttttcaactacctttcagtatatacattataaaaatagatttcttgtagtacagaataaaacccagcatctcattaggtatagattttcatgtggaggatggtttcttcaaataggtttttgccttatctctttccatcttttcggcattgaaaagagcactttggtcttttaactcggtggtactttataatatactattcttcccatcactgtaaaacattgatgcatgggtaaaaatatcttttttatatcgcaaataaattgagcttgttatagtcccctctcttcattttcaggaagaggcagaaatccaggcagaacttgaacgtttggaaagagtcagaaatcttcacatacgtgagctgaaaagaataaacaatgaagataattcacagtaagtcattatttgcatttcacagtttcatattattaaaactacccccgccccccatagagcataaacacaatatttccttcttgggttgtctcatcgtacttagaaaagatccaaagtccttcccatggcttggaaggccttttatgatttggtccctggccaccttactgtcctcacttctcttaaacatgtcaagagcattcccttctcagtgggcttttgtgcttaccatttcctctgcctggatgttcctcctctaaacacctaattggcttaattacttatctcactccaaatgttctttagaaaggccattcttagatcatcctatttaaaatagtagtccctagccaggcccagtggtgctcacctatagttccagctactcaagaggctcaggtaggaggattgctttggccaggagttcaaaaccagccttgtcaacatagtgagacc

SEQ ID NO: 97199 - DNA, 1028 bp, Homo sapiens
aaaagagaaaacagttgcttggctaccagcccttcccaatcataactgtaaatccatgccatatgcataatgagcatgtagaagactaggtttaaaaggaagcagaggccaggcatggtgactcatgcctgtaatcccagcactttgggaggcagaggccagaggattgcttcagcccaggagttggaaatcttgtctctaccaaaaaaaaaaaaaaaaaaaaaaaaaaaaaaaaaaaaagtcggggcgggaaagcaggaaagaaaactgggagaaggactgcagtacactacacgaaggcattgcacctgtgtgtgatcaggcttggtgtcagccccttggttagtgttgaacgttaatttcactcctataatacagcagctgtaaatatttttaagacaagtgtgccagatatttaaattttgccaatcagttgaattcttaaacatttatttgatgctggggaggtagtttttgttttgttttgttataataaagtagaggaactgacagaattaaaacctgcctgttttaacagtcattccaagttacgggtattaatgcatgtatttatgcatttgaagggagagtaaaccattacccctccacacacccccagaaaaacaggaaatgaagtgtgtagagagcaaaacattgagtaaaggtactaagttaattatctaagctagttgaacacacctgaggtgatacagtatgctctcatcagtaataagccactttagtaattggggataggggtggagggaacatttatataattaggaaagaaagcccccaatatttaatgatttttatcttttctccttctcctacccttctccccaatctacacaattattctcaagcaaaaatatgattatggtgcaatagtttcaaaagtcagacctgctttgtctaggtggttattttggttggttggttggttggttggttggctggcttttattttggttggttcatatctcacacattcatatttagaatatgggaaagcatataatatggtg

SEQ ID NO: 97200 - DNA, 1027 bp, Homo sapiens
tctctgataagttctaattatgggaaaacaatttatctttgtgattcagaagctctgctaggttgattatatagtcagatctttattctggagttgaagaagatggtgtggatttgctttcaaggattgtcactaaattaacacataaaactaaaaatacaatccctgcaaaatcaacttccttgaaatgtctatatttttaaaaagatacaagttattagtcataataccccaaactgatgagtaaatgagaattttgaaagttattaggtccagtaactatgtcttgagactgctgttactcaaatttgtgatatgaacagcatgtgggtatgttactctttattttcttgtcttcagatttttttgtcttcttgattttaaatatttgattagttggagagaatgtgtttagaaagtgtgacatctcagtatggagtattaaatagtgtagtagggattggctttaatgtgtgtgttttggtgtgtgtgtgtgtgtgtgtgtgtatgtgtgagtgcatttgacttatgagccctgaatataagtgccagaagttttatttgaaaaacataaccaatttgtaattgaaacaggattagtcaagaaccatcagcaccaacacaaatgtatctttgcagaccgaaggaatcagctaaacaatttacagtcatctcaatctctactaaaacaaaaatcacatccaacatgccacctgacaccatttctttctctctctctcctttgctccttgcgatgtggcattcatctctccttgtgcctccgttctgaagagataacagtatagcaacaactctgccactgaaatcctgttctctgaccgatattggcacctgcaaagagaaacaaccagtaacaggcagcagcagcatcagtattaatcttccatgatgaaatctttacaggtcaagaacaagtacacagctcttttctcactccttcacagtggaccatgcaactagttgaaatggaagacaatggattgtctacaagccttttgaacagtgg

SEQ ID NO: 97201 - DNA, 1010 bp, Homo sapiens
gcattagcatgggtgactctcttgccctttctcccttcaataaattcttaacattaagcagaactaattattagactaactttcttagcactgaaggaccaaagttcattgaggaagcccatggcatatggacataggagaatagaaagacctgtttactttttcttgaagtggataatttatgacatgctttgtgtttcataatgataatcactataattgaaaagctaaactaaaatatgaaaaagtatatttacctttgaataaatcatgaagtttagttcatattttatgctgttcttcagggttagaaaaataataaatccaaagatagccttactctattatccaatgtgtgatagagtaaggaatgagagtcaggcagaaacctccaaaagtaaatacatggctaaaataaataggtgtttctagttactaccaaaaagtaaatgtaaacttacttatggacttattagttttctcttctgagattaggaaaatcacagcagagcgtcactttttttcctctcaactgtatcaagaattcttttatctaatatttattgttatagttgttcccaagtttaagcagtcgttgctcacccatttattaagtgacttattgccatactctgcctgacacaggcataattcaaattcccattttaacggaattacatattactttttatagactttgaagctttcaccatttttgagtgaacattaattacacctttttgaaagcccagatctatatatacttcctctggagtaataccaccagtaagtgacaaagccaaaacttgaaccattcccactcctatttcaatgactgtacccatgtagttaattcctagaattattttgttgtagattaatagtaagttgattctttgtattcagaaaaattaattcacttgtggctttccttgcatctctattaagtactggactgtttgcttttccttaagttttcttttggtgtgtggcgggatgaacgtgctatt

SEQ ID NO: 97202 - DNA, 1487 bp, Homo sapiens
cttccaaggtctttagattattctatttaagtactaccttttggtaaaaaatacttcattttaaagatgaaatctaaaattccatattgtttatgttcatttcataataaaatagcaattgtaaataaatagcaaacttatttctttggcttatcttttaatttgttgcatgtgtgatgtttcgattagaagatgtacgtaggaaaaagcacttagtgatagtataaagggataaaactgagaaaaaatgttgctatgtgttattgtcgtaaacttttaaataatgtgtatctttctacttgtttgtaaactctgaaattgtaatcagtttattgtttttacaggtcttaattttagttcaaatgatttcagagaagtagtaataatagagtaggtttttttccctcaaaattaagttactgacagacataaagttctttttctttgacccaattttttgtgctttctgcttgtcaggttctttcaattttttaaataggctgaattataggtaaaattgaaggagtgaactaattggagatagtatctgtgaagttgtctccatgggatagggtgaggtaggatggagaaacccattctggtagcagctactattacactgcatactaatttgttttggaaatgttattaatatgctggggattcctaccatttatagggaatagaaaattattatatataatttgcattagtatcctttaatatgctatatctgtctatgccaactgcccagaaagcttcaacgtaaactacttgaacagtgaattaaaaagtgatttattttggttttgttatttaagtagttctattctgttctattgtaattattgactacttttcctgcgctttgagacttagttgacaacttaagtctattctctataataatagatggagctatataactatcataatagttctataatagtgatagaaccatataaaggaactatggaagcgaaaagggaatttttagtacaggatgagtcgtaagtatctgtgtgcccacttaaactgttttgataatgagttcgtaagggcctatgctttatgtctcatataaagatttaccagttattttctaaccagcctgtggtgataaaggaatacttatttacttagttatagtgattccaaggtgtacttgagagttttactgaagggttattatcttcacgtgtaataccaaatttcagattactctttctaaatgatgacattttacatatgcaccttattttatgaaaatctgttataaaatctgaaattgtagagcagttaaattaggaattggctatttgtattacaaaaagtacactttgaaaaggcttcaaaggagggtttgtttttgtttttggttggttggttttaaagctttcctggtactttgaaaatactggtttctgtgaaaaacacttttataaagtaaggtatacttagtgtccaaatattatatagacatttgt

SEQ ID NO: 97203 - DNA, 1020 bp, Homo sapiens
cttatttatttcatcacgtggttttttttatgcttgcttacttccactatagagtgtacgctcaaactaatatgtaaggagaaattgttttgtttttcactgtatccttagaatataaattctagaacatcacttgataaatggtactcattaaaacattgtagaattagttaactgtttcatctaaaagtattaaatatattctgaagaatatctcaaaggatttttggctcatacattttccttaaagcattgtagaattagttaactgtttcatctaaaagtattaaatatattctgaagaatatctcaaaggatttttggctcatacattttgggcttaaagttgtccacattttagtatttccacttgatttttatattttgctagttgttaataaactaagtattaatctcaatatgtagaattaaaatttcatttttgacaggttgactttggcagaatatcatgaacaggaagaaattttcaaacttagactaggacatctcaaaaaggtatgtgaaacatatgctgcatttttagttcaatttgctaccagaatttgtgggaagttgtgttataagtcacttattttaaaagccaaaatttaagagagtaagatttcaaattaaaaatttcagattaaaaagagatgcattaaagttactttattttatttattagtatttttattttttgaaacagtctcatcactcaggctggagtgcagcggcacaatctaagctcagtgcaacctccacctccctggttcaagcaattttcgtgcttcagcctcctgagtagctgggattacaggcatgcgccaccacatctggctaatttttgtatttttagtagagtgagggtttcgccatgttcaccaggctggtctcaaactcctggcttcgtgtgatccacccaccttggcctcccaaggtgctgggattacaggcatgagctgtcgcacccggccaaaattacatttttatgttgagtatattaaaacaacattcctttat

SEQ ID NO: 97204 - DNA, 1055 bp, Homo sapiens
tagatttttgggtttatttctgaattcagatctatttcataggtatatatgtgtattcttatggcagtaccatactttttgaaagtctccaatctgtggacataggatatcttttcatttaattaactctttttgaactccttagcaatattttgtagtttttagtaggcaagtctttcacctcctgggttaaatttattcctaggtattatattcttttggatgctattgtaaatgtaatagcttccttaatatccttttcaggttgttcattgctggtgtatagaagtaactgatttttgtgcattgctctcataccctgcagctttgccaaatttatttattgttctagtgattttttttcttgtgcattttttggggattttctaaatatagaggcatgtcatctgcaaatatagatagttttatttcttagcttacaatttagatgcattttatttcttttccttacctgactgctctggtaggacttccagtgcaatactgattagcaatcatgaaagtagacgtccttgtctttttcctggtattaggagaaaatctttccattttcaccattaactatgatgttagtttgcctgggttgttgttgccttttgttgttgttgttgttgttcttttcttttcttgctctgttgcccaggctggagtacagtggcagtctcagctcactgcaacctctgcctcccaggttgaagtgattctcatgcctcggcctcctgagtagctgggactacaggcgtgcaccaccacatctggctaatttttgtttaagtgcctctaacagtctatttaccatagtttgtgttctttgaggcttcatgttaattctctgcttaaacagaatgtctttaagacattgaataccaaatttgtttaaaatgaatatccctgtttttgttatttctactaactttttaaaatactgtcaccccatatttctgttaaactattttagaacacttttaaaattaaaattttcatttactcagacttagtgtggaagattatcaggagtcaagtcttatgtttgg

SEQ ID NO: 97205 - DNA, 1074 bp, Homo sapiens
accccatactttaatagtttggggtattgttttatctcatttcattcaagaaacatttactgagcaaaggtaagtgatgatcactacactaggtactagggatacaacagtataaatactgtataaatagacaccatctgtgttcttagggagtgatgtcatctaaccggacactttctgataaagtatctataggaataatatttattagaaagagtgaggtggggagatagaagatcccatgaaattatatatggcaacacatctttccctaatctaggggtttagagaatacctcacttaaaaaaattctttcaaatgagacctgaaggataagtacaaattggttcacaagagtggaaccaaaaggttacgaatgtatattttatggtttttcatgttttttatgcattttttccaagtttagccttgaaaagtaatggaaggttaatatggttttatttgtttatttttacacaggcaacaagaatgggtgaatcagcaaagggaagatattgaaaggcaaaggaaacttctagccaaacgcaaacctcccacagctaataattctcaggcaccctctaccaattctgaaccaaaacaaaggaaaaacaaagcagtcaatggagcagagaatgatccctttgttagaccaaatttaccacaactgtaagcctccatttaaaatttttcttttttaaaattgttgccagtgagcgtgaatgttactaatggatgttatttataattaatacttagatagcaaaaatgattaagaccaggaaggaaggcagtattgaaaatttagctctaaattaatagccccaaatatctgaattctaccgttttaagcagagatttaacaattctcttttaaaacagagacctaggtagctaagaggttaccagaattcacccttctgtgtctgaatcagttaggaatcaattaaaagttttggattattctaattcaacgtttccattcacattcctttgtctgagagaatgaagtaatgtaactaccatttatatgttttctcagcctgtgaaagcagttcattagtgggttatagg

SEQ ID NO: 97206 - DNA, 1592 bp, Homo sapiens
ttggcccttcacagtcttagagaaattttagaatcaggtttcaagttgcatatgcatcatacacacacagtgttgagattttgtttgaattgctgagggtctattggtgctaaattctgtttcctcttccttgaaaaacaactgtgttgggtatctaattttaggttggcaattcttttctctcagcacttttaagattttgtgcccttgtcttgtggattccaccatggttggcctagacttttgattctcaaagtgtgatcttcagaccaggagcatcagtattactggagaacttattagaaacggaaattttcaggtccttcctgagacctgattcagaagctctgggaatggttcccagtaatctgttgtaacaagccctataggttattctcttgccactgtactaatcagactcatcttttgatgttagaaggaagcctcttctctgagcatatggccacctacaaagtgaacagaattagtatcctattgctaaggaagaatggtgaggacagttgttgggtaggcaacttgtgtatgtcatttataagttcagtggagaaaatattttgttagttataagagatagaggaaaacccacatttaatttgttaattataagagatagaggaaaactcacatttatttttaagtgatagacactttatataccatattttagttatttttaacaaagtgaggtagattgtgttgcttctatttagaaataagaaagctgaactaaagttcttataacttagccaaagttaaccttagagtatggatttgaatgtatggatatggatacaaatttccctgtatgtactttccactacacacttaagtaacatttaacagtattatctcatggttaagtaggctttttttttttctcgtatcatactcagatatttaatattattagtcctatctgtatataatttatttagaacattaaaactatttctaagcttttcatattccccagtctagacctcttgcattttctacttatgtcataggctaactgtgatctcagacggcaaatagatgaacaacaaaaattacttgaaaaatacaaagaacgattaaataagtgcatatcaatgagcaagaaacttcttattgaaaaggtaggctaaaagttgagtaaattttcgctttcccttcattagccccttttgctttgtatgcttttataaattaatgaatacaattgagtgatgattttttttctccttttcagagtacacaagaaaagctgtcaagcagagagaagagtatgcaagatcgattacgcctcgggcactttacaacagttagacatggcgcttcatttactgaacaatggacagatggttttgcatttcagaatcttgtgaagttagtcattcttaacatttaaaagtttttagtattcgtttgggttttcattactttaaaagattatagatttgtaattatgctctccagttcctcgctactctgaaatcatagaatttagtacctttgaaagggatatgaaaccaagagtattacagttttagcttagtaatttcttgattaattagcagtcatctatagaa

SEQ ID NO: 97207 - DNA, 1114 bp, Homo sapiens
atgaaaattgctaagagagtagattttattcacaccacaaaaaaaagatatgtgttaaataacttgatttagccattccacattgtatatacatatatcaaaacatcgtgttgtgtaccataaatagataggtttttacttatcaatttaaaaaaggtcttgcaaaattcaaaaaaatcaactagaggaacgtatagcacaaagcagcggatatattgaattataatgaggaacatcagtattctaagtaattggcctttctagatgtttcttggtaagtctgtagcatttatacacttgaagttattaaaactgcactaaaactttttgagattcactttacatatacacacaaatatatttttctttaccttttgaatttggagtaaaatctagttttatgtttgcttgaaacaacatatataatggagataataaaataactttttttcatttagactgatctcacaatgctgaaattagcagcattagaaagtaataaaatccaggacctggaaaagaaggagggacgtatagatgatttgctcagggtaagtaatgagtcatagaggggaaaaaaattgaataaattatttggcaacagtcaaactgttcagaaaatacttagcattgtaaaaaaatctgtagctaggccaggcgcagtggctcatgcctgtaatcccagcactttgggaggtcgaggcgggcagatcacaaggttgagagatcaagagcatcctggccaacatggtgaaaccccgtttctactaaaaatacaaaaattggctgggcatggtggtgcgtgcctgtagtgccagctacttgggaggctgaggcagcagaaatgcttgaacccgggaggtggagattgcagtgagctgagatcacgtcactgtactccagcctggcgacagagtgagactctgtctcagaaaaaaaaaaaattctgtagctagaactcaataagctttttctgttagtttaagtacatgattgaaaaataccaattttaaagtgaaatattttattagatcttcaataaattgggaattgagaaactgttggagaactggaagttaataacatttatatgaccaactaccataacacaaat

SEQ ID NO: 97208 - DNA, 2461 bp, Homo sapiens
tgttagagggaagggacctattataattctttttatatagtgccatgaacacttgggtatcttgagaatgatattctgtttaaaatagttgattatgttcactaaggtctatgggtaaacattttgaaatttcttgggattagggactatatggctcaataaacatttgtaggggacctgtgctaagatttggggggaaaacaaaatatgtttattgctttggaggaatttatttgtctttgagttgaccaaaataacagatgatagtcagaatatagagtaataaggatctttataaaacagtctcgtcatgttcttgtgatcagtagtctcttagtcttttaggacttggctgaccttgtgttttttttttttgttctggacccatttaaatgactacttattttaaaattaggtatatttagattaattcttaatgtcatatctgaaataactgtctgagcctgctttagtaaataataatgcttcctttttcttttactcagtaccagggtggaaatggctcaagtccagtaagaggcatacctcctgcaatccgttctcctcaaaattcacattcacattccactccttcctcatctgtaagtcatctttcaagtttttcatgtgtagtctttgggagggttatgtacactgaataagttttataatttgttgttttttattgagaacttctatataaataagttagcatttatcttttaatacattatttctgtgacatgaattaaatccttttaagttatctggtgctattggaattttatttctggaagtgagcctcttaaagattttctgaattaattatatccaagaagcattgtttatgttaaaagaatgcctgttgagtctgtgggactaacatgagtactcttgtatcagtctgtattcagttgttgattcctaatttataactttcttaacaattgaatttcttaaccactaaaatgatagcataattcctttctgggaatccttaagaaaaaggcagggtatgtagttcagtataggaaaagaatcatggacttaaaattatcttaaactttttggttttttcataacattttagatatagttcttttatatgcattgttttgcatattggatttcatttttaaatttactttcattgtgtgaaagttcaatatctaactagaaaaacaatattggttttcagtaatttaaagaggaattaaagatttttaaaaatcagagtttcacttatttattcaaacatcttgtttttatgtcttgtgtccccttcttgtcctttgtctttagacatacttggttttgttttactcattttgtacctttcaggatatcacattgccgtgtataaaagtaaggcataagattcaacagtaactaagagttgtagtgatagcgctgatacaatgttataatctgctttcagtgagtgtctttttgaactagtgaccagataaactatgaaattcattgataaattgatattaaactacatatgggcgtgtattattgtccctagtaagtttgttttttcaactatcataatcattgtttaatatttttcagaataatttatttggccttattttttttttaactgtatgaaagcattaagatttcttttatggcactagaatgtaagctctatgagggcagggaatatattgttgtatttctcactgggtcttatgtaggaggtacttaatgaacacttgttgaataaatggtgattaaaggttttaaaagtcaattatgtttcaatttaggtattattctgatagaaacttcttcagaaatgttaagtaattgttgctaattagaaatctgttttgttttgtgttttttttttttttttttgctaatataaaaattttaataatttctttaggttcgaccgaatagcccttctcctactgcattagcatttggggaccaccctattgtacaaccaaagcaattatcctttaaaattattcaggtaaatgataattaaaatgtttttttctatggcttctaagaaaccattgactaacttactaacaactaagatgtctgtttgttttatatgtagtcataaagcagaattacacatcaagaaagataacttactaaacaaaaacaacagaatttgtaggaaggagtgagaaactgaaacacacaatttactatcagctttttaaacaaccgttaacatgtcagttctgtttactgattctttctgaacttaatttccaagtatatgtaattgatattttgtgaaactgctgtattttttagaagtggacattaaagcctctcatttgactgtatttattaaatacgtatatgtgacaaattataaacattatttgaattatttgtatattttctatacttatttagtttcatgaatttgagcactaagtttttcattttaattttttacatgtgacagtttctgagtggcact

SEQ ID NO: 97209 - DNA, 1047 bp, Homo sapiens
gctggttcactttgtcagcgtggtcatatatgagcaatatttacaatctagtttttaaaaaacattgtatttaatttgggaatgctttttagaaaatcaaaatacattttacaaaataacattcctattgaagtgtgttactgtcagtttgacaggaatcatgttatggtttgtataactaaagctgttttattattatttacaagtaaaggttagtttgtcagtgatgcagtcgctacttttttatttactgatttgcttttctgaaattagtagttattaagcagtattaataatgtagttttaaaacaggacatcacttacatcatttatttgtaagattctccaataactggaacttttaaaaattggcatgtctctattgaaatgtcatttgattttcatatttgtgaaattgatagctgatgtcctgcggactcttaatatttttttgatgcccatcactaccctactaacatcatgcgcttcttatattttaggaaaaagtattgggggacgtggccacaaaattagcgactattttgaagtaagttcattgaggattgtctccatttcctaattcagtactattctgctgtgagctagaaataatttcttagaagcacaaggtcagcttttgattacttacttgattagagcagagctttattactatgtgatatctttctaggaaaattagatttacatttacattgggatgccatatcatttttttctaaatactttctcacatagttgtttataataacctgtaagataggcaaaatacatattagtgtttcagtttacagatgatgaaactgaagaccagaaatgtaaagtagcctacaccgtaattttttgaatttttgcagtcagaccgtggcagcagtgaccttgagcaataatagaacactaggcataaatgggttaacccatttaaggcaaagtctgaattgaagagtaaagaatagaagttaaagttcactggctctctagttgagaattctttctactatcaagtgtaattattaaaacaacaaacat

SEQ ID NO: 97210 - DNA, 1093 bp, Homo sapiens
cttttttctcatccaagtttacttttatacactaagtatgtttgagtagtaggaaactaaggaaaaacttaataggaaaaaactcataggaaacactaaggtgatttttttccccctcatccagttaagcatttgaaggtcatcttttaaaggctaattattctaggatttttcatccacttcatgtcaaattctgtaactgaatatcagataatatgtacaaggtcttctctacttggaattttaaaatgtatacaataggaaattttatcttttaaataaattgtgtgtaaataacagtatattaacatctcttgagcactactgaatgctatttttttggtctcgaaacatggttttatgttgactgtgataattttgtatattaaaactgtcatttaaaaatctgttatcttgttttctgtagacaccggagaagaaacaatcggaatcatccaggggaagaaagagaaaagcagaaaaccagaatgaaagtagtcagggtaagcacataacatcttccttcagagcctagtggacacttaaaattaattgttttaatttttaaccaattaatactctaattgtaaaataatatgaagttgtaaattttggtgtgtgcacaggtagttagtgtataatgattgcttttaggcttttcaatgttgcccttattgttttcatttgggtcctagaaagacaagtatcatgtccaaatctggcaagcattaacttatgacttttcatttttcattctttatatgtattgtattgaaatggcttgtttttgaattaaaaacttcaatctcactttaacagaactactcaaacttttcccatttatttaaaaaaaaggctatcaaaataattatgagagactctagttaaagtattatctgtttttctttccatcctttcttgcatacctactttttgtgatatgaactaagaaaattattttcatttaactaaatatcttataatgaatagaaaaatagtgttgtcatttaatttgagcactcaaaattaaatataataaattgggctcttaaatcgtgtataatgatgactttatacataatgttacatgtgt

SEQ ID NO: 97211 - DNA, 1057 bp, Homo sapiens
tggaataattcatattgatttctgtccctcatactgtaacagcattgagattcatgtgttcttatgtttggtcttatttacattgaagaaagactcctttatattttattataagataaaagcagcaggctacatgattagatataaaaaccttgattaataatcactgacctaagttccaagtaaaattggaggattagttaaattatatcactacacttcttgagtcctttaaatttgtctttgtgttttttcaacaaactttcaactggtagaaaatactgtgtaaattcacactaatatcttggaatctctaaatgccagagtagtcattcaggttttggtatgattacaaatctaacatttacacagctaacttggtttaaagtgtactagtctctcctttcttcattttctcctaatgactgtttcattgtatattggagctctttggccttttataattactgaatacttttcatctttacttcaaagccaaatcctattattttgccttccgtattaatcttttctttagtggtctatttatagtaggatagctaagaaaaaatagagaataaaagaaagaaatgacagcattattagcaagagcagtcttgaaaatgttctatataaaatgtttaatatgtgcacattatataccttagcaaatacataggtggcctggttgatgtcctttggatttcctcaaggaaatcattggtcatgatcagtagttttttttaaaagctgtcgaactattttttcaaaggaaatctcatctggaatctcaatattaaaataggagatgctgtgtttgcagattcagggtagaggtaacataggatatgtctctggtaggctggagccttaactcagccacacacttccttcccttctccttcccctttaataacttctggggcacaacagtcttaaaattaattttagtcctgttaccctttttcttctccatctgtaaattcttctctggtttaaaggaggtaaacttgttgccttctttactataattataatgcattcgtttgctttttgg

SEQ ID NO: 97212 - DNA, 1112 bp, Homo sapiens
gtataccagagaaataattgtacagacctagggattcgtgttcaaaggaatgtttgtaggggtatgatacaggagtatgttactccattgtgagtgtcacaatgggtcaaaagttgtgagaccacagctctgaatttgactattacaagcactttcaaaatgccaacatttccagaataaattatctgaaagtgttacttcccaacccccacccttcagcagttgttctaaatggctgttttattcttgtatgatttgaaaactactggcaaggtaatttgagtaggggagaaagttcaactttattctaattttatagtatatactgtttaacaaataaagccttaaagggatagccagagaagggaaagtgccaggaaatagactacgtaagtgataagaaaataacagacaaaatcattttcatcaatattaaaaacttagtatactcctttaaacatgtgtgaatgcagtgggtccaagtgataggagtttaagaagtcacaatgtgaggatgtcaagttaggtagttgttaaaaattgagcataaaataattgttttaatattacatttctttggagtactgatacggttgtgaatgctgtgcatgtgtaaatagagtccttcagcctttacaaaaatgtatgaggtggcatactttaagtatacctgtaagacagcacatattttagttgggtggttacccaatttcttcttactggtgttctaccatcttttatattacacgttattaaacaataaaggcagtacagcagaaaatatactacactccaaattgctgatatgatgattttgatttacttagaattgcaaggaaatgcttttatttgatgataggattccaaaattttacatacataaattttttatactaaatattaaaatcagcattatagtagagatcttcttttagaggtcaaaggttcaagtaaatatttacagataatagttatcaatattaaagttttaactcttgggcagagacagactatgtgaatttcaggtcataccagctcaaaatcatccttgaattcggatgtgcatatttcatggtaacgtttatatgtaaataggatacaaagcagcaaac

SEQ ID NO: 97213 - DNA, 1053 bp, Homo sapiens
attgttgagtgaaataagccaggcacagaaagacaaacttcacatgttctcacttatttgtgggagctaaaaattaagacaatgcaacttatggggaaagagggtaaaaagatggttactagagtctgggaagagtggtggtggtggggagggggaatggttaatgggtacaaaaatagaaagacttagtaagacctagtatttgctagcacaacagagtgtgtatagtcaaacataatttaattgtatatttaaaaaaaaactataagtggattgtttgtaacacctttgtgttacagttgtttgtaacaactgtatcaaaatatgtaccccataaatatatacacctactgtgtacccacaatgattaaaaaaaaaaaatttaaaaaggaaccttctaagctgattggtggaaacaagattggaagagaaaaatggcctattactgtaagagagtgaagatatttttttaaagtggaacccagtatagttctttaccataataggtgctcagtaaatagctgttgtctacccacctcgttaataggctactacttattctctagcatactcatctcacttgctagcatttcctagtatacaatcaggatgagtgtatctacaaaagcagttttcaaattttgggtctcagggactgctctttaactttaaaaattgaaggaccctaaagagcttttgtttatgttggttacaactatttggtatttaccattttaggatttcaaacaaaatgttgtaaccctagaattcacgaatacataatccataaatcatccagtgagatgtcgtcacatgtcatatagcctctggtaattttcactgtaaactcagaatgaaagtaaaaaagcacaccgtacagttagttttatgtaccaactacaaatgattcttaatgtgttcatcaaagcaaggtttctcacccttaacattattgacgttttgcactggataaattttgaggggtggggttcctgtcctatgcaatgtaggatgtttagcagcatctctgcctctgtacattagatatctaca

SEQ ID NO: 97214 - DNA, 1115 bp, Homo sapiens
tttttgtcttttttctacttgattagtatagacttttttctacttggttagtatagacctatcaacttgataataccagtagttcattagcactcagaaactcttaggcattttgtttcactgttcagaggaaagggaacttcaaaggtggcatctttttagctctgtgttattgaaagcatctagaaatctctaggtagacagtttcgtgcagttctgtgcaggcaccctgacactacaaaggagtatggcatagggctctcactcatcaggctttcccttccacagaaacaactggcaggcagctgaaaggactgtgcaagtgacgggactttatctgcagtaggttcccttgaggtaagcgttagtagcccctgtagcatcagattatcagtttagtttttaaaaaattaacatacttatactaagcctttgaaaattgtaggtttagctctagtcaaagttttttaaaaagtgtatcaagaatgttctcactttatatttcctggactttggaacatttcttgatattttcccagaattgggaatatttagtaatttcacctgcctcctgtttcatagacatttgtgttatgaagagcaataaaataatgttagatatttctcttttctgttcactaaatatgatatttttgatagattttttaaaaaagcaaaacatggtgaaagttagatcacttatcacagttatacattctttataggtacccatattccaaatataagttatagatttaatatttggattttttcagaggaattagtctataagagaattcagcttccctttaaagatcccaaggatcacttttggctatatttttagttaaaacatgtttttgtttcttaaaagaccatactggcatttgaaatgaaacacaatttggttaatcattggatatacttagctttatctgtattgaagttttgacatttggggcagcagtagaaaatcttgaaaaatcttttgggccatgtacgggggctcacgcttgtaatcccagcatgttgggaggcctaggcaggattgcttgagaccaggagttcgagaccagcctgggcaacatggcaaagccccatttctacaagaaaca

SEQ ID NO: 97215 - DNA, 1093 bp, Homo sapiens
ctgtttcctcccatattgataatgataccatacattatctatggttgttgttgacttgtttccatctgatgttttgagggggattcatggagattcttgtcacctagttttgttgtaaatacagtctgtgggtttttggtttactatttagttttatacatttttttggtgggtatttacagatgctcaaacactttgccactgcccttattgtcccagaatctttctaatgtattacttcttaattgctgctgtttcaaatttgataatcttgccataattagattataacttattccaagtactacttgaattgtaattagttcaagcgctatcctttgttgacagcagcttttacagtatccagcatagtactgggcatgtatgcaatggctcagagttgtcactttggaaattaatctaatttcaattatataattatagtctaactggcaacctgttaatagtaggattagcagccactcctgttacaagtgaggtgaaacatgaggatatcaattggcttgcctgtatgtaatgttaattcttgcatcatctttgacatatatgccataatctgtcagccacctggtctaagcatttctggaagactatgatctgatgtactgatggtacaaaaaagtgcacaagataataagtatcatagaagcgtattggaaacaaagcagacatcatcctacagaatgttagctctttctttgttacagttcaaaaatattgtcaaggaaatggagaaattcttgagcaaagcaattaattaaaatggtcgagatggtcaaagatgtttttgaagagatagagttaaaacaaattttaaaaaaaagaaaaacaggacagtttgttaatacagagaaaggcaaagaggtgtgtttcagacatgatggaatttgataattgtgaagggacctgaagagcccaaataatactttcagccaaaggtagcattagtttttaatacattgagtaataattttagggatcttgtcatcctaacaatggcccagttcctttgcttttgaactgggatttaaaaaaccagctaatagaagtcagttcctaaaacacagcagaa

SEQ ID NO: 97216 - DNA, 1032 bp, Homo sapiens
aagtgattctcctgcctcagcctcccaagtatctgggaattacaggtgtgcaccatcacgcctggctaattttgtatttttagtagagacagggtttcaccatgttggtcaggctggtctcgaactcctgacctcaggtgatctgcccgcctccgcctcccaaagtgctgggattacaggcatgagccactgtgcccagccatcagagacattttcttgaattacagtttttactattttctggctttagtagtttttagggtcttctgttatctgtatattgatctttgttgcttcatcatcagctgtagcttactctcaaatacttttcatctcttcatttcttttgatttcaaaaatgtccctgttttttgccttctggttatcttaaagcattatctactgtatatatttgctcttgggttcattcagatatactttttatttctgaaacttttatttttaatgctttcttgagttctgttaccttatttccgagttttttgaaatctgatttatatagttgtttcatgtcttgagtcctttttgtaatatctcttagttcattttaaaatagtaggttacaatttttacctattttgtggatgtgtgttcctggtatgcttttattatctggatgttattctgtatcttactttattttttcttatacctttatgacctgcataattttcttttgcctactttcatgtgaaattggatttcctgaacacttaaatggttggtgtggttcaggatggcttttcttacagggctttctctactgctgtttttaggcacgcttcaaaactgtggcatttgctttctgagattgctaggctgtgttccctcccttctttatctgaatattctctttccattattgtaattgtacctatatagtactcaattttcattccacacccagtaatttgtactcattgtaccaccctgttatgtaaagatccgtttcaaggattcgtggaggctagactgctctcactttttaaatgtaaccgtggactcctccca

SEQ ID NO: 97217 - DNA, 1039 bp, Homo sapiens
gaaaagcaggcctgatcttacttacctattctaacttattgattctcctagccttcttaacagtggcattaagaaggtgttgcttggaattttttttttttaatggtttcacatagtttttaagttgaagttcaaattacctgacatttttcggattcctaccttaccactgtagcccagtttcatgccccactttccatcttttcttcacattgtactttgaacagcctatttgtggttccctaaatggatatggtttttcacatctttcctttgaacatacagttcactttgtttcagatgcccatatgccctttcttttcatcagatgcatcactctttgaatgtcaaggtcagatcaggtatcactttaaggatgtttctctgattacctcattccatctaattgcccaaatccaaatctggtggacctcctgtgtccctcttcaacacctgtgtgtacctagacaaaatttttcccatcacattttaattatttgtttcttactagcctactaagctcttgaagacaaaggactgtgtggcatattttaatggtctcagcacttagctctgtgtctactctttagttatgtcctcaattttgggggaatgaaatccttttattataagaaatcaaaacagtgtatcctgattcagaaactttggagacttaggcagtaggaggctaattttgagactggcatatatttttaagagtactgggggaaaattttgaattgcatttagagtttacatggagtcatgtggtccttctggacttgctttaatattatgttcttagcactgcccagtatcagcaagctctttggaactgaaaataaggccagtgtctgtttattttactaattttcctaacttctaacctgttaacatcacgtaaaaaaaaatgtacccatctagttgcttcatttccttagcatatactttaaagtactcatgtgtaaggttccatttagtgtccttggtttgtagacagaggacaaaatccttgccctcagatgcttttagtctgttc

SEQ ID NO: 97218 - DNA, 1295 bp, Homo sapiens
tctgcataataacaataacatcagggtgttaaatttttccccttaattttcaaggtggtttaatactagtaagtgttacttcagtcatctgtgtgtgtggtaaacgtgtttgtgtttcatttacctgatggaaacttaaaactatcaaccgtacaaaaaatcttaaggattgtgacaataataaaacagttctttatagtttaaaatgtagttagttatataagatatacataaacaaaataattaagtggtaatgtcgcatagttacaattctgggtatgctcagaatagggagattacattaggagagtagtattttttaaactatggacccatggtccattgttggtttatgaaatcaatttaattgctatttactagtgtcacctcactcttttttaagtggactaggataggctagaaaatagatgttgtacaggactcttactactgcattgcagtaagatttggtattctgtgaaacttttaaatatatgaatgtttgtaactgtgtactaaattagatggaaaatatatttcttctgtgagttgcagccaaaagtgttggaaatccattgtaggatgttttgataagttgatgtgtacatttaaaaataaagtctctcaatttcgtctgcttgtagcattcattcctaaatttttaacatcttaactaatcacatatatatatttgtgtgtgtaagtataaagtatacacacatatatatgtgtacatatatatttttttttcttaataggtgcaatggatgagcttcatagtctggatccaagaaggcaagagttattggaagctagatttactggagttgcaagtgggagcactggaagtacgggcagttgcagtgttggagctaaagtgagcaaaattctcatctttatttgacagtctttctttctattaaatgatctaaaatagtatgtaaaggattcctacataacgtgcttaacagcaaatgtaacttttataatgtgtagaataagatcagtgttcataaatgcgtttttaatgtagtataccatatttcaggggcattataatacagcataatatgtttcagggataaaaaggagtttggtagattgtactgcctgtctcccactatgtagtttcttatccttcctgcccttattatccatggtcctatctgtacatctaatccacagtttctaactgctgcataaaactttaatagtgtatatcttttaggccaggagtcctcaacccctgggccaaggaccagtaccagtcctgttagtaaccggccacacagcag

SEQ ID NO: 97219 - DNA, 1943 bp, Homo sapiens
tttatagtggcttttgtaatttcttccttttcaaaattataaacatttattgtaataaagaatttgatggattatagtgaatttactttttttccagaaaatttccctcttgaggacagaattttttgttaagggtcaaaaatgacagtttgagtccataaaagattgaaatctttgaagtgtgttttctagaacaggagtaagcaaacttacctatttttacatggctaaaaacatcaaaaaagaataattctttcaggtgatgggtgcaccaaaatctcagaaatcaccgctaaagaacttattcatgtaaccaatcactacctgttcccccaaaacctgttgaaataaaaaataaataattctttgtgacatgtgaaatttgaatttcattttctatttataaataaagtcttattggaacacagctgcttttgctttataatggcagagctgaggagttttgacagaaactgtatatggcattctcattacttcaagctactgtttggtgtaccacaaatttcagtgctgccattattgcttgacggtgttttgagtgccacatctgtgaccagattgcaattttttattttatttgtttatttattaccactgtgtatccatcatgtcaaaaaaaggaaagaagagaaaaatatagacgtgcttttaaggcacattggagtgtgggttattttgttattgaatttaatagcaaaacattgctcttattatgaagtgacactagagctgcaatagaggaatacagtatacatgaaagtaactagactaatcatatactacactatgtccaactctgaggaaagcaatagaaaaattacaaaacttaaaaatggaatatctcatcacagcataatttcttcataaaaatgaaaatgaggctgccaccaaaataagtttccaagtggcttatttgtttgccaagcaaggaaagccatttactgatgttgagttaattaaattgtattttattgaagcagtcaaaaaaattatgtccagagaaaataaacttgttttaggctattagctttttggcaagcacagttgatttaagagttgaggacatttgaagcaacatcactagtcaattaaaaaacaaggcaaatgatttggagtggtttttctcggctcttgatgagccggcagatgttattgatacaattcagttgttctttattcaaggagtcaattccaagtttgaagtggcagaaaagttggcctctgaatagcctgtgcagaacaactacaggcaagaatattttcaaagctgagaaaacactaagtacaatctgaagtggaatctgtaaggatgtgctgcaagcggtggtgatagaatacatacggagcagcaaaaggcttagttggagtaatttacaaagcttgtaaaactgaggagttcatagtttatggttattcattgttattcattggcagatactttgcagaaaatatttccatctatccatgtgtgttactgaatcagtactgtcaactgtgaagtcagtttgctcttttggacttaactagcatcagctgcattaatttttgttagaaacaggacaaatatcctgactggcttagaagtggtaaagtatattttcacaattgtttgagctaaaggctgagattgaaatttttttaataaagagaactgccctcaactgctattaaatactaattagctttggaaattagctttttgtgaagattgagtaatgtttttaaaatgaatttaacctaagatttcaaggcaaaatagtgtctatatttgaaagaatgtggtaaagtcatttcagtggcaactgatattcaaatcccaaataatttcaggctgctttatatatttctcaagctgtcaaagaagttagattgtcattcccacataaatatgagtggacgtattttctagtctcaaactatag

SEQ ID NO: 97220 - DNA, 2546 bp, Homo sapiens
gctggtctcgaactcctgggcacaaaggacctgcctgccttggccttcaaagtgctgggattacagatgtgagacaccactcctggccccttgttgattttcattcattgttttcagttgtgctttaataggtagatcgtattcaacttggacttcttacaaaaagtacttgcagcctcctttttggtcagggatctacttacctgctgtaaagggactttaagaaagaaaaactgttctgtggcccttctttcaccctgtattattgggatagaagaataggccaagaaggagtactgtggagcagtaaatcatcactgtcctttttaaggttcataacaattggttacctctcaggagtgggatttggagacaaggaggtattgggactttttacttttatatttttgtatttatttcaagaagcacctattacttagtaatgagggaaagggatgaaaccaaaaaagagtcttgagtacttaggttagagacaagataccagtctactttctggtagtgaggagagggtaattaccagctcaagttttaccagattcctgttttggagttttcttagagaacattccttcttactgcaggatcaagtacatgctctgtttttctctgtgtctctgacacggacacgtgcacacacacatacacacacacacacacatactcttcctctggacccttcttttgggacagagatgcttagttgagtggatataaactataacaaaaggcagtataacttaacctttcagtgtctcaatttctttatttttaaaatcaggactatatgttaatacagaaatgcagtctagtataaaatacatctatatgtgagtatgtgtatatacatttgtatgtatgtgtatatatatatacatgtacatgtatatacacaatgtgagagattgattttaaaaatagcagattgtcacaagtttgaggctagaggaagaggaacttggttagttgtgttactactatattagcataaagaaattaggcacggaagtatatgtaatcctattatacttagcaggaacttctaaccccaggaagaaagctagaagggggcttattacattatatatgctaatatttattgagcacttatattttagcatacatatatgttcacatttattgaatgctttctaagtgacagatttagttcaaaactattcatagaaacttattttactttaacaactctataaggtatgtacttttattatctccattttctatataaggaagctaaaatagagagagattaaagaacttgaccaaactttacacaacttatcgacctacgtatgtttttgatgaaagaaaaattagttgtcagatttttttattagtaagaataaaattgaaatttaaattattttcattttttaaggtcatggcagtagagagaagcagaaaccctatgctttagtaactctgatgcaagccatatctccttatatgaattatttggtctcagagtatttgaattctttgctgtaagggttgcaacaaaagtgtttaaaaagaccaattatattaaaaagattaggtgaagcattactctgacttggaatgattctagattagacctgtcttctctaccacagggttatataattgaacatgtatacctagattcagggacctgactttctatacttactgttgtcagacatttgggtgaaatcttcggaaagtgtgtgtctgtgtttatgtgtgtatgtgcagtacatatatatctatatatgtagatagatggatagataatatgactcagaaacagataaatagtttagtgaaactatttagtgaataaagtacaaaacagaccgatgtttatggaatgtgataaccagagaggtattttaaattagtgggaaaagtttgaattggtgagaaattgggacattttcctttggaaaaaaattagatatatatctatatataattctaaatggattaatgttctaaatgttaatatttgaaatcattagaaaaaaatgtaggaaatgggtttattgaattcatgtgagggaagggttagaaaaagaaattgggctggttttgtgatagctcatttaactaacatgttcatttaactgccaaaaaattagaatatttggttttaaagtagggaatcaaactgtggaataaataatgcaacatagtatagccaacaaaagttatagctaaatatggtacaaaatattgtcaatgaaaataggtatgttctatttattaaccatgttaaaatggatgtttcaagacaagattcagaagtaattccagtgttatacaatatagacttcttgaattttttctttcttttttttttttttttgagacgggagtctcactctgttggccaggctggagtgcagtgacatgatctcagctcactgcaacctccgcctcccgggttcaagtgattctcgtgcctcagcctcctgagtcgctgggatcacaggtgtgcaccaccacgcctggctaatttttgtattttttagtagaattggggt

SEQ ID NO: 97221 - DNA, 1013 bp, Homo sapiens
cctggccatctttttcttttttaagagataggatcttgttacattgcccaggctggccccaaactcctgagctcaaatgatcctcccacctcagcctccagacactatgcctagctcaattaatatttttaattggcaaatcataattgtatacatttatggggtacagtgtcatgttttgatatatatatatatatatatatatacacacacacacacacaaacacacacataatgtggaatgattaaacaaagctaattaacatatcggtcacctcctttaatttttccagcaagacatttgaaatttattcttttagctattttgaaatacatgtcatatatcattattaactatagtcaccctgctgtgcgatggatctcaaaaacttattttttctgtctaactcaaactttgtgtcctttgaccaacatttcctcatttctcccagcccctggtaaccactattctttctgcttttgtgtgttcaaattttttagattccacatgtaagtgagattatgtggtatttgtctttctgtgcctggcttattttactttgtcctctaagttcatccatgttgtttcaaatgacaggatttccttcttttttaaggctgaataggtccggctcagtggcacatgcctgtaatcctagcactttgggaggcttaggtggaaggattgcttgagctccacctcaagcaccccttgaggtgtgagctgtgatggcactactgctcgccagcttgggcgacagagcaagaccctgtctcaaaaaaaaaaaaaaaaaaaaaaaggccaaatagtattacattgtatatataccacatttttttttttttcctattcatctgttgatggacatttaggttgattctgtatcttggctattgtgaatagtgctgcagtgaacatgggagtgcagatatctccttaacataatgatttcagtttctttggatatatagaaatgggattgctggatgtgagcatcttttcatttcttggc

SEQ ID NO: 97222 - DNA, 1025 bp, Homo sapiens
aaacattttagccattttttttcaaaattgtaattgtggttaaaaaacacacgacataaaatgtaccatcttagccttttcttttcctttcctgtcctgtcttgtcctgtccttttttgagacagcgtctcactctgtcacccaggctggagtgcagtggtgcaacctccgcctcccaggttcacttgcctcagcctctggaggctgccaccctgcctggctacctcttagccatttctaagtcggtagtgttaagtgtattcctgttgttgtgcagctaatctccagaatgttttcgttttgtcaaactgtaactttacacccattaaacaactttctaattcccctctgcccctaggccccagcaaccactattctactttctgtctctgtaagtttcactactctagatacctcacagaactggaatcatatagtatttgtcattttgtgtctgacttatttccctcaacataacgtcttcaaggttcacccatattgtgtcatgtttcagtgtttccttcctttttaaggctgaataatattccatagtacgtgtgtaccacattttgtttatccattcatcttttgattggacatgggttgcttccacttcttgggtatcgtgagtagtgctgctatgaacatgggtgtgcagcaatgtctttgagatcctgctttctattttctatctagctgtaccattttacattcctactgacagtacacaaaggttcccatttttccacaatccttgacaacactttttttcagtgtttttgatggtagccattctaataggtgtgaggtgatatcttattgtatttttttatttacattttgctaataattagtggtgttgagcatctttttctttttttcttgtcgcccacgttggagtgcagtggtgcgacctcagctcactgcagcctctgcctcccgggttcaagcgattctcctgccccaacctctggagtagctgggattacaggtgcccaccaccactcccggctaattttttacat

SEQ ID NO: 97223 - DNA, 1477 bp, Homo sapiens
catctgtgagctacagttcttcaacaggctggagaaacagaccatctaagtcaagcatgctgtggctataaggaacatttattcagatagtatttggtccctattctttgccacataaacagagaggaaaacatttaaattctaaagtatcattatatccacacataatagtgatagttaaaacataagccaggtgcagtggagcatgcctgtagtcccagctacttgggaggctgaggcaggaggatcatttgagcccagaagttgaaaggctgtactgtgctatgatcacaactgtgaattactttttgttttttacatttcaaagatttggcttactgggcaaagggggcgagtatttttatgtcgtttaatctctgttgtcactgttgttttcttagtggaataactgggattttagtctattgttctctgagatgaatcagttgtcagagctatagagttttatagaaaacttattggcatagtttgttcattcagcaagtatttttggacctgaagcctagtaatgaggaaacaaagataaatatgatgaagttagtccttgctttctaggagcttggtcacagtctagtgaggaaggataatttctaacatttaatttatacttttgaagaacaccttgtgggttagataaaacaacccgaattgccagttttcagcttctgagataagctatatcaaggtgttatattcattggtcatttggttgctagaaattaacttaagcaaaacagatttattagtagtagaaggttatagagctgggtatcccttagaccccagttaggccttaaggaggcctactgaggtagaaaccggaaattcaggaatcacagtagcattgttctcttgtggatcattgagcaactgtttccagtgctgtgaaataaagttttctaaaaaggagaagtgggaaggaaggaaattgtatttctgccacagaggttgtgaacaaagtactccctacagaagggagttacacagttttcctccagtttaactgctgttaaaatggtatcttgtttcagttgatatgtcttgattggtagtgagattgaacttaatatttttatcaagagcccaaagccaatttttcttgacgtctgtatcttagacatgagaatatatggtagtgatgttaattcttgttacatttgatgaaactatttccaccgtcatattttttcttttatatatttgaatattttccattgtataaagttttatgcttttattgaattcaataccagttgttctttatattttatttattttcttatcagatgggtcatatgctgatgtcataacaaggtttgagagaggcacctcttgtgtgtgagcacccagtcatcacacttaagaactacaaaagaatcacattcttacagagtctcactctgttgtcccggctggagtatagtggcgcaatcatagctcactgcagcctggaact

SEQ ID NO: 97224 - DNA, 1041 bp, Homo sapiens
atacagttgttattcccatcttcagatgagaaaactgaagcacagagaagtaaagtgacttaccagtgtgacctagagtagtacatgatggggatttgaaccaagttggtgtattttaatcactaggatatattgcctaaaatatgaaaatttggtttttagtattttagtagtttttcctaagcagattttaacttactaatcagacttccaggcttattcattttacttctaaacttttgttaacttttttttgcatgagtttttatacacgtgtgaagataagatttaaaaaaatacaaaaaccccaaccaaacaacccaatttagaaagctgtaccagctgtgcaaatcctacacttcatttttttaagataagttttgtccattcatggaaaatgttagagatacatcaatgaaaaattttatttccatgttagataatctaatttgtaattccatttatcttgatattttggcctcataaacccactggagccataacaagtaaatactagaatttgaacaaaaaacttcccactgtcagtatcggagcagtctatttattgtggaggctttataacctgatggacaaggctttaaactaaattataatgctttagtggcagatctttgactctgttaatagtattcagtatgggcaaggggaagaggatgtgcagtctagctaatctgtaaaaaagtattttaaaaaaatacttagttttaattcttttattgctaacaacaacaacaacaacaacaataacaaaacctttggtagcatgtattatatagcaaacctaattgagaggcaggatttgaatggattgataggaatttatcagtcatggagtggaaagatatgcagagcagagcagatccaggtggtaggttgtcaaacttgaattaaatttttccaatgtggcttcatcattaggtctgaaatttaatgaatttcaagaaggcaatttaacctgtatttaaataaaagtgattatattctacatagattcattagccaaatataagtattttgggg

SEQ ID NO: 97225 - DNA, 1018 bp, Homo sapiens
tcattcctgtgacattagtcgtaatataatttattaggggaaagtttgtagcttttatttattggtgaaagaaatgtttcttgaagaggcagtataacctttgcaaggttatattttgtttttttaagagaatatcatcaggcgaggtgctatgtctcaggcctgtaatcccagctttgggagaccaaggcaagaggattgcttgagtccaggagtttgagactagcctgatcctgtctcaaaaaaaaaaaaaagttagctgggtatggtggcatatgtcggtagtcctagctactggggaggctgaggtgggaggatcccaccttgatcccagcagttcaagactgcagttgatgcagtgagctatgatcatgccactgcactccagcctgggcaacacagtgacaccctgtctcaaaaaagaaaaaagaaaacatcttcattaataccaaagggtatttaagtttatgagcatggtaagtagtgtgataggtagtcttgttttttgtaaaacacttattaatatattaataatataaattgcgtaaataacagtgtgatacccggaagtgaagtaagtaggtgattgttcctcagaaaatattgctggagtttattttatctgggacccctgtgtctgcccctagttaagtgcctgtgttgtttagtgtctcacaggattgtctgtttccatagcatctgcatcatgctacttttattatagttttatttatattgtctactagacagaaaggtcttgaattcagagactatattttgttcattttcgtattttcagtgcacaggaggacatcctctacagagttggcactcaactaaaagttttgtcaaaggactgtttcacatacatcatctctctatatatcatggtatgcacatatttcagacccaggaagatgcttattttagtaattcttaagtgaactatattttagagggtgatatggataacagtaacagtaatagctaaagtttattgtgttcgcacatgttaatt

SEQ ID NO: 97226 - DNA, 2615 bp, Homo sapiens
ctgagaatcagatgattgattatatagaacacttgcattttctttcctgctccaacctgccaattataaataatttgctttacttttttgtaaatagtgaaagcttggtcaaaaagattgtatgggccaggagtggtggctcaagcctgtaatcccagcactttgggaggcctaggcaggtggattgcttgagctcaggagttcaagaccagcctggacaacatggtgaaaccctgtctctacaaaaaatagaaaaattagctgggcatggttcaggaggctgagttgggaggattgcttgagcctgggaggtggaggctgcggtaagcctagatagcgtcattgcattccagcctgggtgacagagtgagatactttctcaaaaaaaagatggcatgatagttcgattaaactgtaaacttcctctgtttccatatttaaagactgcattccttagaagaattaaagtaattgacttcagatgatttagtaatgagatgttaaaaacgaaggtgtaccagatggccctgtaggcctttaattttttgaaatcactagctggaggaggacagggttatgtgtttaaggattctagctcatgaatagatatgtgacagatgtctcctttacaatggcacatttacatattagaggagagagataaaagagagaaaccagaacggaggtttgaaaatcttatgagaaatagactatgctttagccttttggcctcagggcctctttactctcttaacaattattgaggaccccaagagatttaggtttatgtagattatatctactaatatttgctcttttagaaattaaatgacaatttcaaatatatttattaatttaaactgtgttgtaaatagaattttttatgaagaataaatatgtcctaaaaccaaagaaactagaccagtggcattgttttatatttttgcaaatcaccttgatttctggcttacttggagaagacagctggattttttgtctgccttcagtctgttatgatgttttggttgagatatgtgaagagaatccagcttcatgtagatatatggttggaaaaggaaagagtgagtattcttctttggtattacatcaaaattcaacaagtggcagttttttgttttttgttttttaagttactgacaatgtgaaagcatattgtattccaaaaatgtctctaggacctacaggaagtctatggaagatacatttaaagaagagactaacggttgggagacgtgatagctgtctccaggtatttaagaaacttggatttcagtaaataggatttaaaaacctgttaattttaataaataggagggagaatagatccattctcctgctttagaaggcagaccaacgggtgaaaattaggaagacattgaggtcagtctaattttttaccagaatgtaagaactgtatgacaactagacttggaacagtggaacagtggagcaacaatggaactcgcaacagctaacaacaatggaaagaagtagttagttttgagaatttaaagtggactacagggacatattttttggggaggtggagataaattctgtagattcttacgatgagtgctattggattagtgacttaaggcttcatccaatttaaaaatgtaaacattctgtgattttttaaaaatccctaaatatagttaaactatacttatatatattcattaacgtttttgaatgttcttgcaagtcagtagtatgaaactactgttgttgttgactttattactattttgcatttttattgtgcttttcctctgaggatttttctgtcttttcttgtgtcagcaagatcagtcttcatgaaatcttgctaaattccctgtgaaatataataagcttaagacattttagagaaccaaatgctgtttatgatacagtttagtagagttgtaatatatttcagcacagaattttagaatactatgggggctgattttcaattttgtaagagaaattatgagcatagtttatatagtcttttatttgtaattgtttacgtgatttcagaagtaatatgcttaagttattctaatgtttttaaagctagagagtctgaaaagagggaagaagaaagaaaagtgtttaaattgatctcttttgaatttaaaatgcatattaagtataactagaacataaaatgaagaatttaaattctcatcttattcctagaattatacctataatatgtatcattacttataacaattcatattttaattttgcatggcacataatctcttctgtgagttggatttttaggtggtgggaatttaagcataaattctcataactttcttggggtcaatttaatattaataagtgtagtaagtaataatacccagcttgagacctcatgtacttgttgcatttggatttaaagctcatttcctatagaagagctgtagaaatcagtcatgtagtttcataaactccttcatgcttgttaataattttcaagaatcttaaaataaattacaggaatattgttatgaagtagtagaagcagtatggtataggggagaaagtgattgtagttgggatctgaggatagtctttactttgctattaactag

SEQ ID NO: 97227 - DNA, 3564 bp, Homo sapiens
ggagcctcgcgatagtgtttgcacaggcggcgcgtgacgccgccgccgcctgtaactgatgcagaggttaccccaccgcctcagccgccacccacagcccgccgccgccgcctcccgggcgacgccgggggccgacgcactgcagaggtgccggcaggttccgcccgcggaagtgtcctcggccggcgcagcccgcgctccgcccgcgctccgaccccggcccggctggcaccccctcgacgcctccgccgccgcgctcctttcctcctcctctcctctggcgcgcccgctcgctccctcgcttctccccctttccctcctccctgtcccctctccttccctcacctctttcctccccacctcccctcttctcggtttcctcccccatccccttgactctcccctcccagccctcgctctctcgctcgccctcagcgcggcccccgccatgacggaggcgggtgccggtgccgttgccgccgctgccgtcgcagggggggagtcgggttcccagaaagtagcttgatgagtgtccaaagtagcagtggaagtttggaggggccgccatcttggtcccagctctccacgtctccaaccccgggctcggcggcggcggccaggtccctgctgaatcacacgccgccatccgggaggcccagggaaggtaagcaccgccgcgcccgcgcccgctcgcgggcctcctctcccgcgccgcggacccccgcgccccccccccgccccccccgccccggggcttctccgccagaccctggggtgggggatggtggcgaggtggacgcgaggccgcccggctccccggctctggggaggtagtgccctggctgtggatggtggttcgcgggtggcggaggagacggacgagggggtgcgcgctggtggggacggggcgaggcgcatagactcgcctggggttcctgggagccagtcctgcgagggtgggaagcctccccccagacgcgagcccctttctgctccatttgccagtacactcagtactcttaacctcctggcctccggtctctggtgggttttccctcccgctggagccttcgtcctcgagccccctccccttctcccgcgcactcctcccatagaggcggtccccactttgcgagctttgctgcccgggacctggaggatgcccctcgcttgctgggtttctcctttggggagagacgctgaaattatctgggcagactttgatcccctgtgtggccccctagagcaatttaaacgacagactgactcgtgggcaggcttttaaaaccgcccctccagatggttgcaactttctctccttcgccgttgcttcctgcgtgtttgtgcgttatattctctgctgcaagtaggctactgttcttctgtgacagggtcgtgggttttgtgggaaatatctgcgtaaaggttattgcaaacacgcaccaaatcggttacaattgttttctaagttttctggcttcttgcaagcaagtgggctgccaccagatgtagcagttacacagcttgtaaggcaccggcgtgcttttgactaaaatttcaacttgctgtatctaagtatacaacataaaatgaaatttgggagaaaacacatttatggggaatgaataaatgtgcatggaatgtcttttaacgctctttagtctggaaaaagcttagcggtattcatccgcaattggtagacgggctgttcactcctagttgtcgcacacgaggagataggcacattttcaaatgtctggaagttcaaccgtctagtgaatgttttaaagaaatcaagagcttcgatttatgtaggaatcggtgcgagtactttattttgaaaatatctgtcgatatttgctagtcagagccttgacaagtgttaatcaagtgttttgtgccctgaatccagtggttcaggcatagcattctttgtcattttgttcctgtgagcatgtgtgaaagtgacaataggcttaaagattggcatgaatatgctctagaaaattcacggaaagctttgatttatgggatccattaaacatgcggaatacattgacagacgtttccccctttcatcttatcccaacgctgagctttcattgttagaatatagaagtttatttattaaatgactagaaatttagtatatctggtgattcttttgcacttgaaaatttttaaatgaacggtttaaaatgtatttcatagagaagttgatgcttgcttttagcatgcttttacttttgtttgtagtttcattaagatgtttaatgttagtgttatgagtttaaaaagaccattttattgtttcttgtttaaggctatatcatcattcattcattcattcattcattcgtttctcgaatatttattgagccattactgtgagccaggccgtgaactggatactgaggacatagtgttgaattatctcttgatatctgttatcagtattgggaatttgggagacaaaacatctagattgtgagtttctgaggttacttcaacttaaaaacattctgcacttttcctgatgtttgaaaatttggaggggttggaatcatttagcttgaacttccaaataaccataattttttccggcagtttagattacagtgggtttttatgtaacctaaagtagtgagtttctgttaattcatgaaatcataggacaggcttttgtgaaagttacacttcacaccgagtacctgtatagctacagggggatatttctttttgaccaaccagcatgcaagttgaaactattaatcctctctagggttatattcattttgaagcttggcgatgtgttctcagatttcactaacgctaacaggaatatgaagccctgagtgtcaaaatggagatgatttctattgagcgaaatctcagtttttattttaagtgtttagcaccttttccaggtatacatgttagtacattatataaattgatgaagttttagaaagctttttaactgctagttactgctagtaagaaccgttaatattaatggaacttgaatgtattgtatgtatcacggtgaaaactaactttgtttcttgaaaaattgagtcagtttaacatatagtaatagaataattgaaacttaaaagagatacacatgtatgtgaacttacataaatattctatgtgatgaactccttttaggcagacttaactttgaaaatgggttatttttaaaaatatgccataagcatctgtaaaagttacttattttgaagttttgacatttgaaaccacaaacctaagattatgatctgattatttttgatgctgtatgttgtagttttgtttctttttaccttattaccattatcatattcacatagttttatcacaaataaaatacagctctataagatttgggaatctattagaatttaggaaattatgtgataaatatagtatagatttctttccctcgggtcccaaagcttttcgcttgtcagtcttgtggttctgttagaggagttcagcgatgtagctctagattttctgttgaatcttttaaacctataatctccatcccattttgtc

SEQ ID NO: 97228 - DNA, 1061 bp, Homo sapiens
ttctgcaaagccagtttagatgaaaagcaaaatctggttgatcgccgcttacaagttaataggaaaaaacaagtgaaaatgcactgagtgtggattcaaggcaaattccagaaaccattgcaccagactcagaatagctccaatatggtatctacactcctttcacaagactgaactttgtaacatgttaaggtacaaagccagaggactgtgctattcaaggactactgtaagtctattgtttctcaaaagacaatgagaaaaaaagaagagaatttgtatttcctgccgttttgtcataggtgagctcctttgtgcattttaagcacatgtaagtggttcagcacagtatgcctttttctgtgctttgaaaacttgatatgctcaagcttgtttgaatttattacatctaaccattttgcttgttccttgatttttataagcattcaattaagttagtattatgtcaagtaattttgagaaaatgtaacttgacattttttgcaagtaaaaaaaattgtttatttgtttaggcttagtaaaccagttcccaaacacagtcagactcttcccattgtcatctgattgcagagagaaagcacaccttatttccagggaaagctacaacaagcccaaggtcaaagtgtattattttttgtcttgttgttgtctattttctcccaatttttttttgaaattcagaggctcatatctgaaatagaattttagttcctctttcctttcctaaaattggggaagtacagcccatgctgacattattttcaggctattcttagatatacaagttgttaggccaggtgcaatggctcgcacctgtaatcccagcactttggggggctgaggcaggcagatcggttgagctcaggagttcaagaccagcctggacaacatggcaaaaccctgtctctcccaagaatacaaaaattagccaggcatggtggcacacacctgtggtcccagctactcaggagactgaggtgggaggatcgcttgagcctcggaggcggaggttgcagtgagctgagattgtaccactgcgc

SEQ ID NO: 97229 - DNA, 1035 bp, Homo sapiens
ttaaaaaaaaaaaaatcccggaagtctactaagtcctctttttgctttctgttcctttatcatgacagtcacactcgtcctacagagcaacccagtgttttgcctttgttcatgatgtatgtgatgatggcttaccttacccttttccagatgggatcctggatgtcattctccttgtctttgtgctctcttctattcatcctgacaggtaaatgaagacgaaagggcaaagtggatgtgtaaagctcctttatcagtagtggttttcagaactatcaaagcaaaaatgacaatttttgaatttattatttagtgagcaacattatgtataatacacagccttttaaaggcagtttttcctttcttcgtacttttagacagaaactggtcagactacttcattaatgagctttctgtcactgtcagaatgaagtgagcatattctggcaagacacatacctattaaaagtgacagtgcttcaaggaaattacaaattcagaacaacctaatagactcccaagagggaaattgtacttggtgatcagaaacaaacatctttagtgtagtgtcttcctgaatgttcatgaagaggtgggcttgggatctgtttggcttcacacaggcctgttgatgggctttaaaaattttgttctaaagaagcacactagggaatcaggagttattaagatttgccagattatccttggacctttatgatctaaggttagcctgatgccatcatttaaatatttatgacttagtttcatacagtgttttaaaactataaacatagcttttctccagagagaaaacataaagagatattaccagcaattagaatgattacctttcttaaatcttgccatcttctatgtattaaagggtacatatggtaagtaccaggtctgtgctttcataaggtttcttaaaattgggttctcacagttccctggtggaagatacagacttggcgtcaaccactttttgtttgatgagtgtgacccttttccatagaaactgagttaccatgtgct

SEQ ID NO: 97230 - DNA, 1245 bp, Homo sapiens
atgtatatactattctgtgtattttctcttaatattattttcctttattattttattttttatatttatttatttatttatttattgagatggagtttcactcctgttgcccaggctggagtgcaatggcacgatcgcagctcaccgcaacctccgcctcccgggttcaagcaattctcctgcctcagcctcctgagtagctgggattacaggcatgtaccaccacacccggctaattttgtagttttagtagagatggggtttctccatgttggtcaggccggtctcgagctcctgacctcaggtgatctgccctccctggcctcccaaagtgccggtattgtaggcatgagccatcatgccccgcttattatcttttatttttaaattgctacataaggttaccctgtttgaactgcatggtttgcttgctcattcccatgttgttgggcatttgagttttccccactttttcctaatataaatagaactgctatacacacattttttttttaagtagagacagggtcttgctttgttgtccaggctcatcttgaattcctagcctcaagtggtcctcctgcctgggccttccaatgttgggattacaggcatgagccacctcgcctggccgctatgcacatcttttattaggttactcccctgtacttcccccaccccacttaattcctagaggaatattcccacaaattaatcaagatatagtagtattacagtacattctagttactggtaattgggctcaaacacacttcacaagtagcttgatattgtaaactcaaatactagagatttcactaaatataagtcttcttagatggctgctttttgttaggcagaaaatcttttacctgcatggaatgagttacaaagagagttttttttttttaaggtaaaggaagaagagaaagcttgagaagaccctggagaaatttgactcttttataatttctcctgagtctgattttcagagtgtcattttgttttcttacatagtatatcaggcacactccaatttttaaaagtggagatacaccaaaattattgaaaaagaaggaaaatagagatagaaatatttaaaagacaaatatatagtttcagatcaaccataaataggtttctttccattagtgcagaggtgagtatgttttggacttaatatcacataattcttttgttacaaagatccactttcatttctcagaccttaaatacagatgggag

SEQ ID NO: 97231 - DNA, 1049 bp, Homo sapiens
aaactgtcaaggtcttcataaacaaggaaaatctgagatactgtcagaataaataggagcctaagaagatatgatgacatggccgggtgcggtggctcacacctgtaatcccagcactttgggagattgacacgggtggatcatgaggtcaggagatcgagaccatcctggctaacacagtgacaccccatctctactaaaaatacaaaaaattagccgggcatggtggcgggcacctgtagtcccagctactcgggaggctaaggcaggagaaaggcgtgaacccaggaggcggagcttgcagtgagccgagattgcgccactgcgctccagcctggatgacagagtgagactccatctcaaaaaaaaaagacatgatgacatgatctcatgtaataaggggtcccggaacagaaaaaggacattagataaaaattaaggaaattgaataaagtatggacttaagtttataataatgtattactattgagttgttaattataataaatataccataataatgtaagatttaatagtgggggaaactatatcacatatatggaaactctctgtactatctgtaacatttttataaatctgaaattaaaagtttactttaaaaatgcagcaggaatatggtagacaccactatatagggatagcacaacttagtaattaagaagatgaactcacgtaccagcctgcctgggttcagatctcagcctcactgcttagtatctgtgtaaccctggctaccttaagtaactagaactacttaacttctctgtgcttcaatttctttatctgttagtgaagattcttgggaggactaaatgaatttgtgtgtgtgtgcatgtgtatgacttggagtagtgcctagcacaaagcaaaccttatataattgtttgaatctatttattattactacttttgttctttagttttggtgattatggctaaatttcactgcatctctcttcttcagcatactgatttttagcttggcactccaacagaacagtatccataatactttgttttcatgggga

SEQ ID NO: 97232 - DNA, 1094 bp, Homo sapiens
acctggaggcggcagcaccgcgcccccagggctctgcccagctagccactcgcagcacagagaagcgcgcccgcaagacagcgcagcctccgcgggccggaggaggcggggccgcggcaggcagaggcagggccgggcaagccctcgctccccgccgcctgacgggaattgtagttcctgggagaagccgggctgcctcacgaggcactaggaactacatttcccggtgagagagcggctccggccggccgcgcggtaccggagcgtcgcactgtcagcggccagagagcctggggcagatcgaaaagggagtgcttcttcccttctctccgcgctctggcggtgcaagcggctctgctttccctcgccccgccgtcgggtgctccctgcccgcctccccgtgtcagctttccctgggccccgccgggaaagtctgggcctcgaaattcgaaggcagcggcggctgcccagcacgggagtgtggggcgcgccactcggcggcccagcctacccagggcccggcccgcgcctccatgggcccgacccggaagcccaacgtgtgcagccggctgagtcgccgggcgctgggctgcttctcgcgcgacgcaggcgtggtgcagaggaccaacctgggcatcctgcgggcgctggtgtgccaggtgaccgccagccggccggggcgggacggagggccgcgggcgcgcggcggccgagcctcctgcggggatgcggttttaacgcgctggggcctccctttatagggtcacatgtgatggggaggaggatacaagcccggaatctgggataggtggtaatagggccaccagctgcttttagttttacgcttcttatgtcttacctggaaacaattattctaaaagttggtcacctcattaagccaaaacatgagggcagagtggaggaaggatgcaaaaagttttaaaataatataggtgacattatgttgctttgaaaatttaaaatctaacttaaagcctaagagttctttcctgaacggaaattctttatgtcttttaggaaagtactaaatttaagaatgtctggacaactcattccaggtcacctatagccta

SEQ ID NO: 97233 - DNA, 1166 bp, Homo sapiens
atggaaagcatttattgagcacttaaaaaatagatatagactgcttttagaggttttctgtttctttatacaccgggacacctagaaaaagcaaatacttattttgtgtctccccttggcagagtctgttgtagttctttctcatttttaatttgaactacttcagctgtttctcactagtgtccttgattgcaaaacaggcaggcactgatctgagttctttacctgtatttactaatttgatcttcagcacactcctttcagtagatacttttatcatcccattttacaggtgaggattctgagccccagagaagctaagtaacttatccagcatcatagtgttggtaaccttggctcaaactcaggcagtttagctctagagtccctgctcttatgcactgtagtaagctgccccttcttgaaatttctgtaatatggactggcaggtgaagtttatatagaactctagcattaaaaaaaaaaaaaagttaagtagttcctttaattttaccttgtttagataactacatcaagcatttccttgtcaaccctccagtgtattcccatacatgctgggtctgtgaactctgcttttcattcctccctcatctctcttgtctactttttctgtatgcccctgaagccaagcaaactatttgttggctacttctacttactttttatcatggttatctgaatgttttcctaccctttactaatcctgcccagtcacattaataacttaactgcatgccttttattggaatctccttacccttttcctgatttatttagtatgacatctaagaaagagagatgctatctctctcttagtaatacttctctctttatactcttactaccttgcttttactttggtaaaggaaaattcagaaaagtgggatagtataaaaaagcaaaacattttgctactttgagaattctaaagtgtcttgtctgatgtacctttttaataatttaaattgctaaagagcaagaatttttgttttgttttgttttgttttgagacggagtctcgctttgttgccaggctagagtgtcgtggtgagctctcagctcactgcatcctctgcctcccaggttcaagcaattctcctgactcagcctcctgagtagctgggactacaggcgtgcaccaccag

SEQ ID NO: 97234 - DNA, 1047 bp, Homo sapiens
tgctggctctcctactcttttaatacttctctctgatatccttgtgaacatccttgctttctcgaaacaacagattgtccacacccatcataaaattttcttaccacaagacatggaatcagctactctgagaatttttaggcctttttcattgagaatattagagatcaaaattggggctcttgggttcacagggcacattagagttgtgggcagagtaatagtgctacttttgggtcattttttgcatttactgggaaaggtatttctttttaagtacatctgtttgtactgtttttttttttttttctattttgaattcctatgtcctctatattgaatttcatattctttatatattaaatttcacattctctataacatacctagttgatttcaaccccaaattccaactctaattgtatgtttttcttttaataatttttctcttcttcatccaccatatcatcacatacaatgtgtgtatttctcttataatttaccaactcatgcctttttccctttttctattggggtgtttatattttttattgcttaaaagacctttatatattaaagatactacccttttcttaaaagattaaaaaaataagcacttgacatatatttgatatgtttatgcctgtctcttctttttcctcaagattttttgtgaaccactttttatgaaagttgaccctttacacaggtttgaactgcacaagtccacttatacacagatttttttcaataaatacaggaaaattttttggagatttgccacaattaaaaaaaaaatcacagatgaaccgcatagcctagaaatatggaaaaaattaagaaaaaggtacatgatgagtgcatcaaacatatgtagatactagtttatgtgttaattgactatttatgttattggtaaggcttctggtcaacagtaggctattagtagttaagttttggggaagtcaaaagtttggctgggcacagtggctcacctgtaatccaagcactttgggaggccgaggcaggcggatcgcttgtggccag

SEQ ID NO: 97235 - DNA, 1037 bp, Homo sapiens
aaactaaaaattaaattctcaagttagagggtaaataaggcagtcataggttagccacctgcccaaacagaccatgtggtgtttcctaaaggctgcttgaaatgaattcaggtcttctaaaattgctataccttctatttatgcatctaagaatagatctattatgccctacttaaagttgtgataaaagaagatgactaaaaatttctcttggtgctttttagcaccaagagaaatttattttacagtgtcagtcttcaaaagaaactgactggatatatctgaactaccttaaagttaacttgtctgatgataatagtggtagtagtgactatcctgtaataaagctttcattgtgacaggccctttcctaagtggttacattcattgggactaatactcctctgtactggaaatcttaagcaagatagatgtatacctgagtatacctgttagtccaggatgtggaagatctcttcctcacatttgaaggcattattagacctaattaccttgtaggattattatgagagttggaaatagtatctaacccagagtctttacatagtagatgttcaataaatgtccgctacttttattaaatgtactttgtcatttcttaccatcataaacacctttagcccagtttcaatctctactcacctgcgggccacatatacctcctgaaaacagatacctagaaagttgattcagcctaatttaggttccgactggctgtttcttttcttacaataaactccttacctgattgtattttatttccttgaacatagtaatttttcattaatagaaatttatagatgttgcatgcaaagaaaggttgaattcagttaatgaatagtccagagcccccagaacagtgcagctaatgaattccttttcctgtctctacagacatgccaccactgctctttgaggtgtcatccctggagaatgcttttcagattggaggccatccttggcactacatcgtcacacctaataagaagaaacagaaaggagttttccatatttgt

SEQ ID NO: 97236 - DNA, 1015 bp, Homo sapiens
tttgataccagcctgggcaacatagcgagactctatctctatttaaaaaaaaacaaacaacatacaccaaaaaaaattgggcaaatgatttattctatttgtgtatcagttttcagtacttcctttgagtgttattaagattaaatgaaacagtgcctataaagcatcaaacgcagttcctgacacaaagtagatgcttgagatatggtatctcttgggttattaactcctgtttgtgagatatagggtatgttacagaacaaatccatgacatttctgaatttaaatgttcagaatttctcaaatttgcatgtcctcatttggccctcaaatatattccactttaactggttaatattttttcttccgtgtacctttgacctactgatctatcacttgggttagatttgtaaaatcatttgattttcccttaatctttgtctttaatacttttttccaacttcaggcaaaaaatgggatccaagaaatggattgttgttctctagaatctgactggatctatttccatcctgatgcttctggtagaataatacatgttggtccaaatcaagtcaagtgagtaatctcattagcacttgaaagttaagagcagcttttggtagcatttattggcatctttatttttgccagcgaactagtgagccaattaatggaaataattagcttgttgttgggtgcttcctcagagactggcatacagaacacctgaatttattctttgagactcaacattactgtttgtaaatattaaatttgaaaacgttatttgatggatgatatgcaagtaaaagggaattacagactggccctttctcatcaggtcttagttaattctatagggttaataagaaagaagagtatttgtctttgttctgaaaggcagcctagacacaggaaaggaagtagattgtttgaagtaaatcttgttttattttgattggtttcagggcacacacaactcccacaaactgacctctccttcccttaaacactt

SEQ ID NO: 97237 - DNA, 1034 bp, Homo sapiens
aaaaaataaaaaataacaaagggaagtgtctgcctttattttttatgcttcgtagtaatcagtctacctctctggatctatttaatataaggaagatgaaaggatttaatgaaataagattatttttacacattttaaactgtggttccgcttcagtaagccttacttttaatgtttgttaccacccatattagtttgaacttaagaaaacaaggcccacgaagagtgtatggccttttgccaggttttacaatataagcatttaaaaatattgccactaaaaaaactaagtgaataatttaaattattatttgatctcttggtctttgggaactctgaggtctccagcactctctggacacatagctgcttctctctgctgttctttttttttttgcatttgagactttgagcttgtaaaacattgtgcttttgaagcttgttaacaatgtaaacagatttctgtgggtggtgagcaaattattttattttcttttaataggcttgatccatgaggccatttgcactccaaacccccaaatctttaaatataaccaatcctaagaaaaaagaatagtattttcagttgtagtttttaaatattaatctatcatgaaaactcttagtttctatttaggtatagatttaattgctgattgaatttctttttagttaaccctaagtgttgctcatagatatctcatcctacttcagaaataaaaatgcaaatatctgctttaattgttagagctgaaatgttagagacctgttacagcatagcagaggtaaggttcttcagagtaactttcattaagccagtttggaaaatagcttaggcctgaccaagctgatcattacctacttcagtggcacctgttgtcacagttcccacgtttttctgtttaacagaatctccgaatttgaaggagttcatggacatttagtgatcacttattagtattgtagactaatcaagagaactacctcagtgttactataatttttatttgttgagttttacttcagtacttaaa

SEQ ID NO: 97238 - DNA, 1052 bp, Homo sapiens
ctgaaatagaaaataatagttctcagcatcagatctctgaagattttgtcattttggccaacagggagaaccataaagtaagtcaagagtactttaaaatcctttatatatcattgtctttctatataagactataatatgctaatatatttgcctttgagtgtagcagaaaacaacagcacagccctataaaagtctgtacattttgtctacatgggtagccagttttagccccatgtacatttcagatttaaagaaagttgactatcttgagtttgtcttttgctgatttccgcttcttttctgagtttccttttaagtttttattgatgaattatcaacctttgggtctaattaattgtgcaaacttaaatttaattggggtaatatataagtctttaaaaatcacataccatactttaactccagatggtacttttcttttagtgtataaattaagaccacaaagaaaattatggggagaacaatttcaaaaacagatccactttttatttgctgtgctatatactaaggcaaaagtcaggtgaatgaggcagctaatctataatcttttaaataattttttttttgcccattctggcattttagccattaaaaactttaataaagtatttttgagccgggcatggtggctcacacctgtaatctcagcactttggaaggccaaggcagacagattgcttgagttcaggagttcgagatcaccctgggtgacatggtaaaccctgtctctacaaaaagtagaaaattagccaggcatggtggtgtatgcctgtagccccagctactggggaggctgagctgggaggatcacttgagcctgggaggcagaggatgcagtgagccaagattgtgccactacagtgaggcaagatcgcaccacggcactccagcctaggcgacagaatgagaccctgtctcaaaatatgaaacggaggatcagaaatctgattcagaattttctcagttgaggaaagaattgtggatgtgggagaagggttggtaagttttaccaaatttgttaatacagt

SEQ ID NO: 97239 - DNA, 1019 bp, Homo sapiens
gggaaggaaacagcagcaacaatcattgctgattcaagtttaaggttaaaatatggaatttttagcttggatgatttatattaaaatctttccattttttttttcagttttggcttgatgccatgttaagaatgatgtgaattcttcccagttctgccctggtgctagacattgccccatactttcaattagacactagctgtatctaaatagtcccactcagtaaacttacatcttgaaaaacaagaccagtaagaggccagtgaaagtactaaagaaagaaaccaatgttgtgtgagtttcaaagcagctgcaatgctgtgtaaaagtagagtgttcattctccatttccaagagtgtttcagaataggatgtcttaagacttcagtcatgtcagagatttttttttttaggtgattattgagtttctccttctcctttaagtcatcaccttccttttatgaaatgatagtaaggaactcgtctattctgaaaggcatttgagaaatagctgaattcctggctgcttttttgctgggggtagatggtggaatacttctggtctagatataacttaccactaagaaacccccagtatgtcaccactgcctaaatctaactagaccagggtccaaatgccatccaggccaggcaggaaatatacctcatgtgaaagacagtaaggagttgtgggcagtgtaacaaacaggagagctatgccccaactaaaaggagcagctgctactgcttagtttcagccagttgcaacagtatgtgggaatgtaggctgcatggttgttaacaagatagatggtaaaaagatgccagaagatacagaagatagcaaagaatgtggggaatttggataccacacatagcgagagacaatgaagcatgcttcccagctcgccagagtgtcacacagctgctcattctgccacctgccagacattaatgtcttcctgccctacctaaaccccctctttacctgatattttaattcgagactctagctacat

SEQ ID NO: 97240 - DNA, 1057 bp, Homo sapiens
cccacctacttaacaggtactagtgacaggtacaaaacattatgggtaacaattctgagtgtttaatgcaagcccaggtgaagcagggtagcttccatcagcaggtacagacgttacgctgaaaagaggtgcattctgcattgcactcctggatctaagtttctgcattctcagagcatcaatgcagcaagcttattgttcctcaattttttacaatatttatcacaactctgggagaaaacaaaacaaatcctatcctatttactatttgtgctacctagtgaggagataccgctctgtttagacaaattaaggcacttcacattcttccaccaattgaaagttttgtatcttacagttctttttttaaataatatatttattgagcactttctatctactagtcactgtgatacagtataagtaaagtgggttgtctcatttaatattcagaataaccacatgaagtatgaactgccattatctttcccctttgtacaaatgaggaaagtgaggctcacagaagttaattggcccagggtcccacaactagtcagtgcagaggtgggaaacataaccagatttgttcggcatgaacttgtgccaaatttcctccaaagttctcaaaaggcaaggcatgttattttatcccaatttagcataccaacaactataatactagatatgtaggaaagtgcttaataatcgttttttactgatgattcagtgtctaaattttgaacaaatttgggtaagatacaagtcacacataaattgacagaaaatgtagttcttcattcaatggttagcagtcattaaaaggtactttccctttgtttgtggtgataatcagtattagtagttttcatattatttggcttccatattaatcatttttatattttcttctccttcttaccatgtttacttatatcatccatcttttagaatcccagggagctaatttctggtccctgtgttgctatcaaatctgtatcttgcagaaagaataatttatttcaaacaagggacatacaatagaaagataagacctact

SEQ ID NO: 97241 - DNA, 1058 bp, Homo sapiens
gtattctttcgtatgaatatatcacagtttgtttttttatctttctgttgatggacactgggctctttctgcttgttttttactgttatgaataaagctgctatgaacattcttagacaattcttttgtgaacatgtgtctttatttctcttgggtaaatacctggggatggaattttcgggtccttgggtaggtgtatatttagtttaataagaaactgccagaccttttccccaaaggattgtacgattttacatgcttgcagcaatgtaggagacttccacttgctccacacattctccagcatgtgtggttgttagtcttctttatcttagtatttatgctgggtgtgtaatcatttctagttgatactcagattgtttctacttgtggttagcaaccctcttgtcaacttgacctccttccttccccaggaactgctgaaaacatcctttgtgataatagttaagataccccaaaactcagcttgaattattctttctcaaacatgggatacattgctcatcaaagaaccctgattcctttaatggagatcatagttgggaacaacctgggttctaagggcacgtgttccaccgtttcacatgactactggagctggacaaaatggcactggagaagaggtcacaacaatcattataataaaagcagaaaggtgacttttttcttcaaaagttgagttcgtgttatcatgtacatgataacaggtgaaatcaggtgaattttttttctctaatatgagagcatattaaacaagctgtatccttttctcactaactgtagtattctaggccggatatgttgtgatagcaaattagtatattcaaattttagaggtgcacaaaatttcagaagtatttatttatttatactctttttgactctcaattcaagtgtcttagaatttgtgccaaagtttgcaggttcagttcctttcctcattataacctgagtcctatagaagggtgaaggtggaaaggagggggacactcagcctcctatataggcacattaaaaaacaccatgctgtgaacact

SEQ ID NO: 97242 - DNA, 3150 bp, Homo sapiens
gccggatgtggtggcatgcgcctgtagtcccagctactcaggaggctaaggcaggagaatcacttgaacccgggaggcggaggttgcagtgagccaagattgcgccactgcactccagcctgcgcaacagagcaagactccgtctcaaaaaaaaaaaaaaagttctccaaaggtaaaacaatgtttctggctactctataataatcgtataacccagttcttacatactaaaatgtgccatccaaacagtccaatgtcgtaaaatttggttataagaaaaatgtgccagggcatttctttccttgctaattctctgtcttaggctctctaaacttctcatcagtctgtcagccagtcagtgcttgaatgtgtttttaacggcctcttctctgttgacaactgttctaggctatgttaactatttgtctgtattcttagatctctggcatgtggagccttgtggacctggggaaccactcctcccagagttaactaattcctagagataagaatttgcctgccagcacatctttgatatgcagaccaaccaattagggttccacgccccaacctacctgcttttatcagatcactacaggccctgctgaagttatttaaactgtccaatcataaggttgttctgcttgcttactttgctttcccctttcctcttttcaaaagccacaataaaggcttctgccctttctgcctgctcatctggcttcggtgcttccctatgtggccctgcctgccatgccttgcctcctgtttctaggggactgtgaacataaaaaacctccttccttcatggcattttgtgtctgtgtgttgtactatatctgctcaaaacaatttccaggtaaatttttagacaataggctggaagaacagcagcaagtaagacacaccaaatctgtctttgaaaagctgaagatccttgaaggagcttatattttagcctagggtttatacatttgcatgagcgagggctctaaaataaatagaacctagatgtgatcaagcaccatccttttcttccccatctggctattttctgctaacatatgggataaaggtagtagatgagaattggggaatcaaggatttaatcctaattctcttttgcctggataaagaccagactctgcctagagcacactccacctactaatgcctaggctggggagaaacgaccaggatggggtccttttaattttatcttgccacatgattaggaagatgcaagatgattaggaataggtgtggtgactcacacctgtaatcccagcactttgggaggctgaagcaggaggatcccttgagtccaggagttcaagatcagcctgggcaatatagggaaactctgtttctataaaaaattttaaaaattagctgggtgtgctggcacacacctgtactcccagttactctagagactgaggtgggaggattgcttgagcccaggagtttgaggctggagtgagctgtgatcatgccactgcatttcagcctaggtgacagtgggagagcctgtctcaaaagaaaaaaaaaaaggagggggagggagatgattaggaagacttaccaatgtctttcctgagtgcttcctgccttaccagttttccttaaaccaaacttgcactggatggtgacggaagtgtgaaagcaaagtaactcttggggcccccaaatcactcagctaaagggaaaagtcaagctgggaactgcttagggcaaacctgcctctctattctatccagtcatccctctgctcactgagataaatgcatatctgattgcctcctttgaaaaggctaatcagaaactttaaaaaatgcaaatttctataatctggaagcccctccccatttttagttgtcctgcctttccagaccaaaccaatgtacatcttacatatattaattaatgtctcatgtctccctaaaatgtgtaaaaccaagctgtgccccaaccaccttgggcacatgtcgtcaggacctcgtgaggctatgacatgggcacatgtccttaaccttggcaaaataaactttccaaattgactgggacctgtctcagatacttggagttcacagaagtatttaaaatttaaatggaggatcaggcagatcttacaaagcagtatagtgtggagggaacagaagtcatgcctaggtctaacctactcttcttcccatgctcttcttctcccatgctccccacgtagcacaaaagaggctgtactgaattagacattttgctggaatgcctctcaaagatgctctgctcactccccattctcccagataccttcctcttatccttgtgtctgcttgtcagtccagtgtcttactctgttcccttagtaagagagtttcttcctgcctcttctcaaaggaagaggctatggaccaatacaaatgaaaccttccactgccccagccctgcccacgtggggcaggtggacccagagcctcttgaattggagaactggtagagggctgcttccacagccagtatccccacagtgagagcagaagctaatctctccagttccctcagaggaaaaatccctcagcaatgcaggtgtttgttttagacaacacagtccagccttacatgaagaaagtttattccccccatttaacatgggtttggctatgttctcttcaaagcagtaatccttgctttatttcatcaagaagcctctgaccactctggggcttggcttgcctcatgagtcatggtgccggcagggagttcctttgtcttggtcatctggggcagctttctggtccaaatcttttttttttttttaggcggagtttcactcttattgtccaggctggagtgcaatggcacgatcttggctcactgcaacctccgcctcctgggttcaagcggttctcctgcctcagcctcccaagtagctggaattacaggcacccacctggctaatcttttgtatttttaggagagatggggcttcactatgttagccaggctagtctcgagctcctgacctcgtgatccacccacctctgcctcccaaagtgctcggattacaggcgtgagccactgtgcccagccactggtccaaatctcttaaccagaagaagggaggaaaagagaaagtgggaagggaaagcatgt

SEQ ID NO: 97243 - DNA, 1032 bp, Homo sapiens
ctcgggaggctgaggcaggagaatggcgtgaaccagggaggcggagcttgcagtgagacgagatcacgccactgcactccagcctgggcgacagagcgagactctgtctcaaaaaaaaaaaaaaaaaaaaaaaaacaaacaaaaaaaacacctagatgctagaaacatgctcatgcagaattttttgtccctcacacagatgtagaatgtagagtaagaagacatgttgtgagggttgtggaaagaaaatccaaatcccacccatcaggagatgaggcactgggagccctagatgccatctgtcttttgaacttccacaaaataatgttgcatttcttctggtgcatacagaagtccagtatgctgctcttctgaggatccggcaagatggcagaagtagagcagaagaagaagcggaccttccgcaagttcacctaccgcggcgtggacctggaccagctgctggacatgtcctacgagcagctggagcagccgatgcagctgtacagtgcgcgccagcggcggcggctgaaccggggcctgcggcggaagcagcactccctgctgaagcgcctgcgcaaggccaagaaggaggcgccgcccatggagaagcaggaagtggtgaagacgcacctgcgggacatgatcatcctacccgagatggtgggcagcatggtgggcgtctacaacggcaagaccttcaaccaggtggagatcaagcccgagatgatcggccactacctgggcgagttctccatcacctacaagcccgtaaagcacggccggcccggcatcggggccacccactcctcccgcttcatccctctcaagtaatggctcagctaataaaggcgcacatgactccaaaaaaaaaaaaaaaaagaagtccagtatgctaacagaaagtcgtaataagctgcacacagtggtttgctttgtgggataagccgaacatttttcacttctgattgttgactgtgtgttggttcctctctgttttcccctccactctccaccctttgccttggcttg

SEQ ID NO: 97244 - DNA, 1069 bp, Homo sapiens
gtcatgcagtcatttcctgttaattctgggagacaatgatttcacaactagcgggaagcagtcctaaaagtttaaaatccgataaggaatatctgggacagggtttagatcatgactctacacagataccatgatgagagtatattaaagaaatttaggaaagcacctggttcctttctccccatgcctgccttctgctccctccccagctggtttgggctcaaattgtccctggagactagggtttatgttagggtattgatagattagagcaggtggttgaagagatcttctctggtcagacttggaagaatttccaaaactgaagttagccccaagacttccctagggttgatgtactttatgatccagatgctaaacttcttagaatgaaaatatgcttcaacacttaagtagcatacactgccctacaaacctcagagagcacttttccccaagttcttgtttttatttttgaaagtactcacacagcacttactatgctccaaacactcctctaagcactttacacatattagctcattcagtccccagacagacgggatgaagtaggtattgttactgttcccattttacaggtgagagatttgaagcctggggaggctagtaactcaccccaaggtcacacggctcatacatggtgggactgagactcagatgcaggcagtctggcacctcagtctggattctaaccatttcactaagctatttttgtcttgtactactttgacccacccctgaataaacctcaattgctggagtggggtgtagttattaaagggatgctttttaccttttgctgtttgctgtggcagattccccagataaccaaggaaaaggggccacccatacctggaaataggccatagggcccctactactgccaacaagccatggcctaccttgacacttgtttgatcttaaaattgtgtcttggtaacaaaagatttggacaggcatatctgtagctttcaagttaattaattgcaatatttttttcttcaggattttagctgctgaacaactttcagtttggagctaaaagaga

SEQ ID NO: 97245 - DNA, 1084 bp, Homo sapiens
ctgtctcaaaaaataaagtaaaataaaataaaataatgttaaaaaatggttatctttgagacatggtaggataatgggcatttttcattttcttctttttgttttctctgtattttctataattaagtatcacttttgtactaagaaaaacatgtattatcggaatcccgtctgcctcattgacatcatccaaatgtttgcttagtctaatttatcaagaaattgaagataatatatttataattgaaataaatgttttcctaacaccaggaaagaggaactaaagcatttgccaagatcctaacttggtcagataccggaatggcctgagggactatttgctttgcagcattgttaatctccagatcgcagagacataaacatttacaagtcttccgaaggtcatgcaatcactggaagctgggcagtatatacttgtaagaactggacaaaacagaaaaatctggattcttgtaggaactctatcatggtccacgggtgtaatcttgggcaagccgcttaatctctccatctgctacaaaaaacaggtccttttatattcactcaccaattagtgattgaggatgtcttgtgtgcactgctcctaggcactgcctggggctcatgctgaaagctatgaatctgttattttatagactattgcagccagtttaattcatacaccatttccatccttcagcacagaattacctacaattctcatggcttacaactggaataaacctttgtaatctaggtatcgagggctccaaaaaagagagacagttagtaggctttgtaaaagtgacaaaagaggcaaaaatgggaccagacacagtggctcacagatataatcccagcactttgggaggctgaggcgggccgaccacttgaggccaggagttcaagaccagcctggccaacataacaaaacccagtctctattaaaaatacaaaaaattagccaggtgtggtggcacacacctttaatttcacctactccgtaagctgaggcaggagaatcgcttaaacccgggaggcaggaagcgaaggttgctgtgagctgatattgtgccactgcact

SEQ ID NO: 97246 - DNA, 1031 bp, Homo sapiens
atgctatccctcccctccccccagcccacaacagtccccagagtgtgatgttccccttcctgtgtccatgtgttctcattgttcaattcccacctatgagtgagaatatgtggtgtttggttttttgttcttgtgatagtttactgagaatgatgatttccaatttcatccatgtccctacaaaggacatgaactcatcatttttatggctgcatagtattccatggtgtatatgtgccacattttcttaatccagtctatcattgttggacatttgggttggctccaagtctttgctattgtgaatagtgccgcaataaacatacatgtgcatgtgtctttatagcagcatgatttatagtcctttgggtatatacccagtaatgggatggctgggtcaaatatcaactattacttacactcaagctagagtgtaaatagcttatactcaagctagagtgtaaatagcttatactcaagctagaagttgagtataaataatagttgatgagctgaaattgtagaatcatggaattattagagaattttgagattaagtcagatttcttcctttcacaggtaagaaaactgaggctcagagagattacatgctatagccaagatcacacaacccaggtgacactaaactggggccctccatgaaccaaatccagcccaccactacctgtttgtggaaataaagttttattgcaacacagttgctcccatttgttgcattgcctatgactgcatttgtactataattacagagttgagtagttgcgagagagactatctggcccacaaagcctaaaatatttactatccagctctttaaacaggttgcccaacccctctctaggcctccggagtcctctgcctccagctagaagaaggggaacaggcatggagaagtatacatgaagcagggactggggaggtggtagggacagccaggcctggagtgaggcacatcatttctgcccatgttccactgacgaacatgagtcacatggtttcacttggttgca

SEQ ID NO: 97247 - DNA, 1013 bp, Homo sapiens
aataatatttatatccctaaacatttccgtgctgagagcaaatttcatttttgttttctaatgatggccataactggcaaaaatgggttctaagggatatctattgcatgatttatacctaatttaaagcttgtaaaacttattgagtcacacagaccaatgggaaaaaacaaagtttataaaaatgttacaagagataatacaatggtattaaactgtgagtctattaatatatttttatcaacagtgaagcatcagcttgatattacaacctgttttgttattttgattaatttttctgatgacttttaagtcaaaatggcatagaatattatggctaacaaaattcactccagacagtgtctgagtaatagttgtctaggtggcatagggatttgagatttacataaaaaaaacttttccttggaaagcttacattttacttgagaagtcttggatgatctgagagtattgaggtttatctagtttaaccagcagattgtgctaaaacgataaatagccgagataaaagctgacaaaaattttcataacaaaatgttttgtgctatgcaaaagtgagtttaattttacaaaacacaatcccaaataaaatgaagactttatacagaagtttgtgatactctttttcaacaaatcatattgtcattcacttaaaatttgttacctcttaaataattacactttaattttttcattgtatgtgatattgtatctaaccttttgtgccacttgggggaagttgtctattattcctgaccatagacagcaatttcatactgtagataattcgaagttgactgtacttcttgaatttgtctgttaggaaaatttttgtggaaactccttgattacatatgaagatagagcagtttagtacatatcatttgaaggttatttactagaactctattgagaatgattttcatttaatgactataaaaagaacttaacctgtactcaaaactaagttcatgccttaaaagtatacagtg

SEQ ID NO: 97248 - DNA, 1084 bp, Homo sapiens
tttttaaaataaaaatgtccctagtgaacatgattggctatagaaaggttttgaagaacattttatatatgatttaaactttgttgagtatttggattagttataagacagtggggaaggtagcatattttatctccagtcattttataaatagattattaataaaaaattttttacagagtatactatctggcataattttcaacaaaggtttttctgagtggggcggaatagtatcttcctcttgattaaatattagcttatctgttgtgaactatttgacttcagagtttttagctgtcagtaattaagagtggagactcaattctggtcaagatagaacattgtagggagcagtaaataaatatgctttgaaaaacaagccaaatgtcattgctttaatttatttagcttatgatatctatttgaaattttcaataatgtgtaggcatgtgagattgtgtttatcaaagcagcatgagctgattaacagttgaattaccagtttctccaaatagctatgaacaaagggttggctgttccttcccagaaaaggttaacactgtatttagatttaagaatttaagtttccaagttagatctacatcttttcctttctttgaggttcttatttctaaatgatgtttccctttcttgttggcagatttaccattataatggaacctgtgaagggttaaaggctttctgaagatctcattaccgttagaaaattaggctaagtgcatttcataatccttaaaacatatgcctacaagtccagtatttatttgtaatttggcctgaaaaatacaggatacggatgaaggccatggctttcaaaccttttttgacagtaaaccacagtaaaaaatctattttgtatcatgacttaggatggatacttgtttttcttttcaatatagaatgtactccttattaaatatttttaaagcatagaagtataaaaacactgggtttattttaaaaaatcaatctattgttttcctaaagtggatttttttttcctactaaaaacaattggtttaaagaaaaaagagatacagctaatcaaacctctcataac

SEQ ID NO: 97249 - DNA, 1050 bp, Homo sapiens
tgattgcctttttgtcctggatagttaaagaagtacagtctttctcacattacctacatgatcagtgactgccatggtttagctttttttttttttctttttttttttcttctgtgacagttgtcaaagaagagaataggtatctgtgctctaaacttctaagaagctgaaattcattaacatattcacctatgtttatattaattcctttactttataccatttaaaacctgttttaggctgtttatgtgcagaactgtggagtaaaggtaatctgattgaatcactgttcttactaagcagatcatatctcagatacttggcaaaaattaattagtaatggtttatgttattttcaaggctgattagacttacaaactgtctttaaaaatgaattccagaagtgagtcttttcttacatttgagaacctgtgagttgattagtgtttctgttttgttttggcctcctgaatgcatgcattcatttgttctcaggggtttattgaagtctgggaatatagtggtatttgccttcttgcataattctagtattctttgatttttctagattaattggattaaaatgtagcagttaccaaataacactatcattcccctttttaaaaattaatattcctccttttgtaatgatagtaatttttttctaggattgtcccttctgtggtatacattatttattattgcaaaatgtagctgtggctcagataatagctaagagtcctttatagagtcttttccatcatttggcttgaacctatatttgggagaaagaagatagttctgggatggagatatttatataattacaaatgtgaagtcactgtgatttattttggctttggctaagaaactgtgataatatggtagcatcacccttttattttttatttctgaaacttttatttcagaactggctgttaatgtatctgtttatctgtgtaattagtatttagcctgtttctgtaaagaattttgattaacattttttaaaaatgtagtctttaaccaagtaaaatactgttgaacttg

SEQ ID NO: 97250 - DNA, 1692 bp, Homo sapiens
atcataatatattatacattttgatagattaccaagcccactgtttttactgcagcgtgtataaacatttagacataattttaaggttcaatgaatgtgactatcctaaaaaacacagacttttaattaaatacttatttctttagttcctatataactaggaacttgccttcttttcagtagactgttaaaagaagggctttcagctcaacataaactgtattagtcacttaatatcatacactgaaaaattattttgaaaagatacttgggattggggacatttatgataaaatttaaccagaagatggcagtgatgatcctcctatactccctgcaacggtaatcaaaaagttttacaaatgtcatagcatgaaatgtgcacgttcagctgttgttatataatgttaaaagttgaggatctaggggaaagcacttgctgtttattttatatactatgaaaaatgtgtatttttctataagaagggattaagaatattttgggtgtctgtatctttgtctgtacacttcagttttttctgaatactggggtaaggaagttcccataagtcttgccttgtttatttgcatgcatcactttatgttatgcataatgtctagaaggcatgctgttttattgcctgtttgcatttttcacccaaattgctggaaactaatgaacattttaaaggagccattcctttagctgcagtcatttctctaaattgatatctttttttgggggggaggcagtgaaatcattttaaacattactttttgaaagaaaaaattattagacaaaagttaatattttaaaataaatcttgagaaactagagattaaataacttaatgaaacatatttcagagttgaattttggcagcaattgtaaataatatttataatctggtgatattaaaagtgaaaagttacaagggggagaaggaatgctctcctttgaaaattagtggccacatttggtgatggatgagatgaagatgcatccttccataatcttgcctttttaaaaaaattataaagctcaaatgcattttgccagaaaaattgcatgaatcttcagcatgcattgttaactttttgtcttttcccctttctttctgctgttcattttcattcatatatttttgatttttggtttgccattgtttttttcttttttgttaattacttcattaaattatttttgaaacgtcataagctgagcaacctctccgtgtagtaacagcggatacctgtctatttcactatttagtccctcctcctatgtctccatcctccaaatctgtgagcactccaagtgaagctggaagccaagactctggagatggcgccgtgggatctaggtacagtaattttccttttaatgttttaatgatagaatgcattcagtgcccaaatactgttgatactttaaagggactctaaatagttgtgtcgagttagtcctaacattttaaaatctaaaatggcatagaaattctctgttggacactgggagaaaaaaaaggtttctttgtttttttttaataatattttaactgtcacatttaattaacttagtactaaatagtcaaccggttttatgctaattattttatattaaaaatagagatattaatgcttttagatttttctgtttaaactttttgttggttattacgtgaatgtttt

SEQ ID NO: 97251 - DNA, 1098 bp, Homo sapiens
aaagcgtttttttttcccttctacaacattaccatagtaaaaatgtttcccaagattaaaaattactatatttattaaatgtctttatttgatattatacattatttttatgtagatactatactgtgtacattatgactcatcgttcctgattttgaatagtagattattttaattcagtgtcagcaagtttgctttcaaaagtactttgacacttaagttttttaaattaatgtgaattaaaacatgtccccatgagttttatggacaacccagagattattagagaccttttagaatattgtaaattaatacagggagtaataatggtaagaaaaatatttattcatgtatagaacaaatattaagttaccaactttattaaaatactatggtttaccacagaagataaaacattcatggtccttgctttcatagaatttacattgtagtgattacatcattaatttaaagatactgttgactttattggaaagccctaagggtagtgtgctatgtttagtgtgaagcatagtttttttaatgataaattgtaaaacacaaaaacaaatagttaatattttttaaagtatttgttcttgttagataatgaatacaaaattggtttcttgtgagtttaacggagagaaaaatcctctttttgagtgaggtgaccttacatctttctttttttctttgagatggcatttccttcttgttgcccaggctggagtgcagtggcacgatcttggctcactgcaacctccacctcccacgttcaagcgattctcctgcctcagcctcccaagtaactgggattacaagcatgcacaaccgcgcccagctaattttgtatttttagtaaagacagggtttcaccatgttggccaggctggtctcgaactcctgacctcaggtgatccacccacctcagcctcccaaagtgctggggtagcaggcttgagccaccgcacccagccacatctttttaaccttaatatgtacgttgtctcctttgagagcacagactcacttggaaacattaattttcaagagggctgagtatattcatttttatgtatatatacacacacacac

SEQ ID NO: 97252 - DNA, 1052 bp, Homo sapiens
cggtgcttaacccataaattacagaagggtcacattttggaaactttagctattttgtatcccagtgggatagtctttggttttattaccaaaaggcttatgtgttgactcatttcctttaccagtatgacaatttcctgcacacatgtaatgctttggggaagattagaatatgttaaccaagatgttttaatgtgtttgttttcattaggaatcttaaaatttcaaccattttatagcctagcttgttatccataaataattaacttgggttgtctgactttagttgttctaaagcagatctattattatacaatattagtttcccataatctgcaaataatgtcttttaactattctgggttgtatgcttgcatctttaaccataggaagcctattgcatgcactagatgattgagtgacctggtggatttcttgttttgttttcgattttttttttttaatactaaccagaacatgtgttttttaattgtgaatagtactttagctttagctattcatagaatgtatttgcttgactaacttatggccttttttgctaatgcttcatggttgtcctacaaccatttaggacgctgcattgggatacagatccatcagttcttcagcttcactcagattccgatttggggtattgaatagattttttaccttccctgttttataatgaatttgattctttgtgaaactgtcctaattttattttgcttaagtttataatattgtatcacgtagtaaggacaagagttatattttactgtgacacctcatttatccagtatctttagtgaaagaatattctgtgtgatgttctatgtaccctgagtccatttaagtgtccaaatgtttaaaattatttctatgtttttaatacaagttttgtaggatgtattaaaaaacttctcagacttcttctaatattctacatgtaattgaaccttttcagggttacttgatatgaatattaatttatttttctgtattaaaattcactgatgatttctaagattttgagaataatggagatgctg

SEQ ID NO: 97253 - DNA, 1629 bp, Homo sapiens
ttttaattttgttgacatagagataagattatccatccattcattcattcagttatttattctagattctaatgcaaattataaatgtttgctgctgccattttgcctgactcagatagcccttttcccctgataatttacagcttcaaaaacatatgaatataccttttggaattgtgtctaaagtaaggtaaataagccttgatttgaggcatgtaagaaaaatatatgagtttcttgtacttgaactggaagccctctgtagtggccacactgaggcttccccctcctgcctcccattgcttccttattttcagtaaaagtggcttttggataagtgaggtattacttccctacccacctcctcctataaaatcttggaatatttcgtttgtttagtattatggttttttctgttagactctgtatgcattcaagttggtaattgattcctaatattgttggcttgacgatttttttccagctatgtgagtgatttactttttatataatttgcatcttaaaaatcagaatataaagtttcttatttcaaattttattcttagacttctagattacttcagattacttaaattgtccacttaattctttgactatactttttttttccctttcttttttatttctaaactagaaaagacattaaaaaattgttatggcccacattttggaacattaatttttaaaatgtactaattttattatactttatagtactttgttatgctttattagattgtataggacttggatttagttactaaatagaactgaaaagaatatttatataagaaaaaagttatattaccagcgatagcctgctttatattctgaaagttgcagcagtgtctttattgtatatccttttaaggcagcttcatcactgagaacttttttgggagtctggaagcgtactttatttggtttaggatttaaacatctaataaaaccaataaaagatctcccagatagctaataaaatatatttttcttttggttcattttcctcagccacagctctcttccattgtcaaaaaagaatgtataccctgtatttctaaacagaagtgactttagtagatttatggtattcaaaagatctgtcactttagtctaagtgtagaatatctggaccttagtttctccataatgtgaatcaaggacagtattgatcatgcagagattagagatttaaaagttttaaatatttcattttaaagtccaaattgatagtgtaattctcaatttctgccaaatataagtagaaaaaaagctttcaacagaaacctgtttttcagtcgtaaagctgaattctcctagtggcacaatcagctaaatgtggtctgagtgatatctagtctgattcttaaaaaaaagtccagaaagaaccatatcccagctgaaaccagttcttacgacaaccttattcagtggtccactctgaagttcctattctcttacttcattattgcccgcacatttgttctaaaaaaatgaaattacttgcctttttaaaatgaaaataaaaacactgaatgattcagaaatatcttttgcttttgctaccttctcattcttttgctaaaataaagccaatttattgttaat

SEQ ID NO: 97254 - DNA, 1007 bp, Homo sapiens
gacttttagaactcagtgtcagcttcctttataccaggaataaccagactaccttgtaagttagggatttttcataggatattaagttatcttaaaatgggatgcaccagtacaataaaactacatagtaaattgatagacaacaaacatatttcctaaacaacagtgcactaatgatgggatttgtttttcacttcatattgagatttaatcattaaaagtgatagattcataagtagcaatgtttgttcagtaaggattttctaagatactgtatattaccttttaaatgtcttgtaatattttaaaataattcagagtatgctttgtggcatactcttagcttatcttaaatgtatcttaaatgtaaaatgtatcttaaatgtactgtgaggtacagatgagaaaacttgctctgaagtctccttccttcagtttaacaaaagccacccatttcacagatgatttaactttgattaacttactccattgtaagagattattccaacaactggaatttcattctttcgtgttacttgtaggtgcagcttaatttacaaaacagcttttctttctgtctcaccaaaatacatcacaattttgatgttaactcaaagtaaaaattcagtggttcattaaacctagttttagcattcattgacaagagatttgtcattttaaaagtaactgctacttttatgcactctttactgctcagtttataaccttagattccttgtcagagaaagcgtggagttaaccactttagcatattgtaatgaatattcatcaataaattgatgtgacatggcagccccatttttcagtcttcctgctctgttacagtcttttccagttttaaatatagcttatcatgtaataaggactagcttagaaaatcttcagaactgtaattttatatttttggccacgttaatagtcctttggtagctatcatattagcttataacaagaaaagcatatttgtttcagaagaacatttttta

SEQ ID NO: 97255 - DNA, 2453 bp, Homo sapiens
tttaagaacagcattatcatttgtttttatgttccttgaaatttatttaatcatttttatgaagcttaagtaccaatgatagttttaaagtctggttttaatccatgtagaaagggagggtatgtactttaattctaaaataaaaccctgagagcatgtatttaaatagttgatactcatgattcagctacaactgaaataatttatatggacaaataggcatggcaaatgctgtatagtacacagatatagatcactgtctgacatatttcatctacattttaaattttaaaaggaaaagagtgtctataaacaagatcttttctgttaaatatgtaaattatgaggtcacttagcactaaagtactgaccatatgcattatgacaggaatttgacacctgtcattggaaatggtacttagaggccgtataatacaacaaagttgaaggaggagaataagatgtgggtaggaggctgtaatttataattcatagtgctcaagaatgacctgtcctgggtgattcaaaattcctatctttgattttaggatttacatacagtgaaacctactagtaaacacttgattaggataactggtagcattagcagaaagtggaaaatatatgtatattcttacagtgaatttttagttgaaatagatgtcctattattctaaaagacagcttgtaagttaaatgtaattaaactattttgttacattacacctgcaggtgactttatggaagaatttcattctaatgcttgagtaatatagtatagaattgctaccaattatactattttcagattaataattcgttgtatatgagaattcatctaaaaaggagtagtgtctttctgtttctctatgtgattattttgccccaaaaagctttcatttttttaagtagcacaaaagctataattggcatgctttgtaaggaagtgtcaatgtgcaagagagtggcgatcactaagaattcttttacgtgttctttcccctttgcaccaccgcctcctcagcagggtcactgagatcactagcttttcttgaaatggccattttcactggcaggtgcattataccctgtattttcagattgtttttccattctgaatgtttggcaggttgattgctctggctgcgttgacggagaaagggctgacaaatgtggttgggctggctgaaaagacagtgattactgttttcctttgtggctgattgaggccgttgaaaggaaaaattttaaccttcaccatttggttcaaaagtatgagcatatattgaaatcactcgtgccatttatcctagttctgtaaacttgtcagaacacaaaaatcgctcaatttcaagtaatgtaggattggcatacgtcattatcattttgattaagttggaggttgtatcattgtgtgcattatacagtgtcatttaaagctttctttccacaggtacagttatatttttattgcctatactatagagttagaaagattttcatagctctctaaacctaacagtatgtgtgtggtttggcagctggtgtggcctacaagctgcattttgtttgctgggtaaaggcttgtctttaggcctcctggagtgctggtaattgcacaggcctgccattggggagagacacaggattggaagcagtgaagcggaagaatgttatgccatcccattgccaccttgtagcagaaagacacaatcccagcagtgccatctggttgttgctgtctagtcagctggcctggctgctgggaccatgacttggcagctggttcccattcttgaccattcttttgtgtacgtcgtatgtatgtgtgttttagataattttgaacatgagtcagggaaatgactacagcaagtaaagtccccttattgaataggttgtcattacttgaactgcactctggtgcagatgcctgctgcctttcccttatagacaaataacgcatgtgtttaggcaataaaaataaacattttcttcataaaaacccatctcagtgtgtagcaaaagaaaaggtgggcagggttatgtgttctataacattttaaaataaatgattttaaattacttcctggtttgggatgtaagagatttagtaattttttagaagtcttgtaaacattgtatattatcccaatgtatacttttattcaaattaagaaaacattattttaagtgcttattgccacatcatgtaacaatagataatgagacttgcatttaaaatgacagaatagaaaatgtggtcttatagctattatcttcaaaatctgcctctcaaatagcaacctgagagttaatgtaagccatctttatgccttatgaaggcccattagacactgatggtttcagatcacaagtaagcagccagctctgtaggctattttagacatttgattttcctcattctacagcattaatgtgtcagcatgcta

SEQ ID NO: 97256 - DNA, 1050 bp, Homo sapiens
tttgaaattgtctagctgtaccttattgcttccttaaaaaaaaattgagtgtccagatttcatctcaaatatagatcaccttcacttcaaagcttttgttttaaaagtagcccagattgtctctcttaaatgtagggtatctttgtttctattacaccacttcagatattggacttttgaggtctgttgtcaacagcatgatgtttacagttccaaaggtacttattgctttagtagagttaccaaatgtggatggaataacactcaacaaagttaattctgataagttatgagcacagagttaagtctgtcaaaatgaagtcaaggcctgatatataaacctataataaaatgtgtatgtaattggtctacttataggagacttctctaacattttcacttttatgaaattagcaaagctggaatcagtgagatgtttgaggggcatcaaggaccaatcactggcatccattgtcatgcagctgttggagcagtagacttctcacatctttttgtcacttcatcgtttgactggacagtaaagctttggacaactaaggtatctaaaatatagatgtctgctatttgctcaggtttctgacacaaggtggtgatctaatactacataggaatgatgaaaaccttttaaatcataattgtttgctaatagatgaagcctgctaggaagttacacagagcatgagtgaactactagatgttgtaatttttataaaaatatgctaacaagtatggtaaccctacgcagaatcaaggaccagtcttcccaccacttcagtcttttcgagcatgtaactgtttaccctgaactgcactgggaaaaaagccctgagtatctcgcatagcacctcatacagttgtcattcagctcagcacaaaagctatgcatttgctctttggagagtttttaacaggttattcataactacagtggctcacagagttgatgggaaatagggaaaagagagagagaaactgatttacaataagtcctgtataatatggctatatgtagtaaactggaatccttag

SEQ ID NO: 97257 - DNA, 1048 bp, Homo sapiens
ttgacagatgttcttgaagcatgttctatttctttttttaaacagtatggcatctacaagttaaaaagaaaatgcaatcaatagttgattcttagtttacaataccaggtaattctgtagtgaaacaaattgtaggaactttttctaggctgagttaaatatcataaaatgttatcatacctgttgaatgtatgtcatttttttcccagtgataagtagtttaatgatttgtatgtcatatatggactgtgctaagaatcaacttttctctttcagaataacaagcctttgtattcatttgaagataatgcagactatgtttatgatgttatgtggtcacctacccacccagccctgtttgcctgtgtggatggcatggggagattggatttgtggaatctcaataatgacacagaggtgagcaggaaaataacaaaaattgcattgaaaaatagaaaattggatatttattgaataatttgtgaaattcctttttttccaaagaatgtaaaagggttctgtgattgtagattcatcacaaagaactcaaataagctttgtaccctaaataataaacagcatgctgcgaagaactaaagggagaaataatgttgccaggagcactggggcatttccttttacttctgaaaagcactatcatgtctctaatgtcctggcaaagtctcattcataagataactgggatgtttttcattcataagctagaaagcagatagtttcagactgttgaagtatgttaaccttaattctgaatttctaaattatctcttagccttgatagcattgtatatcatccataaacattaatcttagcctgatttgtttgaaggaaggaaaaatatattttgatttttgatgagttttttctatgaaggattgaaaacagagtgttactataaaatgaatatagaaactatcagatttcctaattgctgtactaaaatcacttattagccattaaatttaattgcaactcttatttatttttagtcacatgtatttttaccagcttagagaagcttaaaaa

SEQ ID NO: 97258 - DNA, 1019 bp, Homo sapiens
gtcaataacaattgttgagagagtcaactcagatctcccacatctcttcctagttagctagaatggtaccaattctgttttcttaatttggattttagtcttagagatttgaagttacaattaaatgtggattgaaatttaatatttctttataacaattttggtattctgtgtatggggttaaattatttggggatgactagtacaaattagaaggatttttttgtcaaatttcaaaattttttaaaaattttatcatacttttagtctgaatccaaacactgaatgtttgctccatgtgtagcaaataaaactcttcttccttagcaaagaagaggcacagtcagattccagggagctggtgccattgtgttggtgccatcatcctggctatctccagctagctcatggaacaagaggctttagacagactcatactgcaccttcagtatgaaccgtttctaggaacactgagtcaaatacaggtttcagctgatagagatacatgctgcacaagtgattcttgtcctttacaactgaaccataatctgcttatgagggcttttgaagtgttttctttttaaatgggttttggccatgtgttttcaaacagcttgacttcttaaagacattaaaacaacaaaaaaggattctttattcaagagaagacctttcaaaataatgtgtctagtcttctgagaattttttatacaaagacttattttcccaaaccattttcaaggatcgactataatgtcattcataatatatcactgaagaagaagaaagttggggaaattcttacctgttttcatctttgtttttaaaaatgtagccagcttgagagaagaattactgttttacatgtttatagaaatcttgatgaaacttttaacactgtcctttattttaaatgactttaggtaccaactgccagcatttctgtggagggtaatcctgctcttaatcgtgtgagatggacccattctggcagagagattgctgtgggtgattctgaa

SEQ ID NO: 97259 - DNA, 1051 bp, Homo sapiens
agtccccgtaattatggaaaggccattcaggtcaattattactttttaacagaaaaattatttgaaaacaaactgaataatagtgggtaaaatgatcttttatttcattgtatataaaacattgtctttcttttaacagcagattgctgttccccgcaatgatgaatgggcacggtttggccgaacacttgcagaaattaatgcaaaccgagctgatgcagaggaggaagcagctacccgaatacctgcttagttcctgaaaaggggagtgtaactagtggatttgggaaaggttcttaagtagatcctgagactatttgcatgcttctgtctaaatgataattaaaaggaaatttcatggattaaaccatgggtttaatgcagcaaggaaacttacaatgtccctttatatataacatgcatcttgttttggatttgtgtcattttttaatatagctgattgacttcacagaaagcagcttttttgaattctaatacataggtgtatatttggtattagttattttgagttcttttcaacttataacactgtatacagttatttctaaagcacagatgaaataagttctgcatatttttaaataatcacagttccctgttatacagataatgttctcactacccataatatgtaggaacattgtttctccttagccgtagtatgcatacacctatccatgttcattctgacatcctttgttgtctttataattcatgtggtagttacctataaataaaaacaaatatgcgttaacttttcaaattttcatttttactccttacaacttgaatttttccatcttttataaaatatattttttccatatctttctttaagctcctgctgtgagcagccatctcaaatcctatagagctgtgtaccctaaatataccatgtggtatatactatagatctcccagtgcattatgaattgatgtctagataatctgttggtgaaaaaatttcccctaggttaacttttgctttactactttatattctttccatctaagacatatttcctttaaa

SEQ ID NO: 97260 - DNA, 1007 bp, Homo sapiens
tagaaaacagaatgtgaacatttttcttttaataattgtaacaaagatttgttgggagagaaatttccaaataatgagtagtgtatagtgtaaggaataattgacctggaattattggccccaaactctgattcttgctgaagcatctatgagaagtgtgattttagccaagtctgtgccgcattctttatatgtaggaattaagttttgatttaatgatttctgaattttctttcagctctactcaattaaggggtatcagtatgtgaaatggaatatagaaaagtaggcaattctttacttttctatattcagtttcataaattaataccccataattgcccattatataccaaagacaatatctcaagttatctcattgtagcagtgtctgtgagtcaaaacttcaattttagtagagtcacactttctttatatagaaaaattcatgtactcactactcatgtagttactgtatctttaccttcagtttgtaaaaatgactaaaagtagggaaaacaagtgttaaaacataatggataagaaaaggttggaaatcatatggcaaatcacatgttcctcagcctcaaggtgtgtttagttgtgaaagaaagaataaaattgtttaaatatttcactttttgggaatgacttctcccctactcccccagaaaatgcgatgtatacctttgcccattcaactttagtccatatttttaggaacacacaaatttactttaaggaattacctttaaagttgactatataatagcaaaagagaaagtattgagactgtcagtgttgataaagcttctagcaagattaggttgactagaagtgcatcacagttctttatacttttagaactaaaagccttataattttgaaaaatatccagttacagaaattgtaccttatcagttatactttttttctgagtaagaaaacaagctatagctttctggttaatttcttatttttcgttgtttggtttttgtctttttgag

SEQ ID NO: 97261 - DNA, 1104 bp, Homo sapiens
cgggttcgccctttcttccacctttatagaaaacagaaaaattagttttagaaagggctagcgcagagtgaagggagggaagaagaaagagaagaaaagctctatatggtgatttagtggggtctaggttcttactttggaatccaaatgcaaactgttctaaaagtcactcatcaagggcgtgattactaatttggatctaaacatagatcttgacagccacatctacactttgatatggatgtgatttgatgtgcagtatcagaatttatttaccttaccaaagtgctctgggaagacattattgctactgccagtaagctgggatatgagaatgtatgcaaatattttcaagaggcgagcctggagacagaccaagttacttagtatcctgcacagtgctcctcgattgatggctgacagccctgtgactgcaactgtaggctccctggaggccctccaggaacaaaagaattagctttgaaagcaagttattttcaaatgtattagattggtctcatgggagtggaacaaataataatacagttgttttgctactaccacttgttagaaatatataagtagtccatggatatgtgattacaaaagaatcctatgtatgtatctagagtgagatgggaaagtgtcccgcttaccctccttctacctccaccacttcctggcccagaggtaatcactgctaacaggttacagcatgaatatgtagtctgtttttcataactctatagaaatatatgtacatatttatattttagaaacaggattatgttatgtgtgtgttattctgtgtcttgcttttgttcacttaatgtgttttggatatctttccatgtcagtttataaagttttatttttaatggctgcatagtatttcattgtatgggttataatacttttcataaatcttcccttattgatatttattcatttttttcactactgcaaacaatgctgtagtgaatggcagacatctttgtacacatatctttagtgcatgtgaatttcattaggatagatatttggaattgcaattgaaaacttttaagacaagctttatgtttttatacatattgccacattgtt

SEQ ID NO: 97262 - DNA, 1104 bp, Homo sapiens
ttataagtattgatattcacttcccacactacgacaagaatcagcaaaaacagtagtttggtgtcagatacatttagtgactcactaagatgacattatcatttttttatacataaaaatacttgtatcttatttaagaaaaaaaggaggtaaaataattgaaactgaaagggaacgcttgggaattgtcttattaatattgctactttttttttctctctcacagttatttgggatcatgcaatgtagagtgattttttttttaattcaggaaaaaataataataattttcccctgatcacactgcaacagctaataggcttctatgcccttttcccattaatggccagacatctatgtaaagagttttgagttccgctcaagtggttgaagttgcaggctctatagtagatgttagcagtattcctatcttttataaggtactctagataaattaaatgtggttttctcctgaaaggtgtcccagctgcatctctggtgacccctgctgatgtcatcaagacaagactgcaggtggctgcccgcgctggccagacgacatacagtggtgtcatcgactgtttcaggaagattctccgggaagaagggccctcagcattttggaaagggactgcaggtaggcaggggctggagccatacagaatggctggctggctctagcgtcctcccctgtgactcagtggctatctttaccacatttgtcctggtttcaagtctcccctgcccctgcttctctttttcagctcgagtgtttcgatcctctccccagtttggtgttaccttggtcacttatgaacttctccagcggtggttttacattgattttggaggcctgtaagtcagctgctcaactcctttacaaagaaatcactaagtccaaaacaaatgtttgttctgtctacaaaagcattgttgcaactcttagaaaactgataagacagaacctttaagaccaatgcatttaaaacagtgagcttaagaagcatttgtgttaagcaagtaaaacttgacagagtgacatcgtacataatattaagcagctatttgggggattttagggaagcagcaaatttttttaaaaaa

SEQ ID NO: 97263 - DNA, 1009 bp, Homo sapiens
tgtgcgttgttgggatttggtatgtgtgctaggtaactaatcttcaaagcatacaacaattaaggtgtatgtatttttaaaatgtagtcccagctgggtgcagtggctcacgcctgtaatcttagcattttggaaggccaaggcgagtggatcgcttgagcctagcagttcgagatcagcctgggcaacatggtaagacccccatctctacaaaaaatacaaaaattagctgggcgtggtggtgcacgcttgtagtcccagctactcgggaagctgaggtgggaggatcacctgaacctggggaggttgaggttgcagtgagctgttcctgccactgcactccagcctgggtgacagagtgaggccctgtctcaaacaaacaaacacaaacaaaatgtagtcagttatttctttttattgtaccatttttgtaaagtttcagtagaaagcctattacttgtatacttcaaaaaatttgaagcattgttaaaggagtataaatctcaatcaattatttctaaaagagagaaggaagaggaggaggcagctgtggggtgggggtgggggacacggattggagtactcctgcccagcaggatgttataatttactaatgattacaaacatgaaagaccttagtatttatttaaacataatgtccacatttaacacttggcacccagggactgacactgtctggtagtggcaaatttgggggaattagaataaaaatttgtggttctattcatttttaaatctgctttagttaaaacataaagcagatatgcaaccattatttaagatagtctttgcaaccattatttaaacaagagatttcagggaagtagtaaactttttcaattgatttggtctttaatactagctacaggagcaattacttggattatcattttaacataatttttcatgcagcaatccttttgaaagtattgtttgcttagattgaaacattaaagtgcttccttctgcctgcagtacaacagattca

SEQ ID NO: 97264 - DNA, 1069 bp, Homo sapiens
ataggtgggaattgaacaatgagaacacctggacacagggcagggagcatcacacactggggcctgtcatggggttgggggttgggggttgggggagagatagcagtaggagaaatacctaatgtaaatgatgagttgatgggtgcagcaaaccaacatggcacatgtatacctatgtatcaaacctgcacattgtgcacatgtaccctaaaacttaaagtataataacaaaaaaagaggtggcattttcatcagctctatctctttgatgctcctaaagcattaccttccagacttttttaaaagttctaattcctatgccttttaagaaatagagtacagaaaatatagtagtggatagagttaccattcatatatgttaactggaactttaaaacaagtgtgagatggctgattaattgggcccttatatcttaggtataggactgagtaagccattgtttaataataatttttcttctttagaggccagagggtatggcaaacaataataacggtaactacatttcagctattgacagaaattctgaaccaagagactcagatatttacttagcgcacaaaggtttctgtctttaaagtgtaagcatgacatgattattggcaaacaataataacggtaactacatttcagctattgacagaaattctgaaccaagagactcagatatttacttagcgcacaaaggtttctgtctttaaagtgtaagcatgaccaattcttaaatctatttgcagctcaactaatttcatttgtggtatttgtttcatatttgataacacatggttcgtttcagacttgtttagtccattttgttcttggaaacattaataacttccagttgaattggctgacagtcttggctaaaacttcctcagttgcttgtgaaacctgaagtgatgaggtcagtgaccttggcaacatttaattcagagacactgcctcgggggtcagagagagagagaggttgctccagattctctttgatatgtgtcagtgtggcacatacctgagtcctctgcagagttgctttggaagaggtggact

SEQ ID NO: 97265 - DNA, 1031 bp, Homo sapiens
agcaggcttaagatcagcagtcagcaagcaggcaaacacatatataactcccctttggctggatgatttaaaggatataaaatgtttattgttagcatctttaaaaaatgtatgcaaaaaagtatgctaacaatttggataagctgtgtgctttagaaagctgagcccaacagatgttgaattgtttatttttttcttttccagtttacaaccagcctggggaatttaactttctaaggattatgatttcctttgttttgaggggattcttttaaaatgtcttaagcttgacatatattagtcaataagaatacaacaggcatatgtttttgcttataggagatactcgttaaacaatacttaaaactgcatttttctttgcagttttggcttccttttaaataaatgaatattgaatgctgtgtttctctgaagagaagattatgggagttagtattctataataacgaagccactgtatgccattatgtaggtagcaaaatctgggtatgcttaacagcatgcttttcagagcttttccaagtgtacagtatctgtgtatgtttatatgttgttggttgtaataagggagggaatttggttacattgttattggcagtgttcccagaatagagaagacgcatggctccgtttcttcttcatggactttttgggaagtgttggataactaggctttaaagtaagcatgcttaagaagaggatttatagcctcaagaaaacgtgacattatactgcatttgtaaataattattacatatgtatacagagttttaaggataatctttttcccattttaatgaaaactctgcaatgtttgatgggtaaataatatgggggaaactctttgttgctgggcttgtgtattcatgtctggtacagctatattgctgatgattctgtccctttacctaggtctgataccacaacttataggggttgctccagaaaaggccattaaactgactgtaagtttatctctaactgaatttatgtcatttgtttagattacc

SEQ ID NO: 97266 - DNA, 1048 bp, Homo sapiens
tcacttacaaaatgagatacgtataacaaaaaaatgaagagaacatctctttaaatgaggtctcaacttatttcctatcatacacatatgcttagggagtaggttaaaaatcatttaagattctcaactcttgttttgaaaaacacttaattaaccttgttaaatatcaaactttacgaccataatcataaccttaagggaaagagcgtcttttcctttggcccatttgctcacggcaggcaatcttcttagtgctgagtgttttccttcagcctaaatgctaaaaattcaggacacagtcattaatagggatgacagcggtagcatttcatttatgaatattcatgaagtgaaatccatagcattaattacattaatttacatacctgaatacaagtgagccataagtgataactaagccttaaaaaaatgttgctaaccatatattgtatgttttcttttaaatgttatttaataagggtgaaggtgacatttctgtcaaaaggcatttgggtatttatagttagaaatgtttttagcaaagaattaaagcacagtataatccttcagttttcataggattttgtagggcttataaacattctttaaaggaagaaagtatacagaaaaatatatgcagttgaatacaggagaaaccttttatatgaataagggtattagtggttacttgatgcttatttaggatcataggctttttattctgtgagttttaattcaacatattcttttgaaaggatacatgattgaaaataattcataatctatgagaatgaaatttattttcatccagttttgtgattgagaaactctaagtgggggaaataacattctacatacatttttttttttttttttttttttgaggcagagtcttgctctgtcactcaggctggagtgcagtgatgtgatctcagctcacagcaacctccacctccaggtccaagtgatgctcccacttcagcctcccaagtagctgggattataggcacctgccactatacctgactaatttttgtatttttagtag

SEQ ID NO: 97267 - DNA, 1049 bp, Homo sapiens
ataaaagggattcaatttcattctaccattatataagaattatctaggtagtaatatatacatttattatcaaataattatattttaactcttgaaataacctttaaaaggttaccatgaaataactattccctttaataattgtaatgttacttaattaaatatagtaatttgttctaatttgctttccatttttaattttttttaacttgaagatgaaacacttctttttgttagaccttaaaagtaagaaattaattaatttgggactagaaacagctaattaattaagttagatcctaaaaatctttaataatctgctacaatatttgtagccctaaatattttctgctatctttattattttaattgttttgtaaactttaacatattttacaacttcgaagtttcacatagatttaaggatcatcttttgtgttggttagaaaccaggatcccacaaattgctattgggttaattctttgctttttaaatttgtatttatgtaaggtgaaaacgcttgacctattgaaaactttgaagtatttgtccctacttagggaagaaatgaatcctgcattccatttcaaagaaaagatgagaatcccatctccccagtgacatccaatgccttcttccaactttgctgattgctgcaatctattcagagctattatattgactctagactggtagaacgtccagttcagaattcttacattcccctatcccagtagtaatgcttttattaagaaaaagtgtatgtatataaaactaaagggaatccattaaaccatttacaatatgagatcagtatcttatttaaagaatttgcagaaattagagaaaacagcatagttggagattataaaactttaaatgtgtatttactaattctctagtataactgatagctatcgatggcaaaactctttcactaataaaattggctgaaatttgaaaataattttgttcttaagacatcagttaaacaggcttcctgctttcttaactttgttcatgattttttttttttggcatgagcttc

SEQ ID NO: 97268 - DNA, 1795 bp, Homo sapiens
tgggataatctcttgaacctgggaggcagaggttgcagtgagccaagatcacgccactgggccgggcacggtggctcacgcctgtaatctcagcactttgggaggccgaggcgggtggatcacgaggtcaggagatcgagaccatcctggctaatacggtgaaaccctgtctctactaaaaatacaaaaaaattagctgggcatggtggcggatgcctgtagtcccagctacttgggaggctcacgaatggcgtgaacccgggaggctgaggtcagtgagctgagattgtgccactgcaccactccagcctgggcaacagagcaaaactccgtctcaaaaaaaaaaaaaaaaaaaagatcacaccactgacttcagcctgcgtgacagacaaagactttcataaaaagaaatgaaaattctatgataataaatatatagcttaatttggtaagaagtagagcttcacctgagtattcaaattaaatcaggaagattttttgatttttttttttcttggtgttgctttcggatattgcagagaagttttttgttttttgcttttttttttagtactcaaggctattagagtagcttaagagttcaaggtgaaagaaaaggtggagtgttattagtttttatgctgtttgatgatagactgttgaagtgtctagcttcaataataatagtatgtatgtatgtatgtatgtatttatttattaattttgagacacggtcttgctgtgtcgcccagggtggagtgcagtggtgtgatctcggctcactgcaacctccacctcctgggttctagtgatccttctgcctcagcttccctagtagctggactacaggcatgtgccaccacgcccaactaattttttctatttttagtagagacagggttttaccatgttggccaggctggtctcaaacttctaacctcaggtgatccacctgccttggcctcccaaagtgctgggattataggcgtgagccaccacgcccaaccgatagtctttaaatatgaactcatctttcctgagaaatggacctttacatatatttgacagcaggactactctattgactgtgcagtagtcccttctagaggtaggtaaagggctaatagaaatactttctctcagagaaacaggaggtcattcaggaaactaatgaccatctgagaggagaacccagaagtctgggactgagtctacatgccatgttggttgggacttcctctacaagttcctgttgttggtctttttgttgttgttgtttgttttcctttgttttcttttttggcttcccagttgttcctcctctttcctcccaatttttccttcactgaaaaactcttcacttctacaagtctcaccattgtttttgttcagctatgtacaaggatattcaccattcatggtgggagtcctaaaaacctctctgacttcactttaagaactgtgcaggtgaaattcagctactgaggaacttttccccctgacaataagaatgtttggtctcaagcctataagttggttgtagtggctcctgctgggctggaatccttggaataaggatgtcgttgggctgatggtaggtgggctgtgtcacagggctgatggcttgtatacctacaggaggagttctctggccacaccgttggtacagcagctccttccaggctcattcatggaacaggcatggtggcagtcttggagaagagtgccagccccggtcagaggtaattttgtactgcagaaaggtgaacaagaccagtaggaagtgcccataaga

SEQ ID NO: 97269 - DNA, 1790 bp, Homo sapiens
ttgtaagaaacctgcacatgggggccgggcgcggtggctcacacctgtaatctcagcactttgggaggcggagacgggtggatcacgaggtcaggagatcgagaccatcctggctaacatggtgaaaccccgtctctactaaaaatacaaaaaattagctgggtgtggtggcgggcgcctgtagtccccgctactcgggaggctgaggcaagagaatggtgttaacccgggcggcggagcttgcagtgagccaagattgcgccactgcaccacagcctgggcgagcgcaagactctgtctcaaaaaaaaaaaaaaaaaaaagaaacctgcacatgggccttttgaatctaacatttaaaaatttttaaagtatactgtatatatggaatcgccaagatgtcaacattcttgactttaaaactatcaggaaatagagcagccttagcacaaaccacaaaggacacagcggctaacaaagaaaacaaatgctttagttgacatgtactgaaacaggctttgccagtatctggggttataaatgatgccaaagaaccacttaccctgaggtattttgccagtgttttctccagctctcctactctattttaacttaattttaactgaaagatagagtgtatagcttagaggaaaaaagcataagttttctcccatccataagaagtcagtacttgacttctacaggagacagttaactaattaactcattaaattagagacaattacttggcaatgtctgtaagcctgttgcctgaacaacacaaccaaagagggagtttagatctgaaactagaatctatctacccacagtcagtcaaaaatgctaaaatattttaggtattatgctaacaaagaaaagctggtacctcaaaaattggtgatatatttaaatcaggggtttgggttttttttttttggggggggggggactcaagtgatcctcccacctcagcctcctgagtagctgggaccacaggtacgtgccaccatgctcagctaagtttttcagtttttatttttttgtaaagatgggggtcccactaggttgcccccccacacacacatacacacttagtatagcaagcaatttaatagtttcataatataattttcattttgttcctgtgttttcaaaggatgaactaaaatgactttagatgaaattacccaagtatgtctatactccaagtaactttagagtttatcatttgccatttcaaagatatctcttaagcagttgtatatccctctggggcaagaagtcaaggacacatggaagacattgacataaagtagctgacagtatctgaaatgtatctgaaatagctggtccattttcttgattaaactttttccaagcccaactcaagtatttgaaatgtaaaagaacatacagctttgacatttccagaaatatttaaatttacattgagtatagttagcatgtgctcaggaaagccttaacattctaaagcttaagaaataaaatagatctcatgagattagaatcctcatacatttaatcaaaattattgtctataaaagatggcagggtttcacatacagatgtgtatcataattacactgaactatctctagctccaaatgagaagatcatgccatttaaaaatgttttgcctaccaagccaacagatcaacataccaaggcttcaactgactggaataaactggatagcaataactcctttgcaatttaccaaatttaaccttaagtgacctttaggatgtatgcaaccggctgggcacggtgg

SEQ ID NO: 97270 - DNA, 1019 bp, Homo sapiens
caggcactatgcctggtgcctggtactggggatgcagagatcaacaagacatagtgcctgctgtcaagtagctcagagatgatggcacgacggacactaaaactgggtcagaaaacttgggttctaaactcctgtgccattaactcaagaatttttgggcaaaacatgcagattcttggagtctcttctttaacaagggtttgcagaaaaattgctgtcctattgtgaggcaaaaatgacaccttgaacaccaaagtacttcaaaattgtaaaatataacttgaaatagttactgtaaaatgcttagaaacagaaaagcataggatctctatttccctccttgcttagtgaattcttctgcttttgcccaaacatgaagaaattattgttctaacctttcatctctctccaagccagagtttccctgggttggcttccagtattcctgggcttaccacgagatcggtcctgactggtctaggcagctttatctctgtctaaccaacatgtggctgtaatatgagtcaaaacaaactgttcctccattactttgttccaactgagatgaactgacattttcagatcttaacatcctttcaatttcagtaattcaaatgacaatatcatgaagtttagtaactacagatatctcatagagcatttcccacatagaaaaatgaattatttgaacaataaaagaggacaatatgtaccaaggcaagtactgagtatatgaagctagttctcttactgtccttcactattatggctcttacttccaacagaagccaaatttagtcaggaatgcatgccctttcactacacaagcactctacataaggagcaaagaccacagcagatctgacacacaaaccctgttaaacagtacaatgtgtaatttgccttattatgttagttcaattagaataaaagagcattctatcataaataatactttataagaaaaaaattattttaaatacatatggccagtttgattttttaacaactttattaag

SEQ ID NO: 97271 - DNA, 1046 bp, Homo sapiens
ttggcttcttacatcatagtggctgtgtaataatattgacaatggctaacatttattgatcatttagagtgtgcttgagattggcctagtgctttaaggatattaatgttagttttcataacaactttatgaagcaggtttaatatccttgttacatagatgaggttaaattaatgtcagactatgtggtagagccagattcaaatcaaattccagagcccatacccttaacccttacataatactactggtaggatattgaaatggggtgacttttgaaagacagaggtatatcaggggataatggcagagtgttaagaagttaaaaaaaaatctggttacttaggtgatgaaatttaaaaagtttctttacactgtaactgtctagaatagttagccaaggaatttggatttgaaacagtagggagccactgtgggtttctgagtaggcaaattgaagtggtgaattctggcagctttttgtgtatgttggataaagtatgaagagattggaagtagcttaggtgataagctgagaggctactgaagtaatacttttgagaattaatgacctagagtggttgatggctggggaaatgaaaagcaaggacaataccagcgatgtaagggaagaatctatcgaatttggtattaaatatggaagtaagggaagaagtagaagtgaacctgtcagttttaggataggtgttaattgataaggcatctatttagataatattttttggggggatggggttagtttggttgctaaacaaatgtatctcactaagttaaagttggatttggacagatacaaatttgtgcaggtggtagatgaattccttgtatataaagcaaggcagaggatcaggggctgatttataagtgatatctccaattgaagtaggaaggaggaggaggggaaatagggagaatggtcccatgaaagtttaaagtaggagtttcacaagaaggatataattaaaggttaaaatgtagattattctgttattagtatgatttagtttggggaggattttggggtc

SEQ ID NO: 97272 - DNA, 1016 bp, Homo sapiens
gcgcgcgggttgattcgtccttcctcagccgcgggtgatcgtagctcggaaatggcgggtaagttaccgggaaaagtttaccaaggggaggaggcggccagatcggggatagaacgccgagacggtggtgacaatgcccgcctagaactttcgggctgtagcctgggttccagaaggcctgcttgggaccggaagcgcggaactctcagcccagcagctccttgttggcggcggtccgcgcccccgcccccaactgcttggggttctgcgccttctgccagcaatccggcccctaccgagggccgaagacgccagggaaaagcgtcatgatttgggctcgtaaaatgccacatgccttggggcctgtttctcttcccattccttttgtccactgctgcttgcttcagctcttgtacatctggtcctgttcccgccagctgattttaatgctcagatcctcctcctcttccaggtctccgtctaccttccactacagtcaacttctgagctagcgcattgctgccttgccctgctctggcgctcccacttggatctcgactgacttcgtagtcgtctcgttaatctgtcacactttagtattccgaggatcgtatttagatgccctttgagaaagactttgttcctgaactgctcccttctcttttagggttggactactataatacaattctcttgtgtacattctagagacccttcaagttacaacatttaataatgtataattgctattactttgtacgtgtattaaggctgttttggtgtgattatttttttcgattacttatcttttgaagttatggacagtttctttttcctgagacagggtctctctgtcgcccaggctggagtgcagcgatcatagttccgggcagcttccaactcctcgtaggctcaagcgatcctcttgcctcagcctcccgagtagctaggactacaggcatgcgccacaacattcggctaaaaaaaaacaattttttttaaccttttagagacag

SEQ ID NO: 97273 - DNA, 1421 bp, Homo sapiens
agatggagtcttgctctgtcgcccaggctagagggcagtggcatgatctcggctcactgcaccctctgcctcctgggttcaagagattctcctgcctcagcctcccaagtagctgggattacaggcgcccgtcaccgtgcccggctaatttttgtatttttagtagagacgggtttcaccatcttggcgaggctgacctcgaactcctgaccttgtgatccacccacctcagcctcccagagtgctgggattacaggcgtgagccaccgtgcccagctggcattcttaatacatttatttaagagtatgtggagaatgacttgtgcttttatgatctatcagcatgttttaaatcatacccctattccacttataataaccctattgcaggtttgacaatttaagtcacttccaaactaaaccttttaaaaaccttttctcttaggatttggtgctatggagaaatttttggtagaatataagagtgcagtggagaagaaactggcagagtacaaatgtaacaccaacacagcaattgaactaaaattaggtatgtatgccatttctaagtgatgttatgtacatactgtgtgtgtatatataatctttcattttaaatttgaagtaaaattttatgtaagagcagttatttatgcaaatgtatggttttctgcatttattgaacatattcagattttattcagttttgatttatgtcatggaaggtgtagatgtttgaaaggtgacagaattttatataaaaaggaaagacggtggggcaaaaagtaataagtatatatagttttagcctcttaaaaatattttttacttttttgcctgtaagaataataaacaatagcaaatattggtgaggatgtggaaaaaaacacttgtatattgctggtgggaatgtaaagtgatataactattttggaaaacagtttggcaattttcttttctgtcttttttattttctttccttccttctcttctttcatttcctcccctcaccccttttttttctttctttcttttttaaagagacaaggaaggtctcactctatcacccaggctgtagtgccacggcatggtcatagctcactgctgcctccaacccctgggctcaggcagtccttctgcctcagcctgccaggtagctaggagaccacaggtgtgcaccacccaagcctggctaatttttataaaaaattttttttttgagacggagtttcactcttgttgcccaggctggagtgcaatggcgtgatcctggctcactgcaacctccacctcctgggttctagtgattctcctgcctcagcctcccgtgtagctgggattacaggcatgcgccaccacgcccggctaattttttgtatttttagtagagacggtttctccatgttggtcaggctggtctt

SEQ ID NO: 97274 - DNA, 1046 bp, Homo sapiens
ggaggctgaagtggaggatggcttgagcccagaaattggatacgagcctgggcaacaaagacccccatctgtacaaaaaatttaaaaaattagttgttcatggtgatttgcgcttgtagtctcagctactttaaaggctgaggcgggaagatcttttgagcccaggatttcaaggttgctgtgagctgtgattgtgccactgtattccagcctgggtgacaatgaaaccctgtctcaaaaaaaaaaaaaaatacttaaacaaggatccagtaagggattgtgcactgcatttagttgtaatgtttcttaaataatctcttttaatacagagcagtccctttccgtccacatgcaacttttcccctacatgacattgatttatttgggagagtaaagtcattgcacagataaatgtacattctggatttgtgtatttccttttgatattagtttaacttcctcctctatcctctgtatttcctgtgaattggaaggtaaaaagcttgattagatttaagataaaaatttttggtgagaaaacttcatgggtgatgcagcatacagttggtccttgaacaacacgacttgaactgtgtgggtccacttacacatggactttttttcctaccaaatgcagatagaaagtacagtgggacaccagacagaactacaggacttgagtatgatggattttggtacagtcaggggtcctagagccagtctcttgagtatactgagggatgactgtacttcatattgcattgaatcaggaggcacataatgttgttctgtcccacaatgaatgatgctaagttagatcatttggaaaggaggtgactaccagatctctacagtgaaaatataccttttcttctgtaaattagtaatatgctggtgatactttggcatgcagggagtgacctggtctgtgaggacagtgttagaaatttttcatctacagtttatcttcttttttccccctgagacggagtctcgctcggtcacccaggctggagcgcagtggcacaatctcagctcaatgcaac

SEQ ID NO: 97275 - DNA, 1154 bp, Homo sapiens
ttcagtactctccccctagttttctgctgccaggaatttcccctgtgtatacttataaaagtacagcaggatgtatataaggatgtcattgcagtgttatttttaatagcaaaaaacaaacatgagaacaacataaatgtcatctagcagtcaaaaagaatgacttcatcaaactcaggttattgttattatcagaatgtttcttacagcattctgttttcatttgctgtaacttcttacctcaaagtgtctttttgtttttcctttactcattgcattgtgcataaacatggaaaaataaaaactaaatgaggtgcctctgtcatacttagccttctgattcttagaataagtagggttttgacgctgaagcactcaaagtaatattttaattttctttgttcactagtctcttgagaatacagtgtaaataaatcatataatggtgaaatgacacttttagtaagaaaaatgttggctgtatcctagttatactgaaactcatgaaataggaatacctgtcaccttcaatatctttagttatctttaatatctctatttttttgtcccttgaaacagttcgttttcctgaagatcttgaaaatgacattagaactttctttcctgagtatacccatcaactctttggggatgagtaagtaacttagtaaaatatttgtcaaattagtatggaaaaaaaaattttcattctttttcttttagatttagaaatcaaattttattttcttcttatttttaatgtggtttatcttaaaatatatgttataatggtgtttttttacattgagacaccagttattttaatacctaccatttagtgctgtaaatgcattatttaattctcacagcagtattaatgatggtattattatttgctgctttgtgcattgatagaattggataattgttcatgaacatacaaatggctggagtatagattttaggcaatctgactccagagcccataatcataactactacttttttctgctaccattttgctaaattacttctagtagcatgtattcccctaaagctgtaatagaaagcttaagttgttattctatgatcaaataagcagttgagagaagtttatttatttattatttatttatttatttttgagatagggt

SEQ ID NO: 97276 - DNA, 1047 bp, Homo sapiens
gtaaggcaggtgctattgctgcagctctggattttggtgattcagtaagcagtaagttggagggactggtccaaggcttggtagctgcttgcctagccaggtcctaatttaacactacttctctcatttgaaatgccttctaatactggtaatggtagcagcagcagcaacagtagcaatagtattaaatgtctgacatttagtgagtacttatacaatgtgccagttttataagtagtttacatgtattaacttatttaacccaaacaacattcctgacttaggcaacattcctgagttattctattttatagatgaaaactgaagcacattttattgtagattttttttttaagtatagtttaaaatcttgaaactacccatgaagttaaacttgtttatatgtagggttaatactttttaatgactgcaaaaattcattccattattgctattttttccatttcagtgaaactgcttttggttacaagggtctaaagatcctgttatactatattgctggtagcctgtcaacaatgttccgtgttgaatatgcatctaaagttgatgagaactttgactgtgtagaggtaagaacagaaatactttttaaactgttttccaatttaatttattttaaaataggttttaggccaggtgcggtggctcacacctgtaaccccagcagtttgggggaccaaggggggcagatcttttgatcttaggagttcgagaccagcctggccaacatagtgagagcccatttctcaaaaaaaccacaaaaattagtggggcgtggtggcatgtgtctgtaattccagctactcaggaggctgaggtcagaggatggcttgagcccaggaggcagaggctacagtcagctgagatcatgccactgtactacagcctggatgacagagctagaccctgtctcaaaaacaaaacaaacaaacaataaacaaatagtttctaaaaattaaaggtttgggctgggtgcagtggcttgtgcctataatgccagtgcttttggaggctgaagtgggagga

SEQ ID NO: 97277 - DNA, 1053 bp, Homo sapiens
ttcatattcattattcaactttagtattagaaatattttgagttctatttgttttttttgtgtgtttttccccacttcccagccatgtttgagatgactgagcttgccagataaataatatgtaactacatttaatatttgttttattttatatagtttgtttcccaggataacttttgaaattgtgcagatacaaaagtgattctgagtaatactgtagtggtttgatgtttgaaaagatgtaatcttagataaactagcatttaacacatttattaaaatagagttttttcataatcaaatatgtagattgctaaattctccagacccaagcccagctagatattcttattaaaaatgcaggtgatgtttttccttgtgtgtaaacccactgttggagggtttttgttttttacagttgcagctgatagcactgaattgatttcttccaaaggaactattgatttagttatagataaatcttttaaatatttcatgcagtgaaaatagctgtgtatttgcattgacatctaattgttccattcttgaaaattaggtttttccatttagaaatactgtgttaggaataaggaatcaatcttttataatgtctctttgtagagttacttatttgctttgtggtcaaagatcatttatattgcgtattcaaacaaagacttttttccccttattaaaaacgattgggtaggggatatgtgggtcatgggcttgcttcttctatctcagtttgcagtgagtgttcattccatagtgccttctgtgttgttgatgccagcgatacagtggcagacaaagtcatggagcttacattctagccaagaggaacagtcagtaaacaaaatagtaaatacacaaattaaattcaggcagtattatgaagatacattttgctcatttctgaatgataaaggaggaaccagccatgttataatctgagggtaaagcttactaagatacaaaggctctaaaaatacagcatttttggcatttttgtagtccagaaagattaccagggttaaatcattgtggtga

SEQ ID NO: 97278 - DNA, 4402 bp, Homo sapiens
aatatgatttctttgacacatataaaataataagcaaccttttgccttggccagttcagactgtcatgaaggggtatagtcagctgtttctgcataatggaaatgtccatagcattgcccttattattgtacttggtatcaggtcacctgccttctcttatttacttttatattatgctcatctcagttttgtgtgatgcagtttgtgcacaggaagctcatccttttccaattcgctgtgtgtttacgtctttagttttcaaccaaagttttgtaatttgtgttggttttgtcagttttaaagaaataaaccatattcaacttaaagtcgaatttgttattaattttttatatcctttattctttaggcagatgatgttgagggcaaaattagacaaatcattccacctggattttgcacaaacacgaatgatttcctttctttactggaaaaggaagttgatttcaagccattcggaaccttacttcatacctactcagttctcagtccaacaggaggagaaaactttacctttcagatatataaggtaaagataaatctaaatatttattgagtaaagttctatttgcctgaaacctgtatgtagttttgttgtcagtgatttattctaactgcagtaaacaagttttaatcagcattataaaccaagatctattttgtgtgtatgtctgtatctatgttcacatcttaatctgagacttctaaacattttcccacaggataattttgtgttctgcggactttcacttacctttgtgatgagtttcacctgacttttcctggctttttccctaggctgacatgacatgtagaggctttcgagaatatcatgaaaggcttcagacctttttgatgtggtttattgaaactgctagctttattgacgtggatgatgaaagatggcactactttctagtgtaagtacagttctaaagcaacagtagaccttattacctccacaaagccagcattttaattgtggcagcccaattattgggacagtataatgatatttttcccaggaaagaaaaactattgtttatgaggcttgagttttccttcattatgctttgggagaccttgagaatagagctgaattaaatgctgttgtccgttagggccctgaatgtaggcttaaacagtaaaatgagctttgcctgtgttttcttttacttgccacctattcatctttataataggcaagtgcactgaagtgatgtaaagaggtctgatttatccaagttgctgcacaccaattaagtgaattgtacattcagaacatagcaggtgtacccattgggccctcacagagtagcttgctgacactgaaaattcagtcagagaatggaaaagaaaatggacactgcatgggagcgcgactgtaattgacctgcttggctttctgttttatctgcagatttgagaagtataataaggatggagctacgctctttgcgaccgtaggctacatgacagtctataattactatgtgtacccagacaaaacccggccacgtgtaaggtaattggcagtataacacgtgccttgtcttttatttcagaagaaggaactgctgaagtttccaatacttgttataatagtgttgatttgtttaaaaaaaaaatcactattattcatgggctatgtactgatttatttcattgttccctttgaaacagtgtagaagattaaactaattttgagtatcttgataatttttgggtatctcaaaggtggattgaaaaaaagatcacacaaactttaaagtgtttgtaatactatagtgatctgcaggttttaaactggtcatgttatgatattttaattttaaaataatttctttactgtagtcagatgctgattttgactccatttcaaggtcaaggccatggtgctcaacttcttgaaacagttcatagatactacactgaatttcctacagttcttgatattacaggtatgtaaaatttgatttgttactgaaagagcctttctaaaaatgtcttcttactgattgattttatttttgtcagaaataactattttaaacagcaacattttcctagggtgtttaagccatctaaagatggcttaagtttatgttttagagcataagcctttgtggggattggattacatccctaactgtgaagtgcataatggaacaaattgaagataatgagctgaatatatatggggaagtcttggtcaggcgtaaatacgttgaaagtatggtataacttatttgttcactttatttggcaaacagttgcattatttagaggcagcctgcactttaatttacatgtaggggcagaatattataaactttactgagaaaaaaagtcaaggtaaatacttcttgaatagaatacacatttcctaaagtgtgtgttttgtattcctaaaatgcatgccttcacaacagtagtagataaggtgaaatgtaggcctatttgttttggaaatgtctttcagtatggattagccatagaagtagtagtatgaatagaatgcttaggagaaggaaagacgacttactcgacttactcgacttgactcttcaaaaggagaaggcattattagatggagtttcagataatatgttaaagtgtgatccaccaaaaaacaaagtggcccaaggaatatttatgttattttctaactttcaaatttgttgttcataaaattgctgatgaaactgaaagttacctttttcttttattgaaaaatactttaccagatagttacatgcaaattggtattaaaatttattaatcttacaagtttgaatttggatacatctttgttacaaactatactatttaacatgcactaaaacattaacatgttaaaaaatgctatttgggaattttgtttaaagacaccacctcccacccacccacccccaccaaaaaaaaaatggttgtaagactggcaaccacataaataggctagtaagcagattgtttcatccttctttatatagactagtaatccaaggtaaataaaattgaagttgcttcagaacagtgaattgatctgtagaataataaactggagggaaagcacgttgtctttaaaagggagtttcacatttatagaggtgaattatcttttcatctgactttcctgctactgttaaatgggttggaaactcaggagataaagtagtagttactaaacttcgtttataacaaaagttataaattgtttaagcgacaacttcactagcttagtgacttataaaattgtagaaacataatacagactatgtcacttcttttagttgagcagaaaattgtttagcttctattaacttatagagcttagacttgctgctacatgaagggacatttttggtgattttaatgtggagttcacataagtagtctttgtctactctagtgggtaatgtgccagcaggggttgtttctctgaagcctcttaaccactttcttctgtctactccaaccaataaagtccttgatacttagcaccaattagcagataaagaattttatttcttaaatctcagtgaagagtcatcaataatggtagcctttattcattggtgttattcattagaaactgaagtctctaaaaagaaaagactaaacatgctaaaggacttctgaatttgacaactgggtattggcctttattttcagcattaacatttctcagcatttaaaaatactaaaaatgccttatcagctgttctcattaagatatttatttctcctagatttccatacccagtccttaaaaaacaaaactgcagatttttctactcttctgtcatttagttgcctgtttctccattattgtgtgtgcttttttagctttgtggttcttttgcaggctctggatctccatttgcaatccagaatattctttatattgagatggccttttgcttacttgacagatagccagatctaataataattgaaacttcctgtagatggcctaagttatatcttacttccaatggatgggtgtttgtggtataattgccacccattttcatttttttgcactcaattttaaggtaaaatactggcagacaattccttgtataccatctgccttttgaagatactattctcttaagatgtacagcatttgaatacatctcagttgtataactttataaatagaatcaatgatcttgtttcctctggacttctgaaaggagttgcatttggcaatagaaatcgattctgggctggaatacatatcagtattattatctatcagtagtacattaagagctaattatatttgtcctttaaatgtactttattgttctgggatgtgccatatagctttttagaatattatgtgaattgtttataacttaggtgattgtgctg

SEQ ID NO: 97279 - DNA, 1044 bp, Homo sapiens
ctttcctcccctcaactcctatccctaggcaaccactaatctactttctgtctctataaatttgcctattctggacattggaatcatgcaatatatgactagtttctttcacatagcatgttttcaaggtgcattcttacagcatgtaacagtacttcatttcttcttattgccaaataatattccattgtgtggttatatcattttattcattggtcagttgaacattttagattattcccacattttggctcttatgaataaataatgctactaggaacagtcatgtacaaatttttatgtggacctgtgttttcatatctcttgggcatatacctaagactggaaattatgggaaatctggtaactatgtttaactttttgaggaatcaccagactattttccaaaatggctacaccattttacatttccactaccagtgtatcagggtttcagtttctccacatcttcatcaatacttgttactgtgtttttaattctagccatccttgtaggtatgaagtggtatatcattgtggttttgattcacatttcctgtggctagggagactgtgcatcttttcatgtgtttattatccacttgtatatatcttattgataaatgtcaacttagatcctttgcccattttttagttgggtctttttttttttaccaaattataagagtttgtacaccaatttatatgaatctggatacaggtgctttattagatacatgatttgcaaatagtctcccattctgtatgttatttttttcatttttttactggtgtcatttgaaacacaagagttttaaaatttttgtcacctagtttatttgttttttcttttgttgcttatgctttggtctcattatctaagaaaccattgtctaaccaaaggtcatgaagatttactcctgtgttttcttctaagagttttgtagttttacctcttaaatttgggactgtgatcaattttggttaatttttatgtatggtgtgaggaaaggggatcccactttattcttttgatgatagaga

SEQ ID NO: 97280 - DNA, 1037 bp, Homo sapiens
aaatgtctttgcaaaaggattggatttattattttgacaaagataatagttttatttataaggaataatcctttcatgttgtaacttttgtatgtgtaattttttaaattacacattaaaaattttgtatttttttatgtgtaattaattttgtatgtgtaattttttttaatttgtcttcctagcctagcatatatgttgagattgcaaaagatgaagaaattatattgagtatcagggaaatgttaatattattctgctttatttatttagcggaagatccatccaaaagctatgtgaaattacgagactttgtgcttgtgaagctttgtcaagatttgccctgtttttcccgggaaaaattaatgcaaggattcaatgaagatatggcgatagaggcacaacagaagttcaaaataaataaggtatttttattctgtaggaggaaaacagatttaaattacaaacaaatttttgaagtgtataccttaactaaaatattataaagacattaagaatacatgtgtgggaactagcaatggttaacagtacagctttgaagccaaattgcctgagttcaaatctagctccaacacttgctctgtgatttatggcaatttaatttacctcgtgcctcagtttcctcattaataaaatgggaagataataggtgttattgctatattaagcataacaagcagaggaaagatggataataggatcttatttttactctttaaagtagttgtacccctggagacattattggtgggaagaatggttgaagtaaaacacgtatttcattttatatacttttatatatttatttaaattttaaagtggtaaatgtcttaagataggtacagaaaaaataaatatggaagttcagagaagaaagtttattacatttatgtaagcaaggaaatcagtggttatttcatagaaaggatggcatttgatataaaccttgaagaatgagtaggatttggattatgaaagtatgtgagatgggctgggagtggtggctcacgcctgta

SEQ ID NO: 97281 - DNA, 1125 bp, Homo sapiens
cttatttaaaactcaaaatttgtgcatattgcttacattcctatttaaaatctgtcatgaaggctggggcagtggcttacgccagtaactctaatactttgggaggttgaggcaggaggattgcttgaagctgggagttgaagatcagcctgggcaacaaagtgagatcccatttctacaaaaaaaaaaaaaaaaaaaaatagccgagtgtggtgcatatgcctatggtcccagctgctcaggaggctgaggtgggaggatggcttgagtctaggaggttgaggctgcagtgaactatgatcgtgccacattaaattatccataccataatcatttgtgttacccactagactgcttgagggcaactacttttattgcctttcctctggtttctagcacaattccttgctcatggcagatattaaatatatcctgtgttcttttgggaaagtgtcattatttttactttgaaaatgttcgcattttcttttgtttcattctagcaacacgctagaagggtttatgaaattcttcgactactggtaactgacatgagtgatgccgaacaatacagaagctacagactggatattaaaagaagactaattagcccatataaggtaggactttcaagaatcttaaacactgtattcttttcactgtttaaaacagaagaaaagctaccaaatatcagtatatgagagagtccaagtcattttgtaaaattaacttttacaaaagtagaaatattcttccagtaatttataaaaattctcactcatggccgggcgtggtggcccacacctgtaatcccagcactcagggaggccaaggcgggtggatcacctcaggtcagaagttcaagaccagcctggccaacgtggtgaaaccctgtctctactaaaaatacaaacattagctaggcttggtggtgggcgcctgtaatacagtgacttgggaggctgaagcaggagaatcgcttgaatccaggaggtggaggttgctgtgagccaagattgcaccattgcactccagcctgggtgacaagagcaaaactccatctgaaaagaaaagaaaagaaaagaaaaaaaacccgggtgcagtggctcacgcctgtaatcccag

SEQ ID NO: 97282 - DNA, 1470 bp, Homo sapiens
aagtatagcagttttccatttgtctttctgaaacatttctaacagtttatgttaaaattagcatgtggcccgtaagtacttcactgggtggaatttaaaatgtaattaattaatgactgaatagtaaaatgaagaataatagcacttaatctcagttgtctttcttcagctaatgtcttctatctattaagcaaatatttgagtgtctatactgcccagagttctttaaagttttggagggggctgctagtcacatgtctgtatttaccatcattggacacaaataccaggtcttcttgttaactctttttagagggtttgcaattcatggttaacattatgtttaagcttccttaaaaaacaaaacaaaacaaaaaaaaaacattgtgggacaagtttgggcgtattcatactattcttatttttaacattggagacttaaaattgtaagactataaggaaatatatttactttcttcgtctaacaaataattgtttgtcacttagaaaaagcagagagatcttgctaagatgagaaaatgtctcagaccagaagaactgacaaaccagatgaaccaaatagaaataagcatgcaacatgaacagctggaagagagttttcaggaactagtggaagattaccggcgtgttattgaacgacttgctcaagagtaaagattatactgctctgtacaggaagcttgcaaattttctgtacaatgtgctgtgaaaaatctgatgactttaattttaaaatcttgtgacattttgcttatactaaaagttatctatctttagttgaatattttcttttggagagattgtatattttaaaatactgtttagagtttatgagcatatattgcatttaaagaaagataaagcttctgaaatactactgcaattgcttcccttcttaaacagtataataaatgcttagttgtgatatgttaatgtgtgatgatatgattcttaaatacttacaataaacctcattcttaaatacttatcattccttccacactttgcttctaagattttacatctgacacctttaaaacatttctttaaggttatcctggtaattttattttttcaatatgatttttctttcttttttaacttttagattcaggggtacatgtggaggtttgttacataggtaaactagtgtcttgggggtttcttgtacagattatttcaacacccagatactaggcctagtatccaatagttaatttttctgctattctcccaacctccaccttcaagtaggccccagtatctgttgttcccttctttgtgtccatgtgttctcatcatttactcccacttgttaagtaagaacatacagtatttggttttctgtgcctgtgttagtttgctaaggacaatggcttccagctccatccatgtcctggcaaaatacatgatcttgttcttttttatgactgcatagtattctgtggt

SEQ ID NO: 97283 - DNA, 1418 bp, Homo sapiens
tgttcacttaatctccctcatcactcatcatagtaccccacccttaaccgggatactatgttgctagccttctccagtcagagacctctctgttttattctctcttgagagtgttttactctctcctaagaataattctgccagaatggtagaggggtagtcattacattttgtagagtatgagatctggaggttagcagttcttcgttttagttccacttcactcttgtatcaagagatacctggtgccaccagttgattcctgggaattcttgctttctctaccacctgaacaggattatgttttcttggttctgctgccatttacttcctattatctgcttttcagcttctggtctttttttgcttgtttcctgttgtctcctctcctgttctctaatcttatagggtcatgccctaatctacaagagaggcagcaagggtagatgtgtatttgaactttggacttctgaaatgaattttgttgcatcttggccagaaatattgcccttatacgtgtcatattttgtttcattttacttcagttttgcaatttccttttttttttttttttttttgagacagagtctcactctgtcgcccaggctggagtgcagtggtgcgatctcagctcactacaacctcctgctcccaggttcaagcgattctcctgcctcagcctcccaagtagctgggattacaggtgcctgccaccacactcggctaatttttgtatttttagtagagacggggtttcaccatgttggtcaggttggtctcaaactcctgatatcgtgattcacccgcctcagcctcccaaagtgttgggattacaggtgtaagccaccgcgcccagcccagttttaaaatttcttttgtgggactaacccttatctaattttcaatccttttcctttacctagtgacaattacccaatttctcaaacagttcactgggtcttatcacctctgatatgatgacagcttgaagggcctcaagtttttctgcaagtccatttttttttctctattaaattctgggcaagacaacactgttaatctttgaagactatccatgaatcacatttttgtccatattcctaatttttcctttaacttttttttgccctcatacttcatgtctggtaattttgttagtcagaaatctaccacttaccactcatgggatgaaaaaagcacagtccttaccctgagggaacttacagtttaatacaggtgaacgtgagccaccttttatatatatgtatgtatgaaaggttttagatatatacacatatatacatatatacacatatatacatatatatacacatatatatacatatatacctatatatacacatatatatacacatatatatgtctgtcttgttccatgaaaggttttatatatgtgt

SEQ ID NO: 97284 - DNA, 1025 bp, Homo sapiens
ggggaaggtcacgttttgcagtgacctgggcaccactcttaaatgttgttattattggaagagggtaccctcaggctgctgcccttcctctccccagaagcgctctgtgactgactttccagttcatcttttctagaaccaagactcccaggctgtagatgaattctgacatctacagaccagtatccatctcaacttcatttgaggtgaattttattagtagtagtgacccagtcctaccttaatatgagaatgatgcatcctcataaaaattgcaaacttagagcagtaaacaactaggataaacttttatgtttcagcataaaagtgagttatgacttttttgtcatttaaaatattgcacacatttcctttttatttctgtgggatctttgttactgttttagtggtcttaagtaaaaataacttcaaggacaacacggttggatgtgaagtagaatatttatttcagacaagtattatgcccacatattttagattcaactatgtgctttattttcagcattaaagaaaatgagctgttttccaacacctgcataccaactgggcctgcatcctctttagaaatgttgtttaataaacactgtggctttatcatccagaggctgttgccaaatgctgttaattaggccaaaaaaatgttttttaaaggttggtgaaacagatccacttttctctctgtaatggcatcttagcttgaaatccaggaagcagtggtgtatggtgtccatatccacgatttcctgcattggagaaaaagtgtggaaagcatctggggaaaaggaggctctttaccagcttgtttcctgtaagttcaattggaagaccttgtctgtgcaaatagatttcaaaatagagcctgccctttgactgtctccataattacatggctcgctctgtattttatttggcagccagagcagttaacccctggaaggaaggggctgatggtatggccagcttggcttcccaggcatgtccatgggaatgaataaaccactgtt

SEQ ID NO: 97285 - DNA, 1160 bp, Homo sapiens
ctttttcagtcaataaggtattagaataatgatttaatagacaacaccacaacatcttaaagtggaggactgtgttaggttgtttttttacttaaaatatgtctgtttctgctcacaggttctcatagaattttctcttcaccactcaatcatatctacttacacaagcagtcaagcagtcaacaaagaagaaatttcttttttcggagacaaagagatatttcacacagtatagttttgccggctgcagtttcttcagctcatccggttcctaaggtactgtattgcctattatctcctgctttttccagccaagataaaagttgactgcagaagtgatcaaatatttttgcacctttgatttctgagccatttgggttttaattttcaaactaggtttgtgatctaaaactgtgatttgagaagttttaatatcctgcaattctatagcattaattttttaaaacaaagctctaagctttcaattgcttagagtatttagaattaaaatttttaacatgaaattttctatattaaatttctaacatgaagataaaactatacgtatgtagttttctaactgttttagagaaaaaaaattgactataaaattgtgatgattcaaaagagattacttaaaactaacatactagatttttttaagcctgttcttacattttccttgttattgatgctggtgtctttgaattgtcttttagactaaattaaataaaatatgtctcagagcagtcttggcttttttttttcagagattgcaattctgtggaaaggcaatctatccatttttcaaaatgcaatataaagggagtgtgcgagtgagccctttaggaagaaggagagtagctaaagaaatatagattggtcacaaaaatcatctgctttctcccttttatgaactttgtttacagcgagcccatatttagtatgttatacttctgaaggtgagtggcccacttttatggcaaaggccagtgacacagaagggccaccaggatgtatcccctggcctggccatcacagtgagagtgagaatttggtattagttacaaaactgacacttttttccttagaagaaaagaaaaagaaatctctggtgaggtgaattgtattgctttagccatttcagtcaatttcagcat

SEQ ID NO: 97286 - DNA, 1036 bp, Homo sapiens
taatgcatttcattacatattcactacattaattctagctacattaaaaaaaaaagaagaagaagaagaagagtagaattgaaagtgacattggattttagctatctggatacaaaggtcagttttcacagagtatgaatttgcatgtacaagcttttttgaaaaccagatcagtcagtcccaacaactgcacttaaaaaaactatgtggaaaataacagacaatgaactttttacttgtaccctaatacatttcattatttagatggtttatgtctgccgctagaaaggaaactggccccgattctaacaaatatttgttctgatgtgttaaagcagtgtttctggacacctattatcttgccttttcttattctggcaaaatcttaggggaataagtaaacaaaccatatttacctttaagccaaaagtacttgaaatcattacagaccaaaggtttacaaacatctttcaactcggtcttgtttattttaagatattcaccatcttttgcgtagcctctctctactgatacactaggaaaagaacaagcaacttgtattagtatcatgttatcaaaaaccttgagatctctacaggaaattttggaattctcctctgaaacctaaagaagataatgtctttgaggaagtatcagctaaaatgttttaatggaaagagttctctctgggcccttttgcttttgtgaggaatgtctagtaatctttaggtcatagtgttactagactcactgtatctccatttgctttaaaatatttctaaatctgtatttttataattatctctagattatacaatctgtacatatgagtatattgtgaatgtgtagattcatgcatcatgaatatgtgacagttcaatcaaaaataatttaaacttgtaaatgtcatgatgaaagtatcaataaatggtttttaatgtttaattcataactatatgttttgatattaatttggaacaatataaagcagatttttaaaaaataatctctttctattagattacgcacatttaaa

SEQ ID NO: 97287 - DNA, 2361 bp, Homo sapiens
gagtgtatactcagctcctgagagtcaggcattaagatgtgctcaagcagggaactgggggaaatttggcctgttcttttcctctttccacctggctgtgaaatcctctaacctttgcatccatgacacacagattctatgatactcctggagccagaagttccagcaggacccacggagtaaattgttgtaggagaatgctcttagatatctttagccacctagtaattgcacagcttcttttatgcagaggaacgagaggtatgatggggggagggaccctaagtgttttttcagagtgggctttcttcctctcctctcatcggaaattaaaatgaagattgccattgtaacacacatttaagatgtagccgtgatgcctgccaatcagccggatcctctaaaaacaaaaaaaaaagaacctagatttttttttttagaagagaaaatagaatagtttatattgagtgttcttagaatcattgaggtttgttgggattgaactaacataatttataggtttagggagaaactgttcctgtaaaaaaaaaaaaatctagattattatgtcctatttaattatctttcttccaccctgtattcactcttcatcctcagtgtttattcagaaactgtgtggcacaaataaaaacaccttgggaaacaccaaatagaaatacttgcccaccaaagatccacagaaataaccataaagtacaacgtaagagataaaaaccttgacttaccgttcctgtcctcaacatatgtatagcttacctatttctgcactaacagttacatcaaaattaaatctgaataagaggctgcccatctgctggttatagtgacatccaggtctaagtgaagctgtcttacaagtctggggatggttaaaattatttagaaaaatgtataaacatgaatggccataaagatgctggctgaaagcctgtgggttcatgttaaactaaacttagagtctgttagagactctagtttgagatctagaaacttagttctgttaataattgaaatagtagtcctgtaaatcccaatctagtgttagggttaggggcattttgccctttgtccacatgaaaatataaattcttaatagtatatatgttcttgtttgtctgatgctccccaaaataaacatgttagctgatttcaaggactacttttcaatcttgtagatgaagattttagaattggagtctgtgtgcttggtttcagatggaatgtaaaacatttgcatgtaactaatgtagtgcatgcaatgtacttctccacatacatgtaatgaagtaactaatgaagcactaagaattgggaatcacaatactagcttatcttaagcatcctagtgattaaaaagcattctttatgaattttgttaatggtgcaggtcttgaatggaactctcaaatgatctcacggttttggagtatttcaagaatattgacaaagtagattgagcttttcgtgtgagtgtgcctgttggtaaaatgtgtaacactttgaaatagagcagaaaaagggaaccatagaagtagaaagtcatatttctatattgtaatttgttttatatttggttccccaatcaggagtaatttatagtctttttgtgaaacctcaaaaaagccaggcaggtttttatgacctgcattatatgcacatatatcccggttatgtatggcaatcactatgtgtgtatacacactcacttgttgtctaaaagtggctttgtttgaatgctgtacaaaggtaaatgactcaaacgactgtgttggatagatatgtaccttctctcttcatatatccaaagacagtggttgcaggcaacagcaaaaattaaaattattacagcataatgaaaacacatgaatgttattatctgactctaaatattactgactttttctttttcagagaatattttaaagtgactttgttttatcttagtatgcctgaaaaacttatctaatttaattaaatattttttggtcacttttaaagccacataactcatcagaatggttttcaagtctgtccacattttgtgggacatggaataggatcttactttcatggacatccagaaatttggcatcatggtaagaaagttcatttggaggctgtttcttgatcagagatcaagatgtggcagctttgaccctgaagctcttcctctgactttgaatctgcattatcaaccttgtgtttgtgtgtgtgtttatgtgcagggggcaggggaggggggtctgcttaattttaaccgggacattactgtgttactggattagagcccagctgtttcaatcccaaaataaggtttattttgctctctgtcttctcctg

SEQ ID NO: 97288 - DNA, 1102 bp, Homo sapiens
ttcagcaattaagtttgccattttacatggtcacaggtcttggcacccccaaacgattaccatagtaacatcaaagacatgatcacagatcaccataatagatataataataatgaaaagttcaaaatattgagaaaattaccaaaatgtgactcagagacatgaagtgaatccatgttgttgggaaaatggcaccgatagacttgctccacaaagagttgcccaaaccgtccatttgcaaaaaacacagcatctgtgaagcacaataaagcaaaaggtagtaaaacgaggcatgcctataggtagtttctttggaatttcctcctcgtaaagacagaatgataaaaagcacctacctcacagaattattgtgaggattaaatgagatcacataggtaaagtgctcagaacggtgcctggcacacagcaagtgctgtaggagcttttgccgtccttcctgttttctggctagagccctggactagaatgttatgcagctctggcccccgggttatttctctgtcagctcagtgatgggagttcatgggttcctactccaggactccagcagtgtgagatacagtcactcactctgtccctattttccttcaggtttgtttgctttacgggatgctttactacagtcaaatcctgagagaaagggctttgattggtccaggtggtttctatccttatccccattgggtgaactctgttgacgggccagccaatagatcagcggcccttttgtcaggtcttctcctagtccaatcagctctcaggggccacagagtgatcagtgaggggtgaggaatcaccttgggctgcctccctccttatgcagagggatttgtcgggtgacccttaggacacctccaggaccggaaggactagagttcccactgctgcaccatcagcccccaagaagcaacccactttcttctgcttcctcgggtgccgccaagaatcatcagaagaagccaacccattgtgttatctgaaagccagattccaggagtttcttccaaaacgcttatagaaggcaccgacagcagggctgcttctcgactccctcttcctggcatagctgcaggcacattat

SEQ ID NO: 97289 - DNA, 1047 bp, Homo sapiens
gctcacattcttctctctcctgccgccttgtgaagaaggacatgtttgcttcctcttcaaccatgattgtaagtttcctgaggcctccccagctgtgtggaacttcgagtcaattaaaactctttcctttataaattacccagtctcaggttatgtccttacagcagcataagaatggactaatacaaggaccttcacgagtatctcaggcctagcaatgcccactagtctggacaaaggcatgcatggctgtggagaccctctggcaccatgtcagccacacacatttcttagtttcatctctgttacttcacagacaatgctggaaaagtacaatagatgactgggttgagttacctctctacaacacagggaagaaaatgctcaaggccataggaaactgggcagacattccagaaataggatgtccagggattcaaagacaatgccatcatggggactggccatagggagcgcttgatccaggaatgggcagaaagtagtgccattcggctccccagctggtgaaaggaacagccatcctttggcttccacctggggaaccacctggagacccctggtgttgggtaaccaccttcaaactgcagttctgtctgcccctcccctgcatcactcaggaacttgcctctccatcctctggacctcatggtaaatgcatacccttgcatttcctctgggacaattgtctcttatatagtttgagcccagggaaggccttggcttggtcatcacagcttacataccatattcttcttcccccactcctcatacccccagtcaaataaggtgattttgatggttaccaggtagctcgtgaggccaagatattccatgcaccagggcttgaggtgagtcaatagggaaacacagaatctactgtattgttaagcaaacactctctttatgggtatttggcccaaacaagctctgttatgtagagcacactgatagaattgaaaatgtaaaatgttaaaaacttagcatcaagaaacagtggctcaaaataaacatggagatgaaagatca

SEQ ID NO: 97290 - DNA, 1031 bp, Homo sapiens
acaccagggtaggttcatcaaaatctatggaaatgtccgtaggttgcaggaaggtcccctgattctgaaacacagggctggagagaaggcacagtattccaacggaataattcacagaaccactggcagagagtaaaggaattcttggctttatctgggttcccctccccccacttcattcaacattttaaaatactttcacctgcttcagtgaaggcacagctagggaacttgttgactaccacgtgctgttattttagttaatatccttctccccagagctgagcttgtttgcaggagggctttgcaatgcgtggctttctttccatcctgataagcttcatttccaagctggtggctctccgaaattcttttgcaaaacagagcctcagatctctccctccttcctggttctatggagattctatatgagaatttagaacaaggctcagcattcaccagaatcgcctgggcttcttttctctcctgcgattgctatgttaatgaatctgttggatgtcgctgtgacctacaagctcctacccagcgggagagccctgcatctaaactgctgatatgtcacactaagaaaggaaaagaggccctgcctggccaggcagaggggcaagggggtttgggaagccttccaagactcagatcattgtgtagagatgtaaaacatcacaactctccttgttattactggtgataaatggctgggcaggcagatctgcaccacaagaattgctgaaattgaggaaaccttgtggaatgaacaagcaattgaggaggaagtgagaggccgatggcagtgtgaccttagtggcagaaaagccatatgtcatgttgctgtaacaatttatggcaaatatttctctgtctggggtttgcctttaaatagaaatcacaaatgatgcaagctcagggtcatcacctccaagtgcaaagtcctgccagtggagaaagctgcatggaagggtttcacaggtttggggaacttttggcatgaaagagcccagctctttgagttt

SEQ ID NO: 97291 - DNA, 1044 bp, Homo sapiens
aatgggcaggaagaaaggccacattggattaaaaacatggttgtccaacttggagtaatgtagctgatgtgccagtggcttgcagcctggataaaatacacactaatagtggatttgtagtgaataaaagtttgcgtatgttcttctggtatgcactggacagccacgcttattaatagttggtggatttctgattactcagtgtccatgccatacaaattcaaaactatatcagctaaaagtgttgatataaataagtacttcaatataaataagtacttcatgggacagctttgaataaagcatgcctatattttatgtattttaatataagcaagcatatatattaggcctgggattttaaaagcattttctgagcccctttagccttttcttaaagtttctcaggggtaacttccttgggtaaacaatgtggccaagtaggcagggccttggtcaccctcctccactttgtcaaagcacctgctcttttgcgttgggttctgagtaagatttcttttgaagaaagtgctccattaataagaaaagtggttgaaatgctatgaaggttttatattaaatggtactgtggcagtatgtctatggagaccatggggattctaggggaggggcgcctaatttagtcttgggggtgtggcatggattagcaaaggctttccataaaaagtgattcctggctgggcgcagtggctcatacctgtaatcccagcactttgggaggccaaggcaggaggatcacctgaggtcaggagttcaagaccaacctgaccaacatggagaaaccccgtctctactaaaaatacaaaattagccaggcgtggtggcacatgcctgtaattccagctactcgggaggctgaggcaggagaattgcttgaactcgggaggcagaggttgcagtgagccgagatcacgccattgcactcctgcctgggcaacaagagcgagactccgtctcaaaaaaaaaaaaaaaaaaaaaaaaaggtgattcctgagtgtgtgtagaacaattgtgtatctttca

SEQ ID NO: 97292 - DNA, 1016 bp, Homo sapiens
tatatatccctatttgctcattatcatgctgtttggcatgcacctgtttgtttatcttgctctcctagtaacaggtgagccccttgaaaatagggactttattcctagtatcagagcttaataagcctaggataaatgtttggggagtaacccaccgcctccactcagagcctcttactctgctgcagtccctgctgttcccagcacacatccattactgcatcattgctatttgtttgtgtgtctcattttccccattgcattgtaaagttccttgtgctaaccaagtggtctttattcatttctgttatctggcccatagtacaatgcctggcatatatagaaggtgctaaatcagtgtagaaaaaatatttttaaacgtatgtctctttaactactcagagtggcagattattatatacctttttgtttgtatcttctggagtgcttggcttgtttaatgtgacttttgtcaacacttggtttagatattccttaaacgtcctcgggtaccagactgtttagttgcacaactagacttctgttactcttcatattaggaggagaataaactcagagacaatgagcacaatctgggcattttgtcggtcccacagtcctatcatatcctgggatatgtctttattaggcaccttgtggagagtgcccaagcctttcagtgagctgggattctcagacctcagacgggtaatacaagggaatggggctggatttgggatccatcaatgagggcagtggtaggtctgcatcaagtccacacttgtaggtggagaatccagaagcgagaagaagccagagggagccctgaaagggggtactggaaagactcccagagacaatgggatgcagcaagggccttgtcgctgcacactcacgattgagtctatgggtggagagggattgtctggggccatgagtgagctctgaagtaaacagaaggaagctggctcttggctacatgcagtggcaagccagggggccaccacagacacgcc

SEQ ID NO: 97293 - DNA, 1104 bp, Homo sapiens
tgtctatataccacattttctttatccgatccagcgctgatgggcacttaggttgattccgtatcttggctattgtgaatagtgctgtgatgaagatgcaaatgcacgtgtctttttgatagaatgcattattttcctctggttatacccagtcatgggattgctgggtagaatggtagttctgttttaagttctttgagaaacccccaaactgctttcaacagtggatgaactagtttgcattctcatcaacagtgtataagtgtttccttttctctgcagcatctgttattttttgactttttaatacttgccattctgatggtatctcatggtggtttcatttgcacaaaataagagatttaaatattttttgagttaatagcattacttaaaatggcatctgccattaatggtattcagatgaaaaagaatggaagcaattatcagacctaatcagaggaatcaattacaaaataattatgcaaatcaatgctgttcctgtatgcaagcaataaacagaaattataataaaaatatagattccattcacaataagacacacacaccataagatatagatagtgctatggtctgaatgtttgtcccccacaaactcatatgttggaacctaatccccagtgtgatagtgttagaaagtagaaccctgtctttacaaaaataatttaagaattagctgtgcatggtggtatgtatgtgcctgtcgtcctaggtacttgggaggctgaggtggaaggacctgagcctgggaggtcaaggctgcagcaagctgtgaccataccactgcactgcagccaagacaacagaacgagactctgtctgaaaaaaaaaaaagatatattattaataagtcagtcccccaaattaagctccaatttccaacacattcctaataaaaaaaaaaccaataggattttggagaaaacctgacaaaaatgttctaatacccttctgaaaaaaaattcatgtaagggcgaggcgcagtggttcatgcctgcaatcccagcactttgggaggctgaggtgggtggatcacttgaggtcaggagttcaagaccagcctggccaacatggtgaaaccca

SEQ ID NO: 97294 - DNA, 1765 bp, Homo sapiens
accggagaaagcaaagtgcagccacagtgaagagattttgtgtttaggagaggcgaatgggattttagaactggaggaaacctcttgatttcagcggttaacaactttggaattcgtgaatgttgcagcccctgaattttagtcagtttttttttttttctgataacacctgctaggtgaagcacagaaattagctgggggtggggaggctctaggagggtggtctgaggctatatgcctggccagctgcttatactctgctttctctcagaaataattgttgttaagctgtaaatctgaaatgaaaggttcctgttaactcagttaatagatgacgtttattgtctcggaatacttggtgtgtagaatttgagcttgttagtgcagaaatgattgtgggccagcagagggaattcattctcctgggcattctctctctgcaccagagccccactgaaaccggtggcttccttgaaatacttgttcaagcaaaaagtgtgaagggaaagtactgggacaagaaatatcctggcagtggagatttgcgaaacgtgactttgccaggaatctgtgtcgtgaaggttagcagcatgcttgctaaaacttgttactgctgctgggcttctctggtattagagctgaggcaactcctcccgaggtaaggataagcctgcaatggggtctgatgccttctaggaaagctcttcttagcagctgacagaggggagaggccccgtataaggagactgtatgtttcctagagtccaaaggcagtgaccacactttaaagaggctgtggtttatgtcacgtgctgcccacctccatgcttttgtaaagctttattccagcttcaggaatagcattggtcttcccaggagaaccagcacacacaggccatagcacaggtcagttgtcaacctttgacagtaaagaatgtgggtgtaaatggcagagccagtaagactgagaaaacttctggaccagcttcctaaactctatggaaaaactcagtgggggtctttcagggacctggtgggagagagacctaagctgagattccttctcggccttttattagcagctgttaatttactttgagctttaatttctttatctgtaaaatggagatattactgcttactggggttattatgaggattaagagataatatgcaaagtgcttaatgcctgtctggcatgggtacttgctgactaaatggtagctgttaatgatcatttaaaaagcagtaattgtgtacctactgtgtgtcaggtaccttacaaggtgtcttaaacattctgtgattctaagattgcctgagagtaaagccaaaggtggttgtttttgggtaatgatattttaaactcagtcatatttatgaaacccatgttcaaagcaacttaactttaataggtcttaattagacttataacaaaagtgagtttaatgaacagaggactttgaggaaggagaagtaaaatatcagatgcatgggacggtcagataaaagcacgatcatagaagacctatcataaatgtttgtagttcaaattttctatagtgcctttaactattcagtcacattttaaactccagttatgacttttgcagaataatattgtgtcagagagccccaaaacatgtcgggtgttcctaaagctttggagactataaaattgaagtagataccataaacttcatccaggttttcaggctgtatattaaagaagtttcggactccaaaagattactcaatggtcagc

SEQ ID NO: 97295 - DNA, 2220 bp, Homo sapiens
tcaggccttggtgtcttctgcctctgaggaaacggaatctgtaagcttagcaaagaaacgcacaagacgttaattcttggtttttgatttttcaaaggcggggggttccagctaagggattttcatgagtgtttgtaaatttcacctggcttttgccctaaaggcagactttagaacctaaccccagaaatacaggctgacctacactgcagtgggtactcgggacttgctgaggtggttggttgttatgaggctggacagagaaggatgactgtggaatagagatctttctgaaagcaacttgacaggggtgtgggggtcaaatggaagtgtgcagtacacgtgtgaagtcacttgtgaattgatagcggcaggtttatttcttcaaggatagtaagggaatcttggatatatttaactctttcggtaggatggtgggaaggctgcttacctgctccgggggtgagcctaggagccatagcatgggatctggggatctgtgtagcacccccgctggctcctgggaggatggtaaagattacgtactgcagcagtgggaagtggacgtagtctcagcccccggtgcccatcttccctttctgggcttgggtacaactctggaatcaaataactttatatctggaaggaagcttaggggttctgaaacctggctggtcttcagggtaactacttgggcaaccttttataaaagtgtgattctcagcccagcctagatctgttacgtcagtttccataagtgtgctccaagaagctgttcttaaagtcttcttcgtttgagtcagactagcttttctcctttacacagaaggcagagtgtaatgtagtgactaagagcagagcctagagccaggtaggatcaaacccttttctgccattgactagctatgattttgtgcaggattcctaaccttcctaggccttcctgccttcagctgtgaagctagtatcctcgcacattagaatagtcctggtccagagtgagcattttgtgtttgttaaatagatgaggaaaccaaggctgtaagaggtgcagtggtggcggcatgtctagcaaacttggtcttcaatctgcatcttccctgcttcccggcctgtgctgtgtatgtgctttctccttttaggtttggttttcatcacgtttaaaggtttggttttcatcacattctccctttcttccattccactctccagttgaaaagtgcatctcagaagagccatgccttctacttagcagcccttcgtagctactaagccatagataaatcccagtgaggtctcagtgttcagagatgagtggacagatgggtgcatagacatgacggggcagtgactgtgagctggatacccatggagggtgggtggtgcagttataggttgggcttactgctaaggaataccacctgtctggtttccaggccttcttagacctctatgaccttgaaagcacccccacacctccatccctaggaggctggataacttgcacaacacccagggcaggtttgaaaacgatttatttttcttagttttttgcttggcactaatgtttgctaggaaggagcttgtggattattgatgacaaaactgcctaaggttggaaagtatgtgggcaaatatggaagtagtgtttccttcacaggtttgttaaactggcatttagatttgcaaacactgatctcttggaattaagttaaaaggctaattgttaattagccctgaactggggcaggtagatgggcctctcaccagtgcaggtccctgtcaactaataacagggtttgataaccaccatcaaatctgctatctggcttttctgcttagataaacaaggcaagacgatctcaaaccagcataccgattccgaggttggcatgtttgtagaagactgttctcaggccgcagtgtggcagcagaccctccccagttcagccccatgccagattccaacgttggatcccactgtcgcttcatctcatcctaaattggcagaaagactgtttagaaaactaagtctctaaaaccaattaaatggtaaagaagactgttctgaattagggggaatgggatgaagtaccactaaacgcaagtcacaaagggcaaaaactcatgacatggagccgtgggtatctgcttgcatgtttatttgccaagcggctagtatattttgcatgtcatacaatctgaaacttacttttttga

SEQ ID NO: 97296 - DNA, 1105 bp, Homo sapiens
taattaatgcagaagtgttaatgcaagagaggggagaatggttgatgtgatctgcaaaaatataaagtagagagggaacagggagtgcagatggggagggaagtggtcagcagtagggctgcctgggaagactttgctgagaaggtgaagctgcattcctggcagagagaatggcaaacacaaaggccctgaggcagaagcatgttcaggcaaagcagtgagtctccttggaggcagattgtatagggccttatggatcatcgaatgactggcttttactcatgaatgagatggggagcatttgtaggttctgagaagagtaggacatgtcctcacttggattttaaatggatttctctggcctgcagccttgagagtagactgtatgaggacaaagatagaagtaatgatactgactaggaggctcctgtaataaacagataagagatggtgatttggaccaatgtggcagcaatgaatatagtaaaaagtgcttggattcaggatatgtcttgaaagtagagtcaacaggatttcctggggactaggtatcagttgggacagacagagtagagaagaatgtgtccaaagtttttgacctgagcagctggaaggatggagttgtattatggtttggggagagatgtgagagtaatagattttgggggcagggcaggagtatggttttagatatgtcaggtttggagtgtctagacagccaagtgagttatttaggcagttgagtaagcagctgagtcaattaaaaaaattgaatttaaaagcctgaagttcagttggaaaggtttgattggtgatgcaagtagaggagcctctaggttgtgtttagaatgatgaactgatgagggcaccaaggacggggatggaggcctgagccctatggtgttcttacacatggaggttagggagagccctggagactgacacccatggcaggaggagagggagggagtgtgtggtcctggaaaccacatgatggggtttcaaagaggaagtgaaagatcagttatatcaaatgacacttactgagatttgatcgctagattggcaatgtagaagccactggtgaccttgtgagagcactgat

SEQ ID NO: 97297 - DNA, 1059 bp, Homo sapiens
aactattttccacttgtagaagttgggaaggaacttggggaatggcctggaaaggtagaccaccatcctcatttcatagaacaagaaatggagacctaggatttgtcatagtcctgcagccagctacagacagagctgtgcctacaattcccttcttgtcctgagttgtttctgcttcatttcccactagaaccccatcccgccctcacccctaagcagaggtccagctagctaatgtgtctgtttttataaaatgccaccagaagcttaagtacgtcggttcgtgtcccatcaaacttgtccagatctctttctcatcatagagaggtaccatcctgagttgctcagatgataaacatttctccattagaaactaggctcggatttgcctgtggccacaaatccagaagcagctgtgtgttccccatgtttctcaccaacccctgcgtcatgtttctgaataaggagtcctggttaccgccacacccctcattcattgctttagattagatgaaaggcgaggtgcctgactcaggccactgactcactctgcttgggtgaacccagctcctcccggtaggaagtgattgccccaggcaggttgaggagtgcccacagcatccaggactaaagcatttggaccctgcagctatttataaacagcactttacagtgctttcagtctgaatattgggactcccctagaaaggacagattcagtcctttctgaaaggaggatagacgaagggtgaggagttcttgttggatgtattttcatagctgaaaggttcccctgaatgctgtcagtgccatggatgttcatagggaaggttagagttcctgtctctgatgtcattcattttatgctgcagctcacttgactgtgggactccctaggaaagcttatctaccttttcagctgttgcacctcttttcttccatgtagtttgccctctgccttacattcactcttcattgtaatgccccagttgccagcacagtgcctggcgcacagtaggtacgtgtttgtgagcttgctttactgatgtgttgtcatgc

SEQ ID NO: 97298 - DNA, 1036 bp, Homo sapiens
atgcccagctaatttttgtatttttagtagagacgaggttttaccatgttgactaggctggcctcgaactcctgatctcaagtgattcgcccatctcagcctaccaaagtgctacgattacaggtgtgagtcaccacacccagccccaattttattttaaaatgagctagttatatatttatttctgtacttacaaatttctgttgaagtggaattcttgatcattttaaatgcaggccagttgcttttgtgatttttatgttgttgctaatgttattcttttttccttgaggttattgaaattcttatgttgggaggtaagaagcaagtgttggtggaccaaggtcacaccaaaaatagatcctagggatagaaccagaattccagaattcttttcctgtctcctcctccattttcctgatctgaccgctcttattagcatattccctttaaatagttgaaattgagggttgtgatttcacattttttcccccggtacgtggtaaagactttgagctgaaggagttgaaagttgtggatgttaaaaacacgttctgctttggatgttcctttactgcatgagctcccttgctcttaatgagacacacccatagtaaagtccagacactcagtctggacttaactgagtcaggttaagaactagaaccctcaggcgcaaatgtcacatgagcatcatattcactagaaaatgggtttagttctagcatgctctttcaaggaggcaggaaagaaggcatcttgtgaaattttgggaaggccaggataaaattgctggtcttgtgctccagttaaaggtaacaggtattctttgcctttaattttgcctttagcacagatctcaaagtacttaatagacgttaattataactgaccatgctcttgtaatagattttttttaatgagtaaactggggtgtagtgatgtcatcaaatcaagcagaaaggagactcttggagtagtggtttagagcaagatctgggagcccaggagtgctaggcacaactcctggtttgtc

SEQ ID NO: 97299 - DNA, 1896 bp, Homo sapiens
gtagtacaatctcggctcctgaaacctccatctccggggtgcaggcaattcttatgtctcagcctcccagatagctgggattacaggtgtgagccaccgcacccggccaagaatgaagtctttatagaagtagattaggccaagtcatgacactagaaataaaaaaaatgcctaaaactagggcttctagtgtgaatgctgggaccccaagaattaagctgtcctcattctggcatttgaagagtggtttgcagtctgataactagctggctacccactcagcctaaagcgaatccctggagtcagcagccccacccaggactccctttcagaattcctgctcagggtgagagcgagccagaaatggacctttttatacaacatcagaacaaaagagaacagggattatcaggcatgtgatgagagctagcagcataaaaggcaatggccgaagcaaaccaacagaaaaactacaagaaacagataatccaggaacacaaagaactgtaggaaaacttctaggcaaaatgcttagaattttgggaacatgttaaacccacagaataagattaggatctgttatgtaaaaggcacagtcagaacaaagagctcttgaagactgcaaatgtgactactgaaattaaaaatgtcagtataaataccagaaaatacagttgaaaaatctcagaaccacagagaaggagggaaaatgagagaaagggtagattaacccaggaggttcaccacctgactagttaacagaggtttcagaaagaggacagaaaacatacaaatgaaacgatccacacacaataaaaagagtttccaggaaattcatgtcctaagtctgtggagtgaaagaggtcccacataggctcaccatcatgctgttgagaatgccttgggtaaagtagagaacgtggtggagcacggtggttcacgcactttgggagactgaggtagctggggcctcaaggtaggcggatcccttgaggccaggagttcaagaccagcctggtcaacatggcaaaaccccatctctaataaaagtacaaaaagtagccaggcgtgatggcacatgcctgtaatcccagctacttgggtggctgaggcatgagaagcacttgaacccgggaggcaaaggttgcagtaggtagagatcatgccactgcactccagcctgggcaacagagagagactgtctcaaaaaaaagaagttacccttttgagagtcagactaacaccagaatttccactggcaacactggatactagaattaattacagcagtgccatcaaggttctgaagaaaatgtttttcaacctggagttttacacccaaactatcaagagtgagagcagcataaagacatttttgtatatgcagagtcacactcagtttacctgtcatatgctattaggacagtatttaagaaagtaattcaaacaagggggaacatcagatcccagatcaaatccagttaccccaggatagccatgaagggctgttccagcatgatcctgtgtagcaggcccggcagaacatcaggtctacattgctgcagaaaggtccaggggctctgagaagggagtgtgagccaagatgagatcctgatttaacgcgggtatggcttgggagcttagagaagattgaggcttggataaaggtgaacaatagaagaaaaaagaaaggcaatgagaaaagccaaggaaagcaagagtcatggtccaaatgtgaagtacacaaagcaattgatagaatgtaagaatagcaagtctgtttgaccttaatgctaggaacagtttcttttgaggctgagggcttctgatactgctcccagacagaaaaaggaaaatcagaatacagtttggttcagcactgagtaatacttattt

SEQ ID NO: 97300 - DNA, 1043 bp, Homo sapiens
tccagttcctaatttaaaagtctgtgtgtcagttctgtaccttggtgtgtgctgttttgttccttcaaatgtagggtgggtttggaggtgggggctgactgtgactgtccagggatctgggaggaaggacagtgctggggctatgtgttatccatgagccacccctccttctctgtctgggcatcatctggcccccctccctgctttccaggtacacttgcctccggtggcacctgctgcatgatattggtttaaaaaaaatatgttgaatcctttattggaatgattcctttattgggacccaacaggcatgaaggtaatagagactatttggtttgtattttcatttgttttgcttttgcttctgagatttgtgggtttcttgatggccaggagtggcttgttttctgttgtaagaatttgttgtttgtacaggttcgtgttcccagtccttttcctcagctccagccttgtttccaaaactctcagctcttggtttatctctgtccagtcaggtgtgtgttctttgtctttgtttcttgtcctagttgttccatgagtcagccaggcctcaaagattgtaaacctgatggtgagtaaaggtgttagcaaaagagacctagcaacaaggtcattggatctctaaagagcctgtcaagctgtgagatggtgaaattttaaggactgtggatttggactgggggcctccttataggagataaaaacactcggctggggagaagaaggaatattacagtgcctagtacataagtggagctacaccagttgtccctgaatcctttgtgggagactgataggatgagagaggacgaactcttgtaatgtgacaaaagtgcaaggaagtaagaactgacttggaagaacaaacatcaacttgtacacctcaaatatatctgctttttatttgtccattctaccctaataaaactggagggaaaaaaaaaaaagaattggaaagaggccaaggctgcaagtgaataattcagtcgagttgtatcttacttaccattaggttctctcaa

SEQ ID NO: 97301 - DNA, 1069 bp, Homo sapiens
ggcaaggtcgtggtaagtgtagagacacatgttcatcctatactgttggactgctggttatgtgccagcaccaggcttacagcaggggacagcagggagcatacattctagcgaacttactgctttaaagcaggaatggatgtcaaaaagaaatcagactgggcgtggtggctcatgcctgtaatctcaatactttgtgaggccaaggcgggcggatcacctgaggtcaggggtttgagaccagcctgaccaatatgatgaaaccccatctctactaaaaatacaaaaattagctgggcgtagtggcatgcgcctgtaatcccagctacttgggagactgagacaggagaatcgcttgaacctgggaggtggaggttgcaagagcaaaactccatctcaaaaaaaagaaaaaaaaagaagaagtaatcacgtaatcaaagccttatttctcctgtgattcctgatatacttagaagcaatcacacaacctacttttctttagaactttcagatttaaataacttattaaagaacctttactaaatattcctacaactctagatggtattaaaaacaaaacaaaactagacatcatttctgtccttggaattttatagctttatagataagttagtaaaaatatgggcatggtcttagaaagtaataaccaggtagttttaacctcttgttatttattctgagttttttcaaatagaagggatagcaaagaaaagagggtttgttaggtggattgggctagatggtcatggtaaggccttcctggttggaatatgatctttttgtctccttcaaaatctggttgctgtaacgaaatttatacagaattttgagaaaaaaaatttagtgaacattgagttttgatatttaaggaatgacatttatggaaaattgatttgatactgtatttttaggctgtgtttacatggaggttagccattcataccctgtagaaattatagagattatttctgtctcttctggccttgtaattctctctgccttttaaaagtaggcatattttgggaaataatctcagagctcagggtgt

SEQ ID NO: 97302 - DNA, 1534 bp, Homo sapiens
ccactttcacactgatgttctgaaggtttatacagccactaaaagccaatttgaattaagaaaatgaaataaggtgtttctctttgtttatgtgacaggtaaatttacaaataaattgcctatggatacagattgtcattcaattttggattggaggattattctgagtgagaataaggcacattctagtttctatatgtcttcataatggtctccttagtgccactttggggaatatttgctggtctgggatccggtcccaagatgaggacatgcttaatcatcctctttagaattaacctctgtattgaccattttattcatatgtaattttttaaaaacaaggtttatagacaagaatgggctactttcttccatctgcttgcagacatgtgctcaccgatatgaaaaaaggcagcatgttaatacgaagcaggaatcccgagacatctttgggcggtgttatgtcctgagtcagaatctcaggattgaagacgatatggatgggggagattggagcttttgtgatgggcgattgagaggccatgagaaatttggctcttgccagcaaggtgtagcagctacttttactaaagactttcattacattgtatttggagccccgggtacttataactggaaaggtatgacctttgtatttatagaaatagagattagttcccctaatttctgtaatatgatttagtacattttgagctaaaatgtgttagaagacattcgtatattataaaagttgggtaggatattaaaaatctctaaatgatatgatttttaaaagctaataatagtggaatatatgttttggtgttgacattcttttcccctctaccagtactttactttaattcaggtagttaacttttttttagcaggaatataataattaacattagtattttttgctgttttagatttgtgcgactcatgaagctggaagtgttaattttaagttagtgatctgaaaacttaggaggattaaataatggtatatacaaataacagtgtattaacatggacattaataacagagtattaatatggacatttctctctgtatatgttattttcaaaggccatgctttgctaataattcagtagagttagaagggcagattacagacgaattggggaattttgaggtataatttcagatatgtgaggaaaagtcgtttgattattgtgatgtgagtaaatggagatgtagagaggtaaagaagaaaatggcccacattttttgactgtgtatgtatagaaaatgctatatcataaaagacaacctaactctcatccatgatgaagagaactgcatctgatttggaaataagccatttttgagaaatgtattaataataagtcacataacactttcactcatcagggaaaacttaggaaaatggtcccttttccattcaacaatttgttttaattgtggttctaaatgactcttgaacacctttctctgtgtgcaatcttcaagggtaatttccctttgcccccacctccaccccaacag

SEQ ID NO: 97303 - DNA, 1079 bp, Homo sapiens
actatatgaaaacttatgttttaaattactaattgtaagaatttttaaaagatgaaatcttggttaaagtgatctaaagaaaagatcaatatgtctcacttttacactgcaaaaaaaagacaaattgaggcaggattacagagaatgtaaaatatatatatcaagttcatgtcatttaaaaattggttctctgtagattttgttaactaagcaaaccttccatttttcatctagtttcatggcattataaagatagttcatgaaaatgcatgggacagtttttaatgactcaaacaaatttctttcccataaaaatttacacaaatgtattttacaaccataaaagtcatctctgtccttcctttttttcctccaaattttttttcctgtaactagtgatagcatgggggatgtttattaggaaccatttattttcttttgtttcatcttcatttttttgttgtttttaccatttcattcctttagggattgttcgtgtagagcaaaagaataacactttttttgacatgaacatctttgaagatgggccttatgaagttggtggagagactgagcatgatgaaagtctcgttcctgttcctgctaacagttacttaggtaggagcaggcacagatggctgcctttgcccaccttctcagataccttgtgtgaaactccctcgcagggcctatggcccctggacttctaggctgagaagaggccaggtggggccgggccacttttgctggaatttgataagcttggtgatctagaggcgttaaaccgactgatgcctgggatcctttccttctgactggggctccctcaaagggggaagaaacctcttatcacctaaaatcatccgtcctccctcctgctcagaagtctgtctcttgagctaatggcagcctccgtaacctgaaacaggccgctcatgcagccatgaaaacatgcatgggtgttcacagtaagctgagatctttgttcagtgcctccttccagagatactcttaagaactgcatttaataaagttactcttaagtggcaagtcaagacctccaggtcctccctctgtga

SEQ ID NO: 97304 - DNA, 2176 bp, Homo sapiens
ctaggttctcaaataccatgtatcatcagtcattgttttgtctgcatgtttgtgtctgagaactaagttggtccaaaacaatgaaatgctatctatggtgtattaatgatgttagcatttgtttttgtctgattaccaaagagttgatgcctcttaccaagcttaattactttttcttcaattttattttattcctgtaaaaatactggtcattaaattacagcagaaccctgtaacatgcactcaattatgcttccagtcaggttatatattctctgtgtatatgatgtaacataaccaaattattcctggacaattcagtatctagcttgatctccttttaccatagttccaatattaaaatagggtggaaattgattcttaagatgtatgaatacttcaaaattcaagttatacataggtgcttttagttaaaagtcttaatatccatagaaagcagtaaattagctagccccaggactttgtccttgtgtcacatctgaactctgtcactcatattacgaatgtgatagctggtgggagggtcaagaggagagaggggtgggaagccagaggaagaggtaatgatggagttaccaatgtcataggcctaaaatatatggattgatgtgaggggctctatatattttgtttttctaggtttttctttggactcagggaaaggtattgtttctaaagatgagatcacttttgtatctggtgctcccagagccaatcacagtggagccgtggttttgctgaagagagacatgaagtctgcacatctcctccctgagcacatattcgatggagaaggtctggcctcttcatttggctatgatgtggcggtggtggacctcaacaaggatgggtgagaaagcctcaggttatattatgctgcaaatcatttctgctttgactagcttctatacgactggagaagagccgtcctttcaggttcattgacgtaaagaatatttttattgccgcatttttaccagcctatctttatcatttctatgatggcagcagacagacattcatatccctccccagcgtataggattatatttttgattttcagtttttacttatatgttgggatcatgagtctatgagaattaaaatttgaaaaaaattgactcagaaaacacttgcatgattctgttctgtggtttcatatggggctgatggagcatcagctcccgttgaaaacaggaattggtgataaagtaaaaaacagatatgtggctgttggtgccagttgggggggttagaacagtgaggtcttaatgggagtcctgctgtactatggttctaactcgagaaattggctttgagttcttacccttagtatttttcttggggcgtttattataggctaccttggtttttaaaaaatgttataattgagtcataaattctggagttgagggcctttctattatatgtctttgtatccttagtacctagactggtgttgctggtatgttagctgttggttcacggctctttcccctcattatgtttttaggtggcaagatatagttattggagccccacagtattttgatagagatggagaagttggaggtgcagtgtatgtctacatgaaccagcaaggcagatggaataatgtgaagccaattcgtcttaatggaaccaaagattctatgtttggcattgcagtaaaaaatattggagatattaatcaagatggctacccaggtagataatagattatgaaatggctatgatttatagattatttgattgtttaaataatagcgctgctgggcacagtggctcacgcctgtaatcccagcactttgggaggctgaggtgggcggatcacctgaggtcgggagttcgagaccagcctgaccaacatggagaaactaaaaatacaaattaactgggtgtggtggcacatgcctgtaataccagctactcccagctttggaaagctgaggcaggagaattgcttgaacccgggaggcagtggttgcggtgagccaagattgcgccattgcactccagcctgggcaacaggagcgaaactccatctcaaaaaaaacaaaaaaaaaccccgaaaaagccaaacaaataaataatagtgcttgtgtcatcttactttaaaacattttactagagtgtttctaaagcgtttgttaaa

SEQ ID NO: 97305 - DNA, 1043 bp, Homo sapiens
cgggatttctacagctagagtctcaactttttgccctataataaaatatttaggtttaagtgacttttcacacaaatcttattttatttacaagtccacaatagtataaattttttaaaaatgtattactagaagataccttcaaaataaatatataaatgtaatgacttgcttgttctaattgtaaaatttcttagataagttaggaatcaaggtaatccaaagcaaatgaatgttattctaccctgacggcattaagataagaggaaatacgatatattctctttagtagcatactaaatagagatgaaattggtcaaacaaaataaatgactgtaactacatggagaatgtagacaccaaaaattaaaaatgtcttttgagaaaaataagacttgtagggaaggtagggagatttggtttgaaatggcctgattgacttaatacaataaacaagctcatcagaaatgggctcttttctgctttgagatactatgtaaatcggatgacttttatgaaatgaaatgtatgaagtgttagatcatatagaaatttatgacttgtatataatataatttacttataagtgaactctcaaatttcagttcaaaagaaacttgtgtgtctttttcaaagcattgttaagaagctcatggtgataacctaatgtccattcggatgccctgtgtatttcaggttctcaagggtatatcaccttattttggatattcaattgctggaaacatggaccttgatcgaaattcctaccctgatgttgctgttggttccctctcagattcagtaactattttcaggtctgttatctatgattttagtgttaagcatgttctataatcaggttatactaaaatgttgaccttttggactgaaatttgtcatacctatacttcaaaggtttatatgaattgtgaagctatttctttttcttttgaagttagtaaacaatgtaataacaacctattttctaaaatcttttaaagtatctgaggaaaacatagatccaagttagaatttttacttca

SEQ ID NO: 97306 - DNA, 1040 bp, Homo sapiens
ggaaaacgtcacgtgtattttttttcctgtgtttttaagctgtgctgggcagctaaggatgctctctagtatgtgaattagactcacattcaaggtaacagaggctgagcttgtttttcactccttttgtcttcagatcccggcctgtgattaatattcagaaaaccatcacagtaactcctaacagaattgacctccgccagaaaacagcgtgtggggcgcctagtgggatatggtgagcatccctctgtcttggtgggatccccctcagtttcccacctccacttcatgatgactctattgtcctgaggagccacagggaagatgacaggagtgctgggcaaagggaagagggtctgtcaagtgtttttataacatgttgatcatcaatgggcattggggggattggagagctagggaacatgttgggttttttccactgcaataatggatcttttaagaaatatgtgtttgattttattcagcctccaggttaaatcctgttttgaatatactgctaaccccgctggttataatccttcaatatgtaagtacctagtacctttaaaatatgtctactttctgtctgccaggttgaaagttctgcataaatcacagaaaaataaaactgcagtggccaacatgggtctgtcaattctggtgtaaagaattaagtgtatgttttgtctcccttttaatcaggagggcacagcaccgtgagggaggaaaaaaactccacttggtcgccatttgagttttccagagcagatggtttaggacagaatggcttggaaaagtacttatttgctaccacaaccatttcctccatttctgtctttgaaaagcagtgtggaaaattgattttgtggttgtgaggtggtgggtggtggctggtggttgtgaggtggtgggtggtggctggtggttgtgaaagggcaacggcaggagccagagcacagcacagagtcactgccaggctgccttctcttccccacgcccctccctcccggaacacccgccctgtgttcccaagagcaggc

SEQ ID NO: 97307 - DNA, 1151 bp, Homo sapiens
tctcctgctgtgtggtctctccatgggacctgcagaccttgcacgaagcattcttagagtggatggattatgacttcgtgcacagggggagctgtggccttttgctttgctttttgatgcagccggcattttgtcgagtgtagaaagcaattctttgtgtggcttttaatgacaagaaaatgtatactgtgactcttcaggatctatcatcctttcagtatcatttgtgttatttttacccaaatgccataccttacactagcccacttggataatgggccctttgccagtgtttggaatgaattagagagacaaggagaaaacagtgattctttgactaggcagccagagaaaaaggggaaacatttttattctgttctgatggccattttttcaaaccactctcagtttgactgtagatgtgaaatatcatcagagcactccttgacttcccccaaattaatcacctatataaaatacagactttctcctagctgtagcacagcatttgatgccatgtgtattacttttatgttatgtagctactccattaaccaagtgtttatggatggccttttatgggtggaactttcctttgaagacattcaaagaacatttgctttcattgcttttacttccacagtaaattctaaatgaactaagacagaacttctacaaagctacataagttaatacatctaaaatcttctcccagtagccaagaatgtgagcttattgtttgactgggctattttagctcagcagtcctcagatgtggtgttccatacatatagatatctataattgagccgtaatgagtgttctacttggcttgcccctcaagcagttagcaaaggtggcctgcaaagattttaagatgatgtggactgtctggagggttagggaaggttagagtgaatttggcagataaacggttttcctgcacccacacctcccatacttttgctgtgaggggcacttttgctgtgaggggcactcagcgtgtgagcctttatctggttcattgtgaagctagcaggtcacttataaatggatgatgtcaaggctgcagaggcctaaaatgggggagcattccatttggcagctgtgacatttaagaattctccagatggacacaaaaattactattg

SEQ ID NO: 97308 - DNA, 1051 bp, Homo sapiens
tgtcagtgtttctaaattttgttctgaatagctcacattcagcataagaatgtcacatcgtgtgtgtgcgcatgtgtgtgcaagtggggaaccagttactgccacttctgttcatctgttccataaatcatatgtctatcaggtgttgtgctagttgctggggactgtggtggggaataagactgatgtgatccttgtcctcggctttgccccactgtgggagacaatcaggaaatcacagcgtagtgggcttaaatgtagagactggagagatggaatactctaggatcgcgaagagaggccaggacaggcttcctggaggaggtgaggtccaagctgaaatctgaaggggaagggagggcttagccaagcaggccaacactgctgggaggtggaagggaaaagaagggaaagacagctggctgagggaaggagtgactcctgcggtggttaggaggcaagtgagacctgggcatctaagaccctgtagaaagcaatcgccttttgtgtttgtgatagagactcagaagctggtgctgcttctgtccctctcagtatgaccccaagcctccccagaaaaggtctcttccaactctaaagtgaatattagaatgtgagttattcattttctgtgttttctgtagcagatttttgtcctggagattgccttctccagccctctgcacactttggtttgctttcccttttgatggttagtgactgcttaatgaatgtaagtaatttaagtattggcccatgaaaaacaaagttagcagccacatctaatgaaccaacaaagaatgcgttctgaagtaaaaaaatgagattctgatcatccacatcctagcttccctccaggttccattagtgtaggttatcaagaacaggctgtgccttctagcccagtgcaaggtaggcagtttggttgtgggagctatattatgctgaccgacaggccctccatccactcaaaaatatataatttaccttgtaattcttttttatctttattattatttttttgagaaagttttgctcttgttgcccaggc

SEQ ID NO: 97309 - DNA, 1855 bp, Homo sapiens
ggagaaaatcagtttaggtgctcgggggagtgttgggttcctctgcttatcgttagtattctgtgggttcatgaacttcagccagaaactgattcttaataactgctgctgctgaaaggttttaacttattcttgagctcccccaggtggcacaatgaaaatttaactttgaaacattgttaacagcaaaaggaaggaaaagacagcttgatttgaaccatcacaattgtgcaaatgcatattaccaggaaatatgaagagaaacaatggcaatgttttctacaaggaattaaaatcttaaaaggagttcaacatgcttgtggctggattgtgcatgaatgcacttacgttaatatgattttaattttatctagcaattgtgggcacacttgaagctgaaaaagaaagaagaaaatctgggctatcctcaagagttcagtttcgaaaccaaggttctgagcccaaatatactcaagaactaactctgaagaggcagaaacagaaagtgtgcatggaggaaaccctgtggctacaggtgagggctgcagatggtcacatctgttttatgaagaggacagaaaaaggttatatggtgatatacagatttctgaaatttattctggcaacctcttaatcaatacaaaatcattgttttggaattccccaatagcatgtacaccccacttaactctgactgcatgcttttcatgcaggataatatcagagataaactgcgtcccattcccataactgcctcagtggagatccaagagccaagctctcgtaggcgagtgaattcacttccagaagttcttccaattctgaattcagatgaacccaagacagctcatattgatgtaagtctctctgactttcattttgccaaagtttttttgccatttatgatgctaaatcaaatgtctttgaagggaatagaactagtgatttgctttaaaggccattcttttgtgttaatatgtttttaatgtacgcaaagttagagaagacttgtttcccaaattagcaataaacataaaaacatgaaatacaatttggggccagagcgtattttccttcttcatttttggccattataacctatcgagactataaatggtagagcttatattctaacactgtttctcctttagctgtacatagaaagaaaaatacattgtgttttacttaccattgagaatactgaaatgtagaaagcagtgtgttgctagtcagaacattaaaatcaaggaatatcaaaattcagcaaagcaaaaaagtattattagcatacagtagtcatttagtgcctaatatagcctaagtcatctttggaagaaaaatgtgtattagatggcctgtgggatacctcatatgaggtggggtctgtttgctaggggtttaggatggttaaggtgcaaggttagcccgggcagctatgacagcttgatttggcattatgttcttgctttcaaaatctaattgatgatgaacgggtgtggtggctcatgcctgtaatcccagaacttcgggaggccgaggcgggcaggtcacttgaggttaggagtttgagaccagcctggccaacatggtgaaaccccgtctctagtgaaaatacaaaagttagcgggtatgatggagcatgcctataatcacagctactcaggaggctgaggcaggagaatgccttaaacccggcaggtggagttgcagtgagccgagatggcaccactgcactccagcctgggcaaaaagagtaagactctatctccaaaaaaaaaaaaaaaaaaaaacaactaattgatgatgagtgtctgtccactatggggctgctggtactggtgccttactgaggcag

SEQ ID NO: 97310 - DNA, 1821 bp, Homo sapiens
aggacagaatggaaatttgatgtgtggcaaagtacatttaaagcttgaattctgcattggtaattgtcacacagggaaatgaactgtgtggaatagccagtcacctacatcgatgccttcctgagtcctgaatggtgtaaattgacaatagttttcgttttcctacaggttcacttcttaaaagagggatgtggagacgacaatgtatgtaacagcaaccttaaactagaatataaattttgcacccgagaaggaaatcaagacaaattttcttatttaccaatgtaagaatcgttgtgtagcactagcaaaaatgattctggcttcatggtggctttgtgttaagaaagtttactggaaacgtattgaggactttgcctttttgttcttgttttcttatttttaatagtcaaaaaggtgtaccagaactagttctaaaagatcagaaggatattgctttagaaataacagtgacaaacagcccttccaacccaaggaatcccacaaaagatggcgatgacgcccatgaggctaaactgattgcaacgtttccagacactttaacctattctgcatatagagaactgagggctttccctgtaagtattgttagagaccagctgagaggggaaaaaaatcaacactgtgtggcaaatgagtggattgtgacctagcgtgtgtttcttttacaggagaaacagttgagttgtgttgccaaccagaatggctcgcaagctgactgtgagctcggaaatccttttaaaagaaattcaaatgtaggtgatgccttcatatactgtattttactgttttaaataccattgcagtgtctgtatgcatggcctgtgttaacagctatttatgtttttttaggtcactttttatttggttttaagtacaactgaagtcacctttgacaccccagatctggatattaatctgaagttagaaacgtaagagttacatcaacctctccattcagaattatttcatgaaaatatgggcagtcaatgaattggccctgatctacctcataaaagaagtctaattgtagtgagaaaactgactggtaaaatacaaccctattgtttccttttcattttcagaacaagcaatcaagataatttggctccaattacagctaaagcaaaagtggttattgaactgcttttatcggtctcggggtaagtgtttgtgtttagcataacaaatcaatgtttgaaagaaccatttacaatcctcattaaaactggtgttttttaatttgacagagttgctaaaccttcccaggtgtattttggaggtacagttgttggcgagcaagctatgaaatctgaagatgaagtgggaagtttaatagagtatgaattcagggtaagttggagcagttggtcttttcattataccaaaagctgacatatactaggtatggtcttgagtatgtcattttaataaatcagcaatattaataagcattgtaagtaaatcatgagttaaaaattagtttgccagcttttaaagaacatactggcttatagtaaaaattttatcctccaggatggagaacaattgtcactgttcagaatccagttcagtttagaatgcgttatgatttattccttcctcctttataaggtcatctttctcactgcttgtggttgaaagaatattaatgtatgcctacctttcacaagcccagtttttgtggtgaatgtagatttggtatatgcctgtaggaaaggcagtgactggctctgaaccatttcaaagtaggcaatcacagtgactctctgtcctgttgaataaacataaacatagggt

SEQ ID NO: 97311 - DNA, 1124 bp, Homo sapiens
tgtgttcatcttttaataaaacacagttaaactttgggaggccaaggcaggcggattgcttgagcccaggagttagagaccagcctgggtaacatagcaaaaccccatctctacaaaaaaatacagaaattagccaggtggggtggcacatgcctgtattcccagctacctgggaggctgagctgagaggatcacctcagctcaggaagtcgaggctgcagtgagccaagagtgtgccactacactccagccaggacaacagagtgaggccctgtctcaaaacaaacaataaaaaacacttctaaattaggatactattataatgaagtcagggagagcagaagtcacatgattgagccaggtaagccatgctatattttagcatcagttaaattaaatccatcttgttaataaacacccatgaaagacacatgtatgccttccctgtgctaaatgttagagatgcaaagttgggtaagatacagtgtcaactgttaagaatgtcatgctgtaggagacagaaccaggaaaacactgtcaaattagccagggaaattgagggggattgtttattggttgtatttatattgtccccatttatccctaaggaagcaagtagagagtatccaagcttcctggctgtcaaaattttttttaaaatgaccaaaaaaatgcataattcttcaggggaataagattttcccttttggctctaaattcagagaacaacttaaaattcagagaacaacttaagatacggatccttttataagatggcctgttatatgataaacaccaagagtggatgatgtccttaatagataattttgtaaaagatacgaaaatcccttcattgggtgacttcctgtactgaatgaagttcaatgagaacagtgggtggtacattacagggtaatttagagaaggtattttggcagttgacaagctaatgtagtctcagcactgctcactggtaatcgaatttaatgcatcaacagagcttatatccctcttccccttatgggcacatggtggatgagtttcacaggtgtgcgtcatccccatggaaataactacattgtaatgaaaccaaaggtaagaaattatttttggagttgtaaagc

SEQ ID NO: 97312 - DNA, 2763 bp, Homo sapiens
agaatatttgactgaaaacacttctcagaagttaaatgctccccctgagttttgtttccctttactttacattctcttaactcagaaatatcagaaacttcaaaccagtggatctctaatcagtgtagtttacaaaatcatgttcacaataatcaccaggtctttagcatgctttgaaaaatagttcctggtatcacaaaagttcatttgcattctaaacccatgtaactgagttgttggaattgccagaagcagctttttaggtttctgagtaaacaccatttctatttaattgatatttgcaaactatcctatgtttagagtttaagcttctcagcagcaggagcaacttaagcgctaagctgcctctgagtgggtccagggtctagtttgttcatatacctttttgtagaagatggcaccaagccatttcaggaaatgttattgtttatgagggtctttagtgtgatatcctaagaaaaaggtaaaatggtgtccatcagtcatgcagccctatccctatttttgtatttcacaacatctttaaagtctgaatgaggaatgttggctacttttgcctaaactggcccttttctttccattgctgaatattaattaaaagaaagtataggccaggtgaggtggctcatacttatgatacccacactttgggaggtcaaagcaggaggatcacctgaagccagcactttgtgaacaacatagaccctgtctcaacaaaaaaatttttaaaaaaattagctgtgagtggtggcatgcgcctgtagtcccagctacttgggaggcagctgaggtgggaggatcacttgagcctgggaggttgaggctgcagtgacccatggtcacaccacttgcactccaacctgggcaacagagtgagaccctgtctccaaaaaaaaaaaaaaaaaagtatgattgttctcaaaaagataccaggttagatagatagaacagactggctgttagatctatttaactgggtatctttttgagagcaatttgtttagatacacagactggctgtatattgataattgctggaacaggatgatgaatacttaagggttcattatacagtttacttgtgttgataacaaattttttttaagatacattaacaaagaagtaaccactttgtcagaatacaacccagcattttcaagattctggggaaagatcttcaaggaatgtctcttgaagcaatattctgttaagagaaaggatcttgcatcagaaagtcatctcatccattcacaggctgcattgtccaaaatatattcaaaagcagaattagaaccataaactcctggtgtgaactcttgccgctgtatgtagtaatgctgctttcttttctgccctgtaggttcgagtgactgtgtttccctcaaagactgtagctcagtattcgggagtaccttggtggatcatcctagtggctattctcgctgggatcttgatgcttgctttattagtgtttatactatggaaggtaagtcatatctggcatttgaatttcataacaaactttatttcatgttttaaaaaatgggaatcagcactgatagtacgttttctttttcattgcttccttttttctaacattatgaaactcttttgacatagcaaatttgaggaaaattttaccatgaacacctgtatatttaccgaatattttgtatttaaagtatattatttgtacacaataagtttcttcatttgtctctcacacataatttagcatgtttagcaaataacaaatttagattttattactttagcattttcttcacctaagatataagtctggatctaagccaaattgttagggtgtagtaataatctgaatgtgtatccctgctaatttcagtttctgtgaagaatgttcatagcagccattggtgttggttatgcttacagctagatttggaatagaagagtatgacatgaatgaataactctatctcaagggggtcactatagcgtgtatcaaacataaggaaggtctaggttcaatatgatgttcctcattagaatttggccctttgactgtaaataaaatgtaatatcttcccctgattctaccagtaaagagtctacattatgaaaaactgcgtatgagatggatacaaactcttattgcccaaagattacaacctaaaaattttagattattcccagtgagtgatagaggcttacagtcccttatctgccattccaaaaagctctgaaaccttgaagtatatataatgacttatttggcaataaaacctgacgtgatgtgaagagaggctacttcgaagtctttatcctttatgattaatttcactgcagaaatactaacattttgattatagtagcattaggtatgcagtgcattactcattttaaaggacaaaaattttggattctcaaacatgtccggtctggagggttctgtatgaaccatcaaccccctaggatcagactatccttttcttttcattggatccaaaaatataatacataagggttcaagatagtcttacttgcaaatattgagcatctgtttttgctttattttttttgactgacttttgcaaatttgagataattttctgatgtcttctagacatgggattgaagctcatgacaaaactcctcctggtatggagttttagccagttttacctctaatgtttacctcgggcagtaggttcctctggcacacacagccagtcaatataaaacattttttcaaggagatgc

SEQ ID NO: 97313 - DNA, 1137 bp, Homo sapiens
ctgaggcaggagaatggtgtgaacctgggaggtggagcttgcagtgagccaagatcgtgccactgcactccagcctgggcaacagagtgagactctgtctcaaaaaaaggaaagaatgttgccaagttggaggcaggaccaggcctcttggctcctggtttattcttcttcccaccctatttactagcacatattattgaaagctgcccaacaaaactctatactgatggaaatgttctggagctgcagcatccagtatggtagccattagtcatgtgtggcggttaggcacgtggaatatggctggttcacttgaggcacagagttttaaatgtaatttaaattaatttcaatctgaatagcctcacggagccagcagctcccatatattgtacaaagtgaatctaggcttttaccttcatgagttgctggactaggaatcagagtttttcaggagattttatttgaccaggttaaattttataaaagacagttccatggccttatgaactagataaaagtaaataggaaaagttctctatcactgaacgaaggaaattatagtagaaagtggaattatacttttatactcatttagagtgacctaacctgaggagcattgggtccctaccatttaagggttttatggtgctcagagtttgggaaaatgacagcaatcattctttcatgatggtgtattcgaatttgtattgtgattcaccccacagatccaaaggcctcaagtaaatggcatttgttccataaaatttactgtaaaaggcagaaaaatacccatagtatatctatattttatttggatttgtgcttttatttagagaatttattttctaacctttgtctcaataaactgccgaagtcaatcttttgcctcttttggagttcatattctcctgcaggaagaaactacccaaagctacaatcagcaatgtatatacgttttccctattagaatgatttttgtccacaagatttctgttacaaagagaaaaatcaatgagctgactagtgtcatccatataaatatttgaccagagatgtatggtgaagggtgtattgaatatgacaatgaaacaatgcagtggctgttcattgttggttgactgaaagtggtctgtt

SEQ ID NO: 97314 - DNA, 1032 bp, Homo sapiens
ctagggaattcaaagatgcataagaaatcattctagatttcttgtccattttggaattttccacagatagaagctgtgtcgaccgcctaattaacctgttgcatgttggaaatgttgtgtttctcttggtgaggcttcctcactgtcatctttttgttctctttgctataaagtgatggggaaggcttggaatgctttttactgttgctcaggaatcgttttatgctagctaagcatgcaacttccatttcctgcatgtctcctacaggtcaaagaccattacaacaaactgattatcagcatgatgggcttttatggccaacttcagaagatgatcccttaccaaagttaccttccatctacaaaattctagtacaaaaaataccctgaacagtttttattgcaatatgttgtgatggagtttgaccatatttcatgtatccagagattttatccaaccttggatctcagttgattttaaattcaagtttctcttatttggaaatacatggaaataggaattgctagtgatccctttcaccatttacgtgggcatgagaggacagaattactcctgtaatcctttccatggcactatcacagtgaatcacaacattgccattcagctttacatattacccttaatttccctctttgtttaaatggggtagacagcagtcatattttgtaatagataggtactttggcttttttttctttttttttgcacagaataataaatgaatccatgtagaaatgacctggaacaaaacatcttggtccattttgcctattgatttagtgataactatacatataattttatcttgctccatggcatttttataacataacatcattcaacataaatgtcctgttactattgacgtcacacaataaacacattaacagttctatcaatatcctcattcttctaaactgcattttaaagttgaaaacacctttttttaaaaaaagtaaatatatttcatttaaaaatttaatctcaattcaaattttttcagatatatt

SEQ ID NO: 97315 - DNA, 4047 bp, Homo sapiens
cactggcatattcaaatagtaatttgtaaaatacttgtgacatgatttgcattttattagtgggaaaggggcatgaaataatctttggtttatgccatttaaaaattattcttaatctaatctgataatcagatattttacatatcatattgtgattatttttaaatatggaagcactgttttcataaactcttaaattgttagtaaagaggtagcctacatttgttataaaatgtaaagagaagatgaaaatggacttttcttccagttttacagctgttctcttccgttgatccccactggctcttctttcatttcagcctcttggttctttcttaaaagaaaaccatgtctttttccccttagtccagaggtagacatagctgaacagaaagcttagacattcccatttagtgtatttgcttctttgtgagattaatttgtttctctttctctttccctcttctctagtgtggattctttaaacgctctaggtacgatgacagtgttccccgataccatgctgtaaggatccggaaagaagagcgagagatcaaagatgaaaagtatattgataaccttgaaaaaaaacagtggatcacaaagtggaacgaaaatgaaagctactcatagcgggggcctaaaaaaaaaaagcttcacagtacccaaactgctttttccaactcagaaattcaatttggatttaaaagcctgctcaatccctgaggactgatttcagagtgactacacacagtacgaacctacagttttaactgtggatattgttacgtagcctaaggctcctgttttgcacagccaaatttaaaactgttggaatggatttttctttaactgccgtaatttaactttctgggttgcctttatttttggcgtggctgacttacatcatgtgttggggaagggcctgcccagttgcactcaggtgacatcctccagatagtgtagctgaggaggcacctacactcacctgcactaacagagtggccgtcctaacctcgggcctgctgcgcagacgtccatcacgttagctgtcccacatcacaagactatgccattggggtagttgtgtttcaacggaaagtgctgtcttaaactaaatgtgcaatagaaggtgatgttgccatcctaccgtcttttcctgtttcctagctgtgtgaatacctgctcacgtcaaatgcatacaagtttcattctccctttcactaaaacacacaggtgcaacagacttgaatgctagttatacttatttgtatatggtatttattttttcttttctttacaaaccattttgttattgactaacaggccaaagagtctccagtttacccttcaggttggtttaatcaatcagaattagagcatgggaggtcatcactttgacctaaattatttactgcaaaaagaaaatctttataaatgtaccagagagagttgttttaataacttatctataaactataacctctccttcatgacagcctccaccccacaacccaaaaggtttaagaaatagaattataactgtaaagatgtttatttcaggcattggatattttttactttagaagcctgcataatgtttctggatttcatactgtaacattcaggaattcttggagaaaatgggtttattcactgaactctagtgcggtttactcactgctgcaaatactgtatattcaggacttgaaagaaatggtgaatgcctatggtggatccaaactgatccagtataagactactgaatctgctaccaaaacagttaatcagtgagtcgatgttctattttttgttttgtttcctcccctatctgtattcccaaaaattactttggggctaatttaacaagaactttaaattgtgttttaattgtaaaaatggcagggggtggaattattactctatacattcaacagagactgaatagatatgaaagctgattttttttaattaccatgcttcacaatgttaagttatatggggagcaacagcaaacaggtgctaatttgttttggatatagtataagcagtgtctgtgttttgaaagaatagaacacagtttgtagtgccactgttgttttgggggggcttttttcttttcggaaatcttaaaccttaagatactaaggacgttgttttggttgtactttggaattcttagtcacaaaatatattttgtttacaaaaatttctgtaaaacaggttataacagtgtttaaagtctcagtttcttgcttggggaacttgtgtccctaatgtgtttagattgctagattgctaaggagctgatactttgacagtgtttttagacctgtgttactaaaaaaaagatgaatgtcctgaaaagggtgttgggagggtggttcaacaaagaaacaaagatgttatggtgtttagatttatggttgttaaaaatgtcatctcaagtcaagtcactggtctgtttgcatttgatacatttttgtactaactagcattgtaaaattatttcatgattagaaattacctgtggatatttgtataaaagtgtgaaataaattttttataaaagtgttcattgtttcgtaacacagcattgtatatgtgaagcaaactctaaaattataaatgacaacctgaattatctatttcatcaaaccaaagttcagtgtttttatttttggtgtctcatgtaatctcagatcagccaaagatactagtgccaaagcaatgggattcggggtttttttctgttttcgctctatgtaggtgatcctcaagtctttcattttccttctttatgattaaaagaaacctacaggtatttaacaacctacaaattgggagttgtctttggactgaatcctcctcttcactgcctgtccttgtaaggatagggaattgcttagcaatgataacctggcattaaaaaaaattctgacagctaagctgcttccttcttagaatatgttttggatgtgggagcaggctagctgtgacgtgtgtggcagaatcaactagtcagaaaatattttcttcagcaaaagaaagattttagatttgagttttatgaaacttctctagctggattatcacaacctaatacaagaaaataaaatatataaatatataaatatatataaatataaatatataaatatatataaatatatatatacatatatacgtatatacacacacacacacacacacacacacacatatatatatataaaatgcctagacaatatagtgtgccctggcctgaataaatgtctgtctaatatattaggtaatagctctccactatacttggcattacataaaatcttggccttcttggttctttgaagatcaaacaggtgttaccacccaaagaaatatgtgattgattggcacttaatgatttgggccagtggctgtgaacctttttagcctcagttcacatatcagatatacccagattaaatcactacaataatatgtaatcgtcataacctcatagagcctatcagtagctgtggtttgactagggctatggcataaataacacagactgtaagtaagtcatggcccatccagtcatagtgcctgtgattccaacacttcccctccctctcaaaaattacaggaacgtctaccagcgattgtggaattattacagggttatccttggatctatttggattcacagaggaatcactgcaaacattgatacttcattattggttgtaaattagttgctgcaaattcagtgtgtcgtgcatagtcatggtttacgcttttcccttgtggctgagaatattctagcatgtggtgttgatataggtggggaatgctttaaagattgtccagactgccagccatggtggctcatgcctgtaatcccagcactctgggaggctgaggatccttgagaccacaagttgagatcagcttgggcaacatggcaagacccaatctctacaaaaaatttaaaaattagccaggtgtggtggtgtgcacctgtagtccttgctactcgggaggctgtggtgggaagattgc

SEQ ID NO: 97316 - DNA, 1390 bp, Homo sapiens
aaaaaaataaagtcaatacctgaacctttgtgggcagaacttgcccccagaacaaccccattcccagaaaatttagagtcattcttaagcaggtctacacatttaaatcaccaaagaaatacatttattaaaatcccgatggctggacaatctgccacactgactacatgagaatctgagtgagacccagaaattagcgctgcttaaagctccccagctgactcgtaaagtgcagccaggattgagaactactttagagattattggatgttgtgaatatttatcaaaataatatgctcactgtgtggaatgcctcgttcctgtttgtggtacttccactgcaccagtaacaggagctgagaagctagaggtgcatttgctataggcagggaggcagctgagcggtgcataagggcatgtctctggagccacgctgcaggtgtgaattagcttctcctcttagaacataaccttgggtgagttacggatatctctgtgcccagtttcttggcctgtaagataagtgctcactcagaggttctttttttttttttttttttttttttttgagatggagtctggctccatcgagacggagttttactcttgctgcccaggctggagtgcaatggcacgatcttggctcagtgcaacctctgccttctgggttcaagcaattctcctgtatcagcctcccaagcagctgggattataggcgcccgccaccatgcatggctaattttttgtatttttagtagagacggggtttcgccatgttggccaggctggtgttgaattcctgacctcagatgatccacccctgcttcggcatgccaaagtgctgggattacaggtgtgagccaccatacccagcccagaggttcttgtaaagagaaaattggaccatctggaagtgcttactagttacttttatacttacccttgtttattatatagaaccataaatcttaaaaagggaaggaagcatggaaatctagttctacttcctcgtttcacagatggggagacacggtttatttttattgtcacgggaaccttttgtctcctcattcttcagtgtctaccaacttaagtcttactagtgggtgttataactacaaaaaaaaaatacgatgaacctcttaaagtccttatcaacatagatcattctgaacaacgacaagagtgaccttatttctatgttaaattctgtctcaacccttaatacagtgaccataatgcagtcttcggttggggtcagaaagatgacatgttaagataatcaacaaagcatcttgaaatcgctaggtattgaatctttgtgtttttctccccgctgacatggaagagtgtgaaaagagcagattctctttttgaaccttttctcaga

SEQ ID NO: 97317 - DNA, 1969 bp, Homo sapiens
acttagactttccctgggccaggcacagtggctcatgcctataatcccagcactttggaaggctgaagcgggtggatcacctgaggtcaggagttcgagaccagcctggccaacatggtgaaaccccctctgtactgaaaatacaaaaattagctgggcgtggtgacccatgcctacgtagtcccagctacttgggaggctgaggcaggagaatcgcttgaaccagggaggtggaggctgcagtgagccgagatagcgccactgcactccagcctggttgatcgagactccgtctcaaaggaaaaaaaaaaaggaaaggctttccctggttgggggcagtggttcatgcctgtaatcctagcaccaaggcaggaggatggcttgagcctgggagttggagacaaacctgagcaatatagggagaccatgtctctaccaaaaaaaaaaaaaaaaaaagcagactttcaccaaactatcaaagtatattttcttctgtagagagttcaagactttgatttgtcaataccattgccatcttaatgcgtgaaagagaagtatatttattaaatccttttttgttttgttttgattcacactagatggctatgaaaatgctaggcgtctgtgtgatttgtattatattaactctcccgaactagaacttgaagaactaaatggtaagcctgatgttgtctttttctcaataattagtgctttgattacttgataagggataagaatttaaatgttttaatggaagatgactttttatcaacttcgttggatatgaaggctaaaggatagtaatcatgtaaaaaatatatctataaacatatgtaatttagtcagattctttatgaaaagatttggctttttgtatcacattttctttatttttaattgataactttgattctttgcttattttttattttctgtttagtcatagaaagaaaatgataccaagaaagttacatttgacttttacatgcacttcactaatgtaagacttaccctttttctacttcctgagttgtaaataattttctgttgttgaggacatagactggggttataaaagaggaaagaaagatgctcatctatttgagaatctgtttgtctctgatggttttctttttaccctgattagtgccttttggacaaaaagggtttagatgccttgaagagggattgatgagtctctttttcctgaaagcatggtagtttgacagaaaaaagcatttcctaagatgacactttaagaaggtgtgggaagaataaaacaaaataggcttttactaagctgtattctggaccttagagtgagagagcagtgaagttatgcaattgaaaatagcattgcttggtgattttctaaagccatattaactcttttgagccatgatggtagcatagcatttggtaaataacaatcacagtgtacaagtaagtgatagtttgcaaacctgaactgctgtgagcaatttccagatgtcccatttttgttcccaagggggagtttattcagaggaaggtctgatttattggttgaattagaattctaagatatcatgagtcttaatcatttgttctactaaatgtctgttttatacacacccctatcaccacccccagtggggctcctattaagtgtttaaatgtagaattaattactgtctcgagaaattgatgctagctcatattttttattcagctttatatccatcgaaatgcctgaaataaaacaatattccacccaggtgaaacattttgaaaatggcttaaagaatgtatgggctgggcgcagtggctcacatctataatcccagcactttgggaggccgaggcgggtggctcacaaggtcaggagttcgagacaagcctggccaatatggtgaaacccgtctctactaaaagaaaaatcagccaggcgtggtggttggcgcctgtaatcccagctactcgggag

SEQ ID NO: 97318 - DNA, 1631 bp, Homo sapiens
aaaaaaaaaaaaaaagaagaagaagaatgtatgcatgcatgtgaattggactgtggaatttaaagattttaacacttctctatttggaaagtaaaattcctacccgaaagttaagcgatcttaaaaaagactttaccatcctagagaaaaatgggcgcatgggttggttcgattgtgatgcaagattgtgagaagtgaccacaggactcttgtcatcatcagttgtaaatatttgtgggtatgggttcaaacactaatacattgaagaaatggtgtggcagttctcccccaggtaatactgtcctccgtagttaatgttttcttttcatcactacacagtttattcttaaaaatgctttaagcacatctctctgtactttcatatttttctcttctgctctgtagcaaaatcaccaggacagccaatacaagtggtttatgtaccatcccatctctatcacatggtgtttgaacttttcaaggtttgtaaaatagtattacataacctttaccagtacttttctgaggttaggaatctgctctgaaagccaaatattccactaggttctcctattaagaagtgccatttcacatcagtatcatatcacattgctggagatcagctttttatcaacacagggagacatctccatgtagtggtgagctcagactatggagtcagaaagacctgggtttgaatcccaattatggctcttaatatgtgtgtgaccttgggcaagtcactcaacctctctgagcctcagtttccttttctgtaaaacaagaatactgtccaggattgtttatgactattgggaataacatactaagtgtccagtacagtggcaacgtattacatataggtgctcaatagagttatctttatgtttttataaaacaatatttagaagagtgattctcaacttgctaccctcaaaggaccagaattctttttttggtctggcttttcttgggagggggaggtcatttatattgacttacagggtttctgctgtaatctttgctctttacaacaaaatttgaaaacaaattatgctactaatattgagagtatcttttttccccgccaataatacttgctggttgacaagaaaatgggtgaggagtgaggggcacaggtcctggtgggtgaaaatgattgccctctatcagaagcttgtagtctctcttcagttgtgtttcatcagccagcagcaaactagaggaaagagggggtggctttcaatctgataatgtaaaggaaaagtgcactgaaacacagaaaaactgaccgaatatcttagaacagcagcagaatgttctttcttccaagacagcaaaaatgtatttaataccttacaaaatcttttttaaaatatttattttattttttgtagagttgaggtctcactctgttacccaggctgtccttgaactcctggcctcaagcagtcctgccccagagtgttgggattacaggcataaaccactgcacctagccctaaaatctttttatccaagtagttaaacaagtagtgatgggcacttcaagcattaacacgaattttttccttgaaattccagtggcataaagatcttgtgccctatgattgaggcactccgtattatat

SEQ ID NO: 97319 - DNA, 1156 bp, Homo sapiens
ccttaatttcaaactagagataaagggattcattgctccatcaaatacgaccatcgctgttactactatatgaaaaaaattgctttcctttaaagaaatttatgacagttttttaaatagttctaaaaatatagctgaaactacattttcaaaaatgttttgcccatcatttactaaaattataaaagtgtttgaacagagttttctgctttaatgtaactagttaaaagtgttttgaagtctgactttggaaaataagcaaaatttagttggagtctttaggtcagaatatccttcaaatcccccccaaattgactccattaaaaaaaaaactttaaatgtggttataagaattgtgattctttggcatatttccatcaaattttaaaacttcaaatagtgcatatgtacttgaaaattacactttctcttttctaaaaagctgtatttttaatacaaccctaatgtatttcagaatgcaatgagagccactatggaacaccatgccaacagaggtgtttacccccctattcaagttcatgtcacgctgggtaatgaggatttgactgtgaaggtaaatgtgtttaatggtttgttttcttttttttttttttgtaattgatgaacagacatgcaaaggtaaccatacgcataatttctaaaagacataatctactctcaggggaaaagaatcttgtctgtaatagataataagcacattgcttcattgagctggtggattatagttatcccttgagtcttttctatgcaggtcccccgtcgaggtgattcaagttaaaataaatcttggagacagacaatttatcattaatatctctttgataagtaagatctaaaatatttgggtagttgcagtattatggagatagtattttatatataatttaaaaaattttaaaacagtgctttctaatctactggtttcatttgattctcatgacgtaggtaattttatcctcacttttacaggtgtggagactaagacacagtgattagctcaggatcacacagggcagaaatgctatgggacatgatatccagtcttctgtccccagtgctaggccttttctattacattgttcaggtggcccagtttcttcttttacattttattaaaaattgttttctgtcaccc

SEQ ID NO: 97320 - DNA, 1015 bp, Homo sapiens
cttacgaacatatcagaaagttttctggggttctaggctgtaaaattgctggtagatggaaatacaaagtagtggttctgtctttttctccctgaaaatgaaaattatactgtttttttcctgttaaagtaattgtgaagaaaattcagaaactgaaaaccccaaacaagaagagaaaattactcattctacagacaataaaattagatatcatttcagacctttttataatagaatttttgcagagtattataaatgcttctttgtaactgttttttttttgtttgttggttggttttttttgctgcttaactatctcttatgccagtatatggagttctatataatatctaattaatggttaacaatattctattttagaatgtactttcttttacttaactaatcccctatttaggttgtttacttttaggtattctgcatagagctgtgatggatgttctcatatatactttgcatgcttttctgcttattttctcaggataaatttctggaagtgacattgttgtgtgaaaggtacatgcttttttttttttttttttttttaaatagaggcagggttttattctgtcacccaggttggagtacagtggtgagatcatagctcactacagcctcgaactcctgggctgaagtgatcctcctgcctcagcctcccaagtagttggggattacaggcatgcactaccacatctgggtaattttaaagttttttttttttttttttttgtacaaacggagtctcactatactgcccaggctggtctggaactgctgggcccaagtgatccccctgttatggcctcccaaagtgttgggattatatgtgtgagccaccagacccacccaatatatgcttttctttttttgtttgtttttgttttcttaatttagagacagtggctccctctgtcactcaggctggagtacagtggtgccatcatacctcactatagcctccacctcctgggctcaagtgatactccttcctcag

SEQ ID NO: 97321 - DNA, 1026 bp, Homo sapiens
gatggagtttatgtattagagtttcacatattagaggagttgggttgggttcaacagcgagggaaatgcttatattggcaacttggattgtgttgtattcattttcaaaagcagcactcaggctgggtgcggtggctcatgcctataatcccagcactttgggaggccaagacaggcagatcatgaggtcaggagaacgagaccattctggctaacatggtgaaaccctgcctctactaaaaaaaattagccgggcatggtggcaggcgcctgtagtcccagttactcgggaggctgaggcaggagaatggcatgaacccgggaagcagaggttgcagtgagctgaggtcgcaccactgcactccagcctgggcgacaaagcgagactctgtctcaaaaaaaaaaaaaaaaagcgctctcccaccagcagttaaactgtgatgctatgagtatgtgttgatattttgctgttttgaggatttgggcatagagcacgatccttttcttaccttagatgagtgaccgaggaggtggcgttcctttgaggaaaattgacagacttttcaactacatgtattcaactgcaccaagacctcgtgttgagacctcccgcgcagtgcctctggtatgttatcaagaaataatgaagtgtgtttctgtgaattgccttccacatgctgtagctgccaaataagtaagttaagccgtcatgtagggtactccacaaggaagaaagaagctcttagaaatgcacactttcccctaaatttaaacagccttcagaatacttttttttttttccaactgaaatgggcacgagacagagatttggagttcttgttacaaagtttgatcgtgatatagcagtagttttcctgtgtaaaaccacattttgaaatatggttaaccacattatttctaatgtggggaataaattactggttttagtagtgtttggtcaacactgaattactttttagtgttgacttttttctcaagtacttgtcattagaatgatctcatatc

SEQ ID NO: 97322 - DNA, 1429 bp, Homo sapiens
tctctttctctttgacttctttgcctctctctttctgactcctctttgtctcttcctctctctgactttttgtgtctctctttctctctctctctgactccctctttgtccctgtctcttcctctctctgtctctgactttgtctctttctttctttctctctgactccctctttgtctctctcttcctctgtctctctctctgactttctgtctctttctctctttcctttctgctggtctttccctgcctctgccagctgcttatgctgctcttctcccctctcctggagaagtccgcagaccaagaacccactggaaggaaccaattccagacacaatacgaccgagcaggccagcaaggaaaagcaatatgctttttcgagaccaaccacaagtcattttatagaaagaataaagagttttaaatgaccagagggaagtcagctgatacagtactcaagtaaacctcagcttaatcattgtcaatgcttaaatattaattatattaaatataatgcatctctcagatgcgggctctgatagccccgtggtactcaatggcatctatcttaattagaaaagtatttcagtgtgtgtctttctgaatagaattttgtttttctcatcaaacaggctggttttggttatggattgcccatatcacgtctttacgcacaatacttccaaggagacctgaagctgtattccctagagggttacgggacagatgcagttatctacattaaggtaatagctgtagtcttcttgatttaatatttcttttgatgataagaacagatgtccatacttaactgtaatgaaatttaactctaccacatgctgtttaaatagaaaaaaactatggttttttgctggggatctcacccattttgatagatgatcccctaaaactatggggaaagagatttgtatcctggagtgattaggactctgtctattaataggaaaaaaattgggttaaagtagagaatcataagttatatatcatacaagtttaattttaacataaaacacatgaatggacattgataacgccaaacttttgatgtactgccaaggctttttttttgtatatgggtctgcagattggagtgtcacattgtcttttttgcaaaagctgtactgacagtgcatcattttagtttctttaaaccaacaagtgcatactctttttggacttttatgcagtcctttacagatacctcctgactgatttgacagcaagttttatgtgactttccttcatgagtctttccaaaacattcatcttagttttcaaggaaacattcccctttttattctttgcttatgtaataaattttgtaattatcatgacagaattgtacaaacagatttgggaacaagcacaagtgactcttggtaagcatatagcttacctaatggac

SEQ ID NO: 97323 - DNA, 1432 bp, Homo sapiens
taaataacacgtttcaaatatacataccatttaaaagtatatttaggtggtataaggattaataagatactaatagaatattatttaatttgtcgtaacctttttgccattgtctattttctcaaataatgaattctaaaaaatgccagacttaataggtcttaggtttttctttttcaggctctgtcaacagactcaatagaaagactcccagtgtataacaaagctgcctggaagcattacaacaccaaccacgaggctgatgactggtgcgtccccagcagagaacccaaagacatgacgacgttccgcagtgcctagacacacttgggacatcggaaaatccaaatgtggcttttgtattaaatttggaaggtatggtgttcagaactatattataccaagtactttatttatcgttttcacaaaactatttgagtagaataaatggaaactgaattccatttgtgcccgttaaacctcctaaaggatgaaattgcacctattttacacttatattttcacagttaattgaacatatttttaaacaactgtagttttgggcaacttttcactttgtggtagacttcagaagtgtggaaatcttcgggtttctataggaaactagttttttttttttaagaaatactttcatttatgtttgctagaaacattttctaaatgatagtgattagctggttagccatcttcctgttatttggaggagttctgccatcttttattcggtagtgacagctgtaatatggtcttcatgtttatcagtgacttgactacaagtaaagcagaaaacagttggcctgtaatcacagaaccagccacccttcggcgtctacatgcattgtcttagctctgaggttaatttaccatttttaaattttattgtaaagaagtgtaatgactagctctctgtggatctatgccaaaatcatgggccatcttttctaagtgtacttctgattaatgcaaggggaaatttttatactgaaaacaaacaaacaaactagcagctactaaaatagagaagaaattgagggcaaagtaatatgtctccaaaactgaactgattgcttgttgagattacctagaaagcttttggaaaaaaatagagcttttctgcatcctactccagatacactgaatcggaatccctagggctagagcctagaaatctcactttttaaaatgcttccaaggtaagtctgatgcctaccctaggttgggaaccactctttcaaagtaaacagtgatgacacagcatttgctaaagtaacatctgtaggttttggtttccacctatttaaagtcagatttatagactcgaggagacagaaactgaatcccacacctggtgcaattagaagcataattagaagcagaagaacaaaatgccacgtaaccaaagcatcagagc

SEQ ID NO: 97324 - DNA, 1669 bp, Homo sapiens
gtcatcagctggcaagtccaggagactgtgtcatttagagactgtgttgttagttatccctcaacatcttctaaggtggcaggaaataatattggaaataacattttaaagtaaaaattttaaagtttaaagaagagttttgccacttaaacaggggagctttgtctggaaaatacactgagttgaaacacttcatccttggaaggattatataagatgaacagttgtgataaatgtgtagattagagggatgtgaatgggcagttagtccagtgccctcatttaagaggccaagatcctgattcagaggaggcatcctttgcccagagctgcttagctaatctgaccaaatgttgggaaaaatgtctcacctaacccactattccttaattatggattttgtgaaaaacaatagaacatgttaatgagtaatttatattagttcgatgtattacaattttttagctttaaattacagttttcttataatgttgaaatgttttagaatcctttgaatctaagtatttgtttcctaaatgaaacatttgtacaacatttgatgtttttacttatgaaatattctcctcccccaagaaaatttaaactttttctctctatttaaaagctaagaaatgttttaaaggaaaaatgaaattatcttcctttagcttatttttaaggtaaaacagctttttactctgttattgtggtaatggacagaatattacatacaaaaatattctgggagagctttttcctagttggttttaaatcattgtgccacctgaaaggtttttagattttataggagctaatttgtccaccagcattaatgtaacacagtgtagttatgaaaatatattgaaggacaggaagtggacacgaagtgatttttgtaacctgagcagttaatgaatgtgccaacattttctaggaagggacagcaagaatattctgctctgtagttaaaatactggctggcttttgatgtcttcatgcttaattgtgatcactttcttgcactgtgatgtttttacgtgaatatgttgaagtagaagtctaccatattattttataaaatgttttctgtatggcaataaactgaaaacatggatcaacccttcttttgaaaataaactgagtcaatttagccttttaaaaatatagtcatctcttttaaatagaatcctcttccaccatcaaggctcaacattttgtaagcatccaaaaaattggtaattagggggcttgcactaaatttcactatcttcagtagagaggaactgtttggaacttagatttccaatgtgtatattctaatggagaaagcaagaggtagagtttgtatgtttgacttaccttagatttttattttccatacatactgcaaatgattgacttgttgcataaatgaagatcttctgttgtgtgcttttcaaacactgtaaataaatttgaaatttgaataactttccacagtataactgtaaaaaaaaaaaaaaaaagtcttaatttaaccagcattaccctctgcttgtaccaattgaatggcagaactactatagtcaaaaataaattcctatcctatttttaattgatgggatataggcagcacaatttcccttcattgttgaagccaacaagttccgtaacagaactccagaggtaa

SEQ ID NO: 97325 - DNA, 1738 bp, Homo sapiens
ggcccagaagtgcttacccaggccgtcgcctcgtctggcctcgcttgcccatgacagctttcagaaaactttaattcaggactggctagatgacatccgattgcctaaaaaatttttttaaaaagttatctctgttagatcgctgaaaatgttatgtttctgatgcgctttgagatcgcgcataagtactgtttatggggaacttaattactatttttgttagtttctgtaataatgaaagcaacacaatttaggggcccattccaagtatggtacagtaagcagctctcgatactggtgtgtgagaatcgtcttacagagtgaatttgaggatgtttgacttaagattgttgaaaactgtactccttctttaaccccgaagctgttttggaagagccttcttgcttcctcgaccttcgttgaaatgaacagctaggatttagtggatccaaacctccaaacacgtttaaagacaaaaataaacaagtgattcaaggctagttaatgtcctctttgtagtaggcctatctccacagtgaaatttcacttgtttttcaattttccaaaaaaaaaaaaaaaaaaaagtgatggctgcattttaattatggttatggtcatttgtagagtctttgttttaaattcctgctactatagtgagagatttaggagattgtaaatgaatacgaatttagtttgggaaaacagaattaagataaagaaaaatggtcttttggaccactgcactgtttattttaatctatcacaatttaattcctactataactttttgagattatttggggagttttttaactacaaaatattgtttaaataaaaaaatttagtgataataattccagagtaaatgaccatgatgcaattgcaaggactttctccgttgtctaaaaaagcaaatagatgattgatccgtttttcttaatcttttagggaatatataaggacacagtaaagagagaaaaaaaaatccaaatattaaacactcggacttggatctaaaaatggatggtcaaagatcttgggaactaaggggccttcttgccaaataaggaaacttggcaagttgcactgtgtattttaacttagcacaagagtgagtgttattggcaatatattggctcagagcctatctggaatgagcagtgaaactgactttgatagggctacaaaattataaataggtttgtgggggcgtggagtgaataatcgaatcatcagagaaaacactgaaaacttttcatgaaaataagtcagatgtaaggtgaagctattagtgtggagtgacagagcaaaatggacagtttattttagaaagtggtagattcagaagagaggagagaatcagtggtttttttgtttttgttttgtttttgtttttgtttaaactggaaaaagatgtttgtggggatataatacttcttggaataagatagccctatgtctgtatcctgagatgttggaaataaaaatgaatttagatcacttgttttccattttattctacccaggacagattgacagggtgagtatcttgtctatctaaatgtagtaggaacagttaaggcaccttttggtcttactgcaaggaagatttaggctagttttttggtagctattaactttgccccactagacacaaataagcagagttccagctgtgaccagaaaattgtacctggtaagggaagaggactatgaatgctagagcttagattgattc

SEQ ID NO: 97326 - DNA, 1077 bp, Homo sapiens
tgtggattttgcattctcttctgtcctacactgttttacttaaattgaacaaatcgatacagacacatattttaaaaaagacaaattttttttttttttttttttagaaacagagtcttgctatgttgtccaggctggccttgaactcctgtgctctagcaatcctcccacctgaactttccctgtagctggggctgagggtatgtgctaccttgcctggcttattccccatagtgttaaagtgaaattgatgctgtaggacagctgtttattcatatcaccttctgcacagtactgtgtaataccacgtatgggaataagcacacgaggaacatgggattggtcctaataaagagtcctgcaccattaagctctgcagcccaatactgcatggggtagtgcaattccattttgctgataaaagaataggggtagatcatcatccaaagagttttgatgttaggtggttatacgatggctttcaagacaaagagatctctttgctttgggaattggggggaaggaagaggaaagttttaggatagaaacctggaatgtggctcttagcttctcacccagtttgggaggagaaattgaagaagatggccaaatcgtttcctttatttccatcactgatgtggttcactgtgcttctccatgatgtttggtgtcgggttcatgactgcttccctcagaaaaggagggagaccgtctatactttatagtagattagtcatcaactcaacagggttggagtgggtcttaaagtggtttcattctgccctcttagctgatgcaagagtctcccactcccactctacaccgcatatcccattgaacgctcttggtgatgggtcactcactactaaagagggtggcagattttcttgttggccaactctaaaccaggaatcctttgttttttttttggagacagggtctcactttgtgcagtggcataatcatagcttatggcaaccttgaactcttgggcccaagctatcctcccacctcagtctcttgagtagcagggactacaggcatgaaccaccacacctggctaatttttatttattc

SEQ ID NO: 97327 - DNA, 1032 bp, Homo sapiens
atgctgcaagaagctcccagctactcaacacaacaagcccacgcagcggcctatgccgtggccgtaggttgtatccacttcatgtttccttgttgggcttctgtttgagcacagacatgtttccacgcagcatttctgtggcgttaagtgctcccaccaactacattcctgtgcctcccatcttttacttctggtaacaatacttttggtaaggaagtgtgttgtggaagttgacttttattaaattactttaattatttcaataagaatgcctcactactaaattactttaatatttcaataagaatgtttagcttatttttattcttaccattgctctaactagagagttacattacttttatatggtaaagatagaggaagggggaaaatatgaaacaatggctattctgttttttggattcttatttaaagttgggttctctcagatatctatgcctgaagtcctatttactgaacccaacctactctgtataagatacactatttttctaggagcagccttggaggaagaaaggaaatatctggtagatacagtacaagttggttctgttcctatacctagtcttgcaacttttatttttttattttttattttttttttttgagacagagtctcactgtcacccaggctggagtgcagtggcgtaatcatagctcactgcagcctcgacctcctgggctcaagcgatcctcctgcctcagccttgcagagtgctgggattacaggtgtgagccactgtacccagccagcttttatcttttttagtgattaaaaaaaaatagtagaacagcagtcctgttgaggaatagaatctttgaatctttgaccttggtgttacggacaaatacactgaaccagagctttcctcatttttttgaagataagactcaggggaaaaaaattgcagaacagtgattccaagtggtgttctttttatacacatgatgacaaagcacatattattaatttattcactgatctatgttaaagaggctgaaataatacta

SEQ ID NO: 97328 - DNA, 1065 bp, Homo sapiens
atagatcttagcaatgctaatgtccaaaaagtgcaaaaaaaaaaaaagaaaagtattgtgttttagcaatttaaatacattatgaaaaaagcttaaaagaaattataattacttactaataagatctttcagaaatgacaaaaaccaaaaacggcagttaaacagaggaatgagaaagaattagaaaataggcaaagagagggaaaggattcagggatcaatagcacctttatttgttaataattgctctacaaaactaagagatataatataaaacaattctgaaaatggggagaggaaagctattgagagcatacctgaccataaaaactgaaggaatagatggctaaatatgatatcaagggttattaaaataatgagaaaaccataatttccattaattgcatgtataccatatactaggcactgtgctcacgtatgcactttcacagcactggtattattgccagtgagaacagtgaggtcagagagacacagtgccttgcccaagtagctaataacagatctgctcatagatctctctagtaggggtctttaccctgaatcatgctacttccctgttgaaatatctcttatttggaagtgagatgtatcaatgaagtcaaatactatgcaaacttgataactttggggctatcagttttgtgacattgaatggaaaagatttgaaattttttatttatgcatctggaaatgccacagtctgagaaaaagtgatttgttaaagttaccgagaggtggagggagagttcaaactcctatcaatctaattctaaaaccttgctttttaacattagaactgtagtggggtcatttttgtttttaatttggggcaaaagtaacagtgaaaaggtaaatgacttatttgaggtcaacatggatctgaaaaatcaagaagcaaaatagaaggtctgtgaatagagaaacttaagtctatttttttggactagaagattgaaaactttaaaaagtaaaataattctttaagatttcctaccttcttatgtttccacttttcataattaggtgatgctgctatatatg

SEQ ID NO: 97329 - DNA, 1029 bp, Homo sapiens
aggatttgcttcagaaccctccggggcacttgtaaaaattacacaccttaagttttacatgacttggttgaaacctttccagctacaaaaggtataatggaagaataaccagaagctatttactcacttattcaacaaatgcttttttaatggaaaagctgcctaactgtgtacttggctgtgtagtaggtgctgaggatccagatgtaaacagaactgagttttgactttagggaatttatagtctggtgggaattaagtgggaaagataaatgggtaaagaaaggtgctgtggcacatgagagggagaattcagctgtgctcaggagactcaaagaggtggtcagggataggagtttgctgtgcagagaaaagtatttgaagcagagacactagcctgtgtagaaatgtggagatgtgagaggtcagtgtatattgggaagtgcaggcagttcctcgtgtgtgtatgggaaatgagatgacatgaagtcaaagtggctataagtggtaaatgaataacacaagaaactttcttggaattagaatacatgagttacagatagaaagagttcactgagtgtcctaccaatgaatgaaaaagactcattcctaaacatatcctattaaaattcaggattcctgggatcaatagaggatcctaaaagctttcagagaggaaaaaataatataaaaatggttaataatcagtaacatcagactgctcagtagccacattagaaactaggagaaaatgaagtaatactttcaaaattatatggaaaatcatttcctacctagaattgtatgcccaaccaggctaccaatcaagacattttaagatatacagattctcaaaaaattctattctgtgtgttctattcaggtaactaatgggagatatgtgtgtcatcaaaacaagggagtaaaccaagaaagggaagatgcgaaatccaaagacaaggttctcacagaggaaaaaggtgaaggaaattcttaggatggtagccaacaggagtcccagtccaagtc

SEQ ID NO: 97330 - DNA, 1143 bp, Homo sapiens
cagtgccagaagaaaatgctaaaggagttgaaattagttgcgtctagagagtgggaattgggtatggggaatggggagacaggaaacttctattttttatgataagctttgtagttcaatttcattttaatgcttttataaaaataattaacaaaaatgtaaacctagtgtctgtaatgctgagggaaccttgcaaatggtgtttgacatttggttgaacaaactttttagcttgcatactctatatacctacccttggcaacattcctgaattttatacaaattttgttcttttccatgtttaactaaataggaattacaaaaaagttggtaacataaactgttgattcacatatgtttatagactatatttggatactatgatctttccctcactcatatttttatgtggagtgtatcttctaaactttagaggatgaacaaataacccttcctctttctcgccttctccccaaagtagagcagcgtttgacttcatgtgagaaatcagcattcttcagtgacctgattttcctgaaatgggatggctagccagctgcatgctaagatctttgagctgcctgtgcacttcactcagcagagccccaggctttttatggagaaatgttgccagtttatatggatacaaaccaaccccttctacctttttatttaaaaaaaaaaaactcacagaagaatggaaagagtagtaaaatgtccagatacctgtcacctagatgtgccagttcttaacgttttggcacacttgctttctctctccctctctctattcctatgtacttttttggatgtgtgtgtcgggggacagggatgaggactgaaccattttaaagtaaattatagacatcatactttaaaatggctacatgcatttcccaagcaatacatccaaggacatccatctataaagcaaaaataccattatttgccatggataaaataatatcatctaatttatagttaatatttagatttctctaatatcccaataatattttctatagatttttttatccagaatccagtgatcataaattatatgtagtcatcgtgtttccctttttttttttgagatggagtctcgctctgttgcccaggctggagtgcagtggcactatctca

SEQ ID NO: 97331 - DNA, 1010 bp, Homo sapiens
taacattttacatttgctttttctctatatgttattgatttatatgtattcatatatattgtatgatttttgctgaacgatgagagtacattacagatgccatgtacctttatccctaaatacttcagcatctcccaaaacacaaccacagtacaattaacaaattcaaaaaatgtaacaatgataacaataatgttacttgttatacagtctatattcacattttgccaacttttgcaatgcgagcttttgatggcaatttttccaacccaggatccaatccaggatcgtatattgcatataatcgacatgtctgtttagcccggcttaatctggaacagtttctctgcctttctctgtcttttaagacgtagacattttggaaaagtataggataagtgttttgtataatgtccctcatttggggtttatgtgatttcctccccagcccccagcctagtcagagtttatgtagttttggcaggaaaactacataggttgtgtgtccttggtgtgtcttaatgggtgtcttgtgatgttggttagtctcattattgatgatgttagttttgaatgcttagttaagaggggtttacccaatttctccacagtacaagaaaatacctatttttcctttgtaattaataattaagctattggtagatactttgaagctaagtaaatatctttcctcagcaaacatttactaatgtttttagcatctattgatgattcttgtttggatcaaatagtactataacagtttactgtgcagaaagtaaaaagttctagcataagtgagtttgcccttattttttcctttcttcctttagtcaaccattcattcatgtatttattgtttgatcgtatacttaaagactttttggaattcagaatgttataatccattagtgttattcattttcatgcttaaactatcccaaatttagcaagtaagagctctttccagctggctcttgtgtccttttggtatgtcgctgtcatttttt

SEQ ID NO: 97332 - DNA, 1046 bp, Homo sapiens
aaaattagccaagcatggtggcgggcgcctgtagttccagctactcgggaggctgaggcaggagaattgcttgaacccgggaggcagaggttgtagtgagccaagatggtgccagtgcactccagcctgggctacagagtgagactctgtctcaaaatcaatacaaaaacaaaaacaaaacacaattaatcacagcaacttatttgtactcttgtgtatatttgataataaattgaacaagatatgtctgtacatagtatttttttttctgtctggaagagatgggaacctgacagcctttatgttaacttgaaatctgttgatactcaattgaatcaaaaggaagcagaatccttaagaggtaatatataaggccttttcttcatctgtcttggcttttgtaagacaccactacccttattttaaaagaaaaagcatcctaccaaatttcactgctttagaaatgtcggaagccagataaattcaagtttcaaatttattccacgttataaatatttatagataaggagagaagatcaacatgtcaaactggttataataacaggaactatcaataatttttatataaaggggaaaatacctgtgtgaaataggaaatataatcttgaaattgacagagaaccaagagcaaaaaataaaaagcttttattatactcagttaatcaatatgatatcgtttagtgatttatggaaggctagttaaatgttatcactttattagctcatgggagggagacccttcttcttttctatgcagttctgttgctaactttttattaataaattctttaaatttgttttaattgtaagtgctattttaaatatttccccctgacccaaacacgttaaagaagaataatgccacatttactttctttgtaaatcctctcaatatttaagtatatcgatgggaccaatacaaataaaaattaattatcttagatatttgacaatcgctattgagttctggcatagtttctataataactcgtccaaagcggtgctcaagagtggccactggtatt

SEQ ID NO: 97333 - DNA, 1026 bp, Homo sapiens
tatctaggcctcatgctgagaagggatcagatgccacatatacagttagcagcaaaggcagcctggcaaggctcagggtgaatacagtgggcaagcacatgtgtggtgcatttgatgtcctgttgtgaactttctgagagcaggactgtctttgtagctgatgctgtcactagacatcatcactctaccaagtactgctaccactgtgagcctgaatttggtgaagggctttacaccattgccctcttcttcttcacagtcactttataagattataatctgcatttgatggaaactaaggctcagggaagttaagcagcctgcctaatataaacagcatcgttcacttgggtcttccttgccagcctcacaacacctgccattgtgctttgctcccagtgaacattgaagtatttgttccttgatacctggtattgtgtcgcagtggacatacctctcatttttgttcatctaggaaatgtatcttgtattgacatacctacattttcttcatttactctgctttgagctgtgaagagggtagaactcgtgtctttaccatgtcactgtaagtacagtaacacacttgcattcacctacatagtaacaaactcttaggtattgccctttctgtagggttcctgatgtctggtttttataaatgcccttgcttttgtgccttttagactggcatgccatttctgcttaaggaattttaaacgtgtcactgtgcagtgctttaacattgtgctacgtatataaatcatcattttgaattggagagtaagcaatttaaaataatggatcattttatttgataatgaacatagtcatcatccggaagtatatgttgaatagccatccatcactctgctcttttctaccagacatttctgttactgggagcttgtaatctaagacactccaaggtgaactgctataaaggtgttagaggaaattggacacatgttgagcaaataaatgtattaaaatgagtaacatgtattactgatatgtctgaagata

SEQ ID NO: 97334 - DNA, 1605 bp, Homo sapiens
tgaagtaaaaccaattaacgtatttcagtaaaaatgttacagcctgagtagctgatgttatacaaagctaggctcttgctattagaagaaaaatagtatacagcatgaattcaattcctgagaaactcaaagcctaatatagagaattgagaaattgaaaaattggaggagagaaaaagcagcccgtaagtatttcagatagtttcaaaattgatatgactggctcttagtcttcaaaaatagaattatctcacttgaatatttaaaaagtacctagaattttcttctctgttctgtagtgaagatgggaagtcactgacatgaaattacccaagaatagaggccatgttatcaattttttttcactgatgcttgactcatactcccggttaggacatccagtttctgtttgaacactgccattgatgacatatgagatgcagtctgctctagtttggaacagcttcttagaaagtcctttataatgtaacttccagccattgttcctggtccctgcctccggggccatatacaacaaatcttaccttcttccatgtatcagcttctagaggatggcatctgtaccttattgatctttgtactttctggactctacacagtacctggtccacaataagcagtcaataatggataggatataaatgaaaagaataataaacataatgatcacatctcaactttctcttctttgtaagatttacagaaaggtttcactgttaatgaatcttcagaaaagaatacagcttgccattcctaccctactttatagccttttcttctccatgtttggctgattttttgagttcttaataaattactttgtctttgaatgaagggttctgttctatagcagctagaaaggatgttttcctggccgtggttcttatctggtttgtttttgaacatatttcccaaaaaggaatccaagatgctttttcttagccctgctaatatcagatgttcactgattcatgacctgagaaaaattaaggtgtcctaaatgaaatgagactgccagaattttaatgacttgaaaatatgactcttatccctgatactgttcttcaagaaaataatgcttggcagaattaggtgcattagagaagcagcactggtaagtatgaaaatgtttgttaaagagggaggagactgtatggcagctctgctttccagagattgtattcagcaagtaatgtacaaaatcagctgatctcacgacattttaaaaacatgccaagcagtgcttccattagtcggaaactgaattgcttccattattggaacatagaatctaccttaagaaacatatactcataggtgggcagatcacctgaggtcaggagttcgagaccagcctggccaaaaccctgtctctactaaaaatacaaaaattagctggtgcctgtaatcccagatactcgggaggctgagggaggagaatcgcttgaacccaggaattagaggttgcagtgagccgagatcgcaccattgcaatctagcctgggccgcaagagcaaaactccatctcaaaaagaaaaaaaagaaaagaaaaaaagaaatatatactcatttttattttaatca

SEQ ID NO: 97335 - DNA, 1034 bp, Homo sapiens
agttgagaagatatgggaggaggatccagctagaatacatgcggtcctgtaggaattggcatgagaggtgagggggcagccggagccggttgtcttgtgctgacctgcacagggataagggcacccagagcctagtcctggagtattcaggactcgcctatttacatgttttaaaataaaatatatgttttaaataacatcttctgccttgcgctgcaaatggaggcatttaattcctaggaagcaatatggcttcgtgtttaagagcctgggctttagcgtcagacaggtgtagattcagatgctttctccactacttattagatttatgggaaagtgactgcaccaagccttagtttccttttttataaaatgcagataataatagagtccacttcataaggctattgtgaggaccacatgaggtaatctgggtaagtacagtgcctggctcctactcagctctcagtgcgtgttacctgtggcggttagggctatgatttcagcagcagacagtcggaacatattcgagatttctcctctcccctgtggcttgttagcactatttcagcataacttgcttttttaagacttatagataactagctatttacatcatcctagagtataatgtttcccaaacttaaaaaatctttgttctctatggtggtttctcatcctttttaaaaaaattttctcaccagacaacaatattttgtcatttacttactatattttgtgttataaactgggatttttatttttttttttatttttttttgagatggagttttgctgttgttgcccaggctgcagtgcaatggcgtgatctcaccgcaacttctgcctcccaggttcaagcgattctcctgcctcagcctccggagcagccgggattacaggcatgtgtcaccatgcctggctaattttgtatttttagtagagatgggtttctccatgttggtcaggctggtctcgaactcctgacctcaggtgatccgcccgcctcggcctcccaaagtgctgggattata

SEQ ID NO: 97336 - DNA, 1248 bp, Homo sapiens
gaaacaactggtataagataggagaaaaagttaaaatatattacatttacagtaaataaaccgaacctttcttctttcttggagaagccttttaaaaaattgcctaattctcaagtgagatgggtgtgggaattggaaataaggtactaactccaaaaatgcatatgttggttgggaatacatcagtaaaatttatcctatgttaggacaaaaaaaaaaaaagtaagacataaaggctgccccataattcatgcatatcaaccaataataagaatacctgcaatcccttattgaactcttcccatttgtcaggcattgggctgagtgccctgtgtgcataggtaacaccccagtgggttaggaattattgccaggacgcaggtgaagagatggagagaagtgaacatacatgcccaaagtcatatagttagtaagtgatagaatctagaccttcgtacctgccatgcacacacacattatttcaactgtccctctgtcaaatgaaccatacctatttttttctcatatctcataccagttgaagcctttccacaccgagtacaatttcatgttgatgcaaaagattatgaaaattcttgaaatgatttcaataatttattttcctctgacacaaggttcatctcacactcctcctccttcatgccttctccagtatttccaatgatagttttctaattgcagtttccaagaaatgacattgatttgagtttatgcatctgtaaaagatccaatcacagcagcatatggaaaacattatagttgacttatttatttatttatttatttatttatttatttatttcagatagagtctcgctctgttgctcaggctggagttcagtggcatgatgtcggctcactgcagcctctgcctcctggtttcaagtgattctcgtgcctcagcctcctgagtagctgggactacaggcgcgcaccaccagcccagctaatttttgtatttttagtagagaggaggttttgccatgttggccaggctggtctcaaacttctgacctcaagtgatccactcgcctcaggcccccaaagtgctgggattacaggtttgagccactgagtccagcctaaattgactttaatgaaaagtttccatgctgttctttgcattaattctcctttagctgtttggagactttgcttaatctcatgattttagtacattgttgagctgattctttcctgaaagtgcaaaataatcacttcctgttc

SEQ ID NO: 97337 - DNA, 1107 bp, Homo sapiens
attaaataagaacctgtttttcctgtggtaattttaaaatttaaaaatttcaactattttatatgaaatatgctccttcaaggaaccaaaaacattcttcagatcaattttagaaatcttttctttttttttttttttttttgaggcagagttttactcttgttgcccaggctagagtgcaatggcgcaatctcggctcactgcagcctctgcctcctgggttcaagcgattgtcctgcctcagcctcccgagtagctgagattacaggtgcccgccaccatggcctagctgatttatttttttatttttagtagagacaaggtttcaccatgttggccaggatggtctcaatctcgtgacctcgtgatctgccctcctcggcttcccaaagtgctggtgagccaccgcgcccagccaattttagaaatcttaaacatttaaatcaaagttgtagaaatatgtaacactatatgaatacttactaacagttttttggagtatttactatgctaagctcttgcatgcattatttcatttcattcttaccacaatcctgtgaggtaagcactatcatagctcatcaaatctaagatgcctttggtttaaaatattatgcaccactaagaaaaaatgctgccaatggaaactgtaagatgccaccaattgtaatacagccccagtgtcagtgataccaaaagaaacatgcatcttacaatccatgaatacaacagcattatcactgttttacatctgaagaaactgagacatagagaattcaataattgccagagatcatgcagcaaataggagcagagctgggatctgagtcctggtctgactagataggtcttgtgtttgtaactgttgcatttgtgctttcataagtgctttcattaagcgatatggaggtatttagaaatgaaactttaccagatgttttatctatacttgacctattaaaatcaagttggaattgccttttctaaaattacgcataatcagaaattataattgaagctcacttaagtggagtcaagaacttggggccaaacatactattacaaaaatagaaaaaggacatgaagagacatttcacaaaagggtag

SEQ ID NO: 97338 - DNA, 1049 bp, Homo sapiens
tcaatactctctaaatttgtttaaggaacctctaaaattgaggcaacataagttgatatatttccaaagtgcagaattgcattatgcgtcaaaatgtgcttacttttgacctcggcatttcacaactcagaatatatcctaaggttatggtcaaacaagtgcatctgatgaatgtgcagagatgttcacttaagtgtttttattatcatgaaacatttgaaacaacctaaattttcaacagtaaaaaactgggcaaataaatgttggtattttcattcaatgaaaattaagctagtatggaaaacaattgtctagacccatatttactgacatggaaaaatgtccatttttttaaataaagcaccttatagacaatatagatttgcttaatgaagaactgccctgagataatatccattaatgtttattattctcaaaaatcagaaacaaaaagggtaatgagaatatgtcagtatttttatgctatcaaggagacagggatactcatatttttatcctggactctggaattagttgcttccctctctgatgtcttcatctgtaaaatgagagttaaaaaatagaaagattgaaatctttccagttttagattttaaatgcacgttcactaaagtgcagaattaaatatgatatgagaatgtgttggatcctgtccaaagtatgctggttaacagagaaccaacatgctagggtgtgatcagtctgggacggtgctgagcactgagctgtgaaagtgttctatatggaacagactttgcgattctgttctcaggacactgtctagtagataaaatgagaccagcagtgagacagtgggaattcttgctgatgattgttttatgccatgtaagtgcaaaacaacaactttaactgcaccaggattcagaatgtgacaaggttttaggatctatcaaaattctactgaaacatgtggctatgactaaaacaaataagatgcttctaagaacagattgtgacttgtctatcagcccctttgaaaacaatgtgcatgctatttattagggatt

SEQ ID NO: 97339 - DNA, 1066 bp, Homo sapiens
agatagggaaagagttgcttaggaattcaacgatttcattttgaggtggagtgaaaaataaactgcccagagataggaaccatgaaaccagtcatatatacaagtagttgtttttgaaattgtcaaatgaaaacatgtttgaaaatgagtaccaattaataacagttattttatattgtctgtaagccaaagggctaggcagggttctttatttcagctaggaaattatgtggtatattagatatttgcagaagaaagtattttaatcaaagctgaataaaattcagaaaatcatgtgtagaaatatagaaagatggcagtggaatggtaggaggcaagttctctaagggtctgctcaggtgcactcagtgttgtgaacctcaggttgccttggggttgatgacaaagcaaagatttcagaaaggagcaagttttaagaataaatgtgatgtgatagaagcagaggcaaggttggcagctaactggtttggtgtgatttcatggtttgcaaccaggactgagtgtctgattctttgattttctagagacattcctaatttcatccctaactctccccagataaattctcatctcttatcaaaaacaaggtccctggaatggaaagtcagggaactccctgaggaaatgagtgtttagctgtattctcagtcatgtaggttttgttgatcatagatatttttgaattgatgctttcttgtccccatctctccttcccttaattcaagtcatacttatcactcctttcagcctctggttattccccctttctgattcatctgtcatatggacctcaaatttaaaaagaagaaaaaacagatcagatcatgtcatttctgcacaaaaatggagaaacttttgttggttctccattacctatagaaaacttctaatccttaatatggcatttagtccctttacaaaagtcaccctcaacaaagctttcgtcttctcctccggctgactccccaccccttgcaccccatgtaggctgtgtatcagctttaagagagggaagaatcctctccgaatgagcagtgtgcttttt

SEQ ID NO: 97340 - DNA, 1764 bp, Homo sapiens
tgtctgtaactggccccaaaaaggatttttaaaaaagttgtctgattttgtttgttaatatgcttatatcctgacctctctgaaaatctgactttgaccgagaagcattatccataagtggcctcacagaaagactcaaaaataaattttctggatttttgttagtatggtttttctgaagttaatcctacaagatggaaggaatacactgtttcttatgcctctacccaactctctgcccctttatcctcccctgtcccccctcacaccagttctcgtctgtctttgttggctaacattacataattttaatgggtttaacaaacatacccttaagtggacatgtttttggcctctgtactgaaatctcttagtattctcccttgctcttgggttagaaaaccttcttgttaccactttctggtaaaattttatgctatgagaggtaggctgtttcatggctttcagtctaggttaagtgccagaacatgttctttattttactattcgaaagggacttggaatttattccactatctcctgatatccttaggatgagtggtgtgagtagaatgggtcctggtcatgctttatagaattggcccttgagcagaccttcataaacaccttgctaaatctaggacagcaggaaagacaagaaaggggcagagttaaccagctggtccactgagggataaagaaaagcatcccttccctgcctccttccaccccaggtcgctccaacctcctgacgatgcctggaagcggtgtgcagattgtttaacaggaaatgtgtgggtatttgttattttgctgatctctatggaatgtcccttactgaatttcatggtttgccaaatttggcagagttcttcacttctttgactgtatagctctgaggtgtgagattgatgttcgatgatgaagggaaacctaagtgggtcctgaggttccattaatacctctgccttcactctgcctcttcttctgtttcctgctctcccagattgagccaggtgtttacaaaaatctggtcaagggctgattctataaagctgacttcctacactgaaaataaaatctgtggtcatagaaggaattttgaaccccagacatctgttgtagacgtatagaattgatcacaatgtaggataggtagaaatatttataatgatagtgctgaaatcaatatttggagcttaatatgtgacaggcagttttcctggtgctttacatggatgtactcatttaatgcataagaatagtaaagtgtattctcatggtacttttcactgtacaaagtgttcttgtatttatttgattcttataaaaaccctgtgaatatgagaccagagtagactaaagagacatgacaactaaatgcagtgtggcaccttgggttggatcctgaaatgcagagaggacattagtggagaaaatggtgaaatccaaagtctggagcttagttaatagtaatgtactatatatagtaacataagatgttaacaatgggtgaggggtatatgggaacactcctatatttttctctgaatctaaaattactccaaaataaaaaagtttatttttttttaaaaaaaacccttatgatctagtcaatgcaagtctcattatcctcattccccagatttgtactgtttggaaaggctgagaaccttgctcaatagcacaggggggaggtggtaaaagaccaggacctaaactggagtccttgcattcttacctgagtgctgagtactgaggagt

SEQ ID NO: 97341 - DNA, 1090 bp, Homo sapiens
gttaaattctttaatgtattttctcaatgaaaatataaagtcttatttctgaaatgtatcttgattttaattatatgcttatctttccttttaaaatagaatatgcttctctgggatcactctatgattacattaacagtaacagaagtgaggagatggatatggatcacattatgacctgggccactgatgtagccaaaggtaataatatttggtatattcttatagaattagtggggtgcattttcccctcctgaaatggggacttaacatcagaaaatgttttattctgtctttagatgttctttttccagaccaaaagtagtaagaattccacagctgatggtacagataatattttaggtcattgcctttccactcctgaattccttttatcttcctcttaagactctactttatttctatccacgaaatctagttgtagcttcagggcagacatgtttgtcatgttttgtgatattataattgactagcttgcttgacacattaaatggaaaaatcatagttctgttgttctgaaagtctctacttagactcagtatccagaaaacatgatttattgtaggattagttctactcattttgtatacataatatgctaaaaatagaaaccacttgcaaaaaaaatttttatttgtcctgccatgtaaaagcaattcagattttattttacatttaatgtaaacttacttaggcatcgctgttggaattaaatatttttaatacaccaaacccctaaacaaagtgcccagtcttttttctcatacattcttgcatagatgaatgctttctaaagcaattcaaacttcatttatttttatcttttttttttccattttcctaactgaacatttctgggctttatttataactgtcagagttgctttggaaacaacttcatctaaataatgaacaccgatagttatatttgtattctagcaacccctacaaagtgtgtctgaattttcctggggcaattaactcctctacattttactactccattctctacaagcatctctttacaaagcaaatataatgtgatttagcactcagtaaggggagcaac

SEQ ID NO: 97342 - DNA, 1045 bp, Homo sapiens
cttaccagatgaccttgtccatgtctgctgccagtcttagagtagcagtgactatctgaagcgtgactctaaggcattacataagaatcacagcagagccacatagagaatagactaatgagggggtggagtgctcaaggaagagaccacaggaatgaatccgttaaggagcagaagctcctggaggaggaatttggagatgggccatttcctgaggaataggttatacctgcattatcagagagaaggaagtggagtgggagagttctttgctggaggaaggaattcatttgttgccttttgttgaggataaacttttccctaaaatgttacgtattctttaaaaagtccaaaatagttttggaattccctgtctttacatctcatactgccctgctatttatactattatactgccctgctgtttatactattacttcctaaaagggcattttcatagtaatgggtaaagaagcagcctgttttaggtccaaatcagcctgtctcttcgtcctgaacttctgtgttttcttactgcaggtggtagccaatgacacaagaggagattcacgttgtcagacctgttttgttttgttttgttttctttattcggtctctaggtatttaatgctggcttcacaggttttggacttgtttcagtgactagctttttgtaaatcataacacatcctatgtataccaaattaataaagattaattttgttagctattgaaaaaatcatttcaagaatgaaatatgtttttgaccgaaggctagaattttaaaggtcagaaggcaagagtaacatcaggcttaatacctgatatccaaaaaaagaaaaaaaatcaatacctgatatcccttgattctggtttcttaagaatgaagactataagctattacagtgatcaaatatttctcataagtttcagaggagactagcttataaaactggtctcctatgtcaaatgttactacattctaaccatcatacattcatctgtgggatattctgaaaatggggtatttgtagcaatttaagac

SEQ ID NO: 97343 - DNA, 1357 bp, Homo sapiens
ggcaactatgtttctagcttctcatagcctcccccaaatccagccaagttcagttttaagttttttatttgcaaaacttctttggcaaacagaactgtggaataagtcttaatacttattacagcagttctcaactccatcacacccaatgctcattttataacaactatgttaacaaccccttacactcccttgaggtgaaattcaaaggtaacacaactacctacacacattatattgtaagttaacataatgctctaactgtaatataaaagagaaataaatgaaagatgttttccagtgtacaaatgctcaagcatgaccacaccagaggagattttggaacagttttaggggataaatagaactcagcagctacaaatgcacccggatggagttgggttgtattaacgactccagtactgggagtagcactgttgttgttatgtcagaaatcatgataaagttatgaatcatgcaagaatcaataagcctttgatttattttatttggtagatgcattctgcagagttcagtgtatcttaaaactgttcaaaagaatactttgtgtttatttgtaagttagagttagattctaggcccagaaaattataaacttcattgtttgcttgttttacttacatgaatgtaaatggggcatttgaaattttgtgggatacaggggagttcctggttatgcaggatagtatggtatattgaattgtctagcattcctgacctgttatacttaaaagtcggttgcaacccaccagtctctaaaacaaacacaaaatgcttctgtggaatagaggcaccacaagttctatgagaagcaccactgtaggatgttagaacaggaccatcctcacattataatttttgttgtatcgggtccttaaagtatatgggtttgaccaaaacaaagccgtaatcagtcatacgttcagaatgtcttatttaccactgagaaatgtagagtttttaaaattatctctgtgatctgtgctcagatgttttcagagttgtatacctactgccaaagctaaactggtttctagttacctggcctatttacatatatcgcaagttgcctataaacatacagtgacatatggttttatatttaatatttaagttccgacttgccccctcctactgtagttctgtttagatattttatgttttgttgcattagttgtactgaacctgacttctccgttcactacagttccctttcaagaaaaagtatgagtctttagagattacagatctaaacataaattgtcacttgtcacatattaatcaatggaagctttaaatttcatgccttatgttcttaaaataactctattatgac

SEQ ID NO: 97344 - DNA, 3149 bp, Homo sapiens
ccacatttccctagaactgtatagactgctgaactgttttttgtgcttcctctaagcttttcttttgggtacaaagtttcttaatttttcatttgagatttaatctctgcttaatttatttttttaaaaatataatggtcaactaaatgtttccttatgaaagtgaaattgggaaaagtcaagataaatcctagaaactattttgttttaagcaaaatgagggcttaaaacttgcaacttcttttccatttgaaatttggcttgctgtggtgctttgcaaacttttggttgtgatttatcctgtcattcataaattatggcaaatatgctggagccaaatctgccattaaataaattctcacataattccctacattcatttatttcactaatcatttacctcctgtgtagtgccaactaattttgtggtatctattttcctgatttaaattggtcctaatttctctttttacttctgtcctttcttcccttttgatagcttctcttgcctcttgctgcaagaatgtctgaggagtcttactttgaatctaaaacagaggagtcaaacagtgcagagatgtcatgtcagatcacagcaacaagtaacggggagggccatggcatgaacccaagtctgcaggccatgatgctgatgggctttggggatatcttctcaatgaacaaagcaggagctgtgatgcattctgggatgcagataaacatgcaagccaagcagaattcttccaaaaccacatctaagagaagggggaagaaagtcaacatggctctggggttcagtgattttgacttgtcagaaggtgacgatgatgatgatgatgacggtgaggaggaggataatgacatggataatagtgaatgaaagcagaaagcaaagtaataaaatcacaaatgtttggaaaacacaaaagtaacttgtttatctcagtctgtacaaaaacagtaaggaggcagaaagccaagcactgcatttttaggccaatcacatttacatgaccgtaatttcttatcaattctacttttatttttgcttacagaaaaacggggggagaattaagccaaagaagtatatttatgaatcagcaaatgtggtgcctgattatagaaatttgtgatcctatatacaatataggacttttaaagttgtgacattctggctttttcttttaatgaatactttttagtttgtatttgactttatttcctttattcaaatcatttttaaaaacttacattttgaacaaacactcttaactcctaattgttctttgacacgtagtaattctgtgacatactttttttttcttatagcaatacactgtaatatcagaaatggttggcctgagcaacctagtaagacctcgtctctactaataattaaaaaactagctggcatggtagcacacacctgtagtcccagatacttgggaggccaaggcaggaggattgcttgagacctagcaatcagtcagggctgcagtgagccatgatggcaccactgcactctagcctgggcaagagaacaagatcctgtctcaaaaaacaaaaaaaagaaagaattgatagtacaaaatccaacaacaatactgagatgatctaagaaggttataacaaaatgctcttcagaaatacctaagtgctgagaatttttagtactaaagagcacagctgctcaaagtaaagcctgagcagtgttctcagtaatgtatttgaaggaaaaataccctgatttgaaaccaacagcagatgttgcaaactttcataccactgctggccatggaagcctcttaacaacacactgtcatttaaggctgtgcttgtgctttatacaaagagaaagaggtggtcttaaggggatgcttccaggggggtgagttcatgcctctcctgtattttccagcaagtggggtatgtgtggtggtttgttttttagaggggcataataatccaggattctaagcatatgctcagctattttaaagaggaaattaaatattataaaagaaatagtaaagataagttatcctcacttaggcaaaagcacaggtcctttccatatcaagtttagcctaccagggttgttttttgttttaaccctgcttaataatgttggtgttttagaagtagatacaggcactgctctgaaaacctggctagccaaggatattctcagaatgttatcacctgtttgtcaaagcttgtttaaattataaaacacttttaattatatatatgaggcaaaagaactaagacttttttcaaactaaattagaaaggagtgtcattatttgactgttaaaccaaaatatttttggtgggtctttttatggaagtttaaagaaaggacatcatcatagatatgatctaacagtatttctaactatatttgatcattaaaagcctcttggaatttgaagcgtgacgtgtttctaatgccccttgagaggtgaaaaataccacataatgatcagtatgctgtgccagcttcatttggggagaaataactagtagaaagttctgggtgtgaggtgtacagcagtctaggtggcatagtgatgaagaaagggatcagagtctgactgtcactcagaatcctgggctcagttgcttgacaaccttgggaaaattgttttatctttgtgcgtctgtttgctgatcttcagcgtgggaataataacagtacctacttgaaaggatcattgtgcggattaaaagaaataatatatgtaaagcactttaacacagcaccaggcccacggaaagtggctaatgttagctactatgaatggtgccagtgaagacactgaaaaataagtgatttcagtaaccttctggaaagctatcagtttcaaataatattttctctgtagtatgagatgaaattaaaagtggatagctttcaggaaagataaagagaacatgcttagaatgtaagctaaacagattttttctgttgctctttgaaaactatgagccctggccagcttaacctggtctgaggtgagactaaacacaaaaacagtagataaatctctccctaaaagatggattcccccacatacccatgctactagtttctctgtctattcacacatatgtacaaatacatgaacacagcctgtctgtgctca

SEQ ID NO: 97345 - DNA, 1121 bp, Homo sapiens
tggggctaacttcgggatccctgcactttatgtaagaatgtaaacctggagtctcatttaagaatgatcagcaatacgtttagaacatatgaactgaatgaaatggacattttttcttaatttatgtataaatccatatgattatacataaagttctgatgcattaataaaagcagccaaatagggccaaagagaaaaataacaggactctgtactggacctaactttatcattaattaggtaatattttcctcatttctttactgctgccattttcctcaccagtattccagagatggtcatagctcattactctaccaccaagaacctaaaaggaattagaatacagcagaattggcctcagtgaagagcttaaaattgttctcctcgtagaactggactattgatcattaccacgtgacgttggctctattactttctgttcccaatgtccttctagtggtttgaaaatgttaaaacatccctaaaatctaaatcatataatcagaattctatagtgtcccactctatctgtaaagatcatttggaagactttagactctattaattttaaaaggaatatttattagccatatgcagaatttctaatgatgatattgtacagcttctaattcacttttcagatcagtgtttgaaatggcaattatcagtgttggatttagttccaactacttgatttacaaaaatgtacatttagaggttaaaagaaacagtgagaaatgtaaacattcaaaatgataattgaatctctcagttgtgggaataattatcagagacatgcaactgaaaatgtctcacctttcatctttttttcttaattcataaagttatcttgtagaatttgatgagaccctccctagtcattctcaactggggcggtgctgtcaccgaatggtgtttgagagtgttggggctagggcacatttttggttgtcacagcaactggggtggcatttgctgcccagtgccaggaatagtaacattatgaatgccagggacagtgtgctcagtaaagtcttccatccaaaaggggcagggcacggtggctcacgcctgtaatcccagcactttgggaggccaaggtgggcggatcacctgat

SEQ ID NO: 97346 - DNA, 1053 bp, Homo sapiens
tgtaagttagaaaggttaactcacctaccctatgatttttatactaacagtaaaagcaaccaaactcaacttttttttgaaactcactcacaagaaaatatttgtaacagaagatgagtgacaatttgccatattatctcataagcaattcatttttggggggcaagttaggctagttaaagctaatagctgtaccaaactctaatttgacttataggacacacagacttctaaaaattatgtaagcatttattatttagatggccatggggcatatattgaagacagtaagtagttctttggctctgaaaatggtgcaggctgaagtcctctggaggcatcttcatttgtacttgtgaacctcacagggaggtattttaatctgttttagttagagcaactctgcagcctgggtttcttaggaccgtaccaatttcccatgtccttcttcatccgtgagtgctaacatttggtttttaaaatattgtgcaaatgagatctttcaacacttagaaattcccccttgagaacaggcataatacatgatctggttactaagtggttgctttggaattttcattaataatccaacagtcctcatgttggctgagactctgaggaagactctaggtctctgagaaaatgtcagaaattgcttgactgctgaggcttgattgtgggatgtaaaaaccaggtaccaacaaaggaatatgatacagctcccaaagtacatgaattgttactgagagattggtgaacattactggagcactgagaactgcctcttaaggtcaggaaaactgttttccattcaacccaacctgcaggaggaaccaagccagagcagcagctgagagctgaaagagtgagacaagaggatgaaccaaaaagacaatgataatattacttttttttttcatttcatgcatatttcccatgcagctgctgccttcctttgagattggtgcatggacggaagacgatgtggtaagctctttgtattcatgccttatttgacttgagcaggtatttcataaatttttccctaagttt

SEQ ID NO: 97347 - DNA, 1053 bp, Homo sapiens
acgcgtccgcttctaaccgctgagggccagcgcgtctgaggtttaaggtcttgcgaaccggtctcctagaacttgggctgcgcacgcagtgtgaagcgaccgtagtcccgggcggtggttaagtgcatttaaagggcttggtgggtcaaagcgttcgccgaccatttgctcgtttcctacttcctccaccccaacccccaaccccccaccccccaccccccagccttactcttagctgcaggacgttgctctgagtggaacgttactttttgctctaacggaagccagaacgtagggtcgggctcctggagagggtagaagagtgggggttgggtgaaacggaagacaatgacatgtttaaaataaatatcaggggttagggaccctcgcgggggtgggtgcgatggggcgtggtttcagagctgagtcgccgccccggtggagctgggcattggctttccggatgaagaaaaccatgtgtagctggtcttggaacctgacatgcctgagttcaaatctgagccaccatgggacttgagtaatccatttcgctttcctgagcctcagtttcctcattggctaagtgagaataacgatagcacctttgttgcaaagaattaaacctgacgtgaaagtgtacttaacatagtgcctggcacgaaaaacgcctactataaatggtattagttattacttacctgccaaagaagttcatctccgtcttgactatttgccttgctgcttttttgtggcttttcctccaaagatacgtttgcctggtaaataactcttggcttgtgctgacttgttaaagctcagcctgtatttctcggacagcttccaatagaatgccgcctttgaggctgtctggggcctctgactgcttgcaggtagattgatgagtaaagggtggtaattcctgcagtaatgcgatgaacactgctgcttaagaagatggcagacttgagttctccttcctgcccctgtgatcttgcagtctattacaccttcctggggccttgaatatcctcatctggaaaatgggatctgaga

SEQ ID NO: 97348 - DNA, 1029 bp, Homo sapiens
ctgtaatcccagctactctggaggctgaggcaggagaatggcgtgaatccatgaggcggagcttgcagtgagccgagatcgcgccactgcactccagcctgggcgacacagcgagactccgtctcaaaaaaaaaaaaaaaaagaatttgacctggttttaaagatttttgggtccagatacagtagctaatgcctgtaatccaagccctttgggaggctccggtgggaggatcacttgagcccaggagtttgagaccaacctgggcaacatagcaagaccccatctctaaaaagaaataaaataagttagctgggcatggtggcacatgcatgtagtcctgtctactcaggaggctgaggcaggaggcttgcttgagctcaggagttccaggttgtagtaagctatgatctcagcactgcactttagcctggaagacagagcgagatcctgcttcttacaaaaaaaagaaagaaaaaattttttgtagcagttaacaaacttccttttctatgtagggtatgataaatggacatatctactctgtgctgtttgaacctactaaactaaaaaaaaatgatgtctttagttaaataaagtaagcatcacgcttaataggattgctatttccatttgcagcagaaagatctcagagtaaagaagaacttaaagaaattcagatatgtgaagttgatttccatggaaacctcgtcatcctctgatgacagttgtgacagctttgcttctgataattttgcaaacacggtaagtgctgcctgagaataaacagaattgagtctgcagtgctcaaaatgccccagatgctttgtgcgtgattaaaactgcttgctttttgcctacatttctatacagccgttatgaaaatacagtatgcactataatttcatttcactttttgctgtggttctaggtagtaattgttggaggtagattagctacttattctatccttttgaaatgtcgcctaacctaacatgcatgatgatttgccataacaactcagaaatcat

SEQ ID NO: 97349 - DNA, 1049 bp, Homo sapiens
taaatgttggtctcatagtagatctgtggctgcatcttgaaaacctgtgataacttacgtgcaggagctccattgcagataatgacattgagggcccttcctgctgctacttttgctccttggttggcttttcctatgcacgctaccttcctttaactgccgctgccactgttgtgctgtgcctcggtcccactcttctgagcatactgcttaattctgcacacattttcctgttccaaagactttcttgacaaaggaagcagtgcattcactgataatcaagtgcatgctcttcaactcactggtctgacatggatccactgcctgaggttcatggtttgagtaacattgatagaagtggcagtgcctggccaaggagtgttttggtccaaatcagtgcatactggagtttgttgcagggggtccagtctgcagatctggatgcgacacaaacattgtcaatagcctgaataatttctgggcagtgtttcagttctttgaagatactgtcatgattaataaaatgccaattcattataattgttaggaactcatgaaaggtttttgttgttttgtactctctcaatccatggacactaaaagtacaaaaagctgtttgtgggcatgtaagacttttgagacagggtcttgcactgtcaaccaggctggagtgcactggtgtgatcatggctcactgcagcctccacctcctgggcttaagcgattctccctcagcctacccagtagctgagactacaggcgtgtaccaccatgcctgggaacttttaaaaattttttatagagatgtgggctcactttgttgctcaggctggtctcgaactcctaggcccaagcaatcctcccgtctcggcctccaaaagtgctgggattacagccaagagccaccttgctggccttgataaatattttaatgttaaaactgagtctttatgggtgaaattctgggatttatgggtgatttttttcttctctctctctttttttttaacctgcaaccattaccatagtcaattttggaataactttat

SEQ ID NO: 97350 - DNA, 3592 bp, Homo sapiens
attttttaaagtagagaattgagatctgttaatataatttaatattgccataaacattgaagccatatttataggggaacacatttttttccctttttttttttttcaagacagggtctggctctgtaacccagccctggcatacagtggcacgaacacggctcactgagcctctgccccctgggctcaagccatccacccacctcagccttccaagtagctgggaccacaggcatgcgccaccatgcccagctaatttttgtatttttttttgcagagacggggtttcaccatgttgcccaggctggtctcgaactcctaggctcaagtgattcacccgcctcagcctcccaaagtgctgggattacagatgtgagccactgcacccagccaggagaacacatttgttcttgtcagaattcttttaaaatacataaagatctgtttctaaagaaatgaaaagcaggtggtaggaattttaacattttaaaaaaaggctcagaaccacaggcctagggactatgaaaatagcttataacagtgtggtccagatgggctacatggaattaaactgcactctgttgatgtactctttgtggttcctgattttgttacccagaggtatcaatgttcagttaaaattcatttcatacaagtgtctcattgaaaagggactttgtagttatactgatgcagcttgtctgctgatcaagtcctaatgactcaattgttgtgattagaggctgcagtcagttcgggaaggctgtaggacccgcagccagtgcaggcactctggacctctcagggtggcgatgaagtttccagcgcggagtaccaggggagcaaccaacaaaaaagcagagtcccgccagccctcagagaattctgtgactgattccaactccgattcagaagatgaaagtggaatgaattttttggagaaaagggctttaaatataaagcaaaacaaagcaatggtaggtatctgactttgtgttagaattaatttttcctctctaagcgactcattacttaaatctgttccatcacgcaaaagttatttttttctgttacatgaataaaaagttatttttgtttacctgtgaagtcttcaatgtgtgcctcaaaatgtgtttctttccctgaactactttttttaaatctgttaaaggcctggttaagtgtataggggaaatcagaaactctgaatgtgtcagcttactatcaaatataaaaccatgagatgtacttgagtattttccagaagttagttgctcattttcgacagttattctaagccaatgatatcagtttaatttcctccctttttagcttgcaaaactcatgtctgaattagaaagcttccctggctcgttccgtggaagacatcccctcccaggctccgactcagtaagtaccagttcttgtttatatacagtagtgttttgggcacacctaaggtcgatctgtgttgtatttaaaaatctaatttctttatttgtgtggccttctagacaaacgaaggggacctagaggaaaccccctgacagatctctggatgatcctccttgaatcctgggcagtttggtctctccttgctgtgctcctgtggcactaaactccttttgattggttctttctttccttcccagctagactaagcccctcatgggcaggtaatgaagattgaaaacttttttctgttctccagtgtgagcacattcctcctacatggtagatgtgcaatagatgtttttaaaattggagaatgaaaataaaagaagaaaatcacaatttcttatcaagttgtagcttggtatcatacacaattgcattctgaggaattaaggtggtacaacttagggagatttggtgtgtctgctgtgatagaaaagatttctttttcctggctttccctgaggaaaggaaagatggaaagagggaagccatacagatatccctctattttgcagtgtagaaactgaatgtgtttctacagggtcaagagacatcagagaaaatttttttttttagaacagaagatcatttcttacatcttcattaagtaaaagaataaatagctcatctctcaagttgaaagaaactgggcttggtattacaaaagcaaaattaagatggccatataggttttaggctcattttgccatgcattatgcaaaggacaaagaaaaagaaaaaatagagctctctttacttaaaacatccttaaggagaagctatgaattccccaaagtactacttctctttattatggaataaatggattcccttatacgtgctttgtttagcaatcaaggagaccgcgaaggcgtacattcccgggtgttgcttccaggagaaaccctgaacggagagctcgtcctcttaccaggtcaaggtcccggatcctcgggtcccttgacgctctacccatggaggaggaggaggaagaggataagtacatgttggtgagaaagaggaagaccgtggatggctacatgaatgtgagttctccgcattggtacttgctcttctgattctcatcttcggtaggcctggcatcatacacagcacaggtacacgcacatccttaacaccaggcgatccatagtaaatgttttcctctaaccattcagaactgtaaacgtcacataagcttacttggtaattttattagcaggcgagaattgggttttcttcatctcttcttaattgtaggcatcgtttccaaaatgtccagttaggctacagtaagcgtatggcctgttcccctaccataagctctaggagagatttccaggttgaagtttgtgtgaagaaattacaagtcaagtatctgagattcaaagctggggagagccagttttgaatctctgtgtttcatatttgaatctgttttttcagttttgaatctctttcagtttttcagttttgaagttctgtgttttgtattccttgtaatgcaggaagatgacctgcccagaagccgtcgctccagatcatccgtgacccttccgcatataattcgcccagtggaagaaattacagaggaggagttggagaacgtctgcagcaattctcgagagaagatatataaccgttcactggtgagagcctctaaattacacctgagaatgtaaacatctgtgagaggaagagagcttctgtccctaagcgttgcccaggttctaaagggcctagcatgtgaaatctgtacctatatgtttttttcacacaaggaaggaaaagttttacagtatccctgggatttagccctctttcacagtggaattatctgcttagtaagtctgtagtcatggtaaatcttttctcctaatttagaaatcaattcattcaacatatatttactgcatatctattatgtgtgtatacatagctaggtgctggagtgtggtggtacaccaaagataaaagtggatttgggtaggttattttttaataagaccttttcttaaagggaaagcggttttaccacaccaggctaatttttatatttttagtggagatggggttttgccatattgcccaggctggtcttgaactccttggctcaagcgatccactctcctca

SEQ ID NO: 97351 - DNA, 1048 bp, Homo sapiens
cacaaggttcaagtttagattttaagcacttttataacaatgataagtgcctttttggagatgtaacttttagcagtttgttaacctgacatctctgccagtctagtttctgggcaggtttcctgtgtcagtattccccctcctctttgcattaatcaaggtatttggtagaggtggaatctaagtgtttgtatgtccaatttacttgcatatgtaaaccattgctgtgccattcaatgtttgatgcataattggaccttgaatcgataagtgtaaatacagcttttgatctgtaatgcttttatacaaaagtttattttaataataaaatgtttgttctaacttgtctgcttttttaaaaataatcttactgtacttaattctaattttttcctcatatttaaataaaaggccatttccaccttttctaaaaaagtctcccttttgactgaagtttctgaagttctaaggtcagcttgtttgaaaggacctcactaggtgacaggactaatacctgtgatcagaaaacgggcggagacaaccacagtgcctgatagaaaacaatatgtgcccatgaagttttgtagtgttttcttttcctttatgatgtgctttgcaatacctggcttacttttatcaaccattcaaacatatattaaatgcatgctgtgccttgaggcttgttccaggactgtgagaatcaacaaaaaaggcatggtctaaaagctctcatagcccaattctttttttattttttgtagagacaggtcttgctatgttgctcaggctggtttcaaactcctgggctcaagggatcctcctgccttggcctcccaaagtcacaggcaagagccaccaccacaccggctgtccaattctttagaccagggattggcaaactacagcctgtgggctacatgctgctgcagagtttattcgtatggcatatgaactaagtatttttttttccatttggaaagggttgttaaataagcagagacaatatggttcacaaaacctaagatatttacaacctggcactttacag

SEQ ID NO: 97352 - DNA, 1039 bp, Homo sapiens
tttctcaacaacttgtgtataaggaagtatttttatacttatttaacagacagaagatgtgaagcagaggacttgtgacttaccgaagttaaaatcacattgatcctttggaacaaactttatgacgatacacccatttttatagaaatcaaaccaaagcacaaccaattatctgacatacctgggcaacttttgaccaatgccttttccagatcattatctaaagaattaacccaatattcttattactttgtaccagaattttatatataaaaattgttcattatatacatctatgtattggtatataataccatctctatgagaaaatgtcttatagatattacactctatatatctctatatatccatgtagaaaacctatatctatatttatctatgtatctatattataaaacagtcttgcggtcctaagaacaatactggcacctgaaattgcttctttgattggataataaatcctgggtggcttgatttaagttgccagtttcaatcagagttttcctttgtgagacaggcagtcatgtaaactgatctagttcagctgatagtaacagttccagaaatccaacagagtgttttttaataaaaatgtatacaggattggaatgttgataagacatttgcaaatgtatatagaaatatgataatttatactattttgtgataagattcctggttggcattagtgatgcatcatatgattgcattaattgcaaagaagaaactcaaaatggcataattgtgcctgatgttcaagtaatagaaatagaatttaaagtgttcttagaaaatggaaaaatgttactgaggtgaaaagactttaaaaacatgaattcaaaaccaaaccattagcacatgtaaccctttcaaggtaatataaatcctgtagtagaccttctaccaccacccatcaacctggacaaggataaaagaaagtggggagatgagcatcagccgctggtaggttatctctgaaagcactgaagagagccgttgcatgttgtaacatcctcag

SEQ ID NO: 97353 - DNA, 1011 bp, Homo sapiens
tcataacaacccacaactaactactggaattcgtattaggctaatgagaaaaatgaagtagccaaggacatctagtaagtggtggagctgggatctcaacttgtttgatcagtctcctgagactggggacatgaccactgagctatgctgactcctcacttctccaacccgtcataagtgtcttcgattgtgtactggatgaaacagcagacagttgaagtaccctgccttggagtgctacagtatctttgggacatagtttaacgtttgatcttctagaacctccgcgtcatggtttcaccagccatcagctctaatacacaactatcatttgcacaactcttgattcctgaaaattagctaggtcactaagtatgtcagctgtaataatgtagcagctaattcttttaaaaacagaaaactgtatattagaactgccactggcaataaatctgacctagaccatctatcctctcttagctggaaatttatcattatgtagaaagtgattttgttctttccaaaccctcagccaccaactgggccagttttttgcttctgcatatttcattgaagttgctgcttggaaaacaaccaaccataattacttatttatgtgcatatttctgaaactgtaataatcggtgaacctgccttggatatttctgacaacttggtttgcatgaaagtccatcaattttgtccttaaattctttgttcctgatgaacttctgtaaaaatctttgttctggaataagagatgttctttctaattcctccaaactgtgtctcctgctcccattgttaacaaaatcactagctttcctctttatctctctggttcctttgtttcacgttgttctcctctttttcatttgttacccatgtaatacatgtcatttttggaaaatcagaaattgtaaataagcaaaagaagagaaggatgaggaggaagaaaggaggaaaaaaggggaggagaaaaacaagctgtttcaatcttttggtgcttat

SEQ ID NO: 97354 - DNA, 1026 bp, Homo sapiens
gcggggttttgcagggagccctgttggtaaacaatgcctgtttgcaggctactcaggaacgacctgggaagtggaaggatctgaaaatgttgtgcatgaagtggcccgttggctgtccaatgaagtgtctgttatcagaaggaaatgtgtactttttgaggtgagatcggttctgtgctctgaaccgaatgatttttcattttttgttctgataacaagctggttgtaagcttcactgaactgataaattgtaaactcttagaaaaggctgtctaaagataacaattcaatgtttcttggtaatgtatcctggatgaatctgataatttaaagcccacttcaccaaaatgggagtggtgcttgcgtcctctttatcttcaattatgtctaatctgtttctaattcaaacactgtgctgctgttgtcagatcaaatatagattttaaatgttttatgcttctccgctgggaaggtttaaaatgtatgcaggctgtctgtcaggactgtgccagttgaatctaataaagttttagataaattcaaaggaaataaaagagtacttaaaaatgaaatgattcacggttcatgagatggaacatgcttaatgaacggcaggcagttcgggaaaagttatggtagagtctctatggatcacctgcctaacctttacagagctctccttgaataaatatattgtgtcttccagctttacaggcaggagttcagaaaccaatttaaaaatcaagtcatctttgggcttgtttcaaacagggcctcataagcctatgggcgcagggactataatccatggtttttcattccacatgatgacacttccatcactgagagcagattggaaaacatagttgcagttttcagtcactgaataggatgcagttgttatcgttattagaattctttttttctgctcatctatgtagatgtgctccaggtatgtgtgtgctctggaatatcaaagcaaaaacatattcggagataatatcgggcattgttagacctgggacc

SEQ ID NO: 97355 - DNA, 1026 bp, Homo sapiens
ttatcatttcataatttctaccctgaaggttatagtaagagaagctgataacattctgactataatcaccttcctgacttaaaaaaaaatccatttggtttcactagtttcctgtacttttttcattataagaacatattccctttatttcaatgttagggaagggctacttttttgttttttgtttttccttaaacatgatcctctaagagctacagtataactctgctaaatatccacagatgtgacatctggagcactgtgccccaagcctgggagagcctgcgtataggccttgtctacttggcacgtttagattcatgaggggacctaataaaccttttatgactttcaaagaaagaacatagggccttacttgctcaggctctagtgttaaacttgaggctcacttgataagccaaattcagggcagcaaaaaactaagaaaagttgatgatgggaatgtatctttctaaccaaagtgttcctcaaatctactccaatattggagacagtgagtcaaccctgaaatggagactagaaactataaggcagcaacatatgcacaaaaccaacttttttttttttttttttgagatggagtctcattctgtcacccaggctggagtgcagtggtgcaatctcggctcactgcaacctccacctcccggattcaagcaattcttttgcctcagcctccccagtagctgggactgcaggcacatgccaccacgctcaggtaattttttgtagttttagtagagacgggatatcaccgtgtttcgatctcctgacctcgtgatccacccacctcagcctcccaaagtgctgggataacaggcgagaaccaacgcgcctggccaaaaccaactttttaaagcaatattctgccctataagtcattatgtgactgatgacgcacagcaaaagcgacagtaggtgtgaacaccatccggaaccaaggtcttgtgttacctagtctcctctctgctgggctggtttctttttcaattggcaaaggataaa

SEQ ID NO: 97356 - DNA, 2588 bp, Homo sapiens
tatttagactttaaagtgtgttatagatgcttattttttagctggcatcttaacacaggtatttcaaacaaactcttagcgtagttgagatattaaagtcttatttgaatatccatctattatataatacatgtttgaagactgctagtcatcaaaaagtaaagatgaaagatttaaggagaaatattctgtaagagaaatctggcaggggtagctcgtaaaatgaatacaattttaatagacccctgctcccatcctcacctgtcagcgttgacttactttctgttttgggggagatgattgagctattaaagttgaatttttaaaaccaagtaacttaatttttttcttaacaggtgagaagaaatttgtttgtccagaatgttcaaaacgctttatgagaagtgaccaccttgccaaacatattaaaacacaccagaataaaaaaggtattcactctagcagtacagtgctggcatctgtggaagctgcgcgagatgatactttgattactgcaggaggaacaacgcttatccttgcaaatattcaacaaggttctgtttcagggataggaactgttaatacttccgccaccagcaatcaagatatccttaccaacactgaaatacctttacagcttgtcacagtttctggaaatgagacaatggagtaaatattacacaaatacttattcattgtggttatttttatacagtagtgagaagaatattgttcctaagttcttagatatctttttattgatgtgcaaaaatttttggattgacagtaacttggttatacatgacactgaaatgccttactttgtatgatattccatagtatattaaaaatggtaaaattgcatgggttttgtaggtacttttggaatctagaagaaatgaaattttaccaagttatataaagagaaaattgaatttaacaatgcgaatggtagtctaaccaaatgcatcaatcctgtgtggtttagtgtaaaaatgagaacatgttggtatttatctattgtaagataaaaaagctggtgggtgaaagaaatcatgttatgataaaaaattttgtaattttcttgatgactggaatttttattatgcataactgacaaatcaagtttccaagcaaatgttacatagtgtaggctttacttagcttatcaatttgtcattttgaagctaattattttaattaggttaactatgtacaatattttaagcattactcttgtaagattttgaaaactacattttaacatggaactctagggatagtcaccttttaaatcctgttgaaaagccatgtttaagatttaatttgccaaaataatgtcttgttaatattctttcaataacgaagttgggcaatataaccaatgtttaaaaaagtttaaaatgtataagttgaggcatttgggtggtaagagaatgttatagtgaattatcccttttcttgactattggaggaccaaaaaaataaggtgtattgcgtcttagcagtgatttttatccaatcttgtttccaaaaaccatgtctcccagggccttaaaagccatcatgtaaattaccagtaaagtgtaacatatgcaaacataacaaaatcacttccatagtgacgatactccaaccatatggatattagtcatagaagaactagaggttttatgatatttttttaagtcttttttttttttgtctaggtagtcagtctgcacttaaatatcaatcattttccttttttgcttcttcccttaaaatttatatgtatccagtacatttaattgagaagcgtatgttttttattatgctgtattttctttttattttttaattattgtttatattttcaattcaaaaatgtacaaaataaagttacattgctggtcttgtaagagctatacagttttcctaaatgtatacctgtaactgcagcagttcacctatttcaaaaatttggaattctgttcatttgttattcttaagaccacctcaaatttaaaggctaccttattgtacgtttaaagtgtattataacagtgtggtagttaataaaacactatttttttttcttttgagtttgttgtattcctatgcataaaaaatattgcagtggtatggggtaagaattggtggtttatttttcttcaacttggctttttatttttagattcttgattttagacactgaattgtaaacaggcatttatttgaagaagagatatatagagacactggtcatttactaattttttacctagagtaaataagaatgagcttattaaataaaatttttgaaaaaaagtcttagcccttagcccacattgattcatatcagttttatcagtaccattttgcaatttttttgttttccgttttaaagcaatgcagaatattttgatttatcgaaaacctgaatttacattaagactcctgaaaatgataagacaagcgttggtaaccatggcaggagttacttgaaaaagttgcctttgaatttgcatgtgtttcatcattataaaggcagagtaggaggaaagagtattaatgtgattgtgtattgtagatgttttaaagtaaaa

SEQ ID NO: 97357 - DNA, 1039 bp, Homo sapiens
ttttggtttctgattgactttgtaatgataatgtcttctatttaaaattcaacatggggatatatgatgtaaatggtaatgtccatttgaatattttcatataagtatatattattctatgtgtgttttttagaggtaccaatcttgggaaaaagaagcaacacatttgtcatataccaggatgtggtaaagtctatgggaagacctcacatctgagagctcatctgcgttggcattctggagaacgcccttttgtttgtaactggatgtactgtggtaaaagatttactcgaagtgatgaattacagaggcacagaagaacacatacaggttactaatacttacttttaacagacaaaaatgaattatagggctacataactgccttgacttcttttttattagcattccttactgaactgaatcgatttaaaatacaatgaattacatccaatttttacctttagtaacaccatcttaataacacaaattccaaagaacaagtcagtctggcttatcttctaaaataaagttatatttaagtagactttgggtggcttttgttgacattattgaatgctttaaaccacatttatactatttttattctgttaacatttttaattagttgtcagcttttactcttgatctatcctattttttttctttcctcttaacactgtaacaaaaaatactcctgtttcttctgacatatttgggcatttcaccttttcttttgtttttagtatctctgaggtaagggaaaggtatttcactgaggaataaccaaggcaatgttgatgtgaagactttctctgattatattatttttacatagtgttgtgtggttgttaaatgaaatggacctgtgactgatctacactgaaacctaacagtgttaacttagagatagttttttcctactaccatgtaaatgattaaagtgttcatcagtctatgctcaacactggagaattgaaaactatgtatttacaatccctagagagcttggaagaagcatggtaaaatggagaacaac

SEQ ID NO: 97358 - DNA, 1406 bp, Homo sapiens
tcttagggatttttaaataataaaataaatttaaaaatctaaattaaatggaatcaatattggctttggttagtaagactttggcattgcaagggagccagaaaaacctgtttcacttaactcagctctttgaagagttgtagaaattgggggtggactggagcagaaactagaattgtgttagattatgacatccttgcccttgagacaacagcatgactcctccttgtctttacttatgctattcctctgcctggaatgccttccctcctttctatctaaatcctacccacctcctccacgaagccttctctaactactggagcccacattgatgtctccctgttcagaacacctatggcatctaacagccagcactgcaccgtttagcactgtttgtcctatggcaatttcacatgctactgagtgtgagtacattaaaatataaatgtggggaaatatgcatttttccagtaaatttgaaaaacgataggtgtattgtatacaggaggatttacaggctatagaaagttttacaggatatgcctaaactgtgagattgggggaggaggggagttggggagggggctaaatgtacttttttaaaaaaactcagaaacattgtaaagtttatacaaattgttttgtccaaagtgtcatgttttttaaaaactaatttatttttattcagtaacaagcctaatttttttttttattttaaaaggttgagaaataacattttctgtagtgtttaatactattcaaatgatcaattctgggatcaaaaaagttttcttcttgcttaggctaagatacctctgttcacccatctaatctcatatcttctaaaccctgctcttggtatcaaatactgaaatgtaataaatgtccaattttgtgatgtggagaaaactgtattttattatatctcttgtgtctaattttgggtatcttttacatggttaatatgaagggaattttaaatgtaaagataattttgatttgtatttatctcatctaatgctaagggagttcagaccattgctttaactagatttaaaaaaaagctttctccaagtcagtgtatattcagagtgtggccacacaaatatgaacaaatattcttaaatcatattaaagtctgctaaagctgcctatatcttttaattgtacctgtgatcagttacgtattcattctttggtttaaatatatttttgattatctgacgacttttgaatacagaccacatttagtttcctatataattaagtggatcaggcttatgcgtagaatttgtgaatggttctgatagaagaataaatagctttattgtacattctttacatatgaaatgtccttttaattacataattcttgagcatatttacatttggacaacaatcac

SEQ ID NO: 97359 - DNA, 2704 bp, Homo sapiens
tcacggtcccttttttgtgcagctttgaaatatatagagcaaaaacggatagaactctaaagccatacttaaccaaatcccttgtcatggtgaaaattaacatacctttcttagaaatgcactgtttaagtagataaaatgtacttttaatagagttaacaaacttgatctaatagagcttttctatctgcctttgagttgcacattggccagccctttccagtaataataattgctaacaactggtaacattgagagtttaccgtattcccagtggtgttagaagtgagacatagagaggttgagtgactcctaagagcacacacaacagggatttggacctagttttactccagagccttaaccattaaactatactgcctcccaagtgactctccttctacatctgatccttaggtattcatgtttattgtaattagtttaaagttttgttttttgacatattttggtcaattaaaattgtgaattctaactaggcagtaacttttctgaaactcattttagaggggcttttaagataaattattcacaaaagtcaaatctaacggaggcctggcctttgtttcacttattctttattttaaaatgaaaatgttttaattagtttatgtttattaaactaaaacatgctcataaaaatgtagacacataggacatttaaaaacaccaaaatctcacccctcttcaagttaagctagtaatgtgtttgtgtttgtcctttaagatgttacatgtattttaaagtagaatcatcttattctcactgttttatatgtctgttcttgttttgagaatttttgtgaccatattttcaagtctatatagtctgaatcatttttatggctgtatagtattctgttgtattctattgtatggatgtagggtgatttaacatcttttgttgggaatttattgtcataatcttacacgtatgtctttgcacatttgtctgattattttatttgtataagttggcagaagtgaaattgctgggttaaagggaattgtctgctagaaaggctagtttatactctaaccagcagtgtgtgagagtatctagtttcccacacctttgccaacaatgaattttacaattatttttaacctttgaaagtctgacagatgaaaaataccttaatattgtcttagtatatttttaaattacttggtgaggttgaacatttttggggatgttattttgccattttaaaatttattttttgaattgtttctttttttttgtaaatctgttaatttatgtaactctgtcacgtgcaaatgttttttcccagttttacattgcctttgtcagtggtttgtagaatgcattgttattacacaagtaaagaaacagttccatcacttacaccttgcaaacattttaagcacaaaaaattaaagttggtcagcctttcctttattagatgccttgttaccatgctattacaagttttccgtattctgagaattataaaaatgttcatttatattttttctagaacttttgtgacttcattctttaatagctcacttattctaagcaataaaaattgagattcctaagaaaagaaactatattgtttcttagagcttgtttgaacaaaattcaagcagtatatgtgtgatagacacacttgtataaatgacaattgtacctaattgatagaagcataacataggtagtaaatccaaactattctaaagtattctgcaagttgatacagatagtaattaaaaaagttttttagaatatttgtctttttttgcaaccattatttttttaaagaatatgggcaagatggcatttttagagaactgattttattcatctttagagaagtaaattttatttgtttaccttttaaagtaaggtgtaaaatataaaatatttaaaagttgtaattatttagcaaatatttattgagcagaaccagctttcagagactgtttaaactagtgagagataacctagtgagagacaaataattgtaagtaaaatacattctagaggcatgattgttatataggttttgtatggattaaacatcagtccatatttttaaaattgtgcacaatctgttttctttgtcagcatttcagtttatgtcctgtttttcccaccctgagcagaagagagtgtatttacttaacttttcttaactcctctacccacagtttagcttccactctatcttagcattattaaattattgggaacaagtttagacactcaagaataaaaacgtaaaattattagtttttcctatattataggcattagtggtgtggatattaatcaagaagaaaactttaaatcttttattcctgaactttgttgagaaattcacttcagttctctcccttcaagccttggtatgacatgccgtaaatccacatctaccatatctatatcttactttgaatgaaattttctttttaaatagaattttgggcctggatgttgagctttttccttaaatatgtgtgcaaccccgcccctatgttttttctttcctagatgcctgtcccattttcaaataatatttcttatttcctaataattcagttaaaaataccttccctagcttcttgcttctttgagaacccagatctgttgctgttaatttgttagtcttgtgctttgttagtgttcccatgctaaattttgctaagtttgtgaaat

SEQ ID NO: 97360 - DNA, 1050 bp, Homo sapiens
gagaaagtttttccaggtagattattacctatattggaagttccttcttacagaagacttgttcatttagggagattgtattttccgagaactttgagtgaagcatttattatctaaagggacatatgaactaattaatgttattaattctactataagcatttatacaggagattactctccaactagtcttgaagaatagaggttagttagatgaggaacaaaataactggaaaacagtctaggcaagagaagtagtgcatgcaaagttgtaacattgggagaagacatgtaatttcatgctgtctttttgggccatttggttgcttctcatctgtatttggtttttttttccctttagatattaggatcaaggaagaagaacctgatcctgaagagtggcagctcagtggtgattctaccttgaataccaatgacctaacacacttaagagtacaggtggtagatgaagaaggggaccaacaacatcaagaaggaaaaagacttcggagggtagcttgcacctgtcccaactgtaaagaaggtggtggaaggtatgcatacatgaaacacatatatatttttaagagtgctaatatcattctgatttttgaaatactgcatgctatgtcatttaattatgagaaattattacatgatcatttttggtgtgtgtgtatgcgtgtggcagaagttagagaacaaaatatatggaattggattttcagttctcaatgttttttaaactaaaattattagtttgctgtttcaaaaatagtacagcagatgccatttaacaggcccacactgatcagaaattagcctgtttgcaaaccagcaatggaatttgcctaaatatagataaaaagttgattttttaggttgagaatagtagttacgtaaaaattaagttcaggaatggctgataagcataagtatttccattttcttagaagtgaaaaataagccttaatagattgaattttttaaaaaatgggattgtatttcagttcagtctttttaaaggtaaacattaagacagaataacat

SEQ ID NO: 97361 - DNA, 2472 bp, Homo sapiens
aacttggcaaacgtttcaagtacaaggggtccagaacttgcagaatttgcaaatacagaatactgctgcccaacaaataactttgacgcctgttcaaaccctcacacttggtcaagttgcggcaggtggagccttcacttcaactccagttagtctaagcactggtcagttgccaaatctacaaacagttacagtgaactctatagattctgctggtatacagctacatccaggagagaatgctgacagtcctgcaggtgagtcttaagttatgtcatgccataaataagttcagtgataatacatagagggaaattttttgctttaggtatttatcagcatcagactcacattagaattaatgatcaatgtttgtatgaaaatatgtttgtatgaaagtagacatcaaagtatcttccaaattattctttgaaagtttgtagtttttgaagttagggattcatgtttctattatgccaattaacatttatagttttttcttaattttatatttgttttgacatctgattgatattgtcaggcattataaaatttttatttggcaggtagggtgtcttggttggccttagtgtgatgtgaattaaaatttttatgcattatatttggttgaggagtcaggttggtatagtgaaaacatggtacagggagtaaatatgcctcagccacttgctaggtgtgtgattttgaccaagttatttttctttcgcaaactcagtttccttgttgtgtaaaatggaggtgttggactaggtaactgtctaggtgaccttccagaccaaaaattctttgattctgtgatagtgggcattaaacttagctgtgctagaaatagttgtcaatagtatgggtagacatttctgaagtctgctctttgaatgttgtgtaagaattaaataataaagtttaaaaagagatagtgtcatttttaccctattaatgttgtctgtctagataacatttgattgaatgttttgttgtgcagtaaatcctgaactttattactttaattctgttttgtatttggatttctgtggagattgtactactaacattctttcaccaggtcagtgattctaaactcttaaattgggacactttaactgaactgattgacataactcccatcaccatttaaagattaccttttttcttttgataaatttgtgatacatgcttagaaaattgaaatggtcttagaacctcagatccgtatttggaaatcctttaattgcatttaagccttctgaagctgtgattatttttttttaggggttgggattaggatttctgaaactggtttagagcagtagttgtttttttttttgttttgttttgttttttgagatggagtctcgctctgtcacacaggctggagtgcagtggtgtgatcttggttcactgcaacctctgccttctgggttcaagcaattctcgtgcctcagcctctcgagtaactgggattagctcctgaataactgggattacaggtgcacaccaccacatccggctaatttttgtatttttagtaaagatgaggtttagtaaagatgttggccaggctggtcacaaactcctgacctcaagtgatctgcctgtcttggcctcccaaagtgctgggattacaggtgtgggcctcccaaagttctgggattacaggtgtgggtctcccaaagtgctgggattacaggcgtgagccaccgctctgctcctggcctagaacagtagttcttaaaatgtgatctgtggaccattggatatccctgagaccctctcagaggtccttcacatcaagctgcactaagaaattgtttgccttgttctctgtgttgacactttcagtggtggtggataaaactgcttgtgtcttagcataaatcaaggcagtgacagcaaactgtaatagttgttgctgtattcttcatgaccatgcacttgcagttaaagaaaaatcccagtttcactcaagaatgacctcgatgaaccagtaagaaaagatatttactaaatcttgacccttgagggctgcatgtcttttaaaaaataatagctttattgggatataactcacataccgtaaaactcactctttatacaattcactggttgtaactatggtcatagagttgtacaaccatcatcactatctaatttcagagcatttttattacctcaaaaggaaacccataccctttagcagtcactcatcattcacttcccctcagaccctgacaaccactatgctactttctgtcccttcagatttgccagttatttcgtatcagtgtaattgtacaatatgtggcctttggtgtttggtttctttcatttagcatgatgttttcaaggttcatctgtgtcatggtatgtgtcattacctcatttctttatatatggctgaatactgttccactgtatggatataccacattttatttatctactggtggacat

SEQ ID NO: 97362 - DNA, 2190 bp, Homo sapiens
atgactagtctgtgctacttttcacattgtattagcatggatgtgtgtatgtctgcttggattgacagtgaaccgtttgaagattgggattgtatgtcatgggtttactcacgtgtgtatttcatcttggtaaattacgttcaaatgtttgaattcagtcatttaactgtggttcatccactgaaataactgtatatatttctcaactatgtcttcatgaaaattaggtagtgagtttctttaagaaacttaagatttttttgtttatcatatttgcattaagttttatagaatggtttatgttgagagaactgtgtatgtctcaactgatttttatggtcccattgagattcccattgagaatataatgaaaccctagattatctttctctccctcaaattgtattaatacaccagaatacaaaaggtatatgccagacattctactgaaaacttagactagtaagtaaagtcacagtgtgtatcctccagcttctgatcctagagaaacctttcaaatggggctacgttgtcatgtggtcacagggcaatgactttttctcattaagtttttttaaggtctttgtttttcattagttcatggaaaaagtagagtttgatagcttaatggaatagccctagccatgagtttactttagagtatgttaatagatgccacaaaagagtagatttcattgtttgattttaggcttatagcaataaatcttttctaagtcggatgacttaatacactatgcttatgtttcctttttatacacaaatataatgcacctgatttggtcatagccatctccactgttttgttttgtgttttaactgtgtagtgttagagatcatagatgcaggattagaaaattggtctgtggttgtgatgaacattccgagaattttttttatcccactcaaataggatgaattgtctttgcagtaacaaaactggaagtgataattattgtagttcatatagtactgctcctgtatttgaactccattgtgttttaagataagttgaattttcaggtagtaggatttataccagtttttagaattttttgagggttgatttaaatataccacaaatatatcacctttttgttttcttcatccagacaggtgatttggcttctgcacagttaggaggagcaccaaaccgatgggaggttttgtcagccacacctacaactataaaagatgaagctggtaatctagtccagattccaagtgctgctacttcaagtgggcagtatgttcttccccttcagaatttgcagaatcaacaaatattttccgttgcaccaggatcagattcatcaaatggtacagtgtccagtgttcaatatcaagtgataccacagatccagtcagcagatggtcagcaggttcaaattggtttcacaggctcttcagataatgggggtataaatcaagaaagcagtcaaattcagatcattcctggctctaatcaaaccttacttgcctctggaacaccttctgctaacatccagaatctcataccacagactggtcaagtccaggttcagggagttgcaattggtggttcatcttttcctggtcaaacccaagtagttgctaatgtgcctcttggtctgccaggaaatattacgtttgtaccaatcaatagtgtcgatctagattctttgggactctcgggcagttctcagacaatgactgcaggcattaatgccgacggacatttgataaacacaggacaagctatggatagttcagacaattcagaaaggactggtgagcgggtttctcctgatattaatgaaactaatactgatacagatttatttgtgccaacatcctcttcatcacagttgcctgttacgatagatagtacaggtatattacaacaaaacacaaatagcttgactacatctagtgggcaggttcattcttcagatcttcagggaaattatatccagtcgcctgtttctgaagagacacaggcacagaatattcaggtttctacagcacagcctgttgtacagcatctacaacttcaagagtctcagcagccaaccagtcaagcccaaattgtgcaaggtattacaccacagacaatccatggtgtgcaagccagtggtcaaaatatatcacaacaggctttgcaaaatcttcagttgcagctgaatcctggaa

SEQ ID NO: 97363 - DNA, 1270 bp, Homo sapiens
aaattgagttgctgtaactcacacaattccacagtgtagccagaactagaactcagttctgagcttttttttttttcttgtgtaatatattgtcgagtgtagttttggcataaatcatctagtagttttctgattcaatgtgttttttccattccatttagaaaatagggtattcagcaaatttttttaaaactgcaaatttattaaattaaaaaagttccttttcttgcttgattcttttccttaaattacctgttgctttttttttttttcccccatcgttgtgcttcacaggtattttaataatgcttttcatttcaggcttattcagaaaagttcggaatacatcactttgctctaggtttagagattttccttcaattaatggcctgaattgctgagaaaaatggcactacagtttatttttatctagcttctggagaggggatgacttgggcaatatttactcagatttgtcatttgcgttagctgtatttattttcaaggaatttcttgactagaaagctgttcagtgatggttgaatatctgcctttattactattttgtaaaaaaaaaaaaaaaacactttaggtgctgtaaatttgactttgttttttttaaagaaaggaaaagggacaaaatgccagtatcataaaattaatttgtgtctgagttactatattctttgataaaagttcaatacctgtaaattttatgctggtcagaaaaaatttcagtggatcctccaggtgagcaataaccttaagaagataaaggttagattttagacacactttagtgtagattttagtatatagatttaaatatttgtagtttacttaaaatgccaagagaccgaaatgaaacatttgtcactgtaatgttaggaaaggtgacttaacattgtaatttctataccagattgaagttgcagagtgacatgtgactttaatgtctgatgcttcattttaaaattgtttagtaaatataatttaagtgtatttaagacagatcgctattttatagttcaggcctagagatttgtattgggttccacaatttctcagcctttagtctcctccctttctttcagtctccttcattgagccttagtttatctttataagacacagatgtgattgcaccactcacttgcttataaaccttttatagctttcactcactatctacaggataaagtctaaacaatttagtgggatctgtgaagccatttacaagcgttgataaaaatatctagtcctgttcccc

SEQ ID NO: 97364 - DNA, 1095 bp, Homo sapiens
atttgtttccacctcagcttcacacctgttcttgtttccagttatactccttcctttcctatttctggctttcgtaaaggcattcgtgggaactaagttaataatcatttccaaatgctatgcaataggtggtgtgaattttttctttttccgtttccaccggtatatttgtatgtagagagacttagagtgccttagttacaactttttactgtactaatgccaacattcatgttagatggtgttttgtttgttttttgagaaaggctcgctttgtctcccaggctggaatggaggtgtgtgattacaactcactgcagcctcaaccactggggctcagttgatcctcccacctcagcctccctagtagctgagactacaggcacgtgccaccacgcctggctaatttttgtattttttgtagagatggggcttcgccatgttgcctaggctggtcttgaactcctagactcaaaggatccacctgcctaggttttgtttgttaattgtccggtaagaaaggtactgagagaaacactggtggatttttaatttggtttgtaaacttacgtagacataggttatgtagaggattatcttgcttctaaaccaaatactagttctcgtcttggttgcctgttttaattttttttatttttatttttatttttttgagactgagtctcgccctgtcactcaggctggagtgcggtggcggaatctcggctcactgcaatctccgccttccaggcccaagccattcttccgcctcagcccccagagtagctgggactacagccccagagtcccagagtagctgggactacagatgtacaccatgcccggctaatttttgtctttttagtagaggcggggtttcatcatgttggtcagacgggtctcaaactcctgacctcaagtgatctgcccgcctcagcctcccacagtgctaggattacaggcgtgagccaccggccctgtcacggttgtacgtttttaaatctccttttattcttttgtttctgtagtgtttccagtagtctaacatcaaacatttttcaaacttttttttttttttggtctcagatgattttc

SEQ ID NO: 97365 - DNA, 2688 bp, Homo sapiens
tgcagcaagatagggccgccatcgccgggcgacgacgaggaggaggcggccgccgcagccggggcccccgccgccgccggagcggtaagtcccgcgcgcggcccgcccccgccgaggccgggcgcccgccatcccggacccgtggcgcgcctgcccaaaaggcctccccggcgcccgcgcttcccccgacccgcacgggccgctgggctccagggcgccctttcctgctctttcgcatcccggtttggatctgaagccagcccaggctttctcgaaattgtcactgcagcacctcgcgcaaaatcttcacaaaatgaagtctgagagggcgggggtagaggactccaaaatggatgtttgagcaattcatatcagtgctgaaaactccttcgcttaacactacaaaattttcaagcacagcctatcggccatagatagtatcaactagaggcaatgtctttagtttttattatttttgaacctggagcattttctgttggacgttacaggatcttactgctttaaatcatacattattaaaaaaaatgagggtttattctttgaattacccttttgtatgcaggagtgaagactgcttttttagttgaccattcaaaatcgttgaattttagtttttgcagactactaaaatttgcagtgactttttttttgtaaggggggtaaatgaaacatttagcagcctttgaaatcagcaagttgcttagatagtactttagattttgaaactgaatataacagtgttagaaaagtatgtgtaaggaattgtatttacgtgcatactagtagtacaatacttatagctgaatttggttggcaaaagtatgttttcattttattacgactgctagtcaggtaagatatggtgggattctttctgtagtgttttcagtgtctgggcaaggggaggagctcgcctgtgttatatgaggggttaataccaataggataggaacagtttttagactgttaattgtgaattttacatttgggtcatcactgttgtgtagatttgttcacctattaaaataatgaaaaccctcatttgagtgtgtgtgtgtggtggatcataggaattgatttgtggagtgatactttcaatagtcactgaagacagaagtttggtatttggtatagtctacaacaaatgcttagtatgtccaggtattttttttttttaagttaaaccaatgttaagctattactggtaaataatttgtaattttagtgcttcgttataggggatgtgaatagttttaatgtcttgttttttcataagcagattaacatgtaaaaatgtaaaattatattaggctttgttatttttaaatacatttatggattggtacgccttctgttcacctcatttcagcttcgctgagagttggtagatttttttatgaactgtatccctctagttccaaagtgccaaaacaaattgactgtatcttaaaaaactactgcataagtaaaattaaaaagcagattgcttctcctgatcttttttgtatttcaaatggaacaaaacttttcttgtaactgtaatttgtaaagtttagatatcagtttacagatgggggaggggagaaggaaggaaatatgggtgaataatatgtgtatgtacatacatatgtgagtctgaggcccaaggatagaatactgtctccaaccttagccagctgtggccatatacttgtagggaagtttccatgcttcttcagctgcttttctgaattaccaaatcactcctgacaacacatattctgccacatgaagacgaactagaatcaatctgataaatctgagatttatcaatcaaatacatcataatttgccaatcatagtaaaatgaaaatagttttgcctaaaaaaaaaaaaaaaaaaaaaaaaacccaaaccatatatttatgatgtctggtacctgcacccaagatttttcactttgagtaaaattggtaagactggcttgtgtgtatttgccttagcaaatagaaaatttgctaaaaatttatttttccagtgcaaatatgaacttaagacatcttttcagcacatcttagaaaaggaaattcacatgagttcatgggcttagataatcttttattactcaaatgactgggaattatgagaggttatagctgtgtttttaaataattgtattttggaataattttaaatttatagaaaagttggaaatacagaactgagtaatctcatacccttcatccagcttcccctaatgttaggataatgatgatacatttgtccaaattaagacatgaacattggtatgacattactaaccagactttgtttgcgtttcaccagcttttccactaatgtccattttctcttctgggatccagtccaggattccacattgcatatatattgttgtgtttaaacaagtggaaatatacacatacagatgaactttatgccagtttagcttggtattttgagattaaaagggccttgaaaagccaatcaactgtgctgaagattgcttttaatatttggattttgaatttggaatttgtcataaaagaggatcctagccaagggtgtttggttacccacagtacattgctgaagaagtctagtcataaagcagtctcgtatataatgtcgtacaacatggactctgaaagatggttttatagcaacgct

SEQ ID NO: 97366 - DNA, 1051 bp, Homo sapiens
tatagtcaatattcctgtcttactcattgcattggaattattttgtttctggcatgcttgctaactcatgagtttgtacttttttactctattttgaatattctgatttcacattactgagataatctttctttctttctttcttttttttgagacaaggtctcactgtgtctcccaggctagagtgcagtggtgccatcttggctcactgcaacctccacctcctaatctcaagcgatcctccttcttcagccccccaagtagctgggactacaagcatgagccaccatatccggctaatttttgtattttttgtagagatggggtttcaccacatcgttgctcaggctggtctcgaacttctgagctcaagcaatccacctgcctccacctcccaaagtgttaggattacagacgtaagccaccgagcccagcctaccatgagataatctttctacttcatatttcctccacactgaattgaataagccacttatctgcttatgtccctagtctactcaagtcatttcattccttctttgtattgactgaccctccctctagttttgtataacaagcttactgcatgttacttcttccaaatcactgacatataaaaatgaacaaagttggtcctaatattgatccctggagcgttgtaacccatccattccaaactattccacactttgatatcaaagtcattgtttacttaagtagttcatccctatactacttatctaacttctagattagttgtttgtctggtattcttttcatggtattttatcctaaaatacaagtaattggttcatggcttccctcagctgatatttgttattagacccagaagttatttcatatcactgaggcagataagatgtgaatccatgctgactctttttaaattaaatcataactttctgatatttccatttgctgatttcctacaaaatttaccaatgtcatcttctctacagaatttaatacttctgaatctcatgctcaagagaaaaagggatatttagggaatgaacaataatttaatgag

SEQ ID NO: 97367 - DNA, 1048 bp, Homo sapiens
tcagcctctcaaagtgccgagattataaacacgagccaccatgcttagcctgcttcttgattcttaatagatgtttaaattcatcaataaggagaaaagtgacttgaaatactttatctttgactaggtctatgtcagttttaataagtaaaaccctcattaaattattgttcattccctaaatatccctttttctcttgagcatgagattcagaagtattaaattctgtagagaagatgacattggtaaattttgtaggaaatcagcaaatggaaatatcagaaagttatgatttaatttaaaaagagtcagcatggattcacatcttatctgcctcagtgatatgaaataacttctgggtctaataacaaatatcagctgagggaagccatgaaccaattacttgtattttaggataaaataccatgaaaagaataccagacaaacaactaatctagaagttagataagtagtatagggatgaactacttaagtaaacaatgactttgatatcaaagtgtggaatagtttggaatggatgggttacaacgctccagggatcaatattaggaccaactttgttcatttttatatgtcagtgatttggaagaagtaacatgcagtaagcttgttatacaaaactagagggagggtcagtcaatacaaagaaggaatgaaatgacttgagtagactagggacataagcagataagtggcttattcaattcagtgtggaggaaatatgaagtagaaagattatctcatggtaggctgggctcggtggcttacgtctgtaatcctaacactttgggaggtggaggcaggtggattgcttgagctcagaagttcgagaccagcctgagcaacgatgtggtgaaaccccatctctacaaaaaatacaaaaattagccggatatggtggctcatgcttgtagtcccagctacttggggggctgaagaaggaggatcgcttgagattaggaggtggaggttgcagtgagccaagatggcaccactgcactctagcctgggagacacagtgagacc

SEQ ID NO: 97368 - DNA, 1002 bp, Homo sapiens
cagaggtggcagtgagctgagatcatgccattacactccagcctgggcaataagagtgaaactcagtctcaaaaaaaaagaaaaaaaaaaaacttactataaagctacagtaatccaagaaagtgtggtgctggtgaaaaaatagattaaaaaaaaaatcaatagaacaaaatggagagcccagaaaaagacccacataaatgtagtcaactgatttttgacaaaggagcaaaggcaataaaatggagcagagatagccttttcaacaaatagtgctggaacaactggacattcacatgcaaaaaactaaatcttgacatacagaccttactctttttacaaaaattaactcaaaatgaatcatagacctaaaggtaaaacccaaaactataaaactcctagaagataacacaggagaaaacctagatgagcttgggtttggcgatgactttttctagatacaacaccaaagacatgatccacaaaagaaagaattgataagctggcctgcattagaattaaaaacttctctgtgaaaaactgtcaagagaatgagaagacaagctacagactgggagaaaatatttgcaaaggacatatctgataaagaacatttctggactgttatccaaaatatgcaaagaacttaaaactcaaaaataagaaaacgaacaacccaattcaatgtcttgaggataggttggagatggccattaaacactcttgggtagatatcagactgggtagataccaagaccaattgttgtgtctcaattggaagctcagaggaaagtttgaggaagcaggtatataaatttagaatcattactatatggatattacttaaaacctgagggccagaatagctcaccttagacaggtgagaacagaaagaggagaaggcccagaaatgagcctgatgcaaaaggtctctggaaagaggaggggccagcaaatcgcagcaaaaaaactgccgaggccgggcgcggtggcccatgcctg

SEQ ID NO: 97369 - DNA, 1046 bp, Homo sapiens
gaaggccaaggcaggcccagtagtttgagaccaacctgggcaacatagcaataccctgtctctacaaaaaataaaaaaaggaaaggaactcagtcatatgagttgggattctccaatccatttcttcctttcattctaaatgtatgctgcttgtatcagagaatggcttattcaatgccattccaggggaacatttctgtatcttctttcttactatggattatagagttgctttcacactttggcaagcaactaagtaggaagcagtcttcataaggtgcccgtgtatgtggcctgtgtttgaagctccatggagctcatcagtgaatcagtgcgttctgtttccatagaacctgggaaagatggacaaacagtgagatgtcctattctttgactcttcttcctctggtcttataaattgcctttttttttttttctggtgagataacgcattttggttgccatagggtacaaggaataggtcacatcttcatttagttacatgatagcatatttccctggtcctcttgatacagttttataaaacactgtgtttgggatcgtaataaactcctatctgtttgaagggggttatttgcagattgtttcatcctgtctatgttgatttaacactgaggaaaggatattggaggaggtctgagggggtgctagttgtctgccagaacgcgttcctctttctaatttgagtagagtacagaggggtgcgtggctgtcctgctgtagactgtttcccggcttccttgcagccagatgaaggccacatgactaagttctcatcggtggaatatgaacaaagtgatgcaggctgattccagagataggtcttacacacctggatgcatgctcccctcacatgctctggaagagcacatgtcattaataatgcatacggggacaacacccaggggacagtggagcagcatggcagcaacttgggtccctgaatgactgtggggagcagagctacccagtaacttggctgcttaccttggggctggtacatgaaagaaaaagaaaaatgaatt

SEQ ID NO: 97370 - DNA, 1015 bp, Homo sapiens
aacactttgggaggccgaggtgggaggatcacttgagcacaggagtttgagaccagcctgtgcaacatcatgaaacatcatctctacataaaaaaatacatatatacaaaaattagctgggcatcatggcacacacctgtagtcccagctacttaggaggctgagatgggaggattgatcgatcgcttgagcctgggaggtggaggctactgtgagccatgatcatgccactgcactccagcctgggcaacagagtgagaccctgtctccaaagagaaagagaaacttgagaaggcttgtgcccaaagcttgaagaaagattgtaatagcatttagttgtgttttatcatgttatcttcataacatgcattttgcatatggctcagagcagagccggatctcccaaggaagcacaaatagtttttgtcgctaacttagttatgagtgaagcctctgttcacttataacttgccagtttcattggtggaataagtccccttactcatgattcatcaatattcctatattaaaattccagtttgatgtttgtctctagttgtctgtgtataatatttccaaagctcctttgtaaaccccgtctcctttcattcagagagtcagagacggtatctcctcctcctgcctcttctattgttctgattagtctacttaaattcacttgatgctctttttattttacaagagacttgagaaatgtcggttgttcctaatggcaaactactttagctgggaaaattcatttcaacttattttaagcttgtaaaatacactgtggtgataaaataaaagagctgggtttgacttttgagtgacttttttgtcttcctaactggttttgggccccttataaaaactgaccgttcttgaatcaccttcatggtctatgaatttcccaaaccacttgtaaattagtgcttcagtgaaaagccttgtgttgcaattaggaaatacaaaaaagggactcacgtgaccacccaggcagcaagcgcttcac

SEQ ID NO: 97371 - DNA, 2618 bp, Homo sapiens
ttctttaagcaaataaagcagcttttaactagttatatagtctttttctttctgcctggtttgatctgttttgttacagtgacttgctggatgtttgcagacacatcagaaatgtaccataaacagcgtgtaatgaaacttaatgatattggtataattacatttatgtaccaacaatttagtggagaatacattatgattatgtatatatggaaaatctagttctgcccaaatcaagaatactttgcttctctccaagtctagttttgaacttgtatgccttcctatatttcattttttctttttttatatcacccaagtagtataatactttttatatctgctgccaccatttaccccatgtatttagttgtaaactaataacccatttcctctatattttctgtttgcaggctgctggaaagtacagacaacaaggcagaaattatattgttgaagatggagatattatcttcttcaaatttaacacacctcaacaaccgaagaagaaataaaatttagttattgctcagataaacatacaacttccaaaaggcatctgatttttaaaaaattaaaatttctgaaaaccaatgcgacaaataaagttggggagatgggaatctttgacaaacaaattatttttatttgttttaaaattaaaatactgtgtacccccccccccccatgaaatgcaggttcactaaatgtgaacagctttgcttttcacgtgattaagaccctactccaaattgtagaagcttttcaggaaccatattactctcatgatacttcattaatctccatcatgtatgccaagcctgacacatttgacagtgaggacaatgtggcttgctcctttttgaatctacagataatgcatgttttacagtactccagatgtctacactcaataaaacatttgacaaaaccagccttggtgtgtttggggatgtctgtattgactgactgtggtgtgctgaatgcgatacggcacctggtggttgctgattacagaattttaaggcgtgtgtatgacacagtaactggcagtgtggggcagctgcaattgtatcttaaaagtgagtctttcatgggaatcagaagaatagtataccagggatttgtctcaaaaaagttaattaatttatagatcaacatttattgaaagatgatagcaatgatattatgagggatatgagataggtgactgaccacaaagaagaaaattctgtctcaaaaattaaagaattttgtttgttattgttgttctgaccatattgaaaagaggttcacttttaatctttcctttgaaattattaaattgtaaaaactgacccattgatgtctggtgggttatgttttgcttcaattcagcaatgtgtataaaagttcctacactgattttgaaatactaagatcagactttgaaaattttaaaaattctttcattcttacttttcagatatttgagagcagtcgaagtggtagtatgggtaagttaagcacttcttaacattgtagcagaaaattccaaaagaaagactagaacaaattggtaatttggagaccctttgccacttagccttctcttgtgatgatggcctgaaagctctctcggccctgagcctccctttctctcccatgtttccattcctgtgagacctcccttccttgtccttgtcctctgcccttttgtgctcttctgtgatcacaggaccatttccatggaatgcagattcatacccagccagcctttgcctctactgtatcgctttgggactttaaagatgcagaagtattagaacacacacaaacttaaaatggaaagttaccaaatgtagcactagaggcaagaaaaggggtgattttttaaagatttggctatacttaagatatttaaagaggatgaggttgagtcgtgagtataatttagaagctctccagtgagtatttttttagtatcaaatagtgatcttcttttgctaacataaaaatgagtaaactacagcagagaaataagaataaaactaatgaagggttttttaaaagaactaaataaaacaaataaaactaggctacaggtatagctgaccaagtttgctgtgaaaaatccttgttatatctatttctgtattggagtaatgtgtagattagtggattgttagggatttcagcagtataagaaagaatcaaatatcttgcttttgggtcttctccaaagtaaattgcatggacttcttaaagaagtttgaaatcagtaaaaagacattaggatcatgcaattttactttgtctagcttctaatgtggtaaattgcacattgtgcaacagaaccattaataaaagaaaggagttagttttgaggtaactgcattcattaggggctgaaaataaatgttaaaaatgtttaatttggttagaagttctacaacattgtatgtacatatacaaaatttcattttctctgaaagtcgagaattccaagaactgttacatataatcatatatatgcctatatctaaacgttttccctcctttaatattgataaagttaatatattttaggatgttatgtaaatatttttgcatgtatctgtagctccatcttaatcaaa

SEQ ID NO: 97372 - DNA, 1991 bp, Homo sapiens
gatttgttggaaatgcctttaaaatgtccctttgtatattgatttttatatgttctttagatgagctgaaattttgagagctttttatctttttaaaacctttgataattcagcttgaaagttacttaaaaatctatttttttccactgtgaagaatagaaaatcgaaatgaaacctacaccaaaaccagaccactgcttctaaatcaataaaacagtggatgactgttaggaaaaacaaagccacgcttctttaatatctactgatctatgctaaatctgctgcacagatactacccagtgttgaaaatgtactaattatatacctgacatcttaacagatattaaactaagttctagttgagcccaactgcagatcagagaaaagaaactctgtgcttacaatcagtcatcttaaatgcaattagttttctctggtctttcttttcaaagaaagggactaaggctcctcaggctgcaggaaagattcacacagattttgaaaagggattcattatggctgaagtaatgaaatacgaagattttaaagaggaaggttctgaaaatgcagtcaaggtaaagaattgtttttatttttgtatttcacaatgtttccactgatgcgaagttagtcatgataaaaatgaatgataattatcttttaaactgagtgtagtctaaaataaagtaataagatgatcagcgtttagtgttactatcaactgacttaagagctatagatgtttacatacttttagatcattttaaaaatgtgtgaattgtcagtagttttgtggaggtttttttctataattgaaaataaaataaattaggtttaagtaattgtaaataatttcgaagaatttgttcactcatggccaatgaaaaattgtacttattacatttgaatagctgaagtataatatatatgcttataattacttcaagaatagagatagaaagttagttaaataaaagctgttctttctaaaacttcatggttttacttgtttgttgtttaaagatacttggggatttgatttgctttctcaacactagagggcaggtccaaaattgtgctttattttagctaataaggataatttggtttgcagacactaatagtgaagcagttttatacatgagtagtagatgacttgttaaatgtaaattctgttgcaaaattaattttgtttgatttattagatgttacttagagaaatctagcaatctctaatatagacagattagctggttaaactgacattgtaggaaggttctttaatttaatttaatatttgaagactactatagtaaatgttatagaatttaaagaagattcttgtgtttactatttcataagttgaaaggaatacaaaaaagtttatttcaggtttactttattttcactggtatcattggaaaggtcataccgaacagcaggactttaatagaactgttggaacaccaggaagaggagggggaaaatcttggtataattggttcaatgttgaatgagaaccattttgtttttttgaaagagtggaaggaataacagtttacaagtaaacacagttgttaattttttgatggtggcatctgtatagatataggtaggtgtgcaaaaatactgagattgaactttgtcaggaatactaattagacgaacaaaaatctcagattatttgtcaacatgctacatcatgttggcatatctatttttcataaggaagataaaaatgaggatgttttctattactagaattcagagatcagatgcttctttttttatactcttaaaatggtaagcctgtttaccaatccttagtagatctatgttgtaataaacttgatagatgaattgtaaatatttcctttaacaattgagagaaactttataatatccaataaaataatatttcctgcttgtaagactatttaccactaactggcagcttttatactataaattagaaaaggttgactctgaca

SEQ ID NO: 97373 - DNA, 1374 bp, Homo sapiens
gaatggtcatttactactatctttaacattttctgcttgaaatgaataattttagctctataccaatttctggcacaatcaacttatgtgttgggtgaatttgtttcatttgatttcagtgctttgccaaagatcattaaggctgggtttgcagcactccaactagaatactttttcactgcaggcccagatgaagtgcgtgcatggaccatcagggtaagattcatacttattcatcagctatatccagttccacactattgaattcagattgatatcactgactttgaagtttgtcatggtggcggttagctagtcattacagatgaggtttttgtccaggataactttaattatttgtgagctgctgaacagtgaaagtggagcggcattgattgaggcaggtaacaattgattctgcctattacatagtctgaatttcttcatcctgtagaatctgtctaccctcctcctgtggtcagagataagacgcaccagtattgtgcttgcttaatctgtgtgactgggtttgtctgcagtgaaattgatgttgcttttcattttgtattcgctaagtttgtttgggttgcgggtggttctttcctcctttgctttgctcggattacattttcagcaataaaagcaatatgacatcattatgctcttcatagatacacagttgggctcaaaaagctaaactcaacgtgtaataattcatgcctttttaaatttgaattcatagaagtaatgtttattttcagtgttatatgttcagtcttacttctttaaaaatgtgatatgtattttaaaaattgatgtatactgaatacaacagagagaatgactaatttattcccagaggacaatagaaactgaactgtaatggtttgcttttaaatttaaatatattgtaacatagtagttactattgaaaaatattttgaaatatatgtgatcctaaatagtatgttacagaatataaaaataataccagaacttttagaaatagtgtcttattcagtcttttattatgctttttaaatatatgctacacgataaattttagtggtgctttgattcctgttttcagtgactactgtaatttattgttacatgtattttgatttaatatggatagaaacatggaggcagttaacataatgttaaatgccttgtgtgaatgtgagatttacttttcttttatctcctctcccctttgtaaaaaaatgtttgattgacttctaaccaaggtccttttatatagattttaaaaataatgtcaaagcaaatccaagttggtaaacaaattgccaggatttatttttactatatattttaaagatgtattttaaagccttaaaactttctaactta

SEQ ID NO: 97374 - DNA, 1003 bp, Homo sapiens
cttttaaaaatttactttgtaaagtaaggaaaacaaaaaattataaaatggaagctttattcaagggtacaggtgttaatgctgaacaattttagtgtaactaaaaaaagtttttaaatatttgtataatagtttccatagataatgtgctaaagtaaaactaggttacagtaaaatactatggcgtatacctgaagcagttgctgcctgttaatgccttgaccttggaaagctatatacaaaaagatggcatcataaaaccgtgcaattcttatgaatatgtatgtgctacttgataataatgaatgtggtacagtcatgcatgcactacaagataatgttgtgcccttttttgtctacaggttgataaaaattaaagagtgggtggacaagtatgacccaggtgctttggtcattccttttagtggggccttggaactcaagttgcaagaattgagtgctgaggagagacagaagtatctggaagcgaacatgacacaaaggttaattagcattcattttccctacactttattatcaactatttccttgcagtaatttaattgcttgcgctgatagaataataaatgacagagtaattaccattataaagagggaatcttctcctttctttaccatgagacagagtgaaaagatttattttaaattaagtttttaactgtcatctgtcatctccgtacagtgttttaattataacataggtattagttatgtatatttttgagaaggaatgatcgccaaaactctttcgtcatgttcagtgggggaggggaaagggtgaatcagttgccataattttttctgagtaacagtaatatattgtttaaatatcagatttcaatcaaataattttgcttttatggccaggtcctggaaataattaattttggatgaaaatagtcataatttttctttttttaaatagcaaacaattcaaaataatatcttcaggctaatacaattaaaaccaattttagaagag

SEQ ID NO: 97375 - DNA, 1050 bp, Homo sapiens
agatgactagctatagtttggggtatggtttgtagaaagagaatagacatttttctgcaaaaggtaactggtccccatggggttcagatttgtgatcttggcctcattatcacacttttgtaaccatcagacctaatagatacaccacatatatttcagtctataatcttgaaatcaaataatatttttaattaccctaggtttatttcatagatgtaattaaaaatcattttgggacatttcccacttttgtttgatagtaaaagtcacaaaagtaaagcagacagccaaagaacctcactcacttttcatcttccctgtgttttctatgacagtgaaagtcacaaaagtgaagctggcaggcaaagagcctaactcactttacgggagagtgctacggtacctttttcttttagtgaggctatagcaggtctgatgtcagtcactttagagacctttagacctcagtgctcatttactgctaaaatgtaccagctctgcttctgcattatgaagatcatctgtcaacactttgagatattctcctttgttattaagcttgtgatgctctacactgtcaggttttttgccaattatagttaaggtacaatagtgtattcaccagatcaaagtctcacattggcggtagaggaatgatttgtaagtctttattcatttgaattgtacaatagaacacctgaggaatgcaaataatccctctgagaactctgcaggaaaggctgttaaaatgacagggtaggactattgttattctgaattgatgtgttagctaaagtaattatttcttatcttgttgtttcataacagttctagttttattagttctgttgaccatatttatgaaataaagtgtgtatgatatttttatattctccttttacatgggcttgttttatttcactttcattgaatctatttggtatgtgatctgcttttttaaaattacatatttgattttaacttgtataatgaaagtaagttactaaaccattgatgataacatttgaatatagacttttgtttgaatag

SEQ ID NO: 97376 - DNA, 1154 bp, Homo sapiens
ttgagctgtaatttgaattgatactcaccttactccaaaatctctgctttttctattggcccatactatttccaaaggaaggtcagacgtcatatgatcataatgtggggaatattagcatttctgttttgtaatctttagattagctctcagtttacttttggggttttattttttagatataattcacatacacaaaattctcccttttaaagcacacaattcagtggtttttagtatattcacattgttgtgtccctatcactaattccagaacattttcatcaccccaaaaatgaaacccatgcctattaacaagcatttcccattgcctctccaacctaatccctggtaaccactaacctactttcagtctctttggatttgcctattgaggctatttcacataaattgaatcacacaatatgtggccttttgtgtctagcatagtgttttcaacgttcacccatgttgtagtgtgtatcagtacctcatttctttttattgctgaataatattctgttgtatggatatactacttattgtctgtcttcttaattataatcatcctagtagatgtgaagtggtatctcactgtggttttgatttacattcttgtaatgactaatgatgaacatctttttattatgtttattgctatattattatatttttatgtttattgctatataatattgttgttgttattatatattctccagggagacctgtctattcaaattatttgcctatttttaaacttaatttctgtctttttatcgttgagttataagagttctttatatattctggatactggacctctgtcatatgtatgacttccaaatattttatcccattctgtggactgccttttcactttcttgatagtatcttttgttacataaactttttactttttaactcttacatttagatctttggtccattttaatttttgtatgtggatatccagttgtctaagcaccatttgttgactcttctttacccattgaattgttttggtacctttgtcaaaaatcaattaaccacaaataaactttacaacaaacaacccatccagttaaaaacaagagcggaggacttgagtagacatttctccaaagaagatatacaagtggccaacaagcatg

SEQ ID NO: 97377 - DNA, 1050 bp, Homo sapiens
atcataagttcaagagatcgagaccatcctggccaacatggtgaagccctgtgtctactaaaaatgcaaaaattagctgggcgtggtggcacgcacctgtagtcccagctactcgggaggctgaggcaggggaatcgcttgaacccaggaggtggagtttgcagtgagctgagatcgcaccactgcactccagcctggtgacagagcgagactccgtctcaaaaaaaaaaaaaataaataaaataacaaagtcaaactcaaatacgctttctactggtttacctcaaatctatttcttgtatggtatttgcaactctacatagtttttttgccccttcttagaaactgcagggtgatcactcagcagtgatttttaatgaatagcaaaacttgctttgtctatacaacggacagaataatttaaggaggaaaagaaaaaaaaatgcctttgaagtgattagtgcttagacctgccttctcagataaaactgattaatagccacatcacaggtaaatacaacagaattctgtttaggaaaatgtgacctgaacattgtggaagccattcttcactttataaataataataatagctaatacatgttgagcatttaccttgtatcagataccatgctaagcattttctgtgtacgtccttatttaatcttcatcataaccctctgaagtagctactattattacctccatttataggtgagaaaactgagactttagaaagttccatggcatggcccgtatcccccttgtctggccccagtgttctataaccatattccatgctacctcctttgcaaacaggttgcttgtgggagttctttaattatagaatttctttaatgaaattaaattaactcttgtattttatttacaaaaattctttttgtaaaattctttttgtaaaactataagctatgaagccaactacaaattttggtgggtatgattctactcacacatttcccgatccttccttttctcatgtcagaatattccattaagccagtggcactttgtataagaccgtaaaca

SEQ ID NO: 97378 - DNA, 1051 bp, Homo sapiens
tgctatgttatgctgcattagctatgtatgaattacaaccaaagaatattctactctttctaatatttattcttttatgatcattttgatatttaattgttgtaatgtgttcttagaattaaaaagtaggaaaagtttaatgttattttaagcagtgcctaccatttatactttctttggtatgtgcacatttgccagcatcctgaaaacttacattgtgtggaatgcttttcccccattttaaaaaagacaaaagtgttactgtatatacctgataagcagaaatggctctctggaaccattcttgtccttcgggtaattaagtaattatatagtgttgtgtttttttttttaatttgtattttgttcctgaaccatttggacccattatataattacactgtgtgtactttgtagtaaaaataccattggaaaattcatcagggaaagtagtctctgcatatgctcttcacaatgtataaatttctccatcctcctgtttctatgtctacggaaatctcagagtatttaatggtctgctttacccataccacttccccctacgatggatgactctgtgcttccacagaaacaccttgtgtgactgccttgtctagaataacacccccagattcccttttgttctctatcatagcatcatgtttatttccttcagagcacttatcacaagctgtatcatcttggttacttgtctcttgtttttgttttgttttttgtcttgtaagaatttaaattccatgagaataaggaccatgcatgttttgttcattttgtatttccaatgcttggcactggactcagtaaatattgttgattgatcaaatagctggctggatgaaatccattgaatgtatcccttttgttcaacactgacttttagtcttcattaataaactatttggatgatttgaagtcaatctattctggttagatacatctacagtttagagcacaggtggataggctgtgtatgccagggttagcacatactgtctataatagatcaggatatttttgtctaggaccacac

SEQ ID NO: 97379 - DNA, 1111 bp, Homo sapiens
gatgtgttcatgtaacgaaccttcacatgtagccccaaacccaaaataaaaattttgttaactctcatcatgttttaggactggaagagaaaaatgggtgataatgcttttattatttaaaagtgtttttttttcctgagtcttattttgaaaaattatacagaatagtttgcatggcatattccttgcatcatagaacttgctctgcttcaggccaaattgaaatagagacagaaaagaaagagaccaagaaagaggatatggagaatatcagccatttgtttcctttcccgtattcaaagacaaacatctcagttgcctggatctcttgaaattagtacttgtaaaagcttttaagtgttactggaatacattgttaaagccatatctggttgaaattttctgattaagcacaattaaataattgtttcagcaattacacagttcatgattatggtatgtgatgggacattatttttttaaaatctattattaagtaaaatatgtattggtggccaagtataagttttagtacaacttgctatatcttggacattttgcatatatagcttaaagaccagtggggtagactgggaagttttgtcagcttcataattttggaaaacagaaaaaaagaaaaaacaatgctgattaaacattcttagccataagaagatatgtgagtgtggcttagctaataatacctactttcttactatgtatcacttaatagactttttttgctatgaaatattcaatagttacacatttgctattttatagttatttccctgccctgttaacatcaagggttactaattgttgcattagtagttcctgacaaatagaaattatttgatactctaagccatttctgatggaagatacaaagttttgacaaacacgtgtggcacagcaagtgtcccattctaaagagcaaaataaatgcaaaccaccattatggtgaacacaaacagcctgaaagcaagttatcagtaagcaaataattgttgaactgttatgaatggaataggatgttgaaatagggcatgattggctgatgttacatatgtccttgattaccttccttgtgcttttatcctaataagtg

SEQ ID NO: 97380 - DNA, 1092 bp, Homo sapiens
gcctgggcaacaagagtgaatctccatctcaaaaatagtaataataataattcttcagtgatggggtgagggagttgatgttatagaaatagggaaatgagagaatatcacgtgttagtttgttttctgctgctgtaacagataccacagactaggtaatttataaagaagagaaatttatttggttcatggttctggagcccaggaagcctgagagtatgtcactggcatcttctgagggtcatcccatggcagaagagcagaaggcagaaacaagtgggagacagagagcaaagtgggtcaaactcattctctgtatcaggagtccactcctgaaataactaacctactcccatgattacagcattaattgcttcataaggggtgagccctcatgacctagccacctcttaaaggtcccacttcccaatcccattgcactgggggcttaggattcctaacacacgaaccttggggggcacattcaaaccacagcactatgaggtagagcaatggcagataatttgtatgcctaatgttgtatttgtagtagtcgtcattcagtcaacacttcacacttgaccttatgccagttatatttaagattcccaacaagcttgtaaagtaggtgccattattacccacattttaaggaaatgaaaagcaagtatggagagattaaggaacttggccaaagttacataaccagtcagtggtgccgacatccaattgtaagcagttcatctgcagagctcatgttcctcactaactgctaagccatagtatctcagcactggggcactggtgatgctggaaaggtagacaaggcctgagaaatgtgtcatataccagtcacatttcctattactatgaatttcatttaggtaaggttttgttgttagacagttcatgcactataaaatctgagactaaaaattcattataacctaattagaaaatgccaactgagagtggtattttttaaaaaattgtacctaaaattgtatctttaattgtatggacttctctctaaaaactattttccaatttaatagccattgtagggacagtacataaaagagtttatatatt

SEQ ID NO: 97381 - DNA, 2292 bp, Homo sapiens
acaatccccttaaaaatctgcactagagattaaggatctctgagtcatattttgttaccaaaacactgagttgggatgagctacacttttacaaccggagttgatatggtttggatttttgtctctgcccgaatctcatgttgaattataattcccagtgttggaggaggggcctggtatgagacgattggaccgcaggggtggatttccttcttgctgttctcgtgataatgagtgagttctcatgagatctggttgtttaaaagtgtgtagcacctacacctttgctctcttcctccttctccggctgtgcctgcttcctgtttacctttgccatgattggaagtttcctgaggcctccccagccgtgcctcacagcctgcagaactgtgagccagttagacctcttttctttataaattacccagtctcaggtatttctttatagcaatgtgagaatggactaatacaggagtttagtagttggtgaagagggtagtggagaattttgaagctcagaaatctcaggactgttgggagtgggaaatatagggcaggacctcgggaaggatttagaatggaggttcaagatagtttgtaggatttgaataacaggttttcctgggagaagggtggagaaaaggaaaggtgaacaatgtcagtgttttacagcctaatgtgtcctgcttgtgtgggataggaggaagagcattatttgtctctaccgttctttcctgtgcagcatgttccccagacacagcatctacctttggatttaatgttgtagtttaactatttgatgagttaaatagacttgaagcctagcccaaaatgttagggaccattaataatattgtttctataaagaaaacgaatcctaaaaaactggagaatatggtctatttgtaacctagggagtagaaactatcaaggagttgggtgtgttaagaagaatactactttagaatttgaaatacaagtgctatggtctttatttgctactataagtagctctttgaacttggccatttaaattacttagcctttcatgtagaagataattcattgagattgttcatataaaatgtgttctgtataaataatgtttcccaaatttacttatagctcaaaaagtattcaataatggaaaaagaacttgttttggccttgtgaatgcatcttttggatacattaccttggtttttatttctgttattggattaaggaacaaaatttattacatgtataaatataacagtgagactcccatgatatcactgccatgttctctacaaccccatcccctctttcaggttgggccctataacttcaccatttgcagcttagaggattttattgtcacccttggcttccattagagtaaatcattctttgtttacattgttacaatatgtacagtctttatgtaaaatcatgttacagtagcatgattttttaaagaaaattgtttattcttttaaaaaccttttaaaacagtttcattgtgatttcatatatctcagtctctctgagtatgaatgtatgtatgtatgtgttgggggtgaggcagtgcaagttagtaaagaattaaagatcatctctaaggttcccttccagggctagaattttatgattttaatgaagtgtaatgaattcataaagaaaagatacccatgcaaatatctaggtttgccatagtaacttttcctaattgcgtacagagcattcctgaggttgcagcccaatttaagagcaacttttctgggctgggttacagataagacctgatcttttttcctactctcattccctcttccatatctcagggccttgaaaataagccttttctgcatctcaccatgtttcttcccatcttttatcttagtgggcagctgttgctttggctagaataagagcaaagtgaattggcatatctatatttgagatcagtaacattacttaaactattatattcctttattctaaattgacctagaaagcatgtcccatcaaaaacattagaatgtgagactcaccctcaaaagcctatttaattcacaatgtagtagaaatagaacaatttgagaaatatttttgtatctgtgaccatttttacgaccagttttaaaattctgctttttaaaaatgtgttttaaaataaccgacttatgaactttgcatatactcctgtttatataaggctgggactgcacattgctgtgcaatctgtatttttaatgctttacatcaagaaaagcaaaacttggtaaaaaaaactgtcattataaatgc

SEQ ID NO: 97382 - DNA, 1883 bp, Homo sapiens
ggtcagttgatttaatattttggaggctggatcatcgataataggctcaattttgtcttgtttgtttttcttcttaggggaaaaatataatttagtctttcttcagtatatcccctcactccattttctaatagcatgtttgtcttctatatggcatcactaggtaatattgaaatggtagtaactcttgtattagtctttgatgtaattgaattgtcttgacatttttcaggctgttactaatttttgctaatattgtccattttatacattaaaaatttaatgccacaatgttttattagtaattggtttttaaatgagatattgaaaataattatttgtgtgacctagccccctttcattaaaacaatctatttttattttgaaaatttgaaaactttttaatatttagtatctaaatgtttagttattcatatatatttacctttttctcaatcatgtgtaggatataatgtgcaaagtaaaatcctgggttatagatcaaaagaaacctgttcgcttctatcatgattggaatgacaaagaggtaagttgtaaatatcatgccatctattactgcctttgctttcatttgctagggaacaaattagagttgttgttattttacacttaccattatatctaaatttttatttctgtcagtgattgcttattcctgggcttgttatttttttcttttcccccactcatgatatttcataaccactaatcttttggaaagaagaattataaaaatgaaaatgcctacttgttttaaggaatgtttactttcaaattcttcagtgatttactccatatttactaaacttttaaaagggattctttctccatctcccactttagattgaagtgttgaataaacacttatttttgacttcaaaaccaatggtctacttggttaatctttctgaaaaagactacattagaaagaaaaacaaatggtaagtttttcctcaccagatatacccagatgcatcatctctgtacacacacaaacacacacccacatatatgtacttaacggcaatgtttaattttaatatttttctccttattaaaaagtttaaaatggatgagaaagctgtgcttggtatttaccttcacagatgagtcttctaattgacttagagaacttaagaaaaactgaattaaataagcaatattgaattatatacatttacttatcaaatgtaagtttattagacattatcgtttatttccattgcaaaatgagaataaatgtagtcacaacaataaaacttcttacactaggaatttctagctgtgttgatattataagtgactttaaaatacccacctggggttgtagctgggcatgaattttaaaatccagattgaatgctttaaaaaaaaaaaaaaaaagactgtgtgtggggaaagaccagtacctgtttcaaatgctttaaaagtacatcgaggtaaaaactatgcattcatgtattgattgtcatttttggcatgtaaccaaaatgtacaagatttgttactatcactgataacttcagaaaattatatgttcatgtacctgtgggcatgtccacatttggcataccactcactttgacttgcctcactggactcttaagtattttatactattgagtcatacaaacaaatcaaaactatccaaagcaaaatatctgaattctcctaaactatattgtctgtttctccctgtacttcattaagtacttagatgcacatggtttcaattttccattaaaaattctcatttccatatgatatcaaagagtgagaaggctttaaactgaaaaataaacattcatagactggaagccaaaacaataattaatgtcagatggttaactccaataaatcat

SEQ ID NO: 97383 - DNA, 1009 bp, Homo sapiens
tgttgaaagccgaatgctagttctcattaagatacttcttttttgcctacttctttgaaaagagttgctatgttgcagcaactaaaaatttaaaacccttgagcaattgaatataattaagtacaggtgttgactctgggttataattcataacttttaagtgactttaaggattctttaatggtgcggatgtctaattatctacagtacaagtaaaataccaggcagaattttctggtgttctgtacatttagaagaattacactgtataatattgtaatgtgttgcttcttgtcagttaagtggtgtcagtgataaccagaaggcttttttgattgctactatactaaatataagctccaattttaatgtttttcatgtctttctacgtgctttctctttatctcatcttactattcaatattgtttttcactgctttaaagtatattatttttaatttaagagaactcttaaaattagaagaaaataacaatttttaaggtttctcagaactgaattgacccactttattattctctcctatgctaaatatctgtttatctcaaggtttggaattatttttacttacagccttgcttgattgctcccatgtaagtttactttgcgtgaaagtcctgtaggaatcatttataatttctttaattttagactagtccctcaaagtcagctacatatgccttttattttactaagctttttgaaaacttaatcaacttttgaatgtgtcaaagggatggtagttttattcctcttggtctagattgagttttagagctgtttcctgtaatgagagaggaggaaggaagaggagaggggagagaagcaaagcaaaagcacattcttctggctacttgtagttctgttttctattccagcattaaacaattagactagcacagactggattattttatggcctttgttatatctattttaatagacttttccctggaaaacaaatattaaagacttaagagttacttttga

SEQ ID NO: 97384 - DNA, 1842 bp, Homo sapiens
ctgttagtcaagcaataagattttagataaatgaaaataaagttcttatattttactgttttacatttatttctaggccactgtgtatttttctttatgctagtcacatgcatatttatatacagcatgtgtataagtaggcctatataagttataggcatataatacatttatgtttacattgttagtttgcttttgttactataacttatgttgtctcatattatacttttattcaggattaaaacttagctagcaaaatattatatggcattgtattaactatgtatgtgatatagttggatgcattcttataggtaaaaatttatatgaagaaatggaaatcttatttaaaaaatgaactgcactatttaaaatagaaactcatgatctttttaacgttgcagctgagttaaacaaataatctttccaccattaccaagaggtgctgtagttaaaaatacatttatacatattatttttaaaaacctagttaactttaaaatatgtaagttttcttgtcgtttagggttctgtgaagctgatcatcaagagggttgcaaatcattggtggtttctattttcagatttccacatcccggagtaatttgctttaatttcacccaatttaacctatacttcacaccatcaccattcagctttaatagctatgttctatgcataagaaaagcagataaatgtccacaattaggctgcaaatgattacaactagttagggctttatgaagacaaaacttaaaggaccatggcgccaaacaaagccacaaagacggcttgaaaatgctgtctcgagaagtcaagtctaccatggcatttgatttattacttttgtagttgattttacttatttttaatatattggcaggtgtgcctactctgggaagtattcatctttaaagaatattagttctctgttcatttattttggtttttaatttatttgcttttttgaatctcagcataaccaggttgaatctcttttcaaaaatattattaaaaggtagcaatttttaaaaaattgagaataatttgtttgaaatgtactggcatttatatgccttgttaatgcatttctgaaatcaagactttgctgaaatgtttatacgttgaataaccgtatcagacatttagtggaagtatagttttacaattttgtatagaatttcatttccagataggttttagtatgcaaaatataagcctatggaggattacttctatgaaatgttacttctatgtgcatatgtataaaaaattcagaaattgttttaatcctatatgtatgttgtattttctaagatgtatgttcttgttgatgattaatgtatattgttatttcaaggtacaaagaatttatttatggtttaaggttttaaaaagttaaattattttaatataatagcattttataaatttattttctcctatgaagtaaaacttgttagtttggttaatatatcgctgtatttaatgaagtaaataaatctcagtctcaagactggatctcatctcttttcaaaattttctgaagattttaatcaaggtgtgacatataaaaacattttctttaaatactttgtaataaatatatacataacataaatataactcaaggctttagtctggtgttccaacattagtcattttgttggatgttctctcagacattctatatagataggaatagcaatactgatggataataactttatagtttatggcacccagaattattcttataattgtaatactccccattttagaagtaatgttaatcattttatttattatataagcagtaacatgtatttattttaaaca

SEQ ID NO: 97385 - DNA, 1987 bp, Homo sapiens
aagagtttggataaattaactgttgttcagtagcaatttgaaatgtacagcttttttatgtggtttaattcagtgttttaaaaatagggctagtatattttgaaatcactagagaattagttgaattggggaaaagtcaacaactttttgtaaattaagttttttttgagatctattctttccttttaattgatattaatttcctgaggagttgatattaattttctgattaatcattttaggttgtatctgaaaaaaatttaagaaatccaaatgtatttgattttattaagctggctgactttgtcaaaagtctggaaaaactttaagaaatccagatgtacttgattttattaagctggctgactttgtcaaaagtctgaaaaaaatttaagaaatccaaatgtacttgattttattaagctagctgactttgtcaaaagtccattgctatttgcttaaggtttctagcttttgcagcagtgaataatagtgctcttaaattggatttatgctaacttttaagaaacatatttgttccaagcagtctaagaagtgcagagatgcatgtcaatattcagaattcatattttccttgaacagaaggttgtgataaaatggcacatggtatgttttcattgcctgttgaaagactttcatgcagttaaaataagcattttgatggtggttgaattaagagtttttgtcagtctcttctcatcatggatgattagactaaaacgtctgcttgtcttgacttgagatcaccacagcttcagataacatgctttgtgattgaaggtcgaaatattttgaattctaataggctgccagatgaattgcttgaaatagactgtaaaatttcaaggcttccttttccatctgctgtgaaaagaaccattgggaatggttgagcttgatgatcatagaattactggatggtgattctaaaaccctcaaagggaagttgctatggagatctagttccaaactgtgaaatgattcacctttgaaaggctgcagggtctgagaagctgaacacatcattgttcaggtggtcattggttaggaaattgctggtgcctgtgtaatcagcactcctgtggtagttaacgatctaaaaaggtttgttctgaatgatgtgggacaacagcaatgtgcataagatggcttctctcaatcatggtttgctcagtctggtgcttgtaaaaatacagcaaactaaatagcacagaaatgaattgctttattgagggaatcttttgaaaacaaaattttgaattgatgagtttagcatctaaaataaaatggttctttttgaaaataaagttttcgcagaaacatgcattgtttactttattttaattcatccccatacctcccacttttttgtggtaaagagctctttgtctctctaggtgtaagaccttaccacggtgaaatgtttagcttttaatatcctagagtactatttcaagagccttcttgcataagcacaggggcacctgagaaggagtttagaaaagcccctggtcattgagaatgagtctaggaaaatccccaaatcattagaagtagaaagtaattaatcccctatagcaaattggttcccctcaaattgttttttattatgcatatttgtgacatgtattttaaattgatattttttccaatttttgtttttattaaatcaacttttgtttttatttccagaaacctgaggccaaaataatttttgaaattcatttaacagcaaattattataaactgctattctcccatattaagatttcagaataggtaaaattcaatcttagttaatttcatatcagcctataatgttgaactttagtaatcaagtatgaaaccttatcaaagataatgtatgtatatcaagtttgtctgtatggtgtcttctccagacatcattaaggtaaaatatacatgtaacaaaaatcatatattcttagtgtacagtttgatgaag

SEQ ID NO: 97386 - DNA, 1316 bp, Homo sapiens
aatggaataaaattactcatttaaagtaagtttattatcttgtactttgtaaaaagctttaagaatgtcactgttatttaataataggtaaaaggtatatttagttttaattttaataacaggtaaaaggtatagtataaggatgttttctaaagtagccagtggtatgcctctgcaatataattggcttgctaaacctcaataatagttggcatacagaaactctacatgaattcagtgattaaaagcaggaaaactacttaaaataagacctttttgttctttttagaaacaatctaaatgagaactttatatttgcaggaacaagatttggcatttctttttcactgcttggttgctttgatgtgagcagtataatgtagtggacattagtatataagtaaatgattaaatgagtcataagatggaacatctgcctgagaaggcctttcagacagcatgagttatgttgttgaagtctctaatcagtgcatctgtccctgagacttcagttggtacaaggatagttttctattttggattagttactatatgaagacagcatatttaaaaaaaattttttcatgcatgcaactggaaaatttgtgcctgtgatattggaataaaaaaattacagcagtgattttttttttgagcatagtaataaaggatagcaataagtgtataaaatttaacttttatatgccttaaaatggttatttatggtaggattttacattacagacccataagtcttaatgtcttacctgaggaaatattcttagaaataatgttattacaacaggacataaattcagatgaaggctgaagcacagcaggattcagataggatgtttaactgaaactgcagaccatatcgtgggtcccttccgatctggaatattaccatagtttcaaagttgcagagagagagagagaaaatatgaatatgcacgtttgtatgttgtatacaagataaaaactcctaaccaagagcacattgtagaataccagaggatgatgacatagagttgtggtaaatgtatgtatgttttattctttataatcaacaagccacaggagacaaattcttgtgatcatagttaattttcactaaagggtgcaatcgaaagaagaaattggctcttctttccttcaaaaatttatacttagctgttcaattaaacttttttacaagaaaataatgagtgtaattaaaggagaatatgggggtttgagtaagaattgggcacatgttaatttacgtattgggatttttaaatctttgaaatatagaccagtcatcgggaaatatt

SEQ ID NO: 97387 - DNA, 1025 bp, Homo sapiens
ttcagaaacacgataaatacatttattctgttttagttttctcacttattatcctaggtaagaaagtccaaatgtattacaaggccatttctaattttttttggggggaggggtggatattcatttatcaaatcattattgttccattgttctagaaaggaaagaatttatgtgaaatgtttggagaattcatttggttgatagataagtttttagtactgttttataataaagccatcttttgtttttcagcaaaattcctgcctttctaaatgtggtggatattgctggccttgtgaaaggagctcacaatgggcagggcctggggaatgcttttttatctcatattagtgcctgtgatggcatctttcatctaacacgtaagtacagttgtttatttaatcattgatttcattcagatcagtgttttctttccattagtgcacaaataaaattagaaatgactaatggaagattgctttgctttaccagatgaatcttgggtttgtctgtaaatctgtgactttaatgttacttagtatcatctccgtatctgaaggcttattccatagcaagtatatgctgcattgagattatattctaattgaactttattccctgttctggattagagcaatcaagaagtgtttctatatggaactttgttcattgtaaaggcattctgaaattatcttaaattgtggaactttattgcttttctgtgtgttaaggaggcagaattgttagagaaggggattctgattatttaacaacagagaaaggcttctgggttatctattagagatgaaaggattaaagagaaactatagatcagctagtccttatggagagaggaatataaaggaaagagaaaaaataggactgtggcttagtttgggctctgttgactgactataaaagtgagccaatcacatagtaattttctgacaaaatagagtttaggttaaggcttaggtcaaggctgtactttgtgttaatagtattataatgagcaaattaataga

SEQ ID NO: 97388 - DNA, 1036 bp, Homo sapiens
ggtgtttgttgtctctggtctctgtgtttaccttcgcgcttcaccccgaagggcgacttggggtcttctgggagatgagccggtttacggcgacaacccaagtccggttgtaggcagggttgcagcggggaacacggaggcatctttgatttatagcctcagcgaagtgcaactttccggcgcctggaccttcgcccgggtgatcgcccctgctccgcgcccggtgcggcgactcctccgcgggcgcgtggggaggaggcgcgaggcggggagccaggaccccccgggagcagccgcaggggacgaggctgctcacgggtgcactttgtttcttcccccacttcctcttgccctcctccttcttgctccctcccccatcccacccactctaggaagagccgcgcttcggaacgaccccgttggccatgctggcggcgacctgcaacaagatcggcaacacgagcccgctgacgacgctgccagagtcgagcgccttcgccaaaggcggctttcacccctggaagcgctcctcgtccagctgcaacctcggctccagcctctcgggcttcgcggtggccaccgggggccgtggctcgggcggcctggcgggcggctcgggcgccgccaacagcgccttctgcctggcctccacgtcgcccacgtcgtccgccttcagcagcgactacggcggcctcttctccaactcggcggctgccgcggcggcagcggccggggtgtccccgcaggaggcgggtggccagtcggccttcatttccaaggtgcacacgacggcagccgacgggctgtacccgcgcgtgggcatggcgcacccgtacgagtcctggtacaagtcgggcttccattcgacgctggcggccggcgaggtgaccaacggcgcggcgtcgtcgtggtgggacgtgcacagcagcccgggctcgtggctggaagtgcagaaccccgctggggggctccagagctcgctgcactcgggcgccccccaggcctcgctgcactcgcagctgggcacctacaaccc

SEQ ID NO: 97389 - DNA, 1010 bp, Homo sapiens
ttaatgttagttgtaggtaatgtaaagtttatgtgggttataaaagccatactacatatacgtttttgagaagtcaaaattatttatttgtatatcaacaacataaattaaattgggttgtaaggacgtgtagttgtattacttaatgtgaaggctctcaaaaggtgacattttaaaactctggagcgcctaaaaaatgcaaaggtccttggcagctttaattggggaggtgcctaaacctctgggaggggtcagagaaaactctggtgggtttgtttgtttttaaaaagtgatttaaaaacaactgtgaaaggaaaacgcttaaaaaaaaagaagtcttttagctcccaaggccctgtatgttggaaggcaactcaagggaataaatcgctagagtcaataccccggaaaagacatttcatgcctaaatgaaaatcttgttaaatgttattaattttgacttagagcacacagcagccccctgtgccttgtattcccttattagggattcatgtcttatcaaatatctaattaatctcctagacatcatttgttctggccaactttatctcagctggtccgcggggaaaactccaaatattctctgtgacaaagctcccttgaagatctttttaattgtctaaattaactgcaccaaatttgcatgtcaaacggtaaagggcaacctgagataaaatgtaaacgttttaaaaagcccccaaactaagcacttgatttgataactaggctttttaatgttatggaagacaactgctcctttccttttcaaagacggctgatctatgcaaatagtgaattggaaatgcctaggtccccgcgccgtcaaatggccctcgcaggttatttgaatatcagtggcgctgcttctgaaaaggttcaaggatgctctctgacttctttgtgattactcagtgcggcgtcttattctgaagaaaaaaactcaggaataattaaaggctgggatcaggcctgggaacacatttgggaca

SEQ ID NO: 97390 - DNA, 1039 bp, Homo sapiens
gaactcatttctgaatatttttctatccccctaccctcccgtatgaactcctttttggcagtaactgtctcattcttccctaagtgacagacacatcagctggagtacgtcatttaagccagtgtaggtgatttaggctggcaactttaaatagctgccatgaaatgttgtcattagtttgctatctgcagggaaaacaaaatgaaacaggaatatacaaaatgagataagagtctctcttaccttacataaaccttatgtttgagggcagggggcaaacctttaaaaaaaaattatttatttatttagagacatggttttgccatgttggccaagttggcctcctgggctcaagtgatcctcccgcctctgcctctcaaaatgctgggattacacgcatgagtcaccactcccagctgaaaatttttaaaatttattgttagttcatatttgggaaacaaaaagctcacttttcagtctgagattttgcaaaagtggaagtgtagtgtaaaaaaatataaaacatacataccaatagccagcctaaaactgcttgttagcaacccaagctagtaattaaaaattttgaaatctgggaataaaagcaagattaattaaagtacttggtggttacccataggtgtgtgtgtgtgtgtatgtgtgtgtgtgtgtgtgtgtgattagcaaccacttggcaatgtattcagtattgttatttgacaaataaggatgaggaattttgaattggaaataaggatgataaattcctcatgtacctttaaaaatacatcttttaaatgaactcttactgagagaataactactaaaagtttaattgtagttttttattataatattttgctttgattttatactaaaaactgccaaccagataacatctaaatgtatctttttcaatatgacaaagttacataagaagactccccttgcacgtaaagaaaaatgcaattattttctattctgaatctccagactgctgttttagaaaatcatatctgattatttgctcagcagaaga

SEQ ID NO: 97391 - DNA, 1028 bp, Homo sapiens
acggagtctcgctctgtcacccaggatggattgcagtggctcgatcttggctcactgcaagctccacctcctgggttcacaccattctcttgcctcagcctcccaagtagctgggactacaggcgcctgccaccacacctggctaatatttttttttagtagagatggggtttcaccgtgttagccaggatggtctcaatctcctgacctcgtgatccgcccacctcggtgttgcaaagtgctgggattacaggcgtgagccatggtgcccagcccgtagaatgtatttttctgtgatgcttaaacacatacacacagcagagtgcatagtcttataataattaaagtttctaacccacaaggggataagaatttgtgtataggtacctataaagcaaattaatgttagtaagattgtcaaaataaatataaagcaaaattctatctattaagtaattcttttccccaagcaaacaaagattttgcacatctttccatgtttgaattgcagatttatttcttcacaaagcaaacaggtaacactaaacagtcactctgggccaggtgtggtggcccacacccataatctcctcactttgggaggctgagaggggaggatagttcaagaccagcgtttgagaccaactttggcaacacagcaagaccctattgctacagaaactttttgtaaataaataaacagttactgtataggaaagctagagctggggttgctgggagtgctagctctccttcagcctgcttctcaaccacccattatgcccgccgttgaactcagctctacaccagcagtgatagtggatgaaccagccctgaaactctaatgcaggcatgccttatttgatcatgcttcactttcttgccctttgcagatgctgtgttacaaattgaaggtttctggtaagcctgtgctgagcaaatctatcagcaccagttttccaaccgtatgtgcttactttgtctctgggtcacatttttggtaattattgcaataattcaaacttgta

SEQ ID NO: 97392 - DNA, 1061 bp, Homo sapiens
ttgcggtgagctgaaattgtgccactgcactccagcctgggctacagagaaaaaaaaatagagaaagaacacctagatatctaataaaatgatattaagtgagtaattatagaatattgttacagtggaatattatcccattaaatgatatgaagatttcttaatgatatggacattgtttacaacctttggtcaaataagaaaagcaggttatgaaacagtagttacatttgtgtttctctttgtatctttaggtagacatgtagacagagagacagatacttttagaaaaaggattggaaggagatagacaaatattaacagtggttgtgtctgggtggtaggattacttgcgacttttaatttcatctttttggcttacctgtaattccattagtgaaggtacattacatttataagttttttaaattaacattgttttagaagaattaaaaactgtacatagaagtaaattatttaaaattgaattgctcaattaatgcctttaaagtttgacttaaaatttagcagtagtacttaactaaagctaatagaaactcttaaagatttctcaaaatcaaaatcaaaattctgtatgaaataggaaagcaaataatgatgttgtgttctgaatttgaatgcaatgaaaaataaactgaccaattttctaatccacttgctgattcaagctacaaaaaaagtcttttcatttaaaaaaaaatcacctattgaataatgtctcaccagtgaatagagattatttttgcaataaggcaatttcagtggatgtggttatcatgggataatcacactcctggggtacagccttgtgcctgtaatctctcaggagtgtaattatttcatgataaccacaccccctggtgttgcattatttctattatgaaattcttagtttagtatataaagtaacttactttgatcactggaaactgcaaggtgctgttagaatgttccagctgtgaggtttacagagaccagcataagatttacttctcctttgcaaagttaaattaggcaatcaaaatgcttctttgggctaa

SEQ ID NO: 97393 - DNA, 1040 bp, Homo sapiens
ccaagtgagaggcaaaaagaaatgggattcagcttagtttctaggcaaaatttatagtgaaagattttagtctttgtattaaattaccaaacatagtttggagtctttttccctggagatcttttaaaaatgtaatttagcttaaattctatcaaggaataggaatttgaacattggttagattcttacttttttagtaaccaaaatcacattcattatttctcaggttcgaaatgtgaggtgcattaaatgtcacaaatggggtcatgtcaacacagatcgagaatgtcctttgtttggtctttctggaatcaatgcaagttcggttcccactgatggctcaggtaggcactagacatgatttgtttcgggagaggacaaacaaggaaagataaaacaacatttttctttactctttctgggtattgttttatttgggtttgtgtgtggggcttgtttgtttgtttttgactaagaccattcccaaaatatgattaatgggaaactctgatcatatatgttgaattaaaatgctgtgtaataggattaagtttaatttttccagccaaaggccctatgaactaagttttaaagtaaaatacattaaacatagtttatcaggctagtagcctaaaaatggaaggaaaaaatgcttatttctcatactcatatcctgaattataaaaatagactgtactgaaagcctcagcagccatctctttttagtacagaggtaaaaacaaagctgagtatgttaaaattgttttttacttaaagttacttactgtcctacatattactgtctacttcagaaaaattgatctaatttggtttagattattttggttctttttctaaagagatattaaactgagaagttttaacttaaatttattagtgctttgttagtatattattgaaacaggcacaataatccaaccctaacctgtaatagatcataatagaaataatctgtttaatcctgtaaccttaagcaagtcctttcacttttatgaacttcagctccttattttaaaata

SEQ ID NO: 97394 - DNA, 1022 bp, Homo sapiens
ggcattacctccagcaacagtcgataacaggattatttttggaaaaaattcagatagactctatgatgaagtacaagaggtggtttattttcctgctgtagttcatgataacctgggagaacgtcttaaggtaggtgaaataaatgttttgttagcaatatgccttttaaaaatatcataaagttatttctatacatagcaatttggaagaaactgtagaagttaaaattgaggagtttacatttgaaaaataaatgagtcagaaataaactgtgatcttttatttcagtgattcggaggacgttgaaataacaataataaaattatccattgtttgaataaatatttgaatgctttccatatgcaagcatgttagatagggcaagagatttaaagtcagctgtcaagactctgttccaggagcttagagtctagtatagcaataagatgtgtatgcattataccccattataaaataggatggtttaaatgctaaatttaagtaacagtagcatgctgtggcagcggaagagaatgaacatttaattcagcttggagttagctggaatttgatggacaaaaaggattctgattctgaattggcttaggttctacttgatgtagaataggaaagtcatcccagactttaggaatgacagttttatgacacatcaaaaaaggtttattaggccctatgttaacactatcaatatacattttatgcagtcacttggtagtatacacattaattaaaggatcctttaaaaacttattttaaaaacccatttaatgtggaacttaaaatgagagcttcaaattatgctattgttgctaattcatactttttagattttattttattgatattctaatattaaaacatattaaatattagacttttttctgtatcctatgccatatttttttcttttgctaagaccacttattcatctgtgataccacttccactttatttcttcatatttaaatatagcctgtcctgtaaaccagtggttctcatt

SEQ ID NO: 97395 - DNA, 1005 bp, Homo sapiens
gaagtaggaaattataattcattggaagtacctaacatactttaatcacaccttaactaattctcacaataacctcatgggctatcgtgctcattttacaaatgagatatctgaggttcagagataaagtaacttgacagtgaattaccaacttcgaatttgataggtttgtttgactccagaaactttatttccatgattccaaactgacttcagaaggaaaagttttaaagttagatgtcatttcatctgttaacttggaagaaattttactttgaatctaaaaaatctcatgagcatgaaattatttaaaaaaaataatggaaatttattttaatatgagaactttatatttttgttttagacttggccttgaaagagctgatacagctgaaaaagccctcaatgtcattgttgacttactagaaaaatatggccagggtggaaattgcacagagggtagaatggtatttagctatcacaacagtttcctgatagctgataggaatgaagcctggattctggagactgcagggaagtactgggcagcagaaaaagtacaaggtatggacaactttttgtgatttaacttgtttttgcaattaataaaatacacccttacctatagatattgcatttaattgcttccaagattaataatctagtgtaatgaagggttgaactgcaagggaaatttaaaaatttgaaagaacagtgaaaaagtgccataaagagctttcttgaaaaagataaaaaggtagcattacctctgggaatatgaatttcatataacctgtatatactttctttgctgcagctcttggccatttcatagtactttttcactttaataatcccttacaatttcttcccctttaaactttgggctgcactccaaaatcttatgtgtaagtgtggaggtgaggaaatgggagtggggttagagacaggtgtttgtgagttggtggttgaaaaagctgtgttgatacaatagtaaaacacaaa

SEQ ID NO: 97396 - DNA, 1064 bp, Homo sapiens
aaaaaaaaaaaactaaacatgcaactaccatacaacttagcaactgtactcctgtgcatttatcccagagaaataaaaacttacatacatttacacaagaacctgtacgcaagtatagcagctttttccatgatgaccaaaaactaggaacaattcagatatcctttaccttgtgaataagtaagcaagttatcatacattcataccatggaatattactcaccaataaaaataataaactattgatatatacaataacatagatgaatctttagcgaattgtgctcagtaaaaccaaaagcttacatattattccatttatataacattcttgaaattacagttatagaaatggagaacagaatagctgttacctgaggttaatgaaggatttggggtgggagataagtaggtgtggctataaaagggcaacatgagggatccttgtggtgatggaagtattctttatcttgactatagcaataccaatattctggttgtgatattatactacagtttggcaagatgttaccattgggggaaactgggtaaagggtacacagtatctctcagtattatttttttataactgcatgtgaatctataattatcttaaaatcagtttaattttaaaagtaattcatttatctttttgaatatgtaatagatgcccatggcacaaaatttagaagtctatatttatgtttacatagtgattaggaatcatgatatacagatacatgctttatgttaaatatgacttttcttctcctttctcctcttcttctttgaaaatagagggagttcgtaatatttctaatcaactttccataacaaccaagattgcccgggaacacccagacatgagaaactatgctaagcggaaaggttggtgggatggtaaaaaggagtttgattttgctgcagcatattcctatcttgacacagccaagatgatgacttcatcaggcagatactgtgagggctacaagcttctaaataagcacaaaggtaattttatcatataaataatattaggatgacaaactacattttgtgtagat

SEQ ID NO: 97397 - DNA, 1024 bp, Homo sapiens
acaatggctttgagactttgcatagtttatatttaaaataacatacctttcctgtgacagtggaatgaatctaattgtagttgatacaaagtttgtttatagtcagtctcttaatttatgtcaagactaatatctcacatattatcagtagagaaagcagttcatatttgcaaggcatccgtatatgcatatgtatttgatgattttaaaaattatttctctaggaaatataacttttgaaacaatgatggaaattcttcgagataaaccaagtggcattaatatggagggagaattcctgaccactgcaagcatggtttctattttacctcaagactccagccttccttgcattcacttctttacagggactcctgatcctgagaggtgaagccacaaaatactataaaccagcaaggggtcaggggatggagtagagtcattagtatgttaataattttgtcaggataaatttttgttatacaactaggacaataatttttaatatattttctgttcaggctttaatctgcaatatccacaaatgtgtaactgttctctttttatgggaaggaaatgtgaatagtttcttgtatgcgttatccctactccttcttcgtacaaatagatttaacatagtcaagaaaagaaagtagatagattttcttactcacatttcagatatgatattagataattcataacagtaaaaatgttaaatgatgtagttgtgcaggatttacttatgcacttgtatctagaaaatacatgtgaaacttaaaatatcaatagttccagttttatttaattattattattactattttgagacagagtctcgctctgtcacccaggttggagtgcaatggcatgatctcagctcactgcaacctctgcctcccaagttcaagagattctcatgcctcagcctccctagtagctgggattacatgcgtgcgccaccacacccagctaattttttgtatttttagtagagacagggtttcactgtgttagccaggat

SEQ ID NO: 97398 - DNA, 1096 bp, Homo sapiens
ctgtaagaatcatagaccttttttctccctttattgaataaggatgaagtcatagaggaaatgtcttcttttggttgattttttcctgaacattattgttctattgtattaatctgataatattggttttaaatgtaaaagatcaaaattgataaaaatatttcagcctcagttttcagcaaccttccacatacacagttcatatgagattttctattgtcctgttgtcttttaggttttttacttataaactactcttataattgtttttgtcttttctactaaaaataatttggtattcatgcattaactcaatctagagcaatgattttcccaaagaatttcatttcattctttctgtctctaaagaacaagaagggaaccaaaccacaatcagaagccagcatgaacaaaccttatttgtagagatgggttgaatttggttagatttatgtgtatatgtatatgtgtttatctttatatttttaattgtttaggaaaaagccaaaataatgttggacaacatgaggaaactggagaaagaactattcagagagatggaatcaatccttcaaaacaagcatcttgatgtggagaaaattgttaatctctttcctcagtgtacaaaagatgaaattcaaatttatcagtcaaatttatcagtcaaagttagttcttagtgatcatatggtcagctaatattagttcttagtgatcagtggtcagtaatcttcaaagtcagaatctatcaccttggtaaattatataaacctaacttgagcagatctgattattcttggatagtattcaagtggtatcttgactattaaactacgtatagtgttgctgaaatagaaagaaaacagcattggaattggattcatgtatcgtgggatacaggtgttatttcaggtgatgtacttgcattattttctttagccatagtaactttttgtcacaataactaagtattcaattatatataaagagtgaaacattaaaatgacgcatggatttatatttattataattatgtagtaccctcaaatcattttgtcagttacatcaagaaagcagatttttctttagtcatgaa

SEQ ID NO: 97399 - DNA, 1050 bp, Homo sapiens
gtaatcccaactactcaggagactgaagcaggagaatcgcttgaacccgggaggcagaggttgcagtgagctgagatcatgccacttcactccagcctgggcaacagagttagactctgtctcaaaaaaaaaaaaaataaaaaataaaaagaaatagctgcttttaccaaattctaggttcagagcatagaatgaataaatgattctaagcagaataagctattggagcactcaggcctcagagtaatgtgaatgattcatctcttcccctcacacctgcaattatttagctcaagatccaaattcaggtgacctagctaccacacttctggaaagcagcaactaagtttttcccggatgcctgaataaaacctttgccaaaaatttaaagaaatggccccaaaacaaaaccagaaaaaaccattacagcgaacaggccaatgatgagaagtaaacacagcaacacatgtcgggtcagttgctggtctccactctgtagatactgttcttcttcctgggctaatatgcagctctgggagttacagcgactcacacaatgattgtctataaaagagtaagcacaacaatttgtaatcagagctttttatctaaatgcattttaaatttgtaatgacttcctaagagaaacaacagaaaagcacattcagctaagaatcagtatattattttagatgaaattggaagaaagctccttcatgttgctttagaagaattctagctgaaatgtttttatctcaaaaaacataagtagaatacaatagttcccttttacactattcaacaatgttttatatatataattatctaacataagttatataatttggtctttaaaaattatacataatttgcctgggtgcggtggctcatgcctgtaatcccagcactttgggatgccgaggcaggcagattacttgagattaggagttcaagaccagcctggccaacacggtgaaacctcatccctactaaaaatacacaaattaactgggtgtggtggcgggcacccgtaattccagctacttggaa

SEQ ID NO: 97400 - DNA, 1050 bp, Homo sapiens
ctatgcacaattattccctattagcacttctttgctcttaattgaggatctatattcttgatgtttgtaacttctatagatattctatgtagagttcttttgagggataagaataaggaatcttctggccgggtgtggtagctcacgcctgtaatcccagcactttgggaggccgaggcaggcagatcacgaggtcaggagatcgagaccatcctggctaacacagtgaaactccgtctctactaaaaatacaaaaaattagctgggcatggtggtgggcgcctgtagtcccagctactcaggaggctgaggcaggagaatggcgtgaacctgggaggcacagcttgcagtgagccaagatagcgccactgcactccagcctgggtgacagagcaagactccgtctcaaaaaaaagaaaaaaaaaaaaaagaataaggaatcttctgtcccttaatcccatcctcatagtccagaggcacttacttttctcaaacgaaggaatcacaggctcactggtgcttgtgtttgctattggctctattgatgggcagtgtaattcaccatttcccatggagcaggagcagcaacctatatcaatcaaatagtatgtgagagtagagcccaaccacaacagaaatggacaattttaagaaatgccaaagaaaacaaaacaaaatccactcacacacacttcccatgtagcctcaatagttttcacatggtatctatccaaaagtattcaaatgttctcactcatatacaaaataaaaaaaacttaatctcatagaagcactgaatgtggccaggcatggtagcttacacctgttgcttcaggaggctgaggtggcaggatcacttaaggctaggattttgttttgttttgttctgtttttttgttttttgaggtggagtctcactctgttgcccaggctggagtgcagtggcgcaatctcggctcactgcaacctccgcctcctgggttcaagcgattgtcccgcctcagcttccgagtagctgggattacaggcacctgccaccaggcccagcta

SEQ ID NO: 97401 - DNA, 1147 bp, Homo sapiens
ggtagatggaaatgggccacagaatgacccaggaggaaaagtctctcattttgtcagctgtttaggcatctgcatacccacccttgatgtggaggttctgaactaattctgtccctcataatccatacttacaatcccacatgcccactgcttccgcagtaatccctgcctagagggaaggtgcttatatttcccctagaggtaagttttagcagtgggacattagcaatgaaagtagattcagcccagtgggattctaaataagttttaaattttggagctttcaggtacagagagaaaggtagtatttgttgctttacccaattttgtaagctataaatagctcaaaaagaaaaaggggtttttcgtggttttcccatccactgcagtgttggaccataatcatggtggacatgatggagttgcccaggttgcgcatcaacgctggcacgctagctcagttcatcgataagcctgtctgcttcgtagggaggctggaaaagattcatcccactggaaaaatgtttgttcttttagatggagaaggaaaaaatggaaccatcaaactgatggaaccccttgatgaagaaatctctggaattatggaagtggttggaagagtaaccgctaaggccaccatcatgtgtaaacttatgtccagtttaaagaggtaaccatccttttgatcttggactttacaatgaagctgtgaaaattatccatgagtttcctcagttttatcctttagggattgtgcatcataattgatcttgatggattttcatatgattgcaaatgagctatattaaagactattaaaggaagcccctcttgtttgagggagagatttctgtgctttctcatatttaatttgctctttttaaggtattccagcctagagtttttgatggaactgatatattgacaggtctcacctaagtccttttataaagaattgctactccaatttatggtcagattatatgcaagaacaaagcagttgtctgagtttaggtttctattttattaataaaaactaaaatggtaaagaaaagaaaagaaaagaaaaagcggtttttgtttgtctgttttttctactgtggaaaacaaaacaaaaggacataagccctgcctggctctgacaatg

SEQ ID NO: 97402 - DNA, 1083 bp, Homo sapiens
ccatcctggttaacacggtgaaaccccatctctactaaaaatacaaaaaaaaatagccaggcatggtggcaggtgcctgtagtcccagctactcgggaggctgaggcaggagaatggcgtgaacccaggaggcggagcctgcagtgagccgagattgcaccactgcactccagcctgggtgacagagcgagactccctcttaagaaaaaaaaaaaaaaaaaacatgaagagatgatcctaaattatccaggtgggcccacccatatgattccttaaaaacagagactctttcccagctatggccagaggaagagatgactgtgaaagaagggtcagagaggtgcgacactgctggctttgaaggtggaagaagagggccaggagctaagaaacatgggtggacactagcagccagaaaagcctcccctagagtctccaggaagggatgtaccctgtggcctgagggcaccttggttgtagccctgagggacctatggcagacttctgacctacagaacaataaaatagcaaatctgtgttgttttaagccaccaagtttgtggtaatttattatggcggtgatagaaaaccaatacaccacacatgggcaggacttccctgccatgatgctgaagaaaggcaggtttcacactggtggcggaccctgcgcattttttggttgtagggctgcttggcctcctcctaacacttcctcttgtgcatgcgcctcccaagccccacttggcaccccaacaacactccccaggccagacactactgatgttttctttcagccagcttaggagtgggggaaggccatgggccccatgtgctggctacagctctttaataaattatactgttggttggtccagagccttcttctggattcttgattattgtaattgtccttctgagtttggaatctgtctggatttgttatctttccattattttaattatttatttggttcattttttgcagccaattttgttcttttttttttccccctcaatccctgggagctcagaacatgcagccaattttggatgtgtgaggttttcttttcccactcttgtcaa

SEQ ID NO: 97403 - DNA, 1034 bp, Homo sapiens
ttctaccaatgccatcttgttcttgtcctctcataatgaataggcatctcaccagaactctcgcccacttcatcctggctcttgcctatacataatgctaagagatatttgcagaatccttttgaaagctcataggctgtagaagttgggactcgcaggtaaatagagctatggtcgattttctgctcccaagaaggaccaacaaaacccaatttatataaataatagtttcctgtattttatagccctctgaggaagggacttccagtcactgggaacagactctagctctctgatttcttcagggttcctgatttcctaactgatgtttgttttcctgttcttcagattctggaggaagccgaccaccattgttgccaccgggaggaagatccacatctgcgaaacccttttcacccccaagtggcccagggaggtttcctgtgccttctccaggccacagaagtggtcccccagagcctcagaggaaccgaatgccgcccccaaggcccgacgtgggctcaaagcctgatagcattcctcctccagtacctagtactccaagacccattcaatcaagtccgcacaaccgggggtccccaccagtgcccggaggccccaggcagcccagccccgggcccactcctccccctttccctggaaaccgcggcactgctttgggaggaggctcaatacgtcagtcccccttgagctcctcctcgcccttctccaaccggcctcccctgccgcctacccccagcagggccttggatgacaaaccccctccaccacctcctccagtgggcaacaggccctccatccacagggaagcggttccccctcctcctcctcagaacaacaagcctccagtgccttccactccgcggccttcggcctcctcacaggccccacctccgccgccacctcccagcaggcccgggccgcctcctctgcctccaagttccagcggcaatgacgaaaccccaagactcccacagcggaatctgtccctcagttcgtccacgcccccgtta

SEQ ID NO: 97404 - DNA, 1049 bp, Homo sapiens
ggtggcggaggcggtggaagttttggagggggcggacctccaggtctgggaggattgttccaggctggaatgccgaagctgagatccacggccaacagggataatggtaaggagagtttccctgtctctgagtgactgaagacaaggcagagtttggcagtttggaggctggtcatagcctctaaggctcttcgcccttattaaaatattgtacattgttttaaatattaccactgttttataagagactcaatttaggctttattattattattaaccaggatcagacagctacacagaactatgaaattttcacccagtgtctttgggggtaacctgtacatttttttttttttacttttctaaagggttagctggagtgggaagaaaagggaggagcaaatagaacttgctggccctggaaatctgcctggtgacctgacagattcagctttctttgtgaggtagcccagctgtctagtagagtaaatacttgtgagccgcttttcaaacacgatggagcacatcttgtggaatatgattacaaatctcactaaatctgaaaaagtgttttgcatgacagatatttggtatttcagtgccagtggttctcaggagtctctgcagggagccatggacatgagtccttcaggattgtctatgaacctgatggtagaaaaaaactgaacttgctcatgaatgcctagataaaaaactttgcagagggcatgaggctctctcccagctactacagaaactcaagaaattttaccataaaactgcttttgtaatgttgatcatgttataataattttcatttttagaccttttataagatgtcccctgggaaagaatgaaactctcacatttacatgaatatggaatcactgaatcctcagggttagcctactattttatcactgaatggtccaaatctagagagaaactcagtcacatgagaggttctatcttgccagaccaccatttaaatttgaatttaaatttatttaaaactcaccaaaaggatttaaggcagctgataaatgtat

SEQ ID NO: 97405 - DNA, 1009 bp, Homo sapiens
aggatcagagttaggtggactactggtttgggaggaaaaaggaaaagtgaaagacctagataaggcctttgaatgttgttctgttaccgggcaaagtgctgcgagtgagaatgcactgctttcaaaaaggaactatggccgggcgcagtggctcgcacctgtaattccagcacttttagaggctgaggcgggtggatcacttgaggccaggagttcaagaccagccttgacaacattgtaaaaccccatctctactaaaaatacaaaaattagccaggtgtggtggcacatgcctgtagtcccagctactcgggaggctgaggcacaagaatcacttgaaccaaggaggtggaagttacggtgagctgagattgtgccactgcactccagcctgggcaacagagcaagactctgtctcaaaaaaaaaaaaggaactaaggtatttaactcttgacacagtctgacttgtaagtcaaaatgcccacaaaacgaatgtggttataatatattccctctaatccctcagccctccaagccctccaatagccatctgaatcatggtccctggtatgaggccagaggagctgacctctaggacagaggcctgtggttctcctcactgcaagagggagcctagggctctgttgaaggaggctggacagtctagacctattcctgaatccactagtggaaaccttgaagaattgtattcttcaatgtccacttctcttatttaatggaaatagtgttagtccttctctcttccatgatgtttaataatgtgctttccttgatggaaggaagatacagtccagtgcaggcccttgtccacacactcaactggacacctatactgctgtcacaagctctttgcaagcagcagtgtttatccacagttttgtatctgtttgcatgtgaaacttccctgggctgtatgtcaaaatgttgaccatggttatgtgtgataactcagccctgtcctacagtttaattactgaaaaaataatct

SEQ ID NO: 97406 - DNA, 1042 bp, Homo sapiens
ccaaagtgctgggattacaggcatacaagttattttaaataatttaatggcataactagtatatgtagtagagaatggagaggtggtaaatgaaaaggctactgaaagattctaactaagcaaagtaagacagcttggtagagagaaagatgaaagactggggaaagaataggacaggacagtgagaaaggaagatgagaaactgggaaaaggttttgaggttgatctgtgtggaaatcatactcttacaattcacttggactacagtgctatgtgttaactttatcaagctttgttcttctgtactggaatatcatcatgtcaaaactcttccttttatcagtctaaggtcattaaatgacttacctgaaagtcatttttcactaagtcaggttttctattgctctttgaaaagtttattcatgggctatttgctcatagcgcttcagctactctaatatctaaccttttaagggttacacatactctgggtggactgaaatattcagagaactccctgtggtgaaaattagttcctgggatcgagcagcaacttcagatctgatcaaattctaaatctggcctgtaggctggaagttccccagcctacctaaaatatgagatgaagtgatactgaattcctggaccctttaagtgttatgaccttttgaagccttcttaacattttatgaacacacatcatttactttggaagtttctggctgtttaaattatgatatatttctgctttaaggtttgactcattttgtccaaattgttaaacatgtgcttgttgttgaagaaagcatttctcctggacttccataaatacctctgtctgtcctgaaaattaaaactgtaaaaaaatactagaataaggaatgccttaatcagtatgcttttctgagaaatttgaaatgcactttatacacatctcccttcaccattcacttgtaatatggaagtttgcatgggtgtacacacataggctgatttaaatcagctcatggtttctctttctcgtggttaaatagggggaaag

SEQ ID NO: 97407 - DNA, 1037 bp, Homo sapiens
gttcttttgttggttggacttttatttttacttttttattgccactaataatgggtgttcagattttgagagtttactccttttctgggaagaaccacttgttctttgaccattgtaggggagccctcattctatccagtttctccaagagcaaaagaaattattttgagaagtaaaaggtaacttctgtaactctgtaagttacctctacaagtctgagcatttttacactagattaagcaaacctctttaacagcctctagtggataaggaagggaatgagccacaagtcttttttttttaatgctttttgttatggaaacattttaaatatatatgaaaagtagacagaactgtgtaacaaactgctgtgtactcctcacccagcttcaagaatggctatttcatgatcaattttgtttcatttgtacccctacccactttccctccttttctatattactttggaaacaagcccaggcatcatatttcatccacaaatatttcagtatatatctctaaaagttagggattctttgtaaaatacaatataaccacagtaacattatcacacctaacaattatcaatatcttaatatcattaaatatctgaacaatatccaaatttccaattgcctcatttttgttttttagtttatttgactcaggatccaagtaacatctacacgttgccttttgtttgtttgtttgtttgacacagagtcttgctctgtcgcccaggctggaatgcagtggcgtaatctcggctcactgtaacctccgccttccgggttcaagcaattctcctgccttagcctcctgagtagctgggattacaggtgcgcaccaccccaccacgcccagctaatttttgtatttttggtagggacagggtttcaccatgttggtcagattggtctcgaactcctgatattgtgatccgcctgcctctgcctcccaaagtgctgggattacaggcgcgagcccctgcgctggcccacatgttgcttttgattgctgtacctcttgagtctcag

SEQ ID NO: 97408 - DNA, 1066 bp, Homo sapiens
tctgaaaatgagttttagataaatgacataaatggagactcaaatgattagcacctacttttttcaaatatcaaagagtaaattatttattcttttttgtttaaaattttaaaaaataacccataactcagcattataaaagtcttcattcttacattgcattgaattatccctctgtaaacaaaaggagccactttaccagctgtgttcccatgtttgccttcttacttatcaatcttgccctccctgcccaacctacccttgtttcctcttttaccaagtagcacgaactggggagaagttctgctcacttaataatcgtaatagtagctaatgttgttgagtgtttagtatgtaccaggcacttcatctcaaagcatctgcctgtctaatttagaaatatcaaatatctcctaagtgcaggatgaagaactgtgcaaagtgaggaacatcctgtcacaggtcttcacttgggaagagccaggtggaaaggagatcagttgtccttctagcccaggacaactggaaattacagcccaccaagtagactgctagagttgctttgaatgacctgtgctcaaaagaggtttttatcatcaagtttgcaatcataaaaaaattctaaactagattctaccttttctaaaatatttgcataatggctaatgaaaatggtaaaaatgagagaagcttgagtattcattaggtcagcctaaattacaccttgatttctgggaactttggtcttgtgaacactaaaataaggtgactcagggtcacaactgctgttttctgtaccttagactttagaagtttacacgtctgcatgtgcataacataaaccaaggcattcctgcttttgcctttgaggcaggaagagctatggtaagatgtgcctagaggtcctaccctctcctcccagcatgggatagaaacatttcttacagtggtaaaaattctcatagactgcacaaaattagccacagctaataaaataaaggtagtccttggtttatgaacatttggtttataaacacacagaaacggtcactgccttccacccagt

SEQ ID NO: 97409 - DNA, 1045 bp, Homo sapiens
ttaaaataaccctgctgaagtggcaagatgacctttgtcatttcccacctagcataccaattcgattccttttcaaagccttattagttaccgttaaaatccacaaaggaaattgtgtgactaagaactgtggaaatgaaaggaaacctcaaaggcctttattgaacctctgcctttccagaccacaccctttccacctctgcatcaggtcacattgcagtttgtctactttctgatatctttattcacttctttccattcatggactggccaagaaaatacaatacgatatttaaactacacagagagatgctgagggcctcctaataatttactatggctgggtgagacctttgggaaatgctaatggagaacatcaccaccacagggtgcgcgttccaaccaaccgcacttccttcttgctctgatgctgccatggactcaacttttcaccactccctgtgtccacaaggtgatcagaacaatgacatttcactccctggaagtcaatccattgctacttgaagaccacaccagcacttgagtcatgactgatagaaattaccatttgctccgatgcctatagctcagtattaagcagacagcaggtagatgaacatgtacgaggggtctgtgctcacaggctttgtaacatcatcattctttctgggctgtctctcttttccagatgcctatgatttggtatttctcctggccagagagtagcactggaaacattgaacacaaagtattctaacccttattgctcaatgtgtttttccagagcagcccaaaaggttatgctgggtttcatgagctgcagaggatgactgactggtgccacctagaaagacaaacagcagaaactgcagagcttggactgagctcagacaaaaatctctgctgcttgtacccagcttgaatattatggccaacacttgaagaatagaaagcatcacttaaaacattttaattatccccacatgtaacatgggccctaaatgttctgaactgaaaacctcactatgtagttgaaggtcaatga

SEQ ID NO: 97410 - DNA, 1041 bp, Homo sapiens
gaggattgcttgagccaggagttcgagaccagcctgggcaacgtaggaagaccccatctctacaaaaaattaaaaattagccaggtttggtggcattcacctgtggttccagctaatcaggaggctgaggcagggggatcacttgagcccagcaggtcaaggtcaaggctgcagtgagccatgatcacaccactgcactccagcctgggtaacagaggaagactgtctcaaaaaaaaaaaagaaagagaaagaaagagagaaggagggagggaaggaaggaaggaagggaggaaggaagggagggaaaaagagagaaagaaagagaaaggaagaaagaaaggaaagaaagagaaaggaaagaaagaaggaaagaagaaaagaaaaagaaaagaaaatcataagacctttttttggacactggatgttttcaaagttttttctctttgtttttcttgtttggcattttcccttaattcagatttatttattaagtatcttccatgtggatcttatattcaagttaaaagatgtggacaaaaaacaataaatctaaaaaatactaggtgatgtatattaggaatttagaagggatacatgctgtggagaaagaagtctagcggggctaggaggagcagagcacagtggtggaggatgggtgtaggtgagctggtaagggcagctgtcatggagaaaatggtgagataattcaccatgtagccacatggggaaagcctgaggacgcagaagcggaacatgcctggagtattcaaggagtaacatggagccagtaatttggaggtgagatcctggagggccatgttggtcatggtaggactctggctttccccccagagtctgggagtgaggggaggattttgatccaaaaagagacaatgatctgactttaaatttaacagctccctttggccactgtattgagaatagactgtgggagcacaagagtggaagagaaggaccagttaggaggctattgaaatactccagtgagacatgctggtgccatggacaagggttagcag

SEQ ID NO: 97411 - DNA, 1042 bp, Homo sapiens
caagattattcttcctgaggccaatgagggacagtttaattacgcagtggcctgctgctttcagacctgtatgtggaaaaagaaaacgtctcaaatccaagttaagagaaggaagttcctacattattggactgctgtgcagctctaggacaggttagccagagaggctgctgaactctttctgggtgtttttgggaaacatactagacggcatctttgactgtgttattgtgttaactgagacagggaggataaggaggagaggagagcaagatcaggaacttcctgtttcatgtcttcattctagcccaaagtgttgtaaaatgtgtctgtatgataaacaacgaaggggtgaggggctcgtggactcaacttgtttatatcctagtaatgccaaataactagaacagtgatgaaagagaaaaatcatggttgattctgtcctccaattgccacatttttttcatattttaccaccaagttgtacaagaaaatggagacaaagctgacagagaataagagaagattctaagctggacatatcagccctagtggtttcagaaaccccgtgctagctctgacagagccagcccacattgttatcaggtttggagggatggagggaagattggatttatcactggttggagccctttgcacaaatgcctgtaggagacacgcacttgggaactgcagtaggaaggcctcttgtacctggtactgcccttgagccccaggaagaggcttacaacttagcagtggctggacatccctcgaaggagctcttctttcagttttgttttgctttgttagttggctatacagccttgctgtttcagaagttttatattctgcaaatctgctgctcacagtagaaagggactttttatctttttattttgttagaatactttccagatgggcctgatgtctttttttttttttttttttttttttttgagatggagttttgctcttgtcgcctaggttgaagtgcagtggcaccgtctcggctcactgcaacccctgccttctgagttca

SEQ ID NO: 97412 - DNA, 1046 bp, Homo sapiens
gcatgagccactgcacctggcccaaaatatttttaagagagaaaatttaagaggctacaagtggtatgggttagagtttaaacaacagcaaaagaagcatgctcagagtagagccccattcctccacttgaatgacagacatgaagtgggacggtgtctgcatgcagtatctacaaatgagcctctctgagcagagtccattgtagaaagacacattgtctaaaccagggttctgaaaccttttttggttatgacctacagtaagaaatacatttttcattgagacccagtgtatacaggatagataaacagaaacaaaaacaaaagttttataaaacaatttccatgtttaccaaatgcaacacatttccttttctattaagaagaaaaagccggttgcaacccactaaagtgatttgatggccaaagaataggtagcaatttgcattttgaaaaatacttatttaaatagaaatttgtcagacatgtagaaaccagtcacattgtagctctggcagatttctgcaggagatccagtgacacatttcatggtcctagaaatggttttccttactctttgaatctttcacggttgatgaggtggtgttggtgatgaaggccaaggaagagagtggagaagatggtgatggaggagttaggaggccaagtcttaattctgctcaggcagaaaacagttgagtgtctgtgatgcattgtccagacacgaatgagacacagaccctggtctatggcggcttatagtcgaggtgtttgcttcgtagtaaaacaggagcaaaaaaccagaatgatgcaggtaacctgaggccccttcattctgagttctctgaaaggagaaaccatattatagggatgtatgcagcgttataccctcggtctgcctctcctctgtctcctctgtaataagtattcaataaatctgtattgaaagacagtgttacctgagaatacttgtacttgcaactagactggtaatcaatttctatagtggtattgttaatataatattattaatgttaataaaacat

SEQ ID NO: 97413 - DNA, 1781 bp, Homo sapiens
tataataaagcatcatagacattctctccagaataaaaaactcacttatggcatggctgcttaatattccacaatttaactgttcatattgtgtcaagttttcttctactacaaccattcttcctggaacatctgtgtgtgtgtgtgtgtgtgtgtgtgtgtgtgtgtgtgtgtgtgtatttgaacctgccaacttacagaagcttttttatttctgtctgtcagagtctctaaaggagtattactttccaaaagctgtagtaattcacagtctcactgacactatttgaaaatatctgtttccccatatctttgccagcataattcattttagaagtataaactttatgatctcttttttcctgttttgtttcaagttttctttagggagcacttgtcactgtctctacattaaaaaaattcacttatttgatttattcttacctgtcttttgcttaattttgtaatttcttaatcataatacatatgatttgtcttctagaactgaaaaagaaaagttcatggctggacttacagagcttaattgttctgtattgaaataaaacaaaacacttgatttctgtttatagtaaagtaaatgtagacctttcaattccaattttcctcttctaaaagtgcattatttaagaaattgtctcaggaaatataaatgttttaatgggaaaaacagaaacttacaaaatacaaagatgggaaattttaaaggagctttaagactgcaaagctgagtttctctcttgaatccaaaaatctgaagacaaaggttctttgagagcattagttataaattgtgctgaattacataaagaggaaaaagtgaatcatagcagataggaatttaaacctggactgttgttgaaagtccttgcgctcattgctcctgcttatttttctgggaggtgagtttagattctgcttctcatgtccttgccgttgctgagttcattataaaattatttatataaagctccagcagtacattggttaatcagaaacagctgcacaactggattcatttataggaacggaataactaaatcaatcagcaaaatttcttgtatttgggtaggttgggccaacattgtgcagcccagaataataatgctttgtaactaacctgacacagatgtcaaaaagattgcatttgggcaacagaagttggaactgaaaattaagaaaccctgtgaatgcttgatgtctgccataataaaagtgttactctttttttttttttttaatattagtgttttcaaagttaggaagattcacaaaaggaagtcctgttttaaaaagaatgtatcagagttttaccctctatgggctgggtcccttgaatgagggtgaattgtccagatcagtgtcccctgaaagataagtgcgtacattctgccaaacgtccaggatagaaacaagccaagggccccatgctgggaagaacgccacagaccaggcaggcaaatggatgtccctgactagcgggagctgcgctgaatcagggagaagacagaagttcccaagcaagactgaggctgaagttccgacacagcatggtcaaaggagttcctcgagatgatgtgtccttatgcagaacccagaggtccatgggggctgaatgagtttatggaatgaagccctgttgtatagctctaagcaggcagtgttgcggagacttcagtacaatgcgacaggaggtctgatgagaaaaggaaaatctctagaccctgagtccccatatgggacccaatcctaagggaccctga

SEQ ID NO: 97414 - DNA, 1908 bp, Homo sapiens
cctatcaggaaagatggtagagcactctgagcaggtcggagaaagcagcatgggacaaggaactcaccctggagtgggggtgtgggagagggccaggcaggaacttcaaggacaggcaaagcaatctgcacagaatcctatcaatactgcagggccacagaagtgatacgagtaagagaaagggaccaattgaggaacagaaagaaagaaaatctaaaaaactgacgataccaagcattggtgaaaatgtggagcaactggaactctcattcatatgttgctggataagaatgtgaaattgtacagccactgatgttggctgtatgacccggcaattccaaacctaagtatctgccccaaagcaacaaacacacatgcccacacacaaatgtgtatgcatatatttataccaacattttcttttttttttttttatagtttaatgtattttaatagcaaacttacaggaacagcacagaagacagacaacattaaaaacatgtacttgcatgtaggacaactcagttagaaaagtatagtgaatggatggaatctactgtatgataaaaatgctacaaacaccatttagttgccatcaataagaaatttacttgttttaaaaaaatccaaatgctggcattgtccagaaaaatttaacaggtttatttataattattataaagttgaaccgctgaaacttgttcactgaaacattttaacttgcattaatgctttacgtctccgcatttatattaaaaattcacacacaaatgaaaatggaaaaactgccaatacctgatttctgtcccctatttttccactcgcaatcatatacttaggtaccttttgaccccatggaaaaaaaatatctaacgttcagaactaccaataacaggaagaagagaaattttttttttttttttgagaatgaaatgtttcccatcatagtggattcttaagcacgttctccacgtatgcggcgtgctagctggatgtcttttggcataattgttacacgtttggcatggatagcacacaggttggtgtcttcaaaaaggccaaccagataggcctcacttgcctcctgcaaagcaccgatagctgcgctctggaagcgcagatctgttttaaagtcctgagcaatttctcgcaccagacgctggaagggaagtttgcgaatcagaagttcagtggacttctgataacgtctaatttcacggagcgccacagtaccaggcctgtaacgatgaggtttcttcacccctccagtagagggcgcactcttgcgagcggcttttgtagccagttgcttcctgggtgctttaccaccggtcgatttgcgggcagtctgctttgtacgagccatggtacagagacctccttacttaccccccttctccttcggctggagctcggcgagcgagaggcggcgctggcgttggagagcgacggcggcgcggcggcggctgcgaacctataccaacattttctactagtaaaaaaaaaaatcagaagcaacccaaatggctaccacaagtaaaatgacccatgtggaaatgtattgtctgaaactctacatcacgggctcttgtccctgtggcgtctgtggatgcaaaatattaagtttggtgcatttttctggggaacaaggagctttttgagtctcaaagagtatggtggtcagttttatgtgtcaatttgatgaggctctattgcctaattattcaactaaacattagtctcagagtggctatggagctcttttgtagatgaggttaatacctatagttagttgactttaagtaagtaaaggagattactcttgatggtgtgagtgagactcatctaaccagctgaaggctctaagagcaaaaactgacgtttcctgatagaggaattctgcttcaa

SEQ ID NO: 97415 - DNA, 1050 bp, Homo sapiens
cctctatcaggaaacgtcagtttttgctcttagagccttcagctggttagatgagtctcactcacaccatcaagagtaatctcctttacttacttaaagtcaactaactataggtattaacctcatctacaaaagagctccatagccactctgagactaatgtttagttgaataattaggcaatagagcctcatcaaattgacacataaaactgaccaccatactctttgagactcaaaaagctccttgttccccagaaaaatgcaccaaacttaatattttgcatccacagacgccacagggacaagagcccgtgatgtagagtttcagacaatacatttccacatgggtcattttacttgtggtagccatttgggttgcttctgatttttttttttactagtagaaaatgttggtataggttcgcagccgccgccgcgccgccgtcgctctccaacgccagcgccgcctctcgctcgccgagctccagccgaaggagaaggggggtaagtaaggaggtctctgtaccatggctcgtacaaagcagactgcccgcaaatcgaccggtggtaaagcacccaggaagcaactggctacaaaagccgctcgcaagagtgcgccctctactggaggggtgaagaaacctcatcgttacaggcctggtactgtggcgctccgtgaaattagacgttatcagaagtccactgaacttctgattcgcaaacttcccttccagcgtctggtgcgagaaattgctcaggactttaaaacagatctgcgcttccagagcgcagctatcggtgctttgcaggaggcaagtgaggcctatctggttggcctttttgaagacaccaacctgtgtgctatccatgccaaacgtgtaacaattatgccaaaagacatccagctagcacgccgcatacgtggagaacgtgcttaagaatccactatgatgggaaacatttcattctcaaaaaaaaaaaaaaaatttctcttcttcctgttattggtagttctgaacgttagatattttttttccatggggtcaaa

SEQ ID NO: 97416 - DNA, 1032 bp, Homo sapiens
gtaatgtgaattcagtattttggtgaatctttttctaacacaagtgcatgtacgtgtaatgtttttgtgacatgcaataaccatttctatactgtatggtgacttcagttttccagtcgttgaggtccttcctgtcctagtttttaatggctatatgatgttatttgctaccttttgttatttgacatgtgtctgtagatctctaatttctcttggttgattattaatataaatccgtctttttcctggaaagctctaaggcaccaaggccaggggttgtgagttgtgtagtgtgggttgcccagtctgcaagagggaagagcttgggtccgtcctgtggttccccgctaattctaggagtgtcctgcacatgtggtcacttgattttcttttctccatgcactattgatttaacccagaatcattgtttcctatgttgtcctcatctaacttatgaaagagcatcctcctttgttatgtttttattttccttctgcttcagtattgtgtctttcacctttagaataggattctaagaaaaagagaggaaaatttagcaatgatgtgtcatagaaaacttagtgttgtttacataattcttgacatgtggtaactgctgcttgtgaactgcaccctcccaaacacacatatacacacacagcctgggcaacatagtgagacaccatcactacacaaaatttttcaaaatattagccaggcatggtggcatgcacctgaatttgattgagaattacctgtgaagtccatttctcctaagtttcctaatggctgtatgatgctatttgctaccttttgttattggacatctttttcctgagcagctgaaatcacctttgcaaaaactatcatagcaagggaaatctgacattcccagctactcaggaggctgaggattgctttagccacgagtttgagcctgcagtgagctgtgattgcaccactgcactccagcctgggtgacagagcaagaccctgtcataaaaaaatgaaaaaaaacaaaacacatacacg

SEQ ID NO: 97417 - DNA, 1063 bp, Homo sapiens
cctcctcctcttgcccttggacatcagaactccaggctctctggcttttggactccaggacttagactgatgttccctctgggttcttgggccttcagccttggactgagaattataccatgggcttttttggttctgaagccttcagatttggactgagccatgctactggaatcccagcttgcagacaacctgttgtgggacttctcagcctcatagatatatttatgatttctcatatatattatttcttttcatcttgtaaattgtaatccataatatagtttacccaacaactagaaactgtgatacacacacatatcttattggttgtgtgtttctggagaaccctgacaaatacagttgggttatggtgatttggaggccatcaactaagcctggcccgtagctgcacagtttctagttcttgggcaaactatactgtggattaaagtttacaatgtgaaaagaaatcaatttctcttctacttacttcttcagaattttagaaatggtgatgatgcgtaatacatttctggtttcatttataggacttgaacctcaaacatgattggaataagggctggtggtgggtggaaggcacaaattttaattgggaagacagaaagatggttttttgctaagactgaaattcttgacaacactgagcagagttacaggatggcctagatggagccaggggtggctgggagagccagtgaacagatgaactgacccagcctggagttgctttggaatctcaaagtctggattcaaatcccagttcttctagtttgagcaaagaacttaacctccctgaaattcaattttctcatttggaaaatagggacattacaggatttccctgaaatttaattttctcatttgtaaaatagggacattctaggattttatgaaggggatgatgatgaagtaaacccatacaggcaagacaatttccgtagtgcctaggccctattgtttggacttgtttcctttcagacccttatcaagcccaggtgccatatgagactggtaaaccttctctgacttctcaggtcta

SEQ ID NO: 97418 - DNA, 1071 bp, Homo sapiens
cagatagatataaacatgagcagcaccattttaagagggccctggatattcctacttttggaggtccaattccgctttatatcaaatatacttaaaatgcaattataccccacattaaataaacattttatgtaactttaaagaaatgggttttttttttggctatttgacatattttgtggacattgaattaaaaacattaattttgatttttttgttgtattctcctgagatcatacagcaattaaacgatgaagcgtgagctagaattctggtctcctggcttataatcaaattgttccaagagaaaagatgaaaattattgtttttccaccaagaaagaactgctggagtctagtccactttaaaacctaattcaagctggagtgccttttgctaaaattaacactccagaatgctcaaaactctgaaaataatattgaatgtttcctttctttattcttttcttagattgtggtttgaatgttcataagcagtgttccaagatggtcccaaatgactgtaagccagacttgaagcatgtcaaaaaggtgtacagctgtgaccttacgacgctcgtgaaagcacataccactaagcggccaatggtggtagacatgtgcatcagggagattgagtctagaggtgagccatttgcagtgcgggttgcagtggtctccgttcactaccagtaccaatcctgatgccttttgggtacctcattgcacaatacggttgtcttctgtaatttggaggggaatggtttcatatgtcaaatgatctcaaagactgaaatgaattaatttaacaattaaatagcttgatttcaaggtacatttaactaagtgtagccaatgtgcttgtataaaaatatatttatagatgatgcttccagtctgcaaaagttgacaggtaaagacaaattcatttttcagtttttaaatttttctttggttcaaaaagcaaaagtataaatgctctactaaaactatctataaagccaaaaacagagctgcatcctaattattctttcccacttgagaaaaacaggcctatattttatcttagtct

SEQ ID NO: 97419 - DNA, 1049 bp, Homo sapiens
agtcttctcatccgtgtgtttcccctttcctgactttgcccctctttttttttttcaggtgcatacattcagagggccacactggtgtgaatactgtgccaactttatgtggggtctcattgctcagggagtgaaatgtgcaggtaagagctcttgtcttgtctctggattgagtcagttgtgaagttataagaggtgaggtagaaggagacttgttgttatgcatatccagtaggctggatcctggtttggtcttatgcacatgcagtaggccagattctcaggcagccactttggaaatttgatattttatctgctcttaaccttctggcacttgatggacagcacactagggatctggcattagtccactgaaaagagagaagtcagcttgttcaaaaagtctgataaaaggagataaaagtaaggcagttatatttaatacttgcctttgatgttgcagtaactaaatttataaaaatgatttttttaaagcaatgtacagggacctatgattgttgccttggaaactgaattttaaagataacttgttaagctggattgtccttactaaatttttgtgaaatcaaattgaagctttaaaaatctgtgaattcatcttcaaagatggttaccaaattctgaaaaaccacttagtcactaatattttctgtgtgatgttttgaaatcaaatacatcaaatactttttgtaaaatatgaccatgaatatttagatacaaatttagaaaccaaaagatttacacatacagaaatagccaacacaaggatgtatttgagatactttgtgaaataaagtacttatgtatatcacgtgaaatccatttgtatagagcaactatactgaatactggccatttatccaaactactttaaattctttttttttttttctgagacagagtctcactctgtctcccaggctggagtgcagtagcgcgatctcggctcactgcaagctccgcctcccaggttcaggccattctcctgcctcagcctcccgagtagctgggactacaggtgcccgcca

SEQ ID NO: 97420 - DNA, 1050 bp, Homo sapiens
gatcatagccagtgttatgtattctcttttcacggcataataatataaatcaaagtactttaaactgaagtggtaaaattagggtatgatttttttattttttatttttttttgagacagagtcttgctctgtagcccaggctggagtgcagtggcacgatctcggctcactgcaagctccgcctcctgggttcatgccattctcctgcctcagcctcccgagtagctgggactacaggtgcccgccaccacacctggctattcttttgtatttttagtagagatggggtttcaccgttgttagccaagatagtctcgatctcttgacctcgtgagccaccgcgcccggccaaattagggtttgatttctaaattccatatcatatggaccaaaaagtttaagaccatcttggtgagacaaacattggtcacctaaaagagtgcattctagttaccctaaacataaaaatgagggaagaaaaaactttcctgaccagctgcctgcctacctacattcctttcgttttgattttgttcatctgttctctcccctcatcacccaacactgtgctggagaactgactcatcacagtcccaaatgagaagctgcagctgaaatgtcattgccaccttcccaagcaaaattttatttcccgtaatgttcatatcatctccaacgtggcttacatttgcagcaagctttgcaggcatgctccttggctatttgcattcatgcttatttctaaagggaatgttttgacttgaaaggaacaatgaagattaatggtgaatttttctttatcttcctatatcatggatttctttttcagtttctgttactggctttcaaactggagatatgaatgctgtaaacatgatgagaagcagggtgtttgtttccttttataagccaggattttagtctgaataatggcaggcccaactgagaatgacttcagtttttatctaagtcattgcccaggagacacatgacacttggcctgtgccatatgggcccctcaatagcccaccctttcccaccctgtcctt

SEQ ID NO: 97421 - DNA, 1073 bp, Homo sapiens
tctgtcactcagctatggaatgtaagtggtttttattgcacaaccatttacttatttattttcctattgtacctacataatataaccttaggggactggtatttcaaagtgttgatttttactaatatttgaatacgaactcattcatctcagtaatgaagcttactttctaagtagaagtgttttaggtgatggcatttaacatttttgaaccttgagcatgattcagtttggaggcaaaactatcaggggaaaagaaatcaaaaagaaattgtcttctgaaacttaaaagaagcctaaacattaaaattatatattttataatactctaaatactcatattttgaaatggaaaatgtctttgaattaatggttatatttattgtttcatcattattatacaatctgtaccttgtagcatataataatcaaaggattgctttgagaactttgatatttccacatccagattcttgggtttcagattgatggttctgtgtaaggggccactatttcagctcagcacagaacatcaacaccagaaattgtgtttgtgttctagcattaatatggttgtttatgattctaagcaagttctgtgcaacctttgcattcattttgtaattttagatatacttctccctcaaaaacatagcggtgattgggaatgtatggatcataaaggaaaccataaaagaatttaagctctgttaataaggccaatattgaattgtggtaaatgtatttttatgagaataatttattttttctgcacatatttaaaatattgttttgtataccaattaacataaaccatttttataatattcatatgggagcagaactaaattactgtattgccctggtgactgtcctaatagtcatattgttatagtatgatcatattttaccagcttttccctgtagttattgctcacagttaaagttacatcatttatttgtggtatggtcaatgtatgtctagtaggcttttatggtatttctctcaattttgaacagttttcttactcttaaaattaggtcaccaattttctgtcatttgtcattctctt

SEQ ID NO: 97422 - DNA, 1080 bp, Homo sapiens
tttctcacctgggtggatatagtgtagtgtttatgagcccagcccccccacctactagctgtgcaactttgggaagtaaactgtaggcctcagccctctcaactataaaattaagataatttatgcctcatagggtttatctgtggattcagtgggattctatgtataaagtgcttagttgggtgtctggaatatatgtactcaataactaataagtgataaccgtaattaatagattctatatatgagtagatggctatctactagatattgtaagcatgagtgatacacatttgtctagaatgtcagactattgattatattggttctgaattttagagttatcaatttttgttatttacaagttcttcaccaaaattaatgcagaagtgcagttactgccatgttgaaggcataatagtgaccaaacccttagccatttgagagtagccaacgctgttttcatcctaagctgttgttttctatctccttactgccctaggtagctgctcagattgcagttaatccagaatttcttgactaaatagaacattactcaggaaatacagtacaatctgcagagtctacagtagaccttacctctgaatgacaaaatgtttacttttacctagctataaattttctgggtaactatcatgaatatttttatgcttgaattttagtaactatagctgtagaaccaggaatgatctataaaataggatgttgatcaaaaatactcaagaaaaagatgctactttggttacatgtgtgattgttttaacttagtaacttgatatcaaatattgttgaagaaaaaattttactgttcaacttgtgtttggagctgtttttttctggttcctactgagaattggttaaacttcactttaggctgtacatgtctaaagagtcggttggccgttatatttttagtcatcatgtgacaaaataggtccaatctgaaaagcaatttaggctaggcaaggagactttttccattgcatttcttcttgcagtgggagcattttatgtctcatattaattatctaagtatataaactcatgaaattgaaactc

SEQ ID NO: 97423 - DNA, 1036 bp, Homo sapiens
tgaaaaacttttatatttaactttggtgtagaaatttcacctgtctaattttttaggctttataatgaaaatatacttgggagaaatgtgtctttaacattagaggaaaatggagaacaagaaagtgtaattatatggatagttcacttaagtgtaaatcaaaatttgattgttactaaaggatggataaattatgctttagaagggccaacatggatagtacgttggattctagattaaattgttattaaagtctaatttgaactacagaaacagacatcgtctggctattattttaaaaaatattttatttcctttccatactttatttccacattaagatgttcctaactcctattcatttggaatataacctataccagaacaattttgttatataacaagtttatagtcccatttaacgctttacttaaacagcgtttattttagtattttagttcatccctgttctgttgtacttttaacaatgaaattaaatatatcctttgtgacttgtttagtttttaattagtctcactcggggttaccttcaggagaccattacactggcagctcttgttgccttgttgccttttgacatctgctttcattaaagtcagtgcattttcttgcctgtgtcttcctgcaaggacactgatgttaatcatgccaaattggatccatttctgaggtctgctgcaggaagcaaaatactgaaattatcataaaagtaaaccattattcttcagttgttagagcacatcatcagaacataaaattgaaaacagaatttctatagtccaatagcttatgacttttgtgccgtatgtatttcaaacatttcttgcacagacctaaccagcagacagaataatgactctttaaaaacgaaagaataagtccttggcctgtggccagaagtagcgaaagtgtgtttctgtgccatcctgccctgcatggctcaggtttctggagtcagctctactttaagtgattgctggcatcatattctggttagccctaaatggagctttcc

SEQ ID NO: 97424 - DNA, 1041 bp, Homo sapiens
gtcaggagatcgagaccatcctggttaacatggtgaaaccccgtctctactaaaaaaatacaaaaaaattaggcaggcatggtggcgggtgcctgtagctcccagctactcgggaggctgaggcaggagaatggcgtgaacctgggaggcggagcttgcagtgagctgagattgcaccactgcaccccagcctgggcgacagagcgagactacgtctaaaaaaaaaaaaaaaaaaaaagaagttagactttctggattgattctctatcttaattattttctctccttttttttatctttttgtctttttgttctttaaaattttctcaacttttttaaaaaaactttcatttatgctatattcctttttctacttatttttctatatattctatattccttttttttacaggattctaatgttttttggttaaattctattcaagaataggaacaggaaacatcttattttgggttttttgagcatattttcattcccatgcatgattttgtttcctctaacttgctttgattctgtttgtttatcatagtctttgtctttcatgaggggagttttcctcagatgtcaggtggcccttggctgactgctcatattgaagcatatgggaccctaaaaggctggctagtagttctgagagcttggaggaagcctgacaattataggatgatggtctctactcttaagtctttttttgttgagttgatcagatttccaagagtagaatctttcagtctcctatcaggaaaggtacaagccttccgatagcctcatggtgaagagaaatggaggtatcagtttctttagtatttaaattttgggtatttaaaactttcacttagttttcaagatgatacctctgcttgtattccctcagttcactatctccctgttttatcctgcctagaaaacagaacttaagtcttctgccatggtggtgaagggataacaatagggacaggattagggagggcaggaggaatatctaactgctttttaaacggacttcgagttaatccttc

SEQ ID NO: 97425 - DNA, 1048 bp, Homo sapiens
tagatgtggatttagagtcagtataggtgttttgggtgttcttaattaattggtccaaagtcactttcctcttttatcagaaatgtttcaatgtcttgattttaatcacattcatttctctcctctgctcactgaaactgctgatgaaccttcaactctctgtgaacagttttttgtgagttgagctgaggagaaaatggaaactttccatgtataattaatacttatagtagaatctgaagggattgagatttcagaaacctactttgctatgaatagcataatttttcggatggcccattcagtttttagattaagggtaataattacttctgttgtcttgcatgaagagatatgtttggatttacagagggaagggcagttattaacttgtctcaatggattatctttttggttctgtacccctgtttttctgaacttgcttatttatcttttttaacttaataatttttaagtgcaattacagtattgttaactctatgcacattgttgtacaacagctctccagaactttttcctcttgtgtgactgaaaatctgtacccattgaacaactccccatttcccttcctcctaccccatagcagccaccattctactttttgtttgcatgattttgactgctctagatatccgtataagtggatcctttttatgattggcttattttgcttaacataatgtcctcacggttcatccgtgttgtagcatatgaaaggatttccttcattttaaaagctgaataatactccattgtgtgtgtgtgtgtgtgtgtgtgtgtatatatatatatatacacacacacacatatatatactcctatatataaccacatatgtatacacagtagtcctctcttatctgcagtgtatacattcaagaccccagtggatacctgaaactgtggatagtactaaaccctttgtgtgtgtgtgtgtgtgtgtgcgcgcgtgtgtgtgtgtatatactatgtttttccagctgataatgagctactaagtgactaacaggtgggtagcttatacaaa

SEQ ID NO: 97426 - DNA, 1038 bp, Homo sapiens
tagctaattggtagtttaagatcatgttgagccagattctgtgagtttagcttcagtgcctatgaggaggttgatgatcagtgatagaatggacaacgagatagtcaaaaaggactcatctgtgttctgtaaatgtagttgttatttaatttattgtggctttgagtttagaatactgataaaattctattaagcaagggatttctgtgagagggtaatacaatctttacagttctgaagattttgtgtgaagaaactattgctgctatcttagaaaatgataaaatgcactgaagtaaaaaatgtaattttgctaatgattgaaaacacccaacaattcctaattgaatctcaaaacattaggttgacttataaagtgagcttggccaaagagttcctgagtaaagccagagaatcatagtagatactgataaaggggcttttgcagttttaaaatatgaaaattggttgaaagcatttttcatgttaaagaagaaggatcaaaaggaactggggaaggattatgctgctagtaggcgttgacgtgtaatgtactgtgtgttcttttgatctgatagctcatgataggttcagttggttaccatggtttcattccatttcctgcaaaccttcttgttgtgctatttggaataagtgaaaaataatgttctgtagaacatttttcaaaactgtttttctcctcttagtttagattatgaatcattttatgggaaaattttaagatataagagtaagtgataacacatgatgacagtaacatttagttctgcagtattagaaaattaatattgatgaaggggatagcacaatttatttaaaatataatatattatcagtgctaaaaagctttttaaaaacattgatataataattccagtttatgtgaggtacccttgctcaggtgttctttaataaaacaaaccatagaaagtaattgatgtgacacagtaggaaatggctagtttaacataaggcatcccttacttgaaaaaattgatgtgttcctgaaaatgtgtt

SEQ ID NO: 97427 - DNA, 1078 bp, Homo sapiens
ttttttccagcagtagttcccagagcctatgagtattgttaataacaaactcatttgatcatgagacccccttttcatggactttctcagtggaacacactttgagaaatgttccattcaacaattgatccctcatttcctcttgctctggacctcatgctcaccaagcagccttctgattaatgtcttcccgtgttgtctgtctacagagtgagaaaacttaaaatatataggctgagtgttcagagcctttgagttattatttctcattttcaattaacaaattaagattaaatgctgggactaccaggaggaaaagacggaagaaaatctacaaggtttcttctgtttggtaaattcagataaacatgcactccccagtcctcattttttccccccttttaaaaagacacccgtttttgatcaatgaacctaaaatgactgcttgctaaagtgttaacttgatagagaaaaaaatgttaagggttaattgcctcaccgattctttttcttcctgttttctcatttttttcctggaccaaaaaagactgccttctattcaaacagtgttatgaaacatctactgaaggcaaccaagcactgtttctatgtattataaaattgcatcttttttttcttactctgtttgcaagcatggcttttgcatgttctcatatcttacttttttaaaactgtttcttcagttatatagcatagcaattcacctgtttcaagtgtacagttcagtggtttttggtacattcacaaaattatgacataatcaattttagaacatttaatgcccctgaaaagaacctctacatctatttgccctcactttctgtttctcagctctcccagccctaggcaaccactaatctacttttgtctctattgatgtaaacaacctagacatttcatataaatgacattatatatgttcgtgactgacatttttcccttagcataatgttttcaaggtttatccatgttgtggcatgtataagtactttgttcctttttactaatgaataatattagaaaaatattccagtagttgatggacatttgagttgtt

SEQ ID NO: 97428 - DNA, 1061 bp, Homo sapiens
ctggcttaccaagtaaaagggtagaatatgatgaaaaacaagtattttgcgaagaagaaatggtgccggaatgtagaacagcatggagcatttcgtgtatggcagtctgctgagggactgggagtatgggaaattttagcacttagtgtgccaggagagcctagaatttcatgcttaagaatttgggctttatctgtaggaaatgggagtcattgaaggcttttagtagaagacaatagggttacatttatgatttagaaagatcattgctggaggaattagaatgctgagtggaaagggtggtaggaactatgttttaccagaattatttggataattaatttagtaagcagtttttctttgactatggagaactgatatttaaaagggcttctgtatccttacagattttaaagggttcactttgaagagaacttgttaactccaaatttggcaactccagagacatttctgttaatctgactcattttagcttctctaaattgggagaagaacaaagtgacatgtgcaagagtcttgataatccccaaaccctgtatctggatatttcagggcatatttggacatattccagagaatgccttatacctacaatacttggcactttcctgttgattttatgctgacaataacgtaagaactatttggaaaaattttagtaattgagaacaaatgataaacactgaaaaaacatgatgtttgggaaaattatattttcttttaaaaatatgtcacatttcataaattcagaaacataaaacttttatcaatctgaaaaataaaatttattatacagaatagtatgtatagtatcatactacttatataaaatttcgtacctatgggtacttaaatagaaaggtgtctaaaagaatgatcaccaaaatgtttggtgtttatctcttagtgactaacttaaacatgattgttacttctttgtattttttgagttacctgattttttttttacagtgcacatgtatcattttacaaacagaaaaaaaaaaaaaaaaccaaaagagctatttttattttgagaa

SEQ ID NO: 97429 - DNA, 1566 bp, Homo sapiens
tccgttgtctttgttcatccctttatttgttcattcatatatacattcatctatttggaaaagacttaaaagcagagacttctgaagacagaggtcaaatatatgaaatttcttttggtagtcacaaatagaggatagaaagttgatgttaatgtttaggactaacatgtctaattccttctccaatcacttatacctgtgtgagcgagcagggcctgctctgattcctgtccacaagatttgatattaatctttctattaaatagaatgaatacaattcagtattatttcatactgaatgctgaaataattgaatacttggagaatagagcttgtcacaggagttcatggaaatttgctttttatggtaaattataaagtgtaaattccacttcaattacttaattatactgtttttttcaggtttaaattgtggtatacaggaaaaaaattctggtatggcaattcaaatacctattcaatttaccattaattgaattagaagactgatttggggcaaatcacagaatttcttgaagttggtttcttcatctttctactcctaacatattataattctagaattcttcaccaccttatttccaaatagtctggtcatctgattatctatggtaaacagccttgatgtaaatggtccagaataaggaaggaagaaggtgaggtaaaatgagaaacagaagcctctctttctttccttttggttgccatttcccctgcatttctccaggatcacttggaagttataaaactttaatttgaactcagtttttcctaactacaaaattcaagtactttcaccacattaccacattgcctgtcatcttatatctgtcacacagttttcaccagctgataccagcaaatacttgaaggctaaggatttagtttggagaaaagtagcacccagaccttcatatctctttctcattcctgccttcttgcactctcccattctactcatggctttacatttataatcacttcccatccactttggcccagtaaatcttgatggaaatgtttcaaattaatatctctggggtaacttacagtctttcttttgttactgaaaattgccataaaatcattacttggaaaagaaaaaatagtgagtaaaaaggggctgtaatggtcatagatagaggaattttactcacaatatacattgagtaatttatgtgcccaaatatgattgacattttccttgttttaaacttgatgtatggctaggaagtgttaagcaaagtctgaaatagaagttgcaccgatatatgtattattcttatctgatactcccatttcaactggtgattctcccagttcacatcaatttgtttttaacatacacgtaatccattaaggggtagccagtttgtctattttatacccatcagtgttatttatgcatttactgtgtcaactaggggctctaaaattaggaataagtccttgaacttgattcctcataggcacctcaatctcagtatatctcaaactgaactcaacacttttctcccaaatgtgctgtgatatctatatttcctt

SEQ ID NO: 97430 - DNA, 1048 bp, Homo sapiens
aagtacctactagggaaaagcttttttgctgttcctatgaacagtcggagttggcatcttgtcattcaggactcactttaaatgtcatctcagagagagctttgctaaccacccagcttaataagtacctcagcttaataagtacctcactagtcttcccttttgttacccactcctattttcattatagtacttactcttactttctattttctttttaaagcttctttattgtctgtctgtcactattagaatgtaagttccaaaagaattttggtcttatacagtaatgtgtccctgcaggtagaacaatgcctgtcacatatttgctgttcagtgagtgtattttgaatgctgtctatcttcctgtgaaaattcctgggcatttatcttgctgggacttttcttagctatagccaacacacatgccctgataagctgtggtgagggaagagatgatgggacaacagaagggtaagagtatatggaaatgctaactgaatggagagtctggagcaagaaggagaggaatagcaggggaggatgggggagaaagctgcaattgagtgtgtcacaattgtggctatatgttttggggtgttgtattttactcttgaataaagtgaaatttttttcagctcgttaaattctagaaactaaagatagtttagtccaactacatacatagcattttataaataagaaataggtctggagagatgaagtgaccagtccaaatggcacaggtaacctgctggtagaactgggactccatactctgttatttgaattctttttttaatatatgctttactttgtcacatgcacaaaatgttgagttatgttctgcacatttgcatttttacaaatatgcctgtttttttgctttcccaataggtggaaaacagaccaaagtattatggaagagagtaagtatggattattagaaaacgttttatagattggcatatgtaagacagacagggtaaatggatgcttttaaatgaaagcaagatgaagtattcaagtttggtggagttgcatttat

SEQ ID NO: 97431 - DNA, 1047 bp, Homo sapiens
ggtttataagatttaaaatatttaagataacagagaacacactttctaagagattaaaaggtaaagtccttttcatgtagtccaggtatcttcaaactggaatacttaatcatacttaatcataatggattaagctggttttcagttgttggacatttaggttgagtacagtattttagtctttaaaagtaatattgtgatattcttctgtattaatatttttctaacatccttaattaattgtttacaatgaatttctaaaaatagaactgctgggtctaaaggtatgcagaaggaactggcatgacctgttacactctcatgtttttttctattaatcagcaggaaatttattatgttcctttttagacagtctccgcctccaagtttgagccccaggaggctttcccagtcccagagtcatcccatctgcctccaaatgccagaaaaagaaccaactacactattgctcttccttcccatcatcattttttctcagcatttaagaccagccctgcactgtttggcaatagttgcttgaactgccactaggatcctgtttctggtcagaccatggcccaggtcacagcagtcaccgcagttgaaggtcaagattgcagttttttaaaagttcattttcttttactgaaggatttagtgtaccagggaggctgaggtcagagacacttccagcatccaccttaggctgtgccagaatctgtcctacctgataaacgcagaagctttttgtgtgaccttagatcaccagtttcagttattccttcttcaaggccattttatttcaggaatgtctctgcctcttcttgccagtgggacttggcttgagctatgagtgtcttctgtgacagaactctttaattttgaatctcaggaattaaagattggggtaatgtttcttccttttcaggaagatttagcgtcctggaaaattggtcctcctgccttcagcaactaattctgcatatcaagagattgaggcactttttcctaagccattcaactttcccctcccagtgtcccctcctc

SEQ ID NO: 97432 - DNA, 1084 bp, Homo sapiens
tgatcaggtgaggtttttggtaccaaatgagttataaagagttattaaattactttgacgttcaggtcagaccaggctttgctgccaaatgcgttataaaaatacttccacttttgaaggcatttggattttataattgagaaaatacggacctttgttggtattatacttgttagtttttcatatccctacactgctggaacttcttcaagacaaccagtccattacatgttcattttaggccttgttgcatgcaagtgtcagcaagaaacgttacagccccagatctttcatattctggttctgctctcaggaagaaaaacaagtacctatcaatttgaaacacagtttctcatttataaagagtttttgccccttggcaacttattctgttgtgtatgccataaaagcatagttaattaaaagatgccaagcattttactatactttaggatagttaacgtgctttagaattatccaactccgctcatttgtggttgccacagtattacttccatgtctgactttgctttcttccttacagctgtgagctgccttattccacatttggctctacagtttataatctaaggcaaacctctctgtgttccttagaatccactttttttttccttagtgactgagtggttttcccagagatatccagtttaaaagaaatgcatttggaaatgatcaaaataagatgaaaaatgttgtggtcttttcccatctcagttacctgtgatgtgagtattagtaataggagccttatctctcttttcccaatagtttcatgtaagcgttagtttatcttactttctgagcaactgtccttttgataaagcttgaaaacatggatgtaaggaagactttgaagggttgctattttaatgcctgctggcaaaatgatatattgactctcattggaaaatcctgtgaatccgcattgcagaataatgcacattctaataaacacactactttaaatactcccaggccagggaatatgatcgattcctgttccaagggcaagaatccaagtaggtcagtgctacaaaactatgttggagtatggggaaagcat

SEQ ID NO: 97433 - DNA, 1333 bp, Homo sapiens
tgtccaattgacgtgccctgggtcagactcacaattagtaagtgctggtagagacaggtttccagacttccagggcccacacttctcaccgctgtcctgcactgccaaagctggcagcacaaagtggggtgggtccacatcgtcagtcctgaaactcacatcaacctggctgaaaatgtgtaacttctcttcctcctgagcacccagaagtgaagtgcccaggcatccttcatcttttgcttgcttttgctgctgcttcttcatcactttgtcttctcttgttttgcttgtgcatagaaaatatcccagaacttactttcagtcattagcttccctggccttgaagtatattttgtcacctcctgcctaggtttctgcccttcctgaaaaaaccgtgttttgtgaatgggcttccagcagcctgagttggtctactgatatcatcaggaagatttacagtgctctgtggcatctaaaacactgaataactgtgcttattatgtatgttttctgtttcatgatctggcaaaatgttgtcatgatagttctgcatatcatatgttgaagcatgggttatagtaggaaggaggcatgcagattgcacagtagcccattcaactgtggaagataccagagagcataatcattgttatccagcattctctttctaactcttagacttttactgtgatgacccagtgtggaagaatttgtggttgaacaactgaagagttcaaggcaaaaatagtgttagggtgatcctgggtcactagtaaagctatgaaagctttaattttctttttatatttgatataaaatgaggatagaacactagaaaaagagaatatcagtgattatattaggaacttttcaggatctccctcatttaaaatttggagaatatgtttattagttcactttttctgtggatgcagatattatgcatactaaggggttatattttctatttctgatcttccttatgcatagctgagtcagaatttgttaaacattctctctgataaggttatgtagtataattccttacgtgataacgcttagccttggcactgaatcaacctgactttatggccaccctccctccctcctaatagagtgagtgaggaggacagttccaagatctcactttactttctttgctccaacttccattgtctgaatgctgcatagctcaaactacgactactgctctgccacccacttcaccttctttttttcttcccaatcctagatcactcatttattaatcatccccaacaaagtgattcatagactaaatattacaggaagtgtaaattccaagattttagaa

SEQ ID NO: 97434 - DNA, 1518 bp, Homo sapiens
accctgtctctactaaaaatacaaaaaattagctgggcgtggtggtgggcgcctgtagtcccagctactcgggaggctgaggcaggaggatcgcttgaacccaggaggcagaggttgcactgagcccagatcgcgccattgcactccagcctgggcaacagagtgagactccgtctcaaaacaagcaaacaaacaaaaaatcataaggaaaagatatttattgaaaatatgtggatcgttgtaaatgtcttcatctttgttgtcttcatgttgagtagactgaagaagaggaggggttggttggtcttactgtcttaagggtaacagaagcacaagaaaatctgtttataagtagaaccacgtggttcaaacccatgttgtttaagggtcggctgtatttctaaagtctaaagagaatcatggacattgtgactctggggtgttttctttcgtattagtcttgtgtttgttttcgtctttacatactatgtatcttaactcttaatctgtaaacttttggttattaggcatacacatatggtggatctatggatgtgtctattcattagttccactatattttagaattcttggtaacttttttggtttatattttatgaaaaacaaagggcccccttttcttttgcaaggtgtattctatagctgtgttcgctatattataaaattaggagagtaattctaacttctctgctgagtaggtgctttttaaatttctttggtatatcagattctcaagcttcattacataatatatctctgtggcataactcctgaagataatatagggatccagtgtgacggtttggctataaatatttcacatgatttagaataatctaatctcaaatccacaattgcagtttattatagttatggatgtttggaccctggaaaattaaccttttaatttaaattaaagtaacagtttgattattgggaatattgtattgaacatttataatgatttgcttttggaattatactgatgaatagagtgaaaacattttccagagagtccacaagatggcacttgccaacttgtttcctctgtttttccttaacttatggaaatgcagcaaaatttaagaaggaacatctaaatatttatgcccttaaaatgctaaagtttagatttctagaagctttagtcaagactccttgaaattgatgagcttcaatttaacattttaaacagtgttcatttccggtataggagccaaaatcctttgttgaagatccgtaaaacacactgggatctgtagaatacaaagggctgcctgcattcactatgtttgcctttacttttaaagtaataatatgatttatgaggcttgtagtctatatgtctcatttctagacatcttaaaatatggacatttattagaacaatgggtattagtaattgctctaaagtaactgttattttttatttaaaaacaagatgatgtagttggaatatattatgtaatttttaattatgaatgaaatttaataagt

SEQ ID NO: 97435 - DNA, 1297 bp, Homo sapiens
taaattatttggcataattagataacaaattccacttcattaaactattgttcattttcatttcagtggtacaaagggattgtacataaattagcttggtttgttcatgttttaccctcacagtagggaacataatcaaactgaataggaattcagtatgaaaatggctaatttaaccttttcgaggtctgaaaataaaaacaacataatctttcattaatttgtctgctacaggaaccttcctattagtttttagatggttgtgagaagagcagatataaacagcagtttaaacattaacatttttaaatggattaaaaaaccttttatttctgttatttattaatgcctcttgtttttctaggaagaatttgaggcaatttacaaaaagattcagtgcaagaagattgaaacaataatcatgggaatttgtttttctctgtcttgtgtcattaggttcttcctctcctttgggttgtttccctctgattgtagctgtgatttgccattccatatggtaaagcctttttctttcttttttttttttttagttttggtaccctctcaagcactgtcatgtgtttttttggtgctcctcccattaccaaggacttattgaaagagaagtctctgtatgctccccttccactttctacatgtctgttttcatctcttcccagccacggtgccacagataataattagtttttaggtgtttgtgaatgtcattcatctctagtgaaaaaggagagattgacaactgttaaagaaaaacttattctaacgcttgttaaagcagcaaagaagattgtatttaagataatcatgataggttgtccagactattgtgataggggagagagattggactcaattccgaatataacatgaacaagcaggaatttataaccatgaagcaggttgtgggggtggtggatggacagttactaagaggagacatcaagggtgggggaattattgctaaactgacataacaggattcttactgagggcatgtcagtgtgatcatataacaagggtagggggttgaggaattccattagctagcaagtgattggagccaggtgtggtggctcatgcctgtaatcgcagcagtttgggaggctgaagctgaaggattgcttgaggccaggaattcaagagcagcctgagcaatgtagtgagactctcatctttacaaaaaataaaaaaatagctggcatggtggcacacacttgtagttccagctatttggggaggctgagcctggaggattgcttgagcccaggtgttagag

SEQ ID NO: 97436 - DNA, 1029 bp, Homo sapiens
atgttataataatagttttaaaggaatgacattagtataataagttataggtttttcataagattgttttaacctaggaatttactatcttgagagcagccatgacaaagagtaccttgctggggctggtgagggtgtagcgtttctccaagtccctctgataaagatgaggtcctttgctatgggcaattgatgttttctcagtcttatagaaagcatcaattacagcatctttagaagactttatttatctgaaatatgtaaactaaatgaaatcacagaactttctgtgcaaactcaattcaaggcaagtccttgagcctggccttgtaaccaaattaccagccattagttattcttacatagaaaataatttctatgaactttgattttttttaattaatataatcctactatccttaaaaataggataggacaaaactaaggaaacagggtacagtatgaccatatttacattgaaaagtcatattgaatagaaaaaaaagcctgacaaaataaagttataaatatacattcctaatttggctgcttatttttaaaagaatagatactttgtgaatacactaaaaaccactacattgtacactttgaaagggtgagttttatggtatgggaatttatgtcagtaaagctgagatatattaatttaaaaaaccacctgagctttaaaaacaaagattagatagaagaaaagaatggttttatatccaagaacctttaagagctttttacatttttagatttttttttacttttcttcctcaaagaacaaaaaataaaattaaaaattgataggtaaaaatgttcctacctgttttaaatttagaaaagtaagcacttcttggaaagagccaatacccacagttgagagaatgtgggagaagggaagatgagtcaggccagcatgtcaccagctgctcagtggcctggcatagagccacctcattgttttttatccagcagcgctgaaagtgtttcctttctctttccactctgactctgaccttt

SEQ ID NO: 97437 - DNA, 1073 bp, Homo sapiens
gggcctgggcgcccggggagggggcgcggcgcgtggggtcggggcgggccggggccgcagagttggggcgcccggggcgccggcttgctccctcgcgcctctcccattgtttcctctcccggcagggccgatgggcgtgtgctcccctggccaattctcggctgggaggctcagaggtcctgggtgttttgcaaacgcacaaagattctctaagatgccaacttgggagtgaagttaactggttgttttcaaacctgcctttcccgtcggtaaataaatccttggaaagtttatttattttgaacgaggtatctgtgagtccccagcctccttggaattgccaaatgcatgtgttgcttcctgttggactattggggaattttttttttggactcagtatattccgttggaaataagtatgatttgtgaactgaatatgggttaaaattgaaaatgtttgcactaacgaatgagagcagacagaataaagttggttaccagaagataactgtaatctcaggagactgagtattcattaagaatgaaatgttatttttgtggtgtaattactgcagcactgttgcttttggtggttaagacttcaagctgtttttttctcagtctgcaatgacaatgggttgggaaaaaggactgaaaagatacattctttccttttacaaaacgactatggtacatacgtacctgactttaagaaaactcaatatgtgaacattagacgttcaaagtattcagcttttttgaagaagcaaagtacaatgatatgtaattgatagctacgagaacagcctaagtaagttattcacaatatcaagtttccagttcagttttaattatgtcatttgatcaaacacgttagaggtgttacatacctcaaatgctttttgaggtaaatacttcccagtgaattaagctgctagaatcaaagtgttacttttatttaactatcttattttataaattaaacttagacccagagaggttgtttcccaaagtcacatggctcttttgtggcaaaactgagcctagaattcacttcaccaggcttcagtctg

SEQ ID NO: 97438 - DNA, 2969 bp, Homo sapiens
taagaattcattttgtttatgcatgtggttatacatttttatcttgtaataagaatgacatgtaggccaaccagactgagtttgttaaatgtgatacttaatgtttgattgtatctgtaagagactatcttccaaactctccctcattttctttctttaacactatttagcaaatatttcttcagctctattccataaggcagtgggcacccagatgtttccatatgcatggttgtgccttcttttgacctattgcaggtaaaattgcctacttcatgacctatatcaattgctgtaataccaacttgtctaatcagttttgtaagatactttctaactttttactctgtgtattgcctcagcatactggtgcattcttaccgattttaggaaaatgaataatttttcttttttccacccagctgctgataaagatgatagttcagaagacatttcagtgccgagtagtccacatacagaagctatacagcatagttcggtcagcacatccaatggagtcagttcaacctccaaggcagaagctgtagccacttcagtcctcacccagatggcggaccagagtacagagcctgctctttcacagatcgttatggctccttcctcccagtcacagccctcaggaagttgattaaaaacctgcagtacaacagttttagatactcattagtgacttcaaagggaaatcaaggaaagaccagtttccatttatgcgaaatctgtggttgtaaattttttttttttacttgaaattaaatttggctctaaagttggtgtagcagcagttgatcagactgaaaaacggtttttagtctctggaaaaagactgattttgctttttttataaatattattagatttattaatttttctgtgctcaatgtgtaaattgtattataattcattgtgatttatttcacttttaatttgctggtgttttaataaatgggggtgttactgaatctttcttcccacttccatttcttttgaccaccccttaaccctcaactgtgacggtagtagtattatcatttataccaaagttttgcatagtccctgttgactttgtaatgttaacggagtcataaaagcactaggcaagagaaagatagaaatttgcttttaatctttttgccttttattttgcacattatgcaaaaggaaaaacattaaagaacacttttttttaagtgagtgaaaacatggtaaagacatacagtgcttttatgcacattgttaagctaaatcaaggtcatttataatcattttccttttttatttaagattttaagtaaacaaattttagaattttcagcatttcaaaaatgattttatttttcaagtcttaaattcaatattttacacctatgttttgaggctaaaaatatgaaattatataatgtatgatacagggttatcaaatatctaataatttttgaaattagctcttgtttttggtttttttgttgttgtttttacagatttcaggttacaaactgcaaagtttatgcataattaagtatggtatggttgccagaaaagcctaaaattactacttagaaaatttaagactgtttacccccattgtcttgtacttgcgagctaacttgtactattcttgtgaaagcactgtcatcttttagtagcaaattttgataatgtttctcgtggaaaaaaaaatcagtatctatctttagaacaatgtaattataatgtgggaagtgtgcatgaatgagagagagtgtgtgtgtatctgtgtgtgtgtgcgcgtgtgtgtgtgtcttttaatagtttatgccagcaatctttgcttgaatgtttaacgatgccttcagtgtgatgctggccaatagatgattgcagtttaaaatgtcattattgtgcaggcttggataactaacattccatgatgtagcttgtttctgatgagatgattgtaggtacatttttctcattatccaatcatctgtgggatacttagttttctaatgtgccattatctatttttattctgcagttatgttcaaaatacagtacatattttaaaatagaataaattgttaaacataaaattttaaaagtagtagatgtgcgtaagaaaactttgtaaaatagttatgagtcctacccagtagcaacttctggcattcaagcaggattccactatgtaaatatctgtaatgcatttataataagttgtgtagtttgtcctgcatccatactacactatttgctaaagtctcagtgccatctcctaatgagactgacattttaaaagtctgtatggaatatccttgataattcaaggaaatatccctcctgcctaagttccaaactgggaaacattcaaattatataaatgacatttcaggactttaagtatgaagataatgggaattttattgttttgctttttaaaatgagagcatttttatttgataattttttttaaatttttaatttttaactaatttcattattttaaagtaatcagtttttcaaatcatgattttgatatcattattctaaggagttatctcaaaggcacaaaatatgaattctgcaagaaggctattttttattgtagtttgaatgggttaggaaaagcctcaatttttcactcttaagtccttcagtacatttttctttcatcttattacttatgcaagttaaggttctttggtaacagaattcttgcaactgtaaaataaaactacatagatgtaagaagtcatgtaaacggttaacaagcttaccaaggttagcaaaactttcattgtaaatcagtctgtactgagcaaataaaaatcattattagttgtataaacacaaattccattttgactttcaggatgtcatactacttctgtacctagcattttcagtccttatatttgcaatgttacacaaactgtactattttcttttatgtgcagtttgcatgagtaaac

SEQ ID NO: 97439 - DNA, 1060 bp, Homo sapiens
gcacatgcaaatgtatgtttattgcagcactattcacaatagcaaacacttggaaccaacccaaatgtccaacaatgatagactggattaagaaaatgtggcacatatacatcatggaatactatgcagccataaaaaatgatgagttcatgtcctttgtagggacatggatgaagctggaaaccatcattctcagcaaactattgcaaggacaaaaaaccaaacactgcatgttctcactcataggtaggaattgaacaataagaacacatggacataggaaggggaacatcacacaccggggcctgttgtggggtggggggaggggggagggatagcattgggagatatacctaatgttggatgacgagttaatgggtgcagcacaccaacatggcatatgtatacgtatgtaactaacctgcacgttgtgcacatgtaccctaaaacttaaagtataatttttaaaaagtgataaaaataaaaaaattttaaaaatcacatataaatacttaaaaaaaaaaaagaatagtggtgaaacaaaacaaatagagctttttagtattccctccagttaaactgtcattgccagtattttgttttctatatacatgtaatgattatgtaatgattatattggctattttaataactgaattataaatattttataacattcattactgcttgatcagaaaagtaggggggtgaaggagaggggcactagttgagaaacgacctgttgggtgctatgttcactattttggtgataggttcaatagaagcccaaaccccaggattgcacaatatacccatgtaacatacctgcatatgtaccatctgaatctataattttttttaagtattcattctgttttatataatttttaaaggattactacttctggtggttggtggtggtggtggtgttgttttattgtaccttgaggtcaagtatctaggggtatggttttgatttatagcatgttatagagaagatggggttccatctcattaatgtattttaaaacctgcttttcaaaaatgcatggatttgagg

SEQ ID NO: 97440 - DNA, 1026 bp, Homo sapiens
ctgtaaggttattatagaatgcagtagagaggtataattttttagaatctagagagtttgagttttcctgtttctagcttttttcctaagcgttactatagatcaacaaaatggattagctaataatttaaaatatactgtaagtacttgatgatattttgttcatcttctcaggataacactttgtcttagattgacagggtgaaacactacttttttcccagcctccgttcattaatgatgatatttttctttttaaaatcagctgactgcctttaacaatatatgatatccctttaaggtatcagatcctattgttctttcttagataatgtcagcattgtgtaacgtttttattgttgtaaacctttatattgagatatctagttagtttataaaaatgttaaaacgggaacagtagttaaattatctgcttgtaaatttcctgctaaatgttttcccaaagaatgagattcttttgttttcagcattttaaaggttaattgtgccttttcctttttgtaatgtccttcttttttgataagatgcacagtgttggaaccagctgttactcttgaataaatggccaattttgtccatagtatacaaatttgtaacaaacaacagagttgggaatgcattaggcaacatttataatatataacccacagttttagtctttatgatttagtgatatttcaggatattagtaaatgtgaagattgtttcaaccatatgtatccacttcattttaatttgccagtgtcagtaattcaaaagaaagaaacattttgtattggatgcaaacagttcctcaggtgctcacgataaaacttaatggccaccatctttacttgtagtcattataagcagtttcatcagaatgggcaatattttttaatttaaaagattccgtagatttagctactctcaattgccatatatatttagaacgctgatttttgtcagttttgagcatataaatcttgcttatttgatatctagtaattttgacaggatggtgaa

SEQ ID NO: 97441 - DNA, 1064 bp, Homo sapiens
ggttcaaactaatgtgaaggtagcaagggtatgagaggcttgaagcatcactagtgtttggtgttaaaggatagagtatgttggaagagcagtgagagttgaaaatcattatgttcaccatcaccagattgtaaaagattgtatattcttgagtaaaaataaatatccagcccatttcctgttacaggatttaatgagagaaacttgtagacatcagtctcaaaatcaagctgacaggatgggtaatatacattgggtaatatacattggattattcataacatggtttcatcaatagtgtcatttatactgaactataattagcagtattgacaccagttggagaaggtgtttcctaaatgacagcttatcttttcaagccaaactgttttaaattttaccttttgtactttgattactatctacccattcttgcctcaaatacaatattctaaatcatttaatcttttaattaacggtttagagttattatgagcatcaatttttgttctgtacttaaatacagtgatgtagttcattgttattggggtgtgaggaactgtttgacccaatagacttgcctttagattgcttaacttttattatttaatttttatgtttctgtcacttatcacttaaggaggcccaagtctgctaaattatttcatttattttttttgagacggagtctcactctgtcaccaaggctggagtacagtggcacaatctcacctcactgcagcctctgcttcctgggttcaagcagttctcctgcctcagcctccagagtagtgagtagctgggattagaagtaccctccaccacgcccaactaatttttgtattttttgtagagacagggtttcaccatgttggccaggctggtcttgaactcctgacctcaagtgatacaactgcctcggcctcccaaagtgctgggatcacaggcgtgagccaccgtgtcagcctgctaaattattttacattcagctttctgcttaagaaacaaggtagaaaatgtcatgcctcagcttttatgtacacctgtttgctatattttctaat

SEQ ID NO: 97442 - DNA, 1326 bp, Homo sapiens
gaaatcatggttttctatcatgaatttaaataggaagttattaaacgttttgagaaatttataattagttttccagggatttaataatataataaaatctgttaaaatatacttggaaaaatatttctatatatcatttgtattgtattttaaattttttcatatttgtatgtaaatgaaaatattatacataaagaatacatttgctgtgacattgcattagtgagaattgtgttatagcatagctcataacataagtatattcaagaaggaagttaaaccacagggtgattttcatattgccccaacatactgatgtattcaacaagacttagaaaatacagttgctctccccctttgacaccctttactgcctatgttaattcactcactagatacaaatataacaggctttcatctctgtttataataggcttctccagctcacacaactccacagacccaaagtacaagtggtcgtcggagaagagcagctaacgaagatcctgatgaaaaaaggagaaagtttttagagcgaaatagagcagcagcttcaagatgccgacaaaaaaggaaagtctgggttcagtctttagagaagaaagctgaagacttgagttcattaaatggtcagctgcaggtatggtgcatatatgtgaattttgttttatttcttttttaataattgtgaacatagattttttttttcctagttgggcctccaaacattttaggacatgatattgggtgtgtatggaatctatagtaaatcatagttttgtaaacctgtttgtttggatgctgagatgaaataatataaaactttcaacactgatacagtgaagaaatttaaaatgtgtttacctgtgtacaaaagtagctaaactatccggtttgaactttataaagttgtgatataaagtgcagagaattttaaaatttaaaaatatcactgttatttcacttttcttgtctatttttttggtttatagcacaactataagtttcttcagtagcagtttttatttttaaattatttcattctttgaattataaattttgttctgttttgttttatttaaagtgaatatattgctcgtgaaaggtgccagattgacagctttggaaactgaaggactctaattatccacagaccaggtacaatatggccagtggcagtacagatcatttcatactgccctgccaatgtgcctcagatacatttcttaaaacctcatggagtataaagttttaaggcagcaccgaatctgtttcctttgtttttcttccttccttttgtttttgttgtgttttttaacgtaaata

SEQ ID NO: 97443 - DNA, 1052 bp, Homo sapiens
aaaaatacaaaaatgagccggtcgtggtggcatgcacctgtaatcccagctcctcaggaggctaaggcaggagaattgcttgaaccgtgaaggtgaaggttgcagtgagctaagatcatgccactgccctccagcctgggcgacaggcgagactccctcttgaaaaaaaaaaaaaaaaaaagaaatttaataggattgtacactaaacagagttaacttgctatgtgtaacttatatctcaagaaaaaacttttctttttacaaattgactttattttaaaaatcacacccagaatatacggtgattcacaagagagagaaaatgtccactaacatttgttcacgcataattactgcctcagttgaaattccggtgatcttttcatatatgcttcagtttttatgggatctggatcacatatgatagacagtaagaagataggcctagatgaaaaggaagaaattacaagttttgaaatagttataaaaatttctgaattgttcttagttgaagtgaatggaaatacttgtactggtattatttgggggtcttttttaaaagctcttctctcactcacccctttctgctgtactcagggaaggaagaaaggaaaagattgccaagaatatgtgttcttaacacttaacaccccagacagttatgtatttctaagaagtttgggaagcactgggtaggctgcaacatggttctcacatctctatctctcttttgtctctcagttgcactcgctctcactctcttattagcctccatcccctcaaagatgcacctctataagaatcttaggaaagtgtaatatacataactctgactccaattcctgtaataatatgtatttggggcccaagaactacatctcagttattaagaacagtatcagcaataatagtctcaggtctgttggatccctgaagtccctttcattgctgagatactgtggtctgattatctgtgcaaattatttcatatttacagatcataacaaaaccaccttaaagatcacatatgaccattttcactaaagaaacca

SEQ ID NO: 97444 - DNA, 1511 bp, Homo sapiens
cctactgctgtgtccagtttccattggctggaatgggacctcacattctgtatttgtcctgattggctagcaacttagaagttttaaaagaggcaaaggcagaggagaacaaaggaaggaggaagtaacttgtggaatgctaagaaaggtaaaaacaccttcaaataaggaagaggaacaggctatgacctaatgcttacttggaccagtatacgcatgccagggcaaatatgtaggtaaattgtgggagctaagaacataaagtacattgatttctttattacggctagcagatatttgaatgttagcacaggtctttgaataaattttgcttctaagagaagttactatttattcctaattagatggggaggagagtctttgaagaggaacctctactttactttttacatctcatatataaaatatgtctgggatcaaaccaatgcttaagatgacccttagggatattttgaaaattcagaaacataggaactatcctgattctttggacctccgtgctaagaaaatagaggcctcagtagtattcttaaaagaaataaggaaactgacatctgaaaaattcttttacgagtcagatagttttacatgttatatttatttttcaattcaactctgcaaggaagttattattcccagttttataggtaaagaaattgagactcaaagatcaatgatttgttcaaagtcacagatagtttgaggtagagttaggttctgaacctaaagtgtattctcagctttataagaccatagtacattgcatgttctaatcagtgaaagcactaggatattacataagtggtactttttataattcataaagaagtagtctgtcagaaaagagggagaaaacatgccagatcctggcttagcagttgcagtaacaggtttggcactctaaatccttatgattgttttttgaatcattaagccacaaagtttcagactctctgtcttgagttttccctgtgttttctggtagcaccaaggataaagtatgcagcatggtgctgtggaaatattttgcacttgaaattaaagagatctgggtttatatccaggatttgaactagcttaacagctctgcatccttgagcaaatgatatctggtttcctaaagtgtaaaatggggatactatacaattaaaaactcattaaaaaactacagataatacaacaacacaggtgaatctcaactgcattgtgctaagagaaagaagccagattcaaaaggctatacaatgtatgtttccaagtatgtgatcttctggaagagacaaaactcttgggatcagaaaacagatcagtcgtttccagggccagggagtagaaggagagtatgacaggaaagggcatgaggattttattgtggtaaaactgctgtgtatcctgattgtagggtaggttgcatgagtgtatttgtttgttaaaattcaatagaggccaggcacgatggctcacacctgtaatcccagaactttaggagc

SEQ ID NO: 97445 - DNA, 2897 bp, Homo sapiens
gactagttgtcactaaattttggtttcagggttttgtttgtcgttaagcccgtaaatcatattactcttctaataaaacaattttcttttgtaatatttgtaatcaaaaagcagctcttctgaataagaaaatgttaatcatctgggaattttaagatttagtaaagtatttaaatagtatcctccagaatcttttttttttttttttttaagatgtgtgacaaactgagaaatatctttgcacacagtgggtagccagtaggttttctgcagggggtttctactgaaagctgacagagggcatcttggcaaatgttcagaaacctacattaacttggttgggccctgcatggaacctcatgttcagcagaattcttctgacctgcctctgcatgccgagctaatcagcaaatacctaatgagcccactccaaagaaacagaccctctctcaacctacttgattttcatatgttctctgggggtggggtgacaagatttcatgaggactgatgatgctgcaaagaccacaataatgataattaacttgctgaatttagaagattatgctgttaattagttgcaaaataaagataagtaatagagcagcagatggtaggataacacccaggagaaggagggttattactctgatgagcttttgtggcacatatgaaatatggatctgactttttcataaattgtttctagagaacattatcttttttctttgaactgtgatggagtactttgttcctactactaagttctgacagatgtgataaaatttattttcaagggtgcaacatagaacttgaatgacaattatttctaggagatcacctcttaaagcgaatgtgtcagattggtcagcacaacaaattattcatcctttaattaattgaaacaatctatatctctctaagaaaaagagttttcagtatagtagttgaactttacatcactgaaaattaaacattaaaatactggtctgtttcatagaaacataatgaagacatttttgtttatcaaacaaagtctacctttactttaaattaaaattatgcctaagttttcttgtacatgttggataatatagaccttataaagtcctccttttttttttttcctcttttttttgagtcagggtcttgctctgttacccaggccagagctcactgcagcctcaaacttctgggctcaagcaaacctcctgcctcagcctcctgagtagttgggactacaggcatgcaccaccacacctggctaatttttaagttttttgtagaaatggagttttaccatattgcccaggctggtgtggaactcctgggctcaaggagtcctgccttggcctcccaaagtgctgagattacaggcataagccatcacaccccaccttaaatctttaatttttatgagtgctcaatctttacttcttagagtacttaatccttatttacatatattaaatttgtctattgagagagatttttgatcttagtaatggactgaccaatatcagatgcttaacttaattgattactaatagatttagaaaatttaacattagactagagctccagtttggcaaagcttttgtttagaatatgtttggtgaactgggagtcaacaaatagagtttctggttttatctctgctaactttgattctgggaagtaacttcagttttttggagtttctgtatctgtaagatggtgattggactaattgactttcattatctctgctagctccaaaattctattgtaaaataaatgttcattacatttgttttcattgattttttttttaaaccaaagtatttggccttcttcaaatgctcctaacaaatatgtatggctggattgtagatatccttacattaattgtaaaatttatatgaatgatatttagtgactgcttttttgacctaagtctaatttttttagcgtgtgtgcatttttgttgtagttttagaaaaattaatggacagtttagaacagtgttaattaacccttaaaatctttttcttctgttgtatacccactggcatacttttcaagtcagacccattgtaatcaatgtaacagcatggagcaaacattagagcttcctcactggatgagtactgtataccctagggcagtcaaggaaggataatgaatgaatactgatgctgcttttaagtgctttataaggtagtaacttgccctactaaagattattcaagagagtgatgtttatgtacttcaggctcccctatgtgcagttactgtatttcattaattctgagagttaagctcttcactgtaaaactttaaatgctcttcaattctatgataatttctacctaaggacttaaaaatcttttccaaacacataatttactaagcctcacatttctacttctagttatatttgtgcacattttaaaactagaaatgaaagccccaatttatcactatagactgggtactagtcattgtattttgatgtctaacattctatttataaaatatataaatatgcagactggcgacctcccaagactctctccctttgttctgacccacacttttccaactcaggtctttctactttaaatacttcttgatcgtttttctaagtattcctatctggttctagccagctactactttagtcccgcatttaatttcagttttaatccatccacttccacattatcccatcaattagggtcctaatttcctatgttttagctactaatatagttgtttctgattgtttagaaaaggaactaggaatcttatcttgattctaaaaaattcagtttttcttatggtcttgagcatgtctctgttaggaatgcttacttgttccccggtgctgtaaagaaatagcacttgaacataaa

SEQ ID NO: 97446 - DNA, 1956 bp, Homo sapiens
ctcctgacctaaggtgatccacctgcctcggcttcccaaagtgctgtgattacaggcgtgagctactgcactcagcctggaattctttatttacactggatataaggtttttgttagagagagaggtacgtatatttctactgtctattttcttttagtgtgtagcttgcctttatttttcttaatggtatgtttatactcccattgacttacttttgtctttaatatttgttttctcctacttaattaagcttaatttgcttatcttttttgggtttcttaaagtagaagcttagattatctatttaaatcttttttctaatatagacatttaaagctataaaatttcctctgtgcacaaattttgatatgctatacttttattgtcattacttttttaatttctcctgtgatttcttctttgacctgtgagttatttagaagtgcactgtataatttccaaatatttcaaggcttttctatttatctttttcatattgatttatattttaattacattgtggtttgggaacttaccatctttggtatatttgattttcctttatttccattttctaatagatcatagctatttatttcagctcatttgtgaaacagtagatattgctatgctggtacagtaacctgaactggtaacttaaaatgtcagtgtactggataagggaattctggttacttgaatttttttgttgcatagaaattatttcacacttcaatattctttttatattaacaacatcatttaacagctatttctatcaattgttacatggcaaacatttcttgggttctaagaaattcaatagacatgatcttaaattttgagatttttcttgcaaatgtgttcagtagccatcaggagagtcaaaaaagaatgttcttctaagaagaccattatggttttcttttccagcatgtgtagcaattaggattgtattttatcaatgagctattttgttttgggttttgatttcatatttttttggggggggggcagattttaatgcccttgatggtgacttgtacacataatgattattcagggactacttttaaaaaataatataagatttattaagattacaagtttaaaaacctagtgctttcctaagttctcaaggcaatttacatgtacagttatgtaatgattgcttttaaagagcttaaaatataatcttaaacacgctaagctatatacatgtaaagctatgtactcaataattctctcaattgtctttcttaagtacttaaataattcttaaatttaactaaacttagtgatacatagttttcttaaatattcattaattatttagaagcttacttaagattatctcagcacttacaactaaaatcacaggcccattatctcagcacttaacaactaaaatcacaggcccaagtcaatctcttaattaaacattttcacttaaagtccaagggtaacgtgttattccgcttggcaagttagattagattatacttgtagaacgtaaaataccaaataggtatagtttatttgaaatttaagtttgaaattaaaatgtcagtggtattggtttacttttttaagcttcagtgggcttaagaagactcaccatataaacaattctgtcatcccaactgaagaacattgaagatgggttcgtatcccagtgcacagagctttcttaatgaccagataaatggtcacagaacttgattctttcatgccttaaagatagaactccaagtccacattctccaaataagtggttcccagctcacattccctagattcatgttacacattaagtgatttttctgactcttcacctgtttgcgcaccgccccccccaccctgccaccaccttaaaacttgtaatttcttcttttactgcttttgttggattttactttgttgttttcagatctttgaaagtattttaaacatca

SEQ ID NO: 97447 - DNA, 1459 bp, Homo sapiens
ccaccatgcctggctaatttttgtatttttagtagagacgggttttcaccatgttggtcagactggtctcgaactcctgacctcgtgatcccccctccccagcctcccaaagtgttgggattacaggcgtgagccaccacacccggcctgaaaaatttttactgctattctccattagtgcagacaatcagtcagaaatttgcacaggacaccctgttttagcaataaaacttacatattatctgaatgaacagcagttggttgaagagtataaaaattaggtggttattgattgttagagaagaccctaaaaacccaaggaggaaatttttcacatcatagtatgttcaggtcagagctttggaaatactaagatgaatcttcttcacttgatagcagaagagcttcaccaggggcattttttgcacttcctattttagtatactgattgatgaaaaattcaatttaatttaccatgcagtgggaactgaatagagcagatatagatattaaaaggagatcctgttattgtgtactgcatctaaaagtatttttacatattcattggacttttttctataaattaattcaaaaggaacaaatccagttttaagaaatacctttatttacaagagtaggccatatttttagaaactgttaaactttacacttaacctgaataactgtttcttttaggtcatcaggaaattaaattaaaaagaataaaagtttctctctttccgatcagtccactccatctattctgatgtttgtaaccatagattagttatagaatttcatataaatagccactttatactcttatgtccagctcagcatgtctcagatttatccatgttgttgagtgatcacagtttgcttctttttattgctgagtggtattccattgtgtgaatataccacaatttctttgtccattctcctgctcatggacactttaatggtttctagtgtttagctattgtgaataaagctaccatacacagtctttttttttttttttttttttttttattgatcattcttgggtgtttctcacagaggggaatttggcagggtcataggacaatagtggagggaaggtcagcacataaacaagtgaacaaaggtctctggttttcctatgcagaggaccctgcggccttccgcagtgtttgtgtccctgggtacttgagattagggagtggtgatgactcttaacgagcatgctgccttcatgcatctgtttaacaaagcacatcttgcaccgcccttaatccatttaaccctgagtggacacagcacaagtttcagagagcacatgattgggggtaaggtcatagatcaacagcatcccaaggcagaggaatttttcttagtacagaactaagtgaagtctcccatgtctactttctacacagatacagcaacaatctgatttctctatcttttccccacc

SEQ ID NO: 97448 - DNA, 1925 bp, Homo sapiens
cctccaatccattttctgtaagatgacttttaatacattaaatatgtcacctgcttaaaatctttcaatggtctaccattgtatttaaaataattcacactccttggcataagccctctttgatctgggcctgtctacgcatctatccttacctcatgcctctctattgtgttcatcaaatattcaaagctttttcctacctcaggacatgacatatatggtattgcttccttctccctacaatgaaatgctctcctcctcatccttttatcatcagttcgaatgctgtttttgcaaagaagctcacctattcttactatgctgtctaaattaactgactcttccttaccttcagctaatctttcatcctttgttacattgcacgtattattctgtaacacttaacatttactacaatctgaaattttcttacttgttttacttgtttattgtctcttccttgagagctagtccttgggagcataagttctcaacttactgaataaatgaagttacaatactactactttatccttcttcctatgtagcttaataagattttgatgataagtggcagcatacaggccaattcataaaacaccatagacccaatttttacactgactatttaaggagttctgggtaaaatcttttaaaactttttgttctataatttgtaaaaccagaggaaataccatctttaaggtcttggctgacaaattctgttttcctgacttgaaagagttcactccggtaattatttattttacattcaagatatcagtattacgtggccttttgatatgaagaaattattgatatagaagaggtagctaactggaattaacaattatttgtattgctctaaaagttcttatttctgttacttaattgtatcagccataacacagtctcactggacctgtttcctcttcatacagtataatgagggagggggactaaacagtcccttctggattttaagttctgtgattctctgagaatggattatatttttattttttattaaaattctcttggtatcatagccaagttgcccagtctaacttatttctggattgataggagaacaagttgtactggaaaaaaaaaaaacgagtctttttaaaattaaaatattaattgaacattgcatttgaatctttacagctcttctaaaatgttcttttaattaatttgagatattaatttgcttttagcagttattattctgtagatgcttttagaagtgtgttacattctgttcactaaggtacatgatttgtatttttaaatgccacccttttttatctcattgttaaataggaagtaccattggcacaaactgcacagcccacatcagctattgttcgtccagcatcattacaggttcccaatgtgctgcttacaagttctgactcaagtgtaattattcagcaggcagtaccttcaccaacctcaagtactgtaatcacccaggcaccatcctctaacaggccaattgtgtaagtgattcaggccaatcattgaacatatacatgaattaagtttgttttgtaatgatttttcctaagacatttgattattcaaactaagatcttagttttgtatgtgtgtgcatgcttcgaattttggaaaaagtacttgcgtagtcttctttaatataaatattaactaacagagtgggagataaatacaactaaaaacaaatatagaatgtgaatttaagatagtcttattttcatgctatttcacacaaaatataaaattactgcatcaccagattccatttctttcagttcttactggtagctcccaagagctctctgatgacagtttttctcattttacaaattggagattgtcctaagtaaatccataacttttctcttcttttcaatactgctacacaggttatgcattta

SEQ ID NO: 97449 - DNA, 2934 bp, Homo sapiens
tttatcgaaaacaatatacgtaggaaaaatgtaggggaacttccaacatatcctaactaagttccataagtaacttagagatatgttacttatacagaagagtgagataatgcttttttttttttggagtattttacattagacattaagagctagaaccaaaggaaccaaacaagcaaaatagtaacaacctcgaaagttcactctcctaggcatgaagctctttgtttctctgaaactttctgccttagcacaatctctgtctgtgtgtaactctttaactcaaatatgttttgaaattggtttctagaaattactttcctgtctgatcacatttaatgcagtagaaaaatagagcacattcaaacacagtacttgaccttttttttcactaacatgttgagatgaataggttaacattactatgcaaataaaatgcatgatgtgtgtggtatatttttggtgatcagtagccatatgcaatgtgcatgttaaatgattgtgcctatgttgacttttctgaagtctgatggttccagtaatcattgataaaagtgacttatgcttatgtattttatttttttaagattttcccctccctttaatgtaagttaagagccttctgatgaacttagatagacaaaccctttgggtgtgaacagaagagtcacatttagatttgacctactaatttagtcatgatggacttaagctaatacatgtactttacttactgtaatgtgatttttgagatcttttgggaggtgggaattaagggataggctagaaactagtaaaattatgatataatagagtccttttagtaattctgatattactaacagtgcctgaaacaggcctgcattatgtctagttttgtattacaagtgggtcattttagtgtgaaatatatttgtacatagtaaaaatactagtcctctaggtatacatgtggggggcaaaggtaaaataggaagtaatgccctctgtggggacataatggttaacaaatatgtaaattttaatcttacaaaaggaattaggagtattttctcttaaaccaagagtcttccttagtagagtacttttacttcacttaggctagatccctgctatagcctgtaaaattggtgctctaaaatatattaaatgtgaatagaatttgaatgtgctaccaactctaatcaatatgaatagacacccttgaaaatagtaacactaaataggcagaatttataagtttcttgcttttcattcagtgtaaatcttacctggcattttttgtagcctatacatggacactgagtacctatgttaatgtacatagtaggagtacatattcgagtaaagttgaaatgtttcatgttgtaagaaaatagagtagactctttctttactccttaggaattaagctagaacattctggaggcatgtgactcacacatattccttgtacctagcttgtaaaatgcattaaattagaaaattagtttcagtagatagtggtaaaaagagggtttgttgttttagggctgttttaactttttttttctttcttacaatatttttatctacctattaaagattgttttatcttagtttgctttcataatagagtatgaacagctagtggaagaaccaagttaaagcagatatacatgctcttatcctagttttccccaaatttcatttatttaaataattgtagtttttaataatgtaaatttaaaaaattctttatactgtgttagataataatagtttatctcttgagtagaggatgtttatgccattctactcagaaagaagcagtggactaaggagcaaaaaggacttctttcctactttcatatttcatagttcttaaagttggaggaaatacgaagtacaacaaaaatttaaccaaattttgtttgttttaaaggaagaggtctttccaaagagagaattaacaactgactgaaccagtcctgctaatttgttaacttagtagctatattttagagtcttaacatatttaaatatgcatgattacttcttgacatttatttcagatcagaccccaacaccaacaagattcttgaaaaactgtgaagaagtgggtttgtttaatgagttggcgagtccatttgagaatgaattcaagaaagcttcagaagatgacattaaaaaagtatgttgtaaccatgaaatttaaaaagagtacttctgacagaaaagtaatcatagtttatacttcctgctttttaaatttagacacactgtttttgaacttataaccttttccttattatttgaattatagatgcctctagatttatcccctcttgcaacacctatcataagaagcaaaattgaggagccttctgttgtagaaacaactcaccaggatagtcctttacctcacccagagtctactaccagtgatgagaaggttagaaatttttagaaatacaaagtaagggggaggaacagtacccaaataaagtttactatttaatctccataaaatgttaatgtattaaattcagtgtcagcttgcaatagttttatatgtgaaagcctgtcaatactcagatatttcagggtaagaagactgcagcttttattgtacatagaaaaattataggggagaacagtcatgttacataaaacttatttttaaaagatatataaatttataaatttaacttaatttttctgtgttttgctattttatatttagctacttttatacagtaacagcttaattaagaatctattcaaaaaattatttgaacagtggttttttagacttttacaggattaagggactagttactcattctcagcagtggatctttgttagcggcaattaggacgatgatgatactagcttgaatacccagataatctgggaccacctgggctacagttgtgtgttgagtaacatta

SEQ ID NO: 97450 - DNA, 1065 bp, Homo sapiens
aattttgtccaggcgtaatacttttataagaaaattctcttttaaaaagtggtaagtaaccttaagtctaggtaaatattaatactacagtactttcttgaaaagtcattgaaccatggagtatagtttctactatgataagacaaattaatggtggtctatttttagtatccataagaaatttatataaagtttctttgcctccaattttatttttaaatgctctcaaatgagttatgtgacctagcaatatatcagtattgcttattcttgagtaataggtttctctgtgattgtttgcaatctagtgtgctatctactaacaataacggattcttttatagtttaaaaactgctatttcactgttaatggtggttttacatgttgtggaaattaatttcctaatcattttacttatttgatcaaattgaaaatcttaactatattttaaaactttttgccacagcgttttaccaacgaggatcatttggctgtccataaacataaacatgagatgacactgaaatttggtccagcacgtaatgacagtgtcattgtggctggttagtatatgcttttattaatagcttgtatacatatttcacctggaatgtgcacaatttttgtgtattctctgtaaataatatagtctggtgatattccaatgacttcattatagtaaatgttggcaacatgtattttacccattacattttcatgtttccttctgactattcatttcatttttttgtgtggttttcaaatttatattccaatgtcgattttgtggaagttcattagaactctgggaacattcataccatctacaaattttacatttaactaataattgaactaacatggtatttagtcagcatttcttttagctgtcttgtacaactgacttacaaggctgtgtgaagatagaaaatgatcaagcttctcccattggagaaagaacagtgagcagacttgttcattagagttgtttatatttcttttcagactaaacatttgtattagtaaaatattctcagtaaggaggctctaaattcagtcaatgc

SEQ ID NO: 97451 - DNA, 1673 bp, Homo sapiens
cataaccctttgtatatgtctacttagtttcttaaaatacattttggaactagaataactggatttaaatgtttacacgtttctaagtttcttcgtgtattttgccaaattgttttttaaaagctaaatcaattttttatactcactcataattgaattctcactaatagtgatgcttttaaacattaaacatttgatcctgagtattattttaggggggcctgtgttcgtaccctaagatacttaaaataatctctttgcaagtattactgatcaaaatataacctggctactcatccatttgttaaatcttgctgagaacagaaatggtatggtctgtttttagatttatataatatttcctaggaactacttagtaagaattggttttagaagcatcattttgatggtgactgctttttcacaagattgctttttcacacagtctttttaagtttcttgttattttttgtcaccagtaagcaatgacattattctgaatttgagtttcagctttaacacaatggtcttagttaaatttaaggtttcaaatagatttttacaatttaaaatctattttggtgacaatacaacttcagagagagtcctatagaaatgattacaaagagtttttaatactagacttgtgctattaaatcttttcttgtatgcctcagttactcttaggttttccacatgcctgttaatttcacttgttttaaagtgatgctccttggaatttagtaaaagagacactgagataatttggtgaaagattcatttatctttgttagtcttccatatacttggtagtatctttgcttttggtgccccgtcattgaaaaatgtttctttggtagaatgtttacacattataagctgttttataaaggagataaagattcattttatatttagtctaaagtgacaatggagatgtatgtgtgggagtgtgtgcgtgtgtgtgcatgagagagacagtgaatatatcagtgtaacttcctgctgttgttcaatagtccttaaactagtgaaaaaagtagtgaaatgagctattggcccaatggcttgaaaacttatttgtgtctatctaatatgtttaaaaggaataataatatatcatggatatgagtgtatgtattaactatagaatgactgattttttaggaagttaattctggtgagagtggtcaagccttagtaacacagatttcccagatatcagaacttaaattattatagaagcaactgatctaccttcttcccatctgacaggttaccctttctttttaaccttttaagagagattgctacctgctaggcacctatcaaaaaaaaaaatctttttttttttcactttttccattgtttattgagctatatactcaaggtcttagtcttgtttaacaaaatacttgtgtttctttgtatatctacagtattttctttggggttgtgctttgaaatgcctggaagaatacagtttatgaattcagtatgttggtgttgctagtaatatagatatttttacaaaacttattcttggaatataatttgactgggaagacatttcatatagattctgtaaaaaaatttagcttgcagctattttataaataaataaagaatgcatttctttcatattaaacttctggtgactgccttttcacaag

SEQ ID NO: 97452 - DNA, 1917 bp, Homo sapiens
ggtgtaaatttaagaagggatttaagagtttgtttttagacatgttgatgttttggtagcatatttaggtagaaatgtttaagccaatagatacaaatattccactagaatataggactggagatggagattttgccacattattttcataacagtacagtaggatccttggaagactgcatagtatttgctcatttaattttcttgaataaatgaaatgtgttcatttcaccataagtacttttacactgttgagcaggaaaaagtttgcctgacagagcagtgttcctaacctttttcctatagtgcaaaatctgcatgttacatgtattttatctactctcataataagaaagatagaattaaaatgtcagaaaagtgttttattttgtattaaaatagaaaagttaataagcttaatgaaaaatcttgagatttatattttaaattattctttattttaaaatatgtactctaaagtgtcttctgtttgattataggcaatacaaggacctgtggaatatgagtgatgacaaaccctttctatgtactgcgcctggatgtggccaggtaatatataaattactttaaattattttgtatatttccacttattaaaacattgatgatataatatgttatcactaaaagtattttcttacagtattctgtaaaattttagagttaggatgaaaaaaaacccaggaaacttttggcaagaaattctgctttttcttcaatagtgcaactgagctttagaaagtataatccaatacggagggggggagcattatatcttgtaatggaaaggtggaaatcctacacaaaagtccaagatataaaagtataatttgactgttattggttgaaaattattgataaactgcctaattagaaatcagatcgatattatatgagaattattttgcttactgaacttttatgaaattaactggtatttacttcttagagtatcactaatgtattaatgttgttaagcctaacgtctttaatattgggcatgtggcagcagtttcagaaagtaatattttagtttttttttaacaacccactaaattattaatctattcctattatacttatcttaaaataactatagacaggaagaattaaagaataaatgtaatgtatagcaaagttacaaagtacttaaatatacggaccataaatgtaagtaagcattattctttctcatttattttctttagttgatattttaaattgaaatataattgacttacaataaactgtatatacttaaaatgtaccatttgataagttttaacacacgtatactcaaaaccatcagcacaatcaggatagtaaacatacaatcacccaaaagtttcctcatgcctatttataattcctcttatcccacctaccttcatcaattactggtctgccttctgttactgtagatttgtttgcattttccagaattttgtataaatggaatcatatagtatgtatgttttttcactccacataattcaatatttctccatgttatgttaccaatagttaattccttttcattgagatataatatttcattatctcacaatttatctgttcatctgatggatattggtttacttctattttttagttgttaataaagctgatgtgaatacttgtgtacaagtctttttatggacacatgctttcatttctcttggaggaatacatgggagtataatgatgggattatctgatagatatatgtttgactttttaggaaattaccaggctgcttttttcatgtgtttgttggccatttgtatcccttacattttgtgaagtatctttttaaatcttttgctcattttaaaaaattgggttgtctttttattattgagttgtaggagttctttatatatcctggataccagt

SEQ ID NO: 97453 - DNA, 2014 bp, Homo sapiens
atagcatttaagcctcccagaattgttatcgtttctgtctcagggtgcttgaactgttaatatttataactctcttagctaggtattagaaaatggtaataagggaatggagtttttatttgttggctaagaaatgggctgctgtgtaggtaagaaacttgttttgtagaggagggggatagtatagtggagagtagaaaagattaaggagaagggtaccaagggctaactccctctgaaagtttttctagagctatcagattgatccctccactacctctctactctcataatattttaactcttattcctaccaaattaattgaaaattgtacttccatattcctctttcctctagactgaaagtttctcaaatgcaaggagagttttcttcatctttgtgtctgtgtatagttgatgtttaaatattccttgtactaaactgagctaggcgctgttgtaggtgttaacccaaagataagttccttgccctcatggagctcatattctacttgtaatgacagaagcatggctattacagatttccttggatttttctagtgttctttttcctctcctcgcagacagcatggtaaagttgaatgtgagtgaagaaatggaaccctctcagataaaaattttgcatgggacaagggaagaaactttctctcttcttatttcctataccagatccacctttactccaggactctgaactttggctagttacacatttccccacaagaattaccaaatttttctgagcatgacattcttgaaacttcatttatgaacaaaattatgaaaaatgcaattttcctctatgcaccattagcttatttggataaccacatagttactcttatttaccactggatgaggtttcagtgaccataaggtgaagccattggtggagttttaaaaatgggtcatcaatctgagtagtttcagtatactgtacttgtccttaagctgatacaattggagctgtttatatagatcaactacattgtgggacaaataaattttgatgaattaggctgagaagctgaatatcagtaagtacattttttaaaattaaaagctttctgaagagaaatatggaattactaggttgcatcattctcatcagtgttcaaagtaaggatttttttactcttttaatggctgcccttcaatcacagccctaagggctgaattaaatgtttcttccacttttaatccctttggtggagttagatatgttaatacctatgtttaggatatttgtgtaggtgtgttgatatttcaagagcagtactctattataaaaattgttaatagtgactagttttggggtgacagtagtgttacagagagtaatttgagcactttattttctactgtttcaagaagtgtttcagaactatttttaacagtgtgaaaccactttgtttttcagtattcttgccatgagaaaaagaatgtgataagttattcaacttatgaaattcaagttacatgtgaattctgccaggtatgtgtgcaatatttggtatttttagccattttttacattttgggttgtaaaaatctttatagcttgtttctattaggtaagtatttgtggtgtttttttccatacaaaacaagtcacttacttagtatgtagtttagctgatactcctattttgtttttaaataatcaaattaaaagcatctaagtacacttagctatgacagacataaacatgttttaaggttttgatttcctctaaaatgagttctatcagtcccatgggatgttctgtgaaaaagtattcaaatagcaaatagctttggcaaaaatgccatactctgggtgctcccctagtcattttacattagcatattaaagactgtgaagagtcctgccaaaaaaaaaaaaaaaaaacaaagaaagaaagaaaagtatattttagcatttcccggatttgtttggccacacctttttttctttagtgtctactgacatccccgttgaaatgttttgggg

SEQ ID NO: 97454 - DNA, 1012 bp, Homo sapiens
aaagcagaacaccaattcttaaagctatgctttgcctttaatagaaatatttgtaagacagggaaagccagaagcttgagggttaatggtgtcttgattaatggaggttttaaggcactcttattttaaattatccatttgttttgttccatggaagcttctacaacctagggcaactcattctaataagatttgggatggggataggtatggatttcttgtgaaaagtgggagaatgagggctctgggaaagtaggcagatcatctttgggaaagcaaacaaagggaagatgaagatacagaagctgattttcttaaaacttgtcttgctcaagtatcccttggaaagccttagtgtgtacctttagtaatacataccccactttgtctgtatcccatactgcctccttgaaagactgtccacctcctgcctacctcctgtcctcccacagggacagaagctaacttctctccaccacccaggattgcccttgcatctgttacacacttttgaggccatgcccaagagaggattaattcctttctcatactgatgcctactttttgggccctgtttcttgtcacagtatttggctcttaccaggaaatttgccattagcagtgtttgcacatttcagcagagattctacccacaggttagtgatatccaaatatagccatttgctgcataacaacattttgagtcagcagaccacatataagatgtggtagccatcatgatatagtataacacattactcacatttgtagtgatgttggtgtaaacaaacctactgtgctaccagttgtataaaagtatagcatttgtctttcattaagacaaggaaaaaatagcacaattacgtacagtatgtaatatttgataaacaatgatgttactggtttatgtatttaaatatactttttaatcattattttggagtgtacttttacttttttttaaaaaaaagtttattttaaaacaacctcaggcaggtccttcaggaggtat

SEQ ID NO: 97455 - DNA, 1031 bp, Homo sapiens
cctctctcatgtctgctgtgagtgggggaaaaaatactgctgctttccttgttaacattgggcttaatatttttctctcagctgatgaatttgagttacctaaattgatgaactaaacattatatatcaaataaacttacagatagcatcagaatcatgggttaaagattaatataaaacttttttttttttttgagacggagtcttgctctgtcgcgcaggctggagtacagtggtaggttctcagctcactgaaccctccacctcccaggctcaagcagttctcatgcctcagccttttgagcagctggaactatagtctccgccaccacgccccgctgatttttttgtatttttagtagagacggggtttctccatgatgaccaggctggtcttgaactcctgacctcaagcagtctgcctaccttggcctcccaaagtgctgggattacagggttgagctatcatgcctggccaaaactcttatctaaaagtcaaactgagtatgtagttcagtttctggccttaaaaataaagaagatagtaagattaggtatttattaggcattagaaaaatgtacatttaaagtcaaagtaaaatgcagtaaaatttatgaacttaataaatactattttagtgtcatgcactattctgtgtattttacatatgttacttttatatattttgatagccctgaaatgtatttttttttttactgtagaggatcatagtgtaatcatacaatttaaaattttcctggccaggggcagtggctcacacctacaatcccagcactttgggaggctaatacaggaggatcattgccttgattaatggaggctttaagtcactcttattttaaattatccatttaaaatatccacttgggttcctgtagagatgacctcagtttccagtgttccccccagacgtttgcttcttgccgtaggatcaggaagctttaaggcactcttattttaaattatccatttaaaatatccattttaagttatccattttaaaattatc

SEQ ID NO: 97456 - DNA, 1897 bp, Homo sapiens
caccgtgttagctaggatggtctcgatcttctgaccttgtgatccgcccacctcggcctcccaaagtgctgggattacaggcatgagccactgcacccagcctgcttttatttattaaacgtgtcggaacaatttttttatatatcaacttgttttgccatactaacaaataattgtgttcattatttttgttttcttctagtttgtgcatatatattgcagtttttacagaattatatcaaataagttttattttacttttatagcattgtatttttccatgttgtataacctttatgatatttgattgttacttgatagttgaaaaataagtattaaatttgttctaaatgcctgacaggaaaataatagttttcagtttatgcctattttgacattgaattgaacatctctgtgcattttttcttttatgaattgtttctataggatactaatctcaaatgaattactagtcaaaggatataaatgtttctacagttgccagatttttgcctccccaaagacttgagcgagtttacactgtcagcagagcatgaatgcgttagctttgccatacttttgtgaacttgggagttatgattaatgaagcgtgattacctaattgggaattatttctgggaataagttgtattatttagcagttttaaaattatttagttggccatatcatactatagttatttatctaccagtgatctatgtgatgtgacaaatattgtgtatttcatattttctgacattttactgtctttgtttcttttaaagtttaccaaaacttttgacagactggtaacaataattcttagatttcatgcagttttatgtggtttgtacactgagtattttaatgctagtttaagagttaatttctgggctgggcatggtggctcatgcctgtaatcccaccattttgggaggcctaggcaggtggatcacctgaggtcaggagttcgagaccagcctggccaatgtgagaaaacaccatctctactaaaaatacaaaaattagctgggcatgatggcgggtgcctgtaatctcagctactcgggagactgaggcaggagaattgctcgaacctgggaggcagaggttgcagtgagccaagatcacgccagtgcactctatcctgggcaacagagcgagacggtgtctcaaaaaaaaaaaaaaagagttactttctgaactatacatttcatagttctgtcttatgaatgtgtcattatgatttattaagatttataatgacaaattcatttccatgtaggaaacacttggaataaagaaagtgtatatgagtatatgatagccaaattgactgagttttgtccctggcacatagttaagtgtgtaatcaatattttaggatagttattagaagccagattatcaggggtctaccacttactgtgttatcttgagtaaattatataacctctctgcctcagtttccttctctttaaggagaataatttaactcatagtcttgctgtgagcattcatgtgatatatatacaatacttaatacagtgtcaagaacttaatgagtactcagtttgtgttgtgggaattattattgaagttcattcagaaataatctagcctagccctccaggcatgcttgtgctgtagcttgaaagcagtacagcaaccatctacttggtagctttggcaacaaagttatttttccctaagaatttataatttgtggaggaacatgccaccttagaattttcgtaaattcatttgagagaatgtctcatatttttttgttccatatgtaccccttctcagacattttctgtatcaaattccttcagtatagcatatccttattttaagatgataaaattatgatactgtgattttcataaaatc

SEQ ID NO: 97457 - DNA, 1026 bp, Homo sapiens
cgagactccgtctcaaataaataaatagtagaaatggttgtcagcattttaacaaatagtggggttggggtggtctttattggtattcaggatctgaaagctctatgactatggtagaaaaatatgccatacatcaaacatctatctgtaagtagcattaactcttcaaaaaataatgtacattttttctacccaaatttttgtattttggaaaacttcggttttaatgatacatacgttcttgtctggtaaattgttagatcgtgttagatcaggtaaacaatctcaccaatgtgtgctttttctactaattttgtctaaaggctcttccttccaatatgaaatatacctataagtaggcatttctttctcttttttattcttactaaaatgtcattggagaatataaagtagttgaagtctcccttatgaaaaccagattttcatcagaacctctcgttaaaaattcagtgaatagcaataattaatattcaactgatttttataaaagtcaatgcatatagcacctgttgggttattttgtataattaaaatgtaccctaaaaaaaatcccaccttagccaggtgtggtagctcacgcctgtaatcccagcactttgggaggctgaggcaggcggatcagctgaggtcaggagttcaagaccagcctggccaacatggtgaaaccacgttggtaggcgcctgcaatcccagctactggggaggctgaggcaggagaatcgctagcacctaggagcaggaggctgcagtgagagccgatcgtgccactgcactctagcctgggcaacagaatgagactgcatctcaaaacaaaacaaaaaccaaaaaattcacttagtattgttataatctggagtttaatttagtatttctgtgtttatctcatactcacacctgttcctcaaggctaagaacttgtctaaaatgctgcatgttctctttatgtaagttttaatgttgaagtagtaggatagtattcacctatttctatttgaaggaaaaccc

SEQ ID NO: 97458 - DNA, 1031 bp, Homo sapiens
cctcccctcacaccgccaaagccctgcctagcccttcaccgccgcctgcacccgcgccctcctccagccgacagccaatcacagtcttccacagctccgggtttacagaagtaacgctccttgggccctctggtcccgccccctccagaactgcttcccgcccttcgggctccttgtccaatcatgagcgcccgagtgctctttgatgcccgtcccctctacccgccctgccgaagacccgccttcttctccttaagcctgacggaatcacctgactcggaggcgctccctcagaaggaaggcaagaaggggcgtgtgggtgaaggggaggggcgccagaaggaaggtggggatgccgggagcggggcgagcgggcgggggttgtcagtccgatctcgcgagagaggacggaagcctgtgggagcccgtggcctttaaagtgccgttcagccttttcctccaggggtgctttgtaaacacggctgtgctcagggctcgcgggtgaccgaaaggatcatgaactagtgacctggaaaggtgagtaacgatgggcagaggtcagcagggctggagactgtagggatacggagaaagaaggcgctaacatggcgacgtcgctcagcacagtccccaccccccgtttcccatcacctcgggtgctcctgacgtgctccttagcccttggggcgattgtggctgtgctgccacctcggcggcccgcgcggtgtgggctttgggaacctgactggctgggccggaccgttaggtaaccagcgttcgttgttccggcccctccctctcgcgcgctttcctaaggcagaggaaaaaggaataacggctccctcttagacccctccctccgaattatcttcaccctacttgggtcagttcagaggtcctcggggcgcgcgtcgagtcagccgtgtgcgcagggagacctctcccacccacagtccttgggttgggcggggagagggcccactctggtctccccacccagtattcaagcgattgaggaccgtgtattggtg

SEQ ID NO: 97459 - DNA, 3018 bp, Homo sapiens
tattcttaaactgatgtagaattgcttaagttccttttttagaaatttttttttatgattaatggtcatatagaaatagctttgaaatggtcagggctattaactgctgggctattttgaatgataaatgtttattgtgacgctcctaatatacttgttggtccacttaaaattgccaaagaacgtgtggtatttattgcttttttctgacttgacttacggcactacaataatggaaatgtcaaaagcagttcttactctctttgtaactgttattagaaattttattcaaggtagcaagcgttacaatttcattagcatgaaactttattaaaattgcttatgtattaaaaatgaccaaacagcaaagagtcaattcagaagtttctgattcatttttactgcttgcttttttagaattcatggtaccagaaaagtcattgaagtcttacctgtattctttcttaatattgaaatctttatttttttttcattaatagatccgagctggatccagagttgcatacagaccaatttctgcatcagtgttatctcgaccagaggctagtaggactggagaggtaatagtagcaataattgaaattaggtaacactaccaaataagggtagggttttgattagagtgaaggaaaaaaactttattaataagagtttgagggcaagtctttcccacccttttatccaaaaaactagatgagccaaatagccaaaaatagccaaaaaactagatgagacgaatagagaaatttctctatccaaaacttggccaagtatttatattcaagtctattgatttaagttgcctatatttaaaattataatagctacagttattgaaaaatgtactctattggactggatgcggtggctcacacctgtgttcctagcactgtgggaggccaaggagggaggattgcttgaccccaggagttcaagatcagcctgggccacatagtaagatcctgtttctacaaaacatttaaaaattagcccagcctggtggtcacctgtagtgttagctactcaggaggctgaggtggggagctggcttgagcccaggagttcaaggctatagtgagctatgatcacaccacactgtactgcactccagcctgggtgacagaccaggtgagaccttgtctcttttaagaaaaaacaaaacaaaaaaccctactttatttaaaagcatatttatatatgttgtttcttaattttcaacacccttttaagatgtagatattgttatccctgttacacaagagtgagattattctaagctcttgatttgtctctttacactcagctacaaaataaaaaagtagttatcattttgacaatatggtatttaattaaaatagctacctgtggttactgatacgacctttacctttattttctgttttccagggctctacggtatttaatggggcccagaatggtgtgtctcagctaatccaaagggagtttcagaccagtgcaatcagcagagacattgatactgctgccaaatttattggtgcaggtgctgcaacagtaggagtggctggttctggtgctggtattggaacagtctttggcagccttatcattggttatgccaggtaatcatttctatccctaaataagttaagagcatgcttgcagtagttggaaacttagctactgaaataatagctactttgcattaagtgcttactctgtgtcttgcattatatttaaagggctttgtatgcattatctcacttaattctcataacaccatttggggtgttatgagaataacatctatgaaggactagagacacagaggccacattacttgcccaggtcatagctagtaaatgtcagaaaatgaattttaactaagtctgacttcagagtctgcattcctaattgttaagctattttgggaataaaattattagagcacattccttaaaaggatcaatttattttatttaagacctaaactgtcagatcttaaaaggtatagatcatattttcagatggataagaatgtcagaacccatcaaaatgaatgaaaactaaccatttatattgacagacagctccctacctttacaccatattatcaggattgaaggagaatagtgtaagagagatctaggcaaatactcttccagcagacttttcagtttacaaaaatccccacactagtaatctgattctttaacatttaccaaacatgttgaaattaatatttcaaagtaacagtcatatgtggtctcttttagaaacccttcgctgaagcagcagctgttctcatatgctatcctgggatttgccttgtctgaagctatgggtctcttttgtttgatggttgctttcttgattttgtttgccatgtaacaaattactgcttgacatgttggcattcatattaattacggatgtaattctgtgtatcttactgtgactccgaaaactgtagtattggtgtcatgggaatgtacgttatttccaaagtcatttcattaaagatgaaaactttaatttcttctgtgatttgtacttacactaagtttagattatcacaaagaagaacgtgcattcaggcagatgctgtcccattcagaggaagctacagcagttgctccactgatgaaaaatattccaatgtaatttttatgggaattcttttatatagtgttctgcatattgtaattcatagggcttttgtttattcatataaaggataaatatttgggtgttttgagcttctataaaatatgattaattaaaggtagttaatactcaagatggtcttgagtttttaaggtctaacatcagttagaatacttcaaatcagaatcaccttccaagactgacttgacaggtggttctaaaaataaatcacgtcagctttttaggaaatgaagccttaagctagggggtaatgtgacttttgtttttcagtaagtctcacattaagcaattgtgtgcctctaatgaatcttccatgtcttttcagaacag

SEQ ID NO: 97460 - DNA, 1095 bp, Homo sapiens
gcagccaactcatatcaaaagttaatctgtttagtcctctctgccggggtgaatctacagtttttctttttgtctccctcttgccccatcaccaggtggttgtcgttgtccttcccggctagttgccaataaagttgttacaaagtgaccttgagtgtcttccttggtgcacccgaaaccccgccttcttcatccgggtgctgcggcgcgaataagagccggaccgcgcttgcgcattgagtcccactccttcgacctctgccgcagcccgtgccgccgccgcctcctgggaaggtaagtggagggcacagggagcccggcctggccagggcggagcggcgcccagtagggacccattcattgtgccggcgcctcactgggcacggggcccaagctgacggcgtgcacgggagcctgcggggcctgggtgggaagaacaggcccctggagggcacttgaccttaagcctcttttcctccgcagagaggaagcgggagaggagcccacgtcgcctgtcacccaatatctccagccgcgcagtcccgaagagtgtaagatgttcgcctgcgccaagctcgcctgcaccccctctctggtgcgtagcccaggcagggtcggggggattgaggggtgggcgttttggcctagagcgtccacgttgttgaatggggcaaccttcgggcggggcacaccgccctctcgggaacggctttctccttacctattaacccattgccgttttcttcctaatcttagggcatctcagccctctccttgccactagggcgaggcagagcagccgaggcctagctgtcaggcctcactcggtgtaggtcaaactctctggtccctagaccaggagtggccctttcccccaccttctctcagcctctctgttggattggggtcgacgcgaaggttggagtactgcagaggatgtagggggccgttgaggcctagttcacctcagcagcgctttccagtgcctgtctgtaggtcaaactcgttgctgcagagggagggactttgcctttccgtgtgggggcggaggaaggtggtgggggaacgagcccaaagtctttcttcctgcctctg

SEQ ID NO: 97461 - DNA, 1115 bp, Homo sapiens
tctcaagtccagggattcctatacttctcgccagctggttataaactgggagttcccatgactcgctcctcaggttcaacactttcatagaatgactcagagaactcaggaaaacactttacttcctattaccagttattataatggatacaactcaggaagagtgaaatggaagagatgcatagggcaaggtcagggggaggagggtgggaagtcggaccttccatgccccctccaggcacacagctctcccagtaccttgatgtgcttgccaacctgaaaactctctgaaccccatatatatatatttttaagtaaaggtatcattatattgtcactattgattaaatcactgacggttgatgataaactcaatcttcagcccctcttccctccccagacgtcaggtggtgggctgaaagttccaatcttctaatcatgcctaggtctttctagtgatcagccctcatcctgaagtctcctaggggcctgagccaccagtcatcactttggagagcatacaaaagacacttatcacttaagagagtccaagaattttaggagcatacaaaagacactcatcactttggcgagtccaagcattttaggagctgtgagccagtaactagagacaaagaccaaatatctgtttcccattgtaccacagaactcaagatttatttgtggcatctgtgtctcacacatttttttttttattctaagggactgggcaggactttttaaagtccgaggcctttttgggggtgttccttcctggctctgctcatcacctaggtatttggaaagggtgtcaccttcttttcactgacttagtgccatgtaccgtgcctcctccatctctacatgcaggcagtgggtttccttcaacagcagaagtccttggtggtccacagagggctgggacagtatcactgcttgctgtacagtggtattggggactagaacttctaccatacatgctttgccatcaacacaaattaaggttttcacatcacatagtcctgggaagtcctgtgtgcttctgcttctactgtatgcctggcccctgctaggtcccacagcatctcatctaggtgtgggatgaccctatactg

SEQ ID NO: 97462 - DNA, 1052 bp, Homo sapiens
agctctactgttttagaagggatcaattatattactgttatttcaaaaccaaaccaaaccaaccccccaaaaccttttgcctctaagtacgtgtaactctggcactgaaaatgtagacatcagcctgaaatgtttggattatggtttctgattatacagtcagactccaaattgttgccagtacatggagggacagctccaggcaccgtctcctgtcctgcaggaacacatctagaagcacacctagcccaaagggttccagaatgggcacattttccatttctgctgagaggcagtggttcataaatatggtgagaagcacagaatgaaaaggttaaaccagtacattttggctggatgaggtttaattaggagatgatttgcgaggaccattatgtgtgtgctaaatttactgaccttttcccctcctgtatagaatgaagctctgtgctctgtgctcattatctttaaatgttttcttttctctgtatcatcacctcattcattttatttggtcattttaaaatgcactaatttggagcagtaggcttcattgattcttgggaatagaacattcagtaggcacagctctgtaggccttgggaaaacattttatggtcatatggggctctttggcatgaagatgggcccctggtcatgttggcaaggatactgacaaataccctcccacttctctgtaggtagcaggcatgtctaaaggccctacaaacaagttttaaaaccaagtttaagtagtgacttgccaattcttgtctatttagggacaatgatctattttgctgattaagaagagtgcttttccttctattctgtttgtcagcctttggaccaattgctgctctgtggcaacagtcccaagggcaggcaggaaggaagattttaaggcgacgctgggcattctagaagcacctaactctgctttgtctgagcatctgaccgcagggttctccaaaatgcagaaggccttcttgccttagagccccttaggtccacccagatggcaaaaaaaaaaaaaaaaaaaaaagcagagg

SEQ ID NO: 97463 - DNA, 1051 bp, Homo sapiens
ctacaaaaaattagctgggtgtggtggcagatgcctgtaatccccactgcttgggaggctgaggcaggagaatcacttgaacccaggaggcagaggttgcagtaagcctagattgcgccactgcactccagcctggacaacaaggtgagactccatctcaaaaaaaaaagctatgctgccatctgtaagactgttccacctcatatttgatgaccagacatttttaaagtatcttataaatcccgttttgtagacaatgaaattgagctgggaaatgggtgatgtgtacgtgcttggaaagataatccatggagagacagtacaatccagcatcccatgggtctcatctctgcacttagcactaattcgcttttcaggagaacataaaccaccttagtgtcctgcatggcactgtgatgaaataacgggaatgtgatttttgagccgctcaataatggaggagatggaaatcttcccacctcatcttgcttattgctgattgtacacacaacacttgcccatcaagatcatttttgaaagatgattacttcagtgtgcccaggcctgcaggacataagtacgtgggcagtgatggtaagagctataattattcttaatgggaaaatatgcaggtaatgacttggatgatcatgtgtctgtaatgtataagttccaaagcccaatgaagtaattaagcaatctgcaaacatgcagggggaaaaagcctgaagtgaaaaagaaccagaaaagaagagctctttcatctatctatctatctatctatctatctatctatctatctatcatctatctatctatcatctatctatttatccatctaccgacctacctgtcagtcttgcttgcctgcttgtacaggcaaatatttctaaatctcagagtactgagtattcattggaggccagttattccaagttatcatttcaaagggtagtatttattctttatgaaatgtgaatttgcatgtagttatatctttattgaatgcattcacatatataaaactccatctattgctcaagagcaacag

SEQ ID NO: 97464 - DNA, 1069 bp, Homo sapiens
ttgcctgaaatgtttatcttatatacagtatatcttcccttaaaattgagaaatcctatcgtggaaaaacattttaagctgtcagttaatttgtaaattattttgagtactgcaaggtgatgatgttagaactttgtaacacaggctattggggcctcctgactttcaccccttgagactttccattgtttaaaagaacccaattccctatgttaaatctcttacaggttgaaaaactgagagcagtttctgtttgttgtattaaattctgacctttacactaggccagtccacttataacagcagggacatgaactcttagaatttacctgaaaagagatagaaatgtgttgaaaccccagaagcattgtatagggtagttagtgatacttggtcttgaaattttctaaaaaaggtgatgagagaattagtttcaaatgattaagcagtatcatttaataaaatgcctgcagggccgctcagaaagactatgttctggagataataatgcgtcagttattcttgagtacaggagggcaagaatggaacccaggaggccccaggttcgaggaaagtagtctgagggcaccccagactggtgggccatagtgagagttgggtaagtttgatagttcttgcgtagcatcactgaacacgttaccttggctggctacatcaatggtgaaagttggttatgaaagtgtttgcatcacattgcaacagtggggatttgccaacgctggtttgactggcactaagcaggaccttgaactcattcagagtaaagtgacccacatgttagctggccccaagggcaacctccatgattacctcctcttgtcactcctttaaattcatcataaggaatcttatttgcacgaaagcatttgtgaacaatgcagattttactgagggtttcataggaaagagtgaagacaggatttacattgcacaaatgagtacatatgttcctagacttatgatgcttcaccttataatggtacacattcaattgaaagtgtactttgaattttgatcttttcccaggttggcgatatgaggtacagta

SEQ ID NO: 97465 - DNA, 1034 bp, Homo sapiens
tatttgagttttctagatattgccaagtcgctatccacaatgtgtgaactactttgtatccctaccaggagtgtatttctgttttgccacatcctgcacaatgtatttctattttgccacatcctgcactttaaaattttttgtcagttaatgtggttctctaaggtttttaatatcagaagagtcctaaatggctttttaaggtccttttcaggtctaagaatcgattcccaacacacagaattgtatttcactatgacacgtctattctaccctaattaaattgctatttcattagtgcttgactttaattgtagcctggtactgcgcccatctcaggcttttgaatgttgatatttctgaaatttctggtgaaggaataaaacaaaattttattattctcagatctttaatgccagatacatagaaagaatttacaacatggcagaaatgccatgtgtaattcttgccatttgggtaaaaaatagtgtatggcatctaatctctgcaagacagaatgtgtcttttgtggggccactagtcttctgctaaggggctttgggaaaattaaggaagccagccccaccctggcttactttctgggagtataatgggctctgtagtcttctctgccagtcctgattccagtcatcctacctgcctctccatggcaaagagggaaattcaaaggtcacatagacttgaaacaagccccaaacctggtaacctaacacacaaacagaaccatttctggattcattcttctcagggtagagagaagtgctcttaagaaatgacatcttggctgggcgcggtggctcacgcctgtaataccagcactttgggaggccgaggcgggcgaatcacgaggtcaggagatcgagaccatcttggccaacatggtgaaaccccatctctactaaaatacaaaaaattagctgggcatggtggcacatgcctgtaatcccagctacttgggaggctgaggcaggggaatcgcttgaacctaggaggcagaggttgcagtcagctga

SEQ ID NO: 97466 - DNA, 1066 bp, Homo sapiens
agaagcaaatagaaacaacctggtttggctgaattagtgaattaatatctagttatatgtgcttattttaatagaaagttgcagtcatatgaagaataaagaagtaacataccacacaaaaacaaagccaaaataaccagaagagctcccagcagggttatgttgtagaatcctcatcccgtgtgtctctttccaagtgccacagtggttgtaacctgccgggagggcttttcctcccttaagcttctttggtaaacaaaagagttgaaataaaagctgctgaatgaaaataaataaaggtttatggctagagaaacctgtctgtgtagatgaattaatcttatagagagtcccccaaaaagagaaaacagtgggcacattattgccaagtaaacctggctttttaacacctttccaggtaagctcagccaagaaacaggaagatttgtccagtgtcaggacagggctttcgaatttagaaggcttcttgctttacaaaatggaggcaaggtggccattgggccagagacattggaaggtggtggctcacggagattcactctaggtcaagtcccttataaaattatagggactccctttccccatttcaaactcacagaatgactgtaaaacttgtgtttatttcaggtgggtaactcctcccacatgagtggtctgcctaccctcaggaatattttttgtctgtggtacctcagcctatcattgtttgaatggctcttcagaatctatgtgcttcctctcattcttagtgcctcctatgaccatctacactgaacaagatttatacaatcatgtacctaagccccgcaacaaaagagtacccattcttccttttgttatcagagcaggagtgctaggtgtgctgtgtggcggtatcacaacctctactcagttctactacaaactgtctcaagaactagatttatacaatcatgtacctaagccccgcaacaaaagagtacccattcttccttttgttatcagagcaggagtgctaggtgtgctgtgtggtggtatcacaacctctactcagttctactacaaa

SEQ ID NO: 97467 - DNA, 1071 bp, Homo sapiens
attaggaagtcaacacaaataaattacacatgcatgtaggataggctggtatgggcagcaaagaaataaatgatcatcaaataatcatagtgtgtgaacaggactttgtattttatgttgagctcactggtatcagatttttatgctctacactcaggacctctcctatgcttggagcttcagctaaagtcaaggcaaagattgcattttgaggaggagattgtgtgtgtgtgtgtgtgtgtgtgtgtgtttgtgtgtgtatcggggagaaagtaggaggaaggcagaagaaatagcaatttagtttgaaagaaatggagaagaaaacaagtataaaaatattaccaaaaccagtaacaaaggtgatcaagaactgactgtgtctgtaattattttctaggtttttttccattagcattatttttgtctaatgttattaaattatttttatattatatgaatatgccaattaagggatatggacatttcaagactaggcacaaaggcatttttcatctggtaagtgatgagttttgcttctttagaacgtgtggccagggtagaaattcttagtgtttttaaagcaactatttgaaatagctcattcacgcggccattagtcttttcaaaatttatttttaaggtagctgtggaaaataaagaggaaaaacactgggcaacattcaaaataacattctcagacaatcctaccacctgaaatgaatgatttatggtacatttggcattctctactaccttttacattatacttacaatataaactgtagctctttcatcttttaagctgtcagactaatttcaatatgcacattgaaaaatgtgctgaggtgtttaagaggtagtcaattctttattataaattaatttttcctttataatttgaaatcagaattttaaacattcagaggttctaaaccagtaactcttagtttaagcaaggtaccttttaagagccctgaaaaacctagttatgtgttaaactctatcttagaaatcttgaaaagcataggatattgtttttaaaagtggacatgtggagtatatgtttta

SEQ ID NO: 97468 - DNA, 1048 bp, Homo sapiens
taagggagagaaagctttattggtcctcttacttatttgaatgtgaaagagagttgtttggatatttttttgataatctaggaatccctggcatgagtgccccactttgcagacaatgagtttccacctgggcctggacactcggatttctagagattcattttagcatccatttaaacggcttccataaaaccaactttcatttgtgctcaagtgcttgatactaatgttgacagagaaacatcccaccagggaactgaagtgagtgaaagacaggacatgtagctttacacacacacacacacacacacacacacacacacacacacacacacacacacacacacacagctttcctgtttggtttgccctctttgtcctgcctctagcctgacttgcctggtctaggccctcacttgcctggaatgattataggctctcacacttgccgggtgcagacctgatagggccaatgtctcttgcagctgcagagcccagtcaaaagatcactgagcttcagtgctggcctagaaataagctgggaaagctctctcctcaggaccttataagaaagaagaaaagaaaagaagagaagagaaggggaaggggaaggggggaaggaaggaaggaaggatggaaggaaggaaggaaacgaaaagaaaagaaaagacaaaaataccagattcagtttacaaacggaccccatgtcagacaggcccacagcttatgaaattgcccttcccttgctccactctgatcttgatttccctcttatttccccttcatctttttgttgcttggtttgctttggctgtgggttgtaagaggttagggacacacactgaacaacctttttaaacttcccaatgattgtccaagagggtcacatccccaaagtaaaaaaccaggataacaaaatgtcagaaagactagaagttcccacaaacatcctggactgcaatgctagcaccttttggctgaaaactccacaggcatagggttggtcccacagaaacctgttagggaatattttcttgaaattgtggca

SEQ ID NO: 97469 - DNA, 1055 bp, Homo sapiens
ctaattcacttggaactttatagatggcttttctctttcccatcacagagcaaataacaatgctgaggaggttgagataggactgcactctgctcctctctgtgtactatttaattctaggcatgttttcagctggggatttatagcagaacaagacagtgcgtgaaatatctttcctttatttttaaatgattagtaagtaagaatgtacctctaagacaaagggggtatataaagtccaactgcttttgccagctgtgccaatttgcctaatcctagaaatctgttattatctcatttttaatctcaaatatgaagtttagttttaggaggatctttgcctaacagaaggaacaattgagatgaaaatctctgattcctatgaaatacactgctcttggaaaactttgcatggatttctgatatacacagagatttctatgaagtatgaccacacacacacacacacacacacttcagatcccaagacttcaagagacctcagagatagagctacctagcccaacaccttccttggaaaaagtcaagagccaaaaaggccaaatgacttgccaaatatcatacttcctgcccaagattgcaggcaacggcagtaaaaggaatcacaatgacagccattattaatttagttcgtactaagtgctttgcattcattaatttaggtctcagaataaccctatgtagctggtgctatttatcctaattttagaaatgagaaagggaaaccttggagatactaaatattgtccaaaatctaacagccaatggttttgaaaaccagtaaagatagttttcagagctataaggcaactctaaagtctatgtgcatagccaccctaccaggctatatattataccagaatctagtagatgctatcttattttaccataccaagacggcacctatactcagaagaaaatggaaataaaagtaagacattatgttttaaacttttatagctctttgtggttactgagttctaactaatattcaccctattatagagaaaaaaatgagcctcataatatgatct

SEQ ID NO: 97470 - DNA, 1027 bp, Homo sapiens
gatttttgtagtgtggggaattttgcaaatcttaaattgtttgaactattgagtagggaaagggccagataacttgttcttcacaatttaggcaaactccaattggttcctctgtctttttttgatccattgtccacattgctcttggagctttctaaaacacacatctttaaaaatattctgcgactcacttgtatattgcaattccgtaggcaacttgcaaggaagcccttcagaatcaaaaatcaccttttcagcctatttcccagtactctcctttatactccggccatagataagtatttcatacatctgagagatgccatgcactctcatatgatctattctttttaaactctcacttcttcaagacccagcattatctgtaatcttttgagtgacatcatcctcaacttttctaagcagttacttgcttttttgttgattgcactttatatactttatgtaacttgtagtctcctgacctcttgttatttgttctgtctacctccctcatttgacctaacactgaagataggccatgttccttaatttttactttctcacttttgctgtcctcaaacagaataacaggaaataaaaacaaaacctgtgcctgttacaggtatgttgagtggattcatataactgatagatctgactttctcagcatcaatggttggtgtgctgcttctcttgaaactcttacaaatccaggaattggagctagaaagtgagaaggactagctcaagacataagaatagggaaactgagcacattgagggtgggggggattcatgtgttttgtactctcaatgcctgacataggaaaagctctcatcatgaatgaattgaactggagatgacctcacaacacaggtgttcagggggattacagtacaggagctcatccctcattcacatgaatccatgatttggataaggtttctaacttgtacataaaatattttgtgttcgtttaatgagttcccattgttgaagatcccaatacccctcactccctgc

SEQ ID NO: 97471 - DNA, 2484 bp, Homo sapiens
ttcatatatcacactattattctcttatttctctggcctcttgctctcaacgtcctgtaagtgttggtgttccttaagttctacctagtgtcatcatttcttcattctgcatattctttccctagggtttcttcccaacaccaaaggacttaccatctgtctctctgaatctcagatctccagctttgatctgtttcctttactttagagctatatatttgcctgcctactggcctgtctctcacaatccatatattcaagaatgaacactatactttgcttcaaaccttcagaacattcaaaccgtttatgtttctcatctaatcaaatagagttactctctaagccagaagctgtaaactcatctcttttccctttattcaagctgtcaatttttgtctcctaaacatcttctagttatattctcatttctctgttcacattgcattaataatgatgataaacatttgcattcttattctgtgccaggcaacatgctaactgctgtatatatattattatatttgtactttggcaagaatcctgtgaagatttttatctttggactactagaagagaaagctgagttgtagagagagtatgtatttaagtccgtttgggctgctataacagaataccacagactgggtaacgtgatgaacaaaaatttatttggctcacagttctggaacctgggaaatccaaaggcatgatgctagcatctggtgagggcctttgtgctttgtcatcccatgccagaaggcagaagggtaagagagggcaagagtgagcaagagatggaagttgcaacctcaagctcttttataatgagcattaatccattcatgagggcttcaccctcatgacctaaacatctccattaggctccaccttccaatgcaacagttagcataagttttcaacacatgctttttgtagcattcaaaccatagcaggaagcaactttgcttaaaattgtatacctggtaagtggaaaaagagggatttgaatataggcaaatgacttcagaggatttactcttaatttctgttgtactgccttctaatcttggcctccatcatttcagattaccaaagctgtctcttaactggtttctttgtctccaaccttgtgcacttgctatctattctgtgtgctgcagcctgagtttttaaaaaacagaaaatgaggggccaggtgtggtggtggctcacgcctgtaatcccagcaagttgggaggctgaggcgggcagatcatctggggtcaggagttcgagaccagcctgaccaacgtggagaaacactatctctactaaaaatacaaaattagccaggcgtggtggtgcatgcctgtaatcctagctactcaggagcctgaggcaggagaattgcttgaacacgggaggcagaggttgcagtgagcagagattgcgccattgtactccagcctgggcaacaagagtgaaactccatctcaaaaaaaaaaaagaaagaaagaaaatgaatctgccacgccattgcttagaccctttaatgactcttgagtgttcttgggatgaggtccaaatttactaataaggcctgcaaagccctgtgtaattttgctcctagttatggctggcatctgcaccacaactacagccactgccacctccccctgccacacacacattttaaaagtaacaatagtagtgttttctgtgttttgcatatgcagtcttttctcatctcccagccttcttgagcttttcctctgcctgagatacgctcccactcacatagacattgggggcactaaataaaaatagctgtttaattgaattggaatcgttccacttggaacccaagtttggaaattttgctacttcttgttaagctaggccttttattcttgaagttgctatttctcatacaaactcattttatgcattagacacacagtcactattgttatggagaacatagttgtatcagaagaggtatagctttgggtgtggatgtgcgtgtgtcaggggaaagatattctgattatatgatgattttcataaaatatagtatgctgagtttccgaaaatcctaaatgacttagaaatggtgctatatgtggtttgtttgacccctgcaaatctcatgttgaaatttgatccccattgctggaggtgttttgagcatggagcggatccctcatgaatgtcttggcgttgtccttgcagtaatgagttcttgctctatttttcctcccctggaagctgattgtttaaaagagcctggtatcctccctccctttcttctttgcttcctctctcttgctgtgtgatctctgcacacaccagctcccctttgctttctgccatgagtggtctgaggctctcaccagaagccaagcagaggctggcaccatgcttctagtacagcctgcagaactgtaagccaaataaacttcttctttgttttttttttttgtttgttttgtttttttttca

SEQ ID NO: 97472 - DNA, 4235 bp, Homo sapiens
ctaagacttccatattaacacatgtgcatataacacataatttctttgcaaaacaattttatttatttagcaaaactgacctttattatacaaggaacttaattagaactttttactaaggctggccttccctccagagtttttgaatcagtaacatttgtagtatatcgtaagaaatcatctatgagagtggaaaaatatgctttttttctcaactgatatggtttggccatatttctactagcaaaaatactaattgctgttttttacataaacaaagaaataccttaaagctagatttttatctttaatgtagaaattgggtggcccaaaggttgtctgctccagtcattccctcctccatcctgttctttaaaccttaaagaattaaaggcagtttattcaatacaattgttatattatttttaagggatttgaattcaataatacttagagagtttaaaaggagtaaattttcatgtagggactagtacccttaacttctgctatggagatgggattaaaagacccttctctttctctccctaacatgctaggtatgtagtacattctgacccagaggttaaatacagaggacttgtcttgcagagggatgaggagagactagtcatgcctttggaaaagatagaaacctgacttcccagtttttggataatagagatgtatatcagtgtaggaacgcaccatccacccacacccacacacacccacccacccacccacaaagtacacatttacatattactcacagggttgcctggacacaagggaaacagtttcttcaggaaatgtaatctggacattaatacatttgcattgtttgctggactattgtattatagcacataattctgttgggactatgatttttggacttcaactttcagatgtgtctttagtaacttattttgtatgaaaatatgggacattagaaaaagtatatttatgggtttttttcctctgaattactttttttttcttctatcatactaactgtaaagagagttatgtacttattgtaaaagattttaaggataatgttagacaattgtatggtttctttgtgtgtgtgtgtgtgtgtgtgtgtgtgtgtgtgtgtgtgtgtttatcttttttgcttgccttatttagcagttttaacgttcaggtattcctaaagttttgaatctttatcttttcagaatctttagaacacgatgttcttgatgataatacagagcagacagatgacaaaataccagctacagaacagacaaaccaagtgattgaaaaagcatctgactcagaggaaccagaggagaaacaagagactgagaatgaggaagcctcagtgattgaaaccaactccacagttcctggagctgattctattcctgatcctgaactaagtggagaatctttgacggcagagtagtaaatgcttccacgtgccttcaactggatatttatagtcttactgatgtcagttattgctttttcggtggcacttactttttttgcccctctaagggtatgcttgtgtatcatttgaattcagattgcctagctatttgaacatctcaaagttatatatactgggtattaaaattaaaagcaagttatatcagtgaagtaagatccttttgaatgtacaaagacccacactattgagacagcttttagatacttttttgtccattctaaaagtaagcaaacatgattgccttcttgttttctgtatgtataacccgtaaatatccattttgacataggaagaactttggttaagagtaagttctctaattgtgtttgttttaaggaatgaaacttggttaagattttgactacttcattattaaaaattgatagaattttagctcctgagatatttacaactgggagaaatgtctatttaggtgtttacattaagcggtatgaaagttgttaccacataggcactggtacgaattctcaataagaatgcagtggaacagttaagtagaactgtaactacgttggcactggtacgaattctcagtgagaatgcaatgaaacagtcaactgcagtgtttctttttgatgtcttttattttacaactgggccaaaggcacattatgtatataattagtttatatttacacactagcatataggaaatatttctgcacttgaccctatttgaattctgagcattatttataagtataaaatgatgatatataagtgaattttgtgctcttgtttgtattttattaaggaaaatgaaaataatctggcatcagtttcattttgctaaatatctagtcttcttcaaacagtatcttggtgggtgacttggctacctgaaaaatcttaggaggaatagctcacaatacaataaatctgtagattctgcttagagcaaattatggtacttttattcagacttgtttcctttctagttaacagaaatagtgacatttagaggttttaatcagaagttaggtttttctgattcaggaacatcgtaggccagccatttgtaatttttaactttgagaaacaaattttgtgagaataggtagtgggttgctggtagttaattggatttaatatttgtattaaggattaactggaaaaaatgtgtctcagtgctaattcttggacctttaatacagtgtgcttatctgttacggcctccttttatctctcttctccaatattaaaaaaaatggaaatcaaattattatgctgaagggaaaaatatacctgtataagaatggtgtgtttggctaatgtttctaagttgcacacagtttattaacaactgaacaaaacatttttatcatttaaaaatctatttttatgatttaatatctcatatgtgacagtttttttttttttttttttttggaactcaatctgttaacagtctgggacatccggtatagtaaccagagtttttgagcctgccgtattgggcttaaatttcaggtctgtagtcttgggcaagtcacctataaactcactgagattattttttcatctgtaaaatgggaagagttatgtttatttttgaagggtattaggataattaaaaataatgtaatgtgcctagcacactacctgaaaacgatggcatttgttcttattaatgtctttaaaatatgcaaggaccataagtttttcctcttgcagatgaggaaagtaaaaaataatacgaacatgtaattcagcttctcagattcaagccaatgttttttgcatcaacttttctatattgtatgtatgtatataaatacatagattaaggaaataggaaactgaaactctgtggaatataaactttttaaaaataatttcatcaggttttttgtatgttactgacccatatggattttagtaacatcttgcttagtcatgttgttataaaacattcaaattctgatatacattgcttgaaaatgagtgagtacctcagagaaatttgatagactcaaacagatagtatgagaaatatctttgaaagaaatatggaggaaggttaaaaggggattagtaaaattaatgcgataggtaacatgtttgtaaccatatagtatccttttagatacaaaagcttattttcattattattataataaacagttaatggttgaaacttagtaaaatgtcctatttctgattattaagactagtataaatgagaaaatccaagctattaagtaccattagctacagtgatcttagcttccttgcttacaattgttcagtgggtcatctaaattcttctatgtcctgagcatgatctacaaacatggtctagcttctgtctctccgtcttcccgccatcattgtgctgtagccatatggaactcctttcagttctctgaccatgccctttcctgcctcagatttcagcttaaattttgcctcctcagagagatgccttcccaaactccccatctgaagctggcctctgccttttactccctatcatgtcactctctgctcaccatccttatcacaatgtgtatttgatttgtttgctagtttactgtcttcacaacataatgtccgtttgtgcaagggtcttatttttcttattcatgtctgtatctcaagggtctagcacaatgcttgatgcatattgtgtgaataaatactttgttgccaaatccagtgaaaactctcagttcttgtttcactgcttggcagtattgacattgaatattctctgagatactttttttct

SEQ ID NO: 97473 - DNA, 1515 bp, Homo sapiens
tatcagttttacctttttttaaaaaagcattctttttatggtatgtgataatcattagagtactaggtttctacattgttgatattctaatgcagtgattttttggctagcatgtttacaaaatgttactgttaatattgtgtttttattgcccagttgtgtttgtctaggtctcatgcagttattttagtagaatatagtttttgtccaattggaaataacttcctaataataaaactcatggcatctaatcaatactatcaaaaatagcaagtgaaatttatataaggtaaaatttaacttgataatatgattttagtccttctctttcttttatgcaaaatactgttaccattaggttgcgctgaacaagggaaaattcttagtatttttgttatgctccaggaaattaaactatttgataatgtaaattttgttgtattccatgtatttaccagatccattaaataatctttttatacctttgtttatatttacttatgtgcagccttctcaagatatgtagtatgtttttgcatgtttgttttagacacagagatcttttggccgtctcactcccttttctaaaacactttcacttaatagtttagttttagatcattgcttaataattaaactcttggccaggcacggtggctcacgcctgtaatcccagcactttgggaggccaaggcgggcggatcacaaggtcagttcgagaccagcctggccgatattgtgagacctcgtctctactgaaaaatacaaaaatgatccaggtgtggtggcgtgcacctgtagtcccagctacatgggaggctgaggcaggagaatcacctgaatccgggaggcggaggttgcagtgagctgagattgtgccactgcactccagcgtgggtgacagagtgagactctgtctcaaaaaaaaaaaaaaaaaacccttaacttgtctaattgatttgctcagaaatggtaaataattaaatggtattctgtatgttgatgaatactagctattatgagtggttataatttaattgaattttatttactgagttattgggttgagttggggtgaaatttatacctttgtttcttaaatatgagttagccattttccttaaggcaggaaaatctcgtaaaaagtgccttgtttaaaacttgtgagttaaagacatattgtcaattttaatttaacacagttcctttgggtaagtttgtagcttacatagatagagggtactgatgtgttagcaaggcaaaaatatatgaagttgttttgctagactattatttaattttcttaagaaattattttttcaagaactagagtaaaaacctaaacatgatattctttacatgtttttgcatgtgtgtagtttataggtggggcagtgatattcattatataattacactgttttatgagtttcagttttctagctgagttgagactttgcccaaacaactggaagccaattgttactatttggtaaaacaaaataataataatat

SEQ ID NO: 97474 - DNA, 1028 bp, Homo sapiens
atcaaagtgaatttgaatacagatagctatgacagaggcctgtattcttccaacactgaatcaatgcattcatcttctccaagtctgcagcatcaccttcaaacaaaatgtcaatttttttcttttgcttaagtcgtgctctgagctgcatgctgtcacatgcaaaccatctgccttgccattgcagccttttggaactgaaaattaaaggatttcatactgaagatgcctagaggaaaaattgaagtcttttccatgactagccctgcttatagaagctaaagtgaatatctgtaagctaatagttgggacaaaaaaaaaagacaggaagaaacagtcaacacagtgaaaatcttgataatgagtcccatactttctgtcttctgctaaggtcaagatagatagttagcaaacaacacccagctatacctatccttctcatctaatctaggaggagcaataccccagacgtctcattttctgtctgaaattcctggaaagaagtcttactggctcaaacccaaccccaataaggtaatgttattacatgaagacaaaactggaggcagggtttgataactccataatgctaaaaactgaagcaacaattccatttggttaagatagtttctagaataataactttcatacttctctttggattcatcaaagtggctatgagcatctttttctttggctttccagaagattgaaacttttctcaagacatctaactcaacactgtgacacacagttatcaattccaagctggcttcctttagtaaacaactagaagtatatctgatgaacagatgaagctgcatttgttttgaaccccggtggcttatgagtatattgaactattaatgaagaccacatcatctcaatcatctactctttgctaacagacagtgttttagatttctgatttttaaatgatgtagatacttgaggtctgaaaaaaaaacttttctgctttaattcttatattattaaaagtattgcagtggctccttcttagcagcaga

SEQ ID NO: 97475 - DNA, 3113 bp, Homo sapiens
ctatgtcttaaagttcaccagtttttttgtgtgcagtgtctaaactgttgtacacataatctgtggattttttttatactagacattgtagtttttatctgtagaagttcaatttggttttaagttttacatttttttatgtctacttagcatactgaatctttagattctcaaacatatgaaatatagtcatagtcataagaattgttttaatattgtgtactaattcagtcattttcataatttctgggtcaattttgattgatttttcttatcagtgatattttcctgcttattggcatgtctagtaatttttaatctgttgccagagattgtgaattttaccttattcaatactgggttttaaaaattcctatacagtactcttctgaatactttacctaatggcctgtgtgttaggaggttctcccactctgattggaaatgggcaatattcttggccctgtatgaatgctgtttcttttcacctttttgagtagtttttttcctccatcctcagatagttttctcacatgcatgcaccagtcagtactctgctgaattctccagtagaccctctgcaaatctttgttgttctttctctgtgccttctctcctgcttggtaccctttcttgtgaactcaatatgccttggccttctcagaattctggctttgtctcctcaactgtgagagtctgctacatttcatctgggtttactttcttttcactgccgagtggaaactctctataggcaataagctggggcagttgtagggcatgttttgtttttagtcttctcagggaacaataacctacattgcttgatatccagtgtctttaaaactgttacttcatatgttttgcacagtattttaattgttttaggtgggacgttaaatctgactcctgttgctctattatggcctgaagtggaagtcccctgatttactatcacgtaggcttttaagagttggagcattttaaaaacatcagtttgtacagaactaagcataattttatttgctagtagttatgtaggaatctactacagaatctactagcaaaggtagttctaatatagcacatatttaaatatattttgtagtacagtatttttaatgaaaatttgaatgttcttcagagatttataagaattagtattttgctattttgttaaaaccttttaaaatttctaacaagtataggtagttcttggtaatggaattaaattttatgtgtatttcatgtatataaattttgtatgtatttatttatttaataggtcttcatcctccaggtccacctttagcaagacctattctcccccgagaacgaggtgctttggatagaattgttgaatatttggttggtgatggtccacaaaacaggtaatatttactaaggtggtagataaatgaaaatgaaaacaggatgtgtgtgtgtgtgtacacactagatgttttagttttgtggcacctattttctgactttagagcatagtggagtattttatagccctgcaaaagagtacatattcaattatttgacagtagaagttttgacaacatagtctggattaaatccattttgaaaaaatattaactctgctataacttttagagaaactggattatttcattgaaacttttaaacttaaaaagcaaaaacatagttcaactctgataggttctaagaagtggagctttataggtatcagtactggacttggtgatagtagtacttttaatgttaagagcaatttgcatgtatttatttctcaaaatgcttttccaattattcttaaaataactctaggaagatcgtatgatatgtacagagcaattgtcaaagtatagatttttaaaaaattcatcggataatagatgtttgacagcgctcctaattaatattatttaaaaaaaggaatgagaatttagtgtttatgtaataaatcgtatgttattcaaaatagaatgacatttgatatagcgaagtattcattgagtatatccacagagaactgagaaagtatataaatagatgtttagtgtaactgggaaaggtataagaatcatgtatagtaattaatctttgggttgtactaaacaaaattaaatatgtttgtttgccgcaagacatctcaggttttaataatattcattgtgaatctctaagagggttccaacttttccagccttatctgaccacagatttggaggctttcatccccagcactatactctgggaaacaccaaaatttaagtgttcagttgtcaaatatgtttctgctaatttaataaagatatattcatttaactgttagtttattttaaatttgatgtataaattatatttttaaatgcttgaaatttgggctttggttaattttggcttttatttaatgaatattgtttgttgtttactaagtctcatataatttgttatggcatatttagctgtgttaaaatataaattagccatgatggctaaattagtctctgtcatgagctttgtttgcatttgtaactggtctgttcatttttccttacggtgtaggtatgcacttatatgtcagcagtgtttttctcataatggcatggctttgaaggaagaatttgaatacattggtaagaattattgggcaatgagatttaaatattttatgcttaaatattttattctatgccattttctatgcagtgtcattttattttatatactctctttgtatacattggttaggcatattatccttattttagtacatagagcaaagcagggaagacaattcaggtttcttcctatataatgtacagcccctaggccagttgttctcaaaccccactgtgcatcacaatcacccaaagagcttaaaataattatgatacccaggacccatttacaaagagtctcctttaatggactgagtatgaggtccaggcatcagtatattttttaaagctctgcagatgattctcatgtgtagccactattaaaaactactgtggtaaattgaaaatgcttctgaaatattatgtactacattttcatgggtaaatgtgcaagcttctggattttaaaatacctaatgattctggttactagaaatg

SEQ ID NO: 97476 - DNA, 1039 bp, Homo sapiens
ttttgttaatgtgggctagtagattttttttttttaaggcatagaaccttagtattttctgatagatattttataaagctctattaaatgaacatattctctttatttcatagattatctcttttcactgtggtggatctctaggggaagatcccattctgaagtgtaatagactatagtaccctccagtttcttttggagtgtgactggggcatggaagtccactgctttagcacagatcacattgttttatgtagatttccatgtcatattgttgcatatgttagtaaattatttattttgttttagattattctaatgtagattactttgttatttcatgactaattactaatatataattaataatgattttgaggctaggcagtagctgatatcaggtaatcagagtatttgtgtagtaaaatcaataaaaaatggaaatgtcacttagtacagtagatgtttttcctgttttccttcaaaaatgcagcataagattttagaagactaaaaaaactcttcatttattaacaaattaagaatactgactataaatgaaatgtatacaaatcttaaaacttttaaaatagttacataaaacaatacttttaaatttgacatataatgacaatacttaaggcagccatatattttatgaaattgagaaaagttaaattgattgaaaattactaatgtttctgttgttatctggttgatttgagatacccatgatttgtaaattaaaattcctggttgtttaatgaaagaacttttttgggtgcgaatgtatggattatatacatttgtatatctaacttattttaagcaaaaagtttagcaacatataaagtaataaaaattgtattgcacatgtaagaatagggctatagaaggaataatagcctagattttatgatcatgtaaatataacatgttttactgaagtttttaattagtttctgtgtgaaagactgtgtttaaattgtacattgtcaaaaatgtgaatgagttaaataatttattataaagaagatta

SEQ ID NO: 97477 - DNA, 1023 bp, Homo sapiens
tggagtagatctgttgaatgttttggccaaaacaaatttgccaaaaggatagcaataccataaaggagaatggaaatggtacctaatagtaaaaatactttttcagcatttctatgactacttagattaattactttgataattccagaatatacttattcacttatcgcttagtttttagttttttaaatcttgaaaaacaaatctgcaatttggagttttgactaattctgataaactttctttcctttattatgatgaggaagattactttaaaaagacatggcacataattgggtgatttcattttactggatttgttttgaaaagtggtatcagtagctacacttagatcatggcttgttgtgtaaacatgtacagttgaactgtaagttcagaaatagagtactttgttttcaatgtcacatattatagatttattattataagtaattttgacactacaatgccttttggggcgtaaaattttaataaatataaattgtttgtgatactggctaatatggtatattggaaattaagtctagtatgtacttactcttctcagagattcgtcagcgaactgcagctcaaagaaacctttctccaacaccagcaagccctaaccagggccctcctccacaagttccagtatctcctggaccaccaaaggacagttctgcccctggtggacccccagaaaggactgttactccagccctatcatcaaatgtgttaccaagacatcttggatcccctgctacttcagtgcctggaatgggtaaacagagcacttaatgttatttacagtttatattgttttctctggttaccaataaaacgggccattttcaggtggtatggaaatggcatttcatttggaaatagcagagcagttatctgattaagcaggagttccatattcaattagccataactctttacagctggcaccttgtgatactgaaacctatttcttgagctcatttaactgttatggcttctttgtttaaatagcaataa

SEQ ID NO: 97478 - DNA, 1076 bp, Homo sapiens
ggctggcaagtgatatatattattattaatagaaaactttctgcttaaagatagcttttctgtatggacttctgaagttaagctgagattctaaatgcagcaggctgattagcaatcttaattctatctgcaatctttatctgccttgcatgtaacatatttacagaatggacaagaagatggggacgtttttgagaggccattttcctgtttatcactctaaataagttgggtagcaggcagttggaaatttaacattgaaatgcaagaggaaaatagattgatttcataggtgtttattaagctcatactctgtaccagttacctttcccacatcatgtgtctacagagatgtagttcctgcttattagcttttgattaaaaggggtatacacatgtaataaacggtatggtaaggaccaaaatgaagataggcacaaattacaatgcattataacttttaataataatttgctgtgagaataggattgaaaaagtactcttcaggtaaaggatttactccgtgtgcaagcactggaagagagaaacaacttggcacctcgaggcactacaaatattgccatatccctgaaaaaggaaagtaggggtcatatgaaggagggatcaaattatgaagggctttttctgcatcattatgtagtatagttctggagttcaggactttatcttatacacaacatataaagtcaatggaggctttgaattttacatcaagttagcattttatgaagaatacttttttttttttttttttagtaacatggaggttatgttggattggagagaatatgactgagccatagagaacaattaggaatatcatctaatatagttaaaagataaaggcctgtactagataaggttacagcaatagcgttggggaaaaagaagagatttgagagataattcaggagtagattgatacaggcaattagatttggaaagcggggcaggggttgggggtgggaggaagaatcaagatgtgacctacgtttttgtttggacaactgcttaggtgttagtatgttaagccagataaagaacataattggaat

SEQ ID NO: 97479 - DNA, 1076 bp, Homo sapiens
tttttaattattgggagagcaaaacctttgttgggataactaaaacagagtcctgaagtactttagttctttttctaaattttatttaaaaatataaaagggctaggcatgatggtttatgcctgtaatcccagtgctttgggaggcagaggcaggagaatcacttgaggccaggagttcaagaccagtctgggcaacatggtgagatcctgtctctacaaaaataacaaaaaataccaaagaatttcatttaatttagccctaaagaaaaataaattctgttttaccttttgaagtcttgaagacttgacatatggaaatgtctgttgtttgatagcttatgttatctaggaggaattctgataaaaaccagaggaatttattgtccacagagaggatttagtgagttttattttgaagagagtatatttcaatttttgtagtatttacactgacaattatatatgctttttaaaaagtatctactcatttaagaaaatttatacatttcctacagaattctagccactatctctgcaattccatctttttttccccgttttctttctctgtatgctttttaaaagtcctccttccagcctgctactatttcagtgggtttgcactggagaagtgatacgagacttttttattattgcggaatccttgagggttatgggcattatgcttaacctatattctcttatctcccttcccttggtaaggacaaagcctggtgttttttgtacttttaggtaattgtccaaatgccaaataggaatctggtgctagttatttggtgttttcatgtcacaaaaataaatcatcacaatattaaaaaaaagtgtattatctattcctgtgtaacagattgccccaaaacttagtagcttaaaacaacagatgtttattatgtctcagcttttgaggggcaggaatgttaagagctgcttagctgggtagttctatctcaggatcttttgttcttaggtaaattgcagttaagctgttggtaggggccacagtcatctcaaggcttaactaaatccatacaatcactgtagataaagtcattg

SEQ ID NO: 97480 - DNA, 1035 bp, Homo sapiens
tattaaatggtaatatctgattgagtttgaatttctttcacaatttgaaaagatttttttagtagaacaattgttctaaaccttcatttgtaatccaatatacctgaggaatattacctagtaatatgagtaataattgctctatatggcaatgttttatgattttctagtagatgaccatgctccccgaagggcactgggcatggagtagtgggtaatggcaagtggggcagggtttgtaaaaacgaaagaataactgctcaaattattctgaatatattcacctcaactctcttcccttcgttttactgctatatggtcactgctataaagcaattgacccttattttagaaatattttataatatagcactgtataggaggcgtatcatgactgagaattttgagagacaatttaataaaaagtttgtttattcagtcaacaagcatttatgggtaccagttgtttagacattggattataatggtgtatggtacataaaaatacaaaattctctgactgtatatcttagactgcaaacattaagtaatgagtatgatgaatgttataaacagaagtgtaaaatgctatgggagcatttaataggggcattgcctcagtctgaatactactataaaaaaatgtgtttgtttagtctttagtgcagggcatattttcaatttgaaactcctgaagcttgtaaaattataagttcgtatgtagctacaagagctgaaattgagtgctttcataatattgcaaaataattatctctgctactttctttattttcattttttgaaatcttttggaatgcttttatcccagaagtagtggattttataattgtgagccccttttccttgtttcccttatcttttttcataagaggagaggaaagaaaattacaaaataagtatgagatgtttagtaaatttaagcacttttaaatactcaaaaatgcactttacatatatttccatataaagattgattttttgatcataaaagacttgtatctagttgtaacagaa

SEQ ID NO: 97481 - DNA, 1032 bp, Homo sapiens
gcatatttgacaagatttgagaaaatttaattttgaaataaatgttctttaatgattatatcaaaatgtaaaggtttgtgataagttttaatgctgtctcttgtttctgtttgtataacagacaaaaccttcaactgtagaagttctagaaagtatagataaggtatgttctttggctgtgaggtattttaattcattttaggtattaagtaaatattattgtagtatatattattttggagaccaaatctggtatgggaatttagaaatgatatagagtgagtctgagaactttaatattatgtgatctcaaaaaatccaaagtctatccgtgacttaagaagtctgtttcaagtaatagagccagttagaatgaaattagatctgtagtgtggtgtaaatcagtgttacaggtaggacaaaatagatgagatactgtacaatagtttttatcagtctacaaaattttcacagctttttatatactattatcaaaaatgattattttctgggaatattgagagtgataaatagatgggttactgttttaatttttattaattatttttcttattgccagattttttaaatgccttttataggaggaattattacttatttgactcaacaaatattattgccgataccaatttcattccctgaatctttgccaatttgatagtttaaaaatagtaactaactttgcattgtaaaaatgatgttagaataagcattatacatttttaacttcatttttagttttctttttcatattatgttttgttttaaactgttagaatattatgctttactgaactttaaataagagttttttcttaaatatctttcctgctaaaattttttaacattttaatttctttatgaagtttgaaatttactaacatggaataattttctcttaacaggaaattcaagcattggaagaatttagggaaaaaaatcagagattacaaaaattatgggttggaagattaattctgtattcctcagttctctatctgtttacatgct

SEQ ID NO: 97482 - DNA, 1851 bp, Homo sapiens
tgttctggttttgaagaatggatttttaaaaggtgggcttggtggtgtgcgatggctcacgcctataatcccagcagtttaggaggccaaggcgggcagatcacttgaggccaggagttcaagaccagcctggccaacatagcaaaaccccgtctctaccaagaatacaaaaattagccaggcatagtggtgcgcacctgtagtcccagctactcaggaggctgagccacaagaatcgcttaacccgggaggcagaagttgcagtgagttgagatctcgccactgcactccagcctgggcaacacagagagtctccatctcaaaaaaaaaaaaaaaaaaaaaaaaaaaggtagactctatcccaataactgtctgaaatcaaattccatatatgtggcatccaaataaattaatatttcataacattttttaggcagtattgcaacatctatagtgggtatgctgtgtgtttaacttaacattttaaatacttgctttatttctagctgtgaattcctttggacaattgatgatatttatcattgtgcccagtttctacaaataaaagatgggtggattattttctcgatggagggtaaggtacttttctttacagctagttcttgagtctaatataaaagtgtcacataaagctatttgtgaaagtctcctttgattatagccttgaatagtagtttgctattttccttaacttttttcttctcttttgaattacttttctatttttttattttaatacttccatttgttctgtaggtgtccaatgcctctgtttaacagaattatttcacttggatgtatgaattatttttatttctgtatttctgtatttgtgtgcaaatggctatcttgttttcttatacttcctaagtttcaagcttatttgaaaggtagttgaaagtaagtattctaggccgggtgtggtggctcacatctataatcccagcactttgggaggctgaggcgggcagatcatgagttcaggagttcaagaccagcctggccaacatggtgaaaccccgtctctactaaaaatacaaaaattagctgggcgtagtgttgcgcgcctgtaatcccagctactcgggaggctgagacaggagaatggcttgaacccaggaggtggaggttgcagtgagccaagcttgtgcccctgcactccagcctgggtgacggagcaagactcagtctcacaaaaaaaaaaaaaaaaaaaaaaattctatacaagacttgttttttacagactgtatctttttacttgaagcttatcataaatattgactaaagtcacactgcctgtgcttttagaaattataggttaaacaaaattagaaatgcagtttgattttattggataagcttttagaggaagtatctcaaagttacagctcgaaaatatgaattgtataaattatataaccccgtctctactaaaaatacaaaaattagctgggcatggtggtgggcgcctgcaatcccagctacgcgggaggctgaggcaggatcgcttccatccaggaggtgaaggttgcagtgagccgagattgtgccactgcactccagcctgggcgacagagctagactctgtctcaagaaaaagaaaaaaaaattatataaatgctcttttcaaaagtaagaggagataaggtagtctaggataaactacttatttttttttactccttattaccataataatagagtctaactatacttggtacacaatttaggttttggggtattgctggaacagccttgttttggatcagcattatattgaccctgttatgaccttataataatctgcccaaggatcaaatttatctcttc

SEQ ID NO: 97483 - DNA, 1056 bp, Homo sapiens
tgcaaaggttattcggttcccatgtattttccatgtatttgaaagaaaggagagatggattagaaaatagctacaactacagcagtaaaaacagtttgtattgagcaatcactatgtgccaagcactgttgtaaacaggttagaatacattaggtcatttaagtctttcaacatttaagggggtccttaactatccctcttttacagatgaggaaattgagtagcagataggttaagtaactgatttgtccaagattttacagtaagtgatgggccacaggacttggagttaatatgtttgggtggaaaggagagcaccagtggttgaatacagaagaggtatgaaattaaagctatggagaaatatttgatttaattatttaattttgttgtgttttcacatctgttagaaagtaccacctattacatatgcattacagtaaaacagttcctttaatatcagaatttgatagaaaaattgctgaaactgtgctggttgactgttctttgattatgaacctgaaagcatggatatggcatttaatgactatcactctaatattgttttagagtacaaatttaaaagcataatcccttgcttcaggggtcttagaggctaagatgtagattgtttcattaataccaaaacaattctttaagcaaataattgtcaaaattggtatagtgatattatgcatatatttcatattgtacttactttaaaattgacatgcagtaaacaaataaaggctgtgcttgcagacttctagtaccagttctgtccctagctggagctacatgattttggcaaatcatttaacttctctttaatgcagatttaaacactcaaatgtaatcaaataaaggaattgggttacacaatacattgtactaatactatttcttgtgcttattactcacttttcatttcagtagatttgtttaccaacaatttgataatgtcagaggtggtttcatatattttacatataaatattcaaatctaatctatacaaagcagactttatttctgattttgtgttattcataataact

SEQ ID NO: 97484 - DNA, 1036 bp, Homo sapiens
ggactcctcaggacggactcccttccagatgcacccatctccatccttctcaactccccaacctttgtcctccccactcttcgctcgcgcggcggtctgagaccaccaggaccagtttcaggggtttccttctccagcgagacttggcagaacaggctttaaaagcaaaggaggcagcggaagagtaagaaataactatattctaagagtcataataaatggcagtacataactgcgacacgacaccgagcagcctaagctggctgcggaggccacaaacacaagatcctaacctcccggccgacccgccccaacaactacccgcccagggtacggtcacgtgacgggggagcggcgcgcgccgaccgcggcgccaattggcgagcggctggagcgcggggtttcatgggaaggagttggcccggcttgtctctctgtcagtggcggctgctgcctgctctggaggcaggctgggcggtggcggccgagactggcgggggtggacgcccgggccgggctgcgcccgcttcttgcaggtagaacgctcaaggcgagggcagttgggagggctctgcagcggggaggcatgctgagctgtgcccctgggaaataagctgcgggttccccgcttgcctctccttggtgcccccgcctcctgccaagtggcctagagctctgcggcggctgctagtcaggctgcgcggtggtccgcgcagacccaggctcgccgccttgttccctggatttcccagcacactggcagtggtggcgctggagtcttgaaacccttgtttcccctctagggctggtagtttctccagctcggttctaggagattccgggtggtgactggcttgagccccagctctttggcccacttgtgtcgagcttatctcgacacaggtggggcaaagaggtcagaaggtcccaaactagcatttcctacgctcagctgtccgctttgagcgttctctccgcttctctttctgagttgtgcggaggctccaagagttagaaagaccagaagggactgaaa

SEQ ID NO: 97485 - DNA, 1053 bp, Homo sapiens
agcggccccggcccccgccacggccgcctccaccacctcctcctcctccacttccttatcctcctcctccaaacggactgagtgctccgtggcccgggagtcccaggggagcagcggccccgagttctcgtgcaactcgttcctgcaggagaaggcggcagcggcgacggggggaaccgggcctggggcagggatcggggccgcgactgggacgggcggctcgtcggagccctcagcttgcagcgaccacccgatcccaggctgttcgctgaaggaggaggagaagcagcattcgcagccgcagcagcagcaacttgacccaagtaagtgcaaaagaaattgccccctgatttattgctgaaacctgtaaggctcgaatgtgcaaaactgatagttttactaacctataaaaacgtctagacgcctacccaagcctaggcgaacaacatgcatccataaaaagagcttcccataaccacctaccctgggcgctcagttagtacggtaaacagagcgcgagcattaaggctttttatgataattccccacaagttgtgaaaagcgaccatccttggtgaaattaatttaacgacctctcttccccaccctgtggtctctccctgcctcccctcctctcctctctccccgtctccaaacctccctctttgtagacaaccccgccgcgaactggatccacgctcgctccacccggaaaaagcgctgtccctacaccaaataccagacgcttgagctggagaaagaattcctcttcaacatgtacctcacccgggaccggcgctacgaggtggccaggattctcaacctaacagagagacaggtcaaaatctggtttcagaaccgtaggatgaaaatgaaaaagatgagcaaggagaaatgccccaaaggagactgacccggcgcggtgctggcgggagcgctcaagggcagcggatttgttgttgttgctgttttcctttgtgggtgtttggtgcttgatttccagaaactctccagcgacttggacttcttcttctttttttttttctttttaga

SEQ ID NO: 97486 - DNA, 1021 bp, Homo sapiens
atcagggcccatgaaggtaaatgcgcgacttcttggagaagtagctttggcagacaacctggcttggtcgggcagtaggaaaaggagtagacacaggatattcccctctcgcttctttttcttctgccgctgagggcatttgttcctttctggaaaataccacttggtaaggaggagggttatttggatcctggtgggggagggtggttaataaagccgccatccttgggatggattatttttctttctttctttctttttttctttcttaagaagaatattctggttgttcgcctgcttggtaaccctgaccctggcagaagaatgagggaactcattgcttcaaattgtcgccaagcccattaggctacctgaactgtctcagaaagtgcgggtggctgcgtcgaacggtggtggctcagaggaagagattggggccggcagcgacctaggtacctcactctgggtgggacccagaggttgtaacgttgtctatatataccctgtagaaccgaatttgtgtggtatccgtatagtcacagattcgattctaggggaatatatggtcgatgcaaaaacttcacgtttcttcggaatagccagagaccaaagtgcgacatggagactagaagcagccggcgctggtcagccgcctcgttctgttttattaccttggactccaggaggatcagctgcgcctggtgacatagagcagcttttcctctccagaagctcctcacctttaaacagagtatcctctgggtgctgaaaagaaagaaagacagaaagagagaaagagagagagagagagaaagagagaatgcaagcctaattggttgcatggatgcagggccaaagggctaggttttggggtactagggagtgaggtacaaggccagcttgcccagtcccagctctgccctccaggaacatgaggtgcaaaggtacccaaatgggggcttgcttgtatttggggcctgtgggaagaaagcaagcttcaaagaagcccagtggggagctc

SEQ ID NO: 97487 - DNA, 1063 bp, Homo sapiens
atagcctctagcttctgggctcaagccatcctcctgccccagcctccccagtagctgggactacaggtgtgtgccaccatgcccaactgatttatttgttatatttttaattttaggaacactttaataaagttcaacaacacatttggattgctaaaaaaatccaaacttgtaaatatttttctcccatacttctagagggctctcttagtgaagaagaaacagttatctgttagtttcatctggtttctctctcttattacgtctaagtaaatgtaaatttaatatttttatttaaaaatagcatgcataatatgtatccagttttataaaattatttctatgtaccaagttatttatgcaccgatcactcctaatatctgagtgtctacatagagctgtcaagaaagatgttcacctaatattaatgatggttacttctttttttttttaagttcagctttttattgaacacgttataaaagaggtttagtcaaaaagaccaaggcccatgtcatcatcagactccttggattcttctttctttgcttccactttcttctcctcagctggagcagcagcagtggagggggcaggacgtcctgctggtgcagcaccagctgctggagcaggtccaccagcccctacattgcagatgaggctcccaatgttgacgttggccagggcctttgcaaacaagccaggccaaaaaggttcaacatttacaccggctgctttaatgagggcattgatcttatcctccgtgactgtcacctcatcgtcgtgcagaatgagggccgagtagatgcaggcgagcttggagacggaggccatggcacgggcgagtgtagggcaggcgctgccggacgcggtgctagtcgcaggatgaagtgagggccttaccccaacgcggccttagcttcctcggaaggaccgagcagcttggcggcagctgagggaaggggtcggtttcttctacatagtaagattttgttgacatttttttctttgtagtgattttctgttttgcttaaaatttaaataattaaattcagaaataata

SEQ ID NO: 97488 - DNA, 1287 bp, Homo sapiens
gctcaattccctgttgaagaaatgaatgatagaccttatctatcatttatttgactcatgtgtacacccatgtatatcacagacatttttatttaattattcaagaattggcacatgagaagcattatctaattcctctgggaccttccactggcaaaaataaatgcaatgactgtggctaccagatgaattttgccctttttcttatatttgaaagtaatgactttattatttctgaatttaattatttaaattttaagcaaaacagaaaatcactacaaagaaaaaaatgtcaacaaaatcttactatgtagaagaaaccgaccccttccctcagctgccgccaagctgctcggtccttccgaggaagctaaggccgcgttggggtaaggccctcacttcatcctgcgactagcaccgcgtccggcagcgcctgccctacactcgcccgtgccatggcctccgtctccaagctcgcctgcatctactcggccctcattctgcacgacgatgaggtgacagtcacggaggataagatcaatgccctcattaaagcagccggtgtaaatgttgaacctttttggcctggcttgtttgcaaaggccctggccaacgtcaacattgggagcctcatctgcaatgtaggggctggtggacctgctccagcagctggtgctgcaccagcaggacgtcctgccccctccactgctgctgctccagctgaggagaagaaagtggaagcaaagaaagaagaatccaaggagtctgatgatgacatgggccttggtctttttgactaaacctcttttataacgtgttcaataaaaagctgaacttaaaaaaaaaaagaagtaaccatcattaatattaggtgaacatctttcttgacagctctatgtagacactcagatattaggagtgatcggtgcataaataacttggtacatagaaataattttataaaactggatacatattatgcatgctatttttaaataaaaatattaaatttacatttacttagacgtaataagagagagaaaccagatgaaactaacagataactgtttcttcttcactaagagagccctctagaagtatgggagaaaaatatttacaagtttggatttttttagcaatccaaatgtgttgttgaactttattaaagtgttcctaaaattaaaaatataacaaataaatcagttgggcatggtggcacacacctgtagtcccagctactggggaggctggggcaggaggatggcttgagcccagaagctagaggct

SEQ ID NO: 97489 - DNA, 1049 bp, Homo sapiens
taaaatttgccggaatgtttttcactgctttgcgtttgtgtgaacgtacatttcttttttttccttcttcacttaaaaacattattttttagaggagagaagctcctactagattgcaagcttcctgaaagtagggatcaaacttgttttgttccccattgtatccatagtcagttggtgctcaataaatatttgcgacccaaatcaatgactaatcttgagatttcaagcaatgattatttctgcttttaccatttatgttgaaacaaaatcaggcttatatagttagatcagcgatttaatttagtttgctactatgttgaaaaaaaaaacttcacagtgtatgttgagtggttcactgtgtgcatgtgtcctaatatgtgatttcttttaatgagaaaatgatgaatgtcttttaataaactttggatactgctttaagtagtgacgtttaaaaatttctaggcattttgtctgtctgccgtcttagctatttgtagtgatctgttactctaggaggaagcatttaaaaatggataattcaataaatggtgttggaacaactactaagtcattacaccacatgaataaattccagattgattaaagatctaaatataaaacaacaaaattgtaataaaataattagaggaaaacatagattattttaataatccttggatagcagaagaggcctaagcaaaacttaagaattcataatccataagagaagaaattggcagatttgattgccgaaaaaattttaaaactttgataaaagacatctcaagttagtacaaataagaagacaaaccaacagaatcaaggacaaaggattggaacaggcatttcacaaaagggtgaaatatagatggacagtgaacagatgaaaagatgttctctgtccctaataatgtatagcatcctcccacccctgccatcagatggacaaaagtgaatatgatttctagtactaatagggcatggggaaaagttactctcaaactattgggtctgtaagttagtattactttttgggaacgtaatgt

SEQ ID NO: 97490 - DNA, 1071 bp, Homo sapiens
taagttacaaagaaaaaaaattcaagtctcacattttgggaggcaacgaactccagcttcaaggtgccggtatctgatgcgagcctttgtgctgcattatcctgtggcagaaggtggaaaggccagggagggcaagagccagggactgagagggctgaacttgcttttacaacaacctactcttgggataaagagatgaatccattcatgagggtggagccctcatgatctagtcatctcttaacaatcccacctgttaatactgtcagaatggtaattccatttcagcatgagttgtgaaggggatattcagactatagcagtggttaaagtaataatttatcggaaaccctgtgtttgacttgtaaatgacttataaatgtgactcaaatccagcaactattcacagtgttctgtttctggtagtacaggttggagttatgtatctatatagatctgttataacttaagtaattatgaatctgtttttgtagttgagagctctaatttttagtgtatccaacactttgcttattacctttccttcctgtggacatgagctaacactgattatttcttttggaaacatttaaagatatctggcatctctctgtggtattcttgaagtgacttctttgagatccttattcataaggatatctttttagaagtcttctctgaactccccagtttaagtgaactgcttctatctccttactaccagtatttcccttgccaacttttctcagttatcgttcctaaataggacttattctgtccatttctactgctgttaccttagttcaaagctttgtcattttttgcttagataaccatagtagtctctgaattgatttctctgcttccagtctggcttccttccagtagagtccatacactgcaagcctcagtgggttttttgtttgttttgttttattttaattttccttaaaaaaaaaaaaacctcctcttgttttaacattttgttggtttctcattgtcagtaggacagcctcatgtcttgtcacttctttccttgccccttgcctgagatgtgcactttgcttgaat

SEQ ID NO: 97491 - DNA, 1075 bp, Homo sapiens
ggcaaagtaagtgcaaagcatgcaaggcgggcagtcaggagccgggggagatccaggactaagcactggcaagaccaggtactacctggagtgtctgatcccagggaggacttagacccttttttaaagggctttcaactgataaaatcaggccacttaggatactctcccttttgattaatgtaaagctaactaagtagggactttaattatatcagcagaatctctttatggcagcacctagattagggttagaaaagctaggaggaagtgtgtgtctgctacaaaatgacgttgcctctcttctcttcccaacacctggcggagaatatcccttgtagcccactttagagacatagtagaaagggaattttggcaagtgtattcagtgtaggtaagctgatgtgtcccaaagccatcacacgtgtgtgtgatttttgtctgttgtaagcagtgcttacgtaaacatatttatgcatctgttcagtagttttttggaatatattttttaaagtggaagataattttgaactgttcttttagcttaatatggaaagaaatggtaagttatgcttttgaatgaatagttgtttctctagatgatgatgtgctggatttagaattttttttttttttgaggtggcattttactcttgtcacccaggctggagggcagtggcacaaccttggctcactgcaacctccacctcccaggttcaagttattctcctgcctcagcctcttgagtagctgggattacaggtgtctgcccccatgcccagctaatttttatatttttagtagagatgggatttcaccatgttggccaggcttgtcttgaactgctggcctcaagtgttctgcctgccttagcctcccaaagtgctgagattacaggtgtgagccactgtgcccggcctagaattttaaaaggataaaaatagacctggatattattaaaaatagtttaaaaatattttataacctgtatatttgttttcactttttttaatggagagatttttcaatacattactcacattttgtttttttaattttgttcttccagtcagtt

SEQ ID NO: 97492 - DNA, 1297 bp, Homo sapiens
gccaccatgcccgacccactctgggtcattttaatcttttgcttactaccttgttccaaatgaatgggttgctggagatagttatttgtggaatattatttgagttatttgccgtagttcagtaaattggaattcatttggtgttttagagattatacactgtcgtgtatgtttttttcttgttttttgtgtaatgtgtagcccaaacagaattaagccttgttatatgtataccagataatattgtcataatgaggtagacttcagtgtttttaacttcagacattgtaaaggtacacataaggagataggccacatgatacctctaaaatagaagtgccttatgggcagttacttggttttctttataattgtgcctttagctcttagaatggtgcctgacactttatatgcattcaatgtatttattgaatgaacgataaaactgatttgtagctgtggctaaatttactttctgaagtaagatgtatgtataatttactatacatatttatatacactgagtatccccaatttgaaagtccaaaatctgaaaatgctccaaaatccaaaactttttgagtgccaacatgatgctcaaaggaaatgctcattgaagtgttttggatgtttgatttttgggttagggttgcttaactggtaagtatataatgcagatattccaaactatgagaaaaatccaaaattgaaacacttctcgtgtcaggaattttggataagggatactcaacctgtatgtaacaagcaataatggatatacagtagactcttatgtcagtcaacaagtttctttttcctaaaaacttgtgatgatgtgtagccaaaggaatagttctggtctgaatcttcttctagaagaatcttctagaatctaggacttcttttgtatttgtgtctaatacttctctattttgtcctagaatgtttgctttctgcttcaggatttctattttaattgaaggtagtctatatctttgtatctacacctgcttgcaaatgtgttttttaagtagccttaccactgtgctatgcaatactgactgctttttttttttttttaacgtttatggaaatggcaatatgacgctgcacttccctgttctccaacacaagccattttcttacataaacactgatctctgactattaaggtaatgggaaaatggttttaaacaccttttgtgggaagagtcacttctgcttacacatcctgtatcgtatcattaaacattccctatgaaacactagctaaggggcattactatttaataatttc

SEQ ID NO: 97493 - DNA, 1031 bp, Homo sapiens
tgatataaactttatggagtaattttcttctatatagtgggccagcatttgtttagaagaatcagttaaaggcctacatttgatgtataaaattgatcaaaacaatgtgacaggtatccacaaactggattattttctagaagataccagatatcaaacatcagatattttaatagtctgccagttaggccattaggaaatttaaattttacttaacacatacacttggtgtttattatacccccaaaactaagtgattgggtctttttgaactctaagaacttttatgatttcagtttaaaaataatttttttttcctgtagctatttccccttagatttgctttccttcactcttgtatgttgagtatactgaagtattagtatagcatgtttctctggtcccttgagccgaatgtgtatatatgcagtattatacacacatgcacacactagagagacagagagagagagagagatatcttccattctgtacttgtgctttgaaggacttaagcttatgctgactggaaaaagtaactttgataataattctctgttactattctctgttacccccaaatccaaaccagccatctaataaatacacaatgttggccacatttgtgatttgaaattttctagaagcctcatttaacaaaagtaaaaagaaattggcaaaatgtattttaataatatgcattattttacccagtatatccaaatattattttagtatgtaaccaatacataatttattaatgggactttttatattaagttcaaaatctgatgtgtattttacacttacagtacctctcaatttatgctagccagatttcaaatgcccactagtctcgtgtagctagtggcttttgtgttagacactgcaggtttagaatacaatatgagcaaatacatatatgctctcaaaggttttggccaaattgttttatttaagaagtttatgtctattgattgagtatatgctgtcttttatagaagattccaattggtatctgtttcaaaaaa

SEQ ID NO: 97494 - DNA, 1051 bp, Homo sapiens
aattcatattaacccatttaatccttataacaactgtatgaggtaagtgctgtataaggtaggtatcataaataatcctttcacacagctaccctatgaggtaggtactattattattcctattttcctacagattaggaaggtaaggcagagaggttaaacagtgagctcaaagttacataaatagtatgtggcacagctggaatgcagacccaggaagtctggatcgacagtccacactcataacactttgctgcatattggtctagtccagtgataacagatattgaagtttcacctaacaataagtgatcatttaatcacaaattacttctgacatttcttagtaaattatatcttatgattaatagtttacattaaggagtaaaagaacatgtcttagcttttgtatctttgaaatgggataaagatagtcttacctctataatattatgaagctcaagttaggtaataaatgggaaattcttttgaaaaaagtgaaaggaataggaatgtaagatgtcaaatacagaattagtgcctattttgacttcaaagatttatgtacatattttgtgagtgtctttatataataaaatgttactttctaataagttttagaagtccaatgtgctagccgttgcacaacagagactttctagtaagttttagaaagaatttcgcttcatgtatgtgaagccagttttaaaaagctggtgttttttttttttttttgtatggcttaatctagatattataaaaatttgaatttgttttttagagtgtctcaaactgatgatcattattagaatattgcatgaacaagtaatcttactttgtcctttttacttcaagtaagaatagcatttaaggtaaagtgaaggagaatgttcttgttccatttaatatttttactttttcttactctttgttaataaatacttttctctaaaaatgaaagggaagacaacagaaaaaaactattttatttctgttgaatgtagtatataatttaaaagtcagcattttgttttgttttgtttttttgaga

SEQ ID NO: 97495 - DNA, 1630 bp, Homo sapiens
ttctgcagtgtgaaatagattggtttggaaaatgaacctggctttgctataaattacattcacaggtacaaaggaatttgttattttgtttaaaatagtcacaaatataattaaggtcttaatttatgttaaactacaaatatggctgttatggtaactggattaggaacttaatctgttgcgtcaagaatgatacctaacacttttcatttataaccttagataccttatttcaattacagggtctgcagctgtttgatataaaaatgaattattttatagatagatttgttcatggtttttaattttaaattgtgcctcttcagtaaggtagaaaataattcttcaattgtcacaaattttcctttgtgtctggttgaaaaaggatatgaattaaaattcacaatcatttttattttgtgtcctgaaaatggcattgcatgcttgcgagtagtcgttagtgaattcttacataaaatatttcaaatttaattaggaaataaatagaagctttgttctaaagaagaaaaacctgaggtctgctgtctaaggatagctttacctggttggactgaaaatggattgctacctatctagaatttgaataactttgttcatgtgacttacataaatttagaagctgtgtttataacgccttgaatctcatggtattaatcagtgtaaagcatctaatctttaaaaacttattaaaggcaattctttaaaattttgaattacttttatatttttattggcaagcaatgctgattttattgcttaggtgcaactaaagagagtgtgctgtgtatctaacttgaaagacaaatgttcatttttgtctttggaataaagaagaggaaagaagacagttggtgctggtcattggcaagtgtttcaatattgagttactattagttaattaaaaagaatatatgttccttccatctactagttcatcctaagaattttaatttttttgttattatttttatcagttgggaattttcttgtaagtaacaaaattttaaagcattcattataggagctcagaaaaagaatatatatattttttcgttttctccccaactgttcattgagtgctaactatgtaactgctgttgtgttaggttattgggttacaagaattgttctttctgtactttcgactattttataactcttgcttaattttgaccctacaactttatgaaagttgtaaacaagatagacatggtctgtatgtactaatgaagcttatattcttgggaggacaggcttttatccgttcatttattggttttatcagtgcgttatttatatgtaattatcacagggaaagcttatatctttctctattctaattgtctcttttgttgctttcagaaataacctgatttttttctatagctgtcagatgttgatgtatctaaaattgactcaaatattccaggagtagtttctaggtgagagtttcattaaggaaggtcagtctatgaagtgatatgtcttcaaatgttctctcaaataacatttcatattttttggtaataaattcactctctttaaagctttttatgcttattgaattgtggtttctgatttctacatagatcattattattatttttta

SEQ ID NO: 97496 - DNA, 1300 bp, Homo sapiens
ttcgtgagcacagaaactacatgttggaatatagggtattactggagagaactttgaggtagcagagatagtattttgagttttcctctaaaatgaggaagatgatgatcctatagaaaatagtggaatgaagcaattaatagcttataaaatttggactttagtcatctacttaagaaaattaaagctatatatatagtattgctggtttacataaactaatacagtaacataaatgtggataatttacattttattccttaggtatacatacatactttaagtttcatgtatttactgatgtctaaatcatactgatttttaagtagtgacatgacatttttgtttggaaaacaaatccttcactttaaattggttcattgttttctattagagttttgtagtatgaaactattcagtttagaaaagaaatgcatacaaatttctgttcaaatatgcatatgctttttactgggcttattgtatgtatcttgatttacaggcctttttgcaaatgtgtaacttgcctatcaaagtagtttgtagggcaaatgcagaatatatgtctccatctggtaagtgtgtttttttttcttctctgttaatattatggagtgataaaattatagtgatagtccagtttgtatctacatgttaaaatgcctgattttttttgtttaccctttgaagaatctttccatggttttagaaagtaacaattgcaaatttgacaatcttggggttggcatatctattcatttcaactgtgatcagagatggttactgacgtgtggaaatggttttaatagtaagggaattgttttaaatagtaaatgttaaggaaatacatgatctcagatttccctagtcttaatgtacataagactttcctgttgagaaaacaaattttagtaataatgaatccatttattattccacacatctttcttaattatattctcccataatacagctggaagaagagagattgtagaaaaattaatttgtcgttagatcttgaagtcatcactgaatgtttttggtttctaattattttttctaatgcttaattttaacaggttttgagatgctttagcttcctattttttaaaatcagtattatctttatgtcagtagattaaattactgttttaaataaataattcaaaatttttaatataaaaatgtgctacaaagctgataaataaatgttatatataattatcatggatgattattgtaattatggttttgttggagcaataatacgtagaattactcctttttgaataaattatta

SEQ ID NO: 97497 - DNA, 1069 bp, Homo sapiens
aactctagaaatgaatttacctgttctttttttctaaagttggttagtaatcagtttaaaaacttacagaatttaatatacacatctgacaaaaattttcaaaagttacagttttatgaaatccctatttataaatacctgagttttgtgttaattttttttaattatcacaaactttaacatactggaagtatttttataaatactttttttttctctcaacaggtaaagtaccttttattcatgtgggaaatcaagtagtatcagaacttggtccaatagtccaatttgttaaagccaaggtaataaaaagatattaaatgtatttgatcagttaccaagtcattcatcattctttaatgtgtcttaacatttacattgatttcaacctagttttataaaatgccaatgcaaactactggaaaatatttctgaagtgtaagttagtattttttcatgatataatggcaaaagaggtagctttttttcctctattaatgtcaaatttattaaaggtatgtaattttaatatctagtctaaagagatggtttgatctttacaaaatggtagataattttctaacttatgcttactacaactgtggtcataaatgaaaaactattaggttttgaagtgtctggctgacctttgaaaagggagatacaggatttgtttgaagttgaatgtatttatccatttgaatgattctgcttttcatttattcagtttagattttaatagttattaaggaacaactcccattagtgtttctgaaaaatcattccagactttttgaatatatagaaaaacctagatcatactagtgtgtattattttgcaacataccttttaaaatcataaatatgtttggaaattcttccatattaatagctgtaggtatatatcatcctttcacattgttgtattctgctgtattggagatatatatatatctccaaaatatatatatatattattttttttttcttcaacaccctccccctgtattggataaattagaattttatttactcaagtttattgttgggcttttaggtcatggccaat

SEQ ID NO: 97498 - DNA, 1045 bp, Homo sapiens
tgacaaaaccctcaacttttatgcattaaaagaatcattctttatattgatactcctttaaaaaaatatatataagatttgcaagaaaaccatttcctgtgattttcactaacatgaagtaattttatttctaaaaaatcatacatgcttgatgtaaagcaaacaatgcaatgcagatatgtgtaaaaaagcaataaaacttgcctgaaatctcatcacctagaaaataccacccttaactatttggagagccttcttctagatgtttcttagtaacattttctcaaatgggatcattatgcctgctactgtataacctgagggtttttttttttttttaattgaacaatacattgtgggcaccttttatgtaactaaatatagatctgcagcatcagggcttaaaaaaaaagccctgttaaatacagtactttgtccgtctgtctgtctatctatctgtctatctgtctatctatctgtctatctatatttttgctactaaagtagcaaaacttaaaaatacttatcttgtccacaagcatcattaagttaattaatgcccgtcttttccaaggctacccttaatactagccagccatctcactgatgtgtgccattggctacaagggggtttcagtaaatgaatagggatagaataaataaaaatctatctccactagtgggaaaataactcaaatgcttttactcatagtgggtcaatgttgttacctttattaagcagattttttggtatatgcaaagccatttgaatatatggattcaggaagacacttttgttcttgacaaaatccttataagtaacttaaatgtacttgtattttgaaggacattcactgagaatttcttcctatttcttgtatacaaagtattatatatatatacttatatagaaagtatttcttataagtatttcttatatagaaagtatttcttataagtatttcttatatagaaagtattatatatatatgtggtctatggtcttattaaaatatattataaaaggttaacttaaatttatatt

SEQ ID NO: 97499 - DNA, 1016 bp, Homo sapiens
tgacatatctctaagttactctaatttctctatgtgtatgccagtcctaaaattagaattaaccccctacaattagaattaatcccctaaaattagaattaactttccttctagctcaactactggggatgttgggaggactcgtgaaagaaaccaaataccgttacttgatgagagaaaaggaaaagggtagttaagggagatctcacagaaagaataataattgggaaaagaggccaaaaagcaaggggcttgatttacaaaacttgggtgacagccctaaagataagtgattaggatgtaaagaaaagataacgtagattatttctagtactataaagagatgaaaagttaatgggaaagaacaattaggaaacactcagacaaaattaatgcttttgaaagcattaatatagatgatactatgaaggtatcagagagaaataaatgtgaaataatgaataagcaaagcaaaaaatatgagtgccagaaaaatcttaaatggaaaatgttaggaaaatgttgaattttactgagtgccagaaaaatcttaaatggaaaatgttatgaaaacgttgaattttactgtttttgttttgatattcaaatgaaaaaatagtagataaccaacaggaatgtggaaagaataataatgtaagaaggcatcaaatttcttaggactttaaaaatatatttgtcaccctggaatatttttctaataaaaagtctataaagataaatgcaataatatatgaaacatcttagagctcataggaggggaattgctatctatatttgaattataatcacaaactatttggtaagcagaagggtagaaagttgtgttttctcttcacgtgatatagcaagataattaaaattggaggtatatgaagatcttgacttgattaaatagttcagtagaaatactggataaaatatgttacttgtctttttgttaagtcaggtttattgatgtgtaatttacatctagtaaaattggcacttttatgcgt

SEQ ID NO: 97500 - DNA, 1025 bp, Homo sapiens
ttactttttttacatccatctccccagccaggtcagaggctctaggtgtgctgtgaccatctccactcatcaccatggaacacctggcatacggggcctcaggcaaagctgctagtggaggccttgggccacccccttctctcttcccacactggacaccccagtttcatactcaagctccatcctcttccacttaaccacagctggtcctgtgcctcctccttgaagccatttggacagggaattctggggtcttgggtacctggagcagggcctagaaatggaggaatgtgaccagggcaaacagtgtatattgtggggcccagggcagaggccctgattgcctgagtctacaggcaatgttgccagcattccagaaacactgttgtgcatgtgacgaacattaataaactgcagcactgctacagagaaataacatgaagccaactcagagggccctgaacagcaggaagcggtgtacaggctttgccggaagagagggcaggtctgaggggcagcaatggtagagcctgaatgaaacactcactgtagcttaccatactctagctattatttttccattacttttctataacttttaagggcagagaatgttccttttcattgcagaggaagttccatttacttggatgtttactaaaggataatctcaagcttcccagtaatgactcaaacaaatagaatttggacattctgagaataacctagaccctcagattttttcccaatctgtcactagtagtttgtacacccacacagcatgcctaacacgtttctgataatgtatttaaggttcagagtgaaatttcatactctgtgaaatttaaaagcaaggtaaattcttgtttatacagcagtgcctatagggtagagatcaatgaaatggggacatctgaatgaaacaaatataaaacccaaacagaaatttttactgtatgaaaacaaaaccatcttttctatagctagaccaatgctatatgtcaggatgattttgaagttaaagt

SEQ ID NO: 97501 - DNA, 1048 bp, Homo sapiens
tggggagttgtttgagatgccctggaaaccttcaagtggagatgtttttctttatttctcttcatttttccttctgggaacttcatattggtcctgaccagtaacttgtactatatcatgatctataggaaatctactttgtttttccttctacttcttgagacctctctaagattatattatacactctcatctctatcaatttctaatttacagatataagaggccgccctgtagaggaggaaggaggaagttggctgtgattgaccttgctaggtcatcttcctaatctttgtcctttcctgcaccccaaatggaagataaaaggcaatgcaagatcagcatcctcagagacatcgttttgtttgggtttcatggattgcaattgccagagatgcttaggctgcctctagagggaagatgattgattgttaacctatgtggtccaaccaaatgtcttaggggttattgataattaaaatggacaatagcgattttccatttcttctggccttgggtgctggcatgtggaagtggtattgatactcatgaccaaataggcacttatcgatttcagttttcataagttgcctaccaaatgcaaactagtaacccagacgtgggagacctaatattccattgttaatctttaggtccataatttttatttcctctacttgcctcttcttccttcctctgcataatgagttgggcttatataattgcacccatttactcactcattcgttcaatcaattatttgttcctattttatgccaagtaatgaacagaaggtgttggggatgcaaaacccaactaattggaatttctatgttacaggagcttatgctttagtgaaattatagacaaattattatacagttttaatccagaatagtaagtgctatgggagcatgcacagaggaaacaacccaatcttaaggaatcaggaaggtttgcagaggactgacaggaaaagtgggcaggtgaagaagatgggcagtgagaggaggagtggaagcacttttgctagggaaaaacatgaata

SEQ ID NO: 97502 - DNA, 1044 bp, Homo sapiens
cccatgtatgtgaaatataattttcactatagatttttatcaaattgtgatcctaaatactatcattactttttctcattaatataaacatctttacatgacaataaattatccctaataatcaatgttgatgattatatagtatttcattatgggagtatgccataatttacttaatcgctcctccccttattgagtatttaagttattatctactttatatattataaattataaaaagcattgtaatgaatatcctggtttacaagtctttggacatttggcaaggaaaagttttaaatatcctcttttaaacaatcaagtttaggcaagtgaaagtccctttttcttccatcacaagattaaacaataaatatagcttatctgaataaatttctttagtgtatgagatggactaagatttttaaaattattataaaataagggcatgctaccctgattgatgataatggaattactttctgtctcaagttgattctagaatacttgtttggcctcatttggtcttttgtggcatgaaaaatgtacttctttattagattcagtcatataatggaagaaatgagattctaaatgttcatgtttcctggaagaagttgctacctagctgtgtctttgtatagtttcataaaactataggttgggaaggagactggtttctgtgattaactctgtttctcagtttccattttgtaagtgggacagaactaatcactctaaacatctagaaatcttttaaaactttaaaatccaaatgctttacattctgttccccctgcttttgtggttgtactgcagcaattctgtgttttggagctagttagtaagcactttgaaaaccactatcacagtgtttacccattttgatgaagctttgagtatctcggctttgttttttaaaagcctatacatggcattttcaggtggtctcccatccaatattaactggaccattcctgcttagcttctgaggttagatgagatcaggcagtatggccatatattggatatctatgatttggc

SEQ ID NO: 97503 - DNA, 1052 bp, Homo sapiens
tttttttttttaagacaaaagcttgaaggcataaaatggagttattttcatcgggatatcaccctcgatgctgctgctttactacatgttcatagtcaaaattatttcatgtttcccttgaataactacgatcagtttgaaaacagctttgttaattagtaagagatgacgcaatatatcactgcatctttagggctctggcgccagctagtggtaggagaggggagccgccctgtcgctctcaaatctgggaaggcgtcggtcttctcgcgtccccttatccctcatcctcctcattttttttttccatcagcataatgggggaatcattgcagtgtggccagagaggagcagacgagattatagatgaaagtagagaaaaacggtgggcaggggcagggagaggaaaggccagacaaatgcaatcatttctccaaaggatttgagaagagatcatttatttgaaatattcctgccatgttgatggagcagctcaatcttttgccagtgaatctttagcgttttgtttttcatttgtagatatggttgaacatatacttaggacacgtaataactatggaacttcatcacaaacacagcactgaggacatgttgtaagtgtaaatttgtgttcatttttaagtagcaaatatttctactgtgaagaggctctgttacctcctcacacgtatgactctgagatgaataactctcaaatggttaataaaggagaaacctcttaagatggtatttgtagatggtacactatgaaaaaaatacaaaatttccaggcaaaagagactttatttgggaggtatgaagtagatgtaggtttggagccctatctattctcaaatagaaataggctgtgatgatttgcaggaaaacagaaaacatacagtatttattttaagaacaaagaatctttggcaggccatctttctcatttaattaagccataactgatcttactagggttatggagggacttcaaatgctaataaataaaacctgaagctgagacatttctttcactaaacagctggagctgt

SEQ ID NO: 97504 - DNA, 1036 bp, Homo sapiens
cccagaccaaagtcacccaggtgccataataaaagaatttctaagggagatttcaactagaaaaccaaaaggccatcaaaacaaacattgatttgcattccagatcactttctgctcttgttcatttctgggatcttatttggagattaaagggtaatgattcactgatatcctgtgggaaaaccagttcaggagcagcctttgacaaaccacatgtagaaatctggctgatacagggagaaaacaagtttcaatcttatttttagtgtagggtaaaggaagtccacccaagataaagcttagcattctttctttgaggaattagggtaagggtgaagaaaagaaagcttgatatttttctgcctatgaaagccagaagaaggctcagagaagcccgttccttcttttcctctttttccaagtgccagacctccgcagctcccagaggaaatgagggcatggggtgggtaatagggcatgtgatttgaatgagtattcccagccatttaatatattcacaagtcaaactataaagtatttctttaaaaaaattatagtatttcactgaagtttgaatgtactttctcttgccaaaataatcagagtctttcatttttctaatgataaaaatgtgctacatgtgtaggaaaatttcccaaatgaaaaataacattttctatggcagcacatacagtgcttgaatttttcaccttagattttattctagccagacctaaactctgtcttacttgcataatgataattcatgtcgtcaaaccaaacgcactgtttgctgctcgtttgtccaggagccatcttttcctaaagtgagcaatattacgtgcattttgtctggctggccgagggctcctccctacagcttctgcagccatggaagagtctggaaggacagtgttcgcttgtacaagaagagggaaggataggatgagaaaagcaaaatcttggagagtctgtggtcggaagaagaaagctgaagctggttaggaggaaggagtgtgtgagtgaattaggagct

SEQ ID NO: 97505 - DNA, 1052 bp, Homo sapiens
catgtcaaccaatgcttccaccattgctgacaaagacaaaaggaatgtagtgaattgtatactgataaggcttggaactgaaaataacacatgccattttgctgactaatgcaagtcacataccatatctaacttcaaaaaggtaggcaagtagtctatttgccctaaaagcaggagaaccagaatgtgtggataatcccaataatgactataatttctatcttacctaagccactgttattttgggttttcagccaattgcatctgcactgaatcctaattaagagaggaatgatcacatcaatgctgtgataactatgtcctgtgaggaaggctgtcactgggtgtacaccttatactcggaaggatttgcaggggtcactccctgtggcttttctgagaaagaagaagccacatctttcttaagatcctcagtcatccttcagtcattgacatctactacactgcaggcaaatcactaagaattcctattcctaaagttcaggctaccacctctagctccttctaagtctacgaaatattccctattcttttgaaaacacaactctagtctttttctattctgctttgttccggcattcaaatcttagtccttgagatctgtcatctttcccagaggctctaaatatgtccttacctccttcaatttggcaaatatcttcactcgaccctatgacattttccaaatctatagacaaatgagtcgttctatacctattgtctttttgttttccttttctgaaacccctgtgatgaggcttctgtttgtaccattctacttaaactgtctaaaaagccattaatggcttttatcaagaagcgtttgtctaaaactctggaatttcctggaaacatgctttcgtatatttcatatagtgggatggataacagcagataaaaacagtcataggtttagtaaaacatagtagagccctttctgcatttgggtagtatgggaatgccttctgatctgctacaggtaaaatcatatgtctgtctgctcctgccctaaaacacaggagccatctgca

SEQ ID NO: 97506 - DNA, 1795 bp, Homo sapiens
gaggcctcgggagggaagccggcctgccggctgcgcggcctccgaagcgaggccgagggcggcatggcgggccccggcgggagcggttgggaggaggtggtgggggaggggaggggacgagcaggcacatccgggcgagcgagcaagcgggcggcggccacattgacattgatccgccgccgcgttacgaaatggcgcattggcccgcaatggccgccgcctcgctctgccgccgggaaagcgagcctgggattggagggaagagggcggaggcggcccggcagaaaaagccgcaaatggcctcgaagcatggggaggtagtgctttcgctgaagttctgccgacgcttttctaggccttttacgggtcctctccgcgagaagtcgataattggccttttctttttttcgcagcatcctgttggaaatacgagattgttaaaaactttgctgctttaaaatacttcctgatatatttttgctaaagtacttacattacacttcttaaaccgccatgtgggcgaaggacttaatttttgagaatttgagtgtagatgtgaaaaacaacccagccagctccttcccggctccggccgctgaggagggtgggtggagaagaatttgagtatagtatgttaaggaagaatttagaaatgttttttatcttcatgttttcccattctttgagtcggctctggttgtagtttcctggaattttatttagaggactgcaaccagagttgaaattttcacgtttttgcagtacatttaatgtggatcctaaatatttttgtcgatttcgttattgtcaatcgaatacatttatccaagacttgaaaagatgagattacatgaattaatgctttaggctattaacgtttttttctagcatgtgacaatctcttcacattaaacggtttaacatctctacctctaggagacacaggaagacattagaatgtaaatgtgagccccttatttaagaacttcgggtgaaggaaaccttaatgcatgcattaaatgacagttcatgcaatgtgttaaaaagtcttgactaaagtataaaacaatttcaagacatcttaattcttaaaaatctcaatttttgttttgctgtactccgttcttatagtcagacaatacataccattcctaatgtaagtccaacttgccagttagttgtgactcttaaaattgagttgtaaattgcagatttttgcagcatataacaaacatgggttatagaaagctatttgatcggcttttttttttcctcagtttttttgggaaatgctggtttggcttaggaatgcctgttttaaattaatttgcttgaaagcagtgagtttctgtaagtttgacattcagaacttttagattgttcttcatcacagttttgagtttaaatgtatgggccgggcgctgtggctcacgcctgtaattctagcactttgggaggccgaggcgggcggatcacgaggtcaggagatcgagaccattctggctaacacggtgaaaccccgtctctactaaaaatacaaaaagttagctgggcgcggtggcgggcgcccgtagtcccagctactcgggaggctgaggcaggaaaatggcgtgaacccgggaggcggaggttgcagtgagccgagatcgcgccactgcactctagcctgggcgacagagcgagactcagtctcaaaaacaaaacaaacaaaaaaattaaatgcatgttgggttgtagactgagaagagttgaaatgggatagatgcaacactgcttctccaacagtttagtgcct

SEQ ID NO: 97507 - DNA, 2558 bp, Homo sapiens
cagttgtagcttttaaaaaatgaagcgattttttgattctggaattgtcttggatttcaatttagttgaagtgatgctggcatttgaaaggctggttataggtttccttgacataagttagcccctttaacagttgaagtcttatttctggtcaaagtttttgttgttttgtttttttgagacggagttttcgctcctatggcccaggctggagtgtaatgacatgatcttggctcaccgcaacctccgcctcctgggtttaagcgattttcctttctcgagtagctgggattacagacgcccgccaccacgcccagctaatttttgtgtttttagtagagatggggtttcgccgtgttggccaggctggtctcgaactcctgacctcaggtaatccatctgcctcggcctcccaaagtgttgggattacaggcatgagacatcgcgccggtgtctggtcaaagttttaactggacaaagtgttaactgtcacaggaatttgatgttgattttattacttaccgtacattaaaggctcttcgtgcatcttaattcatctactgtaaggtaacttaagagtattggttctttctctcagggccatgatccaaaggaaccagagcagttgagaaaactgtttattggtggtctgagctttgaaactacagatgatagtttacgagaacattttgagaaatggggcacactcacagattgtgtggtaagttactaagagaacagaagggttctaaggggtgtagagaaccggtggaggtgttttcaacgttataaaactttttattttgtaggtaatgagagacccccaaacaaaacgttccaggggctttggttttgtgacttattcttgtgttgaagaggtggatgcagcaatgtgtgctcgaccacacaaggttgatgggcgtgtagtggaaccaaagagagctgtttctagagaggtattttaataatacattgtgtaatatgtgaaattgttgtgaaagtttgtttcttgacttaatatattactttatttgtaggattctgtaaagcctggtgcccatctaacagtgaagaaaatttttgttggtggtattaaagaagatacagaagaatataatttgagagactactttgaaaagtatggcaagattgaaaccatagaagttatggaagacaggcagagtggaaaaaagagaggatttgcttttgtaacttttgatgatcatgatacagttgataaaattgttggtaagtagcaatttatggtaacttgaatgagaaagtagaactggtttttctgttttgaactaaatttgctaaattgtaattttctgttgcgtgtaatggcatttatagtgtatagtcaattttcatagtgtctgcctgtgtaatcagtatccagatcaagaaataaacataaacatctcagaatgctccttcattaccagagtcactacctgattatgtcttaatgggttacataatgacagagggtatctcatatatgtgcttttccaaacataaaataactttttgttttgtttgattgaaaaaaaatttagttcagaaataccacactattaatgggcataattgtgaagtgaaaaaggccctttctaaacaagagatgcagtctgctggatcacagagaggtgagtaggaccatacacatgtatacagtggatatgagtggtgtttgtaaggttcttaaaaatctcccttgcctgtattaaaggtcgtggaggtggatctggcaattttatgggtcgcggagggaactttggaggtggtggaggtaattttggccgtggtggaaactttggtggaagaggtaggctgtttatcttctaagtacatggatacctgacattttggtaagttgaatatattattttaattcatttcttgtttttcctcaggaggctatggtggtggaggtggtggcagcagaggtagttatggaggaggtgatggtggatataatggatttggaggtgatggtaggtggcttattttcattgatgtttgatattttaactttctttacttattgaaaattatttattacacttttctaattttagttaaaacttcagtggctaaatggttaaggtgtatttccaaactgtacatggaagaacaggaaccctttttcccctggagagacattagctgctctttttcagcaagtagtaggggttgagctagaattgttctattaagtctgagactatatttttcttagtgaaattttgtaaaatgaaaactgattttcttttttactatcagaagatgggttacacatttatttttcattcttactagtgcagatacttgatactctattattattaggtattaccaggcttcagagtgctaaatcaattcattggcttatttgccagtggcttaaatgtaatataaaaccagagttgagtaattctagctattcaggaggctgaggcagaggggttgcttgaggtgaggattttgagactagtctgagcaacataaggagaccgtatatctagaaaaataaaataggggaacatggtggc

SEQ ID NO: 97508 - DNA, 1048 bp, Homo sapiens
tgcttacagtttcattcgagccctgagtatgtgccctgctgttactctctttggtagttgaacgttgaattcaagtcttttgttttaagaagtactaagcaaacaagcaataaaaaggggaatggggtgtgctagtgtttgaatatgctctcttgttgctctaattctgtgcctctgtgcattaatatttggatgcatgcaatgccagcatggaaattggtcttcacacatactgcagttttccagaaacattcacaaaccaataaatgtaacagacattccatttgttaatgggcatatatgtgaaaagcagtgtagaaaataggctaatattagaaaatggttaagtcctaaataacttcaagtgtggttatataatggacactgtcaatgttcataacttaaacctgggtacctggtcaaaataatgcttgggaaacattaaaattgagctaaattgtctcaagttcttttattcatataaataaagtttaaaggaatgggggagattaacatttcctgttttatgtttgtgaaattgtttgacacaaccttgacagtatcctttaatggcatgaggttaattgtactgttaaccaactttctatgttctggaactagtattatagtgaaaacatttacagtaagttgatgtttacaacctataagcaggtgaaatctgtgtatgtgacctgtttataagttgtattagcttagctcttgtgaacagtgtggaaaagtaagccatgaggagagcgatttaaccacctttaaaggacctaagatgtgctttttaagcacagtgtggatcacagaaactcactaagacaggacttcagcagccttttgtgtttggacaagtcagcataaataaagaatgacaaggcagcagcaagagcttcaactacagagaagtgaaggcataagatactatgatgatagtgagcaactttccaaaagctagttaaatctgcttattacaactgaaatatcgaagaaagtctagcaggaaggagctcttcgccttttggaacatcaatgagagata

SEQ ID NO: 97509 - DNA, 1045 bp, Homo sapiens
ataagcattaggtaaggcttgaatttgaattttttcactaattaaagagtaattttttgtaaagcaaggtaagagtaatctttttgatttgcaggttgaatgagaaccctacttgcctaaatgaggaatgtctttcctaccatctaaaatacgaaggtttctggctgggtaaggtttgtagttgacagtaaaacctgatgacaccatttgtttccctgcaagtctacattacatatttcacaactttgtccctctctagtaggcacattggaaaaattcttcaactgaaaactaccttggtaccatgtcctacacgttttaaaccttagttttaaaaattcccctgcgaaatagccataagtattcatatcaagtcagttgtgactccttgtgtatacaattcattttttgtgtcttcagggtaaactcaatttttggtaaagtggtttcagcttttgtgaaaaccgttttggtgtgtaagcatgacacacaacagactcagtaagctgcccatcctcatactaggaaaacaccttcaaaggaacattaaaagttaccagggccaggcacagtggctcacgcctgtaatcccagcactttgggaggctgaggcagatggatcccaagtccaggaatttgagacgagcctgggcaacatagtgagagcctgtcaacaaaaaatagaaaaattagttgggcttggtgatacacatctgtagtcccagctatttgggaggctgccttgatatcaggcagtcgaggctgcagtgagctgactgccccactgtattccagcctgggtgaccccatctcaaagaagaaaagttaccagatgtcatgggtaaaggttggtcttcaagtggcctcataagttgtcttgcatttaaattcagggaattcattggaccaataggttacattttcgttccttttttgttttggttcatctgttaagcagtgggggcctaattactgctcctttgtaaaaacacattttcccaaagaacactgaattaccgttcaaactggttgttgatgggtaata

SEQ ID NO: 97510 - DNA, 1005 bp, Homo sapiens
aataggcatggaaggaaaaataatttttaaagttatcaacccttgttgcctaaaataggtcttgaaagacaatatatgagatatttgggtgatacatgtgaggaatctatgaacctttgagggggaaaaaaggataaacgagttagtaaatagaaacaaactaggagaaaaaagtggttgctaggagggagaggacattacagatgttggaattacctagtttgatcttgaaaggcagtggagtggttcagtattgtatggtgagagtaagttggggaaaacctttcatgaaatttagtagtcttaaacgacactgccgtttgacacaaagggaaaagggtaaggatgatgtgggtaatgatcatccgttttgttggattcatttgtgggggtaggtcttttgataatttattttttgaaatgtgtgtatttggatttctagccttaatagctattaagcacattttcccaatatagttttttcaagtgaaatactttataagttgaagccagctgaggattcttcgctagctgttagacttaatgcatactcattttgcttgtattcaaacactggtttcatgttctgtgcagttaagtaatcttaaagaatggcgtgtctaggctgggtgcggtggctcacacctgtaatcccagcactttgggaagccaaggcgggtggattacaaggtcaggagatcgagaccatcctggctgacatggtgaaaccctgtctctactgaaagtacaaaaaattagctgggcgtggtggtgggccacctgtagtcccagctactcgggaggctgaggcaggagaagggcgtgagcccgggaggcagaacttgcagtgagcagagatggtgccattgcactccagtttgggcgacagagcgagactccgtctcaaaaaaaaaaggcatgtctaataatttcagtttaatacttaggtcctggaataataaaggacaggtgtggacttatttccaacaaaagtatatttaccct

SEQ ID NO: 97511 - DNA, 1083 bp, Homo sapiens
tcaatgattctgactccggcatttcactaaacacaagtcccagtgtggcatcaccagaacactcagtggaatcttccagctatggagacacactacttggcctcagtgattctgaagtggaagagctagatagtgcccctggaagtgtcaaacagaatggtcctaaaacaccagtacattcttctggggatatggtacaacccttgtcaccatctcaggggcagagcactcacgtgcatgatgcccaatgtgagaacacaccagagaaagaattgcctgtaagtcctggtcatcggaaaaccccattcacaaaagacaaacattcaagccgcttggaggctcatctcacaagagatgaacttagggcaaaagctctccatatcccattccctgtagaaaaaatcattaacctccctgttgttgacttcaacgaaatgatgtccaaagagcagttcaatgaagctcaacttgcattaattcgggatatacgtaggaggggtaagaataaagtggctgctcagaattgcagaaaaagaaaactggaaaatatagtagaactagagcaagatttagatcatttgaaagatgaaaaagaaaaattgctcaaagaaaaaggagaaaatgacaaaagccttcacctactgaaaaaacaactcagcaccttatatctcgaagttttcagcatgctacgtgatgaagatggaaaaccttattctcctagtgaatactccctgcagcaaacaagagatggcaatgttttccttgttcccaaaagtaagaagccagatgttaagaaaaactagatttaggaggatttgaccttttctgagctagtttttttgtactattatactaaaagctcctactgtgatgtgaaatgctcatactttataagtaattctatgcaaaatcatagccaaaactagtatagaaaataatacgaaactttaaaaagcattggagtgtcagtatgttgaatcagtagtttcactttaactgtaaacaatttcttaggacaccatttgggctagtttctgtgtaagtgtaaatactacaaaaacttatttatactgttcttatgtc

SEQ ID NO: 97512 - DNA, 1016 bp, Homo sapiens
tgttttccagaccccacttctcttatataagccagtggcttagagtgcttgctctaatttctatattccattaaacaagggtgggatttcttctcattcaaaccatttgtgactttgccctttagtgacctctaccatcaccctatcattaatgatccaagtgattagaatggatggctatgtgtttgtaggttgtttgttgtctttaatgaatagattcattgaatggaattaactgtgctcttctagaacattggatctgtgttctcatttagattgtatttgtaatctccccacttcccaccatcaacagtggcataatgtgaattaatttatgtggtatctgtcatttaaaaaacatgagctctctccttcctttttttgtcttaaacataggacatggatttgattgacatactttggaggcaagatatagatcttggagtaagtcgagaagtatttgacttcagtcagcgacggaaagagtatgagctggaaaaacagaaaaaacttgaaaaggaaagacaagaacaactccaaaaggagcaagagaaagcctttttcgctcagttacaactagatgaagagacaggtgaatttctcccaattcagccagcccagcacatccagtcagaaaccagtggatctgccaactactcccaggtacagagtactcagttcttgggaaagttatggcaggtttaaggaaacactgagcaaggaattaaaatatctggatttgagttccagctttgcctttcttttacttaaccttgtcaaatctactttccaacctcagcctcctgatgagttcagtacctaacctgagttcagtacccaacctattgatcttaacagtgttattgtgaggattgggaagacttaagttacaccaaagagttttgtaaagtatagaaacatcctgtaaggatcaagtagcagcaacagaagtagtagcaggagaaccaagtagcagggattactggcgttactgtgtgtggcaagcactgttttaa

SEQ ID NO: 97513 - DNA, 1052 bp, Homo sapiens
aaatctgagtagcacagagtatgacattaaggccataacaataaacctattgttgctgcattctaaatttgatcaagatgtctgtttttgggaatccaaaatagttgcttcaaatttagcttttttcttttatgaagcagttttgttttgttttgttttgagacctctcatagcaagaaaaaacattacataaacttttttttgagacaaggtctcactttgttacccaggctggagtgcagtggcacgatcttggctcactgcagcctcgacctcctgggctcaagcagtcctcccaccttagtcccccacgtagctgggactacaggcacatgccaccacgcccggctaatttttgtatttttagtagagacagggtttcaccatgttgcccaggctggtctcgaactcctgagcacaagcgatctgcccgcctcggcctcccaaagtgctaagattataggcgtgagccaccatgcctggccacataaatataaacttaaaaatacacaggaaaacctttcagaacactttgaaacctattttggtcctattacgattgcactgaatgtcccccagcctaatgaagagcaattagatgtcatttggtggcattcttggtggagacagtaagctagggccgcaggagctgcttagtctcccagggtccagcattgtttcaggtaacgtgaacaggatgctcaagagctagtctaaataatgcttcatgtcttatttttcctgtttgttgataaggattcataaagatgtctttttctggtcatgtcaagggaaattcaaataaaaaacattgaattggtttggagctgtccattgaagggtactcacagcaggaattgagtggcaattgaatgtgtgtgtgtgtatgtttgtaaacatttatattagagtgtatgcaaatgtatatgggcgtgcccactgccatcaccattacccccaccaacagtaacaaaaccaccatcaagagcaatatccactaaaacttctaatttgcttattaatttgctttattatttgtaaataattcagaa

SEQ ID NO: 97514 - DNA, 1058 bp, Homo sapiens
gcgcccaccaccacgcccagctaattttttgtgtttttagtagagatggggtttcaccgttagccaggatggtctccatctcctgacctcgtgatccgcccgcctcggcctcccaaagtgctgggattacaggcgtgtgccaccgcacccagccgagattatttacttcttgtgtgttcttgccatctccatagcctcctttgctttcaaatgcccacttgggctgggcctttggaaaatagatttaacccttgtttattggaaggatattcacacagtaggccagttatacactttgtggcagtcgttacctcttctgtgaggtctttctgtgcagatttagtggcacctcctccatgctgcctgggcttctacttgcttctcatcactttgtctcataactcagatcagagactgtgtcttactcatctttgtatccctggcatctgagggggtggtatctgatgggtagatggattagtgatccacttagggtatttacactaatcttgttgatcttgactactacctttataaccaccaccattctacaagttttaacttttttttttttttgagacagagttttgctcttgtcacccaggctggagtgcaatggcgcgatcttggctcactgcaacctctgcctccccgggttcaagcgattctcctgcctcagcctcccgagtagctgggactacaggcacccgccaccatgcctggctaatttttttgtatttttagtagagacggggtttcaccgtgttagccaggatggtctcaatctcctgatcctgtgatccacctacctcagcctcctaaagtgctgggattacaggcgtgagccaccgcacccagcaaggatctttttttttttttttaaagctaagtgttttatacatataataatattgttaataaaatgtatctaaaattcataccaccagcacacaaggtctccggctagcagcagtaaatggcatttagtacttacttagcccccaagcctggatgactgactatactgacttattattacttttagctatttgtaggta

SEQ ID NO: 97515 - DNA, 3057 bp, Homo sapiens
tcttcctagaattaacaaagtgaactgggcacaggaaatagcacatggcacaccttcagcaaatggtggttgtgatcattttcatcattccatttcttcttgaaaaaaatccctttttttttttttttttgagacagagtctcactctgtcgcccaggctggactggtgtgatctcggctcactgcaagctccgcctcccgggttcacgccattcttctgcctcagcctcctgagtagctgggactacaggcacgggccaccacgcctggctaatttttttgtatttttagtagagacggagtttcaccgtgttagccaggatggtctcgaactcctgacctcgtgatccgcccacctcggcctcccaaagtgctgggattacaggcatgagccaccacgcctggcaaaaatccctcgagttccagtgtaaacactcacgcccttttttgctgtttgctataaacctctcattctccttggtcttcttgtccttgtgtgaggtcctggttgttgtggagactgaggtcttctgagacagaaaaccaaccccatagcaggcctggtgtgtgccctagaatggcagaggccccacacgttgccccggctcctctggaagaccctccagcctgtctgctggattccttgtacttatgaggattgttaaaccatctcataggattcctttccagactcagcccttcacttgtggcagcatttcttactctgaggttctgggcctagaaacccagtgtccataggcaaggtctagggacagagagagtttgtagaaagtgggaatgcatcagtggaaggctaaatccaaacaggaactgagctggcctgggtggctttgtccttttgccatcttcgtaaccctttaaaggctttaagacacttcttttgtaataactaccccaactaaatttggccagagctgtgaagggaaagaaaatctaagacccttgagggagatgacagccgaacgttttacatttttaccacctttgttgttgccatgcacagctgatacataaacaagtaatggcctcatcttctattcttttatttactggttagacccagaaccctaaaaggtagatgcttctcatggtcatttggcatttgcaacaggagctgaatttattaatagtactaatacctcatccttggacatccttgggttgtccgatatttttaaggggcatttacatcctttgtttttcatatggaaaacttttccgtaagggctggtatcatcttggccttccattgcaggaacagcacagggaggttcggtggctaggccacagttacccacgcagctaggtagcagcagaggccccacctggcaccccctggcttcctaagcacatcgcactgtgcagcctccctgaggaagcctcgagtggataggaactctggttctttaagataaacctgagttggatctcactgtcaccatttatcagatggggcgatgtcttcaggcaaaagtacttaacctctctgtttttgtttccttactccaaaatggtaatgatcatactactacccacctgggtggattggtgtgcatatgaaggaggtcatggggacaagtggttggaagagtgttgagcacatagaaagtacaagataaatggtggccattatgttactacttagactatatcatacttgtctttatctgggcttagaatcttgacactgagatctttcattctcagatcttaatatgaaagcttaccaggtaaacactaccccaacataattatttagtgggttcatacatgtgaaagcagttgaaatacaatttctgaactccgggttaatttatatccttagttggaacaggtagtaccctcccagcacctaaggcctctcacttctatccattcttcagatgacctttgcaataatcatggtaattgaatagcatctgcaccataacattgttgaataacatcaaaatgatccatttagccatcatgagccttcctagtaattcagactcacaccagttctttcaggttattgagtagcttttacaaataattgctaacagtacaaatactgtctcaggtattttggaagggtgaattttcccattgatttcagtgtatctttaggaggtaatttgcaaaaccgaagagtttggttccgtcaaagtcacccctaaggagtgtggaggaccacattgtaggtttatactgcactgtccctcatgcttgaaatttggctcatgcaaccaaggaactgaatttttaatttcgttaaattttgatttaaattttaaaacagaaatagtataaaatatttttctgttaaatataccttgtagtgttggcaagactacatttcgtgttaccatgctgggtaagatttcttgtagtgtgtattgtgttttgtcacctcgttaataattttcttattttggttgcatgttaaaataattttggatatattgggttaaataaatatattgttaaaattaaattcacttgtttatttttttgttggtgaggctaggctactaaaaaatttaaaattacccatgtggattgcattatatttctattagtgctgctttagctgcaagtagcctatttaaaaaaaatcattattttcagacttatggacttcatagaatcagaggtatttagaggaaaggatcttgggggtcacctaatccagctccaacattttgcaagtgataagaccaaggccagaggctacaataaaatgactgacctcctcccagatggggactggatcccagtggctttatagcctttgccttggatcctggttttacttggaaacatagcagacatcagagctgcagagaacttctaccagatccggagtgaagaaaatgccttatttatttatttatttatttatttatttatggagaccgggtattgctgtggcctaggctgtagtatagtggcagaaacatggttcactgcagcctcaacctcctgggctccaggatcctcatgcctcaaccttctgagtagccggggccacaggtacgcgccaccacgcctggc

SEQ ID NO: 97516 - DNA, 1032 bp, Homo sapiens
gagtaagatcatgtctcaatgaaaaaaagaaaaatcaaccctagtggactggaacagggctggtttactttgtgtcagctgcagtgcccccactcgccaacccacatgttcttctcctgctggttcccaagcagagaccagaaccaagaatgagaatcatcctgtgggtgcaggttgtatcttatcctccagagacagcacttcaccctctgttagaaacttctttaccacactgcctgtttggtgaaatccttagggcagtgacttccaaactgtgatccaggggccacccttggtgggaggatcaggaaggagggggaatgtatcttaagaaaagttgggggaagctcatatctcttctcgttgatcctgagaagtaaagtctttcctcctcagagagatgcgggtagacatgactcgcctagatagaagctcattcatctccctcccttctgcctctgcaggactcttggaagtctgggtccccgggagtatgcggctcttgctctgtgctacaggtttccaaagttcacttgataacagtacaattgtgctgtaaattgtgcagtaatggagactgaggaaacaattagtctttcatcttcattcatgttaccagctcacttcctatggtgtgaaaagagccagactttggagttaggagacatctgaatacagacagaactggcaagattatggggaagaaaagggaaaagtaatgaatattttcaaagaggttaagccatttggccaggacaacactgcttgcaggtagcagaactgggattttgactgtccataatccctattctctgcttgttttactccttccctctcttctttcttttttcattgtctaatgacctacagacattctgtcagctgctaaagaatgagggactcctttataaagattgataggacagtgtcgctacttaaggagttccttccatgtggaccagtgggggcgctgttgacgcatggggctggacttctctttggagcagagtcctgttccacggatcgctgtga

SEQ ID NO: 97517 - DNA, 2231 bp, Homo sapiens
cctgtattatcagctgtacactgacaagctctgaactctattgctttttcaaatcagagaagaaaaatgagtaagaaaagaaaaatatggatcacttaggctttgatgcctcctctgagtttatagtgtttaccttctgtattacttaggtgatcctctctaatggcattttaaatctctgttgatacttgtcttacttatgtatctgtttttttttcctctatagtagatagaatttatagatatatatgtattttaaagtaagatacaatttacgtaccttacaatttacccatttaatctaattcagggttatgcaaccctatgaatttagtagtttattcatagagttatgcaaccatcactgtaatcaattttcaacaccctcaaaagaaaccccatatccattagcagtcacttcccatttcccctcaactctcctggcccctggtaactactcagttattttctgtacctatggatttgcctattctggacatatcatgtaaatggaatagcatgtaaatggaatcatacagtatttatccttctgttgctggcttctttcacagcaatatgttttcaaggtttaaaaatgttgcaacgtatatcaatagcgtcattcctttttatggctgcatactattccattgtatggctataccacattttatttatccagttgatgatcatttgagttgtttccactttttatgtttctgtttgtttcttacagcagtggttctcaaactgttgtatattagactcaccatcagtatttaaaaaactaatgcccaggccatatccctcatgaaatcaaaatctctgggggtggggcccaggcatcactattttttaaagattctgaggggattctaacgagcagtcaggtttgagagccagtgccctagggcagcagtccacaacctttttagcaccagggactagttttgtggaagacagtttttccatagaaggaggtagaggatggtttcaggatgaaactgttccacctcagatcatcaggcattagattgtcctaaggagctggcaacctacatcccttgcatactcagtttacaacagggttccggcttctctgataaactaatgctgctgctaatctgacaggaggtggagctcaggcgggaatgctcgcctactgctcacctcctgctgtgcggcctggttcctaatgggccactgacccctccgcagccagcaggtggggacccctgccctaggggacccacctcagtgcttggtatccattgaagtatatagtgatttagaaaatctggttaggatgtcttatttaaatcatgaaagcaagtgcttttgtctttgatcattgcccttcacagccttacagttaacacctacattcaggaactgtgtttcaaagtgcctggcgagtgtttgaaactcactaaatatatataacctgggctcattaaacccctccagaagatttgggtaactttgttatgaaagggcttccctgaagtgggtcagcaggattgctctgtgttttttcaggaatgtggcctgtgataacttgcaatctagattatttggaaatagcactgagagaagccagtgaggacagaatgctcagaagcttgggataggtgttgaacatcctggaggccaggacggaacactgtcttactctaggaagctgtgttcctgggcctcattatcttcctccgttaaaaacaaaagacttaaatctccacagcagctttcagcaacttcattttttggttctctgtatctgcctgataaagtcccactttgtagtggctcccacttatatttacctgaatggcttttgggttgacatatttggaaactggggctaacttccaaactgttggcaacttgtgtgtgggtgtgcgtgccacagcacagcagtcccacttgagagacttgatggtgtggtggtggttggggggcttctgaagctggcttagccccagccctatacacccaccccacagatggtgggaacaagcccagaagagagtgggtaactctgtccactgtggcctccacagccaaggttgccaggcagagctcgcaaggcccaattccagtcttgtctttgaccgttgcccctttgtgttgggggggtgtatttagtcacctttctggaagcatgcttttctaattctagtcatcagtagtttgttgctttaagattttgaaaatggtatcctgttatttta

SEQ ID NO: 97518 - DNA, 1025 bp, Homo sapiens
ggattacaggtgtgagccactgcgccagtctgtttcttaatataataatagttttaaaaatttctgatgtttggcaatgtccaagattctgcctcacatttttcagaaactgccttttttcttaattaaatctcttagctactggagtctttgcctttgtttgccttgctacttggtacatttcttctgttccattggctctttttgttttgaagtagtgctcaaaaataagtttggtagtaagaatatggtgaagagtgtgacagacagggttaaaccaggctgaaggaaagagagcagaatggggaaaatttgagttgaaaacagctagcagaaagctgatggcgcaaattcaaccctaatctcatgttttggcacttctgaactatagcaagcataagggctcaactcttatctagttgaagcttacttgggtctttgagaatagtacatctcaaaattaaacactttcttagtccttattgttaagttgtttttggaattattgtcttatttgtctgaattaagtgtgctgcaggacttataggatctgatggatgatttgcctaaaagttggtccaggtcaacctcagggcatttaaatgcttggtccagccactttctgaaagttgactgaaatatgttgcacagcagggtagaggaggacaagtttactagatgtcatttttaacctgcttgtcttcatctctgactgtagaaatgtatattcattataagtttgccacaaatagagaatagagtttattctttgatcatctaatttctaggagctattgaaatttcactgctacctgcttttaaataagcgccaacaaacatttattaaaagggctttaaggtataggccaagatttattcaattgctaatggtatgttttctgtaaatgaaagcaaaaatatgttcaagtgtataatattaaatattaacattcagaaacttggagaaatacagatggcttttttttttgagacgcagtcttgctctgtcgcccaggctggagtgc

SEQ ID NO: 97519 - DNA, 1686 bp, Homo sapiens
tcagacatcgatttgcatatttgaaaacagaaaaagaacaagaaaatttagaattgattttgtttatgattcatattagattgttgtcatccataaagatttgaacagagtcaaacattttcttgaccttttgtcaaaaaaaactctccaggtgtgaagtggtagtaggatatagtttttcaccttctgtgcagaggatgtgttgataaacagggcagtaaggagagccttagattcagtatctccattaggtggaaggaaccatccattactcttttcaagggtgtcttggagagataaagcactttcctagatgagggatgaagttgatattgaaatagaccgatgagattatttttaagtcaaacaaaagaaaaataggacaggcctctcatctcctgaatgaatgttaagcaaagaacaacttgactttttagatatgtgaaaaatctcttgagaggttgtggaagcagcatgtaggaggataaatgcataactcacatcagtcttttacgcattaaaaataacttgggccattttgaaatctttctttcttgccctgggttcttataagcaatgttggggggaaaactgactctgtctttaggattaccaggaaaagttgaaagccaaatgcatcatttttcttaatatttgtttttattgaggataaatcatgtttaacaaagctgcatgaaaaaaaggaacccaacaagtacatttttttttctgggaatttcctctgtcctgactgaagacatttaaagggggttttgtgtcaatatttcctccttaactgttcctcaagcctgggttaacttttcagtatgcaggaagaatttggcactaagataataatagataagttactgggcacgtccctgggtgccagacataattgcttcacatgcataattttacagtaacctcacgggaaatattattatccctggtttccaggttgggaaaaccaggcataatagttagatcaggcattaggttaggaaaggttaggagagaggcatagagaaaggccaggacctgctaaggtgaccatactattgagtggccaaggtagcattcaaacaggtttgactcctgggggcttctaatcaccacttccagactgtaccaaaactccttaaactctaaataggaagaaaagctcacactttaaaaagtgggtaagttgagatttgcctattctgggggaaggagaggccggaatataaaagattaatgtctgcagcttttccatttagcaagacatttaatcactgtatgtgacgtggggaggtggaccttgttaaatacagggagagtgaatacaatccatcaatggtacccactgtggtccttttaaggaagacacagaggcctcggtggattcaatttagaaaggcaggactgttttttgttttttgtttttttttttttttgagatgaagtcttgttctgttgcccaggctggaatgcagtggcctgatcttggctcactgcagcctctacttcccgggttcaagtgattctcctgcttcagcctcccgagtagctgggattataggcacccactgcccggctaatttttgtatttttagtagagatggggttttaccatgttggccaggctgggctggtctcgaactcctgacctcaggtgatccacccgcctcggcctcccaaagt

SEQ ID NO: 97520 - DNA, 1955 bp, Homo sapiens
ccgcctgctgggaccccagctggcagtcccttcccgcccccggaccgcgagcttcttgcgtcagccccggcgcgggtgggggattttcggaagctcagcccgcgcggccggcgggggaaggaagggcccggactcttgccccgcccttgtggggcgggaggcggagcggggcaggggcccgccggcgtgtagccgattaccgagtgccggggagcccggaggagccgccgacgcagccgccaccgccgccgccgccgccaccagagccgccctgtccgcgccgcgcctcggcagccggaacagggccgccgtcggggagccccaacacacggtccacagctcatcatgatggacttggagctgccgccgccgggactcccgtcccagcaggtgctgcctcggccctctgggccctgcggtggtgccgggacgggggcgggggagctagggaaccgcggcccgggagggacagccgcaaccggcttcccccacgtctggccagagccaggaccgcggcgctgggtagagccgccgcgcttgcgccggggcagggcggggaggggcagcggggacgcggccgggtgatccgaccgaccacgagcccgagggcgaacgggtgggaagttgcgggaaggtctggggactgagcccgctcgcgtgggccttgggggagaatccagccgcgtccccgggcccgagagctgggactccggagcccctaagtttgagcggcccggtgggcggcggggcaagagggggcggacgctggccgtctgagccggcgcggcccggcccttccggggctgcgcggctcccccgcctcggtgccggcaaaaatgtgcctagtcacggggccgctctcgggggaactgaggtcgccttcgggctgggacccggagccccttcgccgcgccccaagacctccttgagtgcgggctgcgacgcgctcaccccgctgggccgtctgtgggcgcggctttgcgaagtcatccatctctcggatcactctctggcagccttgagctctcttgaaagcccagccccgggacgagggaggagcgccttaagtgcccagcgggctcagaagccccgacgtgtggcggctgagccgggccccgcgcactttctcggccggggaggggttcgggctcgggcacccggagttggcccctcgtaacgccgcgggaaagtgcgggcgagggcagtggactctgaggccggagtcggcggcacccggggcttctagttcggacgcggtgccccctggtggcgctcaccgcgcgcgtggccttggcttccgtgacagcgctcggttggccgtcacagcagccctcggttggccctttcctgctttatagcgtgcaaacctcgccgcgccagggccaagggacaggttggagctgttgatctgttgcgcaattgctattttccccagagcggctttgtctttggatttagcgtttcagaattgcaattccaaaatgtgtaagacgggatattctcttctgtgctgtcaagggtaagagttgcgagtgtagattagaatttctgttgcttttagtctgttagtaattttttgctttcagctattatttctcccctgagtactttatatatgtttccttttcagttgagaatttgcctcaatttcttaacatgttccccctcttctgcaggggcagagagtggaacgcttgcgtttcaaaacacttgctaatttctgtgaattgttataaaagtgaaaagaagtttctgctcatcctttgtagaaactttaaaagtagatatttatatttctaacttcttttgtaaatgaattttaggaaaaaaattggaattcaaggaaatgtgtacttgatgtacagtaaatacgtttatgctgttaaatgtaaagttttcggttaattccaaagatctattgtaaagttttaagttatggacaatgtattaattgt

SEQ ID NO: 97521 - DNA, 1066 bp, Homo sapiens
ttttacgttttgatgaagtcaagtgtgtatgttttcttttgttgcttgtgtgtttgatctcatatcaaaaaaccattgcacaatccaaggccacaaagagttatgtctatgttttctagatttttatcattttagtgcttacatttaggtctttgatctttttgtgttaattttttatattgggtgtgaggtaaaaatccaacttcattcttttgcatgtgatatccaattatccagaaccacttgttgagaaggctagttcttcctcactggattatcttggcacccttgtcaaaaataagttgactgtagatgtgaaggtgtatgagttgctaaaatacctcttctgtgatatttataatttattttctaaaaggataagttataggtcacatctcagattacaatgattcaagtcaaaaagttcaaagtagaatttactttcaaaattgtttgttcccccagagctagttaatgcccccagagctagttaataaactctatttgcagataaaagcatgctttcccttcaaaggtatttcaccaagacgggaaacacaaaactaaataagctgggaaactgaggatacacagagggtctccttaatctctggatatgtggtctaatgtatcctttttgtgctcattttttcccttttatccagaaatacaacattacctttttataaaattcctggagattgatcatatctctagtgtttgggtctagaatgtattttttggccaaaacatctctttaccccacttccacatgtggaaagaaagaaaacatggtactctaatctcacaagtgaggcatggggttgtttcctgaaatgaggcaaggactttggacaagaacatgtttggacttgagatggtttttgtaaacccaaatgatattagttctagtctgtctttatcgctcactgtattttgttttcattcatactaatgaataatagacttgattgtgttccatcatttatgtcattaatatttcctttatgtttgagtgctgtgcagttctccttgaaacttgtatggagattgaacttgatagtga

SEQ ID NO: 97522 - DNA, 1063 bp, Homo sapiens
gcattgttatggatcttaaatgaatccaatacttacagcaaaccaggtggcgtggagtttggctgtatcagacgtgcaggataatgatgcaaatgaccatgcttacacaacccctctgcatgacttaggaacaatgcctacattatctttaagatacagaaaacacaagtaacatgtaagagacactgttagagtcagttcccctgatcactaatatcggtgtgtcgtcagtcattttttgtattcccatgtaactgattaaatctatttgggaaaaagtgtcggccatcgtatcttagattctgtttcttaaaaaaaaaaaaaaaaaaaggaagagtgagttgggggagggctgttgatggcagtttgctgccgctgagtctggcctgctgtttttctggcattttttcatctgtgctgccatctagagaggagaattggaaacacgcaaaaataaagtcccaagatggagttcagggaaagtggatactgtgtatttatttgtagaaaactggaagaaacatcatgagatttgggactataaatttatgtttttctcttctctctctctgtccctccaagatccaaaacaggacttggatatctgtttctcagtttttgtgaggacattccaggcattgctgggaagccatttcctggattcgaactgactccttacatacctaaaattcaattgtataaactttctgggacctctaaattgtcagaaagtggtctcacttttctacagttgaaacattgctggaaatgctcacattcccagttctgtaggatttggaaataaaatggcagctttttgtgtgtgaattaacaagagaaagaagtcctttcaacacagtggagcagtttcctgaagtctgtgccttccacagaatctaccagatctgcgggatgtttataggtgaaacgttggtcaaatgaatttggggattgcaaggtaaaacaatgttaagcagtttttataggctttaatttaccagtgtccactgccagcttgcaagagaggaaaatgctgggcaagctttcccaaacttgtttgacc

SEQ ID NO: 97523 - DNA, 1053 bp, Homo sapiens
caggagggcacaggcgaggtgggaagggaagtgacacgggtgggcggaaggcatcccggtccctgaaagtagggacccacctctctttcgagagagtggactagaccctggattctgtcaggaagggggcgggatgggatggtggattttggtcactatgtgagggtaacaggcttgaagaactctcgttggagaagggtttaaaggattcctttttcctgagcttttagtgccaggaattcattttttatcttgaattaatacttttggtgctgaggtcttggaatgggtagcagaggttctatttttctccgaggagatataaatttgtactagatgatagatcataggaatctctctcattcgcgaaagcctgctgtgggggaaactggtggtgccctggaaaaaggtgctgactggtttctgtggggtaagttccacttgcttaggatcaagatgtattgactttgagggaggaaaccgatgaatggtaagaagccataaactgcaaacactagctagtggtttaaggtgtggtggtatagctactgagctctgtgtaaccagaagctaaaagacaagagtctaaccgatgagggatgtttgtaagagatcttgactttcgatgtttttggagaaatctttttttttttttttgtatttttagtagagacagggtttcaccgtgttagccaggatggtctcgatctcctcaatctctgatgaaggctattaggagaagctactttctgacgtgtggctttgtcaccgtggataaatggataaaccgagagtgaaaaaaataagtagctaatgtttaaagtgtacttttaagtgtgccaaagtgtgctaaatcctttgtttcttcccaagctatgaggtatgtgcggttttctcccattttacagatgaataaattaagtctgctggagtcttagcagatatgctgtgtgacaggttagaatttgaaagcacatcaaattgacttcatggccaagttcctaagctatacttgcttctgatgaattaattcaacatacatgagtctttaca

SEQ ID NO: 97524 - DNA, 1022 bp, Homo sapiens
tggtggggaggggaggaataaaggatttcatctcgtctcctggcttcaattgaggttatattattaatagctgtcattaggtttaaaattttctaaatggtttcatgtacatttatgtgttctcatttgtatgcatatatgtgattgtacattttatgtagattcacactcttagaaccaagtaaggagggcaggttttccttatggttagatttaatggcttggtttacagcattcagagaaaaaatagtaacgtttgtaaggcacaccaagatgatggttgaaggtgactggtcagggatgccctgtgtggctgctccaaggactgaaggcatcgatagttcaggcacgactgtaacccatttgttgcataggttacagctggtgggaagccctggtctttggttcggggttagacgactagtggtaaaatctagtcctgtactggtactttgagattttcatcaaaatatgagggaacacagaaacttgtattagatgacacatcaaaagcttccacagagggtgatatacttgatagataatcatgaggaacccaagtctcccttctacttcctacttagctgggcctgcagttgccagctacagaatccagcctaaagggaagataaatgatagaggaagaaggaaccacagtatatatctaataaggtgtgagtatgcctatatgtcaattattttggaataattttgtgatttgtgtattattccttcccttttattactttggatgataacattgcttgtaattgttttatcacatggttgttttatcacatggttggttatatcacatggcctggagtagtgacttcttgaaatgccatattttcattcctgttacagaatagtcatgcatatgtttcaacatttatagagtagttgctttatgaaggtcctgtcctaggcattggaggtaaagagatgaataagtagtcttcagcctcaaagagttcacaatctaggaagtgagagacacagtgcagtttgattagagccac

SEQ ID NO: 97525 - DNA, 1099 bp, Homo sapiens
gaggcagaggttgcagtgagctgagattgcgtcattgtactccaggctggacgacagggcgagactgtgtctcaaaaaacaaaacaaaacaaaaaagtattatttaacatctgccggaagctttggtagatattttccagaaggaatacagctgagttaacctcttgtaaatatttcccaagagggtatcctgaagcctgtaagagctgatacagagcaaaggttatttgcacaagtgacctggcttaaaacttaacatcgtttggcaaaattcgagcttattttggtagttatgttgaatgaaatatttaccctattttgagttcctagctaggaattctagtgatagtagtaataggagttttaattgactaagtcctaatatgacaggaaccatgctaaagcttatgtacattatgtcatttaaatctcacacaacagctctgaaaaatgagtgatactatatgtacattacagttgaggaactagaggcttagagaagttaatttatctaaggccttgcatttgtgaaatgaaagagatggcatttcaactctgttcttgctccagagtccatattctttcctctatgctggattaccacatctgatgttcccggggagatatctacttactattcatcaagttgctgtctttgtcatgctaagtttcaaagtttttgtgattaaatagatcatgatcaaatactttgtcatatagttaagaaggcattagtttatgttgtacttaataaattataaaacatcattctgtcaaaatgaaattcataataagaaaatgtaatgggtggtttaaaaaggtagaccagccagtttacttttgtgagtgcattttgccatttgacttgtggaagaagacagtgtttggaatgaaagggaattaggaagaatgtggaagacccaagatcagagaagaaaggaggaaaagagaataggtcatggagggtttactgcctagttgcaaactgtctttggactgtgaatgaacaggaaactgaagatttaatcgctgtggttatttgttaatatgcttctctagattgcattttaagatggaccagaccttctctacatagact

SEQ ID NO: 97526 - DNA, 1034 bp, Homo sapiens
tttatagatattactgcataggaagaggttaaagtaattaaaatagtgtttaagaattaatatatttacttttcttaagtacatcaattgtttgaggtaataaacagaatgctcccaggtactaaatcatttttataaataaattaaattggatttttaaacaaagtgaccttgcagtgttcacatattatttacgagcttataagatttcagcttaaaatcataagtccaactctattactcaattacacattttaaatttgagttacaagtcagtcattcttaaagactagattctcttaagttttgtaaatatataaaatatcaattttttgtatagttttcttaaaaacattaacatctgtctttggttctcttaagcatttgtatatttaattctggatctttcagtagttgaaatacgcttactcattgaaaaaaactgctactattccagtaactgcagttacttttgatgagagagttttgcctcctgggtgagattcggaggggtagatatcgtcttgtcattcactaagaaaactgttatatgattgcatataacatttgttcttgccagcatgtttgaaattactaatcagagatttggccaggttgctgaccagattcttgttgttgacctcagtgggactctccaaattctatttatagttgctgtgtcagagacctcatcctataagcaggggaatgctcaggtatcccaggaccttagaatcaagtaatgtgaactatttaatttgctataatcacagaagttcgcatttccaactcagattgattacctagttgggttttacattttttctaaaggtgcttgaactaactgtataggaatccagcctaaggaatattaaaatgacacctacttgaattctcttatcactttagtcacatatactatggagtggatattttgctgtcaactcaaattttgtaggtcgacactatccagtagagctttctgtgatagaaatattctgtaatctgtgttatccagtatcatagccactatg

SEQ ID NO: 97527 - DNA, 1287 bp, Homo sapiens
gtgcaaaattgaatgattcaaccattgattttgataaataaggatttttacaactatgaaatattggtgttttgcaaattaaaaatagcatgttatgaaatattggtattttggaaattaaaaatagcatgttattttgaaatattgaaagtgagtatggccattaactgttacaatatgtaggtcaaggtagagattggtagctatatggaatttgaagaatttagaatgtaaacccagcactgagatttttaatctactttattgtgtctactactagtcagtctacttggtaaattggtctttttttaaaaatcgtagcagaaggttaataattatgatttttttctcatgtgtaaaactttgtttccttagttttaattgcaaagctttttaggtcattctacagtgtaaacccaataacatgtacaaaatgagacatttatattttaagcatatcttcttcctttttgcaactttttatttcttcctttgaatgcattaaatttattggttgtagccctctgtgaagcaggtgctgctcatcagagtgattctatattcagaaatattagtatatggacattttaatgtgtgctaattttatttaaccttatacaatatttgtgggcataaggtattttagatgattgtgagttaataatcaatgatatactgtacagttttaagatgtttagcattggtctcacttatatatattttcttctcactaggcaagaagttatgaaatggaatggatggggatataatgattctaaattcatcttcaataagaagggccaaattgaattgactgggaaaaggtaaccctggtttatttcttcttttgttcctcctttaattctttctttctatgaaaaattttaaacacacatgaaaatataatgattcctccttgagtttaaacattatcaacattttgccataactgctttttgtctcctggtaatatttcaaattctgatgttgtcatgtcacctctaaatatatgtatttgtgtgtgtgtatatatatattatatgtcttaaaaaataaggacctaatataaccaattatataatattatatatccaaaatagcaaaaaatttttatttagttatccagttcatattcacattctccagttgtctcacaaacatcttttataggtagtttatttgtgtcaggatccaaataatgtctataagccacccaccacccaattcccatgccattcagttttttgaaagtagcttcatatttaaatctggtaatttacaaggagt

SEQ ID NO: 97528 - DNA, 1063 bp, Homo sapiens
ttgtatttttagtagaggcgaggtttcaccatgttagccaggatggtctcaatctcctgacctcgtgatctgcccttcttggcctccgaaagtgctgggattacaggcgtgagccactgcacccggccagaaatgctaaattttatcgacaggtataagtgtagatagtgcgaaagtcaagtagctttctcccagtctccttaatctgaaatggaagatttaatactttgctgtcttccctgttgattacaatctttagaaatttgtaatttgttactctcataaagctgatttctatatatgttgtgttgtattttcctatgcttcagccttactttgaatgtttaaaaaaaagtctacattttatagtcattctctctaactgaagtacccaaaattcgttgtctaaaaataagtcaaagaaatcaattttattttctaggcatccttaaatcctagtgatacacctccttctgttgtaaatgaagattttcttcatgaccttaaagaaactaatatttcatattcacaagaggcagatgatcgagtatttagagctcatggtaagttactttatattagccctatttatttttaacaaaaaaattctatattttaagctgtttttgtgtttttcttttttttaaccacaaaacaggtcattgtcttcatgagatatttttgctcagggaaggaatgtttgagcgaattcctgatatagttttatggccaagtaagttttcccctcctcgtatcattaatttagtattgctaaattttaggtaaatttaacattggaaatacgtactttttggcatatgagttgtaaaaaatataaattgctgtatttttaagagagtttacataacagtcttgaagctctttcttgacttggttgttctgaactattggttttaacaattcattttgttgctgataattaaatcatcattttaaatgtaaataatcatatttgagatgtcagtggaaaaacatatttttggataatttggaagcttcatgaaattagtgtcagtaatacattcagatatatagaattatt

SEQ ID NO: 97529 - DNA, 1987 bp, Homo sapiens
aggctaggtagttgaggataagcagtgaataaaacaaaaatccgtgctctcaagtgccatacaatttaccgaggggaaacagataatccacaagtaaatatgtaacatattgggtagtgttaagtgctgtaaagaaaagaaaagcatgtaagagggtagtgcgaacaaggatgtgtagtggaatgggggtgcagtttcagataacatggttaaggaaggcttttgattaggtgacattcctagaagataattttgccttgttgaagattttttaatagacatctttgggtgttttgtgaattattaattaatgagtattctatttagtaaatttaccacagatagcaagctttataagtttaatccaaaagcttgaaaatagatatttattaaaaatcggaatgaaacaaatgacatgttttcttagctttacacaaaccttagaaaagataattgcaacttttatggaactatttttgctttcataaatggatattcatttgctttcctcagcattcttatttcctactaagtccttaggctcttagcaactaatactggagttttgcatagttttcttgcctcaagtctcgctcctccatgccatctcttattatatcaggagattgacttttctaaaacaatctctttgccatcttgttcccctccttaagaacctccactaatgtcctattgccagtcaagttgagtcttagcacctcttgcttggcatttaaaatcttccagtcaggtttttgttacttgtataacttttacaagcataaagagaaccctttagttctgtacaaaggaaaggaattatgtgcagtgtattttgtgcaatattgtaaacatttgtttaaacaataaatcatcaatggtgctaaaattagtaggtgaaagtatgatgagaatcatgatattttacatagtctaagatatgtaaatactgtgtcactaggttttcccactataaggatactgtgtttcttgttgaaattaataggtatttaaataataggtatttgaacaattaatacctattaattttgacaagaaacagagtatccttatagtggggaaacctagtaacacggcctaaccaaatgctgtattaataagttaacattactggaaatgagacatgttcatatcatgtgcctctagatgtaatgcactgacaaagatgcaacatcacttctgtggaattactcccaaaatatataacctgaacttaatcatgaggaaacatctacaaacccaaattgaggggcattctatgaaataactgaccattgttcttcaaaactgtcatggtcatgaaagttaaagatactctaaggaaatgcctatttttaaagaagacacaaggcaactaaatgcagggtgtgatcctggagttgattctggtccagaaaagaggacattagtaggacaattggaagtatttgaataaggtctgtagattagtttattgtattgtatcagtgttgattgcttggttttgaaattggactgtagctacataagatgttagtatttggggatgtgagatgaaggaaaattttcgtactatctttgtaacttttttgtaagtcaaattatttcaaaatgaaaagttaaaaaggtaaagtgttttagtactcaattaactcattgtgttaatgagcaaatgaatgaaggaaaagtttagataaagaatttcgtaggttcttatttgccaaggttatcagattttatttatgcctctgtaattaatttattttcccttttttcaacagcatgccatgatgatgtagttaagattgtgaatctagcttgcaaatataatctttgtatcataccaattggtggtaggtattgtgccttttgaattttaatatgtaaatttgttctatttaaaatatttgtattttaaatatttgcgtcaccctactgaaaacaaacattattgtaattgtgatgtggttattctcaaaaattggtc

SEQ ID NO: 97530 - DNA, 1047 bp, Homo sapiens
actcgcttgaacccaggaggtggaggttgcagtgagccaagatcacaccactgcactccagcctgggtgacaaaaaaaaaaaaaaaaaaaagaatctaatatccattttgttttaaatgtatttcatcattacattttacccttgtattcagttctccaaaaggtaggtttacttttaccctcaggtatatatgttgatggctattttaccaaatttgaatttttttttcaaatacctaagtagagagaatagtttacccattttttagatgaagtcgttattaacattttgtcatactttctttatctttcttttttttctagtagttttagagcaaattctgatacaatgctactttacatgtaaatatttctgtataatctcgtttaaaaaggacattttctcacataactattattatcactcctggcaaaatcaaaagtaattctttatgttatttagtagttagtctacattaaatttttgataaaaagtgtctgttttatagttcatttgttcaaatggggatccagacaaggctcacatttgctttccattgtagctcttaagtctcactttatgtaaaagcttcatcttactccctgtttttttcttttgaatgttatagacttttgaagaaacaaggttatttgtagtatagaatgtcatattttgaatttatctgttgctgcttcttgtcatttaactctttatctaagccctgtatgtccactaaattagaagttccatataaagtctagttagattcaggcattgcctttttttggttttgtttttacagcaagaatccctcatagatggtaatgtgcttttaaaaaaatgtcacataacatcaatagaggtgtgtagtagctgattgtctcacttttagtgatgctaaaattgatcaagttcagatggtgaacactttattttattgtaaggttccccattaacctatctccttatcccagattttaagaaaaggcaatttatttcctcagaagatagctgaagaatagcctgttctggaatgttaacatggg

SEQ ID NO: 97531 - DNA, 1053 bp, Homo sapiens
aatcttatggtcatattctgatattcttaaattagatagtgattgctatgttaacacagtgcagatagtatttgcacaatgccaggacctgtatatgctgtttttttacatggagtacctcatttaattattgtagccaacactttatgtattattactattttacattttacaaatgaggaaacaataagcttagacagttaaataatttgcctaaggtaagagaaggaatttaaattaacctctgaataaagacagagtctatgttttaagccaacccctgcataatatgctgcctttgttactatgttgtcatgttgtatagtctgggataagtggacttggtttccagtgtgggtggttgaggggaacccttcttgcttaatcactgtcttaccacttgttgctttgaattaggaagttatatttcctgagaaaatattagtagttcctggagatcagatttctttcttcctttgcaacagaatcgaattctctgggttgatgagaacaatttgacagctcatgtagaggctggcataacaggacaagagttggaaagacaggtatgttatttatttttcttatttttttaaattaacttattctaatatcaattctgatgttatttctttaatgaaagttttcaaaactgtatcccctctatgaatgaaataccttttatgatacattcattcactcaaagaatttgtttagtttctattatgggtcaagcattgagctagattctgaggacatgatagtgaataaggcattgtctgctaccttcaggtagcttagattaggacagaaagttcgataaataattaattatttggagtgaaaattgctatgtggatgctaaatgcagggtattatggatcatcaaatggggctaggtgggaacgagttgggcaaagaaggtatcacatagaacctggcattttttttgttgttgttagtactgagtcagtggcaaaggacacagcatttaaaatgagacttcaggatgagtctgagttagcaaaaaaggaaagaacaatccagaggaag

SEQ ID NO: 97532 - DNA, 1045 bp, Homo sapiens
aaatgcagctcaaaaatatttggaaaaaaaaataacaataccacaaggaaaataatacaaaaaatatagtagaacaacaatttacatagtatttacattgtattattcataaatattctaaaatgatttaaagcatgtgagaggatgtgcataggttttatataaatactgtgctgttttatgtaagggacttgagtactatggattttggtatcctcgaaggtcctagaaccagttctatggggatactgatggatgtctgtatacaaatattattttacaagcctcgtggaaatgaagtcttcaactctaccgtgattttagtccatttacttagatgatttcgtttttgctactctgtttccttaggagattttgcatttttctgaaaataatttttcctgtatagaattaaataggctgattgaaattgttctaccaagtagtggtaagacctgtcatgttttatgtgcacactgctttttgtagctgatatggtgccactttgctgggagttagtataataatagtatataactctgggcaccctagttagggattaggtatcatttgttgctttttcaatgattagttgtgtgaatttgtacaaattggtttacgtttctaaacttcagtttcctcttctgtaaaatagaataatgatatttgctgcatagaattattgtgaggagtaaaggacataaaatgaaaactcaaaatctctggtgtgtagtaggtgcttcataaatgttgtttccttatcgtcaatattttcatagtagtttaaaagaactttaatttgagactattaaagtgatgttcccaacattattcctggagctatttagctttgcttttgaaatctaaagtttccacattttcatcaatatctttgttattaggaatattaaatctttaataaaatatattggttctttatagttaacactgaggaattaaaaacttttgtctatattgtgaatactttttaaatattttcattatcctatttatttttctttattcaaggcatttagaaaagcac

SEQ ID NO: 97533 - DNA, 1179 bp, Homo sapiens
attctcattgaaggttagggtttttttgcccaataaattgtttttaagactaaaaataagcacaaatatcaaaatacgcttttgtctgaatacatatgagacataagaatccattgtttttcaatttttttattttaataagttgtaatactttaaaagccatttaaaagtaaccttcttggagaaagtttactttaaaatgttgaaaaatatttgtacatgactaattaaagcgtattcctaaagcttttttgagaaattgtaaaatttgcttaattttataattttttctagaatgacttgagtagccattattccccaggtagacttgataaatttaaatgtgcataataaattgaattaatagattaaatagatttaaatatgatttagaaaattgtcatgtgatgtactggattattcccccttctttttttcaggaactcttggtgtaataacagaagctacaataaaaatcagaccagtccctgaataccaaaagtatggctcagtagctttccctaattttgaacaaggagtagcctgtttaagagaaattgcaaaacaggtaaaagaaaaaatatatatatatacatacatacatatatgtttatgtatttatatttttcaaattctactacatagttgattgtgatatgttacaactaatcttcatttttagttgtattatatttgtggtttttacccagttctatatgaaaaggtagtgttgtacagtcatcctttaagtgcagttactatttctttgagtaagtatattgctatcaaacctatttcttggtctagatggctatatgattgtaagccaaggtaagatagtactttgattggtagcttcagatgactttgccttttattgactgttatgtgtcttaagttatttttgggtaagatattttatgattaattgaagtgatatttaatttaaattgagacatttattgaaattaaaagtaatggctaaatatcaaagaccccaaaatttaaatataggtaattcaacttcatcaattcatagaatgtgctgctactaggctatactttgtttcataatattatctaagctatagcttaaattaaggaatatactatgtgtaataagctaaaaagaatttttattttctcccctccttaaaaaatatattattaagatttttt

SEQ ID NO: 97534 - DNA, 1023 bp, Homo sapiens
tgtaatgattttggattacagtcattgggtgaacatcctaagaattttttaaaatgaataaaaggacaagttttactgatttgtgtaaggatgaaggaaaattccatcccctgcttgtcttaaatagttttattttccctctgtctttgatgagcttcactattccccccacaaaaagtgtggttttttgtttgtttttttaagatggaatcctactctgtctcccaggctggagtgcaatggcgcgatctcgatgcgctgcaacctctgactcccggattcaagcaattctcttgcctcagcctcccgagtagctgggattataggcgaccaccaccaagcccagcagatttttttgtatttttagtgaagatgggattttgccgtgttggccaggctcgtctcgaactcctgacctcaggtgatccgcccgccccggcctcccaaattgctgggattacagtcgtgagccaccatgcccagccacaaaaagtgttattaaagaattgtagttcatgtcatttcttgttcaagtcttgaatgacataattctaattcaccattattgcctctaattttatgaaaaaaaatatgaatgccaaattagatttttcctttctgagacagggtctcactttctcatccaggctggagtgcagtggcacaatcacagctcaacgcagcctctcaatctcctggatgcaggtgatcctaccacctcagcttcctgaatagctgggaccataggcacacaccactatacctggctaatttttttttaaacttttgtagagatgggatctccctgtgttccccaggctggtcttgaactcctggactcaagcgatcctccagtttaggcctcccaaagtgtagagattgctggcatgagccaccatgcccggccccaaattagattttttaaaaaattacagaagttataaaagtagtttggatttgtatttattttcaacaaaagatctcagagaggtcgtgttcagtctgtattgaccaactctgccc

SEQ ID NO: 97535 - DNA, 1673 bp, Homo sapiens
atttttaagacgttctcagaaaatacatttcctgctgtagcctatgaagaggaggaaaataatgttttttaatcagcatatcagtgttagatataacgtgttattattctctaaaagagataaataaaattgttagtttggaaataacgatgtctttacaaggttaaaaggaaaaccgagtgttaaaacaagctcagaagcagtttctgaagcttgggttttttttgtttgttttcaataaaaacttaggagtagtgccctatggtattttgagaggagcatttattccaacaagaggaaaaactgtatttggtattgattagtactcattcctctcaaaactcttctcagtaaaacctagtttcttcgaactaggtttttagaattatagatgaaaatgcagcttttcttcccactaccttttgatggagggtaatttttccttccttctatcacttttattttaaacaattttaaactgatgaaggtttggggttttttgtttgtttgttttaatgattttagattataatttgggaagacataaattttatgaattgttctgttttaaacttaatttatcttggaggagttcaaataaattagaaggagtcaggtttagcacttaccttataaaacacttaaaacttctttttattcaacagtaattcttgggagtatttattacatagagaaactgaaattattttaaatcattttttttgtgtcatgcgtttttttctctgaagcagagagaataaccctagtcaagtgtttggttaattggatcatttactgtttgatccagcaaaattaagacagttatgagacatgttctctaccagaagccactcagaacaagttattatacctttactaaactgaaaaactataaagttataattaggagactggcattatcttttggtcttttccttaatataagtggagggcaatattcactccctattatgtattattttattctttaaaaccaagcaacaattgacttgtcaaaataaaaagttcttattgtttatcatacggactcctagctgtaagtcagtatgtcatctctaagatgaccaaccagtaataactgtagccttaaatagtctatcatttcatctgtgataccaactctgacttattagttagaagaagaatttgtctacattttaagtttttatgtccagaaattcacatttaacagattatctttttttacatagccttttttgaacttttttttttttttgagacggattctctctctgtcacccaggctggagtgcagtggtgccatctcagctcactgcaagctccacctcccaggttcatgccattctcctgcctcaggctcctgagtagctgggactacaggcgcccgccaccacgccctgctaattttgtttttgtatttttagtagagacagggtttcaccgtgttagccaggattgtctcgatttcctgaccttgtgatccacctgcctcagcctcccaaagtgctgggatttgaacttttaaattaatcaattttgttgtgtgccttatttgaggtagtgtgctcttagcttgataaccaacataatgcaatggatagtatgcagttatatgtggttcctcacttctagtgaggatgttgcatattatgataattttttgtgcccaa

SEQ ID NO: 97536 - DNA, 1735 bp, Homo sapiens
gcctgaaatagtgctcatctaaaagtcagaatgtcttcatcttctacctttactgtggataaaatacagtatagttcataaaatggcataatacttgaggcactggattttagttttagaaacatctttgttctaaaataatccactttggggtctggtatttcttttaggatattctcatatgtctttgccagacattaggcagctttttctgctgataaatttaaaatctgttaacttatgtttgtatttatttatctatatctgtagatttcttctctccaaatattttatagaagtcattgatatttgtcttcataaaagtatatgaaaagttaactttttttcctctgtaaatccttaggaactaagctcttgatctcttaaatatagaaagataatattcacattctacctgtctagcttcttactgtattaaatttgtatcacttttttttttctttttaaaacagagatgtgctccggcatctattcgcctcatggacaacaagcagtttcagtttggtaagtaaggagtggtaattttaaaatgtcatttagccacagaaatttatgaaacatcagtaggaagagtacggagtgcagaggtagaaagaacgtcagtcttgcctttcaggaagatgtcagtctaatgaagatagacaattacataaatgagtgagggtagcagtgttggagggcctgtgaaagaagactgcactggataccatgggctgcaaatgaaggaattgattcttcttgattttgcttgaggataaagagtcagaaaaggcttttataagagagatgcttgagctaaatcttcaaaggtgaatataagtttgcctagatgtctcttcttcttctcaaccagacttcttcacttggcagcaaaaatgtgaaggtgtgaaactcaatgatgtgtgttaggggacttcaaattgttctatgtggctcaaatagagggtggggttagagttgttacatgagataaagttggttgggtgggctagggctttgcaggatagatttggattttgtcttgtcagcagtgggatttctttgaagaataaaatcaatcaactttacatcttagctcattctggcagcattgtgcaggatagattagaagggtacatgcatggaggagagacactaggagatgaaacagctcaagaagcaaagtttgagggctttgagcatggcagcagcaatggagatagagaacggatgatagattttcagaaaatcagtttgctaactggatgtggaaggctaaataaaaggaggagttgaagacaacacctagactgatttgattgggtagattaaataacatagaagaatgggtggtggtcttgggaaaaagatatgataatgggttgtagttatattgtgaaatttactttgggatttaagtttatagaatttaaataccctcaaaacaattcctaaaatcatgagagtgatcgttcagtaataaatactaaaggcaaagataggcaggcttttgtcatgtctaaaagtaagctgagattttaatttagggaagcatggttatagttacatagaaacttaactaaagtcaggttcgtaacatattaagagttttaaaattacattcttctaagttagtcataattgtttatttctttaagtaaattactttcaaaatactatactactgacaaaagtttaagataaatatgttctataagtaatgaaatacttaaat

SEQ ID NO: 97537 - DNA, 1913 bp, Homo sapiens
atccccaaaccttaaaggcttttttaaaaaagaaaactttttatttggagataattttgacttacttaagactgaaattctttataaaaattttgtataaatggtatgacacctttttctgaattgggctgctaacactgaggccagatgcatgactcttaaatgtagcaatcataggagttgagtcgttactactttctgaaaagtgagaaaacagtaaaaggttttcactcaattaagcttaatctgcaggcaaagatgttaatttaacagactttgagactccatttatgttattttggcaattttaactctccgggtgtgattaaggaagcaattgctagttttatgccaagaattctggatgaattaacaattaattaagaaacaaccttaaacttggcattaactccatatttggatagttctgaatagtttctatataattaaaaaaaaaagtaaaaccagccaccatgggtgttcttaatgaaataaaaattaatgaagtaattttattatgtgtaaaccataccgttgaaagaaaacctaaactatgtgtagtattaattacatatagtgatttgacttaaaaaatcaaattgataatgggttttgtaaataaaaagttgtttgtgacatttgaaagaagataaaagtagcaaatattaatataactatatatcgtaatataaatatttatgtaaataacacgggaagattttaaaaattaaagttgtgaaaacttttactttcttttaggattctaagttggagtagcttcttgatcttctgaaaaacatagactaacctattaatataaacttttttctcttcttaggtcatgctcttaaacctcaggtttcctctatttttacatcatttttggacggattaaaaaagttttatattacaaaggtaagaatttttataaaatgctaaaattgtaaatgcttaagatatctgttttctgctttcttcccacatgcacctattgtaagggtgtttttccatgttgctatgtacatttcagaattacagtttttcatgttggaataaatattaagtaaatcaggcagtcaatttcagaaaattttatttcttttccagttttgaagcttctaaaaataacactgcatttgaacagttttgttttcataacattttctatagtttaaattttttcctttatggaaggtatccataaagtgaaataagagtgtggattttttttaacctttgattgttgaatttttttcctagagtgttaagccatcttataatacatgtgtgccttcttttccttgcatccttgttattccatgtgggattctttttgttacatttttaatttaccagggggaaaacagtactttcttctagttcatgttttttgaagctccaatgagactgaacgttaacattttttttattttctagatctaatttttgtgtgaattcgttggatatggttatttttgccaggtggtggtggggggtgtgcagcttcatgtttttttcttggtactttgatgtatctttttttgagattggaattattagatgtcctttgtcataaatgttgtaagtaattttttttcccagtcaggcatctccttttttaatagggatttttcttttttggtgtaaaagtttcaaatttttatatcttttcctgtgattatttaatatagtctaagcttagaaaagccttccttcctccagtaatatgatcagggccattttcttcactctctctctcttatactaaatgagaatttaaaaaaaaaaaagtctttattactatttgtatttatttcaattttattatgtgaaaaagatctaaattaatcttcacctcctgctcctccaattgttaaccggttgtggcagcaccattaattaatctgtgcttc

SEQ ID NO: 97538 - DNA, 1089 bp, Homo sapiens
gttagattgatatgttgctcttgtctaatcatatatatattattattaaacattgtatttttcctagatttttacattaatgtcaatttcatgatatttgttctactagagtaaaatagaaaattcattgtcctcttactctgtggtgataatagtgtatgtataaagcgtgctactagtgtgtttttaaaaggaaattgtgtttaatcgaaggtatttgataaattatctatactgcaccccctgtcacttactgttttgtgctggtataaagaaacagaaaacatttcacatctataaccaactgaataatggtagggtggtttctctctgtcttcttgatggattataagactgattgatgagaactatagtgaaaatgccatttatcaggactatgttttttcctttccttttaaagtacataaactaacagtttctagacactaatcttttcttttttgatttcagggattaaaatatatcatatacattatgcttaatattagttctttgtaaatatttattttcatttctttttcattgttttttaagaaaacaaatgaacacttaatttggacccatgtgttttagaatgccccacttttatgtattttttttcatatctaatattagccctttatttctagggttgtctgaatttagtgttaacgtgcagtattcttaaaggggaaaatagtctaatcttagacttaaattttagttttcttttgcactatttttaagtattgaaaatgtctcacttttaccctattctgaaattggcaaatggaattttaattttttcagtaaaagagaaagtttattcatctttcatcttttctcgatagctgttttgggaattgctgatattttaactaaatcacttaaaaataattgtgctataaaatccatgtaatgaccagatggcttgaatttcaggtcatctcatttttgtttgaatttttgaaatgtacatgttttccttcccagaaggaatttagccctatgtatgtacccgttttttagtttctaagttatagggagtacgtatgtaatttgattaaaggactgttttcttaaaacata

SEQ ID NO: 97539 - DNA, 1651 bp, Homo sapiens
ctttacattgatttttatgaagtattcccaacaatttagagcatttttatgtgttgtcttagccattttttctctttgcttacccttcactcacaccccaacatagttcaatacctttgaacacatatgacccaacagaacatagtagccacataatgaataatcatactttgattgtttatccatgtttgctagtaatgtattttaacttctccaagagcagagcagaataaacattacctgtcagcactcatgacaggtgttttgacatttaccatagaacttaaggtaatatgttatcattatttttaaagcatgcttaagttgtttaatataattcaacatgagagtgattaggttcaccagatggcccttttatataaaaagattgtctctcattcctctttcattagtctttccagtccttcctcatgagacagctttaaatttgtttaaaaaccttgaattgatgtttgaaatttgtggggacagcaggaagtaggggatcgatgttgctactttaacataaagcagtttgaatctacatgcagtcattttggagtgattacaaaagtcacaatttagaagcatttgatttttaagccctactattctttaatatattgtattttaaggtaattctggctagaatattgacagttctgaaagctaaaaagagaaaagtttcaaaaagttcagtcataagtctatgatttccttgtaaagcccagactgactctacttctttgggcttatgaatttagaaaggacatccaatttcttcctgctttgaattagaaaatgcatgtttctctgtggtttgtctccctggatcctaatgtgaacagatctgtttcctccctactgccagatattagaaatattagaagagggtctaaagaaagatgacttaggactgaaaagtaagactttttgtctcatctcgacataacagaggcaagcctattaaatgtttatacctgttacttctcatcagatacatacttggcattctcttttctcaaatattcccaacacaggtgccttgcaccttttcctactcctcactctcttttcctttccttccaccactaggttcaggatggatgaactgtttctgtttcctagacctgtggtgctttttctctcttggactcagagtctgactctattttatatctacttgagctatgggctaagctgttttcctttacgcacttgccacagcagttttctgacttgttttccttttgttttgaaacttggaggctttctacctccaacctcacatccaactcagaattgtgttttatctcttcttctcactttcagctgcttgaccaaagttttatcttctttgctcattaacattctaatacaaacagtccccttcattttttttattataccccattctcaagtagttctagactagagctgcttatatcaaatctttgccacttcttttggataacaccatctacctatagtggcaagtcaggaaattttgatttagcccatttagcttgaaattatcttacagtatttgtacagaacaagagtacatctacattgtagtgtttacttactaccaaattcaacacaacttcagaagaagaaaatatttaattataaggtgttaattgaggtg

SEQ ID NO: 97540 - DNA, 1089 bp, Homo sapiens
gcttttttgagaatatgggtagaagtagttgagtttatgagtcaattttatttcgtggataaaagtttgaaattaagatgaaacagaaatattaaaagtgttttcagatttttgttattcaaacttattctcttgacagctttttgatacatttatgataaatgagattaagataaaaaatttattaacagtttgttctttaattacagtgggttggcagctggagaagataatggacagagaggttatttgctgacctatgttattgcatacattcgagtaagttatatcatatttcccttgccacttaatttatgttgcaaacaatactttttcttactttaagtgaatgcaattgtcttccctattttttaaaattttaagctactgtaatttagcatatcattttacatgaaccttattttagctacaaatcttcagaagcccatttaaaccttctccatatgctcttgaagaagttaaagatgatttaatatgtctttctgctctttaaaagaatggagcctttctctgtttaaaagttgagcataccattcataacattacttggttaaaatcaagctgttttacttagcaacactcttcacttaataatctgttttaatgatgtgtaaatctttaactgtgttgtaaaattttgatatttaacttgaagtagttatttgttcactgatgatgattatagaattaaagaaataattatgtgtacttgaacactcaaatgtttctaattctagattttctacttacgatatactgaaatagtcttattatctcaagtctgttgtatttactgatatgaaattgttcttttgaaattttattttttcaatttagttttgtttttctactttgtaacaaattcaaatttcttaattgctttctgctgttgctggggttactttttttattttttatttttcctgtttacataatttgaatgatcttactctaaaaggtcattttttcagatatcctattgagaatttggcttccacaaatactcagctttcttgttttaattataaaaatttttggaaatttatacataataaatatacatatttt

SEQ ID NO: 97541 - DNA, 1412 bp, Homo sapiens
gatccaaagaacgaaggtattgttgaagtttacattttgaagaatgttattgaatgctcagtgttactatgtggttatacttcgctttgacttaaattcttaagtgattaatattgcttaaatgttctctaaaaagtcctcccaaagtataaaaccagttaactgtcctttataatattatttagtttttgatatttgtatgtgtaaaaatgggaatttaggtggtttataaaggaaatttagtttaggaaattatgtacaatttctgtttttaaatttaagcaaaatgttgatactggagcatattttaggaaatggcccaaataagatagatggaaatagattttagaagggtttctttactggaaatacatacatacagtattggttagtgacttaataaaaactgattaggaaatgcgaaatggtttattaatagacctgtgagttgtattataactcatccagtaataaaaaaaatcctcaaagagattgtctatacaatcccttattcaaaatgctcaggaccagaagtgtttgagattttagaatatttgtattatatatttaccagttgagcatcccaaatctggaaatttcactggaaatcactgcagcatttcttttgatcatcatgttggtactcaaaaactctcagatttgggggcatttcacattttggttttttgcaggatattcaacctgtatatttttatttgtttctagtatactgatattttacttttctttataaaatttataaagtactttaaatctacaatgaagtgtataggacggaacaattccctgtgaatctacttcttagattgcatatcttaatattttggtttcttccaatccctcttttttcccccagaaaactttttacttttctacatgcagtcatcatctactgagttagtacgctggtgttcgtattccatgcattgttagctagtaacccagtttatgttatactatcactcagtcattcacaattttttttattttttaagtcagatttctcaagttgaaatgttattcacaaattttgatgctaaattttaacaaggggaataaatcctttcaataaaaaaattatcaagtcatcagcctttgagtagtagaaatagtttggcagcggctgggcgcggtggctcacgcctataatcccaggactttgggaggccgagacgggcagatcacgaggtcaggagatcgagaccatcctggctaacacggtgaaacctcgtctctactgaaaatacaaaaaattagctgggcctggtggcgggcgtctgtagtcccagctactcggcatgctgaggcaggagagtggtgtgaacccgggaggcggggcttgcagtgagccgagatcatgtcactgcactccagcctgggcgacacagcga

SEQ ID NO: 97542 - DNA, 1028 bp, Homo sapiens
aagaaaaaactttcttctttttgaagttaggaatggagggctcaatttgagtgatcagggctcttttccattcttgaaaggacaactatgaaagctttagctaagaaaatgtcagacttgaatgatgccagattaaccaacgtttattagcacttgtgtagttctcacttgaaaacttaatattgtattcatttatctttttttagggtggtagatctctgtagaaatgtaaaagaaagaataacaagggaatgcaaagagaagggtgttcagtttgctcctttttctacatgcaggtaagttttaaaaattgttcttatacttcttattctgaaaaaaatgttttttttaatcaagggggggaatataattttccagctgagaaaaagcttcagtctattacatttggccagctttcctaaccttcacttaccaccttgttaggattgtgccactggaattttacagtagtcctgagccttttaggagtaggacacccttctgtgagtaagccttccctgccatctgggtggcatggcagtgaagagccaggtgtctggactcctggaaaaagaagaggactactctactcactgaaactataaattatatagtcaagaaattataaattatatacatactcaacatgactctgaagagtgaaggcagtgttttgttgtttactagtaatttaatctcttcaagctctaatattatcagtaaaatagtggtaatgccatttcttcatgggactgttgtaaaaatgaaatgagaaagcatatgaaaaaactgttaggttctgctgtagtattgttttgacataattacattaagcttgaggtagataatccatactagtattagtaaggaaaatttgtatatttccctttcctttccaatgacaagtcctcattaaggcattcagttgttaagcttacttgctccttatagcatgataatttgcatatatttgttttccaagactagaaatatttctgtattctttaaactgctaattgtatgtgtgt

SEQ ID NO: 97543 - DNA, 1066 bp, Homo sapiens
caaggtgtgaagatatgaggcctagggagaaaggtgagaagatatgaggcctagggagaaagaaaagcaggtctgtgggccacagagggtctgtgttctgtagagttggtgctgagtgaaggtatatctcctcaagctttcacagcagtgatagccgttgctcctttgatattggtttcttcctcaagttctttggtttttcttattcctgatgtcagaattgtagttattttcagctcatttttccctgcttttttcccttaatctttttgttcatctggttcctctactcatggatgtctagctttttttactctcctttgttatctcctggttgatttctcctatatcttagtaatattggcatttgttttacctagaacaatatcttatgtttctttgtcagtctccatttaggtatgcctttccagaacacttttcccaatccgacctatcccaattttcttattctttgtatagactgatttttaagctgcataagctaattgatggtgtctgtctttatgttctctcagcattcttcaatctcgtttgtcattctgtatctttagactatgtcatattttggctatatacagcttagaagagtttcttctagtgcatttaaattatctgtgtagaaaaaaatattattgatatttattttgttgtcatttatttttaaagttatagccagaactgaacagtgtctttgttttggtctcaactgcagtgatttgctttttttctacccagaatctttaagtctgttgagccaggagaatccaaacaaatgatgagttcatagtattgttgccagagtgtgacaggaaaagggtcccaggatgatccagacctcaggagaaggttcttggatctcacacaagaaagaattcagggcaagtccacagtgcaaagtgaaagcaagtttatcagcaaagtaaaggaataaaagaatgactactccatagacagagctgccccaaggtctgctgattgcccatttttatggttgtttcttgatgataagctaaacaaggagtggattattcatgcctcccctttt

SEQ ID NO: 97544 - DNA, 1019 bp, Homo sapiens
acacatgctgctgatagttctcattacttctagataacaaaacaataaaatcagtgaaaatggcatttcatcataaaattctgatacaatgtataaaagtttttgggttatttcccaatagaagttttagtaacatgggacagacatgaaaaagattgaatatgtacctataatattgactaatttggtacttcagtgaaggtaaaattcttgttttgcactgcgtcctcagttcacctgttttggcggacaactctaaagcaagccaatgtgtattccttccatggagtagaggctgggaagaaactgagattatatcttaaactaatcatttgggtcgtcttgactttcagtttctagatgttaaatctgatttcacttaacttaaagcccctgtggggattttgtttgttttttagggtgacgcagacttacgatgcaggtgcttgtatctacttctattttgcctttaactacaggggaattagtgacccactgaccgtatttgaacaaactgaggtaattttgcatacctgcatatagcttttacagctgttgattaatttcaataaattttactgtcaatttatgaattttaagttgagtctctttaatcacacatggtttgcctagctgttagcccttagaaatgaaaagcatatttgtttccctggcttatgtactgaattgtgagtctaaaattaaggtactgtacacctagtctgtgattcttcagttgttacagtacataatagctgattaaattaaataacaattaggaattcattaaattaaataactatataggaatcttagatatcactttcacagcccactcatttccacatggtggttgctgttgaggtcagcagccctaatgcccttggtctgtgttgttgtaatgtcattctagatttgtaatttttttatatgctatagctgtaagtgggtgctttgggttcattagctagcagtttctattactttcttaaagagtgtcaaactgtttatttttataa

SEQ ID NO: 97545 - DNA, 2310 bp, Homo sapiens
ggagcttggttaggaccttacatattagggtaaaacgaggtttttcttttcactcttaggtatccataagactgacaagtaatttatcccaagtcattgacctaagaagtgttctccataaaggcatttatggttgatttctaataggtttaataaagactctaatagctttataactctgatgcccactatatgatattaggcaaataatttaacctatctaagccttattttatctgtgaaatgggagtaattgtagttatttcataaagctatactgaaaataagatactgcaggcaaattacttggaacttttctggtacacttataggaagcagtcagtaaattttagtcactttgttggtataatgagagatgttcgttactaagtagaacctgactctacatttacaactttgcagttattaatattattaacaatttagtgtgctgaatggtcattttgtcttttttccctagaatctcaaagtgatctttagacattgtgactattcactagaaaaaaacttatgaagctaggctacttatttaattgctttttaaacacatttgaccaaaagagaggaaagttaggcttctagtttattatttaacccaggaaacatgtgccttctttgggagttgggtctttttctttcactgcaaaatgaaatctaactagcaacaatttgttgtgttgtttccaaatacaggcagctgctagagaagaaatccttgctaatggagggagcctgtcacatcaccatggaggtattcttttttgggagtagaatttctaatattcttactttaaaaaatattcagttcagtaaaatgctagggagagacatggtatgaataatatgagagtacttgaggtttctttaaagtttctatgtctttgaaatagctgttactgaggtagatagttaggttgtggtagtagccactagaagcttactttgacacgcctgcctagaaatggagcccaggcaaccttctgaggtctcagggacctcatgttatcagagaatagcccagcttgcctgggaggtacttgaccattacagcaaacgtttttaaaggatgatggggaagaaaacctacataaatgtttttcagccactatcggaatgtagctggtcatcagttatataatatattgaagggctgtttgttctgcccacccaaagctcagcaaattaatcaagacaggatatgagaaaaatcttttttcaaggttttaatgctgttttgttattacttagtggtcattttggtaagtatcgagtgttgtcagaatttatcacatcaccaataaaaattattacaatatgtctatctttgttactagcatgcttatgaaaataatgaggcaaccctttaaaacttaaacaatggccattctgttattaaaatggcaatgtttgaggttatccacttgttctgtagaatagaaatttgttcttaatatatccctcaatataatttgatgcctaggaaaatagaaatgtgtagatttttaaatagtttttaggaagcacagtgacaataaccacctaatttaaaaattcaactgctctggactccttatatccttttttttcctgtttaattttcattcatagcacttattattatctaatatgctgtatatttgtactttttaaaattttgtcttcctactgcaaagtgagaatccatgaggacaggaattctagttttgtttgttgctatatggtagcacctagaacagtgcttagccccagtcagccctccatacattgatgcagaatgaatgaaagaattctgttggaaaaggagtggactatggaaggtgtgtgtccatatcatattcttacagcaaggtctggaaaagattgctaatgttgatgaataaagtagctcccaacgtcattgtgtcaatttaatcttttgctatacttttctcttaacccccacaaatgaattcttaacttagccaatagcattgaagataatatgctcctctctcctttttctatttattatcctttcatttgatggtggttctcatgaatgctagcataacaaaaatggaaaagggagggaaatgaatattagaaacctctcaagtggaattaaaagcttccgattactctaaaagtccaaacctaattttggaaatttgaatgaggagttacttaaagatacttagattttagcaccttcctgtaaaattttcagaaagccatatacattattttaaatattttttattctgtttcaaaatgacactgtattaatattcagggaactttaatatatat

SEQ ID NO: 97546 - DNA, 1100 bp, Homo sapiens
cagaccttcatttctctatattcactcatttatttgatgattatctcaagtttcacaatttaaaagaccatctgtatgctaactcccagatatcaaaagataacacctctataccactaccctagttgcaatcactattttctgcagtagcctcctaactggtctttcttccactctgctactgtattctcatttctcttgctgctcgattaatctgttaaaaaaatcaatggtttcttctcacattcagaacaaaatgaaaactccttatcatgaccttcaaggatacattgtatatcactctgtcctcagctttgattactttgtacctctagcagcattggccttcttgctattcctcagacatactaatcccttttcccattcaaggcctttgctgtttgttccctctttttataatgttctttcttttgtcctctccttcagatatttgcatgactcactttctaccattgtttaggtctctaataaaaatgtcaccttcttagagggatcttccctgtcctcttgtgtagtttctgtaatccccatttgaattaaatttattgaggttaatgactttatcttgtttgtcactgtatttctcactccctaaacagtgactggctgctctacatagttcaacatcataaatgctcaatgaatatgttaaatgagtggataagtgcatgcccaaataaatgctcacagaatttgagcagttttgcaaattctcaaatagctctgaatcttgcatattaatcctttttttttttttttttttttttgagatggagtttcactcttgttgcccaggctggagtgcaatggtgtgatctccactcactgcaacctctgcctcccgggttcaagctattctcctgcctcagcctcccgagtagctgggattacaggctcccgccaccacacccagctaattttttgtatttttagtagagacggggtttcaccatgttggccaggctggtcttgaactcctgacctcaggtgatccacctgtctcagcctcccaaagtgctgggattacaggcatgagccaccactcccggccgcatattattcttttatattagaacagc

SEQ ID NO: 97547 - DNA, 1036 bp, Homo sapiens
tgagctcaagttctccttccgcccaatctcctgagtagctgagactgcagatgcgtgccgccacatccagcttattttttatttttttatttttatttttttagaaatggggtctcactatgttacccaggctggtcttgaactcctgggcttaaatgatcttcccacctcagcctcccaaaatgttgggattacaagcatgagtcactgtgcctggcctagttttctgtaatattcagtatttggcccatcttttttatgtcttataaaatacatctaaatacttaagtacttaaggaatcatatatttagaataatagagaattatggaatgcaaggtacttatcttgttttcagagatggtgatcttggctttttgtagctctagtgttgactctcaggctagatttatacttctagagcatcagaagtcaaaggaatatgttgggtcagtagctatgaatatcccacatcagatgattcaggtctaaaaaagaagaataggctttatgtggtatgtgtacacatgcctttcagtagataactatcacatacaaggtaaattgaaatagttttaggccacctgttatttgctgtcttcagtaattcattttcccttcctttaatatggtgtgctacataagggacagagtataatttcttccctttctgaaaatgagctttacaggtgtttaataaggaactgctatatagttgtatacccatgtgtgttaacatgggtacagatcagtatggtcagctaatttctgaatgcccagcagtacaactaagaattgtacaaagggcattattagtggtggtgtttagctctggaataaaaatcttgtactttgaagtgtgtttcttctccaagattaaggcctgtggtgtttgttgttttattgatccatgtggggtaactacataaggttctccagaatctcaagaagactccaataattgtcttgttgttaaggcatattgaacgtttttgtttgaatgtgttttctacctgtatatgtatcctgtgaagtag

SEQ ID NO: 97548 - DNA, 1017 bp, Homo sapiens
gttggagcagttgtttgcagtcttttcaggacaattacatccataaccacaggatacattcagtgaaactgtattacagataacagtggagactggtattcactgctcgtcacccctctctctcttcagctgcctcagtgtgggcagcttatagtagtatggtaaagccccttttaccattcacagagtagttgtttaaaaaaaaaaaaatcctgtggagcaaatctggaaaaaactgatttttaacttttttaaaaagtgcttaaaatcatagaatattagagttgaagagaccttataaagtctaatccatttgcaagtgaaaaaacaggctgaatcatagtcatgggcagtcccttaggagataatagaaggtcctggtagaatatcttttaggtggtagagattgcaggaatagggatttatttactcttagcttctggttttagagctatctcaaacaaaatttttcattttgaatttaaggttttttttctgctgaacttcatttccccccgtcttaataccagcaatacctttttatttctgaaagccaagcagataatttgctttctgagattatcacagtatttattattttgatgacaatttgatggtttcttagagaactggacacaaaagatggttttagttgagctcgaaatggtatttaaggtttccaaaaggcagatgctatgatgtatcactatagcctaataaatgggaatgcattatagaatgacaggctgaatactttaatgaaagaaggtttcccatttcagttggtcaattaaatcactgttgatgactttggatcattaatgaacatttgtagaaaatgaccgtttgaattcaattagtatgataataggttttttggagaagtacaagtacaaataatcctaactgtaaattaaaagatttatccattttgccacagataagttagcatattgcttgctttttaataccagagcaaactgacatttcagaattcttttacagattaagtacata

SEQ ID NO: 97549 - DNA, 4470 bp, Homo sapiens
ctttatgttcgttaaaatattttaaggatatatatcctgtcatttttgctgaatttacccaacaaattcgtctcaatgtgatgtttttctttagttaacttcattttctctaaaacttgggtgtgttttggtagttaaggcagaggtgggttctttcgaaatgcacgtttttctcattttgttatttgtaaaatgggctataatctctgtccaagcttccttcaatctccatttcatagtttacagagaaaggagacactgtggagcacagacttcccctgggaatacattgggcttaatgagcttgatagtctggtgggctcaataaatcaaataaagcaaaacatttctcatttttgaataaaagcatttatcacacagtgtttgttcactcatggtcacaagattgattggttcccagtatcatagcatatattgaagcatttttgattttgtttttccagtgggcaagttacggaagcaatggctaaaggaaagtatctctgatgtcggctttgggatgctgaagtctgtcaaggaatatgtggaccccaataacatctttggaaacagaaaccttttataaatccattagtaccattacaaaaaaatgtcaattttttttttaagttttcaactgtggttatactagtaatcaaatatatcatggactatattttggatacatttgtttctttggtttaaaataagtttgttttcattctgtagtttgttttgtttctacatctatggattgacagatagtattcctaaatctctctcattgtaggtacatcattttacattcagcggttgtcatttcaaattttagtcaggcagcacaaagctgtcaattattccagaggaagctgctgccagctgttttgtattgttgcttcctcttggggaacaaagacagatttggtatcattgattgctcagctagcctctttttaaaagaacgtttctgggaatcagatgtctagggaaggattccactgaggagtgatacacgtgtacattgtttaagagcatagtctagtgtgagtaggccattaaggggaaggatattcatgaaagaatttaggcaacctgttatttagaaagccttcacgtctgtaaggtgcttggcctacttttttttttaaattagtatacatgcataaaaccttgtatcatcaatatacaaattattctgttaggggacatgtttttgttctccatgtttctgtttctattgtggtatgagttgtatttgtatcactgagataacctattgttatattctaattcattgataatatgttttgtaagaaaagctgacatccttcattgcaagtgaagaacaggtttaccatgaaatgaatgcctttattcaacttagagtcctaatgtttctgatttcacattcttgttgctgaaatgcagaagaaacagctacagcaagagcagaaggaaaactcttagacttaatgtctccaattgcaagaattgtttcactaaagaaacagtcatcattcaactactgaatttgaaagcctcagcagtttcaatgacaaaaatcatttttgattttttaaaattaatcccaatggcatgataaattttcatataaaaagtaaagtttcaatttagtttttaataatggtttaatgccttttttgaataactggtttaacctaattttttttaaatgtaatgtattaatgcatataccataatcaaaagtttgaaatatcctgtttcttaaataatgagaacattaatcacatttagcaagcatttgtacattcaaacctggatattaaagtgaaatgattactttgaatcactgtctgccaaggttcatgattcacattttgagatggattcttttcttaatgcaatacctaacttttgataattttttaaaactaatatttgatcagataatgtaagtcaaaatgcagacgatcctttaaaaggatgcattgtctgtgtatgtagcaacagctccaaagtatttttgggcagtttgataccttttatatctgaagtagccttaaccagaaaaatggtaatttaaaattgacaaaatgatatttttaagacttcaaaatgataaataatttttaactattaaaattggcctcaaactaataaatctgtaattaaattagaattaaatatcagtttaacaacaaaatgaaatatttattttttagaagctgcctctcttcattggtcatttatttttaattataaaatttccaacagatctttgctttaagcccttgatatttgacctagttggacacttgatgaggaagttgcctctagaattataaaaatctcagctttataaaatgcatctgttcacgaaggtaatttctttaattggtgatcaaaatataaaattaaggtactaatgtctcactggaagtatatatatatatatatatatatgtatgcatgtgtgtgtgtgtatatatatatatatatatatgtatatgtttctgagtaatttttaaaaaataaaacaggttaataagaagatccattcctttgcatgtgattgttataacattctttcccagggagttcaatttcagcaacctcagaaatccatacttgatattaggaaactgtaaatgtaacacctgaaattattatgttcactattctacatgaaccttatggaaattcatgatttatgtctttgtttttctttttccaagtatatgcaggactccccaaccttgattttataatggtgactgcattttgtaggtggaatcatttctaccgaaatcattttgaaacacaagaatattgatcagtactgtttcactctgatttagtaaatcagaaagcctccccctacccccagcccccactttcacataccttctgggaggtgcctcagtatagacttggtatctgtgaaggactgagttcatgaatatgcacagaagcacttaaaccatgcctcttatttctataatatctgaaaatggcttcataaaagttaagtcaggagaacactgtttacatgacacttcttaactcatttttaatgtttatttttaatttcaaaaacttgttgcctatttggttttcagtactgcataacactgactttcttaaattagtcatagttgcaataatttacttaaatttggtaatgtcacatttgggttggggtttcagtgggaatagtaacttgccgctagtgagaaatggcattgaatactaaagactcaatatgaacaggctttatagacccttagagaaactgttgccttaatgtttggtgcaatttctagtagtgcataagtgaatttagtcttatgataagtaactttgagctgtttttagcttagtaagaattgtggaaaccacatgtttattgtgcccatcattttacacaaagaaaagaggattatattatttcttctaaggaagtaggagttttcttcctaaaagtgcttacatattgtagtactattacttaaaagttatttatgaagttgggagccttctagtttgcctgtgttgatgtattttgaaaacaaaattgcaataaaggatgagcttccatcggtgtgtatggtataccagatacagatggttgcaaggaaaccttttcccccactagaatagtctattagtaactgctaagtcctagcttgcatttttgaaaatgcctttctgcatgttagcacccagactttcctttgtcatattcctttatagctacaacttaactgtagcttatcagagaagctctgtagtcctacactgaagtgtgttcccttggctgttcatatggggctgggtttggttgaacttccattctgtataaatgctagaacacagttactacagattgattcacaaactgcatgtgctggtgcttgaggcagccaaaatggaatgctgtggaaagcatatctatatcttaaaaaacactcagacaggagttaaggacagctttaataatttttttgtttaccacttaatctttatcaactttgattttagttagggcttagctcatggttgaagaaaagtggaaaataacaagtgcccatttaggtttgaagaatccagaatgttttacctttgactttatgagttatagaagcttggctttgctctaggcttcatgttcccaaatgagccatctgtcagtatattcacttaattcttactaatttcagtttcctgtaaaggaaacaacttacatattgatgcttaaatccagaaagtgtaaaaggttttcttaaactgttaaaatatagtgtctgatataaaggatgtaagttactcagctttctgctccctaagccaaacagtgtttgtcttcagtgtgaaatttaactgtaaaaactacttgtaatgtcaagagattatagatcatattattaataaaatggacctgggtctaatattttttttcttcaaagggagtgtgaagctgtttattct

SEQ ID NO: 97550 - DNA, 1034 bp, Homo sapiens
ttattttttgagctacttatactatatccccaaaagctcacagtgccttgttgggattttttttttccatgaactagccattattttaaatgagtgggagagggtaagtctttagacagaggtcattcagcagttcaagactattcctcttcaagaacatgtcaggaattaagcagttatatgtggaaacactggtaattctttccacagtgttgttttggataatctgttctagtatatttaactaattgtatggtggacctgtactctgatacacatcgaatcagtcaatgggatttgtatgtgcttttccttcctacattttcattcctactgccccaacctagtagccctaagttgtggcttggtgggtttggcattgagcctcaagacactcactacattctttctggatgtttgctcacaggctccctgaggagcagaacctgtggagctggggagtgcgggtggtttctattcctaatattgtgtgtcagtcctttttcgtgtgatggtgccttcagaataacgaatatttctgttctggacaatgattaaatcttatgagaaatatatgtaggttatattaattcttgtccatttttgctaagcctgtgaaatactttggctctgatacaacttaacttgaataatatcttatcctgagtcttcctccaaggcagtacatattcctgccaggactgtagtaatcctttgggaactacatgtgagtaagcacttgtatgtaagccattatactgctgtaactaatgcatacaaacaattcttctctttacatttatagtctaaaaggggatatgcagtgggaaggaaaattcctgagagattccagcatagctttgtcaattccgactgagccatactgttttccacaagggctcaacacatagtcagtattccgtgctttcagtgtgtgttcagattctcctcttactggttttcttagactgtattgttctataagcaaatgcccatgtgtgatttttaagatgtgctggggaaaaataaatcaa

SEQ ID NO: 97551 - DNA, 1090 bp, Homo sapiens
cttttttaaatttaattttgaatgttcttgcatgtttggtacctctctcctcactgctaaagataaattgtttatctgtataacataactacaccaatgtcatttttgtatacgctagtacacaaatgtgtttttttattaagtaatgaagtatttgctgtgaaaaatgtattatttgtgccaccgtttatatctgtgttcattttctgtgtgtatatgcgtgtgtattcgaatctcaatttttcttttactctagtttagattaagacatatttagatgaaattttaaaaataacattggaaataggaggctaagttttgttgagtctcattcccttggggggaaattgcttttgccattttattttcatgtacaataacctaaaaaggatctcctactgacttccttcctaattattattgttttacacgaaagaaaggaaatacgttttcaattgagttgtttgaaatcattcactttgtgtagatttcccagactgatgtttcattgtaagaatattacattatagacaggttggccatttcacaagcaactaatccatagttttggaagcccgctttaagagacctgaatatctttgtttttaataaaatacttagagtttaactaaagctctggaataatctttatttcttttgagaagggtgatttcagggctgaaagaaggaagcaagcatccaaatacctacagtttaaatgttgactgttaatttagtccattaaccttgtgttgatctgtgatgttttcatgtgtgagagggacactaggacacgcctgtccatatagctttttaaagatgacaaaaggttcttcaaattatcgaagtttttctggaggtaggagagtctgcggacaaatgctgggttcctgtgtccgttacagattgctcaaatttgcatgggcaattacacagggggatcgcatcaatgcagggccgctagccacactgtcgccatacaattacacaacggcttcggtgcttaaactttaaaattcttacaccattgtgcctgttctattagaacaaactgcagcaaatgatccaaagccaattcaaatgactggag

SEQ ID NO: 97552 - DNA, 1049 bp, Homo sapiens
cactgggttcattatattaatggtattctattttttgtatgtttttaactctccaaaataaagaatttgaaatttatgctaataaacaggttaaaaattaagccttagaagtggttataaatgtaatagaatataataataaagttatatataaaattaatccaatttttaaatgtatgcatcaaacatctacgcaacatatgtaattgtactggactgtgttgcctttctgagacttacatacacaagcacttgcaaccgtagttgaggctaaagggtcaacatattcccaaaacatgactaaggttttatgatttgatagtaagtgccttcagaagcttctggttgggaaagaaagtcatttatatatagactgtaaggtttttccaactctgagcttggtaaggaaaggaccagttaggcctaaatcaatagttaattaatgccaaatcaatatttggttgcattcatcttgaaaagaaagataagcaaattcaatcaaaactatcccgttcccatgaataattagacaacctgcaattggcttgttacattgcatactctggtaaaggagacatgtgagtttgttggtcctagatggtgattccctatcagctggaaaggttctggtctctggacctcaaaatggggctaaggtgcccccttttctcttcagcagacccatttattggtagacaaactttactgtaaatgccgagggagtatgaccactaaatctagatgctatagtttgctcagtagggattttttcccctccattgaagtttgtggttgcatacctgttcttccccttatgctttcatcacacactgtctctgattgacaaaggtaagatccttttttaaaaagaaggtatgctgcgacatccagtagtataaatactcataagcactcctagtaagcaattgaaatctgcttccactccaaagcttgagatagtcctctgctcaatattattgccttggagcatataaaacagtttgatacccattaggctgcccctaggatctatatgttgagtggttgcc

SEQ ID NO: 97553 - DNA, 1136 bp, Homo sapiens
tttgcacccatccttctccctatctgtatatataaatcgctaacaatctacctgacccttctcaactgcccctttctccatgaagtcattcctgctgtccttcagtcaaaagtgaccttctcatttgcctttcttcctaccatattcatcactttctaccttgcaatataaatcttggtgcacctgtctactcaaatgattaaagcagttgcatttttaggagagaatccttgacttactcatttggtaacccttatatcacctaaagccatgccttgcacctgggtgctggagaaatttctaccttgtgaccaaattccttgaaatgttcgccatttttatggcaaaagaacttataatgcttgggtggaattttgaagcagggacctatgacgatggaaatttctgacaatttcaccccaatccttgctttatgctgtttgaaaccccttgtttttatgttcctggttgttgtcctgtgcaccctaaactatatgaaaataaagggattcgttttctttgtttaggataggtactcctatcctctttggagtgtgctgtaatgatagtgtctctcttccccgctggaggcaaaagccccttgccctttaactcttagttgattcagcaatctctttactactaaatacgtttcttcattcatgtatcctcctaccaccaccctgctgactaaatttttttaaacctatttttttgaccttcaaaacacctaatgctttgttatttgtatttgtatttactattttatatagttctatagtctgtctttcctgtttttgaaatcatgctctggtttggctgttcttcctatttttcctcatttggaaatggattcatccaaaatcttttaagtgtttgtgaatcataattctcttggtctcaagacaccctatgaaataggaagttaggagacaatgtctggctgaagggttttctgcagtctctgtagccagatctgcccttttaacagtctttgtaagaccatggacacagtaagacaagagcaagcaagtgtataaaaagacaaagtaaccaccagaccttttggttaatttcaatttctaggctccaggtttcctcatctgcaaaacaaagccatctctagctaaaaaatg

SEQ ID NO: 97554 - DNA, 1146 bp, Homo sapiens
gattctctaaggtttgtaggtgaagaaggagttagcatttcccagacttatttgtttgagatttgtgtagattaagaatgtaggctgggtgcgaaggctcatgcctataatcccagcactttgggaggctgaggcgggaggatcgcttgaacccaggagtttcagaccagcctggaaaacatgatgagacacctgtctctacaaaacaatacaaaaattagttgagcatagtggtgtatgcctgtggtcgcagctacttgggatgctgaggtgagagaatcgcttgagctcaggaggtcaaggcttcagtgagctatgatcacactactgcactctagcctgtgcaatagagtgagacctgtctcaaaaacaaaaccacaacaaacatgtgtctggcagcataaaacatataacatacatatgctatttatgtgtgagtgtgtatatgtctgtaaatatgccttataaaatgccaccaatgtgcatttatttgtctcacacaacaagaattctggggcaggggagcccagggtcctttctctttccctttctgttctgttcacagcaagctggcattcactgccatgcttgtcacctcatacacaccagattttgctgcacctccaggctttacagctgtattccatgaaggaagaaaaagaaagaagcagcgccgacactcccacttataattcattgaccaaggccgtgtcataaaggccaccctataggaccaccccagctgcagggagcctgcgaattggggtttttaacttttaagcctctgtgtcagtgagttatgatgtagataaattgcaaaagttgattctcactcaaatgacatgccatcagctgcaggttggctgcagttctactcaatatatcttctttatttgggggctcagactgaaggatcggcccctctcaggccatgcccttcccttggtggagggaaaaaggaggtggcagaactatgtgattgctgttgaagacacactcaaaagggcatttgttacttttcccattgaccaaaagaagtcatatgccaatgctgatgtcaatagggcagggaagcacaatcctcttacaaaaggggtcacagatatatatcaatataatctttcctaatataataaaagcaggcaa

SEQ ID NO: 97555 - DNA, 1050 bp, Homo sapiens
cccaaggcctacctctgtgtacaacaagattgtattttcagacccatccctggtggctgcctgctttcatattagattttgccaatgagttgctgcaatgtttaattagcaggtttgctctttcctaggcttttgtcatcttttgtggacttggcatcaacaacacaattatgtatgatcaagtgaagaagtcctgggccaagcagtctgtggctcttgatgtaagtacagtgtttatgtcaggtttgtatgctgtcagctctaattttatgagggaaaaaatttccctggttatggggcttaatttctcaaattttaattattcattgggccttaatcattttaggttgtgggtttaaatctcatgaagtccagagaaacacaatgttgcatatgatttcaggggttcacagatgccttgaagcccattcatataagtcctatgtttagatatagattttttaaaattacatttattaaatagtgacaatccaaagataatttggcaggatttcaaatttattttaaacttagatttgaatatgtatagataatctataaagtcacaacttttcttatcgtaggagaagaattcactacaaggatatatgacctagatggggaaagctactcctgtcattatccgattccctttcttcctccctcccccaacacatgtcccatcaagaaccttgacctgttcccatgtctgcacatatgtcctctcagacactaagttccaaaagagcagttctaatctcccctgaatctcagacgcttgttttgactcaagactcgtttttttctagcttctgctctgtagttgttttttttgttttgtttttgtttttgttttttttgcccaggctggagtacagtggtgccatctcggctcactgcaacctctacctcccgggttcaagcaattctcctgcctcagcctcccgagtagctgggattacaggcatgcaccaccatgcccaactaatttttgtatttttagcagagatgaggtttcactatgttggccaggctggtcttgaactcctg

SEQ ID NO: 97556 - DNA, 1050 bp, Homo sapiens
gttgtgactatcagatgggtgtcagatgacattgctgtaagtgattggtatctaccatctagcatcatataatgacaattgcctgcttctgtcacagctgaataaatctgggtggtttttttgttgttgttgttaatcttggtccaacatttcctgtcagtgagattacagataattttattattatctctaatttttagtttccataatggaaaacatgggaaataaaactcactttgcagggctgtttggaggataaaataatagaatgttgaaggctgcatagcgcatagaaggctctcaataaataccggctctttatatcacaaagatttttctttaattaaaaacaccaaggtgagacatgctctgtttaactgcttaacttctaggacagtagagagatgttaaatgtttttgacggtggcatcattatcagatttggagaaatactgaggagaaaatgtgccagctggcaaaactgctgatactagagcagtcaggattctatcctgctggaggtttcaagtagccccacaatatctctctgtgagggtgctgtggatacctccatacatctctagattgagggcacaccttcccaacaagtcctgcatatatatatatatatatatatatatatatatatatatatatatatgtgtgtgtgtgtgtgtgtgtgtgtgtgtgtgtttgtgtgtgtgtgtgtgtatatctatatgtgtgtatatatatctatatatgtatatatatctatatatgtgtatagatatatatgtatatatgtgcatatatgtatatatatgtgtgtatatatatctatatatgtgtatatatatctatatatgtatatagatatctatatatgtgtatagatatatatgtatatatgtgcatatatatgtatatatatgtgtgtatatatatctatatatatgtgtatacacacacacacacacagcaagaaagggagcagattcaatttgttaaaatattaattaaagcatgttaaatgagagacctactaaagcaagacagtcaaacataaaa

SEQ ID NO: 97557 - DNA, 1046 bp, Homo sapiens
tctgccttagcctcccaagtagctgggactgcaggagcgcaccaccgtgcccagctaatttttgttgaccttgtgatctgtccacctccacctcccaaagtgctaggattacaggcatgagccaccacgctaccctccgccttttttttccttttttttttttttgagacagagtctcgctctgtcacccaggctggagtgcaatggtgcgatctcagctcactgcaacctctacttcctgtgttcaagcaattctcctgcctcagcctcctgagtagctgggattacaggcccaccctaccatacccagctaatttttgtatttttagtagagatggggtttcaccatgttgttcaggctggtcttgaattcctgaccttgtgatccccctgcctcagcctcccaaagtgctgggattacaggtgtgagccactgcctggccttaaatactttttgaaactatcccccccagatacttgtaactctgaaaaattactgctataaattttgaaaatgaaaatcgttaagctctgttattgatcaaccacattattaaaaggcaaaaataagtgagtgttaaaattgtaacattaaagcaggaaccacaaagtccgatatgcagaaaattccatatacaagtgaattttcattgactaggcagttatctgattgaaacaatttatgtttctttctgaaaagagtacatggttactaatcatgtagcttgtactaggttaatccttattccacctctatccttacctatccccgttggtgctgggatgaggcttatcaaaggaaaaagtatgttggttctgcatattattattatttaaagaagctgaaactgtagtgagtggtgtgagttttaggttggattcaaatgtcacatagtcaattctctctcattctctttcccccttctctcccttcatttccatcttgtttcttaaaggatttgaggcatctgatggaaaatattggaatatgaataaactttcatggccagataatgtgataagctgggaattctcaaggagttttt

SEQ ID NO: 97558 - DNA, 1106 bp, Homo sapiens
ttttgctattcttattcttttaacctctgaaacagggtggcagaaattattgtctctatgagactgaaaatacattttgcactagatctagagtgcccattgttttaagatttgatccggatgatgtggcttgttgccatggatgtttccattgttttacactttaaagagccatccagttgggtgtaatagtgcaggtagtgggcttggagaagtgctgaggtggcagtggtgccggcaaggatgaagatagtgggagcaggccctgggcttgtcgctcaccatgccgatggtagaggagctttacggcaactatggcatcatggccgataccacggagcgagtgggccagcataaagatgcctatcaagtgatactggatggtgtgaaaggtggtactaaggaaaaacgattagcagctcaatttattctgaaattctttaagcattttacagaattggctgattctgctatcaatgcacagttagacctctgtgaagatgaagatgtatctatttgacgtcaagcaattaaagaactgcctcaatttaccactggagaaaatcttcctcgagtggcagatatactaatgcaacttttggagtcagatggctctgcagaatttaacctagtgaacaatgccctgttgagtatatttaacatggatggaaaagggactttaggttcattgttcagccaaatacttcaaggagaggacattgttagagaatgagcaattaaattcctttctacaaaacttaagactttaccagatgaagtattaacaaaggaagtggaagagcttatactaactgaatccaaacacgtcctagaagatgtgactcatgaagaatttgttctattcatgaattactgtctgggttaaaaagcttacagacagtaagtggaagacagcaacttgtaaagttggtggctgaacaggccgacctagaacagaccttcaatccctcagatcctgagtgtgtgggcaggctcttacagtgcactcagcaggcagtacccttcttctctaaaactgtccattccacaaggtctgtgacatatttctgtgagcaggttctccctaaccttggtatcttgactac

SEQ ID NO: 97559 - DNA, 1029 bp, Homo sapiens
gtagacatataaatactcatagtaatatcatagttaaacacctttcctatttgttctattcttatttttaaataaggggttgcaaaattagacctatatgttttacatcatcttttgcacatgcactttttagaaatgaaaaggaatataattgacctggataaattaatataattctttgaaggctgaagtaaaacccgtttgataccaatagcagtttctgaagtagctatggctagaaacttaaaataagcctaattaatgagatgattgtctttatgaaattggatgttataatatatctgtgtttttgagcactcatacattaaagcttgcatgctttaaaggatatgtttttgtttaacatcatcagcattcacttcagtcaaaatgatggaattcttttttctccccggctttgaaaatctaatatatatatttttttggtttgtggttttaatgttccattgcagagcaacatgggagatgctgaagcaggcaagaagacctttattcagaaatgtgctcagtgccacacagtggaaaaaggtgaaaatcacaagactggtccaaatctctggggcctctttggctgaaaaacaggaaaagcaccaggattttcttatacagaggcaaacaaaaacaaaggtaaaaactagcagttgtgggagagaaccagatacactgtaggaaagaataaagcatatgatttggcattataataatttcctaatttgcagcgttaaaaatggaccactctttacatattactgaaatatggatttatatcataagacctgcatttggataactgatcatccttttaatcagaagaattaagaatcttgtatggcataggtttttgcctatacagggtatttgattttaggtaatacatttttcttgaaaaagtataagctagatttttaaaaaatcatattttagtggtataatggcagtagtgattctatttgtagtattgattttagcagagtgggagaaatactatatagtttgaagcgtatattc

SEQ ID NO: 97560 - DNA, 1033 bp, Homo sapiens
tatggttatggtgaatgtattttgtgaaaaggccaaaaatgtgcttttgtgagtgaagttttatcctctatggtctgtgctcaaaggctcactgaattctgaacctatttaggtaattaatagaactgataattgaatgcagtactctgagtgatgtttgaagttttaaagtaagcttctcttggataaagtaagttttcttacccggctttccatgaaacctgaactattggttaatagcttagttgtttttggatactgcctaaagaaaactatcttccctttacttggattgttgacactgttatgggtttccacatagatttaaagaagttagggagagctggttttgcaggttgttgtgtataaagcattggcctttcttggagcagtaactaagaatgtttgtgttattctgccaatattgaagaatacagattgtttaaccacagtatgttaaacaatttatgaattgtagttaaacaataggtttcttcaatattggcagaataacacaaacgttttctgtttctattgatagatcaatatgtgcttaggactctactctcaaagaatttggtattttcatgatgtctgtagtagtaattctttgtgttcaaatccatcccaaaccccatctcccttgcactcattcttcacagaacacaaaaacagaaaaatagaacccagacagcatattccttactatattaaagtacacttttttttttttggacagaaaccgcaagtgtttattgcagaaatctggccaaggtcccagttggctgggcaggtgagatagggaggggtggaggaagtgatctggcccaggggctcagagctgtgaggtgatattgggtgccaggctgcaggtgagacctatgccatcaggttccacattcagggccttcattatgccatcctgtaccaccatggagaacctcctgagacatcgataaagtacaattttttgatagtttgaacttattttaatttttacatcattttagatggaggaggcatttatttagtt

SEQ ID NO: 97561 - DNA, 1123 bp, Homo sapiens
ggcgtggacagcctggacgaaccgcccaacagccgcatcttccttgtgatcagcaagtacacacctgagtcggtgctgagggagcgcttctcgccttttggcgacatccaggacatctgggtggtgcgggacaagcacaccaaggagtccaagggcattgctttcgtcaagttcgcccgcagctcacaggcctgcagggccatggaggagatgcatggccagtgcctcggccccaacgacaccaagcccatcaaggtgcgggtgcccgggtcggggtgccctcgggggaaggagtgggcctcttggacctcccttcacctgctgctctgccggggtgagggaggagtggaacatccgttcccggcagctgaccagacagcacctggcttggggacaggggctgctttgaggagaggctcccctcccacgaagctgcgccgggttgcagggaaggggacgggatgcggagtgtttgccccacgagagcggacccggcagccgcggccaccgggtgacagaacagcagtggctgggcttcccctctccctcgccctcactaatccaccagctcttgagttcactgccaaactcgtcctagcctactttgagtacttttctgaccttcctctctcagatgcccagatttccatatataaaaaacggaaaaactctacttttcctcaggtacagatgaggcgttaacaacttgacagaagtactttaaactggggagggacctctggtgttggacgttttcctagtaccaggcgaaagaatacatgtacagaaagaataagtgcaggtgtttaaaacggtcactgttacatattcttcacattttgttattttggaaaattgttttgaatgagctctgtttctgaaagtgttaatagcatacatttggttcttgaccctttctgttactgcaacttttctttgaaagcagaccaaagtaaactgccttaagaagagccaaatcattgtgataatgacacatggcaggaaggatcattttgagggttatttgacataatatgtgctgtcagcacagtgcctcacacagggtaagccctcaataatgtccttgttattgatcagtagtagccaagatgtcacagcttac

SEQ ID NO: 97562 - DNA, 1033 bp, Homo sapiens
tctgaaatgttgttggaataaggtcaatagagtagtcttggggaattacataactgctttcatcaatttcaatctactctttaaatattaaacctagcataaattagtttttaaaattaaagaatatataaaagctggaaaatagtaatggtagtctctccctactttattgtgaaagtagagattcgcagaaatgaagcataaagctcagaaacttttaagtaaagtcacacaactagtaggtggtagagctatgatttaaacccaggctgtcggagtctggagcctgctcttggtctttaaaatttcaaagcacgcttttatcactcccctctattgcctggcatgtagaggcgaatcaggcagacctgagtgtgtgaactgtattatctagtattgagaacgggcctatggtgtgttgacatggtactcattcacagaaaggcttattctttgaagagtttttgtcctaaaattgggcctttgaaggaattatatttaaagaagaaaacgtaaatatagctctgacctatataagtgaaatttgaggataattttatgtctttttagccattaacttatgcagtgatgagctttcacacaaattattaaaaagcaattttttaattgttttgaattgtagttttttatcttttttctactaatcctcccatgaattgggtggcaacaagcaagaaagaaaacaagcagtaaaaagtaattttcaaactttctctcctaccccaattgagaattcaatgaaatacttcaaaaataacaaataccaaaaacgtatattttatacatcctccagtagtaaggaaaatgttttttaccttaaatatttataaatttttcttttcctgaatgaacaaatataacactttaatgtatagtaattaagttgctaattgattacataagaatttataaaataaataataaataccaattatattccatatttctttgaacattgaaagtaaacactactgcatgtttctcagaatagtaactttctgagtgaaccagc

SEQ ID NO: 97563 - DNA, 1007 bp, Homo sapiens
tttcccatttgccttacaagaatgttagtgaatttgatagacaggaagcttgttaaagagctgcacaaaatatcagggacataatgtgatagtatattgaggctcaaaaggaaaaaaatatcaggatatggttcaagtattttgacctttatttaactgatatatttagttttcttcttgaacctcctctttgttcaaggcaggaactgtgctaagtacaagagacatgtaaacaaaatattaaatggacaagacattatgattcttgtcctcttagagctgatctcatgtaggaaacagacaagtaaacagaaaattacaacccagggtgattgttgctgtgataaggaatgtgtaagatacaaaggaggagcagttaccttagaaactctgagaagccttgaaagaaggaaggtgtatgtggagacctgaagtataaaaataatttctccacaggtgaaagctgggggtatgcatggttatttctgccatagagaatgtaaaagaagggctgttaaatagggaatttgagagattgttaaggaagatgaaactaaagagtccaaggacaatgtcagaacggctctagagctatattaaggaatttgttgtcaccatggaggcaatggggagctgctgaggggacttttagggagtaaatgatcatatttatgttttagaaagatcactcagaagacagagtgaaaaatggattgaagagggacaagctcaggggtaaggaaactagtgaaaaaggagttagattaaggaaaagatgatggtctgaatgagaagagagatctgaatgagaatgaatagaattgactgagatgtttaagattgacatgagttggatgttggatctggggagaagggtgaaaatggagtcaagaatggactccaaattttagacctgagcagttgtatttatcaattttggttgattatttttttcactttgtttcagtcgttttggtaacctgatcgaagtttaccttgtgtcagga

SEQ ID NO: 97564 - DNA, 1478 bp, Homo sapiens
tttgcccttctgtaaaataaaatcacatttcaatttagaaagataaataattgttttttgtttgtgaaatcttcgattttaagaattcaactttttattatgtgcttatataaacttttaagttgtccggtgctagaataaggattgctttaaaaaaaaattgaaatacttctaaagatttttaacttgaaaaattggtgtcttgagttatgaattgaggtaatttataacagtcgtttataaagataatgttttgacttctctctaatgaaatgcctaaaaagcaatatcaaataatatatcatttttggaccttttgaacctaaatgttggtgttttctggacttgtatttgtgagtttgtgcattaaaacaatacattcagaaaatattctcgtatgcatatatgtattttttaagaaaacctgacaatttaccaaaaactctttattgtaaattttgatacatacagccatatgaattccatttcctattttatttattagttttcaaaaatcaaactacaatttatttgactgtgacagtgagtttatatctgtgtggtttggggaaacattccttaaagtttgactttttttttcccccgagacgtctcggtctgtcacccaggctggagtgcagtggcgagatctcgattcactgcaacctccacctcctggatacaagtgattcttctgcctcagcttccccagtagctgggactacaggcgcgtaccaccacgcctggctaattttttgtatttttagtagaggcggggtttcaccgtgtttcgatctcctgacctcatgatccgcccgcctcggcctcccaaagtgctgggattacaggcatgagccactgcgcctggcctaaagtttggcggtttttattctgtaaaataattctgaatttcaggggaagccgttttcctgttcccacacactaactttccaagtctactataggtcaaatgtagtagatggcaggcactttgaattcagtttgaagttactggcttgaaacctttatttttttcacttaagattttctttctgaccaattgtgtgagctagcacgtatgagaatgattcctgccaggcctcactgctgatgacccttcctctcctagaacagatcacatgattagttcctccttcatagcttcatagaaggcatttgacaagagaaagtgcccattgggcccataatcctaatttttaaatctttttaaatgttttattaaatgacaaaaccactctcattgtaccatacattgttagcaatttaaccctggatatattaaattgggagtggaaaagaattagcaagcattttttcctgtttatggataaaatgttaagaatgaattctgtttggagaagctattctctagcatgcaaaaaatgtgttttttctagtctgtgaatatttcaataataggaaataaatagttcttgcttttactcaataaatctttg

SEQ ID NO: 97565 - DNA, 1685 bp, Homo sapiens
tgaccctctttgcctttttgaggcccagttttctcatagggcttttgagagacaatgagtcaacaaaatgtaaaatgaaaaaaaggctttgcaagtctaaactaaaactcttgcatttgtagcttcagtgaaacctttgagatgtcctcttatctaaaataatgacatccaaatgatcagaaactaaaagtataatgatataaaactaccttgtggccagttggtactgtgagaactaagctttataaataccacatttttcccttaaactcatccaatttcctacatcagaggaattgcattttcagcatggctgttcataaaaattttaatctatcatttttcccttttttgaactgttacgcatattcagggcagagataaaatagggtcaggttagttgaaaatggctgtttggataggatacgattagctacacggttttgaatttcttctaattgcagcatggctttttttatttttgctgcggatctcctatttacaatggactccattatgagattcttcttctttgttggtgtattaaataaacatattaccttattttaagtttcgataaaatactgtggaagactttgccaaattttatatgattgtgacaagttttttggggtaggtgcacttttttgtttgtttctttaatttttaaaaggctgcaaacacagctcatgaaggctggtttcttttatctctgaggtatgggcctgggattaagtgagtcatgcctaggaaatagaagcaactgatccaaggatataacattgaaagtagttgaattctattttgagatgggtctgataaccacaatgtaattctctttctatttgaggaaaatataaattttagtatttcagagcatcagattttttgttaattcacaacactttccctctagaaattcagcacctgcatcgcccttcttagtaagtttggttttatttgggggcagctatgattaagcagataacattgggtatattgaaataaaggaacaattcctaacattttaggaatactacaacagctatttcctttcctttcaggtgatgattttcatacttgtgttgtgttctttctacagaacaaagactaaataatgacataatcctcagctgactgactgaaaatgtgactggacgcattccctgtggacagttgacagctttttttttttccatatacctgatagtctgtgtacagcattgttttgtctgggaagcagggattgctgacatgtatttttgaatccatacattaatgctaaaacgaatatagtagttgttccttagagcaatatgttgttacgtgtagcagaaataaagttttctttgcttaactaaatcatgacttatttatgtgaaagacaagaacggaaaaatttaatagacagtctttagaatttgactaaatgacatatgtcattgattttgagatgcacatctttcacattttaacacccctgaaagtagaagcatctcaatatcagttgtatggcatagtgtaatcgacaaccttattttctttcttaataaaacatgaaaaggtgcttttttcaatcaattgcatcttagagtcaataaaatatggtaattgctactcaatctatatatgcagcttaactgtttacacttaatctaaggacaaaagacaaaatcattggaaat

SEQ ID NO: 97566 - DNA, 1049 bp, Homo sapiens
ccgcacctttcagggaatcggggaagccgagaggagcggctggggaagttgtgcattgggttttattgtgcgcgtgcactgcggactgccctcgcggggcacccctgcccacccgctgctggcgcccctgcagccctcccggcagcctccgtccactcccccggccagggccaagtctgccttccctggttcagaccgggacagcgtttgcattgcagtcaagacgtgcttcccctgcatcaagccgggagctgcccgcagatcgtgtcgccggggatgctgggggaggagggaatgggagacctgaggagaaagcctggagaagtaatgacacaagcggattttctccccaaagcttctgctgcgtatagacacatctgcaaggcaccttttaagctgtttttgaaagttataaccagatactgattttgtgacaattctatgatatacctgaacggttgcttaaacatagagacctaaagctaggggaagcattacataatggacatgaagcaaatgacacgaaactaagtgaacccactgggttgccagattatttctctcttctggacacaaaatcctgtaaggttttttctataggaactttcatttttaaattgctgggctaagtttagccaattgtctattatattcagttgtgattttttttttctaaataattttcttggacatcttttcttaaatttaaaaattgcatactaatggttacatatcactaagctgattaggaaatgtagtcttcacaaggtaaaaataagaaatttcccatcttaatacattaactttgttttcctcttgttttgtttttgtttcttttccttctttcatccttccccccgcccccaacccccgctttattttttggaaacatttctacagttttgggtactgcaagctcacaacgttgatatttctatcacatgctacagcattgcggagacaaagactaataataaatgaaacagaagacctcgcagtaactctgagagttagcagggttcccaaggtcgaagggaagctgcagtgta

SEQ ID NO: 97567 - DNA, 1096 bp, Homo sapiens
gtaagttttcttatccctagattgctataaccttaagttaactttatttcaaggagaaaaataaagtccttccaagatgaaatctttgtggttggaggtcttagtaccaccacagataccggattaggtaaactgcataaggagataaaaattcttatgactttactcatgaaactgttggactagagagaagataatatagttttgaaaggtaaggcatacattctcaaaagaaggattttgttgttttgctgcaaaggttaggtcataattatgatactttttaaaaagtggttttaaatcttgggggaaaaagggtctcatagtatccattgacttctggaacttttttttcctcactcaatattatatctctggattcattcatactgtatgtagttgtagttcactgactttcactgcagtaaaatattccattatgtgtcttataacgcagtatgtttctcttttctcctctctgaccattttttttttttttgagatattgcagtgttgctctgattattgttgtttcctgggcacacgtgccagtgtttctcttgggttaataccaaggaataaaattgctggtttgtaggttatgtgaatattcaacttattaagtattgccaaattatattcccaaatggttgtactaatttacataaaccagggaaacaaccaaatacaaacactaaataaaaacatgcacttctgttttgcatatatgtctgttgaaatacatatctttttagaaagcaagagaatgatgaacgtaaaacttagaatggcagttatcttttatatggactggagggtagcatgtggggaggaacacacacatggatgtttgttattgataatgacctagtccttgggtttcatggtgagtttctaggtgatcattgtacagtaattcccccgttatccaaagggagtatgttccaagttccctagtagatgcctgaaacctccgatggtgccaaaccctatgtatatgcttcttttccatgcatagatacctatgataaaatttaatttataaattaggtacagtaagagattaacaatcataataaacagaacaattattaac

SEQ ID NO: 97568 - DNA, 1072 bp, Homo sapiens
ttaaaagaaacataaacataaaactcaattttcttaaatcaaatgagagctttcatgtgtcagtatccaaaggcagcgttttaaattttgattatactgtgaaattctgctttaaacaaataaaaattcacattattttccgtcctcttctcttcccccttaaacccctaccattactctttctacacacttaatatttctgttaatttgcttctgagggaatgcttgggtatttactgctaagtgtttttctgggtctttctagaaggccgactgattttattgcttaggtttggggccaaatcctatggttgcctggctctctgagatattgagtcttcaacctttagctgcctgtgagtgactgctcaaatgtcatggggagcctctgcaagataaccattaagggttttttttttttttttcatttgttaaatccccaaaactaatgctattaaggggcttttcatagaactagaaagctctatgtattcatctttttaactcccacatcacatagccttgtacatagtggacattcagtaagtgttgataaatatacaatttttgttaattgattcgtataaaattacactgtacattgtttgccgtttgaaatgctaattatagttctgtttggtttgtgtttacattctaatctttcggaacactgggaaaaaaatactttaagctttttccctttaaactttgaaggaaaacacatatttggataaggcagtgctgtacttctagtctcaaagtgtccattattgggtagctaactgacaattatttctctgtgtaagaaatattttaaaaaagttcttcgagaataatgcctaattattctttgtgagctggccaaattttgtgaaataatgaggtttagggattacatttttcaaagccagcaataaaatatacaaagattaaagcacatttctttaagttggaggtgctggagctttttagttgcttctttttgcttttaaaatgggtcatttgacatttatatgcaaatcaataatgtatgagttaaatgcaagcaagcaaggttctgtttcttcagacc

SEQ ID NO: 97569 - DNA, 1031 bp, Homo sapiens
tacagggcagagagaaataagatagaccctctgccaagaaataaaaatctcctataaatgatcccactatccagaaatagataatatttggtgttaaatactcatattttcttctctagtatttatattcctgtaaatcatttattatatttatttttcataaaaatagtcatgcacacatgctgctttataaacctctcccttccccagtgtttccaagttggtagctctatatttattattgtttataatggctgcagagatttggtggacacatacgttgtgtcctatttttttgttgttgccataagcaacactgtgatgaacatctttgtacacaggagtatgtacttgcttgattttatgcttaaaatagcttcttaaagatgttgaagccttgtaagacttgttactagttcactctaaaagtttactctgattctctatcaacctgttatgtgaaaagtgattttacattgtcttaaatcgcatctctattattcagatagagcatttttctgtattgtgttggccatttgaattttgtggttacattccctcctttgtgtttttcccatttttctttaaagatattcctgttttggcttattgttttgtgagagcataatgtattagagacatggatttcttgtctgccttgttgtagatattttcccccactggattcaaatcttgattgagattttgtcaaatgtattgttagttaagtgggtatatgtatatctttcgatattggctcttgtttattaaatacgttttacaattaaggaaattgtaaaaagtaaaaggatatggagtgacgtttcccaggcccttcagtttattctttgccttggggtagaactgtttttaaatcctttgagaaaactgagtatttagtatttacactgactaagtgattggattccatttggttgggttttaaagtgttctttttaatgattttagcacactcacctattgttactcattctcaaatctggtatctttggctctttgaaacagctttg

SEQ ID NO: 97570 - DNA, 1052 bp, Homo sapiens
ggctgattgcacagagactttgcctttaactgtcacagggttggctagtgtgaccttcacatcaggctgcggaaaacacacttgccagtcatcttaggacaatttggattggttgcctgggcaaccttactggcttctaatcaaatgccccaaggatagcccaattcccaaggggaacgccgcatctgaagggaggaactctgtccttggagtagcagtgattttaggacacttggttaatattggggggaagtgaggggatgccatgatctcacaatgaacccgggaagggagacaataaaggaaagggggatcaagagagaagggatgtaagagaggctggaagggaagagaaggttgcattgaagcaaatggtagacactaaatagtgaataagagcaaatgatttgtgaataagaaaactgtctattgcagagtgagcagaagtacaccaagaatgcagattgaaaagttatgtttagaaaaaaaaatccatggccaataaatgactatctagagagggaaaaagaactttggagacttctgaaaatgcaatgaaaatattttttcactgaaacagccttgcatgtgaatgtctttgattgactcctttttaaggaaataacattgtcttcttcctatactctccattgcagcctgagtaaatcctgtgtccagaatcagaatgacaccattcagaattataggacgcatttttatttgtttctttcatgaatcagaactgttatagattagaaactagtgtagttaaagtcagttctggccaggtgtggtggcttaaccctgtaatcccagcactttggcaggctgaactgggaggattgcttgagtccaggagttcaagaccagcctggacaatataatgagaccccatctctacaaggaattaaaaagttagctgaatgtggtagcatgcacctgtagtcccagctactcagggggctgaggcaggaggatcgctcaagcccggatggcagagattgcagtgagctgagattgtaccactgcactccagcttgagcaacagagca

SEQ ID NO: 97571 - DNA, 1050 bp, Homo sapiens
gaaggttgggtgctggggagaggcgacagattggacaagcagttttccttttttaaaggctgttacacaacattgcccacatccttttgctcagatcccattgagtagagctaaatggccctaccctgtttctgaggctggaaattgtagattagttggctgatcatgtgccaagtgaaaacttgtggaggtgagatggtggaggaagttgttctgttcctgacaggaaaaaacagaatggatactgaaggcagtttgcagttttactgcaataggtgggcacagtttgatttattttgcaacctagaccttaaccttgattttattatttcatagtctctgatcttcactggcatactgggttcctcggaaaagtggaagacatgaagtatggatgtatataatacccgaggaagtctcaaaggtactatgaaatatgtctaaacgtgaaaggtgcccgagagaacttgagtcaccaagatcagcctctgaccaacttctttaatgcagagaaggttgtgtgtggtgcattgtgtgggaggcagaatttagccctaggtgtaactgttcaaaggacaagtatgagtatcctaaacctactctacaaaaataataaccattaacattttggtctgtctacctacctagattataaatataaaaaagaaattggattatgcttttgtgtggttttgcagtctgccttttccctataccttatagcacaaataccttccatatcaataaatacatgtctgattgttaacaaatttctgtcatgggatatttcaatagctttcactttctgatttataattagcactatagtgaacatagatatacatttctacccacaacagcatattgaagtagcattgttgtttggggtagatacctggggtttgtcatctcacactgagaagattaacgacagggacacacacacagagtgggttaaggaatggaaagtttaccaggcagaagaaaggagagaggagagcagctctctctcttgtgagagaagggtgtccaaaaatgggaaaaaggctg

SEQ ID NO: 97572 - DNA, 1013 bp, Homo sapiens
ttgatatttcgacaggaagtagcttaatagtctccctctttagggatgtgggatccagtggattaatggtggaagagagaaatctgaatgcttaagtttctaaatcactgtttaaaggtacagtgttagggcataggcaactatattcatcatcctagtgaccagtgtttaatgaaaaattaggagacattaatatatatagatctccttcactttaaactgtttctaagaattaataatttgggtaaatatgggatggagatgaggaatcaaatacagttgaaatttagagttggaaaaagtgcatccaaattccatatagtactcaacagactcttctgatacttcattaattcttgtcttgttagaaattctagactcagtctttcgatgctatagtttcaaatttatcatggaaatgggtggaaaaattagatttaaaaaaaaaacttttgctggatcttatctgttctgaaatgagaattagttccatgatagttttctccaggaacagggtgttagtatgatcttggataaaagcacatatagaatagtctgtcaaggccaggcgcagtggctcacgcctgtaataccaacactttggaaggccgagatgggcggatcagctgaggtcaggagttcaagactagcctgacggacatggtgaaaccccatctctactaaaaatacaaaattagctgggcgtggtgacacatgcctgtaatcccagctacttgggggactgagatgggagcattgcttgaacctggaaggcggaggttgcagtgagctgagattgcaccattgcacttcagcctgggcaacaaaagcgaaactcagtcccaaaaaaaggaatagactgtcagagctggaagaagatttgcaatcctctagcagcctagcatccttggtttataaagagttcaagccccagagatggtaagttacttgtacaaagtgacacacatcaaggcagcagaaccatgactagaaacccagacatctgactcttg

SEQ ID NO: 97573 - DNA, 1037 bp, Homo sapiens
caaaggcttgtgaagatggaatgcaataattcatgtaaagcatagagataggaatgtaaaaaccagtaactattaactgccattgtcatcattatcatcaacactatcctacagaagttactagtaccactgaaatagtgttgctacgttcaaagtagcagctataactagaagagatacatgcgagatagctgaaagcttgaagaacgtactttagaaattcctaaattattttggatatttttctttgaaaatattttgggtaatctgtgaatataaaaatagcttagctaagatagttaggtgaacaatttcaatggagttaacattcagagagcagtggaccaattctctttactactgtcctaaatttatagaaaaagtgagtctgtaaagaaatttgtagcctcagtctaaaacatttccagcaatgtctttatatctttgtaatgaaatttaagtaagtaaatgacaagatccctattcaacagatctcctggactctcattttgagaatcacgtttctctccgcgtgagttgcaccaaaccattcagctattattaagtgtctcattgtctgtctgtttacctatgtctttgataccaagtaaactagactacagtcatgttggcacatttccacttgctgctcaggaggtattgagatcaatgaacactaacctgaggagcatatttttaccaaattaaagagctacagtgaaatatgtgttccaggttcctggttttaagctaaatatgcatcagttatctctgatcaggggaaacagagggcgggtaagtacttccaccttctctgtgtgttctaagttccttaaaaaactgacctggaaattaacttataattttagcatttgagaggaaacttgattttagaagaataattaactggtttacataaccctttatttaacttgcttacataatgtgtgtaacaccttgaaagtagtggcatgtgtttccaattcactctgaaagaatatgaaaacagctatcttgtgaagaaaagtacaaaaatt

SEQ ID NO: 97574 - DNA, 1045 bp, Homo sapiens
cagcttcccaagtagctggaattgcaggcttccatcaccatgccgggctaatttttgtatttttaatagagacagggtttcaccaagttggccaggctggtctcaaactcctgacctcaagtgatccgtctgccccagcctcccaaagtgctgagattacaagcatgagccaccatgcctggccgccactggattttttaaggtagacctttctttttgtctgttgctattcccagttggagagatgagcaaatatttctatgtaagcctgattagtctaagtagaaggtgtgtctttgtcataaagttgtaagttttcttgtgtgtatcataaaatttttcgagagatattcctctgactctccaagactgaaaccggcactgcagcagcagttcagcagcaaatctagaagaggaggggaaaatcctgtgccgacatatttttctgtctgttgctgctatctttggtcttttcaggaacttgccatttttaacatagctcactgttttgactgtgttgtgtatgatttcatccccatgcacattcacatgaaaagtgagttgtctaaccctgggctatgttttcatttattttcagagtattcacatactggagaggactgcttcctctagcaccgagccctctgtaagtcggcaattgctagaaccggagccagtccccctctccaaggtcagtgatgaaatgcggtgctttctctgctggcatgatgcctgctctggggccaattgaactgtgaataacgtttacacctgactcccctaaaatacttgtgatgccacttgtaggcaactctttgcactttttctgcttccaaggagtagagtttctctgccctttataagagagaacagagaatgtatactttgctgggatttgtagggttacattcaaaggtccaaaattctgtttaagggaagaaggaaaaagaagctattgccttccctgttggagataaacaaatatttctatgcccagctaatggaaaagaaaaaaaactgcatccagcaataaaaataataacag

SEQ ID NO: 97575 - DNA, 1064 bp, Homo sapiens
gtttcacctgccagtatcttcatcatataaacatggatctgcctacttatatttgccataatttgcattgacccttttattaccatccccaccgctccctacccaattttaacgtatttttatttctgatttcttattagatcttgcacattgccagtcaaaccttgtggaacttagcaaactcctgcaaaatttggaaatacttcagagaactcagtcggcacctaactttactgacatgcaggtaaacatattcctgctgctggtaaaaggacttagggtattaattaatactctttattgggttgttctatgaatatataaggtaacatttaaagataaataactgcaatacagacattcatttatattctggagttatttttaatatttttgaatctcagtgtcagtgtgttaagatgattattttaaaacattttacatttaaatacacactaaccaaaagaaatacattcagtatctgaattattcttccatgtttgtgtcctattagaaatggtagctttgaagatatgctttagatactctcagaattattattgtcttttcatatagaaatcaaagctagagatttctaatcctgtattcattttgtttatcagtaaaatatattttataattaagttcttatctctgctttttaatgcccactattcgtctaatatgcctttctgtcctggctggtttgcttataggctctaacaatgacctttagtaacttgctgtgctcttgtctatatctgtatcatctgtgtgaacttaataatactttgttgcttttaactatttgtgtaatgtaggctaactgtgtagatatttcaaagaaagacaagcgggtcacaagacgatggagaacaaaaagtgtcagcaaagatacaaaaatacaactgcaggtacagattttacttttccttcattcacgtttctacatatttttaaagtactagtctttatacatcagtttatgggcgttagattgaaagggcaacttaactgctttaaagccagcacttttcaaactgttacattatctaaaatagtgg

SEQ ID NO: 97576 - DNA, 1029 bp, Homo sapiens
aaaaaagaattatgcatttatttgacctatacatctgaaatgtgttccaggatatattcagtccaatagtgaatattttttaaaaatgtactagatcttccacacttaatatttttcccacttacatcttaatctgtttaaaattactgattactatcactcatttttttcttttctgatttgcactcttgaggttttcttcctaagttatgctccctgaactagacttttatatttcaatatatattatagagttgatcttattaatactaatcaaatccctatgtatctatatcaaagttgaaatttctgataaaaatcctttagagctgtgcttatgcttttttcaactgagtagttccttagaagtaagtattttctttagtctataaatgcactgacttaactcctttaagaattcaatgtcgttatgtgattttgtgagaactcggtgtctatataaaatattattcacttcctggtgccttggatcagagtgaaggagcaagcaaatcctgggtaagtggttctccgcgtggagcagatcctgcttgaacagtttccctcggtccctaaaaagtagacttacaccgtgtcaccgtgttttacgtccctgaactgtcggcgtattttcagtgttaagtttcatgtcatggatgttgttatatgggccacactttctgcattatccataaaacactgtcagctgaggggcatatgctgcttccagtataaagccaggggtctcaggagcatgagcgtgaaaatccgctacgattctgccagtcttcagagggctttatttagaagaacattttaatggctttccctggacccttctcatgtcatggatcggtcgaacactcagttgacgttaattggtcttccaaatcattattctgaaagtatcgtgaatcagaaagatcaaaatattggtcaagtaaacattcaaatgtcatcttgtaaacatataaaatacattcttgtccccctaagtgttgcaatgattccttcagatgtatttaatga

SEQ ID NO: 97577 - DNA, 1115 bp, Homo sapiens
ttcagctccttcactctcttcagacccttactcaaaggtcacctccagggaagcctatgctggctgtcctatctacaatttagagttgccatttcttcctttcctctgaccttttggggtttttctatttatttttgagacagagtctcattctgtcacccaggctggagtgcagtggtgcaatcttgcctcactgtaatctccacctcctgggttcaagcaagtctcctgcctcagcctcccgagtagctgggattacaggcatgcaccaccacgcctggctaatttttatatttttagtagaaatgaggtttcaccatgttggccaggttggtcttgaacacctgacctcaagtgattcgcctgcctcagcctcccaaagtgctgggactacaggcatgagccactgcgcctggcctcctctgaccttttgtatccctctttcctcattttttttccttcatgcttatcactgtcttaaatatatatatatttcctatatttcatttgttgtgtgtctgccccactagaacataaatttcatgaaggcagagatttaaccactgtgtctcctgcactaaaacagttctggtgagcccagagcaggtactcaataaatatctgctaactgagcaaaggaagaaatgcttataatgattattctgagaaacatctgggcattagctgtcttacattaacattttccatggcagagggaaaaatcctctttatatgttatttaccaatgcactttactgaatgaatcctctgctcttttaaaaaatgttcttcttgcttccacaataatctatttgcctttacttttaaacttgtttctgcaatgctgcatgcctggtcacatttaggaaaaatatatattttctgaactcttttgaatccctaagtttgtaaagagaaatacttggttccaggacttcttaaccacggggcagaggacaaactgtttgattacaatagtgcagagccttggctctttgtgcagggtagcgtgaattgaccacagcaagatagcccagccttagttactgcacacatgtgacatgtatacatcttactcaaggcccactattattgtagaattcttttacaccagt

SEQ ID NO: 97578 - DNA, 1024 bp, Homo sapiens
aagaaagagagagagagagaaagaaaaacaaagaaagagaaagaaagaaagaaaagaaagaaagaagaaagaaagaaacaggaaggaaggaaggaaaggaagggagggagggagggagggaggggaaggaaggaaagggagggaggaaaaggagaaaggaggcagggagggagggaaagaaagagaaagaaaagaaagagaaagaagagagaaaaggaaggaaggagggaaggagaaaaaaagaaacagaaaaggaaagaagagagaagaaaagaaatcgaggaagaatagactttatagctgtttgtaggataaacatgagtgttttcttaacaaatgttcaaacaataaacatgcatgcaatgtgaatttggtttaggtagacatttgtctcctcaaacataattgtgtatgattagatttttttcagagaaatcaccagaggagtttgatttactttttttcactttcaagcataagaagttggcttttcatgagcctgatggtttaaccttcagctctgctgcagtcagtaggaactgtgggaaccagttgcagcgggaaaatatgaatcagaaaaagattttgttctcaatttgtcatctttatgggcttactctgtatgcaaaaacaaaattaccattattcatccatgtgtgcaatcattctgtccatcactgttctccctaaatatatgaactcttctcaaccctaatttttaaaacattagcaataaatccagaaaccttaaagacaaagaccagttgtttttatgtacaaattcaaaatgtttacatgacaaaagaattggcataaacaaagtttaaaaatgcaagttaagaaaaatgtaatctatatgtcaaactgaaaaatgtgtgaaagataagacaaggagttcataaagggtgaaatttaaactttaaagcaatcttttggccaggtgcaatggctcatacctgtaataccagcactttgagaggctgcagtggaaggattgcttgaagctaggagttcaagcctgggt

SEQ ID NO: 97579 - DNA, 1228 bp, Homo sapiens
cttaatgaacaggcattccccctcccacgccacccccacccctgctaattgttcttttggcagctgattgttcaatacattctattttgtatgatctcttgaggtaaatggttgaaaaaatctgttaggtaaatagttaagagaaaacgtttttcctctttctcaaaccaacagcttgagtccttcttattaaatgtatttaattttttaaaacttagcctgtcttgtcttgaatgatatttgagtgtatctaatgccttatttataaaactatacactgttgttttctgcatttattagcaaccttgcattgaaagaattccatttacttttgaaaagatataatgaagactcatgaaaggtctcaaaatcagatttatttgaaagttatttcccttcttgattttgtgaaatcagaacagcaaagtgtccttcactgtgactctccttcttccagtcctgaatggggagcttacaggaggggccttccgaaatgggcgtcgagcatgcctgccagctccttgtcctgacaccagtaacattaacctgtggaatatcttgaggaacaacattggtaaagacctgtctaaagtctctatgcctgtggagctaaacgagccgctcaacaccctgcagcacctctgtgaggaaatggaatacagcgagctcctggacaaggcttcggaaactgatgatccatatgagcgcatggtaataaataactaacagagcagcgcccctcagggatttgccaaccctagacctgggctaagccagaattcattatgatatatttggcatttgcataatattcttactgcatagtaaaagaggaattgatctgtttgcataaatccggcaaggccaaaacctcccagataccaacacaggaagacacactttttgtgccttatccttggtctagagtgtttctaaagttaaggtgtaaaggtctcatactccttagaggttgaaggcacaccttgcctcactttatcagtttttcctgaatgtcaggatagcccatctgttcaggaacttaggtctgagaaaataacttctgtttatacttcaccctttatcccatatggctgtgggaaacatgccatgccctctgaaaagcacccgcaaccacaatcctcatgcacatgaggctaagatcatgcctgtggcagaaccaataagctgggtttcagaacctttgaactctgtgatactcatgacgttg

SEQ ID NO: 97580 - DNA, 1019 bp, Homo sapiens
attattcacattgccaggctaaattttctggatcattgttactcttctgttttttgtatagttgtaacagagtattctttaaatacatttttatggcatgcctattatgtacaaaacaccacaaagcttatgtaggtaagtgatacataggccctacctcaaggagcttactgtctgaacaggggagaggtgtggtgaaggatggacaaattatatgtatttgtaagagtatataatttatggtaaaacaatttcaagaaaggattaaaccatgtgttataatgtttcaaagaagggagagattataaaccactggggtaaaaggataggcttcttggaggaagtgacatttgagatatatcttggatgaccgatcagattcccatagaagaggtctgagaaaagggcattccatgtagaaggaatgacaagagcaaagacatagagagttaattagaaaatgcttgtcatttatttcataattcgggggaaattattttgttttataacacttttaaaaaatatttagctttgcagttcctgaccccttaatgcctgacccttccaagcaaccaaagaaccagcttaatcctattggttcattacaggtaagttgtacagttctttgcctactgatgaaatatataataagtttgtaatgtcagaggggctaacacaaggaattaatattttaaagacaagatagtgatatattttgttttccaacttacgatcattagattaacagagctaacttgaaattattttcctatttatgttctgggttttctttcatatacagtatttgcctttggcttatagaattctcatttaagatcaacaggccctcagtgcacatgggtaaagtgttttatactttaagaatagttcttgctactcttgtgacaaatctctttctacttctgttgagacagaagactttatagagagcctaaatcaaatcagtgaacctaactgaagaaaaggagtctatttgcttattctaccaaaaaaaaaaa

SEQ ID NO: 97581 - DNA, 1060 bp, Homo sapiens
gatccactaaaagtactcttttgggaattctaattttgaagaagcaggcagaggttttcttttattatataatgtataccaaaagaagagaatgttaagtgggatattaattcttgacatatctttctaaagtaagatttttttttttttttttttttttttgagacggagtctcgctctgtcgcccagtctggagtgcagtggcgggatctcggctcactgcaagctccgcctcccgggttcacgccattctcctgcctcagcctcccaagtagctgggactacaggcgcccgccactacgcccagctaattttttgtatttttagtagagacggggtttcaccgttttagccgggatggtctcgatctcctgacctcgtgatccgccagcctcggcctcccaaagtgctgggatagattttttactactttaggtgtttctagatagaatattggtcctggagcatctcacatattaaagtagtgtccactgggtgcactctggagcttggcatgctttcaagttcttcttgtgcatacacttacatatgcctgaagtacgatctgtgtaatcagcttatagttgacagtagagacccagggaatttgggatgggttttttgttccctagtcatagaaaggcttttggattaggggtgtagttaggttctcatgtagtattcctctctttttgtaaatcattctaaaccgtttgggtagtttagaactaaccagtgacatggcaaccctctagataagcagctgcccaagacaagccttgcatttcacaagatgatgcttgattctctagggtcatgcattataattgatctatgccaggctgggcggggtggctcacgcctgtaatcccagcactttgggaggctgaggtgggtggatcacttgaggccaggagttcaagaccagcctggccaacatggcaaaaccctgtctctactaaaaatacaaaaattagccaggcatggtggcaggcgcctgtaatcccagctacttgggtggctgaggcacaaaaatcgcttgaacccgggaggcggagat

SEQ ID NO: 97582 - DNA, 1033 bp, Homo sapiens
ggccccagatcaaggagctaactgatgaagaggcagagaggctgcagctagagattgaccagaaataggatgcagagaatcatgaggcccagatcaagaatggcagccttgactccccagggaagcagaagactgaggaagatgaggaggaggaagatgagaaggacaaaggaaaactgaagcccaacctaggcaacagggcagacctgcctgattaccgctggaccaagaccctgtcggagctggacctggcggtccctttctgtgtggacttccagctgaaagggaaggacgtggtggtggcatccaacggcggcacctccaggtggggctcaaggggcagccagcgatcatcgatggggagctctacaacgaagtgaaggcggaggagagctcgtggctcattgaggacggcaaggtggtgactgtgcatctggagaagatcaagaagatggagtggtggagccgcttggtgtccagtgaccctgagatcaataccaagaagattaaccctgagaattccaagctgtcagacctggacagtgagactcacatcatggtggaaaagacaatctatgaccagtaacagaagtccatggggctgccaacctcagacgaacagaagaaacaggagattctgaagaagttcatggatcagcatccggagatggatttttccaaggctaaattcaactagcccctgtttttccctccctgaactcttggggctgagctgcaaccacccaactttctttcccactcttctctgggacttgtgggcctcagggcttggggcaggcatgggactggcccaggcacacaggtcccagggcatcaggagaaaggctggggcttggggtcttgtcctccccagttggcctactgttacacattaaaatgatttgcccagctaaaaaaaaaaaaaaaccacttggcttaaacaaaacttttaattgttccacaaaattactttggctctacacacatttgcttaattattagatttaaataatacagcaatctgtctgcaaca

SEQ ID NO: 97583 - DNA, 2947 bp, Homo sapiens
aaagatatattgtatgtctatactctcatggttaataggaaatatctgcagggtgtgatggcccacatctgtaatcctagcactttgggaggccaagatggcaggattacttgagtccaggaatttgagaccagcctgggcaacatgatgagacttcgtctctataaaaaattaaaaaattagccaggcatggtggcacttctgtagtcctaactacttgggaggctgaggtgggagcaccttttgagcctaggaggttgaggctgtggtgagccatgttcatgccactgcacttcagcctgggcagcagagtgagatcctgtctcaaaaaaccaaacaaaacaacagcaacaatccctgaaatatctcacttttggggtattcattcattcatttatttattcagtcacttgagaaatagatttttttggtacctcttatgtgccaggcaccattctagttgctgggaatgcagtgatgaacaagataaagtccatgtaccaaaataacttaccttctaatttgtttaggtctcactagggaatactctgttgtttcataaaaaggaatcttccaggaacctgaaagttgctggtttttagttgctttagatatctctctttctgaactgtattactgcattccctgccttcctaaacagggttacaaagtaaaatttaatctttttgatgactcagtgttgtcatttcaaaagtgttacagataaatccttttggggaattaagtcctggatctgtattaaagtgtaaggatgactgacccatctcccctctcggcactatctgaccctggaaagatcaaattgatcatgtggcaggctatggcaaaagtgaccgggatacgaacatccatggtttaaaatgtacattttagccatgaatatttgtgctgaattgttatttaatagtcatggaaagaacaaggacagtcacactgctcccagcatggtcaccatgttaatagtcagtgaactgttgtaaattagtagcatgcttgataagactccggggaacaccaagtttggcttcaaagaggagtgggaattgggtgccaaggaaagtcatcatccttgtcgtcagctttggcatggagccaagtctgtgatagatgtgagctctagtcactgaataaatatcaatcgaacaattgcagtttctaggatttcaaccctagctgtgcaactgcagacaagggaagagggggtcatatggggaatctgtgttctcaccatagggtatgtagcttctatttaagagactggaattcatttagcactcattgtgtttaagggagtttgcttagaaatatgtattttataagaggcacattgcagaattagagggctaggtggcacctgagaggtcatcttgttcaacctacacattttagggactgggaattttagagatttattgaaatgaaaagatttgtccccagggtatgattatccattaaagaatgatactataggtaaggctagaacccttgtcttctgtggcttttcccataatatcgtaaccccaactctgttcctttttaggaaaagagggcagttatgctatacccggtttagggctattactgaggatgggccttatgggttgttaatgagaacactgtgagctagaattagaagtattactccccgtgtttttgctgctctggagcttgctccagaaacctctcccaataaagtggagactgatgcaaaaacatttttggtaaggcttggtgattgaaaatttcattatcggaatgttatttgagagccaagaaataatgtggatggcaggttttgaaatcacagttttctatgtggtgaaagtaatgtgtttccaattgaccttttgttatttatggtctttttaggctggcagcctcgttggtttgttttagataatggaatcttatcctactatgattcacaagatgatgtttgcaaagggagcaaaggaagcataaagatggcagtttgtgaaattaaaggtaagtgaatatacagaattagaggaattggaggttagatagtcaagggttcttcagcatactccagacgaggaaaaaaagcatttctaaccacgtagggatcatctaataccatttatatccttagcagtcaggagtggcatttcatcacagttaacacaattaaacacagtttttgataattctccctctacaaatgtatttttgaatggaaataacttttgctagtcttccaatttggatttgacaaacaatttcttgtggatactactttagtgtccaccttcagtctataagcattctatttcattattgttgtaattaatagaaagatattgtaaaagttggaggctgaactctaaagatgatggggccagctctgtagggttttgataaggtatgaagttggagtcataaactctggttctttgctgaatttggaggtaagttcctctgggtgatagagatggtttccttttcttccaaaaggggagaaataaagcaataggtcctgctgtaattttcgtgaaggaagattttatggaccattgattcatttgtgtgtgtggttggagtgtgtggggtggaggcgaaatcagataaaatggcagtgaaaaggactgaattcttcaaagagagtgaaggaaaaactagagcaccaggggagtgactgttaaactccttcctggtcgttttcatttctccactctagcttgaatacttgtccttcatgaagtgtgtttcctttgacgtggtgagctctgggtcatagctatcaaacagtcttcctgaaaggtagcgattaatctgactttaattgccatacataagtgttgtcttttaatgttttataaatggaataattcagtattttcttttgtgtctggcttcttttactcaacatcatgtttgtaaaatttatctatattgttctgtgtaa

SEQ ID NO: 97584 - DNA, 1070 bp, Homo sapiens
gatctggataaggtatttgcagtatataagatagaggaaagattactatctttaatttgtaagaacttttacaaactatcagtttatattgttaagagaaaaaccaacatcagaactggaaaaaatgtataaaggacaaaataaaaaagcaattcacaaaagaaaaccaagcactttttaaatggaagatgagtaatggaatggaaatatcctgtataaaacatccagtggtcatcatcctatctctggaaatcacctaaacatggcaggcatataactgtcagctttttcccaattatctgaagagaagatgtttccttagggctcttgtatcctgtttccaaggtctcacatttcttgagctataggtatttatattcattgcttttttaaatgattacattttgttacattgctcaaagaatatgaaaatgatctaactgtatatttatgtatattcttttcagaaataagtgaaaccagtgaatcgctgaaaaccaaaatgtctgaacttcgcctctactgtgacctcttaatgcagcaagttcatacaatacaggaatttgttcaccatgatgagaatcattcatctcctagtgcagaggtagagcgaagaggatctcttcacgtgtggttatgctttggagtactctggggggatcctcagtcattccataagatgacaggcattttcacattgagttattttcagcttttctgggttctgcctactgtatactatctggaaatctgtagcatcttctcgattgtgtctgtgtggccagagaagaacatgaagtagcatatttctccaggggtcaaggcttgtctttgcagccagtctgataatttggaggttggagtggggaagaagcattccaggctttgttctccaggctagcggcataaattcactggacagctgctattctctttttttggtaataaggtccctgcttcaactatgagagttgataacttatctttatgaaataacttaaaacaaatccttctcagaacagtgacttaggaatcaaaactcagattagtaggatcgggctataataggc

SEQ ID NO: 97585 - DNA, 1114 bp, Homo sapiens
caatatgataattaaatgcaaagcttattttttcttagaatctagtttcatacattgtttaggagacaggcatttcttatacatagatgttttaatgttttcttttttctttttttgccccagcttaattttctaaggtactgtattttaaataaatttgaacataacatagtaatgtgtctgttggagatgtcttattatttaatgataaggttgtatatgattccatgtagttgtatgcaaatctgttcaagtctttgtgtaatttttcagaacatgaatgaagcctcttctctgcttagtgccacgtgtaacacattcatcacaacgcttgaggaatgtgtgaagatagccaatgccaagtttaaacctgagatgtttcaactgcaccatccggatcccttagtttctcctgtgtcaccttctcctgttcaaatggtttgaacttcttgttttggttttttccctcagtagtaatgttgcatgtggttttcgtttcattttggtatttatttttaagggtggaagcaggcagttggggggcggggaacagctaacaagttgaatttttttgtttgtactgtttcatattcgagcttcttagctgatgagctgagcacttgtgctagtgtcctcattcccttctccttggaggggctgtgcatggcctgcccacaggctgcttcatccattttccccagtgtctaggaaaatattacaaagtgctgtgacaaagaaaaagttggggagctctattctgcttggtaagaattacacaatggaatgagattttagtcacaatggggtacaattacgtatatctttaaaggagttagaaggaatttgaaacatattccggtgggaacggtattctctactaagcatttggatctgaaccctcagagtagctgatcttcagtttcttcatgtgtaaaaatacagtgtatatcagagagtcactgcaaacgatctgacctgcttactgttaggtgctcagtgttagtttcttacttccttattgctcagaacaagtcctctttttgccaggggtggcagattcgttgtcctttctgagctaataaatttgctctagcatgctgttagaaatttgtag

SEQ ID NO: 97586 - DNA, 1042 bp, Homo sapiens
ctaagtatctttagcccaaataccatgacatattgagcatctttaaataaccagactgtattgtccttcatatgtgaagttgacactactgatttgtcaataccaaattttgggttaaagtgtttaatttttatgtatttattttcttgttgcctcaaaagatgattgcattctaacttttgtgacctaccaaatttaagatgtgtatacgttgttctttacgttgttctagaaaagagattttaatgctgtagtgactttgctcacttacactagagaaataaacaactttcaatggaagagaattttagtgctttttttttcctaaaatagatattaagctgctgttgtaaagtattgtttgcagctctttccaatatctagagacatttttatttatgaatatttatacaaaaaggaattctgtcaagatgactgctctatatcacttgagaatggcattatttaattaaagaacaaatagcattttttggtagtgcctgtccatacctattgtcattgtttgccttgtaatctgtttttttgaattcattttgggctgatagttttgtttaaggttttggataaggagcactttaaaacaaactggtgtgttgtttttaagttaatcatatgtttaataaatgcgtggtttttgcattcaaacacatcatataatacattgtattttttacattcattgatattctgtctaatctttattaggcactaatataattctaatggatttgagtttgtttgtatatttaggcctgctggtgaagacacaaatgaagcataatttttgttgcctgtgagcttagaatggtgtgacctatttcattttatttcaatttatcttgtaagtttatgtgggatattttaaaataattaatatttggtatttgtttaaaaaactgtaattataggccttccatcttaagtttaagatggacataaacagtctatacattaatatgtgtttgggtaaactgtatgctacttgaagtgtttgtaattttaaataacacacaggtcatca

SEQ ID NO: 97587 - DNA, 1045 bp, Homo sapiens
aatcccaacactttgggaggccgaggtgggcagatcacgaggtcaggagatccagaccatcctggctaacaaggtgaaactctgtctctactaaaaacaaaaaattagcctggcgtggtggcaggcgcctgtagtcccagctacttgggaggctgaggccagagaatggcgtgaacccgggaggcggagcttgcagtgagccgagattgcgccactgcactccagcctgggtgacgagtgagactccgtctcaaaaaaaaaaaaaaaaaaaaaaaaggaaaaatcatagtatttgtaggattcagtactatccacagtttcaggattccactgggggatcttgggacaggttgcccaagaataaaggtggcctgccgtacatctaatgagtaccagtgagacctaggctaggtcccctctaaagtgctgcttctctagtccctagcttcaatattctgtactgtggtccctaacagaataatgattgctggtatttattgggtgctctgctaagcgctgttctgagttttacaagtagtaacttgtctaatcgtcacaataatactgtgaggttgctgctgttattctcattttatggacgagaatgtcaaagaatggagaagttgggtaacctgccccaggtgaagtaagttagtaaacagcagttcctagatttgagcggggccctcagggttttgaatgcagacatgtaattgcaacatgattcggctgatcatgtagccagggtgtggggtttataaaatagacgtgaataaaaaaaaggggcaggatgacagtgaagcttgctcatgggttttgtggagggcgtagattggaaccaaaaagcacgcctcggcttggtgctccctgtcgccctctgttgacatggggagagaagagcgggtctgactcggaaatgacgccataatgctgaggaaccactcctggcgttgcggaaggtggggtgtggggccggaagaccctccccccgcgtcttcagaggagcgctgtttctggaggagttaggggaaggaggctgcctggt

SEQ ID NO: 97588 - DNA, 1927 bp, Homo sapiens
ggctactgttagaactttgccttcatcaatgctgatatcagatggaagagcttcaattttaggcggaattcctttatggaacaatgacaaaaaaaaggtcttagaatcactgaaaaaaataaagatttgctttctactgaattgtgtgtactaaagactacaccatgttacttggcttgtctacctctaccagtaattttattgctcacctcttatgcctgctttaagcattttactagttgagctttccagttgtgtcatattagatattcccataaagctgctggaactcatttctacaaaggactcttgcatggaggacatgctttgggcagacatgcttgcaaatttcatctcagtcatgctgctagcactgctgctgctgaaactgctgaaggaggcctcctgcttggaggcagacatttggactgactgagacgagaagcttccttgcaagcttgtgtcaccacttgttctcaatactacctctctggaaggttcttcaactagagctgtggagcatagcagatacacagtgaacatcaatgacatctggttaattgatgacatatgacgctgacttacagaaatggaaacttcaacacacacacagcagcataacccaaacaatttgctgttgaagcataagcaaatacatatatacatacatttgtcaagagctagctcaatgtctccaaaacatgaatccttatatttctatcattacattacatgcaggtgctaggaatcactaggagaaaaatgattagtcatatagaaagtaattgacatattgtgcatcctgcaaataaatgttacacggcagttggtagctttactttgaaatgtaatctatccaagtttctgtgtagctataaagaaagtttgactacaagaatgaattcacatcagttggctgtccctctttcacatggaatttaataaggcttcttagagttttctgtgcttgaaagagaggcaaaaaaacgatctaaaggccttaaacatgtaaggaagaagggtgaggagatacttacgaaggaccattaaggaagctgtagctgaacactggccacggaaatttttggccttaattgtgtactttccactgtcgctgactgatgcatttcggatttcaagggagtatacatttctggagcggcttatgctgacatttgaagaaatagaaatctaagacaaaggaaaaagaaaagaaatgttgaagttcttcagatgtggaagacatggtattttagtttttcttcaataatatattcataattaaacttactggcaggttgtttttaaaccattcgatttcaggggatggctcgccactgatttcacaagtaaagagaacattttgtccttcattaatattttgagatctaggctgtgagatgaaggctggagcatctgagagttctttgctcagtgtcaaatcatactgacacttgacgattccttccttggttttgcttatgcaggtgaggattccttcatctctgtgactggcttgcttgatggttagggtctgatcgctgcctgagacaccatatcggtactcctcagagttggtaagctctacgccattcagtacccatttcacatcagtggcaccagcaatgttggcttttaaaaccagtctttgaccttcgtttatgctcatctgagtagaaaatgctttaatctcagcatgagttctgacttcttctgatgcctgtgatgttttagtgatttcctcatggacaatggatttttccagggaggttgctgctgatttcttgacttcttcagaaatcagaacctttgaagcttcctctttgagggctaacttttcttgagattttgcctctgacatcttaatttcttcagaccttagggctttttgggaaatttcctcttggacaacagctttcttctgagg

SEQ ID NO: 97589 - DNA, 1068 bp, Homo sapiens
aatcaataacctcactgaatctgatcaaggagaatatgtttgtgagatttctggtgaaggtggaacgtctaaaaccaacttacaatttatggggcaagcctttaagagtatccatgagaaggtatcaaaaatatcagaaactaagaaatcagatcagaaaaccactgagtcaacagtaaccagaaaaactgaaccaaaagctcctgaaccaatttcctcaaaaccagtaattgttactgggttgcaggatacaactgtttcttcagacagtgttgctaaatttgcagttaaggctactggagaaccccggccaactgccatctggacaaaagatggaaaggtaaccagttcttaaatgtctctttcttttatcttctaaaatattttatcttctaaattcagcttcccaaaaaaagcttaaaatgaaatcactttttaaaacacaaatcatttgcattctacaggccattacacaaggaggtaaatataaactctctgaagacaagggagggttcttcttagaaattcataagactgatacttctgacagtggactttatacttgtacagtaaaaaattcagctggatctgtgtcctctagctgcaaattaacaataaaaggtaggttggcttttgtttttacccacatttcttcagaagataatattagggaaatattttcaaacatccccccttatatacacatacaagaaagtattaaaataaaattattttcctaattccagaatacaatttgtacaccaaagcagaaacacacatttgaagttagcatatgcttttctatgagcataaaaagcagttattaagtacctagttatatgtggtattatataagattccatagtgtcagcccctgctcccaggaatatttaagaataaagtcagtgaatatacaaaatggcactacttgcctaaaccttcacagttgctaattttccaaagcagtgcaaagttaattaaagaactatttctattttaccaattaaaattagtttgctttcatttcaatcttctgaaagataatttaatgttttggttactcaaaat

SEQ ID NO: 97590 - DNA, 1010 bp, Homo sapiens
ttttctggttactgttgactcagtggttttctgatctgatttcttagtttctgatatttttgataccttctcatggatactcttaaaggcttgccccataaattgtaagttggttttagacgttccaccttcaccagaaatctcacaaacatattctccttgatcagattcagtgaggttattgattttgagctcataggtaccatctgctgaataatgaaactggaaatgcccattttccttcagtttcttgccatctttataccaggtgacctcttttgcccttaatacactgctttcaaccacacaggtcagttttgcaatctctttagaagcttctgctttcaggaactgagtaatctttggtggggcagagactgggaggtgctgaactttctctgttggtgttggttttgtctctgtgggtgatacggctttcgggtgagaaggttctggagatttcactcgttttggagacttaactgcttctggggatttcacccgaggctctggggatttgactcttggtggtgatgtcacagccttttcagttaccctggccttttgaatagtcagagtgaactctgcttcttgtttcccttcactgttttctaccaccacgctgtaattgccctcatcggaagcctggactgaagagatctcaaaggttgatttgtactttgtggtggtcacttggtggcgggcagaagtacttagcacttgtcctttacgcagccaggtcacagttggtaccggctcaccatcggtgtcacaagaaaaccttgcagactcgccctcgtagacggtcatggaccgtggctttgttagaattcttgctgccaaagtcgtcttgatctttctggttgtggatttttcttccagtgacttttcttctaatgcagcacttttcatttctgcagatgcagagtgttcatatgaggagagactttcccttgtctccgtcatctgtgatttcacttccctgacagaagacgaagcttccatctcag

SEQ ID NO: 97591 - DNA, 1041 bp, Homo sapiens
agtgacagaaataacagaaattgaggaagaatacgaaatctcaaaacatgctcaaagagaatcatcctcatctgcgtctagactactgagacgacggcgctccctgtctccaacttatattgagttaatgaggccagtgtctgagctgatccggtcacgtccacaaccggctgaggaatacgaagatgacacagaaagaaggtcacctactccagagagaactcgcccacgatcccccagccctgtgtctagtgagagatcactctcgagatttgagaggtctgcaagatttgatatcttttccaggtatgagtccatgaaagctgctttaaaaactcagaagacatcagaaaggaagtatgaagttttgagtcagcagcctttcacactggaccatgcccctcgaatcacactgagaatgcgctcgcacagggtaccatgtggccaaaatacacgttttattttaaatgttcagtctaagccaactgccgaggttaaatggtaccacaatggtgtggaactccaagaaagcagtaagattcattacaccaacacgagtggagtcctcaccctggaaattctggactgtcatactgatgacagtggaacctaccgtgctgtgtgcaccaactacaagggcgaagcttctgactatgcaacgttggacgtgacaggaggggattataccacctatgcttcccaacgcagagatgaagaggtccccagatctgttttccctgagctgacaagaacagaggcgtatgctgtttcatcatttaagaaaacatctgagatggaagcttcgtcttctgtcagggaagtgaaatcacagatgacggagacaagggaaagtctctcctcatatgaacactctgcatctgcagaaatgaaaagtgctgcattagaagaaaagtcactggaagaaaaatccacaaccagaaagatcaagacgactttggcagcaagaattctaacaaagccacggtccatgaccgtctacgagggcgagtctgcaaggttttcttgtgacaccgatggtga

SEQ ID NO: 97592 - DNA, 1045 bp, Homo sapiens
agctcatcattgcaagtgtcacagatgatgatgccacagtttaccaagtcagagctaccaaccaagggggatctgtgtctggcactgcctccttggaagtggaaggtaaaaataaataaattatcatcaagttgaggctaaatgagttattaacttgggggtggaggctattgcacttaaacacatactgttagatgttgctaaattatattctttttttttttttttctgatacagttccagctaagatacacttacctaaaactcttgaaggcatgggagcagttcatgctctccgaggtgaagtggtcagcatcaagattcctttcagtggcaaaccagatcctgtgatcacctggcagaaaggacaagatctcattgacaataatggccactaccaagttattgtcacaagatccttcacatcacttgttttccccaatggggtagagagaaaagatgctggtttctatgtggtctgtgctaaaaacagatttggaattgatcagaagacagttgaactggatgtggctgatgttcctgacccacccagaggagtcaaagttagtgatgtctcacgagattctgtcaacttaacatggactgagccagcctctgatggtggcagcaaaatcaccaactacattgttgaaaaatgtgcaactactgcagaaagatggctccgtgtaggacaggcccgagaaacacgttataccgtgatcaacttatttggaaaaacaagttaccagttccgggtaatagctgaaaataaatttggtctgagcaagccttcagagccttcagaaccaaccataaccaaagaagataagaccagagctatgaactatgatgaagaggtagatgaaaccagggaagtctccatgactaaagcatctcactcttcaaccaaggaactctatgagaaatatatgattgctgaagatcttgggcgtggtgagtttggaattgtccatcgttgtgttgaaacatcctcaaagaagacatacatggccaaatttgttaaagtcaaagggactgatcaggt

SEQ ID NO: 97593 - DNA, 1045 bp, Homo sapiens
acaagttctacaggaaaccattccaagcacacaacctcagcagatgttagatggagtgaactgagcactttccttgagtaattccctctaatgcaatggtttctttttaaaaatatttcccaacaagatttgaaaggtcaacaattgtatgccacttcaatgaacctaagtaagggcaagaatactacagaattatagagagaatttacagtcccttaaaagcctatacattattaatccccttccaatcataaagagaaaaaaacactctacataaaatgtgacgatgtgctcattgaatccctatttaccatatgatcctaggaaaatcacttcaaagagtttttaagaattaggctaatatgtaaatcatggtatgtgtcagtaaataaggtaaattcattcctgatatacaaggacaaaggattacagattgagtattaacagtcacttaatattatctttcatattgttcagctggagaggccccaggaatacgcaaagaaatgaaggatgttaccacaaaattgggtgaagctgctcaactctcatgccagattgttggaaggcctcttcctgacattaaatggtacagatttggtaaagagctcatacaaagccggaaatacaaaatgtcttcagatggacgcacacacactcttacagtaatgacagaggaacaggaagatgaaggtgtttatacctgcatagccaccaatgaggttggagaagtagaaaccagtagtaagcttctcctgcaagcaacaccgcagttccatcctggttacccactgaaagagaaatattatggagctgtgggttccacacttcggcttcatgttatgtacattggtcgtccagtacctgccatgacttggttccatggtcagaaacttttgcaaaactcagaaaacattactattgaaaacactgagcactatactcatcttgtcatgaagaatgtccaacgtaagactcatgctgggaaatacaaagtccagctcagcaatgtttttggaacagttgatgccatccttgatgtgga

SEQ ID NO: 97594 - DNA, 1050 bp, Homo sapiens
ctggccaaagaagtagggaagaaatatctactttcctaaagcaatttaattcttaagataataatattaaattataatgtggcactctgtgctgtcctataatatcaggagcccagttaataaagattatcttggtgagtgtggacaagagcaataatgcctttgtgagtcttgaaaacaaaaaatacaaatctcaacatttccttatttgcctaatatctgcatctcactttttaaattccacagatacccctggaccaccttctgctccaagagttgtggataccaccaaacacagcattagtttggcatggaccaaacccatgtacgatggtggtactgacattgtaggatatgttctggaaatgcaagagaaggacactgatcagtggtaccgagtgcataccaatgccacaataagaaatactgaattcactgtgccagaccttaaaatgggccagaaatattccttcagagttgctgccgtgaacgtgaagggtatgagcgaatacagcgaatcaattgctgaaattgagcccgtggaaagaataggtatttatcacagaagcttttaggtgaattattttcttctcacacctgtccatgaattaattaaattttgtcattaactttccagaaataccagatcttgagcttgcagatgatctaaagaagactgtgaccatcagggctggggcctccttgcgcttgatggtgtctgtatctggaagaccacctcctgtcataacgtggagcaagcagggcattgaccttgcaagccgggcaattattgacaccactgagagctactcattgctaatagtggacaaagttaatcggtacgatgctggaaaatacacaattgaagctgaaaaccaatctggcaagaaatcagcaacagtccttgttaaagtctatggtaagcattttacttaaaattggctatacaatgagtagatcctctaaaacaatatagcttgacctatgattgatcacctctctagaaaggaactatgttgattatatttccccaagaaaaaaaaagctatc

SEQ ID NO: 97595 - DNA, 1027 bp, Homo sapiens
acagatgtaatagttaaaatgttctctgacttaagctatatttatgatcatgcaaataagcatgtgcttttctagaccattcataaattctaaaaattcttagagattgtgtgttggaaaattatctgtcatatagttttgaggagcattgtatttatgtatgattcttggagctcacatgatggttctctgcatgagatgaagttggaagcttcgctgggctcactgttaccagctgcattcactgcggtcacccggaactggtaatcacaaccctccatcaggctggtcaccttcagcctggtatcatacaccacatagtctttgttgacacgtgtccagcgcaggctcttcttctcacgtttgtctactaggtagttgctgatttcattgccaccatcagattcaggttttgtccactgaatgatgatatgctctttgccagtcccaacttcttcaggtatgccgggtggtgatggaatagctgtttatgaaaataaggatgatgagaattgcacaaaattactattgataagactgcccttctcccttctccccctgattctattacatttcaactgtcaaattatttaaaagtgttaatacttactgaatgagtttctggctacaattggctctgattcaacaggcacaccagggccatatttgtttactgccctcactcggaatatgtactcattgttcttgatgagcctggtaacgacataggatagggttgggcattcgccttcaacaatcacccagttgagcctgctagtctcgcgtctttccacgatgtagtgagtgatttctgctcctccgtcttcctgcggaaggctccaggctaaagtgcacttctcctgtgttactctgctgacggtgagctttccacatgggccaggggaatctgaaacaggtgtaatgacaagccatgatgaagatcattctttctgcccacactggaaaatgctatataaatgtgagaacatttgacatgcttaccaagcactttgaccatgacagacac

SEQ ID NO: 97596 - DNA, 1115 bp, Homo sapiens
gcctgacaacaggaagtgagtatcagttccgtgtttgtgcagaaaaccgctatggaaagagctcctacagtgaatcttcagctgttgttgcagagtatccattcagtcccccaggtcctcctggtactcctaaagttgtgcatgccacaaaatctaccatgcttgtaacctggcaagtgccagttaatgatggaggaagtcgagtaattggctatcatcttgagtataaagaaagaagcagcattctttggtcaaaagcaaataaaatcctcattgctgatactcaaatgaaagtctccggccttgatgaaggactgatgtatgagtatcgtgtatatgctgaaaatattgctggaattggtaaatgcagtaaatcttgtgaaccagtccctgcaagagatccttgtgaccctcctggacaacctgaagtcacaaatatcacaagaaaatcagtgtcacttaaatggtctaaaccacattatgatggtggagctaagatcacaggatacattgttgaacgcagagaactaccagatggccggtggctgaagtgcaattatactaatatacaagaaacatactttgaagtaactgaacttactgaagatcagcgttatgaattccgggtttttgcaaggaatgctgctgactcagttagtgagccatctgaatccactgggcctattatagttaaagatgatgttgagcctccaagagttatgatggatgtcaagttccgagacgttattgttgtcaaagctggagaggtccttaagataaatgcagacattgcagggcgacctctgccagtaatttcctgggccaaggatggtatagaaattgaagaaagagcaagaacagaaatcatctcaacagacaatcatactttgttaacagttaaagactgtataagacgagacactgggcaatatgtactaacactgaagaatgttgccggcactcggtctgtggccgttaattgcaaagtacttgataagcctggtccaccagcaggaccacttgaaataaatggcctcactgctgagaaatgctctctttcctggggacgtccccaagaagatggtggtgcagatatcgactattacatcgtagaa

SEQ ID NO: 97597 - DNA, 1025 bp, Homo sapiens
tatgtttcttgtatattagtataattgcacttcagccaccggccatctggtagttctctgcgttcaacaatgtatcctgtgatcttagctccaccatcataatgtggtttagaccatttaagtgacactgattttcttgtgatatttgtgacttcaggttgtccaggagggtcacaaggatctcttgcagggactggttcacaagatttactgcatttaccaattccagcaatattttcagcatatacacgatactcatacatcagtccttcatcaaggccggagactttcatttgagtatcagcaatgaggattttatttgcttttgaccaaagaatgctgcttctttctttatactcaagatgatagccaattactcgacttcctccatcattaactggcacttgccaggttacaagcatggtagattttgtggcatgcacaactttaggagtaccaggaggacctgggggactgaatggatactctgcaacaacagctgaagattcactgtaggagctctttccatagcggttttctgcacaaacacggaactgatactcacttcctgttgtcaggcgaactattttaatggatgttcttgcaactgcttgtgaaactatgtgccatgttgtagaggtggtttctttcttttcaacaatgtaattgctaatttggcagccaccatcatattctggaggattccaagaaatggttatgctgtcacaactaacctcatcaatacgtataggacctggaggtcctggtctgtcaaggacaattatagtaataggaactgttatggatccagcactgtttgaaacacataattcataagttccaacatcttcctttgaagcttccttaatagatagtgatgttacagtctttgaagaagaaacattgactctagttgtctctttaagagtctgaccatcttttctccagttcacagtagcttgaggtcttcctttgaatggcacatcaatcttaagttgttctctagcctttacattgaaagtatg

SEQ ID NO: 97598 - DNA, 1286 bp, Homo sapiens
taacggatctgcggctcagggtaactggtcttaccgaaggccattcctatgaattcagagttgctgctgaaaatgcagctggtgtgggagaacctagtgagccatctgttttctaccgtgcgtgtgatgccttgtatccaccaggtcccccaagcaatccaaaagtgacggacacttccagatcttctgtctccctggcatggagtaagccaatttatgatggtggcgcacctgttaaaggctatgttgtagaggtcaaagaagctgctgcggatgaatggacaacctgcactccaccaacaggattacaaggaaagcagttcacagtgaccaagcttaaagaaaacactgaatataacttccgtatttgtgccatcaattctgaaggtgtaggtgaacctgcaactctacctggctcagtggttgctcaggagaggatagagccaccagaaatagaactcgatgctgatctcagaaaggtggtcgttctgcgtgcaagtgctactttacgcttatttgtcactatcaaaggtcgaccagaacccgaagttaaatgggaaaaggcagaaggcattctcactgacagggctcagatagaggtgaccagctcatttacaatgttggtgattgataatgttaccagatttgacagtggtcggtataatctgacattagaaaataatagtggctccaaaacagcttttgttaacgtcagagttcttgactcaccaagtgcccctgtgaatttgaccataagagaagtgaagaaagactcagtgacgttgtcctgggaaccaccacttattgatggtggagctaagattacaaactacattgtcgaaaaacgagaaactacaagaaaagcctatgctaccattacaaataattgcactaaaactactttcagaattgaaaatctacaagaaggatgttcttactacttccgagtcttggcttccaatgaatatgggattggtttgccagctgaaacaacagaacccgttaaagtgtctgaaccacccctcccacctggaagagtaactcttgttgatgtgacccgtaatacagctacaattaagtgggagaaaccagaaagtgatggtggcagcaaaattactggttatgtggttgaaatgcagactaaagggagtgaaaagtggagcacctgcacacaagttaagactctagaagcaactatatctggcttaactgcaggagaagagtatgtcttcagggtagctgcagttaacgaaaagggaagaagtgatccaagacaacttggagtg

SEQ ID NO: 97599 - DNA, 1032 bp, Homo sapiens
ccctgaagccattgttattacaagaaacaatgtcacactgaaatggaagaaacctgcctatgatggtggtagcaaaataacaggttatattgtagaaaagaaagatctacctgatggccgctggatgaaagccagctttaccaacgtattagaaactgaatttacagtgagtggacttgtagaagaccaaagatatgaatttagagtaattgcaagaaatgcagctggaaactttagtgaaccatctgatagtagtggtgccattactgcaagagatgaaattgatgcaccaaatgcctctctggatccaaaatataaagatgtcatcgttgttcatgcaggagagacttttgttcttgaagccgacatccgtggcaaacctatacctgatgttgtttggtcaaaagatggaaaagaacttgaagaaacagctgctagaatggaaattaaatctactattcagaaaacaactcttgttgtcaaagactgtatacggactgatggaggacaatatattctgaaactcagcaatgttggtggtacaaagtctatacccatcactgtaaaggtacttgacaggccagggcctcctgaagggcctctgaaagttactggagttactgcggaaaaatgttacctggcatggaacccacctttgcaagatggtggtgctaatatttcacattacatcattgaaaagagggagacaagccgactctcttggacccaggtttcaactgaggtacaggcccttaactacaaagttactaaacttcttcctggtaatgagtacattttccgtgtcatggctgtgaataaatatggaattggagagcccttggaatctgggcctgttacggcctgtaatccttataagccaccaggtcctccctcaacacctgaagtctcagcaatcaccaaagattctatggtagtaacatgggcacgcccagtagacgacggaggtaccgaaattgagggctacattcttgaaaaacgagataaggaaggcgttagatggaccaagtgcaa

SEQ ID NO: 97600 - DNA, 1047 bp, Homo sapiens
atgatgctggaaaatacattcttaagttggaaaacagcagtggatcaaagtctgcttttgtaactgtgaaagttcttgacactccaggaccaccacagaatttggcagtcaaagaagtgagaaaagattctgccttcctggtatgggagccacccatcattgatggaggggcaaaggtcaagaactatgtgattgacaaacgtgagtcaaccagaaaagcgtatgctaatgtgagtagtaaatgcagcaaaacaagttttaaagtggaaaaccttacagaaggagccatttattacttcagagtcatggctgaaaatgaatttggagttggtgttccagtggaaactgttgatgccgtgaaagctgctgaacctccttccccaccaggaaaggttacactcactgatgtgtcccagaccagtgcatcacttatgtgggagaaacctgaacatgatggcggtagcagagtcctggggtacgttgttgaaatgcagcccaaaggaactgaaaaatggagcattgtggctgaatccaaagtctgtaatgcagttgttactggtttgagttctggacaagaatatcagttccgtgtcaaggcttataatgagaaaggaaaaagcgatccaagagtgttgggtgttcctgtcatagccaaggacttgactatacagcctagtttaaagttaccatttaacacatatagtatccaagctggagaagatcttaaaatagaaattccagttataggccgaccaagacctaacatttcttgggtcaaagatggtgagcctcttaaacagacaacaagagtaaacgttgaagaaacagctacctcaactgttttgcacattaaagaaggtaacaaagatgactttggaaaatacaccgtaacggcaacaaatagtgcaggcacagcaacagaaaatctcagtgttatcgttttagaaaagcctggacctccagttggcccagttcggtttgatgaagttagtgcagactttgtagtcatatcttgggaacctccagcctatactggtggctgccaaa

SEQ ID NO: 97601 - DNA, 1017 bp, Homo sapiens
agcctccttccttttctgattaaaatgtatttttttctttgcagaggcaccaacaattgtccttgatcccacaataaaagatgggctaacaattaaagcaggggataccattgttttgaatgccattagcattcttggcaaaccccttccaaaatcaagttggtccaaggcaggaaaagacattagaccatcagatatcactcagataacttcaaccccaacatcttccatgcttactatcaagtatgccactagaaaagatgcgggtgaatataccatcactgctaccaatccttttggcacgaaggtggaacatgtgaaggtaacagtccttgatgtacctggtcccccaggtcctgttgaaatcagtaatgtttctgctgaaaaagcaacacttacatggacacctcccttggaagatggcggctcaccaattaagtcctatatacttgaaaagagagaaaccagccgacttttgtggacagtggtttctgaagatattcagtcttgcaggcatgtggcaaccaaacttatccaaggaaatgagtacatcttccgggtctcagctgtaaaccactatggcaaaggagaacctgtacagtctgaacctgtcaaaatggtagacagatttggtatgtagagcatgtgagggaattgacatggaaacatttatagcagagtttaggaaatcatggatttctaataaatttgcttccttttcaggtccccctggccctcctgaaaaaccagaggtatcaaatgtcactaagaacactgccactgtcagctggaaaaggccagtggatgatggtggcagcgaaattacaggatatcatgtagaaaggagagaaaagaaaagcctgcgatgggtgagagcaataaaaacaccagtttccgatctcaggtgcaaagtaacaggactgcaagaaggaagcacctacgaattccgtgtcagtgcagaaaacagagcaggaattggtccacccagtgaggcttcagattctgttctgatgaaag

SEQ ID NO: 97602 - DNA, 1040 bp, Homo sapiens
tacaaaaacgtgatgcagagaggaaatcctggtctacagtgacaactgagtgctccaaaacaagcttcagagtagctaatttggaggagggaaaatcctacttcttccgagtgtttgctgaaaatgagtatggcattggtgatcccggtgaaactcgtgatgctgtcaaagcttcccgtaagcaaatgaaccatcatcccatcattttgagttatatccttcctttgttatatggggcttacacttatcatttctcctttgctttagaaactcctggaccagttgtggacctgaaagtgaggtctgtatctaagtcatcctgtagcattggctggaaaaagcctcacagtgatggtggaagtcggattattggatatgtagttgatttcctgactgaagaaaataagtggcaacgagttatgaaatccttaagcctacagtactctgcaaaagatttgactgaagggaaggaatataccttcagagtgagtgctgagaatgaaaatggagaaggaaccccaagcgaaatcactgttgtggcaagggatgatgttggtaaggctctatgcacacatcttcatttttcctttattgtcatcgaaagtgcactcttgtgtcccactcactagcttatctaaaaatccgttaaaagctagaactatttgaaaaagttaatcgcctggccttaaaaataacagtaatttatctctgctattttacagtggctcctgatcttgacttaaagggtctacctgatttgtgctacttggctaaagaaaacagcaacttccggcttaagatccccataaaaggcaagccagctccatcagtctcctggaagaaaggggaagatcctctagcaactgacactagagtcagtgttgagtcatctgcggttaacacaactcttatagtgtacgattgccaaaaatctgatgctggaaaatacacaatcacacttaagaatgttgctggcaccaaggaaggaactatctccataaaggttgttggcaagcctggcatccccactggaccaatca

SEQ ID NO: 97603 - DNA, 1045 bp, Homo sapiens
aaaatcccacatctgcagaagggctgtgaatatgttttccgagttagagcagagaataagataggtgttggtcctccccttgactccacacctactgttgctaagcataaatttagtcctccgtctcctcctggtaaaccagtggttactgacattactgaaaatgcagcaacagtgtcttggaccctgccaaaatctgatggtggcagtccaataactggctactatatggaacgtcgagaagtaactggcaaatgggtgagggtcaacaaaacacctatcgctgacctgaagttcagagtgactggactctatgaaggaaatacatatgagtttagagtttttgctgaaaatcttgcaggactaagcaaaccatccccaagttctgatccaataaaagcttgccggcccatcaaaccacctggaccacctattaatcctaaactgaaagacaagagcagagaaacagctgatttggtgtggacaaagcctctcagtgatggtggtagccccattctaggatatgtagtggaatgtcagaaacctggcacagcacaatggaacaggattaataaagatgaactcattaggcaatgtgcctttagggtacctggactaattgaaggaaatgagtacagattccgtataaaggcagctaatattgtaggagagggtgagccaagagaactagcagaatctgtgattgcaaaagatatccttcatcctccagaagtagaacttgatgttacttgtcgtgatgttattaccgtgagagtaggccaaactatccgcattctagctcgagtcaaaggcagacctgaaccagacataacttggactaaggaaggcaaagtattggtccgagaaaagagggtggaccttattcaggatctacctcgtgttgagttacaaattaaagaagctgttagagctgatcatggcaagtatatcatctcagctaagaacagcagtggacatgcccaaggttcagccatcgttaacgtccttgacagacctgggccttgccagaatttgaaggttacca

SEQ ID NO: 97604 - DNA, 1002 bp, Homo sapiens
gattcatgttaccttacttggaaagaaccactggatgatggtggttctgttattaccaattatgtggttgagaggagagatgttgccagcgcccagtggtcacctctctcagctacatcaaagaaaaagagtcacttcgctaagcatctgaatgaaggcaaccagtacctcttccgagtagctgcggagaaccagtatggacgtggtccttttgttgaaacaccaaaaccaatcaaggctttggatcctctccgtaagttgctttctctgaatacaaaactattgtttgactgtctttaagaatattactttttcatcataacttcttctttgaaaagatcccccagggccacccaaggacctgcaccatgtagatgttgacaagactgaagtctccctagtctggaataagccggatcgtgatggtggttctccaatcactggatatttggtagaatatcaagaagaaggcacccaggactggattaaatttaagactgtgacaaacttagagtgtgtggttactggactacaacaaggaaagacctatagattccgtgtaaaagctgaaaacattgtgggtcttggtctccctgacacaactatcccgatagaatgtcaagaaaaactaggtaatttttggactagcagtattaccttatttctttttaaaattattcatataggtgaaaatcaaaatctaattttttcatgtttacttttcagtgcctccatccgtggagctagatgtgaaattaattgaaggtcttgtggtaaaggctggaaccacagtcagattccctgctattataagaggtgtgcctgttcctactgcaaagtggacaaccgatgggagtgagattaaaaccgatgagcactacacagttgaaacagacaacttctcatcagtacttaccattaagaactgcttaaggagagacactggggaatatcaaatcacagtttccaatgcagccggtagcaaaacagtagccgtacatc

SEQ ID NO: 97605 - DNA, 1050 bp, Homo sapiens
aacttgcacatttgtagatttgtaataagacatcaataaaaatgacttgcctttataattacaaattttagcacccccaacgcttcacctcgacttcagagataagctcacgattcgagttggtgaagcttttgccctcactggccgttactcaggcaaaccaaagcctaaggtttcctggttcaaagatgaagctgatgtgctggaagatgatcgcactcatataaagactacaccagcaacacttgctttagagaagatcaaggccaaacgttcagattccggcaaatactgtgtggttgtggagaacagtacaggctctaggaaaggtttctgtcaagttaatgttgttggtaagtcttatttagtggaaagaatagatcttctgttctttcaaaagcagaaatggcaataacattttgtgccatgattttttttttctgcagaccgtcctggaccaccagtaggaccagttagttttgatgaggtgaccaaagattacatggttatctcttggaagcctcctttagatgatggaggcagtaaaatcaccaattatattattgagaagaaggaagtgggtaaagacgtctggatgccagtgacatctgcaagtgctaaaacaacatgcaaagtttctaaactacttgaaggaaaagattatattttccggatacatgctgaaaatctgtatggaataagtgatcctctggtgtctgattcaatgaaagccaaagatcgtttcagtatgcattatgtttctttttagtgattcaatgcttgataaaactaatataaagaaataaatttctaacgcattttccaacatttgttacaggggttcctgatgcacctgatcagccaattgttacagaagttaccaaagactctgcattagtaacctggaataagccacatgatggaggaaaacccatcacaaactacatcctggaaaagagagaaactatgtctaaacgatgggctagagttaccaaagatcctattcatccatacactaaatttagggttcctgatcttctagaaggatgt

SEQ ID NO: 97606 - DNA, 1028 bp, Homo sapiens
atttcttataatcaatatgatctttttcacagctgtccctggagcaccagataaaccaacagttagcagcgtgactcgtaactccatgactgtcaactgggaagagccagaatatgatggaggctctcctgtgacagggtactggctggaaatgaaagacaccacttcaaagagatggaagagagttaaccgagatcctatcaaagccatgactttgggtgtttcttataaagtgactggtcttattgaaggttccgactatcaattccgggtatatgcaatcaatgctgctggcgtgggtccagcaagtctgccatcagacccagcgactgctagagatccaattggtaagcctggaaaccattccttttttttaaatcttattttccaaaagtgccttggaaaagtcaagaatactaacgtatactggctctttgcagcccctcctggtcctccatttcccaaagtgacagattggactaaatcatctgcagatctggagtggtctcccccactaaaagatggtggatccaaagtaactggatacatcgttgaatataaagaagaaggaaaagaagaatgggaaaaggtaggaaaacttggcactaaggaaatgcactatgaataaactaaaaaatgtcatagttattctcaatcccattaacttctgtctatactttttggattaagaaatcaggaaaatagcataattttaactcacattccaaacatctgttaatgtcagaaatcgaatcaaaagttaagtcatgttattactaatcttttggttataaaccctggaatgtggaataaataaatcaaggtttaatcatttgacaataattttaaagcataactcctgccaagttattccattcagtgttgcctgtaatatctgatccctaaaacctaaaccagcaacaattttcccagagtaaacagttaaataggctgctggtgatgctttaggaagccattaaagcaagaagctacaaagaactattctaattataaaatgtctatgattt

SEQ ID NO: 97607 - DNA, 1025 bp, Homo sapiens
aggagacaggatcaaaggctatgttattgagaagaggactattgatggaaaagcctggaccaaagtcaatccagactgtggaagcaccacatttgtagtgcctgatctcctctctgaacagcaatatttcttccgtgtgcgagcagaaaaccgttttggtattggcccacctgtggaaaccattcagaggaccactgccagagatccgatatgtaagctttaaaatctaaatttaaaatatcttctcaaaattgaagtatattattataaacaacgcttaatacttcctttaattatttttacagatcctcctgatcctcctattaaactcaagattggcctcatcacaaagaacacagtgcatctgtcatggaaacccccgaagaatgatgggggctcccctgttacccactatattgttgagtgccttgcatgggaccctactgggacaaagaaagaagcctggaggcagtgcaataagcgtgatgtggaagaactgcaatttactgttgaagacctagtagagggtggggaatatgaattccgagtcaaagctgtcaatgctgcaggagtcagcaagccttcagccactgttggccctgtgactgtcaaagaccagacatgtaagtaccaatgtactgacaaagaatgtcctccttacagctgccttcctaggtgttcaataatagttcacaattaaaagagctatatctgtaccttaggaagctactatggcttgaatgtagacatgggcacattacttaattactcattccttcaatttccacagaattttcacattcccttacctgttaccttttccctgttcaaaggagatgatgtctgtaatttcctcgctgtaattttcctcgcagtctgttttatttatcagaggctaaagcaatttctctgcatgctcctcaaaagggacagaaagtaaccagtcattttcttagcaactgctgagacccatttatcttcacaatcaagtttttatttctctatatgagaaaagatatatccat

SEQ ID NO: 97608 - DNA, 1044 bp, Homo sapiens
tgagcgatgcgaagaaggaaaagataattggattcgttgcaatatgaaacttgtccctgaactgacttacaaggtaggtcatttgcatataaaaaagaatattcaatgtggatcatggacataactgtatgtgttttttacaaatattaattcataatcgtaggttaccggattggaaaaaggaaataaatatttatatagagtatctgcagaaaataaagctggtgtttcagatccatctgaaattcttggtcctctcaccgctgacgatgcatttggtaaatagatattttatttttagatcggggaatagcacatagctactttggggcaacagggacttaaatatggcactgcaaactcattaacttttcttctttgtagttgaaccaacaatggatttaagtgcatttaaagatggtctggaagttattgtcccaaatcctatcacgatcctggttccaagtacaggctatccaaggccaactgcaacctggtgttttggagataaagtactagaaacaggggaccgggtgaaaatgaagaccttgtctgcctatgccgaacttgtcatttctccaagtgaacgttcagacaagggcatttatacactgaaattagaaaaccgtgtgaaaacaatttctggggaaattgatgtcaatgtaattggtaaggaacaaaacatttatcatctaaggtgatttggcagtattaacaaatattagttcagactattaacagtgactcgtgagtgcattttttttcagctcgcccaagtgcacccaaagaattgaaatttggtgatataaccaaggactcagtacatttgacttgggaaccacctgatgatgatggaggaagtccgttaactggatacgttgttgaaaaacgagaagtcagccggaaaacatggactaaagtgagttttgagcagcactgcatcaatgccaaaaatgagagtaggggaaatcccagaaggttgggatgccatacaaaagtcttatgtgctacaacttcttacctttacctcactgaaaatgtaca

SEQ ID NO: 97609 - DNA, 1042 bp, Homo sapiens
tgtggtgttggcaccaatggacatcattctcatgtgcctaaagaaaagtgccgccgtttatcttcctgcacctcctgcaaagcatctcccaccaagtgtatctccagtctgatcaccatacttgtttggctaataccactgctaggtgaaataatcaaattttctggagcgtttaatatatttgagaagcttggtaaattatctgtagtggataagaacagatttttgtactctagaaacagatgttttcaacataatatgcagcaaaattattctatgcctattccctcctaatttaagggcgtgcagatgaaggctgacatcggcatagaaatgtgctaaatttcaaatatggttgttcaataatatatttttaattgtattttaaaacatccctttgtagggaatatcagtagaactattgaattgatgttgtatttttgcattagctgtcctttaattttgctttccatgtcttgatcttgttaccgaaatgcattctgtgtaatttcaacgtagactacgttcctgagtctgatgatgtcattgtaaataatcattcctcatgttgctctcacgggtttgacattggaggatagatgtgccatcaactttaaatagagtttccatcttttgtcagctctgcatgtcatacagcaagatggaacacaggttgcaagaaagaaccaacgttattcctgacattctattgatgtgttttgagcagcaatgtgtaaccaggtgtttctgcttctaatcttgattctgctgatgaccatttttatactttatggcaaagcctcattgcctcagtttcctgtctggaaaatgagttcatcatctacctcttgggcaattgagagttttcattttgtgtcttttaaacatctggaaaatggaaaacactgagggctaaggataatgatattgtttaatgtaatttgtcatcagaccggcctcctgctcactatttctttttttttagatgctgtttttttagaatattaaattaaaggagtgctgttaatatgtaatcttcaac

SEQ ID NO: 97610 - DNA, 1069 bp, Homo sapiens
ctcctgtctaatgtaactgtcatggaaggttctccagtgactttggaagttgaagtaacaggatttccagagcctacactgacatggtgggtagcctataatgacaagccataaatggaaacaaattcaatcacagagaaaaatcattctgtgagcactaactgaaaggtttagggctagctgattaatattctatgacactgcaactctgcatgattcaatctcacatcagacccctctcattttagtagcagcatagttaatacctttaagaaaaataaaaggtaaccatataaagtactaataatttaacaaatttccaaagcactgtaggttggttgtgcttgttttcttctgtgtttaacattccacatttctaaagattgtgggttgaaattattttttattgtctatttccatataagcatggcatctgcttgctttaactacctttatgcaattgaaaatataagaatttgtttttatttccctttactctcatttacctctttcatctttttcctctttccaacagagtcacacgtgtcatctttgtaacattttgttttactaggatttctttttacaaattttttcaatgtgagaggtggaatataaatatttctgtcacagttcctccaggtgacaggcaataaactcatttttgaaaggtagtataataactgagctgtaaacaatatgatttcactctggagacatcattattttttagcctctttttttcagtaaaagcaaactgtagaatactggttttggatcacctactattggtaacaaaagcagttctttctcaatatgtgggttacttttaaacatttagaaaattctcatccttaagtaaatttatttcaggacaaagttacaaatctgcaaaagccagtttatacttataaactaagattaagtaaaatagcatttattgatcacaatgtttcagtagatattaaatgatcagtttcagttattgtgtgtgcccattgatggtacttgaaatatgaaccagttatctaaggaacttatgagaaaactttggtttctcaaattattt

SEQ ID NO: 97611 - DNA, 1034 bp, Homo sapiens
tatagctatgttaactcagtctgtttattctatggtaaatatagaagagctgaacatgtgaaaagatgggaaaataaaattattcattaaaaatatattttccctaattttctgaagactttgaggaactttaatatgaattataacaccatttcaagatttctaacagggtaaactttttctcaccccaagcttggggtgtttttctccacttatgtgctcaacttgagcagttgtctcagccccatcccgccattccccattgttgacaagttgactaaagttagaaacagctgtgtgaacagtgataccacagcccagcgactatggcactcagttcctttaaaaatatgaccacaagttatgtggggattagatgggaagttaagttttcatattggaaagtgcaggtaagaaaattaagaatggcaagatttttcaatcgctgaaggtagtttcatgcatactgccttccacttgtatctgcagtagtcctgaatttgagttgaaaaaggcacagagatttagttttaaaatggatttccagtgaaaccaaaagagaaaagtgccagcaactttgtcaagggagctcatgtgtcagaaagaacttgatcccatttcacatactcatagtgtcatgaacattctttgaccttataaatcatcttcagtggaagtgcacacgttctgaagcaaacagaaatcaaatcacactcatcatttatcagtcttaaatttcttaatccaaagtagatttaaaatctcatggttgagaattaaagtattaaatctcagcctttctctatcatataggtttcaaatagacattgaactttcccatttaaagcagatgtaatccaatggttatcaggttaatgacagagcccctcttcctttctctagactaaggttttctgatatatgtcacatttcagtagagaaaaatatatgactatattttatatattcttatatataagtagaagaatatataagtttattttccaatggataagtgttagtgacagggcatt

SEQ ID NO: 97612 - DNA, 1021 bp, Homo sapiens
caatttcacatttaaatgacctctgagaactttgagtctttgtcacttctccttttttgtggacatgtagtgcgtgtgcacaccctggactttcccaccacaggcctaagggaaaataatcagaaggaatattttccgtgtcccttaggaaaataaaaatatgtgtgttccagtttatattgtgaacagcagagcccaaacagatggcagtttccacagtggtaataatatttgctatctagacattattatcgttgttatcattattagtctttgggtatagctgcttaaaacttacgtaaaattaaatatgatacgttatactgatttttttctgcataaacaattaaaattagataacatgccagaggactaaaccaagtatagcatttatgtttaaagttgatttttaaacacagtttcactttcaatgtgcttaaagtactgttagaaagttcacagactctgacttgcaatggatttttgagaatgtccagttcagtatgttcatttttcagatgggaaaactgaggagcatatgactttcatgttatgaatatgctacaggacaacagagtttcagctcagggtgttccaggggatcaacttcaggccacagactcatttgttgggcaccaacatgcttatgatttgttaaactcagaattcaccatttacataatatttcagtgccattcaaccactgcatggtctgatgttaaatatcttcttttttttatgctttcctcttctatccctattttctggtatatctaagatgtttgtatgatctgatataatagtacagttcatttggttatttcaaaaaaatttctttcttgactgtgctgtagctaacttacatggtcttaacttcactgaaagcccttagaaaagaactcaatacctcaaggcaaaataaagtgttctaaatgtaatttttaaaaatgtaatgtgatgtgccttagagacaacgaatgatagtttgtgctttatctttgagaaaaaaccatttttttcc

SEQ ID NO: 97613 - DNA, 1066 bp, Homo sapiens
tcccagcactttgacaggccaagacaggaggatctcttgagcccaggagtccgagaccaacctgggcaacatagcaagacctcgtctctaccaaaaaaaaaaaaaaaaaaaattagccaggcctggtgccgggtgcctatagtctgcagtttttagccattaatacttggaagatgaggagagaggattgcttgaccccaagagtttggggctgcagtgcgctatggtggtgccactgcactccagcctgtgtgacagagcaaaggaccttatctcttaaaataaataaaataaataaataaataaataaataaataaatatgtttacaaattaaaaattcagaaaatgtagttttaggttttatataggtttttattggaatctactgttctttttctttaaaaaaatgtgtttaagtgttcttaactctcttttttcttttttaggtagagatgcagtttcagagcttaaaagaattttatgaaaccgaaatccctcagaaggagcaggatgatgctaaagccaagcattgttctgactcggctgagaagcagtggcagctatttttaaagaagagttttataacacaagatctagggcttgagttccttaatttaataaatatggtaagaatggcattaaatggatcacaccttctgcagggatactcatcaaagtcaaaataataatttcaaaggttcagctgtctattaatcagcagttctctcctagggagttctctttagcttcattcaacctagaccagtcctgaagcccaacatttaaatgcttgcttggcctagaactttggttagtttataacaggaaggctgttttaactattaagaagaaagtgactgtaatccaaatgcaacattgttattattaaatagagtcctcagaagtccacccaaaagttctgtgttattttgaaagcatgcaacaaggtcctttcaaaatttctaggggctaaagacaacttctaagatgaatcttcttttgaagagtttcttaccatagcagatctctttgtagtgaagatccattgcatttagaaaaataccc

SEQ ID NO: 97614 - DNA, 1045 bp, Homo sapiens
ccatataactcaagaatctgatatacttcctgttctttttagagtttcctaatgtgtttggtgaatgaacctatttgtcaaatcgcttagcagaatatacaagtaagtgtcagttgtcgacattgactaatagttgattggagaaaagttcctctaattatcagatgttactaagacttatgagaacatggcatgaaatatgaatatagcacctattagaataactcatctcgatcctccaaaatattcatccttcgggattatagattatcttatttattatacttctagtgtgttcacagaaaacaagctaagctatggttgatatttattgatcaccccaaacgtatttatcattgttaagggaatgtagtttgaatcagagataaatatacaatatgtttcaaaaacagaatgaggtgagcctgtatttacaggacagctgcaattgaacccaaaactgtaaaacatgactgattggtcataatgtatcgtgtcctatgccttccatttccaggcacatgatttcattgaagaaagcaagcagaggaaactgaggccaaatccattttatgaacatggtctgatttttgggtggtcagcctgaaagcaaagatgaagcaaaagttggggtggccaaagaaacacacaaaaagtagttcgaaatgtaacaattgtcatagcttccgttgtttctgccatagctattgaaacattaatgtcctttaagaagatgatgttgctttttcaagatatttacagtgatccatagtaatgcttatagcaacatcattgtttcagatgcaaacaaaataattaagcatggaatttgtatacttttttcatttatatatacgtgatatatatgggatattaacattttcaaaataaacacattttaggcccagctgatgaaaaaaaaataattaaaatggtccagttgttgtatagattgaaattttaagaaaacctgcccaagtagagtacctaaaaaaatactatgcagaaggaatttattgaggtaatataaatgaattcaagtaat

SEQ ID NO: 97615 - DNA, 1109 bp, Homo sapiens
ctacaatatttactacaatttcatgatttgaaaatcgaatggcagatttttgatatactcagcatatctaaatattctctgaatcttatcagaaattataaaaagaggtgtctttgtcagtttgagtttctataacaaagtaacatagactgaatggcttgtatacaatagatatttatgtctcattgtcctgggtgtgagaagtttgagatcagggtgccagcacggtagagttgtggtgaaaaccctcttctgggttgcagactgccaacttactgtatcctcacatggtggaaggggcaaggcagccctctcaggcctctttcataaggtcactaatcatctcccaaagccctacttcctaatatcatcaccttgggggttagatttcagcagaggaatttcggggggacacaagcattcggtccataacagaggagatgtataaaataataagaataatctcttgcaggaatggaattctgctgttgagaagctgaagagtgaggcactgagaattctgctgtcaaaggactacgtggagaaagaacacctccagctctctcaccagaaactcagtcagcttcaagaagaatttggtcaactcatggtggaaaggaatacctggttaaagaaggcgaatgaattttttaacagtgctaacaaggtcagtgtgaggtcaagttgataattttcggtaatcaggcagaccagtaaaagacccattacttcaactgactggagcacatcacagaagtcaaaacgccatgtaaaatttcaaaactgatagcagcaaagagagcttttaacatatattcctattatggccattatttgattctcaaaactgaaagactgttttcacatgtaaaaggtgactttaaaaacaacaaacaaacctcgtgagggttttttgtctttttgttttgtttggtttggtttggttcattggatggtttttgttgttgttttgagaaagggcctggctctgtcaccctggctggagtgtagtggcgtgatcatagcttactgcagcctcgacctcctggactcaagtgattgtcccacctcagcctcccacgtagctggaatcataggcacatgccacc

SEQ ID NO: 97616 - DNA, 1747 bp, Homo sapiens
tcagatttaagagcctttttaaaaaagtctatatttgaggtttattgtggataaaacataaacagaccctcccttctattaagttagcctatttcatttagggaaatcaccacaaaaggtaaacatcacaacctaataatttcccctgtagctgagttagatgtgttgagatcctgaaatggatctcaatggattgtgtagacaatgaaaaagtaagtcctccgagaacattaagataaactaggaccacctggtcagtccatggcacaatctgattgtaggcaaattgtgttagatgcaagtattttggccagctagacttttattaaatttaatttaaaatggaaacaccaaccaggctctgttacttaactagaagaaaacgtgattaataggaacaagaaatctaagaaaaacagggacaagacactaaagaagaaaatggttcttggaatacacaaatcttgggaatattttccccagaattcctgtgtaattaaattttcatctatgttgaaccaaggaagaaagaagaaatgcatttgtgctccaatcactattttgaagatttgtttatgagcacagtgtgttgtgatttcattttcaaattgtattttgccacatagccatttgcttcagtatttattagcaacaagcaccctgtgcttcacgctgctaaagtgctgcttagtgggtccactcagtggccaaacaccgaagagaataagggaaacaagagatttccaagtcataggctattttcctgcaactttaaaaatatctgaatgaactaaaataaacgaactaaatatctaacactaaaatatctaaatgaactaagataagaaagcagcagctaatactcagaaattaatttggtgatatctgtcacttctattatagacttgcaattccaattctggtaaggttgatttctggatcaaacagccagtatcccacattttaggagggcatgaaatccaggaacttgaagcacagctaatttgtcactgaattaacagatgagtcactagagaagcagaaatgtaccaactggtggtgactgtcattgcactgaagtaaaagcaaggctcaaaaagcaaaatcttcttcctgaagctacttaacaagcttggaataaaaagtgtaccactctagctggagttctttgctcttacccacaagctctccctggttcagtcgcaatgattttctaccatatgtctgggaggtgaaacagcacacttctttcatctctaggtgaaatgctaaatcacagttcttcctgtttgcaatctgtgcctttgctggactgcatcatagtgagggtgaagtttaaatggcgtgtagacactgaactcagcaagcatgggagactgaggcaagacacttctctccagaatgaccctgacatttgtataggtcagcatagaaatgcccctgaagggagcatgagaagagactaccacccaatttataatccaacttgacataatcagagtttcaacttctaaagggctcaatgccactcttcaaaagcataaacatttctgtaaaaaaaaaaaatcttaagcagactttcaaatattctatgattaaaattgccaggtttgttttaccatctgttaatacaatcatgtaaaattctatgattttgtgtcaatgagttaattctagttgttctgaatggaactgtagacttgagggttaaacaagaaataggctatgtctaatgagatggtctagg

SEQ ID NO: 97617 - DNA, 1175 bp, Homo sapiens
atgtaaaaaaatatcccaataacattagcaaataccactgtgcattgacagggcttccagaataatgataaacaaattaacagcttctacaacaataactatatttttctgaatagttactatgtgccaggcactatagtatgtatatgagatccattatctaaattatcataaaacccctaagggggaggtattattttctccattttatgcatcaaaacaaataaaacaaaaaggcttggaaatgccaagtcacttgaccagtgtaatatatcttgtcagtggcagatttgaaattcagttctaggttttgtctaatacaaaggcccaagctcttaaacattatacattttagctttctaaaaaattttttttctacactgagatgtcactatgagtcatcacttttatgacttccagatataatttgattgctgttccaatttacatgtcttttgctctttaacttgcttcagatttctcagttttacaagaagtaatggctaccagccaggcagccacttataggtatatagaatgcattaaaatgcaagcatgaagtgctgaaagcaagatgagtaaagcaccagtgttttggttgaccttctctccattgtgtcttgttatttgaaaatcagtgcgtttatacatctgggggtctgtaaatactttccaaaattctttacagaggctccatattgatccacaagaaaacagaagtccgtcatagtagatgggatgggaacagtgaataatcactatcaagatttagggaactttgtatattaatattttagattatgatagttgtaagtagagctaagtcataaagctctagaaaacaatgggccaacactactagacagtagttgaatacaggctagacaagtcaaatattcacatgtctgggaggttaggagtaggcaggatgaggatggaggcagtagattgcatttatttagacttaaatcttttcatggggatcatgacacatttgtttcagtttcttgcttctgtttgaacactccagtgtcttgtaggcattcaaagtctttggtttgaatatttgattgataaaaggtgcacttacagaagactgttgactaataatgactgattattttttaatttcttaaaatttttcagcatttggtttatctgtttaggaggttaac

SEQ ID NO: 97618 - DNA, 1053 bp, Homo sapiens
gcatctttgctgactttcctttttctccatctcttttcactctgtgatagatgtcatcccatcactacacacacaccacacacaaagatctgcctcactcctctgctgagttctatctcctctgggcatcaagtacctagaatgccctatcaaattaatgggatgaccatgaacacattgctcagatgaaactggaagatagaaactgggaagaaaggaaaaatattctaattaacccctttaatccatcattgcccagaaccaatttccagtgcatacttcgaatactttttgttttccttcctttgtacatctcctcagcttgtggctcatgttttcatagttttgcagggaccatgttctacataaatgtcctggtgcatcatttactgtacttaccactcaggcttctggacagcagctgacataatttaaaagcttataaaaagtgcacttagaatatctatgcagctgtctgcagtagctactcgctgggcacaatgactgatttactgggtggcagaatattatgattgacatgctcctggttatttagggtgtcttattttgtcatcagaaggactctgagagcctattttgtgtgcatcccacagcatacatggtaaatctgatcgaagagtctgctcctgtgtatgaatacctcataatgagatgtaacaccctcctgatgatctacttacttctgagttttatgccaacttgtttttatgtttctttccagggtgcatctggtagtaaaaatttgtagatctagagagtcagcatgatttaacaggcaggaacgtgaacaggatacactgaacattatcgtatgtctttaactacattctcctaaagggaatagtattgttttacaggaatagtatcttttgggagttgaaatagtatatgccaaatctagaagatgaggtcagtagataccgtttaaaaatcaaaacaactcactctttcccagctttcatcactgctggcatgtgttagatgacaagtctttgactcacaaagtttaataagattatctgaggttccagg

SEQ ID NO: 97619 - DNA, 1085 bp, Homo sapiens
tagttaaatacataaaattattattctaaacaggaaaaaggattgtatgtaaagctgttcataaagtaacaagtttgccttaaaataacatattttagctttcctactgcccatcaacagagaataccgggatttgatactggaatttattgaggagatactgataccttccagttgatttcagtaattcacaaagggctccaaaattcaacagaagaaaattgtgagcattgtcctcctggaatctctaagtccaaataataacaggccaataactagatcagtcccagaatacgtctaaaaatggaaacccgatccacatttttggcagtaattgttttttcctgctctcctcccaagtctgcaggtacaaacatcagcaacacagctttagcatctcttctaatgtgcattagaatcacctaatggaccaaatggatatttcaaatctggtcatcgctagttaagtccagagctcatttgactgtattgtctaatacaaaataaaggcaactggttcccctactgtaaaaaaagaaaaaaaaacccaaagccctatggaaacatgccttcaaaatcaaagcaggcattagaactgtcacctgtgaccatcaactacaattgaaaacatttctgtatatgtgtgtgtttttggtaattgccagagagactgtcaaaaagtcttgggttaaagaagataaataactgatgcctttttcctttatcagttttttgtacttaatagaacctggttattcagcaagttctgcacatggaaaagaaaatgaaagtaatttgatgagattttcatctccccttaagcatttctgttaaggtcgtttgaattgcttattgctagctcacctcctccagcatattttaaataaagataaaagagatctgatttcatattgtagaacaaattgcagaaaaataaactgcagtggcttatggcattctgatgtgttgctttgggctgcagcagaagttcaccttcttgccgcctgagttgtttatccttggccatcagagagcattttctaccgcttgcatgacccatctttcagtcctgtctttggcacatg

SEQ ID NO: 97620 - DNA, 1098 bp, Homo sapiens
aagtacccacaggaagtatagagggagtcaccaacgaatgtgtacatgtcctgctaaactgcaggcttcctgaggaaaatggccacgtactcccctgacacatggccctggatttctcacgaggttatgggttcagaaaacagtgtttaattatgtgttttggattgagggcaaccaggccagtaagtaatccggaaaccatatttgctggaaaagactttaactaactaggtaattttaaccccaaggagagaagtcaggagaaggtatattattccctctctttcaaggattgttatgtggtggagggaaccaacttgttctgaaacattccagggggcagaaatatcaacccattaatcctggttctaacttccgtagtgttaaagaataagtttcttacatattagggagccttagcactgctgaataaggagaaagcataggtgaagctaattgaaataaagtgactattaggggtaagtttgattatagtttttccagcttttgtcatcctaacactcatgttttgtactactcaactgattaacatctcagaaacttactagaatggctagctgcacttatagacatattttatttccttaaatttaaaggtaatagatatgaagcactcaactaaaaaatcagaatttcaccctttaatatgcatttcaaatcagctaatcttaatcatatcccatggaattagttggttaataaattgcatcaacttcatttttttgttttatgaaaacaaaaacccttgaagccaccactgggcatatgaactgggaacaagtatcctgaccagagttctctgtcatctctgtgcttcaagtatcacacagaagggcacaaactctcacaataaatatgtcatcaagatggaagaatattttttcatcataaaaataaactatgtttcctgtcttccactagcatttttatccatctcttcagactaaggacacccagtggactcttgaaggctggtacccctgaaaagcaagacatcagtttcactgtcagctggatgccaaagaagtgcaaacaaagcagcatgtgccccatataaactggcccacagtgccgcag

SEQ ID NO: 97621 - DNA, 1050 bp, Homo sapiens
tgtaatcccaacactttgggaagctgggagggtggatcagttgaggtcaagagttagagaccagcctggccaacatgccgaaaccctgtctctactaaaaatacaaaaattagccaggtgtggtggtgcacacctgtaatcccagctactcaagaggctgaggcaggggaatcacttgaacctgggaggcggaggttgcagtgagccgagatcacaccactcactccagcctgggtgacagagtgagactctgtctcaaaggaaaaaaagaactttgcgttgatcagccacttcagtgaatttctggcagccagtggctgagaaggagatattcatctgcttcaagaagcagctgattgcctccgaggtgccacaaaaaagtggtctccactttcttacatcaaactccgtaatgtcttttgtcttcttggctctgttaatcctgccattcctgcctgtgccccccaaggttctctgatttccagatgctttgctatctagcacagccctccatctctttttacctcctcctctgatctttttagttcaactttatgattttttttccacctcaagctgctattctcttcttaccttccacaaatgctgcaaccataagcctggaaaggcagaagtggtttctagccagttggagtatattgactccacagttcattggcatagattatctctggtgttggttgctgacactgcagctgcacatcagcacatttaggtgatactcccaagactacactcctttcttcgtttcctctattaagctgtttctcaaattgtgcttctcatgtccctaagagttcacaaatatactgtgagagatgcgtaagtatctaaaataatctcaaattttgatttaaaaatatttaatatatgctaccaaatttcaatgcttacacttgtgcttgtattttcatttcactggtgctaaaggaatggcagtgtttgacttttttcatattttctcaaactggggatccatagcttattctctgagttcttgtgttctcaagattgagaaacactgctctg

SEQ ID NO: 97622 - DNA, 1047 bp, Homo sapiens
tacaagaactttccccatggtgaaatttgcatcctacctgcccaagtggaatttcactatttttattgagttcagttttgtgagtgagagaggatacagttgtgtaaattattctgtaactttataatattcaataatacgtaatccattgtatgttttcctcacttgggaatttttaactcaaatccaatatgccaagagagaataatttatgctaagaataaaaaataaaagacagggcatggatttatattagatctgttgtgtttcaatttaagtaaaccccatctctatggaaagaatggaaaaaaatagaaaatagaaaaaagtgtttacagtataactggaaatttaaacgatatattaaaaatgagaagggtgaagaggaaggaacaagaggaactaaaagtgcattttatttaatttttatttttagtgtggcaaatgggtacaacttcaactggctgaatcacagcccaatcttctagaaattggcagcagtcaagatgaaaccaaaaaacttcttcatgatcatgaacttcttttggccaagctcaaggtaagatactaagatgtgaagcagaaacaaaattaaagagacataaaaaactatttcttatacttcttgattcctctgctgttactggcctagggccactttaatatggtaccaggtagataatggaaaaatcagtagttatttatgaacaaacagcatcagagagaagtaacaatatttttaaaaattttccctaatgtgatagaaactatggaaggataatattttcactgtggagaaatgagtaatttttttttcctggctgcctcagtgggaaaaaaactccatcattttttcatttcatgcattacaccatcaagtcacaaaaacagatccacaatttctattgttaatgatacctgctggtaaaaataatttagaagacttttcccccgttggactattgaaaatatctgattctgtgcttagtattaagagttcttgaaaccaaataatacttctggtaaaaccagacatactattttata

SEQ ID NO: 97623 - DNA, 1309 bp, Homo sapiens
tcaaatacattaaaaagttaaaataattttatagtgtactcactacctagatgctaattagcattacctatgcttgctttgtcacatatccattcatcatttcatattattatttgatgcattttaaattgcatatcattaactagagttcattgttggcttttttacataaaattagcatgcaatgaagtgcatagaaatatgtgttcactgaggtttggcaaatgcatatagtgctatggaaataggaaacgttatcaccaccctagaaagtttccacactgccctttccagtcaattcctgtccctacttgaccctcaaaggcaaccactgttcctttttctaccataagatttttctgttctaaaactttatataaatagagtcacgcaacatgtacgcttttctacaaggcttcatttttttattgctgttcttttttattgctgagtagtattccactgtatgacaatattacagtttgttttcttaatttcctattattgatagatacctgggctgtttccaggattggccattataaataaagctgctatgaccattcttacgtaagtctttgtgaacataggttttcatttctttgcagtaaattccttggattagaattgctgggtcacagggtagttttaaaagaaactgccatacctttttccagttcagttttattgtgccctgtattttgtattttgatgtgcataaaggtgtaaactatttttatgatccatattgaagtattagaagaagtgagtttggaataacaatggcattgttcatggtcaaggatgacaattggaactatctgaggaaagcaaagacctgtctgccccagacagctcctcaaggggttcctatgcctgaaactttagcaatatttcactccttgaaaggttaaagcccaaccatggtgatatgttagctagaagaaacagcactggtttgtttatgttactaactttcaccacccgttttcagtaggtaaagtaagactgatcattgaacagaaaaggttatttctgtgatgaggttgagggggtagtggaaagcatgtattgctagtaagccccaggtacagctatgtgagagagagtcacctggacagggaagtcccccaaatggtggccagaagagcagaaaacggggtgggaaaaattctacctcacagttttgcataggggatagctatgcttttacgggacattttagcgtttaaaaatattttcaatattgtctctttattcaataccacccagctgtagttttttcacactctgatgactctcttatcca

SEQ ID NO: 97624 - DNA, 1511 bp, Homo sapiens
attatttatttcagtcttcatgatggtgctatcacattctacagttgtttatgtctgtacccagtaagctcttttgagggaaggaatcttgtcttctcctattcccagtcttgctcatgcataacagatgcccattcctcctaaatatgaatgctgtattataggcattagtaataatccctgttacattgcagtctgaagtatgttttaaacatacttttttaaagttagaactgacttacaagtgaatctattcttagattcttagatactaactactttagatatttagttatactcaataactaaatatcaatactcaatatctgtttcttctgaatttcagagtagttagaatgtttttcttaagactttgctagaaaggaactggtttgttagtaattctgccatcaactcatggagttataattgccaaatgagttaatttttatataccttaagctatcttgcctacaaaaagtaaaataaggcaggattcataaatgttacttgtaaattgagtgtttcacatgaggccaagtatgattttaacataatgaatatcattgctcctcatctgtaaatttgctgctgctttcatatgtgtatctgtacatagagttatgaatgaaaatccagtaatgccctaaagcaactttcttccatagggtcaaagctcacttaaggtaaacgtgtgaaaaaagtgactgcagtgtgtttgaaaccacaagctgtttctatgtcataaattaacatcagcttgcaagtctctgaaagaaccactcatttgtaattggtatatatgtcacaacctcccacattcctttagcccatctcagggaattattgaaacgctggcagggttagtttcattttgttttggtttttttgggtttttttgtttgtttgaggattttttttttcttttatcatttgtttgctcctgtgtaagcttaatatataatggcagtttggcatctgttcttcgcacatgtctaacccagcagagttatgcaaaaatgatgacttcattttaggtcaaattggctttgttcccagtcctcattgttggtcactttgttcagttctggtgactcattggtgatgttgatgaaactgctcagcctgccagctgggatattgatggcaggtctaggcttcattgttaggtagaagattgaatacttctcactttatacaaatttacattggctattgctcccatgtgttagctagtcttaacatgtttgttatttcgttatcttattagctgacatacggagtggtattattagtgtcgtactccttagcgtgagcatgacaattaagttaccttactaacagtgatgagtaaaccatactctgatctaaacccattgttaccaatgatgtgattatgaagttagctgaatctatggtctacatttgaagaaatagttcagaattctctactacattgtaagttacttgctaatagagattgggcattattatgtactactccccttctc

SEQ ID NO: 97625 - DNA, 1046 bp, Homo sapiens
tcagtgtaatcctttatatcagagtaatctttcaggaactaaaatagcaattgttaataaaatttagtttctcattatagtctaaaagcaaaataaattctgaagtagtccaataacagaactgtatgacccctttagaaataaaatttatcatgaaatgctagttcttttaagtttgtattaagtttaaatggtaaaatgcatataatttaaattttatgtatttttatttcagaacattttttaaaatattaaaaattattttttagtcttgtagtcattacaaaattataaacgagttgtatactggttcctttttgaggtctacaaacatgctcgtgtatcttccaatgcaaaaaaaaaacccctcccttttaacctgctagtttttccagccttcttcactgactgacagacttcttggagaaatccacatccagtgcccctacatcctcatcactcactactcagcaccttgcagtctggttttacacagcactctactgaaactgttcttttgaaagtcagcaatggcctcccagttaccaaactgaatggtttttttctccgtctgaatcccttacccttttctctgcaacatttacaccattgagcaacctttcctagacagtgtctccttccttgaagatgctatcctctgaaataactgtgagtacagtcgcataaccctaatttaagatgtgcctgctgaacatgtgctctctcagatcctgtcctcagaatgcttttggctcttttctcggtatctcatccttagagtttttattttataccaatgttctggattacatacctggtccagaaatctagacttgtacttctttttaattgcctagttgacatttcaaccttgattaaagattgacaatatttatcaccttttcctcctggaacaatttaggttaatggtgcagccttttttcctagtcaaacatgccaggaagttcagggcaaagttcaactgctccctcttgtcttatgtggtcactgcttctgagaacatccaggaagttctttctatactt

SEQ ID NO: 97626 - DNA, 1102 bp, Homo sapiens
taactacacatgatataacctttataccatcaatatatttttctcatcatgtcttaatgtattttatgccattttaaaaaatgtttttcctgctgaatttcctgctcaaacagtatgatcaccgatgaactgatatttacacataggctatctcatgtagattttttatggtaaatttttgcttctatttgtattcactgcagttaatagatttgtattaatctgaggtttttctgtgtgttttgatttttagaaccgaacaatattttgggagtccaagtgacatggcttctactgcagaaaacatcagagacaggatgaaactagttaatctcaaaaggcagcagctgagacatcctgaaatggtgaccacagagagctaatagctaccagctacctacagatttgcagttcataatcccgcatgttgtcaacatactacagcattagccaccacaccttaagatgcatttcacagccaaaataagtctcatttcttttcatgacacatttctctttacatgttaacaccttgctactaccaaggcataattacttaacatgcttcgaggctgtagattccaagtatcttaaaagaaggaactataaacattgcactgaaaacttgctttaaagctttacctgacctgtcagtttgtagacaaacaactgataataagctttgaatggtgctaataagagtaggaattctctctattaaaaagaaaaaaaaaagttgcccttcctccacaggtgatttagtaaatttagacagtagttaaactcttgttagtagacagtggtgtcctcaaaattttactttgtaattcttcagaattgattatttttattgtgtcaatacagagaaagcctttcagatctttgatatatcatagtcattaaaagaccttttcctatttgtattgataatgtattaaaagttgtttgtgcttaataaaagacttctttaaacatcttatttaatttagtagttacatcctatttccaaacatgagtgccttatttaaaagggcattcttaggactgtgaggatggtttaatatttgttttttcatggtggttgcatgtattttagacagga

SEQ ID NO: 97627 - DNA, 2849 bp, Homo sapiens
tcttcttggaataatgtaggagacccttcataatccaattcttgcataattttatcttctataacattcccataaaatcacacagttgtttttatctccctgaaagcatcatgctgtttcatgcatccatgactaagaatacttgtttccttgttttctgctcagtgaattcctacttactcttcaagactcagggatacttactttactttaggaagcctttttggacttctaaggcaagttagtcacttgctcctccctactctcataaaacattttaaatagctttataatagtacttataacatctctgcaaatgggagcatcttgatagtagagaccatatcttatattttccccagcacacattatctaatacctgaatacagtatatgtatgataccatcttcatcaaagtggcctacattgttttttagtttcatatttaaaaaataattatcacttcccttcagtccattgtagaattactttaaccaagttgaattttaatgtcatgttatagcttttattcagagcatctttatttttttttaaaaaaaagccttgtgatacctacttctatattgttattaagctttctttaaggacatcaagtatagtagagcacagtgtctggtaacatattatcggtatttgagactgcagtgggagtcccccatcccacctgcagtacgcagaatttcatggaaatgaaggaaatggaccagagttaagttaggttaagttgccttaaaaatttaaatggttatattatccaaaaagaccacaatgagattaaaaaaataatttgaattgtgtttctctacacccagaggtcagtagagtttttttgtttttttaagccctccatctagtttttaagaatgtagatggagggttttaaaaaaaatcagaattaaatattattttaggtactataatataatgaaaagcgttaatgtttaaatgtttctttagctgggcatagtgatgcacacctgtagtcttagctacttgggaggctgggatgtgaagatcatttaagcccaggagtttgaggttatagtgagctatgatggtaccactgcactccagcctaggtgcttgagtgagaccttgtctcaaaaaaatatcatcctgtatttgagaaacattacacttttatccttgaaacttgtttgatgctaaacagcaatggagattttttttgggttttagtgtactattgtccttacattttgctttaatattttgcagaatccatgctatctttaagagggtttgtcattgagtatcatttgggtattttgatgttttgatgtaacattgatataaatatccctaaaattcttacaaatcaatacaaaatacttgcattctccattgtttaggactaagtattttagtgtactataaaatacatgtaccaaatgatgatgttacaatagtaatcaataaaacagaaatgatgagttaaatttatgtttgggttcattagatgtgaagacatggtagatgtgcgaaggttaaagatgcttcagatggtgcagttgtttaaatgtgaagaagatgctgcccaggtaaggagcagtcagctacattatgtagttaacttttcttagaagattgattttatctaactacaaacaaaagtgtacttttcatggtcctaaaaaagtaaattcttgaagtcaggttctagtttatctatcttgttgaagaatacactttggtattcccagctagttgattgatctcatttaacttaattttctcaatgaaatcctctataatcctctattgagctagagattgggatcgtttattatttattattgttgattaggttgtcagttacatccaggataaaatctggtggagcacactgcattttgctctcttgcatctgcaagagaaatttcaataccagataaacaatttgatatattttgtcgttatcatcagagaacatcatttcagttagatatagataaaatttttgattttatgtagtaacacaaatctgtaatgcaatcctgatggatctacatacagaaatacatgatcttttattatgtgatattaattttaaaagaatgcttttcttcagtatgtcttgccttcagatttaaagaattttgaggagtaggacaggtcattaattcatgtagcttatcattgaatgaaataagcttttaagactttaggttataattaacggatttattaatcacatgatagtaatctctgtataaatgacattttgatacaataagtaaagagttctgaatccagcttcattgttatgtctttttgtttaggcagtagaatggctaagtgaacttctggatgctctgcttaagactcacatcagattgggcgatgatgctcaagaaacgaaagttttgctggaaaagcatagaaaatttgttgatgttgcacaggtgcaaaactggttatcttccttttccacaagctcagtgtttgaatagctttctgcatgattataatgtaactttaccttccaagtacaagaaggttagttttgttattccagaagtgtcacagaattaagaaaatgtcagctggtgcatcaaaactagcctgcataaacttgagagggtttacgtttccctgaatacatgttctgcatggtccctctgatttatgctatgtattacggcatttttaaggcaatccaactgttcatccacagaagttaatatgaaatggatgttaatatcagtaaataagaaacctcactttctgcatcacactagtgttagcataataatacagaacttttttgtggtgaaaagtgtctttttttttttttttaagacacagtc

SEQ ID NO: 97628 - DNA, 3799 bp, Homo sapiens
tttatctggagaaattataaaatgtaatctcttccaggaactaatttgagccttagtttactttgtaacatcttgattacaggaatggtttgcagtgtatgtggaacttaatcagcaaattgcagcactcttgaatgctggcgatgaggaagatcttgtggaactaaagtcactgcagcaacaacttagtgatgtttgttatcgacaggccagtcagctggaatttaggcaaaatctcttacaagcagctcttgaatttcatggtgttgcccaagatgtaagtgtctattctgattcttttcttttcttcaaattatctgaacacttacctacacgtaatttttttcaggtttgcatgcctcctaaattatttttctgaaccaataaaatgaattactggtgggggtaatgagataaaattctttgattttttttaaaaacaagtattttttaagtcattctgcatgcaattcaaccttttattgtctaactagagtgttccaatctagtagaatattttattttgactccttctcaatgtttatgctttataacttagatggaaatggaagtctcaatacttttttgcattctgctgacctgaatgtacttctttgtcttcctggtgcatgcatctgtgtgttctgtcttccagataatgcatattctaatgattcgtccttgtcttgtaacagtgtagtcttttcaagtgtaattgtgataacctcattagatataaacctcattaatcattaaacactttagatgctgattacatcagggttatctctttggtgtccctctgctttagttgtctcagcagttggatggcttattagggatgttgtgcgtagatgtagcaccagctgatggagcatcgattcagcaaactttaaaactgcttgaagagaagctgaaaagtgttggtaagcagattttaaaaatgctgaaacataaggtttttttttttttaaatatcattaccatggttagacaattaagtcaacttacactgaactaattagtattattttcaggaaacagaaaaatagtataaaaagattttattcccttgaggggttataatttatgctgaaaattttatttttcatcgttagttagtcactcctcccttcactgggcctttacccttgcctgtttacccagctatatctacaggtgctgtgtcttgcatatactatgaacaattatttgtagtgcatgcatgaactgtaattagctgtgaaatgttctgtggtaaatcctgtatgcccaaaattgtgttttatgcaatgatttttgttgttgctttatcctaaccttgtgaaaaaatagttggtttggttttttggttcttgtctcaccaaactgggaatattgtcagattacccattctccaaggagtggggtacatttacattaaggggtccagttacattaagctgatgtaggcttgatgtcatttgacatcaaggcctttagaatttttctacagcaggaagcacagtgaactttcctaaaaggtcaggatgtgacaatgggaaggtggggagtcgtatcaaggggggacaaaaggggaaatggcaatggaagagaggaaacaggaacttaaggcagagaactagtaaaaagtggttgcacatgactaaaccaaattattgaaaactgccttagggaattggtttgaaaaatcacacttgtactgacattttacttgcttacagcctttgttattttatttttttgagatggagtcttgctgtgttgcccaggctggagtgcagtggtgccatcttggctcactgcaacctctgcctccccgattcaagtgattctcctgcctcagcttcctaagtagctgggattacaggcacctgccaccacgcccggctaatttttgtattggtagttatagtagacatggggttttgccatgttggccaggctggtctcgagctcctgacctctggtgatctgcccacctcagcctcccaaagtgctgggattacaggcatgagccagcgcacctggccagcctctgttattttaacagatggtatgcataatacatatttagtgtttaatatgacaaatgaattttcttttaaaatattagttttcttgagccacagtctttgtttaaaaaaaaaaagttcctttacacatgtaatttggagaattgtaaatataccctaattgttgcttcctatggtatagaagctagactgtatctttagtcacaatgttcaacatcctttgacattgatgatacattgctggagtgtcttaaaattttgcaaggcttatgcgcttttttaaacaacatgtttgccttgttctcctataagttggacagcataaaagcaggaagaaaaaacagaaaattgttttctattagaaataggaattttcatatttttcttctgctttcattttttaaaagtaattattgtctatggaaacccatgttttcaaaattccctttagggagaatttggcatgagagagagctccaattcgagttacatttaaagggttttattgcttgaaatgttcataggatggagtcttgggattccatcccaaggtggtttactgtacaaagctcctatacttgggatccaggtacaatatctgatgagacgatttgtttgagggagggaaagcgccttagttgtgtaagagattaaatctagtaacttttgttttagatgtgggattgcaaggtttgcgtgaaaaaggtcaaggtctcctggatcagatctccaatcaggcatcctgggcctatggaaaggatgtaaccattgaaaataaagaaaatgtggaccacatacaaggagtgatggaagatatgcagcttagaaaacaaaggcaaagtttgaccgttaattactttttactaaaataataacaatattagttaaaatgaagttatataacattttatatacagacaaaacgttcttaactgttatatagaagacatgtagtaggtttttggtgaatgtgataattactgtatataattttactaacatagtaataatttattcaattattaggtaccattttcctttttattgggttgtaaaaatttcaattatactcaactatttcaaattccatatccccagtgtagtctatgactcttctgctttaaaaaaaacttactgaagaataattttgctttttaaatttcatttagtttagagttgccattaaacttgtcatctacattgatctgtttcttcatctaaacttacagaatgtcacacattcattgttctcatatttgctgtaggaggattaaacagtggactagtgatgtttagtttcattttctataaaactaggaattcaaaagattctttgaaaactcagtttgcaatagcaactacaaagtattgcaaagtaaaggattaaaattatgcaatatacacaatctagcatggttatatgaaattttgcacacttaaaaattttatgatcatcaacaaaacttcacagaaagcttccttctgcatcacagagaaaacagtcatgaggcagaaatttcttccctcatatctgcaaacttacttttattctgtcaccacagaggatgatagagctctccgtttatatcaaaaaatatcaaagctgagcttccatttaggctctgattctgatcaccctcctgactcctaactccatcaaatcccattctctactctggttcctgccctcacttaaatgcttaaatttctcctgttttaaaaataataatcacacatatgggtacgtcttcctcttcaactct

SEQ ID NO: 97629 - DNA, 1162 bp, Homo sapiens
ttacagctctgagggcagagcatagggctgtagaagaacggagggttggggatttgttggtgggaagatgaaagagttttccgattacttcccagtgaattaagatctttggctgagaatgaagaagtgaaaagggaattggagactgatagtgaaaaaaacataaatgatcatgagaatgagaaagtgaatttactagagaaacataaaaggattgccaaagactcatttgagattatttagtcataactttaaaaagagatctgtcaatccttttgtagtttataagcatgatgatgggtgctcacactcatctgagatgtgtctccctctaagccttgtaacaacatcagcacgttacccttctgatgtgagggaaaagagagagagcgctatccacctagttgtttttagtctacccatgttcggctactctggtacaggcacacattaggcagagaaaacagatctcaggtttcaacaggtcattctgatggaaggaaagaaagccaggcaggggcatgggttatatgctgggaggtggttatagcctttgatcaaggatggaagtgaggacagaggttctcatgtgctggatggtagagaggtcagtagattggtggattccatgggattgtaggtgtgagcctacaaacagaggtgaatgggagagtcaataggtggtcagaaaatgggtttcatgaaacagatttttggagctacatagtagtatatgatgacacgtttttatggccagtggaagaggtagctgagttgaggtgaggacaagttagttggaggtgagggagggagtcaaggaactggaggttcaggatggtggtgggtgcctatgtagtggaagtcactaagaaggctgatgctgagaggaaggcagtgtgacctttgctaaacccttctgtggatgaggtgataccacacagaaagctgaaaagatgtaatctaacagcatgcacttcaaaggggatacggttttttgaaagaagagggaaaataaatggtctgcaagtagtgaggaacgaggcacccaaacccaccttcaggcttgcagtatgtcagacatggaaacagtaatcagttgagaaggctgcaggggtgactgagggcggacaggtttcacttagagcaaggaagagaagagaac

SEQ ID NO: 97630 - DNA, 1123 bp, Homo sapiens
gactcttgagactttgggccagataaatgtctgtcgtaagggctgtcctgcacatggtagggtattttgcagcatcactggcttctacttactgcatgcagtggcatccccattcctcagttgtgataacccaaaatgtttccagacactgccacatgttccctgagtgacaaaatcaccctctgttacctacttaatgtaatgtcagtaaatctacagtgattaatgttttataccttcaatcaatgaatgttaattgagcacatactatgtgtcatgtgttgttctaggcttttgccatataatactgtcttactatatggaatttacattcaagttggggagcggaaagcaatataggtatagattttaggaaaggcctctctgaggagatgacatttaatcagaaaccttgaaatgatgtcgagaagtaatccaaacaaagggcaattcagatagaggacacagcagtagaaacaccccagcacaggaagatgattgaggaacagcaagaatgttggtgtggctagagtacagggagcaaaggagagtcacagaaaataaagttttagaggaagtcaggagccaaaacatgtaatgtcttttagcccatgaaaagaaacttgaaatttattttaaatgttatgtgaagttatttgaaacttttggacagataattaatttatgttttaagcaaatcaccggctattgtgtggaaaatagggaacagagactagcaatgaaaatggaaggcggggggctgatagatggaggcattagaagtaatgagaattgatagaagttgatgaggttgagccagcaagacttgctgatgaaagaatcaggcttttggccttagcagctactaaggcagggaggactgcgagaggaacaggttgggaggatagtgaatcagtgtctttggtggcaggttagattttagatatctagtagtcatccagatgaaggtggctagtgggcagttgggtatcagtatctggggttcatgggaggggtcagtgttgatgattaatttggtaattcttagcctatagatgtatttagagcctatattaacttggtagttcttagcctatagatatatttaaagcctatattaatt

SEQ ID NO: 97631 - DNA, 1112 bp, Homo sapiens
cctcatattgctttctttgtaatgttctgtaaatcaggtatagcaattactggtattggcagaaaatctactactataccctaaagcagttgtaatctagctgaaggaataataagagatattacaagatttggaattgtctaaaggcactacatatatattccttgcaatttttctaattagtacttgtaaaaaacttgaaaatgaaatctcataattgaaaatcgatttattttatgcatttcacaggttccaacataatggttcttccttttatactaaaataatcatattacaaaccctgttcctgaggatataatcttttaattctcttggtacttttaaaataatgttttgattttttttttaacatggattgtgatttgtttgaacctggtagactgttctagaacatgttactatagttagagtctacaatttgttcctctctttagttcctaaaaaactgtatttactctagaacattctagacttcacctaaggggatttagttatgaaagtattccaaaagttctttttaggaaggacacatggcacatgaggattctaaagacaggatttatctatattttattattttttttaaatgccaagataaataattacagttagaaattggattgtatacatactgtactgtactctaagtttacaaaaagacttcaaaagcaaatttcatattgcgtatagtatggatgaaattgcagatgatgtacatagaaattgctatgttcagatgttggttttgtatttttaatatatttataaggttttcaaaatcagcttaaagaaacatcgcttaagggtggcccttcccatgtgcttaagcttacttataatgtggaaccaatatataaaacttttgaattgcaaaataccttatagattattctaatatcttcatcttactttatagatgaaaaaactgggaagctacgttttttgatcagtgaatagttggactattgttaagacacagatctcttgatacccaggggggatcctttctctagctgtctcttagagaaagctactaaattttacagatatggttaagctacagtagtttttcattcttgtacttttaatac

SEQ ID NO: 97632 - DNA, 1082 bp, Homo sapiens
ttctcctaacaagcctttgagataattagtattattttatctattttgtactgcaggaagccaaaatgacttgccgaagatcaagtaactattaagctctctctccatagctaaatccaaagccaaagctctactgttttataatcatcgatgtaaaaacacttatcaccttgcaaagccttgcacatagtgcaagcacatagtgctgcctgatatgtatattccaacccaaatatctctagtagcagtttcacaaactctaagagaatcaaattgtaattttttccaattgaaatacctcaattttatttctgatcttttttttaataatagctcataattctaatcctactgtgtgccacatactgtctgagcactttacatatgttaactcatttcagtcctgtgaaatagatactattgtcattccaattttaagatgggaaagctgaagcataaaaacgttaagtaacttatataggttacacagctagtaaatgctggagctgggacttgaacctaggcagtttgatttcaaggcatgctctttgaaatcattatgctatgctgcttctctaatgaaaatgatatcgacaagaaaaataatcaagggtgacaattgtcaaagtagaaaaaaataaatgtattctgatattcatagcttttatgaatatatataaaaagactttgcacaaacctttaaaacaattatttttccaattataaaatgtaataaataataaagaagtaaattctgaatatatttgttgtattgattcaggtgtcctaagttcttccagtatgatatacagcttattttgttagagaacaaagaaatacttgtaatctctgaattattatatatttagcaggtacaatagactgtcagtaaaaatactgctctagatttaaaacttaattccatatatatgtttagcagcttgaaagctttttattttaattcattgaattaagaagcttttacaatttctattgtaaatttaattttatatgctactaggtcctattttatatgctattaacttttaaagtaagtattgaaagagagtataaaacaaaaa

SEQ ID NO: 97633 - DNA, 1060 bp, Homo sapiens
tgctgccctctaatggcagctcattgatggcacccactgatgtccatcttaaccaccaagaacttgctgttcttggcatccagcaacttatgtagctgcgggatcttgggtggctctcccagtagatagacagctggaaggaaaagcatgcacatgtgaatcctgtgatttcccgtcaaggtgttggcattcaggtagttgtgacaatgttaggattcttagagtaagtgttttgctttaccatttgttcattttattgttcatttatccattaattcatcagatgtttgggaatgccagaaatgtccactgcctggacttctgtcaatctgttaggttctaagtatagatttgttgagtgagcaaataaatacaaaaataaatgacgtggtctctgcccttggggagacaaaatacaaacttaaatacaccttggttgcctttattttcctctttaaatctccacaatactgggaaagatagttaaactaggaaatggatacaaatatccatggaaacctagtctccctgtatttctagttctcagaattcattgtccctaactgtagaagggctttgttctaagaagtacttattttgcacctagaaatgatattagttttttttggtgcttcttgcttttggttgaaggtaacacaaaatcatggttgcattttcctttatatttaccagtctctaaggcatttaatttgtcatgaagtgtggctttccgcctcttttctatttaatgaactatgacttaaaataggtgctgctttaaatgaccatataaataggataagtgaagtgctgtgtattttttttgttacgaatgttgtgaattccttaattctttcatttcttagcctgctttacaagacaagttttttttttaaggtatttttctttctactctttattatttcatattaggtgaatgtctgttattggcttcattccttgtttgagagtataatccactcagatgtatttaggtcagatatcccattgtagaagaatgtggactagtatgtttatgttattttttaaatttattttt

SEQ ID NO: 97634 - DNA, 1371 bp, Homo sapiens
gttttcttttaaacatttttctgatagaagattatataatcagtttggttttagatcaagaaaatacgattaagacctaattagatatttttatagacttgattttaaatcagtaattactgcttttaaaacgctttgaccaaaaagatgatccttgtaattaaatattaccaagtaaaactacttggtaaaatatggttttatattattctatttacatacatttattttggtcccaactcatgattgtaaagcctgtgaaccacaaagtgttctggatcatcaaacgatagcaaataaaaattaaaaaaaaaaaaaaaaaactacatcagattttttttcaaacatgagtgtaaaataattaagtctaggacttgttcttacatattaaattacaagtaagagcacgggtcatctcccctatttaaatatttttcagactgaaatttattttttcattttcttagattttacttgtcaacatacagattgaggctttcttaacatctaccctttgctatatgctcaggtcatgtgtatgtatatgtacatataatttaaaaaaattactttttagatacaggatctctctgtgttgcccgggttagagtgcagtggcacgattgtagctcattgtaacctcaaactcctgggctcaagtggtcctcccacctcagcctcgcaagtagctagggctgtagacatgtgctaccatgcccagctttttttttttttttttttttttttttaagagatgaggtctcactatgttgcccaggctggtcttgaactcttggggtcaagcaatcctcctgtcttagcttcccaaagtgctgggattacaggtgtgagccaccacacctggctacatataattactcattgtaataaacgctatttgagttcatattaagtaattcaacaagtaaaaatgacatggttccttctgtcagtgagctcttgttagaaggggagatggataatgatgaatgataatcataatagagtggaaggtaaatggtagcactgaggagggagagaatgggtactcatcctcaccttgagtgttgtgtcagggaaggtttcacagagaaggtgaatctaagatagggttaaagcatgagtaggaatttcatggacaaaggattgtagtaatgttatttcagcgaagatgacatcataggccagggctcaaaccgtgaaacagtattgcaagttcagagagttgcacttggtttcttgctaatgagaaaaacatgaagtggagagagaggcaggaggatgatctggaaaagacttaagtcttgtaaaagaattggctgtggagtaccattcgggattttcaaatggagtgaaagaattaattttgca

SEQ ID NO: 97635 - DNA, 1120 bp, Homo sapiens
tgtgtctctgttacaccatttgatgttctatagaattctattctataggattctgcgtttctactgtctgtataccatgaccttgatcaatttgttcttctgtctgaaatgcaccaatcgttcatctcaaggccatgtgtctcatcaccttgtaatctgcaagctgttaggtatttgactggatcatcagttgtttcagaagatgtgaagctggaactattgaaaaatgtcaaaataatatgttctgcaccagaatagtttgattgtccttctaaagtaaggtaatgattgtaaattggttgttaatatatcagtatcaccagtcactgattgtggagcatctactctttgttgagtattggacttaaacattggaatagtagataatttaaggtttgcatgtagttaaatggcatttctttaagaataaagcgttagtagtgctaaatgatgccttattgttttaatctatcttaataatgataaagacttggccagtggttttgaatcctagctgcatatgttgtttacctggggggctctgaaataattcctgtgcctaggtctaaacccagagattgtcattcagttgatttgaactggggctctcacatttatattttttaaaagctccccacatgattctaatgtgtagctgggttaaaatataagtgaataccagtggtttcagtcacttttaaagttctttcccagaatgcttccagctgtgcagcttttaactttatacttcaaagtctttaccttagcagattcaaaaaaaaaaccttgtacttcctgcagatgactcatccaggagagtcattatatgaactatgagctggtttgcaaaaggaagaaaacattttgtggcagtaattaaatttctgtagacaatatgaaataacagaattcaggattattctctcaaagatttaaaaaaaaattctctattcatttttttaaaaggtggttgcaggaacagtacagagcttatagcatcctatataatccattgatactgtagacttttgttgaattaatagtcttaatctcacttcaagtgtttacttttgtcagatactaagatacatagttggcacaaatatagataataaataat

SEQ ID NO: 97636 - DNA, 1051 bp, Homo sapiens
gtggttcatttgtcaaaactaagaaaccagcatcagtatgttactgttaactggagacttgctttggatatcaccagggtttccattaaagttcttttctgtttcaggaaccatctagaaaacaagattgcatttagttgtcatttctccttagtctcctctgacagtttctcagaggtgttttttttttgtttgtttgttttaaatgatagttttaagaagtactggtgatttattttaagacacaaacactaaaaaacaaaagtgttgaaccttactttttgtcagctggatgggggtagtagtggtggtggtcctttgctcttttcccatgtttgagttttatgtttggaagtctgtgaggtcagcctagccacctatgtattttatgcctctcttctccccagacttttataattcatttacttctcacaggatggaggctgtatgaactttgggatggagaacagattcctgggggttggaagggaggaagatatgcaaaaatggtcaccacactgaaagaaagaaaggggtatcaaaccaggagaggaaaggagacactatgaaaataacatctggatctttgcagcttgagtcttgggttctgaataattaagtttaaaaggtggcagggacaaaagagaggtcaagtcacctattaactttttgggccagattctcccaggtgtggtatctgtactaaaacaatttttctagtggacccagcaaaataaaaagcaaagcccctacttcctcaatttaaccaagtcaaaccaaaaggtaaaaatacctcttagctgcctcgaagtgcaagacaagcatttaaaaagacagttcagtccttgtttaaatctttttctgttttgatagaggaaggtggaagatggtggactcctgaggcagcagataggaaggatactatagagaacttaagacaagagaaaagagagcttacaggcagctcagaagacaaacagcgatttttatagtttttactagatcttgaattacctttactcacagccagatgaaagctcaataccacaga

SEQ ID NO: 97637 - DNA, 1128 bp, Homo sapiens
agctagagaactaacactaggcactttacaaccttatctcatttaatctttccaataatcctatcagatagagatgatttccatttccctttctaatagataaagaaacaaaggtgcaggaattggattttccaaggtctacttggtggactcccccagtcctgggaatattctttggctcattacaagtattcactcctgggatgatagggcatgcccctatgtacagggaataccaaggggggaacctactataaactgaaatactaagtgtatgaatgaactaagccagtgttggatgagactacttatttattaatgacttccattaataaaatacaaatagaggattgttaatgtgtcccaatgccagtgcttaagagtagtaatttaagatgatacttcattttcccataatcaccttatctaaataatttattacctactcctaatttcattttcagtttgaccaggtaaagcacagaagtaaattgtaagttagtggtcagagctggtttgatagtggtgtgtgtgtgtgtgcatgcatgcacgtgcgtgtgcatgtgtgtgtgagagctgagaagtacagttcttcagcagcttggcatatgcagaaactgcacattcttggaaagaagtaatctgcgttataatttaattgccttctagtagatttgcagaatcatttagaaaatgaacctgcctttgtcaattggtttgtaaagacctattgattatattcttgaaagatagtaatattgtctttcctttagtgggtattgccagagcttttgcttatgagtttcattttatttgatcaggttcagtgatattgatttggtatccttgcatgctttgtgctagggatgtatgaaacaaaatgcttttgagaggtcatgaattgtgattcagtaatagtttagaaagtttaggaattctatctattggggcttcagttagcatgtttttgtagtagaagtgggaattactgagtttaggttagataatttttatcagaaaagtcttgaattgcactgtgtaaattctcactgacgttgcatcttttctgcagaatacaaaatactttggagctatatataagaattagaaaacatggttctgttttca

SEQ ID NO: 97638 - DNA, 1078 bp, Homo sapiens
ggtctgagtgtaaactcaggtcttctgactctacttcctgcactcaatgaggcatacagaaattaaattgtgtttgtgaatgtctggttgattagtgacaaagtgagggaaaaataaaaaaaatcaaaccaaacaataacaaaccataaggtgttgtggcaacactgccacatattcatcagattttattacgcattttcaaataaattccttttcttctgtcataataaggtaggtctgctttccacatttccaatggggaaacagagtcagagtgattcaacctagtaacagcttcttaatagcatagccgatcctagaacccactgtttcagaatttgaatagtatgtatgtgtatatatatagagagagtaaaagctgaaaatctcccttcactttttgtctttttccccttcttcactcctaagaccacttccatcttggagaaactgctgttgacagtttgaggtttatatttccaaacctgtatctttgcatttatgtgtgtatttatctataaatacacatttccatattttaccatacatacagacatgtttcttttcataatgttttttcttttacaaatgggattatactacacatattcctttgtttttcacttaaatatgttaaacttttccatctgtaattacaaaggataaatctaatattatgttttcatttaagtttgctatccatgcctggcttcggtgtcaagatgaagtcaggattaagaatgattaggaaacttttcacttttttctgtgctctggaacagtttaaaatatctgccctttaaacgtttactagaaatcatctgacaactgtgggggcagagagagatctgagatgacctttctaatttttttttttcttttgagacagggtctcactctgtggcccaggctgaagtgcagtggtgtgatcacacctcactgcaacctcaactgcctgggctcaagtcattcacccacctcagcctcccaggtggctgagagtacaggcatgtgccaccatgcccagctaatttttgcattttttgtagagatgaagtttctcaatgttgccaaggct

SEQ ID NO: 97639 - DNA, 1024 bp, Homo sapiens
cgccgtctgccgggtgcggccgcggcccgcagagaccgggccgcgcgcttttccgttcctgagcgcccttgttcatttctgggtgaaagggacccgaattgtgcaacaggtttgggcgttagtccttattttccagcgggtctcttttgccagcgtgcaggaaccagatgtggctccctgctctcgggcgagtcccgcgtccagcgcccgcgactggctcctttgtgtgaccggtgaccggccctgtcgggtgggtggaggacacgggctcgaggccccagggctgcgccgaggctcctggacgcctcctcaggtcgcggggcttggcttccacgggcctgccagaggttaacatccctccagcgtttgggagagtcacaaaggggaggagagagagggttggccagggtctgtggttgtgtttatttttctattttaggtagactcatattagaaaagagccgcagtctgaccagctcttgagggtacgggtgggatttcaccctgggatgcacggtttggacttggctgttgctctgacagcccccgtggttttcttggtgctttgacatctttctcttacacacagacatcgcgggagaagttgggagtgctgccgagggagtaactagatagcagctgtttgacaggtcgtctcttacttcacgttttgcttgtgtcaagcatgcccactatgtatcccagcatagcttggcaaaccgtcaaatttaaattgccactcaaaatcctaatccttatacatacctacatacacagacacacatatatctatatactttttctgttttggctggctaaatcttattaatgtgagaatttttcctcccaaggaagaatgcataataaggtacaatttatctttggttacataccttggttaagttatgccaatacctagctggtttcattggtatgctattttagtttaacaatactaattcctttagctttgagcagtaaaatacgtctttgttctaggaccaggaagcttttatacgtaata

SEQ ID NO: 97640 - DNA, 1041 bp, Homo sapiens
agatcaaatcctgcctacagggaaagctgaaacaccaaacttaaatgctaaatggaaacaataacaacaataacaacaacaacaacaacaacaaacgaccaacagatgatgaaaaccccgtgaagcaaggtaaagaagggaagagcagaagttctcctaggtatgaacagggcaggttctgaaaagctgtgtgtaaatctctcagtatccatgagcaaagaggccctaatcaggtgatcacactgctgtggctggtaggtagagcctactctcccttgttctgatgcctgctttatcctcacttttctgaagttggaagtttgtgtgtaaagatgcagtatagaatttgaacttagaaaattgcaaaggaaccaaggaaaaatcactcttcactgcctctctcacttgttcatttggatccaatgcacctggcctatttcctaagaaaatagtctgttttaggttgtttctatggtcacagtgggtcttgtcagagctgtatgtgtacttgggacttggacactgtcattcttcttgaagccaagtagtagagaaaaatcttccatttgtcatgtttgcctcagggcagctcctcctgaatcactgtagattgttctagaaacacagacaaagcaataaaaccctctttcatattgcgttgacttgaaatcataaccataagttcccaccacaaatttctttcttcattaattcatttatttcctcccttcctccttcttcttgtacaaaggctttgaaggagcatagtaaaatcttaaagaggagaaaatgagtgctagggggaaatctgggcctagcacaccatgcatacacctggacatttgctagaggagcacctcacatttggtccagagctttgcagcagctaatacagatttgtgtgcgagatctctaatttgtaaatggataatacaattgaagtgtccataagaagaaaacaaatctattttttagaagaatcataacagtttttgacctgagaggaattccctcctaaagtgtaatgatgtggtggacaac

SEQ ID NO: 97641 - DNA, 1135 bp, Homo sapiens
cagaattctttgtatcaccatagcactagagagtaggttagaaatttctgaatataatgaatagacagaagaatcgtaggaagtcttagagtccttgtaagactcaaccaggagacggaagtagccaaaagacttttctgtgaagatgacactgagaacctgtgaatttgtgatgctgggcttcataacaaggaggaaaaaaacacagcagcagatataatgtggaacccatgactagaggactaatgaaaactcagacactgctggattttccagtgtagaagagtgatgataactgaaatatttcaagataggcccatgacaatcaggaatgagacactcaacctaggggagaaaatgaagagcaagaaaataatgaattcactggatttacccaaaattgactagattaacttttctactactaaacagaaaagaattcaaaataggtgttgaatgcaaacaaaactgtataccttatgatctagagcagaggggttgtaacaataatgcagggccagatcatgaagagcatcgttaactgtgctatggggagtcattgaagggcttcaaagacagggacttacaggatcagctctgtgatttagtgtttctctctaagcaatgtgcaggctggattaaagaacaggcatattagaggaaggtgcctaagtgacagagtaggtggtggggagtcattgggagagagatgattcattgttgagggacttgcttaggataaggtttaattacactagatctaatttctatgataggacacaaaacttctattatattgaaagtaactttatcaagaaaagattgagaatctctaggatcaaatccaagttaatgtaatcataatcctgcctggatataggagaaataacataaatttatctgaagaacttaattttgtataggaagatttaagagatagtcttatgttatttgaatatgtatactagctcctttgcatccacttagggtgtagaatatagaaagtcacaaggaaacattgctcctaccctaataagaatgaaaggggataacaaattcataggtttgattcagcaaaagagctgaggatgcaagaaaagactaatgaactaaatcaaagtgagagaagaaatcc

SEQ ID NO: 97642 - DNA, 1186 bp, Homo sapiens
tgacagcaaatattgcctggaaatttttgttaacatttcctattctacttaacttgtgttttgtcttgtgtgtgtgctcctcactatgttctatactcttatacaagcaattaatacctaactacctctagcagaagtattttgagtataagtgagttatatcagaagcagagactagaagctggattgaggaactattctgttctgctttgaaaatgcatttctgcagcatcaactatgatgtattcacatgtactgtctgccgctcaggcagatttttcaccttcactcttttaatgtgtaaacaagaaacatgttgcctatgtttgctatttctatatttttacactatttcagagttagtattttttaaggatcaactgaattctagatactttgcatgctcattccttttcaggttctcaatttccttgcttccaaagttctaattctacatccctagctacctactcccattgtcatccccgttaggttggctttcaaatcataccacctctgaaatccctccttgaagcatcatactttggccacttcccaaccagttcacctgctttagtaccactattctagaaatccttcacctcagcaaaccttctgatccattgactttgttacaatcagttaccaatccccaccccagcacttctttacttccctcattccgtgatctatcattcgaatagataaatgaacaaataacgaatttaattctttcaaaacaaccccatgagaattggtattgtcttcctacatcacagaagaggagactggagtccaaagagactaattaggctcaggccacaaagttgataagtagcagtatttaactcagatcatcttcattccaaagcacaactggaggatgaataaaagccagagagaaggatttgagaatcagctctgtctcctagcagctgtgtgaacttaggcaaattatttcacttttctgaccttctgattcacctttaaaatacttttgtctaccttacacagttgtagtgattattatatgaaataatgaagtcaaaggccctagaataccatgtaacacagtgggcatttagcagagttctttttcatagcatacagcaaagatgtggaagaaaattcaggctcatcaactggttcattgattgcttcattccatctgtaatgccatttatag

SEQ ID NO: 97643 - DNA, 1627 bp, Homo sapiens
ggctttgcacctagtttatctgagttagtaaacctacactgtatcagtaaatgtgattgttataattatgaaattaagattgaaataaaagctaactgtcttttattttacacacgcagctaatgatgtaagaaagaagggacatgggaagaccagaagtaaagaggtagataaattgatcagaaaccagcaaacaaatgataggaaacaaaaagaaagaagacaagaacacgggcaccaggaaacaaggactgagagagaaagaaggtcagaaaaacacagagatcaaaattcaagtggttcaaattggagagatcctataacaaagtacacatcagacaaagatgttccttctgaacgaaataactacagtagagttgcgaatgacagagaccaagaaatgcatatagatttggaaaataagcatggtgatcccaaaaagaagagaggagagagaagaaattctttttctgaaaatgagaagcatacacaccgaattaaagacagtgaaaatttcagaagaaaagatagatcaaagtcaaaggaaatgaatagaaagcactcaggctcaagaagtgatgaagatagatatcaaaatggtgccgagagacgatgggaaaaatctagcagatactctgaacaatccagagaatcaaagaaaaatcaggaccggcgaagagaaaagtctccagcaaaacaaaaataattctacaaaatgacataaactggacatgccttatattcagttgaaacaaattattttttactttgacgaactttatagagaattcttgtataaagtattggtttgtatttgtaaatttaaaaaatgttttcattttaacatgttttataattgatacatctcaaggccctacccataaaattatttgaaaactttcaccagaaagggatgtaagtctcgcttatattttgtgaataaaatgatcaaaagctcattgattcagtgatgttttttcaattgacaaaatatttttttagttgtttaagaagctgttatagtgaattatcagtgcttttttgtttgtaactgaagaccaaaacaggtgaaccttttcagtttaacagttttgctttgttaatgagatgttatgaatctttttcaggtagtcacttttttttttttcagtagaggatttgttacaattttcatattaggctttgaacaaagtatgtaatgtgtaatttttttcacaagtgttggtaaagctaggtgtatgttactctttaaaccaatacgcagttatttataattagaacttctcccacaggaaatatttcttctctctggactccttgatatcatttaattgaaattctttgtgattagtgcatttttctcagccttgaagttatatcactgttgatgaattaatgtgtatttaatttttagtttaggttaatagatcattggaaaacatatagttgtgaaatatgcaagcagcctaaatgtaatttcagttttttatatgaattttaagggtttccatcattgtaactgttaactgattaattaatatgaccacattagttattacttttgaaataaatatttcctctaagatattagacttgctgacaaacattttaacttccttgctaaata

SEQ ID NO: 97644 - DNA, 1059 bp, Homo sapiens
agatgtatcaattataaaacatgttaaaatgaaaacattttttaaatttacaaatacaaaccaatactttatacaagaattctctataaagttcgtcaaagtaaaaaataatttgtttcaactgaatataaggcatgtccagtttatgtcattttgtagaattatttttgttttgctggagacttttctcttcgccggtcctgatttttctttgattctctggattgttcagagtatctgctagatttttcccatcgtctctcggcaccattttgatatctatcttcatcacttcttgagcctgagtgctttctattcatttcctttgactttgatctatcttttcttctgaaattttcactgtctttaattcggtgtgtatgcttctcattttcagaaaaagaatttcttctctctcctctcttctttttgggatcaccatgcttattttccaaatctatatgcatttcttggtctctgtcattcgcaactctactgtagttatttcgttcagaaggaacatctttgtctgatgtgtactttgttataggatctctccaatttgaaccacttgaattttgatctctgtgtttttctgaccttctttctctctcagtccttgtttcctggtgcccgtgttcttgtcttctttctttttgtttcctatcatttgtttgctggtttctgatcaatttatctacctctttacttctggtcttcccatgtcccttctttcttacatcattagctgcgtgtgtaaaataaaagacagttagcttttatttcaatcttaatttcataattataacaatcacatttactgatacagtgtaggtttactaactcagataaactaggtgcaaagccaaattgattgaatagaaagtctgatgacacagagtcttaccaaatgcttaattttattttattttttgagacagttttgctcttgttgcccaggctggagtgcagtggcgcaatctcggctcactgcaacctccgcctcctgggttcaagtgattctcctgcctcagcctcccgaatagatgagattacagg

SEQ ID NO: 97645 - DNA, 1029 bp, Homo sapiens
acattcaccatttttatattctacagaatttgttatttcatggtatccattttgagaacagatgataacacagcatgaattgctgcaataaggaagcttgctgattcaaaattaatttgccttctcatataatttcagtagagaactttgttttattaataaaatactaaatagcataaaagcagcatgaactgccccaaaattaggaaattataatgcaaacatagcaaacggagaagagattgcctcttgttacatggctgggttttaatatcagtaaagcccgacagtggtgtacagtaggatcaaggggacgctggtttagcacagagccagatggtttctgcttgggtagctgcagctcagctgagctgtttgataggaaccagagaaataggtccttagtggcaaaccaactgactgtaccatgtgccaaagatatgcatttagcggaagaaatagaggctggtacagtgagatttaggtagaattagggtgacaagaggcacttttctatcatattttctctttcttgcctatgtatgaatttgagagaaatttttgttatcttagcatctttgatttgtgcacccaaattaaataacagataaactgattaagtttgttttattgcttaaagtggttatttcagtataaccattttgtatttatagttgtgattacatcagcaaaatcaaattgtttgaggtcttttcagaagagtttctacagaaactaagcctttgtggctctaataaagcccatgagtgtaaatcttaacatatctgctcttgttggtgcagttagtgcctctctgatagtaacagaggggagaactattgtttttgcaggaagagacctttcattgagaaatatatgttcatgctgttaagcaaacccagttgttctactcctcctatgtttaggaagtgaatgctagtttgggtgatcattgtattttgatctgacttaatagtcctatgaataacactctatgggctggaatttcagcttttggattcaatttgt

SEQ ID NO: 97646 - DNA, 1045 bp, Homo sapiens
tgatagaaatcaagtttggtacattattacttgaccctactcatttcatttagatagcacgtagcctaacctaataaatgacatcaactagttacttggttgtatttcatttagtaatttaatatatgaaaaatctgaaaaatgactaaggattttacctttttatctttaagcaatgtgttctcttttgtttatttttttcctttttagaactctgcagccattctttgaaggattattaccccgagataatccaagaaacactcggtttgccatcaacttctttacttctataggtcttggaggtttaacgtaaggattattctcagaatttatgttcagattataaaattatctcataattgtctttgaaatagaatctaacagattatattttaaattagggatgaactgcgggagcatctcaaaaatacaccaaaggtcattgtggcgcagaaaccagatgttgagcaaaataaatcctccccatcctcttcctcttcagcgtcctcctcttcagagtctgactcatccgactctgattctgacagcagtgatagcagttcagagtcttccagtgaagagagcgactcttcatccatcagtagtcatagctctgcctcaggtattgaagcttatgtgtaatttggcttgctcttttctaataaatatgttgctgatatatatgaaggaagaaaataatttgattgtttatttgtcttagagatcagttgtttaaaagccacaattaatacaaatggtcccatctatcattcttgcagtctgtaatacaacatttataatgctgggattaccttttgacatcctcatcatagaaatgaaaatatttcattcgcagatacttatctgagtgatgactgatatgaaccatccattcataatgtttgtaatctagtttataggagctatcctgatgtttttattttaaataaattttagttttttacttttaatattaaagctgtttgtaattgagatatatcatacattcattgtggatctcagatgctatatgaatttttat

SEQ ID NO: 97647 - DNA, 1002 bp, Homo sapiens
atcttccctgctataaaaagcacattactcaaaacagagaatgaaatctatttctgtcgcatcttaacattttgaaagttagtatagagaagtagttttaaactttatgtcagcataaggggagatattcagagataactctggttgaagatgggaataaatagtaattttgagaaacacttaaacctacaaatattggtcactatgtcctgtcttttataaattaaaatatacttgtctttttttattttaattttcaggttcttgaatgtataaaactgagtgaagaaaccactacatcatccagtagaatttttgtcaaaatatttttccaggaactgtgtgaatacatgggtcttcctaaacttaatgcaagattaaaggatgagtaagtttgccattaagcactttttattcttattgacctctggttttctcccattgtagcagacataagcccatccgagactgtaaaaacaagagctaagccccctgagactttcttcatccattaatcactgtgaatttcatgttatgtcacacaggacaacatgcaacttttagtggtggtttttagtttaagtggagttcaaattaatgcctttttagattttcttagaaaatacagaattgtttttgtatgctcacttgaattctccagtgatatttataattttattttctttttaccctaattttaagccttagaatgataactaatattatcagtggacagttttgagtatatatttcatctattaataattgttcaaaatattacatagaactagagccttatttcaggattattatgtaatcccctctcacctttcttatttcctgtttgttcagattgccacttaggttgacttctactccattgacactactgaaatcatcctttcagatttctcagtgaccacctgccatattcagttgtctttctcaggctgcatgcctcttcacttctctgcctcacttatgcagttgactacctactca

SEQ ID NO: 97648 - DNA, 1109 bp, Homo sapiens
aaagcggtgctgtccaatacaacttcctgtactgatggaagtatttatattctgcactttctagtacagtagtcgctagtcacatgtggcttttgagtacttgaaatatgactagtaatgtggctgaagaactaaaattttaattttatgtataatttaacataatttaaatttaaatagccactagccataatggctagcggctaccatgttgaacagcataattctagagtatctgttctgtgcttctccaaggttcccttcctacctcttgctctaagtcctcctctggagtctctgacaatactgttaacatatgcagtaaatacttaattatataattttttaaaatatttactatttttagttaggttatatcctgtgttagtaaatatgacaaaatgtcaaaattgttcattgaaaatataaaggtaaaaattaaaaagcaacacgtttttatatgcttgctttctgtttgcacaaagcaagtatattacagttactctatttggaaaattgttttaagtttctggtaaatctttatagaaaagattacactgatcgtagatgaattaacaccttttttcattttgtctctattcaccttatgttgcttgagttttttcatctatgacattgctataatcaatacatatttcatttgaattatttcaggaattaatatattaattaagaaactaatttgttaagtagaaatcatctgtgatgatagtatttcttgactgggcatttatccattagtttaacagaattttcagagaggtttacatggcgcctgaatagctaattggaataatatactagcagttatggaatgattccatttatttgtatagatccatatagataggtctatatgaataacatttattttgaggtgagaaaattcatccacagaggtgttttttgatgtttctttatcaacgttaactttatgttaacgttgaagttgtacctacttatgcctctgtaaagactaataatgatctgccttttccatgctaaatatattccttagcaattgaattcatatccttgggacatatgtaactgaattgttagatgttgtgttggtgagtctatattta

SEQ ID NO: 97649 - DNA, 1385 bp, Homo sapiens
tgacaaaacagaaattaacctggtctcatttcgtcgtacaatttatcttgctattcagtcaaggtaaggcatcatatctcagttcatcctttttttgtttttgataagggatgggtaaagagatcagggatacattttagggtctcataacagaaaactggacaccatttcagcattcttagactctctcccccatcccatgcccaagctcatagtacctttctgttggttctttgctttataggcaaattgtttttacttaatgggaaggtctaattgtgttacctaattaaatggttttttagctatatcatttcttatagttaagtgccactaataaaaacttgaaaataattctgttttacaagatagcagagtacctaattttataatgaaaatgtaatatttaacatttttaaaatttggtttctagttctgattctaggcaaagaagcactgttgtgatgactgttggacagtgatttgctctgcagatgtcaatgagtataaacagaaataggaattagacttaggaagattttgaggactctttgaagtaatgctaagtaagaagtagtgtgatgtgatgtcatgaaaacaaaacctattccctttgaaggatgtgaatttggttttgaagagaaataaatgaggatgttaaatcttagtgcatctggtagtttgtatgtgaatcaacctattgatttaataggcacactgtttacattttacactggaggagaaatgttttctcagttttctttcattactaggtttagtatatttccatttaggatgatgtaatagcagtaatgattcataagtaggagtcatctgttttcagtctgaacattttttggctttaggtttatcttcaaatagaggaacgttaaacagcaaaacattggttgggaatttttttgctttatccttacttattttctcttcacataaaaagtattaaatatggccgggcgcggtggctcacgcctgtaatcccagcactttgggaggccgaggcgggcggatcacgaggtcaggagatcgagaccatcctggctaacacggtgaaaccccgtctctactaaaaatacaaaaaattagccgggcgtggtagcgggcgcctgtagtcccagctactcgggaggctgaggcaggagaatggcgtgaacctgggaggcggagcttgcagtgagccgagatggcgccactgcactccagcctgggcgacagagcgagactccgtctcaaaaaaaaaaaaaaaaaaaaaaaaagtattaaatattttttcatataaacttaaagtgaaaagtgagaaatattttctcagaggtgaatattctttgggtttgacctttcatttgtttgtccttttagaaatccaa

SEQ ID NO: 97650 - DNA, 1218 bp, Homo sapiens
attattttctctcccttctttgtctttccaagtacattcttagcctaaattcttgttttctgtatctagccttaactttttgtaatggactgtcttctttctgatgatgaaacaatattttgactcccatatactaacttctattcctaatatttgccagtgctcttgctcttttcaaaaaccatcgtctactttttctttgtttttttcatctccttgtttcatggacactttttatgtggcagaagagtgatacatacagctctctttagtcaaatcagttataatgctttttgacaacctaggcaataacacgaggcttggtggttatctttgttggctagcaaactgttacaccacagtggatttcaacgaactgagaatttatcttcttagaatgaaatacatgtatatgacttgcacatttttttcctaaacttactttgtactttacagaaattcttgatgagggagatactgactcgaacacagaccaggatgctgggagtagtgaagaggacgaggaagaagaagaggaagagggagaagaagatgaagaaggtaaacatgtagcatattcaaataatattataagatactctaaaattaattctaatgtaatcttctaaaacaatagttctcaatctttggggagagcaaggacagctgctgatggcgtctaggaggtgaagactagggctgctgttaaacagcctacaaaccacaagactgccccctacaacaagatatgatctagcccaaaatgccagtattgccaagactgagaaactgctcaaaaagtattaaacaaattcattttttaacatcagcacaattttaatttagtatattatgcctttgattatattctagacaatgaaaaacatgttttcttattgagttcatgtgatttatgtagccctggcaggaatgtgacaaatgagagtgactgcatatttgctgttcattttggcaaaatagagtgaagatgccaaaagctatatttacacagaagtagtatgttcttcctcttcagctttgattaccttatttcacagaaataagctcggaactttactttggttaaggcacagttaataaatacatcagaacataaataaactggtcattatttacatgtattgcatgtgtgaagatattaaaagtatacatttgccttttagggcataataaatactctgtcttatagtacaattc

SEQ ID NO: 97651 - DNA, 1813 bp, Homo sapiens
gttttttacttcattctgaattacttaccccattgttctttcctctttccctctaaactatgcaacacttacgtctcacccatcttaagaaatattcatagattagtggtggcctttatttagcttctctaccatttacattctgtgccacccagtttagtattcaattaagtggtatactttattgtaaagtgctatactttattgtttcttgaggtcaggttaatatccttctggtaggatgaatcatagtattggtgcctctctgataaaataaattgatcattttcatttgtacatcattggtatattgtaagtactaactttggacaggttttgatgtgtaatttatctttgacattactagctgagtgacctgtagcaagttacttgtttgttggaagactaaatgttacctttctatggaaggatatataaaacacagtgttgtgtattatcacctacaatgatagctattattagttactattttcacatttgtattattttcctcctaaagctaacactcaggcctacttacataataattttatgggcttatttctcttgagttgtaattttactggagaagtatttattgctgtggaagcaataaaatttacctttgtattaaaccccaaaagtttgtattaaaagctctctgattataatagaaatgtaaagagttggttagctttgcaaaatcttttatcaggctaacagcaccattgggcaaaatgtaattttagtttttgtcatttgtttgcttttaacataaagaccagccttatgtagtctcatatacagagaaagcagaaacctagaactctgtctctgtctgcattccattgttcagtagtgcttagaagtagaaggttgaaatgaaaagtaaaattgggagaaatcttccattcctctgcattatcctaaaaacctgttataataatgagtttctcttcttagatgctgatttcctaggagcttttcactgtaatatgccagattctttttttctgttataatttcatttccaaacagagaactccatagatccattttgccttcttttcttatgaacctcttttcctacagtctccctgaaaaatgccaaatgttttttgtgaaattcttagatacacctgatttgatttctttcttttttaaacttgagaattctctatccatttctttagcatctaggcaattggccaatgcctggaaagtagtactttcttttattatagcagttctcaaattctttcgtctcaggatccctttacactcttgaaaattattggcaactccaaagagcttctttttatgtgggttgtatctattgctatttactatattaaaggttaaaacaatataaaagaatatttattaaattatttcagaataatagcaaacctagtatatgttaacataaattacatatttttatgaaaatcgttattttacgggccgggcatggtggctcatgcctgtaattccagcattttgggaggcggaggtgggcggatcacgaggtcaggagttcgagactagtctgaccaacatggtgaaatcctgtctctactaaaaatataaaaattagctgggtgtggtggtgcatgcctataatcccaacgagtcaggaggctgaggcaggagaatcgcttgaactggggaggtggaggttgcagtgagccaagatcacgccactgcactccagcctgggcgacagagcgagactccgtctcaaaaaaaaaaagaaaaattgttattttacaaaacaaatttagtgagaatggtgttttttatattttgtatt

SEQ ID NO: 97652 - DNA, 1051 bp, Homo sapiens
agagatttttggcattgccatgaaacactcgatatgataaattttttgcatcttccagctgtggtacagggcagtattttcttgtcactgacctaagactgtttgacacccctcctcccctagtaaaaagaagtagtgggtgtctttgatgttgtgcacagctggaagaagatatctcctgagttgagatttagacttctttcctcaccatcttaaatcactgtctgactttagaaaggcatatgtatggtgttttaaacattctttgttgttcgttttcttctcttagcaaacttctcaatagaattttattcccactcttcctggcattgtttataaatgtcagtttttgaacgtggccagtaatagtttgatttaattttttaaaaaaagatagactattcaaaactgttgtgttccagaagttgttaagatattttgtgataaaattagtattcatgtaacttaaggactatttgtgtctaatagagttgctgatagaatgaattgggaaatgtatataaagaattgtgatcatggagaagggtattataaatcatattactatttcttatgtagtaattatgaaaataattaccttattagaaagtagtatatgatttttaacatattttatctatgacactttccgtacataatggctaagaatatttcttctgaagataattcaaatagttgtattcagcatagaaaattaagatttttgaaacagtcatctgaaaattcttagtagacagataataaaagtgatagaaaaattgtatcccatatttggagtatttccatgtgctttataaaactttgcccatcatatgtgcaatataattattgtaaacagatttactaatttttagaaattataaaaataatttaatgtatgtaaaagcattttgtttcttccttgtatatgtattttatttaaggcacacgaagtattatgcttagagatgctcactttgctcctggaaagaccaacagatgatagcgttgaagtagctattggttttcttaaggaatgtggcctcaaatt

SEQ ID NO: 97653 - DNA, 1172 bp, Homo sapiens
tacagttgaagtctgttcgtaggctgtaaagggtacaaggagaagtagacatctgtaagagaaggccatagtctttgctttcagtagatacgtgaattgtgggcttcctaattaggatgtataattgtatttgatgtagccgtttgattagtttaataagataggttgtgattgtatatgagcaacatcttattaatcaggccacttgttaagccatgcatcttgtgtctagagatagtggaataccaaaaggttggagttatgaaacagtggaatagtccaccttgggtacaggcagtaagggggtacataatttatagagaatttagaaacaaaataaaattaaccgcaaagtgagtctgttttttatcctcaccatgctagcaatactaaacaatatcagtgatacaatactcgttcccaccaagaactgctctcaccaaccttccttgtaccactccagaacagggattcttaacctacaagcccctcaagaggtccatgaatagaattcaagcaatcagtccatgaatgtgtttggggaaaaaattgaatctttatttttactcatctctaaagtttagcttttgtttttttcttttgagaatgtaggcaatagatcagagtattgacagtctgttacaggtatttcatgatacggattatggccatgctacttagaaatttaagtagttattaagcatactgccagttcttgtttaatgtgttatgaagcacatagaatattatatcaaacttttgttcttctcatgtttcaaaaactgaattttagtatgattagtatcctttgtaatcctattcattgtatatatcatcccaaaaagtctactgatttcaccagacttcccgagagagacatgtatggaagaaaaaaggttaagacttcctgcagctgaaatcagattccacagaaaagcagttacaaaacccatagaactgtagagcattgaaagatcttagacattgtccaattcaacctaaagaaactcaatgaggccaagtaatttccccaaaatctagggtaaaaagcagtacagctatctaacattcaactggtatagctgtaggactactacatcaacatagagattgtctttaaaatacactgaatggtaggtaattcagccccatgatttcatgtgactcccttt

SEQ ID NO: 97654 - DNA, 1390 bp, Homo sapiens
gagattaactctggtttcttctcctttatacaatttgtcatatacaccacaggctaatttgtcttcttaaaacactcttttcatgccactctcctactgagaaacttttaatgattccccatcacctccagtataaaaaccttaaagtctttacatatgttttaagattttagtctaactctaattcatctttccaacaaccatgacacataatcctttgtttcctgattgtcctactcattctgaccttaacacccctgctcagtctttcaataattattccctcttctactagttgcaaaatgtcatccttcgtctccccttcctcctgccgacttgcccccagtctaaatcctgtcaagccttcaggacctaatttgttgaattttctctgtgaaacactttgtcaccattctaaaccacttttcctagtctgaatttgtgggacccacttatggtctcactcatttgtgtgcagttaattgctaagagtgtgttttatattgtcttttctgctcttcaaaaaatttatattacagaaacagggaccgagaaaaacgcagagaaagagaaagagatacggatcggaaaaggtctcggaaatccccatctcctgggaggagaaacccagaaacatcagtaactcagagttcctctgctcaggatgaacctgctacaaagaaaaagaaagatgagctggatcctcttcttactcgcactggtggagcatatattccccctgcaaagctcaggatgatgcaggaacagattacagataaaaacaggcatgtttatatcaatcagtatacaaagccatgaaattgtcattgaaaaataagtcaactgtggtttaattaaccctggttcttgagaatttacgttagtctatagtgatagagacctcaaattagagacctctttactttatagctccattggagagccacacactacgtgcccttatattagcacattacttcttttttcttttttttgcatgaatgaattaaaaagtttgaggaaaagattgcttaccctttttatagtatgttcaaactattgttcctttcatagtttcatggatgcattcctattgataatgtctgttttttgtagaaaagagtaatactgacattttagttctaaaattgacttttcctgttgtaaaccaggagtcagcaaactttttctgtaaaagcccacactgtaaatattttacactgtgagtcattttgtctctgttgttgctacttaactccgctcttgaaatgtgaaaatagtcataggcattgtgtagaaaattataagcatggctgtgttccaataaagcattatttacaaaagcaggtggtcagctgcatttggctcatgggtgtagtttgccaacctc

SEQ ID NO: 97655 - DNA, 1097 bp, Homo sapiens
ggttctgcaaagccgtaagaatgatacaatgggttttagggactcagcggaaagggtcagggagagtaggggggtggttagggataaaagactacacattggggtacagtgttcattattcatgtgatgggtgcagcacagtctcagaaatcaccactaaagaacttatccatgtaaccaaacaccacctgttccacataaaactattgaaataaaaaataaaataaaaagaaataaaaaataaaaataaacagaaaaaaaaagaagtttttggtccataatgaaaacaggtgcctgccacagacaggcctatctgggatggtctgaagattttgttttatcttatagactgtttaggttacatgaattattcttaatgatttaaaaaatgttttgatacaatttctaaagtacttccaactttctaagccatgtatttcagtctgtgttattaacataaataatttttgaaatgttttccccttttcctcttttaaagccttcttctggtcatgacagaagggaaaaccttaattcatatcagaggaactcctctccagaagacaggtaaatagtttaatatgctctgaatgcaatgtaaatttttatagtaaggtttatgtaataatttagctcttagatttctaattttagggtggataacttctttttaatggttttataaccaatattacttgaatgggctgtaggaggaatcatccttaaatgactcttctaggagtttctagtaaataattccagatattatgtaatttttatgtgaaagggagtaatttttaatgtttcaaagactaatggaatgaaagtgtaaaatggaaaactgagttgaaattacagtattcagaagtgctgcttttgctactgttagtattatctcttacatgtacatagctctgtattgtctttaaaatatttttatatagattataacaggggtccccaacccccagagccatggaccaggccacacagcaggtgagcagcaggcctgccagcattcccgcctgagctccacctcctggcagatcacctgtggcattccattctcataggagcacaaaccctcttgtgaactg

SEQ ID NO: 97656 - DNA, 1135 bp, Homo sapiens
gagactatgagttactacatgatgtcaccatatttgttttgcttcatgaacaatttcgaaaaattttaaaaggtaattctgactgtatagtattttcaactactgcactgacttacaatctaaactctgtgataaaagaaatagggaaattcaggttcttaatatttgattcatacctgaaagtgattcttaacttggtgaaatcctattcatctaccaaagccaaattcaagtccccgttttcccactttcatccgttagcactgtatgccacagtgattgtttcctactcaagatctcctgttagcacttactatgtgtgccagtcatttgttacttgatcatatttatgaaatccttcttcacaacttcaatatttttggtctcttcctcttgctcacaacagatgttgcggagatgtgttaaaaatcattagtacagaattggggccttctccttaatgtaatcaaaataactttctttgccttgtaaaagaaaaaggagataatgcagttttattgtcctctgtcttctcctctctcctctccctgccccctccttcttctttctctctctctctctctctctctctctctctctgtctgtctcactcactcactctcattctggggaacatataatctaatgtgtttaatcatagaaatctttataagcctgtctgtcttctacaagatcataagctccttggcctttcttatctattgtatctttcagaatgtctacacaggaaggactatgtcttataataagtgatcagtataaatattgtattttatgttaccattgaattgaatgaatcttgtgctttgtatttgacctaagatctttatgtgaagttttatagaaacctatgtcatatatattgaacatttctatttcactgtgttgatgagtgaaataatttttaaaactttcttatattagatacagaattttaaaatggttgaatttaatgcaaagtaacagctaaactatggttactttaagttatcaattttgattacatgcttattcacctatataaattagttagtggatactattcaaaaaattcagtaatgagactattttgcattgtacttgtgattatgttagactcaaactgctgttaatt

SEQ ID NO: 97657 - DNA, 1050 bp, Homo sapiens
tttctatgtggattaaatttatttcttaatgatcattattgcaaggatattgggtatttcattcttagtctgtgtagaaacattggatttttatactcagtttatatagagtttctcttctatcgtttcctcaggttttttttaataatatcacactactattttatgatgtaggtatgtatctccctcactatgagaacatttttaataaagttataggacatccctttttaaattaacttttgttccgcttggtccttagaataaaaccttctatttgctctcttgttcatggattttttttctacttgtatgtgttaggtatacattattatgtgtaactacttaaggatttttacaatttttattatatttgtttatggattaagaaaaataaagcggtcaaatgtccattgtatagaaaaaatatatcatcatttttcacactttgttagtgttaataaagctttctttggtatattttataggtgatgtttgcagacagaaaaagtaaactgtcaaggaattcagagcattgggtacttgttatttggaccagtttgaagcatctttgatttattggaccaactggcaacagaaaatgaaaagtagtgtggcacagataaaagtaagtgtttgaaacttaaaatggaggatgtaaacttatagtcaattacctattctttaaatataaatgcatttatgtaattaggacatcagagccagacagtagaatggcacttaggttggtgcaaaagtaattgcagtttttgcaattttaaaaaccacaattactgtttgcaccaacctaatacatccatctaacttaaacaattttaaatgtagatacttagctatatggaagtattagtgtgcaagagggcagttgagaacatacagaagtgtgtgtacgtgtgtgtgcgcgtgtgtgtgtgtgtatacacatggatgcatgcgtcaggggcctgcatatatcatgtgaatgatcacatgtaaaagaaaaacaagtaacaaacagtgcagggaaatttctgcatatctgtttacaac

SEQ ID NO: 97658 - DNA, 1116 bp, Homo sapiens
tttaaatgaatcattaaaaagttcaacatgtagaatttttctttaaaaccaacttaaatagaaatcaatactgtactgtaaatcaagagacagcttattgaaatgttgaaactaacaaaaatagacaaatttctattctcatagatcctgcattctgttgaaaagaagcacattggggaatcttcctatgcgtaaaaaaattaatagtatttccaaatgattggatcacttaactctttatttggttacttaaacagcctaaaatagactagcttcatgatacaggaaatgaatgggggtaatactacctcccaatttataatgtgaggttttcagtatagataatggtgtcactgggttcattaaaatgtcttttttttttttcactcctctgtgtcttactgtcttaaagtgtctgaaaatttgggctgtctactctccacacagagttgcagaccagtcaaatgcttttatattacttacttcttacagaaaacaatgtccagaactgtctgcacaacttctagccctgtacttgaacctggcaatctagtcattcaaatggttatgagtcagcacacctggcatatgcaatgactatgaagcaaaagggaggacagctctgcaactctttatttgtaatttttggagccagaagtgttttgatttcagtatcttgtagattttagaaaactgcagtgcctatactacatattaagtaatccccccttttggggtctggagtaacatcctctagtcaaaacacattaatatttctgcactgtatcaagtcacattaagtatcaagtcagtatatgctaagttttgctctcaagtgagttgccacatgcttaagaataatctttgtattttcagagctttacagattttagaactgcagataaaggattttcaacctgtacctggtgacttttctagaaagagacaggagtattttgacccttttattttcttgaaattgtgattctatgctgacatcaaattataattttttggccttatgaggtatatcatgaggcaattttttcactaatatgtaaattaagacaggaaaaaatagcaagaaacggtttttctaaaacaagtaagttttcc

SEQ ID NO: 97659 - DNA, 1022 bp, Homo sapiens
ttttcccctttcgatatggataattcctacttgttctttaagactcagcttcaagacctacttctttctgtatgtcccaaaccctcttttccagtaacacttgtttatgacattgttgtagcacttagacatttcttctttacccaaggacagagtcctcaatgccttgtctgttgtgtaatgtatatatctccccaccgtacatagacactgcctttagtaaagaccatgactgtactttttctcttagcttcatacttcctcattttctctgtaagcatttttcttttttcatcttcttttactattgttttgagatgggatctcactatgttgcccaggctgggactctaggcacatgccactgcacccagcttttctcagccactgaatataaatatcaattatggccctagcctaaatggaaccttcccccagcctcctatatacagtgacagaatgagggggaaacatgggcagatttggtagaatcagtaggatttggtgacttacagggagtaaggaaaaggaaattgccacctgggaagctttgtaagtcatatcttagaagaagagctggtttaagatggggagaaggaaataattagttccactgtggatttctttagttcagatggcctttggcacatccacttagaggtttcctgtagcaaattggacatcatgatttggaactctagagaagattggctggagtaaaaagttgttttcgcatgttaattaaagctatggggatggagatgatcttccacagataatatggagaaagaaaagataaggactattcattcatccatttaacaaatatgtattgagagcctctagtgttgggaatgtagcaatgaacaaaacataaattcatgagcaaatactaaactctcaggcatagtaaatattaaagggatggacaaatgaaggtggtgtccctgtaagttgacaagtgagaacttcaagaaggggattaggtgccaaatgctagagcaatgtcccataaaagaagg

SEQ ID NO: 97660 - DNA, 1034 bp, Homo sapiens
ttttccctccccccccttcccccccccacagctgcctccatttccttaaggaagggtttttttctctctccctcccccacaccgtagcggcgcgcgagcgggccgggcgggcggccgaggtaaggcggcggggccggggggccgcgtggggggcggccggggcggcggcggcggtgggggagggggcgggggcgggcagctttgttcgcgccgggcgcccgcgtcgccggtgtccgcgagccgcggcggggccggctgggctgctcgcatcacttggcgcccggcgcggcgagcgctacccgcggcccccgcgcggccctccccacaaagggccgcggagctgcgtggccgccgccgccggccgtggctcgcctccgcgggcgcggaaatttgttgcacttcttggggctttgtttatttgtttgttttttctctgggtttcttatttttttcgttattttggacaaaatgtcggtccgtgatataaaaattgagcgaggaaccttggtggcattgggagctttgcagaaggtgcagtttgaattctgcttttcccagggtggcagctcggtcttggccggatgaatcttcgctgctggccgtggaaacagctagagcagctcgttagttgatttttaaatttccaagtgttgtgtttaaaggctttacgtgcactgaggaggaatcgccaccttaaataagcatatgggcgattaacagggtgtgttttcctctcggaaagggaatttggtagctttgaccaatgtcagtgtgtaaatatttagacgttattagtgacttttaaacatttttcagcgagatctgttatttacagtgtgtcatatgttattaatgcttgttgcctaagttccttggcaaatctgtttcatgccttctgagaaagtagacaattgatagattgtccaagagacggaaaaaaatgtgagtgggttttctaacttgagttcggcaaatcccttaacgctggcgttgtgtgacacatcacctcccttgtacgtacccctgttgtacga

SEQ ID NO: 97661 - DNA, 2457 bp, Homo sapiens
gagggcagtgtaattccctggttattctgtagactatatcaaatcctttttgtctcttctcatttcactaacagaattcagaaggagctagctgaaataacccttgatcctcctcctaattgcaggtaagaaatgaattttgttgttttggtttcaaattgtggaaaaataccaagagattgatgtattgtctggatatgtgtgcagcagaggagacaacatttgcttctttacagctttgcaagtgcattaaacaaaaattgtagaaggtgaactagataaaattgggagaaaaaatactttttagcataagtatacattgtggatttatgaatatactgattttgtgcttctgatattcatatgaatggtgctgatttttgttctgatgtatttctgtagagggtgttttttcagaagtatactgaagaaacttctaaaattttgctaagctttaaagttactgcttgtgtgtgcaatctgaactgaccttccacatttagaaattgctgaatgtggtgttacaaaatgtaaatgcagtaaataagcatatagttggttctgtttgatttattcagttactagccttaaggacaaattttatgggctaagctaatggttttagtggtcgttttctacagaatgcattgttggaattatttacgttttaagcaaatgtcctaattgcttgggaacatttttagtaattttggtggttggaatatgtgtatgaaaagcagtaaatgaattggaattgtgggaattcattttagtggaactcaggtagatgaatttaagattattggttggtataagatacattaaaagtagctggttgattattttttctctaataatttttttcatttcatttgtatagcgctctattctttttttaatgactatggcttacaaaattgaacacgcatagaaaacaatattgtagatagtttgtgaagagatatgtgctcaataatgcgagtggctgcaaggaattaggcagttttatggtttgataggacaatgttttcatgtttaacctgtatttttgctacaagttgtattcacttgggatgatcagaccctgtctctgaagtctgcttgtgatataatagggtataatccagttgcttcttattgtgtatgttaactggatcctcagataaggtgatttgatcctgatttatccgatgaatgaacagtttgcttgtatttgtaatttcagttcaaacaggaaacatgaatgtaaactaattttaaggagatggtggtatgtgagatctcaaagtattacttaagagctatgctgtccggtaatgtagccacttgccacatgtggctattggcctcttcagttgtggctagtccaaaatgagatgtgctataagggtaaaatttatacacattggattttaaaaacttagtacaacaaaaggatgtataatactgcattgacttaaaaaaagttcattaatattaaaataatattttggatatatttggctatataaaatgttaaaattaatttcacttttttactatgttaatatgttattagaatatttaaaattacgtatgtgacttgcattgtatttctattgaacagtgccgctttagagaacaagtaaatgaaagtattttccctccagccttctaaatggtgtgtcaaatctgtagccatttagggaggtcaagttaaatttgctccctggaagaatcacttaacttgcagagtgtattctgatatttcccattatgaaaaatgtaaagatctatcaattcagaactcttaaatgttttaaaattgcatgtagggtcaaacatttttaaaggtttctgttgattgtctgcaaatgaaacaaactaatgtacgtgcataaatctagagagcctagtagacatgtattaagtgccctcagagcaatagcctagtgttgcagttgccaaagaaatctactttacatgtttaactccggaatgtttcctcaaggtcactgaggattattttagagggagtagaatctttcaatgagataggaggtttcacttgtctttctctttatataccagatttcatttaagtccttgaaataatgcttcctcatttagtgatcagactagtgaaacatcaaaactttgggctttctgtgaacagtaacatggaacacctcatccctgctttcccttgtcacaacctgtgatgactatcaactgctgcaaatgacatctttcagttctcaggttcttttaatagatgagtttatgtgtggctgtggtatgtgaaaaacagacatacagtatgtcttagtagggaaccaggataagtggtttcttattatttggaggcagtgttttaccatatgcctcacatgtaaaatatccagatactttgtcttcaaattcttgtgggtggaagaagacctagtttttgtccttgagtaggaattggaatactga

SEQ ID NO: 97662 - DNA, 1328 bp, Homo sapiens
tacatgacagatttaattcttcctcagggaagaaatgtaaagtatatctgtgtacattcaggaaaaagttgaatgaaacacaagaaaactcagcaaaaccaaaattattcagactgggatgatttctctaaaatcccttcctgtgttttaattaatgaaatattctttaattagtatatagttatgtctagtacatacatacccagggtgatcttaagatagatttaattgaattgtgtatggctttatacatgttttaatatattttgatagcattgatatttcttttcccgatagtgtaaaagtttgataatgacgttatttccagtgatttgatgttattttaaatggttttaggtattggagggccatgggccatagtgtactaaacatagggatatgtttatttattggtttcagtttatgctgtttacataaagtataaataatttatacatcaatgagagtcaagggaaattgtgttatgggcatttccctatttgtatttattgagaattgttgactagaattgtttagtgatgtgttattaagacatttactttccatctgtttcccagagggtgtccttgtcctctcctagtcaccacttgtgcaaacagcgaaagtttagaaaggtactggatttctaacttaacccctaatttctttccatataggaagaagcacaaatatactgacgaatattttaagagtgtatgttcagattgaatctatactggagatatttgggggtatttgtattaataaatagtttcttgatgtgggaaaggccatattgggggatatgtattacagtttcaagttaatagtattaatatattgactagcaaaacctgagatcaggtgatttcgttgactttcttctttaaaaataaaaaaataatgaaatcataaaagaagcagttgtttctaaaccagtagttgataatctctagattcctcattagcctaattgtctgaggataaattctgctttcttctgagggttgctaccactttccatcattttctagggcggactagaactttgctacttaaaagagtgagctgctgactgtcagcatctgcgtcacagatgaggttgttagaaatgcagactcttgcttcccccaacccccaacccagaatttgaatttaacaagattcctggtgaattgtatatataagtaggtttgaaaagtgctggtactggagcaagactgtctggtttcagatccatgctctgtcactaacttgctatgttattaccttagatacattttggaatatttcggttcttctcctcagttgtaaagtggggattaaaa

SEQ ID NO: 97663 - DNA, 1581 bp, Homo sapiens
acatggtgctttgcatgtgaaggtctgttaataaataaattgaagtctctcaaattgacatagaaatagcaattccaggcaaaacaatgacttcagagaaaatttattaaatatcctatacattctttacctttttcataattatgatacttaatatttaataacctattcaaagtttacctagctactgtttttgcttataagaggaaattgatactcacagtaggcctagttatttcctccatacgtgccagtgtagcagaaatactcagtactctgtgtgactggaaacattttccaaaagagtgaccaactgaaaataatattcttcccactaaacttcacatttttattaaggatctattaagttcaatgcagataatgtaattagaaggtgggtaaaacagcatgtgcttttaaaaaaagttatatgtttacttcgcagctacatgctcacataaccagtcatattcctctcataaccaattagtactttatgctctccttaaatgagttgctgtaacaacagatggatatgtttacttttcaggaaaatcagcaagtcttgcatagagtgtaaggacattcagattgagaatgaagaacttgtcctttcagtctcttcttccctatcaatatgagataaaaacataataaaatcacttgtaaatctagagaaatagaaagtgatttttttttccacataccaattttgacaggtaagtatatttgggcattttaattggaatctggaagctgaaacatcttcaaacttttaacctttcttttgccttttgatcagtggttctcaactgaggcaatttttgtcctccccttccccagccaccaggctaggcgacaattggtaatgcccagagatattttttgcttttcataactgaaggagaagggggctaccactgacattagtaggtagacgtcagtggtactgctgaataccctgtaatacataggacagacccccacaataaagaattatctgggccaaaatgtctagtgctgaagttgagagaccctcctatagatatttgttcctgtactttgcctcttgaatttttgaatagtttgcttttgactgttttcctgtcttattagtgatgcatccttaatatattcacctacaccttcctcagctgattcttcacttcctgctacttctatgcgtagtttacatatgtcttatattatttgtcatacgtgtgtgttattttttatgtgaaaccacaggaatgactaccttgagtacttgctaaattatggtcttctgaggccagaaatgcttacagcagtattttatttcttttaggtcttgtgccagttaattatatccctgcgtgatctagctttaggctggttatatctattatgttctactaggagtactaaagtaacatcatggagaaataacattggacagtcatcaaaattcagtttgacattgaattacacacaggttagaaatgtgtgctcttcatttgggttttattttcatcattatgacaatacacaagttacttcaatttttacaagttcacaatcctttatttgaaacccttgggg

SEQ ID NO: 97664 - DNA, 1002 bp, Homo sapiens
aaactcataaactttcttaaaacatgagattttttttgcgattttgtttgtttgtttttttagctcatcagctattgttagtgttagtgtattttatgtgtggcccaagagagttctgctgctgctgctgtggcccagggaaaccaaaagattggacactcctggactagagcatatacagtatggataaactggacaaaagtatgattcaagcccaagtggatggagcagggcaatgtgagatttcatcgtgctacttagaatgaggtacgatttaaaacttaagaattatttctggaatttttccatttaatatttttggactgtggttgacctagagtagctggaactgtggaaagtggaactgcacagataggtagggactgctctgctacttctgttacgtgaccatgactgaaattacttactactcatgatgaaagggtattttcatttgctttgctttcttttttacctgtttcctaatagctgattttggtttctcagttgttgtttttggtttgttgggttttttgtcttgtaacttgtatgcttaagagttcttttctcttaaggtgaaactatcagtgtctactcgtttttaagttgttctttgtttactgggttgtttttccactttgctttcaaatactcttttaatcattccattcattctagatacacagtattacacagaaaggaagataatctttaattcttaaacacaagtattaagtaatacttaatactttggatgtattttgccttgcattatttaagtgcaattagactataaaaggagatgttaaatttttctggttgtgttgtgattacaaacaaacctagaaggctcagtggctcaatgtataaagatttatttctcactcatgtgaagaccactgtgggtccagggactatcttgggcagctcttctctgtgttgacttatatctgtgtatcttgtagctctgacatttggaacatatgcctcaagcaatcctcc

SEQ ID NO: 97665 - DNA, 1095 bp, Homo sapiens
tgccttttttggaagcttttggactagttatgccattccaaagtttttttgctgctttagtgttccagagcaaatatactctgtcattctgtttaacttccagcttgtctggggaaaaataaagacatctctagtccaaaattgcttttgggagtatagttccacatcttttggtctgaatgaaaggcctagggaaacatgaattttgttacctttttattttattttccttcacttataaatcatcatcatgatccccctttacatccatgcgtctcactttttataaacactgtttattccctttctgaggatggttatttgtagttagttttgccatttacagtcttataggtcctttacaaatggatcattttctcacattaaattctagtaggtcaagaatccatttattcagggtcccgaagagaatcgatctcagaagattgtggctacatattttttatggcttcctattgctttctgtagtcttcttaatttaaacagtagcaacagcaaaatatagagggtaccataaggcattggctttatgatttattcttgcctcatacttgtttcttagggtattggtgttatttgttagatttgtgatatatatgcttgtactaaatttacctggtatcacaatgagaagaaacctggcatttgaaggctttgaacgcaaactcagagacatgtaatttatatggaattcaatggcagttttaactagtgtgcctttaatttttcttcattttatgtttacaccagtgtccttgtaaaattttaaaagacatttttctcatcttcccaggtgcttactatccacatttccattagaagatgccaaatactcattttcttcttttgaaaaccctaaaataagcacgttgcaattatcacttttcccttctgccgaggtttcttaattttggagaacttgaaacatatgcaaaagtaaacaggctggtatgatgaacccccatatatataacctttatccagtttcagtagttacctaatcatggctaatctggcttcatctatgcctccgtccatttcaccctcccattattacattaaaaaaatctcaga

SEQ ID NO: 97666 - DNA, 1903 bp, Homo sapiens
ggaggcggaggttgcagtgagccgagattgtgccaccgcaccccagtctggcgaagagcgagactccatctcaaaaaaaaaaaagaattgcgttaagtaacttttgatttgggactaaatatgtttaatacaaggaatacttgtcagtttatgtatatgtcctttgcacatgcttacagcatgtttctttttaagaaggctaaggcatcatagcctcctatattgtgaaaaaagtaatatatatatacgtagtaggtgacaactaaggcctttattgtttcttggccttttgccaaatgtaattttgaatgctagtgtttgtatgataaatcttcagacagacaatgtcttacgaagaaaatattttggaaggattttaagtaaaacccaaaacttttatttgcatatacttgcatactgtcagcctataagacaaactcagcactgtgtgtaagttacttttaaaaattgactttgaatgcctgtatcagaacttatttggttgcagcggcatacaactcaaaccaaaccagcttaagtaaaacataaatttgttggctcacataactgataaagtcagagtagatttggcatttggcatgctgtcagcatctgatttacctttccatttgcttgctttccttcctcttagttgactccatgattagacagactttctccttgtgatcataagataactgatagtacctcccagctgtgttcttcagattgagatgcagtgtgaaatagcgtgaatcttggccccagttttttcatcagaagtctaatgcatttcattaactccagctgagtatattatatccatatggttcatgcctaggccactgctctatccccaggataggaatggcattaattccattggaagcatgtagactgtgagaaggggtgcaaaggtgaactgggttaccacaagttaagtaaatgaagctgatgctgagtagcaaaattagtatgtatctttttggactgataggcattatctatttctccatagtccttacctcttcctattatgatggttcacttaactaatttatattacctgtgtggcaccttactgacatttgggtttgattcttctggtttataatttcctgttatctattgaataatttgttacggttatatagttatatattttttctatttaacagacctacatttttagctttaatcttttgtatatgtatttaatatttttgtgaatctgaagttacctttgtttgagttgtgaaatggcaaggatgtttataaagggtcaggttaattagtttttcaaatggctttaccaaacacaggtttatgtgttggttaaagctcagctggtagtcttgaactgcttctggcaatttcttagaagaggctgtagcccagattttggctcatgtgtataattatagctaagccaagagctgctgatgtaaacaccagtttatgggctaaggactgggaggctgtcatagttggaaccaaggaggtccaagcctagtccttctgaagaacagaattgggaggcatttccagagtctcttactctgacagcaaggcagaactggagagggtaaggaggcagaagtctgtagggtcagaattcgtatcaccaggataaaataaacagtgagagctagaattgagcacaaatagtacagaaaaaattccccagtcaagattcccttgagctggcattaggtttaaggccatagagtttgcttaaatagacatactttcacttgttttaaagtaaaggcacacctccctgttcaatgtatatgcattctgttcatattgtttgtgatttcagatttttgttgccttccaccttttgccgttccagattccatgaaggatactacttctggatctaggatggccagataaa

SEQ ID NO: 97667 - DNA, 1122 bp, Homo sapiens
cctaaaaatttatatacttaaattggggaggaaaatatgtttgcgttcttcttagtggataaatggaagattgcgttatagtcatatattcatagagctttctgatatacccagttaagcaattttgatacatccttcttcgtccttccacgggacattgacctgtctctagttctgcacatgttacactgtattgcatttagccttttcataacaataaattcaattagatgtcatttatttcttttatccctactacagtgcctggcttatgatgtacataaaataaatattagtggataggaaaatttttttataaagaatcaattttttgccacagtgcattttttcatggttgacatttattcaagaagcatttattgagcaactcttatgtggaaagcattatactggctgctttgagatatataaaagaactataacatctaaacatttaatgttagaatgaaatgtaatttctatttagtataaggtatactacaaattataggatgaaggtgggtaatcactagaggtttcagatggatcataggtaaaaaatactggaaaaacagtttagtctgatgacaaaggaaatcactttttagtagctatggtattcaaaataatcatagtttaaaatgtcatttaacagtttctggaatttttataaaatcattctccttgctgtcatattgttagatccagagagttagactgtgcagtaaatgagctatttttttaccttagaaaagcagaagacttgaattttcataagtagactcttagaggttccttctgatgcttcagcacatttccttttctccaaagaaatgcttcagggccgagtgcagtggctgacgcctgtaatcccagcactttgggagacccaggcgggcgaatcacgaggtcaggagatcaaaaccatcctggccagcatgatgaaacccagtctctaccaaaaataaaaaaattagacgggtgtggcagcacgtgcctgtagtcccagctacttgggtggctgaggcaggagaattgcttgaacccgggaggcagaggctgcagtgagccgagatcatgccactaacgacagagcaagactccgtctcaaaaaaaaaaaaa

SEQ ID NO: 97668 - DNA, 1046 bp, Homo sapiens
ttcctgctccttccatgctgctgtatgcttttaggcaactactttaataatagaaggcttcttgttctcccttccttttttaattaattagttatataaagtgtagtagtaatggatattaaaatgatagccaatgagaattgaactagattatgattatataacctcagataaaatcatttgtgtataattcataactttaaaaaatgcctgccacatgtgaacttcagaaacttgggtagctgacttgataaagtgatgtttagacctgaaatttcacacattttgtttcgttatgtgaccttttttttttttttaagttgacttacttctaaatatttgataagtcactaaagactgttactgttgttaccttatgctcggcagagatacatatgcaatagatagtgacagatggatattcattgtggtatcctttattagagtattggaaacaacctcaatgcccattaatagatgtaacgtttaaaaagaatgtgacaactctatatgaactaatagggaaatatcttcaagatatattaagtataaaaggcactggaaaaaaatacatatacacaacataatattctaaatgcttgtcagtgcatgtaagaactctgggaagtaatgttgtaaatgggtaacaattgtttgccagggaaagaaacttctgagcagttggagtcaggaaggaagatagtttttttttactggctatggtttggtacaattcaaatattgtaccatatgtacatatttttttgtttttaaacatcaaaataaaaatttatatcaggttcactctctagttcagaattctacttaaaacaaaatggcaagtaagttttcaagtgtaaatattgatagtgattagagtcatatcaggcacagaatgaaggaagcattttatttgaaatagcatggtattgtaagactggggttttattttaaaattaaccatttttgaactattcataagcagaaatataaccacctagtatacttccattttgaatgaaaggccaaaattacaaaatagtttt

SEQ ID NO: 97669 - DNA, 1174 bp, Homo sapiens
gcaaatctttatagcctttacaatacggacttctgtgtatatgttatactgattctactctgcttttatcctttggagcctgggagactccccaaaaaggtaaatgctatcaagagtagaactttgtagctgtagattagttatgtttaaaacgcctacttgcaagtcttgcttctttgggatatcaaaatgtattttgtgatgtactaaggatactggtcctgaagtctaccaaatattatagtgcattttagcctaattcattatctgtatgaagttataaaagtagctgtagatggctaggaattatgtcatttgtattaaacccagatctatttctgagtatgtggttcatgctgttgtgaaaaatgttttaccttttacctttgtcagtttgtaatgagaggatttccttttaccctttgtagctcagagagcacctgatgtatcatctcaaacacaataaacatgctcctgaaggcatagtttcctgtcgtaatattttaagtcagtcttgttagaaagtgtgtctgagatgattgttgatgaagtaaaaatgtggctatgaagattactaaagactagcacaaataaacccattcttaaattgaaaacatttaaaatcctattaaatgcatagagtttttttcctttgttattgaaagaatgaccttaaataatcaaaagtggattttgacccattggtctcaaacacataaagttgtacttcggtaatatgatgtttaagccaaaaagaatatgaaatcctggctcgctcactcaggaatctggtaatgtcttatggaacatgttgcttccaaattgatgatttttgttcagcactgggcaatattgtcagatggtaactgtgatgtggtagctagtctgtgatgcactttttacttctaatcctggtcttgaatgttcatgttgtgtattaccattcttactatggcaagtggccagcaaatacagccagaggcagagatgaacacagaaatctttgtctgccttgaaggtagactagaactgtgttagtgtacagatgtgatattatttctcaattggtaaaataccaaattgtaaggtttttagaaggttaaatttcttctttctagttgtaattctgaagtgttagatttcttgaaagttagaatttctttgcaatatttag

SEQ ID NO: 97670 - DNA, 1055 bp, Homo sapiens
aggtcactaaaagcaacttttttccccaaatcctccaatctctaatccctaaagtttatctcaagtccagctcctttgatggaaacctttctgttacactgctctcacatacctgttggtctgtttctctgagatgccgtcttcacaaacaccagaaataataaaagggaatcaagtatatgcatatttccaagtgccaacaacaagccaggtgccttcctcaacaatgtgtgccctaaagccaggaattctttttcctttttcttttttctctttggaaggaggtagggggagatgaaaggtggttatgctatataactccttagctgatcttcactttgagtttatctgctctacaaattttatgtgtttgctaattacaaggttctttctggcactgtgatacatacagagatgaatacattttcacatccttaaacagtttatcatttccctgtccagatagacttttccctttgctaatgtatatccatttttattgaatgacaaactgaacagatgttcctgatgatttagcaatgaaaatattagtataatatttagtaagttttactctctatatattaaatatgcttaatactatttgatgcttttaaaataattatcttaaactacacttagtaccctatgtttctagcatgcgttttggcattttattcagttttattccatatccatatttctggataatgagcttttggaggataatatctatgctttgtgtctccttatttcagtatctagcccaatatgtaacatgatgtatgtttgctgagtgaatgataattatatcatgggtgtaagtcttctccataaggttatccagagaccatgtgaagcatatctgtcatgtctcctttaattccccatgttgattcagtgctttgtatgtggttggtgccatatatatttaaattgttaaatttgaaactgttaaattgaaatatgggaaatagcaatgggttgttcatataacctacttaatgacaatgtgtttaaaatagagactgacttaatcttgtaattttaaactt

SEQ ID NO: 97671 - DNA, 1033 bp, Homo sapiens
gaacatttccttaattcaccaactcttcttcaaggttttctgttcataggactacaactctttgatgccctgacgtttttataattttactactagcagttgaatgtattgatgcatgtaaccttgttgctagccatgttaagtttcaatcaagcatcagaaaatggtttgcttaagatacttggctaggcacaccagtattttaaatgtgaattgatatacttggtgcttcaagacagatggtgcattgcttctgtgcctaagagcatttggcagtgctgaaattgagccttctgttcgttcaaaataattcactgatgagtgggcaactttatacttttttgagggtttttttttttttttttgctgaattcgagtattggaagtgttttagcttacatgttagctatatgtaagtaccttcaaaaaatgacactacaggcataggcaagtacataatcgggataagtactgtatatcagtttgacatatggtgccacatgtttttatttttattatagtgatatgtttctagtaagatttacaagatatttgacccttcaacaacacgggtttgaactgcacaggtccacttaataatgcagattttttttcaaaatgtatcagaaaacttttggaaatttgtaacaatttgaaaaaacttgcaaaccatgtaccctagaaatattttttaaaatagttatgtcatgaatgcataaaatatatgtagatattagtctatttatgtgttaacctacttcgttatcagactcctggtccactgtaggctactacttttggggagtcaaaagccatgtgtgggattttccactgtgtggcatcacccccctgtgttgctcttcaagggtcacctgtttggccactttggccacatttaaacatgggcccaaacttttcagatttaaagttaacagactgatgttagttaagctcagagggaaggcttttcaatgaagtgagtttaagagatcagagaattttaaatctcatgttggtcacctttcctgtttca

SEQ ID NO: 97672 - DNA, 1739 bp, Homo sapiens
tttgatttatttcatttcctatgtcacttagaccttctgtctataaataaatatttaaatcacactttagattttagaaaatgttgagctatttgttacacaacttgtgcatattaactcttctataatacatcttttaacaacatagtttcacatttagaatttctaattacattgtattttaaattatgtcttgatatgtgagtaggacgcttgatggtttgctttgtaaaatgctctaatgtaagagcttattgagaaggaagccagtgatttaataaaactcatttgaaagcctgcatcatttaaaaaatagcaagatacggtttatgaattttaggtaaacgtaacatggtgatttatctatcttgtccaatactttcagtaaacagtatacttgttataaggaacagtatgtcataatttttggtataatctcttagtaaatttcttgatgtctaatagaaatatttaatttcagattaaataatggaagtatggctcttataattgcccgaaacacttctcggccagaatttataaaacacctgaaaagatatgccagtgtaaaaaatcaggtatagtaaattctttttgttacttatttgcaaagctattaatcatgtagaaaaagatgctgcaagaattgacatcgaatcctgcctcataagaaggttttattttcttctgaatatattaatcttctttttcccaatctatttcatccaaattttgaaaagcatccgccaggattaatatagattggccttttttgaatgatgaattagtggttatgtatctgtaaccacaaagataaaataggaaatgtagtgttatattgcaatgtgaaataaattaaggataaaattccatactcaggctgttcttcagaatgaaaagaagtgaaatttgagagtttagccttcttgatattatggcagcagactttctaaagttatgatctttagatcttcctgacatttgtttgcatatctgcattgattgaaatagatctgtagatatgtatttaaaaatatgacagttttatacaaatattcattcaaaatgagaatatgtgaagatatacatttccacttaagtgatttgctttaaagagaaacagtaactattacaagccatattattttggcagctgttttgacctgattattaggaaaatgatccttgaactatgtgaatttctgaaattgtgagtctttgaagtacataggtatggttgtaaaaccctatagtttcacactttttctttttctttctttttttttttttttttgagttagagccttgctgtgtcacccaggctggagtgcagtggcgtgatgtctgctcactgcaacctccacctcccacgttcaagcgattctcctgcctcagcctcccgagtaggtgggattacaggctcacacctccatgcccagctaatttttatatttttggtagagacagggtttcaccatgttggtcaggctggtctcgaaactcctgacctcgtgatgtgtccacctcggcctcccaaagtgctgggattacaggcgtgagccaccacgtccggcccacacattcttaaaggtataaaatggtgcttggatagagttgggagataacagacgggaggaggaggagagtaaacccagccaatgactggcagctgaaccttgcttatgtaccttagccatagcaagtctctccatttttgcctcattatattttaaaacttt

SEQ ID NO: 97673 - DNA, 1037 bp, Homo sapiens
taagatcaatacaattgagcagctgttagcatgtattggtttccttatattttaagtatgttttcatgttttgaaggtgtaaagggatgacagtatgttttgttgtggttttcatcatacagataaaaacttattacagttgaaatcttggtgaacataatacattttaaaatttccattcctcacccatttatctagatatttagacacagtaaaataaataacatggatacatttttgtcatgtgatttatgttttttaaaaagtagaaataaatttctctaaaagttatttttattttttaaatttagcatttttcatatttgaggaaaaaacaatatgtcttggtaccctagcttctgaactaataacacacctgtcattttacaggttattttaatgtttttcattgggatcaaacctactctggaaatatctcatgggtgagctttatttttatgaaatgttcttggcacttgaagacctttgtaggtacatgccagactcatcttacatccagttcttctgcatggaaaatatgtgcattgaaattctaagtgccttttcaaatttgaccttcttagagaataatatgagtcccaacaattaggaaaactatggaatgccttttggcctttacttttcaaagattttcagtcagtaatgtttaattagcattcattgtgtacattgtccttttttgtgtgatatggctagttccaaaggaatattctagaagatctcagccttctgctattgaaggtgataatacactactaagttatgtgttgctttacattaaaataatgttgcagcagttacttattgcttaactagcgggtataggacatcaggttgaaataactgattttgaagtgaagagttcttgtttatatcttaaactaaccaagtatgttcattaactttgagaataacaatgatctttttcattattcttgagtagactggataaatcagaaaacccatgttagaggtccctgtaaaaacttcagtcttatttggtaagtccctttata

SEQ ID NO: 97674 - DNA, 1032 bp, Homo sapiens
cttccacgttaagcctccgccgcacgcctacagcgcagcgctggagcccttctttgaaagccctctgactgattgcaccagcccttcctttgatggacccctcagcccgccgctcagcatcaatggcaacttctctttcaaacacgaaccgtccgccgagtttgagaaaaattatgcctttaccatgcactatcctgcagcgacactggcaggggcccaaagccacggatcaatcttctcaggcaccgctgcccctcgctgcgagatccccatagacaatattatgtccttcgatagccattcacatcatgagcgagtcatgagtgcccagctcaatgccatatttcatgattagaggcacgccagtttcaccatttccgggaaacgaacccactgtgcttacagtgactgtcgtgtttacaaaaggcagccctttgggtactactgctgcaaagtgcaaatactccaagcttcaagtgatatatgtatttattgtcattactgcctttggaagaaacaggggatcaaagttcctgttcaccttatgtattattttctatagctcttctatttaaaaaataaaaaaatacagtaaagtttaaaaaatacaccacgaatttggtgtggctgtattcagatcgtattaattatctgatcgggataacaaaatcacaagcaataattaggatctatgcaatttttaaactagtaatgggccaattaaaatatatataaatatatatttttcaaccagcattttactacttgttacctttcccatgctgaattattttgttgtgattttgtacagaatttttaatgactttttataatgtggatttcctattttaaaaccatgcagcttcatcaatttttatacatatcagaaaagtagaattatatctaatttatacaaaataatttaactaatttaaaccagcagaaaagtgcttagaaagttattgtgttgccttagcacttctttcctctccaattgtaaaaaaaaaaaaaaaaaaaaaaaaaaaaaaaaaa

SEQ ID NO: 97675 - DNA, 1121 bp, Homo sapiens
ttgaaaggaatcagtaattacaaggagaccgaagataaatgtttccctgacagtgaaggcagattttagtgttttagaaactggcatgacttcacagtgtttgaattgaacattaatgggattttggaagaaatagctgactgggaatgttgacacttgctattcaaaagactctaggctggcagccacaggaacttcattaaggcaaatgtatagacttaaaagagtaaagtggttgtgacaaaaaggatgacaatatcccagaggaagtaaccacagtaaagaaaaacaggcgggccgtaggaggaagatggcggtggggtcgcgcgttacccgggaggagattaagacggagccagagaacccgatcaaccgtgagaaaacatgcctgctgctgctgcgcatcttcaccaccaataatggccaccaccaccgaacggacgagttttcccggggaaacgtacagtccagagagttgcagatctacgcttggatggatgcaaccttgaaagaactgacaagcttggtaaaagaagtctacccagaagctagaaagaagggcactctcttcaattttgcagtcgtttttacagatgttaaaagacctggctatcgagttaaggaagttggtagcaccaagtctggcagaaaggggactgatgattccatgaccctgccgtcgcagaagttccaggtagattacttggacatagcaattacccctccgcatcgggcaccacctccttcagggcacatgagaccacattaaattctatttactatttcttgtgtttattttttggtcagttatgtaaaataaacttactctttttcctccccagattattgtcattaagcctttgaattctaagcaaattataatccatcatctatttaggaattagatttggatgtgctattgtataattactaatacaaagtccatatgtttccagcctttttgtaaaatatgaagaaatgctcttagcattctatgtaaaactgtactgttaaatatatgtgtgtaataaaaaaagcaacagaaaaacagacaaaaacccttcaaattaaaggaaatctcagagatattttacagcattgaaagggcaaaaagtaaaatg

SEQ ID NO: 97676 - DNA, 1052 bp, Homo sapiens
acaccaactgcaaatatacattgcgaagctctacataaagagtattgtctgggccaggcatggtggctcacacctgtaatcccagcactttgggaggctgaggcggggcagatcacctgaggtcaggagtttgagaccagcctgaccaacatggagaaaccctgtctctactaaaaatacaaaattagccatgcatggtggcgaatgcctgtaattccaccaacttgggaggctaaggcaggagaatagcttgaacccaggaggcagaggttgcggtgagctgagattgtgccattgcactccagcctgggcaaaaagagtgaaacgctgtctcaaaaaaaaaaaaaaaaaagagtattgtctgaatcaatgatgtttgcaaggtggaaaaagaaagaaatgtatattaaatgtggataattccatccagcatgacatagtggaagcaacgtggtctttggtgttagactgaagtttgaaatgtttccctctttttctagctgtatggtataaggcaagacagctaatatcccaaggccatgacttttctcatctttgaaatagcaatcatgataactaccttcccaaattgatgtgaatctcacaagaaataatgtaggtgctcagtatagctattagaatgattatattgcagaaagcaaaaaataaatcaatttcatatgggggaataattctcatattagcaaatggcatctatcatcatgcttatgcagctgtattttaaaattggcataagttcaggcaaagatagaaaacgtatactttggttaaatcaggcagttttatatgggaaagcatgaatcataagggaaacattgttcttggtttaattagatatttaaaattgcaaaacaagatttactattgggtaggctaagccattttggttgtagttatggtattgtttctttaataatatttatatgctcaaaaattgtattttgtgcatcaaaatcttaattatttagaatctgattagagagtggtagagttgcagttatttcttcaaattctcatcttttgttaagaca

SEQ ID NO: 97677 - DNA, 1038 bp, Homo sapiens
cttacatttactgaaattgccacacctaaaattttaccacctgttcaagacagaattctaaagttcaaagtacaacaagcatgtgcaggcagtggcaaggcatataaaaaaacatttacagtgtcaggaaaatccagctcctgacttaatatgagatggataagaagaatatttgctccaggatctggttttccatgaaactcttggtatgtagtctgattgaacatcttcaaaaatataagtttaaaacagcctataggttggcttctgagaactttatgttgctggaaaagtggtttctttacgttaaagtaaaagcttatacctgcttcttgaagttatataatcagaataatgtctgagtacattcaagtctgaaagattttactgtataagatattttgctgggtgaatttaactaaaacagtgattttatatgagggtggagaggaacagaacaccaggatgagttttcaaatgtgtctttcaggtgtgcttgtgagaaatggaggaagttttgaagatgatttgtcattgggagctgaaggtatgtttgtttggaagaactgtatttttgtgtagttttcaaatttaaaaaaaatgagaaagctgaatggtttcaggtttatgatcctcaagctaaatttaaaggtcttgaaaatggctcaggcatattttacattacctttctttgttaataatctagtcatagtctgtaggatacatgtagggatgactctgaaaaactatgtgaagtgtccatctgtctttcttggactaaatgcttaaaggaacagtttgtaacaaaccgtggtaatataactgagggaagaattgtcctgaaaaaggaaggacacttaaatatttatacatgggaaaacaaaattgaagcttatttttagcgcaaaatagacttatgtcatacttacagctgcagcttgtctttctctttgcatttaagtgtctcctgtcttttccccattttcctgatttttagaaaattaaaggggaaagacaaaatagcagagctaatagaat

SEQ ID NO: 97678 - DNA, 1010 bp, Homo sapiens
ctggttccctatacgtttttttattttaagcactcaagtgagagtagttagtttcatgttgccacaacacaaaaacacccttcaaaagctcctggccctgttcttatctatctgtatatcacttttaataatgcagatttaatggaccaagataagtgtttaatatatttggcatttaattctaatattgtaggtaattagatttcttgataattgtatcatagtagttatagtcctactaacaattgtgctctacgtttattgtttttacctgtagccaaccacctccatgaaagtgatgctcaaattgaaaactggtatgtagctgttttgttctatttcttttaaaaaatgaagacctttaatgaaaataaagttataaagttttatataatctgattttgttcgtagcaataatatcttggccaaagagagaagattacagtttcatcagaaagggagaagtatgaattccactggatctgggaaaagtagtgggacagtttcaaggtaacttattctgaaattgtgttggaattacattgtgctatagatgacctactcttatcattttttcaatcttggatttgaccttgatcatatgaaatcagaaagaacacaaaaagagcgtttcctgtaccagcacaactgataggagctttttgttttgttttgttttgttttgttttactttgagattaaataaaatgcaataaataggcttatactgctgctggaacccataaatgagtattttgagccctctcaacagcctgaaagaggaactccatagcggagtaacttgtagttgtagagaaccaaaattcattgttaaggacttgagttaactctgacacaaaaatcagaataaatttttctaagttacagcttgatatttaagcatactttttttcaacacattaaaccaaagatctttcaaatatatagtatagccaggcccagtggctgacaccggtaatcccagtgctttggagtgtcaaagtgggtgg

SEQ ID NO: 97679 - DNA, 1141 bp, Homo sapiens
ggatactaaatatttaattcccaataggattagagtagttacctttgtgtaacccacactctctgtaccttactcctcctacttcctgagtggaagtggttggagagaagttgaaagtaagctcctccctcgcttctctgaaatcagcttgttatctttattgttcctcctaggacaattgccactcctaggacaaggataacagaaaagctcaaatttcacaaaatgtccctcagttccttttaatttctgctttaatctgttcattccttattcttcatcatctgtcttctacttgttttagctgctttacagggaatctcttaaaatgacaaaacaaataaggtgaggaatcacgtagggaatctctgactgtgttcgttggggttagctcttttctgcaactctagcaacttgagacaatgaaccctttataagggctatttattccccagtacacatgtgtaaacatggtaaaataaataatggtttccagagcagaagctgagaaaaaagattttatcacaggaaatcagtaatatgtattcatttataatgtggtgtggactatcaatttattttatattttcatgtttccttttttgccccctttttttgtagtgtttcagaattgttggaactttatgaggaagatcctgaagaaattctttataatcttggatttggacgtgatgaaccagatattgcttctaaaattccttccagattttttaattcatcatcctttgccaaagggatagatattaaagtatttttgagtgctcagatgcaacggatggaagtagaaaacccaaattatgctttaacaagtaagatttttaagtgttaggcatattattttcttaaattatagcatctacagcaagatggtcttattttaaagccttaattttcaggaatagcactggaaagtaaagagattgattaacgcaaaagccatttttacatgttaaaattaagctattttattactccatttatagtggttaatttgcctatttttcccctcctccccaattcctgacttaagtgctaccataacttatttgcagaaccttattgttgtctacagattgcttttattcaagaagaaaagaagtaggagaggagccttgttaat

SEQ ID NO: 97680 - DNA, 1133 bp, Homo sapiens
ttgttcatggatcagttttaagagatcaataaatccctcaccctgcaaattaggtataaaatatatgcttacatgcattttcttaggagaattttgaaagagtcttaatggagttcaagacttcagaatagaatcacaactgtagattcaatagctagttctttctgttttattcaatgttgccattatgctttgtgcttatttctgattttttaaaaatacaaattctagtgcttagagtaaaaatcttgctccttcccacccagtgaatgtagagaaggtttaagtgttagatgaggaaaaaatagggttttataatctttgtgatctaagtgtagtttttggaattctaaacaataatatgcatttaatatatgtgtatgtatatatataaatataaacatatcattaatattgtttcttttggtaggccgttttcgtcaaattgaagtgcttactactgtggccaatgcgttttcttctttatattctcaagtctccgggacgcccctgcagagaattggaagtatgtcctcagtgacctctaacaaggagacagacccacctccacctttaactcgaagtaacactgcaaatcgtttaatgaaaacactctcaaaactgaatttatgtgttgataaaacagagaaaggagaaagtagtagtccttctccatcagctgaaaaaggaaagattctaaatgtttcagtgattgaagaaagtggcaataaaaacgatcaaaagtctcaaaaaattatgaagaagaaagagtcatcttctatgttggctacagttaaagaagaagtctctggtagttcagcagctgttacggagaatgctgatagtgatagaatttctgatgaagcaaatagtaattttaaccaaggaactgaaaatgaacaaagtaaagaaactcaaagtcatgagagtaaactgggtgaggaatctggtattgtagaatccaaattagatagtgatttcaacatatccagccacagtgagctggaaaatagcagtgagctgaaaagtgtccatatatccacacctgaaaaagagccttgtgcaccactgacaataccatccataagaaatataatgacacagcagaaggactccttcgaaatggaagaggt

SEQ ID NO: 97681 - DNA, 1947 bp, Homo sapiens
tgttaactattagcgctttgattttttttttcaaggttgaaaacccatatgttcagctaggtaccacactttactaggatgttctttatgatttaagaaccaatcattacagagtaaagtgacagaaattaccgtgcatcttgcccattccctatgtatttaatgttgacatagagttaattatgttagaatagacagagtgtttgtggggtggaggtggtgatttaggaatctgaaaatttctaaattatgtacttgtgcagatagaaaaataaacacaaaaagacaactaagtttgatatgttctttgaacagtgttttcagggaagatttatggttaatatctttcattattttagttctgtaatgaaacctgcttttccacatacagctcccaagttatgtcttgaaagaatttcaggacaaagcagtcttaaacctgagcaatttttgatacctgaaagtttgggggagtttagaaattctgcagtggtagcactgtgttctattttcaaagatgcgagacttataattacctcaactgtgtgttggtcataatgtgctgtagtgagtgtattagtgtttctcctgggatttaccctactttgaagtttaacgtatagagaacttttccttatggatctgtttttcatataatagcaacattttttttgaatgaagcagttattaaaatttattcaaggttgaaaacccatatgttgggctagtttgcacacttgactacgatgttctttactatttaagaactaaccgttacagggtaaaatgatggaagctagtgcacgtctgatgcactaatttccatcagttatttttctttgctacaaacttgagtgctgttgttaactggaaaatagatcagaaaatttagttgtggagcattctaataattttgaggtcagatttcttaaagtttgaatatatatataatgttttggtgcacttgagttaggttgatttgtttaatagatatttattcaagaagttatacttgtttgccttagattcatttggttttaactacttaaaactcttcttaaggttcaaagtacggagggagaagctcctcatgttccagccacttaccagctaggtcttacgaagtcgaaaagaggtaagtggaccagtatccactagttctgagcacattatcaaatattagttgatttggaaaaggggttttatgtatcagtatttgtagtatttatgagtgtgaaaaggcaaagaacacacacaggtaggcatgattcactattgtttgtagaactttttttgtattttttaaaagactttttaaaaattagtttgctaattagtttgcttattctggaatgacctcattacacaattgtgtgtgctctaagtattttacactattgcataagagctagttgggaagtgatagagcaatggattaagactaccttttacattgttatgactgaaaaatatactggtattatctatctttggtgtttcactatataaatatagctcctaggtataacacatgaatattcctctagcaaaacccaccaattttttagcaatagttaaagctagttaaattcaaactatgggtcgaaggtgagtggttgtagatactgttcctctcttaaattattaattattgaccaaagaacctttgaatccatccctttcacttttaacttgcaacaacaacaacaacaaaaatgtgtgatctttggatttacaaaacttttgagctttagagaaagggaaagaggaagaagtgaaaatgaccactgaaggtaggactgtttatttttgaaactttacacatgctgaaccaccctgttttttttttaaacaaagattcgtatgtatgttcctagaataggaaattacatgtttgttgtctcctgatctctgaaattacttcacaggagacaatttgcataaatt

SEQ ID NO: 97682 - DNA, 1071 bp, Homo sapiens
acaatcttggctcactgcaacctccacctcccaggtttactccattctcctgcctcagcctctcgagtagctgggactacaggcacccgctaccacgcctggctaattttttgtatttttagtacagacgggcttttaccgtgttagccaggatggtctcgatctcctaacctcgtgatccgcccgcctcagcctcccaaagtgctgggattacaggcatgagccaccgcgcccagccctaactgtgttttttaaattgggaagataatagaaatctttacacactatgctctctatatgaacttctaaatttacctcctaaatatctttacatatttacataatggaaatggtttactttgggacttctgtttttattagagccatcttttacttcagttttcctccaaggataaaacattgattggatttaccaaaatagattataattagagcttaattaatgagcgaataccgagagattctaatagaagatctgatacagtttttgtttgaatttgagttacctcctgtactttgaagacataattttgcataagtaatgcatatttttctaagaagcagtcaaatattgtgtatcttatatctgctgggaatcatatctctgtagtaatattgctctcagtaatttcttatagccactttttttatttatagatcatctgtttcttatagccacatttttttattcatagatcatctgttacgtactgcaagtcagcattccgatagcagtggttttgctgaagattctacagactgcctatcccttaatcatcttcaggtaaaattttctgttctaataggcactatgattaacttcctcattttaaggtggtttttgtattactatatattttaatattgagtctgtataatctttatttttcaagtgacagaacaaaactcctggcatgtagatgttatctaagcatttgactataaattttagatttcattaattcttctctctgaatatgtttttaaaaatatctatcttccccttaatttttggaccaccagtaaacagagattattgtgatcattaac

SEQ ID NO: 97683 - DNA, 1025 bp, Homo sapiens
tgagtcagtgtgttgtattgaaaggaaagggggaggttgttggaaagggaattttaggaaaacagtgaagttctgaaataatctttgtgagaaagtgagaggaaggagggatgtggttgctgctcaggagcaataaaacaattttgagcaacagcagggccacaactgcagtggagacagtgaaattatagaagcaccatgttggtttggtattttgttagtgactcttcttacatatattcttcatctttccacctattttcttttcacaggttcaggagtccttgcaggctatggggagtagtgctgatagttgtgacagtgagacaacagttacgtcacttggtgaagaccttgccacaccaacagcacaagaccagccttattttaatgaatcagaggaggagtctcttgtccctcttcagaagggactagagaaggcagcagcagttgcagacaaaagaaaatcaggtagccaggatttccctcagtgcaacaccattgagaatacaggaactaaacagtccacctgtagtccaggggatcatatcattgaaattactgaagtggaagaggatttgtttccagcagagacagtagagctactgagggaagcaagtgctgaaagtgatgtgggtaaaagcagtgaaagtgaatttactcagtataccacacaccatattctgaaatcattggcttctattgaagctaaatgcagtgatatgagctctgaaaatacaactgggcctccctcttccatggacagagttaatacagctttgcaaagagctcaaatgaaggtttgcagtctgtctaatcaaaggatggggcgtagcctgctaaaatcaaaagatttgttaaaacaaaggtacttatttgcaaaagctggctatcctctaagaaggtctcagtctttaccaaccaccttattgagcccagtaagggttgtgtcctctgtcaatgttcgattatctccaggaaaagagaccagatgcagcccaccttccttcacctataagtacaca

SEQ ID NO: 97684 - DNA, 1040 bp, Homo sapiens
aagatttgtgattaggaatctccaaactgcatttttccaattttgtgcccttcaccataccaataggtttgaagttgatcagctccagggtttgagaaattcagtccgaatggaacttcaggacctggaactgcagctggaggagcgcctgctgggcctggaggagcagcttcgtgctgtgcgcatgccttcacccttccgctcctccgcactcatggtacgctacctggagggtggtcggagttttcaccaaaggtttatttataatgttccaataatttaggacgtgtgccttcatttcaagtcatttattttaatggtattaaaagcatgcatactgtttaaggagctttcccacaaatcagttgaatgtacaatttgtaataattgtcataaatagtatatttagaaatatgttgaaaatttttaatgataaattttaataacaggaaagaataagggcttatacgaaagttgagggtttttaaaggaaaaatgctagtgaattaacatatgactaatgtaaattttaattgttgcatgtaactgcagagaacacagatgcatattttgctgtttttttttctttcatgcctttaaataaaaaagtgttccttttaaactttttctttattttggattcttttccatttgtttttaaaggaatcaaatgatacctgtatattttcatacatatatatacatacacatacatatatgtattttcctaaatatatagatatatatccaagagaataaaaagaaacatgtttttgtaccacttttcatacttctaatgtttctttccataacatttgaacttcaacagttgtattatttttgcaaatatctttgaagttgtagaatatgttgctttgaaatgctgaaatagtgaattattctttgttaccttaacaatgtatttgattttgttaaaaagaaatggatgaatatacacacatacaattatgtgtgtatatactataaatgaagtagaataaacaatggtgtataaacacatatatgtatagcatagacta

SEQ ID NO: 97685 - DNA, 1687 bp, Homo sapiens
agcctcaagcgatcctcctgctttagctctaacttcattttatataatatatattaataataattcttggtgaatgcaaaaagaaagaataagttgagtagaatagaactaaaaatattcattgaataagacatgagaaacaaatgtaatttgaaaagtataatatacaatttcagatataggaaattggaaagtattttaataaattatgtcacaaagcaattaataggaattattttttttaaagccagggatataagaattaactctcaggaagatgtatagagattacaggataatcatgtttctgtgtatatatatttgcataaaattctcatcttcctttaaagaagcttttaataacagtatttgaaagaggtttaaaactgacttctcttttcttttttaaggttggcatggatcctattagctgtgtaatactggaattatcaatgatatgcactggtggaggtgttatttgtgctttagaagatacttgctgttgagctgggctactgtatacagtgtacaatgtgtatttcttcaaccatatattttaaaaagacgtacatagaaacttaggcactttgctatttcttttctaaactatcaaaaactctagcagtttgaaaagcctaatatttatttgtatgtcagtatttttcatttgattccctattagaattaattttaaaacttgaagacttccagacttatccaacttataaataacatatttcttcagactaacatcttaaaacactgacctctatgaggtatttactgtgcaataactgattcatttttttcagagcttgaagcatccaatgatttttccctccactgctgttaattaatgtcacttccaagaagaaaaactgttctgttgtaaaaaatataattgctcttaattcttggggaggttactaatagcagtaggatagaattttatgaggttacctacaactacttaatgtacttacactgtaagccttgttgctttacccaagacaaatgtaattttatcattgcttatgtagtatttttcttttggaaatgtgccttatgttaaacactatgtacttttactttttgcattgtccagacttctttattagatggagatgtttctttttctgtcttctagactaaatagagtatcatccaaataatggggcctatgacttgaatgaatagaaatgaataagctggtgtttgttttttcaaaatggaagtaatttagatttgttctcctcatacataaaatgattttagttcagttttaaccagtgaaaactttgtttttatgaaaaaaaaggaaaatggtttcccatttggttttatatgtgttaaataaatgtgtaaagtaaccaccaaatgttattagaatttttcttctagcatttataattttttcaactcctattgtgtttctttgtgtgtgatattttaatcaaaagtggttgagttgttaacagtgttctttgaaagaatctctaaaaggcttataaatgtttgaaatatcacacaaaggctgatttctaaaatatatatatattaaaacaataaagtatttattttgcctaaagtgttttagtggtttcttaaactgcaacatgaagattttgaattagatttgataggtaacaaatgaggtccaaaagaattgcagcatataacccaatag

SEQ ID NO: 97686 - DNA, 1001 bp, Homo sapiens
tggaacccaaacatcatactgtcaggaagaccaagaagcctgggaagaggcctacatggaggaagacagaagcttctggcctttggccctggaggaactcccagccaacagacagcaccaaatcgccaatcatatgagaaagttatcatgaacgtggattctccaccgctagtcaagccaccccaggtgatatcacaatgaattgaaacaagttgtccctgttaagccctgcctgaattgtgaattcatgaacgaaatgaatgattgctgttgcttcaagacactaagctttcaggatactttatgtgcgcatagatatctgtgacaaattttggtatctagaagtaggatgctgccataacaaaaccctatatttgggcattggctttgggcctggactgtgggaagcagctggaagggctttgaagagatgcttagtgaaaaccaaaggctctcaagtagactgctagtggaaacctgaaagaccttgaggaggctctcagtgaaggtttaaaggaaagtgaggacaatggtattggaagctaaaggaatgggaagccttgttggatgacggcacagagtttgccaacataatcatctgtgttaatgtggcaaagtggaaatatacctgctaaactcaatgatctagttaagatttccaggcagaatattcaaaatgccacctgatttttttttcatcacctatgataaaatgtgagacaagagagatgagctaaaaataacctttaaatataaaagagtcagaacttgccaggtttgaaataaaattgtgtcttatgccctgatcctctaaaaacaattactaaattaaaaatggctctggaaaagataaaatcaagggtggatccataagattctttgttagtacttaagaaagatttaagagagtggctcacaaaacatttcaaacagaaaaaggtatttttatggatcttaaggcctgcctggccatctcttctctgttaaataattgggtgctc

SEQ ID NO: 97687 - DNA, 1061 bp, Homo sapiens
gccacatccccaccccaccttcagcctccattctgggaatgaggaaagcttgacactgaataagaatttagatattctatttctttactgaactgaactctagcttgggtattattagagtagctgatatgtttaatgccaaaacattacctaagaatgaatacaccaactatggactttatctatagttttatctttaatagtgagaaataatacatcattttcttttcacattttatcactgatggaggtatcacataatcatattaatgtatctgcaggatagatgttatcttagtaggaattattttcttccctctgtaattaaggaaactgaagctcacagagtttaagtaagtttcctaaggtcccacaaccaacagtcaaaagaacaaggctatgaaacatgaatgtttcagtcaaacagtcattcccttcctgcacgctgcactgaacctcaaggaccaacaaagaacttgagaattcaaagtgggcaagattttatctaatttggggaaacaaggagtgttcatgcaaggggaatggttcatgaaatggactttcaggatgaataggtttttagcaaacagagatgagaggaaaataattctaggacagaagtgactaaactaagaaactgaggctggatagggtgtagtctacaaactgtggtagtctaatctggatacgtataaggtcgaggaagggttagggaaagagaagtctggaaacactgtggggcaatagaatggtaattctttactttttaccttactccctcttctgcaactgcctcttattctttgagaaaaaaaggaagatatacttttcatatgatttggaaagcagagattatgtgctaacatctcacttggtatagggaaaaactgcaagaattttttagagaggtggacctagtttcaaatccattactactataagaatatactatttctgaaactcaatttccttgtctgtagagcaaaaaaattactccatagtaccacagtggaggataaataaaataagatgaatatgatacacaattataaaataactgt

SEQ ID NO: 97688 - DNA, 1068 bp, Homo sapiens
ggaaaacattggtaactaaattaaaatatcaatgctgtctaccatttttgttttcttttattgagcttcttctaaattgtcttcatataatatttgagacaccatataaagttatgtgccaagaaatctctttttcttttgtgacaagaaaggtgaaacagtttcttactcccattctgatgtagacttctctgcattagtctattaattttcttcttatattacaatctttttatttatctttttccatattcaaccactaatttgttactcagtacaacaatttagattctacactacaagtcatcatctatgatggtggaaatatgggcaaataactatggcatcaggtctttcataaattagatttaaaaagaattatatacttggccataagttatcaatcgtttagggctggaaaacacttcctatttcttatgccatctcaacaccaaatgaaatttctgattcagaagtttcttatgaatttgggacctagacttcttcctacatactaagaaaacatagctattgatagtctttcaaagattgtcaatttcattgatttccatgtggaaagttggtttgaagattttacagtatttcacctatgcattgtgtttcttttccatttgaaagataaatgcctttttgtgtcatgtactgttgctttttttttctctaaacatacaaagagttccacacctgtggattttattaaaaaattaaacatttaaaaaacactggtgttgctctttccagttagtgacattgctataagaattcaatctaagaggtgacagcattttcagaaaactgaaaatgagcatttttcaggtagaaaattcagtgaaaacgacatgaaattatagggaaaaatctaaaacaaagtattatcttactcaggcattcaagagaagagaagaaagtatgaactgccagaaaccataaactactgacaaaaatgtaatactcaccacttcatagtacttactgccccagttccttcagtttttataaacatagtactagaatctatcacaatttcagttagaagctaactttata

SEQ ID NO: 97689 - DNA, 1070 bp, Homo sapiens
agacaaatcctccaaagctccgtcttccctttaaaagactctcagggaactcaaccccaaaacccaccctctgggtttccccgtcaccctggcaacggaagcaggaagaggcgggcttcgccatccaccctccccgcccgcggcaggcgccggccgcattggtgagggggcgcgggctgcttggccagggcagttccctcagctccgggttggagccggagccggagccggatcccgcgcacaccgccacgtcaacctaaacctacaccgccctctccaccccaccgccgcagcgcccgctgggcccgcagcgggtctccccaggcagcgtcctccacgcctttcccacaatgctccgcgccaggccccgccccggctcgccgtggagaccggcgcgtgaggaacctaccggtaccggccgcgcgctggtagtcgccggtgtggctgcacctcaccaatcccgtgcgccgcggctgggccgtcggagagtgcgtgtgcttctctcctgcacgcggtgcttgggctcggccaggcggggtccgccgccagggtttgaggatgggggagtagctacaggaagcgaccccgcgatggcaaggtgggcatgggcccggggctagggctttgctggagccggtggtggcctgggccctccggtcagggaggggcggaatggctgagcgcctgaacctcccttcctgtgcgctcttaagacctggatattgtgttctcgctccccaccttcctcctccctgttattcacaccacccttcctctgcccagcgattccctctcagttacttacactttctccctaagtccgacctgagacttcagacaccagcaacacttaacagccctgttcccccgtgtcttcatctttacccctctcccctctcccactctgcagtgatggcaatgcgaaagcttgcgccttgcatttacctggcgcttccacctgcccggtagctcgggccacgggcagttcggccacacccacgctgagaacaacccctgggcgagaaacatcttatcccaaagtgttgattgagactatgccctctcttttt

SEQ ID NO: 97690 - DNA, 1024 bp, Homo sapiens
gacatttcctacaagtgaattctgctgaaaatgaaaattagacagctttaggaggtaaagaagtagctaaaaggaagaggtattacaggcaacgctataactgggtagaaagaggaagcacctgtagctcattgccacctttgtgttctgatgctcgtcagaggtcttttctcagtgtataaattgctgagggtgtgtgtgcaagctacttactaccactcatgaccttttttctgctatcttcagtgatttcacaaatctagctacatggatgtagaaagagtgaaaaatagaacctggggcattcacactgatttgccatttaatggagattgtattgctgaccatgttctgtgataaataaattgtgctattattgtttagttcaaaatgtattttaactgcctgcttttctttcttagattaatatttttggggacagatttgtgatgcttgattcacccttgaagtaatgtagacagaagttctcaaatttgcatattacatcaactggaaccagcagtgaatcttaatgttcacttaaatcagaacttgcataagaaagagaatgggagtctggttaaataaagatgactatatcagagacttgaaaaggatcattctctgttttctgatagtgtatatggccattttagtgggcacagatcaggatttttacagtttacttggagtgtccaaaactgcaagcagtagagaaataagacaagctttcaagaaattggcattgaagttacatcctgataaaaacccggtaggtaaacgtttgtttttaaaaatatttgattatatttttggtacattttgatatttatttaaattgctttaaatgatcaaatgcttaagaataatcatatgtcaaaattataattcaacttgtatgctagaaacaaaagcaccaaaatgttctggattatttaggatcccgtgaaggaatgtcagtaccaaaaattcagttccctcttaatttgtagacgattttccaacaattctattaaagacatta

SEQ ID NO: 97691 - DNA, 1023 bp, Homo sapiens
tttttaattaagttgattttacctcaaatagaaaaataacctacaaatgtattgatttataattgttataggagtaaaaaatatttatgaaattaagagtttcaacaggcttattattttcagctgcattttttaggaagaataactcatggtctgataacgtctgtcaaccttttgaagagtcaattatttcattacttttcttacttttttttttttttttttgaagattatagtttcttaaaaaatacttcatttcaacccatggtaactcatgtcatgttgtattacccctccttatgttggtatatggtctcccagaagttactagattaattaaacctacatatatgttttgaagaaacttggattgtgtatctgaaataattgtattatatctaatattttttaacagaataacccaaatgcacatggcgattttttaaaaataaatagagcatatgaagtactcaaagatgaagatctacggaaaaagtatgacaaatatggagaaaagggacttgaggataatcaaggtggccagtatgaaagctggaactattatcgttatgattttggtaaggtgatacgatattacttatgaaatgtgttttatctgagtaaaagaaaagtgaattctgtttcaccacttagcttatatatttaagatgcgtcactttgattagctccttttaatttgctgtgggagtgaaatttaaaaggaatgtcagttggtatacagagatgatctgtacagatatgaagttgtattggttaaatcttgttaaatacttttaaaataaggattgctatttaataaaaaatatgcattcatggactgcataatgacatttcacttaacaatggattgtatgtaggacattggtcccatgaaattataataccatatttttactgtaccttttctatatttaaatacaaagatacttagcattgtgttacagttgcctatggtattcagcagtaacatgctgtacagatttgtagactaggtgtgtagta

SEQ ID NO: 97692 - DNA, 1026 bp, Homo sapiens
ttatgtaggtctcttattttattctttcagagtttacagtagctgtcagaattgactaaacctacttaacctgtgctgcatgtaatagaagagcttaaatctcagtcactcttactatttgtcttctttatttctctcatgcacacaaactcttacgtgaggtttggctgctatttcttgtgccgtcactttttacaactttatggccatatttatcttgcagtttgaggctgcttctttttcaagtatgggcgtaggagagtttttttaaaaagctattgttggtttgacatttgaaatgtttcttgtggaaaaaaaatttttaattttttaaaaatgtcatttatgtagaagatatagaaaaacatcacacagaaaatgagaaagacaatatgaaaattgcatgactttttaaaattctgatctccacaaaaagtttttaactaaaatatgcatgaacctttaataaataattctaagttgtttgcattttatgtatttttagatgctgctgttaattctggagaactgtggtttgtaaatttttactccccaggctgttcacactgccatgatttagctcccacagtatgtatttttcacatcctcattactagttttatttctaattgatctgcaatttatatgttagaatttttttttctatgaatagtaatcaaaaataattatcaaatactttaaatgtctggtttaaaaatatatagcttggagtgtgttcaagggaagaaaagtggtcttatcagagaaatatgttttctttttctgtcatagtggagagactttgctaaagaagtggatgggttacttcgaattggagctgttaactgtggtgatgatagaatgctttgccgaatgaaaggagtcaacagctatcccagcctcttcatttttcggtctggaatggtaagggataaagttagcattttttaaatttgtgaaacattatgacaagttaaatagtagagaaaataacagtatgtagaatttgcagaacattttaagtct

SEQ ID NO: 97693 - DNA, 1011 bp, Homo sapiens
tgtaaagaaacacatttagaaattgatttgaaacattttcttcccttatttcttgaacatttaactcacctatttgtaatcttattttctgatgactgtattcatagctatgtgttttttcctgaataattagttacgttcaataaattttaacgtggtatcaattctaagtgtcatttactttgtaagtattctgtaatttataagttcctcttcaactgaagttacatgttagtgtttttgtcatttcccaactttatcttttgttgttttcttttttagtcatttttaaatgtatatagctctcatgttatggctgggaagtagcctgagtgatgttgattttttaacaccattgaaataccctttgtggctttgtggcttgacaaagccacacaaattgtcagttttgaaaattttggaaattctttgtgagcttgaatataataatgttatgttaggtgtaatatatgttaggtgtagtattacatttattagatcagatttattaatcatgttatttgtttttggactacatgatctataatttctaagagggatgtattaaaatctctaccatccatcattgatttatctatttcttatatttctgtcagttcttcctttacatattttgacattatattgttggcagcagtatgatcattatatcctttggcggctatttatttctctttgtgcattatggatttgtttacacaaattctgttttatttgatattaaaatcactaacttagtatgcttttgtttcattccctttcttatttcaccctatgcctaggcctttagtttttcagcactacacattaaaatcacctgaggagcttttaaaaataataaaaaaacaaaaccatgtcccccagaccaattaaatcaaaatattcgagggtgaggactgagcattagtatctttattttttttttaatatttggtgatcagagtgattggcctatatttttcctttccagtaaagtctgtgcacttttag

SEQ ID NO: 97694 - DNA, 1004 bp, Homo sapiens
aatgcacattgtagacacatacagagaatgtctcataaactgtataattactaaaaggatagccacaatgaaaaatcttaaacagtagtttggtttattttctttaacctgaaagactattggacagctcactttctataaaaattgtaaatgtcgttttttgtggattcgtagaaagaattataaaaagtagatttctactattagggaaaaaccatttctcaagttactaagtacaattttttgcacttaatatttctaaatttattaagtaatttataatattagaaatctactttttaactttgctgtagaactaaggcatgaagttttaattttttggtagaaaaattgtgtttttagctaagtaaagctctaaatccctttaactttttgcctcccatttacaacatggtttgttgtttctttccattttaggatggtcttgttaatgtaggatggatggactgtgccacccaggataacctttgtaaaagcttagatattacaacaagtactactgcttattttcctcctggagccactttaaataacaaagagaaaaacagtattttggtatgaatcactttaaactaatttatttacatataatgtgcaaacaccctcaaaaataatacattatttttgtaagcagtgagcaaagaaatgaacaatttatattgtctgattgtggaacccttatttagaacacatacttaatttctgagattctttttaatacatgcttcaaattataaaatttaaggattatttttaaactgacgattacatttcatttaaagtcattacatctttacatttaaaattaccttacatttaaaaccattatatttttaaaccccaaaagtatggagtacattcctgggttatacgaaagagcatttatagcatgagttttcattgttttctatttaattgtttattttgttttttttgagatggaatctcactcttgtcgcccaggctgtagtgcagtggcgtga

SEQ ID NO: 97695 - DNA, 1036 bp, Homo sapiens
tttcttaatggatcttctctcttaaatgccacagatttgttcctggtttatatttggctgttgtgcttacgctcttctttttcacactctttgaaaacatcacttttttcttcattatttctgcttctgaaagtgatctctcctctatctcaagattatataaacattctctacatcttcaaaaagtaggtttctggaataacttcatattttcttgggaattcctcaggttttttttaactctctaggaagcatttttttaactaaattgagtcttaatattaaatgtaaatgaattatttctgtctcttattttcgtagcctattagcttctgtttaaaaactgtgtcattagggcagtgccatttttggattatcatgaatatttacaaatcaaatgggtaagacagtgtttttatcaaatttgacctttttctcctttaggttggcaggtttgactgttcctctgcaccagacatctgtagtaatctgtatgtttttcagccgtctctagcagtatttaaaggacaaggaaccaaagaatatgaaattcatcatggtaagaatggaaaaaaatgataaaaaaaaacttagcttcattttcaaatagaagttttctaattgtgctttttaaacttattttttacggacatgcttattgtaaataacttttctcagtaaatatgaggacagatattttgaattatatgtagtcactttattctctttacccttctttttaacatgaatgccttttctctattcagtattttgatcaggatttctggtgataagtcaagctagtgagaaatttaagtcctgcttgtttgcaaaagtaagcaacacctgcagtttatattccagcttgccatgtgtatcatctcagccattataggcaatttccaaacattcttttggatgtttctcccactagacttccagacttcttcattaactgccttgttatctttcttgcatttataattttatttcagcttatttgggactttagctctgcattcatgtgagtgcagtc

SEQ ID NO: 97696 - DNA, 2223 bp, Homo sapiens
tggtgagaaaaggagcaggtttggaggaaaataacacagcctcaatttgaatatattgccatgtgtcaacgacagagacgtcttctgagaaatgtgtcattaggagatttcatccttgtacaaacatcagagagtgtacttaaaaaaaactagatggtatagtccactacacatctaggctatacagtatagcctattgctcttaggctacatctgtacaatgtgttacaatgtactgaataccataagcaactgtaacacagcggtaagagtttgtgtatctaaatgtatctaaacatagaaaaggggtaatgtgttgcactacagagttacaacagccacaccatcactgagccataggaatttttcagctccattataatcttatgggaccccatcatatatgtggtccaccattgcctgaaatgtcattatgcaggactgtattgtgtttgacgtgtttacgtgatatccaagtacagtttttcactgggcagttggtaatatgggttttgaattcataagagaagtctaggttgtagaaaatgatttaggagttaggccatagtaatcactgaagtaagcataattaatttaaagaaccctataaaaaagtcattattctacctctgaagatgagggaacatttcaaagagattttgactttttttttttttttttttttttttgaaatggagtctcactctcaccaggctggagtgcagtgtcgagatcactgctcactgcaacctccacctcccaggttcaagcagttctcctgcctcagcctcctgagtagctgggactacacacgtggccaccatgcccagctaattttttgtatttttagtagagacgggggtttcaccatgttggccaggatggtctcgatctcttgacctcgtgatctgcccacctcggcctctcaaagtgctaggattacaggcgtgagccactgcacctggccaattttgacatttttaactagtccaggaaacagaagagtgtgcaagaaaagggtgctcctatcagagctaagccctgtatagtatacagcacactaaaacctcaccaaaatcaatttgttcataatttatcttctttagtattctgagtattaaaactttgaaatgtctctgtgcatacaaaaagcagaatttggatttgaatttctctcattcactttgaaaggaaagaagattctatatgatatacttgcctttgccaaagaaagtgtgaattctcatgttaccacgcttggacctcaaaattttcctgccaatgacaaagaaccatggcttgttgatttctttgcccccgtaagttatttttatctgtcagattctaacattgtcagatcttctcctgttatggcaaaaagacattttctagataactctgaatcattagtacaaaaactgtgtcattccattatggccactaatgcatattgcttttaaatgagtgctaatgtaattactcctccagggaaggtttgccgctaagtacagtttgtcttacttagcatattacttgttgcagaaatgatgggggggttttttgtgtcatttggctcggtgcttatgaatattttttctttcctagtggtgtccaccatgtcgagctttactaccagagttacgaagagcatcaaatcttctttatggtcagcttaagtttggtacactagattgtacagttcatgagggactctgtaacatggtaaggcaaagtatcaaaaattattctaattaattttataaaatgaagaccttttggctgtttattattaaaacattaaaataacttagaaataatacatcttctatttagagtagtaacaaattatttaaacaaaataatatttttagaaagtggtatcaaatatgattggattaaaccatgcatagctaatcaatgcattgaatgtaaataaggtcttatttatcaaactcaggcaactattttcattaacttcataaaatgcttatatgattttccaattattgaagattgttatatttctttaatatttttgacattttataatttttttcctttggctttcttcatacttctaagtatatttgctggaaagaagttaaaacaatgaacaagccttttgaaatctttgtttaaatgaaattattttctcaggtaaatattcactcctcagttgcaggaagaactaaaaattatataccgtagaatgaaagtacgtaa

SEQ ID NO: 97697 - DNA, 2275 bp, Homo sapiens
tattcttgctgttttatttcctgatcatcatctatttctagaaaaagtatttattatggtttaaaaaaaagactcaagctagagatatagcctgttgtttatagcctcttcttaccttggttcaggagagtaaaaagggaccattcgtataattacccatgccgatttctcaatgtttcaatgcctatggttctcatggcgaatggagcagctataaataaggatcaggtattcatcagtatttagcagtattcatcaccataagtcctttgctaaatttggtgagactaaaatttttgtcaccagaaatttagaaatgggtttttaaaatcttgttcttgttacttaaaggcaaacttgttataaatttgtaacaaataggtgaaatctataaaatctttaattcatattctccttcctatcagtataacattcaggcttatccaacaacagtggtattcaaccagtccaacattcatgagtatgaaggacatcactctgctgaacaaatcttggagttcatagaggtatttcagattatagactatgtgactagaaatttgtctgtttctatgtaaaccctgtatgaatgtttcatattgtttaataggatttactcttttcatgcccaaactattttcttacaaaatgatttttaaagaatttttctaatgttttactcttcttatatacttgtctgtaaactcaaagtaaatctgtgttttatttgttacctggtatgtacagtgccttataaacaatggacacaattatttattgaacatatgcaatgtattttcaccttgtcacccctttgcactgttttctctgaaaacaagtgtctggcatctacagcatctttttttttttttttctcagtaacactcttgatagaaatacttacaggggactcctagaaaaaaaaaaagaaaatttctagtttattattatccatttgatgaccctccaaccctgtcctactcacctgttcctcctcctctgacgtaatgttttgtcttgttttcccagtgaagctagcctcttcatcagtattacctgactgttgtaggctgaagctttgttaaaatatcatttggaacaaagaatctgtagaaaggtgtagtatctccagtcagaatgtcagaaaaatgagatagtaggctttccactagtaattaaagaatcatttccaaaccagtcattcttggttctagaacagaactttatggcctctgtagacatccaggcagcccttgaaactcttttattatccatgcagaaacttaaagttgcctctttgcctgttatgattttagtgatacatagagataaaggataaatagaccttgattttttacaaaactaatgagcaaaatccaaacttaaaaatctaagttaggtttattttcatattttaagataattcacattggatttcttttagctatccttaagcatcttttggtttctcaaaaatgggaactttctaaaggacatacacagattgagcacccctaatccaaaaatcttaaatctgaaatgctccaaagtctgaatttcatgtttagacttgggtttcattcccaagatatatgcaaatattccaaaattcaaaattctcaatacttccaagtattttggataagagatactcaacctgtaccaacaatttgccaggaatatatgaacagctatgctttatatatatgttataatggaagctatattctcttcaggatcttatgaatccttcagtggtctcccttacacccaccaccttcaacgaactagttacacaaagaaaacacaacgaagtctggatggttgatttctattctccgtggtgtcatccttgccaagtcttaatgccagaatggaaaagaatggcccgggtatagtaaaaatagtttattttaaatcttaacatttactaagaatgtttatttaacagaattattttgaaacggatgtgaatgaacccacaactaaattattacttaataacagtactgatcataccactttgattccagctctgtttctgtctggtgtgtgaatggtatagcctaccatttttgtgtgtatagcatctggtacactttttttttttggtcgggtagcagggggcagagtctcgctctggagtgcagtggcgcaatctcggctcaccgcaacctcaaccaccctagtagctgggattacaggcatgtgccaccacgcctagctaatttttgtatttttagtagaaacagggttttgccatgttggccaggct

SEQ ID NO: 97698 - DNA, 1009 bp, Homo sapiens
cttaaaagtaagaaaaaaaagctttcagcatgtgtatttagaaaatttcctgaaaataggcaccatgttttaagttgtagaagattggaaacaaatcacttaaataccagaatggaaaatgcaattactacttcacatttgtttacaagataaaacactaaatctgagttaaagtgatttctagtatcttaacatttaggattacatatttttgtgctcttttcaataaaatttttaagttcaggtgtgagtcagtataacacattagacacctacaaagcttgttttcattggaaagaatactttgaaatattgcaaagactttcattagtttctagcactttgaattttagaagtatatagttttttctcatgtaacagttaaatgaaataaattgtttaatctgcaataattttagtaagtacttaattacaaaattagattacaaattcattagtataaatggtctattatatgttaaacccttatccatttttattgggtaaaagtcactgataaataatataataactgtttcaccataataatacaatgcttatttctttattgcaaacatatgtaaaaagttatggaggtaatctgttttttcttttacagacattaactggactgatcaacgtgggcagtatagattgccaacagtatcattctttttgtgcccaggaaaacgttcaaagataccctgagataagattttttcccccaaaatcaaataaagcttatcattatcagtaagtattctctcatatttgaagacatttattataattatttaattatacacttaacagttaagttacctgaacaaaataaaagttaacccaacaaatatttattgggagcccactacgtaaagatagtttgttaatgaacatttcagaagatgaaaagggagtattgaacagtctcactgtgcataaagcttatagtctagacaaaaagataaggaaaggaagagctaacatttattaagtccttaaacacctt

SEQ ID NO: 97699 - DNA, 1033 bp, Homo sapiens
ttttctgaatacatccaataatagagaatcctatttacaactaacattttttcttctctcagcagttacaatggttggaatagggatgcttattccctgagaatctggggtctagggtgagtaattaaaatatatatcattgtataaaatagattcaaagccatttaccccccttttatatcaatagttaaatttactgtgggttaaggttctagcattttaaattacttagtaaagtattatattaaccaagatagtactgtactttattacattgcccttccttgacatcatttttaacttagaaagtattacaatattattgcatttcatatgtttgctttggttttatataatgaaaaatgattttgatcatttgccacagatttttacctcaagtatccacagatctaacacctcagactttcagtgaaaaagttctacaagggaaaaatcattgggtgattgatttctatgctccttggtgtggaccttgccagaattttgctccagaatttgagctcttggctagggtaagtcatacctgtcttaaataagttgtagccacattcatgttttagtaattagataaaacattgtaagtatgtaatttttaggtttttttcttaaatgtttcctctgaatttaaaaatagctattatatttctatgactgtaatggttgtagtagatttcctctttctttgttaaagcttttagctaacatcttctctatcttggtagacatcatcatctactagccataaaagccagaaacgtctctttcttctccctcttgtctactttctcctccccaccccagtactctgttgccctccaggcagttactagattgtgtcagttttatcccctaaatgtctttcaaatgtcatttcttattcatctctactgctaacctgtttcttcaaccctttatcatctcttgtctagacttaaccatatttgccttttaagtgcagtcttcccttgatatactcaggggattggttccaggaacccccattccataccaa

SEQ ID NO: 97700 - DNA, 1017 bp, Homo sapiens
gtgagaagcactatgacagaggaaccataatccaggaaggaatcctttcatgattatatacatcttcactggagaatatgtgttctgacagggagggactggagaatacaggtggagtaagtcagccttcacgagacaaagagtgcccaaagagtcctaccacagcacacccccagtgaaaggagaaaaagatagaaacagaaacatgtttatggtatgatgtgccagtagtgggtggcaggaagaagttgagacattgcaggataaagctgctcagttttcttgatgaggcaaaggagggtttatttgctgttggagaggtggtgctaggtgaataggggcttaaagggataatgtggaaataatcttgtttgagtaggaagaattaaagttttttaaataaattcttagattcaaaatgttttatatcctattgctttgttgttgccaaaatagtttatgccaaacagaaaatggcaaactgtatttttctttttcagatgattaaaggaaaagtgaaagctggaaaagtagactgtcaggcttatgctcagacatgccagaaagctgggatcagggcctatccaactgttaaattttatttctacgaaagagcaaaggtatgtccagactttcctctgttccttcccttagtaggccaagctcaaaagatgtgtttcagtctgagtaatgttttttttctgttttctcatccttgtcatttttttatattattacatattactgatacaagtttttaaaatttacatgtataccaagcgatcttaaaaggttttttgtcttgtggttgatacagactcaattgccttaacatttttatactaatgaataggaaaactactagaaagagacaaaaaaagtattattcgtgataatctttgagtgctggaattcaaggtaattttctacttttctgtgaaaggttatggtgactgttgaggtcactaagaatactctataatacacactgctgcttggaataatatttccttagta

SEQ ID NO: 97701 - DNA, 1024 bp, Homo sapiens
attgtttcatgtttccgtgacactattattagtatttattttaggtacattatgggttaactgcttttgcagcattatttccttgaagagaataaatttgaatttcaaacacttcaagttttggaacaaaagaacttgaaagcatatttaatcaagtttcttaggtggaaatgttatgtttttattaaatacttaaaagataacaagtgtttttaattttagagaaattttcaagaagagcagataaataccagagatgcaaaagcaatcgctgccttaataagtgaaaaattggaaactctccgaaatcaaggcaagaggaataaggtatggactaagcctagagttgactttggcaaaagttggcaaaagttagcaaaatctatttttcctatacattacatgcatccagagacaacaaaatgaggcatcaaaaaatagtaagatagctgaaaattctactttgggaaataggacaatcaaaatgtagcctagacactgaaatgcttttaaaaatttggacaagtaaaaccacttaacaaaaaatagtgactgtggtccatgcaaaaacatgtatacaaatatttatagctgtatcattcataatagcaaaaaaaagaaatgtctgtcaactgacagataaatgaaatgtggtgtatccattgaatagaatattttcagccataaaaggaatgaagtactgacctatgctacaacatgtttgaactctggaaaatgtttagtgaatgaagccagtcacaaaggccaaatattatataatactattgatgttaaatatctagaataatccatagggacagaacgtaggttaatggttgcctggggccgaagtggagtgggatagaaaagagcaaaaatggggtaactgctaatgggtagtaaggagtttattttgggaatatggaaaaatgttttaaaattagattgtaatgacagttggacaactctgaatataccaaaaaccactaaactcctttaaatgtgggaattttatggtatgtga

SEQ ID NO: 97702 - DNA, 2059 bp, Homo sapiens
ctgcagaccccaatagacaaagccttacaacctacctcaagaatattttttacgaatctgaaaggtaggaaagagttatgagtctgtattttcttggttccactgaacaaacatgtttttctagtgtttcgctatattagttttctcaagatattttattttgaaaggtgtaacttttatctcattaaatatttgaaatttaaaaattgtcataatctaaaatatcatacctgaaattaagttaaagagaatacccaatatgcttgaaattatgtaaacctatatagttagtaatatctgctgtgagcaggtaagaactaggatattcttttcttttttattgttatattttggcaaagtatatttcatgtcatgatccattaaataagaatattgagtatttctgaaaaagtaaaatgttggtttgtggtatttcaccttatttttaacattaccaactcatactttctcctttctctatcgcctttacattattattataggatgaactttgataatgttgaagatgaagaaaaagtttaaaagaaattctgacagatgacatcagaagacacctatttagaatgttacatttatgatgggaatgaatgaacattatcttagacttgcagttgtactgccagaattatctacagcactggtgtaaaagaagggtctgcaaactttttctgtaaagggccggtttataaatattttagactttgcaggctataatatatggttcacacatgagaacaagaatagagtcatcatgtattctttgttatttgcttttaacaacctttaaaaaatattaaaacgattcttagctcagagccatacaaaagtaggctggattcagtccatggaccatagattgctgtccccctcgacggacttataatgtttcaggtggctggcttgaacatgagtctgctgtgctatctacataaatgtctaagttgtataaagtccactttcccttcacgttttttggctgacctgaaaagaggtaacttagtttttggtcacttgttctcctaaaaatgctatccctaaccatatatttatatttcgttttaaaaacacccatgatgtggcacagtaaacaaaccctgttatgctgtattattatgaggagattcttcattgttttctttccttctcaaaggttgaaaaaatgcttttaatttttcacagccgagaaacagtgcagcagtatatgtgcacacagtaagtacacaaatttgagcaacagtaagtgcacaaattctgtagtttgccgtatcatccaggaaaacctgagggaaaaaaattatagcaattaactgggcattgtagagtatcctaaatatgttatcaagtatttagagttctatattttaaagatatatgtgttcatgtattttctgaaattgctttcatagaaattttcccactgatagttgatttttgaggcatctaatatttacatatttgccttctgaactttgttttgacctgtatcctttatttacattgggtttttctttcgtagttttggtttttcactcctgtccagtctatttattattcaaataggaaaaattactttacaggttgttttactgtagcttataatgatactgtagttattccagttactagtttactgtcagagggctgcctttttcagataaatattgacataataactgaagttatttttataagaaaatcaagtatataaatctaggaaagggatcttctagtttctgtgttgtttagactcaaagaatcacaaatttgtcagtaacatgtagttgtttagttataattcagagtgtacagaatggtaaaaattccaatcagtcaaaagaggtcaatgaattaaaaggcttgcaactttttcaaaaacctgttagaatatgctttattgtgttttgaggagttttcctttttttcttttcaatatcactttatcctgctcaccagtatttcctcataagggttattatagccataattaatgttaaaatagactttgttcttcatattctcccatctttttcgctactat

SEQ ID NO: 97703 - DNA, 3770 bp, Homo sapiens
tttcagttataaatcctgtcagcttttttaaaaaataatttttaaattacaaatgcaaatatagtactaacttgaggagaaaataacttctatttcaaggaaaacactattaaaaattttaagtgtttctttccatttgcaaataattccttcactcagggtttaatgtcttaatcttacagtgtttctgtgaagtcaaatccagtgtgaaactgtcttcttccttgggaactaagaaatatagtcagtatagataatgggatgggataagagaaaataatttgaatcattttaaaaagcagacttgttctgaaaaaatcagttttaaagaccaataagaatatttgattacatttattatgttagtgtctctttgtgccttaattactctctaaattactgcttgaatgtaggctatctaagctcatcttatttaattgctcattattttatatttagcactgaatgattgaaatgtgttggaagttgaaacatacctaaaataagtaaccgatgaaccttttattaacaaactcactttatgtgtatgtatacttttaagcttgcatcctccagtctactgaaaattggccaggagacagataaaactacaacaagaaatagagaatctgtttatttactgctagatatggtaagtctcattttaatttttactaacaataaaaaagttccagtcgttcctgagaatcttttcttggcatcttagtcattgaatactttttttgatcccttttgttcacttcacgtaagccacacctttctaaaatttgcagagaagactgacatcactcatattttatcatttcggtaatatcagaagataacaatcaaaggttagcattaactgtgggtattcttttatgaacagtttttcaacctgttggaaaacactcaggccttgtatttttctagtgtattggtgtcacctctcttccagttttctgagttttctacattctaactctattctgcccatttctcgtaattttctgtaattctctgtgcctagtcacttccctctctgcagtatctgtgaaccagctcttgcttgtttctaccacgtggctctttccccacttagagttattttccttacctgcagaaattggatttatcctaatgacttagcacatcccacagctcaaatctttttccagatagtctttcttgattactttggcctacattaatctttcttctgttttgaattcttacagaatttacagctttccatttcattatagtcggtcttatgtttggttttgcttcctagcttagtctttgattgccaggtagagttgatagtacaaaaaaaaaatatttttgtattgtcttttatttctagtatatcagtgaggaaaatgaaagtgctcaatatattcctgttgattaaataaatttaattgaaaagtagctctttttaaacagtttgatatacattcactgtggcacatttacattttagattaagtaaaaggaaaataatatgtgtctattgctaataagaacaatatagaagttatgccttactggttgtcaataaatgttcccattataaataacttatgatttttgtttataaacaagttataaataacttgttttgatggattttttgaattttacagattgtacaagaatctccattccttacaatggatcttttggaatcttgttttccttatgtcttgctgagaaatgcataccatgctgtctacaaacaaagtgttacatcttctgcataaaattacctacttaatcaagataagcacgcatttttgttgccttggttttacctgtagactgtggaactattttaccttaagacctgaaaaagttttgtggattataaatttctttcatacggttgtattttctgatcattggtttcttaatatggttgtactacagtatacttggttgatttaggttgcacattcactgaattcactgagattattcctataattttaaagtatcatttatttgaaaaacatacattatcaacatgtttttgatatttgataatgaaaaaaatctttgcttgtttatttctgaaaaagaactgtatttagtgattattttagatagtgatattatagtattcatctgtgtgtaaattatttcatatagggaagagttctgatctgtacctatggttcttattgaaaacaacattggatgtgcatttctgtgatgttatgaatacatttctactttattttgaaacatttgccaaactaaatactgtaacactgtataacatttaaaaatgttaaagaactgcttagtattagaagcagatcatttcccaaaattctaagagcagcagcatatgttgttgcttgtataaagcctagcgataatttttagactaacttccatggtgccctgttggcattagcactaccattgtaccctgctgtataataaacaatcttagacatttatcaactgttgatacaaatgttagtccctaaccactttttatatatgttttaaatttttgaaattcaagtgtacctgccataacataaaataaacactagactgtatcacacttcgattgatttctttaagatccttggatattcgttcaataataataaagtttttgtttaaacttagtttgaaatataaaaaataatggtttaggaatgtctaagtacagcattcgataccaggtcagctattatatgatttgtttaaatgttttaaaaaacattttattgaaaaaaataccaaaattagaaaataaaattacacaatacttcttaaaaattaagaacttaaagaaaacttgtatgctgtcaacttgctcattttatctgtaaccaaatagagttatttaaaagaatagggaaaaaaaattgagtgatcatgggactagtgagaatgttgagaactgctgcattagtcagtaatgaatgggaaagacataaaagggcctattgcttaatagttggcatggagggcaaagcagctcatttagtttgaaaactaacccaatgttttgctctttgattggcattgttgaggctgtttctcagcagctttgtatatgaatatcataaagagcttctgttcacagcttcttatgtatacactggtaacttgtgttaagataaaagaaggctgctgtgaactcagttataatgtttttctttcttcaaacatagagagtagaatgaaattgaagtactatgagattatgctattattttgtgtatgatttgtccagcctatatttaaagtagggagtagttgtcactatctgtcgaaaaattgtacttgttccataaagattttttaaaaagggaaattttaaaatggcatagttcagacctgaaatagtctgatttacacagtgagcagtcaaaactaagatttaatgccgtttgttttgaaatattaggatcttagagaggtaataactttgttggcagtgatctctggagaggtaaagtaggaatttggatatgtacactttggaatcatatgtgaaagggcataaggatgaaaataaggcattctctaccactgctaggctgagaaaaaaatcgctcctcatagtcacctgaagtttttgtccaaattttttctcatacagcaaaggcgggggaggaggcgtggcaaaggtaacttggaggaaaaagttaaaagtaaattgacaactactatttttaatatcttgtttgttttattttcttctaaacttacacaacaacatactatttttgttgttttct

SEQ ID NO: 97704 - DNA, 1079 bp, Homo sapiens
gggcatggtggctcaagactctaatcccagcactttgggaggccgaggtgggcagatcacctgagcaaggtgggtggatcacttgaggtcaggagttcgagaccagcccgaccaacatgaagaaaccccatctctactaaaaatacaaaattagccaggcgtgacagtgcatgcctataatcccagctactcgggagggtgaggcaggagaatctcttgaacccaggaggtgcaggttgtggtgagctgagattgcgccactgcactccagcctgggcaacaggagcaaaactcccgtctccaaaaaaaaaaaaaaaaaaatgtggtgccactcaaactttttgaggcttatcttctgccacttctttcttccttctctcactctctttcttactctgtccctctttttatatggtattctgtgagctaactagatctttctgttgcattctcacatctatctgttttaccttctaatttattctacttgaaaataccaaccttttctctttctgccttttgaaatcctgcctgtattttaaggcttgattcaattgccattttctaagaaccattcctagattctccaatgataaagaacttcttctttcttagtgttatcagagaacttgtttatctcctgtggagttgaatataatctgccttgtattataattctatttttctacttatatttataccaaatggtatatatcttgaagacccagactttgtttttttggtgttgttgctgttgtttctcttacagtgttttgtgcagaataaacatttgagatcagtgattgtcttgtgattctatgattgaaaactatgtacaaatagctcaaaatgatttcctaagtggaaacactgcagaaaaaataaagttaaggagacaaaaactaatcagttcttgagaagacactgatgtgcagaattataagaattctaattaatattctgagcaaccattcacttttcacctgacataatcatgtttagtttccagcaaactttcaatagaacttaacttttaaaaaaaaaaacaacaaaaaacaaaaacatgtttttaaacagct

SEQ ID NO: 97705 - DNA, 1050 bp, Homo sapiens
ttctcaacaggcattttttgtttcttaactcaagaccttaacaatttaagaatttagcactgctgagttcctgggccgcttgaggatttaactcctgttcactctgatcagcttctttctcatctagtctcgcttcccttctttctgcccctaccttttctgaaatagggtttcagaaggtagtaatataatttatataaagttatattataaatataatttatagttagctacttgtgaaccatctaactcatatgaaagagcacaatatactccatttgatggaaactatagttacttaaaagtttaaccagtttaaatatcagctatcaacatctttctctctttaatcattattgtaatcaaattactgttaattgtgccttttatcatgggaattttattactttaataaatttagatttttttccaagtttaagaaagaatccagttcacacttttttattctcttctccttctgtttctttgaatttagctgttgacagtgtcttgaagaggatgacaataattggtgtaattttatccttccgatcattggcacaagaagcacttagagatgtaagaaaccattacaagtatatactcggtatccaaacaatcccttttaatttctcagaaatttaaagttaagtttcagattcatgcttagcaatgatataattaaaattccagttttagtagttacagaaaataacatacataaaattagttatttaagctcattttttgttttggtactgctgcttgcagagtataacttgcgtggttattgcactactttttcagtgatcttcattatcagtagagtattttcaattttgactatactggctttaatattgaattattttgaatccatttaattttcatatgtcttgaaatttttgaaaaatcactgaaagtagataaagtaaaataatttttatgaaaactaaaattaatcaattggtaatattttgtaaatttaggggttgccatttaaaaataattctgtattcttatttgttatcctgcctaggtcttatccta

SEQ ID NO: 97706 - DNA, 1004 bp, Homo sapiens
tcttttgtgcttccttctccccatgtccatatccagaagtcaatgtgtttttgaaggagtttttcacagtcaacaagcacattctttttaaaagataaagcattatgattaattaaaagtaggtctgaattgggaggcaatctggaatttattagtttatttttattttattttatctatttttatttttaaattttttgagacggagccttgctctggtgcccaggctgaagtgtaatgacacagtctcagctcactgcaacctccacctcctggttcaaccaattctcctgcatcagcctcccaagtaactaggactacaggcatgcactaccacactcggctaatttttgtatttttagtaagatggggtttcacagtgttgtccaggctggtctcgaactcctgacctcaagtgatccatcctcctcgacctcctagagtgttgggattacaagcgtgagccaccgtgcctggccttattatcagttttaagacttctatgtgacttgggcaaatctccttatgtctgtttaatatttttttattctctgacattctgtttcttgggactaggttcatcgctttactgactccctaattccagactaaaaatatttctagttttcctacagcaattttttctttcgaaaactcattctattcacatacctttctgccatcatctacaaacctataagttgcctctgaagatctttactttagcagtactttggatgttattatttcctgaaattgttccaccagtaaaaatcttgaactttgaaattcaactctcagatcacagccatgtcttctagctctcccattcctttacacctattgaactccttgttctggctcattgaaacttttatgcctctcagctttcctgatcacctattcctggctttacatattttatccattctggactatgaaatttggttagtgcattctcccttatgctgtcatacccttgagtttttgctacattcattccc

SEQ ID NO: 97707 - DNA, 1442 bp, Homo sapiens
tgttgggaaacattactattatataatccccatcaagtggtaccataccataacaagtcattctccctctacttgtatgtatccagtaatactcattgtctacaggcatactctagcctgcctttggccaggtttaactttagctagtttttttgtttcagttggaatttgttgctatgtccattttagtgtctactttttattattgatgccgttcagcgtctaagtaagcataagatgattctttatcctactacttacctttgttgcttttcctgaactccttccttcttgaatttgtaaactgaagggaaacactaagcttatataaataattttcagatgcttttattgaaacaacaaaaaaatatatgtagcatagagcgtctggatttcatgaattgtgtttcctacttgccagattgtaatttccaagcatgctcttatctcattaacacaaagaggtctgtgcctgacctaggatctttcttttttttttagaaacttgtggtggagaatgttgatgtgttaacacaaatgaggaccagctttgacaaaccagaccagatggctgcactgtttaaaagattatcatgtgggtaactcatgatactttttataaacataagaagatcttgatactcagtatttagctttggctcaaaatttgtaacataaatacaagtagtaaattatgaaaagtactctttagcttatgaagagaactagaacatttttgcagtcaaaggatcatataagtgtgtgtgtggcttatctgtttcacaatttttcttaaccatactcttagtctactatgtgtcgctagttcatgaatattaccagtatcaatttggttttgaacccattaaatttaatacagtaaatctacattaatttagactaaaaggattagcttctgagcctgttaactttctaaaaatcaactttatacgtataagttacatacaataaaatgtaccatttaagcaaacggtattttggattttgacagatggatgcattcatataaccattgccacagtctagatatagaacagttccatcagtttgaaaaattgtttgctatctctttgtagttggtctcctaccccagtctctggccccaggccaaacaaccactgatcttatttctgtcactatagattaaatttgtgtctggcctctttcacttagcataatgtttttgagatttattcatccatgttgttaagtgatcagtaatttgtttctttttgttattagctaagattgatgaaaacctgaacctacaacttaaaaaaaaattgtaatgtcttcttgacattgattctttgtgggaggtatattgtgaaatcacagtgaatcttaagtattaaagtgtgttcaagcagataactgttttagatatacttgatctaatgttattttcttttgcttttttt

SEQ ID NO: 97708 - DNA, 1015 bp, Homo sapiens
aagataatgacagtaattttacagctttgtaataaattatttttaaagttaattttattgcttgtttaatattagataacagtaggttgagtggtttattttacatgaatggaaaagtcagaggcttttcttattcttctatcccttcttcccaggtcaattgttgggatgactatgtataatcaagccacacaggaaattgcaaaaccttcagaacttctaacaagtgtaagagcatacatgaccgtactccagtcaatagaaaactatgtgcagattgatattacaagagtatttaataatgtgcttcttcaacaaacacaacatttagacagtcatggagagccaaccattacaagtctatacacaaattggtaaggaatgcatttagaaatttgtagtagcggaaaatttgtaatgaagtacttaggaaaattaatttttttgtgaataagtacttattcatattatcagtcaacttaaaattatatgcaggaatgtatatcatgatacattctgaattaagcagtttcttccggttataagtttacgtttctccttaggtatttggaaactttgttacgacaagtcagcaatggccatatagcatattttcctgcaatgaaagcgtttgtgaacttacctacagaaaatgaattaacattcaatgcagaggaatattctgacatatcaggtgaatagtactataccacagtttagagaatgaagaacacttaattcttttgctagtgtcttgattctttagacttttgattctgttgtgactatttcattcaattatatgcgtaactgcatattgtatcttagaattacttttgcattttgtattctctctttcactctagagacttttatcaggattttacattagtttttataatgagatgttgtattgtgttaatgttcattttcttaaagtatttgctctgtcggaagtataaaattaagtatgttttctttcagaaatgaggtcattatcagaactactaggccc

SEQ ID NO: 97709 - DNA, 6181 bp, Homo sapiens
cacagattttaaatgaaataagattggaaacagtactctaaatctgtttgctttcacattatatgtttaatattttaacatttaagaactggatataggactttgtggaatttgaaaattaaatacatagtttttcatgttaagcaaaatactgatttttcaagactcctcccagttatacattgctttcacaatcaccaaatactttgtcatttatgttcaaatacagtatggtgagttagttgttacaagaggcaaaagcaatttttaacatctcccaccctcactattgcggaatgtacctttagcctaattttccatgtctatttagaagtctttttaattcaacgtactttctttataacttgtattattattattattctgccttcacagcgacatcatattggagatcgcagtctttccttatgtaatatgttcctagatgaaatggccaaacaagctcgaaatctcatcactgatatttgcacagaacagtgtacccttagtgaccaggtaatgatttaagtgtttccaacagataggaaattttgtgtgaaggcaagaaaatgtgcttttagccagttgttgttttactttccattctttagttcccacactattagtaaacctcaaacctctgctgtgaaactccattaacaggtataatttcttagatgtaaactttctggcaagactgtacgtactgtttgtgttctttaatcaggagtcacgtgtagtttttacatgtgtgtagtgttagcacctgattctgctatttcttgaaagttgcaaaagaactggaattaagcatatttggtgattttcaatccactgtacttataattcagattgaagctcagattgccccgtcattggctagtgggagtccttttttttttctttccaactttaagcatctatttatttatttatttattttttattatactttaagttttagggtacatgtgcacaacgtgcaggttagttacataggtatacatacgccatgttggtgtgctgcacccattaactcgtcatttaacattaggtatatctcctaatgctatccctccccaatttccccaccccacaacaggccccagtgtgtgatgttccccttcctgtgtccatgtgttctcattgttcaattcccacctatgagtgagaacatgtggtggttggttttttgtccttgcgatagtttgctgagaatgatggtttccagcttcacccatgtccctacaaaggacatgaactcattttttatggccgcatagtattccatggtgtatatgtgccacattttcttaatccagtctatcattgttggacctttgggttggttccaagtctttgctattgtgaatagtgctgcaatagacatacgtgtgcatgtgtctttatagcagcatgttttataatcctttgggtatatacccagtaatgggatggctgggtcaaatggtatttctagttctagatccttgaggaatcgccacactgacttccacaatggttgaactagtttacagtcccaccaacagtgtaaaagtgttcctatttctccacatcttctccagcacctgttgctttctgactttttaatgatcgccattctaactggtgtaagatggtatctcattgttgtttttgatttgcatttctctgatggccagtgatgatgagcattttttcatgtgtcttttggctgcataaatgtcttcttctgagaagtgtctgtttatatccttcagccactttttgatggggttgtttgtttttcttgtatatttgtttgagttcattgtagattctggatattagccctttgtcagatgagtagattgtaaaaattttctcccattctttaggttgcctgttcactctgatggtagtttcttttgctgtgcagaagctctttagtttaattagatcccatttgtcaattttggcttttgttgctattgcttttggtgttttagacatgaagtctttgcccatgcttatgtcctgaatggtattgcctaggttttcttctagagtttttatggttttaggtctaacatgtaagtctttaatccatcttgaattaacttttgtataaggtgtaaggaagggatccagtttcagctttctacatatggctagccagttttcccagcaccatttattaaatagggaatcatttccccattgcttgtttttctcaggtttgtcaaagatcagatggttgtagatatgcggcattatttctgagggctttgttctgttccattggtctatatctctgttttggtaccagtaccatgctgttttggttactgtagccttgtaatatagtttgaagtcaggtagcgtgatgcctccggctttgttcttttggcttaggattgacttggcaatgcgggctcttttttggttccatatgaactttaaagtagttttttccaattctgtgaagaaagtcattggtagcttgatggggatggcattgaatctataaattaccttgggcagtgtagccattttcacgatattgattcttcctacccatgagcatggaatgttcttccatttgtttgtatcctcttttatttcattgagcagtgatttgtagttctccttgaagaggtccttcacgtcccttgtaagttggattcctaggcattttattctctttgaagcaattgtgaatgggagttcactcatgatttggctctctgtctgttattggtgtataagaatgcttgtgatttttgcacattgattttgtatcctgagactttgctgaagttgcctatcagcttgagattttgggctgagacaatggggttttctagatatacaatcatgtcccctgcaaacagtgacaatttgactttctcttttcctaattgaatgcgctttatttccttctcctgcctgattgccctggccagaacttccaacactgtgttgaataggagtggtgagagagggcatccctgtcttgtgctggttttcaaagggagtgcttccagtttttgcccattcagtataatattggctgtgggtttgtcatagatggctgttattattttgagatacatcctatcaatacctaatttattgagagtttttagcataaagggctgttgaattttgtcaaaggccttttgtgcatctgttgagataatcatgtggtttttgtcgttggttctgtttatatgctggattacatttattgatttgcatatgttgaaccagccttgcatcccagggatgaagcccggcttgtgggagtccttatagtcatttgagagctttcttgttatctggtgtgacaagatgtaccagcctttctagtagctctgtctcttgtgaagagtgttatagagattcaacactctggtctctttaatattgttgaagttgcaaatgtccgtagaaattttcattttaggaaggaactcctttgtcacaatagaaatgcaatgtaatttcttatgcatttttttccccaaataccaatcccatggctttagttactatctaggtataatgactaaataactttccttggcccagctctgtccaatggagatactatgtaaaccacatatgtaatttaaaattttgtagtagccatacacaaaacttagaaagaaacaggtaaagctaattttaaaaacaatgattcaaccctatataccccaaaatgttattatgtcagcatgtaatcatatgaatgaaatattgtatagtttttattatactaaatctttgaaatctggtgtttatcttataacacagctgaatttggactgggcacatttcacatgtggctactgtaatgtacagtgaagctctccttctacctaaaatgttatttcttatttctcatttgcctgctttgttacctgtcaagtgaaatcaattatttctgatttgtacctgtgtggtttttttgttttaattattggtcttaacaatgtgttaggtagaaacctctgtgtcatacttgattcctgcttctctcacacatctaagttactgaatcctttcaattttatctcagaagtctgtctcagatctgcccattaaaatttttttattacacttgcctatttcatatccctttttcatgccttgtctgaactatttctagcagctctgttacaattttcctttttcagtgttttcttctgccaatatcagagttatccttagaaaattacctcttcatggccaggcatggtggctcacgcttgtaatcccagcactttgggaggccgaggcaggtggatctcctgaggtcaggagttcgagaccagcctggccaacatggcgaaaccccatctctactaaaaatatacaaataaaattagctgggtgtggtggcagtcgactgtagtcccagcagctcaggaggctgaggcaggagaacccaggaggcagaggttgcagtgagctgagattgtgccattgcattccagcctgggcaacaagagtgaaactccttctcaaaagaaaagaaaagaaaagaaaatgtctcctcatgctgtggctattttaaaaaattgtcgctgtctttttgcctgcagtttacaatccaacctctagcttggcattcaaggcccttcctaatagttgaaacctctgtactttaccttacacgttatgctccaccacatagtagttctaactacagctctgaaccatcatatctttacacagtttttttccaaaggccatttaatccttccagtgaaatattctttttcattccttgcttgcctggtatgtttttacttgtctttttaatagtaatttaaataagcgtctatgaatttactctatgacgtgtttcttcacacaagatttacccaagatctacccgtttctgttttcaccaagctatgtgcattacccaagctagctaagtaagctctgtatctcacttatatttctgtcttttaatattgttgtgatatttgcaacacagcctggattcagctactgtttgcttgaatagttagtatgctttcagagtaattggtgtaatgtaagatttcattcttttctaaatttagttgctacccaagcattgtgccaaaactatcagtcaagcagtgaataagaaatcaaaaaagcagactggtaagaaaggggaacctgaaagggagaaaccaggtgttgagagcatgaggaaaaacaggctggttgtgaccaagtaagtatccacttatattatacctttttgctccaggtaaaatatttatttcatttttttctattgacattagtactgaggaaatgctaataattgtatattcttcattttccagccattttaaaaaatatttctgagcttaattaacctgttagttgcttatttcatctcaaaatacagattttggcctttagaagaaaatatatgtaatagttgatatttgtctttttatactaagtactgaaggccaattatatgtttaaaaaattttgtgtgttacattataagcaatctgtaatttttaatttatttaaagttagatagtggagactttattttggcatgtttttgatatattagaacatacccaatgtcattattataaaacagaaataacagaccaggtagcattcagggatctttgcttgcttcattgtttggaggggaggtgtaggtgggtaataattcggtaaatattttttgtttaaagtatagttcctactttcttgctaaattgagcaagccattgcccttttatagacaactttccttctctcataacagaaagtacttcaggaattgggcgtgattatctttatgagtgcagaataagctctacctttgtatattaagtcagtatattcattactacctaaaggtagaaacaaatgacgccatctttagaatattgctcttatgtgttagttataaccttaaagattttgaactttctcagtttaggagaataaaaagtcgaattctctaagcattatctccaaataaggttgatatatttataaaattaattttgtattgcctgtgatgacatgtgaacattttaactgtttattaatttttttcagccttgataaattgcacactgcactttctgagttatgcttctctataaattatgtaccaaacatggtggtatgggaacatacctttaccccacgagaatat

SEQ ID NO: 97710 - DNA, 2660 bp, Homo sapiens
acttgggaggcttgaagcaggagaatcgcctgaacctgggaggcggaggttgcagtgagccaagatcacgccactgcactccagtctcggtgacagagtgagactgtctcataaataaataaatacataacagtggggttaggattcaaaatcaagaattctcgcctcaagctatataatatcaactctattttctgcttcttggccctttattttcctttagggaagaggactggaataacctagtatgtctcttgatttctaaaatgctgaaatgatctcagtggatagtgatagtagtttctatgtatgggatagagatcatcatgaaaagcttctcactgcatttattttggaaaatagtataatctgtgttgattttggcagtttgttaggaaagcttgaattagcagtattgcagaagaaattcaaatcaccaggtagagaaaccatgcctcttaaaggaaataatgaaacacattaggaagtatactttttagatttaggcacatcacaggtcaaatttgcaagaatttttaagattatgtggagcccaggactactgtctgtctggcacaaagtctaccttaggtagaacatgaaacattatatgtttagatattttcagctatgcaaaggatcctattccaaaagaagaatacaacaattagaaagtcatatcccctttcttggaactaaaagcactttgaataatgtttgaaatttgtaattttcagtcatacctgaattttatttatattttttcatagttgcattctatttttgcctgtcacatccaaaataaagaaatgtttactacttctgtttgtcttattactctaagatatgtagtgttttattgactcacattcttttacatttagatttaacatctttaaatgtggatgcaaattaaaactgctggcaggctgggtgccatggctcacacccgcaatttcagcaccatgggaggccgagatggaggattgcttgagcccaagaggttaaggatgcagtgaactgtgattgtgccactgcattccagcctgggcaacaaagtgtcccccgtctaaaaaaagttaaaaaaaaaaataaaattgatggcgtgtgattatttaattggcaatgttttttttttcttagtggttcataaaatatttctctctttttttaatttattttttaaaaatagagacagggtttcaccacattgcccaggctggtctcaaactcctgggctccagtgatccacctgccttggcctcccaaagtgctgagattataggtgtgagccaccacacccagccataataatggtattttttcctatttatagtgacttagctttgatgaaatttgattatgtaagaggccatagattatggtttattattttttaaaatgttgttattgttatataaataatatttttattactctgggataattattggtgtgtaaaagatactttgggggaaaaatattctcttcttaaatcagtgctaccagttatcattcattcacttgaatcaaattaactgtaaggtactatatcagaaaacttactttaaatgtaaaaattgtgattctgatttttgtttatatagtttttatagtcgtgcttttgagaagatgtttcaacagtgtttggagttaccctctcaatcaagatactcaattgcatttccactactttgcactcattttatgagttgcacgcatgaactatgtccagaagaggtaattatagtgtactactgtgagttatatggtatgcaaagtaaactagatcaaacctgtagccaaccaaatatttacagtcataattagctaacttagcttcccatcgaatacatctctatgcagaatcagaaaagtgcttgaacagatacataggtttaatatatatatagataaataaacataagtataataagaacataccataaagtcacttggaattaccttttttaagataaatggtgggtcaggtattaatatctgtggaaaagatttatatagtaattgattttgtatacttaattttcctcttaaactgtcatggaaaggactcgaaaattaaatttatggattactgaataagcataaacaagtcaaagagagattcactaacttattattactaaattgttaataaatatattaagcaaaatccagattttgtgatacttgtgggatacatacatgcatgtgcatacacacacacagttgcagagtaattgaactgcttggtagttttgttgatgccaagtatctgtgaaaaatgtactcagtgtttcttctaatctttaaagaagaaatattttctatgtgataaaaatataaagattaaataatgtatttctttattataatttaacttagtgtttagtccctttacttaaaattgcagaacttgtagaaaagaaacttagagatagcaggaacatggtcagtttctttaagcattagacaacatctgttgcagattgtatgccagtattccaggggaagccaactttgagacagaagttagcttacaggaagtttattagggaatactttcagaatttctacctatgaggatattaataccacgaattttaatagatttatgaattttttagatttaatagatttttttctcccaaacttgacac

SEQ ID NO: 97711 - DNA, 1050 bp, Homo sapiens
aacaatgccctttataagaaaaatacttttagaaataagattaagggcatcgaatatattctttaataatgatgaatttattatttgaatatttttcttgaaattttaaaaaaggcacattgctgaattaatattttacatggaagaacttagagcacatgtgaggaaatacggacctgtaatgcagaggtattacgtgcagtacctttctggctttgatgctgttgtcctcaatgaactcgtgcaggtaaaaactatctcatactatttcccttttgttccttccttcccacctttgatagtattttatttgtttgttcaacaagcatttatgaaatatcatgtgccaagtgataaatcatgtttatattttggagatcattacctagaagggaagaaacagttagttgtagtccaatgtgataggtgttatgcattaagtatatataaagctcagaatgaacacaaggaaagacacaattatttatcctgaagatggaggtgtacgctaaccaaattacagagggccttgggaaagaggaggttaatcataaatcaggtgtactacttaaaaagatcaccctggttcagtgtggatggtagattgctgggaaccaaatgaggaggcagagagaccagaagaaaaatgactgcagtaggctagatgagaggtgatgagagtctgaacatgggcagtagctatggagattcagaagagatgatagagacaatataattggtaattaagtattagagggaaagtagaataaaaatctttttgaagaagattgttagaggatggccagtaaataaagatttcatatagacattcccatttaaatgtccaattttttttccttaattggtttttagcctttttttgctttccataatttatttattcaatatttttcatctttatttaaatttaaaaaactttttattccaaataaactgactctaaggaaataatattttattttgcttcactttatagaattacatgtttcaaatgactgtaagctaatacatagtataaagaaaacagtt

SEQ ID NO: 97712 - DNA, 1300 bp, Homo sapiens
tgttgcccaggctggtctcgaactcctgagctcacgcagtctgcccaagttggtctcccaaagtgctgggattacaggcatgggccactgtgcctggtcaccatcaagaacttcatagtctataaagtgcttaaagctacatggtactaaaattggataaattattcataaataaatagctagatgttgggaaatgcttcttgaaggactggtcttgaaggttgggtaggattttgatagatggagaataacaaaagaaacatagtttaaaaagcaacataagaaaggcaggataaatgtaagattagaaactcacttaacgatagacacatagaagatgatttttataggaactttggcttcctaaaaaaagactttggaagttgcacctataatgctagttactttaattgccaataataattttagtagaagcagataaactattatggtgtctttccccatagtggttcaatgcacagagaaagacgcaagtttttaagatctgcactgaaggaattggctactgtcctctctgatcaacctggattgctaggtcccaaggtaattcatttaattattatttcaataattgtgccatattaaaattttaaaaaacgtttctaagtgaaattttactgaaatttgagtcagggactacataaaaggatttttatatttagtggagaatgaatttgctgacttgacattcatacatcgtacctccctgcattcttctcccttatatgcatgctctctctcatacatacttacaggttctcttgtgtcctcttctgttagtctcttcactcttttgaattgatattatcacttcttgccaatgacttttcacatagaaagagattaccagttttgtttttaatctttgaataagaataaacacttacttttttttaaacaggcactttttgtttttatggcattatcctttgcccgtgatgaaatcatctggctacttcgtcatgcagataacatgccaaagaagagtgcagacgactttatagataagtaagttagcaacatttaaaaaaatattttctgtatatagatgcttcttgatttacaatggggttatgtcctgatagacctattgtaagttgaaaatattgttaagttgaaattcatttagtacacctattattactgaacattagagcttagcctagcctaccttcaatgtgctcagaactcttttattagcctacagttgggcaaaattatctggcaacatagtacactgaagagtataggttgtttatctttctgatcacatagttga

SEQ ID NO: 97713 - DNA, 1262 bp, Homo sapiens
cctcagttttctccttcacaaaacctttttatccaaacagtcattacttttgatcactaatatatatcctttcagaattttttcatgcttaaagatagacttgattaaaaagtcagaaatgatagctttgtcagtactttagacttttggaaatcacttctgatgttaattacatcagaagtataatttcagtgtctccattggggcttaaggaagtaataacatttaataaaatgaaaatctacattgtgaagtttaattttattgttggatttaatataatgttacttttttttttaggaaggcttgactggacatctaagtgctaggaaaaagtgtgggtagattcttccatgcacttccagtttgatggccagtttctgaattgataatgtcatttttaattgacttctagtattagacttactcattttgacagttattgatcaaattaaactaacgttctaatttgtttttgcacctagctataataaacgtattaatgacataagagaatgcaaggaggcagccgtgtcacatgcgtgagtagttttattttatccgtggtagctttaatcaagaaaaattcttaaagcatcattttgttgaagtgagtacagattaatagtatgcaagatatggtagtagaagagggggactttcagtcaatgagaattattaagtatattgcctcaatatgtagaaccttggaattagtgaagtcagattttaaatgtttttgaagtgttgataaaatgctataaggaagtatcacacaaaggactcttactttgggtataatctcactgccactatgctctgcataccaatatgatttttgtactactacatgaaaattaatatatccatataactcttacagataatatttacttttttttttttttttttgagacagtctcactctgtcacccaggctggagtgcagtgataccatctcggctcactgcagtctccacctcccgggttcaagcaattctcctgcctcagcctcctgcgtcactgggattacaggcacccgccgtacattcccagctaatttttgtatttttagtagagacaggttttcaccatgttggctagactggtcttgaactcctgacctcagtgatcagcctgccttggcctcccaaagtgctggcattacaggcatgagccaccgtgcccggcaaatatttacttttaagagtacacctctttcccaattttaatttcttatattagtaaatatatagatatcc

SEQ ID NO: 97714 - DNA, 1922 bp, Homo sapiens
agataagctttatttttaagttattataacaactgtaatgattactgcattatgttaattagaaatttctgatctttggttgaaaatattttataaatgttatttttattaaaatgacttggttcataacccagaagtgacatttttcccgttttgtcagttcaggttcaaataactggttttgcagaatacagaaaattataattggaaaagaaacgtattaccatggtttatacatatgtattgttactgtcactcagaagcctcaatttagtgatcgtggttacgtttctgtatttttcaaaagctacactgtcaccaaactttggaatacttgtacatttacatttgtatttgctttctttttatttaaagttggctttattttgtgccatgggatcctaaatactgacgctacagcactgaacctttggaaactagctcttcaaagtagctcttgcctctctctctttcgggatgaagttttccacattcacaaagctgcagaagacttatttgtaaacatacgagggtatggcattttcatttattttgtcttttttggagaagggtggtgagtgagttatctttactgaagttttggggataaaggagtagtcacactgtgcaggaagatacagcctataccatctgacttggatcccaggaagttgtttttaacagtcatcctgatagttaataatcatgttttttacaggtaacttcacatattaaaaaaaaactgaggttacctgacctttcaaaacatgtaatataggagaaggaagatatgtcttcttttgcaagtcatatatgattttagatgcaaaagtaccatatacattttagaggtttaaaatttttataagtgttattttagaatagggtgtacttgtaaaagtatatgaagcaataaaaaatagttaattggattaattataaccattacagaattcatatcactgcatgtaggaaatcatgttgtttttatttaaataatagtattccacattatttattttcatttatttccagttcagcaaataattatctgaaatgtgtttctttgaaatttttaataactttatttctctccacttgagattctgtagccaatatataaaagccaaattgaactcagacttggtggcaattatgaaatcttttaaaaatatctaggatctgctatacttatgttgaatatataagttgggcttcctagcttcagataacagtgaaatttgcttatatttatttcacatccagttgaataatgacttaatgacattgaaatgaaataaaacttctagatattttaatgtatgtgtatatgtctgacgctaaatgtaagccaatatatcccacattttagtgtacataagaattaccccgaaatgcaaattgaaatccaggttcctgagcatcacctctaacctcctctatctgtgtcttggagaggttaaaggaatctgcccttttcttcccgagtacttttttgagagaaaatacaaacagaaaaatacatacatcttagctgtataactcagtgactttgcatatgaaaactccggcatcatcaccacttaaatcaagatgtaagaacatttccatcatctctggagaattcttttgtgcttctttctggtcggtactgccatgcctagtccccactccccccccactcctttctcaagtgactactattctgatttctgtcaccatactgatattcttatggcagtgatctgtcagtcatatgataaatagtgccctatgtacttttcagctcttattttagatggtggaataccctgaaatattatgtgcaagatgggctttgtcattttctaattgatttagattgaaaatcatgaaacttttattaatatcatgtactagcatactgacaaactcattgtaga

SEQ ID NO: 97715 - DNA, 1008 bp, Homo sapiens
gagctgagatcgcaccactgcactccagcttgggcaaaagagcgagactccgtctcaaaaaaaaaaagaatcactctttacagaatttttaggaagcagggattaatagcaaaagacatttatgaaagcaagaaagaaacagttgagatgaaacgttaaataccttgataataaagctgtaatcaacaaacccgttgataaagagaagttaagtaatttattaagatgaggtacagtgtattatttttataagacattctttagagaaatataaagcatgttgagttttattaacacttagtcatataaccctgaagtctttttcttttggaactatcagaaactatcagaatggaaacttgcattggcaaaaaggtgacagtgggctgtctatcccttttggaataaagttcccaagattgccacgtattttaacctttaagaaaataacatgagtttctgacctaagcttttgctcaaaaacgcagaatctgtgtagcttttataacgttagcaaaaaaattctagaggagaggagccacaacccaactcagatattataaggagcatgggtataattaggctgtgttgttttatgatggtatagttagaaacacacagcaattatagctgcaatgtaaacagaaaaggaaagaaaattattcttcagcttttttttcgtattttaattagtctctttcagatgcactaatttctcttcaaatggtatatcctcgaaggaatctttcagctgaccagtggagaaatgcccagttattgagcctcatcagtgcacctagtacaatgcttaatccagcacagtccgacactgtatggttctatttttctcttttgaatgaaaataaagtgacttttaaaaaaataatagttcagtaatgctgttgctgtttgtttctaattagcattagcttattagttgaagttcattataaaatgttcactacttaagtcatattgttcagattttttagctttagagtcttaatg

SEQ ID NO: 97716 - DNA, 2463 bp, Homo sapiens
ttcaacatttccctctttcatgtcttaactctagttttgcttctttctcatttcttttttgttgttgtggtttttgcttttgtttaatatattattgtgttttctggatctggtcagggaaccgttaccgtattttatgtttgtatctacattttattttgcatgcgtaacgtggctttacctggatgttctttttggtaagttccaaatttatatagcatattgtttttttgtagtgtgagttgtaatgtttttcaccttcttttctcccacttctagtaatgtgatcatgctcatgacttgtttttaattttttaagagttcatttgatactttttttcctaacactttcagattttccttaatagtagcgcaatttggtactaatatgctttgatttgttttatagcctcacactgtcagttgctgatcactattagcagttgctgtctcgagtactttggttttttaaaaagccgtaatcatctagaaatattctaaaagcttgtgcttccatatagcagtcataaaagaagatagtttgtagtaaaattaaatacttttgttctctatgagcaatgcattctaattttgtttttacagcaacagcttgcacaactacagaaagaaaaatcagagattctgaaaaatctggcattatattacttcacatttgtagatgttatggaatttaaggtatgtattttaatatataatatttaacacttcagaagtagatttaaatgtttattaattgtgtgaattgctgtgtcagttgtaaataataaaattgaaattcttccagaactgaagtttaacacataccttatttgtttgtgttttctgaatttaaacagatttatacagataaaagattaaaataagtatttcttttcaggaccatgtttgtgaattgctgaatactattgacgtttgccaagtcttctttgatattgtaagtatcattttcagaaaaatgtccaattattctgtttccagaagagctcaggggaccacttgcttttctttagctagattatgtaactagcatataaagttttagcattattaatttggcttgttttatagcttttttaaaaagtaaagtgtgtattctttttatttgttttgattgtcactgagtataagtcttgtacatattgggaaatacacgttaactttagtattttatttaataggcccaattttgaaaagttaagtggataatattttctctgtaaaaggcatacttgatggactctttcttagtatgataatttttagatacaagaagtcaaagtgaaaattgtctccatttacttaatggtgaactttaaaaaataatttttttcctctttcgtgagattggcaccagtgttccttattattctggcttttattcttttgaactgttaccagtttgaatatagtgatcacaagctctttttctttcatccataaaattgtgtcagacacaaaactgttatctgtaactgtcaaattttagatgtgcttttagtgaaaggaattagcattttagaacagggataaaataaatacagaaaattattagctctcaatagcttctatgaagattttgtgtgtgtttaaaattttaagaaataggaagtagttgaacttgatttttttttctcctagactgtaaactttgatttaacaaagaactacttagatttaattataacctatacaacactaatgatactgctgtctcgaattgaagaaaggaaggcaatcattggattatacaactatgcccatgaaatgactcatggagcaaggtagatttgcattataaaagtctttctaaaatgctcagtttgatggattacaactcattgaaatttgatatgtctgttttaagtgacagagaatacccacgccttggccagatgattgtggattatgaaaaccctttaaagaagatgatggaagaatttgtaccccatagcaaggtaagaggcagttgttaggcatatgagagaatgggcatataacatagcatgaggatggatggttggataaagggataatcttgtttttgaaaaatactataatgggatataagtaatagttatgtgtgcttttatctaattatagacagggaactaattaatgagattcagaatagtgtatagagactcaagaatatattgattgatttcattatagttttttagattttaatatagcactaaacaataggatttaccatatggtatttgagagggtctgttctcacactaatgggttttaatagcaattctgcaaattatagtataatatttgtcgagttacttaactaacctcacgatacctcagttttcttatcagtaaaaatggaataataatagcacttatttcatatggttcttatgagaattaaatgaattacttcattaaaaagtacagtgtttgataaattttaactttattatagtc

SEQ ID NO: 97717 - DNA, 1761 bp, Homo sapiens
agcttcctttgttattcacttaatatttaatgtacagcttctggctgtgaggcattgctacatattcttatgtacattatcttggttaattgtccatgtcagcttccatttcgatgaggagggtattaggctagagatgttaagtcatttaaccatggttgcataataaggtatgctttctagcatcacctaccaaaacatatcatctgacactggtagtctttgaagtttgtcattataatcccttatctgatagatgtttgcattggatacttcctttgtccagaactgtatgatatggactggggaaattaaaacttgagtttggtacactgtctaattgtgctggagatagctataatagaagatagaaagtgatagctgctgttagacattatacatgtttagaggagggagatgttagcatttcagggaaggagtgcaatcaggtgcggttttctgaaaatgggattagcatttaaactaagtgctttaggaatagtggggttgggacatgtttaaatggtgggattctgacattccagtagaggaacagtaagaaagcaggaggtgtgtatagaaaatagtgaatagattgttttggctaccgtatgtagtgtgtgaatacatgtaggggaaatgtagattggaaaagtaagttagggccagattgtggagggccttgaaagctagactgttttgaatttaggcatctagtagttgtttgataaatgtttgtagctaagtagagtctagttatatatggctttgggggaaataaagttgaatgagaaatgtagcctatgagattgtattaaaaagggagatgatgggcatgtagaatggtagaaagaacactttcagaagtaaagagatgagatttccaatcttggctctgtcattaagtagttgtaactttaagaaggttcttttaaggtctgtaggtcttaggttcttaatatggaaaatgaggtttgtatttaagaccatttaaggctcatagtaagatggtgaccgtattatttattgttcagactaggacactgaagttggaaggaaaggggacacaattagtaaaattatactagggcaactaaaataaattgggattattaagcccaatataaaccaaattatacccttcatatcttactattatgaatgtactttcacctgttgtattttgaaactcaagtttaaagtactgaaaagcaggaaaaaggactaagacatcaattctaaatgtttaatgttgtcgaataaggtaataagtattcactttatgtttttggagtagtaatgattaaaatgtgcatataaacatggaatcgttctgaaacagataatgttgtgcaaaatagagtcagctactctcagatgaagctaaaaatagtcactacaagtatatatcttaatttgtctggtatttaggggtagtaatgaaatatttcatttgtgaatattttcttttttctttttttttttttgagatggagtctcatctctgtcacccaggctggagtgcagtggctcgatctaagcttactgcagcctcctcctccctagttcaagcgattctcctgtctcagcctcctgagtagctgggattacaggcatgcgccaccatgcccagctaatttttgtatttttagtagagacagggtttcaccatgttggtcaggctggtctcgaactgctgacctcaggtgatccacccatcttggccttccaaagtgctgggattacaggcttgagtgtgaa

SEQ ID NO: 97718 - DNA, 1133 bp, Homo sapiens
gatgccataggaggggagtagtaggggaatgaagtgatatgactgtgatcactatggctactcggtagagaatagtctgcaggagagcaaaggtgaaaatagggagaatagttaggaaatttgccatcattgagatgagagctgatggtggcttggactagggtggttgaggtgagaaatgttcagattctggatatatttttgaagacagaacctatagtatttgctgatgaattgggtgttgggtgtatggacagtgagaaataagactttaaggtttttggcctgaactcatgtcaagatataatggggtgagagaacaggagaaataggtttggggtagtgcagtgggagtagtacagtgaatgcagtgggggaagtactcagtagctcaatattagacgtgttaagtttgagaggcttactggaaatctgagtggagatatcaaatagccaattgtttatatgaatgtagatctcaggttaggtttaagctgactgtcaagttgaagaagattattgagggatttgagagagagagaaaggaatggaataatcatctaggacagtaggaaaatgaattgacagaaaagtttgagtagtattgctactcagttgtggtcaatgatcatgaaatcaggttgagatcagagtcagcaaagtatatgcttttctgctactgtaggttttatcagacagttatgaaagagggagggaagggcaaggcagtaattataatgatgggccatttaaagttaagatggataagaaagtagggggcctgggcacagtggctcatgcctgtaatagcactttgggagactgaggtgagtggatcacttgaggtcaggagttcgagaccagcctgaccaacatggtgaaaccctgtctctactaaagaatacaaaaaaaaaaaaaaaatagccaggtgtggtggcgtgcgcatgttttcccagctacttggggaggctgaggcacaagaatcacttgaacctgggaggcggaggctgcagtaagccgagatcatgccactacactctgggacagagtgagactctgtctaaaaaaaaaaaaaaaaaggcgtaaggggatgagtgacagtaaaaagatggtagagtgaatggataggaggt

SEQ ID NO: 97719 - DNA, 1037 bp, Homo sapiens
cccatcactcacattactgcctgagctctttctcctgtcatattagcagtggcattagattctcataggagtgaaaaccctattgtgaactgtgcacacgagggatctaggttgcgagctcttgaggagaatctaatgcctgatgatctgtcaccgtctcccatcacccccagatgggaccatgaaattgcaggaaagcaagctcagggcttccactgcttctacattatgataagttgtgtaattatttcattacatattataatgtaataatagaaataaagtgctcaataaatgtaatgtgctttagtcaccccaaaccaccctccacccctccgccccagtacatggaaaaattgtcttccatgaaactggtccctggtgctaaaaaggttggggactgctgctctagagctgaattctagctacccctttggacagctccacaagctaaacagaaaactttttatccaatatggaacatgtgattatcctacctttttttctcttttgtgtttccccccttgagctgtcaccatccacttagttatttaaactacaaccttcagaatcccttttgacttgtaaaaaatatcaaactggtcatttacgacttgtccgggttccccactataatgtcatttgaatttatccccttcaggtctacatttcctgccgggacaaatgccatgttaatccaaacattgatttgtatgccatccaatctctcctactttcgccctcccttcctccctccctccaacctccaccaggggaagcagaacaaaacaaaaaacaatcactttctctgtggtaccccacatctgcatcttcctggaccacgcactcatctttgaatccctcttgactggcatgtagtaggccaacaaataagagtttggtttagaaggaatcaccttactgtaaaataatgtaactgggagttgtaacagcatgctgggagttgtaacagcatcatgaataaatatatatgccctaatggaaactcaaaggaatatttggtcccgaccaattaa

SEQ ID NO: 97720 - DNA, 1121 bp, Homo sapiens
gtatttttgagctgaaagattatctaatttatctgtaatataaatgctttcattattttgaaagtgtaactctcaaatgaaatttgtttctcgtaggtttcttaagggtacctggaggggaatctgttattttcctggatgaagaaaatagtagaaactcctttcttattttattaacacatacaaattatttggctcaggaaacctaaaaggcaatgtaagcaaatgttcaggtgtatgttaaaacttttctaattttttttccaatattttttaaactttttttttctctttcctatattgcattacacctaaaaggtagtttgtgttttttaaaacagtaaaaatattatctggcacaatagtgttattatggaattagcctattgcacattttaatgtaaaattttggatttgatatccaaattaatgaggaaatgataaaaattactatcctatgtatgctgaattagatcttgaagtctttaagaatagggacattgctggcgagtagagtgccacaggagtgatatagggattctagactaggacacaggctgttgttgaaataatttgaaaattatgttttcctaagttataggaatcttttatgttatagatattatttatcccctctcccaaggaacatagaattataagatgttatgtaaaacataattttttattgaagtagcttataaagtcactctaggaaagacaaagcaactctaagtgtaataatcagcagtaaagttagttcagaggcgaagcaatagagccttttaaaaatgttttatccctagtgcctgacacataagaggcactaaataaatgtcccattaatgaatggaactatttgatacactctaacataaccagctttcacttgtattcaaacattgctttagatttatgtcaggacctgaacttatccacactttttaaaagttatggagttaatgttagctaaaaaaagattgtactttttagtagaactattcagatatatcttattaatggtattattgaaagtcacccagaaatagagcaagagtctcaactcctaaaaacataaatgtgttttaggggtggggtggtggaattggtgataggtgtaggga

SEQ ID NO: 97721 - DNA, 1084 bp, Homo sapiens
taaaattgtagcaccatataattctaatcttgttctgttattcatagtctgcagtgcataagttttcttctgaaacgtatatcatagtttgacaatcattgtttacacgtaattttctctctttttattacaatgcttccccagcaaggacaagtttggaaggtttgcaaagcttttcaccttccctctgcccgcttgcccgctttcagatcagtttcatgtttcataacttctctttctgcaatccacaacatagccatagtaaacaatggaaaactataaaattgcagtagtgtatttcctcacacatggcagacagatgtaactttccaaaggacacatccttttcaaaatgcaataaaaagaagttaaatagaaatgttataattttagtaattccctaaggaataacatctcgctagcaagcagttaatttaatgtcacgtaataaaacaggaacagtattcaagattatattctgtattgtaatagttcaggtagaaagttctttctaataataataccttacatttgtatagtgccttacagtttactgcagagaatgctgtactgctgatacggtcaaaacgtaaacatatccatttgttctgtgcttatgatatatagaacagatgtagattcattgtttgaagtgctgctggtatgatggaaaacagtgttgtaactcagatgttcagagaataagacaacacaccttagcactataaagacaattttagcagcttccagttcttttgaactagggctcttgtattaaaatgtttaaagtgaatgaggaaaacattttggaaaagacatttaaacataagcttttattttataacacttagaaagaaacatgtctagtactctactgaatatttaattttgtaatattttattagcttcagatgaatacaatcctacctcaaaccaagaattttttttctttttcttttttttaggtttgagctttttccttcactgctgttctgcgctaactgcttcgaaactttccatgcatttttttcagtagaagaacatctctgtactgtctcccattgcatatttcagctgtgacaat

SEQ ID NO: 97722 - DNA, 1001 bp, Homo sapiens
attatttgttatggttctttgccaggatatattttacctagctgataacttttagtcatgtcagtttatttttttcatagacttcttcttttttgcctaagtattccccatacaagtgtctctcttgttattaagcaaataaatcaagtaagtggattttagaaaaaagataagatggggcctagtacttctgtatgtattaacctcttatttttaattggcattttttgggagctcttggtatgccaaatactctcgtaaagtctacaggtaacactttcatgtagtgaacataaaaactttttagcataggttgtaattattatctgtttaacagttgaagaaactgaggcacagatagaatgacttgctcatgggtacacagctaagtgatggtgccaagattttaaacatggacagcctgtcttgaaactcaggttcttaacaattaggttaaactctgtacagttacagcaaatgtagactttaggctgtatttaggctgtatttagatgtttaggcttaaagtgaataaaggaaatatttgattgagagaggggattgtatttaatagttgcataaggaagttaacactaacttgctagttgtatatatatattatgataaagactgttactatgattactattcatattagacttggataattattatcatcattatagctattattaaaaagcagctagcatttttagagcacttatgtgcttatcattttgctaaatgctttacatggtttctttatctctcttctaatccttataataaccctgtgaggtaagtactaatttccccattttacagacgaagaaacataggttaggagatattttgtaatatattccaggtcccatggctagtaagtcatgaaaattgaaactcagccagttttattccagaatatttgtttttaacctttgagacatactgcctcccaattaagtatgttagataaggtccactgagcagtgtggaaaagg

SEQ ID NO: 97723 - DNA, 1620 bp, Homo sapiens
gcgctgggcctcgcacggggtgggggcgccgctgggagccgggagctgtcccctcctcggcgcccccgcccccatgatggggcccataggaaagggagggtggtgggtgggcgaaattctaggtgggtaggaaaacttgagtgttccatattcttacggagatggcagcagtgaacagggattacaccccacatccccattttttggtgtgggaatgtgggtagagaagggctgattggatgaatcccgtatcccctccactttgccactttattttagattgctaaataaaaagccattgagagtgtgttgacgatttgggattatttcattttgaaggtggagaggagggggaagtgagggtggaaccaattttctgaaatacttctaggctgtgagtcactagaactggaataacaaccttctactctttcccctgtactcctcctcatgttagattttccaataccatttcttaaagttcggtgtctgtacaaaataaaaaccgtaaaaatgttgcaattgctgctgatttatagcatagtctgataatttgagcaactatagctaataggcccatttaaaggcttttacatgtcctcagtacagtaaggagtggaagaccactggaagtttagaaaagtccatgtaaagatagaacaaataattacattcattatcgtaggacaaaacaacaaaatctctccccttaaggcaaggttggtaagttttaaacaatttgataaagagaaaaagagatatttggaaaatttagatccatcgagtttccaatgtgtctttgatgtcataccttcataactatttgttggctttttaatatatcgtgaatgttaccgtttagtttaatcatagcaatagattgtaggttgagagggcttctgaagaaaggtttttttttttttctttggaaattcatttccaagcgtttgagtgtaaaattgatttattttttacaatttgatgtagacactaattctaaagagtgtcctggtttaatgatgataaattttggataaggacaaagtctggttgctcacctaattgcaaggctttattactctaaacccagtgctatctggagagtaactgcaacatgcttactcagtttgttaccttttatgtggcaggagctcagtgtcatgacaaagaagcccctctgcatttaccaaggagcctaggttataaatttatataggttaggaataattcagttttaaatagtattacttagaggttgcattgacctgaactgttcggggagattgtgctgcttaaaaaacttggaaattgattcctatatgaattttgtccaaaaatgaacaagtcaaatattataaaagttactagacctgtggtattgtggtttaaaggaaatggttatgatggtttctaaaagaggaagtgagagtaacatcaaaagtgatttgggtatttgggcaaaataccttttctaagcatttattaaacatttttgtaggataaatgcaatcaaactttaatatcccaccttcataaataagattaaatgaaattctgggcatttgaactctaataattccagttcattgccttttctcaaaagcactgtttttttcactt

SEQ ID NO: 97724 - DNA, 1706 bp, Homo sapiens
caaacaatactatggtgaacatccttacagctaatctttgcaacatctataacttttaggacaaatttttagaagtaggatttcagagtccaggagtttatgtaggatgactgttatcaaattgcccttcagaaagttggactaaggtccttccaagttgttggtcttttttttttaataacagaattgctgtagaaatttatataaaagttcaagatgattatatttgtgttcaaggtggtatcatttatttcttctagggtcacaagatgctgctcatgatttggatacactgaaaaagaataaggtaaaaaaatgctttaagtctggcaccatatacacagaatattttaattgttttatttaggaaaaactgtattggtccatctttggtatattatggagtttatttggtaacattttggctatcatttcaatagagttgaaaaataattggcacataattcaaatatgtggatctgtaatctgtctttccagttttacattcttcttgatctccttcatgtaccctcatgaacctgaccttggaggcatgtctttcttgcctgtgtttatgtagttcctctgtgtgggatagactttccctcatctctgcttgtccaagacctgtccataccttaagtcccaactcacataccacgtcttctgtaatgccatttccagccactctactccatacaactgatgtgatttattacatatttactcaaaaggatttttagccctctaccatttttttgagtactgtttcaggtcatggaattgctgtaggtgaaggagtgcaagagattcttgttcacttgaagcgtatgacctaaggggcagacagagaagagagacaagcagctaccgaacagcgtttgtgtgctttgatggggaagtgcagggtgctgtagaagtgcataggagatgatgctcttaacccatgtttggtttggtttgtttttggggggataagtgagtcaggggagacttcctggaggaagtgatattgaagtatttctctgaagaggctaggaaaggagtagacagcctgtaatcccaaggctttgggaggccaaggcaggaggattggttgaccccaggagttcgaggttacagtgtgctatgattttgctactgtactccagactgggcgacaaagcaagactctatctcaaaaaaaaaaaagaaagtaaagtgttcatacagaataaatgatatgtgtgaaggcccagaagcaagagaaaggtggatgctttcagggacagaaaagttcagtgaccctggaatagagagtgtgagaaagaagggcaccaagagacaaggccagagagagaggtaagcatgagccagatcacaaaaggccatgtaagccaaagttagttgtgtggacttgatccaaaagactatggaaagccactgagaagttacccagagatgtaacaaggtcaaatttgcagttcagaaagatttctcattagaagcagtgtggaaaatcgattggagggttgctcaagttagagatgggggaaactggttataaagctattgcagtaatctaaggaaaagatgataatggctgagattaagatttagtggagatagaattagatagatgtgaggggttttttagagggtagaattcttaaaatttgattacttatgaggcaggatagggagtggggctaagggagaaggaggag

SEQ ID NO: 97725 - DNA, 1024 bp, Homo sapiens
taaggtgactcatattcttaatgttgcatatggagttgaaaatgctttcctcagtgactttacatataagagcatttctatattggatctgcctgaaaccaacatcctgtcttattttccagaatgttttgaatttattgaagaagcaaaaagaaaagtgagttttgttttgatccatagttctgcagaagcagaaatttgaaagtgtggatccattacccaatctttattatttttataatgaatctctaaaaaacaattatgaaatttcccttctaacaatatttcattatttcctacaattatttggttaattgctcttttttcaatgagatgtttagtttcaacattaattcagactataaaacagagactgctctagacttgttagtgtatttatgatgattaatatgcatttgattttaatgaatgagatagttattgtgaaactatgcatttttagcagtaaaattttaaggcactctaaggactaaatgtgtattgctttacttagattgtatgaaaatgctgatcagaaactgtctgttggttttctgaagttagaagaccaatagccaatgtcatatagtacttcaggcttgttattgaagtcaacattctgacaggcaaagtttctaggttggctgttatcaacaattattccttgaaatgtcatcatttttagtcagcaaataattcttacagactttatgtaagatacgtagatgggaaagtagaagcatttacagagagaaataactcttctggaacacctaacaatgacaggattacaatcaggtttaattgaactctggcctaccttctctccctttatcttttctccttcccattttctcttcctctctcccttctttcctttcatttagtaatatttattgaatgccttaggtgcccagcactgttctacgtgccttcctactagactacccagaaaatataaaactattcaattctactgttcatcaactttacttaatagcagatacagtcatgcactgcataa

SEQ ID NO: 97726 - DNA, 1550 bp, Homo sapiens
gagagggaatccttgggtgcccccaagttcatagtcggtcccctactcgacgcgtcgcctccatactgctacaaaggtggcgccgggaagctgagggccctgggagggtgaagaaaaggccgtctggcggtgactgagctgtgtttgtgcccccacacgccagccacgttagactggcccataccttaacctccttctgatacccgagacgcgatgctggttgctggattcccagctggttgctggtccccagaagcatccctgggaggaactgaccgcggtacacgtgggtgggcggtgccctgaagtgtgtgggtgcagtccactgcttcttgatcaccggtgcttccagttcctgttttgactcctctctcccgggctttgccaaaggaatcttgttattaatggaagcttgaatcgtgcaacatttaatcaaccgtgtggttggtaatcattgagatattgaccttaacagcaagctaggagttcgcacgatatttcccgcctttatttggggaaagtgactcttaagtattgtaggaggtatttttctctagtaagtcacgatctgaatttttttaaagattcattcccattattcattgcggagcctcgttgaaatatgtcgtctttgaaaaaaatctaccactttaacagcacgcggatttctttttttcctgctgagttttgcgacttgtgagaatcgtcgaaaattttagaacggaaaataaaccgtcttactgtcatagagacttacctgaaaagttaggttataactttctgagcttggaaaagagagcaaatgtaatatatatggtgtggaaagagtctttagatttgaagggtatgtaatgcttgccatgtttggtgtaaaataagttctttttgagaatagagtaacttgaactactttagtctgtcataaaaaaactaaatgcataatgtcaataatgcagatactctgcattaaaatttatatatagatgtcgtcttggtatttatttttaatgtattttagagatcaaaaactcttcatttccagttccaaatttttctattcaacaaaaacattttggagtgcatatttattggggttacaaatgtgagtaaaccaatccctgtatattgccttgccagaaatctgacattagccagtattaatgtttaagtccacattttgcagatattccaggtgcccactggtgtagtaaaactaagggttgacttcaacaaactgctagctgagtacgtatcttttgggagcacagaatatgaaatggaattgaggacatgcagcatcttttccttaagtttgctttaagtgaaatttagcctgaggggtggttggtgacagtcctgattaagagcccattgtgccctccttcctgtctggtgctttcttttttcttttccttccttcttccctctctccctccctcccttcctcttttttgacacagccgtgtcacctgggctggagtgcagtcgtgcagtctcagctcactgcaacctccccctccgggctcaagcaatcctcccacctcagcctc

SEQ ID NO: 97727 - DNA, 1040 bp, Homo sapiens
ccagctacttattgtatttttggtagagacaaggtttcgccattttgtccagactggtctcgaactgagctcgagcgatccacctgcctcggcctcccaaaatcctgggattagaggcttgcgccttctactgtgtctgtatgtatccagatacatcagaacttttcttaagccaattcttactttattttgctataatttttttttcttttagggagggggagtgaatgtagtgaatgttaccaaaaactttgcgtttaatatggtattctgaatatctgttaagaatatgcttttgtttagacttttggtttgattttagtggatcttcttacgaaatatttctacagtgccatgtaacatagtaactagcactttataaaataattacaatgtaattagagtttttcacaccttgttttagcatttgctttatccatttattgaatttgtttttttttttgtcttttatacacttgtattgttaatatctaggcctaatataatgggaaataagaggaagactaaatagttggcagctttcggatattaagaaacagattgttaaggccatctagaagttaagtaatagttaataaaaaaccatacaaataacatagcaaacatttgacccttctgagtgcaatgagtcacactcaggcttgtcacctagttgaaaattattttcataagcagagattgcaaattctacatttatactttactcagtttttgctattataaaatatttgtagaaaataataattcgtatttattgagcacctgtgtatcaggtaccaggtcaagctatacttgctataattctaacaaaagctctgttagtggatgctagctatgcttattcccttttactgagagaacttgaacccacatctttgactccatagcccattgttttccttattctgctattttgctctgaaattagaattatatagctcactcatcttcataagggaaataatatctactctatagattgtgaggatttattttgtatcaattgtgaggtttcagtt

SEQ ID NO: 97728 - DNA, 1054 bp, Homo sapiens
ccatagactgtgctctaaatagcttaagctgtacagtccaggctcagacattagtcttaccgatggcctgggctgcatcactatttgacattgcatgttctctgatcgataaagacatctttatgtcacagaacttggtccttttactacatctttattatgtacttaaatatatttctactgtgagaaacatgaatgggatctacttaatctagatagtcaaactctacatagggaattgtatttattcaggaatctacagactggagctgtttagtacctactttcaagtgagaaatgggatcaagttttgtatttaaatgttaagcgttttgtagagtgagcaaaagttacatgtgttttctgaaaactaagattttcattaactacttactctgaatccttttattcagagtgcagtctatggatcagcagcattggcattacctgggagcttattagaactgtataatctcaggcttcaccctacaccttctgaatcagagtctgaattttaacaaggtccccaggtgactgttcagcatattaaagtttgaaaagaactaacagacaagattttaagtcagtatttcaaaaatataaatttaaaaaatcttaccaaaaagaagaatccctttttttttttttttttttgtacactgtaggtgggtcaccaccacaaccagttgtaccagctcataaagataaaagtggcgctccaccagttagaagtatatatgatgacatttctagcccaggacttggatcaacacctttaacttcaagaagacaggtaatataaatacccttttgatccccaatgaacaacatcatggttttatgtgtctgttcagtgagagtcaatactttgaaatgtttccctgaagtctgttttaatgtaactgtgttgcacagaataaacattaaacacatcatagaatctacttaaattgtgttgatgatgaactgtacttaacagtgtagaactctagattttctctcataggtaattctcaggtgtttataggtatgccttatccacctgcccatagct

SEQ ID NO: 97729 - DNA, 1025 bp, Homo sapiens
cataatttatagagaatgtttttgatttgaaagttggtaagaatattattgctagattagagcccaaattagttatgccccctggaatttgctcagtttgctttctaatcatgaaagaattggcattaataattgaggaataaattttatatctctcccaacattctctcagcatttagttctggttgctaaatgaagctatttgagatttccttagtttaattagaatctgttttaaaaaatctttattgagttctagagagattctgttctcatttattgattggatattgtctttgttttagaaggattttaaactattttaatccttaattttcttatatttaaaggaactaaaatggataatttaccagttttggaactttctactggtagtggtagggatatgctgtcttttattgtttagactgatttgaatctatagtgtttcatggtttctaagtatctgttgaaaatcaaattttgtcacccttctgtttttctgtatgaacctggtcattttaaaaattaccattatctctgttatttcaaatattgtacattagaaactaaaaacaaatagttaacatgtcaccttttacagaagatagtctttttttttttttttaacataatatgacttttcttattttaaacaaatactaagggatctagtaaattttaggttaatactgtttaacttatggggaaaaaagagtgcctttgtactttgagctaattagaggcatctctagcacatgataaaaattcagttatccattgaatgaagccttttaacacttactgtatttatgttttgcatttttaccataacactttcttctgtttgtgtagccaaacatttcagtaatgcagagtcctcttgttggagttacatctactcctggaacaggtaagtgattctttctttttttttttttttttaaaagacagggtctggctctgctacccacgctggagtgcagtggtgtgatcacggagtaaacaactctgacaccaaatac

SEQ ID NO: 97730 - DNA, 1563 bp, Homo sapiens
ttattaaaacttgtcaataaaaaagccattggaattgggatgaaaaggaatagttaagacactgaataataaaggtgttttgagagatgttaatgcatagttataaatctaaatgccgttgaatagaagcaaccactgattatatacctagtttttctttaagattaatggctttttaataatcatcattatgcttagcacagttcttcatatgtcgtcatatgtgtataatcccatcaaatgtttattcagcaaatatttgagcacctaactgtgtactctgggaaatagtaaacaaaatagatattccctgcctttatggaacttacatttatttgcagaatttacatttataaacaaaacaagtaaattataacatttgttagaaggtattacattttgtggaggaaaaaattaagcagcaaagggggggagggggtagagacttagagttttaaatagggtaatgtattagttttctgttgctgccataacaaactaccacaaacataaaagtggcttaaacaatacacattcattatctttcatttctggaggtcggaagtttgaaatgggtcttggtgggctaaaatctagacattggtagggctgtgttcatttatggaggttctagacaaaaatctatttttctttttttttttgagatggagtcttggtctgtcgcccaggttagagtgcagtggcaccatctcggctcactgcaacctccacctcctgggttcaagtgattctcctgcctcagcctcccgggtagctgggattacaggtgctcgccactgcgcctggctaatttttttttttttttgtatttttggtagagatggggtgtcaccgtcttggccaggctggtctcgaactcctgaccttgtgatctacccacctcggcctcccaaagtgctgggattaaaggcttgagccaccgcgcccagctggcaataatctattttcttgccttttccatttctagaggctacttaatgtttcttggcttatggttcccttcctccatcttcacagtcagcaactttgtaactctttgaccattcttctgtagtcatatctccctctctcttttaaagacccttgtgaatacattgggcccttctagataatctaggataatctttgtattttaaggtcagttgattagcagggttaattccacctgcaaccttaattccctttgccatgtaatgtaacattcacaggttccagggattaggtcatggacatcatttggggacctacccagcttattccacctaccactgatagttagggggcaagtaaactttactcaaaagtctgtaagtgagggaggtagggaatagtattctagacggagggaacagtgtgtctggggtgttcaaggaagaataaggggatggtgactgaaatggagtaagtgagggggagaatagtggaaaatgaggtcagagaggagaggtaatgggggcagatgtattacatggccctgtaggttattgtcacaattggtctttacccagaaaaggtggaagacaataaggatgagactgttgc

SEQ ID NO: 97731 - DNA, 1472 bp, Homo sapiens
aaaaattcaaaaggtatgtaagaatgtacaatgaagttttcccttttgcttttgtcccaagctagttttcctcctctttaaggcagtgattgccatctgttttttgtgtatgtttccagagagattttatgtgttattgatttctatttgggtaaaaagcgggtcattgcattccgttgttctctagaaagtccatactcagtcctatatccatagcaattgggctggtgtgttttttttcttcttcttcttttacatttacatttttatagtctctcataaaatggcttttttttttttttgagacaatctctctgttatctaggctggagtgcagtggcatgatcatagctcactgcagcctccaattcctggcctcaagcaatccttctacctcagcctcatgagtagttgggataacaggcatgagccagcttggctgcatgtttttgaaaataggtacccactcttaaatctgtttttcaggctcagtagtagtggtttaacttttaagatttccagtaattagataaattacttgaagcactcctagtattttttcgtatttcagacattaactctcccagctgtttatttttttactttcgtgttttaataaccctctatgactttaatttcaagaactgaagcattctcctttaagggataaagtattttattttgatcatttatggggaagtacctctaaaggatgcattatatatgttctttctttggtagtttaactttttcctactgacttagggttatgaaatattcattgttttgggtgattctgctatagagtactagaatgtaagtttctactcaaagtggtccaagagttttagaattatgttttatttcttaagtacttccctcacttgcagccattctttcttcttttcatttttgtttgatctctgccctgtaggcacccaacctatttgttgtttttctttgtggttagaaatttcatgtccagattttatacaaatgaattttcagttctgattgcagtgaatattttactcatatagattttatttaattaattaatttattttgagatgaggtcttactctgtcacccggctggagtgcagtggcacgatcttggcgcattgcaacctttccttcccaggttcaagcgatacttctgcctcagccgcctgagtagctgggattacaggtgcccgccaccatgcccagctgattttttgtatttttagtagaggcggggtttcaccaggttggccaggctggtctcgaactcctgacctcaagtgatccacccacctcggcctcccaaagtgctggttggtattacaggtgtgagccatcgtgcccagcctcacatagatttttaatgtgtttggtttctgatttatttttgagactcgaatttttttttttctttagggttctaattcagtcttcagataactgaagttagatagccatttctatgcg

SEQ ID NO: 97732 - DNA, 1057 bp, Homo sapiens
agaattttctcatgcagagatatggctaatcaaattttggtaactgtccttttaagtgattctataccataaatattttgatgctgaattttctctttgttatgatactaaatttcagaatttttaagtgatgctcaatgtataatgattcgtttataatttaaaattctttatcttttcataaccgtagtatacctaaatatattacatattaacatacacatattgaaataaattatatatagaactgcaactttatagttttttttctaagacctggataatggcaacgagagtagcatttttagagatttcagaggtagaatctgaggatggagaagaatggcaggataagactaactttaaggtatttgcttttgagtgactagtcactgacagaattagcccatatcggggaaaacaggatgatcagcactctcctgttaacgttctagacagttgggggccatttatcttgaaacattatcttgtagtaatttgcattcacattgatagtagaagctgacgttttctttggacaactctttttttcaggtttcctcaagcatctgcttcctacatattactacaatttgcacagtatgggaatatcttaaaacatgtggtaaggcttaatttttttcagttcagagttttgactaaagagggataagttgtgaattgagagaaactgcttctgaattttgtgggttttttttaaacttaaatttttttttgagttttgatataatacatcctttgaagtctggaaggctggaagttgcctaatttttgataaaaagagatatagtgagaagatatggagaattgagagtttgaaaatccacctcctctcacctcctttcttaaacagtttacagtcttaaaaaagatagattatgccaagtattatattactgttttccaatttgagctgcttttattggggataaaagaagtaggaggcagttcctgagcttttagagtttttagagctttatagctctaaaatttaaaaaattatcttaccttgtgctacaagttataagtaacaaat

SEQ ID NO: 97733 - DNA, 1011 bp, Homo sapiens
actacaggcgtgtgccaccatgcctggctaatttttgtatttttagtagagacgggatttcaccatgttggccaggttgatattgaactcttgaactcaagtgattcacctaccacggcctcctaaagagctgggaagtattactaagtaatactaaggaatgtactggcatgaatgaagattcatttataaagtatattttcatctgaaaacttttacattgaagtctttttcttccagtttaggattatattttatatcctatttcataatgtgcagaactcaattattcaatatagaactggctactaaattccattttaaaagtcgtgcatttgtatttgaattaatacacattttattaaaagggttgtttattggagggggtgttttatttatttgcataggcctttatggactgtgaagtttgcttttgggcaaaaaatatttgtttgctatattttgttatttctcttggtatcatatcttacccatctttgtatctgtcatttattttaaaagatccaggaaaatttcagaaagcgagctgtcctatttttgaacactatataaaaacaacaaaaatggaatatctgtgatgttaggaaagttaccctgaactaagcctccttttaaaagctcagagaagctgacttcaaaaaaaataacgtgaaactataatcatgcaagtttgtttaaaaaaaaaaaagagtataaggaagaaaataacatccctgtagacattgaaagcacaccagaaaggcatgcccataaatggatagaagctatagagtagtacttaaaattgagttttaagacatttagaaaatgatacaagatatgaaagaacaacaaaaataaaattgaagaacttgggaaaatgttagtaatagaggaaaatcactcataaattaagactagaataaacaacagctgatgaacaacagatatgccctaaaagaaatgaaagataaaaatggaggacttttagaaatcagaaagaaaagagat

SEQ ID NO: 97734 - DNA, 1003 bp, Homo sapiens
actagccgttttgtttcctctccatgagaatggcacgcgtgagctgcttctagtcttccatcttgacccaacccccaaggttatttgatttttaaaccacttaggtgaacttgagaaatattttacatgaatctcctgggttctaatcacagctccttaattaactactaattaaagaatatttgaaaagactattttaaaaacatgaagccaaataaaatatttctttttggtcatataaaaaagtatacttaaaactttacaacatgcaaaggatgatctcaatgtaaatcactggacacatttggacacatttgttaactatgaatatttaaatagtatcaaagtgctgaattcttcatgtattttgtttgtgctagcacttattgtctaggctgaggcatagggacattcttgggacaaaaaagcatctctgacccagaggacacatatgcatcctttagctccaagatctccaagttttgccaactgggagaaacatcagggcaatgtgtgctggggtagaggcaaagacacagggaagggactccaaacttttttctttcttttttattgagacggagtcttgctctgtcacccaggctggagtgcagtggcacgatctcgtctcactgcagcctctgcctcctgggttccagtgattgtcctacctcagcctcctaggtagctgggattacagggacacgccactacacctggctaatttttgtatttttagtagagacggggtttcaccatgttggccaggctggtctcaggagcgttggtgaaaaaggtttctctggagcctttgggtcatgtcttaagttatcaggttatttcttggctcatcagcagaagatattttataaatttaaatcatctatgtcttcctggttggtttttttttttatatgtagtaaagtcttgcagcaggttttaaagcacaatttcaagtggcatttaaatagattgtctattttattttatttattttattttt

SEQ ID NO: 97735 - DNA, 1072 bp, Homo sapiens
gcaggttctcaatatttgtcaacagctatttttgtaccatgatagaaatcttggggtcttggatagatgcagagtaaaaattagagaaaaataaagttaaatagtttggggagtgttttatatagactattgagacaaatagccttttcctcactgatgtccactaaccatctagaagaatgacacatggtaggtgttcaataaatatctgaatgaatgtaaatatttcctttttggttttatatttttaattggttgcttttccttgcatgtctaagaagaatgatatgagaacctaagggagcataaaagagaagttgtagaagaagaacatttttaggaaagaagtatcaagaaaatgtttaattgaatggtggttggcatttggagttttattgtaatatagtgatctgtgttatacttaaggaatagtaacaggttaaagaagaataaatttggtgaaacttaatatggatgtggaatagagtgttgcttacatgtaaaatgaatgagatactaagacagtctctaagcagcaacattctaatttcaacccgtgacttccctgcgacctcggtgacctagaggtgttgcttaagtagtagagtttctgtgggaaatagaggtgagtatagcagcaaagtcctttagagtagaataccatagctaattatttctcttctctgggaacttgagctgtgttaagatgggcaggaagaatagcaatagaattaagtatctccaagcaaaacctttgaaaacaatcgtaattatcttttttgttgattggggcatctcttttcagaatctgaggagagatgagaggaattagagaactatttttttctaccatcacggtgcttctgaagacaaagtgtagtaggtttttaggtgcaagcaacagaaactcagcaggactaaaaagaatttggtaaaggatgttggagagctcatgtaaactctgaggatatgggagaaggaggtttgaaacaggcaggaactaacgcagcaatagccaggaccttaaccagagaccgccgtaggaactatccaactcccaaacaaagatgct

SEQ ID NO: 97736 - DNA, 1020 bp, Homo sapiens
ggaaaagtttcccggtgaggtgacgatggacaagagtcgccccatcgtaagcgaaagtggactgagaggaagcacaaacgcatggactcaaccagctcgcccagattcaccctcaggccttttgccatctgaaaagggcctatcggatgcgcgacatcacgagtgacgcgtagtcattttcccacgtcccgtccctgccccctcctagtgggacgcagtgggcgcgcacgcgcagctccgcttccgggagccgctcctcgctacccactatgctctgcgacatcgacctgtcgcaaaggccgcgtttgcggggccaatgagcgactcgctttccgtgcggtgcggcgagtgaggccccggtcttcctcctcgtcctgccgcagggccagaacccctgacggtattcagctgcgcgtaagtctggccggtgccatctgtctccgcaatgccccccaagaaacaggctcaggccgggggcagcaaaaaggcggagcaaaaaaagaaggagaagattatcgaagtgagtacccacccctcccccactcacgccgcgagccctccggaaagccacttccccgctccgggcttccctgggagccggctcgcttcctcgggccacgtgttcctcccttaggcctgtgtggcccactgccccttctccagcccctgatgacgctagctctctcattactatagtgacgctgctggcgcccccgcacctgggctttgcctctccgcccacacgcccgtgttcacccacccatgcacccgggtgcgaaatgacccctcgggactggcacagggttttatccttcgctagtcctctcagaattgaggagattttccaaggttatgtgtgaagaaatacgctgaacggtctcgggccagcgtctttctggaagaccgactcatgacgagtctttgtgttcgttatttctttacccgtcacccagggatggtactgttagttcttttgaaccaacaaattacgacttggtggctttttcgatccacctctga

SEQ ID NO: 97737 - DNA, 1309 bp, Homo sapiens
tattgttattgcctattttgatagtgtattataaataaaaactaggggacatcagactgatctgcacagtctatacagtgcttagttcctgcccattttttaatattgcctccattttttaatattgcctccattttttttatttgcctcttcaaatgccccaaaactttatgaattcatttgtattaatactttccgaaatgaatatgtcaaacaggattatggttctgttagaaattaacacattagtctgaaatggcatataccatttgctttcttacaactaaaatttagtgacaaatggagtcagtattgagcaatagaaagtttgaatatggaaagaaggaaataatcttggacttagggcaagcaaataaaagatacccagctaagaacttgtatcagcaaggaaatagtaatagggacctatagagacaggatccaggtgtcgtgaaagatggagcaagagaaattggttgccagtgtagaacagctaccaatagccaaaatcaaatgttgattacttgaagctggattaaccagttgcataatatatattgcatggatggacaacaagaatacattagtgcatttgggagaaaactaatgagggaaaaccgtgacagcttctgcctacccgaatgtcccaagagggtagactccattatcttggagcactattcagtgttgacctgcccttccgctgcttccctttttccaaacatcttatttaagcagtggaggctggcccgtaaaaggaatgggattacgtacggatgggagggaagttttaagtgaagcctggaatttactgagtgttaaggctcttggagcctcaggaagtcatccttttctttcgagactcctctgtattcatgtcccaagttgtcttctgaaacacacataaacacgcagttcctttactatcatgttaacttttgggaccttattaatccaatgaggaccattattctcctagttttattttaactgtggtttggggttgactgtaacctcctttttttctaccttgtaattcaggttaatctttaggtagggctctgtcctaaactcaggaagaagcctttttgaacttctccaaattgcaaatcattctgttttcaagaggtgctattggtatctcagatctgcagtgtgatatttagaaaggttattgcgcaccaaccagcccaataacttaatgaggtttctctgggaagtagtttattaaaaactgtagaaggaatttgcttggagtcaaatatacctaggttcaaatatcatctgtcacttaatagttaacatttac

SEQ ID NO: 97738 - DNA, 2043 bp, Homo sapiens
ttctaacacaggaagtctgcctctagagtccttgctgtccaccactgtctctctgaggtaaatcttttaactttcacaacaaccctaagtgagactcactttacaaataagaaactgtggcaaagagggtaatttacccagctctgtttgggattaaaatttgggcagtctggctccagagtttatgcttctaaatgcttgcactatacagccagccccttattaatgacttaacttcaaatgaatttatcatttctgagtttctgtgtatcatagaattgttgagaggattcaataaagtatatattcaggggttatgtttatgtttagtgaatactagataaataagtgtcccctttctctgtggaaaaatgttaatttctgagctctaacttagaggtgaacacaactcacttattatctctttaaactggttatttatgtgccagagcagtgtaatgaaacctgattttttttttcttcttctgggatcgggagtttatacacctttaccagaaactgccattgtgagtgctttcttttcttactggccaggtccccttaggggacatttttctttcctaagtctatctggcagtatctgctttgctatttggccttatttattcattgtttcttctctgtagttacagatggagcatgggttgaaccgcagtttattttctctggcagagcacctgtagatgctgtttaatcctgatcatatttttttctagagcctcctctccctcccgtgagagctcactttttgtaaaggaaaagtatggcattttatacttagttgctgcactgtgttcatctgtatgtatcacattatgttgaccatctttcttcaaattgaattgagtgttaaactttctttatagaaacaagggaagccatccgtaaaaggctcagtgcagaaacatccagcttgtttgtgcttcttaccttttttcatacacataggctgtagaaaattcatgtagaattttgtataataccatgttgggatgttaaatcatgaaacaagcatttaagtagaggaaagcaaagttttggtatatggatatagatgtcatgaataaagagatatttcccaatgagagataaccatttagaagcaaaaccctctgtacttttttgtcttaagactattgaaagatcttttactgattttgaggttgctgtaaacattatgtcatgttgtatgtttttaaatactaattgtttcagtactattgttttctttttctagcttgtccacgtggtggtattttgtatctattattctttctactcattattacttttcctttcccttagaaataatagcaaaataaaggctataaaatggccacttgtttcatactaaatgccactcagagggtctcaaattactttgagaagacctttttgcctcttcttcctctctaaaaccacccataaacaagagaatgagaaagaaatacaaattctattttgaaattagaagacatctgtaatcttggacctcagcatatgaagattggcagtagatggatgagttggtaactgacttagagcagagcggttatgtctgagtgcctgtctaggagtgtgcctgtaagaagcaagtgcatttcctctgcaaaattatgaaaaaaaaaaaaaactcaacaatgggaagcactaggtaatacagaaggcaagaggctgaaaactagaagttaaaagtgttaggagtaattaataattcttatctactacagctcagccaggtgactacctctgcaagaaacaggaggggtcttcttggaggtgggaggtggcagagaacaggcctctctgcttctggaacactaagcacagaggaggtgggatgtgagcctgaaaatggaagctagtaagtctgtacagtaaactgagaccccttctacctgctcttttctcttgtttacagttagacttattgccctcccagctggaggatctttctccagagaaccagaaaagacccagaaaaaatatttcagatattagcatttggtttcttgtcaggct

SEQ ID NO: 97739 - DNA, 1594 bp, Homo sapiens
aaacacctcatgttctcactcataggtgggaatcgaacaatgagaacacttggacacaggaaggggaacatcacacaccggggcctgttgtggggtggcggaggggagggatagcattaggagatgtacctaatgtaaatgacgagttaatgggtgcagcacaccaacatggcacatgtatacatatgtaacaaacctgcacgttgtacacatgtaccctagaacttaaagtataataaaaaatatatataaaaataataaaatttaaaaagcttcatagaataacaggtttaatgatgataatgttgagtacatattgaattgtaaagaatctgggtgatgatttaaggtcatatattgccttgacttgatgtttagtgttttgcatgtttttatattagtaaagaataattatcaataaaaataatgatttttagatatcattggaggatatatatggtaacataaattgctaagatatttctgtgctctttctcatgtaggacaaaactttcggtttgaagaataagaaaggagcaaagcaacagaagtttatcaaggctgtcacacatcaagttaaatttggtcaacaaaatccacgtcaggtaagtaatttaaatgtccatatctttttataaatgtaatattaatatagcctctgtttcagataaaatgtctggtattattatataattgtatttcaaaacagaatcctacttgaaatgtttttgcaccttggccttccttaccagcagtacctcttggatattgtccaagccattttgatataactctcatttattctaataatgattgcatgccgttctacagtacaggtgtgttatattcatctatttcactgttcataagtgatcactttgtttccagctttctgacactaagaccacctgtagaaatacaggagttcttacatgtgtttatgcttttatttctgtggcataaattagctggtaacagactccagatcaagggaaatggatttctaattttaacattataaatttgccagatcactttccatagaggctgtagtacttcacattttcatttgtagtacatgagcaatagatactaaagttctttttaatgtgttacaatctgataagtataaagtgatatcttattgttacattgtttccctcgctactggagagtatcttttgtatacttgttagctgtttgggtttgcacttctatgacttccctattgaaattatttgctttattggttgtctttttcttgtcaatttatgagataccttttgtctgcattgcagataattggtgatatttcagttatgttttgccatgcaccaatttttaacttacatgtatatatagagtttaatattgctagatatgttgctagctttttaaaaatatggttataaggtctcccctgccactggattctgcatgtttttcctagatcatttgtaattattttatttttatagtctatgtcatatgaatttattttatatatcttaaagttctcactctgttgcccaggcaggaatacaatggtgtgatcttggctcactgcggcctctgcctcctgggttcaagccat

SEQ ID NO: 97740 - DNA, 1042 bp, Homo sapiens
atagctgcttacaccagcatcatttatccaactgaaataccactattatcctacagtcatagtcatacattgtttagtgatgtggatacaatctgagaaatgtgtcgttaggcgatttagtcattgtgcaaatatcatagagtgtacttacacaaacctagatattacagcctactacacacctaggctatatggtatagcctattgatccaaggcttctaacttatacagcatgttactgtactgaatactgtaggcagttgtaacacattagtaatgatttgtgtctgaacatagaaaagatagagtaaaaatatggtattataaccttacaggattactgtcatatgtggtccctcattgacctaaatgtcattaattctgtgcttgactgtacattaaagtctcaaggcaagtcttttccccaaaatggtataccttttctatttttcctggttgttcttaggcatttattctttcatacgaattttaaaatgagtttatccattggcaactcatttgaaaaaaatgtagcccctttttttttcaggttctttagacctctcacttgtaaagatttcatagacatggatctttatttttaaagtacatttttccaccatttttatctccttttcattaacttctggaaacacatttttgtaatgtaggagagaagaaagaatttctcatgtgtttacagattttttaaaaatctgctaatatgtatttgtgagataagtaaatttctcttgctcatgctgtctgcaaatcagtgacccaacactttcctttcacatccattttcccagcttgattctagaatctaaaactattgctcttccaaactgctaacttaatagcccggtttaataaaaattaatgtttagagctcacgcctgtaatcccagcactttgggaggccggggcgggcagatcagctgagaccttgcagtgagatagacttgggtgtgaatcttcctatcttttttgttacatgatccttaaatagcaaccctggtctttatctgtactgtggaag

SEQ ID NO: 97741 - DNA, 1092 bp, Homo sapiens
gatgtttctaggtctttttattggactttttaggttcttttgtcccattttatgttgattttcttcaaggaagtgtcctttactcttgccacttttttatgctctccttaagtaccatatacccaaagttttaattgttacctgtaagctgctatttctaaagtctttatctcaaagcagaccctctctgatttcagtggaatcaatatgcatgtctatctgccttcaaaagagctctacccagatgctttgtaagcatcttgcactctgtatgtctaaaactaagctcatcttcacctcttaccctgaaacctgttcctcctgtattccctgtcttgtttaacggcactaaccatatacatgataatcctagattcctccccctttatacttcatgttcagtcagtcctatcagctctgtctccttttctccatccttaccagtaatgctcattttaagctcttgtgttttattgtgtacagcagttgcagcagcctcttgcctttattcttggattcccaatccatcctctacaaaacttgccctcttgatattttataaaatgtgacctgaccttgttattgggttactttaaacagttgagagaactctgttcaagctactgatgcaatctaagcatcttactgatgtttctcatactttattcctctagtccctgtaactttgcattggctggctctttctgtatttcttttcttgcccatcaagaaaaactcatccataaggttattggctcaatttagttttctcaggtatatgggcattctttgttcccagagcactatgtactatgttacagttgttgacatgtctgtcatcctgctagattctgagcttctttaaataagcatctttgtcttttcattgtattctctgtcatctaacataggacctgacgtataaatgtttggatgaatcctctaatcatattaggtatgtaaatcgtgtgcctggaactatgttatatgtcatgttttgttttgaattgttttgtttaatatcctacattgacctaacccagtgtttttccatgagggcactatataggtttttggggtggtataattcat

SEQ ID NO: 97742 - DNA, 2142 bp, Homo sapiens
atttcatcatgttggccaggatgggctcgatctcctgacctcgttatctgtctgcctcggcctcccagagtgctggaattacaggtgtgagccaccatgcctggcctcctttttgcctcttgccctattgacatcaactagacaaagcctgtgaaatagcctatgttcttgtttggtttcccactctctgccacctttcatagtcagaataaaagaaacaaaagtagacataaatgctacaaaaagaactttaaagaaatgtcttgctaatcacccataagtgccgttttcctctcacatcagtgaatggaaaataagttaaccaaaattcatcatatttcaggtagaatctatactttacagcctggcagattataatacaaataccatatgccatttgacataggtgcagatcccaagtctgtagtatgtgcattcttcaagcaaggacagtgtactaaaggagataagtgtaagttctcccatgacttgactctggagagaaaatgtgaaaagcgaagtgtttacattgatgcaagagatgaagaacttgaaaaaggtaatttttttaaaaacactctcttaaaaataaatgttgaatactttcggtttgctactaagatatttattaaattgaagaacatttcaatcttaatagactgtttataaaaaataattaattgggtttattattttttataaaatctgaaaattaccataatatgccctttaagtaaatgaagatactttaaaaaacagtgatttattttggaattgtctgtcaccctttccttcagtactacctgctcatttatccaaagtacttaggaagctttggtgaataattttcttttttttttttgagacggagtcttggctctgtcgcccagactggagtgcagtggcacgatctcagctcactgcagtctccatctcccaggttcaagcaattctcctgcctcagcctcccaagtagctgggtctacagggtcgtgccgccacgcccagctcatttttgtatttttagtagagatggggtttcaccatgttggccaggatggtcttgatctcctgacttcgtgatctgcccacgctggcctctcaaagtgctgggattacaggcatgagccactgctccggccttggtgaataatcttaaaactatttatttctgcctttggtgttttaagaaaaccgtgaggccaggagcagtggctcatgcctataatcccagcactttgggaggccaaggcaggaagaatcacttgagcccaagagttcaagaccagcataggcaacataatgagaccccatctctacaaaaaaatagaaaaattagccaggcattgtgttgcatacctgtagacccagctgcttgggaggctaaggcaggaggaattgatcgagctcagtcaatcaaggctgattgagggaggttagggcttcagtaggccgtgatcatgctatcacactccatcctgagcaacagtgagaccccgtctcaacaaaaagaaaaagaaaaatgtgttaagccatgagtcttataacacagcattagtgtctaaggagatatgtgttgtgggagtagtagataagattacagtatttaatcttcatttctttatttagatactatggataattgggatgagaaaaagctggaagaagtagtgaacaagaagcacggtgaggcggaaaagaaaaaaccaaaaactcaaatagtatgtccttttcttgaattgagttgctgtgatatttatcattagggagaattatgtggcaaggtatttgctgctattttctattagattattctgtaagttactggaaaatttgatttcatcaagataaggtacacgaagctttatttttggaatttacaagttagattttatagattcttgttcagaaatagctgaacaagaataaaactatgttactgaagtcctttaaatgccattttctgaggtgaacgttctcaaatatggataaacaaaattacatatccagacaaaaatccctatttttttgcacagagtggaaggaggcctgttaaactaacccacttaataatgtatttagttttaatagggatagatttttaaattttaaggtttaaaatatttctacatatgaattcca

SEQ ID NO: 97743 - DNA, 1100 bp, Homo sapiens
gcaagtgttcagcaaattttttgttctatatatttattatttgattattggccctgaggagtaggtgtttgtttgtttgtttgtttgtttagttttatttctcatcttctcaggaacacaaatgaaacttggatattgttatggtgctttttataatatatttattattttcagcaattgattcatgttaaaacaatttcttatgacaagttactcatcttcaatggtgagaagaaatctagctcagaataatatatttttagtgtttgtatctctggatactcattttgctcattgccacgtaaagtaaaaaaatacataaattagcttattccaatgtaatatcttcaggatagtcatgggcaaggaattaatcacattaagagataactgcaactaagcactatttgaggtgacttctgtggaaaaaaaattaattctttaccattgcagcgttctgccctaggtccaaatgttaccaaaatcactctagaatcttttcttgcctggaagaaaaggaaaagacaagaaaagattgataaacttgaacaagatatggaaagaaggaaagctgacttcaaagcagggaaagcactagtggtatgtctcaggctcacccaaactgattctttattcttccattttcaatttctgtgtcatgcaagattttgtttctatttcatcagtgacaaggaatgtttagatttttgtcctgagttgatatatttgtgtgtctcaatagatcagtggtcgtgaagtgtttgaatttcgtcctgaactggtcaatgatgatgatgaggaagcagatgatacccgctacacccagggaacaggtggtgatgaggtaagaggaagctttgtgcctcatctccttatgttaattgaaagaaacaatagaaaataccacaacatggttaagagccaccaacatcagagccacagtgcctgggttcaaatccttactccaaccatgggaaattaatctaggcctccaccctcatctaatatggacataatgattatctctacatcatagtttgtgagaattaatcgagttcatgaattagtagttctttatacagcttaggacagtgcctagt

SEQ ID NO: 97744 - DNA, 1024 bp, Homo sapiens
agataacttactgttgattttttgtgtacttacaaaattctggcctctgggttgaaagaaaaaaattgtactctatatataaaaatgtgatggcagaggaagaagtttcatataccaccttgctattctttttaaacgaagtttagaaaaaataattttgaaaatagatcttttgtttttgttttttatagagacaaggtctggctttgttgctcaggctggtctcaaactcctaagcccaggtgatcctccacctcgacctcccaaagtgttgggattacaggtgtgagcctccacacctggccagtaattggtcttttgttttcacttggatcagtgataattttggctcattaagataaatgtcaggagtaaaagaaaactgttcttatttgtaacaactttcttttctatatgttgttaaaggttgatgattcagtgagtgtaaatgacatagatttaagcctgtacatcccaagagatgtagatgaaacaggtattactgtagccagtcttgaaagattcagcacatatacttcagataaagatggtaagtatgctaacttttgcctaattttaagaactaggaagttatctaaagggggttataccaggcttggcaaacttagatgtgtgcaggtaccagattggtaacataaatgtgtggtttgaccataaataaaagcagtaataaatagtgaaaggctgtagacatgagcagctgggtgtatattaaaatcattaatggaaactagaaggagacaaaaatgagcttggagttaaagtcaatgagttcacttcgggacctcatgagtttgagattttttgattatcaaaagtgcactgtctaggatattgtgtagacatgaacaccctacagaacatcagtgttatggggtaagtaaaagaagaaatgcttaggaaagacattgagaaggtcagagaaaaatcaagaaacaagtttccaaagaagcaagtaggatgaaaaagaatataaataagttactggttgtaattggttata

SEQ ID NO: 97745 - DNA, 1464 bp, Homo sapiens
tatagcactatgtttttttttaacaatttgattacatgatgaagattttctgctgtcacaatcacagcattacaacagcatgatttaaatactatttgcaaaaccaaaagccaagtagctgcttatattacaaacatttttttggtttccataaccatttagtcaaataaaatattatatggaaattgactatttaaaatctaattgctaggtcatgtagggaacacagaggtgtagaagattgatcctgccctcaaatgtataaaccattaagtagtcaaatggctacagtgaaaaacagtattttatagtaggtatagataattggcacagataagctcagaaaagaatgatcagttcttgctggagtaattctggggaaatggctttcatggagaaaaggaaaagaggaagtgtagtatcagtctatgttgtctattgctaatgtggaatggtgttttctgcttctacgccttactgattccagtttttatatttagaaaacaaattaagtgaagcttctggaggtagggctgaaaatggtgaaagaagtgacttggaagaggacaacgagagggagggaacggaaaatggagccattgatgctgttcctgttgatgaaaatcttttcactggagaggatttggatgaactagaagaagaattaaatacacttgatttagaagaatgacaccaaacacatcgctgaaaaaattaagtcagctcagcacgagttgaaattgactacattaatttctttccacctagaatcaacaggatgtttatttcctatgctgattctggaggagttaacctcctgcaaaaaaggcatcttgtccctacatcttctcttctgactttggctacatctcatagtaagttcagagtagttcatgataaattgaaaatataatggtcattgcagaaaatgattgatgttgtaactgtccacccaagtaagaagtgtatctgcctttccatcttttggttttcatttgggcatgtgctattaccagaaacaacaaacttatatttaaaatacccttcatttgacacagtttttaatgagtgatttaatttcctctgtatttgtatgtttagaagactgcctaaaacatgagcactgtacttcataaaggaaactgcgtatgcagattcagtattgtgtatctttggacaattagatggacatttaaaatggaacttcttttatctgacaggatcagctacaatgccctgtgttaaattgtttaaaagtttcccttttcttttttgccaataaagttgtaaataaagaccatcatacattaaaatccaaatatgggcctttttttaagtttttctatgaaaaatttaacatttctagcttgagaattttaaatacctgttataatatcacataggcatgttttcttaatatttactacagaagcatctagagtacttgacagtactacaatgagt

SEQ ID NO: 97746 - DNA, 1065 bp, Homo sapiens
ttttctatgtttagatgcacaaataccattgtgtcataattgcctgcagtattcagtacagtaacatgctgtacaggtttgcagcctaggaaaataggttatttcatatatttcatatagtggtagatggtaggctttaccatctaggtttatgtaactatgatgttcacacaactgaaatcacctaacaatgtgtttctcagaacatatcccttagttaagcggtgcatgactgaagttacattgtgaattttaccttatttttgcacagatggtatatcagatgctgtaagcccatcatactgatataaatggactgatataaattgtataatggtacaatatatttctaatgtgtattattcagcgctgaccgttaagtgattcagaatgtgatagcagtgagattacaggatcagatcattgagaaagcattgcatctatcaggttttaacacataaagtggacaaagggaacttacggcagacgttcatacagataattagtagaattattatatgagttctcttcttgttctgggtagttaactttgtataaagaactttcagaatcacagaagagatttctacctaagtataagactgtgatgctgatacatatatatatccacatacaatattatgttaatgcttctaggtacttagcacaccattcatatcatatgaactcaggtatatgttgtaataaattcgtttcaaggcataccagatgagaggataaactcccaaaatcttgtgttttgggtttttgtctctatttttaagcatatatcttactgatgataggtgttctctgagaataaagataacactttacttttcaattagtagaaattacgagaagctgaactctaactagaatctgacaacatctgcaaaattttatagtactttagaaacaaacccaaatgaaataatagtacaaaatgtattttcacattttctccttttaatgttgtattttttgattgttactctttgttaatgtcgaaagaaaaggagattcgttttcattaatttcattaatattgtgtgctttgccaca

SEQ ID NO: 97747 - DNA, 1027 bp, Homo sapiens
aattttttttgattgaatagataattgtgtatatttgtggttaattattattttacactccagacctatttctacacctgtagggaagaaacttaatcactgatatcgtcagcctgtcagataccactgatatcttcagtctagttttaagaaaaactaggactaagaagaagtatataatcaagttcaagctaatcatggccatttttaaattacttggtcttttttaatactttttcccagagcaaccttctaaatggaagggcaaagcctcaactatctaaaatgcagcttttaaggactcttagatgtatgatatgccttatgtacaggagattccatctataccttgacacccacaccactcccacccctgttctctcttccaagaaggtttttggcagcaaatagttctctttaattattatatttaaatatttgtatatatttaattcacattagggataacaactaagaattatttaattggcaggtttattaggtagttgttgattgatgacatgtataacaatccaaatggtatgataggtgaagccaatgcagtggcacatgcctgtaatcccagcactttgggattgcttgagcccaagagttcgaggttgcagtgagccatgattgcatcactgcactccagcctgggtgacagtgtgagactccatctcaaaaaaaaagaaaaaaaaaaaatttggccgggcgccctggctcacgcctgtaatcccagcactttgggaggccgaggcgggtggatcatgaggtcaggagatcgagaccatcctggctaacaaggtgaaaccccgtctctactaaaaatacaaaaaattagccgggcgcggtggcgggcgcctgtagtcccagctactcgggaggctgaggcaggagaatggcgtgaacccaggaagtggagcttgcagtgagccgagattgcgccactgcagtccgcagtccggcctgggcgacagagcgagactccgtctcaaaaaaaaaaaaaaaaaaaaaaaatttgtat

SEQ ID NO: 97748 - DNA, 1054 bp, Homo sapiens
caggctctcatctcctttcataattagtcacatgtaatttatcttccaaactgaaacattttttgagtgtggaagggacactatggagagtgaagaaaactcttttagtacttacattagacaactggtatacattggaactgtcctctgcaaacttgggcatatgttcactgtacttgtaattaatttaacctgtttcctttccttcccttcctgtaaccgatccatccaaagcattgctggatttatcttcttaagcatagttttaatcatgaggtctcccacttcataattctttaatggctctaaattgcctaccaaatacaatctaaatatttaggcctaatcttcaaactctcctctggtggccccagcttccctctcctactttcttatttctttagtcaagtaactcacaatgtaatgcttaacttttttgatcctgagttacctcattagtaaggtagggattaaaatgtctcttcctcagttgtgaagctgtaatggggtattatatgtaaagaaagtaggctggtatataagtacttagcagcaagtacttagtacataggcactgaggtattagtagctattatcacatacactgtagggttgtttgttttgctttgttttgttttctgagacagactcattccgtcacccatgctggagtgcagtggcacaatcacagctcagtgcaacccccaactcccggattcaagcaattcttgtgcctcagcctcccaagtagctgggattacaggcacttgccaccacagccagctaatatttgtatttttagtagagatatggttttcgctgtgttggtcaggctggtctcaaactcctggcctcaagtcatccgccctcctcggcctcccaaagtgctgagattacaggcatgaaccaccacgccaagcccatacactgtagttttctatgtctatgtgttcctactttatgaaatattctctctcacatcccttttgacagtgttcacattcctaaatccttcctatccttgaatgttttgaagatgtattcccatgaagac

SEQ ID NO: 97749 - DNA, 1057 bp, Homo sapiens
tcttggcttgctgcaaccttcgcctcctggattcaagcaatttctggctaacttttgtatttttagtagagatggggtttcaccatgttggccaggctggttttgaacccctgaccttaagtgatcctcctgccttggcctcccaaagtgctaggattacaggcatgagccaccgtgcctggcctgtgttgctttttattccttaatttttttatatagcatcttttatcaccttgtacccagttttctatgcaagtatttctttttcactacacagcttcctcgtaagactttaacatatgtctaaggtcattttactttctctatctcttcattgttctctttaaaaaacttaaatatcttaatgataactttaatatcgagatggcattttggatgaaaaacttcatcagcttttttccctcacaaatttagcatgtagatattgacacattccttttatattattctgccatttctgtagcatttcaccagtatgcaagtctgcacatgaaggtatgcttaggaaaacttaatgaacatccatttgtacacctgattaccatcatttcatgcctataatgtgcagatagcctgatgaaaagcaacaggcttgttcctggtattattcaaggaactcatgctatgtgctgccaatagagtggtgttttcattcagagaatgctcctactgggctctttttctctgtctttgttgaaggccttctcctaataacttccgagctctctctgtcttatagtgccaagtaaagaaagtatctgaaacccaaaattaagtagagatgttacacaaggaaattgttttaagggtaatttaaataattggatgtttaatagaggatgctttctgcattcttgaggggttcagacgtagtggaaatgacttatttatatatggctactttaagattgagacatagctattgaatttactttgttactccactgtccatttaaacttttcttgagttcttataatgtggcaggtgcaaaagatgaattagagtaccctacattcaaagaagcaatttatcata

SEQ ID NO: 97750 - DNA, 1049 bp, Homo sapiens
taaagagccaaagtttatataggaagatgaacattgaactcaggagtcttgactctgaattttcctgctcttaatcagaatttctttgttaacctgctaccaagcccacccctttttggtgatccagaggattttatgctctttgctaatattacttgaaatttcaaaaggaattaatatcatggctaaagatgacttcaagcaattataattttgattatgcttttccaaaatctctacatcctcttctctttggagattccagtccttttgtgccccgctaccctttgttgaattggctactgctttagatcttccttgtaccagaagcataaaaataggttactgaaatgcagtatagtgtttatgcctagagcccttaggccattattttttgtgttccactggtcaccacatagtttattagagaaaattagtaacaaaagcacaacatgtaagactcttactcctacatttgttttgtccatgttaggtgacctgtgacaccaggtcaaaggaactattctgtcctccagattctaagtagttgaacctacaggaaactgcagattatttcaataaacacttattttcttagcccaacactttgatcctacctgttataagtgggaagtgaacattaaaagagtgatacctactcagatctgtattgtgtgttaggaaagagaaaaaatcaggttagaaagcatacactgcacaggatgagggaaattgaggctttatcctcagtgcttggatgccatctgtactgccatctttatgttggtattttggttatggtactgtcatcttcggtggtatgtagagaatctgaagattaaatttgtatttttaatttctatattgcaaaaatgttcctatttgaaaagataattttatagctacgaagaatgagttaacccttgtttgccaagtttgttacttattaattatatgatgtacacacacacgcagtacactcttattttcatttgatgcatgtgggaactgaggttcacatagttgaagcaatcttatttccacatctc

SEQ ID NO: 97751 - DNA, 1029 bp, Homo sapiens
gttttcaggatacatatagagtaagtcagtgttgatgttctgaatggtcaaatgaggatttaaacccaagttgttctattccaaaagaacctttcctctacattattcacaatagaaaatgttttccatttcagttgcttctgtattaagcacagcttttctacaaagaatacctcctgctttcatgacctaggtttggataattcctgatatgtaagaatacatggaactctcctgaaaacatgcgttctaacaatgattcccttgttcacagaatgcttttatttggtttaggcacagaaattataaagtcatttaaagccatattttctaaggtatttaacatccaaatcaggtcaatgaactgtggcttgtgggcctctttttgtgaataaagttttattggaatacagccacacccatttgttgatgtgttatctataatcatctagtacagttgtgagagttgagttgccacactgtgtggctcctgagcctaaaatatttactgttcggctttttacagaaaaagtttgctgaaccctaatctaaataataaaacctcaaatcttaggaaaagcttaaagaacagtctcaaaaaacagaaaagcaaagtgcatgcctttgtttctaataggcctgacactttcagtaacccttgattattgtacatgctttttgattcaacctttgaaatgttaagccacctataataggcctaaattgtgaggggcatcttgttcagagaagaagactcaggagcggaagtctgagaacctgggttatattctgactttgtgctgacaatccacctatagctatgggtaattcacctaaccactctgggcctttgtttcatcattggtaaaacaccaattcacacaaaaaacttctgaggtataaattcagtgttttttatctgtttcatacttcaataaattatgcaaacgaataattggttttatgagatgatgtctgttttgtaagactacactgctaactttttaataactttgcttgtcttgtggg

SEQ ID NO: 97752 - DNA, 1078 bp, Homo sapiens
acttatatggacaccgtggacaaggaacttcactgtctgtcactaacttaccttattactgattacatttgctttcagcttttcataactgcatgataaaacctcagaccttaggagaagagcataaaaaacaacctcaaacaacaaaaaagcaaaattacttggggaaattaagtaacttgaccgtggctaaccagctagtaaataagagagtatagacctgacaccacatgtgtctacaccactacactgcactatgtcaaatcaacaatatacttatcatttcctgagtaatgacaaaggacattatgcagtagaccagatgttcttctgttctaaattgcctagccacttttgttccttctgtctgctttctgatgctaatattatttgaacatagatttttctcagtaatgatttctagttggcttttcctttccttttgtcattactcagggaatgataaagatattattgatttgaaacagtacagtgtagtgttatagacacacctgggttcaggtcctactctcttatttactagctggttggccatggtcaagttacctaatttccctaagcatcagtttccctatctgtacaaattattgagtaataatagtatctcttataggattggtataaagacttaaaaagttaatgtcatgtaaaatgctttagcataatacctgactcagagtaaaggcttaataaaccctagctgatcttactgtcagaatcaataatattactatttgtaatataattaccagacttaacaaatgggagaagtattaaccatctgcaggaataagtaccagagcctgcatcaaaatagtttatattcaacatgaagtctttaaattggcaaaagcactcagtttaatatatacctgttaagaaaattttaagagacagtcatggtttttagctggatactctgggaaaccaaataaagcagataattgtacagtatgataatcaaaaaaaggatgtctttataaatagcttgaaatagttccccagatgcaacttgaataaaggaaataaatagccgacttgctctaacttgaggtta

SEQ ID NO: 97753 - DNA, 1024 bp, Homo sapiens
ggttatttattttatatatacacccttttttaggtcagcttatttcggatcaagtggcagaaatcgtatctaaatacgaccccaatgtttacagcatcaagtataataaccaattagcaactcggactgcacaagctatttttgatgacagctatttgggtaggtaaaaccaaaatttactcatttttggaactgtggtacatatatcttatatctgagtatggtcttttaagtagaaaaatattttatgtgaaatagattaggattttttgaaacatacagaatatacaatttcaaattgttaatgagtactttggttatgttacgtttcagtaattgaaattgaagacagtgattatttgtgcagtgataataataatagctagcctttaagatatgcttactgtgttctgggcattgttcaaggtgacttggtttgtattcactcatttaatcctcacaagtcaagcatactgtattattctcattttgtaggtgaaaacactgaggcactgagacgcaaaataacttgcccaaagtcactcgcttgtaacttgctgttcagagattcaaatggagacagtctaactcctgaagttttcttcatgatgttaaataaaagttttggtctttaggacttattaacatgtgttctctctttcaatttctttatgatatattaaaacaagtcatatatgacagaaatagtacttgctgattgagagaatttatttgttctttatgatgagttgtaaatttggtgtttttaacagactcctttgtaaagttaataagacaattgtagttttgtaataaaaatagactatttgagtatttaactcagtttcatttaaaattcatatgtcatatatatatgaatctgttatgactaggggacaaaatattgcataagtaaaggagtttcttgaaaatattttcaaggaatgcttactcagcaagcctgctgaagataacgtccttgtcctgatggttctcccctttggtttcctgtttaggttattct

SEQ ID NO: 97754 - DNA, 1052 bp, Homo sapiens
gctgaggcgggtggatcccttgagccctggagttcaagaacagtctggacaacatggcaaaaccctgcctctagaaaaaacacaaaaattagccgggcgcggtgatgcacaccagtgtctagcttctcaggaggctgaggtgggaggatctccagagcccagggaggttgaggctgctgtgagttgtgattgcgccactgcactcccgcccgggcgacagagccgagaccctgtctcaaaaaaaaaaaaaaaaaaggaaaagaaaataaaattttaagcaattttaaaccattgttatggaatataacagaagaaatgaggaagatgttagcacactggtgagagtccaggctaggtctgtgctgaacttcctctagtggctgctgaaattgagacagctacacttggcttcagtgcctttcctttctgcttctttttagcccccaacactgttagtgatttccttagcattttcctccttgtcttcagcaaattcattcctctgggaggaagaattagtgtcttctttctttaggcatcctttgttaccttctgggccatctctgtacggttattaccccatcctctcattgtccatccatcttccttcagagctccgtttaggaatcacagtctttacctgattttgatcacatttttgtgccacagccacttctaccccacttcagtttgctctgtattatttttcattactgtactactaaactaaatgtagtttttcttcattcttaggttactttatcttgtctattcttgtttaacaatattacaaatgacttgagggcttatttgcatatgtttgagagccctccagaatttgtattttgtaaattttgattttatagtttaaaaatgctgggctatttattacggagtaccaatttttctaaattgattgtttgttttgaactgaagtagtaaaacttaaagcttgctgacatagtcacttctggtctgcaacttccagtgttgtcctaaaaaatgaataatttgtttgtttgtttgtttcagactttgtttcaggagttcca

SEQ ID NO: 97755 - DNA, 1037 bp, Homo sapiens
agtagtagttacacataggggagccaattattatctgttattaataattattatctattatcctcatgacataggcatccatataaaacttgttgggttcaatcacaacatttgtctgtgactatatatctttgttagtgtgcttgtgtctggtatgttttgggaagtggagagaaagggagatagtagggtaggcctgagaaggagaattgatagtccttagacttaaatgtcatatatcaacaacactggaaggatatacatgtaatatattgtgtatatacatgtaatatattgtgtccatgatctaggaaaacaacaagcctcattacctgattgtcattgtgttggtagaataaacaaaagacaagacatttagattgaagcactatatgcagagaaaaaaaataaccctatttggtacatatattacaaatgttaattgtctaaactaattggatgaaatataaacatttcattttcatctttttatccagatggctgcatatttcggattttctgtagctgccactgacattaatggagatgagtaagtttaaaaaaaaatgtttccagaaagttatcttctcatgtttacgaatactttactcaaactaaacatttttttcttctgtttttgtattccttttctgctaatctttctgtttaaggaaacaatttgaagcaaccttaatcatgaattctagaaaacctcatatgtttgttctgttttttttcagtagcttttataacatgaacaaataaagtaattttatgaattattcatagtttcttaaaagaattaaaggaagtttcaaatttgaaatgagtgctctggtaatcattttgtgtttcactgtgggtgtgagagatgcagaaagaggaaaagtgagttgtagtaagaaagaaaatgcctactaagacatgaaatttgttcttgctttggtgagaagtttctgttcttctagttatgcagatgtgtttattggagcacctctcttcatggatcgtggctctgatggcaaactccaagaggt

SEQ ID NO: 97756 - DNA, 1068 bp, Homo sapiens
taaagatttaaaatgttattcatttatcttctttcagtgtaagttgagcaagatcaagatgaagtcacaacttacgaatttctgagcagattggcttctgttcagaaaaaacaataccatccataaataaattatctagaattttgagagtgaaaataaactttagatgaatcttttgatgtgtcctcctccatcccctacccctagttttaatgaggaagcatttgtggtccagaaagtttaagtgattggtttaaggtcagagccagattatctggccctaaattaatgtcttttctgtacagttttgcttgagtttccttgaattagattattgcttatggataaagagtaccctactgaactttgaattagtatttatcatgatgaatgggttctataaatattaagatctgtacaaataattacaagtactgaaactttcttctcttcatccttgccctcttccccccttctctcgttccttcctcattcttccctttcttttcctcctccttacttctgtcattctccttccccctcctctttttttccccacagatattgcaattgctgctccatatgggggtgaagataaaaaaggaattgtttatatcttcaatggaagatcaacaggcttgaacgcagtcccatctcaaatccttgaagggcagtgggctgctcgaagcatgccaccaagctttggctattcaatgaaaggagccacagatatagacaaaaatggatatccaggtgctttcttatcaacacatagagcccttagatttttcagtcctaatagcaaatagtattagttactgttcttgatttatgttataaattattgcaattcagtatttcatatgttgatcaaacctctaaaatattcaaggcatcattcccgtcacctaagggtatatgaagaaaagtcagctctctttcctgggagtgtacagtgtactctgagtttctcctgtagtctttaatgaaatgagaagagtattacagaagttataaacaaaagttaaatgctcattctaagctgttttaatgttagctatctttttt

SEQ ID NO: 97757 - DNA, 1052 bp, Homo sapiens
ctaacttttttggtacatattaaagactctaatctttattttctgtccttactgctcactatatactgagtggtaaatattctgtcatactaaattttcattcactattttttaatcatatctaagagtttatatcaaaatgctgatgtaaaatgtttttcattatcatttaccaccattttattaatgtgattgcattagatctcatctttgcaaacaactgaaaagaatgacacggttgccgggcaaggtgagcgggaccatctcatcactaagcgggatcttgccctcagtgaaggagatattcacactttggtaagtgccatttcaaatatgtgcaccatagacatttaaaaatatgtgactatagaactgacgccaaagaacatttcaaaaataacaacagctgtgcttgaacaactacatttatttttataccatgcattcctctcactttcctttttcctagtcagattaatgccatattttcttcaaatgagctatttttgtagatggctaataaaactagtttatgtcccaactttgattctcctactctagttctttaactgtcctctttctgggcctcctcctaatctctgaggctttagtacgatactaaaaaatccagaaggtcccaacaaaaatacattggaataataattagcacttgattaacctttgttgagttagcctatataatggctataatgtttttaaaggcaattgtttttcttttttcttttaattaacaaatctccagatctctagtagagaacctggtatagtgttttttgtttgtttgtttgtttgttttttgacacagagcctcactttgtcacccaggctggagtgcaatgacacaaacacagctcactgaggccttgacctcccaggctcaagcaatcctcccctatcagtcccccaagtagctaggactataggcgctctcccccatgcccagctaagttttgtattttttgttgagatgaggtttcaccatgttgcccaggctggtctcaaattcctgagctcaagcgatctgcccacct

SEQ ID NO: 97758 - DNA, 1477 bp, Homo sapiens
ggtctcgaactcctgacctcaagcgatacgcctgcctcagcctcccaaagtgctttgattacaggagtgagccactgcacctggccttaatttttcttacctaattgcactggctagaaccttccgtacaatattgagtagaaatggcttgattgctattgtcttatttctgacattagggagaaagaaggatgaagtatgatattagctgtgggctttttatcaatgccctttctcaggtcaaggaaactcttttctactcctaatcgtcaacaaatggtaccactactggataacattgtcatgaggtgtatatatgtgatatgtctaatacagtgtgatcagcatatagaaggtggtgaatatttatttcttttggctgccaacctcgaagttactgattaaaacattaaatgtgtcagaggccatcagcatgcgatttgatttctgtaggccctccatggaaaaaccattaaaaattctgttttcttttccatggggatgttgagatctggttattatatcttacaaatatcaccatgttatgggtttgcctaaagaatattgagttctagtcatagagtgaatcttttaatattatggatcttatctttctataacaaatcacgataaaaccaaccctttcatttacaaggaactacatgtgtggcaaaagaagaaaaagaaaagaaacataccaaccccttcacaataaaaagcattcatagactcaactattagcctgtttattttcaagacagaagaatctggataatctctttggccatcacacaaaaagaaaaaaaatggcaaattttcaaatgttgaagagatgatagaatgaccttttcttataagtaaaggatttgttttggcagggttgtggagttgctcagtgcttgaagattgtctgccaagttgggagattagacagaggaaagagtgcaatcttgtacgtaaagtcattactgtggactgagacttttatgaatgtaagtagacaggtgcagcatttagcaaacatacccagtgttttcaaataaatataaaaggcctgatatctgggaaatcatctaattgttatttccaaacagaaagaaaatcagaatcattcctattctctgaagtcgtctgcttcatttaatgtcatagagtttccttataagaatcttccaattgaggatatcaccaactccacattggtaagtcattggtttaggcaaatagaataaatttactcaattcaaatgctgtacatgtttttattttgttttttaaagaacgacagcttaacttttttgataatttaaactaatgaagttatatgatagcattataacctagtttaatattatcattttactccttaccccgaagtgattaaagctagaccttttagtttagcatcttgtccagtgtaagagatttcttagtatatactaaattatattggagaaattttaggaattttcgttta

SEQ ID NO: 97759 - DNA, 1093 bp, Homo sapiens
atatactgtgaattccattaaaataaaatataatatttactcagatatttgttgattaagtcaatggactgtttttaaaactaaaagcttttttcctcgataggttaccactaatgtcacctggggcattcagccagcgcccatgcctgtgcctgtgtgggtgatcattttagcagttctagcaggattgttgctactggctgttttggtatttgtaatgtacagggtaagtaacggacttagaaagaaggagagagggaaagcagaagaaaagggaaagggaagaaggaaaagaagaatgaaaagtaagggaaggaagaaagggactgtaatgatgatacttgatgagcattacttattatatgagggaagataaattttatgaaatacaatttaaatgttcttagtggtaatatagtcacccaaaaaatacttttcgtattctacactgatgtgacagtaataatggtttttcttcaactgacagatgggcttttttaaacgggtccggccacctcaagaagaacaagaaagggagcagcttcaacctcatgaaaatggtgaaggaaactcagaaacttaactgcagtttttaagttatgctacatcttgacccactagaattagcaactttattatagatttaaactttcttcatgaggagtaaaaatccaaggctttactgctgatagtgctaattggcattaaccacaaaatgagaattatatttgtcaaccttctccttataaataagttcagacatacatttaataacatagggtgacttgtgtttttaggtatttaaataataaaatttcaagggatagtttttattcaatgtatataagacaggtagtgcctgatttactactttatataaaatagtacctccttcagttactgtttctgatttaatgtacggaactttatttgttgttgttgttgttgttgttgttgttgttttaaagcagtccaaatttggaccttagcaatcatgtcttttgtataggtacttaatgttaatacatattacactacagtttacttttcagaatactaaagactttataactgcatgaacttggattttttt

SEQ ID NO: 97760 - DNA, 2437 bp, Homo sapiens
caaggtaggactctagacaaaaccttctattttagctttagtgaatttcaaaagtaatgggtcttggagtatagatttttattagtagcttgaaagagcttaatcatatgcagtaagtatttttattaccaataaatttaaaattttttaagaaaaatatttttatcctagggccaagtgttgcctgccaccaatcagtaagttagtctataacaaattttaccctaacagttttaccacctagtaacagtcatttctgaaaatatgttggatagaaagtcactctttggcaaaagtgttagaatttgcttttgtgccatctattccttttatggcatctatcttgaaagtaatcttgtattggagattgaaagatgctgtaatttagaaattaacatgatatcttaaattacctttatgaaatatagttttgtataatagcatagattttccttcaaaaaatgaacatttatatatctacaaaaatatggagaagagtaatttgaaagcctactttctgaagaaaatggtgggatttttttttatcatgattaaatatcaaaaaattgccctatgaaaactttaaatctctaaaacatttgaaatactaccatatttgtgatttattgagaataaaaatccattttgaaatgtaaaatttttatgatctgattcagttttaagaaaacatgaatgaactagaagatattaaaaacatttgacattggtaagaaatattgatactgatattgatttttatataggtatttatttcagaattgatattttgagaaaaatacatgtgagtcattttttctgtttctcttttctcttaacgattatcactgtaattctgaatctgaaaggtaaaacaattagtcaaaatattattgccatcattctacctgtgttatgaaactacttattcatagttaattctcattaacacttacatttccataaagaaaactcaagtattaataaaagagactttactggcttaagagggctgtgaaagatttttgatagtgaatcatgaccctaagggagagatttgtgtgataaaagtattgtatataatagatcagcgatttttgtaaggcaaacagaatttgtaagttggcagatcttcctaagttgcaaaatgtaatgatgagcttggtggagaagaatgagtcgttcttggaatacctatgtgcagccactacccatctcaatgtcaccttgtttgcattcttggatagcttgtatatgtagtagtttgatgaataatttaaagaaaaacacctaaaatttgaaaaatgattgtaggatcaaaaaaggcagatgaaattacttaatactcagtgttttggagagtattccttttagtttgttggttggctggtttgaacgatagaaatatgcagcatgcaatatatgcttatatttcattttaatttctgatatataatgaacttcttgggagaggtactgaatctttgatgttttttgtcattgttctcaagtgcaatataacaatgtaaccaaatctagataatttcaaagttgtcattaatttagtaagcctaatataaacaaatatttgtattatttttgttagcaggaaagagtgattaagtgaggttatttacccctaaatggtccattctgcattgtatttcaggctggaaatgaattattctttaccagttttgaaacactttgaaatatcctaaggtaacttggaagctgtgtagtatatcaaattaatttgctacctaataacatagaaagtaaatatctttgtggtcacccacattgggtgagacagaaaatgaatctgttctaaaatttgtaatttgctaacttgatttgagttagtgaaaactggtacagtgttctgcttgatttacaacatgtaacttgtgactgtacaataaacataagcatatggtaccacttttgtgtatggggtttatcctttctgtgacgtgtttttgttttttgattacatgagctagcaataatgcactaaaaggatgacctcagaggtaactttctgtaaaacttcaaatcttgaatgtcagttatttgatgaaaagaaacacaaaaagagcaaaatgtaccacattaaaattcatccttagaaaggcaaatatgtatttgcctgaaatataagaattattttatttctaaacaaacatttctaaattcattatgctaacctttattatttttacattatcagattccttttaaaatgcacatttacatcttttataatttttaattatagtgtatatatgtcattgcatatatgcagttgcaatatacatatgcaattctagtataaaaatacctatttttataaatgaaaagtaccaagaagaaaattaagtgttgagatgcttgggaaattatactgaagtagcataatacaccaccgtaaattcct

SEQ ID NO: 97761 - DNA, 1030 bp, Homo sapiens
atcccctgctcatgtggttttatggggaactttctcctctggcttctgaaaggatttggtaaatggcaggccttgttggatgactggatagtcaaaggaagactgaagctagcatatgtctctccaccacatctgtggtgtatcttccatggtttcagcttcaatggaaaggcccaaatggttctaggattcacctgctgttcttggtctatgataacagaggctcctcttctcatacgtccaatctagggactgtagccccatatgtactagcctagctttttcccattttgaaataaccttgattttatgattgggccatgtttactataggttgtatgtgggaaaagagaagaagtttgctccctgtcatcagaaaattttctctgttctggaataagggggcttgatgtctggcattgctatttagacgtaacaactaacatttgcaaagaaggatacaacttacaaccacattcacacatattatctgcaacttactgtgggcagatatatcttacatacaaaatgctaaagtgaaattgatgtataagtcatatatcattttatcatacacatctatttcgaagttactgtgggtgtttaaacaggaaaaaaagcgatagtaatttcctgttttctctgtttctcaaattaggttaattgcatctagtgcatctcttttgtttctgaacataggtgataactggaagctcatgagatcaaagtggtggcaattaataatcattttatattctacactgtgcaaggatgatgataatacacatcccacacattggaaaagtgtgtacaatagtacaaatcaattacaatataactctcctagactgctagaaaattcctctaatataaatgattcttagtgacaggaaatgtcaacattttctagaatgtctagcacacattctcaccattcaactttgatttatgatggcatatcatcatgtcaaaggatacaaaatacaggcatgtaggataaataagcctagagatctaatgtacaacatga

SEQ ID NO: 97762 - DNA, 1052 bp, Homo sapiens
tctttatgacctttcaattttaagttcactggcaaccctccttctatactttatcctcaggtaagtggcccagtatacacatgcggggggaaaaaaaaaagctccacagtgcttgtttttccattcccttccccgttttttttttctttatagaatatcactttccaccaatttaataccacttctcctgattaatgaatagagatacatactctttcttttttacagagagagggacaagtttaccacacattcctactcagaaacagattccaatctctaatctctaggcttttatctattacctcaggacactggactcactctaacatattatttctatcatatatcttgagcattatgattgcaaagaatttgaataaaaaagaaaataaaagaagaaaaactggccatatccacattatgcagaaacaatcactgttggcattctagcatatctcatttactattttcttgtattttttttcaacttaccacaaagtaaataaagttcaagactggaagtagctgctggaggagcccgaacaatatagaataagctcagcataaaagtatctttttgtaaaatttaacctagcaaatctctaagctccctacctaataaagctatctctatagtaatcatcctcccaactgattgcatgtcctcttaaatatttgcccaatggatacatatataaattctattctcatttatatgtgcttgtatatatatgtatgtattgtgtgttggtacaaaatataaattattatattttcttgattctaacatgcaggtttttctaccttttaacatgattctaatgatgatgaaacttataactgatagtgtataacagtgtaattatgtttttctttctttttttttcgagatggagtcttgttctgttacccaggctgaagtgcagtggctcaatctcagctcacttgcaacctccacctccggagttcaagtgattctcctgcctcagcctccctagtagctgggaccacatgcgtgtgccaccacgcccagctaatttttgtattct

SEQ ID NO: 97763 - DNA, 1061 bp, Homo sapiens
aacacaatcactgatataatcaatttataaatctgcatgagattgttattatctccttgttattatctcgcctcttgttgaacgtgtgattgcatgtagaggaatactgaaaccatgagaactttctggagagaaactctccctcaccggctaaagagttccacatccagctgcataccacaggccatcacaagcactgtttacagttcttaaaaaacgaacaaacaaacaaaaaaaacccacttcatccacagtccactttcatagttctaaagaagtatcttgactttcataatgtgttctaagaccaagaagcacaggaacatccctcataatctaaagatgcctgcatagtaaatctggagcctcatattctgattttctgacaagttggctttccaaaaatagataacaagttttggacagcacccagcaagttttctacttcctgacaggaatgctgatgagaaacaaaaatgtggcacttcatctctgccaaaatcactgccatcaaaatgcagtcaccctagatgaccactgtctacttttctaatccctttcttcctggaccatctttagtcttaacacaagataatttgttgccccagtcataaaagtcctccagagaagtgtttctcaagcttgaataatatatagatatctttaaaaggaaaaaaaatcacagacttccaatttgtaagccaaattacttaaaataactttcattttgtatgaaccagtaacatagtaggaataaattcattatgatcattatacaactataaaccaaaaattgtttacaagttaatactatgcaagctacaaactaataaataatactaatttgataagacttcttttgcttaaaaaaaagaaaaatccttattgtaatatgaatttaatagtgactggtgtagggcagcttagtaatgtggtagaaatagcttagacaaacttgagctactctaagttgtgtgtaattctctaccttttttctatttgagtaatggaaaatctttgcagaaatgaaattaagaagtattaatacaaaatggtggctg

SEQ ID NO: 97764 - DNA, 1410 bp, Homo sapiens
ctaataggggcttaggcaaaccaggctgtatagacatgagacaaatagataaataaatagatatcagaaagctcagatatgactcagatattgtatataacacataatgtaattatatatctaacataagtaaactaaagcatattagagagagagagacaaaaaggaacagtcatatgtaacaaattatacatgacctttttgacatcactgtcctatttctagtcatcgatcatgtggtaatttagcttcatccacttgcctaaaatttgtctgcattgtccactagtcctctatctattgcagatattttctgtcccttaaatataacttttttccgtccattcaaattggccttttcattatcattaaacacaaattactcactcttattctaaaggatgttttatgttattttccccacctaaaattgactgaccctcctaatcttcttaaccaatctgccttttcactaccataaggaggccttctttctgtctctctcccctggcttcttactatgattccttcaatacttgtactattagatattgtgtttgctctgcctcactgtctagattacaagatttttttgaagaaaaacataatgtactatacagtttatagacttcccccaccctcagcattgaccacagtgttaaacatataaagatgactcacattttttatttatcaattttgtgatccacagttacaaaagaaggaacaaatgatggttggaagaatgcggctcatatttaccaagtctttctgaacgccttctgcattcatgcatccatgttctttctaggattggatagcatttcatgcctatgttaatatttgtgcttttggcatttccttaatatttatatgtatacgtgatgcctttgatagcatactgctaataaagttttaatatttacatgcatagtaaacatagtcttctcactgcacctcacttgtaaatgtctaactagcaaagaaaaatgaatattctcaggagttcgtgctagttgtgagtcttttgaccggacctaactattcatggaaaaaaagtcatttttttcctgatttttatacatccctttgcttccatacatcaactatttgtttttgttttgttctgttttgttttttgttgttgctgtttttgagatggagtttcactcttattgcccaggctggagtgcaatggcgcgatctcggctcactgcaatctccgcctcccaggttcaagggattctcctgcctcagcctcccgagtagctgggattacaggcatgtgccaccacgccccgctaatatttgtattttcagtagagacagggtttcatcatgttggccaggctagtctcgaactcctgacccaaagtgctgggattacaggcatgagctactctgcctggc

SEQ ID NO: 97765 - DNA, 1076 bp, Homo sapiens
atgcttttcctgagaagccaccctcaatagcttgaaatgttcatagaccttccctaaatgttaatacacatgaacatattaaaaataattaaaccacatttttgccataatgttttgtaatttcaaagcaagagtggtacatggtaaaataatcttttattccttaaatttgtaaaaaaatgacagttaattccctattaatttactatgagaaatttagaatttgaaatgccaatcccaaaatatggtagataattttaatagtgtatatttatggataaagttagatttttactttttaatttttatgcttactccttcaataacttagccaggtatttataaattttattaaaatcagtaatttatttacacaaaagaatattgctttctgacatttttataatttctagaaaagccagatttctgctttttggaagaagatcctggaatatgtcgaggttatattaccaggtatttttataacaatcagacaaaacagtgtgaacgtttcaagtatggtggatgcctgggcaatatgaacaattttgagacactggaagaatgcaagaacatttgtgaagatggtcgtaagtttatttcttatttcattttagttcatttataggcatccttttaaaactaaggcatctcagatggcattctatactcaggttttgtttgagccatgcaaatgaagatatatttgtgtgcattcaatgtgagatttgtgactgtagttttttaaaaagcacagaaaattaagaaattattttcatagatctaatactttttatgttgcattatttaattcttcttcctgagaatactgcagtacaattttggcacaatagaattgctgaaatctttcacatttatacaaatatgagagcaaacagttactgaaaaccaccacctaaagtcactcagttttatctgcctataacatttattaaagggatgacttaaacattaactgctacgcttttttgaccaagaactacagttactcatggaaatattaccttacaattatatttaaagattcactgtttgctaatttaacatagcaatgt

SEQ ID NO: 97766 - DNA, 1077 bp, Homo sapiens
gttttatgtgtaaaaagtgacacaagtgtgggttagggagagaaattcaaagaactgtccattagctgagttaaaagaggtctattgtggacacatccacttgaatgaagttgccttacaactactactcaattccctcccagttcggttggtacgatttaagcaatacctccctaacaagagtctagaagttgtgtttcatttggtgaatttattaactttatctaccattttgataactgaataactttttatagtttcttagtatgttttattgtacttttccttaaaatcaggacatattaaaaaggaaataaagaacattattacagtgttgatggagattacatgttatatcttttatttttactttatagatacggagttgccaccactgaaacttatgcattcattttgtgcattcaaggcggatgatggcccatgtaaagcaatcatgaaaagatttttcttcaatattttcactcgacagtgcgaagaatttatatatgggggatgtgaaggaaatcagaatcgatttgaaagtctggaagagtgcaaaaaaatgtgtacaagaggtaggtttctgggaacccttattactcaagaccctttagggctattgagtctaattatggatttgataatttagggagaaaagtaatttcatgctgttttaatatttccaaggaatcttttatttccacatttttagactttcagggaatcctaaaaacatttaaggaaaatgataattctgaattgtaccatgaaatacccacatttataggtaccagaaactctctatatgcccgagagacattttaaagcaaattatcaaattttaggtacggtcaacttgcatgttcaactatcatttttcattttcttcatatcagtgaattataaaatatgaggccccatttattgtcttatactcttatccataataaagacagaagaaaaaaacctcaactcatgttcaaagaattgtgaagtatttttaaaataaagtgggtgtaattcggcctcccagacttgtaatctcagttggcagaagaaaaactgttagtcacattg

SEQ ID NO: 97767 - DNA, 1069 bp, Homo sapiens
ttctgaaaatgtgtttcctttttaaaagaagaactagagcagagggaaagataaatcaggaattaaaagttgcattaaagaaataatagaaaaatgcctaaataattattggttctgactgagaaagaatagctgtgcgaaagatgtggaaagtaaaattgcacatggaaatggactttaatacatacttcgccatattgatcagcgtttacccatgtctctcaattactgtcctttttatttatattttcaaagttgaaatatgacctgtttgcttgaatattaataaatatatgcactgaatgtgtttgcccataattctgaatactacatatacattttaagtatgactcattgagtatgcacagagaaatgtatgtgtatacacataaaatggcatagaaatttgcatatgaggtacacatatgatgtttactagtctgtaaatgagtgcatattaacactttatttattagatatgtatgggttctgtatttcagagatgatttacacaatgaagaaagtacatgcactttgggcttctgtatgcctgctgcttaatcttgcccctgcccctcttaatgctgattctgaggaagatgaagaacacacaattatcacaggtaaaatattagaagcaattatctttttaagctagttaaagctctcaattttaatctaaaaaatctaccatagttttccattgtggagggaaattagttgttattgaagtgatatttttctttggaaatttattatacctaatgtatgtgtgtgtgtgtgtgtgtgtgtgtgtgtgtgtgtgtgtacatgcacatgtgtgttttaaacagtccgaaaccaagtaactttagctgaaacacttctctcttttttttcagcatacaatattaaacactggagtagctccgggctattgcaaggagcaaaatgttgtaaaaacaactccctatgacatttgatgctaccctttggctaggaaaagtgtgaggaggaaagggaacttcagacatctgaggtttcagctattctctctttcttccccatatttccaaaatcaaaacttccc

SEQ ID NO: 97768 - DNA, 1018 bp, Homo sapiens
tgcgcaattttgaaaaagatctccaatttcaaaacaagccttctgggtactttcatagttagtctgcacaactaactgaatcagaaaacaaatatattactcaatttcaggttacaagaattgacctccagggcagtgccttctgctctcttacatgtgatttgcaattacagttgagaaataagggtagagaaggaattcgaaggtgaggatctgttttccctgccaagtctttccttcttattgtgagcaaaaaatacactttctcattggagaacacttacagaaaacagtcactttcccagaccagtacttcactcttaaggaacaaccaaaaacaaacgaataaacaaacaccatagtttgggcaaattatcataaaatgtacaacataagaagttggcgattgctgtattttcaatagaaatgtgattgatatgaccagtcctgcctaaaggttagtaatgccgcaagaaacagagaatcaaagtctatagctatgtggaaaggaaagaattgaattgcacattagaaagtgcactctagggctgatgtatcttcagctccagcctactgatagaaaggcagtgacccccacttccaagacaaacttgcaaccaagttagagacactttcttgaaacactaggaatgttcctgctctgagttgtgtttccccaaaatgttggatacctaacccccaatgtgactgcatttgaaggtaaggttttagggggtaattaacataaatgagataataaatgttcaatcctaattcagtaggattgatggccttaaagaaggccttagagaaaagatatctttctttctctccatgtgcacacaggacaggaaaggccatgtgaggacatagggagaaagcagccaccattggcaagccaagagagagccctcaccaggaacgattggaccagcaccttgatcttggattttctagcctccagaactgtgagatacaaatttctgttgtttaagccacacagtctgtgatattttgt

SEQ ID NO: 97769 - DNA, 1035 bp, Homo sapiens
ctaaattcgcttggccgggtccaccttctcgtggcctcactcgccacacggatcagaatccggagcaggcagttctctctattctgaggctcctgcggctgccgcgctgacttccctgtgtgcgggagggaactctgggcaggctggttttcttggaatgtgtttacgatgttgaatgggacttgaacaggaagctggacgctgcagctggaactagcgtgccaaggtagagtaaggaagacttagctggtgttgggcttggcgggtccacttggtacgctgggcaaactccaagtaagtgagggctggcagtcaaggtacccctccctaggtcctagtagtgtttcccaactgagctcgccttactcatttgcaatcagacattttacatgcactatttcaatctgcaagtttgacaaagtgtaatgcagtcaattaggaaggatttaataaatttattttgtgcctgcttttaaaatacgttacaccaacatttgagaataaaaagttacggagaatgttcaagtcatgactgatttctaggactagcaggagacaatactgatgattttgtgtctgtattacaaaatgggtgattaggtgctaaagtaagggagattattagacagagtgaatgtgaggaagtggaaaactttcagaggaattggaaattcttcaaatttgcaaattgctccctttctctgccagtctttcccttttccccccatatgaacaagtagccttggctggaaaacccacaaattgggagagtgcagtcgctggtgactacaggctttgctggaaacagcagacaggctaaggtactgccccactgcataattaaaggtctccttgagctgtccaggagtgttttccaagtttttacgactgacaaggaaaaaaagagaggaacctggccggcagccaaactagactgagctcagtagccaggcatgaaagagactgggcaagttgcaggggctaattggaaaggggctgtcggttgcacttggggtttaaacaagaggtttcttt

SEQ ID NO: 97770 - DNA, 1515 bp, Homo sapiens
atttttaaagtccagcttaattttacctttatgagaagttaccaagtatattcacagaacttggctctcttctcagaaataatgcttgagaagctgaaatatatttatgacatacaaacagactttcttttcttaatggccacaacaatttccttaagaatttggaggatagattttggagccattcattaataaatccagccaatgtttgttgcatgcatatcatgcatcatcgggcctgtattccaatcagcaccgaacttctcagctctgtgatttctgtgcatgttattttacttcttaaacatttttccaacatatcatttattgcctatgtttctgtctataatttatgagcctgttcattgttgattcattatgatcattgtgaaatatttactttttagtgtgacatgtcaattagtaaaatatactacatatttttatggttcattgtactgtgctacagtcatggatgtttaacttaactctttttcgggtgaacagatcaacttattagagaaaacagaataagtatagataaattgtttaaaggataaagtcttttgctaaaatacctagtcatagcttttatttttagactttatattataattaatagtgaatctgtaaaaagcacgtgtatatgggatatagtagttgggttgaaacttacactatgggtatccttgaacaagtggctgtttgaggatatattagggtaattttaatataaaatgtcaaattttacctttcattttaaattagaaatccttaaaattcttatttccattgatgaatggtaggtgattttaatttaaattttacttagcagagtgatgtatttgtgattcaattcgcgatattgcaatttgttttctaaaacctctaaagaataaaaaaagttattttatttcagtataataatgaattcaaagatagttacagaagctaactgcataactgccatgagccctggtccctaaacgtattagaggctggtggatctaatattgtttgccttaatgcatttagagatcaggaaacttaagctttttcccataagagcataaaatatactcagattggaagaggaaaaaatggtataactttgaatggagaaatcgcttcactttcaaatactggggatatgaaattgaaatcaggcctttatttttaaagagaatggctaaaagtcattgttccagagtaagacttagaaaacaatgcttatactgttttcaggcccttgttatttgcgagttttttgtttgttttatgcctaagaaatgttttcagccactctaatgatgcttaccatgcatgattgtcatcagaggacagttaattgactcaaatattgtgtgggatagtaagtgtcaattttctgtttacattgaaatggtatagttatggcgaatttgaaattagttttgtctttcagtgtagtatacttaaaaatagttttgaaaaggctgccctaatttgcacacataatatgaataagtaagttaa

SEQ ID NO: 97771 - DNA, 1120 bp, Homo sapiens
gggtagggttggaccgcacagtctaagataattccaactggctattttaaagacagcaggggtatgagctggagtggcggggtgagaagctttggtgggaaggacggttacagagcaggtgaccaaggatgactaaggacagagcaggtgactaaggagggagcaggtgactaaggatgactaaggacagagcaggtgactaaggagggagcaggtgactaaggatgactaaggacagagcaggtgatagaggctaggagggggttgtttactaaagctagggacaaggagatgtaaagaacgaggaagttaaactttcaaatggaaaacaaagaacagggaagctcaatatactaacatattggttctttgaagaggaatttactgtatcctacaatgtaatgaatctttctttgggactttcttattcaatgagattttgtctttattcagtgattttccattcacttaatatacatttgaagtctttccccccttctcattctgggaaatataactgtgtttaaactgtgcatctgcaaataaagagattctgatatgatacagttgaatttaataaatacttatcaaataacacttgttctttttgtagttgtgtgattagtaggtgacagagacctcctcttattaacttaaatagaagttggtatttctatataattctgaggtacagtgcagaggatgttgaggaaggaggagtggggaaagcgggtattcaccagtgtgaagggaagcagtgtatggaaagaatgtgtgcaggtgattcttagaccaagtcacagaggatgaggatgagttgggcaggcattgaaaagggacagtgtcagtcagagcaggtgggataggcaagaaggcatgaagccatgaatgtggtttaggagaacaacttgtggattttacagttatagagatgttcctcctttatgtttccatgttcatgaactaaccattagtaattacataaaggagttttagctggattaatagttttagctgaataattttagctggattatcttgcaaaacaaccatcttgtttttctttctttttttccatttctccagacctgatcagcatgtaattggaatcacaaggagt

SEQ ID NO: 97772 - DNA, 1039 bp, Homo sapiens
ttctgtgttctgatctgcattgccaaatttagcaagaatcctgctaagtgtctttggccatcctcaatatttgaccactctatatctaatgagggtcctcaccttccaccatttcccagatgatatctcatcaccctaaccttcattcagcaagaatcctgactagtaatttttcttccactgtcttacatcctgctatttggctacaaattcctactttttcttgtagtatttgaagttgagcctaatttttcttactcactgcaaaaaccccattgcaatggtcccaacgcctgttatgatggtcctgaataaagtttgccttcctgttctttaataatgtcatgaatcatttttttcaacactaattttataaaactctagttcactggaaccattagcaatttaatctttttctgccaccaagttcttgacctgacccagcctttacaatgacttagcagtatgcatattggtttttgtaatgtgctctaatcaaagtagggagatatatatctctttgtctttttgccctgaaggtggtaggaataacccaaatctgagaattgacaagagcagggatgaaatatattttggagtattattgctcgctttagctgaaatagttaaccaagtagtttaagcaggaggtggaggcaagcagaactaggactaacctaacctgctgaaagaataggcaaagtgtcataatgggcaggtttgctgggaatgagggatgtgagaaataaaaagccagaggttgtgtgggcagtgcacttgaagagagttggtgaaactgtaggtaggaatgttacagatgctgaaagtctgcagtaaagctgtgtggcaaccaggtcattggtcaagactgagaaaggctaatgtattagaactggtatcagtatgggtgttaaaagcatggagattgggttggagggaaacatagccaataactggaatacctaaggaaagtgaaagagacattagagaagcagttattgatggcgacatttgaagtaacaagacctcctacattact

SEQ ID NO: 97773 - DNA, 1037 bp, Homo sapiens
ttctcctgaatgaaataggaaacatatttttacaagatatactggaagtaaagtgatagtcgacacaatctagtcaactgggattttgattgatgatctggggagtctaagaagcagtgacaaccagagagaaatatatttagtataatttaataataacctgatttgcatgtttttgtctgttggagtaattacatagatttatctcttatatctttacattgttttatttttccagattatggtgcagtctgtcaaatgtttatgtattgaaaaggccacttactgatagagtatgagaaattcagagtatacgtgtttttgttgtatttatatgtgccatgttaatggatagctttccttggaaagttggggaggacatagattttatttataatgtataataatatacttaatcatgactatataacttaaaatattataaacatgtattttaaaatatgctattaagtgaattagtgaggttttttttttatattgtggcatatgtatagtggatcgaagatgatattagatggaatgagaaaagtttttctgagagtaaaactatagttccataagtagattgattttatgatcacagctttttcttttccagtttttcattgttcatttttgataccttggcaaactaatctttagtgtcagccaaaatttcacttggctatttattgtaaattgccctaattgatgagtgaaaaaacttttgatacctgcctaatcttagttggatgaaataactgatttccttctaattaatttttgctccataaaatgatatgttaataaatgaggaaaatcagtcatgatctagaaagtgcagttattcttgttcagaattaaataaagcagaatggagaaaatgcaaagcatttttttgactgttgactgactatcgctatatatgttattttagtgaatcagagtaagtctcataaaagttgtaaaacatttagtcagagggtatataaattttttatagctagtaggaaaatttctaagtccttttaacatgc

SEQ ID NO: 97774 - DNA, 1066 bp, Homo sapiens
tattagccataaatacttattacaaaactttagatttttattttgttgattcagagctctttttttgtcctattctttctttcatttgatcttttttgccctttttactttcttctatcattgagcttaatatcttggagtatgtttgatggtgataagtttagtatggggtttcccagtcttggcaatattgacattttgggaaagacaactctttgttgtcaagggagtggccctgtgcattgtagcatgttaagcaacatccctggcctctacccactagacaccagcacagtgcccctagttgtgataaggcaaaatgtctctagatgttgtcaaatgtccctgggaggcaaaagcattcctagttggtgccaaatgtccgctgggaggaagaccatcaccagctgatgccaaatgtcccctagggagcaacaccatggtggtagagaaccaaagtttattagcatctctaaactcatatagtattttttggacatatttttaaaggaaaggtggctatccctgaaacataatgtgttttgaagtataattaaaattatcataaatagaacagtattgaaccttcactccttatgtgtacaattgactttaacgtccttggcagtaggtatgtatttgctgcatcattacatggaaagaatattcactgatgaaaaagtcctctccaacttgaaagaaatgttttcacatatctctgtgagtatcagtaacctggtataagaccttctttcctatgtcctgacaaaagtttatacagcactttgactcttggtattttacaaaaatgtatgcatttgggctatagcaatgcaatgcaacatataaacatattttctgagaagcatgttttgttaaaaaaaataaaacaaacaggctttcaaaatagatgctgcatcataaagtttaagtatgtatggattttctatacataatccttcaacattcatcttctatgtgaatatgggcaatcttcaatttaaatggaaataacataaactaaaattttaagattttacctaaaatttgcaaaactcagtaatgt

SEQ ID NO: 97775 - DNA, 1046 bp, Homo sapiens
tgattatatacaaatcactgagcctctctttctcagtctacatgtttgtgaaatgggcctattgaactatatcatgaatttattcttatgcaacatatatttgaaagcctgctatgagccagatactgttctaggtgctgaagatacagcatcaaaaaggacagacaagatccctaatctcacagagctttcattatggcatatcaggctgaaaataaacatattaaataaaatcatgtagtgattaacatcatgaagcagataaatggaaaaacaaggaagaatgtggctggagtgtcctggaatgtggtgggagacatccatggatgaggtggtctggaaagtcttcactgaagaaataacatttggtatctgagaacaaagcaatagttagcatgaatatatgtgggcatgtagatttgaaggctgaaggaggctcaaggctagaaattctaaggctataaaagttttgcttataggaggaccactaaaagactagtgtagctggtgggaaaagtggcaggagacaaggtgagaagttggcaggtctagatcatggacttatagtcaatggtttcaggctgtttctcaaacaccagtgtgcagatactctagggcaatccatgataattttttcatatctttgatgcctttgttacctttgacacctttgataattccttccaactctgtgatacctttcatggttttagaaaatctttccttgtgagtagtttcccagaatagaaaccagaaacttgcttctcctataaatatatctgtatctatatctatatctatatctatatctatatctatatctatatctatatctatctatatatttttttctttccaaagtcttgttctgtcatccaggctggagtgcaatggtaagatcttggctcactgcaacctctgcctcccggattcaagtgattcttctttctcagcctcctgagtagctgggattacaggcatgcgccaccacgcccagctagtttttgtatttttagtagagatgggggtttcatcatgttgaccag

SEQ ID NO: 97776 - DNA, 1041 bp, Homo sapiens
gattgagaacatcctggccaacttggtgaaaccccgtctcaactaaaaatacaaaaattagctgggcgtggtggcaggcgcctgtaatcccaactactcaggaggctgagacaggagaatagctggaacccgggaggcagagcttgcagtgagccgagatcgtgccactgtactccagcctggtgacagagaaagactccgtctcaaaaaaaaaaaaaaattgttttgcttttagagagtgcattgttctttacagctgataaagcactgcaataagcattattgctctcgattcacaacatcactgatccataggcagaggaggtattgctattattttatcacaaataaggaaattgggactcagaaaaattagtagcaatagctgcaggttgagggcttttgcaccaggcatagtgttaagaaatttactctatgctgtagaatttattattaactggattttgtggttgagaaaattgaaaagaagttaagtaacttattcaagtgtatgtgacaggtaagtgacagccatagcacaaacccgggaagatggacccaacagcactctgagctcctaatcgtaatgctttgctgcctttttagggtttccacacatgagttgttgttgctgtttttccttcttctctgggtcttctaataaaacttctaataaaaataaactgtcagaaacaatgcatttattatgtaatatagttatctaaatgttcttcaaaaagtccaaaaaagtcagtgacttaactatatattaagtcagcttaatatatagtcatgcttttaattagcacacgtgtagtttcagcttctagtcagtgactatctcaaagcatttttttttttttttttgagacagggtcttgctctgtcacccaggctggagtgctgtagtgtgatcatggctcactgcaaccttaacttcccaggctcaagtgatcctcccacctcatactcttgaataattgggactacaggcacatgccaccacgcccaactaatttctttttctattttttgtagaga

SEQ ID NO: 97777 - DNA, 1061 bp, Homo sapiens
cttatcaattatttttttcacagataaatttagtgttttaagttggatttggatagtaaacatacaacatctttagatacgtgtttcaaagtatctgtaagctgatatgcctccattctgttctcatttcattattttttaacattaatttattctttcaaaagatatttattgagttatacttatatgccatgcattgtaccaacttttggagatgtagtgatgagcaaagaagatgtagtcactgataattatttaggctccagagtgatatatgctataagggctaaataaacggggctgtgattgtattttacagttcttaaaatgacagtaaaataactgacttaagataactaccaacaaactcaaatatctatctaactaagccaaacttttggaaagcttttctctgctagcatggtattgaatgtatttcctgttatcatatgcttcatgctcctataacatacaaaatgaaagcatttcattagattgtgatcaagttagtctcatgggaaaatttgcctcagtttattgttttgaatgtaaggtggctttatagttagttgtaaatataagagcaagatgaactgtattaaaaattatattgatgtactattagttattgcttttctgaggagaagggaggtgataggccccaaataactgattgctcgtttttccttagcatggttttggaaggaaaagactttgctttttcatgtgacattagtaatattgtaggacttagaaaactgaactcaagatgagatgctgcttatgcactggttaactttaggaattgtgcaaaaagatatattagagctattacacagagaggaaagaatcagtgagtaaatgaaccaggaaagagactggggactagctaaatgtagaggttttcagtgtttgttttgtgattgttctgtatttatcaagccttgctgattttttgtaatgtcagttgaacttctccatgctgcagaattttgttttcccattggcaagatgctctgctgcctcttgatctccaattctctttggttgacatcctgtag

SEQ ID NO: 97778 - DNA, 1008 bp, Homo sapiens
tttggctgctgtttttggaaagatagcaaggcatgacatgcttatgtgaatacagagcaataaaacacaaactgccttttagaaattttattgtgaagtttgtatttcattttattatctgattttaagaattgaaaagtaaatagcccaaataacagtcttgattttaatatataataaatagtttagttaccatacaattgaagggtattattcaacgtaatcatgaaatatagtttctcttttatggtggcgtgaacctgaaaacttaattattttccccaataaattagcaatttaaagctctttgcctttctaaaatgtcactgcattgcgtaatattgcgcagatgacaaagatagcttgaccatgacgtattaaatgctaaatgttacgtgcagcatgtaaaatacgttctgctttgtaaaattatttgatagagagtcgctgtcattgtttttgtcaatcatttattcatctgttctgtcccaggcttctttttatctagtcattttcaagaaacgctgatgcctgcttctgatctctagtgatttaaattagagtctctgagcatgaaaaggtgctaggccaaggtctaggaaaagaaatcctaaggcaggaatgactctggcttgtttgaggcacagcaagaagatttatagaagatttttgtgaatggaatgggtggggcaggggaggcaggagagaagagagagagagagagaaacaagggccagcttatgtaagatctataggtctgtaagtgttggcggaaactatgaaatgatttttatgcgtggaaatgatgtgatattatttgcataaaaagatcattgtgactttaacatcattacagaaaaaatatggaggacacccttggaaattgcacatttgatgtttgttgtgatttgttaggtgttcacacctaaaccaaattgaggtaattctgtttggcagattaattgtatgagaagaaaactttgttggcggaaaattgacacttatcta

SEQ ID NO: 97779 - DNA, 1045 bp, Homo sapiens
agcacaatttggggacttagaaaaaaagattatagaatgaaggctactttggttcctatatctcagggctaagtagaatgatatctgatgaaatctattccatctcagaaataaagcaactttatctcagaagattgcagggctgtacatatctgtctgtgaaatgtagctggagatactgaaaagtttaatggtaattcctgggggttagttttttgaagacccccatataatttggagagtgtgccacttactctgcgccttagaaaattaaaaaaaaaaaagtaagtttggggaaaatgttaacatctgtttaaatcttttgtcactgtagagcaaagctgaaaaaaggtattgcaataggaggcacaaatagaagaaccttgagtgtgatcttagaaaagaagacatggatgaatataggtgaattagaattgaagctgatgccaattttctgattgtaagtccatctttttccattataggattaaaagcacaagattgttaagacctgaaaacacatactaattgagtcctgaaactgagtgttagagtaataatgaaaggaaaatactttcattatttcaaaataccccaaggtaccttggattgagtccgatcattcccagttaaacattaattccattgtttgcagagtgatacaagtaaccaagatgccccagtgctctgttagaagattgttgattgacaaagctcctttctgcaaatgttttgcccattctgtgactaattcataaaagtttgtttgttttatttttaaccaatgaaaagagaaggaaactatcatctagaataaagtgggaatatactttagaatttttattaaatttatctttctagcatttcttattaagcagtgtttccactcttcaaaatgaaattcttcttaggtgatttttctttcttcccctctctctttttcctcccttgcttcctccatctttttttctcccttcccctgtcccacactactttcttcttttttctcttccttcttttgtttttcctttggggtggggtattg

SEQ ID NO: 97780 - DNA, 1049 bp, Homo sapiens
ctcttgtcctatgtccaagaagactaaggatatgctgacaatttcaacggtgaggatggcagagaataattttattgagtgatgggactgctctcagcagagaggggatgtgggagtgttcccccaatcctgcagtctggtggtttctcccccagtatggcttagtctggggtttttataggcacagaatggggagggcatgatgattagtttgtgagtatgcaaaaaggttaaaacaaaggcaccactcaaaggtgggcatgacacagtaaaaaactaattagggaaggataggtatatgtaaaataggtgaacagtggggatcaatcagaggaaagcatgccagacaggaagacaggttctcaatctggtccaaggatttacccaggacagcctttgacttgaaggtggggtttcaccagggaaccacctctatctgcctaggcatttgtctgcctcctgcctctgtcagtagatcaggatcaaaagggtctaattcaaattggataagaggacttactggtgaaaaggatgaggaaatccaaaactgaagactgctggtacaaatgaataaagaggatcagtaattttagtcactgaccttagttgtgacgaaatccacattaggcatagggacactaaagtgtatctttctcttctacctcttatctatgtcagaagaaactttaagaaaaccttcggctgggcatggagtttcatgcctataattgcagcgctttgggaggcggacatgggagggattacttaaagctgagttccaatccggcctgggaaacatagtgagacccccatctgtacaaaaataaaaataaaaacaaaattaaccaggtatgagggtatgctcctgtagtcccagctactcaggagggtaagccagttggatcacttaagcctaggagtttgaggttgcagtgagttatgatcatgccactgtactccagccttggagacagagtgagatcctgtcttcaaaaataaaataaaataaaataaaatgttcttagatataaatatattcacatgacaga

SEQ ID NO: 97781 - DNA, 1121 bp, Homo sapiens
gttgtgaaattgcaaagaataaaatgatctgaaactttgtcctaactttagcttatgtagccatataatactaaattccctgggcttacataagattatggtaacataaattcattcataattgtgtgtgtgtgtgtgcacaggcttcatgtatcattgaacaatatgtgaggattggtagtagatagattgaaagcaatgaggccacaataagtttgttattaatttttaggtaggaatttaaataactacgaatgtagtatattatagtgatcactataggactgaaagaaacagctagttagatgttgttttttaatgggcagaaaaacatggcatttgacaaactattttatgatgcacttataaagaaagatagaaaaataaatataactttgcgtaggtcagtgaagtttaaataatgtatcctttccattctcaaaggagttctctagtggagagcatggggctctctcctgttttacattattgatgaattggggaagaatgcttaaataatgataatcaaattcataggtgattgaaagcaagaaggtgatgatacatgaatgctgtagtaggattacagatgtgtgaggaaaaaatgacaagttaggccttattccacactataaacttactaagatactgcaaattgtcaaacaagggcccagaaaatctaatacttttatcatgattcaaatattgctgttatttggaagatgcatcttgaatgctgtcagagtaaaaatggctgaagaataaagtcaacagtgtgagtatcaaaggctctgtgtcattttctaatgtatggatggataatgaatagtccagaactatgactagtgttctgttcagtatcaggcagttgggcactgggtgttctccctttaaaaggttacagtgttaactgacacatagtaacgtgcccagatgagaaagactgagatgacttcaggactttcagccatgtaacaggaagcatgactgagaaccattcatgtgttaatgagagctgtctttcaatatttgaaggactgccatttagccatggggttgagtttagtaaaggacaaataggtgtaaatgataatgtcactgatttaatatagggaaaatga

SEQ ID NO: 97782 - DNA, 1195 bp, Homo sapiens
aaatgtcatgacttctaacttccaacattaataacatagagctaggaaagctctaaaaagaatgtattgtctgaaaaataaaactgacacgatgtcatgattcacatattttcaatttggaaaacatgactgtagaaattcattgggacttttaaaagcttggaagtttactggaagtaggaactatactaaggagaaccatttttaaagcagggcttgagttgcctatgtggtgtatatacccctacaatgcatttcaagcctaataattatttcatggttttataaattaaatgttgttataacaattataaagaaagttattttgacaggcaactatgtagatcagaatataaaggcaaaggtagttatttctttatcccattttgacagagagtaataggtatttctccaaagtacttaacaatagcagagaaaatgatggttaacaataattgtgaaactgtttttcatattcatagctattgtaaaaataaaacaaatatccagtgggctatttgaaatttagtgaactatcaaacacttttgttggtgaaatcacatattaatccaattgcaaatcaaagttccatcatatacatgaagctgctttatttttatttcagctaatcaacagtgaatcataagttaactggtttttttgtttgtttgttattttactttatgctgctgttgaataaagtcatagcctactttctgaatgatctctagcaaatttacaagattatatggcttttgactgcaaacctgtttctactcttccattttgctttgttgttttttttttgcttcattttgctaatttgttttatctttctgtattttatgagtagttataagctaccttaaataaatttttggaagtagtggaaaattttttaatcagtgaaattattttttaaaatatttttatttgaggaaggaacccctgggaattcaagatcaatcatcagcaaaataccctttgtcttaaacctctcttctgaaccttattgctgcttcttactctgaataaaaaccaattctttcataaggacactaaatccccagtagcctctgaagtggtatgtgttttccttccacaactatcctgtagcacctgctataacaggtgaattaaatgttctccttttctcttccctaaaattttccagctttgaatttcacattatca

SEQ ID NO: 97783 - DNA, 1003 bp, Homo sapiens
agaaagcaatagaaaatttctgtaaaaatgctctcaaagatgatggcaaaaacggtgacaatattattccagatgaatataaaagatacagtgaatttttgggatatatagaaatgactgctacttgtaacagagaattagatatattagaaactattcatgtaaaaatatgatttcagtaagatacgctgcataagattacattttaaactggaataattagacataagtgacctgccttcttaaatataaacattcaaatgcaattgattttttttgcattctcaaaagtagagtatattttagtttgtatttatatcaacaatgggaaccaactgatattcattgcagtacattttactcctgaaagatttcatcaagttttctgtaataaatagcaatcttataaactaaattaataatcgccagtgtactgcccaaatcattgagttttctgatacagtctgggccaggactgaacacatatagggaaagataaatgaaaatctcatgaaaatgtagccaagaagtaatatcaaaattagacatttatcactttgtaaaacagggaacaatatgtatatatgtataatctcctttgaaaaccatctgatttgatcagggataaaagagaatttccattttgggggaatagtggcgaaaaatttgcttttcctgtgagaacttggacagagattgcttccagtagttcatattaaaattagaattctcagaatacgtttaattttctgattcacaggtagtgcaggtgatgaaaaaatcaggcttattgtgtgtagagaatgatgggtttgctattcagctaaaataattgctagtacattatttttcatgcaggaaaattgctgtcatccccctttctttaacaatttgtttattgtatcccctcacccctttactgttactcagcaataccattcccctaattatcccattcctgtatcccctctcacttctatatctctactctttttcacgatac

SEQ ID NO: 97784 - DNA, 1341 bp, Homo sapiens
ggctttcggtaggcagccaaaagtgtctagcgtagtagccattccccttgagtattatcgtgtgcttagacaggcaccacagatcaccaaacatcttgggagaaatatgtttcaggaaataacaaaagatagttttacctaaaagtatggagccatgtagaagagacaaaactgttcttagctgaagaaaggctgaaatgtagagatcaaaagggctcactctgtcttcaggccccacgtcaatgtcttacctgaggtgagggttaatggaggactgggcttatgctgagaaagccctggacctaccgatctccctctggctcctctttccccacaacgaccacactgttcccacagttatgcctgcccttactcgcgctaacacctctcgtcaatccaacaagattgaaacgcgagcaagactcatcccaacccagcctcaaagagactcaaacagcaggtagagatgccgagaacacaaaggaccgtgttgtcagctgtaacaaaggcatgaatgaatatatgaaatggagataataatagtaaactcctcacagagctgttgcaaggattaaataaaatagttacacatgataagagctaaataaatattgtagtactataaaaagggtggactcatatatatggaataaaattaatggtgaatggtcactgcttagataccactggtgaaatatttgaggttcaaagataaacaatatcaaagacttccattaaaaaacaaaataaatgttacctacacaaaaagaaaaataagaatcatttcttattactcttctaccacattaaatgctaaaagatactgtaatatctactgcattttcagggaaaaggtttaagagccaacccaattctactcacacaataaaaacaatagaaagacagtatcaaatactcaaggactcagattaaaacccacatagtcttcatgaaaaaaaaattgttcaaaacatactttaactaagaatagcagtcagtgtcatccttttaaaaactaggtcaaatcatgtaattctttctgctcagaactgtccaatcatccccattcacctaacaggggtcaacacaacaaggaccaaaaaaatctggctcctatgacttctcttacctcatatccaactcccctcacccttggccattcagctgcagtcacagtgacttgaaaagctggagacattctcacctctgggctctgaagaaacagtcctttctttccctcctgttatctgaaagacactctctcatcttcttgctcaaacatctgttctttctgtggactccttgaccaattgtttatttgaatatcctcatccccagttc

SEQ ID NO: 97785 - DNA, 1123 bp, Homo sapiens
gtgagtctcttacagtctcctatttaaattgagttaggattacttctggcaaaatcccaacataaaaatcttctaggaagatcagttctgtaaattagacatactagataaatgggcatcaagcagtttttcaaaattatgcagttgttaacttcataaggggaaataaaaatgtatgcatttacattgtatgtattaaaacaaggcagagcatttctatacgttcctaagttatacaaacatatatgtaagagtgaaatatgtaaaaaaacttttacataagcagatgcatacaaactccagatgtgctctttttcttactgtgggttgtgtcttctataagggaaaaagaaatatttatcatttcttttactgctgaggggatgggtgcggctctcatatttcagaaaggggctggaaagtgagggaagccaaactttttcctatttaaggccaaagcaaaggaatctcagtggctgagttttatgacgggcccggtgctgaagggcagggaacaacttgatggtgctactttgaactgcttttcttttctcctttttgcacaaagagtctcatgtctgatatttagacatgatgagctttgtgcaaaaggggagctggctacttctcgctctgcttcatcccactattattttggcacaacaggaaggtgagtaggtactgatttcaagaaactttatgggatttttgtctttcttctcctcacaaagaggggtgtaaaggggaaaatcagttgcctgattcaagataatttcctctataagctccagattgtgaaacgttgaactgaccatggctgtgctttttacattacttgaaaaataatcgcgttatgtgtgtttttaagagttctgtggttaagataagatgttcttgtactaacttgttttcatgttaaaggcactggaaacttttaaaaatggctttaaaatttttccctcctggattgttaacatcttggaatacttccccaggcagtctggaagttattggtctcttgcaataattttatgttcctctttgtctgctggattctttgtaaggttagaatattgagcattgttttctgaataagaatgcctttcaaatatcatggattaag

SEQ ID NO: 97786 - DNA, 1025 bp, Homo sapiens
aaacattcttcagtagaataaaattaatactaatgataattctagtaagagtttgctttttctagatttgagctttcatcatacattctcttcattaccacatatttgaataatggcaccaaacaacagactgagaatccataattgtacgtgtaaagatttcaatttcccaaacttcatattatgtcttcacccccatgatcagtttaaagaaaatgtgtaggtcaatatacaaaggaatacattatacttaaattattcacaagattttgattaaaaagtatgtgttataaagaaaatatattacttatattgtttcctaatattataaagtagagaaacaacaatctgataatgattgtgaatcaccaggatttttcactatttaatttatttttatctcttttttagggccctcctggtattcctgggagaaatggtgaccctggtattccaggacaaccagggtcccctggttctcctggcccccctggaatctgtgaatcatgccctactggtcctcaggtataacaattacggtacttaaaaaattccctcataaaactatctagttcatcttctttctttactcgatattacgtctcactattatgagttctttgtatctgttctctgattcagtgtatttaataaatccttatttagtgcttctatgtattaggcactattctaagtactttataagtattcatttttcctcataatgctaatgtcattgctactatatccttggaaaatttgctaatttctcagcagatatatagcatacacattatgtttaagaagtgaactatgaacttaacaaaaaaaattaacctaaataatttagttagtactgtatccatactttattctcctactaataccaatgtcaaagcctctaaaagtttagacaaaaagaagttgaagaactgttagtattcctattgaacaggattatttctgcctatgaaactgctcttgctaatacttcagagcacaccttgcttctcctgaagcatggc

SEQ ID NO: 97787 - DNA, 1015 bp, Homo sapiens
tttctatggagatgtttatttttgagtgaatcttttagtcatattaaccagaatccaggggatatgaattttacttgtatcattaagtgtttgaaaaataatttgacttcatttttttgctcaaaatgagaaggtgtattatatgatctcgagactcttttggcctcaaacagcctatgatcctatgtttgtaatgatgtagctactgcttagaaataatagcttaagtaagcgcataataggaaaaattggggggaactaacattgaacacagtggaaagatttgtgcatcccacaagaaaatgcttctgtaggatatctaacgtctaaatctacagaaagacacgataaacaagataattagtgaatacataccacatcttttggcacacaaaaacctatcagtagacagtagatgttgcatgcacttctaaatgctttttaaaagaattatgaactgtctgttaaaatgatcatatctatttgtctccttgccacagaactattctccccagtatgattcatatgatgtcaagtctggagtagcagtaggaggactcgcaggctatcctggaccagctgtacgtacaaatgtttctcagcattttggagctttattatctttctggtttgtaaaatcttgaatggttgctcttctaggaattcagtatttttatggaattgtacaaaatagcttacccctactaaggttggaaaagaaaatggtagcattatcatgttctttctatcttattcatattattaaacctatttttaatcacatataaatttttactaaaaaaaaaaaccaaagtcaacacttattaacatctcagaaaagtgtttataagagaaaatggaaatatacaaactattgttttataaatttactatcagtatttagaaacagcatgttacaaaactgaagcatactgttttcagcttgctgaaggttttctagtttaatctgtatttctgaacaatgataaatcaattgtcctatgtatgatgattc

SEQ ID NO: 97788 - DNA, 1006 bp, Homo sapiens
tgaccaaactagtcattttttgcaaaataaaggagttgatttctagtgtataaagtactcttgaaaaatatcgttttcttactaccactatcagaaaaataaaaacattttgtgaattatgttttttattgacttaatatgatttatagattgagttgaacaactttattctatgcaaaatatttcgtacattcaaccaactgtgcctacaacctatcaactgaattataataaaatctatgaaactcatgtttgctactctatagttaaggcaactttcttatcagactaaattgcactttctagttttcatgttttcctgttgtaaaatcagtatgaaatatcttcaacccctttaaacaagttttaaattatttaagctaattttgcaagtagtgttatgaagaccaattagaaaaataccatgtaaactttatcaatcattctagattattaacagattttaataattttgctggttttatacatttcctagggcttcgatggacgaaatggagaaaagggtgaaacaggtgctcctggattaaaggtaaatcacaacaaaaatcatattttcataagtaaattcattaaatattaaagctacatataagattcatattgtgagccttaacttgttttctgaaatttacctgaattttacctattaggtgtgaataatggtaaccaattcagatattctattaacgcttccatgaaaaatgacaacttgaagagtctagattagaaatagttgagcatcttagtataacttatcaattacttcactttagtctttaagtttttaaatacagaaattgagatttctggtaaataaaatactaacagaaaattaatattgttaaaatgtatatctttttctaggctctataaacttttccataatattctgtatttaaaaatatataatattttcttcctcttttgtaaaatagtaacatattttatatgtatctagggtgaaaatggtcttccaggcgaaaat

SEQ ID NO: 97789 - DNA, 1050 bp, Homo sapiens
tgattagttattgccctttgaggattagtaaataccgaccacttcttctttagggtgctcctggtaagaatggagaacgaggtggccctggaggacctggccctcaggtacgtagctttcctcaatttatttctagccttctaatagatgcgttcatctccaaccttctgacttctctctgtaatctgtattatttctacttccctaactgttcttgtttttagggtcctcctggaaagaatggtgaaactggacctcagggacccccagggcctactgtaagttcactcatataaaattggagatgaaaatagggtggaggtggggcaggaagaatgcttcaaaaattacataatctctgacaccatgttgttacagtttaccaaagcaatgatgaaacttgctgacctagttatctagctaaatgctagcattgagtttagagtgtacatgtgtgctttgggtccaggtcctcccttttcttcacatcactacttttataattaagcaacaggcctgttgaaatggatactgtagactaaatataaaaggatgtttacaacagagtgtatcattatacttttctaggggcctggtggtgacaaaggagacacaggaccccctggtccacaaggattacaagtaagaacttgttatttaaatgtcacggcatatctgactgtcaaatttttttgtgtccctaatagattataatttatctgaagcttaacttgtgattctgtctttcatctggaaataaaattttaggcaatgttaataggtaggcatatcttccatgtccgttccagagcacattaataagttatttaaaagaattaatgaaactcaaataattctatttggttacacttatttttattataacataaatccatatagccaagtctatcctgccatgctggtcaatacatttttacgtgtagcaattgaaagaacagagagagatgaaaatgggtttgtaaaatatgattatcacgtatgtgtcactggattttgagtggcacaacgtttctacccctacaagaccac

SEQ ID NO: 97790 - DNA, 1046 bp, Homo sapiens
gcaaactttatcagataattgggatagttactatatgttttgaataatacctgtcacattaactcagtttgaaatatctgttttttaaaattttaaaggttaacttcaaatctctcatttgttattgttatttgtgaacaaagggaaaactcacttctaatattagcgaatttcattgtgagagacctatcctctttttaataaaccatttataaacctgttagcaatggccggaaccaggcctcctgaggatgcactggtctatagcaattgccctgctgcatttactaagaatccttacaaggcatttgtttaagaatattgtttatcaactaagaagattacagctttgaagtagagcaggtctcatatacatgaataataacatggcacgatgaatgcttctttagagtaaaaaggttttctttaacttgttaagtcagagttgtctaagtaattgtaatgtcatgatcatgtacattttgtccttttttacagaaacacactggggaatggagcaaaacagtctttgaatatcgaacacgcaaggctgtgagactacctattgtagatattgcaccctatgacattggtggtcctgatcaagaatttggtgtggacgttggccctgtttgctttttataaaccaaactctatctgaaatcccaacaaaaaaaatttaactccatatgtgttcctcttgttctaatcttgtcaaccagtgcaagtgaccgacaaaattccagttatttatttccaaaatgtttggaaacagtataatttgacaaagaaaaatgatacttctctttttttgctgttccaccaaatacaattcaaatgctttttgttttatttttttaccaattccaatttcaaaatgtctcaatggtgctataataaataaacttcaacactctttatgataacaacactgtgttatattctttgaatcctagcccatctgcagagcaatgactgtgctcaccagtaaaagataacctttctttctgaaatagtcaaatacgaaattagaaaagccctcccta

SEQ ID NO: 97791 - DNA, 2020 bp, Homo sapiens
gggtcaaaagattttatactactagttaattctaatttttattataattagcaataaaaatgagttatttttgatacatgagtgaagcagatttaaaaatacttatgcttgttctcgtgaattattgttattattggtttcattaccctttgggttaataaggacagaggttcttttgagtattcatagacattttaagatatgtttagatgtacagctagaatagcttactttatgacaagaattaaagtaatactcttcaaaattgatttatctgaaatcaatttatatatttatctatacatgtgtaaggcattatgaaacccttcagtcttgtgtatgacaaagactctttgtttttctagttcgcttatggagaccaccaatcacctaatacagccattactcagatgacttttttgcgccttttatcaaaagaagcctcccagaacatcacttacatctgtaaaaacagtgtaggatacatggacgatcaagctaagaacctcaaaaaagctgtggttctcaaaggggcaaatgacttagatatcaaagcagagggaaatattagattccggtatatcgttcttcaagacacttgctctgtaagtactttttgatctacattgatctggttgaggaaaaaaaattatttttgttaaaaatactattacagcactagaactgggggcaattttaccttgtatatgagcataatagcagtttgtttatagtcattccttagggtaaatgtgtgtgtgttagcacatgaagcatgatagaggtttgaatccatatagtaaagaaagaactggatccctaagatctgatccagttcttctgcagactttctttggttcttttccaagttatttaacttactgaatctcagtcccatgcttaaaattccttatttctaaaatgcgtaattaatccaagatactttattttttccaccaatttgtaagtaagtctccccgcttgcatattgagatataaaacgaaaataatactaaatggtgaattatagtttcatttgtgaaaaacaaaaaagctttcataatttatgttgctagtgaccatttgggaagctgcagaagaacaaaggaaatttacttaaagcatgaaagaaattctgttacataagtacactaatatttcactttatgttttcattccttttttttaagtagtactctaaaaatcattgcctttacattataaaagtgtctgggaaggttgctgtctaacatacttggaaaaaattgtatgtacatttaacccattgcatcatttaatttcagaagcggaatggaaatgtgggcaagactgtctttgaatatagaacacagaatgtggcacgcttgcccatcatagatcttgctcctgtggatgttggcggcacagaccaggaattcggcgttgaaattgggccagtttgttttgtgtaaagtaagccaagacacatcgacaatgagcaccaccatcaatgaccaccgccattcacaagaactttgactgtttgaagttgatcctgagactcttgaagtaatggctgatcctgcatcagcattgtatatatggtcttaagtgcctggcctccttatccttcagaatatttattttacttacaatcctcaagttttaattgattttaaatatttttcaatacaacagtttaggtttaagatgaccaatgacaatgaccacctttgcagaaagtaaactgattgaataaataaatctccgttttcttcaatttatttcagtgtaatgaaaaagttgcttagtatttatgaggaaattcttcttcctggcaggtagcttaaagagtggggtatatagagccacaacacatgtttattttgcttggctgcagttgaaaaatagaaattagtgcccttttgtgacctctcattccaagattgtcaattaaaaatgagtttaaaatgtttaacttgtgatcgagacctacatgcatgtcttgatattgtgtaactataatagagactctttaagg

SEQ ID NO: 97792 - DNA, 1005 bp, Homo sapiens
aactaaacccaaaaaaattatttgttaaatgttcattgtgtatgaataactttaaaaatatatgtatattatattttatatgcaaatgcctttaaatattgtgtttagataactcttttttccttattgttaaactttctttttgtctttttataaagaagaaaaaatatttctctgaagttacctcttttattgagtcagtattcacattaatcttcagtttctttccaacggatgagctgttttcacctttaaataatgttagaggttctgtgcggattacaatttatgactactcatatgcagtatgattttgagaaacagagaacttctttttcatactgaaaaacctgtaaagctgtacccaacttattgtaaattccttgggtacagttttaccctggatagtttctgattttagtttgtcctcaacattagggtccagatggcccccctggtccagctggaacgaccgggcagagaggaattgttggcatgcctgggcaacgtggagagagaggcatgcccggcctaccaggcccagcggtgagtagctgcatcggtcaatattttatctcatatgtgcaatacaaattgtttagagaattgattttattttttttgcttgatgaatagatttaaacagtattgtagggacattaatttttgagtctcttaaaaatcttttgatcttaaatgtcaaattcttaactaccttacaaagtctttgaaaatatatatttgtttaaccctgagactagaaaagtaggcaaataaggatatggatttttggtgacctttaaatccttcttcaaagattaaaaagatcccggagctagaggagggggataatcttctggtgaataggtagtgtctttttaagtaaacatgcttaacaaaaataccatattttacagtaaaccatcaaagggaagacatagttgagctaaagtaatatttgaggtgaatgtagggggaatgctgaagaaggatctgaaggtaatc

SEQ ID NO: 97793 - DNA, 1046 bp, Homo sapiens
aaacagcaaaaaatacaagtaatgcaaaattatagttttggcgttcttttttagattatataaaaatatttatctaatttttaaatttaaattttatttttattttaagttccagggtttatgtggaggatgtgcaggtttgttacataggtaaacgtgtgccattgtggtttgctgcacccatcagcccatcacctaggtattaagcccagcatgcattaactatttttttctaatttttactaatgctctccctcccgcaaccccaccctactccctgaccggccccaatatccaggtattttaagaaacattttttttttttttttttaagtcctgggccttgaatctaagctttggacgtcagcttgggttaattttatgatttggatagagaaatcaggaggacagaattgaatttctcagaatgtcatttgaaaatttttgttattttatactgtgttgtcatttataaaataattctattatgacaactttactgcaatatttttcaacaaattggctgcaattttgctttctattttacttttcttttcgtttaagtaaatgtctgtgtagaaaacagaagggacaacttaatcatatggtgtacaactaccatgtagatccgtgaaaactgcaagacaccctgtattttctacccactgtttctttgtacatgtctttcattcagacatggacaatgagagttcactgagtttttgagccctctgtgatgtgtatggattcttgtctgagtgaagagaagacaaggtttaacagtgaatgtggtttttcgtctccttgctatttaaaagcattccaactaactttccacatcatcttaaatttaattataaattctcaggagaagggaagccatgatgactcagagtataaaactaacctttaacattatcatttaaagaaagtaatccagtggcccacttctttgccccttgagttgaagttatgttgtcttaaactttcagaaagaaactgctcttctaggtgttaacacaagactgagacaatgtgtcttttta

SEQ ID NO: 97794 - DNA, 1009 bp, Homo sapiens
tatatgacatgttttcctccctctctattcctgttttaggtggttccctgcctctttcccaggcagagttttccttacccccaccacctcaaataccttctattttttcaaggcctgcttaagaacccacttctactcaccctttctcagataatttcagcttatagtgataccatcttttcagatttcttatttgtaattctcaaacctcgtatcttatataaactatttgctacctcaactaattgtggtcattgaagaaacaactggatagaagatactttacattttgaatgttcttagtaaatatttgttaaaagagtgactttataaactttcctctaagctcctctggagtagcttgtgtatctttaacttttgtatctttcttccatggtatatagtcaggcatacagtaagtagactcaataaatacttaagtaatctatgaaaatgagtataagtggatgtgctaagtataagtaaaataaacttttagtatgggtatttaatatcttacttcacagtgttttctaaattacaaaagtcagcttctttcaaactagacattatactatttttttgacttcctaaaatgtcaaaacacaataatccagaattctgtatctacaattgaagaaagactgtggaattggacctagaaaaatgctttttttttttttttttttttttgagacggagtctcactctgtcacccaggctggagtgcagtggtgcaatttcggctcactgcaagctctgcctcccaggttcatgccattctcctgaaaaatgcttttatagtttgtcccagtgtggctagagtgagttagtcatcggcaacaaatggttcctgccatgttgctgtgcaccactgtcttggcttctggactgctggcccgcaccaccgcaagagccccacccctcctccaaggcaccttcccatggacataccagttggtttagaaacaagagtgctgttgttttaccctcagtcaaaggaagagat

SEQ ID NO: 97795 - DNA, 1063 bp, Homo sapiens
aactctgtaaaggccagctggctggtgagaatgcataaggttctgcatgactggctttaatacagaatggagggcaagtataccaataactctcagagtgggatgaagaggatgacagatctaacaacctgtattgattccaaagaaatcaatcagcatatcatttttagtatttttttcttttttgttggtgaaagaagagctttcataaagggtcaagcaattctgtatggctgtgtcctccctggactgcatggtcattttcaagcagagggtgtggcagcgatttcatgtatgtcttcccaatccttcactcagaaataaacacctgaaggaaaactaaaatagtcattcagagcaggatatggtgctttaaaaatctttttcttgtgtgaaacataacttctgaactcctctgattctgtcattaacacttggttggtgaagtggtctctctagcttctttttctagcttcccctctgtcgtaaggatggacccttctcaatttacattaggcccagagtaatgaacacctaactggcttgctgcatggaatctttccctgctgcctgacgctcttagttcattccgttgtctcagaagattcagtcttcctttttccatttcgcagctcaacaaaggaaaagacttcatgccatccctatcactatcaaccaagtaaatgcaatgctgttagttgatgttcaagatgtctgattaaaggcagccaacaccctctggcatgtattccacaagaagttctttctttcataaagaagttgaataggctgggtgtggtggctcacgcttgtaatcccagcacttgttggggggccgcggtgggtggattacgcagtcaagagatcgagatcatcctggccaacatggtgaaaccccgtctctactaaaaatacaaaaaattagccaggcgtggtggcaggtggtgtagtcccagctactcgagaggctgaggcaggagaatcacttgaacccgggaggtggaggttgcagcgagccgagattgcgccactgcattccagcctgccgacagagcaagactcg

SEQ ID NO: 97796 - DNA, 1058 bp, Homo sapiens
caggtcattttgtggacctgattccactctggtatcaacccacatcatatttgtggaagaagaagaagcaggagtcatgaattatgattctcctagcgaatgagcgcatccttattaaaccttgttaagtcctgtgaataaattttgagctagaactttaacttcatactatagttttgttggtgttactgctatgcattcatttcattactgctgtgtagtttatattaatgacattgactttcaaatatcatgtcttagagaataaaaaatagagtttctgatatagtaatctcctttaaggtatccaaagagctgtgagttgtctgcatatgtgcatgcatatgtgtgtatgtgtgtgtgccttttttgtttgcttgtcttaattttttaaaaaatgtattacttcaagacactataacattgactcataaaatgtgtagttattaatatgactgaaagtgccagagtttgcagtcagtaggttgcaattttccatagccagggaatattggaaagctgttattcaaaggcaatgcagaatcttagggggtctatacaggaactaccttttaaggaaaatgcgtcttaccagtgaaagtgatggaggatgatttccagatgttcaaatgcttgttttggcaactgctacagaaaactgaaacgtgttgccagaacaaccaaaagggatgtgaagcactgatgtaagagggatcaggccatggaaagcaaggcaagcagaaaccagagagtatatagagagataccagagaggggagatagttgagccaagagaacaaactttagagccccagtaattacatgtagtaaaagcatatctgcctctgtatgaggatgcacacccaagcttatcacccctgtgcaccccacttacactttcctgtgctttcttcattatctttcctgtaactattgatgtcattatgttaattgggaaaactcttcctggctaatatgcttgttagatattatgggttagtgaagcatgcatgactggggttaagcagatttgtcttcaaatcttgagttcattcttg

SEQ ID NO: 97797 - DNA, 1017 bp, Homo sapiens
cttttgcgatttaggtacttcagtgcttctctttttatcttccctctgcctattgatgttttcctccaagttctgcttcaaatcttatatcctctaagaaactaagagattcttatctgcaataaatatcccctttcctttcaagggatggtccttatgttgcaagtgtgtttgtgctaaccaagaataagtttcctgggagatagggactatgtcatgaagtcattttatattttagatccacccatgcataaatgccaattgagtactatttgtgaaaatctagaaaaattttttccacaattcgttcactcaagtatgagtgatccgaattcaaatttaggttttggaaattgtatttccatattctcgggcaattttttttatttctctgtgttacagtttcttcatctatcaaattggaatgatacttcaaataattatgatgaatactatctatctatctaacacctacatgatagcagtgactcccaactaataataggaactcattaatatggcagatgattattattagattactatttaataataacaggccaggtgtggtggctcacgcctgtaatcccagcactttcagaggccgagctgggtagatcacctgaggtcaggagtttgagaacagcctgaccaacatggtgaaaacccatctctgctaaaaatacaaaattagctgggcatggtggcacatgcctgtaatcccagctcccagctactcgggaagctgaggcaggagaattgcttgaacccgggaggcgaggttgcagtgagctgagatcgcgccattgcgctccagcctgggcaacaagagcaaaaatccgtctcaaaaaaattattatttaataataatagagataataaatgcttattgggtgattatgagaaccaagatgttagatattacagagaaataaagaaacaacttttgctctcagagagattaagcctagcataaaaattttaaaatgcaatttttatattttattctactatgat

SEQ ID NO: 97798 - DNA, 1046 bp, Homo sapiens
ttttatttttttctttctttttatgacttcagggtatatttccctttacttgactgtggttatttaccagaaatgtaaaatgtaatctgagtatgcctgcctgatagaaacatatgaatgagaagataaaagtaaataaataaagttttaggcattttaagccaaaatcagttccattctcactgagttttaagaactgatttgattttctaaatttataagaaactgaaaggagaaagtttgggagttgggctgactttagttaaaactaacgtaacaaaaattagggagttaaaatgaaaaaaatcagcttttaaagagtttgtgtgggtgtatgtgtgtgtgtgaaaaatcagggagttaaaatgacaaaatcagcttttaaagagtgtgtgtgcgtgtgtgtgtgcgtgtggtgagagtgtgtgtgcattggggtggtggtcttcaaaagattccacatttgtgttaaggaaaatgctagagcatttacagtgtatttatattcctaagttaatgcctagcatctagtgagctatatatattcttgttattagaagtaggcatgcttaattttagaaaataatctttgttatgaatcattgtattcaacatgggataagcaatggagaagggaaggtgcagaaatgtatcattttgtttccaaatactgtaaacctcaatgctttcagaggccaggcaggtaatataaacaagtgaagcaagccagtgtttgtacatcaataggtgatgatggggcctgtggagaactgaaggtgcatgtccactttaaggcattcagaattaacattttcagaagatattgcatatgacaaataaaatatatctgagtatatatttggctcccggcccatgaatttacagccatcatgttgcaatcctacactgatatcctcctggacccaagctaacttttgattactgagagatgaggggctcacagtcttatatgtcatggtctcttgcatttttatgatatgtctgccatttatctcattgttacgatacaaaaatcaggaagcaga

SEQ ID NO: 97799 - DNA, 1024 bp, Homo sapiens
ttggttgtttaccatcaatcagaccgttgcttggcagacactggatggttatgagcctgaacaagctgaaaaggggcaggaaaagaagtggaggcagcattcttcctatttaaagctgcatcgcttgaaaaaagttttcgcagactgtgctggagctggtgctgaaaaagggggtttgcagaggctgccctggggctggtgctgaaagaagagcccacagctgacttcatggtgctacaataacctcagaatctacttttcactctcaggagaacccacatgtctaatatttagacatgatggcaaactgggcggaagcaagacctctcctcattcttattgttttattagggcaatttgtctcaataaaagcccaggaagaagacgaggatggtgagtttgccatttgctttgcttgtagtgtttattgcacggtttgggaaataggtggaatgttaagcctcaggaagagcgtgaagaggaggttctggtttgaagtttgagaagggggctgacggatttgcacctggaaaacgacttgaaagacaattgggatgtttgtaaatccggagcttctagatccaccgttggagagagtacactactaaatttttctgggaaagcctacaataagtccttttggctgagtgtgagagtgggacgtttaaaataagaaaagagtgaatgcttaaaacggagcactaaaggcattttagttagaggagctctgttctgtgggctggagttttcagagcaaggaaaagtcgcggcagaagctgggtagggtggagtctttttgtactgaacttcagctgcttcataaaattctttgtttagtaaaacctctgcagcaactctgatagctttgatttttctttgtctttggctcctcattctttcctctttaacaatttaaacttctttttaccattttcatttgtgaaaatgtgatcacttttgcttactgggaggcagtctcgtttgtttctccatgacagaggctgatagaagccagatttcttaa

SEQ ID NO: 97800 - DNA, 1116 bp, Homo sapiens
gggttacttgaacataagtacttcagtacagcaatagtggataggataaactagacagtttctacgtgactaacgggcaggtgtgtctacagcagagaatgctggaaaaaggaatgattcatgtctcaggtgagacaagggaattcactactgagaatggcatacaattttaaacttatgaattgtttctggaattttccatttaatattttcagattgatcttgactgtaggtaattaaaaccagggaaagtgaaaccataaataagagagtactgctatgaatataatagacacagagcaaatactttttacttggaagatacaagaagatttatatttctgcgccttgttctgtgataatatcgtgaaagtagtcaaacagtgccccaagtagcttaaccacttttagtaatttagtagctgctgctacatggaagaaatccacaaatccagaaagacaaagcaaagctagcatttcagcaacaagaaacaaaaatggaataaagtctttgtatttttctgtacaaaaggcccagacctcaccaactggagcagaacctttgacttaccatttgtaagctggtgttgccagtgaaccatggagatgttggggacatggaaaaacactgctgttggcagtactattgaagagtaatagttgatagtgactagtacagtgtctgcatccatttaatgagcaggcaacttggttaagctggctgtttttgcaggataattccatttatagcctctgtctacaaacagtcaagagatatgatattggcatcattaatcttttctgagttaataatctcttctgagttaatgaactgattggtcatagatgtccccatagacaaaaggcacacaaatttgagtatacaattcttaaactataccaaaagaaatgtctgttgcatttttatcatggacaataaaaagatcctactacctattgagtatgtgatatggtttggctgtgtccccacccaaatctcattttgaattgtagctcccataatttccacatgtgggagggacccaattggagataactgaatcatgggggcagtttcccctatactgttcttgtggtagtgaataagtctcacga

SEQ ID NO: 97801 - DNA, 1025 bp, Homo sapiens
cattgcgaatatccaaaagaggtatgtagtttttggtgtttctcaaacttacttgacttgtgaaccatttggtgtctggaacacattttgaaaaatgttggccaggaggtattgatttggtagatatgttcctttagaagtaaggctctggcttactctagatattgcctagtcttaagaccagtgtctagataagaaaatttgtttggtgagtgggtcaactagttagtttcaagacaaatttgggaatttaatttagtccagattttcccacgtcccccacaaagcagcccttctttcttagtatttaagaataatgaaatggtcatgttaattctgttcttaagtttcggcaaatctactaaaattttatctcaacaatattttgttcttgctcttatttttaatccaattccattttcctggattagtcacagccaacttggaagttattgattaaggatggatttgcattgccattcacttttattccaaaggaaataaagtagcaccgatcttttctttccaaaattaaatgagctacttctaaaaatcaaagttaagtaacttttctacgggatccaagtacatattttatgcttgccgtcctctgagggtttgacaaaagtttatcgctgtgtgtagtgtttgaatgtttttaatagcaaaactattattttgttaaaattgaaatttgtgaagtccatatactaagttttatagccaaaaaaacgtatacacaattcataaaagctttgtttcggatgactgaaagtgagtaaaattagagaagggcagttttatcagatttggttgaggtgcaggggcagcagttctggacttaggagtcacagtgtttgtgtattaaccattgttttgacagtaattatatgtttgacttgttacattttactagtccatatttatgattctcatatgcagtaattgtgatataaatttcctagtttgtataattttttgacttggatagataatatggttttactccaacatttttacattcc

SEQ ID NO: 97802 - DNA, 1037 bp, Homo sapiens
gccaccacgcctggctaatttttgtaggggtttcgtcatgttggccaggctggtctcgaactcctggcctcaagtgatgcacccacctgggcctcccaaagtgctgagattacaggtggcagccactgcaccttggtgcttttcatatctcattcaaaaccttaccatctccctcttcaagacagaaagttggcttttttcctctctcttttagttaaaacttgaaatggatggatctgcttcttgcagaaagctgtgaaaagattgttttgcagaagcaatataaataaatgactctacctctttaaggttaacagtgaattaatgaatagaaaatgcccctgatcaacatttaattattcatttgatatcttgatgaatttcttttttttaaatcaattttgtattgttttacccttttagctgtattcttgttcccttgatggcacaattaaactgtgggactatatagatggcatcttaataaaggtatgtggattgatctttacttttcgttatgtgaataaaaaaaggcaatgtaatttaatggtagatgtactgtttctataaggccaaatatttaaatagacttcctaaacaagttacaaaataacatcaaaaaaattaatttgactatataaaaattttccacttataaaagacaaggtaaagctggaagaagatatttacaaaagatattattccaaatatacaaaaatcttcccaaaaaccaataaggaaaaactaatagcctggtagaagaaattggcataaagtaggaatatgtaaattcacagaaaagaaatacaaatagtcaataaatatgaagagatgcttaaactcattaataaagaaatctaaattaaaacaaatgacacaatatttcccctcataaatttagccaaattgtagattgaaaaaaaatctagtgataggtaaagtatggagaaacaggcacttttttacccaatgagagttaaaactgaaaatcaataaacacgttttgctacagcagtctcacctcggaataatggcct

SEQ ID NO: 97803 - DNA, 1054 bp, Homo sapiens
aaactcgaaagagtatttaacaaatatgtattagttgtcttctgtaggccaggtactctccttatgttgggaatacagcaatgagcaaaatacataaaaacccctgccttgatggatcttatgttccactggagggaacagacagtaaacactatggtgctctttatctttcagactttcatagttggatgtaaacttcatgccctctttactcttgcccaagctgaggattctgtctttgttatagtgaataaagaaaaaccaggtatggtataattaacttactatatatggcattgagtggctctttacattttacagttcctcaaaatttaacattttggttttaatctgaagccaacagtttttagaatgggcatttaaattgcttttgtcattattgtgctcatttggagatggtttgtatgaattctgaaatatgcagtgagggagggattattttttatgtggttgtaatagtagattgcagacctcaaattttaaatctgctttacaaaggtggatagaattttgtctttctactgaacttaaatctgttattaagcatcactatcatttatctatcattgaacacttctcactttcttaagtcagggtggaaatggcatagaaaattggttgatattggccaggcgcagtggctcacgcctgtaatcccagcactatgggaggccgaggtgggcagatcacaaggtcaggagatctagaccatcctggctaacacggtgaaaccccgtctctactaaacaaaatacaaaaaattagccgggtatggtggcaggcacctgtagtcccagctacttgggaggctgaggcaggagaatggcgtgaatccagaaggtggagcttgcagtgagctgagatggcgccactgcactccagcctgggtgagactctgtctccaaaaaaaaaaaaaaaattggttgatattaagaaccaataatgtgactaagttattattaattacattttcactgtctttagaacattggtccattgaaactgctgtgcatcagcattttaggaattccta

SEQ ID NO: 97804 - DNA, 1909 bp, Homo sapiens
caacacctaattgagcacccaccgtgtgctaaatactgttatgattgcacaaaacaaaacacttctaagtcccagtagtaaactgactggattagttaatatgatacagtaagatgaaaggtggtctagagaaaaataaagcaggggagggaaatgagcaacataggaggagtaaatactaaatgagaggaagaagggctgtgcagctgtgttggagaagggaggccggtggaagtgagccagtggagaatagattatatttagcatcgtaggctattggaaggacttttgcttttactctgagtaaaaagaatacccttaaggagatattttttaaagggatataaagagaagaatgtgtcagtattacagaaaaggagattttaccctaatattatggcaggcccatcatagcatttctgaaaactctcagatgatttgttgcttttagctactcagctgaccaacattcatattctttttccattttaaaacccagcttaatactttggaatgtaaaatgcaccagtaagatacaagttgatttgtatttcttttgtttttttttttgaaacagagtcttgctctgtcgcccaggctggagtgcagtggcacagtctcggctcactgcaacctccacctcccgggttcacgccattctcctgcctcagcctcccgagtagctgggactacaggcgcccaccaccacgcctggctaattttttgtatttttttagtagagacagggtttcaccgtgttagccaggatggtctcgatctcctgaccttgtgatccacccgcctcggcctcccagatttgtatttctatatatttggggcatttatgtacatgagttatggaattagacttccatttaaaacttgctcattcaaacaaagagtccacctttaaggtatgttttgttcaagattagcctagaattattatcttgcatcaaataaattctagagtactgattagcagtttcatagggccaggcacagtgcctcacacctataatagcaatttgggaggcaagatgggtggatcacttgaggtcaggagttcgagaccagcctggccaacatggtggaaccccatcgccactaaaaatacaaaaattagccaggcttgatgtcacatgcctgtagtcccagctactcaggaggctgaggcaagagaattgcttgaacctgggaggcagaggttgcagtgagccgagatcacgccactgcactccagcctgggcgacagagcaagactttgcctcaaaaaaaaaagaataaattccttacacatgtttgctctctctagagaagctttatattaatatagctttctttggctagatatatttcagctggtttcagtgaaactgccaaaatcctcaagccaggaagtagaagccaaggagctgtcctttgttttggattacataaaccagtcacccaagtgcattgcctttggaaacgaggtaaattttgttttgttcgttttctgttttgtacctaaaatttctttcctgcaatctctcttctgagcattttatgttacagtgattttatattcccttgaattactatatttgtattagtaactaagaagcctcttcattgctttagcatgtatttatggtatagatttttttaggactatccttatttttgtgtgttctgtcctattgcctttgtaaactctcttagactatgtgtctttagaaattatggcctcccatatgttaattaattaatgtttataattaatatgcccattatagaaaatttggaaactacagaaaaatataatgaggaaataaaacctataatctcaccagtgataattgaagaatctctttctaggcttttttcttaacattcataaaataacttttcccgaaaagaattaaga

SEQ ID NO: 97805 - DNA, 2471 bp, Homo sapiens
tttttcacttaacattgcagcatgtgtgtatactaacatgtttttcataaattataactgatgtttttatactgtgatttcttcagccattccctgttaacagttactttactattttaaaatcaaatgctatgaaaagcctccggacatcactgtagcggcatgcttctttagtcttaagttttatagcattattttggcattattctgaaaagagttaatttctcagagtaaacttctttaacatcattaatgtcagcattcttcagcattgttagtcatcaaataaatactaattaaaaccgtagcaacataccactttaggtccactagaatagctaatgttgacaggatatagagcaaagttaaatacatttacctagcgattccattcctacataaagagatgaaaacataaccacaaaatgatgtgtacaagagtgattattcatagtagctccaaaatgtaaattaacccaaatattcatcagcaagagaataaacaaatgtgatatgcatacaatggagtgccgctcagcaataaaaaggagctaatgacacacatgagaacgtagattaaattcaaaaagatgatggatgatgttgagccacagaggacaagcagaaaagagtgtatattttaccattccatgaatgtgaaattctacaaccggcagagaaataagctatggtgatcgaaacagataggtgggatggaaacattgaggaatgactgtaaagagggaggagggggcatttctgaggaaggaaatgttctagatcctgattgtggcagtggttatatagatgtacatgtatatcaaacattgcattttagtgtatataagttattcctaattctagtcattgtactttaagcttgagagtctagttttaggatttaggacctaagttcatcttttaattttctgtcattgtttcaatagtatgattattctttctatagccaaagtggaatatatcatattaatatactcttatcagctgaacaaagttactgttaacttttgtgggggagtgtttctttttaaacagtgttgggccgggcgcagtggctcactcctgtaatcccagcactttgggaggccgaggcaggcggatcacctgaggtcaggagtacgagaccagcctggccaacatggtgaaacccatctctactagaaatacaaaaattagccaggcgtggtggtaggtgcctgtaatcccagctacttgggaggctgaagcaggagaatcacttgaactcgggaggcagagtttgcagtgagccgagatcgcaccatcacattccagcctgggggacaagagcgagactttgtctcaaaaaaaaaagaaaaaaaaaagagtgttgactatttttgtgaatgtttatcttctttttgaaatactagggagtatatgttgctgcagtacgggaattttacttgtctgtttattttttcaaaaagaaaacaacatcaaggtaagaattattttttattagctttattttatttgctcaagagttctttataattttatttcttcctaatacctatagtccaaagctattcctagttttatgttgcaagagagtgtaagactgtgaagtatggaggtacagtttttaaccataccgtatagtttttaagcatactattagtcaccaaaacctaggaagctttttccagtcaaaagccctatacactgaattctagtctgcattcttggagtcaaagttggatgtagtttgacagggtttcaccacatgattctcattgtcattttatgaatgtaggaatgaatgtaggctttgacatatgtaagttttaattggatcagatttagtctatttgatccccactgcacctcaatttaaaacatatttaaaatagagataatatctacctaacagagttgtactgatgaatgaggtgacgtatttagagcagctagtgctaagtattgaatagttaactatttgaaaataataactacctcttcccttttaccctgccaagattgctttttttttttttttttttgagatggagtcttgctctgtcgcccaggctggtgcaatggtgtgttctcggctcactgtaacctccgcctcccgggttcaagtgattgtcccgtctcagcctcctgagtagctgggactataggcgtctgccaccaggctggcaaatttttgtatttttagtagagacggggtttcaccatattggtcaggctggtcttgaattcctgacctcaggtgatccacccgcctcagcctccgaaagtgctgggattacaggcgtgagccactgtgcccggccaattgctttctttttagtataatattgatcctgacttcttcagagcctgaagattgacaagtattcagccaaagaataggaaataggctagatattataacaagtagattgatccctttggatttgtcctttcagatgcattagcca

SEQ ID NO: 97806 - DNA, 1094 bp, Homo sapiens
catccattatctgatttaatcattggccgtaggaaatgagtggcattatactcattttacagataaaggaagtaggatttggagttgataattaacttgcctaacatgacatggtgggtaggtgggtttggacctggttctgattttagagctcttgtttttaactgttacatggccttatttgacattagctattttaaattaatctccatcattgtttcatttaagctgcatgacttctgtcacagctttgtgtagtgtagctatagcgagtaaaaatacctttaaagtaaagtggtcttcaacagaaatacagggaagtacatcttgtctttgtttacttttagcatcctcacacccatgtggtgagagttatgtcagtttatttgactggttctttaagaaagttactacatactagagaagattgtgtgcctaaaaaatgagaagccaggaaaagtgatttttctttctgcaggtcttcctggagactgacaggacaagtcttagatggtaccatatgctgtggtatccttagagtcttacttgggtgtaatgcccggaagccccaggaaataggagacaccttcaacccgattatggtttggggagtaatgactagtgtatggagacaatgtaggctgctcatttgtattctctaccctccttcccactccacaccctcaaaatactagtgagtgcttggtatccatatgtatgtgtctgtatatgttccaggcaggggtttttttttttttagacaaggtctcactttgttacccaagctggagtgcagtggcaccatcttggctcactgcaacctcgacttcctgggctcaaatggtcctcccacctcagccccctaagtagctgggactacaggcacgcaccaccacgcccagctaattatttgtattttttgtagagatggggtttcaccgtgttgccaggctggtctcaaactcctgacctcaggcgatccccccagcctccacctcccaaagtgctgggattacaggcgtgagctaccgtgcccggccattatttgaattcttgatattatatttcaagtagcatgaatatttttaaatgag

SEQ ID NO: 97807 - DNA, 2226 bp, Homo sapiens
ttctgtaagtggggttacattaatttatttttcagctgttaaggtaatctcattcttgcagtaaactgcgatgacatgataccctttaatatatcattggtatagtattttgcttaagaattttcatctgtcgtgaaatcggcttttttttatatatatataatatttttggtatagtatttaaatgtttagaaaaatttatcagtgaagctatcttggcctaaaggatatttgtttgtccagcttttctagttgtcaacagaggagttggtcagcaacaaactaatcagatatcactggaaaaaaaattcctgaaccagtgatcatttgtcttcagagtatattaaaagatacgaagacactttttgtagctttaaatgagtttatttctctagtacggtagcaaaaacaaaagtgttaattatatttttctttctcttttttcctcaaaacaccatccttttaatttccttgaatggatatgaaggcaccagtctgctgagtggcggtcgtgaatctgtacttgtagagtggcgcgatgcaacagagaagaataaggagtttctcccgcgtttaggagctactattgaacatatctcagtctcgcctgcaggagatttattctgcacttctcactctgataatagtaagtctaaattttttattatgaggaaatatataaacaccataaattagctagcatctgtagggaacagagaataaagagacctaaaactaagagtagcgtatgagatttaatgagccttcttttccttgcattactcctctcttttccacccctctctacccctaggcaccaccagaattcaacatttttgagaattatttttataaaatggaaggctaagtgtatttggttattgatgtgccacttacattttcaaagtcttttagtgtgggatgacatgaggaaataaagggaaggtttggaagtggacattggtgctttcataaaccttccgttttcaaaagaatactgcaagattctcttttgatacagctgttacctgggggcaagagtcctgtagatttgatagaaatagaggcagtcttatatttctccaaaactttgttcatccagtgactactcagcctagactaggatatctttgtaaatccacttccttttctttcaaaaaagaacataactgtgagcagtccatttagtggcatgaaaaagttaaactatttttattagatatactctatagattttgcattaacacttaaaatgtgttcataggcacaactgataaaaacttaaagactccaacagaaaagcccctatccccacccctagattttccactaactcacaaaatgtattcctgattttctagtagtactctgagttcattgaacttactgggttgttttgtattctggtatatttcagaatataaactcaggtgactccttcaccttgaagctctaacccaggggtgtccaatcttttggcttccctgagccacattggaaaaagaattgtcttgggccagacataaaatatactaacactaatgatagctgatgagctaaaaataataataataataatgttttcagaaagtttatgaatttgtgttaggctgcataaaaagccaccctgagccacaggttggacaagctttctctaacctattgatatttaaatacctatttttttctacccacagagataataattattcaccgaaaccttgaagcatccgcagtaattcaaggcctagtgaaaggtattgcagaactcagtggatttggaatcatgaacattttaaagagtgcatatttctcttatttcacctgttatttgtcaccacttctgcagataggagtatcttcactggtttgatgattgatccaagaactaaagctttggttttgaatggaaaacctggccacctgcagttttattctctccagagtgataaacagttatacaatgtaagattttgatcattagccttgaaattaatgaaagctctttacagtaccactggagtcaagcaatttgtttagtagcttttaaaacaagatcctgtgcatatgtttacttgaacatagtattatccgtggttacttagttcagttgttcagagcataattccattgaggccacagttgcaggttacatgtaagccagttggcactcctgtacgtgctgtctctgtcttttgtttcagaatgccctcctattagctatcc

SEQ ID NO: 97808 - DNA, 1015 bp, Homo sapiens
ggcattttatttacttagtataggcaaggaaatgggattttttttaaaacaaccataaataaatgctggcctacttacattggctatcttttttcatttcttaaagattgtaggtttatttctgttctgcttgtttctgttgacagagaatctagccttgagatgatgtaaagctgtttgttcttagaaacaaaagaaaagcactactataaattaacggttctgttgtatcatatagtgggtgttagtaatcgctaatattcaaggtcattgaagaataattaccaccaaattgatactattataatgtgttcccttttttaatggcaattttggtgtccatagtaacaattagttcatttttgcctttatttaaaaatctattactatacagtacagaagttgtcttggatgtagttaattatcatttcttgaatgctgtaacatttgtgtatttatgttaataaacattttggttttttggttttttttactcatcagttagatattatacagcaagaatatattaatgattatggtctgatccaaattgaactaacaaaggctgcatttggctgctttggtaactggcttgcaacagtggaacagcggcaagaaaaggaaactgagcttgaattgcaaatgaaactgtggatgtataataagaaaacacaagggtaatactatctgtgtagccacttaatttcaaagtataaaatatttcacttcccattttacagtttcaattgtctttaagatgtttcatcttgacaaggtttagatttagagatatgggagaggttttattctaataaaacctttaagctttctgctctgagaagacattgatgtcctctaagtcataatgtcatctcataatgaataaagaaacatggaaaagtgacacctcctcaagggcataataccgaattctaggcaaatccagggttagaatccaaatgttcccttgctcttccgttaacagcatactgccttttgaaaagagggagtgtag

SEQ ID NO: 97809 - DNA, 1108 bp, Homo sapiens
acaaggagcactacagttccagtatgtttttctttcggcctctcactttagtgcagcattctacaaatcatttcagtgtgtctccatgtgtgttagttggaagcataagattcctcttcctaagaataagagaagttttttaaagcttttggtaaatctttccttagaagtgaatcacctttgtttttcccctcagtggagtggaatgcaaaattaaatgttagagttatggaacccgatcctaattcagagaatattgctgcaatctctcagtcttcagtgggttcagactgtaagtacaaaccacactttgtagtaagagaacatctatgacctaagttttcttcttaatataatttgagccaaacttgccttcacatcagatgttaattggaagccattttgcttgaggcacggcccttctttgccccaacactttgtcattgtgtgcgtccatacttagttctaggagagctccaatatgtttcttatttttccacaagccaattcgtactcaatctttaaaattcaagagatttcaccagtttgacatatttccaactgcccctgagaagctttaattggtcatcctctatgttcttgaagcagtttctacatatctcatttctagtacttacagacaaaatactactgtaataatattttggtttctgtcttctgcagtgggccctggcctctggagcacgaattcttctttctgtttttcatcctcatagccctcattcctaacctgcctggcccatagtaggaacacagtagatacctcttgaatcaaagcctaaaacagtcatgacttgggccagttactcaatggggtgagtcccaggattagtgtgatctgccagtctgaggctagaactaaccttttcaggcaaaatgttattgtttctttgttttttccctctagtgtttgtatttaaacctagtgagccaaggccattgtatattcaaaagggtatctccagagagaaagtccagtggggagtgtttgttccacgagatgtccctgaatccttcacctcagaagcttaccagtggctaaatagatcccagttttacttcctaacaaaatcacaggtaactgcct

SEQ ID NO: 97810 - DNA, 1049 bp, Homo sapiens
aaacacaggcaacagcaggatgaaaaactaaacgaaactttagagaatgagctggtacaactacccttaacagaaaacatacccgcaattagtgaggtaagtaattatgaaaaccatgtgaaacagattaaatgcacttaaagcacctgaagttggagttttgacacagtcaatctgtaatttgtatgctgtacaactttaatacccaaactaaataactaacaacaaaccgagtaacttaaccttgtgatctgggattgttttgtcctggacctggtgtagggataggggtggttgttggcataaatgtaggaaggtagaaatgtatttttctttggtttggcttttgtatagggaaagccttttcatgtttcactcttggcatttacaataaaagggactccgtgaggacactgtaggaacagactgcggtggaggataagctttttaattgcaaccgtgttttctgtttgactccagcttcttcacactccagcccatgtcctgccatctgctgctttcctgtgctccatgtttgtaaattcattgctgctgtctaaagagactaagaggtaaagcagttcttaagacaggtttggacactctcttttgggaaacaggatcgtttgtgtttatccttttttagagtattcttccactgtatttctttttatttcataagttttaaaatagatttaaaggctataggattattaagtcaagtaacatacattgaaaataagtttcaaaaaagatcttgtatgtgtgtgttttaagggcttggtacataatttaaaattacatgtttgtaaattcacctgctcttttataaataacccataatttttaaagtgtacttagtaacaaaattcttcatttactttgtgtgattatatttctacataggtgtcaaattagaaagttactgtttagaaacatttaatagtgtttatattttattctgttattgttaaagtgctaaggaaattcctgaagatgtagatatggaagaagaaaaagaaagtgaagattcagatgaagaaaatgat

SEQ ID NO: 97811 - DNA, 1061 bp, Homo sapiens
gttctttgtactatgactataatggagcctttaacagaaacctattaacataactatctggttaaaactaactaaatcttataaatggcatcaatttttctttgaagctgctctgtctgacctactacttctagaaattgtgcttcctctgttagttgtgtttctcgatagcaacaaaaatgacaaaatcaccttaagacaccaaagccataattctgtcaccacacaatcttcatagaaatgggaaaagacctgggaaggattttggatcccaggtagcttatttattcctgatgaatacctttgagattaaaacaaaatagaaatgaaagtaactgggatttgatagtagtacactatgacaacaggaggtgagtagactggaatgaaaatgaaccactcaaccacagagatgcagtcaataattatgatgctcagattgctttgtttttcaaaaaccatgagcaaaccacttaatctctgagtctcagttccttcatctaaattgcagaattagacaaagtgacccttccagctctgatattctgtgacatcaaaacttagataccagaatattgcagcataggtcccacatcccatcccatgtctcagaatgccaagaaactggtcttgcaagtattaaattttcggtgcatgtatataaataggtggagagatggctatcttagttttccatcttcaggcatgacatacatacccctggcttagaaactccctgggagatcagagcacttggttcacaaaatgaaataatcagacatgaaagtgcaccagttcctttcattgttttgttgagttttgatcatccttgttactcagtggttgtctactttaacggaaggatgaatataagtgctctgaaaacaagcactttaaatgcaaatatttggatattatgctctagctcacataggaatgtaagttaaattcatattctttcggaaatgcctgtctgcagttgtgaaattgagtccactagcccagctcaatgtggcgtttctgccagaaagagcactggtctaggagtcagaagactacta

SEQ ID NO: 97812 - DNA, 1059 bp, Homo sapiens
tctgatgactgtaaaaatcatttattgaggccactaataacccaatatttatttatgaaaaataattcttaaggcaaggctatggtatatttaaggtgacttaaagacagtcaggctaaaatgtatattttgcatatgtcaacagatttttatctgtgatttgaaatgtatgcctgtaaactaaaatctaatctttaaaaaaatattttattataggtctttggtcctttgatttaactgtgacacagttgctgcaagaaaatgtaattgaatctgaaagaggcattataaatggtgtacagaactccatgaactatcttcttgatcttctgcatttcatcatggtcatcctggctccaaatcctgaagcttttggcttgctcgtattgatttcagtctcctttgtggcaatgggccacattatgtatttccgatttgcccaaaatactctgggaaacaagctctttgcttgcggtcctgatgcaaaagaagttaggaaggaaaatcaagcaaatacatctgttgtttgagacagtttaactgttgctatcctgttactagattatatagagcacatgtgcttattttgtactgcagaattccaataaatggctgggtgttttgctctgtttttaccacagctgtgccttgagaactaaaagctgtttaggaaacctaagtcagcagaaattaactgattaatttcccttatgttgaggcatggaaaaaaaattggaaaagaaaaactcagtttaaatacggagactataatgataacactgaattcccctatttctcatgagtagatacaatcttacgtaaaagagtggttagtcacgtgaattcagttatcatttgacagattcttatctgtactagaattcagatatgtcagttttctgcaaaactcactcttgttcaagactagctaatttatttttttgcatcttagttatttttaaaaacaaattcttcaagtatgaagactaaattttgataactaatattatccttattgatcctattgatcttaaggtatttacatgtatgtggaaaaac

SEQ ID NO: 97813 - DNA, 1069 bp, Homo sapiens
aataacaacaaaaatatgactggtcgtttctcagctgtctgtctttatattatgaattattgcagagtggaagaatctaggctattcagtctttttctaactttctgatgtttttcaagtaggaaaggaagtgagatgtttgttgaactcttgtccactctacattagcttttagtaagtggtgctctttcacatccagccagcagtgtgggctggtggactagtgaaggaaaactttctgcatgtttcaaaacaggaaacagaaacttctttagttctgaaggtcagaaagtatctaattgtggattttttgtgccatttctgctattgcagagttaaaggagaacagagaaaaaggaggaggataaaggaaaaatgggacaaagaagggggaaagtacatctagaagggactccacctgctgccttgggttcctatgaggttgtgtctcttatacacagacccacctactccaggcaggaaggatttgtgtttatgcaggctgatttttgaggttgtggcaaagaaacccaggtaggggcctaggccaggaaggcttcacctgtttgtgatatgtttagagggtgaaaggggaggggtatgcccatgaaaagtaaaagttttgagctggatgctgattgctcccatttcctcatcacagtgtttcttaattttagagattgttttaaaactagaagctgtatcactgagggtaaaagaaaaggaggaattttccctgccaaggttaaaaagttttagaatttcagtggcatcaggccaaaatacagcagtcattatccagtttggaaagttccagaaaaggtgttttatttttctcatgaatactgctaaccagttaactaatttaggtactttctaggtgcttgatttagtacagtgttttatgataacattctcttgtgccacgtttgaatcttacttccttttcccaggctttttaactccatctattgctttttttcctcctccatttcttttgaggatcactctttattagtatcttctgagatttttcttgcccatcatgctaaaaaataatctgccagtt

SEQ ID NO: 97814 - DNA, 1030 bp, Homo sapiens
actgtactgtaattgatttctggttcaatagcaaactactttatgcctctgcaatcaagataggcaaattccaggccccaggagaaacctgacacacaggagaacacgtttttgtctcaaaaagccatcttgggtctggaaactgcattttgtttctagaatgaaaaagagaatgtgcggttcattaatatcatgccttttcaagtttacttaataattgggcaagaatattttccattgtgctgggatgaacgttttaacatctgagcagtattcaatctaagagtaattactgactttgaaagtctcataatgtagccaggaagtgcccttttgataaggaagcaacttcctgagtacaatagactagaaacgaaaaatattccatcaaaacattttctcttttcatttaagggagatcggatgtggcactttgcggtgtctgtgtttctggtagagctctatggaaacagcctccttttgacagcagtctacgggctggtggtggcagggtctgttctggtcctgggagccatcatcggtgactgggtggacaagaatgctagacttaaaggtgagtgttgttatataattaagcccttttattcatgggaccaatgcctgagctacctctgtagcaaaggaaacaacaaactaggagagaaacaaccagggaatgtctgcatgccacacttgagggaggagggcttagatggcaccacctctggatggagggtcccatggctcccacacaaagttgggatgcctggacattgacctaatagatttttttgtatctttggctgttcataaatttcatatgttaatgattaaccttgtagcacttctctgagaaccatgttaaacattaaaagtttgcttaactcaggcttcctaactgtatcttgtactggagtccctttagtgtgatgttcctgagacagctttaacatctgttctttggttactatgtttcatgtaagagtatgtataagggaattgaaaactaagaatagcttcaaggcagaat

SEQ ID NO: 97815 - DNA, 1026 bp, Homo sapiens
gcaggaaaacccggggagtggaacgcgtcgaggcgaaggtccccgcaagccgcgcagggtgtctgcggccggttggacgcttgcgcccggggtgggcgactcctccgggcaagggcgcggggacggcccggcgcgcaaggttgacgggagctcgtctcgcgccgcggggacgcccgggcggccctgaaggggacggggcggccccagtcggaggtcgcagggagctccgcccccgactcggtataagagctgggcccggcccacggcggcggcggcggcggcggagagagctggctcagggcgtccgctaggctcggacgacctgctgagcctcccaaaccgcttccataaggctttgcctttccaacttcagctacagtgttagctaagtttggaaagaaggaaaaaagaaaatccctgggccccttttcttttgttctttgccaaagtcgtcgttgtagtctttttgcccaaggctgttgtgtttttagaggtgctatctccagttccttgcactcctgttaacaagcacctcagcgagagcagcagcagcgatagcagccgcagaagagccagcggggtcgcctagtgtcatgaccagggcgggagatcacaaccgccagagaggatgctgtggtgagtgtcgttgaccgaaagcatatggtggaaacccaggtggggctttggagacaagcaactctacacgagttctggaggaatgtggctctgctgtgaaccatagctttgtaaaaagatcctttgactcatatttggtggacgttaaggaagaaaggaaattcagggtgtgggaaaaggggtttgcacacaggcacggatggagtagattgggcagtttggattgccttgtgtaaaaaagaaacaaaacaaacaaaccaaccaacccaaaaaagaatgctgaaacaagagtttcttcactgtatgtgaaatgtgaagttgggcagttattgactaggtcaataactgaatttagtgaatggtattaagtgaacgaaatacatcggttca

SEQ ID NO: 97816 - DNA, 2485 bp, Homo sapiens
agtcaacagttatatatatatgtgtatatatatatatatatatatatatatatatatatatatatatatatattataaatgttttagaaagcaatagttattaacatgtgctttagaattttaaacaggtctaagtatgacaaaccattaccactttctacctttgtgactttgggtgaaatactttaagcctccaaggtattgtgggatctaaataagatgctatgttaaaagtgcttagccaagtgcttgggccaaaatcagcactcggcaaaacagaagctatttttctaaaagataaacattctttattagtagcctgttgttaattatcattggtactggcacagtgtgtgtgtttatatggtttgattttggtaaacagcttgtgttgccctctgaattgctaggtaaaagtccaagaatttttatgttatttaatatttattctccttccctgcaacagatatattggatgaactgaaaaaagaataccaagaaatagaaaacttagacaagaccaaaatcaagaaatagtcaacctgatttcacataacaatgtgtggcatttgttgttctgtaaacttttctgctgagcatttcagtcaagatttaaaagaggacttactatataatcttaaacagcggggacccaatagtagtaaacaattgttaaagtctgatgttaactaccagtgtttattttctgctcacgtcctacacttgaggggtgttttgactacccagcctgtggaagatgaaagaggcaatgtgtttctatggaatggagaaatttttagtggaataaaggttgaagctgaagagaatgacactcaaattttgtttaattatctttcctcctgtaagaatgaatctgagattttgtcactcttctcagaagtacaaggtccctggtcatttatatattatcaagcatctagtcattatttatggtttggtagggatttttttggtcgccgtagcttgctttggcattttagtaatttgggcaagagtttctgcctctcttcagttggcacccaaacatctggattggcaaatcagtggcaagaagttccagcatctggacttttcagaattgatcttaagtctactgtcatttccggatgcattattttacaactgtatccttggaaatatatttctagggagaatattattgaagaaaatgttaatagcctgagtcaaatttcagcagacttaccagcatttgtatcagtggtagcaaatgaagccaaactgtatcttgaaaaacctgttgttcctttaaatatgatgttgccacaagctgcattggagactcattgcagtaatatttccaatgtgccacctacaagagagatacttcaagtctttcttactgatgtacacatgaaggaagtaattcagcagttcattgatgtcctgagtgtagcagtcaagaaacgtgtcttgtgtttacctagggatgaaaacctgacagcaaatgaagttttgaaaacgtgtgataggaaagcaaatgttgcaatcctgttttctgggggcattgattccatggttattgcaacccttgctgaccgtcatattcctttagatgaaccaattgatcttcttaatgtagctttcatagctgaagaaaagaccatgccaactacctttaacagagaagggaataaacagaaaaataaatgtgaaataccttcagaagaattctctaaagatgttgctgctgctgctgctgacagtcctaataaacatgtcagtgtaccagatcgaatcacaggaagggcgggactaaaggaactacaagctgttagcccttcccgaatttggaattttgttgaaattaatgtttctatggaagaactgcagaaattaagaagaactcgaatatgtcacttaattcggccattggatacagttttggatgatagcattggctgtgcagtctggtttgcttctagaggaattggttggttagtggcccaggaaggagtgaaatcctatcagagcaatgcaaaggtatgacacagtgtttcttctcctgagaattcctgagacctatttttgacccttaaagcttttagcattttgattgtaagaatatagcatattttaggtgcatttatcttattttctttactgtgtagttgataacatttttatacggatttctttaaacctcataggtagttctcactggaattggtgcagatgagcaacttgcaggttattctcgtcatcgtgtccgctttcagtcgcatgggctggaaggattgaataaggaaataatgatggaactgggtcgaatttcttctagaaatcttggtcgtgatgacagagttattggtgatcatggaaaagaagcaaggtaattctaatcatttgagtgttcttacggtatttttataaaaacagcagagtgtaaatggagactttaaagtttgttttctctttggagactgttcacatgaataagagcagc

SEQ ID NO: 97817 - DNA, 1055 bp, Homo sapiens
tgaatcaggcttcttgcacaccaatttaaaaatgttaactcttgatatatacactagttataccactcatgtcagtcaataaattttaaggtttaagtgcaggcctttgtttacagaaatcctaattttttgaaaccataactctgacctgacactaaattcctgtagacatgctaaggaaaatctgcttagtatcgagatcaagaactttcattcaaaaagattattcagttatgttatttgcatattaccattattaaaaataaaaaaatttttaaaagatggctcaggaatcctttcattctaaaatgttttattagccttctgcaggctctgggttggctttctggacatgtttcccaagttggttcaaacacactattcttggtcttgatacatttgtgatatctgatgtaattgtagatgaaaaagaaaaaatattatgggaatccttggtcttttttgttgctttgaagagtcccatgaagttagttacaggaggtaataaagtcaaagaatcttttggttgaattttaggttttaattttcttcggtgctccttccctaaaaattagccacaattaaatgtctctcctgagagccctaggtatagtctcattacttctacttctatgtagttctattttctttacataactaaaacatactaagagaacagatcagtacttccagacatttagatgtcaggggccaaaaatttgtggggaccactatatggtttgctagcttgttatgtcaagttagcaccaataagagaacgaatactactttaaatatcattatgtaaaataaagaatattttaatactaaaaaaagtgtaaaaggcattatctcaaaatgatggacttgatattgaatgaaattaattttatcagaaacgtgctaccttgcccttattttttcttatgttactacaaacctgtgaaaacttcatcagatcatgactgataaacaggttgttgtttagaaaccagtgttaaagtgaagagtgaactgactattcttttatgtaaattactctaacattcaagaag

SEQ ID NO: 97818 - DNA, 2954 bp, Homo sapiens
aactaagtagcaatagatgtgctaccaccattcacctaaatatttctgaattttatcttagtaaactgaaaaaaattcacatatggtgagaaaaaatagaaagagtagtacacaattttataattcttagcctttcttaataaaatggtaagaggttcatatctgtacataaaggctgaaatagtttgcagatacagttatgtattttgccaaataatgtatgtgaaagaacgtgcttcgtaaactaacatactgcaaaaaaggtaaaataagagaatatatatagattaacataaggacattaaagatgcaatgcacagaattaaatcacacaattacttacaccacagacagggtccccccccacccccctttgttttagaatactacagaggctactgccatatataggaaaacaaacaaacaaacaaacaaaacactgcttcccacagtgaaataataggaagtataggacaagttcttattattgacgttcatcattaagcagttattgtcaacttcaagcccattttccaaccaatagaagagcaaacatagacaggggcagtgattggcctcttattgttcgggtcatcataaggaacagggttgtctgcttacctgaatatcagctatagtctatatttgccaaagtatagcatgttttattcattcaggggttttttgttttgttagtaattttcaatttatttcctttgcatcttttcgtttcacagtatttaattttatgactctaaaaaatatgtttctttgataggtggcaagaagactttctttaataaaacatccagagtgctccaccatgagtggtgggaaagccatagaacatttggccaaacaaggaaatagatttcattttgacatcaaacctcccttgcatcatgctaaaaattgtgatttttcttttactggacttcaacacgttactgataaaataataatgaaaaaggaaaaagaggaaggtatatttctaattagtaaagttgaacagataaatattcctggattgtgcctaaaaatagctgctcatttctgcaggtattgagaaggggcaaatcctgtcttcagcagcagacattgctgccacagtacagcacacaatggcatgtcatcttgtgaaaagaacacatcgggctattctgttttgtaagcagagagacttgttacctcaaaataatgcagtactggtaagttttatctcattttatagtaatagttacactttgcaatatgttacttttttcccaagaccttgaccttgtgtttaggatgaacagatctttatgccttatgctagccctgacagtatgaaattatgcaggataggaaagactaacagccatttcttgtactagtttggtagctttatgggacagctgtatagcttctatggcacataagtctaattttgcatcttcttgttggatttaaaagagggcttacaataaagaaagtaaatgcagtaactgctatcactatttttagaaaaataggtggatttccttcatcctttgatgaaatccctttgtttgtttgtttttttaataagccagtcaaatttagcagtgggaggtggtataccaactttcgtgacactaatgttgataaagttctgataatccactatattgtaccagccaaaatccctttaattgtgcttaaaagccttgacaaacatcctgtttaactgtatcttaaactttattcatttaaaaattataaactaaagtgggaaaatgtttaaatggtagtaattcatagatggaattttacatggatatcaaagaataattttttcagagttatgtagtaaaatgcacaaaataataaaaatttcagggtctaaaatagtgtactatgattgaaattatattaaataaatatttagatgaaaggttggaagaaaatatacaaaaatgctagtaatgtttgtatgctattagaattattagtaatttttttctttccaaatttttattacatagatatgtcatctgcccattacccatctcaaaatgggatagtttattattgtttaatgctgatatttttctccaggtttaattagcagcttggttcatatccatatatgatagttattttggttttctcaattccttcaggttgcatctggtggtgtcgcaagtaacttctatatccgcagagctctggaaattttaacaaatgcaacacagtgcactttgttgtgtcctcctcccagactatgcactgataatggcattatgattgcatggtaagccacaggatatacgtgcttcactcataactatgtaaatattaattgccattttatcatactaagccttcttccttcagatcttggagctattgattttattttaatgcttcttatttaggaatggtattgaaagactacgtgctggcttgggcattttacatgacatagaaggcatccgctatgaaccaaagtatgtggtatcattcatgatctttatgcaagttacattacttaagacaaagcctggattttgcctttatatatgaggttttcattgacattctggtggtacttgaaggaaagttacataaatttctttcatgaacctagttaaggttgataccatatgagaaatatttttgctacagtatcaaattataaaaatcttggcaagtttaggtgagttagaaacaggtcatgagtaagggtgatgaattccctcctttggaactagaatgtaaactatgtccatgacctggacttttgcaatgtcaagaacatctcagaaccagcaagtatgctgggaaatttaaggaaaacatgcagaaagcattcaggtgtgagagtgggttgtgattatgctcttacacaggcagttgagaattggccgaaagatagctgtttcctgcaagccttatttcctctcccaaatcaaagttccagtgaatagcac

SEQ ID NO: 97819 - DNA, 1016 bp, Homo sapiens
atgaaactggaaatgtgttgggagaagcaatacattcccaaactgaagttcatttaaagtaagtagacattatcttagtcatttccacttttttggaaaaagtaaaatcattcttttgtatttgtcatatataaaagttttcaggagctactgtcttattcctttttgcaaacacttttaataactgctatagaaaacctcaaacacttcatcctggcttttaagggtcttcacaataaggtcccaaccttaactaatcctgttgccaaaagaaactgagctcattcccagcttccgtatttattgattttccttcagtaatgcattccttcttttctccacttctatgtttcatggtctcagctgaagtcctaggaaaactgttagtcattgaaaaaaaaaatcctattcatatttatacatataacttgtattagtacttaaataataatacactgttgtattaaagcatagaatggtgcaaggattataaactgtgatgtttatagaggactaccaggcaggttacctaaataaatggacaagataaaaagtggaaaatgtctggaggaggtcactactcagctctagccagttgtcatgtgggaatgcaggacctgtgttattagattattataattttcaagggaaaatggaaatccagattttttttttctttttttttggtgagacagagtctcactctgtcaccaggctggagtgcagtggcatgatctcggctcactgcaatctccgcctctcgagttcaaacgattcccctgtctcagcctcccaagtagctgggattacaggcacgtgccaccacgcccagctgattttttgcattttagtagagacggggtttcaccatgttggccaggatggtctcaatctcctgacctcttgatccacctacctcggcctcccaaagtgcagggattacaggcgtgagacaccgcgccgggctggaaatccagattgttaatgtatttgcagattttttacattagtagcta

SEQ ID NO: 97820 - DNA, 1049 bp, Homo sapiens
tctccattttataatttttacagggggaacagcgaagccagatgatttattagttattgccggtgaaaatacagagatcctttgaaacatttgtctctcctagaattctcatcaaaccatatgcttctaacacagcacttaacagtcatggggagtatgtgggaataacagagactcgcttccctgccaaaaccacacatagacccacacacttgaaaaataaggaaataagatcatctgagtatggagattcctcaaaaattaaaattatatccagcaattccacttccgggtatatacccaaaagaagtaaaagcaggaacttggacagataatttgtacatctatgttcacagcagcagcattcacaatagccagaaggtggaagcaatccaagtgtccatcaagggatgaatggttaaaagaaatgtgacatatacacacaatggaatattactcagccttaaaaaggaggaaacttctgatatatattacatcttggatgaatcttgaagactttatgataggtgaaataagtcagtcacaaaatgacaaatactgtgttaccccacttttatgaactcctagaataatcaaatttaaagtggaatggtggttgccaagggctggaaggcagaaggaatgggagcttattggttcttgtttttgttttgtttttttttttttgagacgggagtctccttctgttgcctaggctggagtgcagtggtgcaatcccagctcactgcaacgtctgcctcccaggttcaagtgattctcatgcctcagcctcccacgtagctgggattacaggcattcatcaccacaaccagctaatttttgtattcttagtagagatggccatcatgttggccaggctggtctcgaactcctgactccaggtaatccgcccacctcagcctcccaaagtgctgggattacaggcgcgagccactgtgcccggctgggagcttattgtttaatgggtacagaatttcagtttgagaagatgaaaaggttctggagctagatggtagtcatagttgcat

SEQ ID NO: 97821 - DNA, 1021 bp, Homo sapiens
aacaaccatatagccaacctgtggtctggcagaaacaacgtctctagcaatagtaccaaagtaagtaatggagtcttttttttggcaggtctgcagtaaaagataacattttcttttcttagtcctcctgctctcaacccccatattttgcctttgaatacgtgggttttagtatatatagcccaaaatggtaactgtctccagaacagcaaccacattgaattcttgtgacttaggaaagcttcttatagttgctgacattaattgcaagaaataactatatactactttgagaagtaaacatgtcaaaaaaaacaaagttcagatatgggacaaaatttaaaaattcagtaacatttataaacagaattgaatgaaaagagttacagaccaacttaaacatcaattcgtgtcagtaaactgacttttgggggtaatgatcattgttttgtatctcaaaagtattgagtttagaaatcagttgtatgatactacctttgtatgtctgtcttttcccgtgtatttttaaataactggtgatctataatttaataaaatttttcgttggtgtaatattatttcaaaagccctccaaatttagtcatcaaaattaaaatgacatttttcaagtttatttttaagcaactgaattcgtaaaattaaagtaacaaaaagcattcatttttctttattttaaagttcctctcaaaaggcttacatttttttaacatacttcagagatagaagtctccctcttagacatgctttcttcactgctttctcccgtcaatgttttaaaaatatttactcagtagatatttgaagggcccactctgtaacaggaattatgttaggtattgaggatagtttgtagacaagaaaaaccaactcccttccctttggtgcctacattccagtttaaaacaaaatctaaaaatgactattacttggaacaaaataaattgccatgccataaatgctcctgacttcaagtcaggagacataatggcaatttctaagg

SEQ ID NO: 97822 - DNA, 1041 bp, Homo sapiens
tttttcagaaacatacatggaaatacagaactacacctgtaattacagagggcatatgaaccctagtttgataagccttgctttaaaggatgcagtgtgttctattaaatgtatttaatacaattgcagaaatggaaaatgtggacctccattaaacaaattttttagttcctaatgagataaacttgggaccaaaccgattcctcttgttttagtgctcaaaaatagtttcatttttaggtatttatgctttagtggcctttttttctacctttaaaattgtttaagttccaagtaattttatttttggatgttatatatattcttaacttttatctctacagatattttctggcaagtttctatacgaagtatgatccaactcacttcatcctaaacacagcttctctcctgagtgtactaattcccaaaatgccacaactacatggtgttcggatctttggaattaataagtattgaaatgttttgaaactgaaaaaaaattttacagctactgaatttcttataaggaaggagtggttagtaaactgcactgtttctgtgataatgtgaaatgagaagtatttacattggagggccaatggctggtccttcaagtgctgttttgaagtgcagatttccattaaatgatgcctctgtttaatacacctggtacatttctgaagaggggctttataagcaggctgggcaggcccagcttataagttaaagggcatcacagtgagggtgtagtagataaattcaaggaaataagagatttgtaagaaactaggaccagcttaacttataatgaatgggcattgtgttaagaaaagaacatttccagtcattcagctgtggttatttaaagcagacttacatgtaaaccggaatcctctctatacaagtttattaaagattatttttattaccgtacatatttctcgttttatgtaagcggatgtatatcctcttgttttatacaagccagttcccacttatgagggtacttttttggttttgctggcttaatattgtgta

SEQ ID NO: 97823 - DNA, 1258 bp, Homo sapiens
ggccaagccagacagctgaatgttaatggtaaagcaattaatatacaggttgagcatccctaatcagaaacccaaaatagaaaatgttctaaaattagaaacttttttagcaccagtgttgtgccacaagcggaaaattccatacctgacttcctgacaggttgcaattaaaatgcaatcaaaactttatttcatgcacaaaattattaaagatactatataaaattatctttaggctgtgtgtgtatgatgtatatgaaacataaatgaatttcatgtttagacttgggccctgtccccaagatatctcattatgtatatgccgatattccaaaatccaaaacaatccaaaatctgaaacacttctgctccaaagcattgtggataaggaatactcaacctgtaatgtatagtccaaacaggctgtttagagagtaaaatggagctttggtaataactactacaagagattaggtataatcagaaccatcgtatgcaaacaagaatacaaggtcacctaagtcttaggataacttcttttcctttatattccatatccatttgctcagagcactgtcttctactgctttactctcaacttgatccccataccctcattttttcctcaagtaaattactcagataaatcaaatagtcttcttgatgcttctctacccttctccattccagcttggcagagtgatgttttaaaaatgcatgtttgctcaagtcatactctaagtcattcagtgatcatccattgcagtcatggtaaaatccaagtttcttgtgtgacatataagaccagttgataacagtgcagaaacaaggagacttcaccttgtctcaaccatctctaaatagaggctatacactagcaataaagaaaatcatcttgctctcattttattgttttggcttaagcttttctactatattttcttttcacctggaccaagtactcttttgtttttaagagactggcgtgatcatagctcctcccaccttagcttcccaataaatttgaggactgcaggcacatgccaccacacccggctaatttgtttttattttaatagtgataggctctcactatgttgcccaggctggtcttgaactcctggcctcaagcagtccttctgcaccatcctccaaaagtgctgggattacaggcatgagccagcatgcccagccattttgtttttcttacagagacagggtctcactctgttacccaggctggagtgcagtggcatga

SEQ ID NO: 97824 - DNA, 1071 bp, Homo sapiens
gcaggaccagcccggctgctacggccgcggatacacgccctcaggcccggcgctgcgcagcttgcggaagctttcccggacagactcgctgccagcggattggctgcgagcagcgccaatctcacgttgcccccgggcgaggcgggactcagtgccgcgctctctgcacccgctctgccgcgcgcgtgcgtgctgggtgcgggtgcgggtgcggggttgggcctgcgcatcgggtgagacgctggctgcttgcggctagtggatggtaattgcctgcctcgcgctagcaggaaggtagtgtggtgtgactaacgggtatttattatatcctcgatggctcgagggccccgtcccctctactcgtcctggtccgggcgcgaacgctatagggcagctaagggcgctccccgcggggcgggaagcgaagccgggcttgcgggcgcgcacacgtggaacgcgttttctgagcaggtctgggctccggggtgttctggcttggtctttgttgcgtcccattccccagacccttctgggtggaggacttaaaatttgttttccaggcagcagatttaacccatggcaactgtaactcatcttgtgtgagtggcggtttatagtattgtatcctgtggcatcatacaaggggtgcaagttaaactctttaaagttaatcacgatttttgctcttggccttctgggtttatccgtacgccgaagacaggcacctgtattacatgctaaggaaatgtgaataccaaaaattgatcctgaggaaagtcttgattaggtttttttggaatcgcctttgaaatgtaatttccctcaccttggcagtgcagaaagtttgtgatttttattgccgaaatagctttcaacattttgaaattgacttaagagaatgttggctgtgtatgtctgtatcttgcatttctgttggctttgtgaacctaattgttttggatttagtctgatctttaaataaatgatttctttgtgttctctctaatggaagtctgtgagttctctgatctttacttcttttttaggcacacctgttgtccttaactgact

SEQ ID NO: 97825 - DNA, 1069 bp, Homo sapiens
acaaaaaataaaaaataaaaaaagacgagctgtgcagtatgatcgccctagagcacatttgggcaacgatgggatgactgggagaggaggcaaaaatccagttgttaagaagtttgtacttaacctggttggcaattggaaacctttataaaaattttaagtggggcagcaacatgatgaaatttaaatacagaaagaaccctataggtggttgagattcgagtcaaaatatcaattaggtggttattgcagtagttcaggagagaaaggccgaatggaggcagtacaaagaggagaggactagtttgggaaacatttagatagtaggagagagatgactgggtggcaggatgtagagagcgagtagaatttctaggatgacttcaaggtttctaattttgctttatgtgcttggatggaaggtgtttgagagcatggcctttggagtcaaacatgccaaggtgtgcatctgccacttaatagttttgtgatcttgagcaagttaccatgcctttaaatcctatttggtgataaaggatgatagaatacgtagagttgttgtgaggattaaataggataatatatataaaattctcatgttggctattacttttattatcaaacaagaaatataggaagaaagttgattagaggccagtcgtggtggctcacgcctgtaatcccagcactttgggaggccgaggcgggcggatcacctgaggtcaggagtttgagaccagcctggccaacatggtgaaaccttggctctactaaaaatacaaaaaattagccaggtgtggtggcgggcacctgtaatcccagctactcgggaggctgaggcaggagaatcgcttgaacccgggaggtggaggctgcagtgagcggagattgtgccattgcatttcagcctgggcaacaagagcgaaacctgaaactctgtctcaaaaaaaagaaagagaaagattctctgatcagtttgggacatgttatgtttaggttgccttcaggtcatctaaatgatgatatttagaaggtagatggaagtaaggccctaaagtccagaaaaaaa

SEQ ID NO: 97826 - DNA, 1669 bp, Homo sapiens
tatgaatttggtagagacacaaatattcagactgtagcaattaggagagaagaaagatgacatgacatggaagaagagtatgaaaagagatgcagacatcttaagaccagaggatgcaatgggatggggtagataaagtgtgacagaattcatgctatgaattgccatgatcttagtaaactagaagaatgaggaatattgggatgcaattatagagatttaaaaaaaaaagatcttggatttggcattgtaggagatgaggtattataggaaacgagacaaagatgatgagattaagactgctcagaaggagtcagtctaagtttataccccaaagttttgttgatcagtgtttttcttagatccttgggatttcctagctgaggtggaagacttcttgaacccaggcctaatgtgtgagcccctttggggtaggggttagaggtggggggattgttcatttaggggtttagaggagctcagtttagtcccagtatcctgggatgtttttagcacttatatgccaaacactgtaatacattatttatatatactactttatttacttctcaccacaatcatatgatatcattattagatccattttatagattaggtgattgcattttagagagtttaatttcctcagtgttacatatctgttagtgtaagagctaggataaaaccaaagtagtgtgatttcagagcctgccattttaaccactgctctatccagcactgttcaatggaactataagccacatctatcattttaaattttctagtagtcacattaaacagattttttaaaaggttagttttaataatatattttatgtaatctagtgtatccaaataggataaaatcatttcatcctataatcaatgtaaaaaattgatatgatttttattaatgctgagttggaaattgagtgtgtattagcacatctcaatttggactacccacgtttctagtgctctagtgttcagtaagctacatatgactgatggctaccatattggacagtgcagatctgtcccttagatcgaggtaattctgaagctttggaaaagtgcagaggtgccttttgcttgtgacagcactaatttgtgtgaatgttatgatgatggagtagcctatagtccactgtttccctgcttgattgggacaggaaagcctcccagctgttgagaacaacaaaaacaactattgaaaggtagttgttcacagctgctctcctgagaactgggtaccccaaaactaaatcaaatatatagattaattagagggtagttagtatttaaaaagaattctcagcattcctttacataatgatctcttattataatactctacattttataaggccttatcatttgtagaacaacactttatatattcttccttatttgattcttcacagtaaaccagtgaggtattagctccatctttacagatgatgaattgatttatggagggatttgagtgatttgctccatttttatagatgacaaattgatttatggagggatttcagtgatttgctgagtttatgtgtaataaaggtgaacccccaatacctattttataggctctggtctgttacatttttttcattgtgccaatcacctttgccttctatatagcaaaatatactgtatttatgaa

SEQ ID NO: 97827 - DNA, 1112 bp, Homo sapiens
gcatgctttacagatggaatttccataggacgtttttggatttttcgtttgtttgaacaaaggatttccagttaccaacagagattttggatctgcaggttggatctataaaggacctcaaatgccaacttagagatttgagctttatattattggctttgaggagccacatgattaaaataatgtcgtaggcagaataatatagaggatagttatctgacatgtctggtatgagaccagttcagattaacagtaatcctaactctaaaggagctcagtgattgaaaaagacattataattcatcagaatgtatggatgactaatgatgtttaaatgagactgttggtaaggcacataactgattgtcattatccacttcccaaagttatattatcacttggtcattctcagccaacattacactcattatagcacaattgttcttatcattattcagttattaccatagcatttgtttttaagaaatctttttagaacatgcatgtcttgattccagtatctgtgagctttcggtgatctactgtaatgagtttggaccaagatgtagttggcacagacatttaaggaaatatatttgaaataaaaatctcaaaagtacctgggcccagttacttactcagctttcagcctcttaaatgtccataataataagtataatgttttattcatagtacctactttctatggtttagcggtttaaatgcaatcctatatgtaaagtgtttagcatactatatatttaatgtagtagttgctgttcttattgtaatcatcattttaataaacggcagtatagactgggtgaccaaaggtgaagagtcattgaggctaattaggaaattatattgggaactaaatgtgagaaatactgagaaaagaattgataggatttaggagttgattagatttgagtcagggtgaatggataattcctgtaggaaagttgtgggtttagggtagggattggtaattatacccggagtttgagctagtgattatttcagcaggcagttggaaatacagagttcgagtttgcaagaaaagtcagaatataattagtcacacaaaatcctggaagaaattagaaaaa

SEQ ID NO: 97828 - DNA, 2365 bp, Homo sapiens
tgcctgactagaacatgtgttactttgtcgctgatggagttctgttctgttctgttttgttttggggccatgcataccaaaggtgtatgtaattcagaagaatttttttagtcaaatttaaacataaattattgtttattgtaaatacccatgataatgaaacagtgaaaagcaaccttaaagatcagcctaacctccttattcaacagttgaatctgtgtccagagaaaacaagggagttgcctgttgcaccataactagaaattagtagagctgaagaatttaaactcttatatccataatgctatgcttccataaaagtaaataaatgtcaaaattctttcacttgtgtttctttctaagtgtgataacagtttaatatttttacatattaaaagtgttttttgacattttataggagaactatggatttgataaaattgaggtgcgagataacggggagggtatcaaggctgttgatgcacctgtaatggcaatgaagtactacacctcaaaaataaatagtcatgaagatcttgaaaatttgacaacttacggttttcgtggagaagccttggggtcaatttgttgtatagctgaggtaaggtaattatattggttattttagtgatttcatattcactgaacattacagttaaaactaacccagtatttggtgaagtatggttttaattatttttattatggtaaaatatacataacataagccgggcgaggtggctcacgcctgtaatcccagcactttgggaggctgaggcaggtggatcacctgaggtcaggagttcgagactagcctggccaacatggtgaaaccccgtctctactaaaaatacaaaattagctgggtatggtgcctcacgtctgtagtcccagctacttgagaggctgaggcaggagaattgcttgaacccgggaaacagaggctgcagtgacccgagatcatgccactgcactcccacctaggcaagatagagtgagattctgtctcaaaaaaatatatatatacataacataaaatgtatcattttaattatttttaaatgtacaattcagtggcagtggcattagctacagtcacattgtcgtgtatctataaccattattcatctccgcaaccttttcattatttcaaactctgtacccattaaacaataatgccttttccccccatcccctagtactcactgttctactttctgtctctatgaattagactattctaggtatcacatataagtggactcataaaatatttgttcttttgtatctggcctatttctcttataatgtcttcagggttcatccatgttgtaacatgcatcagaatttccttcctttttaaggctgaataatattccatcatgtgtatataccacattttgtttatctgttcattttcatcggtggacacctgggttactttcacccacctttgggctattgtgaataatgtttctgtgaacattggtgtacaaatacctgtttgagtccctgcttttacttctttggggtatatatccagaagtagacttgctatgtcatatcataattctgtgtctaattttttgaggagcagcaaagtgtgttttgcatttaaaaattgtattaagaaaattaagcagatatttaactatagcacttctcagagcctttactatattcaagcacattgtaaatctctaaggttggtggtttatatacgcactttttcctatacctacttgaccatgaaattcttttattgagaaagcatatcatttttgtttgtttgtttgcttgttctgtggactacactttagaaataccactctaaccggtacagttagtgagattacgctctagagatgtgaattgacttggtctaaaccttaactagttaagggcagattggatttaagaactttactcttctgactgtgagttaggtgctcagtgtctatgaactcctgagttcagtgcttggcacattcacttgcatagtaccaattatactacgctgcctctgccccagatcttataactagtttgtagcaaagcccgtctagaaccttgatctcttcatttctgttatctcagttgtgtttgatcacgtgactctgtactactttttttgtactatactattaccctgtggatgttgggctcttattgtgtgacagtatctatgtgccaggtgacagggtgattgtgagggtctcttgagttattgaaatttgcccagtagccatgtaatccttcatttgtgcttaggctggcagaccctatttaggcaagaatgttccagtacagtaaaatgataggacttcatacttgttgttctggaaaagtggcacagaaatgagat

SEQ ID NO: 97829 - DNA, 1052 bp, Homo sapiens
gccatgaattgcaaagcatttcatatctaaatacgttttcgtagtattctacaaattgtaattttacaaaattttaatgttggaaaatagagggtttttttttactttaacataaatgttacattatgagcactaaggtcttattttgctttttagcacttcagtttcttcgtctagactggagtatatatgtttaaaggatgagcaaattaatatcttgtaagataaagtggttaaaacaaaatcccatgtaaccttataaagtattagcatcatcttcatcttatcatcacccttcccttaaagatgatctgtgtaatcatttattcaggaccatctagaagccactggcagggttagtcctggaactcagagttccagggccgcctttgctcagtgacaccaactttaggtcaggtggctagttctttggagtagagaaatagaattcagttgaccttagcattttggaaaatcagttggttaaatgtagaattgtcttcaaagggataattatggaataatgagccacagaaaagaaaatctctagcactttctgtcctctaaattacaccatttttgaaccatggaatgtattttggaagaggtagatcccttaagagtactcagaaactcccaactttgttttaggttctgcttttttgggggatagtatcacagtaatagcttgacatagcgcccctagtaagagtttcatagacttcattttcagagagaatctaacgtcctctgctggtactgtgagctggagaagccgtttctttttgttgctctgatattccctgcatgctaccaacatgttccacagagctgtaggccctacagtaaatctgcttggttagggcagggtgacagaaccttcaaatatagacccacttggattcagatgagttccaacagtggggttggattcttatggtgtctaaattatatagatttactttagaatattcagctcttcgtataaagatggccaagaaagattactcccaattttgggtcatcattggctcaccagacatgtgaggagg

SEQ ID NO: 97830 - DNA, 1018 bp, Homo sapiens
cctcctcagtagctgggactacaggtgcataccaccacacccggctaatttttgtatttttagtagagacagggttttgctgtgttgcccagctggcctcgaactcctgagcccaagcgatacacctgccttggcctcccagagtgctgagattacagatgtgagccactgtgttcagctgataagtgtttaaatttctctaaaaactatttacttataaaggtaaaaaagatctctttaggcttcagtttcacatatctcctttaatctttttttaataatttctagtgatgggatgattaagagactattaaagctattacctctttagagtcatgttcaaaataattattagatctgaaaagggacttgtgggttttgttgttgttgtttatccttctgcttctccaatttgtgttgtaaattcatgtttaattttgtgttccctcattgcagtttatcaaagtacattctgtatattttctgtggtttttttccttcagttttaatattaaattattggattctttttttcaaatgacttctgtcttcatttcatgtataaaatataaatttcttatattttaatactggtaccaaattctctcactcattcacttattttgtaaatccttagcttaattactgattacttttgcccattaggaattgatatttttgttccacataaaggagagagttaatagaaactcctaagacaatgcacattttttcctcatttattcagttaatgaaaatgagctcaagtctaacagctattttatttgatgtagaatgatacaaatattatatatgttttaattaaaaataatagattataattcttttactgtatatcaaaggttaggacagacagaaggcatttttaaaatatggctcctctctagaaatactctgaccccagttcttacgagttcaaattaggacaccattaggagatatttgagtggctatccagtagagtactttgaagtaatctagtcgccttataaaactt

SEQ ID NO: 97831 - DNA, 1496 bp, Homo sapiens
tccatctgatctttgcccttttgctgttgattttccttttcctgctgacctcagtcttataccttaagtaagtgagaccaggtatgcatattaaggaatttctgtagtcaacaaatgaactttactttctttagtatatttcttttatctcaagaaacaagaataaatacttagaagatcagtagttgcaaaactactaattgcttttcataactcagttttttcacctaattatagttgattggttaggaaaacagcagaaagttaaagtcttaattttaagttgttcttggtggacatattatatatatctacaaacactttcaaaagccttttatgtttatattgccttagtgctgataggttttgagtgattgaatcacatactcatatttcaccagctgtcatttagcttccatttaaatattttctgcgtaagataaaattacagttcaaccatcctaatttatacctgtacatgtagggttcttggactaatttctgctgtgaggtgaacatccctgcttagcatttactcttcatgtcatctgatataatgatacctgtgggtggcataattgtaggtacgggaacaacttacaacataattttatttaggcattggaaaatttgttacccctttaaaaaacgtaatttattattattattcttattttgagacagagtcttactctgtcgcccaggctggagtgcagtggcgtgatctcagctcagtgcagcctccacctcccaggttcaaacagttcttgtgccttggcctcccaagtagctgggattgcaggtgtgtgtcaccacacctggcgaatttttgtgttttttttagtagagacagggttttgccgtgttggccaggctggtctcgaactcctgacctcaagaaatctgccctcctcagccccgcaaagtgctgggattataggcgtgagccactgtgcccagcctaaaagacatattttacaatgtttaaaaatagtttactagaaattccagctctggtttttctaggtgtatatttgttttatggattaattcagccatttaaaatgatttatgtgtttaacagtatgtcaccctaagttgcccttgccttctgttcacttccattttaaagcatttttttaaactaaaaagaaaaatagaaatacatctctatcttttaaattattgtaccaagaacatggagtaaattaatagctttagtcctatcattttctgtcatcacttctattccctttaccctagataatcagtattaagctttccaaattgatttaccctcctagtcagattcttttaagatcttccagtacttctgccttagaaatttctcatatatcaaaagtagtatttaaagggctgtgatcattttcctaccctgttactagagtttcagaacatcatgttctttgtaaattcctacggtgtgtgattgtgcgtgtattaaaagatcttttcatcttaatttaagaatggac

SEQ ID NO: 97832 - DNA, 1035 bp, Homo sapiens
ctgactgcctagagagaggttagcaagtttttcagaaaagatgacgtttgagtttgaagatggtaggagtttgaagatgatagataagaagacatggagtgtaacctttcggcaagagaaaaatgatggatacagattttcaagagaccattgctatctgcgtagcaatgaggggaaaaaacataattttaaaaacttgtagtctttaaactcattgaagacctgtgtcacagagaagtttaaatgaacaaagctcaagagaaacactacatcctcctagaaaagaagtgcctggtggccatttgcatccctgggagcattaactgagtcataggtagataaaggaacaagtcttctacaaataagggagcttttatggtacaaggagaaaccagctgaacttttatagccacttgtgggcagacatgacagattagaatatgggatcctcaaacagagctagtccaacccccacactgaatctcagcaggacttttgttgagtaaaaagtgattaagaaaattgggactgagctagagaaagaaggatcttaaaaccttgctagagaaagagacctgattccatcttcaagacatttgaaaccaaagacatttgaactggaactaaaaggttcaactcagataaactcctagttagattgaagagatatattcttcactctactcttggcaggaaacaaagcactttctctgggagaaaatattttcttctttagtatccttttatattcaatgtttagcaaaaataaaaattttgagagacttgaggagaggaaaatgggatccgtaatcaagagaaacaatagtgtaaataaactcatcaataacccagatgtttgaattaacagacaaaaaaaaaaaaacttatgttaaagaatttagaagaaaagatggtcaaaactggtaagaaggtagcaaatttcagcagagaaatggaaactaaaaaactaaatgaaaattctagaacaaaaagtactatgaagaattaattggttggacttattggagtcaggtc

SEQ ID NO: 97833 - DNA, 1075 bp, Homo sapiens
aaaacagtcaatacagagcttatgttaaacctctttccccagccctgcttccctttttatcttttctgtttgttgcttacattgattttcaaaaaaattatgttcaatttagaatcttttctgtttactttctactataaaagaaaaatagttggctgggcatggtgactcatgcctgtaattccagcactttggaagtccggggcaggcagatgacgtgaggtcaggacttcaagaccagcctggccaacatggtgaaaccctgtctctactaaaaatacaaaaattagccaggtgtggtggcacatgcctgtaatcccagctactcgggaggctaaggcaggataatcacttgaatccaggaggcagaggttgcagtgagccgagattgcaccactgcactccagcctgggtgacagagtgagattccatctcaaaaaaaaaaaaaaaaaaaactgttttcccccacctttcccattccaaatatgtacttaaaactttttcttgatctatcagtttagatagtacttttttactccctaatactggatgacgttcttaactcaaacttttcttcttactccttcctctttcagtcatatcagcaatagttttatattttcaagcttaattatatatataatttttttcttctttctttttttttgagacagagtctcactctgtcacccaggctggagtgcagtggtgggatctcagcccactacagcctccatctcctgggttcaagtgattctcatgcctcagcctccctagtagctagaattacaggggtatgccaccacacccagctaatttttgtatttttagtggagacatcatttcactatgttgcccaggctggtctcgatcctctgacctcaggtgatctgcctgcctcagcctcccaaagtgctgggattataggcgtgagccaccacgcccagcctcataatttcttatgtagccattttttaagtcttctatcttttgtctgaagattgattctaaaagttgaaaacttgtatggactataaaacaatcttcgttaaaagcccagtattgtagtgggatt

SEQ ID NO: 97834 - DNA, 1343 bp, Homo sapiens
aagcttgtactcaggtaatgcttgggattttcttggccgggggaaaattcaggccaaccttagtggccagctacagtgttagccatgatgtgacatgggtcctatttttcagagctccctgaagagttgttttctagttttgacacactccagtgctacttcaaactggttacggtcgctgacttgggatggcaagggtactgtctgaattctgctggattcctcgtagcttcgtggtactttgttgcctacagtggtaacccaggcagcttatggcaggagatctagacttgatacctttaccatcatgccctggatattctagctatcataatttagtctgaagactagcagtgttggcatcacctggaagcttattgaaaataaagaatcctgggcttcatcccagatcgactgaatcagaatctgcattttaacaaggtccccaggtgcacattcaagtgtgaaaagcactgatctagactttggtcagctatgatttcatgagtgaacgagactattgcatgaatcagtcctgtacttggaaatcttttcctcccatctgttttgagatgtgttgccagatctgtgcttacccattgaatttttattttcaatgggcaagcacagatagaattgcataaagagtcctagtaatccatcatagatatgagaatttttgctgcacctctatgtggtttttttttcatggtggattgagggaatttggtaagcatgtgttaatgttccagttccatgggctgtcagaatgataaacttttgagtgtctctctggtgagagtgatcatctaaccaaatccctcttctgttattgcactgtgtgtctaaggtgttgtatttatgttgccaccagctacccattatcactccattctttctgggcttatatggttgaaggagaatggtcctgtatcacagtttctttgagccctttctccatccctggccaaaagcaatcttaagttatttgccactgctggttagtggttgtcctcactcacctcacttctgtccccattatatgcctttaagttgtgcaacttggccaccaaggcctcttgactagtctgggatgacagtgctattggccattaaggaaccttggatgtggagaatctttatatatctcttcccataatgtgagggtaacttttttttttttcctcctgcagggaccccacatgggaagaactaattattggtggtgatctcaacagggccactgctctggtggcttttgtgaggcatttcccatcgtgactttgtgggcttgatggagctcctgaagttatcctttttgacatctgtcttctctttgaaat

SEQ ID NO: 97835 - DNA, 1031 bp, Homo sapiens
actgttatatatttgcagttggaatggcagagaaggggatttcacatgaacttgtttcactgtcctgaacaaaagtgcttaaattactactgtaaaaatgtaacttcttggtgttgtggaggtttactgaaagaggagaaggattagtgttaggagaccagccagggttacatcaatataatcagggttaagaagaggagatgggtttaacagactaggtagctggcagagcccttatcatagtaaaggagtataggatgagctagcaggatagaagtaggatgaaatattttaccaagttttgaatgtggtgagattgagaatatttttgtgacagccagttgaagatggtaagcactggggagtgaaataaatagcagctatacagctatatcttagcatcactggtgtatgggtagttgttgaaactataggtgtgaatgaaattaggaagagtaactagagagcaggaaaaagggggctgataatggaacttggggaccatcatcatttatacgggataaggaaaaggagagaaaccagcaaaccagaatgaagaggaggcattagagaggaagcagaaagaccaaaggagaaggatgaaacaaattcattcagtgagacacttcccagatgagagaattgtgagggtgtcgggctgcagggagtcaaataagagaagggctgcgtagtgtccctttagtgtcccttggagttggttattgaagtagaagcctgcttatacgggattagagatgaagggaagagaggggcggaccatagttgagaagcaattagggaggagaggtatttgtattttgccttcaatttttgttatgctttttaggaaattgaggaatacatttgggtacagaattttgtaaagtcttatctaattttcaattttgttgcactgatttggtgtctcaagttatttttccatgaactggcctgattttcactttttacagcattttatgagtctactgttttattttactttgccatgtaacttaaacatagtttgttct

SEQ ID NO: 97836 - DNA, 1037 bp, Homo sapiens
attgtactttttaattacatattattttttcttttatttattacatgtatttctagttaatccgacatcattacaatctgaaatgcctaaaggaatctactcgtttgtatcctgttttctttctgaaaatcgatgttcctacagctgatgttgatgtaaatttaacaccagataaaagccaagtattattacaaaataaggtaactcttttcagataattttttcttatgctatttataaacatatattactgttttcatataaaaagatttgtttatatttatcttttttattatttaaaatcttgtctattattttcataatttcccctaacatttgttaatttgtatttttaggaatctgttttaattgctcttgaaaatctgatgacgacttgttatggaccattacctagtacaaattcttatgaaaataataaaacagatgtttccgcagctgacatcgttcttagtaaaacagcagaaacagatgtgctttttaataaagtggaatcatctggaaagaattattcaaatgttgatacttcagtcattccattccaaaatgatatgcataatgatgaatctggaaaaaacactgatgattgtttaaatcaccagataagtattggtgactttggttatggtcattgtagtagtgaaatttctaacattgataaaaacactaagaatgcatttcaggacatttcaatgagtaatgtatcatgggagaactctcagacggaatatagtaaaacttgttttataagttccgttaagcacacccagtcagaaaatggcaataaagaccatatagatgagagtggggaaaatgaggaagaagcaggtcttgaaaactcttcggaaatttctgcagatgagtggagcaggggaaatatacttaaaaattcagtgggagagaatattgaacctgtgaaaattttagtgcctgaaaaaagtttaccatgtaaagtaagtaataataattatccaatccctgaacaaatgaatcttaatgaagattcatgtaacaaaaaa

SEQ ID NO: 97837 - DNA, 1156 bp, Homo sapiens
cctctgctcttacccagctccaaaaccacttctacatcttcagttatctttatagcagtgccccactcctcagtactaattttctgtgttagtttgtttgtgttgctataaaagaatacttgagactaggtaatgtataaagaaatgaggtttatttggctcatggttctgcaagctgtacatgaagcatagtgctagcatctgcttctggtaagggtctcaggaagcttacaatcatggcagaaggcaacaaggagccagcatgtcacatggtgaaagagggagcaagagagagatgccaggctcttttaaacaaccagctgttgtgtgaactaccacagagacctcactcattaccatggggatggcaccaagccattcatgatggatctgccccatgacccaatgcacctcccactaggcccacctttaacagtagaggtcacatttcaacattagatttggaggggacacacatctaaaccatagcatctcacttcattgaactctgtatctcatcccttaatgcttgataatataatattatatattattctccagttgttctctgggaaaaatgtttaggataccatctctgtagtctaccagcattgcatctgccaaccaggtcaaggatgtagtctgtaattgggaacaggtaagggattggattattgaagtctcaggatctgaaactcttcaagttatatcacatctctttttttaaattaatccattgatagctactacttatccaagattggactgtctcttttcctttaattccaggtagcattatgtagacttcatgaaagaacactgttacaccgatacagccaaagaagacacatctttgctatgttccaaaaatatgcattctaaagccaaatctgatgctttgaaatatgtgctgttatggattatgtacccagttatacatccaatcctttagctagtttctagttttattttattttattttattttttgagatggagtcttgctctgttgcccaggctggagtgcagtggcacgatctcagctcactgcaacctgtgcctcctgggatcaagtgatcctcccatctcagcttccctagtagctgggactacaggcacgtaccaccacactcgtctaattttttttgtatttttgg

SEQ ID NO: 97838 - DNA, 1055 bp, Homo sapiens
gtaagttaaaatcacagaaataattcaggcgtttagatattgaaatggtagggtagaatttgaagagcagcagttgttaaaacacttaaaccagttttattttcataaatatcatgggactccattttctctccaaagcaagaaatgatctaaacaaatttaaggaacagaacagcaataactgggattaagttaaattatataaagcacatgtggtgtcagtgagcacttatgacttaatgtgagaccctatgggaaattactatttgttctccaactaaggaacaaaactttgtcctgactgtattaaatttgaatgagggttcactaaatgttttaacagcaatttttgtttttaatggacatgttctggaatatgaacttaactatgtgtttttattttttttctttcaggagtttcaattactgaaaattacttggaaatagaaggaatggctaattgtctcccattctatggagtagcagatttaaaagaaattcttaatgctatattaaacagaaatgcaaaggaagtttatgaatgtagacctcgcaaagtgataagttatttagaggtacgcattattttatatatatgttattgtatacaggggtcccaactcccgggccaagccggttaggaaccaggccacacagcaggaggtgagcggcctcctagcgggcatcaccacctgagctctgccttctgtcagatcagtggcagcattagattctcatggaagcacaaaccctattgtgaactgtgtatgcgagggatcgaggttgtgcacttcttgtggaacaatttcctgaaaccatccccacccgccaactggaaaaactcttccacaaaaccggtccctggtgccaaaaagcttggggactgctgctgattctatatatagaggtattatagattggccagactttaagatacttatttcttaaaatagtaaattatttccaaatagtagaatattatctgtaagttttattatgtatttgcaagaagaacactattaaaaaaaaaaagaacactctattaagtttcacat

SEQ ID NO: 97839 - DNA, 1083 bp, Homo sapiens
gtctaaaaagtattgtaatataattctaagtcctgatctcatcaagaggagtagaagggaaggaaagtgaaagatgggaatctttgaataagcggaaattttcatttttgtgacagtattcaccacaaaagagaaatgtaagagtgggttaaaagaaaaggattaaggaaggttataaactttaaaatataagatagtagcaggaaaacaatagtgtttccatctatatatcttgttctagatatccctcaagattggtattatttaaaaaacaaacctgaactctaatgaagtttttctccctttttaaaaatgagccatttttgtttacagttggtagtgtgcctgctgtattctgaaggtcggacttccttaacaggaaagtctgcttgttaaaccttctgaagaatgtattcagtaatgttctgtgaatcctttaggaactttgtcatgtggaaattcccagcctattgtgcgggtagcttaacattgatagtttctagagacttcaagggaatattttcttgtgaaagagttagtatgaacttaaaggttgagggagctgtgggttggaagaaccatgtggggagaaataagagttcagaaataacaggaataaagtaaattgggactggttttaaatatttttttgctaatactttacctttcagtatgttaaggtaatagtggtataagtgttaagaaaaatgggctaggaaaaaaaaagagagaacttaaaccacggggatgcttccatttaaggtcaataagatgaatcagagagaaaggaaagtgaaaggagaaccaagagaggggtggatgtaaaagtcaaggaaggaagtaaatttaagaataagtagtatcatgttctgtatagggtaataattgctagaagactatcagatatggctactagatgacattggtaaccttgaagagaatcgtaatggcaaagtacaattgtccttgtatatactcagtggattggttccagcaccacctgtggatactaaaatccaggcatgcttaagtcctgcagtcagccctccagaacccacatatatgaaaagttggccctccgta

SEQ ID NO: 97840 - DNA, 1030 bp, Homo sapiens
catacattatagtaccattaggaaaggccacattatacggatgggcactggtggaagggtctggcttcaataaaaacaattatctcagaaaatgtgtttaccaaatatatatccttgtacattaggtaatagaccaagaatctctttagatgctgcttttaaaaataaaaattagtgtgatattcatgtcttagaagagcagaatgaatacttctactatcagatacttatatacagaatctttgaaagataaatgaactttgcagcttaagggtagattaaaataattttctttatattataacacatttatgaagtaatattcagtttaatctccctgatcaaatgcccctttctcttagaatggatatctgaagttgtttttctatcttacctatttcttccacaggtagaatttgcatccacatcttttgggcatcctcaaataaaatcttgtttattattgagttagaaacaagaactaaagctcactgaactcactgagtttcaataatgcttgaaactacctaatcaattttagacttttttcttctcggatcacctcatctggtctctgtcttctcatgaccatatcagacaattaaattttatttacataagtttctttctacttttagttttcctcttaaatattattatatagtattgttatttgttactacattattatatagtattaaatgttaatatatagaaaaattaatacatatcattatgttatataaacaatatttcttatgcttgaaatagtctcattttcttaatgtgaaagtttttgatgtcttttcttaaaatgcctctcataatatcttatttcaaatatcaggaaagatttgtttttgtgatttatatatttaaaatgtaaaggccatacttaaaaaccttaaccaaaaagtaccaattacaatttagaaaatttagaatcaaatataaaatattgagtattaaacattaatattaaatatttaaaacttctcagtactgaattctagacaattgaaagaacaac

SEQ ID NO: 97841 - DNA, 1698 bp, Homo sapiens
tcatgggaaataggattaatgttttatttgggaccaaatattgaggggacttgaatatcaggctaaaggttttcaacattggaaagagcaactaaatgtttttgaataggaaggtaacacaatcagaactatatataaggaatattagtttaaaagcatgcttaagatgaatcagaatgaataagaagagaggtgggagatcagtttagaaaatcatagtgctattacccagtcacggtggtacatgcctatagtcccagctactccaggggctgaggcataagaatcaggaactcaggagacggaggttgcagtgagccaagatcgtgccactgcacaccagcctgggcaacaaagtgagaccctgtctcaaaaaaaaaaaaaaaaacatactgctaaaatttcatttatgtatgttttagtcatctcacattcattgtgttctttcagtatattaatagaagtttctttagaagaacttgaagaagaatttgactttcttgagatatacaaatatattatttctaaacttaaattcaatcatagtaaaattttaaagcatatatattttttcagttttctagttctgatacttgccagtaaaatgtgttagtgactttggaggatgacaaagatggaacttaacaagaatgttgagtttatgctatacatggacaaaaagatgctttaaatttaattttatcttgattttcataacaacaaatattcttatatttgcctaggggaaaatgtacattttgttatctttctttgtgtcatggctttctaggttccttgtacttattcctgtctctgtactttttcccgcgttccatatgggcctaaatgtttccagattatctcttatttgttctttcccaactaccaaatatacctccctttttctgaatttggttgatcttggctaaacgttaaaggaaaaggaatcagatagaagtggtttatatcaatgcaaatgatataaagatgcattctatcataaagggagaaaacataatatgaatgactggaatatttggatcttaagattcagtctctaattaattgaattttaggcaatatagggatatatttttgctgtttggagaatattatctactttcatatgcatgtaagatgggtcctcatattacatttttctttccccaaaggataaagaaagagaaactataagtgaagatggtagttcaaaagaagcacatgatatgtcagtgaaatatatttaatatatattttttaattttaacttttattcaaatataaggcatatatgtcctgaatttcaaaatcagtaatgcaatatgatgtaagactgtggactttgaggcaggatagcttcagaactgaattccagctctattcattactagctgtgttactgtagactgttaacttttcaatgaatgtacttcctctatgttgaatggggataatgtttactttgaagagtttgtaaagactgagagaaaatgtaaagcaactagtgcaaagcttgggatatagcagatactcaacaaatattacttcgtatttcttatttctttttatctatttcttaagggaattttacaattaaaaagcaaatcatttttaaaacacagagtctgtctctgtgcacctaagtataacaaaccttgttatatataatttttggtaagctattcatcatgacagtgt

SEQ ID NO: 97842 - DNA, 1044 bp, Homo sapiens
taggaggaggaggaggtacacgtgctgggtaactgtacatcctatcataatagtcccgttgaaagtcacaatccaagtcaaaagaggagccgtacatctccgctgcagatcgtttcacacctgcttttcctcggttcacttttggctctgcagccaggttaatatctaaaacctggccagcaatcattctgccatcctctcctgctacagcagcccgggcatttctctcattaacatactgaaagaaggcaaagcccttatgaacagagcagcccacaattttgccatacttcgaaaagattgcctccacatcagatttcttgaccacaagagtgttgagattcccaatgaatacacgggagttcatggaacgaggatctgtcttgttggtaacgttgctggccattgtgtttgatggtaaggtttctcacaaagccgaaaacaagaaggggagggagaagagattcgattctgagtctcctactcccgggttctgcgtagagaagccgactgctgctggaggtcggcaacgcggccgcaaccgctcagtcttcgtctcttcacaaaatggcctatttatttatttttttagagatggagtctcactctgtcgcccaggctggagtgcagtggtgcgatcttggctcactgcaacctccgcctcccatgttctagcaattctcctgcctcagcctcctgagtagctgggactataggcgtacactgccatacccggctaattttttgtatttttagtagagacaaggtttcaacgtgttgtccaggctggtcttgaactcctgagctcaggcaatccatccgcctcagcctcccaaagtgctaagactacaggcatgagccaccgcacccagtagaagcttatcttaacaaacatacttgccccataaagtacatcatggccttcttgcactgaggaacactatatagacagtactttaaaaatatggttagggccaggttaaactttaaaattaccaataaaaagtgcagatatgagaaaaacatagcaataagtaataggta

SEQ ID NO: 97843 - DNA, 1061 bp, Homo sapiens
cgggtatggcagtgtacgcctatagtcccagctactcaggaggctgaggcaggagaattgctagaacatgggaggcggaggttgcagtgagccaagatcgcaccactgcactccagcctgggcgacagagtgagactccatctctaaaaaaataaataaataggccattttgtgaagagacgaagactgagcggttgcggccgcgttgccgacctccagcagcagtcggcttctctacgcagaacccgggagtaggagactcagaatcgaatctcttctccctccccttcttgttttcggctttgtgagaaaccttaccatcaaacacaatggccagcaacgttaccaacaagacagatcctcgttccatgaactcccgtgtattcattgggaatctcaacactcttgtggtcaagaaatctgatgtggaggcaatcttttcgaagtatggcaaaattgtgggctgctctgttcataagggctttgccttctttcagtatgttaatgagagaaatgcccgggctgctgtagcaggagaggatggcagaatgattgctggccaggttttagatattaacctggctgcagagccaaaagtgaaccgaggaaaagcaggtgtgaaacgatctgcagcggagatgtacggctcctcttttgacttggattgtgactttcaacgggactattatgataggatgtacagttacccagcacgtgtacctcctcctcctcctattgctcgggctgtagtgccctcgaaacgtcagcgtgtatcaggaaacacttcacaaaggggcataagtggcttcaattctaagagtggacagcggggatcttccaagtctggaaagttgaaaggagatgaccttcaggccattaagagggagctgacccagataaaacaaaaagtggattctttcctggaaaacctggaaaaaattgaaaaggaacagagcaaacaagcagtagagatgaacaatgttaagtcagaagaggagcagagcagcagctccgtgaagaaagatgagactaatgtgaagatggagtctgaggggggtgca

SEQ ID NO: 97844 - DNA, 1068 bp, Homo sapiens
gatctgatacacacaacaacagaatgaatctcaaaaacattatgctgagtgaaagagaccttacacagaaactacatactatgtgattccatttatatgaagctctagaaaatacaaactgggccacgcacaatgcctaatgcctgtaatcccagcactttgggaggctgaggaggaagaatcacttgaggcccagagttcaagaccagcctgggcaacatagcgagacccctgtccctgtcagtgcacagaaaataaaaaaatgtatgtgggcataatggtgcatgcctgtagtcccagttacttgggaggctgaggcaggggtatggtgtgagcccaggagattgaggttacagtgagctatgatcatgcgactgtactccagcctaagtggcagagcaagaccccctgtctcttcaaaagaaaaggaagaaagaaaatacaaactaaaaaacaataacagaaagctgatgatggttatatggagacaggagtgaagggatggactgactacaaaggaacctgaaggaactgtttggatgatggaaatgttctgtatgctggttgtggtagtggttatgcaggtgtatatgtccttcagaacttattgaacttgggaaagccagctgacatgttgtgaggacactcaagcagccctgtggagagattttatgttccaaaatggtgtagaagcaagttggcttcactccccttcacagaaaaccacaaacaagagagcaccgagatcatcaccagcaatatcccagcactcaaatattaagataaaacagtttgtagaatcacagggaaatcaagaacaaaatctttgagcaaaactctataggaaaaaaatctaataatccaattgaaaaattggcagaagatttgaatagaatctgaaaagaagacatacaaatggcaaaccgatatatgaaaaggtgctcaacatccttgaccatcagagaaatgcaaatcaaaacaacgagatatcatctcatgccagttaaaatggcttatatacaaaaggtgggcaataacaaatgctggcaaggatatgaagaaaaggga

SEQ ID NO: 97845 - DNA, 1946 bp, Homo sapiens
ggctgttttcaaacacctaacatggctatcataaatagatggcaaataacattatttaggcattctgctttcaagcagaatggtctggaagaataatttcagtttttaattttgttttgccattaaacaaaaattataatcattacttatttaggtccacacaatgttgtaacaaaaggatgctttaaaattgtagaccaacctccaatccattttattatctcctctgtagcactcctgacaggccagccacattttgattgaacacttcagtgacaggaagctcattacattttgacgggttcctccttttctgttgttagcaaggccttgtttacgctgaactgacaatcacttaggaagcagtacctgtttctcattagtcctacctggccaatagcgctccaactgtgaacttagaaacaagatttttctgcaaaaaggatctgaaactttagtcagtctgaaaagggtccatgacccaaaaatagttaagaaatgaaaggtctaaagtgatacaaaataatatttttgtctcctttgcttgacagcctttcagatccctgagcctcagtttctcatctgtaaaatgggaataatatactttgtctaaccctagggttactgtgaggattaaattaataatattaataaagtacttagtagaggtgcctaggagtcagtaaatgttagttatcttcaataaatactagtttttatgtttccttccttacctaagacccctctctgtgctaaagatccttagcccaaaattgaattcaataagtcagtttaacccaaacagtgcagggtgcaatgagctgccatcttcaaataaaataatctattgcttaattggcatttgtagtaaatactcagaagttgactaaaaacctcacctccataccccgtgtgctttgctgtcaagcaaaggagacaaaaataaaggtaggctttattaatttttaaattatgcagttaagcatttcttgaatctgaatttcttttttctcttggcttgtattacttaaagcctctgtatggtttgcagtttgttagatagacgttttaatcttatgtcattcatcatgttaattctacttttcagttttgtgtcacctacacatttgctgagtttattcaccagacattcaagtcactgataatagataggacaagtccttttactgtgaccgtggtacctctagaaacctgtggcacagtaggaatggtcctggatttttggaggctggttttggagtctggccctgatacctattagctttgtgaccttgagaaacttcagtatcaataaaatgaggtaacatctgcctttcagggtggttgttaaaattcaaagtattgaaagtgccaagtacgataatggctggaaatctagttggccttcagtagattttgcttgaactaatgaattcgctggactcagccctttcttatcaaactattctagtccatagagcagtcttctccataaggacattatgagaaaaatgtcttgctgaaaagtaaagatcttgcatattccctgatctaccacaaaagtaaataacattagtttaaaaatgaatgattcttagcaaattgttagttcctagaaatccgcagtcttttcctccacccctcatttttccttgtttaatgtttaagtttcgaattttgccagagatagatgtcaaactattagtctgtaaagtctaggaattctaattctttcttttaattttgaatattaaaaataaaaacactgggggaaaaaagttctgtttgaatctctagtctcttgagactgcccttcttctccatgtttttatagaggttgtcagaatagttctgtgctgacatctgcaggttcttttggtaccctggaatataattcaccagaatgtgaaggcatggactattttaaaatgacctcttctgcttgc

SEQ ID NO: 97846 - DNA, 1053 bp, Homo sapiens
tattaatttatgcctcctacttgttctaaaatgaagtggttttactacataaagactaatagaaattgaatttgtaggggaggaaaaaagctgtcctctaccctcttaggtttgtgaccaaggcctgtgaatcaaactgataaaagagtaatggcataaatagaacagatttaaacacacgtatgcacaggagtttgcaaaagaaatgtgactggaggaggtggttagaatttggggcttatctaccaacttaacaaaatgataaagcgggaagaggttctagatcagattttctttactagttggtcagagctccttttcatttttctgtgaggatttatattatggtgctggaggaattgctgcagattgaaggtcaacattcatggccataaataggagtggccagatgaagccacctggtagccagagtgaagcccagaagggcttagggaaatacctgcttgtgtatgtgtgtggtttttttcctctacctggaggacctggtaaatgagatgaagtattgatacctggacttaagacatctatcgcctgttcaacagttagtctatcatctaattgttcaaaatcctaaattactgttgtcattcttagattataattctctttcctcaattataatctggagatataatacaacacttaataattagatgttagtagctttaggagacaatctggagagataagaaatggaaataacacagaacatgttccacgttccaagggaagttctagatgctttacatatagattcacaatttttatttttttgagacagagtcttcactctgtcgcccaggctggagtgcagtggtgcgatcttggctctctgcaacttctgcctcccaggttcaaacgattctgctgcctcagcctccctagtagctgggattacaggcatatgccaccacacctggctgatttttttagttttagtagagatggggtttcaccatgttggccaggctggtcatgaactcctgacctcaggtgatccacccactttggcctcccaaagcactgggatta

SEQ ID NO: 97847 - DNA, 1020 bp, Homo sapiens
gccattacttaggaagaagtgctgtgacattcagctgattattgggtgtcacaggacctctgttcagcccttcagatgactaaaatctaagactaaacagaaattgctgttaacatagaagtacttaaaatgcatttcatcctagttgttcttataatagtgacattatcgtagacacatttttaaatccagatagttatttgtactttttcacaccagtttttgcttttgtcacatttattcaaactagcacctccacagtcaaagtgttgtcatcctacagcctcaaggcccctcactctcaatgtatggaatgtcatggtacttgatgttattgcatgcccattgctgcaaggcatcacacaagatatcctgagacaggcggtgtgcatattccaagatcacagtattggtccctggaggttccttcacttcctctttgacattaactggagaagccatcctaggtagacatctctcttctggcataaagggttcttcactctcatgctgcttctcaccttcatatatggtaggaaatgggaaagtttgctttgatttcatgcagcccatgttatgaagagctgtttgtggaggaagcagtggcaaagactacttccaggccatctttagaaaacaatgaaatttgtccatgtgatgttgaccagtgctttccctctccagggcacttcagtaatcaatgttccctttcaccactcttcacgtgtagtgtttacctgtcaagagaaggtaggtttcattttgaagttacagaatgcaaaatagtgtatgattgagtggcatgtaaaaatcctttcatcactttggtcacatggaagaaatctgaggtaaaaacaaacagctttatcttatcagtagaagaaaaagataatcactcaataaaaatggcaacttgcaaaataggaaaactttttttcaagatcttgcatattttataaaactgaaaacaattcaatttttgctagcttagatttatctataccaaaacaattcaatttt

SEQ ID NO: 97848 - DNA, 1060 bp, Homo sapiens
gtgattatctttttcttctactgataagataaagctgtttgtttttacctcagatttcttccatgtgaccaaagtgatgaaaggatttttacatgccactcaatcatacactattttgcattctgtaacttcaaaatgaaacctaccttctcttgacaggtaaacactacacgtgaagagtggtgaaagggaacattgattactgaagtgccctggagagggaaagcactggtcaacatcacatggacaaatttcattgttttctaaagatggcctggaagtagtctttgccactgcttcctccacaaacagctcttcataacatgggctgcatgaaatcaaagcaaactttcccatttcctaccatatatgaaggtgagaagcagcatgagagtgaagaaccctttatgccagaagagagatgtctacctaggatggcttctccagttaatgtcaaagaggaagtgaaggaacctccagggaccaatactgtgatcttggaatatgcacaccgcctgtctcaggatatcttgtgtgatgccttgcagcaatgggcatgcaataacatcaagtaccatgacattccatacattgagagtgaggggccttgaggctgtaggatgacaacactttgactgtggaggtgctagtttgaataaatgtgacaaaagcaaaaactggtgtgaaaaagtacaaataactatctggatttaaaaatgtgtctacgataatgtcactattataagaacaactaggatgaaatgcattttaagtacttctatgttaacagcaatttctgtttagtcttagattttagtcatctgaagggctgaacagaggtcctgtgacacccaataatcagctgaatgtcacagcacttcttcctaagtaatggcatcaccaaagaaaatgctaaggaataaaaactgccccaaattccaatggttgaagtttatcctttaaaataacaatttttgtttgtttatacccaaaaaaagtccagatatgaaaagggcttttctaaaatttcttggcgagggaatggcactcaaatcatagt

SEQ ID NO: 97849 - DNA, 1049 bp, Homo sapiens
tttcttggatcattcaggtccaatttaggacctttaagagtataaatgtaaatgtatccgatatcatggcatctttattccagatctgttactgaattatttgaaagaaaaatgcttcacataaaacagattaagaactgagaaaacataaagcaataccttctgggctgccatttcctcatctatgagaagggtgcaggacatgatctttaatgtctttttcagttccgttggctttttattcttacaaacctgaagttcacttagtttctaaagagtatgggatgaaggagaaactataacaagttacaaaaaatttattttgtttataaacaaaaattacaaacaaaaaattataaattttgtttgttaatttataaacttacctttaaaattaaacaaaaattacaaacaaaaaacaaaatcataaattttgtttactttgttaatttataaacttacctttagtttaaaaattattcttgcctagaactttaaggttctgagtctggaataccttttagttctttcataccttaaaaagtacttacttcattaacaatatcaattattgaatatatcttttgaacaaaagtcttcttgctttcaattaatttttttctcctgacttgaaccttgtttgtaaggataattatcacacaaaagtcttacgtaaattataaaaaaacagagtgtctctatctaagagattggagtttcctaatttctcattctaccagattaacaaatatcacaaataacaagaaaataatcctttcagtttcaccatgggatggtattctgattattttagggaagaccaagtctgagttaatactgaagagggacgttaataaaaatcttttctctctgcccaaggtttctaatgtttataaaaggagctcttctgctacagtaactcagttactttaaaacacactcatatatggagaaaattctatgaggcattaacacagtatccaaaacaaaaattctatgaggcattaacacagtatccaaaacaattttcagggtctttattttttata

SEQ ID NO: 97850 - DNA, 1120 bp, Homo sapiens
tttaattatgcatgaagtccccttttctctaccttaagcaattaatttcctcccaaaattcaatgtggaggaggttagaaggcacatctggtccctctgccctcccctgcctttactttaaaccactggttttacctgttttgtaatgtggaggtttcactggcaattttatttcaagaagaaaaaaagaattctaatgtttaaaccactggattaattcagtaggctttattaaagctaagacatgaggcttaggaagttagaaaatatccaccccagtcatcaaaagtatattgctgtccatccctggagatttaatttaaaagaaaaatagaatacatataaaaattttgcaggaaaaaagtatgatagaaaaatgtgcctagtataagaatttctgtcaattcagtaagtaaaatctagcaatattagacaaaaataatggtattaacatttgtatcttctcttgacagttttaattgataaagaccagagtccaaaatggaaaccagctgatctaaaagaagttactgaggaagatttgaataatcactttaagtctttgggaagcagtgatttgaaattttgaggtgacaggcttttaaggtatattttgtagcatgggttggcaatctacagcatgtgggccaaatccagcctgctgcctgtttttatataccctgtaagctaagaatggtttccgcatttttaaatggttgggaaaagaaatcaaagactaataattcatgacgtgaaaattatcagaattcacaaataaagctttattggaactagctatactcatctgtttatatattatctgtggctgctttgaaatgagtagttgcaatagagatggtaaagcctacaaagcctaattatttactgtctggtttttgtcagaaaaaagtttgtcaatccttgttttagaagatggaaaaatgtgaagatctttggagattctcttgagtggtatatctaattgaaatgggatcttcgtttggcttgtatgttgatgaaatcaacttaggtatacaatataaaaaataaagaccctgaaaattgttttggatactgtgttaatgcctcatagaatttttgttttggatactgtgttaat

SEQ ID NO: 97851 - DNA, 1038 bp, Homo sapiens
ggttttggcaagccattttagaggagtgggggcagaagttagagtgtagtaagttggagaggaaaaatgggatgtgaagaagtggagagaatatgtgtagatgaatactcttgaaagtgaaataggatagaagctgggactgtggaatcaaatgaagttccttttttattttgtaagatggaaggtactagaacatgtttaaaaatgattgggaatgatccaatagagaaacaagattatgttgatgatactaatggtagttaatatttactgaacacttagtgtcggacactgtgcttggatgtggattaaaataatcctaggatggatatataaattaccttttcatgtaaagaaactagggttggagaaattactagtccgaggtcacatagttaatatgtagctatcaggatgtgaacctagacatttgaactcagctatattgcctacatcgatgattctaggaaaataaaagtgaatgaccacatcaagcaaagtccatccttgagaaggcaagaggggatgtgaattggaatgcaagggaggactggtctttgaaaaagggatggtcctttcctccacggcattgaaagagaaggcaggtgcagatggccacagttgcctgcaggtgttttagtggtgagaagacaagacttcatatctaagagcttctcgtatttttaaagaagtcagaggttaagtaactggctgagactataataagagtgtgctctacgggtagaggttgagaaggcagaaaacacttaaaatcattatcttggggagttgggaagagatcttggattgtttggcagttttctgtgcctgtttgagatttttgatcatgaattttaaatgaaaccagtcacagttgtatgattttctgcagcaagacttagctgctgaagtgcaggcaggggtacgtgatagggtttagttggtgccaggattttgctaggattgtaaaaaaggaaaaaaggtttgagggagatgatgacattttgacaggaaagtgaccatattaaaggactggtg

SEQ ID NO: 97852 - DNA, 1029 bp, Homo sapiens
catgggcaatttcgagtggctacagaaaagtgtctttttgctatgccagaaactgcaataggtaaacaaccagaattttttttataattacttttagcatcatcttcttttgatatgtttcagagtttactgttgttgaaggaattgatggactcttgtgtgagatgcaacaatgaaaggattttaaaaaagaaattaaataggaagatactttgaagtctatattagctcaatgattatatctgaaaacacaaaactgagaacattaaaggagacattaacacactataaataaaacattaacactatagataaaatatcattaagggaatatatttttgcctttagatctgtgcagttttgagttgtgatcaaaactatcatatgacacttctgagttaatttttgtatatggtgaggggtgtggatcacctatataagtcaaagtttattttgtatatggaaatacaatcattccagtaccaactgttgaaagggtattgttttgctactgaattgcctgtgtagctttgttatagttgtctatagatgtcaatcatggtgccaacaccatgttgtcttggttagtgttgctttatagttaagtcttaaaatcaggtagtgacaatgttccacctttgttctttgtatcttaccaagttgctttggctatataggttctttatctttccatatgtattttagagttacttgtcgatttcaacaaaaaagcctgcagatgaatttagagagaattgacatcttaacactatcgagtcttttcagacctgtgggcaagatataattcttcatttatgtaagtggtctttaatttctctcagcatggatttttagttttcagtttataggtcttatcttttgtcatatttatccataagtatttcatattaatgatatttttgaattgttagttaccagtctaaagaaatacagttgatttttgtatttacctttatcatgcagacttgctaaactcacttattagttttagttgctttagatttgaat

SEQ ID NO: 97853 - DNA, 1022 bp, Homo sapiens
gggaaaggaacatcacacactggggcctgttggggggtggggggcaaggggagggagaactttagaacaaatacctaatgcacgcagggtttaaaacctagataacaggttgatgggtgcagcaaactgccatggcacatgtatacctatgtaacaaacctgcacattcagcacatgtatcccagaacttagaatagtgatgccatgagtcctgatggttgggtatagcagagtcctgggaaatcacagtatagttaaaactgtgttccttacaggtgttttattagttaatactgcaaaatacataagcagtgagacctggtgattaagttatattgtgcaaggctttaagtcagtatacaggaaacttcttcacaattattaagtatgtcatattataatctggctgcaaactacttattctgcctaccctctcaccactcgtttcctcagccagcctttgttccactaatgttttaacatcttaacatttccaaatagtcattgcttatggcttagcatgtgctgtttcctttgcctggaattctcacctcccctttttcttgggatacatcaagccccaactcaagtatcatctttgttttcaagttgaccatagctacaatagtcagaattatttgccctctcttattcatctttgctttctcagtatgtaacatagaacttgatatacagtagtaaattaaaatatttaagggtatttcaaagtccaagaaattctagactgggctctatataataagtcagcttattcagttagctcagaaataaaaatttaggaggtgtgtatgatttgctttggaattgttcgtctacataatctaaataacttcagaaacttataaggtgtacctagttattctttcctttagttaccattaatatgcaagatttgcatttgatatgtatgttttgatgttggcttgtgataaaaacttaagaaattttgtcataaagttattctttgtttatacagagaatgtccaagcacacagatgcag

SEQ ID NO: 97854 - DNA, 1573 bp, Homo sapiens
ttggccctgcccgagcggcccgatggggttggggggcgggaagaaagggtggcaaacaacgattttaaaaatccagtcattagtatttgtaggacgaagaagctgatctgacagttgtccagagcagtggcccagctgcaacaggtagatggcgcagctgtcagtgaccccttggtctcagccttggctttgagagatgcatctgagtgtccctagctgccagctacctccagtgacctacttgatgagtgtgaaataaatatgatgggactatatttagaaaaatctttacttccttgctgttaattctctctgcattttgaaaggtggttttgtgaggtgtgcataattagttggtgtgtccagagtggtagctggaaaaaaatatttaacctgggtttggccctatcatgtagacggttaggcgcaaagagtgtgaaaggaaacgcttactttagtacatctgtgaaaaacacttataagaaaccacggcttgttttttggagatttctcattttaaaggtatttttaaagtgttgaataagcagaagtttgcccactgtatgatggtgttcacttcaaaagaacagtgggttaaaagtatggacagaccacttaagtggatcccatctgttgagtaaaagattttttagcccttttacactgattcctagctttgaagccagaaaagttgataaggatcagccctgctcaacttgataatagtataaggatgaaagtaatccactgaactactcttgattggtgaattagctaagtgatctcattcttaccttttaaaatagagaacataagggaaaaaataaaggcaatggaagaattcattttttcaatacagatatttgtttccattcttatgtagagcctactttatttttaagtttttatggatttttatactacttttgaagtcagcttagtcatgaagagaattatgtcaaatacatagagttacactgtactttttgtgtagaataagctaccacttttcaagcttttggactaaaccaccgcttgcttggaaattgcagctttgactaatgccctttaaaatgatataccttattatagatttaaattatagctttccttgttatagtcctgaaaaaaatgaaaagataatttcttgtttgacatagaaggcctgtgagacaaaagttataaaggttattatatatttattttgctttttaattctgtctctaataacagttagaaaatgtctcattctatttcatgttatacagaaattgcttaaaagataattatgttatataaagtgatcaatgaaaacaaacgtcatcttcattttttaaaggtgaggatggtgtatataagcactttttcccgatgtgagtccttatgaatgttcttgttaaaatactttgaatcttgtaatgaagttaataaaactatgttaatgtgtttggctgagagcttagaaataaaggctctggctggcgtggtggctcacgcctgttatccctgcactttgggaggccaaggcaggtggatcacttgaggttaggagttcgagaccagcctggccaac

SEQ ID NO: 97855 - DNA, 1051 bp, Homo sapiens
ctgcaagtgataaatgatgagaattctctcttgcaattattattttagtttgtaactgcttaatttcctgcaagatgaagttctgtgtttacatgttatgattttcattactaagccatcttttaaattttactttacagatcaacagtacaaattctgaagtttgtaaacttgctgatggtggtggtaagccatggcagatgataaagttgctatcttaacggatgatgaagaggaacagaagagaaagtatgtgcttgcagatccctttaatggtatttccagggaaccagaaccaccttcgaatgaaacaccttcctccacagaaacatctgctattcctgaggaggaaatagactggatagagaaacattgtgttaagataaacaacgatcttctaatttccaaggtcttttattttttcttttactctgcctatggctctctctatccccttttgcctgtgtattacaaacagctgggaatgtctccaagccagagtggactactagtaggtattcgttacttcattgaattctgcagtgcccccttttggggtgtagttgcagaccgctttaaaaaaggcaaaattgtcctcctcttttctcttttgtgttgggttttattcaacctgggcattggatttgtcaaacctgctaccttgagatgtgtaccaaagattcgcccaacaactcaccccaccaatgcaagtcaccagttaactatcctgccaacaaattcttcctttacctctttcctcaccatatcaccaaaaatgcgtgagaaaagaaaccttttggaaacaaggctcaatgtctcagacaccgttactttgccaacagctccaaacatgaacagtgaacccactctgcagccccagacaggtgaaattactaaccgtatgatggacttgactttgaactcaagcacagcaacccctgtctccccaggaagcgtaaccaaggagacaaccactgttattgttaccaccaccaaatctttaccttctgaccaagtcatgcttgtttatgatcaacaagaagttgaagct

SEQ ID NO: 97856 - DNA, 1049 bp, Homo sapiens
gcctggtatgtgtcaagcattggggataaaaatgagccagcataatatgaaagtcctcaccctgcatgcagaatgcagtcaggttgtaggtgcactgttacaaccaagataagtgttgtgaggagaggcacgtgatgctgcaatcacatattaaagggaatggaccaggcatgagatggagctgggtgagagctgaagaatatcaagacacagagacaggtggggatggtggccgagtgagtccatttgtcatccctgcgagtgggaggactgagagctaggcagtgttgtgccagacaaggtgacaaggaaagatgttttataatagaatcttcttcatatcagcaattttgatgcagatgttcctactgtgttacgtagactttctgatgatccatgcagctcttgaagcaaacaagcactcttgttaagtctgacacagaacaccatttctttgtccaggaagaaaatgattatggcaacactatttcctatgtctttcttaactctttggacaactagatggtttacccacacccaatctcccaagagtttcaaaagaaaggaataatttaaatatgaacttagctagaatgttgtatggttttgaagccaaaatagaaacccagacagtgatcccttcaggttgagaaccatgggtcagacatcacacatcatttaatgggtctgtttctactgcatgaaacacagtgacttgatgtctgttcattctttgagaaagtagacatgcacttggaaaaacattcaaaaggtatttagtaaagtctctctcccaccccttgggcagtcccccaattcctctccttagagactatccattatatgaggttctagtgttgtatccttttagagatattctgttcatatgtaagtatgtagctgtatgtgtcacttcctttttctgacataaatattacaatactatacttaatattctgcaatgtcttttaccttgctttaaatgccaaacagttctggaggctgggaagtgcaagatcaaagtgttggcaggttcggtgactggtaaa

SEQ ID NO: 97857 - DNA, 1166 bp, Homo sapiens
tagttggttaaatttagaaaagtagggtctcacaactaactacactgttaggaattacagaatgactcataattcattgtatctatatcttgaacactcttgaaaaaaataccagttttattataagataaccacaaatcagcttaaactgctaatactgtgaattgtgcttatataagaaattagaatctgtaacaatttttttctcctactcttgtagtttgctcaaatacaggataaaaaacgagtggcaggtgatttgggttttccacagggtagtgttttctgctgcatcatttgcttcttatcaattgtgttcctctttatagataacttcagtttaccaaccacctgttctaaaattgcctttgtttcttgtctatttttattactactgacttcctgttctgaaataggacagtcatgctgtttttgagttttatcattataggtgttcagtaggtatctatatctcgtggagagactttttttttcagtgtcttgtatttccagacatcagtgcccataagattactgattatacatcagtaatcttatgtataatcttatgtaaaaaaattctaggaccctgaacatatgctcatattcagcataaaaaagaatttgattgtctagaaaatgatccagtaaaatatgctttaaattcctttatattagcaaatccctaactgtattagagtgaatgtgttcatttgcttgggttaccacaaagtaccacggtctgggtggcttaaaaaacagaagtttatggccgggcgtggtggctcacgcctataatcccagcactttgggaggccgaggcaggtggatcactttaggtttggagttcaagaccagcctggccaacatagtgaaaccccatctctactaaaaatacaaaaattagccgggcctggtagcatgcacctgtaatctcagctacttgggaggctgaggcagaagaatcgcttgaatccgggaggcggtggttacagcaaaccaagatcatgccattgcaaaaaacaaacaaaaaaactcggaagtttatttcttcacagttctggaggcaaaaagtccgagatcaattgtccgtagggttggttacttccaagggcctctctctttggcttaggttttcttccagagtttttatttcttcccttgtg

SEQ ID NO: 97858 - DNA, 1068 bp, Homo sapiens
taaaacattttttaaaaaataactatcacgtggcttttcctgttttgacgtctttttaatcataatcctgtaaatgggcctaaggcaacactcattataacctatgccccactgatgttctaagttaaatgaaaaatatatttcttaaatatatatgctaatgtctattaaggcctataaagagacccaaagataaacatcatgttcattgattcagtacttacaccaagtaatgaagtcattggtaaccagcaatttattaatattatcaagcactctggaatgggtatatgggattcttggtttatttatttatttttacctttgttcaaatatgtagaaaatgctgaaaaaatagtttaaacattcttttctctccagacaagacaatgttggcagaaagaattcctgttccctccagtcccgttcctatagcaaccatcgacttggtacagcaacagacagaagatgtcatgccacgcattgagcccagacttccacccaagaaaactaagcaccaggaagaacaggaagatgtgaacaaaccagcctggggagtcagctcttctccctgggtgacctttgtctatgcactctaccaaattaaagagatgatgcaactcacaagagacaaccgtgcttctgagatacagcctttacaggtacagttcctttgctgggctagcaatattacctgtcactcaagataccttaactgggctcagttttaattactcacttttcattcaacaagatttattgaaagtctggtgggggaaatagacatgcaaacaatttcagtactctgtgagcactgagttaaagagggtgtatacaaggtcccatagagagaatattctgccttatggagttcaggaaaacttcagaggttatgattctttcacttcttgaaagaaataaaataaattaatccattctttcattgtatatttgttttaaatttcagtattgatggttgtctctgtaattccaaaattctagtgggggcattatattataggaccacaataaatatttgttgaattaattaatctgagccactgtatg

SEQ ID NO: 97859 - DNA, 1032 bp, Homo sapiens
tgtacctacatttcacaaagcatcaggaatttgaagcatttctaggaatctaggaatatctagaaatcctaaatggaaatacaaccacacacatacacatatcaggcatgtatggtaatggttcaggctgggctgctttatggcttcctctgccataacagatgcagggaatggcctccctgcctcctggggtggggtaaggtgctaagcggaccagggctttgacattaggaagatttgagtttgaatcctggctttgtgaccttgatctcataacttaaactgttagcttcagaattctcttgtttaaaatggggatagtgataggaacacctccagtttttgttaagggcaaaatgataatctcatcagcacactacaagcacccaatatccacggatgtggttcccttttcctagattccctgctgaactccaaattggcagagaggaatattgcctaagtaatggtctcagtacctcagcagtactggaaggaattgccaattagagggaagctattagccagctatccacttcatgtgacccatggcaggattaataagccagtaaagcagggttgctcttcctgtgaattccttaacacttttcatgaggtttactgcctgctggacaatgtatgtattataatctattcctaaaacttgaggaatagttcaataattagcagttaaccactttggatccacacaagctcagcactcggtaatttactgtttctacaaccataggagaaagagtaggaagtaagtcattaaggcagtgattaccagcctgggctctgtgacacccctgtgtgtgttgagggatctcaagaggggttacaaaatctcaaatcaaaatgtaatttgaattcactttaatattttttaaggtagcatatggcactttggggacaggaagaaaaagtcacaaagtccacaaacccatgaaggtgtcagctcacaaggctggaaatgactgcattatcgattctgctgtcacagtaaatgttccataacaaaggcatgtt

SEQ ID NO: 97860 - DNA, 1355 bp, Homo sapiens
agaaaccaagcttgtcctgtagaatctccaccttctagatttatctgatgacccctttatgatagaatttaacatattcttctcttctgcgtattttctgtaaactggaaattagacttcaaggcttggttagatataaattaaacacttaagatagaatacctaagaggtgatgggcacttcaccttggatcatacccagagacacagaatagcttatagtctcaccatcgtaatgatgagactgaacattggattcagagggtgactccctccactgtaaaattaccttttcctttcatgacaagaaggtaaaaataaaaaatagggtttgtagccaatggtgacatacaactgtgacttcttcctgaccaaagtaaccatgataacattttagtccagccagggtgctggactaaaacacagacatacttatgtatcatcataataatgagtgtacatcccaaattattgcgaaagtcagcctagtatctcatatggaaggaataacaccctatgtgcatttttcaaccttactttatggggtaaaaaacacaaaaattaaggttctctaatagtttttacctttaagtcaaggctctgccaggtttttcacataatgtctcaaattcaaatttatattattttacctcttccacttttccaggctatgtcttgatagttggatttttcagctttgttgtttgttacaagcatgggccccttgcagacgacaggagcagaagtcttctgatgtggatgctgcgactcctctccctggttctggtctatgctggtgtggccgtgcctcagtttgcctatgcagccataatcctcctcatgtcctcctggagtctgcactacccactgagagcatgcagttatatgaggtggtatgtatcatttttttcccccagcaaatttgacattttgagctctagttttattatttgggagagtgtttgcacacatcatgttaatctcataattacatttgatctggagatttcattctgagcaagattgggggtgtaggggtagagagctccaagcatctgatcccatcttcatggctagtcttcattaatcgttgagagctgtaccaccaattaccaggtaattagagctcactcagaattcactagagtcaatggcagaagtacttggactctgggttacctaaaatatcttcttttattcaacattttctttaattagagtcaaagactgctttagtggtatcagctgtgcttatgagatacgaattaggaaacagaaatgaatcataaatgactgaaaggtattatttgtatttaggactttcttttctcttaggtttttagttaaggcttatgg

SEQ ID NO: 97861 - DNA, 1108 bp, Homo sapiens
gcgtgagccaccgtgcccggctacaccttcaataaaataacacactgaacttagttgaggataaataattcatgttggtagtgttgcagttacactgattaaagtttgcaacagcagcattattttaagataaatttactctttataacagtgcttataactccaacttcagtgtacatgcaagctagatgggaatcttgttgaaatgcaggttctgatttagcagtctgcagtggggcctaggactctgccatcccagcaagctccatgtgatgtcggtgttgctgatttgtggaccacaccttaagaccctagggagtttcttaaattgacttcaaatcagtttgatgtaggagtttctaatacaaaaggtttatttgtttgcttttatttttatgagagtgaatgaaccaaaaaatgtgtcatttattttcttccacacacagtatagcaccttttgggctctaatggttggttgttggtttgcctcagtttatattgtatgccagttgatggaagatctgaagtggctgtggtatgaaaacaggatatatgtattaggtaggtaaatagaaaaacaatatgctctgtgattggtaaaactgagatgtacaactagaggccttcttttgatagatgtttctctccaacatctaaattttcattttgaactaacgaaaggtgctactaaaaataatattttgtttatcttattcccattgttgttgatttcagttcatttagatctcattttagatgatttccctatgacatgtttcttagttttctgtagtaatgatcaaaagaggaaaaaaaagtgtttgtcccttttgaatgcacatgcttctgaattgtggttaagctctaaccacatctaactggtaatgtaaaagcttctctgaaaagtggctgtttctttctttcccgtaagtattcattaggaaaggtgagaaatcctaactataaattactaatgaaaacttgccttttcagaaacacagaggctaagaaaccatttattttccttgttttacattacaaaataaatgtttttattgtttattttaactagaaaataatggacaatgagagaatcaattttctccta

SEQ ID NO: 97862 - DNA, 1061 bp, Homo sapiens
atctttgttatgtgtttgtgtgtcttttttactccagtcatggatttcaaactcttccttgtgtttgtggcaggagtttttcttttcttttatgcaaggaccctgagtcagtaagtattcctttttatatttttaactttgtgaatgaaaagggatttagatcatttttgaccacatgctaagtattttcacactattgtgcatttgtagttcttactttaggttttgcaaacaataggtctgaagatggtattggaaaggcctttgaaaacagtaacatttatttttatcgtgtgatatgtatatgttacaaagtgctttcacatattttatgtattaacattttattagatcttgataactatgcaagctctgtattattgttctcattttatagatgagaaaagcaacatccttcatcacactactagttcttatcagggctggagatttgttccctggttttctggtccacacaccttgctctattacattagagccacctactagatttatgaccgtgatacagaaggctgaatatagcaaatttctgactcttagagaaacattatcattttcttttttattactgacaagttctcatctgagaaacatattattctgatgttttgcttcttggaattctctcatgagaaagaaatctttttttcaatattttacttcttagcttgtagattctaggttagtacccaacactcgtcagctattcttaacattgttcattttgaagcttttccttatagtattaccaagtgtgtttaatgtcatccatgaactttagaaaccagatgatgcatacatagcatgaagaataaagcctggactctgacgagctgggctgtaatcccaaatcctccactgagcagatactgacttagggaagattttttaactttttggtgccttaattttctcctttctaaaacctagaaaagtgcctgctacatgataggtgttcagtaattattgtctgatcagatcctgaatatgaaaaatacttcagacattctgttttgagttagtggcaagcaacttaccat

SEQ ID NO: 97863 - DNA, 1256 bp, Homo sapiens
caatataagaatccaatatctctaaactgaattaattccataatttatctcattttcatgattctgtacatacttgctggttctgcccacccccactcccacctcctagtttctgtcttattgcctctaccttgcccttcagccctttactcatatttttgtcttttctgagaaggtgcccataattctgccttctgcttcagaattgaagaagtacttgttctctgtgctcttatagtgccctccaatgtcataaatattgacacttgggctatcgtattttctatctgtctcctccttggttggaaacactgaaggactataattatcatataggagaatttattggccatagaacgttaaaactgctactgttacctccctgcaaactttttttaaaaaagattctgggcaattaaacagttagaaaatgcattcccttttccatctctcagttcgtaggtgtaaagctttgaaggaaaaagatttaattagaacgtctgagtcagactgttactgctacaatcaaaattcccaagtggagtggaaatacatatggtcaactatgcaggtaagggcctacttttaactcatgtcttagggacagagaattaccatgtcctggggacaggaaatgtaccacttcaggaatagaaagtatttttggtatgacacagatctgtgtatcactatgaaagctgacttgaggatcacacacagtggttcaatgggtgagcagtgtgagaagaggacactaactccttcatattctccctcagcccctcccaagccactcccaatgaatatactatctaaatgtatacagcatgcctgctgttcaggcagtcttaagacaacatgttcctcctactttccacaattgctatccaaagcccctccaaatagaaattctggaataaccacttatcccaaatatggccaagatagcagttgctcttaattgcctagtactttccttcattcagcatttaacaaatacttattgagtacctaccttataagtaccaggaactatttctaggctcctaggatacatcagtgaacaaaatagatccctgccattgtggatatttacattatctagggtggggaatagtaaacaataaataaaatagggatgaaaatggtaaaactagtaagtactatgaaaaaagaaaatgtagagtaatatcagtgggatgagagaagtgggagcaaattggccagggtagttctcgttgagaaggtaacatttg

SEQ ID NO: 97864 - DNA, 1018 bp, Homo sapiens
gataagaaaaaagggcagccagaggacaccatgaagcactgacactttgtggaatctcatggattgtgtaaattccacatcagcttcacctcaaaagccagaggccactctggagaattcgagggaaaacactgcaacatgcttttactagcgtgtctataggcatgaacagtcaggacaacctccttccttctatgctgtccttaatctggttgaagactgaggggaaatgcagaacaagttcttttcctctaactggcagatcccttacccagaatacactgatgtatcatatatgagtcaaacaaaagaagcttaatgccacctattctttctgacctcctctatccagtgaggggcaagaagatgatccccagtccagaggatgttaagggttacagtactcaaccctctagctatggatgtattggccatggggtagggcaagggggaagtgcagcctgtggcttccagactggccctcatgctttgtcagttctgtaaatgggatggcagtggcacaggctggcaagggcatcctactacatcaggtggtttcaagggagggccagagtgcaccttcttttacggtgctgactattcctggccaggctcttacaaagattggctggacttccattggtaggccacacatgcctaaataacccactagtcctcttgaaccacaagctacacacaaaagataaatatttaagttctgggggttacagtgataaacatgcaatgtccctgacttcatggagagacagagtataagctaataaatatatatgtaatatgaagaaagaataaagcaggtggaagtggttggggtgtgtttgtttagacagtggggtcaaagaaggcctttctgagaagggagtgtttgatagagtatatcagtgattggaagggatgagctctgccaagatctgggagaagaaggttgcagcagactgaggaaactttatgtgggggctcgctggcatcttgaggacaggaaggccagctgtggctg

SEQ ID NO: 97865 - DNA, 1036 bp, Homo sapiens
ataaccttggtccaggcacagagtctttatggaccgtagttttctcttgagtaaaatgaagatgtttttactgaagagtttccagtattttcctcacctcagtgaacctggtgtttttaaagtttttatgttaccgcatttagtataatagtaacagcctgcttctctgctttgttaatcaaagacacacataaatacttattggagcttctgttctgcctgagacatgcaggatgcccactgacttgataaaactagtccacagctaagaagaatggcaacttttgtagccttagagggatgcctgccattccggtaggctttccaatacggactgtgaagcgcccagcatctggtagtgtgccagtgacactgttggcagccctggattagactaggcttaagaaccatagctgctctttaaaagtctatggtttcttgaggaccctgagaggaaacagctggtacttcctttaagcgaggggcttggattagtgatacctaaggtgccttcctgttctaaaattttgtcttgaataacacacacttcaatggaatggagaacattcagaccaaccccagctttctgtcactctatttggaggaaagtcagagacagttgacacaggaggagcaggtagttgtctgactgagaggagaaacttcaagagtttcccataattttcacccagttagtgaggtccctagaaaccatgtgttgtcctgagatgaagttcaggccctgtcagtggctttccaggcttaaactataacagtccatttgacaccacagctttaagattcatctgtgaagatttgaacttgaagttaaagacctgagtgtgcatgagtatatactaattccagtttcattctcatattcttggagaaagaaaaagatgaatattcaggttaaaaaaaactgaggttaagagaatagttacctttatcactttggtgcctcacgttaacacctttgaaaatgtgtatttacaaaaaacaaatagtaagaaaaatcctgagtccatttgacttc

SEQ ID NO: 97866 - DNA, 1053 bp, Homo sapiens
cttcttacctcctgctaaatttgactatctttcactccacctgcgtccaaaccttggcagtagcaaagtatatagccaaaaatacgggacatggaacctttggtttgatccttggtttgaacctccagattcctgcttaccatttattctcttttgggaaagtacgtcagtttagttactgacctataaggtttttaggagttcagaatgagataaagtatgtagagagaatgctgccttcacaggcagtcacgatgcagatgcttctcgtttttgttcttaaaacctgtagtgtaacctatttggtgtaaggagtttgaagcaagtatgatgagtttttacttttttttttttttttggcaggttaaacccatccagagtaatggctgcggccttacccaggaccctgggggagttgcagctgtatagaatattacaaaaagccaatctactttcttattttgatgcctttatccaacaaggtggtgatgatgtccagcaactctgtgaagcaggagaagaggagtttttggaaatcatggcactcgtgggcatggctagcaagccccttcatgttagaaggctgcagaaggctttgagagactgggtcacaaaccctgggcttttcaatcagccactgacttcccttcctgtcagtagcatacccatctataaattaccagagggatcaccaacatggctgggaatatcctgcagtagttatgaaaggagtagcaatgcccgggaacctcatttaaaaatccccaaatgtgctgccaccacctgtgtgcagagcttgggacaggggaagtcagatgtggttgggagcctagcactgcagagtgttggtgagtccagactctggcaaggccaccatgccactgagagcgagcacagcctctccccagcagacctgggctcccccgcgtccccaaaggagagcagtgaggcgctggatgctgctgctgcgctctctgtggctgagtgtgtggagcggatggcccccacactgccaaaaagtgacttgaatgaagtgaaagagctgctaaaaac

SEQ ID NO: 97867 - DNA, 1121 bp, Homo sapiens
gggcaattgtaaaaatcgctactttgtattgcttttattttgtgtcagtccctactagacatttggaattcattatcacaaacattcttgtctaacctatgtggaggctttatgatttccattttacagccaaggagagacccagacaggctcagtatcttcacctgtgttgccaaactgctatccagtagcagagccggggcttcctatctatgtctgattcctgaatgtcaaagcagtaccaccttcctaggtgctaatgattattcacaaagcatcttacctgtgaaaaaaacactattggggttatacctttcctcctagtaccgtgtgaagggcgaaatgtgtgcaggactggtagtctttgaaaagggtggatggtggcagttattattttctaatccaagaaatgttatgtagtaaacagttacaagttttgagtagaaaatttaacaatgtaaattacaaaatatttaaatataagaaattttcatttgatatgctgattgtttatgagtaaaaaccttgtgttgggaagatacacagagtaaatcagaaaaattagtttgatttccttatgtcctacctatgaaagaacatatttaaggtggcttgacagctcattcaaggggatgaaaaatcaagagccaaagtccctggctctcttgtcttctcctaaatttttttaaatgttagttaaaagtgaattcaattggtaacctttctttttcattaagaacacattcagttccatgaacaaatttgttattaactccaatgttataagtaacatcttagaagggaggaaggatatataaagctacagtctcagacctggtgatggcagctgactaactggactgagtgctatttctcatttgagttttcttcattcgctgaaattgctggagactgggcagagatgggaaatgacagcattcttgaccctgtgggagtcagaggtgcaaagcattcagagataagtggatgaaagaaatgaggtttgttaatagagcccaggaagtcagagaactggggcttgaagaagaaagacctaaaggaaacatctgctagcagttccagcaaggtgggggtgggagagcaaggaagggggaggaaag

SEQ ID NO: 97868 - DNA, 1007 bp, Homo sapiens
tggaaatggcatcagatttaaggataatactccatcatagaaataagccttaataaccagtgttgcctcattcagctcaaacagatttcatagccaaagcaaaaggactggtacggtagtctgtggaaaccaggaagataaaacaacagccacaaaagagaaaatcaagagtgttgcaatctataacagtaatattgattcattcacattcctgtgttaagtcattttatatggaaaggcttacaaatcaatattgtaagcattcattatttaagaatgtacaatgtatttgtgtaatttatagaagtaaaatctagatgttgagacctgtttggtctaatagatgtggatacagtttattttacttgaaattttgttgtctactttgtgtgtttaacgtaaatatatgtcagagtttagaatctgcctgcagttgtgaaaaagaaagcttaagtgatgcagttattggcaagattgcaatgattatggaaaaatagaaagcgaatactcagtttaagccaaggaaaatattgtggatttaatatttgataaaactgattttgtttaacaggaaatttttagcattcagtcatataacatctggttatcaatgcacgtttacacaataaatacttgagtggaggaaagttaaaaagatgagcaatagagtagaaaatatatcttaaactagttgacctagattgtattaatagctacttaagatgtttcaaagataggaagctattgcttggacagagaacttgaaataagtggacccatgtataaaagctttgacttaaacattgatatttcagaatgtgttaaatagattaagacacagtaagttaaccctacatgttataaagatggcgactgttaacaaaggctgtaacagattaagtactattttatatccagaaagtcttctctatgtagagaagtcagagagactagatgctttcactagggaatgtcttcccacccagccatcacaaatgtggacaatc

SEQ ID NO: 97869 - DNA, 1094 bp, Homo sapiens
tgaagacatgtctgcttcctgtttgccttccccataactgtaagtttcctgaggcctcaccagcattgcttcctgtacagcctgaggaactgtgagccaatgaaacctcttttctttataaattacccagtctcaggtatttctttatagcagtgcaagaatggactgatacactccccatggacctagactggttgaacccaatctacacatctcctttcctaggggatgttagggttttgggaatagaaaaataattcctcctcacataaaagtcaatatattattctatattgagtcaggaaatctgaaaccatggtaggtatttcaaacacaaaggatttaatacagggaattgtttacaaaggtgttggaagagctgaaggagcaaaaggaagaaagggtgatacacatagaaagctcctgatgttcctaggctggcattcatgagcctactcttggtactggggagttatggatgttgcacttcagggactggaactgtcaaaattgtccttccgtggctcaggctgtaatcaagaaagagactgtgctgctgcctgggctgccagtgtctgcagttacactagcccctctgctgctacagtagctctggttgaatttagaaatagaaagtttttccctttttccaactttctgatctttcccaatgcctgcctgccattgacagatttgatagatatgaacaggaagccactgtcaaggagtctaagaaagggaatctgcagacttccagtcctaagcaatatagagaaaattataaatggttaagtataaagctgagaaacaatagatacataatcaacacagtcagacatttgctctaaagcaaagcttcctcaacttgtttttaggtcatagcatgtattttaattgggataagctgggaggaatgtggggcttggtaaaaccatatgtcttagtctatttgtgctgctataacaaaataccggagactgggtaatttataaagaacagaaatttatttctcacaattttggagatcaatgtgtcagcaggttcagtgtctggtgagggccttgtctgtgcttccaagagggcatcttcctgct

SEQ ID NO: 97870 - DNA, 1088 bp, Homo sapiens
acagccaaacacaacacacatgacccaggagtcagaagctgaaggaaaatccaggggaacatggagcagttgctgcttcacagcactgaggtgagtcagcagatcagtgacaaggtgtgagagctacaaaatggctgaagccctctacctctcctacaagaatctccctgtggccttctctcagtggaaacatacaggaaagagaactctggaaaaggtggctcagcctggctaaatggacatgttatctagtcaccacacaccatcatgtttgtagttcagccagtggaaaggaagaaggaaatgaagatctcaccctcttctaattaaggacacttcatcaaagggataccttctactttaaccccattgactgaaacctagtcagttagtgactacacttagctataaaggaagtagaaaatatagtcttcattcctgggccaggaattgtgttcctagggaaggaagaaggatggctattgggagatgacttgcagtatctgccacagtatactttgctccgctcggaatgtcttttcctccttctctgcttggcaaactctagttcacccctatagatccagctcatttattatccctcctgcaaagccttcactctttgttttcccattgggttttataaatccctgtaccccagtactttcttatttattcatttaccaagttttaagtctccccatatgtgcagcattgctctgggaactggggatttagcagtgacaaaacaaagtcctttcctgtacaaagcttattgcttcataattatttatgatactttgtattctaaggctgtcccaaattcagacaaaagaaggacaagattcatgggtaatttcaagcaattttattcctgactaaaaatgtaaatctgttatctagaattacgattaaataactgagtaagtcttcaaaagtacatcatattccttcctattaatcacaacggtaatatttgtgatttataaatcatgtctattttagggaattacggaccttgaaaagatcttggagattatctgataaaaccaccttagtttacattagaagtctgagtcttgaatcac

SEQ ID NO: 97871 - DNA, 2200 bp, Homo sapiens
tgagtctccccaacagctcgaattcccagagtggaggagcccactgcttcataaatgcgagaacccagagcccctagtacccaactaggctagcctcggagttggcacggcgtgcagaaagtggctactgagcagccgggcctggctcacccgcttcacacgtcagtttgactcctctccccgccccccaccaatcccccgccctactctccgcgcacccagagccgagagaaatttgactgccctaatcgccaatcaaaagagaggtcgaggatttgagccaatcgcagcgggcgaaaggggcgggccgtcggcgagcgctgaaggtctctagccctcccctgcgctttagcctcagtgcggagccttaggcggagcgaagagaaccggtcgcggcaatcctagcgcgcagcagcagcagcagcagcagcagcagcagcagcagcagcagcagcacccgcatccgctgcgggagtccgagccggaaccacacccaagtagctgccctttcctcttctgtcatctcaccgccccaccacagaccgcgttccccgaggaaaccggccgcccacgcccggagcatcctcccctgttgagcgggcgctgacggacccggcggcatgatgcggctgcgaggctcggggatgctgcgggacctgctcctgcggtcgcccgccggcgtgagcgcgactctgcggcgggcacagcccttggtcaccctgtgccggcgtccccgaggcgggggacggccggccgcgggcccggctgccgccgcgcgactccacccgtggtggggcgggggcggctggccggcggagcccctcgcgcggggcctgtccagctctccttcggagatcttgcaggagctgggcaaggggagcacgcatccgcagcccggggtgtcgccacccgctgccccggcggcgcccggccccaaggacggccccggggagacggacgcgtttggcaacagcgagggcaaagagctggtggcctcaggtgaaaagtgagtgtctccgcgaggcgcaggaggcctcgttcctttcggggcccgggctcaggctgtgtggggccctgcggtggggcgggataggagccgagggtctagaaaagagaaagaaagaggtgccgggcggcctgcgccgtctgcgccatgtgattaggcccggccccgcccgcgccttccccgcccgcaaccctccgccaggcacccacttcccttctccgcccccggcgggggtcgccctggtggggccgcggtggggcctgatgggctcgcctggcgtccccagcgccagagaggccgctcccctgcccgcgctgcgtgctcagctccctggcttgcggctgcagcgcctggccgcccgccccagccattcgtgggcgatgctgcacgaacatctccaccgagtgacatttaggagttgggcgttcagcagagcctttaccttcctgacttgtcgcttttcctggctcgtttccgctctgcctgccctcccttggtttctgccatcatccggttggaagccagatgtgacagagagctctttatatttcgggagtggctacctcaggcacgtgtagagccatctggggcaccggaaacaatgtttcagaagtgagattaggaggaatccggtcatgtggccgagaagatggggcacgcagtatagaccacctgtttgcataagggaccagctttggcttgtcaggtcttccgtgagatggggagatttttagaaataaaagttaaatagccaagatgaaatgtgacgtaatacactaactcagtgaaaaatctgagttgagtaggttttgtgacttcattgtgataggatgttgactcatcctgtatgtgtacggcacagtagtttagtcttaaagcaaaactggtttttcttaaacaatatgcaaagcagtctcctatatatttttgtcttgtgtaatacaaatggaccactttgttttcccaaaatgggtaaaaatttacggatctgctttcattataccttactctttttctggctttgtacgctgacactctaacctgttttgcttcccttttatttctgctgctatttccagctctagagttccttaagtcaaactgaaagtgagaacattgttataatttcaatctcacgcctgcttgatgttttcctgtaattgaagttgggaccttccagaaacttttctaaag

SEQ ID NO: 97872 - DNA, 1049 bp, Homo sapiens
ttagtttccacaaaaatgtttatcttgagaaattgctatacatctgtcttatatgaaactatgtgagttgcactgtttaccttttgctctgctgataaataagttcagagtaaatttaatgcttaaccacaccaatttcatcagttcacatggctgggatatctgcgtttcctcctttccttggtcctgagtttatattttatttactttatattctggaaggaggcgtgatataagcaagttactttacctttttttcacaaactctttgaactaatgtcactttagactatgctgtttccatcacgcaactttagtgtggtttaggatacgaacgtcttaatatcacatagaaaaatttaatgatctttgctcagttttgtctttagtgatcttatttaattttgttatggttcattctgttatcttgaaaaccaactttgcttgcctctcttcgttttcaaaattgttctctcttctttcctagttctttttgaatttcctcactgggtaaaaaccctgaggctgaggcctttgtccctttcccacttgtctgccttctcaacagcgtatcccttctttcagctttgactctcatctttgtgtaggtaatacttcacctcttaatccaaagctctgttcttaaatttgtcgccacatattcaatgacttcaaattttaagtctgtaccctgatattcattcttttctccaattcaacctattttgcgtactgttatgagagtaattttagagttttaatttgaaaatagcactctcttccagaaaaccagcaggatctggaatgagcattatattaaagtcacaaactatgttatggtttatgccagcacttgcccatatggacatttttatcatacttttctctgttaagctggttatacttatttccataaagtccagaagtatgtatcctatcttagtgaatggtccctaggaagagtcagagggatagaggtaaggggcattattaagtttttttatttggacatttattttttaatgagaaaggaaaagagatacataaca

SEQ ID NO: 97873 - DNA, 1035 bp, Homo sapiens
agcaatttttaagctctatgaggaacttacaaagtattcatacctttttaggaatctaagttcacaaaataaactgaagtgttagaaagatttatttcctattatttttggtacagtgttatgcatactagagaaaaatggagaaaaacgcatgttcaacattagtgggatagttaagtaaattgtggtacattcatatgagggtctcttatttagtcatttaaaatgtttgcaggtactttttaggatataaggtaatgttataacggccaaaagttagaatacagaattttctatgcagtatgatctcaagctatttaaaaagctcagaaaaagtaatagaaggaaataagccaaaatgacattagcagttgtggtttatgagaacgagcattgtttttcctgcctccttttgttacttttaagatttcccccccattataagtgggaaacgtctaaaacagtaaaaaacattccatagttttgaaaatcaaaggaaccacatctgttaagttttgaacttgtaaatctctactgtctactcttctaatatcctgattctggttgtataagaacagtaagcaccattacattgaaagaaaagtatgaaaataggttatgtatgaatttgcacagctcctgtttatcagcattgtctaatcatattcactggtacccttaaacatcaaactttaaaaatttaaaactatgcttgatatatctccctagtaaatgttacatatttctctgccatattaaaacattgtaatcaatagagtttaacatttcttgttcaacttatgtgtattttaaggatgcattattatactgcactgtaatacagtgatgctgtaagacaagtgctggcacactttccctgaaaggccaaatagtaaatattttcagcttttggggttctctagtcactactacaacttctcagttcagtggtggtagcaaaatagctgcaaacaataggtaaatagatgtggcagtcttccaataaaactttatttacaaaaagaggaggtccct

SEQ ID NO: 97874 - DNA, 3419 bp, Homo sapiens
ggttatttaacaatggatttagttaaaaatccagtagaatgttcatacaaggattaattttgtgttctttctacctctttagtaaaataaaacagggtctgttacctagcttggaagatttgctgttctatacaattgctgaaggacaagagaaaatacctgttcataaatttattacagtaagtttttatatttttctatcttaacttaaaaaaatcaataataataaatatatacagtattattgaaatatagtcttaaaggtcgtctgacatgtagattctgactgacaatatttctcttattatgttttcaaatttttgtcatgctcatttcaaggtaatcagtgaaagaaaaagaaagaaacaatgagaaacttgtccagaaagtgggtaatagtgacactaagatgccatattcatgttcaagtgttgggtagaagtttttatatacaggaataaaatcttatagttggtataagcatatacattatttgcactatatatttacaaactcttatttttttaaaaacaggcactcaaatctacaggattgcgaacgtctgatcccaggttgaaagagtgtatggatatgttaagattaactcttcaaacaacatcagatggtgtcatgctagacaaagatctttttaaaaagtaaaagtttctgccaaacctttaatggtgatttgctatgctatacggtgattctgcttttaaaacaaaattgcatctttgaaggccactgcttcctgtgtaatggaaaaaggggatttataaacatcatttgtttgaagaacttggtacatattaggttctataatacaccgggctaagagtattctttctttaaatctgttctaagcaaatttagccaccgatgtttccagtttacagtacttggagattgcattcagtttgagtagagcacatcctttgtcctgtcattgcttatattgatccccaattcatctgcatgacttgcacgctttctcagcatggtctctagttcttttccacaaggtgatttaggtgacatcataaaatgagagggcttcagacagacctgtgttcctcacatttacatacctgcattgtctgctcctctcctctcttcagacatattgatacataggcttttggctattttcattttcttcaaaacagtaaagaactaaaggcaactttggcgattaaagccttgatttggttgaatgagaatttttactttgatgttcctgtatttgcatatatttattatttatcttcattaatgtgtttctattagtttgattacttaaagatttaatggacatgtgtgtaatggatcccaaagaatcaaatagtattttaaactactactatttaagtagaaactagtataaaactgtaaatactactataagacattggctttttccagacatggatccaaaaaatttctgcatctactttgaaagtttgttatgtatggttgtatttacttttgttttatcttcttttgggggttgggtgatttgttctagatgtctcctggagtatgaagtcatctgaaggtataagtatttaactgtggttctctgaagtttcctggcatgctgtgaagcactgctgacagcttgggtttcttatcttttcacgaggaggttcttgtttctgttaacttagctgaccttaaagtgtagactttaggtccgtgttgcagttggtattaggaattttgacttccagaacctgctttttaagagacagaaaaacatcatttctaaatttatttgtgtctttgcggtaaggattatttttcgtgttcatgaactgtctgcacaatattctgattaaagtgctttctgtgggcattattttgttgtatctgtgaatgaagttgttagagtaatggttggtagatctgttgataatcagtaggggaactgctttggaattttaagtggaagcagtattttacactttttttttttaagagacagagtctcattctgtcgcccaggctggagtgtagtgacatgatcttggctcactacaacctctgcctcccgggttcaagtgattctcccacctaaattcccaagtatctgggattaagggcgcctgccaccatgcctggcttttttgtatttttagtgagacggggtttcaccacgttgtccaggctggtctcgaactcctgacctcaggtaatccatccgcctcggcctcctaaagttacacggttttaatacttgaaaaaatatttatgttttgtaaacatgttgttatgtttaaatatgaaattaaaaacaatttaaatcctctgattattaagccagggaactgcaaacattaaattttctgcctgcaattaagagatagtaattattgttttaaacactaatccaatttttaaaaatctatgcttgtaatacaggcagtttccaacttgacaaatgttttatggtctatatgagcaaccagtagaaaagtacaagtctctagggcataattatttctctttattcttagaatgaggtggttcaaaacctccaactgttaaccttttaatagctttcagtcacctggaaaggtgattgcttcagagatgttcttttctctgttttcaaatataagaagttacctagttagtgttgccagaaataaacttctccctttcatgcagctagggaggagatgttaaaacatgggattcatttttccccagagaaataatttataaaggtgggtaggtttggttgaagcagtgtgttaatattttacctaaaatacattgtagattaatatttttagactttttcggtaatctgagaaaactattatgtgtgactttttttaacttgggaaaatacgttctaagcatactttttggagtaaaacctgttcgaaagttggagactgcctgtacccaggttgatagtcaattgtttttaatgctagtaaatcttaacactaatacaagtaaaaatatttgtgtggaaaactaatcctttctttattcgtgcatttttaactttataggtattaaaactttctttgtatgatcataattttttgatctttttgttttgcaagaaagtgaatggtagcctttcatttgtatgtttgattttcttaaaaatttcatatttattatgttattttacaaatgaaaaattatttgtgagaaatgttttgtcaatcattgtgcattagtttttagttataaacacttaaggaaagaaaatgattattcccggcttacagataagaaaactgaacaaaggacagagatatatataacttgctgaaaagcataagcacctcctcagagttcattttatatgacttctcatttcctagttagactcatggtatctatattaaaataactcccaagaaaaaccttactgtttggaatggtgatcggtatgc

SEQ ID NO: 97875 - DNA, 1272 bp, Homo sapiens
tctattactgcattacagagacttaagaagctcagaatatacaattggctgtaatccatttgcaaaacgttttaaaggctacgttaatatactgattttctggcttaaattctttttagcaaaaagcagaatacagttcaaattattagatttcagaatatcatgctctcccatccacttggtttactatatttttaaaatacttttttaacagtgaaacatttttattctgcattatatttacatatcttacattaaatagcatattgtaatataacatttttggtgactcaaataatataaaattaattattacactacttcatatgaaattttatttcaaattagagattatttttacaagcatatcaacagacatttcatttaagacataaattaatctgactaaacaaagttgatataattaaggaaaatatgttataatgcaaaatgtttaatttttgaatgaaatgctagtaatagttatataagaactaagagatgtatttctgagattacttggtaaataaacaagatctcaaccttggcagtctgaattttgttaaccagatgtcgtcatgctgaatgttaccaactctgattgagtaagaagcttgtttcagatggtcttaatacttaaacctggtggaacgccttgtcttaatttgtgacacaattttaggcacatccagattaatctcttacacgttcaacagcttacaagcaactacttgaaagactgctagaaggaaagataatgtagaaagcataatttatagaatttagttgtataaaatgataaatttatctattatttaaatagtgtcctaattattactgttattaccaagttctgatatttgaaatgtacccagtttattaattatctttttacattctacagatgtgttcagagcaacattgttttgttgacacaagcatttagaagaaagtttgtgattcctgactttatgtcttttacctcacacattgatgagttatatgaaagtgctaaaaagcagtctggaggaaaggtaatgcttttgatgtacatattttcataaccgaatcacttaataaattcagcttaatttgaggtctagagagtaaattgtgtagttgtgttttgctaaagaaaacactttagcttcgcttaagaaatttaagtgaagccactggatttagtgtttttacggtattttaaatatttaactttgttattctggttaaagagaaatctaagggtaagaattttttattttcagatgatgg

SEQ ID NO: 97876 - DNA, 1050 bp, Homo sapiens
ctgcatataattgcactgtttgaagtttaaatccatgttcaagattcaagtgtataacaacttcagtgtaaatacttactacttacttttaaatacttgattcctaatgttttagtgaaaccctactagcacccatgaccctgattaaataaatttacttttttcctgcttaaaaaaaaaaaaagttcaagttcctctgctagactctcctgctaaacatgagaaagaaagaatgcattggaaaataagaaataatagagactgagaaaagtcactttagatctcataattctcaagtctgttttgcctttagttttcatgagcattgttacagaagatagactatgaagccactgagtgttgtagaataactagtcattggtagaaggtaaaatgagataagaaatttgttggtggaagaaaatacattatttgtcaatattatatctattcatttctttccaatcttttggataggttgcagattatattcctcaactggccaaattcagtcccgatttgtggggtgtgtctgtttgtacagtagatggacagaggtaagtttatttcaaattcatgaaaaccaactctaagccttaacttttgtataatggtgagaatgacatggagaagatcatcttttataatggaaattagtcctaacaggatataatttcaaaaggtaaataaatttaaattttaatgtaatttttaaaaactcaaacagtaacattatattaagttttatgagacatctattttattcacagttgtagtcttgttttttgagtattattcaaatacctgcagttaccaatttgtttcagaaaagcaggcttgtcaaaacatgacactattctctaatgaactgactactaataaaattagtccctatttctcaacttaacattggtaacccatctgtcgttgtctttgttccttgtgttcctgataaaattagcatgagaattaagacagtgcaacataacgtatcccaaagttaaaagtcagttgcaaaacatgtaggatttcatgaagtccatgaaagca

SEQ ID NO: 97877 - DNA, 2061 bp, Homo sapiens
caaagagaaaaatcaatattcttttttcactcatttttaaagacttagctcagagatatattcctttgttttttgtttttttattaaagtatttctgttttatcaaaatagaacttacataagatgtacaacttgtaagtgaacacagcttgaaaagtttatatcagagttgtaattttacctaaatttcgttaaaactactaaaagccgtttaacctagtaattttagattttacttttcaagataatgttgcaattaaaaaccttttttccttttatgaaaatttgatcttttatgttgcccaggttagttttgaactcttggcctcaagtgatcttcctgccttggcatcccaaagtgctgggattataggcatgagcccctgccccccagccaaaaatctgtgactcgtaaggaccttcattttaggtgattttaatttttttttactaattatcctcaagtacttacagtaaaaaatatatgggttagcccattcattttgaaagtaaggaatctgaggaccatagttgacatgatattggcaaaggtgaaatgaacacctaggtctcttaacttctagtctattttttctttcattattatatgcctttatcctcatttgggtcagtaaaatgtactgagcagtcaccatgtgttgaattaaatgttgtgtgctatgaagggacacaatgaaatgaaaaggcatggtgactttatcccttgaagcaaattccggtagggaatggtattcctgtttttgcattttaggaaataatttatcaagtaatggaagtctttgaatttgaagaaaattattatcatgtaatattgaatatgatttttctcttcttaaacattctctatgtctcttagtttttttatctagagaattcagaaagttgacttcagaactagaacatatgtatttttaaatccaaaggtagtaagacaagctcttaatcattttttagaatgattgtcaagtttgaagtaacaatcttatatagtataactatatagtttaagattatagttacacatgaataaatttgataggaaaaaaatatagtgcccagtttcattatgaatgactttcactatgaatgaatgctttgtgatgtgttgggacattgttcagggaacctgggaggtatcagtaagtaaatcaaagatctctgcctttgtgaagcttacattataattgggttggccagaactttttcattcccaaatcttttctctacttcatgtacttctcagtttggtggtaatataaagctttctttttgctctgttatttatctgcatggtaatgatgactgcctactgaacttagtgccagctctgtcatgtttataaaactggatgcttttttttttaatggggcccaggattgtgagtggatgtggcttgcaatatgaggcatttgtagacagggtcccagagaatagtattgaatctaaactgagttctgtttaactttttaaccatggtttagtcacagcttacagctctgagttgaaaaaaaggtgaataatttctaaaagggctagtttattttatgtgattgaatacacgtgggagtaaggaggagcatgctcttactctcttgccctcagaggaaaatttccacattacatatttattatctactttaaaaccattattctgttacgtgaatactttcatgcttttgctttttttcacagtatttctcttaaaataaacataggtcaattctgtatccatggggtctgcacccatggattccaccaaccacagatcgaaaatatttgagccaaaaaagatggatagttgtggctgtagtaaacatgtacagacattttttccttgtcattattccctaaataatacagtacacctatttatatggcatttacattgtatttggtattataagtaatctagagatgatttaaaacacatgggaagatgtgtgtaggttatatgcaaatgctatatcattgtatataagggacttgagtgtccatggagtttggtatcacagggattcctggaatccacctcccacagat

SEQ ID NO: 97878 - DNA, 1858 bp, Homo sapiens
gatcctgtctctacagaaaataaaacattagccaggtgtggtatgtgcctgtggtcccagcttctttggagtctgaggctggaggatcacttaagcctgggaggtcaaggcttcagtgagccatgattgtgccactgcacttcagcctgggcgacagtctgaaactttggctcttaaaaaaaaaatcccttataattttattattctatgtaaatcacttgtttgtgttttgaaatccttctgtgtatgtgcttgtatataaagataaaaataaagcactaagaaaaaagcaaaattgagtacgttagctgtgctttttccaaggtcatttttagtatagtaatattactcaagtgtttaagtatttgaaataatggtattgcttttatattttacagataaaccacataatcctatggtaaatgctggagcaattgttgtgacttcactaataaaggtaaaatgttgatgtttcattttaacctagtaaaactttttttttttaacagctaaggcataaagatgaatctgggattatttatgtagaattatgaaaaattttctcttggtgttaagaaatttgtcttatggtatagtgttaggatctttatttcaaaataaatgatgtagtcatttcaaggcaaaattaaaacagatgactcattgtaaattccaacagtcatttactcttgacttgaagatctggaaaatatttaaagtctgctgaagaaaggcatagaggctttttttttttttttaaagttttgatatttttcctttcgtttccttttggttcttccagaatgaacagttataaatagaattaaaggcattttactgtatatttgttattagtatatgtgggaacaaatgttctggtacttaagacaaagtacatttaccctcaaatattctcaagtctttgatactctcatgagctgaaatcacagtttttattggaacttgtttcatttggttttacttaaatcatgccataattaaaataaataaggcttattccaattatggagttatattttcttatgctttgaaatttgcattgtaagggttttttttttttttagtgtttggtttgcgttaataattggaagatctagtattttaaaataagtatttgaaaatggttcctgtgtgatagatttttaaatctaccacacgattttagatgtttcagatttttaatttctaattataaattttatttatatttaaataaattttatttatgtttggaacatttgtatacttctttggtaaatctgtgcctatctattccaagttagaggaaagcataactacatggccttgtaaatgcattactgtggataaggtaccctggttacatgaaggatatttgagtataaatgatacccttggcccagttcacaaaatttcatctaacttgtatactagaaagcctttcttaacttttaagagttttatatctgtgagaaaaagcttttaaaatagaaggctggtatcttaagaatctatatgtttacttgttacttcaaggcaaattctttgaaagtattggcccatttaattcttataactctaatgaagtagatgttatagccaagtgtttttaaaatgtaactaattgtaataggatatggagaaagctgtcagtttgagctgaaagaaacttgaaaatgcgattatttgcaaggcacagtcctagctttaggtagcttactttgtagtgtgggatatgcaaaagtaaatgggtccttataagaaaattcaataaatgctgtgatgagagaaaagcctcattaataattgcttagatttgaacaagtaacttaaagtagaaataaggaaacacatacta

SEQ ID NO: 97879 - DNA, 5268 bp, Homo sapiens
aagaacttttaaactgaagagagattaacatacactacgcatagtctcaaaagggcttatgtaaataattaatagaagacttccttcactgcacacagttaaaaatctttcatttaatgattcatgggtttaacagactacaccgaaatgctgcatgtgggaattgcatgtctggttatcatatcacactatcatttcattagtttcacttgccatgtttagtcatgagtcataaactatacattgagctgcattttagtatgagtgattataaacaaagttaaaagatacatacaacataagtgtggttcagtgttcaacagtgcaaaaatttaattgagtcatcttgtacctacaaatttgatcagtgattttcataaaaatttaaatttacaggcaaagttggaaatgaggcttcaggatatggtttatatttaaggtcactttctcctgagtttttgttttgtttttagcatgtgtttcacaagtgctttttttttttttttttttatgaagttcatacaaatcttggagagcaaagcctgatataaccctatgtaaaattgaatgccccagaatatgtaatatttttcttaggatcttttagggaaaggattaaattcatataaatatctataatgtgatctctgcaaattgtatgatcacataatatttataaattggtattggtttgaaatttaggtaataaaaccatagccaaaaggccttaaaaattgtcaaacccagttctcttactttatataacggaggaaactgagaacctggcaaggttgtaacagcagtagaattggacttgaactaaatctcctgatactcaatgtgctgttcattacaattcactctgccatatttaacgtaggtgtttgccatttctcttgatgacatctttaattttagttagcatagttatattgccccaaatgcagaagtactatttccttaatttgaactggttcaaacgataacaatttattggtttaaaagttgtatctcatttgatagcaagtgttacgtagtcattcttcggacattagtcagtaaagaaacaggcccttttccaagatgcttgcatctgagtacccaaagccacggatatttcaccatggctactagaggtgaattctgtttttagctcttttaattgatgaccttaaggctatttgtgatttttttttttctttcaaaattcaggaatttatcatggtgccattaaaatcattttcttcatgttaatccccccaccccaaaattaagtagagtctttagtaagactcttgatttcataattttgtagtattgatattttttccttgtaggattggtggtgatcctcaggaaatgggggaagaggcagagcaaatgttcaaaaggattagcagattgtggaaaaaaggagaatttggacagaaggagcctgttgcataaattcttaactactaagcttataggaaaactccaatatttaaaattttaaacaaagctatataggtaaatacctttttaaaaacaaatgtaattttatacttaaaatgcacataatttttaaaaatcataagggtattatacttcctctctttttctctgtggtagctactaactttaaaggaatactttttgttgtaatctgttttatttgggattgtgataatgtgtgattgcttgattaaaaggaaagaacaaaaataaatttgaaaggaacagttatttttatatgatgtagcagtatccttacgtatttgttttcttttcactggtaaaaatttcacgtagttttagtttaaaagttaagatctggtgataacttaagggttaggataggaaaatgaggacaacatactgcaaaataattgccacacttaatgctttttcatgttagaaatagtaaaagttacactgtcttctatgtttttacctctcagagttttttgttttttgttttttagagacaaggtctctctctgttgcccagtctaagtgcagtggtacagtcataacccactgcagcctcaaactcctgtgctcaagtgatcctgccacctcagactccagagtagctgagaccacaggcacaggctaccatgcagggctaattctttataaagctagggtcttgccatattgcccaggctggtcccaaactcctggcctaaagtgatcctccaagtttggcctcccaaaatgctgggatgacaggcattagccactctacttggcatgcctcattctagtggtagtttccagtttttgtcatttaaagaagttcaattttctttttaatcaaaagtatttttgaattttaaaaattagggttttttttctttctctttaaacaatttgtaatcatactcattgaaaatcaagacaagcttagttaatgtatatgtgatgttcagtttggttatgttagcaataacctgttaggcatgcttataagacaggtttttaaagtagtttgtgactctcagagtaatgcatgatgccttggacttgcaacattcagaagacaggattatattggtttatttacttcttgtttatatcagtttatgctttagttttttttttttaatgaaaggtagagcatttattgtcaactgaaaattgttctgttactttatttttagggttgatctatgaaaatactagatctagaaaaacattcttttttacctggagtgtcttattttttattttcctaatactctttagctttaaaccattttctatcataagactaaattaagagtatttcacaaaatcgtttttagttacctctttttgcctttttcctctatgatctctaatttttaattggcttgcacctccatactttatgaatggaatcaagtgcgatacttacaaaataactctgatgcattgattttaaatgagccattttattattaaatttattggcagatgtccttgttaacagtgtttttcacctgttataaagtataatacatgaatcaattcataaatatgttgtaaaaactataaaacattgcaatatagttacattaattttttaatagataatgttaaaactcagtgcctctatcaaattttcattcatacagtattcttcaaaggaatgtaaattctgtaacttgacaggcatatttacagaaaaattttataatttactttttttttttgagacgaagtcttgcttgtcgcccaggctggagtgcagttctgcctcccaggttcacgccattctcctgcctcagcctcccgagtagctgggactacaggcgcccgccactgtgcctggctaattttttttttttttttgtatttttagtagagacagggtttcaccatgttagccaggatggtctccatctcctgacctcatgatctgcctccctcagcctcccaaagtgctgggattacagacgtgagccaccgcgcccggcctaaatttgtataattttctggtaccagaatctgattacccttttcaaacaacccatatgggtttgttttttaaaaatcatttggtgagtggattagaaattttgataagtatatttcttccaatttggtttattttaaaaatgtttctactgtatttactacaaatgattatagctttttcaaaaataatacagtatctaataatgcttgtacagtgatcttcaaactgggataaatatatctttggattccatacttggaattctttccaaggaataaaggggcattgacagttttaagataagtcagtttcaaaatctgtttctagatgcgccttttaaaaaattaatctgcctttagtccaggtgtcctcctattttccaaaagaaagacatagtctcatgtctttcaaattttagtacagtgcactgcttcacattgtaaaaacctcagcccaccagcaaaagaggacattttgaaatattagagtcagtgttattaagggtgtgaaccattgtaataactggtaataagtcctgttatatactaggttgtttccagttctttggtttcagcaaaatcgaaagggaatcttaagttgtcagtcaataggagcattagcataatttttgaggctagagtactgtatgacttttggcatgtaatgagctggaggcatataaagaactgagtaacattgctataataaaacttttaaaatttcaatctacttgtctattataagcaattcacacctctgtaaaaattaaaaatcggaagagaattagtcctgagttcattctagcaatagaagatatccactgatatatgaactaaaaatcaattactgtttcaaatgggaaagaaaaatactcaaaaggaaaatcttacaaattagtatgggaaattattagcaaataaatatttttcctttaattttttattgtgaaaaaattcaaacatacaaaatacacgagtatgaccagctctcatttatgcatgcctagcttttatttttgttaacatctgtttctccacccagctcaccccactactccataatgataaagataatggattttttatcatttttagttttgattttgcattgggggtggtttactctcttttgtatatgtaggcatgtgcttttcctaagagctttgcaaataaactttttactgtaactttttcagaattaatatgacatgttaatgattattagatctcatctatccttggggtacatggagtcgttccaagagatacacaagcagatatagtttattgacttaagttaaatgccatttccagggtaaataatatgaacaaacaataatcaaatgcctttacatttaaatgaggaagtatgggggagaaacattctttagtcaatgcaattattcaatacaggcatacctcagagatattgcagatcacctaactaaagtgaagattgcaaaaaagcaagtcataccaattttttcgttaaccaatgcatacggaagttgtgtttatactatagtaagtgtgcagtagtattgcatctaaaaaaaaacagtgtgaataccttaattaaaaaatattttataggtaagaaatgctaaggatcatcggagccttcagtgagttctaatctttttgctggtggaaggtcttgtcttgatgttgatgactactgactgataatggtggtggttgctgaagattgcggtggctgtggcaatttcttaaaataagacgacaatgaagttgccacatcaattgactcttacttttatgaaagatttctctgtagcatgcaatgctgtttgacagcatttt

SEQ ID NO: 97880 - DNA, 2758 bp, Homo sapiens
ctgtgaaacacaatgaagtgaagctcaataaaatgaggtgtgcctgtattttcttttgctctatttacataatctgtctagagaatgttgagtacccaaaatgttatactgtataatgctagacattggtaaataccagttgtttcttaaaaacaacgttaagagcaaaacttaattgtgctttaatttagtaagtcacaaaatagaccaattatgtgaccatagtctagagttgaatggtttttatttttgtgtattaaacatgacagcccaatgaagaaaacttgtaagagttttatagggtacagtttaggtcacagaatgaagttcaacataacttgtttattttacattgattgtttaaccagtaattatccatatgacatcccaatgcaaatgctgacatccatttccaaaagagttgtttttttgtgctttttctaaggttacaaaggtttttgtggtttaaatgttgttacatattttacagcattaggatctatggaatattttgacaactgcaacagttcaatgaagttggtaatttcttcttttaattatttttcattgaacagctttggagttacatttctacattttgatttctggtatattataaggaaagaaaaaattatgtcaaaggatactttagagaaaatacatagatagtgattacaatatggctgtaattaaattatccttaatcttgttgaagttttgttagtgcctaattttgatgaaatagtatggtgttccttccagctactgattgtatatatgtgattgcacatctttcttaaaaaagtggatttgtaggttttcacatattgtcagccacactctaatcctcttgtaaagaatgaacctggctttattcaattaaataattctctggtacaggttttcctcccataatattttaaagtacaatgttttgggttttttgagggtaaagtaaaagaaaatatgttttaaaaactttagttgtcaaattattttattttaagcctattttagaaattagagatgtattgtttcttttgggtgcatatcaccaattaatacgtttgatttcagatctacaacttactgctttgtaaacttcgccgaggtaaaatgaaaccatttggctacttgaactgatctacattacatagatttttcctattgacatttgcagtagataacatgtcagaaatgaaagtgatgaaacaatacatcttccatattctgaattggcataatgctaaatacaacagaagctaattttttagagactgtgaaatataattttttttagttcaagtatattatagcaagtgagagctattaagaatagagctttctctgcagtagtaaaatgcaaccagaatgtttgcatatactggaattaaaagattagttttgcaacataattcatttttctaactctgatattagtttaaggatttaataaaatataagtagattgttcttaattgaaatattttatatatacttaattcttttcgaagggtgaaactttattttaagtttttttaaatataagattaaataaataacacattttagcaaattatgtgctgtcatgaaagataagggaattcatggtaacttgtatttaaaattctgtaactttgggttgggtaaagatatacttaaaataaagcattccctttgtaattctaatgcattctcaacatatgggtattaaataacatgaaaaaaagtttatataaatgttaaattactttagaactatttcctagatttaaaaatactaatgcagtatattataatagtagctttgaaattttgatattggcttgaaacttaactgtagtggtacctatattaacgtatttatgtctcttatttttttgcagcaaggagtaaataatgctgaaaaatttgactatgtaagtgcaacatgtcattcagttttcatgccacattctctatatatttgttttttgattactaatattccctacttttggtttctaggtcatgcagtttttgaataagatggctggtaatgaatatgttggattcagtaatgcaacgtgagtgttttaaatactgttttgttacgtaaaaacacacaactgtatttagaattgatccactctcttttcattggagggaaatgaatgatttctaaattacctgacagaaacacttaaaaatactttaaatagttttgacaaatttcttacaggtaatcatacaatcagaagagaccccaagtttatctcaaattactggtgcttattcagttttatctttgcttgtaatacctgtcttacctctcttctatttctgttccaggctatctggatttttaccccaattttttattttaaaatttgtgagtctatagaaaagttgaaaaaataaatatctggaatcttttacttatattttctaatattttgtcttacttgctttttctcaatctctgtctctttagatagataaaaaatatgtatgtatacctctaaacacaaatatgtaaatatatatgtacatagattttttttccctaaaccatttcaaattaagttgcaggcatcatacttcacccttagataagaaagcacatacagtctaagaataaggacattctcctacataaccacaataccattaacacatgtaagaacgttaacgttaattttaaaatatcatgacattaatcaatatgtaaatgtccccatctcttccccaaatgtcttttacaacttttattattatt

SEQ ID NO: 97881 - DNA, 1041 bp, Homo sapiens
tttgttttgtgggtagtcaggagctattaattatttggcatctattggttttgataatttggtcccagtctcctttgtttgtttgatgttttcccactcctctccatgtgccattccccagttacatcagaatatttgccattcttcagtggagccctgtctatatacttttctaacccgttcatgatgcatggaatttgccagtgcctaggcctcaccctgaaatctattagtccattgagtcctgcaagatccattttgtgtttcccactctcagtgaaagttccatgattatgtcaagttccctgattatgtcaattaaaatggactcttattgtacttttgggtagccagaggattctgcagtttttcagtgtattttaatggtagaagatttgagaattttaaaattagcatttttgtttacaaaatatgaagactagaaaggacctgaattcgtttcagtcattttatagccaagaaaatgaagattgaaagaattaccacttaaatgacttgtccaaagtcacacaaatagcctattgacagaattgattggaactctgtagtcctgaatcttagttcagtgttctttatgctgtacattgctatgcaaatgaaattatgaacaatcacacttttaaagaaagtacatagagcaaatgtttttttttcttcttccaggtttcagtctgaaagagaaagtggagatcgaaattttgcaataggatattacttaaaagaaaagaaggtttttaaatttttgtttctatttcaaattattctttcatttaataaaatacatgaagatgtatgctaagaattcaacaatagcctttaagcaactacctattactatttaaggtgcagaagtttttgcagagtgctcgtgagtcagtgttatcaaattgttaatgttattgttaatttgatttgtatctggcagcatttaaatatttgactcatattatttattaatacaaattttgtttgaggtttagtctattttttcaaaagcatgatgcctgattactgttaact

SEQ ID NO: 97882 - DNA, 1152 bp, Homo sapiens
taccatatagatggggatgccgaactttgttatgggtgaaatgtcaggcactgtagcatttttttctaaaatggtgatttctcatgtagacactatcataatcttcatgtatggtgctttatcttaaaaatatttcatggctctttttttttctgttgagttaaaagtaattatgcttgtgtattccacagaaagtattaatatttaagcaaatttgaatatcacatgggataataacaaatcttagtgtttagaggctggcacttcctagtctagttctgccattaaaagactgagtatctttggccaaatcagggtaaatcttaaaagtgggtaggacttcggtcaactaaaatcttcagaatgtcctcaagtttatattaaagtaatctctttggaagaaatatttcagatctgtatgaaataccaaataaaatagattatcttaaaagtgaacagtaatattaaaagtagtatgagaattctgctttttctttgtgttagctgtgctccattgaagtgacttgtgaatcagccagtgtgatggctgcgacactggctaatggtggtttctgcccaattactggtgaaagagtactgagccctgaagcagttcgaaatacattgagtttgatgcattcctgtggcatgtatgacttctcagggcagtttgctttccatgtaagtaattgtttaatcttattttctctggcaagaaactagtctgaactggttcttttaaaaatgcagtttgaactttgcttctaaagctgtatattaatttttgagagagaggcttgttttcaaggttaatttgttacaagattagtaaggaatagagataaggtctaccagatgttcttaagaacttggaagtttgatttatagaacctcatcccttctgcttttaaggcaatccagtgtacaaggttagtacagtctttctttactttttgtttttaatgtttagcattatgattatgtatcttaagaattctctaagttcagaaagattgcaaagatgtgacgtttcacatctttggttacggccatagctgttttaaggactaaaagtgtattaaagttaaaacttaacaaaaatgtactgctttaagctctgttgtgcatttgccacttgtaaagtatatagac

SEQ ID NO: 97883 - DNA, 1290 bp, Homo sapiens
tcccctatccttgtcatatttcagtatgtaattctaaataaggatccttaacaaaacataacaataatacagtttttacatataaaaattaaatattacatatcaaaactttaatatcattattaatatcaatattaaattgaatatcaaaatatttagttagtgtttagatttcctggattatcttgtaaattattatttctttttttttttttttgagacggagtttcactttgttgcccagactggagtgcagtggcacgatcttggctcactgcaacctctgcctcctgagttccagcgattctcctgcctcagcctcccgagtagctgggattacaggcgcctgccactgcacctggctaatttttgtatttttagtagagatggggttttgccatgttggccaggctgttctcgaactcctgacctcaaataatgcacctgcctcagcctcccaaattgctgggattacaggtgtgagccattgcacctggcctattatattattttatagtttgtttgacttaggatacagatgaggtgcatacattatgattgggttttgtctcctttttttttttttttaaatctattggtcttcttttgacctgtctctctttttttcttgttatttttggttggaaaaactgggtaatttagtctatacagttttccactgtctctacattgctgattacctctgttccattgtcccttgtatttcctataaatttgtagatccaattcaggtgtgttttttttttttttttttttttttggtctgcttgttttgtttagttttgtgtaaaagtactttattggtatacttcttttatttttgtttgtttatttatttatttattttgagacagagtctcactgtgtcgcccaggctggagtgcagtggcgtgatctcggctcactgcaacctccatcgcctgggttctagcaattctcctatccagaggtactgactgactgaatgttagtaagcaattaatgaacactgctctaatgacattaatttttttttttatcatttgtcaagttttgctaatgtaacttaaattttttgaggaggagtaatttaaattaccattttagaaaatcttttaagaatatataactttttattgttttctagttgtaaaatatttttaaaaaataatttgttatatttaaaaacaatacgtttatcttagaacaattagaaaatatagtcaggaagaataaaagcatccatagcctcacaatttagatgtaactgctataattccttagaatgta

SEQ ID NO: 97884 - DNA, 5762 bp, Homo sapiens
gctgaggcgggcggatcacaaggtcaggagataatttttaatttttaaaccaatttcccaattgtgttttttttttttttgaaactggatcttgctctgtcatccaggctggagtgcagtggtgcgatcatggctcactgtagccttgacctcctgaggtcatgtaatcctcccacatcatcctccagagtagctgtgactactggtgtgcacttccatgtctcactgttttttgtagagacgagatctccctgtgttacccagcctagcctccaactcctgggctcaagtgatctgcttgccttggcctcccaaagtgctgagattacaggagtgagccatggtgcccagccccagtttccctattgttgaacataacatttcttattttaaaatgtttacctgaatactcttttactgaattatttttaggttggtcttcctgcaaaatctggagttgctgggggcattcttttagttgtccccaatgttatgggtatgatgtgctggtctcctcctctggataagatgggcaacagtgttaagggaattcacttttgtcacgtaagcatattttcttaatgtaaataatggtgttacaagttgagccatccaatgattcttttttttaacccattttccatagttcattaactcttggccctccgcctatagtgtgccagttactagggagccgtggaaatactcccagaggagcttcaagttgtctctgtcagacagctcccatttaattattcccacagattatatttgttagatgctaatattttaattttcatggttataattagtatgaattttcaaaagctcaacaaaaggtattaaacttggagaagtaatttaaaagccagtatatcttaagaattattttggtttattatatctttaatctgcatggttaaatatctttatccattgactacctttaaacatttttttgaggaaataagcactgaaaattaaaaaaagattaaaccatttttaaactgttactgctcttgatagttctgtattttgttgttacccagttcctgctaatgtttgagcttctagttttagttacattgattacttgcttgagttcatattaagtaccatactcaattaaaattgttttattttccagtcttttatattttacaaaaactagagtatgaccttggagtgcatataaaatatagtagattgtaaccagagtacttatttatattttaatgtggctttacacttatttgatagaagaattctttcatggggccggttataaaccctattttgtagaagatgaaagatgatttgattggctgagccctaggatcatgttagtaagcagtgttcttaaaacttatatccatatcttactctgattttagttctcttcttgatgcattatactactttattagcatgtagtgatgatttctaggctggacgatataagcagagtttgttaaaatatggatatatataaccaatgaatagccaatttcttatacctgctctgtataactgtttacaggatcttgtttctctgtgtaatttccataactatgataatttgagacactttgcaaaaaaacttgatcctcgaagagaaggtggtgatcaaagggtaagcaaaattcttatttagataagtatataaaatttttaagaagagaaaaagtgagatttgcctgtataaataaaatcttagtttgttagtggcctcgggtctttgctaatcataaatgagtgtaaacaaattgttgacatataaatccgggatcaccagtattaaatacttaaagattgtttaatagatagttaatagatacagatatttaaatattgctgttttgttatttaaattgaaactagttagcctagtgtcagggatttccccttccattttctgctattttaagcaagatttttagaattgattctgttaaaaaaagaacaaaacaaaacattggaatgtgctgcatgctataaagaaagcatcgttttaatatttgttcgtcctaaattgaagtttaacttcttgcatactgtgtagatggatatgtaaatggaaaaggattatcatattagtgagagaccgtatgaagcctcaaaagttttataagtcactgtagatgaaatatttttttccaccgtgtttaatgcaatattcctaataatcttacggtcctatttgtttgttacgagtttatttggcttcatactattgtacacatatattcctttttttagaagtagtattaagagtcaggacttaacttttttggtctatatagtttttcactgtaccaaggggcttgtgctgagaattttgattcagtttctttgcgtaccatattgaaaatgtttgtagtaaaattacctaattagacctcaagataatatgaagaacttctaagtagaaaatatttttaatacatactaagtacattttctgtagtgctaaactaaatttttgttagtttttatcaaattaatttctgttactatgtaagaattatgcaaaaccaacagaatagaaacttccatgggagtcgacctgagtaacatgaagcaaaatgtcagaggtggtggtttaaaatgttaacattttaataatgctcattgaaaaataccattttatagcttggacctttcttcactcaagtgcactaataaattatgtatgttgcttgaacaactagcattcctttggaccattggactatgaaagtctccaacaagaacttgctttaaaagagacagtatggaaaaaagtgtcacctgagtcaaatgaggacatctctacaactgtagtatatagaatggaaagtctgggagagaaaagctaaagaaatgggttctagtttcagaatgtttcttcatttaatctttcaaacatctttagcttttttttgcaagttataaatatttatttgaggtattttttgttctcaatcttgggtgctggagccataaagcttttttttccttttaatctttgtataaaggcagtagattaagaagtgcatttgttggtctttaaaaagtatttacaagtacataaatttgctttatttttaaaaatacaaaaaggaaaaatttaaattttttttgatgtaattaaaatgttaactatgtggtcagataatcccattttacaatagtaacagaaaattgtaattcttagttctaaaattcacaaattaaactcataagttttgttgcattttgttttttcttttccatttttaaaactaatgtgatgtctttagtggcaatagaaggtacttctatgctaaatacaaaactaaaaaggcaaaataatgaaccccaaattattttatttaaaatagcagtggattataaaattagcttgtgtttacatttatgccatttttggtgatagattggctttacattttaaaaaatttatttaaaaatttatcaaatgctttaaaatatgactcctactttttttattttgcaactcctctgttctgtcagagttgttatatacaggagtgtcttatgttactaaaacattccagccaaagaatttcagatgtgagataatgatgtttcatcaataaaaagctataatggttagttactcagaaggagaaacagtgagtgtcttcaagtgaattgttcacctaaacaattttattttcatattatccacataactttttctatgttatatttaaatatgaatggcaaattttggtttttagcttttacattttattatcttaattttataaatgctaatatttcttttgtgataagttatagcatctcataaagtttgttctatttgaagttttttagagtacttgagaaatgaatttagtctgcaggtagtaagtatgctactaaaatacgttagatctaaatccttttatttggtataaaaatgcaatattgagaatcaaaacttgtttttaagagaactatagattctacacaacctgatttcaagtaattattcatagtatttatagttgtcttggcaaagtgattgtaaaattctgtaggacctattcacacttcttccttcttccatatacttctctggttttccccatagttcccctataatttcaagtttgttgaaacctgttaattttagtgggggattagaagaaaaacttggtggtttcttagcatgatggtgtatgtatgtggtaatggaaagtctgtaaaagtaaatatagtgtagcaaaaaagatttcactgagtattttagatactagtgcaaataaagatagaaaatcttgatcataatgtcttaagtttgggaactgtgatattaagaaaagaaattcccttctagaggtgctggccaaaaagccttttgggctaacttaagtattaaatttatatatttaaataattatattttaagttgtagaggattttcccaaggattttatgcttacttgaatgttctttgaatgttcagatgcatatcctaactggatgcttctcaaggccttactgcatatttgtgttgcatatttatgttagttgcaccagggccatttgtagtttgggcaaccgaatgccttaattggaaaaaaggcattgtggtttcccctatgatctaaattgttacattttaccatttcattccgaagttggttttactttattaaatgaagatttagttttcatatcgtatacatagctgtatagatttcaaaattaggttgttaatttgtgtcacttactatttttgtgttggtaatgctttaaatgcatacttaaaaatgaagtactgttatctaagctactgtgtttagaaaatgttaagaatgagcagaaatttttatagaaaagtataaacggaagaagagataagatactgcgaataggccctcaaacttaaaaaagaaaaaactttgccagttttaaggacatattttgattctttcagtattcttaacacctttttaaacaaagttcttgatagtacccactattattgggtttgttttatgccattattgattcttgatattcaagcatttacaatgtagcatatttgattttcttttttctttctttttttggcatcattaacatttcatttgaaatgcatattgttcttgaagtactttgtttttagcataaatgttgtgcattttatcttagtgtttggatgaaaacatttgtgttgtttagctttcatttgctttgtatatttaataatgtacctttattttccagtatgcctacattttgtattgcacaataaatttattttaagctgattttattgttttttttgttttgttttgttttgtttttataaaagcaacttcaacattttaagtacaaatacagttgggattttaacttagaaaaaattattctttatgaagatactgttaaagtgtttgctattctgaagctgcctcaaagtaaactagaaatattcaaaagggctttatttgattttttaaaatgcaatatagcattagtggtttttttgggaggaggacttttcttattggttgtactagaagtatttgaataaaaacttttctctcaatttttttggtggtttttccatttggtaactttaaaaaaagtgcaaccctatttgtaggttatttctgctttctgaggaggaatattgttgttattcactatgtaactctcattttatctgttgttgcctaaataataggaaaaacattgctaaaccaaatgaagagtatcatcatattgctttagaataaaactgt

SEQ ID NO: 97885 - DNA, 1019 bp, Homo sapiens
tctggagattcctgaatatattgtagaagttttaaaactatttgaaaggggaaatactgttgtttacatgaatttgtattaatctgtgggatttttaaatgaagttcttttagaattagttaataaggagttccagtataatgatatattcaatatatgtaacagtttatgattacttgcttttaaagatttttttaaaaaatttatttgaagtaaagagagaggagacttaaaatacctggtgatcttgatctgacagtgtatatttaataggcatatatttatgtggaaagaactgctgaaatatactgatatgtcagcctatatcctgataatttatatataatgtgtgggttgcatatgtttgtgcatatgtatatacgtttgtgcatacatatatatgatttccttatctatgtaccttaatctacccattcatattctgaaaatgatgagcagttcttttcacattgtgtactatgtataaattattcattgatctattcctgttccaagctttgacacaaaagaacccctaaaatttttgctgccctagaattggtaaagtataacatactttacttcttcaatttgactttaaagatttgtggtttctgttaccattcccattcactaccaggactgccagggtaagagagtaactaacaatattgggggaactctggaaaagtgaaaccaagaatattagatttcatgtggaatttaaagcactttccaaaatgtattataaggaaggattgtattttttaaattgtttttgacttaaaagaagtaatgcacttatattgagcagtttatggaacagttttatttagttactgtggtacagtttttagttttaagaatctgttttactattcatctgtaaaaagtttggtttttctcctacatggccttgaaaatgctagaaagcattttttaaaggtatacgatcagaatacttaacgtgtgatttcttctcaattacttctctaccattttatatttaatgttgtatt

SEQ ID NO: 97886 - DNA, 1061 bp, Homo sapiens
cttattctttatttattattttacttagatccttgaagtatatgcatcattgatccaggtctatgcacaagatttataatgtaaataaagaatgaactaaataatactgtttgagatgaatatttgaattgagatgaataaacgttgcatctaatgcacaatgaaacttcattgacatctgatgaaattacagtacaagtgattttgttaacattctatggtgactaatactattaatcctttttaatcataccaataaaatatttctgccttaatgtctctttttactggactatgaagaaacaattctgctgttaaaggataaccaaaaaaataacttccacctatctgaatgcccttattctggcaaattagcagttttattgtagacgtacccactttaagttgctctgcttctcttctagaattgcttttgtaataagtgtaaatttgtagtcagataactcattgcttttatgaagttgctttcccacttgtgtgaccttaagaaagtggctgaagtccaggattcttctggcttcctggtttccatttcaatattttcaatccctgttttacttagttagcaaacttttttttttttttaatgccttctaaataggaattttgttctcctcatgttgttttcttctcttcatttctggtacccaaccaatatccaagattagatccctctatataaatgaaaatgtataacctttaaaattattttcttttggtctttttttctaccaagtaagaactaaaaaagattaccatccccctcagcatttcactagtttttgttcaaacagcacacaaacagaattatttcaagatatttagctaattaaatttgattgtgcaattcagatctatataaattaaccttagcattattcctgtgctttattattcactgataggttcttattcaactaatgtttatttcttgcctaatatgtgccagaaaccgtgaagtgtttaggatatgcagtgagtggttaatgagacaagtatgatccaacttgtgtttgcaattaagcagggatacaggtact

SEQ ID NO: 97887 - DNA, 1001 bp, Homo sapiens
gatgaggctttattgcttagaagtaccaacatagttttaaaaataataactgggtaattaatatattaatggtatatacaggggaatttggatttttcttagtggtgggggaagtaagacacacaaatgctccatgtggtcatgtgttatagtgccatagtgcagcaaaggtagacggagattacttttgatttaagagattggagcagagttcacaggaatgggtaagaataacatatcagtgagaaatgggtggggaaaaatgatttcaggagaatagtatgcactgtgggaggaagcaggaggtagatccagggttgtggtgggagtggaggtatctaattgactctgtccctagcacatgctgtcacagggcactgtgtgggcagctggcaataagctacatagataatgaatgctgggctgggatggcctggggaagactgacagcaaggaagggactttcgggctagtctttgagggaagggaaggatttgattaggaatctgggtgttcttaagagcatagacaccaagacaaaaacaagggcagtaagaccaattttgctctattgaggttgagaagaaaaattaagttagctggactgaagaaccttgaatacaaggctgaagaacttaaatgttatcaggaatgattttgggtttcttgatactccgctgcttagaaacctgtagtgattagagcaatgttttgagaatatgattagaagtatgtggagaggttttggagggtggaagaaggaccagaagcagaggcatcagttaatgattgaataaatcttgtaatgatattcaaagatgtaaaagttaaggtagatgggctgggcacaggggctcacacctgtaatccctacactttgggaggctgaggcaggcagatcgcttgaggtcgggagtttgggaccagcctggccaacctagtgaaaccccgtctctaccaaaaactacaaaaattagattagtggtggcacatgcctgtaa

SEQ ID NO: 97888 - DNA, 1010 bp, Homo sapiens
ccttgggagtagtatttggcagtggaaagtgggtaatgaatctgcaaagcagcaaacaggaggaagattagggtgatggagcagcatggaaggcaagtcgtgagagggtggagggtgctggggggatctgaaggaatcagggcttaggaagctgctggagctttggagagcgctgtttagaggtaacaatgagtgtgaaggtaattttcagggaattaaaaatatactttcaggaaataagcgctgaagggagaacaatagggtcaagtgttgctttttaaaaataggatgaaattgtgtctgttttaaggtaaactgagagaaccaatgaaagaggaaaagttaaagatgctagaaacaaaggggatcagtgagggaacaagaacagggcatctagaggataagtgtttgaaggaatagataaaaagtagtctcaaaaatgaggaagctttttactttgagcgatgaaaacagtttttatctttttagcaaagttgtagttaggatcttctgtctgtttttaggggtctccactggtattaaaggcctgaagaaagtatggcgggaaccaacaagaaaaaaaaattgtcaagcagtaatgagagaccaggtggaaatatggagaataatctgtaatagccagtcagtattctgtggtccaagagcaaaaagggaattgagaattcagagttgaccccattaaaaaagaaagacattaaggacacctgaaacagtggtttataacccagaaaagtgcatatcaaagtcacctggagactttaaacaaaattatgggctgagcatgttggctcatgcctgtaatcccaacagtttgggaggccaaggcagaaggattgcttaaggcccggagttcaagaccagcctggccaacatagtgagaccccatctctataaaaaacaacaaactctatgcatttacctcctttccctaaaatgtatcggattgaggtgtaggagtaggacaacaagaaatgggagagatgtttatg

SEQ ID NO: 97889 - DNA, 1075 bp, Homo sapiens
tctgcagtacaggaacttaactagctgagcacacccccaaaatactactattactatttgtgttgataccacttcaaaaaactttccacttagtcctttagcttcccttccagccatccttttctattcctgcccagagtccagaacagttttcttaatggggaatgggggtggaacaaagaactgaagaacatcacccagaatgttctaaaaacatacataaacatctctcccatttcttgttgtcctactcctacacctcaatccgatacattttagggaaaggaggtaaatgcatagagtttgttgttttttatagagatggggtctcactatgttggccaggctggtcttgaactccgggccttaagcaatccttctgccttggcctcccaaactgttgggattacaggcatgagccaacatgctcagcccataattttgtttaaagtctccaggtgactttgatatgcacttttctgggttataaaccactgtttcaggtgtccttaatgtctttcttttttaatggggtcaactctgaattctcaattccctttttgctcttggaccacagaatactgactggctattacagattattctccatatttccacctggtctctcattactgcttgacaatttttttttcttgttggttcccgccatactttcttcaggcctttaataccagtggagacccctaaaaacagacagaagatcctaactacaactttgctaaaaagataaaaactgttttcatcgctcaaagtaaaaagcttcctcatttttgagactactttttatctattccttcaaacacttatcctctagatgccctgttcttgttccctcactgatcccctttgtttctagcatctttaacttttcctctttcattggttctctcagtttaccttaaaacagacacaatttcatcctatttttaaaaagcaacacttgaccctattgttctcccttcagcgcttatttcctgaaagtatatttttaattccctgaaaattaccttcacactcattgttacctctaaacagcgctctccaaagctccagc

SEQ ID NO: 97890 - DNA, 1029 bp, Homo sapiens
cttcagttgatgcagtttcttcatagtgtcaatggtctttacaattttgtatgtttttgcagttgctggttacccctcgtggagtttttaacaacccagggtagacaagacaaacctttagagaagcataaactttaagatgataattaacactgaatgttctctcttaggatttgcaaagaagccagtgattggtgaggacagtgattgctggcagggattcgacatttatgcagcctgatgttgtttttaataataatgtgaattttatcagcatacaaacttgctcacaatattgagacatacaaaatgggaaggcttctaaacaagctaaaatgtataagaaaactgttaactctaaaatgaatatattggagtttgttgaaatttctgcatttggttggaatcagtttcagaaggcttcatgaagttaaattttaatcagtgctttagggaagagacgagactgaaggcacagaatgaaaagaagggcattctatctatagtgggaaaaatatgcctagaatatattctgctcctctcctctctctcctggtcgacatagcaaactgctattcatcctgcaacaaatgatgtcaacaaagtggtcagggaagggataagaatgcagcttacacatatacatgtacagtaaactctagattcatatccttggacattatgtactggagtagagtatatgagtcaatgagtaatgagaataaaagtttagaatgggaaaaaaacgcatacttgatggtggtttgatatgtattaggagtttggattcatttgagaactgggagctgtattaagtttggagcaagttgattactctttagctgtattgtgtttctgtttattaagcttcaattttttttttttttttttttttgagactgggtcttgccttgccactcaggctgaagtgcaagtggcatgatcatagttcactgcagccttaacttcccaggctcaagcgatcctcccacctcaacctcctgagtagctgcaatcacaggcaaacac

SEQ ID NO: 97891 - DNA, 1035 bp, Homo sapiens
ctacgtgtttaggtggaataacactcccatggatgaagcactgcactttggacaccatgatgtatttaaaattctccaagaataccaagtccagtacacacctcaaggagattctgacaacgggaaggaaaatcaaaccgtccataagaatcttgatggattgttgtaatggtctcaaatcccaagatttaaatcacttacctatttaattgtggaaaatgattatgaagaacatgtgtatttctatctggtagtgatgtatattttacatttgtcatttcagtgttactggagttttcttcattgtgcacacaggacaaatctgatctctttgggaaaaaatagaaataaaacaatctccctccataatgtgagcaatattacctcgtgcattgtataatttgatgtaaaagaaatagttaccaatgctagcttgtgtggtcttccatgatttatttgtgttttgtgaattttcaatttatggtgatgatctgctgatatgcatttataaagtaagctctgttgtacagtctgtccaaatgggtcaaggttgcctttagaagcaaatagtgtgattttcaagacttcaaatacaaatttagtttaagtgtttgaacaactatatgcacttacggttgtgtgtttaaaatgtctctctcaccccctagcttcatgatgtgactcttaaaaaactataatagttaacaactgttagtaagatagaccaattctgattagactttatcagggaatctgtttaagatatgtttggtgaccaaaacgtatgtgtgaatgtagttataatgcttttgaaaaattttcctttttctatatccccttagtccagcctctcttctcagacatttagctatctgcctctttcctttagctgggaaagtgagagctggcatactatgcagtttttatgttttccatagtaagtcagaaaatgcctcctatttctggcatcagaactttgccatttgtctacagaagacgaaccagagacaaaattactaagtataaattagtcaa

SEQ ID NO: 97892 - DNA, 1001 bp, Homo sapiens
agctgcaccaggcccgaagctgttcccatgcttgagcttccatggggaggatgctgagtgagcagtttcctaccccgtggatctagcaagccatggagacaggtagcatttgtaagatgctgcacaggagcagcattatccccaaagatattacagggtagacacgttttaactgaaatcaatcaagataactttattcaaagagcagcccgctttgtgtgactaaaatgaaacaagacagttgaattgtgtgacttgaagattaccaatgattttgaggcttttctataataaaaagaggttctaaccattatttgggaacaaagagagttttcatcttttttcagatcaaaaccattctgtaaaatctttgttgtttaattaaatgtgccgttatttacccctgatgttatttatgactatgtgccgattcctgctcgggctgtttgctgttggctggtaataatatatttgatttaaatgctgttgactgtgctattaactgctgccgtcagtaaactccaaagatctttttgttttggctttagtatcatatgtgctttttctgtatcctgagcgctctatatgatcatgttaatttaaagctttatacacattgttgtttttgctggtctcatctttggtaatatgctataccccactgctgcccgacactgccctttagctgcagagctggattagctgttgaccatttgatgctgttgtctgtctggcagggactgaatgacctgatgtcagatttagattcttcctggggattacacagctatgaatgtatttgcttctaaaacctcccaaagtgaatctaatcttaaaactacaagttgtaagtattctgaaattgggaaacatttattttaaatgcaatcaggtagtgttgctttttacagcataataaatatatgtatcaaaaaaaaaactgtgtggaaaaaatgaattttcttaaaacaattaagagccaggaactccactgagcatac

SEQ ID NO: 97893 - DNA, 1018 bp, Homo sapiens
acccccacgattagatgagttattactgagaagttattgcacccacaaaaaagctgccatttttttccaaagatgtcaaaagctagaaggccaggtcttctcaaagtaaaatacactgtgtattggggaaaaaagggtaagaggcataattaccaagttaggcatagtctgtcaagttgtatttagctattatcatggaatagtgttattccctgataatgaatgttggcatcataaccagaatgattattctcatctccatatcttcgtatttacatctaggaaatataaagcttatttatagtgaacactgagagtggtctctctccaaggagtaaagtaaatatgccctggctaactagtgtaagtttgtattctacataattaaccattataagaagtcactgagtagatcctaacttaagggatatttgtttgtgtttgagtatttctcgtgtggtgtttctaagtttgaaaagtgttttataagcatagagcttatgtgtgctactggggacaaatgtctcattttaaaggaaagagggttttctgagatggcatgaaatgagtgaaatctatttattgcctgaaagctaaagtggaatatgaaggcaagtctttctgaacagagcagtcctgtcactgactaacccagggaaaggacaggaaaaagctagaaagtgttttgaaaactcttctgcttaccttttgaattgggacattaacaaagtaaggaccatttatgtgactggcttcctttggttagttatgattcattcattaattaattcatcagatttatatagagcacctgccatgagccaggcattatactagatgtttgggaaacattggtaaacaaaagcaaagatccctgcttttatggaacttaagatattctgagacactggatcatacattctagtgcagtcaccttattaaaacttaagattttgtgatgcaaacaaacagccagaagctacaaataatgtaaatgttatatttaaaaaatacaatt

SEQ ID NO: 97894 - DNA, 1094 bp, Homo sapiens
agcatttcctcacccgtttcacatgagcagatttgacacgttgctctgtccccagacttgcataacagcaaaaagctttatgcagtctggatggattcacaaaattaagccagtgggcagcagagtaataatccgtcagcttaggtgatataaaaggtcttgattagcccaggataatacatagtacatgctgaaggccctcttattccacggtatttatttgccattgcaagtatcttcctactacttcattctagaatagacaagcaatgtttaatgtatgagtctgcatttcacaagatcagtgtaataaacttaaccacattttgtctttttacagatgaacacagtatagagcatgaatttttttcatcttctctggcgacagttttccttctcatctgtgattccctcctgctactctgttccttcacatcctgtgtttctagggaaatgaaagaaaggccagcaaattcgctgcaacctgttgatagcaagtgaatttttctctaactcagaaacatcagttactctgaagggcatcatgcatcttactgaaggtaaaattgaaaggcattctctgaagagtgggtttcacaagtgaaaaacatccagatacacccaaagtatcaggacgagaatgagggtcctttgggaaaggagaagttaagcaacatctagcaaatgttatgcataaagtcagtgcccaactgttataggttgttggataaatcagtggttatttagggaactgcttgacgtaggaacggtaaatttctgtgggagaattcttacatgttttctttgctttaagtgtaactggcagttttccattggtttacctgtgaaatagttcaaagccaagtttatatacaattatatcagtcctctttcaaaggtagccatcatggatctggtagggggaaaatgtgtattttattacatctttcacattggctatttaaagacaaagacaaattctgtttcttgagaagagaatattagctttactgtttgttatggcttaatgacactagctaatatcaatagaaggatgtacatttccaaattcacaagttgtgtttgatatccaa

SEQ ID NO: 97895 - DNA, 1050 bp, Homo sapiens
cagggaaatgtagcaaataggatcatttttaatttgaaatgttgttttctatatatcataatttattttaataaaaaattagatttttcaatatgaaaagaaaaacaaagtgagtttatctctagtaatttaaatctgtggcttaagccaagatgatccacttagtagtaagttatttatgtgcctatgggcagcacatcattgaagatgcaggcttttaaaggtttttaataaatcttttttgcccagatttataaatctaagcaaataatggcaaatagaatgttattgagaataatacctccctttattttccctgagacagtattataatttatttagaaataaagcagtctactgtatatgttataatgcttagattgtgattagttcttatgaggttcactcaaatccatcaactctgcagtgttttatttctctgtcctctttcattttgggatgttctatgggatttacttagcttttctcctttttagaacctgacttccatgcggttgaaccctacacgaagaaagaactttctgctgttactttccctgacatcattcgcaattacaaagtcatggctgctgagaatattcctgagaatcccctgaagtatctgtatccaaatattgacaaagaccatgcctttggaaagtattactccaggccaaaggaaggtaagtggggcaagcaggtggtaacagcgtggcacagtctttcctgatgagggggtgattattctgaaactccacccatgcagtgttttgctttcgaattggtaagagtaggctttcaaaagatggcataaactcagtgcaggtgaaacataatgcattatttggcctgatacagctagtaagaaatgaatggacaatttcctattttaggaatgttggaaaagtccattgctggtcttgtgtatttgttactatcactgtttccacatgaaaagggtttaaataaggaactgtggtaaaccaacagaaggcatcttgctcacgttaaagttgaggaaactgaggcctgggagaagtgaagtggttc

SEQ ID NO: 97896 - DNA, 1929 bp, Homo sapiens
ctgaccagccagacgagtttaacggcctgctcgagcagaggggcccactgcggggaacatttagattctgctggagtcaccagacagtgcggaccagcttgcactgctggattttgctagtgtggggcagcttgtgtttccgtgagtcacgctggaggtcacccccaggctagcttgctactgtttggaaagggaagcagagcccggcccagggaagtggagagctctggagagctcctggtctgaatgctgataagagcggggagggaacttgatattccctgccaggggagggatcccattgctgtgctgaatgggacagttccatccttggcacctggggagtctttgcaaatgatggtgggaggggccatggtaagtcattgttttagatttttgttcataatgtctgcatttgtatactttcaggaaaatataaatgataaaaattttcccttctggctttggattgaaagcatcctagaactcattaaaaaacacctgctccctctctggaatgatgggtaagggccaccgatagatgtattttgaaacatatttttagtgctgcgaggttgagacaaggcctgagtccagcttcagtatttgactaggcgtgtgtgaatctcacaggagtgcgcatttataggctgccccttcagggcttcagaagagtagaacctcataacattaaccttacactttcttagtacaagtatatgtattggcaaagctaaattaaaaaaaaaaaacaactcttgagtgccattcatgcattcattcactcaacaaaaattttttgagcacctactatgtggcccctaggaaggaagaaaaacccttttaactgggtaaatcatttctatcttgacttattgccaggatcggctgatatttcaacagaagctttaacttgatcagaagggctaaaatatgaaaatatattgcctaggtcttcctctccagtaaaaaagatgtatacattcagacattgttatggcctttaaaataataaaggaacaataaaaggctcattaatcccacacgtgttattgagcatctgtagcatcctactgacaccatgttcatatcgctttttttaaaaccttagtatatacatgtataagtgaaatgcttccttaagtgtcaactgaacagattttaaaatagtctacgttttttaccgtaggttttttttctcacattccagccattttcttggtttgtaagttagcatgaaaatggaaatcatgattgaactaaaagcccatccgtccatctcttcgatatccaggtgcatcatgggcttcatcagcaaggagcgagagcgtgccctgttgaaggaccagcagccggggaccttcctgctgcggttcagtgagagctcccgggaaggggccatcacattcacatgggtggagcggtcccagaacggaggcggtgagtgggagtttgagcacatagtcccaccattccatgtgtgtgaagtccctcttcatcgccgccagtcagctcatacagatagtgcgtttgggacatgaaattgcagatcttatacttaccccaaatgagcccccgataggatttaataaaccaccacaaatgtttgtggttgtggttcactctctggaacatattgtggaaatgatggttttgaaaagacaatgccaattctttcctttgcatcaggtttgttatctgcagatcaaggatgtgagtcaatgtaatctgcaacccgttcttggaaggaatcacatttcccacaggagtaagcatccacattctcttagggtcatcccagagtagagtgtgcagatgagacaggcttcgggagaagacttcatacacatcatcagccagggagttgatgcaggacctgttgggacgagtggcagcctctaccctgccttcaaacagagcagctgcaaa

SEQ ID NO: 97897 - DNA, 1050 bp, Homo sapiens
agtatacctctggatcacccggaattgtgttaaaatagggttttctgattgcctaatcatattagcccttgagattttccaacaagatcctaggtggtgagatgctgctggtctgaggaccacactttgaatcagaaagctttaagataaataaggactgagttaatgagagtaatcttgtgtatagtatctgagaaaccgtgaactaaattccagcgtggtaccatgcaactgtatgaattaatggaaactcccagaaatactgtttattttagacatgaattgagcctagtttttttgtaaccttgttaacagtttgccagcattttccagggccttgggaaaaatttcatattgacacataagcaggaagcctgtagtacatgtcagaagatctggaaggcaagtggggacttgactttggagtgtaaccagcaagtacacaccctgaagaaaacgatggctataatcatgcccttcccattacaggctcagtcggggaatattcagagcacagtgatgttagacaaacagaaagagcttgacagtaaagtcagaaatgtgaaggacaaggttatggtgagtattgagtaaacacatgcatttattctgaaactttctgtaggggaaaaaaggtttcaattgcttggggtgtaaacctcgtaactgagttcagtcttttaagtagttgggaagaaaaattttgcagaagtctcaagctataagtaaacaaattggcaaaatcaatgaccagatagactttttgaatggcctcttataactgccaaacattgagtttagctttttcttccctgaaagatcatgcagtaaatgttgactttgcccagtacccagtaaatgagatgttgctgctctaaatgggcctttatgtccacacctctcaaatcacagtgccccaggataaacatggcccatccttcccagtcatctgttttatcctaagacttggaagaggaacaaaaatacattttattgaaagaaatttggatacatttctgattaagacatccacagcaattttaggataca

SEQ ID NO: 97898 - DNA, 1050 bp, Homo sapiens
attgctattggtagtgttttgcaaactagctttgacaatggcaacagaaaaccctagatgaatatctttggtctagttcaaagcttagaccaacagatgcattcattgaggaatgtcatgtatagtttttatatcatttgcattgtctcgggatcctaaccaaagataattggccttaagaaatatggaaagatattaaagtaaaaatattatgtgaaccatatgtgaaaatacttgtttttaaatcaaaaagtacgttaggtacctgcacttagaaagttaaagcaatttttgtcataattcgtgaaagaaatattttgattttaacaaacatagcttatatagaatttaatagatgagagatgaggtttcccggagaatataaacaaattcatatcaacttacaatacacaataaagtaaacattctgcattttaatttatttttgttctaaccactcaaatctaggataattttcaggaagacccaatccagatgtctatgatcatttacagctgtctgaaggaagaaaggaaaattctggaaaacgcccagagatttaatcaggtacttttttctcattgaacacataaactgtaataaaataaaaatgtattcattcatcaaatactattagggcccatgtcaaagcaatgatgaatatctctctaattttatagccccaagaagtgggagaatcagatttagagattttatagaaccaggctttaagaaagatcctaatctaatggaattaagttctaacgaggagagagaacatataaacaagatacttctgggtagcataaagtgctgagaagataacatgctgaattcatggagtggctgggagtggggttgttcctttagatcagggtcaggaaaggcctctgagttgctggcacaggaatggaagcaggcagatagagggttcttgcagctgtccaaggtagaggcagtggaagcttgcgctcagtagaatcagtggaggtaggaagaggtggacagattcaggttatgctttggatgtgataccaatatagaaggatc

SEQ ID NO: 97899 - DNA, 1028 bp, Homo sapiens
cagaaaagcgttccctgggtttagcaacacggaggtcagttgctaaagggagcttctagaatgacgacgtcgccaaatctgtcctctgcctggattctcggcgatgaaactactacagagacctccaagtttgggcttctgcaaacacagcacgtccttctgatcgttctctaagatatgtaaacagaacgccagttcccagcgtggcaacacgggactgggctgcagctcacccagccggcggcccccgccggaagccggcggaaataccccagcgcgtgggcggagcagcggcccgcagagggaggcggtggcgcccacggaacagccgcgtctaattggctgagcgcggagccgcccggtgattggtgggggcggaagggggccgggcgccagcgctgccttttctcctgccgggtagtttcgctttcctgcgcagagtctgcggaggggctcggctgcaccggggggatcgcgcctggcagaccccagaccgagcagaggcgacccagcgcgctcgggagaggctgcaccgccgcgcccccgcctagcccttccggatcctgcgcgcagagtgagtggccgtgaggttccgggtgccgggggtgggacgcgcagggacagagtcctcgggccgtgcagttggacgccgggcgaggacgggccgtctgtgctgacccgcgaatagtgatcccagaggaagaacgcgtcctgagtattccaagtgcgagcagtgccacctgttctcggagatggcactgctcagcacgattgtccttgccagtcgtgctctggcagtgaagaggacttgtgaaatataattttcctctagaaggcactgcaccttcccatttaccgtcactttctcccgtttccacccctttccatcagtcacgttttcttcttttcgcagaaagtttcatttgctgtatgccatcctcgagagctgtctaggttaacgttcgcactctgtgtatataacctcgacagtcttggcacctaacgtgctgtgcgtagctgctcctttg

SEQ ID NO: 97900 - DNA, 1389 bp, Homo sapiens
ctgtaggaacatttacctggtaaatcatttaccttttggacatggcttgaagcaatattggatctaattaagaaacacattcttcccctttggattgatgggtaagttataggctatatttttcatatgagttaattatgttctttttttctgttgttattggttttcttctttctttttctcttaagcatgtttagtaccacagaaaaaaatagttgcaatttcttattctttgtggagtggcactatgtatattaatctatatatgagtatttcaggtaagaatgacttttgattacactcaaaacaaactgtaggtctttgtaaatgcaataagtgaaaatccaataatgatcagatgaaataatgcatgttctatttttaggtatgtcatgggctttgttagcaaagagaaggaacggctgttgctaaaggataaaatgcctggcacctttttattaagattcagtgaaagccatctcggaggaataactttcacctgggtggaccattctgaaagtggtatatactcactaatgtttattcatgtgaaattagttttcttaaatttggttactgggatttcagtttttggaagtgtatggtgtgttgatctgtctgtgatgtattcagtgggcttgaatattagtagttgcagttgtctcagaacagggtacctatgaattccaaaaagtctatcgtatgcacaatctatactgtccagacagcagaaggtctgacattgaagtgacatgaactgacaagtcactccagtggcatgaagataatgtgggcagggaagaaatggtcacaaggaatgtgtacaggaacctgtatatttctccaatttctgtttttcaaggggaagtgagattccactctgtagaaccctacaataaaggccggttgtctgctctgccattcgctgacatcctgcgagactacaaagttattatggctgaaaacattcctgaaaaccctctgaagtacctatatcctgacattcccaaagacaaagccttcggtaaacactacagctctcagccttgcgaaggttaggtttttctgtttgtttttgtttttttttccttaagattttggaaaataacctcatattggagcaaagtaaatgaagttccccttcttgtttactctgatttctgtaagatctaagggcatgtggaggtcaaagccttagaaatgaagtggtatgtcagcagttcctgaaaagggaccgctgggctttctaacactagcgagtaataagcagctgtaactaaacttcaccatggccatgggggcctctcatagccacttggagagcttcagttttctcctttgtaagacagaagtggtgcaggcttcatgtctatgactgagggaaaggaa

SEQ ID NO: 97901 - DNA, 1036 bp, Homo sapiens
tcctgcctcagcctcctgagtagctgggactacaagcgcccgccaccatgcccagctaattgtttgcattttttttttttttggtagagacggggtttcaccatgttggccaggctggtcttgaactcctgacctcagatgatccacccacctcaacctcccaaagtgctgggattacaggcgtgagccactgtgcccggccctaatggtgcatcttatctatgatgtttttccattctgtgaggaatggaacctgcgaatgtgagactgaatagtgttctagcttagactacactgatgaaataatgaagactatgacagtcatgcaagctgtgaaaattaataatgctttatttggtcagagcgtctttcctccagtcttgtgtatagtatgtcagcttccttgctggattttgttctaaatgtgcctcacaattgcatcagagatttaaagtaaacattagacattattttgaatcactgagaaaataatcaccctctcaccacccacatttcagttcagtaaagtattatataaagcgtaaagtctttttccaaaggtaatggacaacactgagtgtcattgctctgtctgtggaatcctggtttctcacacttttaagaccctgatatttggtggtgaacacacaggttccataactcaaagagctgaggaagctatcagtactgaattatcgtatgtatatttattcatagaaattaaactatagaccaggcgtgttggctcatgcctgtaatcccagcactttgggagtccgagacaggcagatcacttgagctcaggagttcaagaccagcctggccaatatgataaaaccctgtccctactaaaaatacaaaaattagctgggcataatggcgcacgcccatagtcccagctactcaggaggctgaggcaggagaatcgcttgaacccgggaggtggaggttgcagtgagccaagatcatgccactgcactcctgcctgggtgacagagcaagactctgtctcaaaaagaaaaaaagaaattaaact

SEQ ID NO: 97902 - DNA, 1108 bp, Homo sapiens
caccaagatttaagaactgaaaacaaaaggcagaggccaggttcctttttaaattgcactgttggccaggcatggtggctcacgcctataatcccagcactttgggagcctgaggaaggcagatcacctgaggtcaggagttcaagaccagcctggacaacatggcaataccccatctctactaaaaatagaaaaattagctgagcatgttggctcatgcctgtaatcccagctacttaagaggctgaggcaggagaatcgcttgaacccagtaggtagaggttgcagtacactgcactcacgccactgcacttcaggctgggcaacaacagcaagactccatctcaaaaaataaaacagaataataaagtaaaataaaaaataagcattcttctcaaaaattgttccttcctcattccgacatctctgtataactcggaggagagtgaaataagatggagaagtggtggacattctacttttccttgagacactcctatagatgatatagtaagtctaagatgctctctgggacaaaaggggagatgagtagggattgcctagcaaaaaaattctaagtggaagaggcactctgaatcagcaccacttgcatgttgtgtgaactgatggccagggacatagaacattagcccctggttgaaggctctgtcttcctcttctacctattgggtacccatcctcctcctctgcaccctattccccaccatcttgataggtgatcctttactcaaggttttcctaaaacccctctttgccatacttttgcatcctcctgtttcaaaaggaagaatgaccttggactccatggcacttgtcagcatcttgcagtgaatcagatccttcctgaagtggtataaaaaggaaggtggagaggaaaaacatctggcctgattttatgtgactatgcccccttctcaccattcaccaccaatgactgcacactcaacatactccagatcctgaaccaatcttgtgccttgtacaggacttttaaagagcctttgcaacattctacccacccttttgtttgggctgcccatgagctatgatttcatttctctaatgccagtgagctgcttatcgccat

SEQ ID NO: 97903 - DNA, 1051 bp, Homo sapiens
attttacaactcactgtactctgttgtgaaaacaataataaagggagcaataaagatcttaacctataatggagctcataccccaaatcagcagggattcaaccactcttgccatagtcttatatgtggaatacttaaagtagaaagagttactgtatggcgaggtggactttccaagtctgataagatgttctgtctcctgtggttggaagtcccttccgtgtccatttcaatcttactctttcctaggcttctggcccacactgccacctccgtttctgaggtgagatcaccacatagtgaataaaattccaagcagttatcagaggcaagcatttctaaatataccttactctaaagagagtcattgatcacttttggctagtacttaggacttgtaaaaatatatattgtgtgggaagatcggttacatatgtttttctttcagtatgcttacataagaaaacattaatcatggcatttttttatggctttaaatttgctctttttttgccctttagtgagcgccacatttttaacatatagatgcttaataagcttaaacaaagaatgattaaaagggatttagttccaaatgttgataaaatttcataaatgatgacatatataattgaaggtttaaataagaaaacattgaaaacatttaacatatgcatattcaagaaaaaaatgggttaggaaaataaaaataaaaactgtctctaacctaaatcaaattaagtgattcatttaattaatttaataattacttaataatttaatgtttattaactatgacccattgttacaatgcttttttattattaagtggaaaaactatctttgattttcattttctgttcaatagctttacactattggcagaaagtcttttccaactgagaaggcaattggagaaactagaggagcaatctaccaaaatgacatatgaaggtgatcccattccaatgcaaagaactcacatgctagaaagagtcaccttcttgatctacaaccttttcaagaagtaagtgaagtgctatcaatggca

SEQ ID NO: 97904 - DNA, 1396 bp, Homo sapiens
tctgtaatgttctctgctactcttgggagtactccctgtacaaaaagtgtacttttaaaaaataaggaattttcacagattttctttatactggtttccgtaattattttttctctatcctatttccctgctccttttgatgaaactccaactcggaacactctctaaatttcatctttaacctttttaatctttcttccgcatgatgacaaaagacaaatttggccctaatggtacctaattgccttcttacatctccctgtgaagccaaaagtttccttgaatctcttaaaccaattcagccttcttcaagtttgactaccttgtataagtttctgagcatatttatatccaatgctgtttcattctgtcaaattcagcacttttccttctcttcaatccaataaatttgaaaaagtgctttctcctgtgtcccaagctctgaactataaccctgttggagctctcaagatcaaaggaacaactgtaatataggtactaagagacaagttcagatgcaaagaaggaaaaaataggagagataatgcttgttcggtgtgattactcacagcagtgagatcagtgcctggcaataattgctgttcagtacaaatttgtggaacaaatgaatgagtggcaccagtaatgtctgccagcactggctgtaattgtatgggcaggatcttcataagcaaaggtgtgagcaggtgttacaagtgggcaacaccatgtaggcaaagacacagaggcaggaaagcaatgagacatggggagcttagaccagcacaactgatgggcccacttgccctactcgtgtgagtattcccagatgggcaagaacagcagagagctatgggaatgcccttcctgctagggagcaaagtgaactggtagtacagtgcagggctaaaagattctttttcttaatatatttgctctattataggactgaacgttgtatgtttaattctgagtcacagaataattattgctttcaagaaattatcctgaattttccttctgtagtttgtccaaagagctctagacttgaagacagagcgtcattgttctgcttccacatctaccatttgtaactgggcgaccttcccctccctaggcttcagtgttcctcactgcagaaatggagtaataataacacctcacaaagttgtcaaaaatgaggtcgtacttgggaaagtaataacagtaataacaaaagcttcttttttcttagattgattcattgcttcttttggtttcatcactatcctatactacatatagattgtgccacagggcatgttttagtaaaaaatatatatgcatacatatacccatatgtattcatccatttgcatatatgtggcttagaacaatgatgaccatttactactag

SEQ ID NO: 97905 - DNA, 1087 bp, Homo sapiens
tcctatgttttgctttttaaattatgggaacttctatggctattcctcaaaacgtagtgttaggaaagtagagggaacaggccatcttgtctgatattagaaaaataaaaaaatctctatcaattagaaagctctgctcagcgttttggtgttaactctgtggttagtaatctcactgcctatacagtatttttcacaagccagggtaatgactattagtgagagttttaaactcagtgagtgagggggcatgggtgtcacctgcacctcacatattctactctctgaaccaccatggcctatttcttaggggtcatttgggtatggctgaacgaaaatatgttagagctgaaagtacctcaaaaatcaagccataagtgagttccttcttgtttagtctgtaaaaaatgtcttttcagttctgaatatcccacgaagtgagatttttaatgacaaggtaaagcattagaaacacattttgcaataccaaagaggaaagaaaagtggcttgaaacgcggagctgctctgagtctgtcagatcctctcttctaactcatgttgctttctcagttccctcctcttccttcccctctatacaccacacacaaagagaaaaaaagagatgacctcaacctgagacctgagaagaatgtgtagccactctgtgttaactctgaaggagttctcaattgagggatcaatattcatgccattttgccacacatgggtagcagtcaattcgtcaagcactccacagttatttccccaattccccaacgcacaccctcaaaatctgtctccctttaagataataccatgatgtcaatatcataacactcatatttcgaaaggttagtgctgtttaagacgaaatgtgaattagttgtcaagactttgtttgatgcctaatatgggatcatcaacagaaggtggatggtgtgcatcacaatttgtgcatatcgcactaagttgaaatccaatatgatcaacggaagactccaaccacctgaaatttcattcgtgagtcattttgtgcatatccctccaagcctttattttatcctaggttgatcttcctcttgatta

SEQ ID NO: 97906 - DNA, 1050 bp, Homo sapiens
aatagacggggtcctttaaggtcaggtcaggtcaggtcggaagaagactgctctgcccttcctgggaggggtggtgagcagggccttctatgttttttccagtgtctcagccttctccactctccctccttcactgtctcttaaacacacactgagggctcaggcatgacaatgggatgggatccaaactgagttacacacctgcctagaatctgtgctctgtttggtcattgaagcattgctctggggcaggcatgactgagcttagttgagataagtcctctgtatagtgaaaagctatgtggtgcagtggttatgggctgggctctggagacaatactggtttttgaaacttgactcttctccttagtagcccccggaccctgggcttgtagcttaaacggtctgcctccattttctcatctgcgcaatgtgggtaattttgcagagctgccttctttgggttatagtaaggattaaatgaatcaacacatgtgcagctcctagaacagtgtcaggcacagagcaagcacttggtgtagatgttagttactactattcagcctttcctgcaatgctttcctggggttcctcctcccccacaccagatatttaaatctgtttgaatcctagcagtgcacataatttaggatttcatacgagggacccctttggaaaatatggggagaaagatggcaaaaaaagaaaccaaaatgttaagtgattgtgttacgataatagattggggtgacttttacttttaactctctattttctaaatcttctataacctggttatgttacctctgtactaataatataataaaattatttgaagaaagaaaagtcaggctggcggtctccagttggtttgctaaaaagggacaggagagagtgagaagccaggggtaggcctgctctagtggcattcacaggtgaagtaccttcccatttgtgcttatagttgcagaaactaggtaacggtgttgaatagtctttagcagaagtatccccaaaagttagaagatggggctattccttgtgaatccc

SEQ ID NO: 97907 - DNA, 1003 bp, Homo sapiens
tccttgatatactgtcttgtatagggcctgtatgcagtgagaaaaaggcactctttggggcagacacaatcccacaggagctcaactttattttagtcaccttattctgccgccccccctcctccccagctggcccacttttatgcagtacacaaactgaacaactgcacagagcagtcctcctccctgcatttagtcgctttgccaacaaattcagactgcccatcctctgcttaagcctcctttaaatttgttgtctctattgtgctcaaaatcattttggtggctccctgtcatctgtatgtagtggctgacctcagttttatcttccatgggaccatcaccagtgactctgagccttagttgttgccatcttgatgtgtgacataagtaatgactgtagcacagatgcgctggttaggctatgtaatgcttctctctccccgcccacccattcccaccactctaacacctgtgagctccttaggtctgactcctagtctagccttggcttacctttcatcccagcttcattgttcatcaggctcctataccggccgtcctctgctaccattctgccaggtcaccgtcttctgaatatgttttttattcttgctttaaacttcttttctgcttaatcacatccaactcacctttcatggtcgagtttcacctcttcagctatccttctgtgattctcctgctgtatgatagtagctgtacctctaaacagaaatgttcatctctatattcctccttttgaggtgaatcgcctgccctatatgaacatattatactggttatcttactcttaagtattctttcctcagttagattgcacatgcatgagaagcagtagatgtgtctctcattctttcttctttcattgcctgctaagtactgtttgtataccagtagcatgggtcagagtgggaggttgtcaacagaagagtccagcatgtatccatgatggactctcgatcaactttatatgattaactca

SEQ ID NO: 97908 - DNA, 1041 bp, Homo sapiens
gaggtgaaaacctcacttctggacaatatgattggagttggggatatggttcttttagaacctctcaatgaggagaccttcatcaacaacctcaagaagcgctttgaccacagtgaaatatacgtaagtacacacgaaggtcatctgtaatgtttagactttgtattttgtgccagagagctgtcttttcttcctcagactcttctttcttttttctctctgtttgagtccagcagtatttgctttataccctcagaaagagttgagtttttactgatttagcccatgagtaatgtgggttagacaagtcagtctgctttctgtgatcaactgtgtgcaagtattgtagtgggtgttgggggcattctaaagcaagcagaatactgccctctgaggaatttagaaggaattttgaaatccataggcatcttcttggataccttcataagattaacaaagtctaatcagggagaagctactcattgaaatgcaaggcagtaaactgtcaaaaaagacatgaactttctcgacatttgtagttagtagggacaggagcagattatcagataaaaatatgtaattggtccctgaagatttggctatagtcatgtcctactgtacaaaagtctaatgccatatacataaacagaagcataaatatgtatatgctataataggagaaaatttcctgttgtaaaaagtctttataaaggatttcacagggtcaagttctctaaatattttaaaaacatgaataaaaaatacatttatatgcagcttttctggagtttgcataaagcatctgcagaagtaaaggtgtactgttaactaaaccaaagaaatgaggcattgattccctgtacctgcagctgagaaggaaacagaatgttttggatgggagtagttttagtggactctgcctcacttcctgagttctctttcctcctttttaaaatgtgcatctgtgcatggagaagaactggattattgggcatgcttaatatttttctgtttatcattctagggaggaagtataaataa

SEQ ID NO: 97909 - DNA, 1132 bp, Homo sapiens
gttggttgatgcagcataacatcttttatgcaataaactgttgaatgcagatttagaatatttgtgaactgctgctgaacgtgggctgggaataacgtatgcaaaagtgccttggaaggtgtcaagcattctacaaagttatgttgttcgttattaccaccattgctattactttttcgcagtagcatcatcctctctctctcaaaacagatgatatgctgaaaacaaccccaaattgtcatgaaatgcacataaatacatgtgcatgtagatattgatgaggaaatgttcagtaaatgtcttggttgcggaaaagatttattggtcattggcatattggtagcggggcatttgaaaatggttaagctggcaatttgggtcactttagagttgagacattttcagtctttttaccgaaagcagtagtactcaaaatggggcagtttaaaaccccaggggacagttgacaatgtctggagacatttttgattgtgaaactgggggtaggagggtgcttgctgccagtgggtcagggatgctgctaagcacccttcaaagcatatgcagcccttcacagtaaagcgttgtctgttagccgtgtccatagtgccaaggttgagaaaccctgaaatgaagtgaaagaacctgcagaaagtctcattatgtcctagcagaaaggattttctctgtatgattaaagattggctttattaattttgacagaacataaaatctaataattaaggaacatatatataccactgtccagatgcttgttttagtttctcttgataatgcagcatgcagcgatatatttgggctgtttggaactaaagattatttattatttaaatgtatgaaaatggttattaatgaataaatctgctggtatattttaccagtcaagcaaattctgatcattttgttttcttctagaagtagatattgcaagtgttcttgtttcattttgccttaagacaaataatatctgaaatttgttttataaagttatcctgatagttaagcccctgtgatgaaatactttatttgatacctgaatattttaaattctagtcctcaaagccccacttctcaaagtatggtgcttggaccaattgtatcagaattcccc

SEQ ID NO: 97910 - DNA, 1159 bp, Homo sapiens
cctttttaggccatgtagggtaacttccagatgttgccatagcatttgtagattgtcatggtgctggtgggagtagcttttagcatgctaatgcattataattagtgtgtaatgagcagtaaggaggaccagaggtctctttcattgccatcttggttttggtgagttttggctggcttttttttaaccacatactattttatcagcagggtctttatgacttgtatcttgtgctgacctcttatctcatccagtgactaagaatgcctgacctcttgggaatgcagcccaataggtcccagctttattttacccagtccctattcaagatggagttgctctgttttgaaggtgtcttacacagggatttctagtttttaaaacatcgtaacacatgtgaaccattttatatacacataacattcagatagtatgattttcttccttagtggttacatttgactgccaggattaaagtatatttttgagtgacccattttaaaaaatgtgaaacgtggtatatgttgaggctgacctaagtaatctatgaaatttcacaaaaatattgtgagatctgtgttttgaaaacaagtatgattctaaaggaagaagaaactaaaatgcatattcatcatatcttattttaaagcctgactttcaagctttatttgatggtttactgttgtcattctaaaacagatgtcatcttcaaatgacttatcttgatgatattatttttgttttgtagccagtaaaaacaatccttttccggttatgtagccaaaggaaagcaacatggccacttatgtttaggatataagaatgtaaatgaaattagaaaattacatgttgataaaacagtcttggaaaaaaaatgattgtagctcattttctaagataattttcacctgcattctgccatctgtcatgctatggcatagcatctttgttatattgggatggcaactagggacttctttgagattagatgtataaaaataaaagtgcagtgccttaaaaaaaataagttgttgttgtatggtatgtctttttctattttatttcctttcaacctatctatgattttatattttaaatgtcattcctgtaggcacatatagttgactcttgtttttatattcattcttacattctctgc

SEQ ID NO: 97911 - DNA, 1035 bp, Homo sapiens
ttgacggagaactcctgaaagaaggggtcaagcattaattgtctctacactccagctttttcttgacacatagtagactctcaacaaatacttgttaataaatgaagtgaggactttacctattttaaatacattgtcttattgtcagaatcattttttcaattagctagaaggggcaaaatttactttagtaaattttgaagtggggaagagcaacaggaccactgctctggccttacttgatagaggccctttgtcatcctaaggcagggttagaattttgggaggcttgggctggacaaaaaccctggcaaacccaattttgcctctgatggatcttagagttgcagtcatttgtttgtaaaggcagtagttctgtatttaagttattgtagtaacatcagctatttggtatttgataatatttttcaaatgtttgaaaagatttttttccctcatattgaaacttcagtgtatggtcctgaaaaatctcaacgttatccaattttagacatgtggtgtaacattttctccttgtttgtctgagttacctggattttagtttaacaacccataaatgtagcttgctgggtttataaataaataaattatttatataaataatttcatataaattttatataaatttattaaataaatttatataaattatttatttatataaatagtaaatattatataaaaaataaagcatatcattagagtacaataaaacagtactattttggttaatagagaatacatggaagaaggtaacgtgtcacaatggatgggtttatttatttatggattttaagaattcaaaggaaataaaaggtgatagcttgctttccaaaagcatatcacagtggccctttaaggagcttgtagttccatctgataaacacataataatgatctgaagtctaaggaatttttttccattatcccctgcagctttgccctttcggatgaagcatacagatccctacgagatcaagataaggaccaatgtattctcattactggggaaag

SEQ ID NO: 97912 - DNA, 2089 bp, Homo sapiens
tgggcaacagaggaagactctgtctcaaacaaacaaagaaaaaaaacttgttttatattgtaagcgacagagggagactctgtctcaaaaaaaaaaatgctttatattgtaagcatgtctttactgtcacttaacatatttgttatggtggagtaaggtttctcagcctcagcagtgttggactgcttacatgttgctgtggaagggtgtcctgtgcattgtaggatggcctgtcctgtgcatctctgacctctgttagctgccagttgcacccctgcccctagttgttacagttgaaagtatctccagacattgtcagatgtcccctagggagtcagaaccacccttgattagaatctctaggctagataggtagtttggtggaaacttttggttcaagtcatagaagtaaagtcatggaaggatgagattcaacacggattaaagcagaactgctttggggtagttttttcccagtatgaagggttaaaaccctgccctgttgtcgtttgtactcaggctcagcctctcctgccctttcagagaggctcccgaacactgagtattcactgtgaccccaagacacacttcccatgcttcagtttcaccattacaaggacacaccatgcatctgtatccccagttagtagcataagagagaaatgaaggcaaatcatctattatgctgtttttgatctttcctccattgcaatatcttaataacgaagctattatggaaagcgatatctctcaattttattgttccaatatttgactttttgtttattgtcttttgcttttaagttggggtgctatacatttgctgtatttctgcatatgtttattttaagagtgctgtgatgtaaaggagaaatgctgaggaatgctgtagcctgcatctgtgactggaatctggctctttattcagtggtatttggaactaggctccagtgcaggaaatagaagaaatgtctactgtgggcatgcattatcttttatgggaatgctttactttttagctggagctgctactgtaaatgaacatttagaacaatgaactttaaaaaaaccaattgaggaatgtgtctcaagtgttctataatggaacacttgctttttattctgtggctcacaataaaaggctttagtgtttagggttgtgtttagtaatgtgcaactcagatttgtttgatgaaaagatggtttatggcttgcaaatagcaccctgaataaagtttctttgaagcaattccttcacttgcccctgaccttcaagccacaataaactgtcctttatgcatcaacatctctagtcggacttggggctgtgcaagttagctaacttggcagccctgcatgttcacacccaccacaaaagactagcctgtgaaaacacaagaaatgtcatcgtcttcatgataactaggtcaatacacaccattatcaaggttacattcatgaaagccttttaactggtggtggacatgagataagaatgggaacctctccagcaagcatccttttttgaatatttttaggtgcaaatttcttcattctgtatagcatttcagctcatcttctgttgaagacagaatttgctgccagggacctaccaaaccatactcagcccaagcagcatctctaaggcaaagaactttgcctgtgttgactttgtaaatgttgtcttaaccaagcttgggcaactatctttttaagaatcaaaaacacagccgggcgtggtggctcacgcctgtaatcccagcactttgggaggccgaggggggtggatcacgaggtcaggagatcgagaccatcccggctaaaacggtgaaaccccgtctctactaaaaatacaaaaaattagccgggcgtagtggcgggcgcctgtagtcccagctacttgggaggctgaggcaggagaatggcgtgaacccgggaggcggagcttgcagtgagccgagatcccgccgctgcactccagcctgggcgacagagcgagactccgtctcaaaaaaaaaaaaaaaaaaaaaagaatcaaaaacacgaaaaagccactccacacaaaatataatgcatcaagtgtggctgc

SEQ ID NO: 97913 - DNA, 2218 bp, Homo sapiens
taacatggctaatctcattacataaatagaattagaagtgaagtgtgggcgatagaagtaattctaatgaccaagcttctttatgtgatagagattttatttttgctgtttgcaaattacatacacacacagtatttaatatttgcaaatatatttagtctatagatcacaaaaatgtaaaaacccatattgcttaaaaggctattactactcagtgatatttgaaatctagtgaaaggcttggcaggtgatttggcttattaagtaacttcagagaaatcctattataacacgggtattaggatatgagattaatacctgattatgggctaaatcatttcatgcccagtttttagcagtttctctgctttgtggtctgtgacttgactagtaatatacccatgttttaattttataggaggactctactgtatttaaagttactactgtacctaacagtggtttatgtacttgtactccggggaaattgcaatgtcttcgacttgcaaaccagtctgtgttggtctggttaacctggaatgaattccttgacctcttcactgagtagtctgatagaccctgctatgttgtagttaatgcttgctcatcgtagctcacattttgaaccagtattcccatggagatgcctcacagtgtccgctccccaccacagcagctgtagtttgacatattgagctacgagttatttctgagtggactagtgacatgatcagaacccagcttttggcgagtaatcaggaagtggcttagtgggaatagtgtcattccactatcaactgaattctcagggctggccactcattggtttatccctggttgtcttccttttccattctctccagtgtttattctactctcctcaaacatcctatttttttactctcagctcatgatgttacgcctacttcacagaaatcaccatcatcatcatacaggccttcaaactgagttaatcctgcttcctggtgcctgacctatatgtatgtctatgtacactccttttacctaggctctagattctgtcgcctcctgtggccagggaccaccttctgtcaaaaggatcccctcttacatggtcaacctctgactcctttgacagagtaaccattctttccctcctttgtagctgcttcacctccttggtcccccaccttcttggaggtcctccctgtacactgagtggcctgggccacatgactggacttttttttttcctctctcatctcctgcatccaacctgggcctgttcctgtgactctccgggtagctctcaattctgtttactttttctctttgactacttctacttaaagccaccaacatttctccactaatcactgtagccacctcctgtcagctacatcttctcttgcttctttcctgttcattccatgctagccagggaaatcttgtaaataggcaggtttgatcatggcatccttgtttaggagcctttaaggacatggctttggtgtgacgagaatatctcaaagtaatcatgtgctccaacttccctctccagccttgtttcccactcatcctcacggttgccaattcttatgcctactccttcctggtctcccacctccttgcccacctgacttctgctgatactttgcaattaagatggggcagatttcctactctccctttgttcccgcttctttggcatagcaccaggacccactgtaggacatatcctcctagactggaatatccagttaacctgtctcaattcccccgctagacagtaagctccttgaaggcaggagccatgccatgctttcgcttgtgcctacttcagctttaaggaaatggttgagggacatatccttatgaataagtgcagacctaaaagggtagaggacccatgatgatgaaaaaagagaaggtgcaggagcatgcataagccgataaaaaggcacaaattgcattgttgactgagttccatgtgattgtatttcttctcccttaccctcattttgaaaattaatgagttaaagtaattcttaggacatgaaacaaaactaaagactttacttattagatcaacacacacttttccaaacaagaaacagctgtcacagttactctgttatacttgttactctttaggcaattatagaccagttcttttaacaatcagaatattaaactctatgtgtgtttctgtgtgtttaagatactatctataaag

SEQ ID NO: 97914 - DNA, 1092 bp, Homo sapiens
tagcttcttgtagcgtagaaaagaagacaaaatttgccattttgtaggaagtatattttgcctccttttccagcagctgcttagtgaaagcatagattgtcattggctaaaactcttaaccttgaaaaaggcacaatatcccttgagccaattgtgtacccaggaagtggaaaggaaagcccggtaactcctctctctttttctaaaagagacaaattaagtctgggactcacttgaaaactacatatccctgaggttagtgtcattaagagaggtattaaaatagaagatggtaaaacatttgtttcaatagagaagataaaatatagaagcacatccaaatgtttaggtgatgttaaataatatttctcctagtttgttaaggtttgttggtctgataacatttatgtttttgtatttggggattttgcatctagtgttatgaactggaagcttttggaaactagtttttaaaattaacatcacaggcatttggtggcagtttagacagtggagaacatatggtacaagtcgcaagggattctgtcttctagaagaagaatagcacagagaaatatacgctatgaagaaactattatttcagatgtgcatacacctgagcgaactatggactagacaggtcgtcttgttcacattaccttatcaagagtctagtgtaatacctgacacagcaggtgtgtaagtgcaaatacgggcaggctcttttttccttatccattatttggggcatacccgtgagcctacttttgcaactcttgttggtttatcatgtggtttccagtgtctaaacaaaagacggcaaattacttcattctctgtgcctccatttcttcactttgaaatgagaataacaataggactgattgcataggttgtcctgaggtataaattatgtattagtatctaaagcacttgtaatagtgcctggtacatagtgagcactcaataaatatttgcttttttcactatagttatttgtttattgtctctagcctttcaccaaatacatgctctataaggatagagccttagtctggttcattactgagtgaccagcaactaaaatagtgt

SEQ ID NO: 97915 - DNA, 1589 bp, Homo sapiens
ccatcatgtgaatgagcttgggttagctgctggatgaggagagacacatggaatgaactgctagacatatgagtgaggacatcttagcccagacggctgccagccagtcgccagcagacaaccaacccatgagcaagcccagcagagatgagccaagctggctcaggccagaaatatccagctggcgcccacaatcgtgagctaataaatggtattgttttaagctgctgagttttggggtgatttgttatgcagcaaaaactaactgatacaggggtgtgattgataatatatcctttccctcacccagtttggaagcacttgtaaaataggcacaagaatcaagctggagaggaagtggctttattactgttaaaggcaaggttgaggaaagtggcttttggtttatcacccaagtagatgtgttagtagtcctctggcactttggtagtgaggcagtgattgacaacgctaagcaactgctggcctctccttgtgtgcattgccccatctgtcttacagcactgaggagtagagccagatgtgtgcacagtgtggggaacccagagagctgagccctctgtgcacggccgtttccttctgcaaatctcactgctcagcaaagtattttttctcgtcctggggaggagtgagtaaggggccagcacgctgggggagttactctaaggagatgcttccacatggaaatgtaaagcaaaaggaaatggccaccctcctcacaatggagatggaggatggaacagattactctggattgctttgtttttttcacatttctttttaatttacgacacaattggcttataccttcatgtgctatctcgtggcacattgtttaatctgtgtgtgtgctgcattcatgccattttgtatggaacgtggttttactcttttaaattgtttgagatttacagctttgttcttccttttatatcatatatttgattttattgatggaaagtcatcaataaaaggcatgaaactgcctgttagaacacttcctaaaggaatctctgatcagttttctgggaatatatgtattgaggtgaaatagaagacttcctgtctatgggtcagttctcagtagtgagtggatattcgttaataaagtgtctgtttttaatctgcctttttagggtcacaaatcaaaaactaagagaatacattgcctaatttataatacatacaaggctgggcttcttttttttttttttttttttgagttttgagttttgagttttaaagctcctgaagaagacagaagtagtcaatcattggttgtgaagtatctgtagcaatacaactgaaatttcaaaagagcaatgctgtgacttcgtaatgggtggctttatatgaaagtagatgctttctctttatctcagttttactttgttgttcttcatacaaacatacgtttaccatgaaaaaagactgtatttatcatgaaaggagactatatacaaatattgaagaaaccaggtgctgaaatagatctaaattaacctcagattaatgaattaatttattcattcgttaattggtgtttattagggtagtaaatcaagata

SEQ ID NO: 97916 - DNA, 1067 bp, Homo sapiens
cacgggctttttgatggtgttattttgtgtcttgacctactacagtttgcttttgtaatgtgattgtggaagtgctgccaaacaatcgcttgtcatcattataaggtgccactgtaaggtgagaggacagcagctcacctcgtcctcactcacaagggccttggcatctcactgtgaagagagctgctgctgtttgtttgggtggcaagagcagccaagaacatgtgtgacttttgtagaccaagtggaaggtcatcacgtgtccagctggtgctaaacttcttcccaaatcgctggcacatagtgcgttagcagtagatgacctgtttgaaggaattcgtgcatgaatggatgaagtcaaatgtagcatttgtttatattttttatgtaatcaagccactttcttctaaacttgaggaatttcctataaaaattagcttttcaatgaagaatctgcccatgccctgtgggttttttcttctaaaactgttacaggatcccatagaagctcagtcacatgataagtaaaatcgtactgcatgtttaacattacttatttagtctatcttgtgctttgcatgtcagtttttacttattaattgactgaaacattccattttttagagatggtaactattacacaatccttttttccctaagttatatcccacttgtacttttcaacctttggggttttttttttttttcatgttttctaaatatgaagccttcattattttccatctatgatttgaggacattggcagtcttccaagtcatatgagagctggagaacatgaaaaatctgcagcatcctgcgcctaataatttttgtacttacatatttttgttctttttcagttggctcaattttatgttttcttatgctgcatctctttattcttacaatcttatgtatttggagcacgctaggacttctcattcatcaaatatatatcctttcactctacctaaactcctccacaaatgctggtgtaggttccagaaatacaaattaaaaagtttaatgatcgttcctagattaaatggcacatcattctctccct

SEQ ID NO: 97917 - DNA, 1037 bp, Homo sapiens
cataaggagctttcttattctattatcctggggtttgactcctttaaggttatttttaaattccaagtgtttttatggcaaaagttaatttccaactgcccttggatcatgttaaatcaaaactatttttgagacagaaaaaaatctttttatatagtttcagaaactcatatataaacccgagcgattagcattccacattcattagaaaagatgattttaaataacactatactctgttttctgtcttaatgtgtgatacacttgacatgatatggtaactgggatttacttgcaagtgagacagctgtggtgatggggaaaggggagagtaggatgaattatagataaaacaaaattggcatctgttaattgttgagggtgagtgaaaggacatgcgggttctttccctgctctctctacttttgtatatgtttgacaacaataacaaaaacttacattactcccattgctgtgtagcctagtcatttttaaaaagccagctgttctcaaaaagaaagtatctcttacagtatgtcgttttaaaaaactgtataaacatcttcatatggaagcaatagtctgttgatccctggacatgattttgtttaaaccttgagtccaagactggttttagaaccactttgcctggcacgtaattggcactccgtaaaaatttatgaatgaacagatgcctcctgttacccagtatcttgggctgggctcttcacctttgcaaaccacagtttttctgatatgtaaaatgaatgaggagcttttctttgtatggagttgtgcaagttggttttgtttctagtagcaaaacctcagtgtaaaaaaaacgacatacatacaaactgagctgctgtggttgaagtggaagtagggacccaaggctctgctcccagcctcctgtttcttctgtcttcctctttatgtgccctgcaacccccgccacagcaccagaggtacccccagggttcctcgaatcacagttggaaaccactgaagatatagctttgtcttttatgggtttt

SEQ ID NO: 97918 - DNA, 1126 bp, Homo sapiens
tcccaggttttggcctggctcacctggtaactagtggtacacactttgctgaaaaggtcactttacttcactaggtcatgatctaatcattactaaaatgagagtgttggactaggtgattttgaaaggcaccactaatgccttctttaaatatatcacctattattaaaatttctaaaagagttctataccaatgcctcatctcatacattttttaaaaaacaactaaattagttattttcttacttaagaaacataattaatttgtaatatatatctatgttccttggatgcttgtagtgttatatttcatgccttaattaaccctttaatttgaaactttttaaaggcacaaacaaaagtgagaaagaaggtcatgggtgttctggacatttatggctttgagattttcgaggtaagatttaaaattttttttgtattgtctttagtagagtggaatggttggaaattaaatcctgtattatgtagacattataagtaactgtaactttgaatctacaaataatccttgtgtagatgtaacacactatcactttgaatctgccaacaaatctttgtgtagatgtaacaaaatttggttgtgtattcctgcatgtgtgcctgagtgtgtgtgtgtgtgtgtgtgtgtggtgtgcgtatgctgagagccagcattttggagacagtactgcttaaaaagaactcgtattagtacctgacttttgaaattgcgtatttaaatttctaaccgtgaggcttccaacaagctacaatgagtatgtctgtggccatttgtgtgttgttagaaagtgtggcaggttggtgccataaagaaagccacaggagggctggacataggttctggccttgccagggctggtcatttcatctgtgagactcagagaaagaggatttggattaggtgatgtgttgagtctcattactgtgatcttatgataatgaattctgctgcagaggttgaaataatttctgctgaagctcatggtgaattttttaaaatgattctatgcttgttacagattaaatatttaaaccatttgtgcttggttaagcaacacatatacctaaaattagaatgatatagagaagatgagcatggcccctg

SEQ ID NO: 97919 - DNA, 1028 bp, Homo sapiens
tcctggcaaacatggtgaaaccctgtctctactaaaaaatacaaaaattagctgggcgtggtagcttgcgcctgtagtcccagctacttgggaggctgaggcaggaaaatcgcttgaacctgggaggcggtttttactccgtttaaacagaactttcagccaaggccaaatccaatcagttatatgtctatagcaaatcttataatggccatcaaattataaaaatttaactttccttctacatgcagtaaataatttttctttttttccccccagttccttgagagaatcaagatttgttttttcattatatttaattgttacctccattttcctttttaagccttctcagattaatcttcagttttgatttttaataacttttttaaataaatttatttgtggggaggttagattagcgatttggttggggatttttaggtacttttacctgctttttaatacagagttacagacgtgtttttcttcttttaataaattattcacatacattcccagatgccagcctatattttcctggattctcagcaatgttagaacacatggagacatcaggaagctcagagtgttaggaaaccaagaaaattaagaactttaaagtactgcaagttgaagtacaaggggtcagagtatggaagaagtattcagatccacatcaaggcaaaaatgaaaatttctgtgatattttccacccaagtgaaaagaaactgctggagtatagataacatgtatttttttatttgttctgttgttcttcaattgactgtaggaattaagagttctgccttttagaataccctgggcatctctttaaaaactggacactaaagggcgagacttttttaaaaaaatgcgtctagttgtcccatggccctgcagttcccatgaaaatgccttttttagctgagctggtggaaacctttcattccctgtggtctgtctctgaacggaagagggaaactgatgcattaaaccatgggttgatgacacatggatttgactgcaaa

SEQ ID NO: 97920 - DNA, 1138 bp, Homo sapiens
tgtgacctaatagaaaatgtgagtacttaggtacagttttctaaagaatgttttagtcctataattcacccttataaatgttctcagtgcctcaatgttaagcattagtattttcactgttttttatatatatatatatatatatatatacacacacacatatatatgtgtatatatatatatatacacgtacacacacacacacacacacacacacacacacatatatatatatgttaaggaactgcagagttctagagattttattgtagccctaagagatcatacacagttcttgaacacatacatagacagctggatgttttgatacttagccaggatccccagtggccatatcacaacacccttttatgaccttcagacaccaggccttaaaggtaccagcctttcttgtatggttggagcccaggtctattccatgactcctgggcatgtgagtactgatcagagtaggctctgagcagccatccagttttttgccaaatcaaaatatccatttcattcccaaaactctaatgacctcttaacatactattcaccgggtattatattaagtttaagtgacataaagggacaacctctggagctgaattaagtgggaccccagaagtggcttaagtgcagctgtagcattgattcagatcatacatgcagagggcattgcatgtgtgactgcaggtggccagggacctggaatttttcggatgacccaagtatgtgcatatgcaaaaaggcttaaagtgtgaaaaattattggataatttcgagtaagctttctgagtccaagatttttgtttttagatcatattccgtagtttattgtaaatgaattaaatgtaggaagactgattttgtgtgtggaaaacaggaaactaatttatgcttaggattactaatacctgactttgaataagtaatttgaaacagtgtataagccttattatcctgcagtctttttagcaagaccagtttagtgagatgagtgctgtgtttcaggaatacagtcacatgctctgaatgaatattaaatcattttctactcatcttttacaaagctttttgggaaatatgtaattagccagtattttttttcctcagtattcaagatattcctaaa

SEQ ID NO: 97921 - DNA, 1090 bp, Homo sapiens
atataatgcatatggtttttcagttctttttttcaatgtaattgactccaacatgatggcattttgtctcctgaaaattcctttcctgtatgctgtgaggtttcagaggatttttgataagtccatctatcatttcttattagttattcaaattagaagacctgaggaagcaacgcctggaggacttggccactctcattcagaagatatatcgggggtggaaatgccgcacacacttcctgctaatgaaaaaaagccaaattgtgattgccgcctggtacaggagatatgcggtaagagtctcagtcattttaaatcagtaataacaatgctaatttgccaacatttattatgtacttaccatgtatgtgatttttacatacttaattctcccaacaacctcatgagataatggatgttcttaatggttcttttttttaaagatgagaaaactaagacacaaagctgttaagtaatttgcccacagccacatagctataagtggtagagctgggatttgaatccaagacagtattagagctcaagttcagtgtgccataccgcctttcactgatctagctgtatttggttggaaatacatttttaatttggtcatcagattggaagagacaatatcctttaagcttttgatttggttgggctagtttttcaaagtaattggctattctttggctattctttattgtagcagctttgaaagtggctttaattccagaaagctaatgccatgtttttgtagatttctggttttggttaaaggattgcattctctttagtccttaggtatctggctctattaactatagggaaagattcaataataaataatgtttacctagttaatatgaaatttctttttggcatttccttcctcatttgattgtagagattttgttgaaggcataccacaggtatgagagaagcctgaaggtttgcctcagggttaattgaaacttgggctgtgttctcacaaaatgaattaagtttgcactcacatctcctttcttatattcttcctctttttcagccataaagagactttgctatagggctgtatataatcaagaca

SEQ ID NO: 97922 - DNA, 1471 bp, Homo sapiens
aggagaatcaggcagggaggttgcagtgagctgagatggcagcagtaccatccagctttggctcggcatcagagggagaccgtggaaggagaccgtggggagagggagagggagagggagagggagagggagagggagagggaggaagatgatttcatgacatatgaaaagtatatggaatagagatttcagtgtacataaataaagttttattggaacacagccacattcatttatttcacagattgtctggctgctgtagcactacagtggtagagtcaagtagtagcgatagactgtgtgaccttcagagccaaaagcagttaccatctggcattttacagaaaaagtttactgatccctgatctaggtcaacgatacttcagagcctgttctgaccactttcctgtgaggagactttgtggtatggtctggatccagaggggtagtgcccaggcctggagccctttcagagggtagacgctgggtcccgagtccagcaacactgactgaccttgcccaggccctcgacaacttaagggcttagcagttgtctcacagcaaatggcaaaacacaaatctgaacatgtagagtaagtgaaactgctgcctgcaggctcttccttggcctcatggctggaccttggggccccgtttataggcgagagaccttagaggaaggacccaaagtccaccttgaaaccaggtgtcctcctggcccccataaaatcagtttccagcaactaatggaaagaagtcactggtttgggatcaatgagatcattttggttttggagttttaaaaatatcttgaataaaaaggacagctacagttacattccaggcaataataatgaaagagatacagtggcctttagaggatcattggaatcctctggcccctttctgagaactgtttcatcccacagatgtgtgccagcttgtggtgctgtagtcagatttttcccattgtgtatcagggtacgggaggctgctgttccaatcaagtggaaacccatgcttaatgatgtcttcattgtccaccttctcatagtcagtttggggctagtcaccttcgccttctttaacctgttgatttatcacaatagcatgggtgttaggacgatcatctcttcaggtttttttttcaagtcactgtcaattcctttatttttaaacattctctcttttgggtgattctgccctttaggctcgaaaaattctgcgggaactgaagcatcaaaagcgctgtaaggaagcagtcacgaccattgctgcatattggcatgggacccaggtaggcccgagaccccaaggaaggcggtgggtcagcagtaacgtcatgtggaaccatgaaccctcggcttcaggggcagaaaatgtttcactggcttgagctactgagcacgtgtttgcttcttgctctttccaacattttgttgtggggtggtggcacatgcttttgcgttta

SEQ ID NO: 97923 - DNA, 1005 bp, Homo sapiens
gtcttttgtggtatattttcctcatgtagtattttctgtcaacccaacacaggtgcaaaaatacttcttggaaatgaaaaataagatgccttccttatctccaatagacaagaattggccctcaagaccttacttattcttggattctactcacaaggagctaaaaaggattttccacttgtggagggtaaaaaatgtcatattacatcttttcggagactttcttatttattttgagtgtttaaaaacacataaaatcaaaactgttaacacattcttcctttgcctcaaagaggattacttgaggactttggtgattttcccccatgcaccatattgagtttctacgagagcccctgcagcggcccaggcgttccctgtgcggtcgcctctcggccctggctggaacggggagcacagggctgcattttctttccattccaggttccagctgctctcaagtagttcagttttttgttcatttgtttctctctttgtctaaaggaatactgtaggacagagaaatcataaaatttggacaccttcaggcaacatagttaaatcctgcaaattgaagagtttactttatcagatgtacagaacagataatcagataatacatgtgaacacacacactttgatgggtgggaaaaaaggctttttcctgtccctaaagatagtaacacattctctatctaaattacagggaagctggaaatctgttttatactgccttttattttagctctcttattttgtataagaggacatggcatgtaatttagatgttgcccagcatggaacacgtggggcacttgtatagatgttgaccttacttcgataacctagtcagttgatatgtggaatgttaaatatatgcagttatcagatgtaataaaatcatgagatggaagggcatgtatttagtaaatgaatgctcagtacacacatcctccaggaaactttcctgcccagcacggtgggcttgtttttttgttagaatca

SEQ ID NO: 97924 - DNA, 1054 bp, Homo sapiens
acttctgtggcctgtacagcacgttcagttcctttattttagacaccgtggactcagaaaaagaaggaacaccaatcccaagttcagcaagtgaagtccttggtaaagactgtttatcccaatagtcttacatctcctgcattcatcacttcctcccagcaatctaatcccattttcatctggtgtttataaaaaagtagattgtacaatttcaagccaaatctgtaacaactttaagcttcttccaatgaatggccaaagaaagaatgtattatatgctgagtatattcacatttattacgtaaattatgtttatattctctgtgactttatacacatttaaaatatcttccttttaaaggattaaaggaatatacattgccagactcactgggtttaaatattttaaattgtacaacttcattggttagctgatgtggctacttgaggtgatacatactcccttaagtcaaacacagtgtctaaatccaaagttgtccaaagtgcctgttatataaagcatattcaaacaggagaatttgtctgtatgcttgcttcagcaactaattttattcagctttttttttatacatttttaaattagggaataaccttcttaatgaacatttcctgtggatgactcttcagaaactacaggctggaaaatacatctttgaggaaacaatttaaaagcctgttagcatttttataatttaaaacacagttgaataggaaccaaaaaaagttaacttcaagccaagtcctttttgggtagtcttatcagttttcagggatagtggcacactcaccccacagcagtgagagaggtggaataatttagcctcccaccaccctgcaaagtggcagctcttatgggagttggccttttatatcctgagagctgtgaaacgctgaccacctacgtggatttttcttcccttatcctccacccacaacataagcatttaaatttgtatttgcaaattgccagaactttgtagctcaaaatgaagcttatagattccttgaagcagcagtttttccttggtgcctt

SEQ ID NO: 97925 - DNA, 1117 bp, Homo sapiens
agttttatttataatatacatttttgtatgagaaaggtgattggtacagggtgcctattttagtcatggatcaaaatttgtgtaacttgcagggctttctttctttttcttcaaatttacaagggttcattttggaaactacattttaaactttggaatcaaattgtttcttatttgggaggataatgtatatacattggtattatgttaaataataaaattgttctaatttggtgccatttcctgaatcacaactgtatttttgtatctcaagctattttcatatgttgtgtgtcaatgtatcatctctcagaaaggttttacaatccaaacattatatgttctctgtgtaactgaatttcacttatcttttataaaccagaaacattaattgaaaatattttctggggattttctcttgacttgtatttttaaaaattgctcacataaagaagttctcagaagtctttgtgtttattggtgcaggtagaggatgtaattacttagattcttcttgccttgtgcctaaagtggtagattaatagttcctgatactggtgagtagaaatttgggaatgagagggtgtggtgttttaaataacatgcagtatgttcacattgttcagcatgtaagtaagtgttaaaatatatacattacaaattctccatcctatcaaccagctatctgcttagttcccaccctccccgaaacattaaccattgttgttagttgcttttgtattactttgtccatatgtttgcaaaaggaaatcaaaatagattcttacgttcttctgctttagtagacaaaagctagtatattatattgtagccattgttctttatcttgcctttttcacctagcagaatatcatgaagagctgctcattcttccgttgtatggatgtgctgtggtggatttacctggtctcctactcattatcattgggttgcttcctaaatggaacttgaggatggaagactaggatggaaaggagaaatatcccataggtctacttgttagatttttccaaataccttatttgcagattgttcaatcagtcttgtcactgaagtattcaataatttttggtcatggaacccattcttcatgggt

SEQ ID NO: 97926 - DNA, 1054 bp, Homo sapiens
tgcctgtaatcccagcaactccagaggctgaggcaggagaatcgcttgaatccgggaggcagaggttgcagtgagccgagattgcaccattgcactctagcctgggcaataagagcgaaactcggtctcaaaaaaaagcttctccctaagccttcagttggaaatatttcttattttacttcattatttttctctttcaattactaatattattattttcaagtacatatcattgcaaacatgaggtgtttcagccacagtatatgaataaatttgagatgagcaagggaaccaaaccatcttttagaacagtttttatggcaaaagatattcatggtctctaacaatgcactaaattaacttttgaaatatagtctatctatggtgagagggaatttcagcacaggcaaaacaccatgaactgctgaaagaggaattgcagagtgttaatagcttggctcttaaaaaaaaaaaaaagatgtaaatatttcatctactcattcacccaacatcattatcaagagggagaactcaatcatggtcctgcaatgtgttagtgctatctccttcccagctgagggcccattacacaggcttctcccatttcaaagggaaaaaaaccaaacaaacaaaatagctgtcatctctattgatctgggaagactatttgccaactagaaaaggcaggcaaatcttttcagcaagtcacgtgaattcttgtgaggtattaaagttaaaaggcatattgtgagaaactccttccaatataaatactattttgctttttttttttttttttaagacggagtttcgctcttgttgcccaggctggagtgcaatggcgcgatctcagctcactgcaacctctgcctcacaggttcaagtgattctcctgcctcagcctcccaagtagctgggattacaagcatgcaccaccatgcccagctaatttttctatttttagtagagaaggagtttcaccatgttgatcaggctggatggtcttgaactcctgacctcaggtggtctacccgcctcggcctctcagagtgct

SEQ ID NO: 97927 - DNA, 1076 bp, Homo sapiens
aggagacaaaggcactctttgttaaactggagctagtcttacctttaaggatgggatcatttctttgaccacagatctcttccttaccaaaggatatgccctcacgtcagaccagaaaagaataggaagcccatagggaaccttctgattttcaacttggtcttttgatgttgcctttgaaatataccctggagcttgctccaaaactagaactggaagatgacacttttcataggggatcaaccaggagttagggagatagaaactttggacagaagcctgtgatattgttccagtcctaggggacaacaataaactacttttttttttttttttgcctatcaaattggcaaactggcaaaaaaattaggatgtacatactgttctaatttggagtacttaggaaataatgggcctgagaccctaatctgggtggcttaatttgtttcttgcaatacctctacagaatgtttcgccctggtggtttagttctgccctgtagctgcagctacctttccgttttcacgtctttgactcccttgtttatacctgatttttttaagggtgtattcacccttctattttgtttagcttgatttttttttattgtggtaagaacacttaccataagatacaccctcctgataaatttttaagtgcacaatacagtgttgttaattacaaggcactatgttgtacggtagttctctagaacttattcatcttgaataactgaaactttatacctgttcaacaataacttcccgtttctcccttcccccagcccctggcaactaccattctactttccgtttctgagtctattttagatacctactgcaagtggaatcatgcggtatttgggcttccatgactggtttatttcacttagcataatgtcctctaggtacatccatgttgttgcatatggcaggctttccttttcataaaggctgaataatattccattgtatgtatataccacattttctttatccattcctccatcaagggacatgtaggttgtttccttatcttggccataaataatgaatgtgggaatacagatatttctt

SEQ ID NO: 97928 - DNA, 1032 bp, Homo sapiens
tgccttcgcccctgtcccgggagggtgggaagctttgaccccgccctgcccactcgcgtctccgcagccgtagccgcgcctgtcccaatatgaatagggtcaacgacccacttatttttataagagatattaagcccggactgaaaaacttaaatgtcgtctttattgtcctggagataggtaagtggggtttgcagcctactccaccgcccgctgtgcctcccggggcgggagacaggggcgccggccgctgcgcgcccggggctcccctcctcctccctcccctcccccacccacgtggctctagtggcctccgcccgagatcggatcctacctgaggcgggagccctgggcttggtcacttcccaccttccagatgtattaaaataccggaggaggagttagcctttctggatgtcctcattatctaacaacccctccctttgatttttaaatcctcacaggacgcgtgaccaaaaccaaagacggccatgaagtgagatcgtgcaaagtagcagataaaacgggcagcatcactatttccgtgtgggatgagatcggaggtcttatacagccaggggatattattcggttgaccagagggtaggtgtgcaaaaaagtcgggggacctaacagtctgcagaatcgggattggccggctcctgggatcttggcaagccctgaagtcccccgccttttctgtgggccactcttgaggagttttgaactcctttggtgttaactttgggtggtgggcagcgctgggatgtaacagacctttgcagtgaaaggcagtcggtttcagctgggaaatccgcgcctctaccccggtttacaggttaagtagatttttaattattattattttttgggaccgagtctcgctctgtcgccaagctggagtgcagtggcgtgatctctcctcactgcagcctccgcctcgcgggttcaagagattctcgtgcctcagcctcccaagtagctgggactacaggcgtgtgccaccacgcccagctaagttttgtattttta

SEQ ID NO: 97929 - DNA, 1047 bp, Homo sapiens
aagttgttttctctagtgtagttgccactcagttgtttcccaccccttctccatttttaatgacttgaaatcctggccagtattttacatatgttatttagaaatgtggacataaatgaaaattataggtaaaggatttagcatattctgtgatatgtcaaatttgtacttggaaaaagagggaaactttacagtatctggaaggctcattctccaaaatgatttcttgtgtcttctgctgtaaggtggatgttgcgcaaaaaccaaagggatacacagaaaatgtttggcagaaaggcatctacaataccttcatccaaaagagtcagttggcggataggtggctttaaaaaatactagaactttttttttaaaaaatagattgcttttagaaatttaccaaatttttatcttaggaagataaaagggcagaaaaggatcttaaaaacagaatttggaagcttttgagatcaataaaattgtaataatttatcattaactgcagggaaagtggtggagattgatgttggcctaataagtagaatcttagaagtattggaaagcactgagagtaggagcttagagctccttggtgttaccttgcaggcttacaacatcttcaggaagtgaggtaaagtgtcatcaaagcaggaagtgagagtcaggacttagacattttcttctcatacactgactcatgacagtaatttaaacttccacatctttaaaaaacaaaagagaattccttcttagggaagtatggtgaggattgattagtataattggagtttttggctccccaaatatttttcacccaatgattgaaagtattttttacgctaaaaacggcatcttatttcaagtatttcatgttctgtagtgacagtcataggtgtttccatcaaaaaaattattggaaaattaaacttattagttaggtactatagaattttaaggggaacaattacctgggagtacaatttaaacgaaaattaaaaactatagaaactctatttactacttcagtatgaccttgagaagttacta

SEQ ID NO: 97930 - DNA, 1020 bp, Homo sapiens
tggtgtgctgagtaattatcaggaaataggatgtaacagagctctgaaaggtttgggaaacgtttcttaacattataacctttaatgacctaggaaaaatctttaaaaaatttgttaattaaaaaaaaaaaaaaagccaaacccaaaactttaaaaaagaaaggatataataatgttgtaataatataattgtgtttttattctcgtttggttaaattaaaaacttttttttaggcacagagtgaacagaagaataattccatgaatagtaatatgggtacaggtacatttggaccagtgggtaagattttgtttgtgtgtttcatttgtgatcaggtataagaatgaagagagctgtaaagattcacgtgaaaagcaacgtctttaggcataaattagtgataaaggtgaactaccagtaaacagggaatccccaaagggctgattttctagaaagttgataaacttaagccagtttattgagaattctaagtttttgtgatgtccgtgaagagataccatgctattttttttttattgattcctataaaatttctataatctagtgattacttatagtagatgcagaattactggttattttggtgcactgaaagcgttttatctttagagtcatagttcaccttaatttttcacatacaagtagctgctgctttaaaagatgagctgagccgtttaaaggctagtgaccctcagatgtcatttaacatgacccccagacatcatgttcatgatccttgtagctctgttaaaggtcttctgaagtcttttttcttaaatatatgaggaaaagtcagtcttttgtgattagagttcattaggatggctcatgttttggttttgttttgtttttgagacagggtcttacgctgttgcccagactggagtgcagtggcgtgatcttggctcatcgcaacctccacctcgcaggctcaagtgattctcctgcctcagcctcccaagtagctgggattacagatgtgcaccactaccacccag

SEQ ID NO: 97931 - DNA, 1030 bp, Homo sapiens
tgtgggaaacgctgcctttgcctttaaaaagttagaataacattgtctgttttgagatattaatcatatttgagccaaattccaatattcactattttgccctttctttttcttttatagtgtaggcaatgcatttttttactctattaatttctaattttgatgcccaagttggcttttttctctctattaatacagcatcaagttagcatatttatagcaatacatttggaaaaacttagagcccacattgttttttttttctgtataaaaataaaagtgtgtgctttaatatttttaagcattaataacatgttggcacttaagatagttctacttctatagactacctctgaaaatagtgatgaatttttgtattcttttttaggaaatggtgttcacactggccctgaatcaagggaacaccagttttcacatgctggcagaagcaatggccggggacttataaatccacaactacaaggaacagctagtaatcaaacagtgatgaccacaataagtaatggcagggaccctcggagagcctttaaaagatgacctatgctaaatactcatgtgtagtttttatactacatgccctacttgaacacttattgcacttttatttattgttaactgtgaaaagtacgtcctttattgggtttccttttatattcttggtttgttaagaagaatggtttgtttttatagcaaaactgttaagctgctcgagtctcctgttgaagaatgggaacactgaaaagtaggggcatttatttttagagtaaaaagattattggatagcctttaaaaaacctgcacccatttcatgggtgagttacttaagacatcagctttatagcctctatgagtctatcttctgtataagttttgtaatatttaacataaggcttaatgggagatgttcttttgtcttgtattcagatattgccaactaaagcaataaccatcaaaaaacacaagaacttgtcaatgctagcagtaatttttgagtgtttgtggctctcgg

SEQ ID NO: 97932 - DNA, 1044 bp, Homo sapiens
gtggtacccacttcccctttttactgtagggtggataactcttaggatttaactctttgaatattatctcttgaataaagcatgtgttaatgttaacaaacctacgtaatttttgccctttcaatgacttacagtggagagccagtacatcttaactactgttgtagtgatggtatcaacctcatggttacttagctctgcatttgttgctttgttttttttccacttcaaatcacaaaataagtagattttgttttctgaaaactccatagcatttgaatacaaaaagttgtgccagattgtttgccctaattcactgtgtttaacaaatatttcagtacacactatgtattaggcactgtgtggaaagtgttaaggggtagacaaaataccgaataatctccacaagtttatttgtggtctatagtacttttgtaactggggttacaaaaattatagaaatttttttcctttgttcatatgcatattcatgattataatttggctttgtttgtgattaatgttttcttaagattttcacattatagaatacctcaaaagaagttgtctaaggactgggatagagagtatgtttcataaaattgtagatgtttagaatttttaaaaaccctacaaattagtatatgattgttttatataagtaagataggagcaacactttaaattatttgtgggagaatacagcattaaaggtgattttaaaagaaaaaaatttggaattttagaaaatttaaatgctgtcaggtatggaatgctgggcttccaatcctggcctcattgtctcctcacctgtgatgttggatgagttattacacttgaaatgtctttaagccttaggttccacaagtatgaaaacaagtaagtaacagtatcctttctagacttgtttaagatttccatgtaagtaattataatgacttctgacacataataatgtcgtcttataccccaacagtaggaaaaaaatgcagaattcagtatgaaagtattgttaccctttaacacagtggtccccaacctttt

SEQ ID NO: 97933 - DNA, 1096 bp, Homo sapiens
tttgctgggttgagtaatgccaagggaatgatgctaaaaacaaatagatgtgaggttagtaaaagattaaagttacaatttatgatacgagaacttcttaactataggaaagtaggtaaatgaccctaaaaggttttctcagaaggtaaaagttttacatcagtctgaagacatataactctaacatttcagtttagttactgaaatgactttttctggtgtcattgagatactggctgtttgttccaagccattttaggctgagaatgactcttaaggtcttctaatgcatttcagagggttctagaaacaacaaactgaacatgatatgaaactaacaacatagaatgccccccaaacaaattcctctaacctcactgagtttacttgccctattactattttttttttttaagatcttctgtctcttgtttttgttttatcccttacctgatgaaagtgaacatttctagtggagaaagaagatcacagttctctaatatgggcattaagagaggggtacagctagaggggaggtgaaaacctgcctccactggggtgaaaaacagtgtgctgaggtttcagccagtgattacactgggtaatcaaccagtcccatgtttcacaaaggagttgtaatgattaacagttcaggtatgcttctgaggaaatctaattgagacctttggaaaatagcattgttatgaatggtgtggtgttacgccctgagggaaaagctagaaaaacattttacttttcaagtgtatttaaattacatccaaatgtttcagtgtgctttactggagactgcctgagtttggaattcaaatattgtaaccaaattactccaggtttctgaactaaaatgatctattgatgtttctcaaagtatagatcacagagtaagaaaagaggaaatcaagtctggtttatgacaaacttttttccatgttaacattggacccaaagatgttactaagagctttttactactgtgagagaaccagcgtgatgtgaagacaacgaacattttaagaagtttgactagtagacatttcgtttaagtcttttggagggtcttggttgacaacccaca

SEQ ID NO: 97934 - DNA, 1154 bp, Homo sapiens
tctaccacaggaagcatttatatagaggtaataattaaatttaactttttattattctctatgcccaagagaatgtgggtaaaaagagaagtccagagtgctaaagaacaagactttctcatcgtgttttcccatatcctcttcctgtttctcttttcagtatcagggttaattcttgtcacccactgtatttccctccccactcttttaactgctctccagtgtcttatcaacaaaggcttcaactctggtgctaaaagagagtgatttcatttttttaagttaatttttacctgtatacttgcaaagcactagaattttcttttaaatgcaaagggagtccttatttttatttttctagtcttagtgttatcttcagtcatatctgcttaggttgaatttcatacaataacattgtagttgcactactgctaagtcactcacatatagttcatccttttcctccacttaaataatgagaaactaattatgttttcaatagtaggactaaactgctgtgctattgacaaagtcttgattgatttgaaatatgagaaagctgatgcccttcactgaaataattggcttagactctggggagtccacctgaatttaactgttgaaaatgcttattgagtgctggcttcccagtgggtcctgtgcttggtgctgctacacacttgatctaagaggcggtgtgctgtaggctgagataccacttaacctgtggcagcagggtgtgtgagctttggagtctgcatccactcatttgaccattgatttttttcttcagtaaacattggagtccctctgatgtgctaggcatcatattaaacctgagggaatagaatattgaatagaccatagtccctagtaatcaagatacttcagtgattggggtgagtggaagagacccacaaggaaataggcaactatattacaccatgataagtgcagtgctgtgacagagggtggtatacctagagtatcatggggacagatacaagaagaatccaatccagatgtggggttccagggaaggcttcctatagaaggtaatatctaagttagtcctccaaggccagtaagagttattcaagcaaatacaaagatgtggagagggcattatgatccttcctgagagaagtgctttc

SEQ ID NO: 97935 - DNA, 1025 bp, Homo sapiens
cctaatttatactagtaatgtacaaaaatgatattaggctggtccaaaacaatattcctttccattacatatcagatattaacagttggttcattctctggtttgataggatttaaactcataacattgaaaagtcaatataacattcattcttaggacatttgaaatataaaattgttgaagacctttaaagtgagataaaatgggcccatgacttgcttgattgcattgtgctgagtcattctttgtgccttaatgagtaagcagttaaggacaaagtaaatgtcttcctcttcaacttctgcctgtgttcaattcccaacaaaaatttaaagacaactgcacagaaaagcaaaataataacttttccaaaataatccaagcttctactaatgataaattctttcatctgaaatattttaataatttgcttaatccacatctttattctgtgattgtagggccaaactttaggtaatagcattggactgagatttgtaaactttccaaccttccaggaaatgccccagaagcaacagaattcacagacagaagcaaaatacagggcactacagttcagacaatacaacaagagcgtccacgaggttaatctaaagggagcatgtttcacagtggctggactaccgagagcttggactacacaatacagtattatagacaaaagaataagacaagagatctacacatgttgccttgcatttgtggtaatctacaccaatgaaaacatgtactacagctatatttgattatgtatggatatatttgaaatagtatacattgtcttgatgttttttctgtaatgtaaataaactatttatatcacacaatatagttttttctttcccatgtatttgttatatataataaatactcagtgatgagaaaaaattggcattcttaaatttgcggtatctcataactgtaaatataatcagactagtacaatctgtacagctaccaatatttcatgtttcttctcatcttgagacagcacattagttcgt

SEQ ID NO: 97936 - DNA, 1033 bp, Homo sapiens
ttatgtgtacttcagtaacacttcataaaatatgtatataatcaacctctctatctcatgaacattgaaataatttggggaaaaaacacagctttgtgtcactttagagtaggtcaaatgaaaagagtatgttgcccaacattactacatcaattaaactttatatgaatatttaaaggattctggtaataattcatgtgacaaaattcaaaagcagccttttcaataaatgaaaagtttccaggtcaaatctcttcccgacattcatacatattttcttgtcttgcgttaacatgagataacagtcagggttacaattttacctataactaacttaaagaaataagacaggtaaaaagaaaagaactgatttcatgacacaaatatagaattaaactgtcaagattcgaaatgttcaatatacctcatttagagtaagaattttaaattcaaataattttctttgaatatgataggaaatgaatgtattggccagaaatttgtgacaattaattgcagaatggctgaattgtaatgaaaggctctaaggaaaaaaaaatgatgaaatgaatgtgctgtttgctttcaaatcatttacagttgaataatttatgttatctttaattcatccagttaaattatccaagatgaatacaatatgaatagaagaggtttaaaattgtcaggtttttgcattaaaatgtttgccagtaaccactttctattttttattaccattttaatggtttcatatattgcaatatgagttagaagactaagctggagtatacaatgtaatgagtttccagggttataaatatttgacctatgtcttgagacattaaaagaaaacctcttatgtagataggttatgtattcactcaaagaaaactaacctaagtggaaattactctgatctgccccctaaaatttcacccaccatattctttccctttctctgaataacagcattcttcagttgtttatgccaaaaactttggagtcaacctgattttctctaaacgctacttct

SEQ ID NO: 97937 - DNA, 1117 bp, Homo sapiens
tgtttgaactaggtaagataattgatcacatataacgaacgactagctatctggttacacttttttctattcagtgccagaacaaaagaaagaaatttagtttataacacattgtcattatgaagttatgacagaaattatctgttttctaaaaaaaaaaacagttatattgtttctatctttgtatagaattagaattagagagatagttttgtaaggcagatagaggatgaataggatgaccttttaatttcccattttgccttgtgatttcttgattgttctgcactactgacatactgagtcaattttattgggatacaggaattttcattcttactgcagtgtatatactcacattgccatacgtggagaaaacacttgaattattatatttgggaaactaacaaagacttcagtgtcttataaacataggaagaatatcttgtgaatgcatatacattttccaagtctataaaaaactttagctccttgttttgatagactatcagcatatgagattctagagattgtataaattgggcagttctgctttaaaaaagctatttttttcctaatactatatcttcatttcctacaaattattttatctagcatagcatttacactgacgttcatggtaagatataaaaacattctccttggtaaatttaagaatctttttaaaatgtctgaagtagaagagaacataaagttttccaggttctctagctgaaagaaagaaggaagctctggaaattttctttttcttttgtgctaatccatgacaatatcaagattcttcatcagtaagtgatgctgaagcacccagaatccagggttcagttcatgggtattgaatcagtagtgccttaatcctatgtgcatttaacattaatattattcatgctttatcataatgtaattctctaactgaaaaagttttaataactccacagtaaatagagaataaagtacaaacacttttagtcttttttctcagaatatttggaactcattttaactctcttttcagccttatatttcactattactcatcaaatactcagggtataaaataaaccgtacattttactctgccttactccctacatgc

SEQ ID NO: 97938 - DNA, 1018 bp, Homo sapiens
ctattaaacatgctggtaaaatgtgtcagagtatactgctttctactcttataaaataacccgtgggttatattttcaagatgacaaaagctatttaaatgagatagttagtggacatttttaaaaaactgaaaatcaatccagaatatgtgcttgaggaactctcagggaaccaattcgaagatttgcacgaggatcccaggattcctagtcattttttcagccttgggccatgtaggtacacagaaacataaactggcaccagagctagaatacctaatttaggggccccaggccagggggtgttaagattgctgggtgctcaacactctcctatggggcacccaggcatgtcccagaggaaatgtgtggctactgaaaagtgcactgtggttgtatacatcagatgcacaagtaacacaaaaggcaccacatgtgccacacactggagagttttgctacctccccgggggaagccaaaatgcgccgctgcagcacttggaatgaaaatgcattttctgtgagcaacagcctcctttgaagaaactgctttctctttcaacatttggaagctgcttggcaacccacaatcaaggttttcgttatgttgttttaaacaggcccattatcagtgtctcatctctctgaaagcttcagacttcatcatactgtttttaaagattaacatattatacctgataagcttctaaaacttgcagccttactaaagctgactgttccagcactttcttcctattaaaagtgagttgcacaagaattaaaatagatactgtttgtctactcttttcttgcgataagaaggcaacacttcacttgttctgatgttcattttctatccgtacattcaggaattcatttttaagatgtcctttcttttgtcaaaatgttagatctgtgcaagaatttataaaggaaaatcatttcagacatgtttgtaataggcaatattaaaagtaaatttgaaggctacagtgacttattgcaatattttgtttgt

SEQ ID NO: 97939 - DNA, 1150 bp, Homo sapiens
atttagttttgtttagggaagtatataagatgagagagagagagagagaaactttaaaagtttgatctaatgtacttactaccaaataaagattttacctatagattgaaactaaattgtaaatgtcccaaatacttttcccgatgaaattcaaacaaaattagacttttatacacacaaagcaaaacaaaacacaacctatatataatttcaagattaagaaaaacaaaacaaataaaagcattctctcaagaccttgcttcagttgtgtaaaataattaaatgtgctattccaagttgattttagtttttaaatacagaatttgataaaagataagtaaaagaaggccttgggttcagggtggcagatatttagtgcaccctttatctagttcaggaaacacttgaaagatttatcaagtttccttatgtaatgaaagacttaactagttcaaataagcaatacccacagaacataattagagcagcatattggagcacaatttttttttcataaagactaaaactgaacagcagcagattgaaacacaatttttttcctaaagactaaaactgaacagcagtcaagactcaagcatagaatatgtttcaatgtcccatgatgttggacagtcctttgatgtctggacagtctttctctacttctaataaaagttttcctagctgattaatatagtattcccaagaaagcgtccctagaggttttgaaaataagaccttagaatagcatattaaatcttaaagaaaaaaaaaagacaggaaaaaaggcagttcctttagtagatgttttaccatgggaatattattaataagaaatcaattaattttttaaaatgttgcttttgtaaggaaacagtttctatgcaaaattctgtatattttctagctgtttagttttatatgtagactacctaattttgcaaatattgtgctgagactgaactgttccactgtttacccaccagtcttgttaattttctagcatctttaaagacaaaataaaacataccaagaatgtcttcatttctctttctgttaaagcatcatcatttacttttttctgcttgactatcctaccatactgtacttcatatctttatttttctaacaataagatgtgaactttgtt

SEQ ID NO: 97940 - DNA, 1045 bp, Homo sapiens
tataagatagatcataattttatcaaccacttaaaaaaagatgttgccaattatacaatgacaacatattttacaacttggaatttatactttatacttactgaaggaactcttctacacctaataagatgcagatttttaatcatgtataagtgttttgcatcttttgcatacataaaaaggaagaaataagttaaataaattggacaagacatttcaaaacttcttaccatacggggtttgactcgtgaatgttttgggttagtatcatcaatgtctacttgttttcagccatatttctcttgcagccgtcaaagacattaccaatgccacttttcttcagagtggtccatatccctgggatttcttccgtaccacttacattgattgtgcaaatgttagtgctggcatttccttaatttctccaggtggtgtcaacacaacatttcagacacaaacaggatttatattctctttttaaatggtacttgaagagttgtaatcatgcagttattctgttcaaaataacaaccaagttaaccatgacaaagcattgacaactatcattcctgatgcttgtccagcagcaatcttaaaacatcattgattattagaggcactattagatctcagagacattaaaatgtgaaaaaaaagaggctgtttagaatgaaggaattctctattacaactctcacctctttttaccctttcttttgtttcatccctggagattagaggaggattgatttatctgatgagtcaatttgggaaaaataaactggttatgacccgttcaactactttcttttctcctaaaagcacagatgctctgctgtccctctcagggccaggctcaccatttgggtgagaccatcccaggaccagctatgccattgcctggattggtaaatctgccaactgcacatttgctacatttcacagtttgtatttcaacttagcccttatcagttatattttatttatttactgattgatttgtctttctttcagtttttatttatcctccttctctcactcactg

SEQ ID NO: 97941 - DNA, 1051 bp, Homo sapiens
tagctgtgtaaataacaacaattttatatatttaatctgggcttctccttatcttgaatgatataaaaatctactttctagattaatttagttccatataactttgtattgctttgactgtactgataataaagtttgaaagtgttaaatttacattgtgagcttttttttaaaattcgaatttattttctatgacttttatagaatgattcttaaaaaatagtttcaaggacctcttcatagccacaagatttccttttttatatcattaatattattttatgtgaatactataatgaaacccaagtattcagtttacacacagatattataacacaatataccactacacaaaggcaatgaacagataacattctacaaaatctactttacagaaaggattttctgtagtcaatgcaaactcttaaggttttaggttttatttagattattgcaatatcagtatttcaaactcttttttttctttttattatcccttataagttctatggataggccacaggataacttttagctttttctaaaatatccaaacatattctcaataaaaaattagtggaatgcttaaaagtatagtaggtatgaagaaatatagaatcaaaattacagttttaaataatagtatgtatttatttatatagagacaaggatcttgccatgttgtccaggctggtcacaaactcttgggctcaggcaatcctcccatcttggcctcccaaagtgctgggattacaggcatgagccaccgtgcccagccagtaatactaaattatttccaaattaactgcttaggagaccacatacaatgttcagacatgttaaaacaggacacaattcattgtatcacatcagtaattctgtgtcgaatactgttttcctatcagaacgtaagggtttttttggattgccagatacaaggagtggttatttaatagatttttaatggtagatatttttatgttaaaagatgttagaataggatgctactggtgatacaggtttgcaggcttgtacaagtataaggacaaaa

SEQ ID NO: 97942 - DNA, 1036 bp, Homo sapiens
aaaataccacatttaatggatatacgagaagtagggacagaactcaatttatattattaatagcttgcacttaaataacatttaaatattgcaaataatgtaggaaaattaacaaatattttacaaaaatatgtacgtaattttattttgttcttatagttaccataaaatagaacagaaattaacagtcccactttataagtagtaataagacttaaagtggttaagggacttgctcaaggactcatagctaataaatggcagagtcagatctctaacatctttgactcctaggctaatctatcttcactatgcacacagcctcactgcttctctgttactctgtgtgtgccattactgaatcacagaaggaaactaaattgatatttgactacctacattgctgtcaagataaagtttgataaagccattcagtcatatagataccagctgtgtttatatgattgaggctataaaactgatttcaaccatttaaagtagtcctgtaatgaaacttttaaaaaatgaagtcctttatgaaattaggaaactgtatatacatttattgaatagattttcacattaagtttacttaaaacatggtatattatccaggatgagggttttagtgattaatcttttggtttctaccttatttaccttcagaatagcaatctggaacactgaaaaagcttgctttaaaaccttgctaagcaacttatagtatctttccccatcattattagcatattttgtgtgtttgtgtgcatgtgcacatgtgcatacacacatgggtatgaaagaaagaattgcgatacagataataacttctcattcttttatttggtcttcattttcctttaaaaaaatactccctagagtaaaaagaggtttttgttgttgttgttgtttgtttgttttttggttgttggttttggttttagtgaaatgagttaagtagattacacacaggcaataagtactaaattgatcgggccgggtactgtcgctcgcacccagcactttgggtcacatc

SEQ ID NO: 97943 - DNA, 1561 bp, Homo sapiens
atatatttattatgtacaacatgtattttgagacatgtatacattgtggaatgtctaaattgagctaacaaatacattatctcacataccatgtttttttgtggtgacaacattcaacaatatagaccatttcacaaatttgcatgttatctttgtgcaggggctatgccaatcttctctgtattttttcaatcttggtgtatgtgctgctgaagcacacaccctaattcctttcatttaaggatctagttaacctttctcttaagtataaccatgtattttgttaagcaatatctttttattacaaaaatgccatttttttctggttagaaaattgattttctattacaatattttttagagtgtgtgtaaaacctgatgaaatttgaataaggttcgtagttaatagtatcgatgtcagtttcttggttttgaacatgtactacagttatgttagatgttattgggaaaagttggggaaagagtacatggaaactctgaactaattttacaacttcttgtgaatcttaaattatttcaaaataagttaaaaaaagcacatttccctttgcgtattattaagtatggatgtgtttctagaaattatgtgttactgattttactaattgaaggttggaataaacttcatgtggggaataaaaattaagttttggatgaaatataacacagctacagaaaagtactcaaatgttaagtgtaaaattcaagcagttttcatgaagtgaagtgcaaccatgtacccagcacccaggtaaggaaataggacattaataggaacccagaattcctctcatgattctgcccagtcactccccacaccaaagtataatcacttcactacatatttagttctggttttagtcttaaatacaagagaatattagtgaacttcattttttctttgcatccaaagcaaaatatttgcattcaaaatagtataataattagcacaatgattaagttcctaactgtaaattagccccactcttaatgcagaaattatacagtgatagaatacttaggcttttaactgtggttatgtattggaaatcaacagcaaaagatgaaaataaatttgttgtggcactgctagttatttaccggaatcccttttcccatttcttgtcagtagcctcatccattgatgttgacagcacctagcagaactcttcagtagatgtaactcagctgaactgaaaaaatattatcaattataaaactaacatattcttaatgcataaaacttggaaaactccaaaacacaagagacataatagaatattttggcttgggcaaagctgtgtcctataaatgtcagtttttagggttgagtggtatatgggcttctaccatttcccccattcctgtctccatctcagagatcctctttgtgctgtcgatggaaaagattgttaacatctactggaatgcttgggaaactctgtaagttggtgagaccctggcctcctagccaattgagatcatgtgactaaccccttgccaatggaatgtgatgagaagtgatgcctgcaacttctac

SEQ ID NO: 97944 - DNA, 2252 bp, Homo sapiens
ttaaaattagtctcccaaatcttcaagatctgcgctttccagtacagtagccagtagccacacgtctgttgagcacttgaaatacagttagactgaattaggatgtgctgtaagtgtaaaatacatgacagatttcaaagacatagtattaaaaagaatgtaaaatattttaataatttttatattgattagatgttgaaattataatattttggatataatgggttaaatagaatagtatgaaattagtttcatctattctggaaaacttcagaattacataattggctcttattatatttctagattcttgaagtatgcttgtccaatagaactttctataatgatggacatgttctgcgtctacgttgtccaacatactagccatttgctacatgtggctgttgagcaattaaaacatagtcagggtgactgagaggctgcattttaaatttaattttagttcatttaagtacccgtatgtgactagtggtggctaccattgaattggacagttctggacactttatcattttagcatttcttgtttcagatttatgttcaggagctattagcaattgatttttgtaatgatgtgtgaggtaagggtcagattttatttattattttcttttgtgtggaaacctaattgaccaagcaccaaggaaaagaccatcctttccggtttttagcttttgtcttctgttcctttagtctgtttgttattgcaccaaataccacagcatctttgataattcatagagtaaatgcttcaattttgttcctcaaggaatacatcttagccgttcttggccctttctatttccacatcaatattaaaaacagttaatcagttttcacaaaattctgagattttgactggggttgtattggatacatagcttatccagtcataacatgatatagccatccgtttatttaggtcttttatttctctcagtaattttctgtcaataatatttctctcaataatttctctcttttctatgtaaagttcttgtatgtctttggttagatacattcctagctatttgctactgttgtaaatgttactatttttgagttttattttctaattattgctgatatataggaatataatttattactgtccttatattcagtaactgtactaaactaacttattcttaaagattctttaaggcatgctgcataattaattctaccatttgtgaataatgacagtttcacttttctctggttcttaacatattttatcatgaaggaaatggagtaaaactttttttagtggattggcaacttccagagaattagattgttttgaatgtgtctaggtagaaactaatacttgtctctctctttaaatctctttaggaaaaatagaaatgaaggtacatatgcacacaaaattttgcctcatttgtttgctgacatttatttttcatcattgcaaccattgccatgaagaacatgaccatggccctgaagcgcttcacagacagcatcgtggaatgacagaattggagccaagcaaattttcaaagcaagctgctgaaaatgaaaaaaaatactatattgaaaaactttttgagcgttatggtgaaaatggaagattatccttttttggtttggagaaacttttaacaaacttgggccttggagagagaaaagtagttgagattaatcatgaggatcttggccacgatcatgtttctcatttagatattttggcagttcaagagggaaagcattttcactcacataaccaccagcattcccataatcatttaaattcagaaaatcaaactgtgaccagtgtatccacaaaaagaaaccataaatgtgatccagagaaagagacagttgaagtgtctgtaaaatctgatgataaacatatgcatgaccataatcaccgcctacgtcatcaccatcgtttgcatcatcatcttgatcataacaacactcaccattttcataatgattccattactcccagtgagcgtggggagcctagcaatgaaccttcaacagagaccaataaaacccaggaacaatctgatgttaaactaccgaaaggaaagaggaagaaaaaagggaggaaaagtaatgaaaattctgaggttattacaccaggttttccccctaaccatgatcagggtgaacagtatgagcataatcgggtccacaaacctgatcgtgtacataacccaggtcattctcatgtacatcttccagaacgtaatggtcat

SEQ ID NO: 97945 - DNA, 1032 bp, Homo sapiens
gtggcgggcgcctgtagccccagctactcgggaggctgaggtggagaatcacttgaacccgggaggcagaggttgcagtgagccgagatcatgccactgcactccagcctgggcgacaaagtgagtctccatctcaaaaaaagaaagaaaaaagatttttaaaatctgaatttcacttgtatttgtttgtttcttatattctcaaatttggtttcctcaaatccaaacgtatttttaagaaatttttttttgtagcacgtatctgaagacttaagtgttttaatgttgttagaaaatgtattccttatgaattatttgaccctccaagctagtctcttactgttattattgttagccatgttctaggtatttgaaaattaaaattttttaattgttgttcaacttgtcctcttgggaagtaactagaacagtttctagttcataaattgttaatttattgaattaactattgagtggttccaagtcattggtgtagctccaaagtcaggtattttgcacatatggctagcttgttttctctgtgtcactttatgataaggcctacttactcatgataattgtttttgtctcaggcctttcacagacttaggatgaatataaaaaggtataataataagaaactaatagtaatgggatgtcctgttttcctttaaaattttcatactcttgggtacttacacatttggttgactccttgattttctttttaactattcaccttaagcacattcattttagtttcattaaagggatgttgattccttgtttattctatttttagcattcttattaaagtttagaaaaacttgttgagtttgttgttcatatgtatagaaagtagcaccatcaactgtggaaaatgaccacatccttttctgtcactgtcgttgagatatgttttatgtctaggtaaagatctttgtgtttcttcccttgataaatcatcagctatttggttttcagcagttataaacactgattttaaaataacatatattaagatcttagtat

SEQ ID NO: 97946 - DNA, 1165 bp, Homo sapiens
ctagaattttccaaaacaatatgcttttagagtgcatttggcaatgaaaatgtctatataagccattaaagtactctaaatctatttaatctgtttcacagataaggatcttgagtcaccgatgattgcaatttgatagggaaatgatttttctcatcatcctacgagagtcttggggatatagttgtgagtcatccttatccatgacagaaagtcattatctttcatgtgttggagtagaaaaattattaaagtccatgaaaagttttgggtaatatagttgagtgtatccctattacaaattcttattaaaaagttttatttgtaatagatatctatgtattacagattatttgcaagtaatatttagagtatttcttaggcagtaatttatttttttgcataatctccttaaagacactcttatttaatttgttttatcactttccttgcagtgtttgaacgtcactcagttattaaaatactatggtcatggtgccaactctcccatctcaactgatttatttacatacctttgccctgcattgttatatcaaatcgacagcagactttgtattgagcattttgacaaacttttagttgaagatataaataaggataaaaacctggttcctgaagatgaggcaaatataggggcatcaggtaagagagattttaagttttttctccttaaaatagtacctgtacttactttttaaactatagttgaattagaaaagaatcctaaattattgactttcttttgttgtcagactttaaatatattttaatcaggtttagatatgcatatttaaaagaaactgggggaagacgggggcacaatgtgttttatttatctcttctggtatattacaaagggatattttgctatggacggagaactagattaaaaatgaaatatagatttgtgataagttgattatttttgatgagcaaatataaataatgggaccccctaaataaagttatttgttcttctaattacttaacatttatcagggtgcctctgttgaaaagcaaagatgattaaaattttaaagacataaaaagggaagctactgtgtgtaaactccaggaatgtctgggaaatgcctaacaaacttgacatgtgaactttattatgggtatttctagagagcttcaa

SEQ ID NO: 97947 - DNA, 1094 bp, Homo sapiens
gaaggcttctgaaaagattcttattctttgttgttatgttacctgtggattatgacttttaatgagagttgtctgtattgtaatattgccataatcaatatattgtaatgaagctgttgacagatgcttgactatagcaatactgaaagttacagcttattcaatctgaaaagccttagaggaaattgtacttgctttgaaaacaaatatgttactaatagtgaatattgattagttgtttgcaggtggttattagcattgtcagaaatgcagcttgaattaattatgtgctgatagatgctaataattgttagagataatgccctgctagtaattagttttaatgactactgcaccattaagaaaggttaacttgttctatataaatctcccatagtggcacagctactacctcattaactttgttcaaagactgctgtaaacctaatatgctatatactgtgtatggtagaaatcgtttgtttcacaagattggctcatttagtcctagagttgaccctagcttaattaccaaggggggatgtgaataggctgctaagcattttgtgtcaattaaaatgctgaagcagtgtagaaaactgccatcttgcacatgctttgaaccaagttaattagaaagtttccacagatgagcgcttctttttaaaagaatgcattttctctctagataatgagaaagggagtcagtgaataactaagcttgaagacctttagcattttaagcaacccaatttgcagaataagtgaagcttgtttcagacatttggcgcttttttattgcatatggtatcttgggtacatataaagaaaacatttattagtggtatttaatagtttgtatattgttttatataaggtttttaaaagataccttttgtttagtttttgctttataccaaatgaattgtgattaaaaagcacaacaatttggttagaaatcaaaacaattttattaccaccattggttttttttcctacgtgtaggaaattaggatagagtttatgtaagcttaaatttaaatgttataaattctacaaataaagtatttaaataacatgggaaagtattttag

SEQ ID NO: 97948 - DNA, 1023 bp, Homo sapiens
atctcatcatatgaatatatttccatttggggctatgttacatttcttaaactctgtattagaaagatttacaaagattgtaacacgttaaatagatacttggcttttttaatgttctcaggtgagttttataattatattctttaaataaacagctttattgttgtggctctgcctttagacttgggaaatttttatttatagtttagctattaagtgaatcacagccttcagtcattttaagtcactggttcttatctcgtgggccattgaaggtactatttataacttgatctgagtgtcttaattctttttaaaaatgtttaagttagttatatgtcatatttttgttttgtttttaaacaatgccttaaagctttcataatctgggtaaaatagtctaccttctacgattcatttatcttatatttttattctttttggtagtctgttggtttaaattgttatactaatgttgactcttaatttcttttctacagcctggatttgtggtatcatttctatcactgtcattagcctgctttccttgctaggcgtgatcttggttcctatcattaaccaaggatgcttcaaattccttcttacattccttgttgcattagctgtaggaacaatgagtggagacgcccttcttcatctactgccccatgtaagaaatgtttttaatgtttttaaaaatttaaaataaaaatatttaagctgaaagggtccttcattagcaagctatagcacagtaatctagtatttgtattgttttatttgcttataggatgaagtatttttttctccattttcagagttttaatagcaatatttttttaaataaattgaatcattaggtcaactttgctttcaatagtctttaaaaaaaactcattggattaaaatttgcaatatcagtagcagtgagtggtcttttttatctgtgtagcatatcaggttagcctttaggagaaatgcataagatatgttgtaatgattatgcctgtaggtggtatgcca

SEQ ID NO: 97949 - DNA, 1033 bp, Homo sapiens
atgccaccatgcccagctaacttgtatgtatgtatgtatgtatgtatgtatgtatgtatgtatgtatgtatgtattttgagacagattctcgctatgtggcccaggctagaatgcagtgacatgatctccactcacagcaacctccacctcttaggttcaagcaattcttgtgcctcggcctcctaagtgggtaggaccatagctgcgcaccaccatgcctggctagtttttgtatttttagtagagacagggttttgccatgttggccagggtggtcttgaactcctggcttcaagtgatccacctgccttagcctcccaaagtgctgggattacagacatgagccaccatgcctggtgccctctaactattaaaaattatttgtagagacagagttctcagtatgttgcccaggctggtcttgaactcctgggttcaagtgatcctctcaccttagtctctcaaagacttgggattacaggcatgaggcaccacaccctacatgactttgatctttgccatttttgttactacatttattttggcatttataatcaagatacagcagtctcagtttcagttattttgtgttacatcatacctaattgacttaaataggatggcaaaagatattttctaattaagtttattataaaaatgtgaaagtatgtaaagagaagcaagtttcatccgtcttcttaggtaatatttttaatcatgtgacttttattgtagtattttttaatgaaaatgttttcacacaaaaagtgttttcacacttcttactggaggtaagaagtcagattaagggggctttgtaggaagaaaataaaatgaaatgatggaaatggtgactcttttcaagaatgatgcaccactttggagatgatgcttgacgcttggttgaactgttgcttaaatactctgatggtgatgcagctgtctgtttcacctcacatttatgagaatacaaaaaatatctaagaagaattatcctccaagaaagtaaattcagggctgctgccattcact

SEQ ID NO: 97950 - DNA, 1038 bp, Homo sapiens
aaaaagagttggaaaattcattttgttagttaattccagataccttttttgggatggtcaagatcttaaagatgtgcagtctacttttaagatacaattttatactatttttgtttctgttttgtttgcatatgtgtgtgttttgtatatattcctttcatgatttggaacagatctctgaactgggattcatgggagtgattctggtttacataaaacttatttgtgtgactatgactcactcctcatgatttccagtagttatctaaatcatgagaaagaaatcttacttctcatctgtattttcgtatcttatttcaaattgtatattttagttatatttagtcaggacatcatcacatttgtttgcctccaaaggagaggtgattaagatagcctagaaaagaagaatgataaaaggaactgggaaagttcaacttagagaaaagtaaaagagagctaacagtatttagattttgaaggggcttgtggaaggtgaagtaattaattctgatggacgagtagagaataaaatatggtgggagggatgccaacacagaaggggctgcagggaaacaagagttggctaagtagatgactgcagaataattcaaaagaggtggtggggcttgagtgagggtcatggcagaagaaataggagaggaaaagatgattaagggaattatttagatgggagaatcaagaagacttcttagttgattagatgtaagacatataagtatttaaaagttcatcactacaataaattagatattgcaaagtttgtaaagaagttttagaattgccaattgagcatctctaatgtgacaatctaagatctgaaatgctccagtgagctttccctttaaccatcacgtcagtactcaagtttcagattttggaacatttcagatttcagataaacaagttttttgttttttataatttgatctttttaatctcattttgaacctaagcttactggtgcttatacatttatttttgcaaagaaaactgatacaagaatggagtcaccaa

SEQ ID NO: 97951 - DNA, 1032 bp, Homo sapiens
aagtacaattctgctctttatcattattgtagcttctaatttgccagctacagttaataaagttctcagtaggctgctgcaataagggaggagggggtctagagggagtaattttttttaaaaaaggctttctatccaaagatgaactctttccgaacttttatcttcatgctttccagtttttctcctcactttgcctgcttttgatttcagttccctcccgttgacctcatccggagcatcttttaaatctccccccaaacccaatttcttctttgtgtgtgtatgtttgttttgttttgttttgcttattttttaatttaactccagaaatcatttttctattagaatggcttctaaataattttaggaaattatttaagaattctaaaagacattcacttaagaaatgttcattgcactgctattctgtttaaattagcaaatatccatgcatttaattattgataaagcatatcctttgctataaatacaggaactgatgactcggttgtttctgaagatcgacttaatgaaactgaactgacagatttagaaggccaacaagaatcccctcctaaaaattacctttgtatagaagaggagaaaatcatagaccattctcacagtgatggattacataccattcatgagcatgatctccatgctgctgcacataaccaccacggcgagaacaaaactgtgctgaggaagcataatcaccagtggcaccacaagcattctcatcattcccatggcccctgtcattctggatccgatctgaaagaaacaggaatagctaatatagcctggatggtgatcatgggggatggcatccacaacttcagtgatgggctcgcaattggtaagtggactggaaaccactgtctatgctaatcttatggactataatatgtatgattaaatttggctggagcttaacaaatatatggttatgtatcactctggtcagttgatttttcccaaaggctacagttttgtgttcagttgttacatttggaggtgtaaggg

SEQ ID NO: 97952 - DNA, 1028 bp, Homo sapiens
aaaatactgttattaaaagtgtgtatctttttaatgctgattttatttgttttctcctttcagatttgtgttttaaatcctgtggttttaaaacattcccattgtttcttaattgcaggagattttgcagttcttcttaaagcaggcatgactgtaaagcaagcaattgtatacaacctcctctctgccatgatggcttacataggcatgctcataggcacagctgttggtcagtatgccaataacatcacactttggatctttgcagtcactgcaggcatgttcctctatgtagccttggtggatatggtaagatattttatatttttttgtggtactaaacctgcaaatgaaagaaatccttggaagtggtttgaagccaaactatttttgaaaatataactcattttaaagacataatatcctaaataatctcttaaggaaggacatttaagtaggaggtttccttttatggaaaccagttgagttgctgaaaatgtctgtccatcatgttactatttaaataatcattagtagtagagttataattacagaattattatactactttaaagactttgtaatattggtgtagaagtgttttatttttgttagcaaaattaattttttgagtttgttttatggcaaacaggagagaaatactattcctgttaggtaagccagtcttctggaaggaagtggtatatattccataggatttatgtaatttctcttatttctaaatttagcttaaagttaaatgtaaatgctaacaatttgttttattttgattttactttaataccccaaatatgttagacagtgtatttacagaactagcaattaggtttttatgtttgtttgtttgactagataggacatttacttttttttttctggtaagatcacagtcttatttcaaaattatgcagccttttttttttttttatgagatagggtcttgctctgttgcctaggctggagtacagtggcatgaatatggctcactgcagccttgacctcctggg

SEQ ID NO: 97953 - DNA, 2308 bp, Homo sapiens
tttttggagtgtcttattggtaataagttgctttatgctttagcataaagtaaaatgtcagaatttataaggtcagtggatagtaactgtttgaaaaatgactaatgtgcatattttaagtgtttgttgtgggggatgaggaggagggaacagagttagtatttcctagcaaaagcataaaatttcttcagtatttgactaaaatacatctggtgggtagcattgtgttcaataaaataattattttgtctgtagttacacttcagtcactaattttcttaagtaggaaaatgtttttaaaaactgttttgagcagaagtattatacaaagtttaatgtgaagatttatttttctagcttccagaaatgttgcatggtgatggtgacaatgaagaacatggcttttgtcctgtggggcaattcatccttcagaatttaggattgctctttggatttgccattatgctggtgattgccctctatgaagataaaattgtgtttgacatccagttttgacctttcccagtaatcactgttgattacgagaatgttaccatgcagctttgcatctgttccttgtactgtatgcacattgctcaaaggaaagtcagtggcttgcactacttacaagtttcatagatttgagcctaaccacaagaggctggtgcttagtactgttttccctgcacgtaggggtcttttaaaaatataaagcttgtgataaagagaggagaatatgggactccatgaaccagtgttgatatgtttgattaagacttttcacaaaataatcatataaaacactagtctctttattagtagaaacttctgtggctatgcagaaatagagatcgaaccaaaaaaaatcatttaaactttaaaaatattttaaatggactttggggagacattttttgtgtgttttaagaatgaattgtagtgctctttaattcagctacatatattcatgtggtgatagggatcaacttgacacaactttgaaactgcataaagtagacataggaactagaggaaagctcaggctgcattagagtatgaatttagcattgggaaaagcccttattcttgaatctagagttactatttttgtatatatttgcatagtgtttaaacctgcagcctaaactactgaaatttgtgattgtatgtttgtgtgagcttcagtttaatgaaagattcataatggttctttgtattattataatacttggtgttggggtgttctttctgttttgttttttactttaattttgttttgattttttttttttttttttggcgggggtaggtgagggtttggagcatgtggtctttttaaaaaattgtaaccctctagaaaatatcaaagaaatgaaccagacgtggtttaaatagttgattttcctattttaacagtaccaactagttaattgggaaatgtaagttctgaatgttcacattgctttaccagtttggcactggaaccaagagcacatgtcgtggctggctacaaggttgtaaagcagaaaatcgaagtttaccatgtctgtaatgtgtacatgaagtgtcaatttagaacagttactaggataaactccattattgccatggctgtcatggtacccaagtgacttggaagatgcatttaaattactcagctgaaatcacttgatcatcttgtgccaagatatgctgttggtgcctgatagggattagtcttttaggtgccctgttctcctaccataattgtgaatgatttgtgagaagtgcaagccatgtttatcctgaatttttacttaataatttgtattactagtcatatgcatgtagctttctgtttacatcctatgccacatggtcttcatttatgccaggtaaactgtatttgaactatgtgcagctagctttgttttaatctgcttggcaaccagtgtagctgctgtaacaatctatcttattgttcaaatatataagagccaaactcttttccattccatctaaaatgttttcatttagtactcttctttcctcctactctatgaacttcaaaacaaaaacaaaactttgagagcagcacatgcatccaggtatttatagattattgccagtgtcttttctgtatgctataagcaagggagcttaggtgttatttctttaatttatgcttgaatctgaaaaattatttctgacttactccatggcctccttataataagtagaagttttatatataattaattttcagcattgggcactgaattaggacagtcctcatctcattgcttggcccttcaagcaacctagctaa

SEQ ID NO: 97954 - DNA, 1050 bp, Homo sapiens
gttttatttactcttttgtatctgatttattttcttacaggagttaagcccagagtcaacacatccagatttccgaatgtggctaacgagttacccatctccaaatttccctgtgtcagtactgcagaatggagtgaaaatgaccaatgaagcaccaaaaggtttacgggctaatatcattcgatcatacctcatggacccgatctctgatccggagttctttggcagctgcaaaaagcctgttagtaatggttaagtcttgttacctcggccctgtaaagcacttcaagtggcccctggtgatcatggatgtgtgcactgagtaaaactaaaaattaaataggcctcctgcaccgcagtgcagtaggttttgataactgattattgactgtgctgaagtcaattttgttaatattttattttaattttagcaccagcctcattcctgctcagctgagatcttatggggtgtcattaataatgtagctttctatttagaaagtcagctgtaagccattcccagtacaaatctgcaaggttggagaatcttgtttcaggatattaactgagccttgtgctatttagagccatgtctctaaattaaaacataaaaatatttccttcatataactataatgagagccaaaatgattttacttcttgattgatgggactcataagggtcttttttagcgtcaccaggcaagcagggaaaccacccactgctttcatgattagaattgtgtacgtgaatgtctgtgacctaaaattgtttcacagcgttttgccataattaaaaatggaagagtttctttttaagaggggttatgaactttaggaagtttttgctgttaaaaagctcacacgcttgatgtctgaatttgttttaagtgcacatcaaaggaaaacattaaaaataaagaagtactttcattaaacaaaagtcttgggtactaaaaaataaaagggggcctatatttaaaactaagtcaaaccatctcttaagcttctaagatctgccataggactagcttttgtattgattagggc

SEQ ID NO: 97955 - DNA, 1024 bp, Homo sapiens
ctggggaggggaagaggagggagggggatggtgggagggaggaaaatgacaaggaaatgggaatctcctgcctctgagagttgatgagcttcagcgaggctcttaaactctctctagctggaaattacagagcaagaatgtttaatttctgctttgggagatgctgaccaaaggtcttttagaatgactttggccctggagcaaatgtagggaaatagggttgatagttctcttgatgttgaagatataacaaaaaatcttgaggcagaagtttagctcaaggtacagatttggaaaatggactttaaaaccatgttaatgtagattacctaaagaaaaaatccagagaaaaaaagaagagagcaagagatagactcacaggtacatgagtgacttagacaagagagaggaaagagggaagaacatctgaaggaagtgatgtgtcttccaccctgctctttcaagaagtttggctgtaactgaaatatgttgtagatacgaagtaatcatgtttcaaaaacagttaacatatatgaactgaagtcataataaaataagtttcagggcctttatggggttttttttccagcattgtcagagaatttagataatacaaataataaacgaattttctatgtaactgaaacatcctttctataggaaagcatgacacttataatgcaagctttttaaaatgtgctgtgcacttctgttatttcttgaagaaattaggaatgcctgttatttactatgtagtaataagtatctgttttatttgtaatgataactatttgtattttagtgttgcatcagtaatacttagtcccacacttagaaactcagctgtcatttctgatgtttctactggggtggcaactgaacatgaagtcacctgcctctaatcttcagggagtctgtctcagagagttaatttttacttgttaatcaccaaacaatgtgacttggcaattggaagagagctgcgtggggagaagacaaacgcctatgagaacttgctatatgc

SEQ ID NO: 97956 - DNA, 1029 bp, Homo sapiens
tggcttttgagattgaaggtgaatggacagtgagatagcagaggattgaagaaggaaagctggcagatggtaaagagtggaaggtggatggctaatgtttttaggctcatctgtgtctcatgctgttgctgtgaatccctcagtgtctcctggcctgctcatgtggactatgaccctccatgaagcaatccagttaaccttgaacttttgccaagaatctgaaactccttctaaacacctcggaactgctgggactagttcttttggcatcaggttggcagctgctaaacgtagtacacctttatatctgttggttattgcctgtggagtaaacccttgaggcaatcttttttttcttaagtgctttttgcttctaattggctgactgaaccccctagtactttactgactttcaacgcttatcactgtacccttaggctatgaaacaaaactacatcttcaacccattctgagaactctattcttatctccaggtctttaatgaaatttgtctctccctcaagcctatttctgtttaggcttttccattcttccaagtttgggatatggggtctgcaacatttatcttctgttttccactatgaattcttactaatcttaggctcatagcatctcctctccttgactcagcttcattcgttgaagacatcggctcacagttctcccctacgctatgctacttcagcatccatgcgaacagccatagcttgaggaacttagttccttgaccttccatggcaaagtcctttacttcagtccccacttctgtggccacactggggacattctcaacacctggaatagctctacttctgaaatcacagagacaataccctcactgcttcactttgtgttttgagagttagtttctctcactatgtcaccctttctgagaccctctccatcccattccctttctccacagttaacagtcctttcttcctctactcattattttagtttctgtgattttttatttcaacttcactcttatcagattctctattc

SEQ ID NO: 97957 - DNA, 1030 bp, Homo sapiens
gtagaaaaaaatggatgagtcagcttgaagttagagaagttagcttaggggctctggctttcagaagcccttcacggacttggttcacttgtaaccaaaggttgtggtacactatgtacatagatacgggatctgggcaagctgattggcaaggtcagccctaaaggatctgccacctgttttcttattgtactttttgtgatgatcacgtaatttttcttttttaatttgttaaccagtgaagtgtctttccaataattccttgattctctgacagcaactgggtgtcctataatgtagttcagttctgacacaacccagaatgagtgcagattccacaggttaagggctcagtcccccaagaccaccctcatttcagacactggtggtaagacctggaggttatgcatacttctgactgaccagctatccatttggggttccctatgacctccgctcaggtttaataagtcactagaatgactcacagagcttaggaaagctttataattatgattatggttttattataaagaatacaattcagaaacagccaaatggaagacaggagtagggccaggtattgagtgtgtgtaggtggggccagggaagacacagagcttacatgtgctctgtgtgcaccatcatcccagcacattgatgtgttcccccacctggaggcttccagagcctcttgttcaaagtgtttaatcaaggtttcattacatacacatgattgactaaatcattggccagtggcgattcaacaatctccagcctccctctcctccccaaaagtggggcggctgagtgggtgagtgtgtaaggctgaaagttgtaacgctcagatcccaagctttgtctttctgatgataagctcccatcctgaagctatctaggggccctgccttgagtcacctcagcatgaactcaggtatgatggaaacaagctcgttatgaataacaaaagacactctgtccctcaggaaaatccaagggttttaggagctctgtgctagtaatctgagac

SEQ ID NO: 97958 - DNA, 1095 bp, Homo sapiens
gtgctgtgtgctgcacacctcactctcttgccgctttccctggtctccatcaggactttaccaaaacactcaagtgctgtggcatctgagaatgtccctctatgcactgtctgtccatatagtgagataagggaggtgctggaaacaattgttctcttcctctatgattcctgcaagtattgttttgcaattgtgctgcccgccttgaaaatcacatggtgccccactggcagctttatgatcatttctctaaatgaaagtgagaggttatcgaatttgtctagtttagtgtgagtcacttatatgcctgggaaatgaagtcctatcctgtgttattgatactggaagctgcacaaaaggaatgagtctctggagtttggaactcacctcatgaatctcacaccaaccagtgctgtcctggcttttcattgggatggaatgagaatcaagtccccatggtggaggttatcgtgaaaaccccagattttaatagagaggtaatttgagtacataacatattgaacttgaatattatgcacttgaaggaaaaatatttcctttgtagtgggcagcctctattatgttttggaggaattttccagtaaatcatctaacagctgctttactgtataggccttgaaattttatctgttcattggttacagacacttttgcttttggaaacttcacatgcttctctttaccagtaatattttgttcccaaaatatcggctcctggggaggatttaataaaggctgacccaacaagacatgtttttgagcaaaccttttggatgtctttggctaggaaccatgtcctatgtaagtgtattctatgtaagattattactaaaaatccaaaaagcaacctacagattttgtgacaaaaagaaaatgttaaccatctctgaacataaaggcattttgcatctgtgaatgtagaaacagtgattatagtgggtgctagtagaggtatagaatgtatgtgtgtgttttggaggagtggcaaggaagaaacaatgggacaagcattggcaaaaatatggctggtggagattctttccttcagactgcagattgaagacacccttcaca

SEQ ID NO: 97959 - DNA, 1028 bp, Homo sapiens
ttttgcatatcaacaaaaaaagtggcttgagttttattatagttggtgtaaactgaacacagtgaagacattggaatttaataggttctctctctaaggtgactcttataccatgcctctatcaacataatttgtttaggaaagcagtatgaagtttaagccaaaataatttctactttatagatgctcaagagacattttacaattgaaaatgtctttcaattacaaatattttgaaacttcgtaagattttcattctctgtggtctgttatatgagagagatcctttaactagagcaaagagggagttagaaacctgatcagggatattctttacaagttggagcagaggaaagagtagcatgccttcgtattttaacgcaaatgtctttttcctcctcccaacctacttgagatctgataaggtctggaagatggagatatttggtatgcaagtgtagagttttttaatcctccagaatttctagagtagaagatacttaggtatagttaaatattctgtatttttagtcaaacatatttattaattgaatatagaagaaaatgttgacacactcagacagcttactgaattttagatgtcttctgcatcttagaatacaagccagtcattcagagttctaaaagtatgcataaaaaattacagcaccggtaggtctattaacacagtgcccgagtcagcggtagcaagactgatgtgatcataaaacatgacatcaggctcgtctgaagttcttgtgtgaaattcctagtgagtgaggaggctcagcttaaagccatctgcagagtggcccctcattgtggtcttttgctgggaccaatgcaagagactagggagagcaaaatgtttgcttatggctagagactatatccagccctaatgatggggaaagttagtccttttcgggtaatcttttatgaattttcacctgatgaccgttatattggtctgttatcatgttacgataactgtgatctcatgaccatgttgctgtatcagaagaaat

SEQ ID NO: 97960 - DNA, 1059 bp, Homo sapiens
atttgcctgcccagctttgtgcttcgccaaacttgcagcctctatttgtgcagaacctctctttacatctcacaagtcattactttgccattggaaaccacttaggaaatgctgcagcagctttgtgtactccacggcaggtatctgtgtgaaggatagacggtagcaataatatatattgaatacattgtatttatataacacgtgcattcccttgtgttctctttctgtgaggcacactttgagatcattattttagttttaataatataggaactttgaaaagcaatgtaaatctgtagtttaaccgtaccagttttgaggagaggagtatgttgaatgtcgattgtactttgtataaatgtttaaaaattaacatacattttaagttcccctcccttgtttttcaggaatattggtataatagcatatatgttgttaactcacacatcaccatttgtgggagaagataatcaagaaacatacctcaatatttctcaagttaatgtagattattcggaagaaactttttcatcagtttcacagctggccacagactttattcagagccttttagtaaaaaatccagagtaagtaataatttgtttaaatactattacaaatttaatttgtttaaatactattacagaataaataatatatacctattaagaaagtatattctaaaatagtataaaattattagaaatatgtacaagttctaggtaaaataggtggtatgagcaatcattaacaaatacataacttcagatataaaatatacaacaggggattttgaagtaaagaaaagatttgagttacttctctcacaaaccactactaatccctgaaattacctaaaataattagtcatagaaatttacaatacacatggctggttatgataagactttattgtaaatgatttacagtttaatgattttacggccgggcgcggtggctcacgcctgtaatcccagcactttgggaggctgaggcagatggatcacgaggtcaggagattgagaccctcctggctaacacggtgaaaccccatct

SEQ ID NO: 97961 - DNA, 1039 bp, Homo sapiens
cttgggaacagtgttttaaaaccagcgagagatcaagacgggctacagctgtttccgtgattttcagcgatctgatttttgctttgatgccttgtgacccacttagtgtgcacgactcatcctcaaactataccactactggatgccaacgatttttgacatttacccaggctctttgttttattgtagggaaaagcgtttcatttgaatttcctccgagggagaagtagagacaaagttgaaagaggctttatagcagctggtagctggcattagtttctgtctggactagaggcactctgacatcaatttggaaattggaattaagaaaatacgtttttaaaatcgtaatacttatcagatttcactaatatttaaacacatgaggactgtgtatcacattcaccgattgttttgtcgacgtaatgtttacatctgtggtgctaatgataagcagaaccttgccagggacgtttgacgtggtgtggccactttacgttttcaagtctatgagaatgtctgcgcggagacagcatagctctgtagaaatgagtggcagcgtatgtaacctggcattttgaacccaggagcacaattttattaaaggaaaataaacctactttctcattgataacactgttttttagttttatggtgaactgttcggaagtaattttcaacaagtgcttattttataaatattagaccgtgtacccctaggattgtgtattttttaagaaaactggtccatagaagcggtgcaaaagttttaaactcatctgcctcggatcctcctcctctgagcagatgctcaattaaactttttctagtatcttaataattggaggtattaatagatgttttatttttgagatacatattgtacattttagatctttttttttttctaaagtagggatccaaaattgaggtgaaatatatttgcttacatggcaagactttttaaaagtagaatttctgtaattgaagaccatccttttttgtgtgtgaatagaatggttgcggtttctcttgggat

SEQ ID NO: 97962 - DNA, 1073 bp, Homo sapiens
agaaggtattcatgaggatattagataaattatgaatattttaaaaattctaacaagttttaccattagttgtgttaataaagctacccaggctaacaaaactataactggattcctttaatggaattcgatcactctatttaattggtaactttggatttctcatgctgatttcacgcccttgaattcatcatctgtccctctacccatttcctatattccctgccttatttaaagatacctctgccaacccacttttctttctttcatccatgaaataactggaaaaggtttttgcaagaacactcctggcttcctgatgtgtccctgcctccccatctggcctcaggtccaaccttgcctcctgtcccttaggcgcttgcccctctcaggtttcctgatgatgcaatgtcatgttccatctgctgggaacatccttctccttgttgttgattcagagaaaacctgcacacctacaaatctttcaagccttggcacagatagtgtcctctatgaaccttccttggctctgctgagcaaacttgtaactcatagtattattaactgtttgtatgcagggccactaatagcccatctttgggactaatgaaacaaaggtgtctcctagccttttggagaaatgcagcctgcagctagggctcacaatttggcaagcagagccaaaggaaggctggatttcagttcctgcttgccccagagcacaggatacacaaactttagagggtctttttgcctgtatattttgctgccacagtgtaaactccttgaggacagaaaccagacttttcatcctcatctctcagaggacagctgaatccctggcatggagtatatgcttagtaagtacttattcagcgagtgaaggaataaatgaaatataatgcaaattggaaaattaagtacattcacatacagagagagaaattaatcaacaaaccaatctatggaaatggaaatgtaactgatacttttggctcactggatttatctaattgacttgtctatctgtagggaaaaagggagggtaagcatgtgacctcctgattaacatt

SEQ ID NO: 97963 - DNA, 1074 bp, Homo sapiens
aaaaataactaatgggtactaggcttaatacctgagtgacaaaataatctgtaaaacaaacccccagtgacacaggtttacctctataacaaacttgcacaagtacccctgaacttaaaattaaaaaaaaaattacattgcacacatgggagaaaaatggatagatgtccttcttacttaaaaaatgaatcctggctgggcatggtggctcacacctgtaatcccagcactttgggaggccaaggcggacggattgcctgaggtcaggagtttgagaccagcctggctaacatggtgaaaccctgtctctactaaaaatacaaaaattacctgggcgtggtggcatacgcctatagtcccagctactcgggaggcaggagaatcgcttgaacccaggaggcagaggttgcagtgagccgagatggcaatgctgcactccagcctgggcgacagagcaagactctgtctcaaaaagaaaaaaaaagaatcctctaagaagtctggcatggtcttgtgtcgggcatgggagtttctgccctggagggttggaggggctgtaaaggatgagggcagtcctggcaaccggagcaatgagggagagaatcttagtctttctagacaaggatgatggagggcctttcaattttcaagcaggcaaatgtgagtctcattcttttctcagatttcctagtctcactttgcggtagcagtggatagcgctgctcacagtatgagtcaaggagtatataaaagtatatatggttgtctctgcagccagtgcaagttgaatccatggctcttttttcctcttgtggttatgaagtgactagagacccagatgataaataaggatgtagacagaagggtgtctccatggagacctacagcctgagcacatgactgcacttcctctgcttcgcggtcggtggttagctctgtattttgcatttctgtggaagacttcatacccctggtgctctgatggactttatgaaaagagagtacattcactttgtggcaattgctctcaaacagtccaaaaaatgcgctgctaagatgccagcctgaaaactg

SEQ ID NO: 97964 - DNA, 1037 bp, Homo sapiens
atttgagtgttaaaccaacactttgcaagggacctggtggtaacccagagttaaggttttattaaataattttaagcaaagaatacattttctgaaaattatcaccatgttaggaagccttcagaaattcatgacaaataccagttgttttctcctttgggttttgttttttaactcaaagtataagagattagaagtagttctgaacttggagaatgaaaactacaaacctaacatcactgaattaatcacttagcagagtaaattgagagctgaacagttctctagttatctctaagttgaagcagagattttttttaaaaaaggtagttttaaaagtttgtagtaaaaaaatgccttaacatttgctaaattgcttttggttatgcctgtgcttgcctgttccagctcatccctgcaccatgggctggccttgctcacacatttaatctgaaaggctgtatttaattgcagtttccattgcttctatttctgaagtccaattgctgaaataagtattttccagttggcccaagtataatccatgtatctctttggttattataatgttgttaacccatcgatttttactgagagcacaatttctctgacatgctacataagttatattttaccataaatattattagctcattctttccttccaggagatgaattttttttttcagacagagggtgtatgccaccatacctggctaatttttgtatttttagtagagatggggtttcaccatgttggccagtctggtctcgaattcctggcctcaagcgatctcctgccttggcctcccaaagtgctgggattacatgtgtaagccaccacgcccggacccaggagattctaatagcaatgcattaatagaatcagccatttttgtattttcatggcataaaattttattcactaaatctgactaatcaaggacctatttatatggttattgtaaatcttatcaaatgaaatctttgggagggggaagaaaaatgctgagaacctcagctgccatgtttgctca

SEQ ID NO: 97965 - DNA, 1049 bp, Homo sapiens
tcactctctcaaactccttgcccaggcttatctcaaactccttgactcaatggatcttcccgccttggcttcccaaagtgctgggattacaggcatgagccaacatgccctgcctaggatctgttttttcctccttcacacaatcctatcactgaacaagactcagatttttttttcattaaaaaaatgcaatgatgcccacaaaaaaaaaattcaaaaagaagaaaaaataagatagagggagaaaagaggaagaaggagaagaaaagtctttcacaatccctcctccaccccagcttctcagttgccttcattcccttttcagcattccttccctatctttgagcccacgtgtatactttttatcatagggtcgatgtactttatatttttcattttaaatttagcacatcacattgctttactgcaaactcctccttactttgcattttttactctcgtcatttttggccacttgtcattcctcagacctaacacaatcttttcttacacttcagtttgaccctgacatctttgtaagtaaagtagaatttatactgtagctcaggtgttagagtttcagcctctttctccaaatgccttccttaggaagctttaggcaccctcatttttcttgtctgtaattttcctttgtgttttatcatttaaaacatttgcaccttatcactccattttttgctactgagctccctaatgggacttgtatctgtaatgtcttaatcttgaattcatggaagtatctttcttctcccatttaaaaatatttcagatatccatgaggactccatgtcctgtgagcatatgtaactgattccccctggttttaccctgtttaaataaagctttctcgttgtgctccctttttgtataagcttgctcctgacattcgaaagatttacctctttatacatgtttacataatcaaaatattagcatattgcctattgtatgtattagaatgttgcctattgtatgcctgttgtatgatgtgtggcttagttttaggtatgctccacataaatgtccat

SEQ ID NO: 97966 - DNA, 1048 bp, Homo sapiens
caaattaaatcctaagcccttcgaaggctgagaccctattgtttatttcttggaatgaggatatagaacatactttgtatatttatgatgggttctcaataaacattttctattttgtgttggaatcctgtttccaaatctgaaaacccaggtatgattttcaaacaaacatgtacactcaaactcatatgttgaaatagtaaaataaagtcacgttgtccaaagttggtaggaaaacagggaaatagccacagggttcacaaaaagcaccacagccagccattttgtaccaagaattacctgcaagagaaagggggcggatgctctctttgggatataaaccggatcttggatggaatattctactcctttgggatttaggcttttccccactactttggctgaagtgcccgttttgtttcttgtctttccccagcttatttgaagaagagataatgtcgtatgtgcctccacatgccttactccaccccagctactgtcagtccccacgtggctctcccgtgtcatctcctcagaactcgccaggtgagtccacctgctgctcacagtgaattctctgaggagtgaaccttcaagccagatgttctatcctccctaaagacagaacagtaagggaacacttcaggtacatctttggtgttagcacagatacacgtgtgcatttcctgtctcgtaagagtggcttatttccatgaggattcattttgacaaacataatgaataggaggattagtggtatgacatactcagatatagaatttacttttcatgatgttatatcatacaatatcaggacacaaaatattaggttgctttttgactttagaaagttctagtgaagagaacttttttgatatacaatgaagataaagtctctactctcaagaaataatatggaattgaaattgttcagtttaatggacttggacattcctgcaattcattaattgcattagatagaacagaaatggattggcagatagaagatgttgataggtaacctgaaatgtgtacattcaatctcttt

SEQ ID NO: 97967 - DNA, 1043 bp, Homo sapiens
attatattggtgattaggtttcaacatatgaactctgggggacacaaacatcggacccataacaggaggatttaaaggattattccacgagtctccgagggctgagggagtggcttactgaagatagtaattaaaggaaggtcattttaactgcacatgaagtgatttagaatgagggaaacattggccatagaagtctagcaggatataatccattcatcatggcatgtgttgataggaacctgtactaggatataagaaaatagacaaaaaggattcagcatgagaggaatcgcagacagggagttgacaagatttggtgggtaagtaggcagaatagaaactgaagaagttgaccttgagtattaataataataatacataaataatgaacaatacataattaataatactaggaaaattcgaatgagggacttgttaaaggaattgaaggagaacatattgaatttaacaagacatatcctacactttcagaaaaacagagtagatcatagagaaaaataaaagtcaacatagtcctatcaccaggagtatgtggtgaggtaattagtatatattaatacatatttacttatgttaatatttttctgccttctttagctttgctttacaagtataaacatctgtctgcctttcctcatcattgtctcctggtttacaggtttagcttggagcagagaagacttgggaggagagtaagcaacgaataacatgctagctatcctcatatattatgagagaggggttagatttactgagcactcagcttcgcaagtttgttgatgattatgtgctaggcactgagctaagacctagggatacagagatgacagcaactgtgggccctggcatcccagacttgagagcaattataatgtcataaccagaattacaagtgcaataatggatggctatagaagatacactgctggagtggacgattaactccaaagggaaggcacatggaaggggccatagacaggtttggatttgagattagttttaaaggctgattaagagct

SEQ ID NO: 97968 - DNA, 1062 bp, Homo sapiens
tcctaggttctcaagccaacggccaccagccactgcgatcactaccttcagtgcgccaggatgttagccggtaccagagggtggacgaggctctcccaccaagtgaggacctgttagttaaaagggcccaccttaatcaaacggtgaaaggtgacaggcagacccattcccatgagtctcaaaagatggatacatggtcttcaagcggaaggaatctgggggttgccacttgacatagcaggtgtagtccgggacgtgctaggccaatgactcttctctggcaccattatgctgaaagaaagggcagctgtaaatcctgtgttgcccatggggtaaataataatggaggtagatccagatattttgggaaattgggtgcataatagaattgttttaaattatgcctaaccacagcatgaatgttctttcagctaatagacaaattggtacactctcttagaaaaacctcactctatgtaatatactgcctttttgttcacttacagcatttaaaatcattaagcacaaggttctgattttttttcttagggatatgcgagaagtattgttaatttcagaaattagtctactagttatttgggataggacaattagctggggacttgaaagacatttcatttatttcactttcagaaaacacttagcacttaaggagaaatggtggaggattagggatgctgggatatagttacataatctgtattcaaaggtatgagtgatacccttagccaatcataatccaaatgaagtgtaaactctatttaaatttcgacagtcctttaaagagatgtagctctatgagagcaatgcattttgatgaatattgataaagcctggtaaacattgctttaaaaaaaacactggaaggtatacccttttgccttaccgctttcccttcttgctcaccccctccacttacccatcttatatgtgaccatgacaacaggctgatgctttggttcctctgttttaaaaatggtggaacataaagaagggaggggacgcgtttaaagggttacaattctgagtgattagtctggc
